United States Patent Application Publication US 2005/0287570 A1 - sequence listing, part 5

SEQ ID NO: 19074 - DNA, 25 bp, Artificial
  Probe
cttatccttgtggtgagtgcagaga

SEQ ID NO: 19075 - DNA, 25 bp, Artificial
  Probe
tatccttgtggtgagtgcagagaag

SEQ ID NO: 19076 - DNA, 25 bp, Artificial
  Probe
tcttatccttgtggtgagtgcagag

SEQ ID NO: 19077 - DNA, 25 bp, Artificial
  Probe
tcagtacatcattgccactcaggtg

SEQ ID NO: 19078 - DNA, 25 bp, Artificial
  Probe
ctttgatctctcccatgtgcatctg

SEQ ID NO: 19079 - DNA, 25 bp, Artificial
  Probe
cagctccgagttcttatccttgtgg

SEQ ID NO: 19080 - DNA, 25 bp, Artificial
  Probe
ccagctccgagttcttatccttgtg

SEQ ID NO: 19081 - DNA, 25 bp, Artificial
  Probe
caaaggcttgcttgatgacacctag

SEQ ID NO: 19082 - DNA, 25 bp, Artificial
  Probe
caatgctgtgatcttcactctggag

SEQ ID NO: 19083 - DNA, 25 bp, Artificial
  Probe
cctttgatctctcccatgtgcatct

SEQ ID NO: 19084 - DNA, 25 bp, Artificial
  Probe
gggttcagtacatcattgccactca

SEQ ID NO: 19085 - DNA, 25 bp, Artificial
  Probe
ttctctccgatgagctgaaaacttc

SEQ ID NO: 19086 - DNA, 25 bp, Artificial
  Probe
cttctctccgatgagctgaaaactt

SEQ ID NO: 19087 - DNA, 25 bp, Artificial
  Probe
ttcttctctccgatgagctgaaaac

SEQ ID NO: 19088 - DNA, 25 bp, Artificial
  Probe
gttcttctctccgatgagctgaaaa

SEQ ID NO: 19089 - DNA, 25 bp, Artificial
  Probe
gacctttgatctctcccatgtgcat

SEQ ID NO: 19090 - DNA, 25 bp, Artificial
  Probe
acctttgatctctcccatgtgcatc

SEQ ID NO: 19091 - DNA, 25 bp, Artificial
  Probe
cgttcttctctccgatgagctgaaa

SEQ ID NO: 19092 - DNA, 25 bp, Artificial
  Probe
cgaatggagacaagtttctcaaggg

SEQ ID NO: 19093 - DNA, 25 bp, Artificial
  Probe
tgcgaatggagacaagtttctcaag

SEQ ID NO: 19094 - DNA, 25 bp, Artificial
  Probe
ctgcgaatggagacaagtttctcaa

SEQ ID NO: 19095 - DNA, 25 bp, Artificial
  Probe
tcttctctccgatgagctgaaaact

SEQ ID NO: 19096 - DNA, 25 bp, Artificial
  Probe
aatgctgtgatcttcactctggagg

SEQ ID NO: 19097 - DNA, 25 bp, Artificial
  Probe
ttgagactcaggccacagtttcttt

SEQ ID NO: 19098 - DNA, 25 bp, Artificial
  Probe
ctgtgatcttcactctggaggacac

SEQ ID NO: 19099 - DNA, 25 bp, Artificial
  Probe
gcgaatggagacaagtttctcaagg

SEQ ID NO: 19100 - DNA, 25 bp, Artificial
  Probe
catgaaggacagcaaccagtttcac

SEQ ID NO: 19101 - DNA, 25 bp, Artificial
  Probe
tttgatctctcccatgtgcatctgg

SEQ ID NO: 19102 - DNA, 25 bp, Artificial
  Probe
ccaatgctgtgatcttcactctgga

SEQ ID NO: 19103 - DNA, 25 bp, Artificial
  Probe
gagactcaggccacagtttctttga

SEQ ID NO: 19104 - DNA, 25 bp, Artificial
  Probe
tgagactcaggccacagtttctttg

SEQ ID NO: 19105 - DNA, 25 bp, Artificial
  Probe
atgctgtgatcttcactctggagga

SEQ ID NO: 19106 - DNA, 25 bp, Artificial
  Probe
gaatggagacaagtttctcaagggg

SEQ ID NO: 19107 - DNA, 25 bp, Artificial
  Probe
tcttatcctgacctgaccatactaa

SEQ ID NO: 19108 - DNA, 25 bp, Artificial
  Probe
ttcttatcctgacctgaccatacta

SEQ ID NO: 19109 - DNA, 25 bp, Artificial
  Probe
cttatcctgacctgaccatactaat

SEQ ID NO: 19110 - DNA, 25 bp, Artificial
  Probe
gcaattagagacaactacttccgaa

SEQ ID NO: 19111 - DNA, 25 bp, Artificial
  Probe
tatcctgacctgaccatactaataa

SEQ ID NO: 19112 - DNA, 25 bp, Artificial
  Probe
ttatcctgacctgaccatactaata

SEQ ID NO: 19113 - DNA, 25 bp, Artificial
  Probe
caattagagacaactacttccgaag

SEQ ID NO: 19114 - DNA, 25 bp, Artificial
  Probe
agtttagccaagagaatcagagaaa

SEQ ID NO: 19115 - DNA, 25 bp, Artificial
  Probe
aagtttagccaagagaatcagagaa

SEQ ID NO: 19116 - DNA, 25 bp, Artificial
  Probe
aaagtttagccaagagaatcagaga

SEQ ID NO: 19117 - DNA, 25 bp, Artificial
  Probe
gtttagccaagagaatcagagaaag

SEQ ID NO: 19118 - DNA, 25 bp, Artificial
  Probe
ctttcttatcctgacctgaccatac

SEQ ID NO: 19119 - DNA, 25 bp, Artificial
  Probe
tttagccaagagaatcagagaaaga

SEQ ID NO: 19120 - DNA, 25 bp, Artificial
  Probe
tttcttatcctgacctgaccatact

SEQ ID NO: 19121 - DNA, 25 bp, Artificial
  Probe
tagccaagagaatcagagaaagatg

SEQ ID NO: 19122 - DNA, 25 bp, Artificial
  Probe
ttagccaagagaatcagagaaagat

SEQ ID NO: 19123 - DNA, 25 bp, Artificial
  Probe
caaactcctttcttatcctgacctg

SEQ ID NO: 19124 - DNA, 25 bp, Artificial
  Probe
aaactcctttcttatcctgacctga

SEQ ID NO: 19125 - DNA, 25 bp, Artificial
  Probe
tcctgacctgaccatactaataaat

SEQ ID NO: 19126 - DNA, 25 bp, Artificial
  Probe
atcctgacctgaccatactaataaa

SEQ ID NO: 19127 - DNA, 25 bp, Artificial
  Probe
cctttcttatcctgacctgaccata

SEQ ID NO: 19128 - DNA, 25 bp, Artificial
  Probe
ctgcaattagagacaactacttccg

SEQ ID NO: 19129 - DNA, 25 bp, Artificial
  Probe
ctacgctgcaattagagacaactac

SEQ ID NO: 19130 - DNA, 25 bp, Artificial
  Probe
tgcaattagagacaactacttccga

SEQ ID NO: 19131 - DNA, 25 bp, Artificial
  Probe
gctgcaattagagacaactacttcc

SEQ ID NO: 19132 - DNA, 25 bp, Artificial
  Probe
aactcctttcttatcctgacctgac

SEQ ID NO: 19133 - DNA, 25 bp, Artificial
  Probe
taatgagggaaatacgagccagaaa

SEQ ID NO: 19134 - DNA, 25 bp, Artificial
  Probe
tacgctgcaattagagacaactact

SEQ ID NO: 19135 - DNA, 25 bp, Artificial
  Probe
actacgctgcaattagagacaacta

SEQ ID NO: 19136 - DNA, 25 bp, Artificial
  Probe
tgagtttgtagaagactatgaacct

SEQ ID NO: 19137 - DNA, 25 bp, Artificial
  Probe
ttaatgagggaaatacgagccagaa

SEQ ID NO: 19138 - DNA, 25 bp, Artificial
  Probe
tttaatgagggaaatacgagccaga

SEQ ID NO: 19139 - DNA, 25 bp, Artificial
  Probe
ttgtagaagactatgaacctaccaa

SEQ ID NO: 19140 - DNA, 25 bp, Artificial
  Probe
catttctcctggttggtaacaaatc

SEQ ID NO: 19141 - DNA, 25 bp, Artificial
  Probe
ccaaactcctttcttatcctgacct

SEQ ID NO: 19142 - DNA, 25 bp, Artificial
  Probe
ttgatttaatgagggaaatacgagc

SEQ ID NO: 19143 - DNA, 25 bp, Artificial
  Probe
cgctgcaattagagacaactacttc

SEQ ID NO: 19144 - DNA, 25 bp, Artificial
  Probe
atttctcctggttggtaacaaatca

SEQ ID NO: 19145 - DNA, 25 bp, Artificial
  Probe
atttaatgagggaaatacgagccag

SEQ ID NO: 19146 - DNA, 25 bp, Artificial
  Probe
gatttaatgagggaaatacgagcca

SEQ ID NO: 19147 - DNA, 25 bp, Artificial
  Probe
tgatttaatgagggaaatacgagcc

SEQ ID NO: 19148 - DNA, 25 bp, Artificial
  Probe
aagactacgctgcaattagagacaa

SEQ ID NO: 19149 - DNA, 25 bp, Artificial
  Probe
atgagtttgtagaagactatgaacc

SEQ ID NO: 19150 - DNA, 25 bp, Artificial
  Probe
tttctcctggttggtaacaaatcag

SEQ ID NO: 19151 - DNA, 25 bp, Artificial
  Probe
ctcctggttggtaacaaatcagatt

SEQ ID NO: 19152 - DNA, 25 bp, Artificial
  Probe
gaagatcaagatcattgctcctcct

SEQ ID NO: 19153 - DNA, 25 bp, Artificial
  Probe
tcctagcaccatgaagatcaagatc

SEQ ID NO: 19154 - DNA, 25 bp, Artificial
  Probe
ctcctagcaccatgaagatcaagat

SEQ ID NO: 19155 - DNA, 25 bp, Artificial
  Probe
aagatcaagatcattgctcctcctg

SEQ ID NO: 19156 - DNA, 25 bp, Artificial
  Probe
tgaagatcaagatcattgctcctcc

SEQ ID NO: 19157 - DNA, 25 bp, Artificial
  Probe
cctagcaccatgaagatcaagatca

SEQ ID NO: 19158 - DNA, 25 bp, Artificial
  Probe
atgaagatcaagatcattgctcctc

SEQ ID NO: 19159 - DNA, 25 bp, Artificial
  Probe
tagcaccatgaagatcaagatcatt

SEQ ID NO: 19160 - DNA, 25 bp, Artificial
  Probe
ctagcaccatgaagatcaagatcat

SEQ ID NO: 19161 - DNA, 25 bp, Artificial
  Probe
catgaagatcaagatcattgctcct

SEQ ID NO: 19162 - DNA, 25 bp, Artificial
  Probe
accatgaagatcaagatcattgctc

SEQ ID NO: 19163 - DNA, 25 bp, Artificial
  Probe
caccatgaagatcaagatcattgct

SEQ ID NO: 19164 - DNA, 25 bp, Artificial
  Probe
agcaccatgaagatcaagatcattg

SEQ ID NO: 19165 - DNA, 25 bp, Artificial
  Probe
ccatgaagatcaagatcattgctcc

SEQ ID NO: 19166 - DNA, 25 bp, Artificial
  Probe
acatttggcatggctttattggttt

SEQ ID NO: 19167 - DNA, 25 bp, Artificial
  Probe
gacatttggcatggctttattggtt

SEQ ID NO: 19168 - DNA, 25 bp, Artificial
  Probe
gagacatttggcatggctttattgg

SEQ ID NO: 19169 - DNA, 25 bp, Artificial
  Probe
gcaccatgaagatcaagatcattgc

SEQ ID NO: 19170 - DNA, 25 bp, Artificial
  Probe
agacatttggcatggctttattggt

SEQ ID NO: 19171 - DNA, 25 bp, Artificial
  Probe
catttggcatggctttattggtttt

SEQ ID NO: 19172 - DNA, 25 bp, Artificial
  Probe
gtacaatggtttgtgattatggttt

SEQ ID NO: 19173 - DNA, 25 bp, Artificial
  Probe
gctcctagcaccatgaagatcaaga

SEQ ID NO: 19174 - DNA, 25 bp, Artificial
  Probe
actcccagtatatacggcatagatg

SEQ ID NO: 19175 - DNA, 25 bp, Artificial
  Probe
atagtactcccagtatatacggcat

SEQ ID NO: 19176 - DNA, 25 bp, Artificial
  Probe
tactcccagtatatacggcatagat

SEQ ID NO: 19177 - DNA, 25 bp, Artificial
  Probe
agtactcccagtatatacggcatag

SEQ ID NO: 19178 - DNA, 25 bp, Artificial
  Probe
gtactcccagtatatacggcataga

SEQ ID NO: 19179 - DNA, 25 bp, Artificial
  Probe
tagtactcccagtatatacggcata

SEQ ID NO: 19180 - DNA, 25 bp, Artificial
  Probe
catagtactcccagtatatacggca

SEQ ID NO: 19181 - DNA, 25 bp, Artificial
  Probe
acatagtactcccagtatatacggc

SEQ ID NO: 19182 - DNA, 25 bp, Artificial
  Probe
tacatagtactcccagtatatacgg

SEQ ID NO: 19183 - DNA, 25 bp, Artificial
  Probe
tgtacaatggtttgtgattatggtt

SEQ ID NO: 19184 - DNA, 25 bp, Artificial
  Probe
tacaatggtttgtgattatggtttt

SEQ ID NO: 19185 - DNA, 25 bp, Artificial
  Probe
ttacatagtactcccagtatatacg

SEQ ID NO: 19186 - DNA, 25 bp, Artificial
  Probe
tttggcgcttttgactcaggattta

SEQ ID NO: 19187 - DNA, 25 bp, Artificial
  Probe
ttttgctttgatttggcgcttttga

SEQ ID NO: 19188 - DNA, 25 bp, Artificial
  Probe
ctttgatttggcgcttttgactcag

SEQ ID NO: 19189 - DNA, 25 bp, Artificial
  Probe
atttggcgcttttgactcaggattt

SEQ ID NO: 19190 - DNA, 25 bp, Artificial
  Probe
tttgctttgatttggcgcttttgac

SEQ ID NO: 19191 - DNA, 25 bp, Artificial
  Probe
gatttggcgcttttgactcaggatt

SEQ ID NO: 19192 - DNA, 25 bp, Artificial
  Probe
ttgctttgatttggcgcttttgact

SEQ ID NO: 19193 - DNA, 25 bp, Artificial
  Probe
tttgatttggcgcttttgactcagg

SEQ ID NO: 19194 - DNA, 25 bp, Artificial
  Probe
aataggattggaagtgtaatggagc

SEQ ID NO: 19195 - DNA, 25 bp, Artificial
  Probe
ataggattggaagtgtaatggagca

SEQ ID NO: 19196 - DNA, 25 bp, Artificial
  Probe
gattcagaagataacggatgaggtg

SEQ ID NO: 19197 - DNA, 25 bp, Artificial
  Probe
tgattcagaagataacggatgaggt

SEQ ID NO: 19198 - DNA, 25 bp, Artificial
  Probe
cagaagataacggatgaggtgctaa

SEQ ID NO: 19199 - DNA, 25 bp, Artificial
  Probe
tccaattctgatgagagcaacttct

SEQ ID NO: 19200 - DNA, 25 bp, Artificial
  Probe
gtccaattctgatgagagcaacttc

SEQ ID NO: 19201 - DNA, 25 bp, Artificial
  Probe
ttctaggtccaattctgatgagagc

SEQ ID NO: 19202 - DNA, 25 bp, Artificial
  Probe
gccatgtggagttactgtattacaa

SEQ ID NO: 19203 - DNA, 25 bp, Artificial
  Probe
taggtccaattctgatgagagcaac

SEQ ID NO: 19204 - DNA, 25 bp, Artificial
  Probe
ctaggtccaattctgatgagagcaa

SEQ ID NO: 19205 - DNA, 25 bp, Artificial
  Probe
aggtcactgcgagttgttctaatag

SEQ ID NO: 19206 - DNA, 25 bp, Artificial
  Probe
ctgattcagaagataacggatgagg

SEQ ID NO: 19207 - DNA, 25 bp, Artificial
  Probe
cctgattcagaagataacggatgag

SEQ ID NO: 19208 - DNA, 25 bp, Artificial
  Probe
ttcctgattcagaagataacggatg

SEQ ID NO: 19209 - DNA, 25 bp, Artificial
  Probe
tctctgtaaataggattggaagtgt

SEQ ID NO: 19210 - DNA, 25 bp, Artificial
  Probe
tgccatgtggagttactgtattaca

SEQ ID NO: 19211 - DNA, 25 bp, Artificial
  Probe
ggtcactgcgagttgttctaatagt

SEQ ID NO: 19212 - DNA, 25 bp, Artificial
  Probe
tcctgattcagaagataacggatga

SEQ ID NO: 19213 - DNA, 25 bp, Artificial
  Probe
gaagataacggatgaggtgctaaag

SEQ ID NO: 19214 - DNA, 25 bp, Artificial
  Probe
attcagaagataacggatgaggtgc

SEQ ID NO: 19215 - DNA, 25 bp, Artificial
  Probe
tctaggtccaattctgatgagagca

SEQ ID NO: 19216 - DNA, 25 bp, Artificial
  Probe
aaataggattggaagtgtaatggag

SEQ ID NO: 19217 - DNA, 25 bp, Artificial
  Probe
actgcgagttgttctaatagtggtg

SEQ ID NO: 19218 - DNA, 25 bp, Artificial
  Probe
agaagataacggatgaggtgctaaa

SEQ ID NO: 19219 - DNA, 25 bp, Artificial
  Probe
tcagaagataacggatgaggtgcta

SEQ ID NO: 19220 - DNA, 25 bp, Artificial
  Probe
taggattggaagtgtaatggagcac

SEQ ID NO: 19221 - DNA, 25 bp, Artificial
  Probe
tttctaggtccaattctgatgagag

SEQ ID NO: 19222 - DNA, 25 bp, Artificial
  Probe
ctttctaggtccaattctgatgaga

SEQ ID NO: 19223 - DNA, 25 bp, Artificial
  Probe
ggtccaattctgatgagagcaactt

SEQ ID NO: 19224 - DNA, 25 bp, Artificial
  Probe
caggtcactgcgagttgttctaata

SEQ ID NO: 19225 - DNA, 25 bp, Artificial
  Probe
ttctctgtaaataggattggaagtg

SEQ ID NO: 19226 - DNA, 25 bp, Artificial
  Probe
ggagttactgtattacaaagttggc

SEQ ID NO: 19227 - DNA, 25 bp, Artificial
  Probe
ctctgtaaataggattggaagtgta

SEQ ID NO: 19228 - DNA, 25 bp, Artificial
  Probe
ggaagttgttagactacttacagga

SEQ ID NO: 19229 - DNA, 25 bp, Artificial
  Probe
gtaaatcatggtggtcgtgtacttt

SEQ ID NO: 19230 - DNA, 25 bp, Artificial
  Probe
gagttactgtattacaaagttggct

SEQ ID NO: 19231 - DNA, 25 bp, Artificial
  Probe
cctttctaggtccaattctgatgag

SEQ ID NO: 19232 - DNA, 25 bp, Artificial
  Probe
tggagttactgtattacaaagttgg

SEQ ID NO: 19233 - DNA, 25 bp, Artificial
  Probe
gtaaataggattggaagtgtaatgg

SEQ ID NO: 19234 - DNA, 25 bp, Artificial
  Probe
ttcagaagataacggatgaggtgct

SEQ ID NO: 19235 - DNA, 25 bp, Artificial
  Probe
taaataggattggaagtgtaatgga

SEQ ID NO: 19236 - DNA, 25 bp, Artificial
  Probe
tctgtaaataggattggaagtgtaa

SEQ ID NO: 19237 - DNA, 25 bp, Artificial
  Probe
cttcctgattcagaagataacggat

SEQ ID NO: 19238 - DNA, 25 bp, Artificial
  Probe
gaacttcctgattcagaagataacg

SEQ ID NO: 19239 - DNA, 25 bp, Artificial
  Probe
cagtaagaggtgaagaatctgtcag

SEQ ID NO: 19240 - DNA, 25 bp, Artificial
  Probe
aggtgaagaatctgtcaggtgatag

SEQ ID NO: 19241 - DNA, 25 bp, Artificial
  Probe
gaggtgaagaatctgtcaggtgata

SEQ ID NO: 19242 - DNA, 25 bp, Artificial
  Probe
agtaagaggtgaagaatctgtcagg

SEQ ID NO: 19243 - DNA, 25 bp, Artificial
  Probe
taagaggtgaagaatctgtcaggtg

SEQ ID NO: 19244 - DNA, 25 bp, Artificial
  Probe
gtaagaggtgaagaatctgtcaggt

SEQ ID NO: 19245 - DNA, 25 bp, Artificial
  Probe
tatgatgaatgcaagagacgataca

SEQ ID NO: 19246 - DNA, 25 bp, Artificial
  Probe
ctatgatgaatgcaagagacgatac

SEQ ID NO: 19247 - DNA, 25 bp, Artificial
  Probe
atgatgaatgcaagagacgatacaa

SEQ ID NO: 19248 - DNA, 25 bp, Artificial
  Probe
caagagacgatacaacatcaaactg

SEQ ID NO: 19249 - DNA, 25 bp, Artificial
  Probe
ctatggcttctatgatgaatgcaag

SEQ ID NO: 19250 - DNA, 25 bp, Artificial
  Probe
tctatggcttctatgatgaatgcaa

SEQ ID NO: 19251 - DNA, 25 bp, Artificial
  Probe
atctatggcttctatgatgaatgca

SEQ ID NO: 19252 - DNA, 25 bp, Artificial
  Probe
ttctatgatgaatgcaagagacgat

SEQ ID NO: 19253 - DNA, 25 bp, Artificial
  Probe
tatggcttctatgatgaatgcaaga

SEQ ID NO: 19254 - DNA, 25 bp, Artificial
  Probe
caaccgcatctatggcttctatgat

SEQ ID NO: 19255 - DNA, 25 bp, Artificial
  Probe
atcaaccgcatctatggcttctatg

SEQ ID NO: 19256 - DNA, 25 bp, Artificial
  Probe
catcaaccgcatctatggcttctat

SEQ ID NO: 19257 - DNA, 25 bp, Artificial
  Probe
tctatgatgaatgcaagagacgata

SEQ ID NO: 19258 - DNA, 25 bp, Artificial
  Probe
catggagcagattagacgtattatg

SEQ ID NO: 19259 - DNA, 25 bp, Artificial
  Probe
atgaatgcaagagacgatacaacat

SEQ ID NO: 19260 - DNA, 25 bp, Artificial
  Probe
cttctatgatgaatgcaagagacga

SEQ ID NO: 19261 - DNA, 25 bp, Artificial
  Probe
aatgcaagagacgatacaacatcaa

SEQ ID NO: 19262 - DNA, 25 bp, Artificial
  Probe
gatgaatgcaagagacgatacaaca

SEQ ID NO: 19263 - DNA, 25 bp, Artificial
  Probe
tgatgaatgcaagagacgatacaac

SEQ ID NO: 19264 - DNA, 25 bp, Artificial
  Probe
atggcttctatgatgaatgcaagag

SEQ ID NO: 19265 - DNA, 25 bp, Artificial
  Probe
gaatgcaagagacgatacaacatca

SEQ ID NO: 19266 - DNA, 25 bp, Artificial
  Probe
tgaatgcaagagacgatacaacatc

SEQ ID NO: 19267 - DNA, 25 bp, Artificial
  Probe
gcaagagacgatacaacatcaaact

SEQ ID NO: 19268 - DNA, 25 bp, Artificial
  Probe
gtgaagaatctgtcaggtgatagcc

SEQ ID NO: 19269 - DNA, 25 bp, Artificial
  Probe
ggtgaagaatctgtcaggtgatagc

SEQ ID NO: 19270 - DNA, 25 bp, Artificial
  Probe
agaggtgaagaatctgtcaggtgat

SEQ ID NO: 19271 - DNA, 25 bp, Artificial
  Probe
gatacaacatcaaactgtggaagac

SEQ ID NO: 19272 - DNA, 25 bp, Artificial
  Probe
atacaacatcaaactgtggaagact

SEQ ID NO: 19273 - DNA, 25 bp, Artificial
  Probe
tacaacatcaaactgtggaagactt

SEQ ID NO: 19274 - DNA, 25 bp, Artificial
  Probe
aagagacgatacaacatcaaactgt

SEQ ID NO: 19275 - DNA, 25 bp, Artificial
  Probe
ggcttctatgatgaatgcaagagac

SEQ ID NO: 19276 - DNA, 25 bp, Artificial
  Probe
caacatcaaactgtggaagactttc

SEQ ID NO: 19277 - DNA, 25 bp, Artificial
  Probe
aagaggtgaagaatctgtcaggtga

SEQ ID NO: 19278 - DNA, 25 bp, Artificial
  Probe
aacatcaaactgtggaagactttca

SEQ ID NO: 19279 - DNA, 25 bp, Artificial
  Probe
agagacgatacaacatcaaactgtg

SEQ ID NO: 19280 - DNA, 25 bp, Artificial
  Probe
tggcttctatgatgaatgcaagaga

SEQ ID NO: 19281 - DNA, 25 bp, Artificial
  Probe
acaacatcaaactgtggaagacttt

SEQ ID NO: 19282 - DNA, 25 bp, Artificial
  Probe
tatacgctgagtaaacaggacaaac

SEQ ID NO: 19283 - DNA, 25 bp, Artificial
  Probe
cgatacaacatcaaactgtggaaga

SEQ ID NO: 19284 - DNA, 25 bp, Artificial
  Probe
ttgactggctgaatattgtctgatt

SEQ ID NO: 19285 - DNA, 25 bp, Artificial
  Probe
aattaagatttggtgacagactgga

SEQ ID NO: 19286 - DNA, 25 bp, Artificial
  Probe
cttgactggctgaatattgtctgat

SEQ ID NO: 19287 - DNA, 25 bp, Artificial
  Probe
attaagatttggtgacagactggac

SEQ ID NO: 19288 - DNA, 25 bp, Artificial
  Probe
tgttgtgactcttaaagataaagcg

SEQ ID NO: 19289 - DNA, 25 bp, Artificial
  Probe
gttgtgactcttaaagataaagcga

SEQ ID NO: 19290 - DNA, 25 bp, Artificial
  Probe
aaattaagatttggtgacagactgg

SEQ ID NO: 19291 - DNA, 25 bp, Artificial
  Probe
ggaaattaagatttggtgacagact

SEQ ID NO: 19292 - DNA, 25 bp, Artificial
  Probe
aggaaattaagatttggtgacagac

SEQ ID NO: 19293 - DNA, 25 bp, Artificial
  Probe
ctcttaaagataaagcgagcagaag

SEQ ID NO: 19294 - DNA, 25 bp, Artificial
  Probe
actcttaaagataaagcgagcagaa

SEQ ID NO: 19295 - DNA, 25 bp, Artificial
  Probe
gactcttaaagataaagcgagcaga

SEQ ID NO: 19296 - DNA, 25 bp, Artificial
  Probe
ttgtgactcttaaagataaagcgag

SEQ ID NO: 19297 - DNA, 25 bp, Artificial
  Probe
tcttaaagataaagcgagcagaagc

SEQ ID NO: 19298 - DNA, 25 bp, Artificial
  Probe
tgactcttaaagataaagcgagcag

SEQ ID NO: 19299 - DNA, 25 bp, Artificial
  Probe
gtgactcttaaagataaagcgagca

SEQ ID NO: 19300 - DNA, 25 bp, Artificial
  Probe
tgtgactcttaaagataaagcgagc

SEQ ID NO: 19301 - DNA, 25 bp, Artificial
  Probe
cagactgttgtgactcttaaagata

SEQ ID NO: 19302 - DNA, 25 bp, Artificial
  Probe
gtgaggctccataggaaattaagat

SEQ ID NO: 19303 - DNA, 25 bp, Artificial
  Probe
gaaattaagatttggtgacagactg

SEQ ID NO: 19304 - DNA, 25 bp, Artificial
  Probe
tgaggctccataggaaattaagatt

SEQ ID NO: 19305 - DNA, 25 bp, Artificial
  Probe
ctgttgtgactcttaaagataaagc

SEQ ID NO: 19306 - DNA, 25 bp, Artificial
  Probe
ctgtgaggctccataggaaattaag

SEQ ID NO: 19307 - DNA, 25 bp, Artificial
  Probe
ggctccataggaaattaagatttgg

SEQ ID NO: 19308 - DNA, 25 bp, Artificial
  Probe
acagactgttgtgactcttaaagat

SEQ ID NO: 19309 - DNA, 25 bp, Artificial
  Probe
aggctccataggaaattaagatttg

SEQ ID NO: 19310 - DNA, 25 bp, Artificial
  Probe
tgtgaggctccataggaaattaaga

SEQ ID NO: 19311 - DNA, 25 bp, Artificial
  Probe
tctgtgaggctccataggaaattaa

SEQ ID NO: 19312 - DNA, 25 bp, Artificial
  Probe
gctccataggaaattaagatttggt

SEQ ID NO: 19313 - DNA, 25 bp, Artificial
  Probe
gaggctccataggaaattaagattt

SEQ ID NO: 19314 - DNA, 25 bp, Artificial
  Probe
taggaaattaagatttggtgacaga

SEQ ID NO: 19315 - DNA, 25 bp, Artificial
  Probe
ttaagatttggtgacagactggacg

SEQ ID NO: 19316 - DNA, 25 bp, Artificial
  Probe
tgactggctgaatattgtctgattt

SEQ ID NO: 19317 - DNA, 25 bp, Artificial
  Probe
agactgttgtgactcttaaagataa

SEQ ID NO: 19318 - DNA, 25 bp, Artificial
  Probe
gagatagaggtgagaatgcccttac

SEQ ID NO: 19319 - DNA, 25 bp, Artificial
  Probe
gtctgtgaggctccataggaaatta

SEQ ID NO: 19320 - DNA, 25 bp, Artificial
  Probe
gatagaggtgagaatgcccttactg

SEQ ID NO: 19321 - DNA, 25 bp, Artificial
  Probe
agatagaggtgagaatgcccttact

SEQ ID NO: 19322 - DNA, 25 bp, Artificial
  Probe
tgagatagaggtgagaatgccctta

SEQ ID NO: 19323 - DNA, 25 bp, Artificial
  Probe
gcttgactggctgaatattgtctga

SEQ ID NO: 19324 - DNA, 25 bp, Artificial
  Probe
ttagagaaggtggtctgagccaatt

SEQ ID NO: 19325 - DNA, 25 bp, Artificial
  Probe
cataggaaattaagatttggtgaca

SEQ ID NO: 19326 - DNA, 25 bp, Artificial
  Probe
ccataggaaattaagatttggtgac

SEQ ID NO: 19327 - DNA, 25 bp, Artificial
  Probe
tccataggaaattaagatttggtga

SEQ ID NO: 19328 - DNA, 25 bp, Artificial
  Probe
gactgttgtgactcttaaagataaa

SEQ ID NO: 19329 - DNA, 25 bp, Artificial
  Probe
aaggtagaccagtgagacagaatat

SEQ ID NO: 19330 - DNA, 25 bp, Artificial
  Probe
aggtagaccagtgagacagaatatg

SEQ ID NO: 19331 - DNA, 25 bp, Artificial
  Probe
caaggtagaccagtgagacagaata

SEQ ID NO: 19332 - DNA, 25 bp, Artificial
  Probe
gaccagtgagacagaatatgtatcg

SEQ ID NO: 19333 - DNA, 25 bp, Artificial
  Probe
agaccagtgagacagaatatgtatc

SEQ ID NO: 19334 - DNA, 25 bp, Artificial
  Probe
gtagaccagtgagacagaatatgta

SEQ ID NO: 19335 - DNA, 25 bp, Artificial
  Probe
ggtagaccagtgagacagaatatgt

SEQ ID NO: 19336 - DNA, 25 bp, Artificial
  Probe
ttcaatgtaaggaacggatacggtt

SEQ ID NO: 19337 - DNA, 25 bp, Artificial
  Probe
accagtgagacagaatatgtatcgg

SEQ ID NO: 19338 - DNA, 25 bp, Artificial
  Probe
tagaccagtgagacagaatatgtat

SEQ ID NO: 19339 - DNA, 25 bp, Artificial
  Probe
gagtttgatgttgttgaaggagaaa

SEQ ID NO: 19340 - DNA, 25 bp, Artificial
  Probe
gagttccagttcaaggcagtaaata

SEQ ID NO: 19341 - DNA, 25 bp, Artificial
  Probe
agttccagttcaaggcagtaaatac

SEQ ID NO: 19342 - DNA, 25 bp, Artificial
  Probe
ggagtttgatgttgttgaaggagaa

SEQ ID NO: 19343 - DNA, 25 bp, Artificial
  Probe
atcaacaggaatgacaccaaggaag

SEQ ID NO: 19344 - DNA, 25 bp, Artificial
  Probe
tgtttcatatctggtcaagttgaga

SEQ ID NO: 19345 - DNA, 25 bp, Artificial
  Probe
gttccagttcaaggcagtaaatacg

SEQ ID NO: 19346 - DNA, 25 bp, Artificial
  Probe
catcaacaggaatgacaccaaggaa

SEQ ID NO: 19347 - DNA, 25 bp, Artificial
  Probe
ttgtttcatatctggtcaagttgag

SEQ ID NO: 19348 - DNA, 25 bp, Artificial
  Probe
gtggagtttgatgttgttgaaggag

SEQ ID NO: 19349 - DNA, 25 bp, Artificial
  Probe
ggatacggtttcatcaacaggaatg

SEQ ID NO: 19350 - DNA, 25 bp, Artificial
  Probe
tggagtttgatgttgttgaaggaga

SEQ ID NO: 19351 - DNA, 25 bp, Artificial
  Probe
taaggaacggatacggtttcatcaa

SEQ ID NO: 19352 - DNA, 25 bp, Artificial
  Probe
caatgtaaggaacggatacggtttc

SEQ ID NO: 19353 - DNA, 25 bp, Artificial
  Probe
aattgtttcatatctggtcaagttg

SEQ ID NO: 19354 - DNA, 25 bp, Artificial
  Probe
atgtaaggaacggatacggtttcat

SEQ ID NO: 19355 - DNA, 25 bp, Artificial
  Probe
actgtggagtttgatgttgttgaag

SEQ ID NO: 19356 - DNA, 25 bp, Artificial
  Probe
gactgtggagtttgatgttgttgaa

SEQ ID NO: 19357 - DNA, 25 bp, Artificial
  Probe
caacaggaatgacaccaaggaagac

SEQ ID NO: 19358 - DNA, 25 bp, Artificial
  Probe
attgtttcatatctggtcaagttga

SEQ ID NO: 19359 - DNA, 25 bp, Artificial
  Probe
aatgtaaggaacggatacggtttca

SEQ ID NO: 19360 - DNA, 25 bp, Artificial
  Probe
tcaatgtaaggaacggatacggttt

SEQ ID NO: 19361 - DNA, 25 bp, Artificial
  Probe
ctgtggagtttgatgttgttgaagg

SEQ ID NO: 19362 - DNA, 25 bp, Artificial
  Probe
aaattaccagaatagtgagagtggg

SEQ ID NO: 19363 - DNA, 25 bp, Artificial
  Probe
gagactgtggagtttgatgttgttg

SEQ ID NO: 19364 - DNA, 25 bp, Artificial
  Probe
tgtggagtttgatgttgttgaagga

SEQ ID NO: 19365 - DNA, 25 bp, Artificial
  Probe
taggagatggagagactgtggagtt

SEQ ID NO: 19366 - DNA, 25 bp, Artificial
  Probe
agagactgtggagtttgatgttgtt

SEQ ID NO: 19367 - DNA, 25 bp, Artificial
  Probe
ggaatgacaccaaggaagacgtatt

SEQ ID NO: 19368 - DNA, 25 bp, Artificial
  Probe
gtaaggaacggatacggtttcatca

SEQ ID NO: 19369 - DNA, 25 bp, Artificial
  Probe
tgtaaggaacggatacggtttcatc

SEQ ID NO: 19370 - DNA, 25 bp, Artificial
  Probe
agactgtggagtttgatgttgttga

SEQ ID NO: 19371 - DNA, 25 bp, Artificial
  Probe
ccagtgagacagaatatgtatcggg

SEQ ID NO: 19372 - DNA, 25 bp, Artificial
  Probe
aaattgtttcatatctggtcaagtt

SEQ ID NO: 19373 - DNA, 25 bp, Artificial
  Probe
tcaacaggaatgacaccaaggaaga

SEQ ID NO: 19374 - DNA, 25 bp, Artificial
  Probe
tagcggtatctcttggatcttctat

SEQ ID NO: 19375 - DNA, 25 bp, Artificial
  Probe
ggtatctcttggatcttctatgctt

SEQ ID NO: 19376 - DNA, 25 bp, Artificial
  Probe
ctagcggtatctcttggatcttcta

SEQ ID NO: 19377 - DNA, 25 bp, Artificial
  Probe
tatcacagtcatgctctccttctat

SEQ ID NO: 19378 - DNA, 25 bp, Artificial
  Probe
cggtatctcttggatcttctatgct

SEQ ID NO: 19379 - DNA, 25 bp, Artificial
  Probe
agcggtatctcttggatcttctatg

SEQ ID NO: 19380 - DNA, 25 bp, Artificial
  Probe
gtatcacagtcatgctctccttcta

SEQ ID NO: 19381 - DNA, 25 bp, Artificial
  Probe
ctccatctgctcacatctcattctt

SEQ ID NO: 19382 - DNA, 25 bp, Artificial
  Probe
atcacagtcatgctctccttctatg

SEQ ID NO: 19383 - DNA, 25 bp, Artificial
  Probe
ctcattctttcttctcaccttgttc

SEQ ID NO: 19384 - DNA, 25 bp, Artificial
  Probe
tctcattctttcttctcaccttgtt

SEQ ID NO: 19385 - DNA, 25 bp, Artificial
  Probe
atctcattctttcttctcaccttgt

SEQ ID NO: 19386 - DNA, 25 bp, Artificial
  Probe
acatctcattctttcttctcacctt

SEQ ID NO: 19387 - DNA, 25 bp, Artificial
  Probe
atctgctcacatctcattctttctt

SEQ ID NO: 19388 - DNA, 25 bp, Artificial
  Probe
catctatagtctgtcctctaatggc

SEQ ID NO: 19389 - DNA, 25 bp, Artificial
  Probe
cattctttcttctcaccttgttcac

SEQ ID NO: 19390 - DNA, 25 bp, Artificial
  Probe
tcattctttcttctcaccttgttca

SEQ ID NO: 19391 - DNA, 25 bp, Artificial
  Probe
catctcattctttcttctcaccttg

SEQ ID NO: 19392 - DNA, 25 bp, Artificial
  Probe
atacaagtcctacatcaaggcagtt

SEQ ID NO: 19393 - DNA, 25 bp, Artificial
  Probe
aatacaagtcctacatcaaggcagt

SEQ ID NO: 19394 - DNA, 25 bp, Artificial
  Probe
cacatctcattctttcttctcacct

SEQ ID NO: 19395 - DNA, 25 bp, Artificial
  Probe
tcacatctcattctttcttctcacc

SEQ ID NO: 19396 - DNA, 25 bp, Artificial
  Probe
ctcacatctcattctttcttctcac

SEQ ID NO: 19397 - DNA, 25 bp, Artificial
  Probe
gctcacatctcattctttcttctca

SEQ ID NO: 19398 - DNA, 25 bp, Artificial
  Probe
tgctcacatctcattctttcttctc

SEQ ID NO: 19399 - DNA, 25 bp, Artificial
  Probe
ctgctcacatctcattctttcttct

SEQ ID NO: 19400 - DNA, 25 bp, Artificial
  Probe
tctgctcacatctcattctttcttc

SEQ ID NO: 19401 - DNA, 25 bp, Artificial
  Probe
catctgctcacatctcattctttct

SEQ ID NO: 19402 - DNA, 25 bp, Artificial
  Probe
atttgtctttctgtcagtcactctt

SEQ ID NO: 19403 - DNA, 25 bp, Artificial
  Probe
tctccttgtctgtcagtctttctat

SEQ ID NO: 19404 - DNA, 25 bp, Artificial
  Probe
attctttcttctcaccttgttcacc

SEQ ID NO: 19405 - DNA, 25 bp, Artificial
  Probe
ccatgattacacagaccaagtgatc

SEQ ID NO: 19406 - DNA, 25 bp, Artificial
  Probe
catttgtctttctgtcagtcactct

SEQ ID NO: 19407 - DNA, 25 bp, Artificial
  Probe
tttgtctttctgtcagtcactcttg

SEQ ID NO: 19408 - DNA, 25 bp, Artificial
  Probe
cagttgaggacctgaacaatctctt

SEQ ID NO: 19409 - DNA, 25 bp, Artificial
  Probe
actccatctgctcacatctcattct

SEQ ID NO: 19410 - DNA, 25 bp, Artificial
  Probe
cactccatctgctcacatctcattc

SEQ ID NO: 19411 - DNA, 25 bp, Artificial
  Probe
cctatgattcgatataccaggtgtt

SEQ ID NO: 19412 - DNA, 25 bp, Artificial
  Probe
tgtttgaccttgaccttaatgatct

SEQ ID NO: 19413 - DNA, 25 bp, Artificial
  Probe
tcatctatagtctgtcctctaatgg

SEQ ID NO: 19414 - DNA, 25 bp, Artificial
  Probe
ccttgaccttaatgatctccctaaa

SEQ ID NO: 19415 - DNA, 25 bp, Artificial
  Probe
gtttgaccttgaccttaatgatctc

SEQ ID NO: 19416 - DNA, 25 bp, Artificial
  Probe
tttgaccttgaccttaatgatctcc

SEQ ID NO: 19417 - DNA, 25 bp, Artificial
  Probe
gtctccttgtctgtcagtctttcta

SEQ ID NO: 19418 - DNA, 25 bp, Artificial
  Probe
accttgaccttaatgatctccctaa

SEQ ID NO: 19419 - DNA, 25 bp, Artificial
  Probe
gccttagaatcattgtctcttacca

SEQ ID NO: 19420 - DNA, 25 bp, Artificial
  Probe
tgccttagaatcattgtctcttacc

SEQ ID NO: 19421 - DNA, 25 bp, Artificial
  Probe
ggtgccttagaatcattgtctctta

SEQ ID NO: 19422 - DNA, 25 bp, Artificial
  Probe
gtgccttagaatcattgtctcttac

SEQ ID NO: 19423 - DNA, 25 bp, Artificial
  Probe
cttagaatcattgtctcttaccagc

SEQ ID NO: 19424 - DNA, 25 bp, Artificial
  Probe
ccttagaatcattgtctcttaccag

SEQ ID NO: 19425 - DNA, 25 bp, Artificial
  Probe
tactctcttgtaattgtgcctcaga

SEQ ID NO: 19426 - DNA, 25 bp, Artificial
  Probe
cttgtaattgtgcctcagacttctc

SEQ ID NO: 19427 - DNA, 25 bp, Artificial
  Probe
ctcttgtaattgtgcctcagacttc

SEQ ID NO: 19428 - DNA, 25 bp, Artificial
  Probe
tcttgtaattgtgcctcagacttct

SEQ ID NO: 19429 - DNA, 25 bp, Artificial
  Probe
tctcttgtaattgtgcctcagactt

SEQ ID NO: 19430 - DNA, 25 bp, Artificial
  Probe
ggaatagtagtcaacctggttatgt

SEQ ID NO: 19431 - DNA, 25 bp, Artificial
  Probe
tcttactctcttgtaattgtgcctc

SEQ ID NO: 19432 - DNA, 25 bp, Artificial
  Probe
ctcttactctcttgtaattgtgcct

SEQ ID NO: 19433 - DNA, 25 bp, Artificial
  Probe
cacacgaactcttactctcttgtaa

SEQ ID NO: 19434 - DNA, 25 bp, Artificial
  Probe
ttactctcttgtaattgtgcctcag

SEQ ID NO: 19435 - DNA, 25 bp, Artificial
  Probe
cttactctcttgtaattgtgcctca

SEQ ID NO: 19436 - DNA, 25 bp, Artificial
  Probe
actcttactctcttgtaattgtgcc

SEQ ID NO: 19437 - DNA, 25 bp, Artificial
  Probe
acacgaactcttactctcttgtaat

SEQ ID NO: 19438 - DNA, 25 bp, Artificial
  Probe
tagtagtcaacctggttatgttctt

SEQ ID NO: 19439 - DNA, 25 bp, Artificial
  Probe
ctctcttgtaattgtgcctcagact

SEQ ID NO: 19440 - DNA, 25 bp, Artificial
  Probe
atagtagtcaacctggttatgttct

SEQ ID NO: 19441 - DNA, 25 bp, Artificial
  Probe
aactcttactctcttgtaattgtgc

SEQ ID NO: 19442 - DNA, 25 bp, Artificial
  Probe
tagaatcattgtctcttaccagctt

SEQ ID NO: 19443 - DNA, 25 bp, Artificial
  Probe
ttagaatcattgtctcttaccagct

SEQ ID NO: 19444 - DNA, 25 bp, Artificial
  Probe
cgaactcttactctcttgtaattgt

SEQ ID NO: 19445 - DNA, 25 bp, Artificial
  Probe
acgaactcttactctcttgtaattg

SEQ ID NO: 19446 - DNA, 25 bp, Artificial
  Probe
cacgaactcttactctcttgtaatt

SEQ ID NO: 19447 - DNA, 25 bp, Artificial
  Probe
actctcttgtaattgtgcctcagac

SEQ ID NO: 19448 - DNA, 25 bp, Artificial
  Probe
aatagtagtcaacctggttatgttc

SEQ ID NO: 19449 - DNA, 25 bp, Artificial
  Probe
gaatagtagtcaacctggttatgtt

SEQ ID NO: 19450 - DNA, 25 bp, Artificial
  Probe
attacagaaggaaagggaaggttaa

SEQ ID NO: 19451 - DNA, 25 bp, Artificial
  Probe
aaattacagaaggaaagggaaggtt

SEQ ID NO: 19452 - DNA, 25 bp, Artificial
  Probe
agaaattacagaaggaaagggaagg

SEQ ID NO: 19453 - DNA, 25 bp, Artificial
  Probe
gcacacgaactcttactctcttgta

SEQ ID NO: 19454 - DNA, 25 bp, Artificial
  Probe
aattacagaaggaaagggaaggtta

SEQ ID NO: 19455 - DNA, 25 bp, Artificial
  Probe
gaaattacagaaggaaagggaaggt

SEQ ID NO: 19456 - DNA, 25 bp, Artificial
  Probe
aagccttctgagatgtttagtagac

SEQ ID NO: 19457 - DNA, 25 bp, Artificial
  Probe
aaagccttctgagatgtttagtaga

SEQ ID NO: 19458 - DNA, 25 bp, Artificial
  Probe
tctaaatgttctattggcagagacg

SEQ ID NO: 19459 - DNA, 25 bp, Artificial
  Probe
ttgtaattgtgcctcagacttctcg

SEQ ID NO: 19460 - DNA, 25 bp, Artificial
  Probe
agtaaagccttctgagatgtttagt

SEQ ID NO: 19461 - DNA, 25 bp, Artificial
  Probe
tgaatttaagtgaacatttgccttg

SEQ ID NO: 19462 - DNA, 25 bp, Artificial
  Probe
ttctaaatgttctattggcagagac

SEQ ID NO: 19463 - DNA, 25 bp, Artificial
  Probe
tagttggagtaaccagttcctgttc

SEQ ID NO: 19464 - DNA, 25 bp, Artificial
  Probe
cttatcagaagaacagatccgcttg

SEQ ID NO: 19465 - DNA, 25 bp, Artificial
  Probe
tgagttctccagatccatgaatgaa

SEQ ID NO: 19466 - DNA, 25 bp, Artificial
  Probe
ttgagttctccagatccatgaatga

SEQ ID NO: 19467 - DNA, 25 bp, Artificial
  Probe
tatcagaagaacagatccgcttgaa

SEQ ID NO: 19468 - DNA, 25 bp, Artificial
  Probe
ttatcagaagaacagatccgcttga

SEQ ID NO: 19469 - DNA, 25 bp, Artificial
  Probe
atgaatgaactgcaactcaatgatg

SEQ ID NO: 19470 - DNA, 25 bp, Artificial
  Probe
catgaatgaactgcaactcaatgat

SEQ ID NO: 19471 - DNA, 25 bp, Artificial
  Probe
gagtgtgtcttatcagaagaacaga

SEQ ID NO: 19472 - DNA, 25 bp, Artificial
  Probe
agtgtgtcttatcagaagaacagat

SEQ ID NO: 19473 - DNA, 25 bp, Artificial
  Probe
gaggagtgtgtcttatcagaagaac

SEQ ID NO: 19474 - DNA, 25 bp, Artificial
  Probe
tgtgtcttatcagaagaacagatcc

SEQ ID NO: 19475 - DNA, 25 bp, Artificial
  Probe
atccatgaatgaactgcaactcaat

SEQ ID NO: 19476 - DNA, 25 bp, Artificial
  Probe
ggagtgtgtcttatcagaagaacag

SEQ ID NO: 19477 - DNA, 25 bp, Artificial
  Probe
caaccaaataaactagccaggagag

SEQ ID NO: 19478 - DNA, 25 bp, Artificial
  Probe
gtgtgtcttatcagaagaacagatc

SEQ ID NO: 19479 - DNA, 25 bp, Artificial
  Probe
aggagtgtgtcttatcagaagaaca

SEQ ID NO: 19480 - DNA, 25 bp, Artificial
  Probe
gtgtcttatcagaagaacagatccg

SEQ ID NO: 19481 - DNA, 25 bp, Artificial
  Probe
ctttgagttctccagatccatgaat

SEQ ID NO: 19482 - DNA, 25 bp, Artificial
  Probe
atcagaagaacagatccgcttgaag

SEQ ID NO: 19483 - DNA, 25 bp, Artificial
  Probe
cagaagaacagatccgcttgaagaa

SEQ ID NO: 19484 - DNA, 25 bp, Artificial
  Probe
ggaggagtgtgtcttatcagaagaa

SEQ ID NO: 19485 - DNA, 25 bp, Artificial
  Probe
aactcaatgatgctgaatttgctct

SEQ ID NO: 19486 - DNA, 25 bp, Artificial
  Probe
caactcaatgatgctgaatttgctc

SEQ ID NO: 19487 - DNA, 25 bp, Artificial
  Probe
tttgagttctccagatccatgaatg

SEQ ID NO: 19488 - DNA, 25 bp, Artificial
  Probe
gatccatgaatgaactgcaactcaa

SEQ ID NO: 19489 - DNA, 25 bp, Artificial
  Probe
tcttatcagaagaacagatccgctt

SEQ ID NO: 19490 - DNA, 25 bp, Artificial
  Probe
ccatgaatgaactgcaactcaatga

SEQ ID NO: 19491 - DNA, 25 bp, Artificial
  Probe
tccatgaatgaactgcaactcaatg

SEQ ID NO: 19492 - DNA, 25 bp, Artificial
  Probe
tctttgagttctccagatccatgaa

SEQ ID NO: 19493 - DNA, 25 bp, Artificial
  Probe
gaagaaactgaagcgtcaagaagag

SEQ ID NO: 19494 - DNA, 25 bp, Artificial
  Probe
ttctccagatccatgaatgaactgc

SEQ ID NO: 19495 - DNA, 25 bp, Artificial
  Probe
actcaatgatgctgaatttgctctg

SEQ ID NO: 19496 - DNA, 25 bp, Artificial
  Probe
gtcttatcagaagaacagatccgct

SEQ ID NO: 19497 - DNA, 25 bp, Artificial
  Probe
ccaaccaaataaactagccaggaga

SEQ ID NO: 19498 - DNA, 25 bp, Artificial
  Probe
agatccatgaatgaactgcaactca

SEQ ID NO: 19499 - DNA, 25 bp, Artificial
  Probe
gatgctgaatttgctctgctcatag

SEQ ID NO: 19500 - DNA, 25 bp, Artificial
  Probe
cagatccatgaatgaactgcaactc

SEQ ID NO: 19501 - DNA, 25 bp, Artificial
  Probe
tgtcttatcagaagaacagatccgc

SEQ ID NO: 19502 - DNA, 25 bp, Artificial
  Probe
aaccaaataaactagccaggagagc

SEQ ID NO: 19503 - DNA, 25 bp, Artificial
  Probe
gaagaacagatccgcttgaagaaac

SEQ ID NO: 19504 - DNA, 25 bp, Artificial
  Probe
agaagaacagatccgcttgaagaaa

SEQ ID NO: 19505 - DNA, 25 bp, Artificial
  Probe
tgaagaaactgaagcgtcaagaaga

SEQ ID NO: 19506 - DNA, 25 bp, Artificial
  Probe
cttcctcaaggatttcagttacaac

SEQ ID NO: 19507 - DNA, 25 bp, Artificial
  Probe
ttgacccaaccaaataaactagcca

SEQ ID NO: 19508 - DNA, 25 bp, Artificial
  Probe
ttcctcaaggatttcagttacaacc

SEQ ID NO: 19509 - DNA, 25 bp, Artificial
  Probe
tagagtgaataggaggcaagttatg

SEQ ID NO: 19510 - DNA, 25 bp, Artificial
  Probe
ttatagagtgaataggaggcaagtt

SEQ ID NO: 19511 - DNA, 25 bp, Artificial
  Probe
atctccagaatgaaggttacagaac

SEQ ID NO: 19512 - DNA, 25 bp, Artificial
  Probe
atagagtgaataggaggcaagttat

SEQ ID NO: 19513 - DNA, 25 bp, Artificial
  Probe
ctccagaatgaaggttacagaacac

SEQ ID NO: 19514 - DNA, 25 bp, Artificial
  Probe
tctccagaatgaaggttacagaaca

SEQ ID NO: 19515 - DNA, 25 bp, Artificial
  Probe
tatagagtgaataggaggcaagtta

SEQ ID NO: 19516 - DNA, 25 bp, Artificial
  Probe
gatctccagaatgaaggttacagaa

SEQ ID NO: 19517 - DNA, 25 bp, Artificial
  Probe
tagtgtggatgctacaagtaatgag

SEQ ID NO: 19518 - DNA, 25 bp, Artificial
  Probe
ctagtgtggatgctacaagtaatga

SEQ ID NO: 19519 - DNA, 25 bp, Artificial
  Probe
tctagtgtggatgctacaagtaatg

SEQ ID NO: 19520 - DNA, 25 bp, Artificial
  Probe
ctctagtgtggatgctacaagtaat

SEQ ID NO: 19521 - DNA, 25 bp, Artificial
  Probe
atctctagtgtggatgctacaagta

SEQ ID NO: 19522 - DNA, 25 bp, Artificial
  Probe
tctctagtgtggatgctacaagtaa

SEQ ID NO: 19523 - DNA, 25 bp, Artificial
  Probe
ggatctgacattcatagactgtgtt

SEQ ID NO: 19524 - DNA, 25 bp, Artificial
  Probe
gaggatctgacattcatagactgtg

SEQ ID NO: 19525 - DNA, 25 bp, Artificial
  Probe
ggatctccagaatgaaggttacaga

SEQ ID NO: 19526 - DNA, 25 bp, Artificial
  Probe
aggatctgacattcatagactgtgt

SEQ ID NO: 19527 - DNA, 25 bp, Artificial
  Probe
gtggtcgtctggctattctaatgtt

SEQ ID NO: 19528 - DNA, 25 bp, Artificial
  Probe
acgaggatctgacattcatagactg

SEQ ID NO: 19529 - DNA, 25 bp, Artificial
  Probe
cacgaggatctgacattcatagact

SEQ ID NO: 19530 - DNA, 25 bp, Artificial
  Probe
tcacgaggatctgacattcatagac

SEQ ID NO: 19531 - DNA, 25 bp, Artificial
  Probe
cttactcactacatgctctgatgga

SEQ ID NO: 19532 - DNA, 25 bp, Artificial
  Probe
gatctctagtgtggatgctacaagt

SEQ ID NO: 19533 - DNA, 25 bp, Artificial
  Probe
cgtctggctattctaatgtttactg

SEQ ID NO: 19534 - DNA, 25 bp, Artificial
  Probe
tcgtctggctattctaatgtttact

SEQ ID NO: 19535 - DNA, 25 bp, Artificial
  Probe
gtcgtctggctattctaatgtttac

SEQ ID NO: 19536 - DNA, 25 bp, Artificial
  Probe
ggtcgtctggctattctaatgttta

SEQ ID NO: 19537 - DNA, 25 bp, Artificial
  Probe
ttactcactacatgctctgatggag

SEQ ID NO: 19538 - DNA, 25 bp, Artificial
  Probe
cgaggatctgacattcatagactgt

SEQ ID NO: 19539 - DNA, 25 bp, Artificial
  Probe
agtgtggatgctacaagtaatgagg

SEQ ID NO: 19540 - DNA, 25 bp, Artificial
  Probe
tttatagagtgaataggaggcaagt

SEQ ID NO: 19541 - DNA, 25 bp, Artificial
  Probe
ctgtggtcgtctggctattctaatg

SEQ ID NO: 19542 - DNA, 25 bp, Artificial
  Probe
tctgtggtcgtctggctattctaat

SEQ ID NO: 19543 - DNA, 25 bp, Artificial
  Probe
attctgtggtcgtctggctattcta

SEQ ID NO: 19544 - DNA, 25 bp, Artificial
  Probe
cagaatgaaggttacagaacaccag

SEQ ID NO: 19545 - DNA, 25 bp, Artificial
  Probe
cggatctccagaatgaaggttacag

SEQ ID NO: 19546 - DNA, 25 bp, Artificial
  Probe
tactgataatgctcatagggattgg

SEQ ID NO: 19547 - DNA, 25 bp, Artificial
  Probe
aatccagattcctctcattgtcttt

SEQ ID NO: 19548 - DNA, 25 bp, Artificial
  Probe
ttctgtggtcgtctggctattctaa

SEQ ID NO: 19549 - DNA, 25 bp, Artificial
  Probe
gtctggctattctaatgtttactga

SEQ ID NO: 19550 - DNA, 25 bp, Artificial
  Probe
tgtttactgataatgctcataggga

SEQ ID NO: 19551 - DNA, 25 bp, Artificial
  Probe
ctgataatgctcatagggattggtc

SEQ ID NO: 19552 - DNA, 25 bp, Artificial
  Probe
cacggatctccagaatgaaggttac

SEQ ID NO: 19553 - DNA, 25 bp, Artificial
  Probe
cacaagtgaacaaactccataagag

SEQ ID NO: 19554 - DNA, 25 bp, Artificial
  Probe
atagagaggcggattacaataaacg

SEQ ID NO: 19555 - DNA, 25 bp, Artificial
  Probe
cctatagagaggcggattacaataa

SEQ ID NO: 19556 - DNA, 25 bp, Artificial
  Probe
tatagagaggcggattacaataaac

SEQ ID NO: 19557 - DNA, 25 bp, Artificial
  Probe
tagagaggcggattacaataaacgg

SEQ ID NO: 19558 - DNA, 25 bp, Artificial
  Probe
ccttccaacaatgtgccaccttatg

SEQ ID NO: 19559 - DNA, 25 bp, Artificial
  Probe
ccctatagagaggcggattacaata

SEQ ID NO: 19560 - DNA, 25 bp, Artificial
  Probe
ctatagagaggcggattacaataaa

SEQ ID NO: 19561 - DNA, 25 bp, Artificial
  Probe
cacattaaaacgctggagaaaacac

SEQ ID NO: 19562 - DNA, 25 bp, Artificial
  Probe
cttccaacaatgtgccaccttatgg

SEQ ID NO: 19563 - DNA, 25 bp, Artificial
  Probe
acattaaaacgctggagaaaacacc

SEQ ID NO: 19564 - DNA, 25 bp, Artificial
  Probe
agagaggcggattacaataaacggg

SEQ ID NO: 19565 - DNA, 25 bp, Artificial
  Probe
cattaaaacgctggagaaaacaccc

SEQ ID NO: 19566 - DNA, 25 bp, Artificial
  Probe
attaaaacgctggagaaaacaccct

SEQ ID NO: 19567 - DNA, 25 bp, Artificial
  Probe
taaaacgctggagaaaacacccttt

SEQ ID NO: 19568 - DNA, 25 bp, Artificial
  Probe
ttaaaacgctggagaaaacaccctt

SEQ ID NO: 19569 - DNA, 25 bp, Artificial
  Probe
ccacattaaaacgctggagaaaaca

SEQ ID NO: 19570 - DNA, 25 bp, Artificial
  Probe
cccacattaaaacgctggagaaaac

SEQ ID NO: 19571 - DNA, 25 bp, Artificial
  Probe
acccacattaaaacgctggagaaaa

SEQ ID NO: 19572 - DNA, 25 bp, Artificial
  Probe
gacccacattaaaacgctggagaaa

SEQ ID NO: 19573 - DNA, 25 bp, Artificial
  Probe
aaaacgctggagaaaacaccctttt

SEQ ID NO: 19574 - DNA, 25 bp, Artificial
  Probe
caagaaactaggggaatgggtaggc

SEQ ID NO: 19575 - DNA, 25 bp, Artificial
  Probe
gccctatagagaggcggattacaat

SEQ ID NO: 19576 - DNA, 25 bp, Artificial
  Probe
attggccctatagagaggcggatta

SEQ ID NO: 19577 - DNA, 25 bp, Artificial
  Probe
taagatatgatggtctctatgtgcc

SEQ ID NO: 19578 - DNA, 25 bp, Artificial
  Probe
gtcaggagcaccataagatatgatg

SEQ ID NO: 19579 - DNA, 25 bp, Artificial
  Probe
agtcaggagcaccataagatatgat

SEQ ID NO: 19580 - DNA, 25 bp, Artificial
  Probe
ataagatatgatggtctctatgtgc

SEQ ID NO: 19581 - DNA, 25 bp, Artificial
  Probe
gagtcaggagcaccataagatatga

SEQ ID NO: 19582 - DNA, 25 bp, Artificial
  Probe
agagtcaggagcaccataagatatg

SEQ ID NO: 19583 - DNA, 25 bp, Artificial
  Probe
gatatgatggtctctatgtgccaac

SEQ ID NO: 19584 - DNA, 25 bp, Artificial
  Probe
agatatgatggtctctatgtgccaa

SEQ ID NO: 19585 - DNA, 25 bp, Artificial
  Probe
aagatatgatggtctctatgtgcca

SEQ ID NO: 19586 - DNA, 25 bp, Artificial
  Probe
taacactttacttaacgacacttgc

SEQ ID NO: 19587 - DNA, 25 bp, Artificial
  Probe
acactttacttaacgacacttgcta

SEQ ID NO: 19588 - DNA, 25 bp, Artificial
  Probe
ttggtgttaaatcctttgggttatc

SEQ ID NO: 19589 - DNA, 25 bp, Artificial
  Probe
aaattggtgttaaatcctttgggtt

SEQ ID NO: 19590 - DNA, 25 bp, Artificial
  Probe
tggtgttaaatcctttgggttatcc

SEQ ID NO: 19591 - DNA, 25 bp, Artificial
  Probe
actttacttaacgacacttgctaga

SEQ ID NO: 19592 - DNA, 25 bp, Artificial
  Probe
cactttacttaacgacacttgctag

SEQ ID NO: 19593 - DNA, 25 bp, Artificial
  Probe
aacactttacttaacgacacttgct

SEQ ID NO: 19594 - DNA, 25 bp, Artificial
  Probe
aattggtgttaaatcctttgggtta

SEQ ID NO: 19595 - DNA, 25 bp, Artificial
  Probe
attggtgttaaatcctttgggttat

SEQ ID NO: 19596 - DNA, 25 bp, Artificial
  Probe
atatgatggtctctatgtgccaacg

SEQ ID NO: 19597 - DNA, 25 bp, Artificial
  Probe
ataacactttacttaacgacacttg

SEQ ID NO: 19598 - DNA, 25 bp, Artificial
  Probe
agatcacgatgtaaatcactgtaat

SEQ ID NO: 19599 - DNA, 25 bp, Artificial
  Probe
tgttaaatcctttgggttatccact

SEQ ID NO: 19600 - DNA, 25 bp, Artificial
  Probe
gtgttaaatcctttgggttatccac

SEQ ID NO: 19601 - DNA, 25 bp, Artificial
  Probe
gttaaatcctttgggttatccactg

SEQ ID NO: 19602 - DNA, 25 bp, Artificial
  Probe
cagatcacgatgtaaatcactgtaa

SEQ ID NO: 19603 - DNA, 25 bp, Artificial
  Probe
gcagatcacgatgtaaatcactgta

SEQ ID NO: 19604 - DNA, 25 bp, Artificial
  Probe
ggtgttaaatcctttgggttatcca

SEQ ID NO: 19605 - DNA, 25 bp, Artificial
  Probe
ttaaatcctttgggttatccactgc

SEQ ID NO: 19606 - DNA, 25 bp, Artificial
  Probe
gatcacgatgtaaatcactgtaatt

SEQ ID NO: 19607 - DNA, 25 bp, Artificial
  Probe
ttcttgtgaggatctgaaacccaaa

SEQ ID NO: 19608 - DNA, 25 bp, Artificial
  Probe
cataagatatgatggtctctatgtg

SEQ ID NO: 19609 - DNA, 25 bp, Artificial
  Probe
gtataacactttacttaacgacact

SEQ ID NO: 19610 - DNA, 25 bp, Artificial
  Probe
tcttgtgaggatctgaaacccaaag

SEQ ID NO: 19611 - DNA, 25 bp, Artificial
  Probe
acacagagtttgtataacactttac

SEQ ID NO: 19612 - DNA, 25 bp, Artificial
  Probe
aactttcttgtgaggatctgaaacc

SEQ ID NO: 19613 - DNA, 25 bp, Artificial
  Probe
ccactgccttaaaatgacacttatt

SEQ ID NO: 19614 - DNA, 25 bp, Artificial
  Probe
tgtataacactttacttaacgacac

SEQ ID NO: 19615 - DNA, 25 bp, Artificial
  Probe
tccactgccttaaaatgacacttat

SEQ ID NO: 19616 - DNA, 25 bp, Artificial
  Probe
atccactgccttaaaatgacactta

SEQ ID NO: 19617 - DNA, 25 bp, Artificial
  Probe
tatccactgccttaaaatgacactt

SEQ ID NO: 19618 - DNA, 25 bp, Artificial
  Probe
ttatccactgccttaaaatgacact

SEQ ID NO: 19619 - DNA, 25 bp, Artificial
  Probe
gttatccactgccttaaaatgacac

SEQ ID NO: 19620 - DNA, 25 bp, Artificial
  Probe
atagtcgcagatcacgatgtaaatc

SEQ ID NO: 19621 - DNA, 25 bp, Artificial
  Probe
aaaattggtgttaaatcctttgggt

SEQ ID NO: 19622 - DNA, 25 bp, Artificial
  Probe
aggtgacagcactgaatatccttaa

SEQ ID NO: 19623 - DNA, 25 bp, Artificial
  Probe
ctgaatatccttaaagcccacatct

SEQ ID NO: 19624 - DNA, 25 bp, Artificial
  Probe
actgaatatccttaaagcccacatc

SEQ ID NO: 19625 - DNA, 25 bp, Artificial
  Probe
cactgaatatccttaaagcccacat

SEQ ID NO: 19626 - DNA, 25 bp, Artificial
  Probe
tgaatatccttaaagcccacatctt

SEQ ID NO: 19627 - DNA, 25 bp, Artificial
  Probe
caggtgacagcactgaatatcctta

SEQ ID NO: 19628 - DNA, 25 bp, Artificial
  Probe
tgacagcactgaatatccttaaagc

SEQ ID NO: 19629 - DNA, 25 bp, Artificial
  Probe
ctaacttctgagaaacaaggacaag

SEQ ID NO: 19630 - DNA, 25 bp, Artificial
  Probe
taacttctgagaaacaaggacaagg

SEQ ID NO: 19631 - DNA, 25 bp, Artificial
  Probe
gacagcactgaatatccttaaagcc

SEQ ID NO: 19632 - DNA, 25 bp, Artificial
  Probe
cttctgagaaacaaggacaaggatg

SEQ ID NO: 19633 - DNA, 25 bp, Artificial
  Probe
gtgacagcactgaatatccttaaag

SEQ ID NO: 19634 - DNA, 25 bp, Artificial
  Probe
ggtgacagcactgaatatccttaaa

SEQ ID NO: 19635 - DNA, 25 bp, Artificial
  Probe
ggtggagagcagctaatatacctag

SEQ ID NO: 19636 - DNA, 25 bp, Artificial
  Probe
acttctgagaaacaaggacaaggat

SEQ ID NO: 19637 - DNA, 25 bp, Artificial
  Probe
cctaacttctgagaaacaaggacaa

SEQ ID NO: 19638 - DNA, 25 bp, Artificial
  Probe
aacttctgagaaacaaggacaagga

SEQ ID NO: 19639 - DNA, 25 bp, Artificial
  Probe
gatcttaaagtggttgttactgccc

SEQ ID NO: 19640 - DNA, 25 bp, Artificial
  Probe
ggatcttaaagtggttgttactgcc

SEQ ID NO: 19641 - DNA, 25 bp, Artificial
  Probe
gggatcttaaagtggttgttactgc

SEQ ID NO: 19642 - DNA, 25 bp, Artificial
  Probe
agcactgaatatccttaaagcccac

SEQ ID NO: 19643 - DNA, 25 bp, Artificial
  Probe
cagcactgaatatccttaaagccca

SEQ ID NO: 19644 - DNA, 25 bp, Artificial
  Probe
acagcactgaatatccttaaagccc

SEQ ID NO: 19645 - DNA, 25 bp, Artificial
  Probe
gtgacaggtgacagcactgaatatc

SEQ ID NO: 19646 - DNA, 25 bp, Artificial
  Probe
gcactgaatatccttaaagcccaca

SEQ ID NO: 19647 - DNA, 25 bp, Artificial
  Probe
gaatatccttaaagcccacatcttt

SEQ ID NO: 19648 - DNA, 25 bp, Artificial
  Probe
tttaaatcccttccctagtttcttt

SEQ ID NO: 19649 - DNA, 25 bp, Artificial
  Probe
acaggtgacagcactgaatatcctt

SEQ ID NO: 19650 - DNA, 25 bp, Artificial
  Probe
cttaaagtggttgttactgcccaag

SEQ ID NO: 19651 - DNA, 25 bp, Artificial
  Probe
gcagctaatatacctaggatcatgg

SEQ ID NO: 19652 - DNA, 25 bp, Artificial
  Probe
agagcagctaatatacctaggatca

SEQ ID NO: 19653 - DNA, 25 bp, Artificial
  Probe
ggagagcagctaatatacctaggat

SEQ ID NO: 19654 - DNA, 25 bp, Artificial
  Probe
atcttaaagtggttgttactgccca

SEQ ID NO: 19655 - DNA, 25 bp, Artificial
  Probe
gagagcagctaatatacctaggatc

SEQ ID NO: 19656 - DNA, 25 bp, Artificial
  Probe
agcagctaatatacctaggatcatg

SEQ ID NO: 19657 - DNA, 25 bp, Artificial
  Probe
tcccttccctagtttcttttagttg

SEQ ID NO: 19658 - DNA, 25 bp, Artificial
  Probe
gagcagctaatatacctaggatcat

SEQ ID NO: 19659 - DNA, 25 bp, Artificial
  Probe
gcctaacttctgagaaacaaggaca

SEQ ID NO: 19660 - DNA, 25 bp, Artificial
  Probe
ttctgagaaacaaggacaaggatgc

SEQ ID NO: 19661 - DNA, 25 bp, Artificial
  Probe
atcccttccctagtttcttttagtt

SEQ ID NO: 19662 - DNA, 25 bp, Artificial
  Probe
aatcccttccctagtttcttttagt

SEQ ID NO: 19663 - DNA, 25 bp, Artificial
  Probe
tcttaaagtggttgttactgcccaa

SEQ ID NO: 19664 - DNA, 25 bp, Artificial
  Probe
gacaggtgacagcactgaatatcct

SEQ ID NO: 19665 - DNA, 25 bp, Artificial
  Probe
gtggagagcagctaatatacctagg

SEQ ID NO: 19666 - DNA, 25 bp, Artificial
  Probe
tggagagcagctaatatacctagga

SEQ ID NO: 19667 - DNA, 25 bp, Artificial
  Probe
aattctgagatgacttaggttggac

SEQ ID NO: 19668 - DNA, 25 bp, Artificial
  Probe
attctgagatgacttaggttggaca

SEQ ID NO: 19669 - DNA, 25 bp, Artificial
  Probe
ctgagatgacttaggttggacattc

SEQ ID NO: 19670 - DNA, 25 bp, Artificial
  Probe
taattctgagatgacttaggttgga

SEQ ID NO: 19671 - DNA, 25 bp, Artificial
  Probe
tctgagatgacttaggttggacatt

SEQ ID NO: 19672 - DNA, 25 bp, Artificial
  Probe
ttctgagatgacttaggttggacat

SEQ ID NO: 19673 - DNA, 25 bp, Artificial
  Probe
agatgacttaggttggacattcaat

SEQ ID NO: 19674 - DNA, 25 bp, Artificial
  Probe
gagatgacttaggttggacattcaa

SEQ ID NO: 19675 - DNA, 25 bp, Artificial
  Probe
agttgagttccagatcctatacaga

SEQ ID NO: 19676 - DNA, 25 bp, Artificial
  Probe
cagttgagttccagatcctatacag

SEQ ID NO: 19677 - DNA, 25 bp, Artificial
  Probe
gttgagttccagatcctatacagat

SEQ ID NO: 19678 - DNA, 25 bp, Artificial
  Probe
gatgacttaggttggacattcaatg

SEQ ID NO: 19679 - DNA, 25 bp, Artificial
  Probe
aaccagttgagttccagatcctata

SEQ ID NO: 19680 - DNA, 25 bp, Artificial
  Probe
aagatggcattggacattgagattg

SEQ ID NO: 19681 - DNA, 25 bp, Artificial
  Probe
tgagatgacttaggttggacattca

SEQ ID NO: 19682 - DNA, 25 bp, Artificial
  Probe
ccagttgagttccagatcctataca

SEQ ID NO: 19683 - DNA, 25 bp, Artificial
  Probe
accagttgagttccagatcctatac

SEQ ID NO: 19684 - DNA, 25 bp, Artificial
  Probe
ataattctgagatgacttaggttgg

SEQ ID NO: 19685 - DNA, 25 bp, Artificial
  Probe
ttgagttccagatcctatacagatt

SEQ ID NO: 19686 - DNA, 25 bp, Artificial
  Probe
caagatggcattggacattgagatt

SEQ ID NO: 19687 - DNA, 25 bp, Artificial
  Probe
tgagttccagatcctatacagatta

SEQ ID NO: 19688 - DNA, 25 bp, Artificial
  Probe
atatatcttcacttgtccgtgtctt

SEQ ID NO: 19689 - DNA, 25 bp, Artificial
  Probe
aatatatcttcacttgtccgtgtct

SEQ ID NO: 19690 - DNA, 25 bp, Artificial
  Probe
caaccagttgagttccagatcctat

SEQ ID NO: 19691 - DNA, 25 bp, Artificial
  Probe
ggacacaatcaacaaactggagaat

SEQ ID NO: 19692 - DNA, 25 bp, Artificial
  Probe
ccagatcctatacagattaagaagt

SEQ ID NO: 19693 - DNA, 25 bp, Artificial
  Probe
gttccagatcctatacagattaaga

SEQ ID NO: 19694 - DNA, 25 bp, Artificial
  Probe
agttccagatcctatacagattaag

SEQ ID NO: 19695 - DNA, 25 bp, Artificial
  Probe
gagttccagatcctatacagattaa

SEQ ID NO: 19696 - DNA, 25 bp, Artificial
  Probe
attggacattgagattgcagcttac

SEQ ID NO: 19697 - DNA, 25 bp, Artificial
  Probe
cattggacattgagattgcagctta

SEQ ID NO: 19698 - DNA, 25 bp, Artificial
  Probe
tgtataattctgagatgacttaggt

SEQ ID NO: 19699 - DNA, 25 bp, Artificial
  Probe
tccagatcctatacagattaagaag

SEQ ID NO: 19700 - DNA, 25 bp, Artificial
  Probe
tatatcttcacttgtccgtgtcttt

SEQ ID NO: 19701 - DNA, 25 bp, Artificial
  Probe
aggacacaatcaacaaactggagaa

SEQ ID NO: 19702 - DNA, 25 bp, Artificial
  Probe
acattgagattgcagcttacaggaa

SEQ ID NO: 19703 - DNA, 25 bp, Artificial
  Probe
ttccagatcctatacagattaagaa

SEQ ID NO: 19704 - DNA, 25 bp, Artificial
  Probe
aaatatatcttcacttgtccgtgtc

SEQ ID NO: 19705 - DNA, 25 bp, Artificial
  Probe
ttggacattgagattgcagcttaca

SEQ ID NO: 19706 - DNA, 25 bp, Artificial
  Probe
gacattgagattgcagcttacagga

SEQ ID NO: 19707 - DNA, 25 bp, Artificial
  Probe
agatcctatacagattaagaagtca

SEQ ID NO: 19708 - DNA, 25 bp, Artificial
  Probe
tataattctgagatgacttaggttg

SEQ ID NO: 19709 - DNA, 25 bp, Artificial
  Probe
gtataattctgagatgacttaggtt

SEQ ID NO: 19710 - DNA, 25 bp, Artificial
  Probe
ctatgactttcctccttatgcagag

SEQ ID NO: 19711 - DNA, 25 bp, Artificial
  Probe
cagatcctatacagattaagaagtc

SEQ ID NO: 19712 - DNA, 25 bp, Artificial
  Probe
tacaataacaacatgaacatcaacg

SEQ ID NO: 19713 - DNA, 25 bp, Artificial
  Probe
gaactacggaataagtcagcaacct

SEQ ID NO: 19714 - DNA, 25 bp, Artificial
  Probe
acaataacaacatgaacatcaacgt

SEQ ID NO: 19715 - DNA, 25 bp, Artificial
  Probe
caataacaacatgaacatcaacgtg

SEQ ID NO: 19716 - DNA, 25 bp, Artificial
  Probe
aataacaacatgaacatcaacgtgt

SEQ ID NO: 19717 - DNA, 25 bp, Artificial
  Probe
ataacaacatgaacatcaacgtgtc

SEQ ID NO: 19718 - DNA, 25 bp, Artificial
  Probe
aactacggaataagtcagcaacctg

SEQ ID NO: 19719 - DNA, 25 bp, Artificial
  Probe
gtacaataacaacatgaacatcaac

SEQ ID NO: 19720 - DNA, 25 bp, Artificial
  Probe
taacaacatgaacatcaacgtgtcc

SEQ ID NO: 19721 - DNA, 25 bp, Artificial
  Probe
cgaactacggaataagtcagcaacc

SEQ ID NO: 19722 - DNA, 25 bp, Artificial
  Probe
ttgagcaacatgaaccagatgacag

SEQ ID NO: 19723 - DNA, 25 bp, Artificial
  Probe
cttgagcaacatgaaccagatgaca

SEQ ID NO: 19724 - DNA, 25 bp, Artificial
  Probe
gaacaccagcatgtacaataacaac

SEQ ID NO: 19725 - DNA, 25 bp, Artificial
  Probe
aacaccagcatgtacaataacaaca

SEQ ID NO: 19726 - DNA, 25 bp, Artificial
  Probe
acaacatgaacatcaacgtgtccat

SEQ ID NO: 19727 - DNA, 25 bp, Artificial
  Probe
cgaacaccagcatgtacaataacaa

SEQ ID NO: 19728 - DNA, 25 bp, Artificial
  Probe
aacaacatgaacatcaacgtgtcca

SEQ ID NO: 19729 - DNA, 25 bp, Artificial
  Probe
tacggaataagtcagcaacctgatc

SEQ ID NO: 19730 - DNA, 25 bp, Artificial
  Probe
ctacggaataagtcagcaacctgat

SEQ ID NO: 19731 - DNA, 25 bp, Artificial
  Probe
gcttgagcaacatgaaccagatgac

SEQ ID NO: 19732 - DNA, 25 bp, Artificial
  Probe
tgtacaataacaacatgaacatcaa

SEQ ID NO: 19733 - DNA, 25 bp, Artificial
  Probe
acaccagcatgtacaataacaacat

SEQ ID NO: 19734 - DNA, 25 bp, Artificial
  Probe
gaataagtcagcaacctgatcctgg

SEQ ID NO: 19735 - DNA, 25 bp, Artificial
  Probe
ggaataagtcagcaacctgatcctg

SEQ ID NO: 19736 - DNA, 25 bp, Artificial
  Probe
tgagcaacatgaaccagatgacagg

SEQ ID NO: 19737 - DNA, 25 bp, Artificial
  Probe
aagcgaacaccagcatgtacaataa

SEQ ID NO: 19738 - DNA, 25 bp, Artificial
  Probe
actacggaataagtcagcaacctga

SEQ ID NO: 19739 - DNA, 25 bp, Artificial
  Probe
caacatgaacatcaacgtgtccatg

SEQ ID NO: 19740 - DNA, 25 bp, Artificial
  Probe
gaaacagcatgttctcacaacagtc

SEQ ID NO: 19741 - DNA, 25 bp, Artificial
  Probe
ccgaactacggaataagtcagcaac

SEQ ID NO: 19742 - DNA, 25 bp, Artificial
  Probe
agcgaacaccagcatgtacaataac

SEQ ID NO: 19743 - DNA, 25 bp, Artificial
  Probe
caagcgaacaccagcatgtacaata

SEQ ID NO: 19744 - DNA, 25 bp, Artificial
  Probe
atgtacaataacaacatgaacatca

SEQ ID NO: 19745 - DNA, 25 bp, Artificial
  Probe
cagtttccatttcctccgaactacg

SEQ ID NO: 19746 - DNA, 25 bp, Artificial
  Probe
agatgggtctcggaaatactgctga

SEQ ID NO: 19747 - DNA, 25 bp, Artificial
  Probe
gcgaacaccagcatgtacaataaca

SEQ ID NO: 19748 - DNA, 25 bp, Artificial
  Probe
aactgcctggaatggacatgatcaa

SEQ ID NO: 19749 - DNA, 25 bp, Artificial
  Probe
gcagtttccatttcctccgaactac

SEQ ID NO: 19750 - DNA, 25 bp, Artificial
  Probe
tggaatggacatgatcaagcaggag

SEQ ID NO: 19751 - DNA, 25 bp, Artificial
  Probe
agcagtttccatttcctccgaacta

SEQ ID NO: 19752 - DNA, 25 bp, Artificial
  Probe
cggaataagtcagcaacctgatcct

SEQ ID NO: 19753 - DNA, 25 bp, Artificial
  Probe
gatcctggctttactggagctacaa

SEQ ID NO: 19754 - DNA, 25 bp, Artificial
  Probe
caacctgatcctggctttactggag

SEQ ID NO: 19755 - DNA, 25 bp, Artificial
  Probe
actgcctggaatggacatgatcaag

SEQ ID NO: 19756 - DNA, 25 bp, Artificial
  Probe
aaacagcatgttctcacaacagtcc

SEQ ID NO: 19757 - DNA, 25 bp, Artificial
  Probe
cctccattctgccatatattgaaga

SEQ ID NO: 19758 - DNA, 25 bp, Artificial
  Probe
gatagacttggatagaataagaggc

SEQ ID NO: 19759 - DNA, 25 bp, Artificial
  Probe
taatgattggcttaacatgaaggaa

SEQ ID NO: 19760 - DNA, 25 bp, Artificial
  Probe
ctccattctgccatatattgaagat

SEQ ID NO: 19761 - DNA, 25 bp, Artificial
  Probe
gcctccattctgccatatattgaag

SEQ ID NO: 19762 - DNA, 25 bp, Artificial
  Probe
ttgagcctccattctgccatatatt

SEQ ID NO: 19763 - DNA, 25 bp, Artificial
  Probe
ttaatgattggcttaacatgaagga

SEQ ID NO: 19764 - DNA, 25 bp, Artificial
  Probe
agcctccattctgccatatattgaa

SEQ ID NO: 19765 - DNA, 25 bp, Artificial
  Probe
ggatagacttggatagaataagagg

SEQ ID NO: 19766 - DNA, 25 bp, Artificial
  Probe
tccattctgccatatattgaagatt

SEQ ID NO: 19767 - DNA, 25 bp, Artificial
  Probe
gagcctccattctgccatatattga

SEQ ID NO: 19768 - DNA, 25 bp, Artificial
  Probe
cttgagcctccattctgccatatat

SEQ ID NO: 19769 - DNA, 25 bp, Artificial
  Probe
ctatcaccacagagatcctcaagtc

SEQ ID NO: 19770 - DNA, 25 bp, Artificial
  Probe
tgagcctccattctgccatatattg

SEQ ID NO: 19771 - DNA, 25 bp, Artificial
  Probe
tctatcaccacagagatcctcaagt

SEQ ID NO: 19772 - DNA, 25 bp, Artificial
  Probe
tggatagacttggatagaataagag

SEQ ID NO: 19773 - DNA, 25 bp, Artificial
  Probe
atctatcaccacagagatcctcaag

SEQ ID NO: 19774 - DNA, 25 bp, Artificial
  Probe
catctatcaccacagagatcctcaa

SEQ ID NO: 19775 - DNA, 25 bp, Artificial
  Probe
gattcgatgctggagaattgattac

SEQ ID NO: 19776 - DNA, 25 bp, Artificial
  Probe
cgaaggaagcaatcaaggaaagaaa

SEQ ID NO: 19777 - DNA, 25 bp, Artificial
  Probe
ggcttaacatgaaggaaataaaggt

SEQ ID NO: 19778 - DNA, 25 bp, Artificial
  Probe
tggcttaacatgaaggaaataaagg

SEQ ID NO: 19779 - DNA, 25 bp, Artificial
  Probe
aatgattggcttaacatgaaggaaa

SEQ ID NO: 19780 - DNA, 25 bp, Artificial
  Probe
atgattggcttaacatgaaggaaat

SEQ ID NO: 19781 - DNA, 25 bp, Artificial
  Probe
ttggatagacttggatagaataaga

SEQ ID NO: 19782 - DNA, 25 bp, Artificial
  Probe
attcgatgctggagaattgattacc

SEQ ID NO: 19783 - DNA, 25 bp, Artificial
  Probe
cgattcgatgctggagaattgatta

SEQ ID NO: 19784 - DNA, 25 bp, Artificial
  Probe
aaactttggatagacttggatagaa

SEQ ID NO: 19785 - DNA, 25 bp, Artificial
  Probe
tgattggcttaacatgaaggaaata

SEQ ID NO: 19786 - DNA, 25 bp, Artificial
  Probe
caatgtaagctgctgtcaataaatg

SEQ ID NO: 19787 - DNA, 25 bp, Artificial
  Probe
atagacttggatagaataagaggcc

SEQ ID NO: 19788 - DNA, 25 bp, Artificial
  Probe
aactttggatagacttggatagaat

SEQ ID NO: 19789 - DNA, 25 bp, Artificial
  Probe
gtcctctcaaataccaatgggattc

SEQ ID NO: 19790 - DNA, 25 bp, Artificial
  Probe
tatcaccacagagatcctcaagtcg

SEQ ID NO: 19791 - DNA, 25 bp, Artificial
  Probe
ctctcaaataccaatgggattccag

SEQ ID NO: 19792 - DNA, 25 bp, Artificial
  Probe
ccttgagcctccattctgccatata

SEQ ID NO: 19793 - DNA, 25 bp, Artificial
  Probe
aatgtaagctgctgtcaataaatga

SEQ ID NO: 19794 - DNA, 25 bp, Artificial
  Probe
ttggcttaacatgaaggaaataaag

SEQ ID NO: 19795 - DNA, 25 bp, Artificial
  Probe
tttaatgattggcttaacatgaagg

SEQ ID NO: 19796 - DNA, 25 bp, Artificial
  Probe
gattggcttaacatgaaggaaataa

SEQ ID NO: 19797 - DNA, 25 bp, Artificial
  Probe
cactgtgaaatttaatgattggctt

SEQ ID NO: 19798 - DNA, 25 bp, Artificial
  Probe
tcactgtgaaatttaatgattggct

SEQ ID NO: 19799 - DNA, 25 bp, Artificial
  Probe
taaactttggatagacttggataga

SEQ ID NO: 19800 - DNA, 25 bp, Artificial
  Probe
ccatctatcaccacagagatcctca

SEQ ID NO: 19801 - DNA, 25 bp, Artificial
  Probe
ccattctgccatatattgaagattt

SEQ ID NO: 19802 - DNA, 25 bp, Artificial
  Probe
atggagtgatgaatggcgaatacta

SEQ ID NO: 19803 - DNA, 25 bp, Artificial
  Probe
ttgatggagtgatgaatggcgaata

SEQ ID NO: 19804 - DNA, 25 bp, Artificial
  Probe
aagtatccgtaagtggagagaagag

SEQ ID NO: 19805 - DNA, 25 bp, Artificial
  Probe
tggagtgatgaatggcgaatactac

SEQ ID NO: 19806 - DNA, 25 bp, Artificial
  Probe
tgatggagtgatgaatggcgaatac

SEQ ID NO: 19807 - DNA, 25 bp, Artificial
  Probe
taagtggagagaagagcagacagag

SEQ ID NO: 19808 - DNA, 25 bp, Artificial
  Probe
ttaatcctactcagtgaagctgttc

SEQ ID NO: 19809 - DNA, 25 bp, Artificial
  Probe
gatggagtgatgaatggcgaatact

SEQ ID NO: 19810 - DNA, 25 bp, Artificial
  Probe
gtaagtggagagaagagcagacaga

SEQ ID NO: 19811 - DNA, 25 bp, Artificial
  Probe
ggagtgatgaatggcgaatactacc

SEQ ID NO: 19812 - DNA, 25 bp, Artificial
  Probe
agtgatgaatggcgaatactaccag

SEQ ID NO: 19813 - DNA, 25 bp, Artificial
  Probe
gagtgatgaatggcgaatactacca

SEQ ID NO: 19814 - DNA, 25 bp, Artificial
  Probe
gttgatggagtgatgaatggcgaat

SEQ ID NO: 19815 - DNA, 25 bp, Artificial
  Probe
gaaagtatccgtaagtggagagaag

SEQ ID NO: 19816 - DNA, 25 bp, Artificial
  Probe
aaagtatccgtaagtggagagaaga

SEQ ID NO: 19817 - DNA, 25 bp, Artificial
  Probe
tgaaagtatccgtaagtggagagaa

SEQ ID NO: 19818 - DNA, 25 bp, Artificial
  Probe
gatgaatggcgaatactaccaggag

SEQ ID NO: 19819 - DNA, 25 bp, Artificial
  Probe
ctgaaagtatccgtaagtggagaga

SEQ ID NO: 19820 - DNA, 25 bp, Artificial
  Probe
tatccgtaagtggagagaagagcag

SEQ ID NO: 19821 - DNA, 25 bp, Artificial
  Probe
agtatccgtaagtggagagaagagc

SEQ ID NO: 19822 - DNA, 25 bp, Artificial
  Probe
atgaatggcgaatactaccaggaga

SEQ ID NO: 19823 - DNA, 25 bp, Artificial
  Probe
gctgttcacgcaattggattaatta

SEQ ID NO: 19824 - DNA, 25 bp, Artificial
  Probe
gtatccgtaagtggagagaagagca

SEQ ID NO: 19825 - DNA, 25 bp, Artificial
  Probe
gtgatgaatggcgaatactaccagg

SEQ ID NO: 19826 - DNA, 25 bp, Artificial
  Probe
taatcctactcagtgaagctgttca

SEQ ID NO: 19827 - DNA, 25 bp, Artificial
  Probe
aagctgttcacgcaattggattaat

SEQ ID NO: 19828 - DNA, 25 bp, Artificial
  Probe
gatgcggttgatggagtgatgaatg

SEQ ID NO: 19829 - DNA, 25 bp, Artificial
  Probe
tgatgaatggcgaatactaccagga

SEQ ID NO: 19830 - DNA, 25 bp, Artificial
  Probe
cgtaagtggagagaagagcagacag

SEQ ID NO: 19831 - DNA, 25 bp, Artificial
  Probe
cctgaaagtatccgtaagtggagag

SEQ ID NO: 19832 - DNA, 25 bp, Artificial
  Probe
gagcaatggtccaacagacagttac

SEQ ID NO: 19833 - DNA, 25 bp, Artificial
  Probe
agagcaatggtccaacagacagtta

SEQ ID NO: 19834 - DNA, 25 bp, Artificial
  Probe
tgaatggcgaatactaccaggagag

SEQ ID NO: 19835 - DNA, 25 bp, Artificial
  Probe
agctgttcacgcaattggattaatt

SEQ ID NO: 19836 - DNA, 25 bp, Artificial
  Probe
tgatgcggttgatggagtgatgaat

SEQ ID NO: 19837 - DNA, 25 bp, Artificial
  Probe
cagagcctgaaagtatccgtaagtg

SEQ ID NO: 19838 - DNA, 25 bp, Artificial
  Probe
gaagctgttcacgcaattggattaa

SEQ ID NO: 19839 - DNA, 25 bp, Artificial
  Probe
agagcctgaaagtatccgtaagtgg

SEQ ID NO: 19840 - DNA, 25 bp, Artificial
  Probe
ggcgaatactaccaggagagcaatg

SEQ ID NO: 19841 - DNA, 25 bp, Artificial
  Probe
caggatgagcagctacagaagacaa

SEQ ID NO: 19842 - DNA, 25 bp, Artificial
  Probe
atccgtaagtggagagaagagcaga

SEQ ID NO: 19843 - DNA, 25 bp, Artificial
  Probe
gacagttacgcagccatttcagaag

SEQ ID NO: 19844 - DNA, 25 bp, Artificial
  Probe
aggatgagcagctacagaagacaaa

SEQ ID NO: 19845 - DNA, 25 bp, Artificial
  Probe
aagcaggaagcagagtggaaagaaa

SEQ ID NO: 19846 - DNA, 25 bp, Artificial
  Probe
gatgagcagctacagaagacaaaag

SEQ ID NO: 19847 - DNA, 25 bp, Artificial
  Probe
atgtgactactgagcaataatcgtt

SEQ ID NO: 19848 - DNA, 25 bp, Artificial
  Probe
catgtgactactgagcaataatcgt

SEQ ID NO: 19849 - DNA, 25 bp, Artificial
  Probe
tcatgtgactactgagcaataatcg

SEQ ID NO: 19850 - DNA, 25 bp, Artificial
  Probe
atcacagcagtagattgtagactcc

SEQ ID NO: 19851 - DNA, 25 bp, Artificial
  Probe
cacagcagtagattgtagactccat

SEQ ID NO: 19852 - DNA, 25 bp, Artificial
  Probe
aatcacagcagtagattgtagactc

SEQ ID NO: 19853 - DNA, 25 bp, Artificial
  Probe
gaatcacagcagtagattgtagact

SEQ ID NO: 19854 - DNA, 25 bp, Artificial
  Probe
gtcatgtgactactgagcaataatc

SEQ ID NO: 19855 - DNA, 25 bp, Artificial
  Probe
ctctatgcactctctatcaaggatg

SEQ ID NO: 19856 - DNA, 25 bp, Artificial
  Probe
ggtcatgtgactactgagcaataat

SEQ ID NO: 19857 - DNA, 25 bp, Artificial
  Probe
cgaatcacagcagtagattgtagac

SEQ ID NO: 19858 - DNA, 25 bp, Artificial
  Probe
atttgatgctttaatggtggattcc

SEQ ID NO: 19859 - DNA, 25 bp, Artificial
  Probe
ctatgcactctctatcaaggatgga

SEQ ID NO: 19860 - DNA, 25 bp, Artificial
  Probe
tctatgcactctctatcaaggatgg

SEQ ID NO: 19861 - DNA, 25 bp, Artificial
  Probe
acagcagtagattgtagactccatg

SEQ ID NO: 19862 - DNA, 25 bp, Artificial
  Probe
agtatttgatgctttaatggtggat

SEQ ID NO: 19863 - DNA, 25 bp, Artificial
  Probe
ttccgaatcacagcagtagattgta

SEQ ID NO: 19864 - DNA, 25 bp, Artificial
  Probe
aagtatttgatgctttaatggtgga

SEQ ID NO: 19865 - DNA, 25 bp, Artificial
  Probe
gaagtatttgatgctttaatggtgg

SEQ ID NO: 19866 - DNA, 25 bp, Artificial
  Probe
tcacagcagtagattgtagactcca

SEQ ID NO: 19867 - DNA, 25 bp, Artificial
  Probe
gaacctatgtgtgctcagtgtgatt

SEQ ID NO: 19868 - DNA, 25 bp, Artificial
  Probe
aatttcagtgtccaatttccagatg

SEQ ID NO: 19869 - DNA, 25 bp, Artificial
  Probe
tatgcactctctatcaaggatggag

SEQ ID NO: 19870 - DNA, 25 bp, Artificial
  Probe
gaatttcagtgtccaatttccagat

SEQ ID NO: 19871 - DNA, 25 bp, Artificial
  Probe
ccacctctatgcactctctatcaag

SEQ ID NO: 19872 - DNA, 25 bp, Artificial
  Probe
gaaccacctctatgcactctctatc

SEQ ID NO: 19873 - DNA, 25 bp, Artificial
  Probe
ccgaatcacagcagtagattgtaga

SEQ ID NO: 19874 - DNA, 25 bp, Artificial
  Probe
tccgaatcacagcagtagattgtag

SEQ ID NO: 19875 - DNA, 25 bp, Artificial
  Probe
gtatttgatgctttaatggtggatt

SEQ ID NO: 19876 - DNA, 25 bp, Artificial
  Probe
tttgatgctttaatggtggattccc

SEQ ID NO: 19877 - DNA, 25 bp, Artificial
  Probe
cctctatgcactctctatcaaggat

SEQ ID NO: 19878 - DNA, 25 bp, Artificial
  Probe
atttcagtgtccaatttccagatgc

SEQ ID NO: 19879 - DNA, 25 bp, Artificial
  Probe
tatttgatgctttaatggtggattc

SEQ ID NO: 19880 - DNA, 25 bp, Artificial
  Probe
tgtccactctcacttaaggcaataa

SEQ ID NO: 19881 - DNA, 25 bp, Artificial
  Probe
accacctctatgcactctctatcaa

SEQ ID NO: 19882 - DNA, 25 bp, Artificial
  Probe
aaccacctctatgcactctctatca

SEQ ID NO: 19883 - DNA, 25 bp, Artificial
  Probe
tgaaccacctctatgcactctctat

SEQ ID NO: 19884 - DNA, 25 bp, Artificial
  Probe
ctgtccactctcacttaaggcaata

SEQ ID NO: 19885 - DNA, 25 bp, Artificial
  Probe
ctctctatcaaggatggagtgatgg

SEQ ID NO: 19886 - DNA, 25 bp, Artificial
  Probe
gtccactctcacttaaggcaataag

SEQ ID NO: 19887 - DNA, 25 bp, Artificial
  Probe
cttccgaatcacagcagtagattgt

SEQ ID NO: 19888 - DNA, 25 bp, Artificial
  Probe
acctctatgcactctctatcaagga

SEQ ID NO: 19889 - DNA, 25 bp, Artificial
  Probe
cacctctatgcactctctatcaagg

SEQ ID NO: 19890 - DNA, 25 bp, Artificial
  Probe
ctctatcaaggatggagtgatggtg

SEQ ID NO: 19891 - DNA, 25 bp, Artificial
  Probe
tctctatcaaggatggagtgatggt

SEQ ID NO: 19892 - DNA, 25 bp, Artificial
  Probe
attagttggtatctgagttctctgc

SEQ ID NO: 19893 - DNA, 25 bp, Artificial
  Probe
ttagttggtatctgagttctctgct

SEQ ID NO: 19894 - DNA, 25 bp, Artificial
  Probe
tatgctcaggaattagttggtatct

SEQ ID NO: 19895 - DNA, 25 bp, Artificial
  Probe
tctatgctcaggaattagttggtat

SEQ ID NO: 19896 - DNA, 25 bp, Artificial
  Probe
atctatgctcaggaattagttggta

SEQ ID NO: 19897 - DNA, 25 bp, Artificial
  Probe
tatctatgctcaggaattagttggt

SEQ ID NO: 19898 - DNA, 25 bp, Artificial
  Probe
tggttatctatgctcaggaattagt

SEQ ID NO: 19899 - DNA, 25 bp, Artificial
  Probe
ctatgctcaggaattagttggtatc

SEQ ID NO: 19900 - DNA, 25 bp, Artificial
  Probe
aattctattataggagcggcttgac

SEQ ID NO: 19901 - DNA, 25 bp, Artificial
  Probe
ttctattataggagcggcttgacta

SEQ ID NO: 19902 - DNA, 25 bp, Artificial
  Probe
aggaattagttggtatctgagttct

SEQ ID NO: 19903 - DNA, 25 bp, Artificial
  Probe
ggaattagttggtatctgagttctc

SEQ ID NO: 19904 - DNA, 25 bp, Artificial
  Probe
attctattataggagcggcttgact

SEQ ID NO: 19905 - DNA, 25 bp, Artificial
  Probe
tctattataggagcggcttgactac

SEQ ID NO: 19906 - DNA, 25 bp, Artificial
  Probe
ttatctatgctcaggaattagttgg

SEQ ID NO: 19907 - DNA, 25 bp, Artificial
  Probe
ggttatctatgctcaggaattagtt

SEQ ID NO: 19908 - DNA, 25 bp, Artificial
  Probe
ttggttatctatgctcaggaattag

SEQ ID NO: 19909 - DNA, 25 bp, Artificial
  Probe
aattagttggtatctgagttctctg

SEQ ID NO: 19910 - DNA, 25 bp, Artificial
  Probe
atgctcaggaattagttggtatctg

SEQ ID NO: 19911 - DNA, 25 bp, Artificial
  Probe
tagttggtatctgagttctctgctc

SEQ ID NO: 19912 - DNA, 25 bp, Artificial
  Probe
caggaattagttggtatctgagttc

SEQ ID NO: 19913 - DNA, 25 bp, Artificial
  Probe
gaattagttggtatctgagttctct

SEQ ID NO: 19914 - DNA, 25 bp, Artificial
  Probe
cctatgctgtggattagtgttcatg

SEQ ID NO: 19915 - DNA, 25 bp, Artificial
  Probe
ttggtatctgagttctctgctcttg

SEQ ID NO: 19916 - DNA, 25 bp, Artificial
  Probe
gttggtatctgagttctctgctctt

SEQ ID NO: 19917 - DNA, 25 bp, Artificial
  Probe
gttatctatgctcaggaattagttg

SEQ ID NO: 19918 - DNA, 25 bp, Artificial
  Probe
ctattataggagcggcttgactacg

SEQ ID NO: 19919 - DNA, 25 bp, Artificial
  Probe
ctatgctgtggattagtgttcatgc

SEQ ID NO: 19920 - DNA, 25 bp, Artificial
  Probe
attcttcttcatcctttgtcatcac

SEQ ID NO: 19921 - DNA, 25 bp, Artificial
  Probe
ggaatttggttatctatgctcagga

SEQ ID NO: 19922 - DNA, 25 bp, Artificial
  Probe
tggaatttggttatctatgctcagg

SEQ ID NO: 19923 - DNA, 25 bp, Artificial
  Probe
cctggaatttggttatctatgctca

SEQ ID NO: 19924 - DNA, 25 bp, Artificial
  Probe
gattcttcttcatcctttgtcatca

SEQ ID NO: 19925 - DNA, 25 bp, Artificial
  Probe
ggatagcttctgccattacaagatg

SEQ ID NO: 19926 - DNA, 25 bp, Artificial
  Probe
aggatagcttctgccattacaagat

SEQ ID NO: 19927 - DNA, 25 bp, Artificial
  Probe
tatgctgtggattagtgttcatgct

SEQ ID NO: 19928 - DNA, 25 bp, Artificial
  Probe
gaatttggttatctatgctcaggaa

SEQ ID NO: 19929 - DNA, 25 bp, Artificial
  Probe
aaattctattataggagcggcttga

SEQ ID NO: 19930 - DNA, 25 bp, Artificial
  Probe
ccctggaatttggttatctatgctc

SEQ ID NO: 19931 - DNA, 25 bp, Artificial
  Probe
agttggtatctgagttctctgctct

SEQ ID NO: 19932 - DNA, 25 bp, Artificial
  Probe
agattcttcttcatcctttgtcatc

SEQ ID NO: 19933 - DNA, 25 bp, Artificial
  Probe
tagacaaacacagtgggtaaacttt

SEQ ID NO: 19934 - DNA, 25 bp, Artificial
  Probe
ttagacaaacacagtgggtaaactt

SEQ ID NO: 19935 - DNA, 25 bp, Artificial
  Probe
tctaaattctattataggagcggct

SEQ ID NO: 19936 - DNA, 25 bp, Artificial
  Probe
tcatcctttgtcatcacagagattt

SEQ ID NO: 19937 - DNA, 25 bp, Artificial
  Probe
tcacaccaccactctaaatataaca

SEQ ID NO: 19938 - DNA, 25 bp, Artificial
  Probe
cgtttcacaccaccactctaaatat

SEQ ID NO: 19939 - DNA, 25 bp, Artificial
  Probe
cacaccaccactctaaatataacaa

SEQ ID NO: 19940 - DNA, 25 bp, Artificial
  Probe
ttcacaccaccactctaaatataac

SEQ ID NO: 19941 - DNA, 25 bp, Artificial
  Probe
gtttcacaccaccactctaaatata

SEQ ID NO: 19942 - DNA, 25 bp, Artificial
  Probe
caccactctaaatataacaaacagc

SEQ ID NO: 19943 - DNA, 25 bp, Artificial
  Probe
accaccactctaaatataacaaaca

SEQ ID NO: 19944 - DNA, 25 bp, Artificial
  Probe
acaccaccactctaaatataacaaa

SEQ ID NO: 19945 - DNA, 25 bp, Artificial
  Probe
caccaccactctaaatataacaaac

SEQ ID NO: 19946 - DNA, 25 bp, Artificial
  Probe
tttcacaccaccactctaaatataa

SEQ ID NO: 19947 - DNA, 25 bp, Artificial
  Probe
ccaccactctaaatataacaaacag

SEQ ID NO: 19948 - DNA, 25 bp, Artificial
  Probe
taggcagtcgatttacaattacttg

SEQ ID NO: 19949 - DNA, 25 bp, Artificial
  Probe
accactctaaatataacaaacagct

SEQ ID NO: 19950 - DNA, 25 bp, Artificial
  Probe
aggcagtcgatttacaattacttgg

SEQ ID NO: 19951 - DNA, 25 bp, Artificial
  Probe
gcgtttcacaccaccactctaaata

SEQ ID NO: 19952 - DNA, 25 bp, Artificial
  Probe
ataggcagtcgatttacaattactt

SEQ ID NO: 19953 - DNA, 25 bp, Artificial
  Probe
tataacaaacagctttaaatgcctg

SEQ ID NO: 19954 - DNA, 25 bp, Artificial
  Probe
atataacaaacagctttaaatgcct

SEQ ID NO: 19955 - DNA, 25 bp, Artificial
  Probe
ccactctaaatataacaaacagctt

SEQ ID NO: 19956 - DNA, 25 bp, Artificial
  Probe
agctttaaatgcctgtcaaagaatc

SEQ ID NO: 19957 - DNA, 25 bp, Artificial
  Probe
cagctttaaatgcctgtcaaagaat

SEQ ID NO: 19958 - DNA, 25 bp, Artificial
  Probe
aaagagcccatactgatatcgcatt

SEQ ID NO: 19959 - DNA, 25 bp, Artificial
  Probe
ctttaaatgcctgtcaaagaatccc

SEQ ID NO: 19960 - DNA, 25 bp, Artificial
  Probe
ctataggcagtcgatttacaattac

SEQ ID NO: 19961 - DNA, 25 bp, Artificial
  Probe
tataggcagtcgatttacaattact

SEQ ID NO: 19962 - DNA, 25 bp, Artificial
  Probe
gctttaaatgcctgtcaaagaatcc

SEQ ID NO: 19963 - DNA, 25 bp, Artificial
  Probe
aagagcccatactgatatcgcattc

SEQ ID NO: 19964 - DNA, 25 bp, Artificial
  Probe
ggcagtcgatttacaattacttggc

SEQ ID NO: 19965 - DNA, 25 bp, Artificial
  Probe
aatataacaaacagctttaaatgcc

SEQ ID NO: 19966 - DNA, 25 bp, Artificial
  Probe
caacttggcttataacgctaaaaga

SEQ ID NO: 19967 - DNA, 25 bp, Artificial
  Probe
aacttggcttataacgctaaaagag

SEQ ID NO: 19968 - DNA, 25 bp, Artificial
  Probe
ctcaagagcataagaaaactccagg

SEQ ID NO: 19969 - DNA, 25 bp, Artificial
  Probe
cctcaagagcataagaaaactccag

SEQ ID NO: 19970 - DNA, 25 bp, Artificial
  Probe
gcccatactgatatcgcattcctac

SEQ ID NO: 19971 - DNA, 25 bp, Artificial
  Probe
acctcaagagcataagaaaactcca

SEQ ID NO: 19972 - DNA, 25 bp, Artificial
  Probe
agcccatactgatatcgcattccta

SEQ ID NO: 19973 - DNA, 25 bp, Artificial
  Probe
cgatttacaccgtcatgattggaaa

SEQ ID NO: 19974 - DNA, 25 bp, Artificial
  Probe
tttaaatgcctgtcaaagaatcccc

SEQ ID NO: 19975 - DNA, 25 bp, Artificial
  Probe
tcaagagcataagaaaactccaggg

SEQ ID NO: 19976 - DNA, 25 bp, Artificial
  Probe
cagtcgatttacaattacttggccg

SEQ ID NO: 19977 - DNA, 25 bp, Artificial
  Probe
ctaaaagagcccatactgatatcgc

SEQ ID NO: 19978 - DNA, 25 bp, Artificial
  Probe
tataacgctaaaagagcccatactg

SEQ ID NO: 19979 - DNA, 25 bp, Artificial
  Probe
ccaacttggcttataacgctaaaag

SEQ ID NO: 19980 - DNA, 25 bp, Artificial
  Probe
gcagtcgatttacaattacttggcc

SEQ ID NO: 19981 - DNA, 25 bp, Artificial
  Probe
taaaagagcccatactgatatcgca

SEQ ID NO: 19982 - DNA, 25 bp, Artificial
  Probe
tataactataacttccaggtctgcg

SEQ ID NO: 19983 - DNA, 25 bp, Artificial
  Probe
aggatgatctcaacaatacacaagt

SEQ ID NO: 19984 - DNA, 25 bp, Artificial
  Probe
ataactataacttccaggtctgcgt

SEQ ID NO: 19985 - DNA, 25 bp, Artificial
  Probe
ggatgatctcaacaatacacaagtc

SEQ ID NO: 19986 - DNA, 25 bp, Artificial
  Probe
atgatctcaacaatacacaagtctg

SEQ ID NO: 19987 - DNA, 25 bp, Artificial
  Probe
gatgatctcaacaatacacaagtct

SEQ ID NO: 19988 - DNA, 25 bp, Artificial
  Probe
acagaatccacacagcagaagataa

SEQ ID NO: 19989 - DNA, 25 bp, Artificial
  Probe
taggatgatctcaacaatacacaag

SEQ ID NO: 19990 - DNA, 25 bp, Artificial
  Probe
ctaggatgatctcaacaatacacaa

SEQ ID NO: 19991 - DNA, 25 bp, Artificial
  Probe
taactataacttccaggtctgcgtg

SEQ ID NO: 19992 - DNA, 25 bp, Artificial
  Probe
tgatctcaacaatacacaagtctgt

SEQ ID NO: 19993 - DNA, 25 bp, Artificial
  Probe
gacagaatccacacagcagaagata

SEQ ID NO: 19994 - DNA, 25 bp, Artificial
  Probe
aagcacctcaataaagacataacct

SEQ ID NO: 19995 - DNA, 25 bp, Artificial
  Probe
aaagcacctcaataaagacataacc

SEQ ID NO: 19996 - DNA, 25 bp, Artificial
  Probe
agcacctcaataaagacataacctc

SEQ ID NO: 19997 - DNA, 25 bp, Artificial
  Probe
cagaatccacacagcagaagataaa

SEQ ID NO: 19998 - DNA, 25 bp, Artificial
  Probe
ttataactataacttccaggtctgc

SEQ ID NO: 19999 - DNA, 25 bp, Artificial
  Probe
ataaagtcataaagggcaaggatct

SEQ ID NO: 20000 - DNA, 25 bp, Artificial
  Probe
taaagtcataaagggcaaggatctg

SEQ ID NO: 20001 - DNA, 25 bp, Artificial
  Probe
agtccaagaaagataagatcagcat

SEQ ID NO: 20002 - DNA, 25 bp, Artificial
  Probe
tgtaagggaagagaaaccactgtta

SEQ ID NO: 20003 - DNA, 25 bp, Artificial
  Probe
gagattatcggtggtgtggagtcta

SEQ ID NO: 20004 - DNA, 25 bp, Artificial
  Probe
cagtccaagaaagataagatcagca

SEQ ID NO: 20005 - DNA, 25 bp, Artificial
  Probe
aataaagtcataaagggcaaggatc

SEQ ID NO: 20006 - DNA, 25 bp, Artificial
  Probe
ttaataaagtcataaagggcaagga

SEQ ID NO: 20007 - DNA, 25 bp, Artificial
  Probe
aacagagaatcatggataaagaggc

SEQ ID NO: 20008 - DNA, 25 bp, Artificial
  Probe
ggcagtccaagaaagataagatcag

SEQ ID NO: 20009 - DNA, 25 bp, Artificial
  Probe
taataaagtcataaagggcaaggat

SEQ ID NO: 20010 - DNA, 25 bp, Artificial
  Probe
agattatcggtggtgtggagtctag

SEQ ID NO: 20011 - DNA, 25 bp, Artificial
  Probe
tgtgccctggattaataaagtcata

SEQ ID NO: 20012 - DNA, 25 bp, Artificial
  Probe
tatgtgccctggattaataaagtca

SEQ ID NO: 20013 - DNA, 25 bp, Artificial
  Probe
taagggaagagaaaccactgttacc

SEQ ID NO: 20014 - DNA, 25 bp, Artificial
  Probe
gaggtgaaacagagaatcatggata

SEQ ID NO: 20015 - DNA, 25 bp, Artificial
  Probe
aggtgaaacagagaatcatggataa

SEQ ID NO: 20016 - DNA, 25 bp, Artificial
  Probe
gtccaagaaagataagatcagcata

SEQ ID NO: 20017 - DNA, 25 bp, Artificial
  Probe
atgtgccctggattaataaagtcat

SEQ ID NO: 20018 - DNA, 25 bp, Artificial
  Probe
gatcaccactgagagaggttacaag

SEQ ID NO: 20019 - DNA, 25 bp, Artificial
  Probe
aaacagagaatcatggataaagagg

SEQ ID NO: 20020 - DNA, 25 bp, Artificial
  Probe
gcagtccaagaaagataagatcagc

SEQ ID NO: 20021 - DNA, 25 bp, Artificial
  Probe
gtgccctggattaataaagtcataa

SEQ ID NO: 20022 - DNA, 25 bp, Artificial
  Probe
ggtgaaacagagaatcatggataaa

SEQ ID NO: 20023 - DNA, 25 bp, Artificial
  Probe
agacagaatccacacagcagaagat

SEQ ID NO: 20024 - DNA, 25 bp, Artificial
  Probe
atatgtgccctggattaataaagtc

SEQ ID NO: 20025 - DNA, 25 bp, Artificial
  Probe
ctgtaagggaagagaaaccactgtt

SEQ ID NO: 20026 - DNA, 25 bp, Artificial
  Probe
aagacagaatccacacagcagaaga

SEQ ID NO: 20027 - DNA, 25 bp, Artificial
  Probe
attcaacatgtaccttactcgagag

SEQ ID NO: 20028 - DNA, 25 bp, Artificial
  Probe
tattcaacatgtaccttactcgaga

SEQ ID NO: 20029 - DNA, 25 bp, Artificial
  Probe
ctattcaacatgtaccttactcgag

SEQ ID NO: 20030 - DNA, 25 bp, Artificial
  Probe
ttcaacatgtaccttactcgagagc

SEQ ID NO: 20031 - DNA, 25 bp, Artificial
  Probe
tcaacatgtaccttactcgagagcg

SEQ ID NO: 20032 - DNA, 25 bp, Artificial
  Probe
caacatgtaccttactcgagagcgg

SEQ ID NO: 20033 - DNA, 25 bp, Artificial
  Probe
caactcaacttacttgtatgaacca

SEQ ID NO: 20034 - DNA, 25 bp, Artificial
  Probe
aactcaacttacttgtatgaaccat

SEQ ID NO: 20035 - DNA, 25 bp, Artificial
  Probe
aactattctctgttcctctggttcg

SEQ ID NO: 20036 - DNA, 25 bp, Artificial
  Probe
actcaacttacttgtatgaaccatg

SEQ ID NO: 20037 - DNA, 25 bp, Artificial
  Probe
acttacttgtatgaaccatgattgt

SEQ ID NO: 20038 - DNA, 25 bp, Artificial
  Probe
ctcaacttacttgtatgaaccatga

SEQ ID NO: 20039 - DNA, 25 bp, Artificial
  Probe
tgtatgaaccatgattgttaaggaa

SEQ ID NO: 20040 - DNA, 25 bp, Artificial
  Probe
ttgtatgaaccatgattgttaagga

SEQ ID NO: 20041 - DNA, 25 bp, Artificial
  Probe
tgacactaagccacatcacacatta

SEQ ID NO: 20042 - DNA, 25 bp, Artificial
  Probe
gacactaagccacatcacacattag

SEQ ID NO: 20043 - DNA, 25 bp, Artificial
  Probe
cttgtatgaaccatgattgttaagg

SEQ ID NO: 20044 - DNA, 25 bp, Artificial
  Probe
tcattccctacaactcaacttactt

SEQ ID NO: 20045 - DNA, 25 bp, Artificial
  Probe
ttcattccctacaactcaacttact

SEQ ID NO: 20046 - DNA, 25 bp, Artificial
  Probe
acttcattccctacaactcaactta

SEQ ID NO: 20047 - DNA, 25 bp, Artificial
  Probe
tacttcattccctacaactcaactt

SEQ ID NO: 20048 - DNA, 25 bp, Artificial
  Probe
cttcattccctacaactcaacttac

SEQ ID NO: 20049 - DNA, 25 bp, Artificial
  Probe
atacttcattccctacaactcaact

SEQ ID NO: 20050 - DNA, 25 bp, Artificial
  Probe
ctctgtgatgcctctttctttatga

SEQ ID NO: 20051 - DNA, 25 bp, Artificial
  Probe
tcaacttacttgtatgaaccatgat

SEQ ID NO: 20052 - DNA, 25 bp, Artificial
  Probe
ctgtgatgcctctttctttatgaag

SEQ ID NO: 20053 - DNA, 25 bp, Artificial
  Probe
tctgtgatgcctctttctttatgaa

SEQ ID NO: 20054 - DNA, 25 bp, Artificial
  Probe
aaactattctctgttcctctggttc

SEQ ID NO: 20055 - DNA, 25 bp, Artificial
  Probe
gaaactattctctgttcctctggtt

SEQ ID NO: 20056 - DNA, 25 bp, Artificial
  Probe
aaagcactaaacattgtaggtctcc

SEQ ID NO: 20057 - DNA, 25 bp, Artificial
  Probe
cattccctacaactcaacttacttg

SEQ ID NO: 20058 - DNA, 25 bp, Artificial
  Probe
aacttacttgtatgaaccatgattg

SEQ ID NO: 20059 - DNA, 25 bp, Artificial
  Probe
taaagcactaaacattgtaggtctc

SEQ ID NO: 20060 - DNA, 25 bp, Artificial
  Probe
ctaaagcactaaacattgtaggtct

SEQ ID NO: 20061 - DNA, 25 bp, Artificial
  Probe
acttgtatgaaccatgattgttaag

SEQ ID NO: 20062 - DNA, 25 bp, Artificial
  Probe
cttacttgtatgaaccatgattgtt

SEQ ID NO: 20063 - DNA, 25 bp, Artificial
  Probe
gtcctaacactgtatacttcattcc

SEQ ID NO: 20064 - DNA, 25 bp, Artificial
  Probe
caacttacttgtatgaaccatgatt

SEQ ID NO: 20065 - DNA, 25 bp, Artificial
  Probe
aactacccttcaatcctttaccctc

SEQ ID NO: 20066 - DNA, 25 bp, Artificial
  Probe
tatacttcattccctacaactcaac

SEQ ID NO: 20067 - DNA, 25 bp, Artificial
  Probe
cctgtcctaacactgtatacttcat

SEQ ID NO: 20068 - DNA, 25 bp, Artificial
  Probe
tcctgtcctaacactgtatacttca

SEQ ID NO: 20069 - DNA, 25 bp, Artificial
  Probe
gctctgtgatgcctctttctttatg

SEQ ID NO: 20070 - DNA, 25 bp, Artificial
  Probe
cgtttgtgtggaaggagatattcag

SEQ ID NO: 20071 - DNA, 25 bp, Artificial
  Probe
gaactacccttcaatcctttaccct

SEQ ID NO: 20072 - DNA, 25 bp, Artificial
  Probe
atcctgtcctaacactgtatacttc

SEQ ID NO: 20073 - DNA, 25 bp, Artificial
  Probe
gaatcctgtcctaacactgtatact

SEQ ID NO: 20074 - DNA, 25 bp, Artificial
  Probe
gtttgtgtggaaggagatattcagc

SEQ ID NO: 20075 - DNA, 25 bp, Artificial
  Probe
ctgacactaagccacatcacacatt

SEQ ID NO: 20076 - DNA, 25 bp, Artificial
  Probe
aatcctgtcctaacactgtatactt

SEQ ID NO: 20077 - DNA, 25 bp, Artificial
  Probe
ctgcccacatactaagtgagattaa

SEQ ID NO: 20078 - DNA, 25 bp, Artificial
  Probe
ataacattagtcttcaccagaggag

SEQ ID NO: 20079 - DNA, 25 bp, Artificial
  Probe
aattccaccttaacatccacagaga

SEQ ID NO: 20080 - DNA, 25 bp, Artificial
  Probe
tataacattagtcttcaccagagga

SEQ ID NO: 20081 - DNA, 25 bp, Artificial
  Probe
taacattagtcttcaccagaggagc

SEQ ID NO: 20082 - DNA, 25 bp, Artificial
  Probe
attccaccttaacatccacagagac

SEQ ID NO: 20083 - DNA, 25 bp, Artificial
  Probe
aagtgattcaacattgttcaactgt

SEQ ID NO: 20084 - DNA, 25 bp, Artificial
  Probe
ggattctcatttaacatctgggaac

SEQ ID NO: 20085 - DNA, 25 bp, Artificial
  Probe
aggattctcatttaacatctgggaa

SEQ ID NO: 20086 - DNA, 25 bp, Artificial
  Probe
ttataacattagtcttcaccagagg

SEQ ID NO: 20087 - DNA, 25 bp, Artificial
  Probe
gattctcatttaacatctgggaact

SEQ ID NO: 20088 - DNA, 25 bp, Artificial
  Probe
aaagtaggaagtagtgactgcttaa

SEQ ID NO: 20089 - DNA, 25 bp, Artificial
  Probe
gaggattctcatttaacatctggga

SEQ ID NO: 20090 - DNA, 25 bp, Artificial
  Probe
tttctgacttcaaagccttgtttct

SEQ ID NO: 20091 - DNA, 25 bp, Artificial
  Probe
aagtaggaagtagtgactgcttaag

SEQ ID NO: 20092 - DNA, 25 bp, Artificial
  Probe
tctcttgaattccaccttaacatcc

SEQ ID NO: 20093 - DNA, 25 bp, Artificial
  Probe
cctctcttgaattccaccttaacat

SEQ ID NO: 20094 - DNA, 25 bp, Artificial
  Probe
ctctcttgaattccaccttaacatc

SEQ ID NO: 20095 - DNA, 25 bp, Artificial
  Probe
ctcttgaattccaccttaacatcca

SEQ ID NO: 20096 - DNA, 25 bp, Artificial
  Probe
tcttgaattccaccttaacatccac

SEQ ID NO: 20097 - DNA, 25 bp, Artificial
  Probe
ttgaattccaccttaacatccacag

SEQ ID NO: 20098 - DNA, 25 bp, Artificial
  Probe
cttgaattccaccttaacatccaca

SEQ ID NO: 20099 - DNA, 25 bp, Artificial
  Probe
ttctgacttcaaagccttgtttctg

SEQ ID NO: 20100 - DNA, 25 bp, Artificial
  Probe
agtaggaagtagtgactgcttaagg

SEQ ID NO: 20101 - DNA, 25 bp, Artificial
  Probe
gaattccaccttaacatccacagag

SEQ ID NO: 20102 - DNA, 25 bp, Artificial
  Probe
aaagtgattcaacattgttcaactg

SEQ ID NO: 20103 - DNA, 25 bp, Artificial
  Probe
tgaattccaccttaacatccacaga

SEQ ID NO: 20104 - DNA, 25 bp, Artificial
  Probe
agtgattcaacattgttcaactgtt

SEQ ID NO: 20105 - DNA, 25 bp, Artificial
  Probe
ttccaccttaacatccacagagacc

SEQ ID NO: 20106 - DNA, 25 bp, Artificial
  Probe
tctgacttcaaagccttgtttctga

SEQ ID NO: 20107 - DNA, 25 bp, Artificial
  Probe
aacattagtcttcaccagaggagct

SEQ ID NO: 20108 - DNA, 25 bp, Artificial
  Probe
taaagtgattcaacattgttcaact

SEQ ID NO: 20109 - DNA, 25 bp, Artificial
  Probe
gcatattttctgacttcaaagcctt

SEQ ID NO: 20110 - DNA, 25 bp, Artificial
  Probe
tttctcaaagtcggaactgtgaagg

SEQ ID NO: 20111 - DNA, 25 bp, Artificial
  Probe
agcatattttctgacttcaaagcct

SEQ ID NO: 20112 - DNA, 25 bp, Artificial
  Probe
aagcatattttctgacttcaaagcc

SEQ ID NO: 20113 - DNA, 25 bp, Artificial
  Probe
attttctgacttcaaagccttgttt

SEQ ID NO: 20114 - DNA, 25 bp, Artificial
  Probe
ccaccttaacatccacagagaccag

SEQ ID NO: 20115 - DNA, 25 bp, Artificial
  Probe
ctttctcaaagtcggaactgtgaag

SEQ ID NO: 20116 - DNA, 25 bp, Artificial
  Probe
ttttctgacttcaaagccttgtttc

SEQ ID NO: 20117 - DNA, 25 bp, Artificial
  Probe
tattttctgacttcaaagccttgtt

SEQ ID NO: 20118 - DNA, 25 bp, Artificial
  Probe
aaagcatattttctgacttcaaagc

SEQ ID NO: 20119 - DNA, 25 bp, Artificial
  Probe
agccttgtttctgaaaattaagcat

SEQ ID NO: 20120 - DNA, 25 bp, Artificial
  Probe
aagccttgtttctgaaaattaagca

SEQ ID NO: 20121 - DNA, 25 bp, Artificial
  Probe
atattttctgacttcaaagccttgt

SEQ ID NO: 20122 - DNA, 25 bp, Artificial
  Probe
aaaagtaggaagtagtgactgctta

SEQ ID NO: 20123 - DNA, 25 bp, Artificial
  Probe
gaacaagttgaggaacagtacgaag

SEQ ID NO: 20124 - DNA, 25 bp, Artificial
  Probe
aacaagttgaggaacagtacgaaga

SEQ ID NO: 20125 - DNA, 25 bp, Artificial
  Probe
tgaacaagttgaggaacagtacgaa

SEQ ID NO: 20126 - DNA, 25 bp, Artificial
  Probe
acaagttgaggaacagtacgaagag

SEQ ID NO: 20127 - DNA, 25 bp, Artificial
  Probe
aagtagacttcgatgatatccagaa

SEQ ID NO: 20128 - DNA, 25 bp, Artificial
  Probe
ttgaggaacagtacgaagaggaaga

SEQ ID NO: 20129 - DNA, 25 bp, Artificial
  Probe
gttgaggaacagtacgaagaggaag

SEQ ID NO: 20130 - DNA, 25 bp, Artificial
  Probe
gagaaaccaagacccaaacttactg

SEQ ID NO: 20131 - DNA, 25 bp, Artificial
  Probe
caagttgaggaacagtacgaagagg

SEQ ID NO: 20132 - DNA, 25 bp, Artificial
  Probe
tgaggaacagtacgaagaggaagag

SEQ ID NO: 20133 - DNA, 25 bp, Artificial
  Probe
atgatatccagaagaagcgtcagaa

SEQ ID NO: 20134 - DNA, 25 bp, Artificial
  Probe
agttgaggaacagtacgaagaggaa

SEQ ID NO: 20135 - DNA, 25 bp, Artificial
  Probe
aagttgaggaacagtacgaagagga

SEQ ID NO: 20136 - DNA, 25 bp, Artificial
  Probe
ctgaacaagttgaggaacagtacga

SEQ ID NO: 20137 - DNA, 25 bp, Artificial
  Probe
gaggagaaaccaagacccaaactta

SEQ ID NO: 20138 - DNA, 25 bp, Artificial
  Probe
actatgtctgacgaggaaactgaac

SEQ ID NO: 20139 - DNA, 25 bp, Artificial
  Probe
cactatgtctgacgaggaaactgaa

SEQ ID NO: 20140 - DNA, 25 bp, Artificial
  Probe
gatgatatccagaagaagcgtcaga

SEQ ID NO: 20141 - DNA, 25 bp, Artificial
  Probe
caagacccaaacttactgctcctaa

SEQ ID NO: 20142 - DNA, 25 bp, Artificial
  Probe
aggagagaaagtagacttcgatgat

SEQ ID NO: 20143 - DNA, 25 bp, Artificial
  Probe
tatgtctgacgaggaaactgaacaa

SEQ ID NO: 20144 - DNA, 25 bp, Artificial
  Probe
aaggagagaaagtagacttcgatga

SEQ ID NO: 20145 - DNA, 25 bp, Artificial
  Probe
ttcgatgatatccagaagaagcgtc

SEQ ID NO: 20146 - DNA, 25 bp, Artificial
  Probe
ggagagaaagtagacttcgatgata

SEQ ID NO: 20147 - DNA, 25 bp, Artificial
  Probe
ggagaaaccaagacccaaacttact

SEQ ID NO: 20148 - DNA, 25 bp, Artificial
  Probe
aggagaaaccaagacccaaacttac

SEQ ID NO: 20149 - DNA, 25 bp, Artificial
  Probe
gacccaaacttactgctcctaagat

SEQ ID NO: 20150 - DNA, 25 bp, Artificial
  Probe
tgatatccagaagaagcgtcagaac

SEQ ID NO: 20151 - DNA, 25 bp, Artificial
  Probe
ctatgtctgacgaggaaactgaaca

SEQ ID NO: 20152 - DNA, 25 bp, Artificial
  Probe
aagacccaaacttactgctcctaag

SEQ ID NO: 20153 - DNA, 25 bp, Artificial
  Probe
gaacagtacgaagaggaagaggagg

SEQ ID NO: 20154 - DNA, 25 bp, Artificial
  Probe
ggaacagtacgaagaggaagaggag

SEQ ID NO: 20155 - DNA, 25 bp, Artificial
  Probe
gaggaacagtacgaagaggaagagg

SEQ ID NO: 20156 - DNA, 25 bp, Artificial
  Probe
acccaaacttactgctcctaagatc

SEQ ID NO: 20157 - DNA, 25 bp, Artificial
  Probe
aaagtagacttcgatgatatccaga

SEQ ID NO: 20158 - DNA, 25 bp, Artificial
  Probe
agaaagtagacttcgatgatatcca

SEQ ID NO: 20159 - DNA, 25 bp, Artificial
  Probe
gaaagtagacttcgatgatatccag

SEQ ID NO: 20160 - DNA, 25 bp, Artificial
  Probe
aggaacagtacgaagaggaagagga

SEQ ID NO: 20161 - DNA, 25 bp, Artificial
  Probe
gagaaagtagacttcgatgatatcc

SEQ ID NO: 20162 - DNA, 25 bp, Artificial
  Probe
aaaccaagacccaaacttactgctc

SEQ ID NO: 20163 - DNA, 25 bp, Artificial
  Probe
gaaaccaagacccaaacttactgct

SEQ ID NO: 20164 - DNA, 25 bp, Artificial
  Probe
agaaaccaagacccaaacttactgc

SEQ ID NO: 20165 - DNA, 25 bp, Artificial
  Probe
agacttcgatgatatccagaagaag

SEQ ID NO: 20166 - DNA, 25 bp, Artificial
  Probe
agacccaaacttactgctcctaaga

SEQ ID NO: 20167 - DNA, 25 bp, Artificial
  Probe
cgatgatatccagaagaagcgtcag

SEQ ID NO: 20168 - DNA, 25 bp, Artificial
  Probe
tactctatcgatgactgtgattgac

SEQ ID NO: 20169 - DNA, 25 bp, Artificial
  Probe
gtactctatcgatgactgtgattga

SEQ ID NO: 20170 - DNA, 25 bp, Artificial
  Probe
ctctatcgatgactgtgattgactc

SEQ ID NO: 20171 - DNA, 25 bp, Artificial
  Probe
cgtactctatcgatgactgtgattg

SEQ ID NO: 20172 - DNA, 25 bp, Artificial
  Probe
actctatcgatgactgtgattgact

SEQ ID NO: 20173 - DNA, 25 bp, Artificial
  Probe
agtggaaacaagtgcgtactctatc

SEQ ID NO: 20174 - DNA, 25 bp, Artificial
  Probe
cagtggaaacaagtgcgtactctat

SEQ ID NO: 20175 - DNA, 25 bp, Artificial
  Probe
ctatgaggagggtcgggaagaattt

SEQ ID NO: 20176 - DNA, 25 bp, Artificial
  Probe
gcgtactctatcgatgactgtgatt

SEQ ID NO: 20177 - DNA, 25 bp, Artificial
  Probe
tgcgtactctatcgatgactgtgat

SEQ ID NO: 20178 - DNA, 25 bp, Artificial
  Probe
tatgaggagggtcgggaagaatttg

SEQ ID NO: 20179 - DNA, 25 bp, Artificial
  Probe
tcagtggaaacaagtgcgtactcta

SEQ ID NO: 20180 - DNA, 25 bp, Artificial
  Probe
aacaagtgcgtactctatcgatgac

SEQ ID NO: 20181 - DNA, 25 bp, Artificial
  Probe
gtggaaacaagtgcgtactctatcg

SEQ ID NO: 20182 - DNA, 25 bp, Artificial
  Probe
gtgcgtactctatcgatgactgtga

SEQ ID NO: 20183 - DNA, 25 bp, Artificial
  Probe
ggaagaatttgcgttttcagtggaa

SEQ ID NO: 20184 - DNA, 25 bp, Artificial
  Probe
caagtgcgtactctatcgatgactg

SEQ ID NO: 20185 - DNA, 25 bp, Artificial
  Probe
tctatcgatgactgtgattgactcg

SEQ ID NO: 20186 - DNA, 25 bp, Artificial
  Probe
actatgaggagggtcgggaagaatt

SEQ ID NO: 20187 - DNA, 25 bp, Artificial
  Probe
agtgcgtactctatcgatgactgtg

SEQ ID NO: 20188 - DNA, 25 bp, Artificial
  Probe
gaagaatttgcgttttcagtggaaa

SEQ ID NO: 20189 - DNA, 25 bp, Artificial
  Probe
aagtgcgtactctatcgatgactgt

SEQ ID NO: 20190 - DNA, 25 bp, Artificial
  Probe
acaagtgcgtactctatcgatgact

SEQ ID NO: 20191 - DNA, 25 bp, Artificial
  Probe
gaaacaagtgcgtactctatcgatg

SEQ ID NO: 20192 - DNA, 25 bp, Artificial
  Probe
tggaaacaagtgcgtactctatcga

SEQ ID NO: 20193 - DNA, 25 bp, Artificial
  Probe
tttcagtggaaacaagtgcgtactc

SEQ ID NO: 20194 - DNA, 25 bp, Artificial
  Probe
ttcagtggaaacaagtgcgtactct

SEQ ID NO: 20195 - DNA, 25 bp, Artificial
  Probe
aaacaagtgcgtactctatcgatga

SEQ ID NO: 20196 - DNA, 25 bp, Artificial
  Probe
aagaatttgcgttttcagtggaaac

SEQ ID NO: 20197 - DNA, 25 bp, Artificial
  Probe
aatttgcgttttcagtggaaacaag

SEQ ID NO: 20198 - DNA, 25 bp, Artificial
  Probe
gaatttgcgttttcagtggaaacaa

SEQ ID NO: 20199 - DNA, 25 bp, Artificial
  Probe
cactatgaggagggtcgggaagaat

SEQ ID NO: 20200 - DNA, 25 bp, Artificial
  Probe
ggaaacaagtgcgtactctatcgat

SEQ ID NO: 20201 - DNA, 25 bp, Artificial
  Probe
agaatttgcgttttcagtggaaaca

SEQ ID NO: 20202 - DNA, 25 bp, Artificial
  Probe
atttgcgttttcagtggaaacaagt

SEQ ID NO: 20203 - DNA, 25 bp, Artificial
  Probe
gggaagaatttgcgttttcagtgga

SEQ ID NO: 20204 - DNA, 25 bp, Artificial
  Probe
ttttcagtggaaacaagtgcgtact

SEQ ID NO: 20205 - DNA, 25 bp, Artificial
  Probe
gttttcagtggaaacaagtgcgtac

SEQ ID NO: 20206 - DNA, 25 bp, Artificial
  Probe
tcgggaagaatttgcgttttcagtg

SEQ ID NO: 20207 - DNA, 25 bp, Artificial
  Probe
gtcgggaagaatttgcgttttcagt

SEQ ID NO: 20208 - DNA, 25 bp, Artificial
  Probe
tttgcgttttcagtggaaacaagtg

SEQ ID NO: 20209 - DNA, 25 bp, Artificial
  Probe
tcgatgactgtgattgactcgatct

SEQ ID NO: 20210 - DNA, 25 bp, Artificial
  Probe
ggtcgggaagaatttgcgttttcag

SEQ ID NO: 20211 - DNA, 25 bp, Artificial
  Probe
ctatcgatgactgtgattgactcga

SEQ ID NO: 20212 - DNA, 25 bp, Artificial
  Probe
cgttttcagtggaaacaagtgcgta

SEQ ID NO: 20213 - DNA, 25 bp, Artificial
  Probe
gtataagaactgtcatcgtgtcaac

SEQ ID NO: 20214 - DNA, 25 bp, Artificial
  Probe
tataagaactgtcatcgtgtcaacc

SEQ ID NO: 20215 - DNA, 25 bp, Artificial
  Probe
ggtataagaactgtcatcgtgtcaa

SEQ ID NO: 20216 - DNA, 25 bp, Artificial
  Probe
ctggtataagaactgtcatcgtgtc

SEQ ID NO: 20217 - DNA, 25 bp, Artificial
  Probe
tggtataagaactgtcatcgtgtca

SEQ ID NO: 20218 - DNA, 25 bp, Artificial
  Probe
tgaaggtagaaggatacagtggaac

SEQ ID NO: 20219 - DNA, 25 bp, Artificial
  Probe
tctggtataagaactgtcatcgtgt

SEQ ID NO: 20220 - DNA, 25 bp, Artificial
  Probe
actatcacaatggtagatccttctc

SEQ ID NO: 20221 - DNA, 25 bp, Artificial
  Probe
ctatcacaatggtagatccttctct

SEQ ID NO: 20222 - DNA, 25 bp, Artificial
  Probe
gaactatcacaatggtagatccttc

SEQ ID NO: 20223 - DNA, 25 bp, Artificial
  Probe
aactatcacaatggtagatccttct

SEQ ID NO: 20224 - DNA, 25 bp, Artificial
  Probe
tgaactatcacaatggtagatcctt

SEQ ID NO: 20225 - DNA, 25 bp, Artificial
  Probe
atgaactatcacaatggtagatcct

SEQ ID NO: 20226 - DNA, 25 bp, Artificial
  Probe
ctgaaggtagaaggatacagtggaa

SEQ ID NO: 20227 - DNA, 25 bp, Artificial
  Probe
gaaggtagaaggatacagtggaacg

SEQ ID NO: 20228 - DNA, 25 bp, Artificial
  Probe
catgaactatcacaatggtagatcc

SEQ ID NO: 20229 - DNA, 25 bp, Artificial
  Probe
ttctctacctatgacaaggacacag

SEQ ID NO: 20230 - DNA, 25 bp, Artificial
  Probe
cttctctacctatgacaaggacaca

SEQ ID NO: 20231 - DNA, 25 bp, Artificial
  Probe
tacaagctgaaggtagaaggataca

SEQ ID NO: 20232 - DNA, 25 bp, Artificial
  Probe
tatgacaggttcagtgttggagatg

SEQ ID NO: 20233 - DNA, 25 bp, Artificial
  Probe
gtatgacaggttcagtgttggagat

SEQ ID NO: 20234 - DNA, 25 bp, Artificial
  Probe
ctacctatgacaaggacacagactc

SEQ ID NO: 20235 - DNA, 25 bp, Artificial
  Probe
ctctacctatgacaaggacacagac

SEQ ID NO: 20236 - DNA, 25 bp, Artificial
  Probe
tctctacctatgacaaggacacaga

SEQ ID NO: 20237 - DNA, 25 bp, Artificial
  Probe
tctacctatgacaaggacacagact

SEQ ID NO: 20238 - DNA, 25 bp, Artificial
  Probe
tagatccttctctacctatgacaag

SEQ ID NO: 20239 - DNA, 25 bp, Artificial
  Probe
tataaatggtgacaagactcaagca

SEQ ID NO: 20240 - DNA, 25 bp, Artificial
  Probe
ttctggtataagaactgtcatcgtg

SEQ ID NO: 20241 - DNA, 25 bp, Artificial
  Probe
tacctatgacaaggacacagactca

SEQ ID NO: 20242 - DNA, 25 bp, Artificial
  Probe
atataaatggtgacaagactcaagc

SEQ ID NO: 20243 - DNA, 25 bp, Artificial
  Probe
tatcacaatggtagatccttctcta

SEQ ID NO: 20244 - DNA, 25 bp, Artificial
  Probe
aaggtagaaggatacagtggaacgg

SEQ ID NO: 20245 - DNA, 25 bp, Artificial
  Probe
aagctgaaggtagaaggatacagtg

SEQ ID NO: 20246 - DNA, 25 bp, Artificial
  Probe
caagctgaaggtagaaggatacagt

SEQ ID NO: 20247 - DNA, 25 bp, Artificial
  Probe
acaagctgaaggtagaaggatacag

SEQ ID NO: 20248 - DNA, 25 bp, Artificial
  Probe
gtgtatgacaggttcagtgttggag

SEQ ID NO: 20249 - DNA, 25 bp, Artificial
  Probe
ctacaagctgaaggtagaaggatac

SEQ ID NO: 20250 - DNA, 25 bp, Artificial
  Probe
tgtatgacaggttcagtgttggaga

SEQ ID NO: 20251 - DNA, 25 bp, Artificial
  Probe
ataaatggtgacaagactcaagcac

SEQ ID NO: 20252 - DNA, 25 bp, Artificial
  Probe
gctgaaggtagaaggatacagtgga

SEQ ID NO: 20253 - DNA, 25 bp, Artificial
  Probe
ataagaactgtcatcgtgtcaaccc

SEQ ID NO: 20254 - DNA, 25 bp, Artificial
  Probe
gctacaagctgaaggtagaaggata

SEQ ID NO: 20255 - DNA, 25 bp, Artificial
  Probe
acctatgacaaggacacagactcag

SEQ ID NO: 20256 - DNA, 25 bp, Artificial
  Probe
tttctggtataagaactgtcatcgt

SEQ ID NO: 20257 - DNA, 25 bp, Artificial
  Probe
tgtgtatgacaggttcagtgttgga

SEQ ID NO: 20258 - DNA, 25 bp, Artificial
  Probe
ataactcagaatactcacaggaacc

SEQ ID NO: 20259 - DNA, 25 bp, Artificial
  Probe
cataactcagaatactcacaggaac

SEQ ID NO: 20260 - DNA, 25 bp, Artificial
  Probe
tcataactcagaatactcacaggaa

SEQ ID NO: 20261 - DNA, 25 bp, Artificial
  Probe
aactcagaatactcacaggaaccta

SEQ ID NO: 20262 - DNA, 25 bp, Artificial
  Probe
taactcagaatactcacaggaacct

SEQ ID NO: 20263 - DNA, 25 bp, Artificial
  Probe
agaatactcacaggaacctagacat

SEQ ID NO: 20264 - DNA, 25 bp, Artificial
  Probe
tgtgtggttaagtatgtatcaatgg

SEQ ID NO: 20265 - DNA, 25 bp, Artificial
  Probe
ttcataactcagaatactcacagga

SEQ ID NO: 20266 - DNA, 25 bp, Artificial
  Probe
ctcagaatactcacaggaacctaga

SEQ ID NO: 20267 - DNA, 25 bp, Artificial
  Probe
tcagaatactcacaggaacctagac

SEQ ID NO: 20268 - DNA, 25 bp, Artificial
  Probe
actcagaatactcacaggaacctag

SEQ ID NO: 20269 - DNA, 25 bp, Artificial
  Probe
cagaatactcacaggaacctagaca

SEQ ID NO: 20270 - DNA, 25 bp, Artificial
  Probe
ttgtatatgtaagaacttgtgtggt

SEQ ID NO: 20271 - DNA, 25 bp, Artificial
  Probe
gaatactcacaggaacctagacatg

SEQ ID NO: 20272 - DNA, 25 bp, Artificial
  Probe
aacaatgagaagaggtgtctgaatc

SEQ ID NO: 20273 - DNA, 25 bp, Artificial
  Probe
gaacaatgagaagaggtgtctgaat

SEQ ID NO: 20274 - DNA, 25 bp, Artificial
  Probe
catattacaagatgtgttggatggt

SEQ ID NO: 20275 - DNA, 25 bp, Artificial
  Probe
caggtactaatctcttcagcatgtg

SEQ ID NO: 20276 - DNA, 25 bp, Artificial
  Probe
ctgtattgaatgtagtatgagacca

SEQ ID NO: 20277 - DNA, 25 bp, Artificial
  Probe
tgtatatgtaagaacttgtgtggtt

SEQ ID NO: 20278 - DNA, 25 bp, Artificial
  Probe
atattacaagatgtgttggatggtt

SEQ ID NO: 20279 - DNA, 25 bp, Artificial
  Probe
agaacaatgagaagaggtgtctgaa

SEQ ID NO: 20280 - DNA, 25 bp, Artificial
  Probe
aagaacaatgagaagaggtgtctga

SEQ ID NO: 20281 - DNA, 25 bp, Artificial
  Probe
actgtattgaatgtagtatgagacc

SEQ ID NO: 20282 - DNA, 25 bp, Artificial
  Probe
tactaatctcttcagcatgtgccat

SEQ ID NO: 20283 - DNA, 25 bp, Artificial
  Probe
taagctatgtgcaggtactaatctc

SEQ ID NO: 20284 - DNA, 25 bp, Artificial
  Probe
tatgtgcaggtactaatctcttcag

SEQ ID NO: 20285 - DNA, 25 bp, Artificial
  Probe
ctatgtgcaggtactaatctcttca

SEQ ID NO: 20286 - DNA, 25 bp, Artificial
  Probe
gtaagctatgtgcaggtactaatct

SEQ ID NO: 20287 - DNA, 25 bp, Artificial
  Probe
aatactcacaggaacctagacatgc

SEQ ID NO: 20288 - DNA, 25 bp, Artificial
  Probe
tgtattgaatgtagtatgagaccaa

SEQ ID NO: 20289 - DNA, 25 bp, Artificial
  Probe
tgtggttaagtatgtatcaatgggt

SEQ ID NO: 20290 - DNA, 25 bp, Artificial
  Probe
gctatgtgcaggtactaatctcttc

SEQ ID NO: 20291 - DNA, 25 bp, Artificial
  Probe
acaatgagaagaggtgtctgaatcc

SEQ ID NO: 20292 - DNA, 25 bp, Artificial
  Probe
gtgtggttaagtatgtatcaatggg

SEQ ID NO: 20293 - DNA, 25 bp, Artificial
  Probe
tgggtagttaaagtttacataggca

SEQ ID NO: 20294 - DNA, 25 bp, Artificial
  Probe
ttgtgtggttaagtatgtatcaatg

SEQ ID NO: 20295 - DNA, 25 bp, Artificial
  Probe
agctatgtgcaggtactaatctctt

SEQ ID NO: 20296 - DNA, 25 bp, Artificial
  Probe
aagctatgtgcaggtactaatctct

SEQ ID NO: 20297 - DNA, 25 bp, Artificial
  Probe
attgtatatgtaagaacttgtgtgg

SEQ ID NO: 20298 - DNA, 25 bp, Artificial
  Probe
aggtactaatctcttcagcatgtgc

SEQ ID NO: 20299 - DNA, 25 bp, Artificial
  Probe
gcaggtactaatctcttcagcatgt

SEQ ID NO: 20300 - DNA, 25 bp, Artificial
  Probe
gggtagttaaagtttacataggcaa

SEQ ID NO: 20301 - DNA, 25 bp, Artificial
  Probe
atatgtaagaacttgtgtggttaag

SEQ ID NO: 20302 - DNA, 25 bp, Artificial
  Probe
cttgtgtggttaagtatgtatcaat

SEQ ID NO: 20303 - DNA, 25 bp, Artificial
  Probe
tagccagtatgtcgcagagattaga

SEQ ID NO: 20304 - DNA, 25 bp, Artificial
  Probe
ctagccagtatgtcgcagagattag

SEQ ID NO: 20305 - DNA, 25 bp, Artificial
  Probe
gacctgacattatccctccctatac

SEQ ID NO: 20306 - DNA, 25 bp, Artificial
  Probe
acctgacattatccctccctatacc

SEQ ID NO: 20307 - DNA, 25 bp, Artificial
  Probe
cctagccagtatgtcgcagagatta

SEQ ID NO: 20308 - DNA, 25 bp, Artificial
  Probe
ttgaaatcaagcaacctgaagagtc

SEQ ID NO: 20309 - DNA, 25 bp, Artificial
  Probe
cctgacattatccctccctataccc

SEQ ID NO: 20310 - DNA, 25 bp, Artificial
  Probe
ggacctgacattatccctccctata

SEQ ID NO: 20311 - DNA, 25 bp, Artificial
  Probe
ctgacattatccctccctatacccg

SEQ ID NO: 20312 - DNA, 25 bp, Artificial
  Probe
agccagtatgtcgcagagattagac

SEQ ID NO: 20313 - DNA, 25 bp, Artificial
  Probe
gacatttacactcgtgaggaactgg

SEQ ID NO: 20314 - DNA, 25 bp, Artificial
  Probe
ggacatttacactcgtgaggaactg

SEQ ID NO: 20315 - DNA, 25 bp, Artificial
  Probe
tgaaatcaagcaacctgaagagtcc

SEQ ID NO: 20316 - DNA, 25 bp, Artificial
  Probe
gagattagacactagaggggaagag

SEQ ID NO: 20317 - DNA, 25 bp, Artificial
  Probe
agagattagacactagaggggaaga

SEQ ID NO: 20318 - DNA, 25 bp, Artificial
  Probe
cagagattagacactagaggggaag

SEQ ID NO: 20319 - DNA, 25 bp, Artificial
  Probe
tatgtcgcagagattagacactaga

SEQ ID NO: 20320 - DNA, 25 bp, Artificial
  Probe
gtatgtcgcagagattagacactag

SEQ ID NO: 20321 - DNA, 25 bp, Artificial
  Probe
agtatgtcgcagagattagacacta

SEQ ID NO: 20322 - DNA, 25 bp, Artificial
  Probe
cttccttaggagcagggatcaaatt

SEQ ID NO: 20323 - DNA, 25 bp, Artificial
  Probe
ctaactcagagcccagtcatagagg

SEQ ID NO: 20324 - DNA, 25 bp, Artificial
  Probe
cctaactcagagcccagtcatagag

SEQ ID NO: 20325 - DNA, 25 bp, Artificial
  Probe
ttccttaggagcagggatcaaattg

SEQ ID NO: 20326 - DNA, 25 bp, Artificial
  Probe
ctttcttgctaggcttccttaggag

SEQ ID NO: 20327 - DNA, 25 bp, Artificial
  Probe
gaaatcaagcaacctgaagagtccc

SEQ ID NO: 20328 - DNA, 25 bp, Artificial
  Probe
atgtcgcagagattagacactagag

SEQ ID NO: 20329 - DNA, 25 bp, Artificial
  Probe
atcaaattgcacctgtccctaactc

SEQ ID NO: 20330 - DNA, 25 bp, Artificial
  Probe
gatcaaattgcacctgtccctaact

SEQ ID NO: 20331 - DNA, 25 bp, Artificial
  Probe
aagtggtttccttttcctttatttt

SEQ ID NO: 20332 - DNA, 25 bp, Artificial
  Probe
cagtatgtcgcagagattagacact

SEQ ID NO: 20333 - DNA, 25 bp, Artificial
  Probe
ctactggacctgacattatccctcc

SEQ ID NO: 20334 - DNA, 25 bp, Artificial
  Probe
cctactggacctgacattatccctc

SEQ ID NO: 20335 - DNA, 25 bp, Artificial
  Probe
attaaggtgattttgctcaatccaa

SEQ ID NO: 20336 - DNA, 25 bp, Artificial
  Probe
ctctcgtctggagtactaatcacca

SEQ ID NO: 20337 - DNA, 25 bp, Artificial
  Probe
gtcgcagagattagacactagaggg

SEQ ID NO: 20338 - DNA, 25 bp, Artificial
  Probe
agattagacactagaggggaagagc

SEQ ID NO: 20339 - DNA, 25 bp, Artificial
  Probe
tattaaggtgattttgctcaatcca

SEQ ID NO: 20340 - DNA, 25 bp, Artificial
  Probe
tggacctgacattatccctccctat

SEQ ID NO: 20341 - DNA, 25 bp, Artificial
  Probe
gaacaaagtggtttccttttccttt

SEQ ID NO: 20342 - DNA, 25 bp, Artificial
  Probe
aacaaagtggtttccttttccttta

SEQ ID NO: 20343 - DNA, 25 bp, Artificial
  Probe
gcagagattagacactagaggggaa

SEQ ID NO: 20344 - DNA, 25 bp, Artificial
  Probe
caccctactggacctgacattatcc

SEQ ID NO: 20345 - DNA, 25 bp, Artificial
  Probe
acaaagtggtttccttttcctttat

SEQ ID NO: 20346 - DNA, 25 bp, Artificial
  Probe
aaatcaagcaacctgaagagtccca

SEQ ID NO: 20347 - DNA, 25 bp, Artificial
  Probe
ccaccctactggacctgacattatc

SEQ ID NO: 20348 - DNA, 25 bp, Artificial
  Probe
acacagcaggatcattatatcaagg

SEQ ID NO: 20349 - DNA, 25 bp, Artificial
  Probe
cttccgattaacagtctgatccaat

SEQ ID NO: 20350 - DNA, 25 bp, Artificial
  Probe
ttccgattaacagtctgatccaatg

SEQ ID NO: 20351 - DNA, 25 bp, Artificial
  Probe
aacacagcaggatcattatatcaag

SEQ ID NO: 20352 - DNA, 25 bp, Artificial
  Probe
caattagtcagatagcatcctggta

SEQ ID NO: 20353 - DNA, 25 bp, Artificial
  Probe
tacaattagtcagatagcatcctgg

SEQ ID NO: 20354 - DNA, 25 bp, Artificial
  Probe
aattagtcagatagcatcctggtag

SEQ ID NO: 20355 - DNA, 25 bp, Artificial
  Probe
ggatcattatatcaaggctgttaca

SEQ ID NO: 20356 - DNA, 25 bp, Artificial
  Probe
cacagcaggatcattatatcaaggc

SEQ ID NO: 20357 - DNA, 25 bp, Artificial
  Probe
ccgattaacagtctgatccaatgta

SEQ ID NO: 20358 - DNA, 25 bp, Artificial
  Probe
tcacacttccgattaacagtctgat

SEQ ID NO: 20359 - DNA, 25 bp, Artificial
  Probe
attagtcagatagcatcctggtagg

SEQ ID NO: 20360 - DNA, 25 bp, Artificial
  Probe
acaattagtcagatagcatcctggt

SEQ ID NO: 20361 - DNA, 25 bp, Artificial
  Probe
aggatcattatatcaaggctgttac

SEQ ID NO: 20362 - DNA, 25 bp, Artificial
  Probe
cgattaacagtctgatccaatgtaa

SEQ ID NO: 20363 - DNA, 25 bp, Artificial
  Probe
cacacttccgattaacagtctgatc

SEQ ID NO: 20364 - DNA, 25 bp, Artificial
  Probe
gcaggatcattatatcaaggctgtt

SEQ ID NO: 20365 - DNA, 25 bp, Artificial
  Probe
acttccgattaacagtctgatccaa

SEQ ID NO: 20366 - DNA, 25 bp, Artificial
  Probe
ctcacacttccgattaacagtctga

SEQ ID NO: 20367 - DNA, 25 bp, Artificial
  Probe
atacaattagtcagatagcatcctg

SEQ ID NO: 20368 - DNA, 25 bp, Artificial
  Probe
tccgattaacagtctgatccaatgt

SEQ ID NO: 20369 - DNA, 25 bp, Artificial
  Probe
caggatcattatatcaaggctgtta

SEQ ID NO: 20370 - DNA, 25 bp, Artificial
  Probe
cacttccgattaacagtctgatcca

SEQ ID NO: 20371 - DNA, 25 bp, Artificial
  Probe
acacttccgattaacagtctgatcc

SEQ ID NO: 20372 - DNA, 25 bp, Artificial
  Probe
cagacctcacacttccgattaacag

SEQ ID NO: 20373 - DNA, 25 bp, Artificial
  Probe
gtcagacctcacacttccgattaac

SEQ ID NO: 20374 - DNA, 25 bp, Artificial
  Probe
gatcattatatcaaggctgttacaa

SEQ ID NO: 20375 - DNA, 25 bp, Artificial
  Probe
tcagacctcacacttccgattaaca

SEQ ID NO: 20376 - DNA, 25 bp, Artificial
  Probe
cctcacacttccgattaacagtctg

SEQ ID NO: 20377 - DNA, 25 bp, Artificial
  Probe
agtcagacctcacacttccgattaa

SEQ ID NO: 20378 - DNA, 25 bp, Artificial
  Probe
tatacaattagtcagatagcatcct

SEQ ID NO: 20379 - DNA, 25 bp, Artificial
  Probe
aaacacagcaggatcattatatcaa

SEQ ID NO: 20380 - DNA, 25 bp, Artificial
  Probe
agcaggatcattatatcaaggctgt

SEQ ID NO: 20381 - DNA, 25 bp, Artificial
  Probe
acagcaggatcattatatcaaggct

SEQ ID NO: 20382 - DNA, 25 bp, Artificial
  Probe
cctggtaggaaatgacacatataga

SEQ ID NO: 20383 - DNA, 25 bp, Artificial
  Probe
aacagtctgatccaatgtaaacaca

SEQ ID NO: 20384 - DNA, 25 bp, Artificial
  Probe
acctcacacttccgattaacagtct

SEQ ID NO: 20385 - DNA, 25 bp, Artificial
  Probe
gacctcacacttccgattaacagtc

SEQ ID NO: 20386 - DNA, 25 bp, Artificial
  Probe
agacctcacacttccgattaacagt

SEQ ID NO: 20387 - DNA, 25 bp, Artificial
  Probe
ctggtaggaaatgacacatatagat

SEQ ID NO: 20388 - DNA, 25 bp, Artificial
  Probe
taacagtctgatccaatgtaaacac

SEQ ID NO: 20389 - DNA, 25 bp, Artificial
  Probe
acagtctgatccaatgtaaacacag

SEQ ID NO: 20390 - DNA, 25 bp, Artificial
  Probe
aagctcaatcagatgcaatcaggaa

SEQ ID NO: 20391 - DNA, 25 bp, Artificial
  Probe
gcagtatgacacatggtgaaattat

SEQ ID NO: 20392 - DNA, 25 bp, Artificial
  Probe
agcagtatgacacatggtgaaatta

SEQ ID NO: 20393 - DNA, 25 bp, Artificial
  Probe
ggcatctatgagtcaatccattatg

SEQ ID NO: 20394 - DNA, 25 bp, Artificial
  Probe
ctacaatggttgacacaatgaagaa

SEQ ID NO: 20395 - DNA, 25 bp, Artificial
  Probe
actacaatggttgacacaatgaaga

SEQ ID NO: 20396 - DNA, 25 bp, Artificial
  Probe
cactacaatggttgacacaatgaag

SEQ ID NO: 20397 - DNA, 25 bp, Artificial
  Probe
tgctggaactatatatcagatgctc

SEQ ID NO: 20398 - DNA, 25 bp, Artificial
  Probe
tacactctctggatgtgattggatt

SEQ ID NO: 20399 - DNA, 25 bp, Artificial
  Probe
ttgctggaactatatatcagatgct

SEQ ID NO: 20400 - DNA, 25 bp, Artificial
  Probe
tggcatctatgagtcaatccattat

SEQ ID NO: 20401 - DNA, 25 bp, Artificial
  Probe
gaactatatatcagatgctccttgt

SEQ ID NO: 20402 - DNA, 25 bp, Artificial
  Probe
gctggaactatatatcagatgctcc

SEQ ID NO: 20403 - DNA, 25 bp, Artificial
  Probe
gtatcagtacactctctggatgtga

SEQ ID NO: 20404 - DNA, 25 bp, Artificial
  Probe
gaacataacacaagaaagggctaac

SEQ ID NO: 20405 - DNA, 25 bp, Artificial
  Probe
attgctggaactatatatcagatgc

SEQ ID NO: 20406 - DNA, 25 bp, Artificial
  Probe
acaatgaagaaagcagaaatatggc

SEQ ID NO: 20407 - DNA, 25 bp, Artificial
  Probe
ctggaactatatatcagatgctcct

SEQ ID NO: 20408 - DNA, 25 bp, Artificial
  Probe
taacacaagaaagggctaacacaat

SEQ ID NO: 20409 - DNA, 25 bp, Artificial
  Probe
ataacacaagaaagggctaacacaa

SEQ ID NO: 20410 - DNA, 25 bp, Artificial
  Probe
aacataacacaagaaagggctaaca

SEQ ID NO: 20411 - DNA, 25 bp, Artificial
  Probe
tgacacaatgaagaaagcagaaata

SEQ ID NO: 20412 - DNA, 25 bp, Artificial
  Probe
atcaggaacataacacaagaaaggg

SEQ ID NO: 20413 - DNA, 25 bp, Artificial
  Probe
ctggtatcagtacactctctggatg

SEQ ID NO: 20414 - DNA, 25 bp, Artificial
  Probe
cacaatgaagaaagcagaaatatgg

SEQ ID NO: 20415 - DNA, 25 bp, Artificial
  Probe
atgctgtctgtttctttaccgattt

SEQ ID NO: 20416 - DNA, 25 bp, Artificial
  Probe
aatgctgtctgtttctttaccgatt

SEQ ID NO: 20417 - DNA, 25 bp, Artificial
  Probe
ggaacataacacaagaaagggctaa

SEQ ID NO: 20418 - DNA, 25 bp, Artificial
  Probe
aaatgctgtctgtttctttaccgat

SEQ ID NO: 20419 - DNA, 25 bp, Artificial
  Probe
tggaactatatatcagatgctcctt

SEQ ID NO: 20420 - DNA, 25 bp, Artificial
  Probe
ttgacacaatgaagaaagcagaaat

SEQ ID NO: 20421 - DNA, 25 bp, Artificial
  Probe
tgataatccctgaaacaccaacttg

SEQ ID NO: 20422 - DNA, 25 bp, Artificial
  Probe
acaatggttgacacaatgaagaaag

SEQ ID NO: 20423 - DNA, 25 bp, Artificial
  Probe
ccactacaatggttgacacaatgaa

SEQ ID NO: 20424 - DNA, 25 bp, Artificial
  Probe
ttaagaaggaaggctgtgatctgtg

SEQ ID NO: 20425 - DNA, 25 bp, Artificial
  Probe
gtacactctctggatgtgattggat

SEQ ID NO: 20426 - DNA, 25 bp, Artificial
  Probe
tcagtacactctctggatgtgattg

SEQ ID NO: 20427 - DNA, 25 bp, Artificial
  Probe
gcatctatgagtcaatccattatgg

SEQ ID NO: 20428 - DNA, 25 bp, Artificial
  Probe
cataacacaagaaagggctaacaca

SEQ ID NO: 20429 - DNA, 25 bp, Artificial
  Probe
acataacacaagaaagggctaacac

SEQ ID NO: 20430 - DNA, 25 bp, Artificial
  Probe
ggaactatatatcagatgctccttg

SEQ ID NO: 20431 - DNA, 25 bp, Artificial
  Probe
tacctaaggaaatggaagactttgc

SEQ ID NO: 20432 - DNA, 25 bp, Artificial
  Probe
gttgacacaatgaagaaagcagaaa

SEQ ID NO: 20433 - DNA, 25 bp, Artificial
  Probe
tacaatggttgacacaatgaagaaa

SEQ ID NO: 20434 - DNA, 25 bp, Artificial
  Probe
ggtatcagtacactctctggatgtg

SEQ ID NO: 20435 - DNA, 25 bp, Artificial
  Probe
acactctctggatgtgattggattc

SEQ ID NO: 20436 - DNA, 25 bp, Artificial
  Probe
ctgccaaaccattacctaaggaaat

SEQ ID NO: 20437 - DNA, 25 bp, Artificial
  Probe
atacaatgtccagttcagatttgct

SEQ ID NO: 20438 - DNA, 25 bp, Artificial
  Probe
gaacaacttctatcccagagacatc

SEQ ID NO: 20439 - DNA, 25 bp, Artificial
  Probe
aacaacttctatcccagagacatca

SEQ ID NO: 20440 - DNA, 25 bp, Artificial
  Probe
tgaacaacttctatcccagagacat

SEQ ID NO: 20441 - DNA, 25 bp, Artificial
  Probe
acaacttctatcccagagacatcag

SEQ ID NO: 20442 - DNA, 25 bp, Artificial
  Probe
aacttctatcccagagacatcagtg

SEQ ID NO: 20443 - DNA, 25 bp, Artificial
  Probe
caacttctatcccagagacatcagt

SEQ ID NO: 20444 - DNA, 25 bp, Artificial
  Probe
acttctatcccagagacatcagtgt

SEQ ID NO: 20445 - DNA, 25 bp, Artificial
  Probe
cttctatcccagagacatcagtgtc

SEQ ID NO: 20446 - DNA, 25 bp, Artificial
  Probe
ctatcccagagacatcagtgtcaag

SEQ ID NO: 20447 - DNA, 25 bp, Artificial
  Probe
tctatcccagagacatcagtgtcaa

SEQ ID NO: 20448 - DNA, 25 bp, Artificial
  Probe
ttctatcccagagacatcagtgtca

SEQ ID NO: 20449 - DNA, 25 bp, Artificial
  Probe
tggggaatattaaataaagtgaatc

SEQ ID NO: 20450 - DNA, 25 bp, Artificial
  Probe
gtgaggctgaattctctgtcaagac

SEQ ID NO: 20451 - DNA, 25 bp, Artificial
  Probe
ctgtgaggctgaattctctgtcaag

SEQ ID NO: 20452 - DNA, 25 bp, Artificial
  Probe
gttctgtgaggctgaattctctgtc

SEQ ID NO: 20453 - DNA, 25 bp, Artificial
  Probe
cagttctgtgaggctgaattctctg

SEQ ID NO: 20454 - DNA, 25 bp, Artificial
  Probe
tgtgaggctgaattctctgtcaaga

SEQ ID NO: 20455 - DNA, 25 bp, Artificial
  Probe
tctgtgaggctgaattctctgtcaa

SEQ ID NO: 20456 - DNA, 25 bp, Artificial
  Probe
ttctgtgaggctgaattctctgtca

SEQ ID NO: 20457 - DNA, 25 bp, Artificial
  Probe
agttctgtgaggctgaattctctgt

SEQ ID NO: 20458 - DNA, 25 bp, Artificial
  Probe
tgaggctgaattctctgtcaagacc

SEQ ID NO: 20459 - DNA, 25 bp, Artificial
  Probe
ccagttctgtgaggctgaattctct

SEQ ID NO: 20460 - DNA, 25 bp, Artificial
  Probe
gaggctgaattctctgtcaagaccc

SEQ ID NO: 20461 - DNA, 25 bp, Artificial
  Probe
gcgattctcttgcttccagaaggaa

SEQ ID NO: 20462 - DNA, 25 bp, Artificial
  Probe
ctgaattctctgtcaagacccgacc

SEQ ID NO: 20463 - DNA, 25 bp, Artificial
  Probe
cccagttctgtgaggctgaattctc

SEQ ID NO: 20464 - DNA, 25 bp, Artificial
  Probe
gatgagaaatcccaggatgcagtag

SEQ ID NO: 20465 - DNA, 25 bp, Artificial
  Probe
tccaggagttcagattcttcccatg

SEQ ID NO: 20466 - DNA, 25 bp, Artificial
  Probe
atgagaaatcccaggatgcagtagg

SEQ ID NO: 20467 - DNA, 25 bp, Artificial
  Probe
ctccaggagttcagattcttcccat

SEQ ID NO: 20468 - DNA, 25 bp, Artificial
  Probe
ccaggagttcagattcttcccatgg

SEQ ID NO: 20469 - DNA, 25 bp, Artificial
  Probe
acagtacaaggacatgatgaatgaa

SEQ ID NO: 20470 - DNA, 25 bp, Artificial
  Probe
cagtacaaggacatgatgaatgaag

SEQ ID NO: 20471 - DNA, 25 bp, Artificial
  Probe
gacagtacaaggacatgatgaatga

SEQ ID NO: 20472 - DNA, 25 bp, Artificial
  Probe
agtacaaggacatgatgaatgaagc

SEQ ID NO: 20473 - DNA, 25 bp, Artificial
  Probe
gagccatatacagttcacaatcctg

SEQ ID NO: 20474 - DNA, 25 bp, Artificial
  Probe
cgacagtacaaggacatgatgaatg

SEQ ID NO: 20475 - DNA, 25 bp, Artificial
  Probe
acgacagtacaaggacatgatgaat

SEQ ID NO: 20476 - DNA, 25 bp, Artificial
  Probe
gtggagccatatacagttcacaatc

SEQ ID NO: 20477 - DNA, 25 bp, Artificial
  Probe
gtacaaggacatgatgaatgaagcc

SEQ ID NO: 20478 - DNA, 25 bp, Artificial
  Probe
aacgacagtacaaggacatgatgaa

SEQ ID NO: 20479 - DNA, 25 bp, Artificial
  Probe
agtggagccatatacagttcacaat

SEQ ID NO: 20480 - DNA, 25 bp, Artificial
  Probe
tcccttccttcaacagtaaagaaat

SEQ ID NO: 20481 - DNA, 25 bp, Artificial
  Probe
atcccttccttcaacagtaaagaaa

SEQ ID NO: 20482 - DNA, 25 bp, Artificial
  Probe
agttcacaatcctgtaccactcatt

SEQ ID NO: 20483 - DNA, 25 bp, Artificial
  Probe
aagtggagccatatacagttcacaa

SEQ ID NO: 20484 - DNA, 25 bp, Artificial
  Probe
catcccttccttcaacagtaaagaa

SEQ ID NO: 20485 - DNA, 25 bp, Artificial
  Probe
ggagccatatacagttcacaatcct

SEQ ID NO: 20486 - DNA, 25 bp, Artificial
  Probe
cccttccttcaacagtaaagaaata

SEQ ID NO: 20487 - DNA, 25 bp, Artificial
  Probe
gacatcccttccttcaacagtaaag

SEQ ID NO: 20488 - DNA, 25 bp, Artificial
  Probe
acatcccttccttcaacagtaaaga

SEQ ID NO: 20489 - DNA, 25 bp, Artificial
  Probe
gtccagatcaacaaggtgaccatat

SEQ ID NO: 20490 - DNA, 25 bp, Artificial
  Probe
tggagccatatacagttcacaatcc

SEQ ID NO: 20491 - DNA, 25 bp, Artificial
  Probe
aatctgctatttgactggtacatcg

SEQ ID NO: 20492 - DNA, 25 bp, Artificial
  Probe
caatctgctatttgactggtacatc

SEQ ID NO: 20493 - DNA, 25 bp, Artificial
  Probe
cagttcacaatcctgtaccactcat

SEQ ID NO: 20494 - DNA, 25 bp, Artificial
  Probe
gttcacaatcctgtaccactcattg

SEQ ID NO: 20495 - DNA, 25 bp, Artificial
  Probe
tgacatcccttccttcaacagtaaa

SEQ ID NO: 20496 - DNA, 25 bp, Artificial
  Probe
tacaaggacatgatgaatgaagccg

SEQ ID NO: 20497 - DNA, 25 bp, Artificial
  Probe
tttcaaacgacagtacaaggacatg

SEQ ID NO: 20498 - DNA, 25 bp, Artificial
  Probe
ctatttgactggtacatcgagactt

SEQ ID NO: 20499 - DNA, 25 bp, Artificial
  Probe
tatttgactggtacatcgagacttc

SEQ ID NO: 20500 - DNA, 25 bp, Artificial
  Probe
gactggtacatcgagacttctcatg

SEQ ID NO: 20501 - DNA, 25 bp, Artificial
  Probe
caaacgacagtacaaggacatgatg

SEQ ID NO: 20502 - DNA, 25 bp, Artificial
  Probe
tgactggtacatcgagacttctcat

SEQ ID NO: 20503 - DNA, 25 bp, Artificial
  Probe
gtgacatcccttccttcaacagtaa

SEQ ID NO: 20504 - DNA, 25 bp, Artificial
  Probe
aaacgacagtacaaggacatgatga

SEQ ID NO: 20505 - DNA, 25 bp, Artificial
  Probe
caaagtggagccatatacagttcac

SEQ ID NO: 20506 - DNA, 25 bp, Artificial
  Probe
atttgactggtacatcgagacttct

SEQ ID NO: 20507 - DNA, 25 bp, Artificial
  Probe
gtaaagaaatattcaacgtcaccct

SEQ ID NO: 20508 - DNA, 25 bp, Artificial
  Probe
agtaaagaaatattcaacgtcaccc

SEQ ID NO: 20509 - DNA, 25 bp, Artificial
  Probe
atctgctatttgactggtacatcga

SEQ ID NO: 20510 - DNA, 25 bp, Artificial
  Probe
aaagtggagccatatacagttcaca

SEQ ID NO: 20511 - DNA, 25 bp, Artificial
  Probe
taaagaaatattcaacgtcaccctc

SEQ ID NO: 20512 - DNA, 25 bp, Artificial
  Probe
ttgactggtacatcgagacttctca

SEQ ID NO: 20513 - DNA, 25 bp, Artificial
  Probe
tccagatcaacaaggtgaccatatg

SEQ ID NO: 20514 - DNA, 25 bp, Artificial
  Probe
gcatagcaagcacaactgtaactag

SEQ ID NO: 20515 - DNA, 25 bp, Artificial
  Probe
gagacttattgtgaaggaaccactg

SEQ ID NO: 20516 - DNA, 25 bp, Artificial
  Probe
gacttattgtgaaggaaccactgac

SEQ ID NO: 20517 - DNA, 25 bp, Artificial
  Probe
agacttattgtgaaggaaccactga

SEQ ID NO: 20518 - DNA, 25 bp, Artificial
  Probe
actttgatgaaatgttaccctttgg

SEQ ID NO: 20519 - DNA, 25 bp, Artificial
  Probe
ccactttgatgaaatgttacccttt

SEQ ID NO: 20520 - DNA, 25 bp, Artificial
  Probe
ctcctccactttgatgaaatgttac

SEQ ID NO: 20521 - DNA, 25 bp, Artificial
  Probe
gaaataaagtgggatagggaagtgt

SEQ ID NO: 20522 - DNA, 25 bp, Artificial
  Probe
agaaataaagtgggatagggaagtg

SEQ ID NO: 20523 - DNA, 25 bp, Artificial
  Probe
cagaaataaagtgggatagggaagt

SEQ ID NO: 20524 - DNA, 25 bp, Artificial
  Probe
tcagaaataaagtgggatagggaag

SEQ ID NO: 20525 - DNA, 25 bp, Artificial
  Probe
aaataaagtgggatagggaagtgtg

SEQ ID NO: 20526 - DNA, 25 bp, Artificial
  Probe
accagaaaggattaacaaaggaaga

SEQ ID NO: 20527 - DNA, 25 bp, Artificial
  Probe
agaaccagaaaggattaacaaagga

SEQ ID NO: 20528 - DNA, 25 bp, Artificial
  Probe
aggagaaccagaaaggattaacaaa

SEQ ID NO: 20529 - DNA, 25 bp, Artificial
  Probe
tccactttgatgaaatgttaccctt

SEQ ID NO: 20530 - DNA, 25 bp, Artificial
  Probe
gagaaccagaaaggattaacaaagg

SEQ ID NO: 20531 - DNA, 25 bp, Artificial
  Probe
ggagaaccagaaaggattaacaaag

SEQ ID NO: 20532 - DNA, 25 bp, Artificial
  Probe
cctcctccactttgatgaaatgtta

SEQ ID NO: 20533 - DNA, 25 bp, Artificial
  Probe
gtgggaaaggattagaattgtaagc

SEQ ID NO: 20534 - DNA, 25 bp, Artificial
  Probe
aaccagaaaggattaacaaaggaag

SEQ ID NO: 20535 - DNA, 25 bp, Artificial
  Probe
gaaccagaaaggattaacaaaggaa

SEQ ID NO: 20536 - DNA, 25 bp, Artificial
  Probe
cactttgatgaaatgttaccctttg

SEQ ID NO: 20537 - DNA, 25 bp, Artificial
  Probe
ctccactttgatgaaatgttaccct

SEQ ID NO: 20538 - DNA, 25 bp, Artificial
  Probe
atagggaagtgtgtctttcaaatca

SEQ ID NO: 20539 - DNA, 25 bp, Artificial
  Probe
caggagaaccagaaaggattaacaa

SEQ ID NO: 20540 - DNA, 25 bp, Artificial
  Probe
aatttgtattgcccttgttactgtt

SEQ ID NO: 20541 - DNA, 25 bp, Artificial
  Probe
tagggaagtgtgtctttcaaatcaa

SEQ ID NO: 20542 - DNA, 25 bp, Artificial
  Probe
tttcaaagtgtgtattcttcaagcc

SEQ ID NO: 20543 - DNA, 25 bp, Artificial
  Probe
tcctccactttgatgaaatgttacc

SEQ ID NO: 20544 - DNA, 25 bp, Artificial
  Probe
gatagggaagtgtgtctttcaaatc

SEQ ID NO: 20545 - DNA, 25 bp, Artificial
  Probe
aagtgtgtctttcaaatcaagggta

SEQ ID NO: 20546 - DNA, 25 bp, Artificial
  Probe
atcagaaataaagtgggatagggaa

SEQ ID NO: 20547 - DNA, 25 bp, Artificial
  Probe
tgtattgcccttgttactgttaaag

SEQ ID NO: 20548 - DNA, 25 bp, Artificial
  Probe
ttgtattgcccttgttactgttaaa

SEQ ID NO: 20549 - DNA, 25 bp, Artificial
  Probe
tttgtattgcccttgttactgttaa

SEQ ID NO: 20550 - DNA, 25 bp, Artificial
  Probe
atttgtattgcccttgttactgtta

SEQ ID NO: 20551 - DNA, 25 bp, Artificial
  Probe
cgtgtgggaaaggattagaattgta

SEQ ID NO: 20552 - DNA, 25 bp, Artificial
  Probe
ggatagggaagtgtgtctttcaaat

SEQ ID NO: 20553 - DNA, 25 bp, Artificial
  Probe
ccagaaaggattaacaaaggaagat

SEQ ID NO: 20554 - DNA, 25 bp, Artificial
  Probe
cccttgttactgttaaagactgttt

SEQ ID NO: 20555 - DNA, 25 bp, Artificial
  Probe
attgcccttgttactgttaaagact

SEQ ID NO: 20556 - DNA, 25 bp, Artificial
  Probe
ctgaaatcttggttctaattgcctc

SEQ ID NO: 20557 - DNA, 25 bp, Artificial
  Probe
tattgcccttgttactgttaaagac

SEQ ID NO: 20558 - DNA, 25 bp, Artificial
  Probe
gtattgcccttgttactgttaaaga

SEQ ID NO: 20559 - DNA, 25 bp, Artificial
  Probe
aagccctatgaatgcaataaatgtg

SEQ ID NO: 20560 - DNA, 25 bp, Artificial
  Probe
ccctatgaatgcaataaatgtggaa

SEQ ID NO: 20561 - DNA, 25 bp, Artificial
  Probe
aaagccctatgaatgcaataaatgt

SEQ ID NO: 20562 - DNA, 25 bp, Artificial
  Probe
agccctatgaatgcaataaatgtgg

SEQ ID NO: 20563 - DNA, 25 bp, Artificial
  Probe
gccctatgaatgcaataaatgtgga

SEQ ID NO: 20564 - DNA, 25 bp, Artificial
  Probe
cctatgaatgcaataaatgtggaaa

SEQ ID NO: 20565 - DNA, 25 bp, Artificial
  Probe
tcaccttgttgctcatcggagaatt

SEQ ID NO: 20566 - DNA, 25 bp, Artificial
  Probe
aaatgtggaaaatccttcagtcaga

SEQ ID NO: 20567 - DNA, 25 bp, Artificial
  Probe
taaatgtggaaaatccttcagtcag

SEQ ID NO: 20568 - DNA, 25 bp, Artificial
  Probe
gcaataaatgtggaaaatccttcag

SEQ ID NO: 20569 - DNA, 25 bp, Artificial
  Probe
aatgtggaaaatccttcagtcagag

SEQ ID NO: 20570 - DNA, 25 bp, Artificial
  Probe
ggaaaagccctatgaatgcaataaa

SEQ ID NO: 20571 - DNA, 25 bp, Artificial
  Probe
ataaatgtggaaaatccttcagtca

SEQ ID NO: 20572 - DNA, 25 bp, Artificial
  Probe
cttgttgctcatcggagaattcaca

SEQ ID NO: 20573 - DNA, 25 bp, Artificial
  Probe
gtcaccttgttgctcatcggagaat

SEQ ID NO: 20574 - DNA, 25 bp, Artificial
  Probe
aaaagccctatgaatgcaataaatg

SEQ ID NO: 20575 - DNA, 25 bp, Artificial
  Probe
caataaatgtggaaaatccttcagt

SEQ ID NO: 20576 - DNA, 25 bp, Artificial
  Probe
ttgttgctcatcggagaattcacac

SEQ ID NO: 20577 - DNA, 25 bp, Artificial
  Probe
gaaaagccctatgaatgcaataaat

SEQ ID NO: 20578 - DNA, 25 bp, Artificial
  Probe
aataaatgtggaaaatccttcagtc

SEQ ID NO: 20579 - DNA, 25 bp, Artificial
  Probe
cttcagtcagagctgtcaccttgtt

SEQ ID NO: 20580 - DNA, 25 bp, Artificial
  Probe
ccttgttgctcatcggagaattcac

SEQ ID NO: 20581 - DNA, 25 bp, Artificial
  Probe
caccttgttgctcatcggagaattc

SEQ ID NO: 20582 - DNA, 25 bp, Artificial
  Probe
tgcaataaatgtggaaaatccttca

SEQ ID NO: 20583 - DNA, 25 bp, Artificial
  Probe
ttcagtcagagctgtcaccttgttg

SEQ ID NO: 20584 - DNA, 25 bp, Artificial
  Probe
tgaatgcaataaatgtggaaaatcc

SEQ ID NO: 20585 - DNA, 25 bp, Artificial
  Probe
atgcaataaatgtggaaaatccttc

SEQ ID NO: 20586 - DNA, 25 bp, Artificial
  Probe
gaatgcaataaatgtggaaaatcct

SEQ ID NO: 20587 - DNA, 25 bp, Artificial
  Probe
accttgttgctcatcggagaattca

SEQ ID NO: 20588 - DNA, 25 bp, Artificial
  Probe
atgtggaaaatccttcagtcagagc

SEQ ID NO: 20589 - DNA, 25 bp, Artificial
  Probe
atgaatgcaataaatgtggaaaatc

SEQ ID NO: 20590 - DNA, 25 bp, Artificial
  Probe
aatgcaataaatgtggaaaatcctt

SEQ ID NO: 20591 - DNA, 25 bp, Artificial
  Probe
gaaaatccttcagtcagagctgtca

SEQ ID NO: 20592 - DNA, 25 bp, Artificial
  Probe
aaatccttcagtcagagctgtcacc

SEQ ID NO: 20593 - DNA, 25 bp, Artificial
  Probe
aaaatccttcagtcagagctgtcac

SEQ ID NO: 20594 - DNA, 25 bp, Artificial
  Probe
ctatgaatgcaataaatgtggaaaa

SEQ ID NO: 20595 - DNA, 25 bp, Artificial
  Probe
gggaaaagccctatgaatgcaataa

SEQ ID NO: 20596 - DNA, 25 bp, Artificial
  Probe
ggaaaatccttcagtcagagctgtc

SEQ ID NO: 20597 - DNA, 25 bp, Artificial
  Probe
tatgaatgcaataaatgtggaaaat

SEQ ID NO: 20598 - DNA, 25 bp, Artificial
  Probe
gtggaaaatccttcagtcagagctg

SEQ ID NO: 20599 - DNA, 25 bp, Artificial
  Probe
tggaaaatccttcagtcagagctgt

SEQ ID NO: 20600 - DNA, 25 bp, Artificial
  Probe
tgtggaaaatccttcagtcagagct

SEQ ID NO: 20601 - DNA, 25 bp, Artificial
  Probe
ggggaaaagccctatgaatgcaata

SEQ ID NO: 20602 - DNA, 25 bp, Artificial
  Probe
acactggggaaaagccctatgaatg

SEQ ID NO: 20603 - DNA, 25 bp, Artificial
  Probe
cacactggggaaaagccctatgaat

SEQ ID NO: 20604 - DNA, 25 bp, Artificial
  Probe
tggggaaaagccctatgaatgcaat

SEQ ID NO: 20605 - DNA, 25 bp, Artificial
  Probe
gaatagctcaaacctcactaaacac

SEQ ID NO: 20606 - DNA, 25 bp, Artificial
  Probe
tacgaatagctcaaacctcactaaa

SEQ ID NO: 20607 - DNA, 25 bp, Artificial
  Probe
ttacgaatagctcaaacctcactaa

SEQ ID NO: 20608 - DNA, 25 bp, Artificial
  Probe
tttacgaatagctcaaacctcacta

SEQ ID NO: 20609 - DNA, 25 bp, Artificial
  Probe
aatagctcaaacctcactaaacacc

SEQ ID NO: 20610 - DNA, 25 bp, Artificial
  Probe
cgaatagctcaaacctcactaaaca

SEQ ID NO: 20611 - DNA, 25 bp, Artificial
  Probe
acgaatagctcaaacctcactaaac

SEQ ID NO: 20612 - DNA, 25 bp, Artificial
  Probe
ctcaaacctcactaaacaccgaaca

SEQ ID NO: 20613 - DNA, 25 bp, Artificial
  Probe
tcaaacctcactaaacaccgaacac

SEQ ID NO: 20614 - DNA, 25 bp, Artificial
  Probe
aaacctcactaaacaccgaacacac

SEQ ID NO: 20615 - DNA, 25 bp, Artificial
  Probe
caaacctcactaaacaccgaacaca

SEQ ID NO: 20616 - DNA, 25 bp, Artificial
  Probe
atagctcaaacctcactaaacaccg

SEQ ID NO: 20617 - DNA, 25 bp, Artificial
  Probe
aaagtcgtttacgaatagctcaaac

SEQ ID NO: 20618 - DNA, 25 bp, Artificial
  Probe
gaaagtcgtttacgaatagctcaaa

SEQ ID NO: 20619 - DNA, 25 bp, Artificial
  Probe
gtttacgaatagctcaaacctcact

SEQ ID NO: 20620 - DNA, 25 bp, Artificial
  Probe
ctcactaaacaccgaacacacactg

SEQ ID NO: 20621 - DNA, 25 bp, Artificial
  Probe
ggaaagtcgtttacgaatagctcaa

SEQ ID NO: 20622 - DNA, 25 bp, Artificial
  Probe
aagtcgtttacgaatagctcaaacc

SEQ ID NO: 20623 - DNA, 25 bp, Artificial
  Probe
gctcaaacctcactaaacaccgaac

SEQ ID NO: 20624 - DNA, 25 bp, Artificial
  Probe
cgtttacgaatagctcaaacctcac

SEQ ID NO: 20625 - DNA, 25 bp, Artificial
  Probe
gtcgtttacgaatagctcaaacctc

SEQ ID NO: 20626 - DNA, 25 bp, Artificial
  Probe
tagctcaaacctcactaaacaccga

SEQ ID NO: 20627 - DNA, 25 bp, Artificial
  Probe
tcgtttacgaatagctcaaacctca

SEQ ID NO: 20628 - DNA, 25 bp, Artificial
  Probe
agtcgtttacgaatagctcaaacct

SEQ ID NO: 20629 - DNA, 25 bp, Artificial
  Probe
aacctcactaaacaccgaacacaca

SEQ ID NO: 20630 - DNA, 25 bp, Artificial
  Probe
cctcactaaacaccgaacacacact

SEQ ID NO: 20631 - DNA, 25 bp, Artificial
  Probe
agctcaaacctcactaaacaccgaa

SEQ ID NO: 20632 - DNA, 25 bp, Artificial
  Probe
cggaaagtcgtttacgaatagctca

SEQ ID NO: 20633 - DNA, 25 bp, Artificial
  Probe
gcggaaagtcgtttacgaatagctc

SEQ ID NO: 20634 - DNA, 25 bp, Artificial
  Probe
ggtgcggaaagtcgtttacgaatag

SEQ ID NO: 20635 - DNA, 25 bp, Artificial
  Probe
gtgcggaaagtcgtttacgaatagc

SEQ ID NO: 20636 - DNA, 25 bp, Artificial
  Probe
tgcggaaagtcgtttacgaatagct

SEQ ID NO: 20637 - DNA, 25 bp, Artificial
  Probe
ttattccttggttctgtcactcatt

SEQ ID NO: 20638 - DNA, 25 bp, Artificial
  Probe
attccttggttctgtcactcattaa

SEQ ID NO: 20639 - DNA, 25 bp, Artificial
  Probe
tattccttggttctgtcactcatta

SEQ ID NO: 20640 - DNA, 25 bp, Artificial
  Probe
ttggttctgtcactcattaagcatt

SEQ ID NO: 20641 - DNA, 25 bp, Artificial
  Probe
ttccttggttctgtcactcattaag

SEQ ID NO: 20642 - DNA, 25 bp, Artificial
  Probe
cttggttctgtcactcattaagcat

SEQ ID NO: 20643 - DNA, 25 bp, Artificial
  Probe
taattgattagaaccaggctaggca

SEQ ID NO: 20644 - DNA, 25 bp, Artificial
  Probe
ctaattgattagaaccaggctaggc

SEQ ID NO: 20645 - DNA, 25 bp, Artificial
  Probe
tttattccttggttctgtcactcat

SEQ ID NO: 20646 - DNA, 25 bp, Artificial
  Probe
atttattccttggttctgtcactca

SEQ ID NO: 20647 - DNA, 25 bp, Artificial
  Probe
catttattccttggttctgtcactc

SEQ ID NO: 20648 - DNA, 25 bp, Artificial
  Probe
tcatttattccttggttctgtcact

SEQ ID NO: 20649 - DNA, 25 bp, Artificial
  Probe
ttcatttattccttggttctgtcac

SEQ ID NO: 20650 - DNA, 25 bp, Artificial
  Probe
ttaaagatttgtgtgtgaatgtggg

SEQ ID NO: 20651 - DNA, 25 bp, Artificial
  Probe
aattgattagaaccaggctaggcag

SEQ ID NO: 20652 - DNA, 25 bp, Artificial
  Probe
aactaacttgctggacagaaggaag

SEQ ID NO: 20653 - DNA, 25 bp, Artificial
  Probe
tccttggttctgtcactcattaagc

SEQ ID NO: 20654 - DNA, 25 bp, Artificial
  Probe
taaagatttgtgtgtgaatgtggga

SEQ ID NO: 20655 - DNA, 25 bp, Artificial
  Probe
ggttctgtcactcattaagcattta

SEQ ID NO: 20656 - DNA, 25 bp, Artificial
  Probe
tggttctgtcactcattaagcattt

SEQ ID NO: 20657 - DNA, 25 bp, Artificial
  Probe
tttcatttattccttggttctgtca

SEQ ID NO: 20658 - DNA, 25 bp, Artificial
  Probe
aagcgttctaccagtgagttaaatc

SEQ ID NO: 20659 - DNA, 25 bp, Artificial
  Probe
ccttggttctgtcactcattaagca

SEQ ID NO: 20660 - DNA, 25 bp, Artificial
  Probe
atttgtgtgtgaatgtgggagttag

SEQ ID NO: 20661 - DNA, 25 bp, Artificial
  Probe
gatttgtgtgtgaatgtgggagtta

SEQ ID NO: 20662 - DNA, 25 bp, Artificial
  Probe
caagcgttctaccagtgagttaaat

SEQ ID NO: 20663 - DNA, 25 bp, Artificial
  Probe
gttctgtcactcattaagcatttac

SEQ ID NO: 20664 - DNA, 25 bp, Artificial
  Probe
caactaacttgctggacagaaggaa

SEQ ID NO: 20665 - DNA, 25 bp, Artificial
  Probe
cttatttctggtgccaactaacttg

SEQ ID NO: 20666 - DNA, 25 bp, Artificial
  Probe
gggaagataaggctcaaataattgt

SEQ ID NO: 20667 - DNA, 25 bp, Artificial
  Probe
aaagatttgtgtgtgaatgtgggag

SEQ ID NO: 20668 - DNA, 25 bp, Artificial
  Probe
gcttatttctggtgccaactaactt

SEQ ID NO: 20669 - DNA, 25 bp, Artificial
  Probe
ttctgtcactcattaagcatttaca

SEQ ID NO: 20670 - DNA, 25 bp, Artificial
  Probe
attgattagaaccaggctaggcagt

SEQ ID NO: 20671 - DNA, 25 bp, Artificial
  Probe
gcaggtttattgttgagccctataa

SEQ ID NO: 20672 - DNA, 25 bp, Artificial
  Probe
caggtttattgttgagccctataat

SEQ ID NO: 20673 - DNA, 25 bp, Artificial
  Probe
agcgttctaccagtgagttaaatcc

SEQ ID NO: 20674 - DNA, 25 bp, Artificial
  Probe
ttatttctggtgccaactaacttgc

SEQ ID NO: 20675 - DNA, 25 bp, Artificial
  Probe
tggtccagtccttctttagtttaaa

SEQ ID NO: 20676 - DNA, 25 bp, Artificial
  Probe
tttaaagatttgtgtgtgaatgtgg

SEQ ID NO: 20677 - DNA, 25 bp, Artificial
  Probe
agatttgtgtgtgaatgtgggagtt

SEQ ID NO: 20678 - DNA, 25 bp, Artificial
  Probe
aagatttgtgtgtgaatgtgggagt

SEQ ID NO: 20679 - DNA, 25 bp, Artificial
  Probe
agcaggtttattgttgagccctata

SEQ ID NO: 20680 - DNA, 25 bp, Artificial
  Probe
ttgattagaaccaggctaggcagtt

SEQ ID NO: 20681 - DNA, 25 bp, Artificial
  Probe
tttaggtggagatattcccaggatg

SEQ ID NO: 20682 - DNA, 25 bp, Artificial
  Probe
agaaatctgaaggcaatggacatta

SEQ ID NO: 20683 - DNA, 25 bp, Artificial
  Probe
gaaatctgaaggcaatggacattac

SEQ ID NO: 20684 - DNA, 25 bp, Artificial
  Probe
ttatgtcaaagtgtctctgatgtgt

SEQ ID NO: 20685 - DNA, 25 bp, Artificial
  Probe
cttatgtcaaagtgtctctgatgtg

SEQ ID NO: 20686 - DNA, 25 bp, Artificial
  Probe
tccttatgtcaaagtgtctctgatg

SEQ ID NO: 20687 - DNA, 25 bp, Artificial
  Probe
ccttatgtcaaagtgtctctgatgt

SEQ ID NO: 20688 - DNA, 25 bp, Artificial
  Probe
atccttatgtcaaagtgtctctgat

SEQ ID NO: 20689 - DNA, 25 bp, Artificial
  Probe
tcttggaagagaccattggaatgaa

SEQ ID NO: 20690 - DNA, 25 bp, Artificial
  Probe
tatgtcaaagtgtctctgatgtgtg

SEQ ID NO: 20691 - DNA, 25 bp, Artificial
  Probe
tcatcagatccttatgtcaaagtgt

SEQ ID NO: 20692 - DNA, 25 bp, Artificial
  Probe
catcagatccttatgtcaaagtgtc

SEQ ID NO: 20693 - DNA, 25 bp, Artificial
  Probe
agatccttatgtcaaagtgtctctg

SEQ ID NO: 20694 - DNA, 25 bp, Artificial
  Probe
cagatccttatgtcaaagtgtctct

SEQ ID NO: 20695 - DNA, 25 bp, Artificial
  Probe
tcagatccttatgtcaaagtgtctc

SEQ ID NO: 20696 - DNA, 25 bp, Artificial
  Probe
ttatttgaagtctctgatctctcca

SEQ ID NO: 20697 - DNA, 25 bp, Artificial
  Probe
atcagatccttatgtcaaagtgtct

SEQ ID NO: 20698 - DNA, 25 bp, Artificial
  Probe
aaatctgaaggcaatggacattacc

SEQ ID NO: 20699 - DNA, 25 bp, Artificial
  Probe
gatccttatgtcaaagtgtctctga

SEQ ID NO: 20700 - DNA, 25 bp, Artificial
  Probe
atcatcagatccttatgtcaaagtg

SEQ ID NO: 20701 - DNA, 25 bp, Artificial
  Probe
aatctgaaggcaatggacattaccg

SEQ ID NO: 20702 - DNA, 25 bp, Artificial
  Probe
tttatttgaagtctctgatctctcc

SEQ ID NO: 20703 - DNA, 25 bp, Artificial
  Probe
tatttgaagtctctgatctctccag

SEQ ID NO: 20704 - DNA, 25 bp, Artificial
  Probe
atgtcaaagtgtctctgatgtgtga

SEQ ID NO: 20705 - DNA, 25 bp, Artificial
  Probe
ttggaagagaccattggaatgaaat

SEQ ID NO: 20706 - DNA, 25 bp, Artificial
  Probe
aatggacattaccggatcatcagat

SEQ ID NO: 20707 - DNA, 25 bp, Artificial
  Probe
atttgaagtctctgatctctccagg

SEQ ID NO: 20708 - DNA, 25 bp, Artificial
  Probe
cttggaagagaccattggaatgaaa

SEQ ID NO: 20709 - DNA, 25 bp, Artificial
  Probe
tgtcaaagtgtctctgatgtgtgag

SEQ ID NO: 20710 - DNA, 25 bp, Artificial
  Probe
tggaagagaccattggaatgaaatg

SEQ ID NO: 20711 - DNA, 25 bp, Artificial
  Probe
cagaaatctgaaggcaatggacatt

SEQ ID NO: 20712 - DNA, 25 bp, Artificial
  Probe
caatggacattaccggatcatcaga

SEQ ID NO: 20713 - DNA, 25 bp, Artificial
  Probe
gaagagaccattggaatgaaatgct

SEQ ID NO: 20714 - DNA, 25 bp, Artificial
  Probe
gggaagccacagtatggaaagatat

SEQ ID NO: 20715 - DNA, 25 bp, Artificial
  Probe
tgattggggaagtgattcttgataa

SEQ ID NO: 20716 - DNA, 25 bp, Artificial
  Probe
atgattggggaagtgattcttgata

SEQ ID NO: 20717 - DNA, 25 bp, Artificial
  Probe
aagagaccattggaatgaaatgctg

SEQ ID NO: 20718 - DNA, 25 bp, Artificial
  Probe
aatgaggtcataggtgtgtgtcgaa

SEQ ID NO: 20719 - DNA, 25 bp, Artificial
  Probe
gtcaaagtgtctctgatgtgtgagg

SEQ ID NO: 20720 - DNA, 25 bp, Artificial
  Probe
gattggggaagtgattcttgataat

SEQ ID NO: 20721 - DNA, 25 bp, Artificial
  Probe
ttggggaagtgattcttgataattt

SEQ ID NO: 20722 - DNA, 25 bp, Artificial
  Probe
ggaagagaccattggaatgaaatgc

SEQ ID NO: 20723 - DNA, 25 bp, Artificial
  Probe
atcatgttttccctttgctatttgc

SEQ ID NO: 20724 - DNA, 25 bp, Artificial
  Probe
gaagccacagtatggaaagatatcc

SEQ ID NO: 20725 - DNA, 25 bp, Artificial
  Probe
ggaagccacagtatggaaagatatc

SEQ ID NO: 20726 - DNA, 25 bp, Artificial
  Probe
attggggaagtgattcttgataatt

SEQ ID NO: 20727 - DNA, 25 bp, Artificial
  Probe
aattgtatcctcatcatcctccgtc

SEQ ID NO: 20728 - DNA, 25 bp, Artificial
  Probe
aaatctctcaccctttattccaacc

SEQ ID NO: 20729 - DNA, 25 bp, Artificial
  Probe
atcttgacgaaagccttaaatctct

SEQ ID NO: 20730 - DNA, 25 bp, Artificial
  Probe
tcttgacgaaagccttaaatctctc

SEQ ID NO: 20731 - DNA, 25 bp, Artificial
  Probe
actatcttgacgaaagccttaaatc

SEQ ID NO: 20732 - DNA, 25 bp, Artificial
  Probe
agccttaaatctctcaccctttatt

SEQ ID NO: 20733 - DNA, 25 bp, Artificial
  Probe
aagccttaaatctctcaccctttat

SEQ ID NO: 20734 - DNA, 25 bp, Artificial
  Probe
gccttaaatctctcaccctttattc

SEQ ID NO: 20735 - DNA, 25 bp, Artificial
  Probe
tatcttgacgaaagccttaaatctc

SEQ ID NO: 20736 - DNA, 25 bp, Artificial
  Probe
ctatcttgacgaaagccttaaatct

SEQ ID NO: 20737 - DNA, 25 bp, Artificial
  Probe
ctactatcttgacgaaagccttaaa

SEQ ID NO: 20738 - DNA, 25 bp, Artificial
  Probe
ccttaaatctctcaccctttattcc

SEQ ID NO: 20739 - DNA, 25 bp, Artificial
  Probe
cttgacgaaagccttaaatctctca

SEQ ID NO: 20740 - DNA, 25 bp, Artificial
  Probe
attgtatcctcatcatcctccgtcc

SEQ ID NO: 20741 - DNA, 25 bp, Artificial
  Probe
taaatctctcaccctttattccaac

SEQ ID NO: 20742 - DNA, 25 bp, Artificial
  Probe
ttgacgaaagccttaaatctctcac

SEQ ID NO: 20743 - DNA, 25 bp, Artificial
  Probe
atcgctatatattgacttacactct

SEQ ID NO: 20744 - DNA, 25 bp, Artificial
  Probe
tactatcttgacgaaagccttaaat

SEQ ID NO: 20745 - DNA, 25 bp, Artificial
  Probe
aatctctcaccctttattccaaccc

SEQ ID NO: 20746 - DNA, 25 bp, Artificial
  Probe
cttaaatctctcaccctttattcca

SEQ ID NO: 20747 - DNA, 25 bp, Artificial
  Probe
tctatgtgcaattgtatcctcatca

SEQ ID NO: 20748 - DNA, 25 bp, Artificial
  Probe
actctatgtgcaattgtatcctcat

SEQ ID NO: 20749 - DNA, 25 bp, Artificial
  Probe
ttaaatctctcaccctttattccaa

SEQ ID NO: 20750 - DNA, 25 bp, Artificial
  Probe
ctctatgtgcaattgtatcctcatc

SEQ ID NO: 20751 - DNA, 25 bp, Artificial
  Probe
tcgctatatattgacttacactcta

SEQ ID NO: 20752 - DNA, 25 bp, Artificial
  Probe
tatgtgcaattgtatcctcatcatc

SEQ ID NO: 20753 - DNA, 25 bp, Artificial
  Probe
ctatgtgcaattgtatcctcatcat

SEQ ID NO: 20754 - DNA, 25 bp, Artificial
  Probe
atattgacttacactctatgtgcaa

SEQ ID NO: 20755 - DNA, 25 bp, Artificial
  Probe
atgtgcaattgtatcctcatcatcc

SEQ ID NO: 20756 - DNA, 25 bp, Artificial
  Probe
gtgcaattgtatcctcatcatcctc

SEQ ID NO: 20757 - DNA, 25 bp, Artificial
  Probe
aatcgctatatattgacttacactc

SEQ ID NO: 20758 - DNA, 25 bp, Artificial
  Probe
attgacttacactctatgtgcaatt

SEQ ID NO: 20759 - DNA, 25 bp, Artificial
  Probe
cgaaagccttaaatctctcaccctt

SEQ ID NO: 20760 - DNA, 25 bp, Artificial
  Probe
aaagccttaaatctctcacccttta

SEQ ID NO: 20761 - DNA, 25 bp, Artificial
  Probe
atcatcctccgtccatgttgtttaa

SEQ ID NO: 20762 - DNA, 25 bp, Artificial
  Probe
tgtgcaattgtatcctcatcatcct

SEQ ID NO: 20763 - DNA, 25 bp, Artificial
  Probe
gaaagccttaaatctctcacccttt

SEQ ID NO: 20764 - DNA, 25 bp, Artificial
  Probe
ttgacttacactctatgtgcaattg

SEQ ID NO: 20765 - DNA, 25 bp, Artificial
  Probe
tgacttacactctatgtgcaattgt

SEQ ID NO: 20766 - DNA, 25 bp, Artificial
  Probe
cactctatgtgcaattgtatcctca

SEQ ID NO: 20767 - DNA, 25 bp, Artificial
  Probe
acactctatgtgcaattgtatcctc

SEQ ID NO: 20768 - DNA, 25 bp, Artificial
  Probe
tgacgaaagccttaaatctctcacc

SEQ ID NO: 20769 - DNA, 25 bp, Artificial
  Probe
gctactatcttgacgaaagccttaa

SEQ ID NO: 20770 - DNA, 25 bp, Artificial
  Probe
caattgtatcctcatcatcctccgt

SEQ ID NO: 20771 - DNA, 25 bp, Artificial
  Probe
tattgacttacactctatgtgcaat

SEQ ID NO: 20772 - DNA, 25 bp, Artificial
  Probe
tatctacacacacacacacacacac

SEQ ID NO: 20773 - DNA, 25 bp, Artificial
  Probe
gtatctacacacacacacacacaca

SEQ ID NO: 20774 - DNA, 25 bp, Artificial
  Probe
ataactgtatctacacacacacaca

SEQ ID NO: 20775 - DNA, 25 bp, Artificial
  Probe
taactgtatctacacacacacacac

SEQ ID NO: 20776 - DNA, 25 bp, Artificial
  Probe
aataactgtatctacacacacacac

SEQ ID NO: 20777 - DNA, 25 bp, Artificial
  Probe
ctgtatctacacacacacacacaca

SEQ ID NO: 20778 - DNA, 25 bp, Artificial
  Probe
actgtatctacacacacacacacac

SEQ ID NO: 20779 - DNA, 25 bp, Artificial
  Probe
tgtatctacacacacacacacacac

SEQ ID NO: 20780 - DNA, 25 bp, Artificial
  Probe
aactgtatctacacacacacacaca

SEQ ID NO: 20781 - DNA, 25 bp, Artificial
  Probe
cacacaagttgccatgaaggttaag

SEQ ID NO: 20782 - DNA, 25 bp, Artificial
  Probe
acacaagttgccatgaaggttaagt

SEQ ID NO: 20783 - DNA, 25 bp, Artificial
  Probe
tgccatgaaggttaagtggatgtaa

SEQ ID NO: 20784 - DNA, 25 bp, Artificial
  Probe
ttgccatgaaggttaagtggatgta

SEQ ID NO: 20785 - DNA, 25 bp, Artificial
  Probe
acacacaagttgccatgaaggttaa

SEQ ID NO: 20786 - DNA, 25 bp, Artificial
  Probe
ggaaataactgtatctacacacaca

SEQ ID NO: 20787 - DNA, 25 bp, Artificial
  Probe
tggaaataactgtatctacacacac

SEQ ID NO: 20788 - DNA, 25 bp, Artificial
  Probe
gttaagtggatgtaaaccatttggg

SEQ ID NO: 20789 - DNA, 25 bp, Artificial
  Probe
cacaagttgccatgaaggttaagtg

SEQ ID NO: 20790 - DNA, 25 bp, Artificial
  Probe
ttattgctgtgaacagacaccatga

SEQ ID NO: 20791 - DNA, 25 bp, Artificial
  Probe
aagttgccatgaaggttaagtggat

SEQ ID NO: 20792 - DNA, 25 bp, Artificial
  Probe
aaataactgtatctacacacacaca

SEQ ID NO: 20793 - DNA, 25 bp, Artificial
  Probe
ccatgaaggttaagtggatgtaaac

SEQ ID NO: 20794 - DNA, 25 bp, Artificial
  Probe
gaaataactgtatctacacacacac

SEQ ID NO: 20795 - DNA, 25 bp, Artificial
  Probe
atggaaataactgtatctacacaca

SEQ ID NO: 20796 - DNA, 25 bp, Artificial
  Probe
aacatcttgaaatggaaataactgt

SEQ ID NO: 20797 - DNA, 25 bp, Artificial
  Probe
gccatgaaggttaagtggatgtaaa

SEQ ID NO: 20798 - DNA, 25 bp, Artificial
  Probe
tattgctgtgaacagacaccatgac

SEQ ID NO: 20799 - DNA, 25 bp, Artificial
  Probe
cacacacaagttgccatgaaggtta

SEQ ID NO: 20800 - DNA, 25 bp, Artificial
  Probe
tgtgtcttagttcaggttttattgc

SEQ ID NO: 20801 - DNA, 25 bp, Artificial
  Probe
gtgtcttagttcaggttttattgct

SEQ ID NO: 20802 - DNA, 25 bp, Artificial
  Probe
agttgccatgaaggttaagtggatg

SEQ ID NO: 20803 - DNA, 25 bp, Artificial
  Probe
gggtgtgtcttagttcaggttttat

SEQ ID NO: 20804 - DNA, 25 bp, Artificial
  Probe
ggtgtgtcttagttcaggttttatt

SEQ ID NO: 20805 - DNA, 25 bp, Artificial
  Probe
agtgctaaaacatcttgaaatggaa

SEQ ID NO: 20806 - DNA, 25 bp, Artificial
  Probe
tttattgctgtgaacagacaccatg

SEQ ID NO: 20807 - DNA, 25 bp, Artificial
  Probe
aaacatcttgaaatggaaataactg

SEQ ID NO: 20808 - DNA, 25 bp, Artificial
  Probe
gttgccatgaaggttaagtggatgt

SEQ ID NO: 20809 - DNA, 25 bp, Artificial
  Probe
caagttgccatgaaggttaagtgga

SEQ ID NO: 20810 - DNA, 25 bp, Artificial
  Probe
gcctagtgctaaaacatcttgaaat

SEQ ID NO: 20811 - DNA, 25 bp, Artificial
  Probe
gtgctaaaacatcttgaaatggaaa

SEQ ID NO: 20812 - DNA, 25 bp, Artificial
  Probe
tatgcctagtgctaaaacatcttga

SEQ ID NO: 20813 - DNA, 25 bp, Artificial
  Probe
tgcctagtgctaaaacatcttgaaa

SEQ ID NO: 20814 - DNA, 25 bp, Artificial
  Probe
gtgtgtcttagttcaggttttattg

SEQ ID NO: 20815 - DNA, 25 bp, Artificial
  Probe
tagtgctaaaacatcttgaaatgga

SEQ ID NO: 20816 - DNA, 25 bp, Artificial
  Probe
ttatgcctagtgctaaaacatcttg

SEQ ID NO: 20817 - DNA, 25 bp, Artificial
  Probe
gaacagagtctgacagtgatgaatc

SEQ ID NO: 20818 - DNA, 25 bp, Artificial
  Probe
aacagagtctgacagtgatgaatca

SEQ ID NO: 20819 - DNA, 25 bp, Artificial
  Probe
ggaacagagtctgacagtgatgaat

SEQ ID NO: 20820 - DNA, 25 bp, Artificial
  Probe
tggtgtttgaaaagtggaactacag

SEQ ID NO: 20821 - DNA, 25 bp, Artificial
  Probe
ggtgtttgaaaagtggaactacagc

SEQ ID NO: 20822 - DNA, 25 bp, Artificial
  Probe
gggaacagagtctgacagtgatgaa

SEQ ID NO: 20823 - DNA, 25 bp, Artificial
  Probe
tgtatatttgctgcaaagagaaacc

SEQ ID NO: 20824 - DNA, 25 bp, Artificial
  Probe
gtatatttgctgcaaagagaaaccg

SEQ ID NO: 20825 - DNA, 25 bp, Artificial
  Probe
atgtatatttgctgcaaagagaaac

SEQ ID NO: 20826 - DNA, 25 bp, Artificial
  Probe
aatgtatatttgctgcaaagagaaa

SEQ ID NO: 20827 - DNA, 25 bp, Artificial
  Probe
tatatttgctgcaaagagaaaccgc

SEQ ID NO: 20828 - DNA, 25 bp, Artificial
  Probe
cttctcctcactgtcactctctgac

SEQ ID NO: 20829 - DNA, 25 bp, Artificial
  Probe
taatgtatatttgctgcaaagagaa

SEQ ID NO: 20830 - DNA, 25 bp, Artificial
  Probe
ttaatgtatatttgctgcaaagaga

SEQ ID NO: 20831 - DNA, 25 bp, Artificial
  Probe
gcagagcaataacactatatttatt

SEQ ID NO: 20832 - DNA, 25 bp, Artificial
  Probe
ctcactgtcactctctgaccagatg

SEQ ID NO: 20833 - DNA, 25 bp, Artificial
  Probe
tgcagagcaataacactatatttat

SEQ ID NO: 20834 - DNA, 25 bp, Artificial
  Probe
cactgtcactctctgaccagatgtc

SEQ ID NO: 20835 - DNA, 25 bp, Artificial
  Probe
tttaatgtatatttgctgcaaagag

SEQ ID NO: 20836 - DNA, 25 bp, Artificial
  Probe
atatttgctgcaaagagaaaccgct

SEQ ID NO: 20837 - DNA, 25 bp, Artificial
  Probe
actgtcactctctgaccagatgtca

SEQ ID NO: 20838 - DNA, 25 bp, Artificial
  Probe
tcactgtcactctctgaccagatgt

SEQ ID NO: 20839 - DNA, 25 bp, Artificial
  Probe
tatttgctgcaaagagaaaccgctt

SEQ ID NO: 20840 - DNA, 25 bp, Artificial
  Probe
cctcactgtcactctctgaccagat

SEQ ID NO: 20841 - DNA, 25 bp, Artificial
  Probe
ttctcctcactgtcactctctgacc

SEQ ID NO: 20842 - DNA, 25 bp, Artificial
  Probe
tctattttaatgtatatttgctgca

SEQ ID NO: 20843 - DNA, 25 bp, Artificial
  Probe
atttgctgcaaagagaaaccgcttt

SEQ ID NO: 20844 - DNA, 25 bp, Artificial
  Probe
ttttaatgtatatttgctgcaaaga

SEQ ID NO: 20845 - DNA, 25 bp, Artificial
  Probe
attttaatgtatatttgctgcaaag

SEQ ID NO: 20846 - DNA, 25 bp, Artificial
  Probe
tttgctgcaaagagaaaccgctttt

SEQ ID NO: 20847 - DNA, 25 bp, Artificial
  Probe
tgtacagagactctattttaatgta

SEQ ID NO: 20848 - DNA, 25 bp, Artificial
  Probe
ctgcaaagagaaaccgcttttggtt

SEQ ID NO: 20849 - DNA, 25 bp, Artificial
  Probe
ccaacatcacagtcacatacagaga

SEQ ID NO: 20850 - DNA, 25 bp, Artificial
  Probe
tccaacatcacagtcacatacagag

SEQ ID NO: 20851 - DNA, 25 bp, Artificial
  Probe
cgaagatagtgctctccattgaaga

SEQ ID NO: 20852 - DNA, 25 bp, Artificial
  Probe
caacatcacagtcacatacagagac

SEQ ID NO: 20853 - DNA, 25 bp, Artificial
  Probe
gtccaacatcacagtcacatacaga

SEQ ID NO: 20854 - DNA, 25 bp, Artificial
  Probe
gaagagtcctgccaagatgtctatc

SEQ ID NO: 20855 - DNA, 25 bp, Artificial
  Probe
ctttgtattggagaaactgttaagc

SEQ ID NO: 20856 - DNA, 25 bp, Artificial
  Probe
tgtccaacatcacagtcacatacag

SEQ ID NO: 20857 - DNA, 25 bp, Artificial
  Probe
aacatcacagtcacatacagagacg

SEQ ID NO: 20858 - DNA, 25 bp, Artificial
  Probe
gcgaagatagtgctctccattgaag

SEQ ID NO: 20859 - DNA, 25 bp, Artificial
  Probe
tttgtattggagaaactgttaagct

SEQ ID NO: 20860 - DNA, 25 bp, Artificial
  Probe
gaagatagtgctctccattgaagag

SEQ ID NO: 20861 - DNA, 25 bp, Artificial
  Probe
aagagtcctgccaagatgtctatcg

SEQ ID NO: 20862 - DNA, 25 bp, Artificial
  Probe
tgtattggagaaactgttaagctaa

SEQ ID NO: 20863 - DNA, 25 bp, Artificial
  Probe
ttgtattggagaaactgttaagcta

SEQ ID NO: 20864 - DNA, 25 bp, Artificial
  Probe
tctttgtattggagaaactgttaag

SEQ ID NO: 20865 - DNA, 25 bp, Artificial
  Probe
atgtccaacatcacagtcacataca

SEQ ID NO: 20866 - DNA, 25 bp, Artificial
  Probe
gatagtgctctccattgaagagaac

SEQ ID NO: 20867 - DNA, 25 bp, Artificial
  Probe
agatagtgctctccattgaagagaa

SEQ ID NO: 20868 - DNA, 25 bp, Artificial
  Probe
aagatagtgctctccattgaagaga

SEQ ID NO: 20869 - DNA, 25 bp, Artificial
  Probe
ggaagagtcctgccaagatgtctat

SEQ ID NO: 20870 - DNA, 25 bp, Artificial
  Probe
atagtgctctccattgaagagaact

SEQ ID NO: 20871 - DNA, 25 bp, Artificial
  Probe
ttatatgtgcatatgtcctgggttt

SEQ ID NO: 20872 - DNA, 25 bp, Artificial
  Probe
ctctttgtattggagaaactgttaa

SEQ ID NO: 20873 - DNA, 25 bp, Artificial
  Probe
gttatatgtgcatatgtcctgggtt

SEQ ID NO: 20874 - DNA, 25 bp, Artificial
  Probe
tagtgctctccattgaagagaactt

SEQ ID NO: 20875 - DNA, 25 bp, Artificial
  Probe
aacattttccagaagcgaagatagt

SEQ ID NO: 20876 - DNA, 25 bp, Artificial
  Probe
cattgaggcagaggacaacatgaac

SEQ ID NO: 20877 - DNA, 25 bp, Artificial
  Probe
gtattggagaaactgttaagctaaa

SEQ ID NO: 20878 - DNA, 25 bp, Artificial
  Probe
acattttccagaagcgaagatagtg

SEQ ID NO: 20879 - DNA, 25 bp, Artificial
  Probe
attgaggcagaggacaacatgaact

SEQ ID NO: 20880 - DNA, 25 bp, Artificial
  Probe
gaagcgaagatagtgctctccattg

SEQ ID NO: 20881 - DNA, 25 bp, Artificial
  Probe
ggttatatgtgcatatgtcctgggt

SEQ ID NO: 20882 - DNA, 25 bp, Artificial
  Probe
agaagcgaagatagtgctctccatt

SEQ ID NO: 20883 - DNA, 25 bp, Artificial
  Probe
agcgaagatagtgctctccattgaa

SEQ ID NO: 20884 - DNA, 25 bp, Artificial
  Probe
aagcgaagatagtgctctccattga

SEQ ID NO: 20885 - DNA, 25 bp, Artificial
  Probe
tggagaaactgttaagctaaataaa

SEQ ID NO: 20886 - DNA, 25 bp, Artificial
  Probe
ttggagaaactgttaagctaaataa

SEQ ID NO: 20887 - DNA, 25 bp, Artificial
  Probe
cattttccagaagcgaagatagtgc

SEQ ID NO: 20888 - DNA, 25 bp, Artificial
  Probe
agaggacaacatgaactgccagatg

SEQ ID NO: 20889 - DNA, 25 bp, Artificial
  Probe
attggagaaactgttaagctaaata

SEQ ID NO: 20890 - DNA, 25 bp, Artificial
  Probe
tattggagaaactgttaagctaaat

SEQ ID NO: 20891 - DNA, 25 bp, Artificial
  Probe
cagaagcgaagatagtgctctccat

SEQ ID NO: 20892 - DNA, 25 bp, Artificial
  Probe
ttccagaagcgaagatagtgctctc

SEQ ID NO: 20893 - DNA, 25 bp, Artificial
  Probe
tgtcctgggttttaatatttctctt

SEQ ID NO: 20894 - DNA, 25 bp, Artificial
  Probe
actatgtactcattcatgtagcagc

SEQ ID NO: 20895 - DNA, 25 bp, Artificial
  Probe
gcactatgtactcattcatgtagca

SEQ ID NO: 20896 - DNA, 25 bp, Artificial
  Probe
cactatgtactcattcatgtagcag

SEQ ID NO: 20897 - DNA, 25 bp, Artificial
  Probe
ctatgtactcattcatgtagcagcc

SEQ ID NO: 20898 - DNA, 25 bp, Artificial
  Probe
gacaaggtctcaatatgtaaggcag

SEQ ID NO: 20899 - DNA, 25 bp, Artificial
  Probe
tatgtactcattcatgtagcagcct

SEQ ID NO: 20900 - DNA, 25 bp, Artificial
  Probe
ggacctatgaccagagtatacagta

SEQ ID NO: 20901 - DNA, 25 bp, Artificial
  Probe
acaaggtctcaatatgtaaggcagg

SEQ ID NO: 20902 - DNA, 25 bp, Artificial
  Probe
ttcctaaagaacctccattacagtg

SEQ ID NO: 20903 - DNA, 25 bp, Artificial
  Probe
tgcactatgtactcattcatgtagc

SEQ ID NO: 20904 - DNA, 25 bp, Artificial
  Probe
ctaaagaacctccattacagtgtcc

SEQ ID NO: 20905 - DNA, 25 bp, Artificial
  Probe
cctaaagaacctccattacagtgtc

SEQ ID NO: 20906 - DNA, 25 bp, Artificial
  Probe
attcctaaagaacctccattacagt

SEQ ID NO: 20907 - DNA, 25 bp, Artificial
  Probe
gacctatgaccagagtatacagtac

SEQ ID NO: 20908 - DNA, 25 bp, Artificial
  Probe
tactcattcatgtagcagcctcaag

SEQ ID NO: 20909 - DNA, 25 bp, Artificial
  Probe
taaagaacctccattacagtgtcct

SEQ ID NO: 20910 - DNA, 25 bp, Artificial
  Probe
tcctaaagaacctccattacagtgt

SEQ ID NO: 20911 - DNA, 25 bp, Artificial
  Probe
atgtactcattcatgtagcagcctc

SEQ ID NO: 20912 - DNA, 25 bp, Artificial
  Probe
ttgcactatgtactcattcatgtag

SEQ ID NO: 20913 - DNA, 25 bp, Artificial
  Probe
gtactcattcatgtagcagcctcaa

SEQ ID NO: 20914 - DNA, 25 bp, Artificial
  Probe
tctccgtagacctttgatttgtttg

SEQ ID NO: 20915 - DNA, 25 bp, Artificial
  Probe
caaggtctcaatatgtaaggcaggc

SEQ ID NO: 20916 - DNA, 25 bp, Artificial
  Probe
ttcatgtagcagcctcaagaaatat

SEQ ID NO: 20917 - DNA, 25 bp, Artificial
  Probe
attcatgtagcagcctcaagaaata

SEQ ID NO: 20918 - DNA, 25 bp, Artificial
  Probe
ctcattcatgtagcagcctcaagaa

SEQ ID NO: 20919 - DNA, 25 bp, Artificial
  Probe
aaggtctcaatatgtaaggcaggct

SEQ ID NO: 20920 - DNA, 25 bp, Artificial
  Probe
aaagaacctccattacagtgtcctt

SEQ ID NO: 20921 - DNA, 25 bp, Artificial
  Probe
tcatgtagcagcctcaagaaatatg

SEQ ID NO: 20922 - DNA, 25 bp, Artificial
  Probe
tattcctaaagaacctccattacag

SEQ ID NO: 20923 - DNA, 25 bp, Artificial
  Probe
ctattcctaaagaacctccattaca

SEQ ID NO: 20924 - DNA, 25 bp, Artificial
  Probe
actattcctaaagaacctccattac

SEQ ID NO: 20925 - DNA, 25 bp, Artificial
  Probe
atacagtactattctccaacagctt

SEQ ID NO: 20926 - DNA, 25 bp, Artificial
  Probe
ggactattcctaaagaacctccatt

SEQ ID NO: 20927 - DNA, 25 bp, Artificial
  Probe
cattcatgtagcagcctcaagaaat

SEQ ID NO: 20928 - DNA, 25 bp, Artificial
  Probe
ctccgtagacctttgatttgtttgc

SEQ ID NO: 20929 - DNA, 25 bp, Artificial
  Probe
gactattcctaaagaacctccatta

SEQ ID NO: 20930 - DNA, 25 bp, Artificial
  Probe
gtatacagtactattctccaacagc

SEQ ID NO: 20931 - DNA, 25 bp, Artificial
  Probe
tatacagtactattctccaacagct

SEQ ID NO: 20932 - DNA, 25 bp, Artificial
  Probe
ctcctgaatgctgggatcataatag

SEQ ID NO: 20933 - DNA, 25 bp, Artificial
  Probe
gtagacctttgatttgtttgcacta

SEQ ID NO: 20934 - DNA, 25 bp, Artificial
  Probe
agacctttgatttgtttgcactatg

SEQ ID NO: 20935 - DNA, 25 bp, Artificial
  Probe
gacctttgatttgtttgcactatgt

SEQ ID NO: 20936 - DNA, 25 bp, Artificial
  Probe
tgtactcattcatgtagcagcctca

SEQ ID NO: 20937 - DNA, 25 bp, Artificial
  Probe
acctttgatttgtttgcactatgta

SEQ ID NO: 20938 - DNA, 25 bp, Artificial
  Probe
aagcaaataagcctggacctatgac

SEQ ID NO: 20939 - DNA, 25 bp, Artificial
  Probe
atcaagaaagagattggagatgaaa

SEQ ID NO: 20940 - DNA, 25 bp, Artificial
  Probe
caatgttaggttggaggattgcttc

SEQ ID NO: 20941 - DNA, 25 bp, Artificial
  Probe
taacaatgttaggttggaggattgc

SEQ ID NO: 20942 - DNA, 25 bp, Artificial
  Probe
aatgttaggttggaggattgcttcc

SEQ ID NO: 20943 - DNA, 25 bp, Artificial
  Probe
acaatgttaggttggaggattgctt

SEQ ID NO: 20944 - DNA, 25 bp, Artificial
  Probe
aacaatgttaggttggaggattgct

SEQ ID NO: 20945 - DNA, 25 bp, Artificial
  Probe
ctcagggttagagctaacaatgtta

SEQ ID NO: 20946 - DNA, 25 bp, Artificial
  Probe
agagattggagatgaaaactgaagc

SEQ ID NO: 20947 - DNA, 25 bp, Artificial
  Probe
aagagattggagatgaaaactgaag

SEQ ID NO: 20948 - DNA, 25 bp, Artificial
  Probe
gaaagagattggagatgaaaactga

SEQ ID NO: 20949 - DNA, 25 bp, Artificial
  Probe
agaaagagattggagatgaaaactg

SEQ ID NO: 20950 - DNA, 25 bp, Artificial
  Probe
aaagagattggagatgaaaactgaa

SEQ ID NO: 20951 - DNA, 25 bp, Artificial
  Probe
aagaaagagattggagatgaaaact

SEQ ID NO: 20952 - DNA, 25 bp, Artificial
  Probe
gagattggagatgaaaactgaagcc

SEQ ID NO: 20953 - DNA, 25 bp, Artificial
  Probe
caagaaagagattggagatgaaaac

SEQ ID NO: 20954 - DNA, 25 bp, Artificial
  Probe
tcaagaaagagattggagatgaaaa

SEQ ID NO: 20955 - DNA, 25 bp, Artificial
  Probe
gagatgaaaactgaagccagcattc

SEQ ID NO: 20956 - DNA, 25 bp, Artificial
  Probe
gattggagatgaaaactgaagccag

SEQ ID NO: 20957 - DNA, 25 bp, Artificial
  Probe
agattggagatgaaaactgaagcca

SEQ ID NO: 20958 - DNA, 25 bp, Artificial
  Probe
atgttaggttggaggattgcttccc

SEQ ID NO: 20959 - DNA, 25 bp, Artificial
  Probe
tagagctaacaatgttaggttggag

SEQ ID NO: 20960 - DNA, 25 bp, Artificial
  Probe
ctaacaatgttaggttggaggattg

SEQ ID NO: 20961 - DNA, 25 bp, Artificial
  Probe
ttagagctaacaatgttaggttgga

SEQ ID NO: 20962 - DNA, 25 bp, Artificial
  Probe
gttagagctaacaatgttaggttgg

SEQ ID NO: 20963 - DNA, 25 bp, Artificial
  Probe
ggttagagctaacaatgttaggttg

SEQ ID NO: 20964 - DNA, 25 bp, Artificial
  Probe
gctaacaatgttaggttggaggatt

SEQ ID NO: 20965 - DNA, 25 bp, Artificial
  Probe
ggagatgaaaactgaagccagcatt

SEQ ID NO: 20966 - DNA, 25 bp, Artificial
  Probe
agctaacaatgttaggttggaggat

SEQ ID NO: 20967 - DNA, 25 bp, Artificial
  Probe
gagctaacaatgttaggttggagga

SEQ ID NO: 20968 - DNA, 25 bp, Artificial
  Probe
agagctaacaatgttaggttggagg

SEQ ID NO: 20969 - DNA, 25 bp, Artificial
  Probe
attggagatgaaaactgaagccagc

SEQ ID NO: 20970 - DNA, 25 bp, Artificial
  Probe
agatgaaaactgaagccagcattca

SEQ ID NO: 20971 - DNA, 25 bp, Artificial
  Probe
aatatacagtcctcctgcttgaggc

SEQ ID NO: 20972 - DNA, 25 bp, Artificial
  Probe
tcagggttagagctaacaatgttag

SEQ ID NO: 20973 - DNA, 25 bp, Artificial
  Probe
gggttagagctaacaatgttaggtt

SEQ ID NO: 20974 - DNA, 25 bp, Artificial
  Probe
cagggttagagctaacaatgttagg

SEQ ID NO: 20975 - DNA, 25 bp, Artificial
  Probe
agggttagagctaacaatgttaggt

SEQ ID NO: 20976 - DNA, 25 bp, Artificial
  Probe
tggagatgaaaactgaagccagcat

SEQ ID NO: 20977 - DNA, 25 bp, Artificial
  Probe
atatacagtcctcctgcttgaggct

SEQ ID NO: 20978 - DNA, 25 bp, Artificial
  Probe
ttggagatgaaaactgaagccagca

SEQ ID NO: 20979 - DNA, 25 bp, Artificial
  Probe
tatacagtcctcctgcttgaggctc

SEQ ID NO: 20980 - DNA, 25 bp, Artificial
  Probe
tactgcttcctttgtttactctgtg

SEQ ID NO: 20981 - DNA, 25 bp, Artificial
  Probe
ctgtactgcttcctttgtttactct

SEQ ID NO: 20982 - DNA, 25 bp, Artificial
  Probe
gtactgcttcctttgtttactctgt

SEQ ID NO: 20983 - DNA, 25 bp, Artificial
  Probe
tgtactgcttcctttgtttactctg

SEQ ID NO: 20984 - DNA, 25 bp, Artificial
  Probe
gcttcctttgtttactctgtgcttt

SEQ ID NO: 20985 - DNA, 25 bp, Artificial
  Probe
atgctgtactgcttcctttgtttac

SEQ ID NO: 20986 - DNA, 25 bp, Artificial
  Probe
catgctgtactgcttcctttgttta

SEQ ID NO: 20987 - DNA, 25 bp, Artificial
  Probe
gctgtactgcttcctttgtttactc

SEQ ID NO: 20988 - DNA, 25 bp, Artificial
  Probe
tgcttcctttgtttactctgtgctt

SEQ ID NO: 20989 - DNA, 25 bp, Artificial
  Probe
tgctgtactgcttcctttgtttact

SEQ ID NO: 20990 - DNA, 25 bp, Artificial
  Probe
ctgcttcctttgtttactctgtgct

SEQ ID NO: 20991 - DNA, 25 bp, Artificial
  Probe
actgcttcctttgtttactctgtgc

SEQ ID NO: 20992 - DNA, 25 bp, Artificial
  Probe
tcatgctgtactgcttcctttgttt

SEQ ID NO: 20993 - DNA, 25 bp, Artificial
  Probe
cttaccttccaggaggaatacaaca

SEQ ID NO: 20994 - DNA, 25 bp, Artificial
  Probe
ctcatgctgtactgcttcctttgtt

SEQ ID NO: 20995 - DNA, 25 bp, Artificial
  Probe
ctcactcatgctgtactgcttcctt

SEQ ID NO: 20996 - DNA, 25 bp, Artificial
  Probe
ttaccttccaggaggaatacaacac

SEQ ID NO: 20997 - DNA, 25 bp, Artificial
  Probe
gtacgcagattcaaggaccttacct

SEQ ID NO: 20998 - DNA, 25 bp, Artificial
  Probe
ccttaccttccaggaggaatacaac

SEQ ID NO: 20999 - DNA, 25 bp, Artificial
  Probe
ccaggaggaatacaacacactgttc

SEQ ID NO: 21000 - DNA, 25 bp, Artificial
  Probe
cagattcaaggaccttaccttccag

SEQ ID NO: 21001 - DNA, 25 bp, Artificial
  Probe
accttaccttccaggaggaatacaa

SEQ ID NO: 21002 - DNA, 25 bp, Artificial
  Probe
cactcatgctgtactgcttcctttg

SEQ ID NO: 21003 - DNA, 25 bp, Artificial
  Probe
tccaggaggaatacaacacactgtt

SEQ ID NO: 21004 - DNA, 25 bp, Artificial
  Probe
taccttccaggaggaatacaacaca

SEQ ID NO: 21005 - DNA, 25 bp, Artificial
  Probe
tcactcatgctgtactgcttccttt

SEQ ID NO: 21006 - DNA, 25 bp, Artificial
  Probe
gaccttaccttccaggaggaataca

SEQ ID NO: 21007 - DNA, 25 bp, Artificial
  Probe
cttccaggaggaatacaacacactg

SEQ ID NO: 21008 - DNA, 25 bp, Artificial
  Probe
caggaggaatacaacacactgttcc

SEQ ID NO: 21009 - DNA, 25 bp, Artificial
  Probe
actcatgctgtactgcttcctttgt

SEQ ID NO: 21010 - DNA, 25 bp, Artificial
  Probe
attcaaggaccttaccttccaggag

SEQ ID NO: 21011 - DNA, 25 bp, Artificial
  Probe
gattcaaggaccttaccttccagga

SEQ ID NO: 21012 - DNA, 25 bp, Artificial
  Probe
agattcaaggaccttaccttccagg

SEQ ID NO: 21013 - DNA, 25 bp, Artificial
  Probe
tacgcagattcaaggaccttacctt

SEQ ID NO: 21014 - DNA, 25 bp, Artificial
  Probe
ttccaggaggaatacaacacactgt

SEQ ID NO: 21015 - DNA, 25 bp, Artificial
  Probe
ggaccttaccttccaggaggaatac

SEQ ID NO: 21016 - DNA, 25 bp, Artificial
  Probe
aggaccttaccttccaggaggaata

SEQ ID NO: 21017 - DNA, 25 bp, Artificial
  Probe
ccttccaggaggaatacaacacact

SEQ ID NO: 21018 - DNA, 25 bp, Artificial
  Probe
accttccaggaggaatacaacacac

SEQ ID NO: 21019 - DNA, 25 bp, Artificial
  Probe
gcagattcaaggaccttaccttcca

SEQ ID NO: 21020 - DNA, 25 bp, Artificial
  Probe
gaggaatacaacacactgttccctg

SEQ ID NO: 21021 - DNA, 25 bp, Artificial
  Probe
aaggaccttaccttccaggaggaat

SEQ ID NO: 21022 - DNA, 25 bp, Artificial
  Probe
acgcagattcaaggaccttaccttc

SEQ ID NO: 21023 - DNA, 25 bp, Artificial
  Probe
ggaggaatacaacacactgttccct

SEQ ID NO: 21024 - DNA, 25 bp, Artificial
  Probe
aggaggaatacaacacactgttccc

SEQ ID NO: 21025 - DNA, 25 bp, Artificial
  Probe
gagaagaagcatcactaatggtcta

SEQ ID NO: 21026 - DNA, 25 bp, Artificial
  Probe
gaagaagcatcactaatggtctatg

SEQ ID NO: 21027 - DNA, 25 bp, Artificial
  Probe
agaagaagcatcactaatggtctat

SEQ ID NO: 21028 - DNA, 25 bp, Artificial
  Probe
aagaagcatcactaatggtctatga

SEQ ID NO: 21029 - DNA, 25 bp, Artificial
  Probe
tctatcactgtggatggagaagaag

SEQ ID NO: 21030 - DNA, 25 bp, Artificial
  Probe
atggagaagaagcatcactaatggt

SEQ ID NO: 21031 - DNA, 25 bp, Artificial
  Probe
atatgaccgttctatcactgtggat

SEQ ID NO: 21032 - DNA, 25 bp, Artificial
  Probe
aagcatcactaatggtctatgacat

SEQ ID NO: 21033 - DNA, 25 bp, Artificial
  Probe
agaagcatcactaatggtctatgac

SEQ ID NO: 21034 - DNA, 25 bp, Artificial
  Probe
gaagcatcactaatggtctatgaca

SEQ ID NO: 21035 - DNA, 25 bp, Artificial
  Probe
ggagaagaagcatcactaatggtct

SEQ ID NO: 21036 - DNA, 25 bp, Artificial
  Probe
tggagaagaagcatcactaatggtc

SEQ ID NO: 21037 - DNA, 25 bp, Artificial
  Probe
tatgaccgttctatcactgtggatg

SEQ ID NO: 21038 - DNA, 25 bp, Artificial
  Probe
ctgttctatatgcttgctgtttgtt

SEQ ID NO: 21039 - DNA, 25 bp, Artificial
  Probe
tgttctatatgcttgctgtttgttt

SEQ ID NO: 21040 - DNA, 25 bp, Artificial
  Probe
ctatcactgtggatggagaagaagc

SEQ ID NO: 21041 - DNA, 25 bp, Artificial
  Probe
agcatcactaatggtctatgacatt

SEQ ID NO: 21042 - DNA, 25 bp, Artificial
  Probe
gaggctgttctatatgcttgctgtt

SEQ ID NO: 21043 - DNA, 25 bp, Artificial
  Probe
atgtcattgtgtactcaataacgga

SEQ ID NO: 21044 - DNA, 25 bp, Artificial
  Probe
cggtatttctcagaactgtcaacta

SEQ ID NO: 21045 - DNA, 25 bp, Artificial
  Probe
tatgtcattgtgtactcaataacgg

SEQ ID NO: 21046 - DNA, 25 bp, Artificial
  Probe
gtcattgtgtactcaataacggaca

SEQ ID NO: 21047 - DNA, 25 bp, Artificial
  Probe
tgtcattgtgtactcaataacggac

SEQ ID NO: 21048 - DNA, 25 bp, Artificial
  Probe
ttctatcactgtggatggagaagaa

SEQ ID NO: 21049 - DNA, 25 bp, Artificial
  Probe
ttctatatgcttgctgtttgtttac

SEQ ID NO: 21050 - DNA, 25 bp, Artificial
  Probe
gttctatatgcttgctgtttgttta

SEQ ID NO: 21051 - DNA, 25 bp, Artificial
  Probe
tatcactgtggatggagaagaagca

SEQ ID NO: 21052 - DNA, 25 bp, Artificial
  Probe
tatttctcagaactgtcaactatgc

SEQ ID NO: 21053 - DNA, 25 bp, Artificial
  Probe
tctatatgcttgctgtttgtttaca

SEQ ID NO: 21054 - DNA, 25 bp, Artificial
  Probe
gttctatcactgtggatggagaaga

SEQ ID NO: 21055 - DNA, 25 bp, Artificial
  Probe
gctgttctatatgcttgctgtttgt

SEQ ID NO: 21056 - DNA, 25 bp, Artificial
  Probe
ggtatttctcagaactgtcaactat

SEQ ID NO: 21057 - DNA, 25 bp, Artificial
  Probe
cacacatatgaccgttctatcactg

SEQ ID NO: 21058 - DNA, 25 bp, Artificial
  Probe
tatgacatttgggaacaggatggag

SEQ ID NO: 21059 - DNA, 25 bp, Artificial
  Probe
ctatgacatttgggaacaggatgga

SEQ ID NO: 21060 - DNA, 25 bp, Artificial
  Probe
tctatgacatttgggaacaggatgg

SEQ ID NO: 21061 - DNA, 25 bp, Artificial
  Probe
gtctatgacatttgggaacaggatg

SEQ ID NO: 21062 - DNA, 25 bp, Artificial
  Probe
ctatatgcttgctgtttgtttacat

SEQ ID NO: 21063 - DNA, 25 bp, Artificial
  Probe
ttctcagaactgtcaactatgcaca

SEQ ID NO: 21064 - DNA, 25 bp, Artificial
  Probe
acacatatgaccgttctatcactgt

SEQ ID NO: 21065 - DNA, 25 bp, Artificial
  Probe
ggctgttctatatgcttgctgtttg

SEQ ID NO: 21066 - DNA, 25 bp, Artificial
  Probe
aggctgttctatatgcttgctgttt

SEQ ID NO: 21067 - DNA, 25 bp, Artificial
  Probe
cattgtgtactcaataacggacaag

SEQ ID NO: 21068 - DNA, 25 bp, Artificial
  Probe
gatggagaagaagcatcactaatgg

SEQ ID NO: 21069 - DNA, 25 bp, Artificial
  Probe
ggatggagaagaagcatcactaatg

SEQ ID NO: 21070 - DNA, 25 bp, Artificial
  Probe
cgaagaagatggcaaagattactac

SEQ ID NO: 21071 - DNA, 25 bp, Artificial
  Probe
attactactttgtgaccagggagat

SEQ ID NO: 21072 - DNA, 25 bp, Artificial
  Probe
gcgaagaagatggcaaagattacta

SEQ ID NO: 21073 - DNA, 25 bp, Artificial
  Probe
gaagaagatggcaaagattactact

SEQ ID NO: 21074 - DNA, 25 bp, Artificial
  Probe
aagattactactttgtgaccaggga

SEQ ID NO: 21075 - DNA, 25 bp, Artificial
  Probe
gattactactttgtgaccagggaga

SEQ ID NO: 21076 - DNA, 25 bp, Artificial
  Probe
agattactactttgtgaccagggag

SEQ ID NO: 21077 - DNA, 25 bp, Artificial
  Probe
ttactactttgtgaccagggagatg

SEQ ID NO: 21078 - DNA, 25 bp, Artificial
  Probe
aagaagatggcaaagattactactt

SEQ ID NO: 21079 - DNA, 25 bp, Artificial
  Probe
tactactttgtgaccagggagatga

SEQ ID NO: 21080 - DNA, 25 bp, Artificial
  Probe
ctactttgtgaccagggagatgatg

SEQ ID NO: 21081 - DNA, 25 bp, Artificial
  Probe
actactttgtgaccagggagatgat

SEQ ID NO: 21082 - DNA, 25 bp, Artificial
  Probe
aaagattactactttgtgaccaggg

SEQ ID NO: 21083 - DNA, 25 bp, Artificial
  Probe
ggcgaagaagatggcaaagattact

SEQ ID NO: 21084 - DNA, 25 bp, Artificial
  Probe
ctggcgaagaagatggcaaagatta

SEQ ID NO: 21085 - DNA, 25 bp, Artificial
  Probe
agaagatggcaaagattactacttt

SEQ ID NO: 21086 - DNA, 25 bp, Artificial
  Probe
tggcgaagaagatggcaaagattac

SEQ ID NO: 21087 - DNA, 25 bp, Artificial
  Probe
gatctgcatcccatctacatctctg

SEQ ID NO: 21088 - DNA, 25 bp, Artificial
  Probe
ctgatctgcatcccatctacatctc

SEQ ID NO: 21089 - DNA, 25 bp, Artificial
  Probe
gactgatctgcatcccatctacatc

SEQ ID NO: 21090 - DNA, 25 bp, Artificial
  Probe
tgatctgcatcccatctacatctct

SEQ ID NO: 21091 - DNA, 25 bp, Artificial
  Probe
gaagactgatctgcatcccatctac

SEQ ID NO: 21092 - DNA, 25 bp, Artificial
  Probe
agaagactgatctgcatcccatcta

SEQ ID NO: 21093 - DNA, 25 bp, Artificial
  Probe
aaagaagactgatctgcatcccatc

SEQ ID NO: 21094 - DNA, 25 bp, Artificial
  Probe
actgatctgcatcccatctacatct

SEQ ID NO: 21095 - DNA, 25 bp, Artificial
  Probe
agactgatctgcatcccatctacat

SEQ ID NO: 21096 - DNA, 25 bp, Artificial
  Probe
caaagaagactgatctgcatcccat

SEQ ID NO: 21097 - DNA, 25 bp, Artificial
  Probe
caatcaaagaagactgatctgcatc

SEQ ID NO: 21098 - DNA, 25 bp, Artificial
  Probe
aagactgatctgcatcccatctaca

SEQ ID NO: 21099 - DNA, 25 bp, Artificial
  Probe
tactttgtgaccagggagatgatgc

SEQ ID NO: 21100 - DNA, 25 bp, Artificial
  Probe
aatcaaagaagactgatctgcatcc

SEQ ID NO: 21101 - DNA, 25 bp, Artificial
  Probe
atctgcatcccatctacatctctgt

SEQ ID NO: 21102 - DNA, 25 bp, Artificial
  Probe
aagaagactgatctgcatcccatct

SEQ ID NO: 21103 - DNA, 25 bp, Artificial
  Probe
gcaatcaaagaagactgatctgcat

SEQ ID NO: 21104 - DNA, 25 bp, Artificial
  Probe
tcaaagaagactgatctgcatccca

SEQ ID NO: 21105 - DNA, 25 bp, Artificial
  Probe
tctgcatcccatctacatctctgtg

SEQ ID NO: 21106 - DNA, 25 bp, Artificial
  Probe
atcaaagaagactgatctgcatccc

SEQ ID NO: 21107 - DNA, 25 bp, Artificial
  Probe
aacctgtaatgggacaagcaaggaa

SEQ ID NO: 21108 - DNA, 25 bp, Artificial
  Probe
acctgtaatgggacaagcaaggaag

SEQ ID NO: 21109 - DNA, 25 bp, Artificial
  Probe
gaacctgtaatgggacaagcaagga

SEQ ID NO: 21110 - DNA, 25 bp, Artificial
  Probe
agggagatgatgcagcgtgatattg

SEQ ID NO: 21111 - DNA, 25 bp, Artificial
  Probe
cagggagatgatgcagcgtgatatt

SEQ ID NO: 21112 - DNA, 25 bp, Artificial
  Probe
cgcaatcaaagaagactgatctgca

SEQ ID NO: 21113 - DNA, 25 bp, Artificial
  Probe
gatattgcagcaggggacttcattg

SEQ ID NO: 21114 - DNA, 25 bp, Artificial
  Probe
catcccatctacatctctgtgcagc

SEQ ID NO: 21115 - DNA, 25 bp, Artificial
  Probe
aattcccttctccaatacatttctg

SEQ ID NO: 21116 - DNA, 25 bp, Artificial
  Probe
attcccttctccaatacatttctgt

SEQ ID NO: 21117 - DNA, 25 bp, Artificial
  Probe
tggaacaatatagcctatacattgg

SEQ ID NO: 21118 - DNA, 25 bp, Artificial
  Probe
ggaacaatatagcctatacattgga

SEQ ID NO: 21119 - DNA, 25 bp, Artificial
  Probe
gccctgaattatgaaataaatggtt

SEQ ID NO: 21120 - DNA, 25 bp, Artificial
  Probe
gagtcctcctctggtattgctgaat

SEQ ID NO: 21121 - DNA, 25 bp, Artificial
  Probe
ttcccttctccaatacatttctgta

SEQ ID NO: 21122 - DNA, 25 bp, Artificial
  Probe
tcacagtccgtggtttagaagaatt

SEQ ID NO: 21123 - DNA, 25 bp, Artificial
  Probe
tcccttctccaatacatttctgtac

SEQ ID NO: 21124 - DNA, 25 bp, Artificial
  Probe
ccttctccaatacatttctgtacca

SEQ ID NO: 21125 - DNA, 25 bp, Artificial
  Probe
ttctccaatacatttctgtaccagc

SEQ ID NO: 21126 - DNA, 25 bp, Artificial
  Probe
cttctccaatacatttctgtaccag

SEQ ID NO: 21127 - DNA, 25 bp, Artificial
  Probe
cccttctccaatacatttctgtacc

SEQ ID NO: 21128 - DNA, 25 bp, Artificial
  Probe
ggtttcccacccaatcctaatattt

SEQ ID NO: 21129 - DNA, 25 bp, Artificial
  Probe
gtcacagtccgtggtttagaagaat

SEQ ID NO: 21130 - DNA, 25 bp, Artificial
  Probe
ctttgtgggagagattgcagatttg

SEQ ID NO: 21131 - DNA, 25 bp, Artificial
  Probe
acattggaaattcaaaagtcacagt

SEQ ID NO: 21132 - DNA, 25 bp, Artificial
  Probe
cattggaaattcaaaagtcacagtc

SEQ ID NO: 21133 - DNA, 25 bp, Artificial
  Probe
gaacaatatagcctatacattggaa

SEQ ID NO: 21134 - DNA, 25 bp, Artificial
  Probe
aaagtcacagtccgtggtttagaag

SEQ ID NO: 21135 - DNA, 25 bp, Artificial
  Probe
gaattcccttctccaatacatttct

SEQ ID NO: 21136 - DNA, 25 bp, Artificial
  Probe
ggccctgaattatgaaataaatggt

SEQ ID NO: 21137 - DNA, 25 bp, Artificial
  Probe
atagcctatacattggaaattcaaa

SEQ ID NO: 21138 - DNA, 25 bp, Artificial
  Probe
tctccaatacatttctgtaccagct

SEQ ID NO: 21139 - DNA, 25 bp, Artificial
  Probe
tacattggaaattcaaaagtcacag

SEQ ID NO: 21140 - DNA, 25 bp, Artificial
  Probe
gtttcccacccaatcctaatatttt

SEQ ID NO: 21141 - DNA, 25 bp, Artificial
  Probe
gcctatacattggaaattcaaaagt

SEQ ID NO: 21142 - DNA, 25 bp, Artificial
  Probe
attggaaattcaaaagtcacagtcc

SEQ ID NO: 21143 - DNA, 25 bp, Artificial
  Probe
tttcccacccaatcctaatattttg

SEQ ID NO: 21144 - DNA, 25 bp, Artificial
  Probe
cctttgtgggagagattgcagattt

SEQ ID NO: 21145 - DNA, 25 bp, Artificial
  Probe
agcctatacattggaaattcaaaag

SEQ ID NO: 21146 - DNA, 25 bp, Artificial
  Probe
agtcacagtccgtggtttagaagaa

SEQ ID NO: 21147 - DNA, 25 bp, Artificial
  Probe
aagtcacagtccgtggtttagaaga

SEQ ID NO: 21148 - DNA, 25 bp, Artificial
  Probe
atacattggaaattcaaaagtcaca

SEQ ID NO: 21149 - DNA, 25 bp, Artificial
  Probe
cacagtccgtggtttagaagaattc

SEQ ID NO: 21150 - DNA, 25 bp, Artificial
  Probe
gtccgtggtttagaagaattccctt

SEQ ID NO: 21151 - DNA, 25 bp, Artificial
  Probe
acagtccgtggtttagaagaattcc

SEQ ID NO: 21152 - DNA, 25 bp, Artificial
  Probe
tatagcctatacattggaaattcaa

SEQ ID NO: 21153 - DNA, 25 bp, Artificial
  Probe
agaattcccttctccaatacatttc

SEQ ID NO: 21154 - DNA, 25 bp, Artificial
  Probe
atatagcctatacattggaaattca

SEQ ID NO: 21155 - DNA, 25 bp, Artificial
  Probe
ttggaaattcaaaagtcacagtccg

SEQ ID NO: 21156 - DNA, 25 bp, Artificial
  Probe
aaaagtcacagtccgtggtttagaa

SEQ ID NO: 21157 - DNA, 25 bp, Artificial
  Probe
aagaattcccttctccaatacattt

SEQ ID NO: 21158 - DNA, 25 bp, Artificial
  Probe
cagtccgtggtttagaagaattccc

SEQ ID NO: 21159 - DNA, 25 bp, Artificial
  Probe
ccctgaattatgaaataaatggtta

SEQ ID NO: 21160 - DNA, 25 bp, Artificial
  Probe
ttattaccttgaccttaccagtagc

SEQ ID NO: 21161 - DNA, 25 bp, Artificial
  Probe
tattaccttgaccttaccagtagca

SEQ ID NO: 21162 - DNA, 25 bp, Artificial
  Probe
ttcttattaccttgaccttaccagt

SEQ ID NO: 21163 - DNA, 25 bp, Artificial
  Probe
attaccttgaccttaccagtagcat

SEQ ID NO: 21164 - DNA, 25 bp, Artificial
  Probe
ggattcttattaccttgaccttacc

SEQ ID NO: 21165 - DNA, 25 bp, Artificial
  Probe
tcttattaccttgaccttaccagta

SEQ ID NO: 21166 - DNA, 25 bp, Artificial
  Probe
ttaccttgaccttaccagtagcatc

SEQ ID NO: 21167 - DNA, 25 bp, Artificial
  Probe
cttattaccttgaccttaccagtag

SEQ ID NO: 21168 - DNA, 25 bp, Artificial
  Probe
attcttattaccttgaccttaccag

SEQ ID NO: 21169 - DNA, 25 bp, Artificial
  Probe
gattcttattaccttgaccttacca

SEQ ID NO: 21170 - DNA, 25 bp, Artificial
  Probe
gttcagttctggacagaggatatta

SEQ ID NO: 21171 - DNA, 25 bp, Artificial
  Probe
ttcagttctggacagaggatattag

SEQ ID NO: 21172 - DNA, 25 bp, Artificial
  Probe
tcagttctggacagaggatattagg

SEQ ID NO: 21173 - DNA, 25 bp, Artificial
  Probe
taccttgaccttaccagtagcatct

SEQ ID NO: 21174 - DNA, 25 bp, Artificial
  Probe
ggttcagttctggacagaggatatt

SEQ ID NO: 21175 - DNA, 25 bp, Artificial
  Probe
ctggtaattatcaagacactgcatt

SEQ ID NO: 21176 - DNA, 25 bp, Artificial
  Probe
gctggtaattatcaagacactgcat

SEQ ID NO: 21177 - DNA, 25 bp, Artificial
  Probe
aggattcttattaccttgaccttac

SEQ ID NO: 21178 - DNA, 25 bp, Artificial
  Probe
cttgaccttaccagtagcatctcct

SEQ ID NO: 21179 - DNA, 25 bp, Artificial
  Probe
tggacagaggatattagggatgtaa

SEQ ID NO: 21180 - DNA, 25 bp, Artificial
  Probe
ctggacagaggatattagggatgta

SEQ ID NO: 21181 - DNA, 25 bp, Artificial
  Probe
ggacagaggatattagggatgtaaa

SEQ ID NO: 21182 - DNA, 25 bp, Artificial
  Probe
accttgaccttaccagtagcatctc

SEQ ID NO: 21183 - DNA, 25 bp, Artificial
  Probe
cagtagcatctcctggatagaattt

SEQ ID NO: 21184 - DNA, 25 bp, Artificial
  Probe
agctggtaattatcaagacactgca

SEQ ID NO: 21185 - DNA, 25 bp, Artificial
  Probe
ttgctaagagtaacgtgctgtagag

SEQ ID NO: 21186 - DNA, 25 bp, Artificial
  Probe
ttctggacagaggatattagggatg

SEQ ID NO: 21187 - DNA, 25 bp, Artificial
  Probe
gttctggacagaggatattagggat

SEQ ID NO: 21188 - DNA, 25 bp, Artificial
  Probe
tagtgatggtcccattactgtttac

SEQ ID NO: 21189 - DNA, 25 bp, Artificial
  Probe
gtagtgatggtcccattactgttta

SEQ ID NO: 21190 - DNA, 25 bp, Artificial
  Probe
ataggattcttattaccttgacctt

SEQ ID NO: 21191 - DNA, 25 bp, Artificial
  Probe
cagttctggacagaggatattaggg

SEQ ID NO: 21192 - DNA, 25 bp, Artificial
  Probe
gttgctaagagtaacgtgctgtaga

SEQ ID NO: 21193 - DNA, 25 bp, Artificial
  Probe
agttctggacagaggatattaggga

SEQ ID NO: 21194 - DNA, 25 bp, Artificial
  Probe
tgttgctaagagtaacgtgctgtag

SEQ ID NO: 21195 - DNA, 25 bp, Artificial
  Probe
tggtaattatcaagacactgcattt

SEQ ID NO: 21196 - DNA, 25 bp, Artificial
  Probe
ttgaccttaccagtagcatctcctg

SEQ ID NO: 21197 - DNA, 25 bp, Artificial
  Probe
taaatgtgttgctaagagtaacgtg

SEQ ID NO: 21198 - DNA, 25 bp, Artificial
  Probe
aatggaagcattactttctcaaagg

SEQ ID NO: 21199 - DNA, 25 bp, Artificial
  Probe
ggaatggaagcattactttctcaaa

SEQ ID NO: 21200 - DNA, 25 bp, Artificial
  Probe
tttggaatggaagcattactttctc

SEQ ID NO: 21201 - DNA, 25 bp, Artificial
  Probe
ccttgaccttaccagtagcatctcc

SEQ ID NO: 21202 - DNA, 25 bp, Artificial
  Probe
ggaagcattactttctcaaaggaaa

SEQ ID NO: 21203 - DNA, 25 bp, Artificial
  Probe
atggaagcattactttctcaaagga

SEQ ID NO: 21204 - DNA, 25 bp, Artificial
  Probe
cactaagagtttaaatttggagcca

SEQ ID NO: 21205 - DNA, 25 bp, Artificial
  Probe
agtaccatgaagttaggctagacac

SEQ ID NO: 21206 - DNA, 25 bp, Artificial
  Probe
cagtaccatgaagttaggctagaca

SEQ ID NO: 21207 - DNA, 25 bp, Artificial
  Probe
tcagtaccatgaagttaggctagac

SEQ ID NO: 21208 - DNA, 25 bp, Artificial
  Probe
ccaattaaggtgttaccaaggaatc

SEQ ID NO: 21209 - DNA, 25 bp, Artificial
  Probe
accaattaaggtgttaccaaggaat

SEQ ID NO: 21210 - DNA, 25 bp, Artificial
  Probe
aaccaattaaggtgttaccaaggaa

SEQ ID NO: 21211 - DNA, 25 bp, Artificial
  Probe
caattaaggtgttaccaaggaatct

SEQ ID NO: 21212 - DNA, 25 bp, Artificial
  Probe
caaccaattaaggtgttaccaagga

SEQ ID NO: 21213 - DNA, 25 bp, Artificial
  Probe
acaaccaattaaggtgttaccaagg

SEQ ID NO: 21214 - DNA, 25 bp, Artificial
  Probe
ctgtgaaacctctttgtaatactgt

SEQ ID NO: 21215 - DNA, 25 bp, Artificial
  Probe
tctgtgaaacctctttgtaatactg

SEQ ID NO: 21216 - DNA, 25 bp, Artificial
  Probe
aattaaggtgttaccaaggaatctt

SEQ ID NO: 21217 - DNA, 25 bp, Artificial
  Probe
cccagatactctcaaagtcatcaaa

SEQ ID NO: 21218 - DNA, 25 bp, Artificial
  Probe
tactctcaaagtcatcaaacagtgt

SEQ ID NO: 21219 - DNA, 25 bp, Artificial
  Probe
ccagatactctcaaagtcatcaaac

SEQ ID NO: 21220 - DNA, 25 bp, Artificial
  Probe
gtaccatgaagttaggctagacacg

SEQ ID NO: 21221 - DNA, 25 bp, Artificial
  Probe
atactctcaaagtcatcaaacagtg

SEQ ID NO: 21222 - DNA, 25 bp, Artificial
  Probe
gatactctcaaagtcatcaaacagt

SEQ ID NO: 21223 - DNA, 25 bp, Artificial
  Probe
cagatactctcaaagtcatcaaaca

SEQ ID NO: 21224 - DNA, 25 bp, Artificial
  Probe
agatactctcaaagtcatcaaacag

SEQ ID NO: 21225 - DNA, 25 bp, Artificial
  Probe
tgtgaaacctctttgtaatactgta

SEQ ID NO: 21226 - DNA, 25 bp, Artificial
  Probe
atctgtgaaacctctttgtaatact

SEQ ID NO: 21227 - DNA, 25 bp, Artificial
  Probe
actctcaaagtcatcaaacagtgtt

SEQ ID NO: 21228 - DNA, 25 bp, Artificial
  Probe
ttcagtaccatgaagttaggctaga

SEQ ID NO: 21229 - DNA, 25 bp, Artificial
  Probe
aagcccagatactctcaaagtcatc

SEQ ID NO: 21230 - DNA, 25 bp, Artificial
  Probe
gaagcccagatactctcaaagtcat

SEQ ID NO: 21231 - DNA, 25 bp, Artificial
  Probe
agttgtaaaggtacttgttagtgtt

SEQ ID NO: 21232 - DNA, 25 bp, Artificial
  Probe
ttcagaagtcttctattagcacctc

SEQ ID NO: 21233 - DNA, 25 bp, Artificial
  Probe
ttaaggtgttaccaaggaatctttg

SEQ ID NO: 21234 - DNA, 25 bp, Artificial
  Probe
aacaaccaattaaggtgttaccaag

SEQ ID NO: 21235 - DNA, 25 bp, Artificial
  Probe
gcccagatactctcaaagtcatcaa

SEQ ID NO: 21236 - DNA, 25 bp, Artificial
  Probe
attcagaagtcttctattagcacct

SEQ ID NO: 21237 - DNA, 25 bp, Artificial
  Probe
catgaagttaggctagacacgtcaa

SEQ ID NO: 21238 - DNA, 25 bp, Artificial
  Probe
taccatgaagttaggctagacacgt

SEQ ID NO: 21239 - DNA, 25 bp, Artificial
  Probe
acctctttgtaatactgtatcaaca

SEQ ID NO: 21240 - DNA, 25 bp, Artificial
  Probe
agaagtcttctattagcacctcctg

SEQ ID NO: 21241 - DNA, 25 bp, Artificial
  Probe
cagaagtcttctattagcacctcct

SEQ ID NO: 21242 - DNA, 25 bp, Artificial
  Probe
tcagaagtcttctattagcacctcc

SEQ ID NO: 21243 - DNA, 25 bp, Artificial
  Probe
aattcagaagtcttctattagcacc

SEQ ID NO: 21244 - DNA, 25 bp, Artificial
  Probe
attaaggtgttaccaaggaatcttt

SEQ ID NO: 21245 - DNA, 25 bp, Artificial
  Probe
agcccagatactctcaaagtcatca

SEQ ID NO: 21246 - DNA, 25 bp, Artificial
  Probe
gtgaaacctctttgtaatactgtat

SEQ ID NO: 21247 - DNA, 25 bp, Artificial
  Probe
gaagtcttctattagcacctcctgc

SEQ ID NO: 21248 - DNA, 25 bp, Artificial
  Probe
aacctctttgtaatactgtatcaac

SEQ ID NO: 21249 - DNA, 25 bp, Artificial
  Probe
gaaacctctttgtaatactgtatca

SEQ ID NO: 21250 - DNA, 25 bp, Artificial
  Probe
aggaagtcactgttaccatcataag

SEQ ID NO: 21251 - DNA, 25 bp, Artificial
  Probe
ggaagtcactgttaccatcataagt

SEQ ID NO: 21252 - DNA, 25 bp, Artificial
  Probe
agtcactgttaccatcataagtaga

SEQ ID NO: 21253 - DNA, 25 bp, Artificial
  Probe
caggaagtcactgttaccatcataa

SEQ ID NO: 21254 - DNA, 25 bp, Artificial
  Probe
ttaagtctggaacgaatgacatcat

SEQ ID NO: 21255 - DNA, 25 bp, Artificial
  Probe
gtcactgttaccatcataagtagaa

SEQ ID NO: 21256 - DNA, 25 bp, Artificial
  Probe
aagtcactgttaccatcataagtag

SEQ ID NO: 21257 - DNA, 25 bp, Artificial
  Probe
gaagtcactgttaccatcataagta

SEQ ID NO: 21258 - DNA, 25 bp, Artificial
  Probe
taagtctggaacgaatgacatcatg

SEQ ID NO: 21259 - DNA, 25 bp, Artificial
  Probe
ctgaaattattggagggagagaagt

SEQ ID NO: 21260 - DNA, 25 bp, Artificial
  Probe
actgaaattattggagggagagaag

SEQ ID NO: 21261 - DNA, 25 bp, Artificial
  Probe
cgggatttatatgtcttcagagagt

SEQ ID NO: 21262 - DNA, 25 bp, Artificial
  Probe
gcaggaagtcactgttaccatcata

SEQ ID NO: 21263 - DNA, 25 bp, Artificial
  Probe
tgaaattattggagggagagaagta

SEQ ID NO: 21264 - DNA, 25 bp, Artificial
  Probe
tactgaaattattggagggagagaa

SEQ ID NO: 21265 - DNA, 25 bp, Artificial
  Probe
atactgaaattattggagggagaga

SEQ ID NO: 21266 - DNA, 25 bp, Artificial
  Probe
catactgaaattattggagggagag

SEQ ID NO: 21267 - DNA, 25 bp, Artificial
  Probe
aattattggagggagagaagtacag

SEQ ID NO: 21268 - DNA, 25 bp, Artificial
  Probe
tgaaacagacatttgagattaagga

SEQ ID NO: 21269 - DNA, 25 bp, Artificial
  Probe
aaattattggagggagagaagtaca

SEQ ID NO: 21270 - DNA, 25 bp, Artificial
  Probe
acaccctgttgactaagaaatatca

SEQ ID NO: 21271 - DNA, 25 bp, Artificial
  Probe
ttgactaagaaatatcagacctgga

SEQ ID NO: 21272 - DNA, 25 bp, Artificial
  Probe
gttgactaagaaatatcagacctgg

SEQ ID NO: 21273 - DNA, 25 bp, Artificial
  Probe
gtctacaccctgttgactaagaaat

SEQ ID NO: 21274 - DNA, 25 bp, Artificial
  Probe
gaaattattggagggagagaagtac

SEQ ID NO: 21275 - DNA, 25 bp, Artificial
  Probe
atgtcttcagagagtttccatactg

SEQ ID NO: 21276 - DNA, 25 bp, Artificial
  Probe
tgactaagaaatatcagacctggat

SEQ ID NO: 21277 - DNA, 25 bp, Artificial
  Probe
tttaggagcacattctctttcaaag

SEQ ID NO: 21278 - DNA, 25 bp, Artificial
  Probe
actaagaaatatcagacctggatca

SEQ ID NO: 21279 - DNA, 25 bp, Artificial
  Probe
tttaagtctggaacgaatgacatca

SEQ ID NO: 21280 - DNA, 25 bp, Artificial
  Probe
atttaagtctggaacgaatgacatc

SEQ ID NO: 21281 - DNA, 25 bp, Artificial
  Probe
gatttaagtctggaacgaatgacat

SEQ ID NO: 21282 - DNA, 25 bp, Artificial
  Probe
ctcaggatttaagtctggaacgaat

SEQ ID NO: 21283 - DNA, 25 bp, Artificial
  Probe
cccatgaaacagacatttgagatta

SEQ ID NO: 21284 - DNA, 25 bp, Artificial
  Probe
tctacaccctgttgactaagaaata

SEQ ID NO: 21285 - DNA, 25 bp, Artificial
  Probe
caccctgttgactaagaaatatcag

SEQ ID NO: 21286 - DNA, 25 bp, Artificial
  Probe
aggatttaagtctggaacgaatgac

SEQ ID NO: 21287 - DNA, 25 bp, Artificial
  Probe
caggatttaagtctggaacgaatga

SEQ ID NO: 21288 - DNA, 25 bp, Artificial
  Probe
tcaggatttaagtctggaacgaatg

SEQ ID NO: 21289 - DNA, 25 bp, Artificial
  Probe
accctgttgactaagaaatatcaga

SEQ ID NO: 21290 - DNA, 25 bp, Artificial
  Probe
attattggagggagagaagtacagc

SEQ ID NO: 21291 - DNA, 25 bp, Artificial
  Probe
cctgttgactaagaaatatcagacc

SEQ ID NO: 21292 - DNA, 25 bp, Artificial
  Probe
ccctgttgactaagaaatatcagac

SEQ ID NO: 21293 - DNA, 25 bp, Artificial
  Probe
ggatttaagtctggaacgaatgaca

SEQ ID NO: 21294 - DNA, 25 bp, Artificial
  Probe
tgttgactaagaaatatcagacctg

SEQ ID NO: 21295 - DNA, 25 bp, Artificial
  Probe
cacttggaatttgtaaacagggtag

SEQ ID NO: 21296 - DNA, 25 bp, Artificial
  Probe
atctgaggtcacttggaatttgtaa

SEQ ID NO: 21297 - DNA, 25 bp, Artificial
  Probe
tcacttggaatttgtaaacagggta

SEQ ID NO: 21298 - DNA, 25 bp, Artificial
  Probe
gaggtcacttggaatttgtaaacag

SEQ ID NO: 21299 - DNA, 25 bp, Artificial
  Probe
ctgaggtcacttggaatttgtaaac

SEQ ID NO: 21300 - DNA, 25 bp, Artificial
  Probe
tctgaggtcacttggaatttgtaaa

SEQ ID NO: 21301 - DNA, 25 bp, Artificial
  Probe
aaacagggtagcaaacaagatattt

SEQ ID NO: 21302 - DNA, 25 bp, Artificial
  Probe
gtaaacagggtagcaaacaagatat

SEQ ID NO: 21303 - DNA, 25 bp, Artificial
  Probe
tgaggtcacttggaatttgtaaaca

SEQ ID NO: 21304 - DNA, 25 bp, Artificial
  Probe
cttggaatttgtaaacagggtagca

SEQ ID NO: 21305 - DNA, 25 bp, Artificial
  Probe
acttggaatttgtaaacagggtagc

SEQ ID NO: 21306 - DNA, 25 bp, Artificial
  Probe
aggtcacttggaatttgtaaacagg

SEQ ID NO: 21307 - DNA, 25 bp, Artificial
  Probe
ttaagcatctgtaaacactcgtgac

SEQ ID NO: 21308 - DNA, 25 bp, Artificial
  Probe
taaacagggtagcaaacaagatatt

SEQ ID NO: 21309 - DNA, 25 bp, Artificial
  Probe
gatctgaggtcacttggaatttgta

SEQ ID NO: 21310 - DNA, 25 bp, Artificial
  Probe
tttaagcatctgtaaacactcgtga

SEQ ID NO: 21311 - DNA, 25 bp, Artificial
  Probe
acaaatcttctctcaggaaattgac

SEQ ID NO: 21312 - DNA, 25 bp, Artificial
  Probe
ttggaatttgtaaacagggtagcaa

SEQ ID NO: 21313 - DNA, 25 bp, Artificial
  Probe
gtcacttggaatttgtaaacagggt

SEQ ID NO: 21314 - DNA, 25 bp, Artificial
  Probe
caaatcttctctcaggaaattgact

SEQ ID NO: 21315 - DNA, 25 bp, Artificial
  Probe
tgtaaacagggtagcaaacaagata

SEQ ID NO: 21316 - DNA, 25 bp, Artificial
  Probe
aacaaatcttctctcaggaaattga

SEQ ID NO: 21317 - DNA, 25 bp, Artificial
  Probe
gaacaaatcttctctcaggaaattg

SEQ ID NO: 21318 - DNA, 25 bp, Artificial
  Probe
aatcttctctcaggaaattgacttt

SEQ ID NO: 21319 - DNA, 25 bp, Artificial
  Probe
aaatcttctctcaggaaattgactt

SEQ ID NO: 21320 - DNA, 25 bp, Artificial
  Probe
ggtcacttggaatttgtaaacaggg

SEQ ID NO: 21321 - DNA, 25 bp, Artificial
  Probe
ctgatctgaggtcacttggaatttg

SEQ ID NO: 21322 - DNA, 25 bp, Artificial
  Probe
tgatctgaggtcacttggaatttgt

SEQ ID NO: 21323 - DNA, 25 bp, Artificial
  Probe
tctcaggaaattgactttctccatt

SEQ ID NO: 21324 - DNA, 25 bp, Artificial
  Probe
ttctctcaggaaattgactttctcc

SEQ ID NO: 21325 - DNA, 25 bp, Artificial
  Probe
tcttctctcaggaaattgactttct

SEQ ID NO: 21326 - DNA, 25 bp, Artificial
  Probe
ctcaggaaattgactttctccattt

SEQ ID NO: 21327 - DNA, 25 bp, Artificial
  Probe
ctctcaggaaattgactttctccat

SEQ ID NO: 21328 - DNA, 25 bp, Artificial
  Probe
cttctctcaggaaattgactttctc

SEQ ID NO: 21329 - DNA, 25 bp, Artificial
  Probe
tcaagaacaaatcttctctcaggaa

SEQ ID NO: 21330 - DNA, 25 bp, Artificial
  Probe
ttcaagaacaaatcttctctcagga

SEQ ID NO: 21331 - DNA, 25 bp, Artificial
  Probe
atcttctctcaggaaattgactttc

SEQ ID NO: 21332 - DNA, 25 bp, Artificial
  Probe
tctctcaggaaattgactttctcca

SEQ ID NO: 21333 - DNA, 25 bp, Artificial
  Probe
caagaacaaatcttctctcaggaaa

SEQ ID NO: 21334 - DNA, 25 bp, Artificial
  Probe
tttcaagaacaaatcttctctcagg

SEQ ID NO: 21335 - DNA, 25 bp, Artificial
  Probe
ttagacatatgcttcttacacccac

SEQ ID NO: 21336 - DNA, 25 bp, Artificial
  Probe
tttagacatatgcttcttacaccca

SEQ ID NO: 21337 - DNA, 25 bp, Artificial
  Probe
gaatttgtaaacagggtagcaaaca

SEQ ID NO: 21338 - DNA, 25 bp, Artificial
  Probe
ctttagacatatgcttcttacaccc

SEQ ID NO: 21339 - DNA, 25 bp, Artificial
  Probe
tcaggaaattgactttctccattta

SEQ ID NO: 21340 - DNA, 25 bp, Artificial
  Probe
ctacatgaccttcctgtccaataag

SEQ ID NO: 21341 - DNA, 25 bp, Artificial
  Probe
atctacatgaccttcctgtccaata

SEQ ID NO: 21342 - DNA, 25 bp, Artificial
  Probe
tctacatgaccttcctgtccaataa

SEQ ID NO: 21343 - DNA, 25 bp, Artificial
  Probe
agaccttccctcagaatatgtgtat

SEQ ID NO: 21344 - DNA, 25 bp, Artificial
  Probe
gaccttccctcagaatatgtgtatt

SEQ ID NO: 21345 - DNA, 25 bp, Artificial
  Probe
aagaccttccctcagaatatgtgta

SEQ ID NO: 21346 - DNA, 25 bp, Artificial
  Probe
accttccctcagaatatgtgtattt

SEQ ID NO: 21347 - DNA, 25 bp, Artificial
  Probe
gatctacatgaccttcctgtccaat

SEQ ID NO: 21348 - DNA, 25 bp, Artificial
  Probe
atgtcattgctttgttgtgtttgag

SEQ ID NO: 21349 - DNA, 25 bp, Artificial
  Probe
gatgtcattgctttgttgtgtttga

SEQ ID NO: 21350 - DNA, 25 bp, Artificial
  Probe
ggatgtcattgctttgttgtgtttg

SEQ ID NO: 21351 - DNA, 25 bp, Artificial
  Probe
aggatgtcattgctttgttgtgttt

SEQ ID NO: 21352 - DNA, 25 bp, Artificial
  Probe
caagaccttccctcagaatatgtgt

SEQ ID NO: 21353 - DNA, 25 bp, Artificial
  Probe
caggatgtcattgctttgttgtgtt

SEQ ID NO: 21354 - DNA, 25 bp, Artificial
  Probe
gtcattgctttgttgtgtttgagga

SEQ ID NO: 21355 - DNA, 25 bp, Artificial
  Probe
tgtcattgctttgttgtgtttgagg

SEQ ID NO: 21356 - DNA, 25 bp, Artificial
  Probe
gcaagaccttccctcagaatatgtg

SEQ ID NO: 21357 - DNA, 25 bp, Artificial
  Probe
ccttccctcagaatatgtgtatttt

SEQ ID NO: 21358 - DNA, 25 bp, Artificial
  Probe
tacatgaccttcctgtccaataagg

SEQ ID NO: 21359 - DNA, 25 bp, Artificial
  Probe
agatctacatgaccttcctgtccaa

SEQ ID NO: 21360 - DNA, 25 bp, Artificial
  Probe
aagatctacatgaccttcctgtcca

SEQ ID NO: 21361 - DNA, 25 bp, Artificial
  Probe
tttcagttcacaaaacacatgagag

SEQ ID NO: 21362 - DNA, 25 bp, Artificial
  Probe
atctcatgaagtatgacagctacag

SEQ ID NO: 21363 - DNA, 25 bp, Artificial
  Probe
caagaagatctacatgaccttcctg

SEQ ID NO: 21364 - DNA, 25 bp, Artificial
  Probe
aatctcatgaagtatgacagctaca

SEQ ID NO: 21365 - DNA, 25 bp, Artificial
  Probe
aagaagatctacatgaccttcctgt

SEQ ID NO: 21366 - DNA, 25 bp, Artificial
  Probe
ttcagttcacaaaacacatgagagt

SEQ ID NO: 21367 - DNA, 25 bp, Artificial
  Probe
caatctcatgaagtatgacagctac

SEQ ID NO: 21368 - DNA, 25 bp, Artificial
  Probe
tcaatctcatgaagtatgacagcta

SEQ ID NO: 21369 - DNA, 25 bp, Artificial
  Probe
ttcaatctcatgaagtatgacagct

SEQ ID NO: 21370 - DNA, 25 bp, Artificial
  Probe
gtgcaagaccttccctcagaatatg

SEQ ID NO: 21371 - DNA, 25 bp, Artificial
  Probe
agaagatctacatgaccttcctgtc

SEQ ID NO: 21372 - DNA, 25 bp, Artificial
  Probe
tcagttcacaaaacacatgagagtc

SEQ ID NO: 21373 - DNA, 25 bp, Artificial
  Probe
cttgaagtctgacttgtttctgaag

SEQ ID NO: 21374 - DNA, 25 bp, Artificial
  Probe
cttcttgaagtctgacttgtttctg

SEQ ID NO: 21375 - DNA, 25 bp, Artificial
  Probe
tcttgaagtctgacttgtttctgaa

SEQ ID NO: 21376 - DNA, 25 bp, Artificial
  Probe
ttcttgaagtctgacttgtttctga

SEQ ID NO: 21377 - DNA, 25 bp, Artificial
  Probe
ccaagaagatctacatgaccttcct

SEQ ID NO: 21378 - DNA, 25 bp, Artificial
  Probe
aggccaagaagatctacatgacctt

SEQ ID NO: 21379 - DNA, 25 bp, Artificial
  Probe
aaggccaagaagatctacatgacct

SEQ ID NO: 21380 - DNA, 25 bp, Artificial
  Probe
ggctcactgaaaagattctggaaga

SEQ ID NO: 21381 - DNA, 25 bp, Artificial
  Probe
tgcaagaccttccctcagaatatgt

SEQ ID NO: 21382 - DNA, 25 bp, Artificial
  Probe
tgtgcaagaccttccctcagaatat

SEQ ID NO: 21383 - DNA, 25 bp, Artificial
  Probe
gcttcttgaagtctgacttgtttct

SEQ ID NO: 21384 - DNA, 25 bp, Artificial
  Probe
aaaggccaagaagatctacatgacc

SEQ ID NO: 21385 - DNA, 25 bp, Artificial
  Probe
ttcaccttactcagagtcacattct

SEQ ID NO: 21386 - DNA, 25 bp, Artificial
  Probe
taatggtgtgacttggttggcaata

SEQ ID NO: 21387 - DNA, 25 bp, Artificial
  Probe
gtattaatggtgtgacttggttggc

SEQ ID NO: 21388 - DNA, 25 bp, Artificial
  Probe
tacatttgaaacgaagaccaatcca

SEQ ID NO: 21389 - DNA, 25 bp, Artificial
  Probe
aatggtgtgacttggttggcaatat

SEQ ID NO: 21390 - DNA, 25 bp, Artificial
  Probe
tattaatggtgtgacttggttggca

SEQ ID NO: 21391 - DNA, 25 bp, Artificial
  Probe
acatttgaaacgaagaccaatccat

SEQ ID NO: 21392 - DNA, 25 bp, Artificial
  Probe
tgaaacgaagaccaatccatgtaaa

SEQ ID NO: 21393 - DNA, 25 bp, Artificial
  Probe
gtacatttgaaacgaagaccaatcc

SEQ ID NO: 21394 - DNA, 25 bp, Artificial
  Probe
ttaatggtgtgacttggttggcaat

SEQ ID NO: 21395 - DNA, 25 bp, Artificial
  Probe
ttgaaacgaagaccaatccatgtaa

SEQ ID NO: 21396 - DNA, 25 bp, Artificial
  Probe
tttgaaacgaagaccaatccatgta

SEQ ID NO: 21397 - DNA, 25 bp, Artificial
  Probe
tttcaccttactcagagtcacattc

SEQ ID NO: 21398 - DNA, 25 bp, Artificial
  Probe
ctttcaccttactcagagtcacatt

SEQ ID NO: 21399 - DNA, 25 bp, Artificial
  Probe
catttgaaacgaagaccaatccatg

SEQ ID NO: 21400 - DNA, 25 bp, Artificial
  Probe
atttgaaacgaagaccaatccatgt

SEQ ID NO: 21401 - DNA, 25 bp, Artificial
  Probe
tctttcaccttactcagagtcacat

SEQ ID NO: 21402 - DNA, 25 bp, Artificial
  Probe
tatcaaagggacagtctgagggtat

SEQ ID NO: 21403 - DNA, 25 bp, Artificial
  Probe
tttaaacctcctttctgcactgtat

SEQ ID NO: 21404 - DNA, 25 bp, Artificial
  Probe
atggtgtgacttggttggcaatatt

SEQ ID NO: 21405 - DNA, 25 bp, Artificial
  Probe
ttaaacctcctttctgcactgtatc

SEQ ID NO: 21406 - DNA, 25 bp, Artificial
  Probe
gtctttcaccttactcagagtcaca

SEQ ID NO: 21407 - DNA, 25 bp, Artificial
  Probe
attaatggtgtgacttggttggcaa

SEQ ID NO: 21408 - DNA, 25 bp, Artificial
  Probe
taaacctcctttctgcactgtatca

SEQ ID NO: 21409 - DNA, 25 bp, Artificial
  Probe
gtatcaaagggacagtctgagggta

SEQ ID NO: 21410 - DNA, 25 bp, Artificial
  Probe
aacctcctttctgcactgtatcaaa

SEQ ID NO: 21411 - DNA, 25 bp, Artificial
  Probe
aaacctcctttctgcactgtatcaa

SEQ ID NO: 21412 - DNA, 25 bp, Artificial
  Probe
cgtctttcaccttactcagagtcac

SEQ ID NO: 21413 - DNA, 25 bp, Artificial
  Probe
tcaccttactcagagtcacattctg

SEQ ID NO: 21414 - DNA, 25 bp, Artificial
  Probe
gaaacgaagaccaatccatgtaaaa

SEQ ID NO: 21415 - DNA, 25 bp, Artificial
  Probe
atcaaagggacagtctgagggtatg

SEQ ID NO: 21416 - DNA, 25 bp, Artificial
  Probe
tccattgtacatttgaaacgaagac

SEQ ID NO: 21417 - DNA, 25 bp, Artificial
  Probe
cattgtacatttgaaacgaagacca

SEQ ID NO: 21418 - DNA, 25 bp, Artificial
  Probe
atccattgtacatttgaaacgaaga

SEQ ID NO: 21419 - DNA, 25 bp, Artificial
  Probe
ccattgtacatttgaaacgaagacc

SEQ ID NO: 21420 - DNA, 25 bp, Artificial
  Probe
tgtacatttgaaacgaagaccaatc

SEQ ID NO: 21421 - DNA, 25 bp, Artificial
  Probe
ttgtacatttgaaacgaagaccaat

SEQ ID NO: 21422 - DNA, 25 bp, Artificial
  Probe
attgtacatttgaaacgaagaccaa

SEQ ID NO: 21423 - DNA, 25 bp, Artificial
  Probe
tggtgtgacttggttggcaatattt

SEQ ID NO: 21424 - DNA, 25 bp, Artificial
  Probe
cacatattttaaacctcctttctgc

SEQ ID NO: 21425 - DNA, 25 bp, Artificial
  Probe
gaaaagaaaggagcacattgggatg

SEQ ID NO: 21426 - DNA, 25 bp, Artificial
  Probe
ttttaaacctcctttctgcactgta

SEQ ID NO: 21427 - DNA, 25 bp, Artificial
  Probe
tattttaaacctcctttctgcactg

SEQ ID NO: 21428 - DNA, 25 bp, Artificial
  Probe
attttaaacctcctttctgcactgt

SEQ ID NO: 21429 - DNA, 25 bp, Artificial
  Probe
cggcatctgtgacacatattttaaa

SEQ ID NO: 21430 - DNA, 25 bp, Artificial
  Probe
aagcaacatcaataaatcaacacca

SEQ ID NO: 21431 - DNA, 25 bp, Artificial
  Probe
agcaacatcaataaatcaacaccat

SEQ ID NO: 21432 - DNA, 25 bp, Artificial
  Probe
gcaacatcaataaatcaacaccatc

SEQ ID NO: 21433 - DNA, 25 bp, Artificial
  Probe
aaagcaacatcaataaatcaacacc

SEQ ID NO: 21434 - DNA, 25 bp, Artificial
  Probe
tcaataaatcaacaccatctctctg

SEQ ID NO: 21435 - DNA, 25 bp, Artificial
  Probe
acatcaataaatcaacaccatctct

SEQ ID NO: 21436 - DNA, 25 bp, Artificial
  Probe
acaaagcaacatcaataaatcaaca

SEQ ID NO: 21437 - DNA, 25 bp, Artificial
  Probe
caaagcaacatcaataaatcaacac

SEQ ID NO: 21438 - DNA, 25 bp, Artificial
  Probe
catcaataaatcaacaccatctctc

SEQ ID NO: 21439 - DNA, 25 bp, Artificial
  Probe
caacatcaataaatcaacaccatct

SEQ ID NO: 21440 - DNA, 25 bp, Artificial
  Probe
caataaatcaacaccatctctctga

SEQ ID NO: 21441 - DNA, 25 bp, Artificial
  Probe
atcaataaatcaacaccatctctct

SEQ ID NO: 21442 - DNA, 25 bp, Artificial
  Probe
aacatcaataaatcaacaccatctc

SEQ ID NO: 21443 - DNA, 25 bp, Artificial
  Probe
gatctttgtaatagaggctgctgtc

SEQ ID NO: 21444 - DNA, 25 bp, Artificial
  Probe
atctttgtaatagaggctgctgtcc

SEQ ID NO: 21445 - DNA, 25 bp, Artificial
  Probe
tccctgagctgtaaatttgttctta

SEQ ID NO: 21446 - DNA, 25 bp, Artificial
  Probe
tacaaagcaacatcaataaatcaac

SEQ ID NO: 21447 - DNA, 25 bp, Artificial
  Probe
ctccctgagctgtaaatttgttctt

SEQ ID NO: 21448 - DNA, 25 bp, Artificial
  Probe
gttcttacaaagcaacatcaataaa

SEQ ID NO: 21449 - DNA, 25 bp, Artificial
  Probe
cttacaaagcaacatcaataaatca

SEQ ID NO: 21450 - DNA, 25 bp, Artificial
  Probe
ccctgagctgtaaatttgttcttac

SEQ ID NO: 21451 - DNA, 25 bp, Artificial
  Probe
tcttacaaagcaacatcaataaatc

SEQ ID NO: 21452 - DNA, 25 bp, Artificial
  Probe
ttacaaagcaacatcaataaatcaa

SEQ ID NO: 21453 - DNA, 25 bp, Artificial
  Probe
cctccctgagctgtaaatttgttct

SEQ ID NO: 21454 - DNA, 25 bp, Artificial
  Probe
ttcttacaaagcaacatcaataaat

SEQ ID NO: 21455 - DNA, 25 bp, Artificial
  Probe
aatccatgccagcatctacgtctag

SEQ ID NO: 21456 - DNA, 25 bp, Artificial
  Probe
gaatccatgccagcatctacgtcta

SEQ ID NO: 21457 - DNA, 25 bp, Artificial
  Probe
ccagcatctacgtctagttcctgag

SEQ ID NO: 21458 - DNA, 25 bp, Artificial
  Probe
tctttgtaatagaggctgctgtccg

SEQ ID NO: 21459 - DNA, 25 bp, Artificial
  Probe
ctttgtaatagaggctgctgtccgt

SEQ ID NO: 21460 - DNA, 25 bp, Artificial
  Probe
tgttcttacaaagcaacatcaataa

SEQ ID NO: 21461 - DNA, 25 bp, Artificial
  Probe
ttgttcttacaaagcaacatcaata

SEQ ID NO: 21462 - DNA, 25 bp, Artificial
  Probe
cagcatctacgtctagttcctgagc

SEQ ID NO: 21463 - DNA, 25 bp, Artificial
  Probe
tttgtaatagaggctgctgtccgtg

SEQ ID NO: 21464 - DNA, 25 bp, Artificial
  Probe
catgccagcatctacgtctagttcc

SEQ ID NO: 21465 - DNA, 25 bp, Artificial
  Probe
ccatgccagcatctacgtctagttc

SEQ ID NO: 21466 - DNA, 25 bp, Artificial
  Probe
gatgcctccctgagctgtaaatttg

SEQ ID NO: 21467 - DNA, 25 bp, Artificial
  Probe
gcctccctgagctgtaaatttgttc

SEQ ID NO: 21468 - DNA, 25 bp, Artificial
  Probe
atgccagcatctacgtctagttcct

SEQ ID NO: 21469 - DNA, 25 bp, Artificial
  Probe
cctgagctgtaaatttgttcttaca

SEQ ID NO: 21470 - DNA, 25 bp, Artificial
  Probe
agcatctacgtctagttcctgagct

SEQ ID NO: 21471 - DNA, 25 bp, Artificial
  Probe
atgcctccctgagctgtaaatttgt

SEQ ID NO: 21472 - DNA, 25 bp, Artificial
  Probe
tgcctccctgagctgtaaatttgtt

SEQ ID NO: 21473 - DNA, 25 bp, Artificial
  Probe
ctgagctgtaaatttgttcttacaa

SEQ ID NO: 21474 - DNA, 25 bp, Artificial
  Probe
ggatgcctccctgagctgtaaattt

SEQ ID NO: 21475 - DNA, 25 bp, Artificial
  Probe
aattgcctgacttgatgtaaggaat

SEQ ID NO: 21476 - DNA, 25 bp, Artificial
  Probe
ctgacttgatgtaaggaatccacag

SEQ ID NO: 21477 - DNA, 25 bp, Artificial
  Probe
attgcctgacttgatgtaaggaatc

SEQ ID NO: 21478 - DNA, 25 bp, Artificial
  Probe
caacagtatcgtgcttactatggag

SEQ ID NO: 21479 - DNA, 25 bp, Artificial
  Probe
ctccaacagtatcgtgcttactatg

SEQ ID NO: 21480 - DNA, 25 bp, Artificial
  Probe
tctccaacagtatcgtgcttactat

SEQ ID NO: 21481 - DNA, 25 bp, Artificial
  Probe
cctttatctttatctgcgggatgat

SEQ ID NO: 21482 - DNA, 25 bp, Artificial
  Probe
acttgatgtaaggaatccacaggtc

SEQ ID NO: 21483 - DNA, 25 bp, Artificial
  Probe
gacttgatgtaaggaatccacaggt

SEQ ID NO: 21484 - DNA, 25 bp, Artificial
  Probe
tgacttgatgtaaggaatccacagg

SEQ ID NO: 21485 - DNA, 25 bp, Artificial
  Probe
ttatttcacaaggctttcacaagac

SEQ ID NO: 21486 - DNA, 25 bp, Artificial
  Probe
gttatttcacaaggctttcacaaga

SEQ ID NO: 21487 - DNA, 25 bp, Artificial
  Probe
cttcattacagctaattgcagttgg

SEQ ID NO: 21488 - DNA, 25 bp, Artificial
  Probe
ctttatctttatctgcgggatgatt

SEQ ID NO: 21489 - DNA, 25 bp, Artificial
  Probe
ctctccaacagtatcgtgcttacta

SEQ ID NO: 21490 - DNA, 25 bp, Artificial
  Probe
cctgacttgatgtaaggaatccaca

SEQ ID NO: 21491 - DNA, 25 bp, Artificial
  Probe
tttatctttatctgcgggatgattt

SEQ ID NO: 21492 - DNA, 25 bp, Artificial
  Probe
ttcctctccaacagtatcgtgctta

SEQ ID NO: 21493 - DNA, 25 bp, Artificial
  Probe
ccttccttctgaaagcctttatctt

SEQ ID NO: 21494 - DNA, 25 bp, Artificial
  Probe
ttccttccttctgaaagcctttatc

SEQ ID NO: 21495 - DNA, 25 bp, Artificial
  Probe
atgttatttcacaaggctttcacaa

SEQ ID NO: 21496 - DNA, 25 bp, Artificial
  Probe
ccaacagtatcgtgcttactatgga

SEQ ID NO: 21497 - DNA, 25 bp, Artificial
  Probe
tccaacagtatcgtgcttactatgg

SEQ ID NO: 21498 - DNA, 25 bp, Artificial
  Probe
gatgttatttcacaaggctttcaca

SEQ ID NO: 21499 - DNA, 25 bp, Artificial
  Probe
tgttatttcacaaggctttcacaag

SEQ ID NO: 21500 - DNA, 25 bp, Artificial
  Probe
tatttcacaaggctttcacaagacc

SEQ ID NO: 21501 - DNA, 25 bp, Artificial
  Probe
ggatgttatttcacaaggctttcac

SEQ ID NO: 21502 - DNA, 25 bp, Artificial
  Probe
tccttccttctgaaagcctttatct

SEQ ID NO: 21503 - DNA, 25 bp, Artificial
  Probe
ttgcctgacttgatgtaaggaatcc

SEQ ID NO: 21504 - DNA, 25 bp, Artificial
  Probe
aagcctttatctttatctgcgggat

SEQ ID NO: 21505 - DNA, 25 bp, Artificial
  Probe
cttgatgtaaggaatccacaggtcc

SEQ ID NO: 21506 - DNA, 25 bp, Artificial
  Probe
tcctctccaacagtatcgtgcttac

SEQ ID NO: 21507 - DNA, 25 bp, Artificial
  Probe
atgctagaccaacacttctgaaact

SEQ ID NO: 21508 - DNA, 25 bp, Artificial
  Probe
cggatgttatttcacaaggctttca

SEQ ID NO: 21509 - DNA, 25 bp, Artificial
  Probe
gcctttatctttatctgcgggatga

SEQ ID NO: 21510 - DNA, 25 bp, Artificial
  Probe
agcctttatctttatctgcgggatg

SEQ ID NO: 21511 - DNA, 25 bp, Artificial
  Probe
ctagaccaacacttctgaaactgtg

SEQ ID NO: 21512 - DNA, 25 bp, Artificial
  Probe
aacagtatcgtgcttactatggagc

SEQ ID NO: 21513 - DNA, 25 bp, Artificial
  Probe
gcctgacttgatgtaaggaatccac

SEQ ID NO: 21514 - DNA, 25 bp, Artificial
  Probe
tagaccaacacttctgaaactgtga

SEQ ID NO: 21515 - DNA, 25 bp, Artificial
  Probe
catgctagaccaacacttctgaaac

SEQ ID NO: 21516 - DNA, 25 bp, Artificial
  Probe
ctgaaagcctttatctttatctgcg

SEQ ID NO: 21517 - DNA, 25 bp, Artificial
  Probe
tttccttccttctgaaagcctttat

SEQ ID NO: 21518 - DNA, 25 bp, Artificial
  Probe
gcttcattacagctaattgcagttg

SEQ ID NO: 21519 - DNA, 25 bp, Artificial
  Probe
cttccttctgaaagcctttatcttt

SEQ ID NO: 21520 - DNA, 25 bp, Artificial
  Probe
ttattctgtagcgtgagactccatt

SEQ ID NO: 21521 - DNA, 25 bp, Artificial
  Probe
tattctgtagcgtgagactccattc

SEQ ID NO: 21522 - DNA, 25 bp, Artificial
  Probe
gttattctgtagcgtgagactccat

SEQ ID NO: 21523 - DNA, 25 bp, Artificial
  Probe
gcttatctgtaaatgcgaacctaac

SEQ ID NO: 21524 - DNA, 25 bp, Artificial
  Probe
atgcttatctgtaaatgcgaaccta

SEQ ID NO: 21525 - DNA, 25 bp, Artificial
  Probe
tgcttatctgtaaatgcgaacctaa

SEQ ID NO: 21526 - DNA, 25 bp, Artificial
  Probe
ttatctgtaaatgcgaacctaactg

SEQ ID NO: 21527 - DNA, 25 bp, Artificial
  Probe
gagactccattccataaacatttgc

SEQ ID NO: 21528 - DNA, 25 bp, Artificial
  Probe
tgagactccattccataaacatttg

SEQ ID NO: 21529 - DNA, 25 bp, Artificial
  Probe
gtgagactccattccataaacattt

SEQ ID NO: 21530 - DNA, 25 bp, Artificial
  Probe
cttatctgtaaatgcgaacctaact

SEQ ID NO: 21531 - DNA, 25 bp, Artificial
  Probe
atgcctgtgaagagtgattaaatac

SEQ ID NO: 21532 - DNA, 25 bp, Artificial
  Probe
atgcgaacctaactgccatatttat

SEQ ID NO: 21533 - DNA, 25 bp, Artificial
  Probe
tatctgtaaatgcgaacctaactgc

SEQ ID NO: 21534 - DNA, 25 bp, Artificial
  Probe
aatgcgaacctaactgccatattta

SEQ ID NO: 21535 - DNA, 25 bp, Artificial
  Probe
taaatgcgaacctaactgccatatt

SEQ ID NO: 21536 - DNA, 25 bp, Artificial
  Probe
cgtgagactccattccataaacatt

SEQ ID NO: 21537 - DNA, 25 bp, Artificial
  Probe
gtaaatgcgaacctaactgccatat

SEQ ID NO: 21538 - DNA, 25 bp, Artificial
  Probe
actgtgctatattgactttattggt

SEQ ID NO: 21539 - DNA, 25 bp, Artificial
  Probe
agttattctgtagcgtgagactcca

SEQ ID NO: 21540 - DNA, 25 bp, Artificial
  Probe
tgcctgtgaagagtgattaaataca

SEQ ID NO: 21541 - DNA, 25 bp, Artificial
  Probe
tgtagcgtgagactccattccataa

SEQ ID NO: 21542 - DNA, 25 bp, Artificial
  Probe
cagttattctgtagcgtgagactcc

SEQ ID NO: 21543 - DNA, 25 bp, Artificial
  Probe
ccagttattctgtagcgtgagactc

SEQ ID NO: 21544 - DNA, 25 bp, Artificial
  Probe
tgcgaacctaactgccatatttatg

SEQ ID NO: 21545 - DNA, 25 bp, Artificial
  Probe
gcctgtgaagagtgattaaatacat

SEQ ID NO: 21546 - DNA, 25 bp, Artificial
  Probe
ctgtagcgtgagactccattccata

SEQ ID NO: 21547 - DNA, 25 bp, Artificial
  Probe
aaatgcgaacctaactgccatattt

SEQ ID NO: 21548 - DNA, 25 bp, Artificial
  Probe
tagcgtgagactccattccataaac

SEQ ID NO: 21549 - DNA, 25 bp, Artificial
  Probe
gtagcgtgagactccattccataaa

SEQ ID NO: 21550 - DNA, 25 bp, Artificial
  Probe
catgcttatctgtaaatgcgaacct

SEQ ID NO: 21551 - DNA, 25 bp, Artificial
  Probe
tgtaaatgcgaacctaactgccata

SEQ ID NO: 21552 - DNA, 25 bp, Artificial
  Probe
gactccattccataaacatttgcag

SEQ ID NO: 21553 - DNA, 25 bp, Artificial
  Probe
ctccattccataaacatttgcagtg

SEQ ID NO: 21554 - DNA, 25 bp, Artificial
  Probe
agactccattccataaacatttgca

SEQ ID NO: 21555 - DNA, 25 bp, Artificial
  Probe
gcgaacctaactgccatatttatgc

SEQ ID NO: 21556 - DNA, 25 bp, Artificial
  Probe
gccatatttatgcaatacgtgtacc

SEQ ID NO: 21557 - DNA, 25 bp, Artificial
  Probe
ccatatttatgcaatacgtgtacca

SEQ ID NO: 21558 - DNA, 25 bp, Artificial
  Probe
gctactgtgctatattgactttatt

SEQ ID NO: 21559 - DNA, 25 bp, Artificial
  Probe
acatgcttatctgtaaatgcgaacc

SEQ ID NO: 21560 - DNA, 25 bp, Artificial
  Probe
gcgtgagactccattccataaacat

SEQ ID NO: 21561 - DNA, 25 bp, Artificial
  Probe
tacatgcttatctgtaaatgcgaac

SEQ ID NO: 21562 - DNA, 25 bp, Artificial
  Probe
gtacatgcttatctgtaaatgcgaa

SEQ ID NO: 21563 - DNA, 25 bp, Artificial
  Probe
attctgtagcgtgagactccattcc

SEQ ID NO: 21564 - DNA, 25 bp, Artificial
  Probe
tttatgcaatacgtgtaccaatttg

SEQ ID NO: 21565 - DNA, 25 bp, Artificial
  Probe
tggatttgtataataggttgtgctt

SEQ ID NO: 21566 - DNA, 25 bp, Artificial
  Probe
ttggatttgtataataggttgtgct

SEQ ID NO: 21567 - DNA, 25 bp, Artificial
  Probe
ggtgatgttcatgtaaagttcttgg

SEQ ID NO: 21568 - DNA, 25 bp, Artificial
  Probe
gggtgatgttcatgtaaagttcttg

SEQ ID NO: 21569 - DNA, 25 bp, Artificial
  Probe
attggatttgtataataggttgtgc

SEQ ID NO: 21570 - DNA, 25 bp, Artificial
  Probe
gtgatgttcatgtaaagttcttgga

SEQ ID NO: 21571 - DNA, 25 bp, Artificial
  Probe
ggatttgtataataggttgtgcttt

SEQ ID NO: 21572 - DNA, 25 bp, Artificial
  Probe
gggattggatttgtataataggttg

SEQ ID NO: 21573 - DNA, 25 bp, Artificial
  Probe
tgatgttcatgtaaagttcttggaa

SEQ ID NO: 21574 - DNA, 25 bp, Artificial
  Probe
agggattggatttgtataataggtt

SEQ ID NO: 21575 - DNA, 25 bp, Artificial
  Probe
aagggattggatttgtataataggt

SEQ ID NO: 21576 - DNA, 25 bp, Artificial
  Probe
cgggtgatgttcatgtaaagttctt

SEQ ID NO: 21577 - DNA, 25 bp, Artificial
  Probe
caagggattggatttgtataatagg

SEQ ID NO: 21578 - DNA, 25 bp, Artificial
  Probe
ggattggatttgtataataggttgt

SEQ ID NO: 21579 - DNA, 25 bp, Artificial
  Probe
tacctgagacaagggattggatttg

SEQ ID NO: 21580 - DNA, 25 bp, Artificial
  Probe
gtacctgagacaagggattggattt

SEQ ID NO: 21581 - DNA, 25 bp, Artificial
  Probe
gattggatttgtataataggttgtg

SEQ ID NO: 21582 - DNA, 25 bp, Artificial
  Probe
ctgagacaagggattggatttgtat

SEQ ID NO: 21583 - DNA, 25 bp, Artificial
  Probe
tgagacaagggattggatttgtata

SEQ ID NO: 21584 - DNA, 25 bp, Artificial
  Probe
tgtacctgagacaagggattggatt

SEQ ID NO: 21585 - DNA, 25 bp, Artificial
  Probe
gagacaagggattggatttgtataa

SEQ ID NO: 21586 - DNA, 25 bp, Artificial
  Probe
gcgggtgatgttcatgtaaagttct

SEQ ID NO: 21587 - DNA, 25 bp, Artificial
  Probe
gatgttcatgtaaagttcttggaac

SEQ ID NO: 21588 - DNA, 25 bp, Artificial
  Probe
ctgtacctgagacaagggattggat

SEQ ID NO: 21589 - DNA, 25 bp, Artificial
  Probe
agacaagggattggatttgtataat

SEQ ID NO: 21590 - DNA, 25 bp, Artificial
  Probe
gttcatgtaaagttcttggaacaat

SEQ ID NO: 21591 - DNA, 25 bp, Artificial
  Probe
cctgagacaagggattggatttgta

SEQ ID NO: 21592 - DNA, 25 bp, Artificial
  Probe
ggcgggtgatgttcatgtaaagttc

SEQ ID NO: 21593 - DNA, 25 bp, Artificial
  Probe
gtaaaacctgtcgtaaaagctgctg

SEQ ID NO: 21594 - DNA, 25 bp, Artificial
  Probe
ctgtaaaacctgtcgtaaaagctgc

SEQ ID NO: 21595 - DNA, 25 bp, Artificial
  Probe
tgtaaagttcttggaacaataaagt

SEQ ID NO: 21596 - DNA, 25 bp, Artificial
  Probe
gatttgtataataggttgtgctttt

SEQ ID NO: 21597 - DNA, 25 bp, Artificial
  Probe
gtatgtctggagggatctgcatctg

SEQ ID NO: 21598 - DNA, 25 bp, Artificial
  Probe
tgtaaaacctgtcgtaaaagctgct

SEQ ID NO: 21599 - DNA, 25 bp, Artificial
  Probe
tcatgtaaagttcttggaacaataa

SEQ ID NO: 21600 - DNA, 25 bp, Artificial
  Probe
ttcatgtaaagttcttggaacaata

SEQ ID NO: 21601 - DNA, 25 bp, Artificial
  Probe
acaagggattggatttgtataatag

SEQ ID NO: 21602 - DNA, 25 bp, Artificial
  Probe
gacaagggattggatttgtataata

SEQ ID NO: 21603 - DNA, 25 bp, Artificial
  Probe
gtgtatgtctggagggatctgcatc

SEQ ID NO: 21604 - DNA, 25 bp, Artificial
  Probe
tgtatgtctggagggatctgcatct

SEQ ID NO: 21605 - DNA, 25 bp, Artificial
  Probe
acctgagacaagggattggatttgt

SEQ ID NO: 21606 - DNA, 25 bp, Artificial
  Probe
catgtaaagttcttggaacaataaa

SEQ ID NO: 21607 - DNA, 25 bp, Artificial
  Probe
gtaaagttcttggaacaataaagtt

SEQ ID NO: 21608 - DNA, 25 bp, Artificial
  Probe
gctgtaaaacctgtcgtaaaagctg

SEQ ID NO: 21609 - DNA, 25 bp, Artificial
  Probe
atgtaaagttcttggaacaataaag

SEQ ID NO: 21610 - DNA, 25 bp, Artificial
  Probe
tgcccaaactatgatacatcttaca

SEQ ID NO: 21611 - DNA, 25 bp, Artificial
  Probe
gcccaaactatgatacatcttacag

SEQ ID NO: 21612 - DNA, 25 bp, Artificial
  Probe
atgcccaaactatgatacatcttac

SEQ ID NO: 21613 - DNA, 25 bp, Artificial
  Probe
aaatgcccaaactatgatacatctt

SEQ ID NO: 21614 - DNA, 25 bp, Artificial
  Probe
ttctgtctgtgtgtctgctcctaat

SEQ ID NO: 21615 - DNA, 25 bp, Artificial
  Probe
gtctgtgtgtctgctcctaatgttg

SEQ ID NO: 21616 - DNA, 25 bp, Artificial
  Probe
aatgcccaaactatgatacatctta

SEQ ID NO: 21617 - DNA, 25 bp, Artificial
  Probe
cccaaactatgatacatcttacaga

SEQ ID NO: 21618 - DNA, 25 bp, Artificial
  Probe
tgtctgtgtgtctgctcctaatgtt

SEQ ID NO: 21619 - DNA, 25 bp, Artificial
  Probe
gcctgtgtgtgtttgtatataggat

SEQ ID NO: 21620 - DNA, 25 bp, Artificial
  Probe
tgtttctaatacactttctgtctgt

SEQ ID NO: 21621 - DNA, 25 bp, Artificial
  Probe
aattattgtgtgatggtgccaaagg

SEQ ID NO: 21622 - DNA, 25 bp, Artificial
  Probe
tctgtctgtgtgtctgctcctaatg

SEQ ID NO: 21623 - DNA, 25 bp, Artificial
  Probe
gctcctaatgttgcatgatatttgt

SEQ ID NO: 21624 - DNA, 25 bp, Artificial
  Probe
ctgtttctaatacactttctgtctg

SEQ ID NO: 21625 - DNA, 25 bp, Artificial
  Probe
tgcacacttattaaatatcacagct

SEQ ID NO: 21626 - DNA, 25 bp, Artificial
  Probe
tctgtttctaatacactttctgtct

SEQ ID NO: 21627 - DNA, 25 bp, Artificial
  Probe
gtttctaatacactttctgtctgtg

SEQ ID NO: 21628 - DNA, 25 bp, Artificial
  Probe
gcacacttattaaatatcacagctt

SEQ ID NO: 21629 - DNA, 25 bp, Artificial
  Probe
ctgtctgtgtgtctgctcctaatgt

SEQ ID NO: 21630 - DNA, 25 bp, Artificial
  Probe
tggaacaagtgatgcctctaacctc

SEQ ID NO: 21631 - DNA, 25 bp, Artificial
  Probe
ctggaacaagtgatgcctctaacct

SEQ ID NO: 21632 - DNA, 25 bp, Artificial
  Probe
tctgctcctaatgttgcatgatatt

SEQ ID NO: 21633 - DNA, 25 bp, Artificial
  Probe
ctcctaatgttgcatgatatttgtg

SEQ ID NO: 21634 - DNA, 25 bp, Artificial
  Probe
cctgtgtgtgtttgtatataggata

SEQ ID NO: 21635 - DNA, 25 bp, Artificial
  Probe
gtctgctcctaatgttgcatgatat

SEQ ID NO: 21636 - DNA, 25 bp, Artificial
  Probe
taaaagagaaagaagaaaagcctgc

SEQ ID NO: 21637 - DNA, 25 bp, Artificial
  Probe
ggaaaatgcccaaactatgatacat

SEQ ID NO: 21638 - DNA, 25 bp, Artificial
  Probe
aataacccctttcccttttgtttac

SEQ ID NO: 21639 - DNA, 25 bp, Artificial
  Probe
tttctgtctgtgtgtctgctcctaa

SEQ ID NO: 21640 - DNA, 25 bp, Artificial
  Probe
ataacccctttcccttttgtttaca

SEQ ID NO: 21641 - DNA, 25 bp, Artificial
  Probe
atctgtttctaatacactttctgtc

SEQ ID NO: 21642 - DNA, 25 bp, Artificial
  Probe
aaataacccctttcccttttgttta

SEQ ID NO: 21643 - DNA, 25 bp, Artificial
  Probe
aaaatgcccaaactatgatacatct

SEQ ID NO: 21644 - DNA, 25 bp, Artificial
  Probe
tgtctgctcctaatgttgcatgata

SEQ ID NO: 21645 - DNA, 25 bp, Artificial
  Probe
gaaaatgcccaaactatgatacatc

SEQ ID NO: 21646 - DNA, 25 bp, Artificial
  Probe
ctgctggaacaagtgatgcctctaa

SEQ ID NO: 21647 - DNA, 25 bp, Artificial
  Probe
ctggcctgtgtgtgtttgtatatag

SEQ ID NO: 21648 - DNA, 25 bp, Artificial
  Probe
ctttctgtctgtgtgtctgctccta

SEQ ID NO: 21649 - DNA, 25 bp, Artificial
  Probe
taacccctttcccttttgtttacaa

SEQ ID NO: 21650 - DNA, 25 bp, Artificial
  Probe
ttaaaagagaaagaagaaaagcctg

SEQ ID NO: 21651 - DNA, 25 bp, Artificial
  Probe
tctgtgtgtctgctcctaatgttgc

SEQ ID NO: 21652 - DNA, 25 bp, Artificial
  Probe
tgctggaacaagtgatgcctctaac

SEQ ID NO: 21653 - DNA, 25 bp, Artificial
  Probe
attattgtgtgatggtgccaaaggg

SEQ ID NO: 21654 - DNA, 25 bp, Artificial
  Probe
aatctgtttctaatacactttctgt

SEQ ID NO: 21655 - DNA, 25 bp, Artificial
  Probe
aatggttactacagatcacaggaag

SEQ ID NO: 21656 - DNA, 25 bp, Artificial
  Probe
agttactacctcatacagacatcat

SEQ ID NO: 21657 - DNA, 25 bp, Artificial
  Probe
taatggttactacagatcacaggaa

SEQ ID NO: 21658 - DNA, 25 bp, Artificial
  Probe
ctacctcatacagacatcataatgg

SEQ ID NO: 21659 - DNA, 25 bp, Artificial
  Probe
cataatggttactacagatcacagg

SEQ ID NO: 21660 - DNA, 25 bp, Artificial
  Probe
ataatggttactacagatcacagga

SEQ ID NO: 21661 - DNA, 25 bp, Artificial
  Probe
acagacatcataatggttactacag

SEQ ID NO: 21662 - DNA, 25 bp, Artificial
  Probe
ggttactacagatcacaggaagtta

SEQ ID NO: 21663 - DNA, 25 bp, Artificial
  Probe
atggttactacagatcacaggaagt

SEQ ID NO: 21664 - DNA, 25 bp, Artificial
  Probe
cagacatcataatggttactacaga

SEQ ID NO: 21665 - DNA, 25 bp, Artificial
  Probe
cctcatacagacatcataatggtta

SEQ ID NO: 21666 - DNA, 25 bp, Artificial
  Probe
tagttactacctcatacagacatca

SEQ ID NO: 21667 - DNA, 25 bp, Artificial
  Probe
tggttactacagatcacaggaagtt

SEQ ID NO: 21668 - DNA, 25 bp, Artificial
  Probe
actacctcatacagacatcataatg

SEQ ID NO: 21669 - DNA, 25 bp, Artificial
  Probe
gttactacagatcacaggaagttag

SEQ ID NO: 21670 - DNA, 25 bp, Artificial
  Probe
aatggagtgtatctgtcttaccaag

SEQ ID NO: 21671 - DNA, 25 bp, Artificial
  Probe
caatggagtgtatctgtcttaccaa

SEQ ID NO: 21672 - DNA, 25 bp, Artificial
  Probe
tcataatggttactacagatcacag

SEQ ID NO: 21673 - DNA, 25 bp, Artificial
  Probe
acctcatacagacatcataatggtt

SEQ ID NO: 21674 - DNA, 25 bp, Artificial
  Probe
gttactacctcatacagacatcata

SEQ ID NO: 21675 - DNA, 25 bp, Artificial
  Probe
tcatacagacatcataatggttact

SEQ ID NO: 21676 - DNA, 25 bp, Artificial
  Probe
tacctcatacagacatcataatggt

SEQ ID NO: 21677 - DNA, 25 bp, Artificial
  Probe
ctctggtatacgttcatgtgttctt

SEQ ID NO: 21678 - DNA, 25 bp, Artificial
  Probe
ctcatacagacatcataatggttac

SEQ ID NO: 21679 - DNA, 25 bp, Artificial
  Probe
ttccaatggagtgtatctgtcttac

SEQ ID NO: 21680 - DNA, 25 bp, Artificial
  Probe
ttagttactacctcatacagacatc

SEQ ID NO: 21681 - DNA, 25 bp, Artificial
  Probe
agacatcataatggttactacagat

SEQ ID NO: 21682 - DNA, 25 bp, Artificial
  Probe
tacagacatcataatggttactaca

SEQ ID NO: 21683 - DNA, 25 bp, Artificial
  Probe
gactctggtatacgttcatgtgttc

SEQ ID NO: 21684 - DNA, 25 bp, Artificial
  Probe
tactacagatcacaggaagttagtt

SEQ ID NO: 21685 - DNA, 25 bp, Artificial
  Probe
ttactacagatcacaggaagttagt

SEQ ID NO: 21686 - DNA, 25 bp, Artificial
  Probe
ccaatggagtgtatctgtcttacca

SEQ ID NO: 21687 - DNA, 25 bp, Artificial
  Probe
atcataatggttactacagatcaca

SEQ ID NO: 21688 - DNA, 25 bp, Artificial
  Probe
tacagatcacaggaagttagtttgg

SEQ ID NO: 21689 - DNA, 25 bp, Artificial
  Probe
atcacaggaagttagtttggttaaa

SEQ ID NO: 21690 - DNA, 25 bp, Artificial
  Probe
tggagtgtatctgtcttaccaagat

SEQ ID NO: 21691 - DNA, 25 bp, Artificial
  Probe
atggagtgtatctgtcttaccaaga

SEQ ID NO: 21692 - DNA, 25 bp, Artificial
  Probe
agatcacaggaagttagtttggtta

SEQ ID NO: 21693 - DNA, 25 bp, Artificial
  Probe
acatcataatggttactacagatca

SEQ ID NO: 21694 - DNA, 25 bp, Artificial
  Probe
ggagtgtatctgtcttaccaagatc

SEQ ID NO: 21695 - DNA, 25 bp, Artificial
  Probe
actctggtatacgttcatgtgttct

SEQ ID NO: 21696 - DNA, 25 bp, Artificial
  Probe
gagtgtatctgtcttaccaagatcg

SEQ ID NO: 21697 - DNA, 25 bp, Artificial
  Probe
cagatcacaggaagttagtttggtt

SEQ ID NO: 21698 - DNA, 25 bp, Artificial
  Probe
ctacagatcacaggaagttagtttg

SEQ ID NO: 21699 - DNA, 25 bp, Artificial
  Probe
gatcacaggaagttagtttggttaa

SEQ ID NO: 21700 - DNA, 25 bp, Artificial
  Probe
aggattgacacatagcatgagttat

SEQ ID NO: 21701 - DNA, 25 bp, Artificial
  Probe
gaggattgacacatagcatgagtta

SEQ ID NO: 21702 - DNA, 25 bp, Artificial
  Probe
ggattgacacatagcatgagttatt

SEQ ID NO: 21703 - DNA, 25 bp, Artificial
  Probe
tgacacatagcatgagttatttgac

SEQ ID NO: 21704 - DNA, 25 bp, Artificial
  Probe
ttgacacatagcatgagttatttga

SEQ ID NO: 21705 - DNA, 25 bp, Artificial
  Probe
gacacatagcatgagttatttgact

SEQ ID NO: 21706 - DNA, 25 bp, Artificial
  Probe
acacatagcatgagttatttgactt

SEQ ID NO: 21707 - DNA, 25 bp, Artificial
  Probe
attgacacatagcatgagttatttg

SEQ ID NO: 21708 - DNA, 25 bp, Artificial
  Probe
tagaaagtctaatccagagatgggc

SEQ ID NO: 21709 - DNA, 25 bp, Artificial
  Probe
atcttcatttgcagttcatgtaaca

SEQ ID NO: 21710 - DNA, 25 bp, Artificial
  Probe
gattgacacatagcatgagttattt

SEQ ID NO: 21711 - DNA, 25 bp, Artificial
  Probe
cacatagcatgagttatttgacttt

SEQ ID NO: 21712 - DNA, 25 bp, Artificial
  Probe
aatcttcatttgcagttcatgtaac

SEQ ID NO: 21713 - DNA, 25 bp, Artificial
  Probe
aacagatgtttcatttcattcttct

SEQ ID NO: 21714 - DNA, 25 bp, Artificial
  Probe
attacaccacactgaaatgtattca

SEQ ID NO: 21715 - DNA, 25 bp, Artificial
  Probe
ttgttgttttggtttggttttcatg

SEQ ID NO: 21716 - DNA, 25 bp, Artificial
  Probe
aaatcttcatttgcagttcatgtaa

SEQ ID NO: 21717 - DNA, 25 bp, Artificial
  Probe
gactttccattagtgtctatttctt

SEQ ID NO: 21718 - DNA, 25 bp, Artificial
  Probe
gttgttttggtttggttttcatgtg

SEQ ID NO: 21719 - DNA, 25 bp, Artificial
  Probe
tgttgttttggtttggttttcatgt

SEQ ID NO: 21720 - DNA, 25 bp, Artificial
  Probe
actttccattagtgtctatttcttt

SEQ ID NO: 21721 - DNA, 25 bp, Artificial
  Probe
ttttggtttggttttcatgtggaat

SEQ ID NO: 21722 - DNA, 25 bp, Artificial
  Probe
atattattacaccacactgaaatgt

SEQ ID NO: 21723 - DNA, 25 bp, Artificial
  Probe
tttggtttggttttcatgtggaatg

SEQ ID NO: 21724 - DNA, 25 bp, Artificial
  Probe
agcatgagttatttgacttttgtgt

SEQ ID NO: 21725 - DNA, 25 bp, Artificial
  Probe
tttactctgtgtagactttagaaag

SEQ ID NO: 21726 - DNA, 25 bp, Artificial
  Probe
ttgttttggtttggttttcatgtgg

SEQ ID NO: 21727 - DNA, 25 bp, Artificial
  Probe
gttttggtttggttttcatgtggaa

SEQ ID NO: 21728 - DNA, 25 bp, Artificial
  Probe
tattacaccacactgaaatgtattc

SEQ ID NO: 21729 - DNA, 25 bp, Artificial
  Probe
agtgtctatttcttttactctgtgt

SEQ ID NO: 21730 - DNA, 25 bp, Artificial
  Probe
gcatgagttatttgacttttgtgta

SEQ ID NO: 21731 - DNA, 25 bp, Artificial
  Probe
tgttttggtttggttttcatgtgga

SEQ ID NO: 21732 - DNA, 25 bp, Artificial
  Probe
atgagttatttgacttttgtgtagg

SEQ ID NO: 21733 - DNA, 25 bp, Artificial
  Probe
tagcatgagttatttgacttttgtg

SEQ ID NO: 21734 - DNA, 25 bp, Artificial
  Probe
ttattacaccacactgaaatgtatt

SEQ ID NO: 21735 - DNA, 25 bp, Artificial
  Probe
ttagaaagtctaatccagagatggg

SEQ ID NO: 21736 - DNA, 25 bp, Artificial
  Probe
tgaaatgtattcagaaacagatgtt

SEQ ID NO: 21737 - DNA, 25 bp, Artificial
  Probe
attattacaccacactgaaatgtat

SEQ ID NO: 21738 - DNA, 25 bp, Artificial
  Probe
gattacagactttccattagtgtct

SEQ ID NO: 21739 - DNA, 25 bp, Artificial
  Probe
tcttttactctgtgtagactttaga

SEQ ID NO: 21740 - DNA, 25 bp, Artificial
  Probe
gtgtctatttcttttactctgtgta

SEQ ID NO: 21741 - DNA, 25 bp, Artificial
  Probe
acagactttccattagtgtctattt

SEQ ID NO: 21742 - DNA, 25 bp, Artificial
  Probe
aatattattacaccacactgaaatg

SEQ ID NO: 21743 - DNA, 25 bp, Artificial
  Probe
atagcatgagttatttgacttttgt

SEQ ID NO: 21744 - DNA, 25 bp, Artificial
  Probe
acatagcatgagttatttgactttt

SEQ ID NO: 21745 - DNA, 25 bp, Artificial
  Probe
agacaaactggtatctcattatgta

SEQ ID NO: 21746 - DNA, 25 bp, Artificial
  Probe
tgggaacctttaatatgaaaatggc

SEQ ID NO: 21747 - DNA, 25 bp, Artificial
  Probe
tgtggatgatgtgggtatgtgtgta

SEQ ID NO: 21748 - DNA, 25 bp, Artificial
  Probe
gggaacctttaatatgaaaatggct

SEQ ID NO: 21749 - DNA, 25 bp, Artificial
  Probe
gtggatgatgtgggtatgtgtgtac

SEQ ID NO: 21750 - DNA, 25 bp, Artificial
  Probe
acctttaatatgaaaatggcttcct

SEQ ID NO: 21751 - DNA, 25 bp, Artificial
  Probe
gacaaactggtatctcattatgtaa

SEQ ID NO: 21752 - DNA, 25 bp, Artificial
  Probe
ctttgggatgtttcctgtggatgat

SEQ ID NO: 21753 - DNA, 25 bp, Artificial
  Probe
ggaacctttaatatgaaaatggctt

SEQ ID NO: 21754 - DNA, 25 bp, Artificial
  Probe
gtctttcacttttaagttcagggag

SEQ ID NO: 21755 - DNA, 25 bp, Artificial
  Probe
tgtctttcacttttaagttcaggga

SEQ ID NO: 21756 - DNA, 25 bp, Artificial
  Probe
atgtctttcacttttaagttcaggg

SEQ ID NO: 21757 - DNA, 25 bp, Artificial
  Probe
aacctttaatatgaaaatggcttcc

SEQ ID NO: 21758 - DNA, 25 bp, Artificial
  Probe
atgaaaatggcttccttttgacttt

SEQ ID NO: 21759 - DNA, 25 bp, Artificial
  Probe
tttgggatgtttcctgtggatgatg

SEQ ID NO: 21760 - DNA, 25 bp, Artificial
  Probe
tatgaaaatggcttccttttgactt

SEQ ID NO: 21761 - DNA, 25 bp, Artificial
  Probe
cctgcaaacaattactaggttaact

SEQ ID NO: 21762 - DNA, 25 bp, Artificial
  Probe
atatgaaaatggcttccttttgact

SEQ ID NO: 21763 - DNA, 25 bp, Artificial
  Probe
tctttcacttttaagttcagggagc

SEQ ID NO: 21764 - DNA, 25 bp, Artificial
  Probe
gtttcctgtggatgatgtgggtatg

SEQ ID NO: 21765 - DNA, 25 bp, Artificial
  Probe
tgaaaatggcttccttttgactttg

SEQ ID NO: 21766 - DNA, 25 bp, Artificial
  Probe
cctttaatatgaaaatggcttcctt

SEQ ID NO: 21767 - DNA, 25 bp, Artificial
  Probe
ctttcacttttaagttcagggagca

SEQ ID NO: 21768 - DNA, 25 bp, Artificial
  Probe
cttccttttgactttgggatgtttc

SEQ ID NO: 21769 - DNA, 25 bp, Artificial
  Probe
atgggaacctttaatatgaaaatgg

SEQ ID NO: 21770 - DNA, 25 bp, Artificial
  Probe
aatatgaaaatggcttccttttgac

SEQ ID NO: 21771 - DNA, 25 bp, Artificial
  Probe
catgtctttcacttttaagttcagg

SEQ ID NO: 21772 - DNA, 25 bp, Artificial
  Probe
gaaaatggcttccttttgactttgg

SEQ ID NO: 21773 - DNA, 25 bp, Artificial
  Probe
tttcctgtggatgatgtgggtatgt

SEQ ID NO: 21774 - DNA, 25 bp, Artificial
  Probe
tgtttcctgtggatgatgtgggtat

SEQ ID NO: 21775 - DNA, 25 bp, Artificial
  Probe
atgtttcctgtggatgatgtgggta

SEQ ID NO: 21776 - DNA, 25 bp, Artificial
  Probe
tttgactttgggatgtttcctgtgg

SEQ ID NO: 21777 - DNA, 25 bp, Artificial
  Probe
agagtcatgtctttcacttttaagt

SEQ ID NO: 21778 - DNA, 25 bp, Artificial
  Probe
gagacaaactggtatctcattatgt

SEQ ID NO: 21779 - DNA, 25 bp, Artificial
  Probe
acaaactggtatctcattatgtaat

SEQ ID NO: 21780 - DNA, 25 bp, Artificial
  Probe
gactttgggatgtttcctgtggatg

SEQ ID NO: 21781 - DNA, 25 bp, Artificial
  Probe
cttttgactttgggatgtttcctgt

SEQ ID NO: 21782 - DNA, 25 bp, Artificial
  Probe
ttccttttgactttgggatgtttcc

SEQ ID NO: 21783 - DNA, 25 bp, Artificial
  Probe
gtcatgtctttcacttttaagttca

SEQ ID NO: 21784 - DNA, 25 bp, Artificial
  Probe
ctgtggatgatgtgggtatgtgtgt

SEQ ID NO: 21785 - DNA, 25 bp, Artificial
  Probe
tcatgtctttcacttttaagttcag

SEQ ID NO: 21786 - DNA, 25 bp, Artificial
  Probe
gaacctttaatatgaaaatggcttc

SEQ ID NO: 21787 - DNA, 25 bp, Artificial
  Probe
ctgcaaacaattactaggttaacta

SEQ ID NO: 21788 - DNA, 25 bp, Artificial
  Probe
ttttgactttgggatgtttcctgtg

SEQ ID NO: 21789 - DNA, 25 bp, Artificial
  Probe
agtcatgtctttcacttttaagttc

SEQ ID NO: 21790 - DNA, 25 bp, Artificial
  Probe
actctgacttgataattgttgaagc

SEQ ID NO: 21791 - DNA, 25 bp, Artificial
  Probe
tgctactgttccttgcttcaatata

SEQ ID NO: 21792 - DNA, 25 bp, Artificial
  Probe
atgctactgttccttgcttcaatat

SEQ ID NO: 21793 - DNA, 25 bp, Artificial
  Probe
gctactgttccttgcttcaatataa

SEQ ID NO: 21794 - DNA, 25 bp, Artificial
  Probe
tgttccttgcttcaatataatccag

SEQ ID NO: 21795 - DNA, 25 bp, Artificial
  Probe
ctgttccttgcttcaatataatcca

SEQ ID NO: 21796 - DNA, 25 bp, Artificial
  Probe
actgttccttgcttcaatataatcc

SEQ ID NO: 21797 - DNA, 25 bp, Artificial
  Probe
gatgctactgttccttgcttcaata

SEQ ID NO: 21798 - DNA, 25 bp, Artificial
  Probe
tgactctgacttgataattgttgaa

SEQ ID NO: 21799 - DNA, 25 bp, Artificial
  Probe
ttgactctgacttgataattgttga

SEQ ID NO: 21800 - DNA, 25 bp, Artificial
  Probe
gttccttgcttcaatataatccagg

SEQ ID NO: 21801 - DNA, 25 bp, Artificial
  Probe
gactctgacttgataattgttgaag

SEQ ID NO: 21802 - DNA, 25 bp, Artificial
  Probe
agattgactctgacttgataattgt

SEQ ID NO: 21803 - DNA, 25 bp, Artificial
  Probe
ttgataattgttgaagctgtgtgat

SEQ ID NO: 21804 - DNA, 25 bp, Artificial
  Probe
attgactctgacttgataattgttg

SEQ ID NO: 21805 - DNA, 25 bp, Artificial
  Probe
cttgataattgttgaagctgtgtga

SEQ ID NO: 21806 - DNA, 25 bp, Artificial
  Probe
gacttgataattgttgaagctgtgt

SEQ ID NO: 21807 - DNA, 25 bp, Artificial
  Probe
tgacttgataattgttgaagctgtg

SEQ ID NO: 21808 - DNA, 25 bp, Artificial
  Probe
acttgataattgttgaagctgtgtg

SEQ ID NO: 21809 - DNA, 25 bp, Artificial
  Probe
ctgacttgataattgttgaagctgt

SEQ ID NO: 21810 - DNA, 25 bp, Artificial
  Probe
tctgacttgataattgttgaagctg

SEQ ID NO: 21811 - DNA, 25 bp, Artificial
  Probe
ctctgacttgataattgttgaagct

SEQ ID NO: 21812 - DNA, 25 bp, Artificial
  Probe
tgataattgttgaagctgtgtgata

SEQ ID NO: 21813 - DNA, 25 bp, Artificial
  Probe
gattgactctgacttgataattgtt

SEQ ID NO: 21814 - DNA, 25 bp, Artificial
  Probe
agatgctactgttccttgcttcaat

SEQ ID NO: 21815 - DNA, 25 bp, Artificial
  Probe
gagattgactctgacttgataattg

SEQ ID NO: 21816 - DNA, 25 bp, Artificial
  Probe
gaataactttatgccaaggacaagg

SEQ ID NO: 21817 - DNA, 25 bp, Artificial
  Probe
aataactttatgccaaggacaagga

SEQ ID NO: 21818 - DNA, 25 bp, Artificial
  Probe
agaataactttatgccaaggacaag

SEQ ID NO: 21819 - DNA, 25 bp, Artificial
  Probe
gaagaataactttatgccaaggaca

SEQ ID NO: 21820 - DNA, 25 bp, Artificial
  Probe
tgaagaataactttatgccaaggac

SEQ ID NO: 21821 - DNA, 25 bp, Artificial
  Probe
ctgaagaataactttatgccaagga

SEQ ID NO: 21822 - DNA, 25 bp, Artificial
  Probe
tcctgaagaataactttatgccaag

SEQ ID NO: 21823 - DNA, 25 bp, Artificial
  Probe
ataactttatgccaaggacaaggac

SEQ ID NO: 21824 - DNA, 25 bp, Artificial
  Probe
aagaataactttatgccaaggacaa

SEQ ID NO: 21825 - DNA, 25 bp, Artificial
  Probe
gataattgttgaagctgtgtgataa

SEQ ID NO: 21826 - DNA, 25 bp, Artificial
  Probe
gagatgctactgttccttgcttcaa

SEQ ID NO: 21827 - DNA, 25 bp, Artificial
  Probe
tgatatgtactgtggatttgctttc

SEQ ID NO: 21828 - DNA, 25 bp, Artificial
  Probe
ttcctgaagaataactttatgccaa

SEQ ID NO: 21829 - DNA, 25 bp, Artificial
  Probe
tttcctgaagaataactttatgcca

SEQ ID NO: 21830 - DNA, 25 bp, Artificial
  Probe
gatatgtactgtggatttgctttct

SEQ ID NO: 21831 - DNA, 25 bp, Artificial
  Probe
tgtactgtggatttgctttctaaag

SEQ ID NO: 21832 - DNA, 25 bp, Artificial
  Probe
tactgttccttgcttcaatataatc

SEQ ID NO: 21833 - DNA, 25 bp, Artificial
  Probe
ctactgttccttgcttcaatataat

SEQ ID NO: 21834 - DNA, 25 bp, Artificial
  Probe
gtactgtggatttgctttctaaaga

SEQ ID NO: 21835 - DNA, 25 bp, Artificial
  Probe
ctaagagagctgcttcattgactac

SEQ ID NO: 21836 - DNA, 25 bp, Artificial
  Probe
tctaagagagctgcttcattgacta

SEQ ID NO: 21837 - DNA, 25 bp, Artificial
  Probe
taagagagctgcttcattgactact

SEQ ID NO: 21838 - DNA, 25 bp, Artificial
  Probe
ctaagggaagaagcagaatagaacc

SEQ ID NO: 21839 - DNA, 25 bp, Artificial
  Probe
taagggaagaagcagaatagaacca

SEQ ID NO: 21840 - DNA, 25 bp, Artificial
  Probe
atctttgggaaggcttaacatcttt

SEQ ID NO: 21841 - DNA, 25 bp, Artificial
  Probe
cactctaagggaagaagcagaatag

SEQ ID NO: 21842 - DNA, 25 bp, Artificial
  Probe
acactctaagggaagaagcagaata

SEQ ID NO: 21843 - DNA, 25 bp, Artificial
  Probe
tctttgggaaggcttaacatctttg

SEQ ID NO: 21844 - DNA, 25 bp, Artificial
  Probe
gatctttgggaaggcttaacatctt

SEQ ID NO: 21845 - DNA, 25 bp, Artificial
  Probe
agctgcttcattgactactgtctaa

SEQ ID NO: 21846 - DNA, 25 bp, Artificial
  Probe
aagagagctgcttcattgactactg

SEQ ID NO: 21847 - DNA, 25 bp, Artificial
  Probe
cattctctggtgttggcataaggac

SEQ ID NO: 21848 - DNA, 25 bp, Artificial
  Probe
gacactctaagggaagaagcagaat

SEQ ID NO: 21849 - DNA, 25 bp, Artificial
  Probe
gctgcttcattgactactgtctaaa

SEQ ID NO: 21850 - DNA, 25 bp, Artificial
  Probe
gagctgcttcattgactactgtcta

SEQ ID NO: 21851 - DNA, 25 bp, Artificial
  Probe
tctaagggaagaagcagaatagaac

SEQ ID NO: 21852 - DNA, 25 bp, Artificial
  Probe
actctaagggaagaagcagaataga

SEQ ID NO: 21853 - DNA, 25 bp, Artificial
  Probe
ctctaagggaagaagcagaatagaa

SEQ ID NO: 21854 - DNA, 25 bp, Artificial
  Probe
aagggaagaagcagaatagaaccac

SEQ ID NO: 21855 - DNA, 25 bp, Artificial
  Probe
ctttgggaaggcttaacatctttgg

SEQ ID NO: 21856 - DNA, 25 bp, Artificial
  Probe
ggaagaagcagaatagaaccactgg

SEQ ID NO: 21857 - DNA, 25 bp, Artificial
  Probe
taacatctttggacctctgtggaaa

SEQ ID NO: 21858 - DNA, 25 bp, Artificial
  Probe
ttaacatctttggacctctgtggaa

SEQ ID NO: 21859 - DNA, 25 bp, Artificial
  Probe
gattcttcttcatccttccaggctg

SEQ ID NO: 21860 - DNA, 25 bp, Artificial
  Probe
tttgggaaggcttaacatctttgga

SEQ ID NO: 21861 - DNA, 25 bp, Artificial
  Probe
cttaaacctctgtgtgaaagccaac

SEQ ID NO: 21862 - DNA, 25 bp, Artificial
  Probe
cacactccaaggttcatgtataggc

SEQ ID NO: 21863 - DNA, 25 bp, Artificial
  Probe
cttaacatctttggacctctgtgga

SEQ ID NO: 21864 - DNA, 25 bp, Artificial
  Probe
agggaagaagcagaatagaaccact

SEQ ID NO: 21865 - DNA, 25 bp, Artificial
  Probe
agagagctgcttcattgactactgt

SEQ ID NO: 21866 - DNA, 25 bp, Artificial
  Probe
gaagaagcagaatagaaccactggc

SEQ ID NO: 21867 - DNA, 25 bp, Artificial
  Probe
gagcattctctggtgttggcataag

SEQ ID NO: 21868 - DNA, 25 bp, Artificial
  Probe
aggaccttaaacctctgtgtgaaag

SEQ ID NO: 21869 - DNA, 25 bp, Artificial
  Probe
ttgggaaggcttaacatctttggac

SEQ ID NO: 21870 - DNA, 25 bp, Artificial
  Probe
gagagctgcttcattgactactgtc

SEQ ID NO: 21871 - DNA, 25 bp, Artificial
  Probe
cctacccttttggattcttcttcat

SEQ ID NO: 21872 - DNA, 25 bp, Artificial
  Probe
gaaggcttaacatctttggacctct

SEQ ID NO: 21873 - DNA, 25 bp, Artificial
  Probe
ataaggaccttaaacctctgtgtga

SEQ ID NO: 21874 - DNA, 25 bp, Artificial
  Probe
cataaggaccttaaacctctgtgtg

SEQ ID NO: 21875 - DNA, 25 bp, Artificial
  Probe
ctacccttttggattcttcttcatc

SEQ ID NO: 21876 - DNA, 25 bp, Artificial
  Probe
ccttaaacctctgtgtgaaagccaa

SEQ ID NO: 21877 - DNA, 25 bp, Artificial
  Probe
taaggaccttaaacctctgtgtgaa

SEQ ID NO: 21878 - DNA, 25 bp, Artificial
  Probe
aaggaccttaaacctctgtgtgaaa

SEQ ID NO: 21879 - DNA, 25 bp, Artificial
  Probe
aaggcttaacatctttggacctctg

SEQ ID NO: 21880 - DNA, 25 bp, Artificial
  Probe
ttaagccttctatcataaccagcat

SEQ ID NO: 21881 - DNA, 25 bp, Artificial
  Probe
attaagccttctatcataaccagca

SEQ ID NO: 21882 - DNA, 25 bp, Artificial
  Probe
aattaagccttctatcataaccagc

SEQ ID NO: 21883 - DNA, 25 bp, Artificial
  Probe
gacactgaatcttcggtatctcaat

SEQ ID NO: 21884 - DNA, 25 bp, Artificial
  Probe
acactgaatcttcggtatctcaata

SEQ ID NO: 21885 - DNA, 25 bp, Artificial
  Probe
taagccttctatcataaccagcatg

SEQ ID NO: 21886 - DNA, 25 bp, Artificial
  Probe
actgaatcttcggtatctcaataac

SEQ ID NO: 21887 - DNA, 25 bp, Artificial
  Probe
cactgaatcttcggtatctcaataa

SEQ ID NO: 21888 - DNA, 25 bp, Artificial
  Probe
caatactatcgcaactggttgaatc

SEQ ID NO: 21889 - DNA, 25 bp, Artificial
  Probe
aatactatcgcaactggttgaatca

SEQ ID NO: 21890 - DNA, 25 bp, Artificial
  Probe
ctgaatcttcggtatctcaataact

SEQ ID NO: 21891 - DNA, 25 bp, Artificial
  Probe
ggacactgaatcttcggtatctcaa

SEQ ID NO: 21892 - DNA, 25 bp, Artificial
  Probe
atactatcgcaactggttgaatcag

SEQ ID NO: 21893 - DNA, 25 bp, Artificial
  Probe
aagccttctatcataaccagcatgt

SEQ ID NO: 21894 - DNA, 25 bp, Artificial
  Probe
ttacatttgaggattaaagttgggc

SEQ ID NO: 21895 - DNA, 25 bp, Artificial
  Probe
ctatcataaccagcatgtgcataag

SEQ ID NO: 21896 - DNA, 25 bp, Artificial
  Probe
tctatcataaccagcatgtgcataa

SEQ ID NO: 21897 - DNA, 25 bp, Artificial
  Probe
ttctatcataaccagcatgtgcata

SEQ ID NO: 21898 - DNA, 25 bp, Artificial
  Probe
tacatttgaggattaaagttgggct

SEQ ID NO: 21899 - DNA, 25 bp, Artificial
  Probe
gcaatactatcgcaactggttgaat

SEQ ID NO: 21900 - DNA, 25 bp, Artificial
  Probe
gaattaagccttctatcataaccag

SEQ ID NO: 21901 - DNA, 25 bp, Artificial
  Probe
cgtgatgcttacatttgaggattaa

SEQ ID NO: 21902 - DNA, 25 bp, Artificial
  Probe
tatcataaccagcatgtgcataagg

SEQ ID NO: 21903 - DNA, 25 bp, Artificial
  Probe
acaacaatgcctttaatatgaaacg

SEQ ID NO: 21904 - DNA, 25 bp, Artificial
  Probe
cttctatcataaccagcatgtgcat

SEQ ID NO: 21905 - DNA, 25 bp, Artificial
  Probe
cgagagtgagaattaagccttctat

SEQ ID NO: 21906 - DNA, 25 bp, Artificial
  Probe
gcttacatttgaggattaaagttgg

SEQ ID NO: 21907 - DNA, 25 bp, Artificial
  Probe
agccttctatcataaccagcatgtg

SEQ ID NO: 21908 - DNA, 25 bp, Artificial
  Probe
agagtgagaattaagccttctatca

SEQ ID NO: 21909 - DNA, 25 bp, Artificial
  Probe
acatttgaggattaaagttgggctg

SEQ ID NO: 21910 - DNA, 25 bp, Artificial
  Probe
gagagtgagaattaagccttctatc

SEQ ID NO: 21911 - DNA, 25 bp, Artificial
  Probe
cttacatttgaggattaaagttggg

SEQ ID NO: 21912 - DNA, 25 bp, Artificial
  Probe
tgcttacatttgaggattaaagttg

SEQ ID NO: 21913 - DNA, 25 bp, Artificial
  Probe
agcaatactatcgcaactggttgaa

SEQ ID NO: 21914 - DNA, 25 bp, Artificial
  Probe
tcggacactgaatcttcggtatctc

SEQ ID NO: 21915 - DNA, 25 bp, Artificial
  Probe
ctcggacactgaatcttcggtatct

SEQ ID NO: 21916 - DNA, 25 bp, Artificial
  Probe
gagtgagaattaagccttctatcat

SEQ ID NO: 21917 - DNA, 25 bp, Artificial
  Probe
gtgatgcttacatttgaggattaaa

SEQ ID NO: 21918 - DNA, 25 bp, Artificial
  Probe
tatcgcaactggttgaatcaggatt

SEQ ID NO: 21919 - DNA, 25 bp, Artificial
  Probe
atcataaccagcatgtgcataagga

SEQ ID NO: 21920 - DNA, 25 bp, Artificial
  Probe
catttgaggattaaagttgggctgg

SEQ ID NO: 21921 - DNA, 25 bp, Artificial
  Probe
tactatcgcaactggttgaatcagg

SEQ ID NO: 21922 - DNA, 25 bp, Artificial
  Probe
ctcagcaatactatcgcaactggtt

SEQ ID NO: 21923 - DNA, 25 bp, Artificial
  Probe
tcataaccagcatgtgcataaggaa

SEQ ID NO: 21924 - DNA, 25 bp, Artificial
  Probe
gatgcttacatttgaggattaaagt

SEQ ID NO: 21925 - DNA, 25 bp, Artificial
  Probe
aataacactgttggcacttataggt

SEQ ID NO: 21926 - DNA, 25 bp, Artificial
  Probe
ataacactgttggcacttataggtg

SEQ ID NO: 21927 - DNA, 25 bp, Artificial
  Probe
gtttatctatggtttaggaagtgcc

SEQ ID NO: 21928 - DNA, 25 bp, Artificial
  Probe
ggtttatctatggtttaggaagtgc

SEQ ID NO: 21929 - DNA, 25 bp, Artificial
  Probe
agtgtatttgcctgtttaatttggg

SEQ ID NO: 21930 - DNA, 25 bp, Artificial
  Probe
tatttgcctgtttaatttgggtgtg

SEQ ID NO: 21931 - DNA, 25 bp, Artificial
  Probe
gtatttgcctgtttaatttgggtgt

SEQ ID NO: 21932 - DNA, 25 bp, Artificial
  Probe
tgtatttgcctgtttaatttgggtg

SEQ ID NO: 21933 - DNA, 25 bp, Artificial
  Probe
gtgtatttgcctgtttaatttgggt

SEQ ID NO: 21934 - DNA, 25 bp, Artificial
  Probe
taggtgacgtgattgattcagtatc

SEQ ID NO: 21935 - DNA, 25 bp, Artificial
  Probe
ttataggtgacgtgattgattcagt

SEQ ID NO: 21936 - DNA, 25 bp, Artificial
  Probe
acttataggtgacgtgattgattca

SEQ ID NO: 21937 - DNA, 25 bp, Artificial
  Probe
ataggtgacgtgattgattcagtat

SEQ ID NO: 21938 - DNA, 25 bp, Artificial
  Probe
taacactgttggcacttataggtga

SEQ ID NO: 21939 - DNA, 25 bp, Artificial
  Probe
cttataggtgacgtgattgattcag

SEQ ID NO: 21940 - DNA, 25 bp, Artificial
  Probe
cgagtctttgtgtgttatattccaa

SEQ ID NO: 21941 - DNA, 25 bp, Artificial
  Probe
cgtttgtttactccttcaatcagtt

SEQ ID NO: 21942 - DNA, 25 bp, Artificial
  Probe
ggtgacgtgattgattcagtatctt

SEQ ID NO: 21943 - DNA, 25 bp, Artificial
  Probe
tataggtgacgtgattgattcagta

SEQ ID NO: 21944 - DNA, 25 bp, Artificial
  Probe
agtctttgtgtgttatattccaagg

SEQ ID NO: 21945 - DNA, 25 bp, Artificial
  Probe
tggtttatctatggtttaggaagtg

SEQ ID NO: 21946 - DNA, 25 bp, Artificial
  Probe
tgtttactccttcaatcagtttgtt

SEQ ID NO: 21947 - DNA, 25 bp, Artificial
  Probe
ttgtttactccttcaatcagtttgt

SEQ ID NO: 21948 - DNA, 25 bp, Artificial
  Probe
gtctttgtgtgttatattccaagga

SEQ ID NO: 21949 - DNA, 25 bp, Artificial
  Probe
ttactccttcaatcagtttgttcaa

SEQ ID NO: 21950 - DNA, 25 bp, Artificial
  Probe
tttactccttcaatcagtttgttca

SEQ ID NO: 21951 - DNA, 25 bp, Artificial
  Probe
aggtgacgtgattgattcagtatct

SEQ ID NO: 21952 - DNA, 25 bp, Artificial
  Probe
tcaatcagtttgttcaaaggtagac

SEQ ID NO: 21953 - DNA, 25 bp, Artificial
  Probe
cacttataggtgacgtgattgattc

SEQ ID NO: 21954 - DNA, 25 bp, Artificial
  Probe
actccttcaatcagtttgttcaaag

SEQ ID NO: 21955 - DNA, 25 bp, Artificial
  Probe
gtttactccttcaatcagtttgttc

SEQ ID NO: 21956 - DNA, 25 bp, Artificial
  Probe
tagtgtatttgcctgtttaatttgg

SEQ ID NO: 21957 - DNA, 25 bp, Artificial
  Probe
caatcagtttgttcaaaggtagact

SEQ ID NO: 21958 - DNA, 25 bp, Artificial
  Probe
ccgtttgtttactccttcaatcagt

SEQ ID NO: 21959 - DNA, 25 bp, Artificial
  Probe
aaataacactgttggcacttatagg

SEQ ID NO: 21960 - DNA, 25 bp, Artificial
  Probe
atttgcctgtttaatttgggtgtgt

SEQ ID NO: 21961 - DNA, 25 bp, Artificial
  Probe
ttcaatcagtttgttcaaaggtaga

SEQ ID NO: 21962 - DNA, 25 bp, Artificial
  Probe
gctgaagttaatggtttatctatgg

SEQ ID NO: 21963 - DNA, 25 bp, Artificial
  Probe
gcacttataggtgacgtgattgatt

SEQ ID NO: 21964 - DNA, 25 bp, Artificial
  Probe
tactccttcaatcagtttgttcaaa

SEQ ID NO: 21965 - DNA, 25 bp, Artificial
  Probe
tttgtttactccttcaatcagtttg

SEQ ID NO: 21966 - DNA, 25 bp, Artificial
  Probe
gtttgtttactccttcaatcagttt

SEQ ID NO: 21967 - DNA, 25 bp, Artificial
  Probe
cttcaatcagtttgttcaaaggtag

SEQ ID NO: 21968 - DNA, 25 bp, Artificial
  Probe
gagtctttgtgtgttatattccaag

SEQ ID NO: 21969 - DNA, 25 bp, Artificial
  Probe
gggagctgaagttaatggtttatct

SEQ ID NO: 21970 - DNA, 25 bp, Artificial
  Probe
atatacatacacatccacaccactt

SEQ ID NO: 21971 - DNA, 25 bp, Artificial
  Probe
cctcttccttctcagaatcttcaag

SEQ ID NO: 21972 - DNA, 25 bp, Artificial
  Probe
tcctcttccttctcagaatcttcaa

SEQ ID NO: 21973 - DNA, 25 bp, Artificial
  Probe
tatatacatacacatccacaccact

SEQ ID NO: 21974 - DNA, 25 bp, Artificial
  Probe
ctcctcttccttctcagaatcttca

SEQ ID NO: 21975 - DNA, 25 bp, Artificial
  Probe
cctcctcttccttctcagaatcttc

SEQ ID NO: 21976 - DNA, 25 bp, Artificial
  Probe
atatatacatacacatccacaccac

SEQ ID NO: 21977 - DNA, 25 bp, Artificial
  Probe
tcctcctcttccttctcagaatctt

SEQ ID NO: 21978 - DNA, 25 bp, Artificial
  Probe
tacatacacatccacaccactttag

SEQ ID NO: 21979 - DNA, 25 bp, Artificial
  Probe
atacatacacatccacaccacttta

SEQ ID NO: 21980 - DNA, 25 bp, Artificial
  Probe
tatacatacacatccacaccacttt

SEQ ID NO: 21981 - DNA, 25 bp, Artificial
  Probe
ctcctcctcttccttctcagaatct

SEQ ID NO: 21982 - DNA, 25 bp, Artificial
  Probe
gcactgagcaaataccctcttatta

SEQ ID NO: 21983 - DNA, 25 bp, Artificial
  Probe
actgagcaaataccctcttattagt

SEQ ID NO: 21984 - DNA, 25 bp, Artificial
  Probe
cactgagcaaataccctcttattag

SEQ ID NO: 21985 - DNA, 25 bp, Artificial
  Probe
tagcactgagcaaataccctcttat

SEQ ID NO: 21986 - DNA, 25 bp, Artificial
  Probe
ccgtgtccatctttgtatcatcaag

SEQ ID NO: 21987 - DNA, 25 bp, Artificial
  Probe
ttagcactgagcaaataccctctta

SEQ ID NO: 21988 - DNA, 25 bp, Artificial
  Probe
caatatcagaaacttctcccgtgtc

SEQ ID NO: 21989 - DNA, 25 bp, Artificial
  Probe
ctgagcaaataccctcttattagtt

SEQ ID NO: 21990 - DNA, 25 bp, Artificial
  Probe
cctcctcctcttccttctcagaatc

SEQ ID NO: 21991 - DNA, 25 bp, Artificial
  Probe
acatccacaccactttagcttaatt

SEQ ID NO: 21992 - DNA, 25 bp, Artificial
  Probe
catccacaccactttagcttaatta

SEQ ID NO: 21993 - DNA, 25 bp, Artificial
  Probe
agcactgagcaaataccctcttatt

SEQ ID NO: 21994 - DNA, 25 bp, Artificial
  Probe
atccacaccactttagcttaattag

SEQ ID NO: 21995 - DNA, 25 bp, Artificial
  Probe
cacatccacaccactttagcttaat

SEQ ID NO: 21996 - DNA, 25 bp, Artificial
  Probe
tcctcctcctcttccttctcagaat

SEQ ID NO: 21997 - DNA, 25 bp, Artificial
  Probe
aatatcagaaacttctcccgtgtcc

SEQ ID NO: 21998 - DNA, 25 bp, Artificial
  Probe
tacacatccacaccactttagctta

SEQ ID NO: 21999 - DNA, 25 bp, Artificial
  Probe
cttctcccgtgtccatctttgtatc

SEQ ID NO: 22000 - DNA, 25 bp, Artificial
  Probe
ctcccgtgtccatctttgtatcatc

SEQ ID NO: 22001 - DNA, 25 bp, Artificial
  Probe
acatacacatccacaccactttagc

SEQ ID NO: 22002 - DNA, 25 bp, Artificial
  Probe
ccaatatcagaaacttctcccgtgt

SEQ ID NO: 22003 - DNA, 25 bp, Artificial
  Probe
cccgtgtccatctttgtatcatcaa

SEQ ID NO: 22004 - DNA, 25 bp, Artificial
  Probe
ttcctcctcctcttccttctcagaa

SEQ ID NO: 22005 - DNA, 25 bp, Artificial
  Probe
ctcccaatatcagaaacttctcccg

SEQ ID NO: 22006 - DNA, 25 bp, Artificial
  Probe
atacacatccacaccactttagctt

SEQ ID NO: 22007 - DNA, 25 bp, Artificial
  Probe
aatatccagagctgttagcactgag

SEQ ID NO: 22008 - DNA, 25 bp, Artificial
  Probe
cttctcagaatcttcaaggtcaccc

SEQ ID NO: 22009 - DNA, 25 bp, Artificial
  Probe
tgagcaaataccctcttattagtta

SEQ ID NO: 22010 - DNA, 25 bp, Artificial
  Probe
gttagcactgagcaaataccctctt

SEQ ID NO: 22011 - DNA, 25 bp, Artificial
  Probe
gtgtccatctttgtatcatcaagaa

SEQ ID NO: 22012 - DNA, 25 bp, Artificial
  Probe
cgtgtccatctttgtatcatcaaga

SEQ ID NO: 22013 - DNA, 25 bp, Artificial
  Probe
tctcccgtgtccatctttgtatcat

SEQ ID NO: 22014 - DNA, 25 bp, Artificial
  Probe
agttttctattccctctccaatctg

SEQ ID NO: 22015 - DNA, 25 bp, Artificial
  Probe
tgtctcttctctactcactctactg

SEQ ID NO: 22016 - DNA, 25 bp, Artificial
  Probe
atgtctcttctctactcactctact

SEQ ID NO: 22017 - DNA, 25 bp, Artificial
  Probe
ctcttctctactcactctactgctt

SEQ ID NO: 22018 - DNA, 25 bp, Artificial
  Probe
tctcttctctactcactctactgct

SEQ ID NO: 22019 - DNA, 25 bp, Artificial
  Probe
gtctcttctctactcactctactgc

SEQ ID NO: 22020 - DNA, 25 bp, Artificial
  Probe
caatcctcctacattatcagtggct

SEQ ID NO: 22021 - DNA, 25 bp, Artificial
  Probe
tatgtctcttctctactcactctac

SEQ ID NO: 22022 - DNA, 25 bp, Artificial
  Probe
aataattgctgacatgctcttcaac

SEQ ID NO: 22023 - DNA, 25 bp, Artificial
  Probe
atatgtctcttctctactcactcta

SEQ ID NO: 22024 - DNA, 25 bp, Artificial
  Probe
aatcctcctacattatcagtggctg

SEQ ID NO: 22025 - DNA, 25 bp, Artificial
  Probe
cttctctactcactctactgctttg

SEQ ID NO: 22026 - DNA, 25 bp, Artificial
  Probe
tcttctctactcactctactgcttt

SEQ ID NO: 22027 - DNA, 25 bp, Artificial
  Probe
atgcaatcctcctacattatcagtg

SEQ ID NO: 22028 - DNA, 25 bp, Artificial
  Probe
ataattgctgacatgctcttcaacc

SEQ ID NO: 22029 - DNA, 25 bp, Artificial
  Probe
gcatatgtctcttctctactcactc

SEQ ID NO: 22030 - DNA, 25 bp, Artificial
  Probe
ctgcatatgtctcttctctactcac

SEQ ID NO: 22031 - DNA, 25 bp, Artificial
  Probe
gcaatcctcctacattatcagtggc

SEQ ID NO: 22032 - DNA, 25 bp, Artificial
  Probe
tgcatatgtctcttctctactcact

SEQ ID NO: 22033 - DNA, 25 bp, Artificial
  Probe
ttctctactcactctactgctttga

SEQ ID NO: 22034 - DNA, 25 bp, Artificial
  Probe
atcctgtttcctttattcatcatca

SEQ ID NO: 22035 - DNA, 25 bp, Artificial
  Probe
cgattgtcaaacatagaaaggaact

SEQ ID NO: 22036 - DNA, 25 bp, Artificial
  Probe
attgtcaaacatagaaaggaactgg

SEQ ID NO: 22037 - DNA, 25 bp, Artificial
  Probe
ttgctgcatatgtctcttctctact

SEQ ID NO: 22038 - DNA, 25 bp, Artificial
  Probe
tgcaatcctcctacattatcagtgg

SEQ ID NO: 22039 - DNA, 25 bp, Artificial
  Probe
cctgtttcctttattcatcatcagc

SEQ ID NO: 22040 - DNA, 25 bp, Artificial
  Probe
catatgtctcttctctactcactct

SEQ ID NO: 22041 - DNA, 25 bp, Artificial
  Probe
gcgattgtcaaacatagaaaggaac

SEQ ID NO: 22042 - DNA, 25 bp, Artificial
  Probe
agcgattgtcaaacatagaaaggaa

SEQ ID NO: 22043 - DNA, 25 bp, Artificial
  Probe
ctgtttcctttattcatcatcagcg

SEQ ID NO: 22044 - DNA, 25 bp, Artificial
  Probe
taattgctgacatgctcttcaacct

SEQ ID NO: 22045 - DNA, 25 bp, Artificial
  Probe
gctgcatatgtctcttctctactca

SEQ ID NO: 22046 - DNA, 25 bp, Artificial
  Probe
tgctgcatatgtctcttctctactc

SEQ ID NO: 22047 - DNA, 25 bp, Artificial
  Probe
aaataattgctgacatgctcttcaa

SEQ ID NO: 22048 - DNA, 25 bp, Artificial
  Probe
tcctgtttcctttattcatcatcag

SEQ ID NO: 22049 - DNA, 25 bp, Artificial
  Probe
gattgtcaaacatagaaaggaactg

SEQ ID NO: 22050 - DNA, 25 bp, Artificial
  Probe
cagcgattgtcaaacatagaaagga

SEQ ID NO: 22051 - DNA, 25 bp, Artificial
  Probe
ttgtcaaacatagaaaggaactggc

SEQ ID NO: 22052 - DNA, 25 bp, Artificial
  Probe
accagcgattgtcaaacatagaaag

SEQ ID NO: 22053 - DNA, 25 bp, Artificial
  Probe
tctatcctgtttcctttattcatca

SEQ ID NO: 22054 - DNA, 25 bp, Artificial
  Probe
aatgcaatcctcctacattatcagt

SEQ ID NO: 22055 - DNA, 25 bp, Artificial
  Probe
caatgcaatcctcctacattatcag

SEQ ID NO: 22056 - DNA, 25 bp, Artificial
  Probe
agcaatgcaatcctcctacattatc

SEQ ID NO: 22057 - DNA, 25 bp, Artificial
  Probe
caccagcgattgtcaaacatagaaa

SEQ ID NO: 22058 - DNA, 25 bp, Artificial
  Probe
gcaatgcaatcctcctacattatca

SEQ ID NO: 22059 - DNA, 25 bp, Artificial
  Probe
cagcaatgcaatcctcctacattat

SEQ ID NO: 22060 - DNA, 25 bp, Artificial
  Probe
ctatggagagatgattggctgtgac

SEQ ID NO: 22061 - DNA, 25 bp, Artificial
  Probe
caagaacggaagaagaaataggttt

SEQ ID NO: 22062 - DNA, 25 bp, Artificial
  Probe
ccaagaacggaagaagaaataggtt

SEQ ID NO: 22063 - DNA, 25 bp, Artificial
  Probe
tatggagagatgattggctgtgaca

SEQ ID NO: 22064 - DNA, 25 bp, Artificial
  Probe
cttcaccatgatcttctaccacctc

SEQ ID NO: 22065 - DNA, 25 bp, Artificial
  Probe
cttggattccatcagagacttcttc

SEQ ID NO: 22066 - DNA, 25 bp, Artificial
  Probe
ttggattccatcagagacttcttct

SEQ ID NO: 22067 - DNA, 25 bp, Artificial
  Probe
ctctgatgtgttggatatgcctgtg

SEQ ID NO: 22068 - DNA, 25 bp, Artificial
  Probe
atgcttcaccatgatcttctaccac

SEQ ID NO: 22069 - DNA, 25 bp, Artificial
  Probe
cctatggagagatgattggctgtga

SEQ ID NO: 22070 - DNA, 25 bp, Artificial
  Probe
ttcaccatgatcttctaccacctca

SEQ ID NO: 22071 - DNA, 25 bp, Artificial
  Probe
cccaagaacggaagaagaaataggt

SEQ ID NO: 22072 - DNA, 25 bp, Artificial
  Probe
accatgatcttctaccacctcagag

SEQ ID NO: 22073 - DNA, 25 bp, Artificial
  Probe
ccttggattccatcagagacttctt

SEQ ID NO: 22074 - DNA, 25 bp, Artificial
  Probe
ttccttggattccatcagagacttc

SEQ ID NO: 22075 - DNA, 25 bp, Artificial
  Probe
aaacacctttcactcaataaatcat

SEQ ID NO: 22076 - DNA, 25 bp, Artificial
  Probe
aacacctttcactcaataaatcatg

SEQ ID NO: 22077 - DNA, 25 bp, Artificial
  Probe
ctcccaagaacggaagaagaaatag

SEQ ID NO: 22078 - DNA, 25 bp, Artificial
  Probe
gatgtgttggatatgcctgtggatc

SEQ ID NO: 22079 - DNA, 25 bp, Artificial
  Probe
acacctttcactcaataaatcatgt

SEQ ID NO: 22080 - DNA, 25 bp, Artificial
  Probe
aaatggtctttgtcctgtggtatcc

SEQ ID NO: 22081 - DNA, 25 bp, Artificial
  Probe
tgatgtgttggatatgcctgtggat

SEQ ID NO: 22082 - DNA, 25 bp, Artificial
  Probe
caccatgatcttctaccacctcaga

SEQ ID NO: 22083 - DNA, 25 bp, Artificial
  Probe
tcaccatgatcttctaccacctcag

SEQ ID NO: 22084 - DNA, 25 bp, Artificial
  Probe
gaagaaataggtttccttggattcc

SEQ ID NO: 22085 - DNA, 25 bp, Artificial
  Probe
gcgaaacacctttcactcaataaat

SEQ ID NO: 22086 - DNA, 25 bp, Artificial
  Probe
tccttggattccatcagagacttct

SEQ ID NO: 22087 - DNA, 25 bp, Artificial
  Probe
aagaacggaagaagaaataggtttc

SEQ ID NO: 22088 - DNA, 25 bp, Artificial
  Probe
atggagagatgattggctgtgacaa

SEQ ID NO: 22089 - DNA, 25 bp, Artificial
  Probe
cgaaacacctttcactcaataaatc

SEQ ID NO: 22090 - DNA, 25 bp, Artificial
  Probe
cacctttcactcaataaatcatgta

SEQ ID NO: 22091 - DNA, 25 bp, Artificial
  Probe
cagatgacatttgtcttcctcttgg

SEQ ID NO: 22092 - DNA, 25 bp, Artificial
  Probe
aaataggtttccttggattccatca

SEQ ID NO: 22093 - DNA, 25 bp, Artificial
  Probe
agaagaaataggtttccttggattc

SEQ ID NO: 22094 - DNA, 25 bp, Artificial
  Probe
gaagaagaaataggtttccttggat

SEQ ID NO: 22095 - DNA, 25 bp, Artificial
  Probe
tcccaagaacggaagaagaaatagg

SEQ ID NO: 22096 - DNA, 25 bp, Artificial
  Probe
aataggtttccttggattccatcag

SEQ ID NO: 22097 - DNA, 25 bp, Artificial
  Probe
cctctgatgtgttggatatgcctgt

SEQ ID NO: 22098 - DNA, 25 bp, Artificial
  Probe
aatggtctttgtcctgtggtatcct

SEQ ID NO: 22099 - DNA, 25 bp, Artificial
  Probe
tcctatggagagatgattggctgtg

SEQ ID NO: 22100 - DNA, 25 bp, Artificial
  Probe
aagaagaaataggtttccttggatt

SEQ ID NO: 22101 - DNA, 25 bp, Artificial
  Probe
ataggtttccttggattccatcaga

SEQ ID NO: 22102 - DNA, 25 bp, Artificial
  Probe
gcagatgacatttgtcttcctcttg

SEQ ID NO: 22103 - DNA, 25 bp, Artificial
  Probe
agaaataggtttccttggattccat

SEQ ID NO: 22104 - DNA, 25 bp, Artificial
  Probe
aagaaataggtttccttggattcca

SEQ ID NO: 22105 - DNA, 25 bp, Artificial
  Probe
gtgtcttcattaccatcacttgtac

SEQ ID NO: 22106 - DNA, 25 bp, Artificial
  Probe
ggtgtcttcattaccatcacttgta

SEQ ID NO: 22107 - DNA, 25 bp, Artificial
  Probe
tcttgtctgagggtatttgtaaact

SEQ ID NO: 22108 - DNA, 25 bp, Artificial
  Probe
tgactactctgaccatctagttatg

SEQ ID NO: 22109 - DNA, 25 bp, Artificial
  Probe
gattcctacacaggtgtcttcatta

SEQ ID NO: 22110 - DNA, 25 bp, Artificial
  Probe
attcctacacaggtgtcttcattac

SEQ ID NO: 22111 - DNA, 25 bp, Artificial
  Probe
caggtgtcttcattaccatcacttg

SEQ ID NO: 22112 - DNA, 25 bp, Artificial
  Probe
ttgactactctgaccatctagttat

SEQ ID NO: 22113 - DNA, 25 bp, Artificial
  Probe
aggtgtcttcattaccatcacttgt

SEQ ID NO: 22114 - DNA, 25 bp, Artificial
  Probe
acaggtgtcttcattaccatcactt

SEQ ID NO: 22115 - DNA, 25 bp, Artificial
  Probe
ctacacaggtgtcttcattaccatc

SEQ ID NO: 22116 - DNA, 25 bp, Artificial
  Probe
cttgtctgagggtatttgtaaactc

SEQ ID NO: 22117 - DNA, 25 bp, Artificial
  Probe
tgattcctacacaggtgtcttcatt

SEQ ID NO: 22118 - DNA, 25 bp, Artificial
  Probe
ttgattcctacacaggtgtcttcat

SEQ ID NO: 22119 - DNA, 25 bp, Artificial
  Probe
cttgactaaggagtgctggcaataa

SEQ ID NO: 22120 - DNA, 25 bp, Artificial
  Probe
tacacaggtgtcttcattaccatca

SEQ ID NO: 22121 - DNA, 25 bp, Artificial
  Probe
gacacctgtttaccaccttgtttaa

SEQ ID NO: 22122 - DNA, 25 bp, Artificial
  Probe
cacaggtgtcttcattaccatcact

SEQ ID NO: 22123 - DNA, 25 bp, Artificial
  Probe
ttcctacacaggtgtcttcattacc

SEQ ID NO: 22124 - DNA, 25 bp, Artificial
  Probe
cctacacaggtgtcttcattaccat

SEQ ID NO: 22125 - DNA, 25 bp, Artificial
  Probe
cctgtttaccaccttgtttaaatgt

SEQ ID NO: 22126 - DNA, 25 bp, Artificial
  Probe
acctgtttaccaccttgtttaaatg

SEQ ID NO: 22127 - DNA, 25 bp, Artificial
  Probe
cacctgtttaccaccttgtttaaat

SEQ ID NO: 22128 - DNA, 25 bp, Artificial
  Probe
cttcattaccatcacttgtacactg

SEQ ID NO: 22129 - DNA, 25 bp, Artificial
  Probe
tcttcattaccatcacttgtacact

SEQ ID NO: 22130 - DNA, 25 bp, Artificial
  Probe
gtcttcattaccatcacttgtacac

SEQ ID NO: 22131 - DNA, 25 bp, Artificial
  Probe
acacctgtttaccaccttgtttaaa

SEQ ID NO: 22132 - DNA, 25 bp, Artificial
  Probe
acacaggtgtcttcattaccatcac

SEQ ID NO: 22133 - DNA, 25 bp, Artificial
  Probe
ttgactaaggagtgctggcaataaa

SEQ ID NO: 22134 - DNA, 25 bp, Artificial
  Probe
tcctacacaggtgtcttcattacca

SEQ ID NO: 22135 - DNA, 25 bp, Artificial
  Probe
tgtcttcattaccatcacttgtaca

SEQ ID NO: 22136 - DNA, 25 bp, Artificial
  Probe
ggacacctgtttaccaccttgttta

SEQ ID NO: 22137 - DNA, 25 bp, Artificial
  Probe
tttagtggtttgctgttttggtttt

SEQ ID NO: 22138 - DNA, 25 bp, Artificial
  Probe
ttttagtggtttgctgttttggttt

SEQ ID NO: 22139 - DNA, 25 bp, Artificial
  Probe
tttgattcctacacaggtgtcttca

SEQ ID NO: 22140 - DNA, 25 bp, Artificial
  Probe
gcctaaagccatttcaagaacaaaa

SEQ ID NO: 22141 - DNA, 25 bp, Artificial
  Probe
gactaaggagtgctggcaataaact

SEQ ID NO: 22142 - DNA, 25 bp, Artificial
  Probe
ctgaccatctagttatggacttcag

SEQ ID NO: 22143 - DNA, 25 bp, Artificial
  Probe
ctctgaccatctagttatggacttc

SEQ ID NO: 22144 - DNA, 25 bp, Artificial
  Probe
tctgaccatctagttatggacttca

SEQ ID NO: 22145 - DNA, 25 bp, Artificial
  Probe
actctgaccatctagttatggactt

SEQ ID NO: 22146 - DNA, 25 bp, Artificial
  Probe
tactctgaccatctagttatggact

SEQ ID NO: 22147 - DNA, 25 bp, Artificial
  Probe
actactctgaccatctagttatgga

SEQ ID NO: 22148 - DNA, 25 bp, Artificial
  Probe
ctactctgaccatctagttatggac

SEQ ID NO: 22149 - DNA, 25 bp, Artificial
  Probe
gactactctgaccatctagttatgg

SEQ ID NO: 22150 - DNA, 25 bp, Artificial
  Probe
atttatttctctagtgctaggaggg

SEQ ID NO: 22151 - DNA, 25 bp, Artificial
  Probe
tttatttctctagtgctaggagggc

SEQ ID NO: 22152 - DNA, 25 bp, Artificial
  Probe
ttatttctctagtgctaggagggca

SEQ ID NO: 22153 - DNA, 25 bp, Artificial
  Probe
gctgagagtagatagagccttttgg

SEQ ID NO: 22154 - DNA, 25 bp, Artificial
  Probe
agctgagagtagatagagccttttg

SEQ ID NO: 22155 - DNA, 25 bp, Artificial
  Probe
tttgcctaggttgttagcccattct

SEQ ID NO: 22156 - DNA, 25 bp, Artificial
  Probe
ctgagagtagatagagccttttggc

SEQ ID NO: 22157 - DNA, 25 bp, Artificial
  Probe
ttgcctaggttgttagcccattctc

SEQ ID NO: 22158 - DNA, 25 bp, Artificial
  Probe
ttttgcctaggttgttagcccattc

SEQ ID NO: 22159 - DNA, 25 bp, Artificial
  Probe
cctacaacaaatccaaacacttcta

SEQ ID NO: 22160 - DNA, 25 bp, Artificial
  Probe
gcctacaacaaatccaaacacttct

SEQ ID NO: 22161 - DNA, 25 bp, Artificial
  Probe
caaatcatgctacggaaagaagtat

SEQ ID NO: 22162 - DNA, 25 bp, Artificial
  Probe
aaatcatgctacggaaagaagtatg

SEQ ID NO: 22163 - DNA, 25 bp, Artificial
  Probe
acaacaaatccaaacacttctaaat

SEQ ID NO: 22164 - DNA, 25 bp, Artificial
  Probe
aatcatgctacggaaagaagtatgg

SEQ ID NO: 22165 - DNA, 25 bp, Artificial
  Probe
ctacaacaaatccaaacacttctaa

SEQ ID NO: 22166 - DNA, 25 bp, Artificial
  Probe
agaaatatggaggtgctgagaagtg

SEQ ID NO: 22167 - DNA, 25 bp, Artificial
  Probe
atcatgctacggaaagaagtatgga

SEQ ID NO: 22168 - DNA, 25 bp, Artificial
  Probe
tacaacaaatccaaacacttctaaa

SEQ ID NO: 22169 - DNA, 25 bp, Artificial
  Probe
gctacggaaagaagtatggaccaaa

SEQ ID NO: 22170 - DNA, 25 bp, Artificial
  Probe
cagaaatatggaggtgctgagaagt

SEQ ID NO: 22171 - DNA, 25 bp, Artificial
  Probe
caacaaatccaaacacttctaaatt

SEQ ID NO: 22172 - DNA, 25 bp, Artificial
  Probe
tcatgctacggaaagaagtatggac

SEQ ID NO: 22173 - DNA, 25 bp, Artificial
  Probe
aaagaagtatggaccaaaaggctat

SEQ ID NO: 22174 - DNA, 25 bp, Artificial
  Probe
ttagacagcacaacagtggcaattc

SEQ ID NO: 22175 - DNA, 25 bp, Artificial
  Probe
ctaaatttgcccagaaatatggagg

SEQ ID NO: 22176 - DNA, 25 bp, Artificial
  Probe
taaatttgcccagaaatatggaggt

SEQ ID NO: 22177 - DNA, 25 bp, Artificial
  Probe
gaaagaagtatggaccaaaaggcta

SEQ ID NO: 22178 - DNA, 25 bp, Artificial
  Probe
aagaagtatggaccaaaaggctatg

SEQ ID NO: 22179 - DNA, 25 bp, Artificial
  Probe
gaaatatggaggtgctgagaagtgc

SEQ ID NO: 22180 - DNA, 25 bp, Artificial
  Probe
tacggaaagaagtatggaccaaaag

SEQ ID NO: 22181 - DNA, 25 bp, Artificial
  Probe
ctacggaaagaagtatggaccaaaa

SEQ ID NO: 22182 - DNA, 25 bp, Artificial
  Probe
tctaaatttgcccagaaatatggag

SEQ ID NO: 22183 - DNA, 25 bp, Artificial
  Probe
aatatggaggtgctgagaagtgctc

SEQ ID NO: 22184 - DNA, 25 bp, Artificial
  Probe
atgctacggaaagaagtatggacca

SEQ ID NO: 22185 - DNA, 25 bp, Artificial
  Probe
catgatgaagagatctactgcaaat

SEQ ID NO: 22186 - DNA, 25 bp, Artificial
  Probe
catgctacggaaagaagtatggacc

SEQ ID NO: 22187 - DNA, 25 bp, Artificial
  Probe
atgatgaagagatctactgcaaatc

SEQ ID NO: 22188 - DNA, 25 bp, Artificial
  Probe
aaacacttctaaatttgcccagaaa

SEQ ID NO: 22189 - DNA, 25 bp, Artificial
  Probe
tgctacggaaagaagtatggaccaa

SEQ ID NO: 22190 - DNA, 25 bp, Artificial
  Probe
ccagaaatatggaggtgctgagaag

SEQ ID NO: 22191 - DNA, 25 bp, Artificial
  Probe
aacacttctaaatttgcccagaaat

SEQ ID NO: 22192 - DNA, 25 bp, Artificial
  Probe
aaatatggaggtgctgagaagtgct

SEQ ID NO: 22193 - DNA, 25 bp, Artificial
  Probe
aaatttgcccagaaatatggaggtg

SEQ ID NO: 22194 - DNA, 25 bp, Artificial
  Probe
caaacacttctaaatttgcccagaa

SEQ ID NO: 22195 - DNA, 25 bp, Artificial
  Probe
gcaaatcatgctacggaaagaagta

SEQ ID NO: 22196 - DNA, 25 bp, Artificial
  Probe
acacttctaaatttgcccagaaata

SEQ ID NO: 22197 - DNA, 25 bp, Artificial
  Probe
aatccaaacacttctaaatttgccc

SEQ ID NO: 22198 - DNA, 25 bp, Artificial
  Probe
atttagacagcacaacagtggcaat

SEQ ID NO: 22199 - DNA, 25 bp, Artificial
  Probe
ttctaaatttgcccagaaatatgga

SEQ ID NO: 22200 - DNA, 25 bp, Artificial
  Probe
aaatccaaacacttctaaatttgcc

SEQ ID NO: 22201 - DNA, 25 bp, Artificial
  Probe
tcatgatgaagagatctactgcaaa

SEQ ID NO: 22202 - DNA, 25 bp, Artificial
  Probe
gtgggaagagtctggagtctacaac

SEQ ID NO: 22203 - DNA, 25 bp, Artificial
  Probe
cttctaaatttgcccagaaatatgg

SEQ ID NO: 22204 - DNA, 25 bp, Artificial
  Probe
gtctataccagtgagtgtgtgttag

SEQ ID NO: 22205 - DNA, 25 bp, Artificial
  Probe
gattggaagatgtaggttctgtgtc

SEQ ID NO: 22206 - DNA, 25 bp, Artificial
  Probe
ttctgaggattggaagatgtaggtt

SEQ ID NO: 22207 - DNA, 25 bp, Artificial
  Probe
tctataccagtgagtgtgtgttagc

SEQ ID NO: 22208 - DNA, 25 bp, Artificial
  Probe
ctgaggattggaagatgtaggttct

SEQ ID NO: 22209 - DNA, 25 bp, Artificial
  Probe
tctgaggattggaagatgtaggttc

SEQ ID NO: 22210 - DNA, 25 bp, Artificial
  Probe
gaggattggaagatgtaggttctgt

SEQ ID NO: 22211 - DNA, 25 bp, Artificial
  Probe
tgaggattggaagatgtaggttctg

SEQ ID NO: 22212 - DNA, 25 bp, Artificial
  Probe
aggattggaagatgtaggttctgtg

SEQ ID NO: 22213 - DNA, 25 bp, Artificial
  Probe
caccataggcaatcacctcataatt

SEQ ID NO: 22214 - DNA, 25 bp, Artificial
  Probe
ggattggaagatgtaggttctgtgt

SEQ ID NO: 22215 - DNA, 25 bp, Artificial
  Probe
tactaggaggtgttcttattccact

SEQ ID NO: 22216 - DNA, 25 bp, Artificial
  Probe
atactaggaggtgttcttattccac

SEQ ID NO: 22217 - DNA, 25 bp, Artificial
  Probe
attggaagatgtaggttctgtgtcg

SEQ ID NO: 22218 - DNA, 25 bp, Artificial
  Probe
aatactaggaggtgttcttattcca

SEQ ID NO: 22219 - DNA, 25 bp, Artificial
  Probe
acaccataggcaatcacctcataat

SEQ ID NO: 22220 - DNA, 25 bp, Artificial
  Probe
ctataccagtgagtgtgtgttagcg

SEQ ID NO: 22221 - DNA, 25 bp, Artificial
  Probe
actaggaggtgttcttattccactg

SEQ ID NO: 22222 - DNA, 25 bp, Artificial
  Probe
ggtctataccagtgagtgtgtgtta

SEQ ID NO: 22223 - DNA, 25 bp, Artificial
  Probe
tttctgaggattggaagatgtaggt

SEQ ID NO: 22224 - DNA, 25 bp, Artificial
  Probe
atctcacggtgtgtagtaaccatac

SEQ ID NO: 22225 - DNA, 25 bp, Artificial
  Probe
gagcaatgggatcaattcaactaat

SEQ ID NO: 22226 - DNA, 25 bp, Artificial
  Probe
ctaggaggtgttcttattccactgg

SEQ ID NO: 22227 - DNA, 25 bp, Artificial
  Probe
cacaccataggcaatcacctcataa

SEQ ID NO: 22228 - DNA, 25 bp, Artificial
  Probe
gtgtttgtgtttgctcatttgcttt

SEQ ID NO: 22229 - DNA, 25 bp, Artificial
  Probe
atgagcaatgggatcaattcaacta

SEQ ID NO: 22230 - DNA, 25 bp, Artificial
  Probe
tgagcaatgggatcaattcaactaa

SEQ ID NO: 22231 - DNA, 25 bp, Artificial
  Probe
ccataggcaatcacctcataatttg

SEQ ID NO: 22232 - DNA, 25 bp, Artificial
  Probe
accataggcaatcacctcataattt

SEQ ID NO: 22233 - DNA, 25 bp, Artificial
  Probe
aatgagcaatgggatcaattcaact

SEQ ID NO: 22234 - DNA, 25 bp, Artificial
  Probe
gcatgaccctctctgataattcaaa

SEQ ID NO: 22235 - DNA, 25 bp, Artificial
  Probe
agcaatgggatcaattcaactaatt

SEQ ID NO: 22236 - DNA, 25 bp, Artificial
  Probe
tgaccctctctgataattcaaatac

SEQ ID NO: 22237 - DNA, 25 bp, Artificial
  Probe
gtagtaaccatacagaacgcacagc

SEQ ID NO: 22238 - DNA, 25 bp, Artificial
  Probe
gcaatgggatcaattcaactaattc

SEQ ID NO: 22239 - DNA, 25 bp, Artificial
  Probe
aattcaaatactaggaggtgttctt

SEQ ID NO: 22240 - DNA, 25 bp, Artificial
  Probe
acggtgtgtagtaaccatacagaac

SEQ ID NO: 22241 - DNA, 25 bp, Artificial
  Probe
cacggtgtgtagtaaccatacagaa

SEQ ID NO: 22242 - DNA, 25 bp, Artificial
  Probe
gaccctctctgataattcaaatact

SEQ ID NO: 22243 - DNA, 25 bp, Artificial
  Probe
catgaccctctctgataattcaaat

SEQ ID NO: 22244 - DNA, 25 bp, Artificial
  Probe
caatcagaacgtgttggtctatacc

SEQ ID NO: 22245 - DNA, 25 bp, Artificial
  Probe
ttcaactaattcaagaaaccaaact

SEQ ID NO: 22246 - DNA, 25 bp, Artificial
  Probe
tgtagtaaccatacagaacgcacag

SEQ ID NO: 22247 - DNA, 25 bp, Artificial
  Probe
ctcacggtgtgtagtaaccatacag

SEQ ID NO: 22248 - DNA, 25 bp, Artificial
  Probe
tgggatcaattcaactaattcaaga

SEQ ID NO: 22249 - DNA, 25 bp, Artificial
  Probe
agtcagtctgctcttacttagtgtt

SEQ ID NO: 22250 - DNA, 25 bp, Artificial
  Probe
cattcagtcagtctgctcttactta

SEQ ID NO: 22251 - DNA, 25 bp, Artificial
  Probe
attcagtcagtctgctcttacttag

SEQ ID NO: 22252 - DNA, 25 bp, Artificial
  Probe
ttacattcagtcagtctgctcttac

SEQ ID NO: 22253 - DNA, 25 bp, Artificial
  Probe
ttcagtcagtctgctcttacttagt

SEQ ID NO: 22254 - DNA, 25 bp, Artificial
  Probe
tacattcagtcagtctgctcttact

SEQ ID NO: 22255 - DNA, 25 bp, Artificial
  Probe
tcagtcagtctgctcttacttagtg

SEQ ID NO: 22256 - DNA, 25 bp, Artificial
  Probe
acattcagtcagtctgctcttactt

SEQ ID NO: 22257 - DNA, 25 bp, Artificial
  Probe
cagtcagtctgctcttacttagtgt

SEQ ID NO: 22258 - DNA, 25 bp, Artificial
  Probe
tgccatgctctactagaacattctc

SEQ ID NO: 22259 - DNA, 25 bp, Artificial
  Probe
gtgccatgctctactagaacattct

SEQ ID NO: 22260 - DNA, 25 bp, Artificial
  Probe
ccttaggttatgtttgtgtgttcaa

SEQ ID NO: 22261 - DNA, 25 bp, Artificial
  Probe
ccatgctctactagaacattctccg

SEQ ID NO: 22262 - DNA, 25 bp, Artificial
  Probe
gtcagtctgctcttacttagtgttt

SEQ ID NO: 22263 - DNA, 25 bp, Artificial
  Probe
ggttatgtttgtgtgttcaatatgg

SEQ ID NO: 22264 - DNA, 25 bp, Artificial
  Probe
gccatgctctactagaacattctcc

SEQ ID NO: 22265 - DNA, 25 bp, Artificial
  Probe
tttacattcagtcagtctgctctta

SEQ ID NO: 22266 - DNA, 25 bp, Artificial
  Probe
gttatgtttgtgtgttcaatatggt

SEQ ID NO: 22267 - DNA, 25 bp, Artificial
  Probe
ttaactaaccttcgtctgtgccatg

SEQ ID NO: 22268 - DNA, 25 bp, Artificial
  Probe
tgtgccatgctctactagaacattc

SEQ ID NO: 22269 - DNA, 25 bp, Artificial
  Probe
ctgtgccatgctctactagaacatt

SEQ ID NO: 22270 - DNA, 25 bp, Artificial
  Probe
gtttacattcagtcagtctgctctt

SEQ ID NO: 22271 - DNA, 25 bp, Artificial
  Probe
aggttatgtttgtgtgttcaatatg

SEQ ID NO: 22272 - DNA, 25 bp, Artificial
  Probe
cttaggttatgtttgtgtgttcaat

SEQ ID NO: 22273 - DNA, 25 bp, Artificial
  Probe
cttccaaatactgtccagactgagt

SEQ ID NO: 22274 - DNA, 25 bp, Artificial
  Probe
ccttccaaatactgtccagactgag

SEQ ID NO: 22275 - DNA, 25 bp, Artificial
  Probe
ttccaaatactgtccagactgagtg

SEQ ID NO: 22276 - DNA, 25 bp, Artificial
  Probe
tctgtgccatgctctactagaacat

SEQ ID NO: 22277 - DNA, 25 bp, Artificial
  Probe
gttcccttccaaatactgtccagac

SEQ ID NO: 22278 - DNA, 25 bp, Artificial
  Probe
gaccttaggttatgtttgtgtgttc

SEQ ID NO: 22279 - DNA, 25 bp, Artificial
  Probe
cagttgaccttaggttatgtttgtg

SEQ ID NO: 22280 - DNA, 25 bp, Artificial
  Probe
ttcccttccaaatactgtccagact

SEQ ID NO: 22281 - DNA, 25 bp, Artificial
  Probe
gttgaccttaggttatgtttgtgtg

SEQ ID NO: 22282 - DNA, 25 bp, Artificial
  Probe
agttgaccttaggttatgtttgtgt

SEQ ID NO: 22283 - DNA, 25 bp, Artificial
  Probe
accttaggttatgtttgtgtgttca

SEQ ID NO: 22284 - DNA, 25 bp, Artificial
  Probe
tgaccttaggttatgtttgtgtgtt

SEQ ID NO: 22285 - DNA, 25 bp, Artificial
  Probe
ttgaccttaggttatgtttgtgtgt

SEQ ID NO: 22286 - DNA, 25 bp, Artificial
  Probe
ttaggttatgtttgtgtgttcaata

SEQ ID NO: 22287 - DNA, 25 bp, Artificial
  Probe
catgctctactagaacattctccgg

SEQ ID NO: 22288 - DNA, 25 bp, Artificial
  Probe
tgttcccttccaaatactgtccaga

SEQ ID NO: 22289 - DNA, 25 bp, Artificial
  Probe
gtctgctcttacttagtgttttcaa

SEQ ID NO: 22290 - DNA, 25 bp, Artificial
  Probe
gcagttgaccttaggttatgtttgt

SEQ ID NO: 22291 - DNA, 25 bp, Artificial
  Probe
taggttatgtttgtgtgttcaatat

SEQ ID NO: 22292 - DNA, 25 bp, Artificial
  Probe
tctgctcttacttagtgttttcaag

SEQ ID NO: 22293 - DNA, 25 bp, Artificial
  Probe
agtctgctcttacttagtgttttca

SEQ ID NO: 22294 - DNA, 25 bp, Artificial
  Probe
gaccataccttctctgtgttaagta

SEQ ID NO: 22295 - DNA, 25 bp, Artificial
  Probe
agaccataccttctctgtgttaagt

SEQ ID NO: 22296 - DNA, 25 bp, Artificial
  Probe
ttctcttgtaccgctgtattactct

SEQ ID NO: 22297 - DNA, 25 bp, Artificial
  Probe
gttctcttgtaccgctgtattactc

SEQ ID NO: 22298 - DNA, 25 bp, Artificial
  Probe
ctgttctcttgtaccgctgtattac

SEQ ID NO: 22299 - DNA, 25 bp, Artificial
  Probe
tcttgtaccgctgtattactctctc

SEQ ID NO: 22300 - DNA, 25 bp, Artificial
  Probe
ctcttgtaccgctgtattactctct

SEQ ID NO: 22301 - DNA, 25 bp, Artificial
  Probe
tctcttgtaccgctgtattactctc

SEQ ID NO: 22302 - DNA, 25 bp, Artificial
  Probe
tgttctcttgtaccgctgtattact

SEQ ID NO: 22303 - DNA, 25 bp, Artificial
  Probe
actgttctcttgtaccgctgtatta

SEQ ID NO: 22304 - DNA, 25 bp, Artificial
  Probe
tactgttctcttgtaccgctgtatt

SEQ ID NO: 22305 - DNA, 25 bp, Artificial
  Probe
cttagtctgtggctactgttctctt

SEQ ID NO: 22306 - DNA, 25 bp, Artificial
  Probe
cttgtaccgctgtattactctctca

SEQ ID NO: 22307 - DNA, 25 bp, Artificial
  Probe
gtctgtctgtatagctctcgatgtc

SEQ ID NO: 22308 - DNA, 25 bp, Artificial
  Probe
accataccttctctgtgttaagtat

SEQ ID NO: 22309 - DNA, 25 bp, Artificial
  Probe
ctactgttctcttgtaccgctgtat

SEQ ID NO: 22310 - DNA, 25 bp, Artificial
  Probe
ttagtctgtggctactgttctcttg

SEQ ID NO: 22311 - DNA, 25 bp, Artificial
  Probe
gtaccgctgtattactctctcagaa

SEQ ID NO: 22312 - DNA, 25 bp, Artificial
  Probe
gtatgtacttattatgcaccagcca

SEQ ID NO: 22313 - DNA, 25 bp, Artificial
  Probe
tcgtatgtacttattatgcaccagc

SEQ ID NO: 22314 - DNA, 25 bp, Artificial
  Probe
tatgtacttattatgcaccagccat

SEQ ID NO: 22315 - DNA, 25 bp, Artificial
  Probe
ttgtaccgctgtattactctctcag

SEQ ID NO: 22316 - DNA, 25 bp, Artificial
  Probe
gccataggtctttgttctgtgtaat

SEQ ID NO: 22317 - DNA, 25 bp, Artificial
  Probe
ctaagtgctgggattaaaggtatgg

SEQ ID NO: 22318 - DNA, 25 bp, Artificial
  Probe
ttcgtatgtacttattatgcaccag

SEQ ID NO: 22319 - DNA, 25 bp, Artificial
  Probe
cttcgtatgtacttattatgcacca

SEQ ID NO: 22320 - DNA, 25 bp, Artificial
  Probe
ccataggtctttgttctgtgtaatt

SEQ ID NO: 22321 - DNA, 25 bp, Artificial
  Probe
tcttcgtatgtacttattatgcacc

SEQ ID NO: 22322 - DNA, 25 bp, Artificial
  Probe
cgtatgtacttattatgcaccagcc

SEQ ID NO: 22323 - DNA, 25 bp, Artificial
  Probe
gtctgtggctactgttctcttgtac

SEQ ID NO: 22324 - DNA, 25 bp, Artificial
  Probe
agtctgtggctactgttctcttgta

SEQ ID NO: 22325 - DNA, 25 bp, Artificial
  Probe
tagtctgtggctactgttctcttgt

SEQ ID NO: 22326 - DNA, 25 bp, Artificial
  Probe
tgtaccgctgtattactctctcaga

SEQ ID NO: 22327 - DNA, 25 bp, Artificial
  Probe
agccataggtctttgttctgtgtaa

SEQ ID NO: 22328 - DNA, 25 bp, Artificial
  Probe
atgtacttattatgcaccagccata

SEQ ID NO: 22329 - DNA, 25 bp, Artificial
  Probe
tgtacttattatgcaccagccatag

SEQ ID NO: 22330 - DNA, 25 bp, Artificial
  Probe
cgctgtattactctctcagaaagaa

SEQ ID NO: 22331 - DNA, 25 bp, Artificial
  Probe
ccataccttctctgtgttaagtata

SEQ ID NO: 22332 - DNA, 25 bp, Artificial
  Probe
ccctcctagtcttatttatgctccc

SEQ ID NO: 22333 - DNA, 25 bp, Artificial
  Probe
taccgctgtattactctctcagaaa

SEQ ID NO: 22334 - DNA, 25 bp, Artificial
  Probe
gtacttattatgcaccagccatagg

SEQ ID NO: 22335 - DNA, 25 bp, Artificial
  Probe
gctgtattactctctcagaaagaag

SEQ ID NO: 22336 - DNA, 25 bp, Artificial
  Probe
cctaagtgctgggattaaaggtatg

SEQ ID NO: 22337 - DNA, 25 bp, Artificial
  Probe
tttcctcatgccaaagtgttcttag

SEQ ID NO: 22338 - DNA, 25 bp, Artificial
  Probe
caaagtgttcttagtggctgattcg

SEQ ID NO: 22339 - DNA, 25 bp, Artificial
  Probe
taatggaaaggaaagactgggattg

SEQ ID NO: 22340 - DNA, 25 bp, Artificial
  Probe
gtaatggaaaggaaagactgggatt

SEQ ID NO: 22341 - DNA, 25 bp, Artificial
  Probe
tttgtaatggaaaggaaagactggg

SEQ ID NO: 22342 - DNA, 25 bp, Artificial
  Probe
aggaaagactgggattgaaagtaaa

SEQ ID NO: 22343 - DNA, 25 bp, Artificial
  Probe
aaggaaagactgggattgaaagtaa

SEQ ID NO: 22344 - DNA, 25 bp, Artificial
  Probe
aaaggaaagactgggattgaaagta

SEQ ID NO: 22345 - DNA, 25 bp, Artificial
  Probe
tgtaatggaaaggaaagactgggat

SEQ ID NO: 22346 - DNA, 25 bp, Artificial
  Probe
ggaaaggaaagactgggattgaaag

SEQ ID NO: 22347 - DNA, 25 bp, Artificial
  Probe
ttgtaatggaaaggaaagactggga

SEQ ID NO: 22348 - DNA, 25 bp, Artificial
  Probe
gaaaggaaagactgggattgaaagt

SEQ ID NO: 22349 - DNA, 25 bp, Artificial
  Probe
atggaaaggaaagactgggattgaa

SEQ ID NO: 22350 - DNA, 25 bp, Artificial
  Probe
aatggaaaggaaagactgggattga

SEQ ID NO: 22351 - DNA, 25 bp, Artificial
  Probe
tggaaaggaaagactgggattgaaa

SEQ ID NO: 22352 - DNA, 25 bp, Artificial
  Probe
cggtccatgtttgtttagttgcttt

SEQ ID NO: 22353 - DNA, 25 bp, Artificial
  Probe
ttttgtaatggaaaggaaagactgg

SEQ ID NO: 22354 - DNA, 25 bp, Artificial
  Probe
ggaaagactgggattgaaagtaaaa

SEQ ID NO: 22355 - DNA, 25 bp, Artificial
  Probe
gtccatgtttgtttagttgcttttg

SEQ ID NO: 22356 - DNA, 25 bp, Artificial
  Probe
tccatgtttgtttagttgcttttgt

SEQ ID NO: 22357 - DNA, 25 bp, Artificial
  Probe
ttgtttagttgcttttgtaatggaa

SEQ ID NO: 22358 - DNA, 25 bp, Artificial
  Probe
tttgtttagttgcttttgtaatgga

SEQ ID NO: 22359 - DNA, 25 bp, Artificial
  Probe
gtttgtttagttgcttttgtaatgg

SEQ ID NO: 22360 - DNA, 25 bp, Artificial
  Probe
tgtttagttgcttttgtaatggaaa

SEQ ID NO: 22361 - DNA, 25 bp, Artificial
  Probe
ggtccatgtttgtttagttgctttt

SEQ ID NO: 22362 - DNA, 25 bp, Artificial
  Probe
ccatgtttgtttagttgcttttgta

SEQ ID NO: 22363 - DNA, 25 bp, Artificial
  Probe
tgtttgtttagttgcttttgtaatg

SEQ ID NO: 22364 - DNA, 25 bp, Artificial
  Probe
ttctatgaaataaaatgtcacgcat

SEQ ID NO: 22365 - DNA, 25 bp, Artificial
  Probe
tctatgaaataaaatgtcacgcatg

SEQ ID NO: 22366 - DNA, 25 bp, Artificial
  Probe
gcttttgtaatggaaaggaaagact

SEQ ID NO: 22367 - DNA, 25 bp, Artificial
  Probe
tgcttttgtaatggaaaggaaagac

SEQ ID NO: 22368 - DNA, 25 bp, Artificial
  Probe
agttgcttttgtaatggaaaggaaa

SEQ ID NO: 22369 - DNA, 25 bp, Artificial
  Probe
gttgcttttgtaatggaaaggaaag

SEQ ID NO: 22370 - DNA, 25 bp, Artificial
  Probe
ttgcttttgtaatggaaaggaaaga

SEQ ID NO: 22371 - DNA, 25 bp, Artificial
  Probe
tagttgcttttgtaatggaaaggaa

SEQ ID NO: 22372 - DNA, 25 bp, Artificial
  Probe
ttagttgcttttgtaatggaaagga

SEQ ID NO: 22373 - DNA, 25 bp, Artificial
  Probe
catgtttgtttagttgcttttgtaa

SEQ ID NO: 22374 - DNA, 25 bp, Artificial
  Probe
cttttgtaatggaaaggaaagactg

SEQ ID NO: 22375 - DNA, 25 bp, Artificial
  Probe
atgtttgtttagttgcttttgtaat

SEQ ID NO: 22376 - DNA, 25 bp, Artificial
  Probe
tttagttgcttttgtaatggaaagg

SEQ ID NO: 22377 - DNA, 25 bp, Artificial
  Probe
tttctatgaaataaaatgtcacgca

SEQ ID NO: 22378 - DNA, 25 bp, Artificial
  Probe
gtttagttgcttttgtaatggaaag

SEQ ID NO: 22379 - DNA, 25 bp, Artificial
  Probe
cctccggtccatgtttgtttagttg

SEQ ID NO: 22380 - DNA, 25 bp, Artificial
  Probe
ttttctatgaaataaaatgtcacgc

SEQ ID NO: 22381 - DNA, 25 bp, Artificial
  Probe
ccggtccatgtttgtttagttgctt

SEQ ID NO: 22382 - DNA, 25 bp, Artificial
  Probe
ctccggtccatgtttgtttagttgc

SEQ ID NO: 22383 - DNA, 25 bp, Artificial
  Probe
tccggtccatgtttgtttagttgct

SEQ ID NO: 22384 - DNA, 25 bp, Artificial
  Probe
ccctccggtccatgtttgtttagtt

SEQ ID NO: 22385 - DNA, 25 bp, Artificial
  Probe
catgaagtgttgtggaaattgaggg

SEQ ID NO: 22386 - DNA, 25 bp, Artificial
  Probe
tagggcatgaagtgttgtggaaatt

SEQ ID NO: 22387 - DNA, 25 bp, Artificial
  Probe
cttcattcctcaaaggtctccagag

SEQ ID NO: 22388 - DNA, 25 bp, Artificial
  Probe
gcatgaagtgttgtggaaattgagg

SEQ ID NO: 22389 - DNA, 25 bp, Artificial
  Probe
ggcatgaagtgttgtggaaattgag

SEQ ID NO: 22390 - DNA, 25 bp, Artificial
  Probe
gtagggcatgaagtgttgtggaaat

SEQ ID NO: 22391 - DNA, 25 bp, Artificial
  Probe
ttcattcctcaaaggtctccagaga

SEQ ID NO: 22392 - DNA, 25 bp, Artificial
  Probe
cttgcttcattcctcaaaggtctcc

SEQ ID NO: 22393 - DNA, 25 bp, Artificial
  Probe
tcattcctcaaaggtctccagagag

SEQ ID NO: 22394 - DNA, 25 bp, Artificial
  Probe
gggcatgaagtgttgtggaaattga

SEQ ID NO: 22395 - DNA, 25 bp, Artificial
  Probe
agggcatgaagtgttgtggaaattg

SEQ ID NO: 22396 - DNA, 25 bp, Artificial
  Probe
gcttgcttcattcctcaaaggtctc

SEQ ID NO: 22397 - DNA, 25 bp, Artificial
  Probe
tgtggaaattgaggggaagacaaaa

SEQ ID NO: 22398 - DNA, 25 bp, Artificial
  Probe
ttgcttcattcctcaaaggtctcca

SEQ ID NO: 22399 - DNA, 25 bp, Artificial
  Probe
aagtgttgtggaaattgaggggaag

SEQ ID NO: 22400 - DNA, 25 bp, Artificial
  Probe
gaagtgttgtggaaattgaggggaa

SEQ ID NO: 22401 - DNA, 25 bp, Artificial
  Probe
gcttcattcctcaaaggtctccaga

SEQ ID NO: 22402 - DNA, 25 bp, Artificial
  Probe
atgaagtgttgtggaaattgagggg

SEQ ID NO: 22403 - DNA, 25 bp, Artificial
  Probe
tgcttcattcctcaaaggtctccag

SEQ ID NO: 22404 - DNA, 25 bp, Artificial
  Probe
gtgggattcgactggtctatggaag

SEQ ID NO: 22405 - DNA, 25 bp, Artificial
  Probe
gtgttgtggaaattgaggggaagac

SEQ ID NO: 22406 - DNA, 25 bp, Artificial
  Probe
tgggattcgactggtctatggaaga

SEQ ID NO: 22407 - DNA, 25 bp, Artificial
  Probe
agtgttgtggaaattgaggggaaga

SEQ ID NO: 22408 - DNA, 25 bp, Artificial
  Probe
tgaagtgttgtggaaattgagggga

SEQ ID NO: 22409 - DNA, 25 bp, Artificial
  Probe
ttcatctccctcctagaaggtgctg

SEQ ID NO: 22410 - DNA, 25 bp, Artificial
  Probe
tgttgtggaaattgaggggaagaca

SEQ ID NO: 22411 - DNA, 25 bp, Artificial
  Probe
caccccatttctcctcactctgttc

SEQ ID NO: 22412 - DNA, 25 bp, Artificial
  Probe
ttgtggaaattgaggggaagacaaa

SEQ ID NO: 22413 - DNA, 25 bp, Artificial
  Probe
tcaccccatttctcctcactctgtt

SEQ ID NO: 22414 - DNA, 25 bp, Artificial
  Probe
cttcatctccctcctagaaggtgct

SEQ ID NO: 22415 - DNA, 25 bp, Artificial
  Probe
gttgtggaaattgaggggaagacaa

SEQ ID NO: 22416 - DNA, 25 bp, Artificial
  Probe
cactctgttcccgcatccagtaaaa

SEQ ID NO: 22417 - DNA, 25 bp, Artificial
  Probe
cattcctcaaaggtctccagagagg

SEQ ID NO: 22418 - DNA, 25 bp, Artificial
  Probe
attcctcaaaggtctccagagaggt

SEQ ID NO: 22419 - DNA, 25 bp, Artificial
  Probe
ctctcactgactcctgtatattagc

SEQ ID NO: 22420 - DNA, 25 bp, Artificial
  Probe
tctcactgactcctgtatattagca

SEQ ID NO: 22421 - DNA, 25 bp, Artificial
  Probe
ctcactgactcctgtatattagcaa

SEQ ID NO: 22422 - DNA, 25 bp, Artificial
  Probe
tcactgactcctgtatattagcaat

SEQ ID NO: 22423 - DNA, 25 bp, Artificial
  Probe
gctctctcactgactcctgtatatt

SEQ ID NO: 22424 - DNA, 25 bp, Artificial
  Probe
tctctcactgactcctgtatattag

SEQ ID NO: 22425 - DNA, 25 bp, Artificial
  Probe
ctctctcactgactcctgtatatta

SEQ ID NO: 22426 - DNA, 25 bp, Artificial
  Probe
cactgactcctgtatattagcaatt

SEQ ID NO: 22427 - DNA, 25 bp, Artificial
  Probe
ttgttcagactcagcctcaagtaat

SEQ ID NO: 22428 - DNA, 25 bp, Artificial
  Probe
tgttcagactcagcctcaagtaatt

SEQ ID NO: 22429 - DNA, 25 bp, Artificial
  Probe
cgctctctcactgactcctgtatat

SEQ ID NO: 22430 - DNA, 25 bp, Artificial
  Probe
ccaaactaactgtcagggtataaac

SEQ ID NO: 22431 - DNA, 25 bp, Artificial
  Probe
gttgttcagactcagcctcaagtaa

SEQ ID NO: 22432 - DNA, 25 bp, Artificial
  Probe
actgactcctgtatattagcaatta

SEQ ID NO: 22433 - DNA, 25 bp, Artificial
  Probe
actaagcaagtgcaatgtaagatac

SEQ ID NO: 22434 - DNA, 25 bp, Artificial
  Probe
ttctgtagttctgtgaagagaagaa

SEQ ID NO: 22435 - DNA, 25 bp, Artificial
  Probe
gcaatgtaagatacaagaagccatg

SEQ ID NO: 22436 - DNA, 25 bp, Artificial
  Probe
tctgtagttctgtgaagagaagaat

SEQ ID NO: 22437 - DNA, 25 bp, Artificial
  Probe
attctgtagttctgtgaagagaaga

SEQ ID NO: 22438 - DNA, 25 bp, Artificial
  Probe
atgtaagatacaagaagccatgttg

SEQ ID NO: 22439 - DNA, 25 bp, Artificial
  Probe
caatgtaagatacaagaagccatgt

SEQ ID NO: 22440 - DNA, 25 bp, Artificial
  Probe
taatttggtgtcactttcggagaag

SEQ ID NO: 22441 - DNA, 25 bp, Artificial
  Probe
ttcagactcagcctcaagtaatttg

SEQ ID NO: 22442 - DNA, 25 bp, Artificial
  Probe
gttcagactcagcctcaagtaattt

SEQ ID NO: 22443 - DNA, 25 bp, Artificial
  Probe
atttagcatgagccaatttacagag

SEQ ID NO: 22444 - DNA, 25 bp, Artificial
  Probe
gtaatttggtgtcactttcggagaa

SEQ ID NO: 22445 - DNA, 25 bp, Artificial
  Probe
aactaactgtcagggtataaacact

SEQ ID NO: 22446 - DNA, 25 bp, Artificial
  Probe
ctaactgtcagggtataaacactgt

SEQ ID NO: 22447 - DNA, 25 bp, Artificial
  Probe
actaactgtcagggtataaacactg

SEQ ID NO: 22448 - DNA, 25 bp, Artificial
  Probe
aatgtaagatacaagaagccatgtt

SEQ ID NO: 22449 - DNA, 25 bp, Artificial
  Probe
ctgtagttctgtgaagagaagaatt

SEQ ID NO: 22450 - DNA, 25 bp, Artificial
  Probe
aattctgtagttctgtgaagagaag

SEQ ID NO: 22451 - DNA, 25 bp, Artificial
  Probe
tagaggtggatggtgcttacaagag

SEQ ID NO: 22452 - DNA, 25 bp, Artificial
  Probe
ggaattctgtagttctgtgaagaga

SEQ ID NO: 22453 - DNA, 25 bp, Artificial
  Probe
aggaattctgtagttctgtgaagag

SEQ ID NO: 22454 - DNA, 25 bp, Artificial
  Probe
gaggaattctgtagttctgtgaaga

SEQ ID NO: 22455 - DNA, 25 bp, Artificial
  Probe
ggaggaattctgtagttctgtgaag

SEQ ID NO: 22456 - DNA, 25 bp, Artificial
  Probe
aaactaactgtcagggtataaacac

SEQ ID NO: 22457 - DNA, 25 bp, Artificial
  Probe
caaactaactgtcagggtataaaca

SEQ ID NO: 22458 - DNA, 25 bp, Artificial
  Probe
tatttagcatgagccaatttacaga

SEQ ID NO: 22459 - DNA, 25 bp, Artificial
  Probe
aggaggaattctgtagttctgtgaa

SEQ ID NO: 22460 - DNA, 25 bp, Artificial
  Probe
gtagaggtggatggtgcttacaaga

SEQ ID NO: 22461 - DNA, 25 bp, Artificial
  Probe
gtaaacacaaagcccttcatgtaat

SEQ ID NO: 22462 - DNA, 25 bp, Artificial
  Probe
aagaagccatgttgttcagactcag

SEQ ID NO: 22463 - DNA, 25 bp, Artificial
  Probe
tgactcctgtatattagcaattatg

SEQ ID NO: 22464 - DNA, 25 bp, Artificial
  Probe
cgggaaataaagtaattcggaaaga

SEQ ID NO: 22465 - DNA, 25 bp, Artificial
  Probe
gcgggaaataaagtaattcggaaag

SEQ ID NO: 22466 - DNA, 25 bp, Artificial
  Probe
ctgctttactgctttcatggttatc

SEQ ID NO: 22467 - DNA, 25 bp, Artificial
  Probe
tctgctttactgctttcatggttat

SEQ ID NO: 22468 - DNA, 25 bp, Artificial
  Probe
ttctgctttactgctttcatggtta

SEQ ID NO: 22469 - DNA, 25 bp, Artificial
  Probe
ggcgggaaataaagtaattcggaaa

SEQ ID NO: 22470 - DNA, 25 bp, Artificial
  Probe
ctttactgctttcatggttatcggg

SEQ ID NO: 22471 - DNA, 25 bp, Artificial
  Probe
tgctttactgctttcatggttatcg

SEQ ID NO: 22472 - DNA, 25 bp, Artificial
  Probe
gggaaataaagtaattcggaaagaa

SEQ ID NO: 22473 - DNA, 25 bp, Artificial
  Probe
gttctgctttactgctttcatggtt

SEQ ID NO: 22474 - DNA, 25 bp, Artificial
  Probe
gctttactgctttcatggttatcgg

SEQ ID NO: 22475 - DNA, 25 bp, Artificial
  Probe
gagttctgctttactgctttcatgg

SEQ ID NO: 22476 - DNA, 25 bp, Artificial
  Probe
ggagttctgctttactgctttcatg

SEQ ID NO: 22477 - DNA, 25 bp, Artificial
  Probe
gggcgggaaataaagtaattcggaa

SEQ ID NO: 22478 - DNA, 25 bp, Artificial
  Probe
gggagttctgctttactgctttcat

SEQ ID NO: 22479 - DNA, 25 bp, Artificial
  Probe
agttctgctttactgctttcatggt

SEQ ID NO: 22480 - DNA, 25 bp, Artificial
  Probe
gagggagttctgctttactgctttc

SEQ ID NO: 22481 - DNA, 25 bp, Artificial
  Probe
ggaaataaagtaattcggaaagaaa

SEQ ID NO: 22482 - DNA, 25 bp, Artificial
  Probe
agggagttctgctttactgctttca

SEQ ID NO: 22483 - DNA, 25 bp, Artificial
  Probe
tttactgctttcatggttatcgggg

SEQ ID NO: 22484 - DNA, 25 bp, Artificial
  Probe
ggagggagttctgctttactgcttt

SEQ ID NO: 22485 - DNA, 25 bp, Artificial
  Probe
ttactgctttcatggttatcgggga

SEQ ID NO: 22486 - DNA, 25 bp, Artificial
  Probe
agattgcatctcctgctttgaactg

SEQ ID NO: 22487 - DNA, 25 bp, Artificial
  Probe
cagattgcatctcctgctttgaact

SEQ ID NO: 22488 - DNA, 25 bp, Artificial
  Probe
ctgcacttttgaggacccaatagtt

SEQ ID NO: 22489 - DNA, 25 bp, Artificial
  Probe
tactgctttcatggttatcggggag

SEQ ID NO: 22490 - DNA, 25 bp, Artificial
  Probe
tgcacttttgaggacccaatagttg

SEQ ID NO: 22491 - DNA, 25 bp, Artificial
  Probe
ggggcgggaaataaagtaattcgga

SEQ ID NO: 22492 - DNA, 25 bp, Artificial
  Probe
gattgcatctcctgctttgaactgg

SEQ ID NO: 22493 - DNA, 25 bp, Artificial
  Probe
ccagattgcatctcctgctttgaac

SEQ ID NO: 22494 - DNA, 25 bp, Artificial
  Probe
cctgcacttttgaggacccaatagt

SEQ ID NO: 22495 - DNA, 25 bp, Artificial
  Probe
cttttgaggacccaatagttggcag

SEQ ID NO: 22496 - DNA, 25 bp, Artificial
  Probe
cacttttgaggacccaatagttggc

SEQ ID NO: 22497 - DNA, 25 bp, Artificial
  Probe
gcacttttgaggacccaatagttgg

SEQ ID NO: 22498 - DNA, 25 bp, Artificial
  Probe
gtactgttcctgcacttttgaggac

SEQ ID NO: 22499 - DNA, 25 bp, Artificial
  Probe
acttttgaggacccaatagttggca

SEQ ID NO: 22500 - DNA, 25 bp, Artificial
  Probe
ttcctgcacttttgaggacccaata

SEQ ID NO: 22501 - DNA, 25 bp, Artificial
  Probe
tcctgcacttttgaggacccaatag

SEQ ID NO: 22502 - DNA, 25 bp, Artificial
  Probe
ttttgaggacccaatagttggcagg

SEQ ID NO: 22503 - DNA, 25 bp, Artificial
  Probe
tactgttcctgcacttttgaggacc

SEQ ID NO: 22504 - DNA, 25 bp, Artificial
  Probe
ggtactgttcctgcacttttgagga

SEQ ID NO: 22505 - DNA, 25 bp, Artificial
  Probe
tcagtgagagagataaggtcaagtt

SEQ ID NO: 22506 - DNA, 25 bp, Artificial
  Probe
ctcagtgagagagataaggtcaagt

SEQ ID NO: 22507 - DNA, 25 bp, Artificial
  Probe
actcagtgagagagataaggtcaag

SEQ ID NO: 22508 - DNA, 25 bp, Artificial
  Probe
ataaggtcaagtttacagttcacac

SEQ ID NO: 22509 - DNA, 25 bp, Artificial
  Probe
gataaggtcaagtttacagttcaca

SEQ ID NO: 22510 - DNA, 25 bp, Artificial
  Probe
agagagataaggtcaagtttacagt

SEQ ID NO: 22511 - DNA, 25 bp, Artificial
  Probe
aaagaagaatttgccaagatgaagc

SEQ ID NO: 22512 - DNA, 25 bp, Artificial
  Probe
agataaggtcaagtttacagttcac

SEQ ID NO: 22513 - DNA, 25 bp, Artificial
  Probe
tcaagtttacagttcacaccaagac

SEQ ID NO: 22514 - DNA, 25 bp, Artificial
  Probe
gtcaagtttacagttcacaccaaga

SEQ ID NO: 22515 - DNA, 25 bp, Artificial
  Probe
gagataaggtcaagtttacagttca

SEQ ID NO: 22516 - DNA, 25 bp, Artificial
  Probe
cagtgagagagataaggtcaagttt

SEQ ID NO: 22517 - DNA, 25 bp, Artificial
  Probe
cactcagtgagagagataaggtcaa

SEQ ID NO: 22518 - DNA, 25 bp, Artificial
  Probe
gagagagataaggtcaagtttacag

SEQ ID NO: 22519 - DNA, 25 bp, Artificial
  Probe
agagataaggtcaagtttacagttc

SEQ ID NO: 22520 - DNA, 25 bp, Artificial
  Probe
gagagataaggtcaagtttacagtt

SEQ ID NO: 22521 - DNA, 25 bp, Artificial
  Probe
tgagagagataaggtcaagtttaca

SEQ ID NO: 22522 - DNA, 25 bp, Artificial
  Probe
gtgagagagataaggtcaagtttac

SEQ ID NO: 22523 - DNA, 25 bp, Artificial
  Probe
tgacactcttactgaaacaacagat

SEQ ID NO: 22524 - DNA, 25 bp, Artificial
  Probe
atgacactcttactgaaacaacaga

SEQ ID NO: 22525 - DNA, 25 bp, Artificial
  Probe
agtgagagagataaggtcaagttta

SEQ ID NO: 22526 - DNA, 25 bp, Artificial
  Probe
tgagtatctcgctgtctttaagaag

SEQ ID NO: 22527 - DNA, 25 bp, Artificial
  Probe
ctgagtatctcgctgtctttaagaa

SEQ ID NO: 22528 - DNA, 25 bp, Artificial
  Probe
cttactgaaacaacagattatgccg

SEQ ID NO: 22529 - DNA, 25 bp, Artificial
  Probe
tcttactgaaacaacagattatgcc

SEQ ID NO: 22530 - DNA, 25 bp, Artificial
  Probe
gacactcttactgaaacaacagatt

SEQ ID NO: 22531 - DNA, 25 bp, Artificial
  Probe
caagtttacagttcacaccaagacc

SEQ ID NO: 22532 - DNA, 25 bp, Artificial
  Probe
gttacaaggcaacatgaagactttg

SEQ ID NO: 22533 - DNA, 25 bp, Artificial
  Probe
gcatgacactcttactgaaacaaca

SEQ ID NO: 22534 - DNA, 25 bp, Artificial
  Probe
aagtttacagttcacaccaagacca

SEQ ID NO: 22535 - DNA, 25 bp, Artificial
  Probe
tgatgcactcagtgagagagataag

SEQ ID NO: 22536 - DNA, 25 bp, Artificial
  Probe
catgacactcttactgaaacaacag

SEQ ID NO: 22537 - DNA, 25 bp, Artificial
  Probe
ctcttactgaaacaacagattatgc

SEQ ID NO: 22538 - DNA, 25 bp, Artificial
  Probe
ttatcatccctcctgctcctacaaa

SEQ ID NO: 22539 - DNA, 25 bp, Artificial
  Probe
taaggtcaagtttacagttcacacc

SEQ ID NO: 22540 - DNA, 25 bp, Artificial
  Probe
acactcttactgaaacaacagatta

SEQ ID NO: 22541 - DNA, 25 bp, Artificial
  Probe
gatgcactcagtgagagagataagg

SEQ ID NO: 22542 - DNA, 25 bp, Artificial
  Probe
caagaactggaagctgagtatctcg

SEQ ID NO: 22543 - DNA, 25 bp, Artificial
  Probe
ccatcgcttcagattgacatacctg

SEQ ID NO: 22544 - DNA, 25 bp, Artificial
  Probe
gctgagtatctcgctgtctttaaga

SEQ ID NO: 22545 - DNA, 25 bp, Artificial
  Probe
tatcatccctcctgctcctacaaag

SEQ ID NO: 22546 - DNA, 25 bp, Artificial
  Probe
cttatcatccctcctgctcctacaa

SEQ ID NO: 22547 - DNA, 25 bp, Artificial
  Probe
agtttacagttcacaccaagaccac

SEQ ID NO: 22548 - DNA, 25 bp, Artificial
  Probe
ctgcatgacactcttactgaaacaa

SEQ ID NO: 22549 - DNA, 25 bp, Artificial
  Probe
gcaagaactggaagctgagtatctc

SEQ ID NO: 22550 - DNA, 25 bp, Artificial
  Probe
agtctgttgagtaccatgatcctat

SEQ ID NO: 22551 - DNA, 25 bp, Artificial
  Probe
gtctgttgagtaccatgatcctatg

SEQ ID NO: 22552 - DNA, 25 bp, Artificial
  Probe
tcaacaactgtaactgaatgtagtc

SEQ ID NO: 22553 - DNA, 25 bp, Artificial
  Probe
ctcaacaactgtaactgaatgtagt

SEQ ID NO: 22554 - DNA, 25 bp, Artificial
  Probe
actcaacaactgtaactgaatgtag

SEQ ID NO: 22555 - DNA, 25 bp, Artificial
  Probe
cagtctgttgagtaccatgatccta

SEQ ID NO: 22556 - DNA, 25 bp, Artificial
  Probe
ttactcaacaactgtaactgaatgt

SEQ ID NO: 22557 - DNA, 25 bp, Artificial
  Probe
tactcaacaactgtaactgaatgta

SEQ ID NO: 22558 - DNA, 25 bp, Artificial
  Probe
ggcagggacttattgaagaacttat

SEQ ID NO: 22559 - DNA, 25 bp, Artificial
  Probe
ttcagtctgttgagtaccatgatcc

SEQ ID NO: 22560 - DNA, 25 bp, Artificial
  Probe
gaacttattgaagaaagggaactgt

SEQ ID NO: 22561 - DNA, 25 bp, Artificial
  Probe
gcagggacttattgaagaacttatt

SEQ ID NO: 22562 - DNA, 25 bp, Artificial
  Probe
agaacttattgaagaaagggaactg

SEQ ID NO: 22563 - DNA, 25 bp, Artificial
  Probe
acttattgaagaaagggaactgttt

SEQ ID NO: 22564 - DNA, 25 bp, Artificial
  Probe
aacttattgaagaaagggaactgtt

SEQ ID NO: 22565 - DNA, 25 bp, Artificial
  Probe
aacgtgtgattctgcttaactgaag

SEQ ID NO: 22566 - DNA, 25 bp, Artificial
  Probe
gaacgtgtgattctgcttaactgaa

SEQ ID NO: 22567 - DNA, 25 bp, Artificial
  Probe
aagaacttattgaagaaagggaact

SEQ ID NO: 22568 - DNA, 25 bp, Artificial
  Probe
tgaagaacttattgaagaaagggaa

SEQ ID NO: 22569 - DNA, 25 bp, Artificial
  Probe
ttgaagaacttattgaagaaaggga

SEQ ID NO: 22570 - DNA, 25 bp, Artificial
  Probe
gaagaacttattgaagaaagggaac

SEQ ID NO: 22571 - DNA, 25 bp, Artificial
  Probe
tcagtctgttgagtaccatgatcct

SEQ ID NO: 22572 - DNA, 25 bp, Artificial
  Probe
tttcagtctgttgagtaccatgatc

SEQ ID NO: 22573 - DNA, 25 bp, Artificial
  Probe
gggcagggacttattgaagaactta

SEQ ID NO: 22574 - DNA, 25 bp, Artificial
  Probe
cagggacttattgaagaacttattg

SEQ ID NO: 22575 - DNA, 25 bp, Artificial
  Probe
agggacttattgaagaacttattga

SEQ ID NO: 22576 - DNA, 25 bp, Artificial
  Probe
attgaagaacttattgaagaaaggg

SEQ ID NO: 22577 - DNA, 25 bp, Artificial
  Probe
atggaacgtgtgattctgcttaact

SEQ ID NO: 22578 - DNA, 25 bp, Artificial
  Probe
catggaacgtgtgattctgcttaac

SEQ ID NO: 22579 - DNA, 25 bp, Artificial
  Probe
ggacttattgaagaacttattgaag

SEQ ID NO: 22580 - DNA, 25 bp, Artificial
  Probe
gggacttattgaagaacttattgaa

SEQ ID NO: 22581 - DNA, 25 bp, Artificial
  Probe
tttactcaacaactgtaactgaatg

SEQ ID NO: 22582 - DNA, 25 bp, Artificial
  Probe
ggaacgtgtgattctgcttaactga

SEQ ID NO: 22583 - DNA, 25 bp, Artificial
  Probe
taagttagtgcttttgacatttggg

SEQ ID NO: 22584 - DNA, 25 bp, Artificial
  Probe
aagagggcagggacttattgaagaa

SEQ ID NO: 22585 - DNA, 25 bp, Artificial
  Probe
tggaacgtgtgattctgcttaactg

SEQ ID NO: 22586 - DNA, 25 bp, Artificial
  Probe
tattttgtattttcaagagggcagg

SEQ ID NO: 22587 - DNA, 25 bp, Artificial
  Probe
tattttcaagagggcagggacttat

SEQ ID NO: 22588 - DNA, 25 bp, Artificial
  Probe
tctgttgagtaccatgatcctatgg

SEQ ID NO: 22589 - DNA, 25 bp, Artificial
  Probe
agggcagggacttattgaagaactt

SEQ ID NO: 22590 - DNA, 25 bp, Artificial
  Probe
attttgtattttcaagagggcaggg

SEQ ID NO: 22591 - DNA, 25 bp, Artificial
  Probe
gagggcagggacttattgaagaact

SEQ ID NO: 22592 - DNA, 25 bp, Artificial
  Probe
agagggcagggacttattgaagaac

SEQ ID NO: 22593 - DNA, 25 bp, Artificial
  Probe
ttttcagtctgttgagtaccatgat

SEQ ID NO: 22594 - DNA, 25 bp, Artificial
  Probe
aagttagtgcttttgacatttgggg

SEQ ID NO: 22595 - DNA, 25 bp, Artificial
  Probe
aattcatcaccaagaacaagacctt

SEQ ID NO: 22596 - DNA, 25 bp, Artificial
  Probe
actgaatcaagaatgtcactaaggt

SEQ ID NO: 22597 - DNA, 25 bp, Artificial
  Probe
gcactgaatcaagaatgtcactaag

SEQ ID NO: 22598 - DNA, 25 bp, Artificial
  Probe
cactgaatcaagaatgtcactaagg

SEQ ID NO: 22599 - DNA, 25 bp, Artificial
  Probe
ttgagaatcctactatggttcagtt

SEQ ID NO: 22600 - DNA, 25 bp, Artificial
  Probe
ggcactgaatcaagaatgtcactaa

SEQ ID NO: 22601 - DNA, 25 bp, Artificial
  Probe
tgaatcaagaatgtcactaaggtgt

SEQ ID NO: 22602 - DNA, 25 bp, Artificial
  Probe
ctgaatcaagaatgtcactaaggtg

SEQ ID NO: 22603 - DNA, 25 bp, Artificial
  Probe
aatcaagaatgtcactaaggtgttc

SEQ ID NO: 22604 - DNA, 25 bp, Artificial
  Probe
gaatcaagaatgtcactaaggtgtt

SEQ ID NO: 22605 - DNA, 25 bp, Artificial
  Probe
cactaaggtgttcttataccagagg

SEQ ID NO: 22606 - DNA, 25 bp, Artificial
  Probe
actaaggtgttcttataccagaggt

SEQ ID NO: 22607 - DNA, 25 bp, Artificial
  Probe
tgtcactaaggtgttcttataccag

SEQ ID NO: 22608 - DNA, 25 bp, Artificial
  Probe
ctaaggtgttcttataccagaggtt

SEQ ID NO: 22609 - DNA, 25 bp, Artificial
  Probe
gtcactaaggtgttcttataccaga

SEQ ID NO: 22610 - DNA, 25 bp, Artificial
  Probe
tcactaaggtgttcttataccagag

SEQ ID NO: 22611 - DNA, 25 bp, Artificial
  Probe
atgtcactaaggtgttcttatacca

SEQ ID NO: 22612 - DNA, 25 bp, Artificial
  Probe
actctgcttatgtatgtgccaactc

SEQ ID NO: 22613 - DNA, 25 bp, Artificial
  Probe
attcatcaccaagaacaagaccttt

SEQ ID NO: 22614 - DNA, 25 bp, Artificial
  Probe
aatgtcactaaggtgttcttatacc

SEQ ID NO: 22615 - DNA, 25 bp, Artificial
  Probe
atcaagaatgtcactaaggtgttct

SEQ ID NO: 22616 - DNA, 25 bp, Artificial
  Probe
agaatcctactatggttcagtttga

SEQ ID NO: 22617 - DNA, 25 bp, Artificial
  Probe
tgagaatcctactatggttcagttt

SEQ ID NO: 22618 - DNA, 25 bp, Artificial
  Probe
tttgagaatcctactatggttcagt

SEQ ID NO: 22619 - DNA, 25 bp, Artificial
  Probe
gagaatcctactatggttcagtttg

SEQ ID NO: 22620 - DNA, 25 bp, Artificial
  Probe
ctctgcttatgtatgtgccaactcc

SEQ ID NO: 22621 - DNA, 25 bp, Artificial
  Probe
gaatgtcactaaggtgttcttatac

SEQ ID NO: 22622 - DNA, 25 bp, Artificial
  Probe
gaattcatcaccaagaacaagacct

SEQ ID NO: 22623 - DNA, 25 bp, Artificial
  Probe
cactctgcttatgtatgtgccaact

SEQ ID NO: 22624 - DNA, 25 bp, Artificial
  Probe
gtgttcttataccagaggtttcctt

SEQ ID NO: 22625 - DNA, 25 bp, Artificial
  Probe
aaggtgttcttataccagaggtttc

SEQ ID NO: 22626 - DNA, 25 bp, Artificial
  Probe
tgttcttataccagaggtttccttt

SEQ ID NO: 22627 - DNA, 25 bp, Artificial
  Probe
taaggtgttcttataccagaggttt

SEQ ID NO: 22628 - DNA, 25 bp, Artificial
  Probe
aaataattctccaaggatcgtttcc

SEQ ID NO: 22629 - DNA, 25 bp, Artificial
  Probe
ggaattcatcaccaagaacaagacc

SEQ ID NO: 22630 - DNA, 25 bp, Artificial
  Probe
ggtgttcttataccagaggtttcct

SEQ ID NO: 22631 - DNA, 25 bp, Artificial
  Probe
aggtgttcttataccagaggtttcc

SEQ ID NO: 22632 - DNA, 25 bp, Artificial
  Probe
agaatgtcactaaggtgttcttata

SEQ ID NO: 22633 - DNA, 25 bp, Artificial
  Probe
gggcactgaatcaagaatgtcacta

SEQ ID NO: 22634 - DNA, 25 bp, Artificial
  Probe
gttcttataccagaggtttccttta

SEQ ID NO: 22635 - DNA, 25 bp, Artificial
  Probe
ttcatcaccaagaacaagacctttt

SEQ ID NO: 22636 - DNA, 25 bp, Artificial
  Probe
gtttccaaattggtcaggtcattca

SEQ ID NO: 22637 - DNA, 25 bp, Artificial
  Probe
ccaaaataattctccaaggatcgtt

SEQ ID NO: 22638 - DNA, 25 bp, Artificial
  Probe
tcatcaccaagaacaagaccttttc

SEQ ID NO: 22639 - DNA, 25 bp, Artificial
  Probe
ttcttataccagaggtttcctttaa

SEQ ID NO: 22640 - DNA, 25 bp, Artificial
  Probe
gatgagaaagaggagtagagacaca

SEQ ID NO: 22641 - DNA, 25 bp, Artificial
  Probe
atgagaaagaggagtagagacacac

SEQ ID NO: 22642 - DNA, 25 bp, Artificial
  Probe
ggatgagaaagaggagtagagacac

SEQ ID NO: 22643 - DNA, 25 bp, Artificial
  Probe
gagaaagaggagtagagacacactg

SEQ ID NO: 22644 - DNA, 25 bp, Artificial
  Probe
gggatgagaaagaggagtagagaca

SEQ ID NO: 22645 - DNA, 25 bp, Artificial
  Probe
tgagaaagaggagtagagacacact

SEQ ID NO: 22646 - DNA, 25 bp, Artificial
  Probe
gtggctcttccaatgtcttctcaat

SEQ ID NO: 22647 - DNA, 25 bp, Artificial
  Probe
agaaagaggagtagagacacactgg

SEQ ID NO: 22648 - DNA, 25 bp, Artificial
  Probe
cacctcaataaactctgtgcctgaa

SEQ ID NO: 22649 - DNA, 25 bp, Artificial
  Probe
cagattcaggaattcaaggaagcct

SEQ ID NO: 22650 - DNA, 25 bp, Artificial
  Probe
gaaagaggagtagagacacactggg

SEQ ID NO: 22651 - DNA, 25 bp, Artificial
  Probe
gtcacctcaataaactctgtgcctg

SEQ ID NO: 22652 - DNA, 25 bp, Artificial
  Probe
ccagattcaggaattcaaggaagcc

SEQ ID NO: 22653 - DNA, 25 bp, Artificial
  Probe
tcacctcaataaactctgtgcctga

SEQ ID NO: 22654 - DNA, 25 bp, Artificial
  Probe
ggggatgagaaagaggagtagagac

SEQ ID NO: 22655 - DNA, 25 bp, Artificial
  Probe
cgtggctcttccaatgtcttctcaa

SEQ ID NO: 22656 - DNA, 25 bp, Artificial
  Probe
gattcaggaattcaaggaagccttc

SEQ ID NO: 22657 - DNA, 25 bp, Artificial
  Probe
agattcaggaattcaaggaagcctt

SEQ ID NO: 22658 - DNA, 25 bp, Artificial
  Probe
ggtcacctcaataaactctgtgcct

SEQ ID NO: 22659 - DNA, 25 bp, Artificial
  Probe
cccagattcaggaattcaaggaagc

SEQ ID NO: 22660 - DNA, 25 bp, Artificial
  Probe
gcccagattcaggaattcaaggaag

SEQ ID NO: 22661 - DNA, 25 bp, Artificial
  Probe
attcaggaattcaaggaagccttca

SEQ ID NO: 22662 - DNA, 25 bp, Artificial
  Probe
caagcccagattcaggaattcaagg

SEQ ID NO: 22663 - DNA, 25 bp, Artificial
  Probe
aagcccagattcaggaattcaagga

SEQ ID NO: 22664 - DNA, 25 bp, Artificial
  Probe
ctggggtcacctcaataaactctgt

SEQ ID NO: 22665 - DNA, 25 bp, Artificial
  Probe
actggggtcacctcaataaactctg

SEQ ID NO: 22666 - DNA, 25 bp, Artificial
  Probe
cactggggtcacctcaataaactct

SEQ ID NO: 22667 - DNA, 25 bp, Artificial
  Probe
agcccagattcaggaattcaaggaa

SEQ ID NO: 22668 - DNA, 25 bp, Artificial
  Probe
ttcaggaattcaaggaagccttcag

SEQ ID NO: 22669 - DNA, 25 bp, Artificial
  Probe
acactggggtcacctcaataaactc

SEQ ID NO: 22670 - DNA, 25 bp, Artificial
  Probe
aacgtggctcttccaatgtcttctc

SEQ ID NO: 22671 - DNA, 25 bp, Artificial
  Probe
cggggatgagaaagaggagtagaga

SEQ ID NO: 22672 - DNA, 25 bp, Artificial
  Probe
gcaagcccagattcaggaattcaag

SEQ ID NO: 22673 - DNA, 25 bp, Artificial
  Probe
acggggatgagaaagaggagtagag

SEQ ID NO: 22674 - DNA, 25 bp, Artificial
  Probe
cacactggggtcacctcaataaact

SEQ ID NO: 22675 - DNA, 25 bp, Artificial
  Probe
agcaagcccagattcaggaattcaa

SEQ ID NO: 22676 - DNA, 25 bp, Artificial
  Probe
tggggtcacctcaataaactctgtg

SEQ ID NO: 22677 - DNA, 25 bp, Artificial
  Probe
acacactggggtcacctcaataaac

SEQ ID NO: 22678 - DNA, 25 bp, Artificial
  Probe
cacggggatgagaaagaggagtaga

SEQ ID NO: 22679 - DNA, 25 bp, Artificial
  Probe
gacacactggggtcacctcaataaa

SEQ ID NO: 22680 - DNA, 25 bp, Artificial
  Probe
gagcaagcccagattcaggaattca

SEQ ID NO: 22681 - DNA, 25 bp, Artificial
  Probe
aaagaggagtagagacacactgggg

SEQ ID NO: 22682 - DNA, 25 bp, Artificial
  Probe
agacacactggggtcacctcaataa

SEQ ID NO: 22683 - DNA, 25 bp, Artificial
  Probe
caggaattcaaggaagccttcagct

SEQ ID NO: 22684 - DNA, 25 bp, Artificial
  Probe
tcaggaattcaaggaagccttcagc

SEQ ID NO: 22685 - DNA, 25 bp, Artificial
  Probe
cagaactgagcaaagtcaatagagg

SEQ ID NO: 22686 - DNA, 25 bp, Artificial
  Probe
gcagaactgagcaaagtcaatagag

SEQ ID NO: 22687 - DNA, 25 bp, Artificial
  Probe
agaactgagcaaagtcaatagaggg

SEQ ID NO: 22688 - DNA, 25 bp, Artificial
  Probe
tagggactagagtcattgggataaa

SEQ ID NO: 22689 - DNA, 25 bp, Artificial
  Probe
ttagggactagagtcattgggataa

SEQ ID NO: 22690 - DNA, 25 bp, Artificial
  Probe
tttagggactagagtcattgggata

SEQ ID NO: 22691 - DNA, 25 bp, Artificial
  Probe
attctttagggactagagtcattgg

SEQ ID NO: 22692 - DNA, 25 bp, Artificial
  Probe
agcagaactgagcaaagtcaataga

SEQ ID NO: 22693 - DNA, 25 bp, Artificial
  Probe
gtcattctttagggactagagtcat

SEQ ID NO: 22694 - DNA, 25 bp, Artificial
  Probe
ctttagggactagagtcattgggat

SEQ ID NO: 22695 - DNA, 25 bp, Artificial
  Probe
ttctttagggactagagtcattggg

SEQ ID NO: 22696 - DNA, 25 bp, Artificial
  Probe
cagcagaactgagcaaagtcaatag

SEQ ID NO: 22697 - DNA, 25 bp, Artificial
  Probe
cattctttagggactagagtcattg

SEQ ID NO: 22698 - DNA, 25 bp, Artificial
  Probe
tcattctttagggactagagtcatt

SEQ ID NO: 22699 - DNA, 25 bp, Artificial
  Probe
gacaatctaaagctgctctccctaa

SEQ ID NO: 22700 - DNA, 25 bp, Artificial
  Probe
tctttagggactagagtcattggga

SEQ ID NO: 22701 - DNA, 25 bp, Artificial
  Probe
aatctaaagctgctctccctaacac

SEQ ID NO: 22702 - DNA, 25 bp, Artificial
  Probe
caatctaaagctgctctccctaaca

SEQ ID NO: 22703 - DNA, 25 bp, Artificial
  Probe
acaatctaaagctgctctccctaac

SEQ ID NO: 22704 - DNA, 25 bp, Artificial
  Probe
agacaatctaaagctgctctcccta

SEQ ID NO: 22705 - DNA, 25 bp, Artificial
  Probe
ccagcagaactgagcaaagtcaata

SEQ ID NO: 22706 - DNA, 25 bp, Artificial
  Probe
aaagaaaggccgagacaatctaaag

SEQ ID NO: 22707 - DNA, 25 bp, Artificial
  Probe
gaaagaaaggccgagacaatctaaa

SEQ ID NO: 22708 - DNA, 25 bp, Artificial
  Probe
ctactttggcaccatgaaagaaagg

SEQ ID NO: 22709 - DNA, 25 bp, Artificial
  Probe
aaagtcaatagaggggtttctggag

SEQ ID NO: 22710 - DNA, 25 bp, Artificial
  Probe
agtcaatagaggggtttctggagta

SEQ ID NO: 22711 - DNA, 25 bp, Artificial
  Probe
caaagtcaatagaggggtttctgga

SEQ ID NO: 22712 - DNA, 25 bp, Artificial
  Probe
atgaaagaaaggccgagacaatcta

SEQ ID NO: 22713 - DNA, 25 bp, Artificial
  Probe
gctactttggcaccatgaaagaaag

SEQ ID NO: 22714 - DNA, 25 bp, Artificial
  Probe
agtcattctttagggactagagtca

SEQ ID NO: 22715 - DNA, 25 bp, Artificial
  Probe
cagtcattctttagggactagagtc

SEQ ID NO: 22716 - DNA, 25 bp, Artificial
  Probe
tcagtcattctttagggactagagt

SEQ ID NO: 22717 - DNA, 25 bp, Artificial
  Probe
gagcaaagtcaatagaggggtttct

SEQ ID NO: 22718 - DNA, 25 bp, Artificial
  Probe
ctcagtcattctttagggactagag

SEQ ID NO: 22719 - DNA, 25 bp, Artificial
  Probe
tgaaagaaaggccgagacaatctaa

SEQ ID NO: 22720 - DNA, 25 bp, Artificial
  Probe
gtcaatagaggggtttctggagtac

SEQ ID NO: 22721 - DNA, 25 bp, Artificial
  Probe
cctcagtcattctttagggactaga

SEQ ID NO: 22722 - DNA, 25 bp, Artificial
  Probe
gaacacttgaattggtgtgtaggag

SEQ ID NO: 22723 - DNA, 25 bp, Artificial
  Probe
agcaaagtcaatagaggggtttctg

SEQ ID NO: 22724 - DNA, 25 bp, Artificial
  Probe
caggaacacttgaattggtgtgtag

SEQ ID NO: 22725 - DNA, 25 bp, Artificial
  Probe
aatagaggggtttctggagtacact

SEQ ID NO: 22726 - DNA, 25 bp, Artificial
  Probe
caatagaggggtttctggagtacac

SEQ ID NO: 22727 - DNA, 25 bp, Artificial
  Probe
tcaatagaggggtttctggagtaca

SEQ ID NO: 22728 - DNA, 25 bp, Artificial
  Probe
aagtcaatagaggggtttctggagt

SEQ ID NO: 22729 - DNA, 25 bp, Artificial
  Probe
tgagcaaagtcaatagaggggtttc

SEQ ID NO: 22730 - DNA, 25 bp, Artificial
  Probe
ttcatcctcattcttgtcttcacac

SEQ ID NO: 22731 - DNA, 25 bp, Artificial
  Probe
catcctcattcttgtcttcacacac

SEQ ID NO: 22732 - DNA, 25 bp, Artificial
  Probe
tcatcctcattcttgtcttcacaca

SEQ ID NO: 22733 - DNA, 25 bp, Artificial
  Probe
gtttcatcctcattcttgtcttcac

SEQ ID NO: 22734 - DNA, 25 bp, Artificial
  Probe
tttgtccagtaataaaggctcagag

SEQ ID NO: 22735 - DNA, 25 bp, Artificial
  Probe
ggtttcatcctcattcttgtcttca

SEQ ID NO: 22736 - DNA, 25 bp, Artificial
  Probe
ttgtccagtaataaaggctcagaga

SEQ ID NO: 22737 - DNA, 25 bp, Artificial
  Probe
atcctcattcttgtcttcacacacc

SEQ ID NO: 22738 - DNA, 25 bp, Artificial
  Probe
tttcatcctcattcttgtcttcaca

SEQ ID NO: 22739 - DNA, 25 bp, Artificial
  Probe
tgtccagtaataaaggctcagagag

SEQ ID NO: 22740 - DNA, 25 bp, Artificial
  Probe
aggtttcatcctcattcttgtcttc

SEQ ID NO: 22741 - DNA, 25 bp, Artificial
  Probe
gtaatactccaaatggcagctcttt

SEQ ID NO: 22742 - DNA, 25 bp, Artificial
  Probe
ctcattcttgtcttcacacacctgg

SEQ ID NO: 22743 - DNA, 25 bp, Artificial
  Probe
cctcattcttgtcttcacacacctg

SEQ ID NO: 22744 - DNA, 25 bp, Artificial
  Probe
tcctcattcttgtcttcacacacct

SEQ ID NO: 22745 - DNA, 25 bp, Artificial
  Probe
ctttgtccagtaataaaggctcaga

SEQ ID NO: 22746 - DNA, 25 bp, Artificial
  Probe
tctttgtccagtaataaaggctcag

SEQ ID NO: 22747 - DNA, 25 bp, Artificial
  Probe
ctctttgtccagtaataaaggctca

SEQ ID NO: 22748 - DNA, 25 bp, Artificial
  Probe
gctctttgtccagtaataaaggctc

SEQ ID NO: 22749 - DNA, 25 bp, Artificial
  Probe
caaagcctgagcacttactttacag

SEQ ID NO: 22750 - DNA, 25 bp, Artificial
  Probe
ggtaatactccaaatggcagctctt

SEQ ID NO: 22751 - DNA, 25 bp, Artificial
  Probe
agcacttactttacaggacgaccat

SEQ ID NO: 22752 - DNA, 25 bp, Artificial
  Probe
ctgagcacttactttacaggacgac

SEQ ID NO: 22753 - DNA, 25 bp, Artificial
  Probe
atggcagctctttgtccagtaataa

SEQ ID NO: 22754 - DNA, 25 bp, Artificial
  Probe
aatggcagctctttgtccagtaata

SEQ ID NO: 22755 - DNA, 25 bp, Artificial
  Probe
gcacttactttacaggacgaccatg

SEQ ID NO: 22756 - DNA, 25 bp, Artificial
  Probe
cagctctttgtccagtaataaaggc

SEQ ID NO: 22757 - DNA, 25 bp, Artificial
  Probe
gcagctctttgtccagtaataaagg

SEQ ID NO: 22758 - DNA, 25 bp, Artificial
  Probe
ggcagctctttgtccagtaataaag

SEQ ID NO: 22759 - DNA, 25 bp, Artificial
  Probe
taatactccaaatggcagctctttg

SEQ ID NO: 22760 - DNA, 25 bp, Artificial
  Probe
aagagtccttcaccttgttggagtg

SEQ ID NO: 22761 - DNA, 25 bp, Artificial
  Probe
tggcagctctttgtccagtaataaa

SEQ ID NO: 22762 - DNA, 25 bp, Artificial
  Probe
agctctttgtccagtaataaaggct

SEQ ID NO: 22763 - DNA, 25 bp, Artificial
  Probe
gagcacttactttacaggacgacca

SEQ ID NO: 22764 - DNA, 25 bp, Artificial
  Probe
tgagcacttactttacaggacgacc

SEQ ID NO: 22765 - DNA, 25 bp, Artificial
  Probe
ccaaagcctgagcacttactttaca

SEQ ID NO: 22766 - DNA, 25 bp, Artificial
  Probe
aaatggcagctctttgtccagtaat

SEQ ID NO: 22767 - DNA, 25 bp, Artificial
  Probe
atggtaatactccaaatggcagctc

SEQ ID NO: 22768 - DNA, 25 bp, Artificial
  Probe
aactccaagtccaagtgatcgtgtg

SEQ ID NO: 22769 - DNA, 25 bp, Artificial
  Probe
caactccaagtccaagtgatcgtgt

SEQ ID NO: 22770 - DNA, 25 bp, Artificial
  Probe
catggtaatactccaaatggcagct

SEQ ID NO: 22771 - DNA, 25 bp, Artificial
  Probe
gagaaaggacccagaacccaagatg

SEQ ID NO: 22772 - DNA, 25 bp, Artificial
  Probe
cccaaagcctgagcacttactttac

SEQ ID NO: 22773 - DNA, 25 bp, Artificial
  Probe
aatactccaaatggcagctctttgt

SEQ ID NO: 22774 - DNA, 25 bp, Artificial
  Probe
tggtaatactccaaatggcagctct

SEQ ID NO: 22775 - DNA, 25 bp, Artificial
  Probe
caattcttattatcctggtgcttcc

SEQ ID NO: 22776 - DNA, 25 bp, Artificial
  Probe
acaattcttattatcctggtgcttc

SEQ ID NO: 22777 - DNA, 25 bp, Artificial
  Probe
aacaattcttattatcctggtgctt

SEQ ID NO: 22778 - DNA, 25 bp, Artificial
  Probe
taacaattcttattatcctggtgct

SEQ ID NO: 22779 - DNA, 25 bp, Artificial
  Probe
ttaacaattcttattatcctggtgc

SEQ ID NO: 22780 - DNA, 25 bp, Artificial
  Probe
aattcttattatcctggtgcttccc

SEQ ID NO: 22781 - DNA, 25 bp, Artificial
  Probe
ctcctgtaggctcatttgtataaga

SEQ ID NO: 22782 - DNA, 25 bp, Artificial
  Probe
tctcctgtaggctcatttgtataag

SEQ ID NO: 22783 - DNA, 25 bp, Artificial
  Probe
tcctgtaggctcatttgtataagaa

SEQ ID NO: 22784 - DNA, 25 bp, Artificial
  Probe
ttctcctgtaggctcatttgtataa

SEQ ID NO: 22785 - DNA, 25 bp, Artificial
  Probe
cctgtaggctcatttgtataagaag

SEQ ID NO: 22786 - DNA, 25 bp, Artificial
  Probe
attctcctgtaggctcatttgtata

SEQ ID NO: 22787 - DNA, 25 bp, Artificial
  Probe
tcaacttatcatatccaatggagca

SEQ ID NO: 22788 - DNA, 25 bp, Artificial
  Probe
accatcaagttattactggaatcaa

SEQ ID NO: 22789 - DNA, 25 bp, Artificial
  Probe
caacttatcatatccaatggagcaa

SEQ ID NO: 22790 - DNA, 25 bp, Artificial
  Probe
atagacagcaagatattcatgggag

SEQ ID NO: 22791 - DNA, 25 bp, Artificial
  Probe
acttatcatatccaatggagcaatc

SEQ ID NO: 22792 - DNA, 25 bp, Artificial
  Probe
atcaacttatcatatccaatggagc

SEQ ID NO: 22793 - DNA, 25 bp, Artificial
  Probe
atatttgcttggtcttctcccttca

SEQ ID NO: 22794 - DNA, 25 bp, Artificial
  Probe
tagacagcaagatattcatgggaga

SEQ ID NO: 22795 - DNA, 25 bp, Artificial
  Probe
ttatcatatccaatggagcaatctc

SEQ ID NO: 22796 - DNA, 25 bp, Artificial
  Probe
cttatcatatccaatggagcaatct

SEQ ID NO: 22797 - DNA, 25 bp, Artificial
  Probe
aacttatcatatccaatggagcaat

SEQ ID NO: 22798 - DNA, 25 bp, Artificial
  Probe
tatagacagcaagatattcatggga

SEQ ID NO: 22799 - DNA, 25 bp, Artificial
  Probe
tgttgagtcatttagatgtgatccg

SEQ ID NO: 22800 - DNA, 25 bp, Artificial
  Probe
gggagagaatttatcttaccatcaa

SEQ ID NO: 22801 - DNA, 25 bp, Artificial
  Probe
atgttgagtcatttagatgtgatcc

SEQ ID NO: 22802 - DNA, 25 bp, Artificial
  Probe
aatatttgcttggtcttctcccttc

SEQ ID NO: 22803 - DNA, 25 bp, Artificial
  Probe
taccatcaagttattactggaatca

SEQ ID NO: 22804 - DNA, 25 bp, Artificial
  Probe
tcttaccatcaagttattactggaa

SEQ ID NO: 22805 - DNA, 25 bp, Artificial
  Probe
tatttgcttggtcttctcccttcaa

SEQ ID NO: 22806 - DNA, 25 bp, Artificial
  Probe
acagcaagatattcatgggagagaa

SEQ ID NO: 22807 - DNA, 25 bp, Artificial
  Probe
ttgcttggtcttctcccttcaatta

SEQ ID NO: 22808 - DNA, 25 bp, Artificial
  Probe
gcttggtcttctcccttcaattaga

SEQ ID NO: 22809 - DNA, 25 bp, Artificial
  Probe
atcttaccatcaagttattactgga

SEQ ID NO: 22810 - DNA, 25 bp, Artificial
  Probe
gacagcaagatattcatgggagaga

SEQ ID NO: 22811 - DNA, 25 bp, Artificial
  Probe
agacagcaagatattcatgggagag

SEQ ID NO: 22812 - DNA, 25 bp, Artificial
  Probe
caatatttgcttggtcttctccctt

SEQ ID NO: 22813 - DNA, 25 bp, Artificial
  Probe
agcccataaattcttatctgactta

SEQ ID NO: 22814 - DNA, 25 bp, Artificial
  Probe
tagcccataaattcttatctgactt

SEQ ID NO: 22815 - DNA, 25 bp, Artificial
  Probe
ttagcccataaattcttatctgact

SEQ ID NO: 22816 - DNA, 25 bp, Artificial
  Probe
tgggagagaatttatcttaccatca

SEQ ID NO: 22817 - DNA, 25 bp, Artificial
  Probe
ttcatgggagagaatttatcttacc

SEQ ID NO: 22818 - DNA, 25 bp, Artificial
  Probe
tgcttggtcttctcccttcaattag

SEQ ID NO: 22819 - DNA, 25 bp, Artificial
  Probe
atttgcttggtcttctcccttcaat

SEQ ID NO: 22820 - DNA, 25 bp, Artificial
  Probe
aagtgcttctgtagataatgtctgt

SEQ ID NO: 22821 - DNA, 25 bp, Artificial
  Probe
ccaagtgcttctgtagataatgtct

SEQ ID NO: 22822 - DNA, 25 bp, Artificial
  Probe
cttctgtagataatgtctgtggagt

SEQ ID NO: 22823 - DNA, 25 bp, Artificial
  Probe
agtgcttctgtagataatgtctgtg

SEQ ID NO: 22824 - DNA, 25 bp, Artificial
  Probe
caagtgcttctgtagataatgtctg

SEQ ID NO: 22825 - DNA, 25 bp, Artificial
  Probe
gcttctgtagataatgtctgtggag

SEQ ID NO: 22826 - DNA, 25 bp, Artificial
  Probe
tgcttctgtagataatgtctgtgga

SEQ ID NO: 22827 - DNA, 25 bp, Artificial
  Probe
gtgcttctgtagataatgtctgtgg

SEQ ID NO: 22828 - DNA, 25 bp, Artificial
  Probe
gccaagtgcttctgtagataatgtc

SEQ ID NO: 22829 - DNA, 25 bp, Artificial
  Probe
tctgtagataatgtctgtggagtaa

SEQ ID NO: 22830 - DNA, 25 bp, Artificial
  Probe
ttctgtagataatgtctgtggagta

SEQ ID NO: 22831 - DNA, 25 bp, Artificial
  Probe
ttggaacatatcttgtctcacagag

SEQ ID NO: 22832 - DNA, 25 bp, Artificial
  Probe
attggaacatatcttgtctcacaga

SEQ ID NO: 22833 - DNA, 25 bp, Artificial
  Probe
aattggaacatatcttgtctcacag

SEQ ID NO: 22834 - DNA, 25 bp, Artificial
  Probe
tgtagtacaacctgcgtatcatctt

SEQ ID NO: 22835 - DNA, 25 bp, Artificial
  Probe
tcctttcttcttcatcttccttctt

SEQ ID NO: 22836 - DNA, 25 bp, Artificial
  Probe
ttcctttcttcttcatcttccttct

SEQ ID NO: 22837 - DNA, 25 bp, Artificial
  Probe
gtcttattgccttgcctttattacg

SEQ ID NO: 22838 - DNA, 25 bp, Artificial
  Probe
agtcttattgccttgcctttattac

SEQ ID NO: 22839 - DNA, 25 bp, Artificial
  Probe
gagtcttattgccttgcctttatta

SEQ ID NO: 22840 - DNA, 25 bp, Artificial
  Probe
tggaacatatcttgtctcacagagc

SEQ ID NO: 22841 - DNA, 25 bp, Artificial
  Probe
taagatgaaagacttcccaaagagg

SEQ ID NO: 22842 - DNA, 25 bp, Artificial
  Probe
gaacatatcttgtctcacagagctt

SEQ ID NO: 22843 - DNA, 25 bp, Artificial
  Probe
cctttcttcttcatcttccttcttt

SEQ ID NO: 22844 - DNA, 25 bp, Artificial
  Probe
tttcctttcttcttcatcttccttc

SEQ ID NO: 22845 - DNA, 25 bp, Artificial
  Probe
ggtcttctccttcaagcaattattt

SEQ ID NO: 22846 - DNA, 25 bp, Artificial
  Probe
gagaatctggagaacggaactcttc

SEQ ID NO: 22847 - DNA, 25 bp, Artificial
  Probe
atttgaagttcgtgaccagtgattt

SEQ ID NO: 22848 - DNA, 25 bp, Artificial
  Probe
gggtcttctccttcaagcaattatt

SEQ ID NO: 22849 - DNA, 25 bp, Artificial
  Probe
cgagtcttattgccttgcctttatt

SEQ ID NO: 22850 - DNA, 25 bp, Artificial
  Probe
aatttgaagttcgtgaccagtgatt

SEQ ID NO: 22851 - DNA, 25 bp, Artificial
  Probe
tagtacaacctgcgtatcatctttc

SEQ ID NO: 22852 - DNA, 25 bp, Artificial
  Probe
gtagtacaacctgcgtatcatcttt

SEQ ID NO: 22853 - DNA, 25 bp, Artificial
  Probe
ataagatgaaagacttcccaaagag

SEQ ID NO: 22854 - DNA, 25 bp, Artificial
  Probe
gccctcagatttggaaagaaataag

SEQ ID NO: 22855 - DNA, 25 bp, Artificial
  Probe
agccctcagatttggaaagaaataa

SEQ ID NO: 22856 - DNA, 25 bp, Artificial
  Probe
aataagatgaaagacttcccaaaga

SEQ ID NO: 22857 - DNA, 25 bp, Artificial
  Probe
agaaataagatgaaagacttcccaa

SEQ ID NO: 22858 - DNA, 25 bp, Artificial
  Probe
aagaaataagatgaaagacttccca

SEQ ID NO: 22859 - DNA, 25 bp, Artificial
  Probe
cagccctcagatttggaaagaaata

SEQ ID NO: 22860 - DNA, 25 bp, Artificial
  Probe
agaatctggagaacggaactcttca

SEQ ID NO: 22861 - DNA, 25 bp, Artificial
  Probe
gaatctggagaacggaactcttcag

SEQ ID NO: 22862 - DNA, 25 bp, Artificial
  Probe
tttgaagttcgtgaccagtgatttg

SEQ ID NO: 22863 - DNA, 25 bp, Artificial
  Probe
ccctcagatttggaaagaaataaga

SEQ ID NO: 22864 - DNA, 25 bp, Artificial
  Probe
ggaacatatcttgtctcacagagct

SEQ ID NO: 22865 - DNA, 25 bp, Artificial
  Probe
tgctgtagttcttagtgatcctctc

SEQ ID NO: 22866 - DNA, 25 bp, Artificial
  Probe
ctgctgtagttcttagtgatcctct

SEQ ID NO: 22867 - DNA, 25 bp, Artificial
  Probe
ctgtagttcttagtgatcctctcat

SEQ ID NO: 22868 - DNA, 25 bp, Artificial
  Probe
gtagttcttagtgatcctctcatgt

SEQ ID NO: 22869 - DNA, 25 bp, Artificial
  Probe
tgtagttcttagtgatcctctcatg

SEQ ID NO: 22870 - DNA, 25 bp, Artificial
  Probe
tagttcttagtgatcctctcatgtc

SEQ ID NO: 22871 - DNA, 25 bp, Artificial
  Probe
gctgtagttcttagtgatcctctca

SEQ ID NO: 22872 - DNA, 25 bp, Artificial
  Probe
agttcttagtgatcctctcatgtcc

SEQ ID NO: 22873 - DNA, 25 bp, Artificial
  Probe
cctgctgtagttcttagtgatcctc

SEQ ID NO: 22874 - DNA, 25 bp, Artificial
  Probe
tcctgctgtagttcttagtgatcct

SEQ ID NO: 22875 - DNA, 25 bp, Artificial
  Probe
gtcctgctgtagttcttagtgatcc

SEQ ID NO: 22876 - DNA, 25 bp, Artificial
  Probe
ggtcctgctgtagttcttagtgatc

SEQ ID NO: 22877 - DNA, 25 bp, Artificial
  Probe
aggtcctgctgtagttcttagtgat

SEQ ID NO: 22878 - DNA, 25 bp, Artificial
  Probe
gttcttagtgatcctctcatgtccc

SEQ ID NO: 22879 - DNA, 25 bp, Artificial
  Probe
cagaatcggaggacaaaatacaaac

SEQ ID NO: 22880 - DNA, 25 bp, Artificial
  Probe
ccagaatcggaggacaaaatacaaa

SEQ ID NO: 22881 - DNA, 25 bp, Artificial
  Probe
caggtcctgctgtagttcttagtga

SEQ ID NO: 22882 - DNA, 25 bp, Artificial
  Probe
ttccaggtcctgctgtagttcttag

SEQ ID NO: 22883 - DNA, 25 bp, Artificial
  Probe
agaatcggaggacaaaatacaaacg

SEQ ID NO: 22884 - DNA, 25 bp, Artificial
  Probe
attgatgtcacctctaatgactagg

SEQ ID NO: 22885 - DNA, 25 bp, Artificial
  Probe
acattgatgtcacctctaatgacta

SEQ ID NO: 22886 - DNA, 25 bp, Artificial
  Probe
gaagaagaagggttcccaccatatc

SEQ ID NO: 22887 - DNA, 25 bp, Artificial
  Probe
ctctccgtgtctctgtctttgttct

SEQ ID NO: 22888 - DNA, 25 bp, Artificial
  Probe
cattgatgtcacctctaatgactag

SEQ ID NO: 22889 - DNA, 25 bp, Artificial
  Probe
agaagaagaagggttcccaccatat

SEQ ID NO: 22890 - DNA, 25 bp, Artificial
  Probe
gaatcggaggacaaaatacaaacgg

SEQ ID NO: 22891 - DNA, 25 bp, Artificial
  Probe
ctccgtgtctctgtctttgttctga

SEQ ID NO: 22892 - DNA, 25 bp, Artificial
  Probe
tctccgtgtctctgtctttgttctg

SEQ ID NO: 22893 - DNA, 25 bp, Artificial
  Probe
gaagaagggttcccaccatatcaac

SEQ ID NO: 22894 - DNA, 25 bp, Artificial
  Probe
agaagaagggttcccaccatatcaa

SEQ ID NO: 22895 - DNA, 25 bp, Artificial
  Probe
aagaagaagggttcccaccatatca

SEQ ID NO: 22896 - DNA, 25 bp, Artificial
  Probe
gacattgatgtcacctctaatgact

SEQ ID NO: 22897 - DNA, 25 bp, Artificial
  Probe
gaggacaaaatacaaacggcagaag

SEQ ID NO: 22898 - DNA, 25 bp, Artificial
  Probe
tttccaggtcctgctgtagttctta

SEQ ID NO: 22899 - DNA, 25 bp, Artificial
  Probe
ggacattgatgtcacctctaatgac

SEQ ID NO: 22900 - DNA, 25 bp, Artificial
  Probe
aggacattgatgtcacctctaatga

SEQ ID NO: 22901 - DNA, 25 bp, Artificial
  Probe
tccgtgtctctgtctttgttctgag

SEQ ID NO: 22902 - DNA, 25 bp, Artificial
  Probe
gttccagaatcggaggacaaaatac

SEQ ID NO: 22903 - DNA, 25 bp, Artificial
  Probe
ccaggtcctgctgtagttcttagtg

SEQ ID NO: 22904 - DNA, 25 bp, Artificial
  Probe
tccaggtcctgctgtagttcttagt

SEQ ID NO: 22905 - DNA, 25 bp, Artificial
  Probe
agtctgagcagaagaagaagggttc

SEQ ID NO: 22906 - DNA, 25 bp, Artificial
  Probe
gagtctgagcagaagaagaagggtt

SEQ ID NO: 22907 - DNA, 25 bp, Artificial
  Probe
aatttattttccaggtcctgctgta

SEQ ID NO: 22908 - DNA, 25 bp, Artificial
  Probe
taatttattttccaggtcctgctgt

SEQ ID NO: 22909 - DNA, 25 bp, Artificial
  Probe
ttaatttattttccaggtcctgctg

SEQ ID NO: 22910 - DNA, 25 bp, Artificial
  Probe
ttgtatgtatctgttaatgcttgtt

SEQ ID NO: 22911 - DNA, 25 bp, Artificial
  Probe
atgtatctgttaatgcttgttactt

SEQ ID NO: 22912 - DNA, 25 bp, Artificial
  Probe
tgtatgtatctgttaatgcttgtta

SEQ ID NO: 22913 - DNA, 25 bp, Artificial
  Probe
gtatgtatctgttaatgcttgttac

SEQ ID NO: 22914 - DNA, 25 bp, Artificial
  Probe
tatgtatctgttaatgcttgttact

SEQ ID NO: 22915 - DNA, 25 bp, Artificial
  Probe
tttgtatgtatctgttaatgcttgt

SEQ ID NO: 22916 - DNA, 25 bp, Artificial
  Probe
tgtatctgttaatgcttgttacttt

SEQ ID NO: 22917 - DNA, 25 bp, Artificial
  Probe
tccttcacagaccaagaacacacac

SEQ ID NO: 22918 - DNA, 25 bp, Artificial
  Probe
agtccttcacagaccaagaacacac

SEQ ID NO: 22919 - DNA, 25 bp, Artificial
  Probe
gttcccttctgtgtctaaattttcc

SEQ ID NO: 22920 - DNA, 25 bp, Artificial
  Probe
tcccttctgtgtctaaattttccaa

SEQ ID NO: 22921 - DNA, 25 bp, Artificial
  Probe
ttcccttctgtgtctaaattttcca

SEQ ID NO: 22922 - DNA, 25 bp, Artificial
  Probe
cccttctgtgtctaaattttccaaa

SEQ ID NO: 22923 - DNA, 25 bp, Artificial
  Probe
agttcccttctgtgtctaaattttc

SEQ ID NO: 22924 - DNA, 25 bp, Artificial
  Probe
ttcacagaccaagaacacacacgta

SEQ ID NO: 22925 - DNA, 25 bp, Artificial
  Probe
tctgtgtctaaattttccaaaaggt

SEQ ID NO: 22926 - DNA, 25 bp, Artificial
  Probe
gtccttcacagaccaagaacacaca

SEQ ID NO: 22927 - DNA, 25 bp, Artificial
  Probe
gagctgtacaatgaattccctgaac

SEQ ID NO: 22928 - DNA, 25 bp, Artificial
  Probe
tgttttgtatgtatctgttaatgct

SEQ ID NO: 22929 - DNA, 25 bp, Artificial
  Probe
ctgtgtctaaattttccaaaaggtt

SEQ ID NO: 22930 - DNA, 25 bp, Artificial
  Probe
ctgttttgtatgtatctgttaatgc

SEQ ID NO: 22931 - DNA, 25 bp, Artificial
  Probe
gctgttttgtatgtatctgttaatg

SEQ ID NO: 22932 - DNA, 25 bp, Artificial
  Probe
tcacagaccaagaacacacacgtag

SEQ ID NO: 22933 - DNA, 25 bp, Artificial
  Probe
ttctgtgtctaaattttccaaaagg

SEQ ID NO: 22934 - DNA, 25 bp, Artificial
  Probe
ccttctgtgtctaaattttccaaaa

SEQ ID NO: 22935 - DNA, 25 bp, Artificial
  Probe
tgtgtctaaattttccaaaaggttg

SEQ ID NO: 22936 - DNA, 25 bp, Artificial
  Probe
cagttcccttctgtgtctaaatttt

SEQ ID NO: 22937 - DNA, 25 bp, Artificial
  Probe
gtgtctaaattttccaaaaggttga

SEQ ID NO: 22938 - DNA, 25 bp, Artificial
  Probe
agtacatgttaatatatgcaaccaa

SEQ ID NO: 22939 - DNA, 25 bp, Artificial
  Probe
gacagttcccttctgtgtctaaatt

SEQ ID NO: 22940 - DNA, 25 bp, Artificial
  Probe
ccctcctcctctaaacagaccagaa

SEQ ID NO: 22941 - DNA, 25 bp, Artificial
  Probe
ccagagggaaaactgaatgagacag

SEQ ID NO: 22942 - DNA, 25 bp, Artificial
  Probe
acagttcccttctgtgtctaaattt

SEQ ID NO: 22943 - DNA, 25 bp, Artificial
  Probe
agctgtacaatgaattccctgaacc

SEQ ID NO: 22944 - DNA, 25 bp, Artificial
  Probe
tgtctaaattttccaaaaggttgat

SEQ ID NO: 22945 - DNA, 25 bp, Artificial
  Probe
ttttgtatgtatctgttaatgcttg

SEQ ID NO: 22946 - DNA, 25 bp, Artificial
  Probe
gttttgtatgtatctgttaatgctt

SEQ ID NO: 22947 - DNA, 25 bp, Artificial
  Probe
gtatctgttaatgcttgttactttt

SEQ ID NO: 22948 - DNA, 25 bp, Artificial
  Probe
cttctgtgtctaaattttccaaaag

SEQ ID NO: 22949 - DNA, 25 bp, Artificial
  Probe
tagtacatgttaatatatgcaacca

SEQ ID NO: 22950 - DNA, 25 bp, Artificial
  Probe
ggagctgtacaatgaattccctgaa

SEQ ID NO: 22951 - DNA, 25 bp, Artificial
  Probe
tccagagggaaaactgaatgagaca

SEQ ID NO: 22952 - DNA, 25 bp, Artificial
  Probe
gtacatgttaatatatgcaaccaat

SEQ ID NO: 22953 - DNA, 25 bp, Artificial
  Probe
gtctaaattttccaaaaggttgatt

SEQ ID NO: 22954 - DNA, 25 bp, Artificial
  Probe
gaatgagacagttcccttctgtgtc

SEQ ID NO: 22955 - DNA, 25 bp, Artificial
  Probe
aagttgattctctccactgtaagtc

SEQ ID NO: 22956 - DNA, 25 bp, Artificial
  Probe
agtcctaatactgaagaagattcca

SEQ ID NO: 22957 - DNA, 25 bp, Artificial
  Probe
ggcattaagtcctaatactgaagaa

SEQ ID NO: 22958 - DNA, 25 bp, Artificial
  Probe
agttgattctctccactgtaagtcc

SEQ ID NO: 22959 - DNA, 25 bp, Artificial
  Probe
gttgattctctccactgtaagtcca

SEQ ID NO: 22960 - DNA, 25 bp, Artificial
  Probe
aggcattaagtcctaatactgaaga

SEQ ID NO: 22961 - DNA, 25 bp, Artificial
  Probe
caggcattaagtcctaatactgaag

SEQ ID NO: 22962 - DNA, 25 bp, Artificial
  Probe
gtcctaatactgaagaagattccag

SEQ ID NO: 22963 - DNA, 25 bp, Artificial
  Probe
aagtcctaatactgaagaagattcc

SEQ ID NO: 22964 - DNA, 25 bp, Artificial
  Probe
ttgattctctccactgtaagtccag

SEQ ID NO: 22965 - DNA, 25 bp, Artificial
  Probe
tctttcttagccactggattgatag

SEQ ID NO: 22966 - DNA, 25 bp, Artificial
  Probe
gtctttcttagccactggattgata

SEQ ID NO: 22967 - DNA, 25 bp, Artificial
  Probe
gcattaagtcctaatactgaagaag

SEQ ID NO: 22968 - DNA, 25 bp, Artificial
  Probe
aaagttgattctctccactgtaagt

SEQ ID NO: 22969 - DNA, 25 bp, Artificial
  Probe
ctttcttagccactggattgataga

SEQ ID NO: 22970 - DNA, 25 bp, Artificial
  Probe
gaagaagattccagttcccagagat

SEQ ID NO: 22971 - DNA, 25 bp, Artificial
  Probe
aagaagattccagttcccagagatg

SEQ ID NO: 22972 - DNA, 25 bp, Artificial
  Probe
tgtctttcttagccactggattgat

SEQ ID NO: 22973 - DNA, 25 bp, Artificial
  Probe
ctgtctttcttagccactggattga

SEQ ID NO: 22974 - DNA, 25 bp, Artificial
  Probe
tctgtctttcttagccactggattg

SEQ ID NO: 22975 - DNA, 25 bp, Artificial
  Probe
gtctgtctttcttagccactggatt

SEQ ID NO: 22976 - DNA, 25 bp, Artificial
  Probe
tgaagaagattccagttcccagaga

SEQ ID NO: 22977 - DNA, 25 bp, Artificial
  Probe
tttcttagccactggattgatagaa

SEQ ID NO: 22978 - DNA, 25 bp, Artificial
  Probe
ctgaagaagattccagttcccagag

SEQ ID NO: 22979 - DNA, 25 bp, Artificial
  Probe
cattaagtcctaatactgaagaaga

SEQ ID NO: 22980 - DNA, 25 bp, Artificial
  Probe
aaaaggggttcactggagtaaaatc

SEQ ID NO: 22981 - DNA, 25 bp, Artificial
  Probe
agtctgtctttcttagccactggat

SEQ ID NO: 22982 - DNA, 25 bp, Artificial
  Probe
caaaaggggttcactggagtaaaat

SEQ ID NO: 22983 - DNA, 25 bp, Artificial
  Probe
taagtcctaatactgaagaagattc

SEQ ID NO: 22984 - DNA, 25 bp, Artificial
  Probe
ggttcactggagtaaaatctcttca

SEQ ID NO: 22985 - DNA, 25 bp, Artificial
  Probe
aaaagttgattctctccactgtaag

SEQ ID NO: 22986 - DNA, 25 bp, Artificial
  Probe
aaaggggttcactggagtaaaatct

SEQ ID NO: 22987 - DNA, 25 bp, Artificial
  Probe
gttcactggagtaaaatctcttcaa

SEQ ID NO: 22988 - DNA, 25 bp, Artificial
  Probe
gggttcactggagtaaaatctcttc

SEQ ID NO: 22989 - DNA, 25 bp, Artificial
  Probe
tcctaatactgaagaagattccagt

SEQ ID NO: 22990 - DNA, 25 bp, Artificial
  Probe
ttcactggagtaaaatctcttcaaa

SEQ ID NO: 22991 - DNA, 25 bp, Artificial
  Probe
gaagattccagttcccagagatgct

SEQ ID NO: 22992 - DNA, 25 bp, Artificial
  Probe
agaagattccagttcccagagatgc

SEQ ID NO: 22993 - DNA, 25 bp, Artificial
  Probe
taatactgaagaagattccagttcc

SEQ ID NO: 22994 - DNA, 25 bp, Artificial
  Probe
cctaatactgaagaagattccagtt

SEQ ID NO: 22995 - DNA, 25 bp, Artificial
  Probe
ggggttcactggagtaaaatctctt

SEQ ID NO: 22996 - DNA, 25 bp, Artificial
  Probe
aaggggttcactggagtaaaatctc

SEQ ID NO: 22997 - DNA, 25 bp, Artificial
  Probe
ttaagtcctaatactgaagaagatt

SEQ ID NO: 22998 - DNA, 25 bp, Artificial
  Probe
tgattctctccactgtaagtccagt

SEQ ID NO: 22999 - DNA, 25 bp, Artificial
  Probe
gacaatattcctgacagtctgtctt

SEQ ID NO: 23000 - DNA, 25 bp, Artificial
  Probe
atattcacatcagtaaggttacggt

SEQ ID NO: 23001 - DNA, 25 bp, Artificial
  Probe
tattcacatcagtaaggttacggtg

SEQ ID NO: 23002 - DNA, 25 bp, Artificial
  Probe
aatattcacatcagtaaggttacgg

SEQ ID NO: 23003 - DNA, 25 bp, Artificial
  Probe
tttacagtctaactcttgaatgctt

SEQ ID NO: 23004 - DNA, 25 bp, Artificial
  Probe
atttacagtctaactcttgaatgct

SEQ ID NO: 23005 - DNA, 25 bp, Artificial
  Probe
aaggaggacaggtgtgtgtaaatat

SEQ ID NO: 23006 - DNA, 25 bp, Artificial
  Probe
attcacatcagtaaggttacggtgc

SEQ ID NO: 23007 - DNA, 25 bp, Artificial
  Probe
gaggacaggtgtgtgtaaatattca

SEQ ID NO: 23008 - DNA, 25 bp, Artificial
  Probe
ggaggacaggtgtgtgtaaatattc

SEQ ID NO: 23009 - DNA, 25 bp, Artificial
  Probe
aggacaggtgtgtgtaaatattcac

SEQ ID NO: 23010 - DNA, 25 bp, Artificial
  Probe
aggaggacaggtgtgtgtaaatatt

SEQ ID NO: 23011 - DNA, 25 bp, Artificial
  Probe
tctgtcaaagtaactctgcatacat

SEQ ID NO: 23012 - DNA, 25 bp, Artificial
  Probe
cgtctgtcaaagtaactctgcatac

SEQ ID NO: 23013 - DNA, 25 bp, Artificial
  Probe
ctgtcaaagtaactctgcatacatt

SEQ ID NO: 23014 - DNA, 25 bp, Artificial
  Probe
gtctgtcaaagtaactctgcataca

SEQ ID NO: 23015 - DNA, 25 bp, Artificial
  Probe
aaaggggaaagataggtgaaatagt

SEQ ID NO: 23016 - DNA, 25 bp, Artificial
  Probe
tgtcaaagtaactctgcatacattt

SEQ ID NO: 23017 - DNA, 25 bp, Artificial
  Probe
tatttacagtctaactcttgaatgc

SEQ ID NO: 23018 - DNA, 25 bp, Artificial
  Probe
caaaggggaaagataggtgaaatag

SEQ ID NO: 23019 - DNA, 25 bp, Artificial
  Probe
aaatattcacatcagtaaggttacg

SEQ ID NO: 23020 - DNA, 25 bp, Artificial
  Probe
aaggggaaagataggtgaaatagta

SEQ ID NO: 23021 - DNA, 25 bp, Artificial
  Probe
ctcaaaggggaaagataggtgaaat

SEQ ID NO: 23022 - DNA, 25 bp, Artificial
  Probe
aggggaaagataggtgaaatagtat

SEQ ID NO: 23023 - DNA, 25 bp, Artificial
  Probe
tcaaaggggaaagataggtgaaata

SEQ ID NO: 23024 - DNA, 25 bp, Artificial
  Probe
acatcagtaaggttacggtgcgaag

SEQ ID NO: 23025 - DNA, 25 bp, Artificial
  Probe
attttgctagtcctataaagagggg

SEQ ID NO: 23026 - DNA, 25 bp, Artificial
  Probe
gcgtctgtcaaagtaactctgcata

SEQ ID NO: 23027 - DNA, 25 bp, Artificial
  Probe
aaaatcctgggtagtgtgaaatatt

SEQ ID NO: 23028 - DNA, 25 bp, Artificial
  Probe
gtgtaaatattcacatcagtaaggt

SEQ ID NO: 23029 - DNA, 25 bp, Artificial
  Probe
tgtttatttacagtctaactcttga

SEQ ID NO: 23030 - DNA, 25 bp, Artificial
  Probe
gctcaaaggggaaagataggtgaaa

SEQ ID NO: 23031 - DNA, 25 bp, Artificial
  Probe
aaatcctgggtagtgtgaaatattt

SEQ ID NO: 23032 - DNA, 25 bp, Artificial
  Probe
tgtaaatattcacatcagtaaggtt

SEQ ID NO: 23033 - DNA, 25 bp, Artificial
  Probe
agaaagggaacgttaacatcatctt

SEQ ID NO: 23034 - DNA, 25 bp, Artificial
  Probe
tattttgctagtcctataaagaggg

SEQ ID NO: 23035 - DNA, 25 bp, Artificial
  Probe
gtcaaagtaactctgcatacatttt

SEQ ID NO: 23036 - DNA, 25 bp, Artificial
  Probe
cacatcagtaaggttacggtgcgaa

SEQ ID NO: 23037 - DNA, 25 bp, Artificial
  Probe
ttcacatcagtaaggttacggtgcg

SEQ ID NO: 23038 - DNA, 25 bp, Artificial
  Probe
gagaaagggaacgttaacatcatct

SEQ ID NO: 23039 - DNA, 25 bp, Artificial
  Probe
ggagaaagggaacgttaacatcatc

SEQ ID NO: 23040 - DNA, 25 bp, Artificial
  Probe
agattttactcctggtaagaatttg

SEQ ID NO: 23041 - DNA, 25 bp, Artificial
  Probe
ggtgtgtgtaaatattcacatcagt

SEQ ID NO: 23042 - DNA, 25 bp, Artificial
  Probe
caggtgtgtgtaaatattcacatca

SEQ ID NO: 23043 - DNA, 25 bp, Artificial
  Probe
acaggtgtgtgtaaatattcacatc

SEQ ID NO: 23044 - DNA, 25 bp, Artificial
  Probe
gacaggtgtgtgtaaatattcacat

SEQ ID NO: 23045 - DNA, 25 bp, Artificial
  Probe
gaacattaaggacttgctcaccaac

SEQ ID NO: 23046 - DNA, 25 bp, Artificial
  Probe
attaaggacttgctcaccaaccaat

SEQ ID NO: 23047 - DNA, 25 bp, Artificial
  Probe
ggaatgtgttgcctaattctaccaa

SEQ ID NO: 23048 - DNA, 25 bp, Artificial
  Probe
tgaacattaaggacttgctcaccaa

SEQ ID NO: 23049 - DNA, 25 bp, Artificial
  Probe
tgaacctatacatcccgaaattctc

SEQ ID NO: 23050 - DNA, 25 bp, Artificial
  Probe
gtgaacctatacatcccgaaattct

SEQ ID NO: 23051 - DNA, 25 bp, Artificial
  Probe
acctatacatcccgaaattctccat

SEQ ID NO: 23052 - DNA, 25 bp, Artificial
  Probe
gaacctatacatcccgaaattctcc

SEQ ID NO: 23053 - DNA, 25 bp, Artificial
  Probe
aacctatacatcccgaaattctcca

SEQ ID NO: 23054 - DNA, 25 bp, Artificial
  Probe
tagataactagcaatgagtagccct

SEQ ID NO: 23055 - DNA, 25 bp, Artificial
  Probe
ttagataactagcaatgagtagccc

SEQ ID NO: 23056 - DNA, 25 bp, Artificial
  Probe
ggtgaacctatacatcccgaaattc

SEQ ID NO: 23057 - DNA, 25 bp, Artificial
  Probe
ctcaccaaccaatcagatttctcag

SEQ ID NO: 23058 - DNA, 25 bp, Artificial
  Probe
ttaaggacttgctcaccaaccaatc

SEQ ID NO: 23059 - DNA, 25 bp, Artificial
  Probe
gataactagcaatgagtagcccttg

SEQ ID NO: 23060 - DNA, 25 bp, Artificial
  Probe
agataactagcaatgagtagccctt

SEQ ID NO: 23061 - DNA, 25 bp, Artificial
  Probe
cattaaggacttgctcaccaaccaa

SEQ ID NO: 23062 - DNA, 25 bp, Artificial
  Probe
aacattaaggacttgctcaccaacc

SEQ ID NO: 23063 - DNA, 25 bp, Artificial
  Probe
ataactagcaatgagtagcccttgt

SEQ ID NO: 23064 - DNA, 25 bp, Artificial
  Probe
taactagcaatgagtagcccttgtt

SEQ ID NO: 23065 - DNA, 25 bp, Artificial
  Probe
gacttgctcaccaaccaatcagatt

SEQ ID NO: 23066 - DNA, 25 bp, Artificial
  Probe
tttagataactagcaatgagtagcc

SEQ ID NO: 23067 - DNA, 25 bp, Artificial
  Probe
ttgacattaacgatggtccacaagg

SEQ ID NO: 23068 - DNA, 25 bp, Artificial
  Probe
ccttgacattaacgatggtccacaa

SEQ ID NO: 23069 - DNA, 25 bp, Artificial
  Probe
gatgaagggaatgtgttgcctaatt

SEQ ID NO: 23070 - DNA, 25 bp, Artificial
  Probe
gaagggaatgtgttgcctaattcta

SEQ ID NO: 23071 - DNA, 25 bp, Artificial
  Probe
aagggaatgtgttgcctaattctac

SEQ ID NO: 23072 - DNA, 25 bp, Artificial
  Probe
tacaactggatgaagggaatgtgtt

SEQ ID NO: 23073 - DNA, 25 bp, Artificial
  Probe
atgctacaactggatgaagggaatg

SEQ ID NO: 23074 - DNA, 25 bp, Artificial
  Probe
gatttctcaggcaacaccaaagatg

SEQ ID NO: 23075 - DNA, 25 bp, Artificial
  Probe
agatttctcaggcaacaccaaagat

SEQ ID NO: 23076 - DNA, 25 bp, Artificial
  Probe
atcagatttctcaggcaacaccaaa

SEQ ID NO: 23077 - DNA, 25 bp, Artificial
  Probe
caaccaatcagatttctcaggcaac

SEQ ID NO: 23078 - DNA, 25 bp, Artificial
  Probe
tcaccaaccaatcagatttctcagg

SEQ ID NO: 23079 - DNA, 25 bp, Artificial
  Probe
atgaagggaatgtgttgcctaattc

SEQ ID NO: 23080 - DNA, 25 bp, Artificial
  Probe
aatcagatttctcaggcaacaccaa

SEQ ID NO: 23081 - DNA, 25 bp, Artificial
  Probe
aaccaatcagatttctcaggcaaca

SEQ ID NO: 23082 - DNA, 25 bp, Artificial
  Probe
cttgctcaccaaccaatcagatttc

SEQ ID NO: 23083 - DNA, 25 bp, Artificial
  Probe
ctacaactggatgaagggaatgtgt

SEQ ID NO: 23084 - DNA, 25 bp, Artificial
  Probe
ttgctcaccaaccaatcagatttct

SEQ ID NO: 23085 - DNA, 25 bp, Artificial
  Probe
gaatgtgttgcctaattctaccaac

SEQ ID NO: 23086 - DNA, 25 bp, Artificial
  Probe
taaggacttgctcaccaaccaatca

SEQ ID NO: 23087 - DNA, 25 bp, Artificial
  Probe
aagacaaagtcacttgagaagggag

SEQ ID NO: 23088 - DNA, 25 bp, Artificial
  Probe
caagtggtcaatccagcctaagaac

SEQ ID NO: 23089 - DNA, 25 bp, Artificial
  Probe
aggtgaacctatacatcccgaaatt

SEQ ID NO: 23090 - DNA, 25 bp, Artificial
  Probe
cgagttgtgaatatctgtccattat

SEQ ID NO: 23091 - DNA, 25 bp, Artificial
  Probe
tcgagttgtgaatatctgtccatta

SEQ ID NO: 23092 - DNA, 25 bp, Artificial
  Probe
ttcgagttgtgaatatctgtccatt

SEQ ID NO: 23093 - DNA, 25 bp, Artificial
  Probe
cttcgagttgtgaatatctgtccat

SEQ ID NO: 23094 - DNA, 25 bp, Artificial
  Probe
gagtagtgttcctggttggcattaa

SEQ ID NO: 23095 - DNA, 25 bp, Artificial
  Probe
tttatcccttagccacataccctta

SEQ ID NO: 23096 - DNA, 25 bp, Artificial
  Probe
tgaatatctgtccattattagagca

SEQ ID NO: 23097 - DNA, 25 bp, Artificial
  Probe
agaatttatcccttagccacatacc

SEQ ID NO: 23098 - DNA, 25 bp, Artificial
  Probe
ttatcccttagccacatacccttag

SEQ ID NO: 23099 - DNA, 25 bp, Artificial
  Probe
cctatgctgaggttgattatagaat

SEQ ID NO: 23100 - DNA, 25 bp, Artificial
  Probe
gaatatctgtccattattagagcac

SEQ ID NO: 23101 - DNA, 25 bp, Artificial
  Probe
gtgaatatctgtccattattagagc

SEQ ID NO: 23102 - DNA, 25 bp, Artificial
  Probe
atttatcccttagccacataccctt

SEQ ID NO: 23103 - DNA, 25 bp, Artificial
  Probe
gaatttatcccttagccacataccc

SEQ ID NO: 23104 - DNA, 25 bp, Artificial
  Probe
agtagtgttcctggttggcattaac

SEQ ID NO: 23105 - DNA, 25 bp, Artificial
  Probe
aatttatcccttagccacataccct

SEQ ID NO: 23106 - DNA, 25 bp, Artificial
  Probe
gagttgtgaatatctgtccattatt

SEQ ID NO: 23107 - DNA, 25 bp, Artificial
  Probe
atacccagcacattactttgtcatc

SEQ ID NO: 23108 - DNA, 25 bp, Artificial
  Probe
tagattcacctctccagtccaccta

SEQ ID NO: 23109 - DNA, 25 bp, Artificial
  Probe
tagaatttatcccttagccacatac

SEQ ID NO: 23110 - DNA, 25 bp, Artificial
  Probe
catacccagcacattactttgtcat

SEQ ID NO: 23111 - DNA, 25 bp, Artificial
  Probe
gattcacctctccagtccacctatg

SEQ ID NO: 23112 - DNA, 25 bp, Artificial
  Probe
ctcttgctttccattgttgtcatcc

SEQ ID NO: 23113 - DNA, 25 bp, Artificial
  Probe
gcttcgagttgtgaatatctgtcca

SEQ ID NO: 23114 - DNA, 25 bp, Artificial
  Probe
acccagcacattactttgtcatcta

SEQ ID NO: 23115 - DNA, 25 bp, Artificial
  Probe
tacccagcacattactttgtcatct

SEQ ID NO: 23116 - DNA, 25 bp, Artificial
  Probe
cttgctttccattgttgtcatcctg

SEQ ID NO: 23117 - DNA, 25 bp, Artificial
  Probe
tcttgctttccattgttgtcatcct

SEQ ID NO: 23118 - DNA, 25 bp, Artificial
  Probe
ctatgctgaggttgattatagaatt

SEQ ID NO: 23119 - DNA, 25 bp, Artificial
  Probe
ttatagaatttatcccttagccaca

SEQ ID NO: 23120 - DNA, 25 bp, Artificial
  Probe
agattcacctctccagtccacctat

SEQ ID NO: 23121 - DNA, 25 bp, Artificial
  Probe
tgtgaatatctgtccattattagag

SEQ ID NO: 23122 - DNA, 25 bp, Artificial
  Probe
gctcttgctttccattgttgtcatc

SEQ ID NO: 23123 - DNA, 25 bp, Artificial
  Probe
tatcccttagccacatacccttagc

SEQ ID NO: 23124 - DNA, 25 bp, Artificial
  Probe
atagaatttatcccttagccacata

SEQ ID NO: 23125 - DNA, 25 bp, Artificial
  Probe
tatagaatttatcccttagccacat

SEQ ID NO: 23126 - DNA, 25 bp, Artificial
  Probe
cactagattcacctctccagtccac

SEQ ID NO: 23127 - DNA, 25 bp, Artificial
  Probe
acatacccttagccaaaatactgat

SEQ ID NO: 23128 - DNA, 25 bp, Artificial
  Probe
agttgtgaatatctgtccattatta

SEQ ID NO: 23129 - DNA, 25 bp, Artificial
  Probe
cacatacccttagccaaaatactga

SEQ ID NO: 23130 - DNA, 25 bp, Artificial
  Probe
ttgctttccattgttgtcatcctga

SEQ ID NO: 23131 - DNA, 25 bp, Artificial
  Probe
gttgtgaatatctgtccattattag

SEQ ID NO: 23132 - DNA, 25 bp, Artificial
  Probe
ccacatacccttagccaaaatactg

SEQ ID NO: 23133 - DNA, 25 bp, Artificial
  Probe
tagccacatacccttagccaaaata

SEQ ID NO: 23134 - DNA, 25 bp, Artificial
  Probe
gatcctgtgtcagactgtactacgg

SEQ ID NO: 23135 - DNA, 25 bp, Artificial
  Probe
gaggaagaggaagaggaagaatgac

SEQ ID NO: 23136 - DNA, 25 bp, Artificial
  Probe
ggaagaggaagaggaagaatgacag

SEQ ID NO: 23137 - DNA, 25 bp, Artificial
  Probe
aggaagaggaagaggaagaatgaca

SEQ ID NO: 23138 - DNA, 25 bp, Artificial
  Probe
gaagaggaagaggaagaatgacagc

SEQ ID NO: 23139 - DNA, 25 bp, Artificial
  Probe
ggaggaagaggaagaggaagaatga

SEQ ID NO: 23140 - DNA, 25 bp, Artificial
  Probe
cctaataaagagtttgccttcaaca

SEQ ID NO: 23141 - DNA, 25 bp, Artificial
  Probe
tcctaataaagagtttgccttcaac

SEQ ID NO: 23142 - DNA, 25 bp, Artificial
  Probe
tggaggaagaggaagaggaagaatg

SEQ ID NO: 23143 - DNA, 25 bp, Artificial
  Probe
tttcctaataaagagtttgccttca

SEQ ID NO: 23144 - DNA, 25 bp, Artificial
  Probe
ttcctaataaagagtttgccttcaa

SEQ ID NO: 23145 - DNA, 25 bp, Artificial
  Probe
aagaggaagaggaagaatgacagca

SEQ ID NO: 23146 - DNA, 25 bp, Artificial
  Probe
agaggaagaggaagaatgacagcag

SEQ ID NO: 23147 - DNA, 25 bp, Artificial
  Probe
taataaagagtttgccttcaacatc

SEQ ID NO: 23148 - DNA, 25 bp, Artificial
  Probe
ctaataaagagtttgccttcaacat

SEQ ID NO: 23149 - DNA, 25 bp, Artificial
  Probe
gaggaagaggaagaatgacagcagg

SEQ ID NO: 23150 - DNA, 25 bp, Artificial
  Probe
ttttcctaataaagagtttgccttc

SEQ ID NO: 23151 - DNA, 25 bp, Artificial
  Probe
gaagaggaagaatgacagcagggtg

SEQ ID NO: 23152 - DNA, 25 bp, Artificial
  Probe
ctggtgataaggccaagtacctgtt

SEQ ID NO: 23153 - DNA, 25 bp, Artificial
  Probe
tggtgataaggccaagtacctgttt

SEQ ID NO: 23154 - DNA, 25 bp, Artificial
  Probe
ggtgataaggccaagtacctgtttt

SEQ ID NO: 23155 - DNA, 25 bp, Artificial
  Probe
ctgctgctgaccctactagttttgg

SEQ ID NO: 23156 - DNA, 25 bp, Artificial
  Probe
ttcagttatacaacaagcaagccaa

SEQ ID NO: 23157 - DNA, 25 bp, Artificial
  Probe
tcagttatacaacaagcaagccaag

SEQ ID NO: 23158 - DNA, 25 bp, Artificial
  Probe
gttcagttatacaacaagcaagcca

SEQ ID NO: 23159 - DNA, 25 bp, Artificial
  Probe
gggtaggaactgaaggaaatatagg

SEQ ID NO: 23160 - DNA, 25 bp, Artificial
  Probe
agactttggaataggacttcatacc

SEQ ID NO: 23161 - DNA, 25 bp, Artificial
  Probe
ggtaggaactgaaggaaatatagga

SEQ ID NO: 23162 - DNA, 25 bp, Artificial
  Probe
tattaggaatccaccaaagaccatc

SEQ ID NO: 23163 - DNA, 25 bp, Artificial
  Probe
atattaggaatccaccaaagaccat

SEQ ID NO: 23164 - DNA, 25 bp, Artificial
  Probe
tatattaggaatccaccaaagacca

SEQ ID NO: 23165 - DNA, 25 bp, Artificial
  Probe
tgagtttagactttggaataggact

SEQ ID NO: 23166 - DNA, 25 bp, Artificial
  Probe
gtgagtttagactttggaataggac

SEQ ID NO: 23167 - DNA, 25 bp, Artificial
  Probe
agtgagtttagactttggaatagga

SEQ ID NO: 23168 - DNA, 25 bp, Artificial
  Probe
cagttatacaacaagcaagccaagc

SEQ ID NO: 23169 - DNA, 25 bp, Artificial
  Probe
gtttagactttggaataggacttca

SEQ ID NO: 23170 - DNA, 25 bp, Artificial
  Probe
gtaggaactgaaggaaatataggac

SEQ ID NO: 23171 - DNA, 25 bp, Artificial
  Probe
taggaatccaccaaagaccatcatt

SEQ ID NO: 23172 - DNA, 25 bp, Artificial
  Probe
ttaggaatccaccaaagaccatcat

SEQ ID NO: 23173 - DNA, 25 bp, Artificial
  Probe
attaggaatccaccaaagaccatca

SEQ ID NO: 23174 - DNA, 25 bp, Artificial
  Probe
ctgaacgcagagttaatttgtttct

SEQ ID NO: 23175 - DNA, 25 bp, Artificial
  Probe
ctaattgtcaagcaaatctgaacgc

SEQ ID NO: 23176 - DNA, 25 bp, Artificial
  Probe
gactttggaataggacttcatacct

SEQ ID NO: 23177 - DNA, 25 bp, Artificial
  Probe
ttatattaggaatccaccaaagacc

SEQ ID NO: 23178 - DNA, 25 bp, Artificial
  Probe
agtttagactttggaataggacttc

SEQ ID NO: 23179 - DNA, 25 bp, Artificial
  Probe
gagtttagactttggaataggactt

SEQ ID NO: 23180 - DNA, 25 bp, Artificial
  Probe
actttggaataggacttcatacctt

SEQ ID NO: 23181 - DNA, 25 bp, Artificial
  Probe
aaatggcaacaaacagaagctaatt

SEQ ID NO: 23182 - DNA, 25 bp, Artificial
  Probe
taattgtcaagcaaatctgaacgca

SEQ ID NO: 23183 - DNA, 25 bp, Artificial
  Probe
gaaatggcaacaaacagaagctaat

SEQ ID NO: 23184 - DNA, 25 bp, Artificial
  Probe
tagactttggaataggacttcatac

SEQ ID NO: 23185 - DNA, 25 bp, Artificial
  Probe
tttagactttggaataggacttcat

SEQ ID NO: 23186 - DNA, 25 bp, Artificial
  Probe
cttcggaatctgaaatggcaacaaa

SEQ ID NO: 23187 - DNA, 25 bp, Artificial
  Probe
ctttggaataggacttcataccttt

SEQ ID NO: 23188 - DNA, 25 bp, Artificial
  Probe
ggtgttcagttatacaacaagcaag

SEQ ID NO: 23189 - DNA, 25 bp, Artificial
  Probe
tctgattatattaggaatccaccaa

SEQ ID NO: 23190 - DNA, 25 bp, Artificial
  Probe
ttctgattatattaggaatccacca

SEQ ID NO: 23191 - DNA, 25 bp, Artificial
  Probe
aatggcaacaaacagaagctaattg

SEQ ID NO: 23192 - DNA, 25 bp, Artificial
  Probe
ttcggaatctgaaatggcaacaaac

SEQ ID NO: 23193 - DNA, 25 bp, Artificial
  Probe
gtgttcagttatacaacaagcaagc

SEQ ID NO: 23194 - DNA, 25 bp, Artificial
  Probe
tgaaatggcaacaaacagaagctaa

SEQ ID NO: 23195 - DNA, 25 bp, Artificial
  Probe
gttctgattatattaggaatccacc

SEQ ID NO: 23196 - DNA, 25 bp, Artificial
  Probe
agttatacaacaagcaagccaagcc

SEQ ID NO: 23197 - DNA, 25 bp, Artificial
  Probe
ttatacaacaagcaagccaagccac

SEQ ID NO: 23198 - DNA, 25 bp, Artificial
  Probe
tgcaaagaagatacaacccaacaaa

SEQ ID NO: 23199 - DNA, 25 bp, Artificial
  Probe
aaagacacacctgcaaagaagatac

SEQ ID NO: 23200 - DNA, 25 bp, Artificial
  Probe
attgacttcggaatctgaaatggca

SEQ ID NO: 23201 - DNA, 25 bp, Artificial
  Probe
tatatgtgtgtgtgaatgtgtgtgt

SEQ ID NO: 23202 - DNA, 25 bp, Artificial
  Probe
atatgtgtgtgtgaatgtgtgtgtg

SEQ ID NO: 23203 - DNA, 25 bp, Artificial
  Probe
tgaatgctgggattataggtgtatg

SEQ ID NO: 23204 - DNA, 25 bp, Artificial
  Probe
acacattctttatgctcactttcaa

SEQ ID NO: 23205 - DNA, 25 bp, Artificial
  Probe
aacacattctttatgctcactttca

SEQ ID NO: 23206 - DNA, 25 bp, Artificial
  Probe
gaatgctgggattataggtgtatgc

SEQ ID NO: 23207 - DNA, 25 bp, Artificial
  Probe
tatgtgtgtgtgaatgtgtgtgtgt

SEQ ID NO: 23208 - DNA, 25 bp, Artificial
  Probe
tacttcattaaccaaagaacagagg

SEQ ID NO: 23209 - DNA, 25 bp, Artificial
  Probe
aaacacattctttatgctcactttc

SEQ ID NO: 23210 - DNA, 25 bp, Artificial
  Probe
tgtgtgaatgtgtgtgtgtccatag

SEQ ID NO: 23211 - DNA, 25 bp, Artificial
  Probe
actaaacacattctttatgctcact

SEQ ID NO: 23212 - DNA, 25 bp, Artificial
  Probe
cacattctttatgctcactttcaat

SEQ ID NO: 23213 - DNA, 25 bp, Artificial
  Probe
caggagaatgagatatgtagcccag

SEQ ID NO: 23214 - DNA, 25 bp, Artificial
  Probe
gtgtgtgaatgtgtgtgtgtccata

SEQ ID NO: 23215 - DNA, 25 bp, Artificial
  Probe
tttctgttcaagtagtaccaaactg

SEQ ID NO: 23216 - DNA, 25 bp, Artificial
  Probe
gtttgtgccactatgtttaactaaa

SEQ ID NO: 23217 - DNA, 25 bp, Artificial
  Probe
aactaaacacattctttatgctcac

SEQ ID NO: 23218 - DNA, 25 bp, Artificial
  Probe
aatgctgggattataggtgtatgcc

SEQ ID NO: 23219 - DNA, 25 bp, Artificial
  Probe
ctaaacacattctttatgctcactt

SEQ ID NO: 23220 - DNA, 25 bp, Artificial
  Probe
acattctttatgctcactttcaatt

SEQ ID NO: 23221 - DNA, 25 bp, Artificial
  Probe
attaaccaaagaacagaggtcactt

SEQ ID NO: 23222 - DNA, 25 bp, Artificial
  Probe
ttcattaaccaaagaacagaggtca

SEQ ID NO: 23223 - DNA, 25 bp, Artificial
  Probe
cttcattaaccaaagaacagaggtc

SEQ ID NO: 23224 - DNA, 25 bp, Artificial
  Probe
acttcattaaccaaagaacagaggt

SEQ ID NO: 23225 - DNA, 25 bp, Artificial
  Probe
gtgtgaatgtgtgtgtgtccatagg

SEQ ID NO: 23226 - DNA, 25 bp, Artificial
  Probe
cattaaccaaagaacagaggtcact

SEQ ID NO: 23227 - DNA, 25 bp, Artificial
  Probe
tcattaaccaaagaacagaggtcac

SEQ ID NO: 23228 - DNA, 25 bp, Artificial
  Probe
gtacttcattaaccaaagaacagag

SEQ ID NO: 23229 - DNA, 25 bp, Artificial
  Probe
ttaaccaaagaacagaggtcacttg

SEQ ID NO: 23230 - DNA, 25 bp, Artificial
  Probe
ttctgttcaagtagtaccaaactgg

SEQ ID NO: 23231 - DNA, 25 bp, Artificial
  Probe
taaacacattctttatgctcacttt

SEQ ID NO: 23232 - DNA, 25 bp, Artificial
  Probe
gtagtaccaaactggagacaagaag

SEQ ID NO: 23233 - DNA, 25 bp, Artificial
  Probe
tctttatgctcactttcaatttaca

SEQ ID NO: 23234 - DNA, 25 bp, Artificial
  Probe
aggagaatgagatatgtagcccagg

SEQ ID NO: 23235 - DNA, 25 bp, Artificial
  Probe
agtagtaccaaactggagacaagaa

SEQ ID NO: 23236 - DNA, 25 bp, Artificial
  Probe
aagtagtaccaaactggagacaaga

SEQ ID NO: 23237 - DNA, 25 bp, Artificial
  Probe
caagtagtaccaaactggagacaag

SEQ ID NO: 23238 - DNA, 25 bp, Artificial
  Probe
gttcaagtagtaccaaactggagac

SEQ ID NO: 23239 - DNA, 25 bp, Artificial
  Probe
ctgttcaagtagtaccaaactggag

SEQ ID NO: 23240 - DNA, 25 bp, Artificial
  Probe
atgtgtgtgtgaatgtgtgtgtgtc

SEQ ID NO: 23241 - DNA, 25 bp, Artificial
  Probe
tatgctcactttcaatttacagttt

SEQ ID NO: 23242 - DNA, 25 bp, Artificial
  Probe
ttatgctcactttcaatttacagtt

SEQ ID NO: 23243 - DNA, 25 bp, Artificial
  Probe
tttatgctcactttcaatttacagt

SEQ ID NO: 23244 - DNA, 25 bp, Artificial
  Probe
tcaagtagtaccaaactggagacaa

SEQ ID NO: 23245 - DNA, 25 bp, Artificial
  Probe
ttcaagtagtaccaaactggagaca

SEQ ID NO: 23246 - DNA, 25 bp, Artificial
  Probe
agaggtagttcttactcaaggatgg

SEQ ID NO: 23247 - DNA, 25 bp, Artificial
  Probe
gaggtagttcttactcaaggatggt

SEQ ID NO: 23248 - DNA, 25 bp, Artificial
  Probe
tagaggtagttcttactcaaggatg

SEQ ID NO: 23249 - DNA, 25 bp, Artificial
  Probe
aggtagttcttactcaaggatggtg

SEQ ID NO: 23250 - DNA, 25 bp, Artificial
  Probe
ctagaggtagttcttactcaaggat

SEQ ID NO: 23251 - DNA, 25 bp, Artificial
  Probe
ggtagttcttactcaaggatggtgg

SEQ ID NO: 23252 - DNA, 25 bp, Artificial
  Probe
attaccttacaaacgcagactaact

SEQ ID NO: 23253 - DNA, 25 bp, Artificial
  Probe
ttaccttacaaacgcagactaactt

SEQ ID NO: 23254 - DNA, 25 bp, Artificial
  Probe
actattaccttacaaacgcagacta

SEQ ID NO: 23255 - DNA, 25 bp, Artificial
  Probe
taccttacaaacgcagactaacttc

SEQ ID NO: 23256 - DNA, 25 bp, Artificial
  Probe
cactattaccttacaaacgcagact

SEQ ID NO: 23257 - DNA, 25 bp, Artificial
  Probe
tgaagaacaaactattccttaccca

SEQ ID NO: 23258 - DNA, 25 bp, Artificial
  Probe
tattaccttacaaacgcagactaac

SEQ ID NO: 23259 - DNA, 25 bp, Artificial
  Probe
gaagaacaaactattccttacccag

SEQ ID NO: 23260 - DNA, 25 bp, Artificial
  Probe
ccttacaaacgcagactaacttcta

SEQ ID NO: 23261 - DNA, 25 bp, Artificial
  Probe
ctattaccttacaaacgcagactaa

SEQ ID NO: 23262 - DNA, 25 bp, Artificial
  Probe
aagaacaaactattccttacccagc

SEQ ID NO: 23263 - DNA, 25 bp, Artificial
  Probe
tacaaacgcagactaacttctaatg

SEQ ID NO: 23264 - DNA, 25 bp, Artificial
  Probe
cttacaaacgcagactaacttctaa

SEQ ID NO: 23265 - DNA, 25 bp, Artificial
  Probe
gtagttcttactcaaggatggtggc

SEQ ID NO: 23266 - DNA, 25 bp, Artificial
  Probe
ttgaagaacaaactattccttaccc

SEQ ID NO: 23267 - DNA, 25 bp, Artificial
  Probe
acaaacgcagactaacttctaatgg

SEQ ID NO: 23268 - DNA, 25 bp, Artificial
  Probe
gcatcactagactgtgtcactgtaa

SEQ ID NO: 23269 - DNA, 25 bp, Artificial
  Probe
ttacaaacgcagactaacttctaat

SEQ ID NO: 23270 - DNA, 25 bp, Artificial
  Probe
tacctatctgtgcagtaactgttct

SEQ ID NO: 23271 - DNA, 25 bp, Artificial
  Probe
tagttcttactcaaggatggtggca

SEQ ID NO: 23272 - DNA, 25 bp, Artificial
  Probe
ttacctatctgtgcagtaactgttc

SEQ ID NO: 23273 - DNA, 25 bp, Artificial
  Probe
cttacctatctgtgcagtaactgtt

SEQ ID NO: 23274 - DNA, 25 bp, Artificial
  Probe
agatttagggtttagttaagtcgtt

SEQ ID NO: 23275 - DNA, 25 bp, Artificial
  Probe
gcactattaccttacaaacgcagac

SEQ ID NO: 23276 - DNA, 25 bp, Artificial
  Probe
cacgacgcactattaccttacaaac

SEQ ID NO: 23277 - DNA, 25 bp, Artificial
  Probe
ctatctgtgcagtaactgttcttgg

SEQ ID NO: 23278 - DNA, 25 bp, Artificial
  Probe
cctatctgtgcagtaactgttcttg

SEQ ID NO: 23279 - DNA, 25 bp, Artificial
  Probe
acctatctgtgcagtaactgttctt

SEQ ID NO: 23280 - DNA, 25 bp, Artificial
  Probe
tcactagactgtgtcactgtaaatg

SEQ ID NO: 23281 - DNA, 25 bp, Artificial
  Probe
catcactagactgtgtcactgtaaa

SEQ ID NO: 23282 - DNA, 25 bp, Artificial
  Probe
accttacaaacgcagactaacttct

SEQ ID NO: 23283 - DNA, 25 bp, Artificial
  Probe
aactattccttacccagctttgtag

SEQ ID NO: 23284 - DNA, 25 bp, Artificial
  Probe
aaactattccttacccagctttgta

SEQ ID NO: 23285 - DNA, 25 bp, Artificial
  Probe
atcactagactgtgtcactgtaaat

SEQ ID NO: 23286 - DNA, 25 bp, Artificial
  Probe
aacaaactattccttacccagcttt

SEQ ID NO: 23287 - DNA, 25 bp, Artificial
  Probe
tctagaggtagttcttactcaagga

SEQ ID NO: 23288 - DNA, 25 bp, Artificial
  Probe
tatctgtgcagtaactgttcttggt

SEQ ID NO: 23289 - DNA, 25 bp, Artificial
  Probe
ccacaatctagaggtagttcttact

SEQ ID NO: 23290 - DNA, 25 bp, Artificial
  Probe
gacagtaaacgcttaccacaatcta

SEQ ID NO: 23291 - DNA, 25 bp, Artificial
  Probe
agcaagagcaagatcactgtcactt

SEQ ID NO: 23292 - DNA, 25 bp, Artificial
  Probe
ctacttccagatcaaccaggacgag

SEQ ID NO: 23293 - DNA, 25 bp, Artificial
  Probe
gagcaagagcaagatcactgtcact

SEQ ID NO: 23294 - DNA, 25 bp, Artificial
  Probe
aaaggtatttgaaatatctcaccaa

SEQ ID NO: 23295 - DNA, 25 bp, Artificial
  Probe
aaggtatttgaaatatctcaccaaa

SEQ ID NO: 23296 - DNA, 25 bp, Artificial
  Probe
aaaaggtatttgaaatatctcacca

SEQ ID NO: 23297 - DNA, 25 bp, Artificial
  Probe
aggtatttgaaatatctcaccaaaa

SEQ ID NO: 23298 - DNA, 25 bp, Artificial
  Probe
caaaaggtatttgaaatatctcacc

SEQ ID NO: 23299 - DNA, 25 bp, Artificial
  Probe
ccaaaaggtatttgaaatatctcac

SEQ ID NO: 23300 - DNA, 25 bp, Artificial
  Probe
gggaaactttgttgggaataaactt

SEQ ID NO: 23301 - DNA, 25 bp, Artificial
  Probe
tttgttgggaataaacttcactctg

SEQ ID NO: 23302 - DNA, 25 bp, Artificial
  Probe
actttgttgggaataaacttcactc

SEQ ID NO: 23303 - DNA, 25 bp, Artificial
  Probe
ttgttgggaataaacttcactctgt

SEQ ID NO: 23304 - DNA, 25 bp, Artificial
  Probe
gagggaaactttgttgggaataaac

SEQ ID NO: 23305 - DNA, 25 bp, Artificial
  Probe
ctttgttgggaataaacttcactct

SEQ ID NO: 23306 - DNA, 25 bp, Artificial
  Probe
agggaaactttgttgggaataaact

SEQ ID NO: 23307 - DNA, 25 bp, Artificial
  Probe
aactttgttgggaataaacttcact

SEQ ID NO: 23308 - DNA, 25 bp, Artificial
  Probe
ggaaactttgttgggaataaacttc

SEQ ID NO: 23309 - DNA, 25 bp, Artificial
  Probe
gagcactttcaaatctatgacactg

SEQ ID NO: 23310 - DNA, 25 bp, Artificial
  Probe
ggagggaaactttgttgggaataaa

SEQ ID NO: 23311 - DNA, 25 bp, Artificial
  Probe
aaactttgttgggaataaacttcac

SEQ ID NO: 23312 - DNA, 25 bp, Artificial
  Probe
ggagcactttcaaatctatgacact

SEQ ID NO: 23313 - DNA, 25 bp, Artificial
  Probe
gaaactttgttgggaataaacttca

SEQ ID NO: 23314 - DNA, 25 bp, Artificial
  Probe
agcactttcaaatctatgacactgg

SEQ ID NO: 23315 - DNA, 25 bp, Artificial
  Probe
ctttcaaatctatgacactgggctc

SEQ ID NO: 23316 - DNA, 25 bp, Artificial
  Probe
gggaataaacttcactctgtggaaa

SEQ ID NO: 23317 - DNA, 25 bp, Artificial
  Probe
tgttgggaataaacttcactctgtg

SEQ ID NO: 23318 - DNA, 25 bp, Artificial
  Probe
actttcaaatctatgacactgggct

SEQ ID NO: 23319 - DNA, 25 bp, Artificial
  Probe
cactttcaaatctatgacactgggc

SEQ ID NO: 23320 - DNA, 25 bp, Artificial
  Probe
gcactttcaaatctatgacactggg

SEQ ID NO: 23321 - DNA, 25 bp, Artificial
  Probe
tttcaaatctatgacactgggctca

SEQ ID NO: 23322 - DNA, 25 bp, Artificial
  Probe
tgggaataaacttcactctgtggaa

SEQ ID NO: 23323 - DNA, 25 bp, Artificial
  Probe
ttgggaataaacttcactctgtgga

SEQ ID NO: 23324 - DNA, 25 bp, Artificial
  Probe
gttgggaataaacttcactctgtgg

SEQ ID NO: 23325 - DNA, 25 bp, Artificial
  Probe
gggagggaaactttgttgggaataa

SEQ ID NO: 23326 - DNA, 25 bp, Artificial
  Probe
ttcaaatctatgacactgggctcac

SEQ ID NO: 23327 - DNA, 25 bp, Artificial
  Probe
gcccactgcacagaaatatatatct

SEQ ID NO: 23328 - DNA, 25 bp, Artificial
  Probe
caaatctatgacactgggctcactg

SEQ ID NO: 23329 - DNA, 25 bp, Artificial
  Probe
tcaaatctatgacactgggctcact

SEQ ID NO: 23330 - DNA, 25 bp, Artificial
  Probe
cccactgcacagaaatatatatcta

SEQ ID NO: 23331 - DNA, 25 bp, Artificial
  Probe
ggaataaacttcactctgtggaaaa

SEQ ID NO: 23332 - DNA, 25 bp, Artificial
  Probe
tatctattttcacactccactttgg

SEQ ID NO: 23333 - DNA, 25 bp, Artificial
  Probe
atatctattttcacactccactttg

SEQ ID NO: 23334 - DNA, 25 bp, Artificial
  Probe
tgcccactgcacagaaatatatatc

SEQ ID NO: 23335 - DNA, 25 bp, Artificial
  Probe
ctgcccactgcacagaaatatatat

SEQ ID NO: 23336 - DNA, 25 bp, Artificial
  Probe
actgcccactgcacagaaatatata

SEQ ID NO: 23337 - DNA, 25 bp, Artificial
  Probe
ccactgcacagaaatatatatctat

SEQ ID NO: 23338 - DNA, 25 bp, Artificial
  Probe
aaatctatgacactgggctcactgc

SEQ ID NO: 23339 - DNA, 25 bp, Artificial
  Probe
gactgcccactgcacagaaatatat

SEQ ID NO: 23340 - DNA, 25 bp, Artificial
  Probe
tatatctattttcacactccacttt

SEQ ID NO: 23341 - DNA, 25 bp, Artificial
  Probe
ctcctggttctcagaggtcccttag

SEQ ID NO: 23342 - DNA, 25 bp, Artificial
  Probe
ggggagggaaactttgttgggaata

SEQ ID NO: 23343 - DNA, 25 bp, Artificial
  Probe
tttcacactccactttggaactacc

SEQ ID NO: 23344 - DNA, 25 bp, Artificial
  Probe
atatatctattttcacactccactt

SEQ ID NO: 23345 - DNA, 25 bp, Artificial
  Probe
accctcctacttctttgtcctaata

SEQ ID NO: 23346 - DNA, 25 bp, Artificial
  Probe
tcctacttctttgtcctaataaccc

SEQ ID NO: 23347 - DNA, 25 bp, Artificial
  Probe
cctacttctttgtcctaataaccct

SEQ ID NO: 23348 - DNA, 25 bp, Artificial
  Probe
acttctttgtcctaataaccctctt

SEQ ID NO: 23349 - DNA, 25 bp, Artificial
  Probe
ccctcctacttctttgtcctaataa

SEQ ID NO: 23350 - DNA, 25 bp, Artificial
  Probe
tacttctttgtcctaataaccctct

SEQ ID NO: 23351 - DNA, 25 bp, Artificial
  Probe
caccctcctacttctttgtcctaat

SEQ ID NO: 23352 - DNA, 25 bp, Artificial
  Probe
ctacttctttgtcctaataaccctc

SEQ ID NO: 23353 - DNA, 25 bp, Artificial
  Probe
ctcctacttctttgtcctaataacc

SEQ ID NO: 23354 - DNA, 25 bp, Artificial
  Probe
cctcctacttctttgtcctaataac

SEQ ID NO: 23355 - DNA, 25 bp, Artificial
  Probe
ttcagagtgactcggctaatcattg

SEQ ID NO: 23356 - DNA, 25 bp, Artificial
  Probe
tcctctttgtgttcctttcactaaa

SEQ ID NO: 23357 - DNA, 25 bp, Artificial
  Probe
cttctttgtcctaataaccctctta

SEQ ID NO: 23358 - DNA, 25 bp, Artificial
  Probe
ctcctctttgtgttcctttcactaa

SEQ ID NO: 23359 - DNA, 25 bp, Artificial
  Probe
cctcctctttgtgttcctttcacta

SEQ ID NO: 23360 - DNA, 25 bp, Artificial
  Probe
ttctttgtcctaataaccctcttag

SEQ ID NO: 23361 - DNA, 25 bp, Artificial
  Probe
ccaccctcctacttctttgtcctaa

SEQ ID NO: 23362 - DNA, 25 bp, Artificial
  Probe
ccctgagtaaagttgagattcctgc

SEQ ID NO: 23363 - DNA, 25 bp, Artificial
  Probe
gagtgactcggctaatcattgtgac

SEQ ID NO: 23364 - DNA, 25 bp, Artificial
  Probe
cagagtgactcggctaatcattgtg

SEQ ID NO: 23365 - DNA, 25 bp, Artificial
  Probe
tttcagagtgactcggctaatcatt

SEQ ID NO: 23366 - DNA, 25 bp, Artificial
  Probe
agagtgactcggctaatcattgtga

SEQ ID NO: 23367 - DNA, 25 bp, Artificial
  Probe
tcagagtgactcggctaatcattgt

SEQ ID NO: 23368 - DNA, 25 bp, Artificial
  Probe
attcccctgagtaaagttgagattc

SEQ ID NO: 23369 - DNA, 25 bp, Artificial
  Probe
cattcccctgagtaaagttgagatt

SEQ ID NO: 23370 - DNA, 25 bp, Artificial
  Probe
cctgagtaaagttgagattcctgcg

SEQ ID NO: 23371 - DNA, 25 bp, Artificial
  Probe
ctttcagagtgactcggctaatcat

SEQ ID NO: 23372 - DNA, 25 bp, Artificial
  Probe
ttcccctgagtaaagttgagattcc

SEQ ID NO: 23373 - DNA, 25 bp, Artificial
  Probe
agtgactcggctaatcattgtgacc

SEQ ID NO: 23374 - DNA, 25 bp, Artificial
  Probe
ccattcccctgagtaaagttgagat

SEQ ID NO: 23375 - DNA, 25 bp, Artificial
  Probe
accaccctcctacttctttgtccta

SEQ ID NO: 23376 - DNA, 25 bp, Artificial
  Probe
cctctttgtgttcctttcactaaaa

SEQ ID NO: 23377 - DNA, 25 bp, Artificial
  Probe
cccctgagtaaagttgagattcctg

SEQ ID NO: 23378 - DNA, 25 bp, Artificial
  Probe
tcccctgagtaaagttgagattcct

SEQ ID NO: 23379 - DNA, 25 bp, Artificial
  Probe
atctccattcccctgagtaaagttg

SEQ ID NO: 23380 - DNA, 25 bp, Artificial
  Probe
catctccattcccctgagtaaagtt

SEQ ID NO: 23381 - DNA, 25 bp, Artificial
  Probe
tccattcccctgagtaaagttgaga

SEQ ID NO: 23382 - DNA, 25 bp, Artificial
  Probe
ctaaaagagacctttcagagtgact

SEQ ID NO: 23383 - DNA, 25 bp, Artificial
  Probe
actaaaagagacctttcagagtgac

SEQ ID NO: 23384 - DNA, 25 bp, Artificial
  Probe
tcctttcactaaaagagacctttca

SEQ ID NO: 23385 - DNA, 25 bp, Artificial
  Probe
tgttcctttcactaaaagagacctt

SEQ ID NO: 23386 - DNA, 25 bp, Artificial
  Probe
ctccattcccctgagtaaagttgag

SEQ ID NO: 23387 - DNA, 25 bp, Artificial
  Probe
ttcactaaaagagacctttcagagt

SEQ ID NO: 23388 - DNA, 25 bp, Artificial
  Probe
cctttcactaaaagagacctttcag

SEQ ID NO: 23389 - DNA, 25 bp, Artificial
  Probe
gtgttcctttcactaaaagagacct

SEQ ID NO: 23390 - DNA, 25 bp, Artificial
  Probe
caatacattgaagagagaatagccg

SEQ ID NO: 23391 - DNA, 25 bp, Artificial
  Probe
tgttggaggagaaattatcaggatg

SEQ ID NO: 23392 - DNA, 25 bp, Artificial
  Probe
acatagcctacaagtctttcatcta

SEQ ID NO: 23393 - DNA, 25 bp, Artificial
  Probe
tacatagcctacaagtctttcatct

SEQ ID NO: 23394 - DNA, 25 bp, Artificial
  Probe
gttggaggagaaattatcaggatgg

SEQ ID NO: 23395 - DNA, 25 bp, Artificial
  Probe
caattagaaatctgttggaggagaa

SEQ ID NO: 23396 - DNA, 25 bp, Artificial
  Probe
acaattagaaatctgttggaggaga

SEQ ID NO: 23397 - DNA, 25 bp, Artificial
  Probe
gtacatagcctacaagtctttcatc

SEQ ID NO: 23398 - DNA, 25 bp, Artificial
  Probe
catagcctacaagtctttcatctaa

SEQ ID NO: 23399 - DNA, 25 bp, Artificial
  Probe
ttaatttataccgcaatgccctctc

SEQ ID NO: 23400 - DNA, 25 bp, Artificial
  Probe
ctgttggaggagaaattatcaggat

SEQ ID NO: 23401 - DNA, 25 bp, Artificial
  Probe
atctgttggaggagaaattatcagg

SEQ ID NO: 23402 - DNA, 25 bp, Artificial
  Probe
ttcttgtaaaggagttgtgacattt

SEQ ID NO: 23403 - DNA, 25 bp, Artificial
  Probe
tttcttgtaaaggagttgtgacatt

SEQ ID NO: 23404 - DNA, 25 bp, Artificial
  Probe
gttaatttataccgcaatgccctct

SEQ ID NO: 23405 - DNA, 25 bp, Artificial
  Probe
aatacattgaagagagaatagccgg

SEQ ID NO: 23406 - DNA, 25 bp, Artificial
  Probe
atttcttgtaaaggagttgtgacat

SEQ ID NO: 23407 - DNA, 25 bp, Artificial
  Probe
tctgttggaggagaaattatcagga

SEQ ID NO: 23408 - DNA, 25 bp, Artificial
  Probe
tttgggttggttggttaatttatac

SEQ ID NO: 23409 - DNA, 25 bp, Artificial
  Probe
aaatctgttggaggagaaattatca

SEQ ID NO: 23410 - DNA, 25 bp, Artificial
  Probe
ttagaaatctgttggaggagaaatt

SEQ ID NO: 23411 - DNA, 25 bp, Artificial
  Probe
aattagaaatctgttggaggagaaa

SEQ ID NO: 23412 - DNA, 25 bp, Artificial
  Probe
attagaaatctgttggaggagaaat

SEQ ID NO: 23413 - DNA, 25 bp, Artificial
  Probe
aatctgttggaggagaaattatcag

SEQ ID NO: 23414 - DNA, 25 bp, Artificial
  Probe
agaaatctgttggaggagaaattat

SEQ ID NO: 23415 - DNA, 25 bp, Artificial
  Probe
atacattgaagagagaatagccggt

SEQ ID NO: 23416 - DNA, 25 bp, Artificial
  Probe
tacaattagaaatctgttggaggag

SEQ ID NO: 23417 - DNA, 25 bp, Artificial
  Probe
tatttcttgtaaaggagttgtgaca

SEQ ID NO: 23418 - DNA, 25 bp, Artificial
  Probe
atagcctacaagtctttcatctaaa

SEQ ID NO: 23419 - DNA, 25 bp, Artificial
  Probe
tacattgaagagagaatagccggtt

SEQ ID NO: 23420 - DNA, 25 bp, Artificial
  Probe
tggttggttaatttataccgcaatg

SEQ ID NO: 23421 - DNA, 25 bp, Artificial
  Probe
gttggttggttaatttataccgcaa

SEQ ID NO: 23422 - DNA, 25 bp, Artificial
  Probe
gaaatctgttggaggagaaattatc

SEQ ID NO: 23423 - DNA, 25 bp, Artificial
  Probe
taatttataccgcaatgccctctca

SEQ ID NO: 23424 - DNA, 25 bp, Artificial
  Probe
ttggttggttaatttataccgcaat

SEQ ID NO: 23425 - DNA, 25 bp, Artificial
  Probe
ttgggttggttggttaatttatacc

SEQ ID NO: 23426 - DNA, 25 bp, Artificial
  Probe
tgggttggttggttaatttataccg

SEQ ID NO: 23427 - DNA, 25 bp, Artificial
  Probe
tagaaatctgttggaggagaaatta

SEQ ID NO: 23428 - DNA, 25 bp, Artificial
  Probe
atacaattagaaatctgttggagga

SEQ ID NO: 23429 - DNA, 25 bp, Artificial
  Probe
gttggttaatttataccgcaatgcc

SEQ ID NO: 23430 - DNA, 25 bp, Artificial
  Probe
ggttggttaatttataccgcaatgc

SEQ ID NO: 23431 - DNA, 25 bp, Artificial
  Probe
ggttggttggttaatttataccgca

SEQ ID NO: 23432 - DNA, 25 bp, Artificial
  Probe
tcaatacattgaagagagaatagcc

SEQ ID NO: 23433 - DNA, 25 bp, Artificial
  Probe
aatacaattagaaatctgttggagg

SEQ ID NO: 23434 - DNA, 25 bp, Artificial
  Probe
ttggttaatttataccgcaatgccc

SEQ ID NO: 23435 - DNA, 25 bp, Artificial
  Probe
catcacctacaccattagaagactt

SEQ ID NO: 23436 - DNA, 25 bp, Artificial
  Probe
ccatcacctacaccattagaagact

SEQ ID NO: 23437 - DNA, 25 bp, Artificial
  Probe
accatcacctacaccattagaagac

SEQ ID NO: 23438 - DNA, 25 bp, Artificial
  Probe
caccatcacctacaccattagaaga

SEQ ID NO: 23439 - DNA, 25 bp, Artificial
  Probe
acaccatcacctacaccattagaag

SEQ ID NO: 23440 - DNA, 25 bp, Artificial
  Probe
cacaccatcacctacaccattagaa

SEQ ID NO: 23441 - DNA, 25 bp, Artificial
  Probe
tcacctacaccattagaagactttg

SEQ ID NO: 23442 - DNA, 25 bp, Artificial
  Probe
atcacctacaccattagaagacttt

SEQ ID NO: 23443 - DNA, 25 bp, Artificial
  Probe
tttgtgggttcagaagaataaagtt

SEQ ID NO: 23444 - DNA, 25 bp, Artificial
  Probe
ttgtgggttcagaagaataaagtta

SEQ ID NO: 23445 - DNA, 25 bp, Artificial
  Probe
tgtgggttcagaagaataaagttaa

SEQ ID NO: 23446 - DNA, 25 bp, Artificial
  Probe
ccacaccatcacctacaccattaga

SEQ ID NO: 23447 - DNA, 25 bp, Artificial
  Probe
cacctacaccattagaagactttgg

SEQ ID NO: 23448 - DNA, 25 bp, Artificial
  Probe
ctcaggagttatggcttctgattaa

SEQ ID NO: 23449 - DNA, 25 bp, Artificial
  Probe
tcaggagttatggcttctgattaac

SEQ ID NO: 23450 - DNA, 25 bp, Artificial
  Probe
agaatgaagtctctggagcaggatg

SEQ ID NO: 23451 - DNA, 25 bp, Artificial
  Probe
cttttagccttggtgttagcatttt

SEQ ID NO: 23452 - DNA, 25 bp, Artificial
  Probe
ttttagccttggtgttagcatttta

SEQ ID NO: 23453 - DNA, 25 bp, Artificial
  Probe
tttagccttggtgttagcattttaa

SEQ ID NO: 23454 - DNA, 25 bp, Artificial
  Probe
tcttttagccttggtgttagcattt

SEQ ID NO: 23455 - DNA, 25 bp, Artificial
  Probe
actctattttgtgggttcagaagaa

SEQ ID NO: 23456 - DNA, 25 bp, Artificial
  Probe
aagactctattttgtgggttcagaa

SEQ ID NO: 23457 - DNA, 25 bp, Artificial
  Probe
aaagactctattttgtgggttcaga

SEQ ID NO: 23458 - DNA, 25 bp, Artificial
  Probe
gactctattttgtgggttcagaaga

SEQ ID NO: 23459 - DNA, 25 bp, Artificial
  Probe
agactctattttgtgggttcagaag

SEQ ID NO: 23460 - DNA, 25 bp, Artificial
  Probe
ttttgtgggttcagaagaataaagt

SEQ ID NO: 23461 - DNA, 25 bp, Artificial
  Probe
acctacaccattagaagactttggc

SEQ ID NO: 23462 - DNA, 25 bp, Artificial
  Probe
ctctattttgtgggttcagaagaat

SEQ ID NO: 23463 - DNA, 25 bp, Artificial
  Probe
cctcaggagttatggcttctgatta

SEQ ID NO: 23464 - DNA, 25 bp, Artificial
  Probe
gtcttttagccttggtgttagcatt

SEQ ID NO: 23465 - DNA, 25 bp, Artificial
  Probe
aggagttatggcttctgattaactg

SEQ ID NO: 23466 - DNA, 25 bp, Artificial
  Probe
caggagttatggcttctgattaact

SEQ ID NO: 23467 - DNA, 25 bp, Artificial
  Probe
gaagacatgacgctatgcagtagtc

SEQ ID NO: 23468 - DNA, 25 bp, Artificial
  Probe
ctgaagacatgacgctatgcagtag

SEQ ID NO: 23469 - DNA, 25 bp, Artificial
  Probe
tgaagacatgacgctatgcagtagt

SEQ ID NO: 23470 - DNA, 25 bp, Artificial
  Probe
cgagactgtaactagtgatgtttgt

SEQ ID NO: 23471 - DNA, 25 bp, Artificial
  Probe
ttaaagagacccctcaggagttatg

SEQ ID NO: 23472 - DNA, 25 bp, Artificial
  Probe
attttgtgggttcagaagaataaag

SEQ ID NO: 23473 - DNA, 25 bp, Artificial
  Probe
gtgggttcagaagaataaagttaac

SEQ ID NO: 23474 - DNA, 25 bp, Artificial
  Probe
tctattttgtgggttcagaagaata

SEQ ID NO: 23475 - DNA, 25 bp, Artificial
  Probe
gagttatggcttctgattaactgcc

SEQ ID NO: 23476 - DNA, 25 bp, Artificial
  Probe
ggagttatggcttctgattaactgc

SEQ ID NO: 23477 - DNA, 25 bp, Artificial
  Probe
ttagccttggtgttagcattttaaa

SEQ ID NO: 23478 - DNA, 25 bp, Artificial
  Probe
agactgtaactagtgatgtttgtac

SEQ ID NO: 23479 - DNA, 25 bp, Artificial
  Probe
gcgagactgtaactagtgatgtttg

SEQ ID NO: 23480 - DNA, 25 bp, Artificial
  Probe
ttaacctgtctgtcaattcttcctc

SEQ ID NO: 23481 - DNA, 25 bp, Artificial
  Probe
taacctgtctgtcaattcttcctct

SEQ ID NO: 23482 - DNA, 25 bp, Artificial
  Probe
aacctgtctgtcaattcttcctctg

SEQ ID NO: 23483 - DNA, 25 bp, Artificial
  Probe
tttaacctgtctgtcaattcttcct

SEQ ID NO: 23484 - DNA, 25 bp, Artificial
  Probe
gtttaacctgtctgtcaattcttcc

SEQ ID NO: 23485 - DNA, 25 bp, Artificial
  Probe
tctgtttaacctgtctgtcaattct

SEQ ID NO: 23486 - DNA, 25 bp, Artificial
  Probe
gtctgtttaacctgtctgtcaattc

SEQ ID NO: 23487 - DNA, 25 bp, Artificial
  Probe
agtctgtttaacctgtctgtcaatt

SEQ ID NO: 23488 - DNA, 25 bp, Artificial
  Probe
tgtttaacctgtctgtcaattcttc

SEQ ID NO: 23489 - DNA, 25 bp, Artificial
  Probe
ctgtttaacctgtctgtcaattctt

SEQ ID NO: 23490 - DNA, 25 bp, Artificial
  Probe
gagtgtgtgagtgtgtgagagagat

SEQ ID NO: 23491 - DNA, 25 bp, Artificial
  Probe
ctaccacataaacgaatcagcactt

SEQ ID NO: 23492 - DNA, 25 bp, Artificial
  Probe
gagagagatggtcagtctgtttaac

SEQ ID NO: 23493 - DNA, 25 bp, Artificial
  Probe
acataaacgaatcagcacttgaatg

SEQ ID NO: 23494 - DNA, 25 bp, Artificial
  Probe
cacataaacgaatcagcacttgaat

SEQ ID NO: 23495 - DNA, 25 bp, Artificial
  Probe
tttgactgtttcttatcatccctcc

SEQ ID NO: 23496 - DNA, 25 bp, Artificial
  Probe
taccacataaacgaatcagcacttg

SEQ ID NO: 23497 - DNA, 25 bp, Artificial
  Probe
ctttgactgtttcttatcatccctc

SEQ ID NO: 23498 - DNA, 25 bp, Artificial
  Probe
agtgtgtgagtgtgtgagagagatg

SEQ ID NO: 23499 - DNA, 25 bp, Artificial
  Probe
cataaacgaatcagcacttgaatgg

SEQ ID NO: 23500 - DNA, 25 bp, Artificial
  Probe
tgagagagatggtcagtctgtttaa

SEQ ID NO: 23501 - DNA, 25 bp, Artificial
  Probe
gtgagagagatggtcagtctgttta

SEQ ID NO: 23502 - DNA, 25 bp, Artificial
  Probe
cagtctgtttaacctgtctgtcaat

SEQ ID NO: 23503 - DNA, 25 bp, Artificial
  Probe
ctgtctgtcaattcttcctctggac

SEQ ID NO: 23504 - DNA, 25 bp, Artificial
  Probe
ataaacgaatcagcacttgaatggg

SEQ ID NO: 23505 - DNA, 25 bp, Artificial
  Probe
ccacataaacgaatcagcacttgaa

SEQ ID NO: 23506 - DNA, 25 bp, Artificial
  Probe
tcagtctgtttaacctgtctgtcaa

SEQ ID NO: 23507 - DNA, 25 bp, Artificial
  Probe
cctaccacataaacgaatcagcact

SEQ ID NO: 23508 - DNA, 25 bp, Artificial
  Probe
acctgtctgtcaattcttcctctgg

SEQ ID NO: 23509 - DNA, 25 bp, Artificial
  Probe
gtgtgagagagatggtcagtctgtt

SEQ ID NO: 23510 - DNA, 25 bp, Artificial
  Probe
gtgagtgtgtgagtgtgtgagagag

SEQ ID NO: 23511 - DNA, 25 bp, Artificial
  Probe
acctaccacataaacgaatcagcac

SEQ ID NO: 23512 - DNA, 25 bp, Artificial
  Probe
gagagatggtcagtctgtttaacct

SEQ ID NO: 23513 - DNA, 25 bp, Artificial
  Probe
agagagatggtcagtctgtttaacc

SEQ ID NO: 23514 - DNA, 25 bp, Artificial
  Probe
gtcagtctgtttaacctgtctgtca

SEQ ID NO: 23515 - DNA, 25 bp, Artificial
  Probe
agagatggtcagtctgtttaacctg

SEQ ID NO: 23516 - DNA, 25 bp, Artificial
  Probe
gagtgtgtgagagagatggtcagtc

SEQ ID NO: 23517 - DNA, 25 bp, Artificial
  Probe
tgagtgtgtgagtgtgtgagagaga

SEQ ID NO: 23518 - DNA, 25 bp, Artificial
  Probe
accacataaacgaatcagcacttga

SEQ ID NO: 23519 - DNA, 25 bp, Artificial
  Probe
gatggtcagtctgtttaacctgtct

SEQ ID NO: 23520 - DNA, 25 bp, Artificial
  Probe
agatggtcagtctgtttaacctgtc

SEQ ID NO: 23521 - DNA, 25 bp, Artificial
  Probe
gagatggtcagtctgtttaacctgt

SEQ ID NO: 23522 - DNA, 25 bp, Artificial
  Probe
tctgtcaattcttcctctggacctg

SEQ ID NO: 23523 - DNA, 25 bp, Artificial
  Probe
gtctgtcaattcttcctctggacct

SEQ ID NO: 23524 - DNA, 25 bp, Artificial
  Probe
cctgtctgtcaattcttcctctgga

SEQ ID NO: 23525 - DNA, 25 bp, Artificial
  Probe
acacttgacactcttaacactactc

SEQ ID NO: 23526 - DNA, 25 bp, Artificial
  Probe
aacacttgacactcttaacactact

SEQ ID NO: 23527 - DNA, 25 bp, Artificial
  Probe
ccttaacacttgacactcttaacac

SEQ ID NO: 23528 - DNA, 25 bp, Artificial
  Probe
cacttgacactcttaacactactca

SEQ ID NO: 23529 - DNA, 25 bp, Artificial
  Probe
acttgacactcttaacactactcat

SEQ ID NO: 23530 - DNA, 25 bp, Artificial
  Probe
taacacttgacactcttaacactac

SEQ ID NO: 23531 - DNA, 25 bp, Artificial
  Probe
cttaacacttgacactcttaacact

SEQ ID NO: 23532 - DNA, 25 bp, Artificial
  Probe
ttgacactcttaacactactcatgg

SEQ ID NO: 23533 - DNA, 25 bp, Artificial
  Probe
cttgacactcttaacactactcatg

SEQ ID NO: 23534 - DNA, 25 bp, Artificial
  Probe
ttaacacttgacactcttaacacta

SEQ ID NO: 23535 - DNA, 25 bp, Artificial
  Probe
cccttaacacttgacactcttaaca

SEQ ID NO: 23536 - DNA, 25 bp, Artificial
  Probe
gcccttaacacttgacactcttaac

SEQ ID NO: 23537 - DNA, 25 bp, Artificial
  Probe
aattaaaggatgtggatcaactccc

SEQ ID NO: 23538 - DNA, 25 bp, Artificial
  Probe
aaattaaaggatgtggatcaactcc

SEQ ID NO: 23539 - DNA, 25 bp, Artificial
  Probe
tgacactcttaacactactcatggg

SEQ ID NO: 23540 - DNA, 25 bp, Artificial
  Probe
attaaaggatgtggatcaactccca

SEQ ID NO: 23541 - DNA, 25 bp, Artificial
  Probe
caaagagcacaagattgtctgtctg

SEQ ID NO: 23542 - DNA, 25 bp, Artificial
  Probe
taaaggatgtggatcaactcccaaa

SEQ ID NO: 23543 - DNA, 25 bp, Artificial
  Probe
ttaaaggatgtggatcaactcccaa

SEQ ID NO: 23544 - DNA, 25 bp, Artificial
  Probe
tgatgcaatatatcctttctgagat

SEQ ID NO: 23545 - DNA, 25 bp, Artificial
  Probe
atgatgcaatatatcctttctgaga

SEQ ID NO: 23546 - DNA, 25 bp, Artificial
  Probe
gatccctgatgtctgtcaccataga

SEQ ID NO: 23547 - DNA, 25 bp, Artificial
  Probe
agatccctgatgtctgtcaccatag

SEQ ID NO: 23548 - DNA, 25 bp, Artificial
  Probe
ccaaagagcacaagattgtctgtct

SEQ ID NO: 23549 - DNA, 25 bp, Artificial
  Probe
aatgatgcaatatatcctttctgag

SEQ ID NO: 23550 - DNA, 25 bp, Artificial
  Probe
aaaattaaaggatgtggatcaactc

SEQ ID NO: 23551 - DNA, 25 bp, Artificial
  Probe
aacccaaagagcacaagattgtctg

SEQ ID NO: 23552 - DNA, 25 bp, Artificial
  Probe
caacccaaagagcacaagattgtct

SEQ ID NO: 23553 - DNA, 25 bp, Artificial
  Probe
aaatgatgcaatatatcctttctga

SEQ ID NO: 23554 - DNA, 25 bp, Artificial
  Probe
cacaagattgtctgtctgctcgttt

SEQ ID NO: 23555 - DNA, 25 bp, Artificial
  Probe
gacactcttaacactactcatgggg

SEQ ID NO: 23556 - DNA, 25 bp, Artificial
  Probe
ggcccttaacacttgacactcttaa

SEQ ID NO: 23557 - DNA, 25 bp, Artificial
  Probe
aaaatgaaaagggttgggctgtttt

SEQ ID NO: 23558 - DNA, 25 bp, Artificial
  Probe
cccaaagagcacaagattgtctgtc

SEQ ID NO: 23559 - DNA, 25 bp, Artificial
  Probe
cagatggacagacagatccctgatg

SEQ ID NO: 23560 - DNA, 25 bp, Artificial
  Probe
aaatgaaaagggttgggctgttttg

SEQ ID NO: 23561 - DNA, 25 bp, Artificial
  Probe
aaaggatgtggatcaactcccaaaa

SEQ ID NO: 23562 - DNA, 25 bp, Artificial
  Probe
tggcccttaacacttgacactctta

SEQ ID NO: 23563 - DNA, 25 bp, Artificial
  Probe
gatgcaatatatcctttctgagata

SEQ ID NO: 23564 - DNA, 25 bp, Artificial
  Probe
acccaaagagcacaagattgtctgt

SEQ ID NO: 23565 - DNA, 25 bp, Artificial
  Probe
acaagattgtctgtctgctcgtttt

SEQ ID NO: 23566 - DNA, 25 bp, Artificial
  Probe
aaagagcacaagattgtctgtctgc

SEQ ID NO: 23567 - DNA, 25 bp, Artificial
  Probe
tcctttctgagatatttacagtatt

SEQ ID NO: 23568 - DNA, 25 bp, Artificial
  Probe
agatggacagacagatccctgatgt

SEQ ID NO: 23569 - DNA, 25 bp, Artificial
  Probe
acagatggacagacagatccctgat

SEQ ID NO: 23570 - DNA, 25 bp, Artificial
  Probe
cactagataacactgaacacttaga

SEQ ID NO: 23571 - DNA, 25 bp, Artificial
  Probe
aatacttactgaccagtgtgttact

SEQ ID NO: 23572 - DNA, 25 bp, Artificial
  Probe
tcactagataacactgaacacttag

SEQ ID NO: 23573 - DNA, 25 bp, Artificial
  Probe
gtgttactgcaacttgaatcattct

SEQ ID NO: 23574 - DNA, 25 bp, Artificial
  Probe
tgtgttactgcaacttgaatcattc

SEQ ID NO: 23575 - DNA, 25 bp, Artificial
  Probe
agagaagtatacagtacaccgaatg

SEQ ID NO: 23576 - DNA, 25 bp, Artificial
  Probe
cagagaagtatacagtacaccgaat

SEQ ID NO: 23577 - DNA, 25 bp, Artificial
  Probe
gtgtgttactgcaacttgaatcatt

SEQ ID NO: 23578 - DNA, 25 bp, Artificial
  Probe
tgttactgcaacttgaatcattctt

SEQ ID NO: 23579 - DNA, 25 bp, Artificial
  Probe
actagataacactgaacacttagaa

SEQ ID NO: 23580 - DNA, 25 bp, Artificial
  Probe
taatacttactgaccagtgtgttac

SEQ ID NO: 23581 - DNA, 25 bp, Artificial
  Probe
tgagtatataatttgccaacacagc

SEQ ID NO: 23582 - DNA, 25 bp, Artificial
  Probe
ttgtgtgtagaatttattgccaacg

SEQ ID NO: 23583 - DNA, 25 bp, Artificial
  Probe
ccagagaagtatacagtacaccgaa

SEQ ID NO: 23584 - DNA, 25 bp, Artificial
  Probe
atggttcagtctgtctttgagtaaa

SEQ ID NO: 23585 - DNA, 25 bp, Artificial
  Probe
tacagtacaccgaatgtattgcttc

SEQ ID NO: 23586 - DNA, 25 bp, Artificial
  Probe
agtgtgttactgcaacttgaatcat

SEQ ID NO: 23587 - DNA, 25 bp, Artificial
  Probe
gatggttcagtctgtctttgagtaa

SEQ ID NO: 23588 - DNA, 25 bp, Artificial
  Probe
gttgttgggtataaacttatcctgt

SEQ ID NO: 23589 - DNA, 25 bp, Artificial
  Probe
tgttgttgggtataaacttatcctg

SEQ ID NO: 23590 - DNA, 25 bp, Artificial
  Probe
actgttgttgggtataaacttatcc

SEQ ID NO: 23591 - DNA, 25 bp, Artificial
  Probe
cctgagtatataatttgccaacaca

SEQ ID NO: 23592 - DNA, 25 bp, Artificial
  Probe
acctgagtatataatttgccaacac

SEQ ID NO: 23593 - DNA, 25 bp, Artificial
  Probe
gagaagtatacagtacaccgaatgt

SEQ ID NO: 23594 - DNA, 25 bp, Artificial
  Probe
tttgtgtgtagaatttattgccaac

SEQ ID NO: 23595 - DNA, 25 bp, Artificial
  Probe
ctgttgttgggtataaacttatcct

SEQ ID NO: 23596 - DNA, 25 bp, Artificial
  Probe
tgatggttcagtctgtctttgagta

SEQ ID NO: 23597 - DNA, 25 bp, Artificial
  Probe
aacctgagtatataatttgccaaca

SEQ ID NO: 23598 - DNA, 25 bp, Artificial
  Probe
ccttcactagataacactgaacact

SEQ ID NO: 23599 - DNA, 25 bp, Artificial
  Probe
ataatacttactgaccagtgtgtta

SEQ ID NO: 23600 - DNA, 25 bp, Artificial
  Probe
tataatacttactgaccagtgtgtt

SEQ ID NO: 23601 - DNA, 25 bp, Artificial
  Probe
ttataatacttactgaccagtgtgt

SEQ ID NO: 23602 - DNA, 25 bp, Artificial
  Probe
tgttataatacttactgaccagtgt

SEQ ID NO: 23603 - DNA, 25 bp, Artificial
  Probe
gccttcactagataacactgaacac

SEQ ID NO: 23604 - DNA, 25 bp, Artificial
  Probe
cttcactagataacactgaacactt

SEQ ID NO: 23605 - DNA, 25 bp, Artificial
  Probe
gttataatacttactgaccagtgtg

SEQ ID NO: 23606 - DNA, 25 bp, Artificial
  Probe
tgttgggtataaacttatcctgtac

SEQ ID NO: 23607 - DNA, 25 bp, Artificial
  Probe
agaatttattgccaacgtgatgatt

SEQ ID NO: 23608 - DNA, 25 bp, Artificial
  Probe
gtagaatttattgccaacgtgatga

SEQ ID NO: 23609 - DNA, 25 bp, Artificial
  Probe
tgtagaatttattgccaacgtgatg

SEQ ID NO: 23610 - DNA, 25 bp, Artificial
  Probe
gtgtagaatttattgccaacgtgat

SEQ ID NO: 23611 - DNA, 25 bp, Artificial
  Probe
atcaatttgcaccattcatctacag

SEQ ID NO: 23612 - DNA, 25 bp, Artificial
  Probe
catcaatttgcaccattcatctaca

SEQ ID NO: 23613 - DNA, 25 bp, Artificial
  Probe
ttgttgggtataaacttatcctgta

SEQ ID NO: 23614 - DNA, 25 bp, Artificial
  Probe
accattcatctacagtggatgtctt

SEQ ID NO: 23615 - DNA, 25 bp, Artificial
  Probe
attccaataacaacaacagcaatcc

SEQ ID NO: 23616 - DNA, 25 bp, Artificial
  Probe
aattccaataacaacaacagcaatc

SEQ ID NO: 23617 - DNA, 25 bp, Artificial
  Probe
taggaatgaattgtctgtgagatgt

SEQ ID NO: 23618 - DNA, 25 bp, Artificial
  Probe
aggaatgaattgtctgtgagatgtt

SEQ ID NO: 23619 - DNA, 25 bp, Artificial
  Probe
tccaataacaacaacagcaatccat

SEQ ID NO: 23620 - DNA, 25 bp, Artificial
  Probe
ttccaataacaacaacagcaatcca

SEQ ID NO: 23621 - DNA, 25 bp, Artificial
  Probe
ataggaatgaattgtctgtgagatg

SEQ ID NO: 23622 - DNA, 25 bp, Artificial
  Probe
taattccaataacaacaacagcaat

SEQ ID NO: 23623 - DNA, 25 bp, Artificial
  Probe
ccaataacaacaacagcaatccatg

SEQ ID NO: 23624 - DNA, 25 bp, Artificial
  Probe
caataacaacaacagcaatccatgt

SEQ ID NO: 23625 - DNA, 25 bp, Artificial
  Probe
tataggaatgaattgtctgtgagat

SEQ ID NO: 23626 - DNA, 25 bp, Artificial
  Probe
atataggaatgaattgtctgtgaga

SEQ ID NO: 23627 - DNA, 25 bp, Artificial
  Probe
agatataggaatgaattgtctgtga

SEQ ID NO: 23628 - DNA, 25 bp, Artificial
  Probe
gatataggaatgaattgtctgtgag

SEQ ID NO: 23629 - DNA, 25 bp, Artificial
  Probe
ggaatgaattgtctgtgagatgttt

SEQ ID NO: 23630 - DNA, 25 bp, Artificial
  Probe
aagatataggaatgaattgtctgtg

SEQ ID NO: 23631 - DNA, 25 bp, Artificial
  Probe
acagggcagtccattctaaatctag

SEQ ID NO: 23632 - DNA, 25 bp, Artificial
  Probe
ttcagaacaagatgtccctacacaa

SEQ ID NO: 23633 - DNA, 25 bp, Artificial
  Probe
gacagggcagtccattctaaatcta

SEQ ID NO: 23634 - DNA, 25 bp, Artificial
  Probe
aataacaacaacagcaatccatgtt

SEQ ID NO: 23635 - DNA, 25 bp, Artificial
  Probe
ataacaacaacagcaatccatgttc

SEQ ID NO: 23636 - DNA, 25 bp, Artificial
  Probe
tcagaacaagatgtccctacacaag

SEQ ID NO: 23637 - DNA, 25 bp, Artificial
  Probe
tctggatctttcagccacaaatatc

SEQ ID NO: 23638 - DNA, 25 bp, Artificial
  Probe
ctctggatctttcagccacaaatat

SEQ ID NO: 23639 - DNA, 25 bp, Artificial
  Probe
ggcagtccattctaaatctagcact

SEQ ID NO: 23640 - DNA, 25 bp, Artificial
  Probe
tggtgtctaaagatataggaatgaa

SEQ ID NO: 23641 - DNA, 25 bp, Artificial
  Probe
cagggcagtccattctaaatctagc

SEQ ID NO: 23642 - DNA, 25 bp, Artificial
  Probe
taacaacaacagcaatccatgttca

SEQ ID NO: 23643 - DNA, 25 bp, Artificial
  Probe
catcatttaaacatgcagaagacat

SEQ ID NO: 23644 - DNA, 25 bp, Artificial
  Probe
tctctggatctttcagccacaaata

SEQ ID NO: 23645 - DNA, 25 bp, Artificial
  Probe
cgtgtgaaaactccatactctctta

SEQ ID NO: 23646 - DNA, 25 bp, Artificial
  Probe
atggtgtctaaagatataggaatga

SEQ ID NO: 23647 - DNA, 25 bp, Artificial
  Probe
ctggactgtgaggtcaacaacaatg

SEQ ID NO: 23648 - DNA, 25 bp, Artificial
  Probe
gggcagtccattctaaatctagcac

SEQ ID NO: 23649 - DNA, 25 bp, Artificial
  Probe
agggcagtccattctaaatctagca

SEQ ID NO: 23650 - DNA, 25 bp, Artificial
  Probe
gttcagaacaagatgtccctacaca

SEQ ID NO: 23651 - DNA, 25 bp, Artificial
  Probe
tcatttaaacatgcagaagacattt

SEQ ID NO: 23652 - DNA, 25 bp, Artificial
  Probe
atcatttaaacatgcagaagacatt

SEQ ID NO: 23653 - DNA, 25 bp, Artificial
  Probe
gtgtgaaaactccatactctcttaa

SEQ ID NO: 23654 - DNA, 25 bp, Artificial
  Probe
caatccatgttcagaacaagatgtc

SEQ ID NO: 23655 - DNA, 25 bp, Artificial
  Probe
aacaacagcaatccatgttcagaac

SEQ ID NO: 23656 - DNA, 25 bp, Artificial
  Probe
caacaacagcaatccatgttcagaa

SEQ ID NO: 23657 - DNA, 25 bp, Artificial
  Probe
aattgtctgtgagatgttttcaagc

SEQ ID NO: 23658 - DNA, 25 bp, Artificial
  Probe
ttctctggatctttcagccacaaat

SEQ ID NO: 23659 - DNA, 25 bp, Artificial
  Probe
attctctggatctttcagccacaaa

SEQ ID NO: 23660 - DNA, 25 bp, Artificial
  Probe
ttcataagcatcttcctgtaatcta

SEQ ID NO: 23661 - DNA, 25 bp, Artificial
  Probe
atttaaggacaggcaatagtctctt

SEQ ID NO: 23662 - DNA, 25 bp, Artificial
  Probe
aatttaaggacaggcaatagtctct

SEQ ID NO: 23663 - DNA, 25 bp, Artificial
  Probe
gaatttaaggacaggcaatagtctc

SEQ ID NO: 23664 - DNA, 25 bp, Artificial
  Probe
taaggacaggcaatagtctcttaaa

SEQ ID NO: 23665 - DNA, 25 bp, Artificial
  Probe
tttaaggacaggcaatagtctctta

SEQ ID NO: 23666 - DNA, 25 bp, Artificial
  Probe
ttaaggacaggcaatagtctcttaa

SEQ ID NO: 23667 - DNA, 25 bp, Artificial
  Probe
aaggacaggcaatagtctcttaaaa

SEQ ID NO: 23668 - DNA, 25 bp, Artificial
  Probe
aggacaggcaatagtctcttaaaat

SEQ ID NO: 23669 - DNA, 25 bp, Artificial
  Probe
ggacaggcaatagtctcttaaaatt

SEQ ID NO: 23670 - DNA, 25 bp, Artificial
  Probe
cgtgtactgaaacaaatgttgtatt

SEQ ID NO: 23671 - DNA, 25 bp, Artificial
  Probe
acgtgtactgaaacaaatgttgtat

SEQ ID NO: 23672 - DNA, 25 bp, Artificial
  Probe
attttcccatttgtcaaatcatgca

SEQ ID NO: 23673 - DNA, 25 bp, Artificial
  Probe
tccagagaacaaggcgatagcaaag

SEQ ID NO: 23674 - DNA, 25 bp, Artificial
  Probe
gtccagagaacaaggcgatagcaaa

SEQ ID NO: 23675 - DNA, 25 bp, Artificial
  Probe
gtgtactgaaacaaatgttgtattt

SEQ ID NO: 23676 - DNA, 25 bp, Artificial
  Probe
actgactgtccagttccatcaatca

SEQ ID NO: 23677 - DNA, 25 bp, Artificial
  Probe
gacaggcaatagtctcttaaaattt

SEQ ID NO: 23678 - DNA, 25 bp, Artificial
  Probe
gttaggatggattttcccatttgtc

SEQ ID NO: 23679 - DNA, 25 bp, Artificial
  Probe
acaggcaatagtctcttaaaattta

SEQ ID NO: 23680 - DNA, 25 bp, Artificial
  Probe
taggatggattttcccatttgtcaa

SEQ ID NO: 23681 - DNA, 25 bp, Artificial
  Probe
ttaggatggattttcccatttgtca

SEQ ID NO: 23682 - DNA, 25 bp, Artificial
  Probe
ggatggattttcccatttgtcaaat

SEQ ID NO: 23683 - DNA, 25 bp, Artificial
  Probe
aggatggattttcccatttgtcaaa

SEQ ID NO: 23684 - DNA, 25 bp, Artificial
  Probe
cgttaggatggattttcccatttgt

SEQ ID NO: 23685 - DNA, 25 bp, Artificial
  Probe
gattttcccatttgtcaaatcatgc

SEQ ID NO: 23686 - DNA, 25 bp, Artificial
  Probe
tggattttcccatttgtcaaatcat

SEQ ID NO: 23687 - DNA, 25 bp, Artificial
  Probe
atggattttcccatttgtcaaatca

SEQ ID NO: 23688 - DNA, 25 bp, Artificial
  Probe
ggattttcccatttgtcaaatcatg

SEQ ID NO: 23689 - DNA, 25 bp, Artificial
  Probe
gatggattttcccatttgtcaaatc

SEQ ID NO: 23690 - DNA, 25 bp, Artificial
  Probe
tgtactgaaacaaatgttgtatttg

SEQ ID NO: 23691 - DNA, 25 bp, Artificial
  Probe
cgatagcaaagctccactgttaacg

SEQ ID NO: 23692 - DNA, 25 bp, Artificial
  Probe
gcgttaggatggattttcccatttg

SEQ ID NO: 23693 - DNA, 25 bp, Artificial
  Probe
gatagcaaagctccactgttaacgc

SEQ ID NO: 23694 - DNA, 25 bp, Artificial
  Probe
gcgatagcaaagctccactgttaac

SEQ ID NO: 23695 - DNA, 25 bp, Artificial
  Probe
caggcaatagtctcttaaaatttat

SEQ ID NO: 23696 - DNA, 25 bp, Artificial
  Probe
atagcaaagctccactgttaacgct

SEQ ID NO: 23697 - DNA, 25 bp, Artificial
  Probe
taagtttgaagcttgttttgcccct

SEQ ID NO: 23698 - DNA, 25 bp, Artificial
  Probe
ggcgttaggatggattttcccattt

SEQ ID NO: 23699 - DNA, 25 bp, Artificial
  Probe
cttgttttgcccctcaacagttgtt

SEQ ID NO: 23700 - DNA, 25 bp, Artificial
  Probe
aggcgttaggatggattttcccatt

SEQ ID NO: 23701 - DNA, 25 bp, Artificial
  Probe
aagtttgaagcttgttttgcccctc

SEQ ID NO: 23702 - DNA, 25 bp, Artificial
  Probe
caggcgttaggatggattttcccat

SEQ ID NO: 23703 - DNA, 25 bp, Artificial
  Probe
ttgttttgcccctcaacagttgttg

SEQ ID NO: 23704 - DNA, 25 bp, Artificial
  Probe
tttgaagcttgttttgcccctcaac

SEQ ID NO: 23705 - DNA, 25 bp, Artificial
  Probe
gtttgaagcttgttttgcccctcaa

SEQ ID NO: 23706 - DNA, 25 bp, Artificial
  Probe
gatatgctgtacttggctcctttaa

SEQ ID NO: 23707 - DNA, 25 bp, Artificial
  Probe
ctacagcagctctgatgaataactg

SEQ ID NO: 23708 - DNA, 25 bp, Artificial
  Probe
atatgctgtacttggctcctttaac

SEQ ID NO: 23709 - DNA, 25 bp, Artificial
  Probe
agatatgctgtacttggctccttta

SEQ ID NO: 23710 - DNA, 25 bp, Artificial
  Probe
tctccattaagaaagttctcagctt

SEQ ID NO: 23711 - DNA, 25 bp, Artificial
  Probe
gttgatagctctaaaggcagatatg

SEQ ID NO: 23712 - DNA, 25 bp, Artificial
  Probe
agttgatagctctaaaggcagatat

SEQ ID NO: 23713 - DNA, 25 bp, Artificial
  Probe
gagttgatagctctaaaggcagata

SEQ ID NO: 23714 - DNA, 25 bp, Artificial
  Probe
aatccctgagttgatagctctaaag

SEQ ID NO: 23715 - DNA, 25 bp, Artificial
  Probe
aaatccctgagttgatagctctaaa

SEQ ID NO: 23716 - DNA, 25 bp, Artificial
  Probe
tatgctgtacttggctcctttaacc

SEQ ID NO: 23717 - DNA, 25 bp, Artificial
  Probe
tgagttgatagctctaaaggcagat

SEQ ID NO: 23718 - DNA, 25 bp, Artificial
  Probe
cttctccattaagaaagttctcagc

SEQ ID NO: 23719 - DNA, 25 bp, Artificial
  Probe
atccctgagttgatagctctaaagg

SEQ ID NO: 23720 - DNA, 25 bp, Artificial
  Probe
gctctgatgaataactgcatctcat

SEQ ID NO: 23721 - DNA, 25 bp, Artificial
  Probe
ttgagaaaatccctgagttgatagc

SEQ ID NO: 23722 - DNA, 25 bp, Artificial
  Probe
ctgagttgatagctctaaaggcaga

SEQ ID NO: 23723 - DNA, 25 bp, Artificial
  Probe
cagatatgctgtacttggctccttt

SEQ ID NO: 23724 - DNA, 25 bp, Artificial
  Probe
ctctaaaggcagatatgctgtactt

SEQ ID NO: 23725 - DNA, 25 bp, Artificial
  Probe
tctaaaggcagatatgctgtacttg

SEQ ID NO: 23726 - DNA, 25 bp, Artificial
  Probe
tgtacttggctcctttaacccattt

SEQ ID NO: 23727 - DNA, 25 bp, Artificial
  Probe
attgagaaaatccctgagttgatag

SEQ ID NO: 23728 - DNA, 25 bp, Artificial
  Probe
gctacagcagctctgatgaataact

SEQ ID NO: 23729 - DNA, 25 bp, Artificial
  Probe
cagctctgatgaataactgcatctc

SEQ ID NO: 23730 - DNA, 25 bp, Artificial
  Probe
ttctccattaagaaagttctcagct

SEQ ID NO: 23731 - DNA, 25 bp, Artificial
  Probe
ctaaaggcagatatgctgtacttgg

SEQ ID NO: 23732 - DNA, 25 bp, Artificial
  Probe
agctctgatgaataactgcatctca

SEQ ID NO: 23733 - DNA, 25 bp, Artificial
  Probe
acttctccattaagaaagttctcag

SEQ ID NO: 23734 - DNA, 25 bp, Artificial
  Probe
cataattgagaaaatccctgagttg

SEQ ID NO: 23735 - DNA, 25 bp, Artificial
  Probe
ctgtacttggctcctttaacccatt

SEQ ID NO: 23736 - DNA, 25 bp, Artificial
  Probe
ataattgagaaaatccctgagttga

SEQ ID NO: 23737 - DNA, 25 bp, Artificial
  Probe
aattgagaaaatccctgagttgata

SEQ ID NO: 23738 - DNA, 25 bp, Artificial
  Probe
taattgagaaaatccctgagttgat

SEQ ID NO: 23739 - DNA, 25 bp, Artificial
  Probe
ttgatagctctaaaggcagatatgc

SEQ ID NO: 23740 - DNA, 25 bp, Artificial
  Probe
tagctctaaaggcagatatgctgta

SEQ ID NO: 23741 - DNA, 25 bp, Artificial
  Probe
gatagctctaaaggcagatatgctg

SEQ ID NO: 23742 - DNA, 25 bp, Artificial
  Probe
tcataattgagaaaatccctgagtt

SEQ ID NO: 23743 - DNA, 25 bp, Artificial
  Probe
ttcataattgagaaaatccctgagt

SEQ ID NO: 23744 - DNA, 25 bp, Artificial
  Probe
cctgagttgatagctctaaaggcag

SEQ ID NO: 23745 - DNA, 25 bp, Artificial
  Probe
tgctacagcagctctgatgaataac

SEQ ID NO: 23746 - DNA, 25 bp, Artificial
  Probe
gctctaaaggcagatatgctgtact

SEQ ID NO: 23747 - DNA, 25 bp, Artificial
  Probe
tgatagctctaaaggcagatatgct

SEQ ID NO: 23748 - DNA, 25 bp, Artificial
  Probe
atagctctaaaggcagatatgctgt

SEQ ID NO: 23749 - DNA, 25 bp, Artificial
  Probe
tgagaaaatccctgagttgatagct

SEQ ID NO: 23750 - DNA, 25 bp, Artificial
  Probe
gaaaatccctgagttgatagctcta

SEQ ID NO: 23751 - DNA, 25 bp, Artificial
  Probe
cttggtgttcaacagagtctaggat

SEQ ID NO: 23752 - DNA, 25 bp, Artificial
  Probe
ttggtgttcaacagagtctaggatg

SEQ ID NO: 23753 - DNA, 25 bp, Artificial
  Probe
catgtcatgttacccagagaacttt

SEQ ID NO: 23754 - DNA, 25 bp, Artificial
  Probe
caagcagatctactactcagacaag

SEQ ID NO: 23755 - DNA, 25 bp, Artificial
  Probe
tacctgtgcatgagctgtattcttc

SEQ ID NO: 23756 - DNA, 25 bp, Artificial
  Probe
caacagagtctaggatgggttcatt

SEQ ID NO: 23757 - DNA, 25 bp, Artificial
  Probe
acaagcagatctactactcagacaa

SEQ ID NO: 23758 - DNA, 25 bp, Artificial
  Probe
acttggtgttcaacagagtctagga

SEQ ID NO: 23759 - DNA, 25 bp, Artificial
  Probe
aagcagatctactactcagacaagt

SEQ ID NO: 23760 - DNA, 25 bp, Artificial
  Probe
atacctgtgcatgagctgtattctt

SEQ ID NO: 23761 - DNA, 25 bp, Artificial
  Probe
cacaagcagatctactactcagaca

SEQ ID NO: 23762 - DNA, 25 bp, Artificial
  Probe
gttcaacagagtctaggatgggttc

SEQ ID NO: 23763 - DNA, 25 bp, Artificial
  Probe
tcaacagagtctaggatgggttcat

SEQ ID NO: 23764 - DNA, 25 bp, Artificial
  Probe
ttcaacagagtctaggatgggttca

SEQ ID NO: 23765 - DNA, 25 bp, Artificial
  Probe
gcagatctactactcagacaagtac

SEQ ID NO: 23766 - DNA, 25 bp, Artificial
  Probe
agcagatctactactcagacaagta

SEQ ID NO: 23767 - DNA, 25 bp, Artificial
  Probe
ccacaagcagatctactactcagac

SEQ ID NO: 23768 - DNA, 25 bp, Artificial
  Probe
gcctgttttactttacctgttttgt

SEQ ID NO: 23769 - DNA, 25 bp, Artificial
  Probe
tgcctgttttactttacctgttttg

SEQ ID NO: 23770 - DNA, 25 bp, Artificial
  Probe
catacctgtgcatgagctgtattct

SEQ ID NO: 23771 - DNA, 25 bp, Artificial
  Probe
atgcctgttttactttacctgtttt

SEQ ID NO: 23772 - DNA, 25 bp, Artificial
  Probe
aatgcctgttttactttacctgttt

SEQ ID NO: 23773 - DNA, 25 bp, Artificial
  Probe
aaatgcctgttttactttacctgtt

SEQ ID NO: 23774 - DNA, 25 bp, Artificial
  Probe
tggtgttcaacagagtctaggatgg

SEQ ID NO: 23775 - DNA, 25 bp, Artificial
  Probe
cagatctactactcagacaagtact

SEQ ID NO: 23776 - DNA, 25 bp, Artificial
  Probe
gcatgtcatgttacccagagaactt

SEQ ID NO: 23777 - DNA, 25 bp, Artificial
  Probe
cctgttttactttacctgttttgtt

SEQ ID NO: 23778 - DNA, 25 bp, Artificial
  Probe
taaatgcctgttttactttacctgt

SEQ ID NO: 23779 - DNA, 25 bp, Artificial
  Probe
tgtgtatataaggtagtattcagtg

SEQ ID NO: 23780 - DNA, 25 bp, Artificial
  Probe
tgttcaacagagtctaggatgggtt

SEQ ID NO: 23781 - DNA, 25 bp, Artificial
  Probe
ccatacctgtgcatgagctgtattc

SEQ ID NO: 23782 - DNA, 25 bp, Artificial
  Probe
gcaagtagggttattttaagttgtt

SEQ ID NO: 23783 - DNA, 25 bp, Artificial
  Probe
ataaatgcctgttttactttacctg

SEQ ID NO: 23784 - DNA, 25 bp, Artificial
  Probe
gtgtatataaggtagtattcagtga

SEQ ID NO: 23785 - DNA, 25 bp, Artificial
  Probe
gacttggtgttcaacagagtctagg

SEQ ID NO: 23786 - DNA, 25 bp, Artificial
  Probe
taaatgcaactgcaagtagggttat

SEQ ID NO: 23787 - DNA, 25 bp, Artificial
  Probe
ttaaatgcaactgcaagtagggtta

SEQ ID NO: 23788 - DNA, 25 bp, Artificial
  Probe
cctgtgcatgagctgtattcttcac

SEQ ID NO: 23789 - DNA, 25 bp, Artificial
  Probe
acctgtgcatgagctgtattcttca

SEQ ID NO: 23790 - DNA, 25 bp, Artificial
  Probe
aatgcaactgcaagtagggttattt

SEQ ID NO: 23791 - DNA, 25 bp, Artificial
  Probe
aaatgcaactgcaagtagggttatt

SEQ ID NO: 23792 - DNA, 25 bp, Artificial
  Probe
gtgttcaacagagtctaggatgggt

SEQ ID NO: 23793 - DNA, 25 bp, Artificial
  Probe
gcaactgcaagtagggttattttaa

SEQ ID NO: 23794 - DNA, 25 bp, Artificial
  Probe
gatccatgagccagaaccgcatatt

SEQ ID NO: 23795 - DNA, 25 bp, Artificial
  Probe
tgcaagtagggttattttaagttgt

SEQ ID NO: 23796 - DNA, 25 bp, Artificial
  Probe
taagtggtaaacgcttactaggaag

SEQ ID NO: 23797 - DNA, 25 bp, Artificial
  Probe
ctaagtggtaaacgcttactaggaa

SEQ ID NO: 23798 - DNA, 25 bp, Artificial
  Probe
atctctagctcaccaccatctgtag

SEQ ID NO: 23799 - DNA, 25 bp, Artificial
  Probe
gatctctagctcaccaccatctgta

SEQ ID NO: 23800 - DNA, 25 bp, Artificial
  Probe
cgaaacaaccaaacacgtagaatta

SEQ ID NO: 23801 - DNA, 25 bp, Artificial
  Probe
gaaacaaccaaacacgtagaattaa

SEQ ID NO: 23802 - DNA, 25 bp, Artificial
  Probe
gctaagtggtaaacgcttactagga

SEQ ID NO: 23803 - DNA, 25 bp, Artificial
  Probe
aaacaaccaaacacgtagaattaaa

SEQ ID NO: 23804 - DNA, 25 bp, Artificial
  Probe
ttgatctctagctcaccaccatctg

SEQ ID NO: 23805 - DNA, 25 bp, Artificial
  Probe
gtttgatctctagctcaccaccatc

SEQ ID NO: 23806 - DNA, 25 bp, Artificial
  Probe
gcgaaacaaccaaacacgtagaatt

SEQ ID NO: 23807 - DNA, 25 bp, Artificial
  Probe
tttgatctctagctcaccaccatct

SEQ ID NO: 23808 - DNA, 25 bp, Artificial
  Probe
agtttgatctctagctcaccaccat

SEQ ID NO: 23809 - DNA, 25 bp, Artificial
  Probe
agctaagtggtaaacgcttactagg

SEQ ID NO: 23810 - DNA, 25 bp, Artificial
  Probe
tgatctctagctcaccaccatctgt

SEQ ID NO: 23811 - DNA, 25 bp, Artificial
  Probe
tagctaagtggtaaacgcttactag

SEQ ID NO: 23812 - DNA, 25 bp, Artificial
  Probe
aaatagtagggctgggatttagcta

SEQ ID NO: 23813 - DNA, 25 bp, Artificial
  Probe
gagtttgatctctagctcaccacca

SEQ ID NO: 23814 - DNA, 25 bp, Artificial
  Probe
aacaaccaaacacgtagaattaaaa

SEQ ID NO: 23815 - DNA, 25 bp, Artificial
  Probe
ggagtttgatctctagctcaccacc

SEQ ID NO: 23816 - DNA, 25 bp, Artificial
  Probe
ggcgaaacaaccaaacacgtagaat

SEQ ID NO: 23817 - DNA, 25 bp, Artificial
  Probe
aaaatagtagggctgggatttagct

SEQ ID NO: 23818 - DNA, 25 bp, Artificial
  Probe
cggagtttgatctctagctcaccac

SEQ ID NO: 23819 - DNA, 25 bp, Artificial
  Probe
ttaattactaattggcaagcagcag

SEQ ID NO: 23820 - DNA, 25 bp, Artificial
  Probe
taagcgtgatttcaaaccgtaattc

SEQ ID NO: 23821 - DNA, 25 bp, Artificial
  Probe
gtaagcgtgatttcaaaccgtaatt

SEQ ID NO: 23822 - DNA, 25 bp, Artificial
  Probe
tatgtaagcgtgatttcaaaccgta

SEQ ID NO: 23823 - DNA, 25 bp, Artificial
  Probe
acttatgtaagcgtgatttcaaacc

SEQ ID NO: 23824 - DNA, 25 bp, Artificial
  Probe
ctgtccctagtaagatattccgaat

SEQ ID NO: 23825 - DNA, 25 bp, Artificial
  Probe
gacttatgtaagcgtgatttcaaac

SEQ ID NO: 23826 - DNA, 25 bp, Artificial
  Probe
tgtaagcgtgatttcaaaccgtaat

SEQ ID NO: 23827 - DNA, 25 bp, Artificial
  Probe
atgtaagcgtgatttcaaaccgtaa

SEQ ID NO: 23828 - DNA, 25 bp, Artificial
  Probe
ttatgtaagcgtgatttcaaaccgt

SEQ ID NO: 23829 - DNA, 25 bp, Artificial
  Probe
cttatgtaagcgtgatttcaaaccg

SEQ ID NO: 23830 - DNA, 25 bp, Artificial
  Probe
tgtccctagtaagatattccgaatt

SEQ ID NO: 23831 - DNA, 25 bp, Artificial
  Probe
aattcatgttgtaaagtctcagcag

SEQ ID NO: 23832 - DNA, 25 bp, Artificial
  Probe
gctgtccctagtaagatattccgaa

SEQ ID NO: 23833 - DNA, 25 bp, Artificial
  Probe
gcacctctttatgagttcttacatt

SEQ ID NO: 23834 - DNA, 25 bp, Artificial
  Probe
ccgtaattcatgttgtaaagtctca

SEQ ID NO: 23835 - DNA, 25 bp, Artificial
  Probe
accgtaattcatgttgtaaagtctc

SEQ ID NO: 23836 - DNA, 25 bp, Artificial
  Probe
taattactaattggcaagcagcagc

SEQ ID NO: 23837 - DNA, 25 bp, Artificial
  Probe
ctgctgctgtccctagtaagatatt

SEQ ID NO: 23838 - DNA, 25 bp, Artificial
  Probe
tgctgctgtccctagtaagatattc

SEQ ID NO: 23839 - DNA, 25 bp, Artificial
  Probe
attcatgttgtaaagtctcagcaga

SEQ ID NO: 23840 - DNA, 25 bp, Artificial
  Probe
taattcatgttgtaaagtctcagca

SEQ ID NO: 23841 - DNA, 25 bp, Artificial
  Probe
aaccgtaattcatgttgtaaagtct

SEQ ID NO: 23842 - DNA, 25 bp, Artificial
  Probe
ctgctgtccctagtaagatattccg

SEQ ID NO: 23843 - DNA, 25 bp, Artificial
  Probe
gtaattcatgttgtaaagtctcagc

SEQ ID NO: 23844 - DNA, 25 bp, Artificial
  Probe
cgtgatttcaaaccgtaattcatgt

SEQ ID NO: 23845 - DNA, 25 bp, Artificial
  Probe
agcgtgatttcaaaccgtaattcat

SEQ ID NO: 23846 - DNA, 25 bp, Artificial
  Probe
gatttcaaaccgtaattcatgttgt

SEQ ID NO: 23847 - DNA, 25 bp, Artificial
  Probe
cgtaattcatgttgtaaagtctcag

SEQ ID NO: 23848 - DNA, 25 bp, Artificial
  Probe
tgatttcaaaccgtaattcatgttg

SEQ ID NO: 23849 - DNA, 25 bp, Artificial
  Probe
gtgatttcaaaccgtaattcatgtt

SEQ ID NO: 23850 - DNA, 25 bp, Artificial
  Probe
gctgctgtccctagtaagatattcc

SEQ ID NO: 23851 - DNA, 25 bp, Artificial
  Probe
aagcgtgatttcaaaccgtaattca

SEQ ID NO: 23852 - DNA, 25 bp, Artificial
  Probe
ttcatgttgtaaagtctcagcagag

SEQ ID NO: 23853 - DNA, 25 bp, Artificial
  Probe
caaaccgtaattcatgttgtaaagt

SEQ ID NO: 23854 - DNA, 25 bp, Artificial
  Probe
tttaattactaattggcaagcagca

SEQ ID NO: 23855 - DNA, 25 bp, Artificial
  Probe
tgctgtccctagtaagatattccga

SEQ ID NO: 23856 - DNA, 25 bp, Artificial
  Probe
aaaccgtaattcatgttgtaaagtc

SEQ ID NO: 23857 - DNA, 25 bp, Artificial
  Probe
tcaaaccgtaattcatgttgtaaag

SEQ ID NO: 23858 - DNA, 25 bp, Artificial
  Probe
cttgattctctgcacctctttatga

SEQ ID NO: 23859 - DNA, 25 bp, Artificial
  Probe
gcgtgatttcaaaccgtaattcatg

SEQ ID NO: 23860 - DNA, 25 bp, Artificial
  Probe
atttaattactaattggcaagcagc

SEQ ID NO: 23861 - DNA, 25 bp, Artificial
  Probe
ttcaaaccgtaattcatgttgtaaa

SEQ ID NO: 23862 - DNA, 25 bp, Artificial
  Probe
tttcaaaccgtaattcatgttgtaa

SEQ ID NO: 23863 - DNA, 25 bp, Artificial
  Probe
cctagtaagatattccgaattccat

SEQ ID NO: 23864 - DNA, 25 bp, Artificial
  Probe
acaatgacattccaatcactaccag

SEQ ID NO: 23865 - DNA, 25 bp, Artificial
  Probe
cacaatgacattccaatcactacca

SEQ ID NO: 23866 - DNA, 25 bp, Artificial
  Probe
gttctgttcatatccaattctggtg

SEQ ID NO: 23867 - DNA, 25 bp, Artificial
  Probe
gttcatatccaattctggtgcttag

SEQ ID NO: 23868 - DNA, 25 bp, Artificial
  Probe
tgttcatatccaattctggtgctta

SEQ ID NO: 23869 - DNA, 25 bp, Artificial
  Probe
ctggttctgttcatatccaattctg

SEQ ID NO: 23870 - DNA, 25 bp, Artificial
  Probe
aatcactaccagccagaagttacag

SEQ ID NO: 23871 - DNA, 25 bp, Artificial
  Probe
atatccaattctggtgcttaggaac

SEQ ID NO: 23872 - DNA, 25 bp, Artificial
  Probe
catatccaattctggtgcttaggaa

SEQ ID NO: 23873 - DNA, 25 bp, Artificial
  Probe
ttcatatccaattctggtgcttagg

SEQ ID NO: 23874 - DNA, 25 bp, Artificial
  Probe
ggttctgttcatatccaattctggt

SEQ ID NO: 23875 - DNA, 25 bp, Artificial
  Probe
tggttctgttcatatccaattctgg

SEQ ID NO: 23876 - DNA, 25 bp, Artificial
  Probe
ttgctttattccctttctttgttgg

SEQ ID NO: 23877 - DNA, 25 bp, Artificial
  Probe
gctggttctgttcatatccaattct

SEQ ID NO: 23878 - DNA, 25 bp, Artificial
  Probe
tcatatccaattctggtgcttagga

SEQ ID NO: 23879 - DNA, 25 bp, Artificial
  Probe
cttgctttattccctttctttgttg

SEQ ID NO: 23880 - DNA, 25 bp, Artificial
  Probe
tcttgctttattccctttctttgtt

SEQ ID NO: 23881 - DNA, 25 bp, Artificial
  Probe
ttcttgctttattccctttctttgt

SEQ ID NO: 23882 - DNA, 25 bp, Artificial
  Probe
caatgacattccaatcactaccagc

SEQ ID NO: 23883 - DNA, 25 bp, Artificial
  Probe
caatcactaccagccagaagttaca

SEQ ID NO: 23884 - DNA, 25 bp, Artificial
  Probe
ctgttcatatccaattctggtgctt

SEQ ID NO: 23885 - DNA, 25 bp, Artificial
  Probe
ttctgttcatatccaattctggtgc

SEQ ID NO: 23886 - DNA, 25 bp, Artificial
  Probe
gcacaatgacattccaatcactacc

SEQ ID NO: 23887 - DNA, 25 bp, Artificial
  Probe
tatccaattctggtgcttaggaaca

SEQ ID NO: 23888 - DNA, 25 bp, Artificial
  Probe
tttcttgctttattccctttctttg

SEQ ID NO: 23889 - DNA, 25 bp, Artificial
  Probe
ggctggttctgttcatatccaattc

SEQ ID NO: 23890 - DNA, 25 bp, Artificial
  Probe
tctgttcatatccaattctggtgct

SEQ ID NO: 23891 - DNA, 25 bp, Artificial
  Probe
cattccaatcactaccagccagaag

SEQ ID NO: 23892 - DNA, 25 bp, Artificial
  Probe
ccaatcactaccagccagaagttac

SEQ ID NO: 23893 - DNA, 25 bp, Artificial
  Probe
tccaatcactaccagccagaagtta

SEQ ID NO: 23894 - DNA, 25 bp, Artificial
  Probe
ctgcacaatgacattccaatcacta

SEQ ID NO: 23895 - DNA, 25 bp, Artificial
  Probe
aatgacattccaatcactaccagcc

SEQ ID NO: 23896 - DNA, 25 bp, Artificial
  Probe
tgcacaatgacattccaatcactac

SEQ ID NO: 23897 - DNA, 25 bp, Artificial
  Probe
tgctttattccctttctttgttggc

SEQ ID NO: 23898 - DNA, 25 bp, Artificial
  Probe
atccaattctggtgcttaggaacag

SEQ ID NO: 23899 - DNA, 25 bp, Artificial
  Probe
attccaatcactaccagccagaagt

SEQ ID NO: 23900 - DNA, 25 bp, Artificial
  Probe
acattccaatcactaccagccagaa

SEQ ID NO: 23901 - DNA, 25 bp, Artificial
  Probe
ttccaatcactaccagccagaagtt

SEQ ID NO: 23902 - DNA, 25 bp, Artificial
  Probe
atttcagggctggttctgttcatat

SEQ ID NO: 23903 - DNA, 25 bp, Artificial
  Probe
atgacattccaatcactaccagcca

SEQ ID NO: 23904 - DNA, 25 bp, Artificial
  Probe
gacattccaatcactaccagccaga

SEQ ID NO: 23905 - DNA, 25 bp, Artificial
  Probe
tttcagggctggttctgttcatatc

SEQ ID NO: 23906 - DNA, 25 bp, Artificial
  Probe
atcactaccagccagaagttacagc

SEQ ID NO: 23907 - DNA, 25 bp, Artificial
  Probe
tgagagtaagccatttcttgggaag

SEQ ID NO: 23908 - DNA, 25 bp, Artificial
  Probe
catttcagggctggttctgttcata

SEQ ID NO: 23909 - DNA, 25 bp, Artificial
  Probe
tatgtgtgtgtgtaatggactcaac

SEQ ID NO: 23910 - DNA, 25 bp, Artificial
  Probe
atgtgtgtgtgtaatggactcaact

SEQ ID NO: 23911 - DNA, 25 bp, Artificial
  Probe
tgtgtgtgtgtaatggactcaactt

SEQ ID NO: 23912 - DNA, 25 bp, Artificial
  Probe
tgtgtaatggactcaactttctcaa

SEQ ID NO: 23913 - DNA, 25 bp, Artificial
  Probe
gtgtaatggactcaactttctcaaa

SEQ ID NO: 23914 - DNA, 25 bp, Artificial
  Probe
gtgtgtaatggactcaactttctca

SEQ ID NO: 23915 - DNA, 25 bp, Artificial
  Probe
tgtgtgtaatggactcaactttctc

SEQ ID NO: 23916 - DNA, 25 bp, Artificial
  Probe
gtgtgtgtaatggactcaactttct

SEQ ID NO: 23917 - DNA, 25 bp, Artificial
  Probe
tgaccattcgactcattgtaagttg

SEQ ID NO: 23918 - DNA, 25 bp, Artificial
  Probe
tgtgtgtgtaatggactcaactttc

SEQ ID NO: 23919 - DNA, 25 bp, Artificial
  Probe
gtgtgtgtgtaatggactcaacttt

SEQ ID NO: 23920 - DNA, 25 bp, Artificial
  Probe
ttcgactcattgtaagttgccacta

SEQ ID NO: 23921 - DNA, 25 bp, Artificial
  Probe
gcacagccctagatataatcccttt

SEQ ID NO: 23922 - DNA, 25 bp, Artificial
  Probe
gaccattcgactcattgtaagttgc

SEQ ID NO: 23923 - DNA, 25 bp, Artificial
  Probe
cgactcattgtaagttgccactacc

SEQ ID NO: 23924 - DNA, 25 bp, Artificial
  Probe
attcgactcattgtaagttgccact

SEQ ID NO: 23925 - DNA, 25 bp, Artificial
  Probe
cattcgactcattgtaagttgccac

SEQ ID NO: 23926 - DNA, 25 bp, Artificial
  Probe
tcgactcattgtaagttgccactac

SEQ ID NO: 23927 - DNA, 25 bp, Artificial
  Probe
tgtgacttgtcattatgcagtgtga

SEQ ID NO: 23928 - DNA, 25 bp, Artificial
  Probe
gtgtgacttgtcattatgcagtgtg

SEQ ID NO: 23929 - DNA, 25 bp, Artificial
  Probe
gtgtgtgacttgtcattatgcagtg

SEQ ID NO: 23930 - DNA, 25 bp, Artificial
  Probe
agtgtgtgacttgtcattatgcagt

SEQ ID NO: 23931 - DNA, 25 bp, Artificial
  Probe
tgtgtgacttgtcattatgcagtgt

SEQ ID NO: 23932 - DNA, 25 bp, Artificial
  Probe
tttgcacagccctagatataatccc

SEQ ID NO: 23933 - DNA, 25 bp, Artificial
  Probe
tgtaatggactcaactttctcaaaa

SEQ ID NO: 23934 - DNA, 25 bp, Artificial
  Probe
ccattcgactcattgtaagttgcca

SEQ ID NO: 23935 - DNA, 25 bp, Artificial
  Probe
accattcgactcattgtaagttgcc

SEQ ID NO: 23936 - DNA, 25 bp, Artificial
  Probe
acagccctagatataatcccttttg

SEQ ID NO: 23937 - DNA, 25 bp, Artificial
  Probe
cacagccctagatataatccctttt

SEQ ID NO: 23938 - DNA, 25 bp, Artificial
  Probe
cagccctagatataatcccttttga

SEQ ID NO: 23939 - DNA, 25 bp, Artificial
  Probe
aagtgtgtgacttgtcattatgcag

SEQ ID NO: 23940 - DNA, 25 bp, Artificial
  Probe
agccctagatataatcccttttgat

SEQ ID NO: 23941 - DNA, 25 bp, Artificial
  Probe
ccaaagtgtgtgacttgtcattatg

SEQ ID NO: 23942 - DNA, 25 bp, Artificial
  Probe
accaaagtgtgtgacttgtcattat

SEQ ID NO: 23943 - DNA, 25 bp, Artificial
  Probe
caaagtgtgtgacttgtcattatgc

SEQ ID NO: 23944 - DNA, 25 bp, Artificial
  Probe
tgcacagccctagatataatccctt

SEQ ID NO: 23945 - DNA, 25 bp, Artificial
  Probe
ttgcacagccctagatataatccct

SEQ ID NO: 23946 - DNA, 25 bp, Artificial
  Probe
gaccaaagtgtgtgacttgtcatta

SEQ ID NO: 23947 - DNA, 25 bp, Artificial
  Probe
tgaattttgcacagccctagatata

SEQ ID NO: 23948 - DNA, 25 bp, Artificial
  Probe
atacagtccttttgaattttgcaca

SEQ ID NO: 23949 - DNA, 25 bp, Artificial
  Probe
tacagtccttttgaattttgcacag

SEQ ID NO: 23950 - DNA, 25 bp, Artificial
  Probe
gatacagtccttttgaattttgcac

SEQ ID NO: 23951 - DNA, 25 bp, Artificial
  Probe
ttgaattttgcacagccctagatat

SEQ ID NO: 23952 - DNA, 25 bp, Artificial
  Probe
gaattttgcacagccctagatataa

SEQ ID NO: 23953 - DNA, 25 bp, Artificial
  Probe
ttttgcacagccctagatataatcc

SEQ ID NO: 23954 - DNA, 25 bp, Artificial
  Probe
cagcagtatccataatcatcattgt

SEQ ID NO: 23955 - DNA, 25 bp, Artificial
  Probe
acagcagtatccataatcatcattg

SEQ ID NO: 23956 - DNA, 25 bp, Artificial
  Probe
gacagcagtatccataatcatcatt

SEQ ID NO: 23957 - DNA, 25 bp, Artificial
  Probe
aagtcctgcctgataagaatgagaa

SEQ ID NO: 23958 - DNA, 25 bp, Artificial
  Probe
tgacagcagtatccataatcatcat

SEQ ID NO: 23959 - DNA, 25 bp, Artificial
  Probe
gcagtatccataatcatcattgttg

SEQ ID NO: 23960 - DNA, 25 bp, Artificial
  Probe
agcagtatccataatcatcattgtt

SEQ ID NO: 23961 - DNA, 25 bp, Artificial
  Probe
cataatcatcattgttgacatctgc

SEQ ID NO: 23962 - DNA, 25 bp, Artificial
  Probe
ctgacagcagtatccataatcatca

SEQ ID NO: 23963 - DNA, 25 bp, Artificial
  Probe
aacagtatgaagtctccatctcagg

SEQ ID NO: 23964 - DNA, 25 bp, Artificial
  Probe
cctgacagcagtatccataatcatc

SEQ ID NO: 23965 - DNA, 25 bp, Artificial
  Probe
gaagtcaaggacagtggttactatg

SEQ ID NO: 23966 - DNA, 25 bp, Artificial
  Probe
ccataatcatcattgttgacatctg

SEQ ID NO: 23967 - DNA, 25 bp, Artificial
  Probe
tccataatcatcattgttgacatct

SEQ ID NO: 23968 - DNA, 25 bp, Artificial
  Probe
acctgacagcagtatccataatcat

SEQ ID NO: 23969 - DNA, 25 bp, Artificial
  Probe
aagtcaaggacagtggttactatgt

SEQ ID NO: 23970 - DNA, 25 bp, Artificial
  Probe
ggaagtcaaggacagtggttactat

SEQ ID NO: 23971 - DNA, 25 bp, Artificial
  Probe
gacctgacagcagtatccataatca

SEQ ID NO: 23972 - DNA, 25 bp, Artificial
  Probe
agtggttactatgtctgctacacag

SEQ ID NO: 23973 - DNA, 25 bp, Artificial
  Probe
atccataatcatcattgttgacatc

SEQ ID NO: 23974 - DNA, 25 bp, Artificial
  Probe
cagtggttactatgtctgctacaca

SEQ ID NO: 23975 - DNA, 25 bp, Artificial
  Probe
acagtggttactatgtctgctacac

SEQ ID NO: 23976 - DNA, 25 bp, Artificial
  Probe
cctgataagaatgagaaacacctgg

SEQ ID NO: 23977 - DNA, 25 bp, Artificial
  Probe
agaaacagtatgaagtctccatctc

SEQ ID NO: 23978 - DNA, 25 bp, Artificial
  Probe
cagaaacagtatgaagtctccatct

SEQ ID NO: 23979 - DNA, 25 bp, Artificial
  Probe
acagaaacagtatgaagtctccatc

SEQ ID NO: 23980 - DNA, 25 bp, Artificial
  Probe
cacagaaacagtatgaagtctccat

SEQ ID NO: 23981 - DNA, 25 bp, Artificial
  Probe
aatcatcattgttgacatctgcatc

SEQ ID NO: 23982 - DNA, 25 bp, Artificial
  Probe
ctgataagaatgagaaacacctggt

SEQ ID NO: 23983 - DNA, 25 bp, Artificial
  Probe
ggtcgtttattactggagcaagaaa

SEQ ID NO: 23984 - DNA, 25 bp, Artificial
  Probe
gtcctgcctgataagaatgagaaac

SEQ ID NO: 23985 - DNA, 25 bp, Artificial
  Probe
agtcctgcctgataagaatgagaaa

SEQ ID NO: 23986 - DNA, 25 bp, Artificial
  Probe
aaagtcctgcctgataagaatgaga

SEQ ID NO: 23987 - DNA, 25 bp, Artificial
  Probe
caaagtcctgcctgataagaatgag

SEQ ID NO: 23988 - DNA, 25 bp, Artificial
  Probe
aaacagtatgaagtctccatctcag

SEQ ID NO: 23989 - DNA, 25 bp, Artificial
  Probe
gaaacagtatgaagtctccatctca

SEQ ID NO: 23990 - DNA, 25 bp, Artificial
  Probe
taatcatcattgttgacatctgcat

SEQ ID NO: 23991 - DNA, 25 bp, Artificial
  Probe
ataatcatcattgttgacatctgca

SEQ ID NO: 23992 - DNA, 25 bp, Artificial
  Probe
tatcgaggacactgttacagatgat

SEQ ID NO: 23993 - DNA, 25 bp, Artificial
  Probe
atatcgaggacactgttacagatga

SEQ ID NO: 23994 - DNA, 25 bp, Artificial
  Probe
gtatccataatcatcattgttgaca

SEQ ID NO: 23995 - DNA, 25 bp, Artificial
  Probe
gcctgataagaatgagaaacacctg

SEQ ID NO: 23996 - DNA, 25 bp, Artificial
  Probe
ctgcctgataagaatgagaaacacc

SEQ ID NO: 23997 - DNA, 25 bp, Artificial
  Probe
cctgcctgataagaatgagaaacac

SEQ ID NO: 23998 - DNA, 25 bp, Artificial
  Probe
aggaagatatcgaggacactgttac

SEQ ID NO: 23999 - DNA, 25 bp, Artificial
  Probe
agaagcaaagatttcagtagaattt

SEQ ID NO: 24000 - DNA, 25 bp, Artificial
  Probe
tttagaagcaaagatttcagtagaa

SEQ ID NO: 24001 - DNA, 25 bp, Artificial
  Probe
ttcagtagaattttagtcccaaacg

SEQ ID NO: 24002 - DNA, 25 bp, Artificial
  Probe
ttagaagcaaagatttcagtagaat

SEQ ID NO: 24003 - DNA, 25 bp, Artificial
  Probe
atttagaagcaaagatttcagtaga

SEQ ID NO: 24004 - DNA, 25 bp, Artificial
  Probe
tgatttagaagcaaagatttcagta

SEQ ID NO: 24005 - DNA, 25 bp, Artificial
  Probe
agtagaattttagtcccaaacgctg

SEQ ID NO: 24006 - DNA, 25 bp, Artificial
  Probe
cagtagaattttagtcccaaacgct

SEQ ID NO: 24007 - DNA, 25 bp, Artificial
  Probe
tcagtagaattttagtcccaaacgc

SEQ ID NO: 24008 - DNA, 25 bp, Artificial
  Probe
tagaagcaaagatttcagtagaatt

SEQ ID NO: 24009 - DNA, 25 bp, Artificial
  Probe
tagaattttagtcccaaacgctgtg

SEQ ID NO: 24010 - DNA, 25 bp, Artificial
  Probe
gtagaattttagtcccaaacgctgt

SEQ ID NO: 24011 - DNA, 25 bp, Artificial
  Probe
gatttagaagcaaagatttcagtag

SEQ ID NO: 24012 - DNA, 25 bp, Artificial
  Probe
agatttcagtagaattttagtccca

SEQ ID NO: 24013 - DNA, 25 bp, Artificial
  Probe
tttcagtagaattttagtcccaaac

SEQ ID NO: 24014 - DNA, 25 bp, Artificial
  Probe
gttagtatacagaacgtatttagcc

SEQ ID NO: 24015 - DNA, 25 bp, Artificial
  Probe
gatttcagtagaattttagtcccaa

SEQ ID NO: 24016 - DNA, 25 bp, Artificial
  Probe
aagatttcagtagaattttagtccc

SEQ ID NO: 24017 - DNA, 25 bp, Artificial
  Probe
ctgatttagaagcaaagatttcagt

SEQ ID NO: 24018 - DNA, 25 bp, Artificial
  Probe
actgatttagaagcaaagatttcag

SEQ ID NO: 24019 - DNA, 25 bp, Artificial
  Probe
atttcagtagaattttagtcccaaa

SEQ ID NO: 24020 - DNA, 25 bp, Artificial
  Probe
gaagcaaagatttcagtagaatttt

SEQ ID NO: 24021 - DNA, 25 bp, Artificial
  Probe
gcaaagatttcagtagaattttagt

SEQ ID NO: 24022 - DNA, 25 bp, Artificial
  Probe
agcaaagatttcagtagaattttag

SEQ ID NO: 24023 - DNA, 25 bp, Artificial
  Probe
agaattttagtcccaaacgctgtgg

SEQ ID NO: 24024 - DNA, 25 bp, Artificial
  Probe
aagcaaagatttcagtagaatttta

SEQ ID NO: 24025 - DNA, 25 bp, Artificial
  Probe
aaagatttcagtagaattttagtcc

SEQ ID NO: 24026 - DNA, 25 bp, Artificial
  Probe
tcgaggtacaacagactatgcaata

SEQ ID NO: 24027 - DNA, 25 bp, Artificial
  Probe
cgaggtacaacagactatgcaatag

SEQ ID NO: 24028 - DNA, 25 bp, Artificial
  Probe
gtctcagaagggaccatgaataatg

SEQ ID NO: 24029 - DNA, 25 bp, Artificial
  Probe
tgtctcagaagggaccatgaataat

SEQ ID NO: 24030 - DNA, 25 bp, Artificial
  Probe
atgaataatggccgtcacttgttag

SEQ ID NO: 24031 - DNA, 25 bp, Artificial
  Probe
gtttaactgtctcagaagggaccat

SEQ ID NO: 24032 - DNA, 25 bp, Artificial
  Probe
catgaataatggccgtcacttgtta

SEQ ID NO: 24033 - DNA, 25 bp, Artificial
  Probe
ctgtctcagaagggaccatgaataa

SEQ ID NO: 24034 - DNA, 25 bp, Artificial
  Probe
aaaggtatttatattgtaagcagca

SEQ ID NO: 24035 - DNA, 25 bp, Artificial
  Probe
tttaactgtctcagaagggaccatg

SEQ ID NO: 24036 - DNA, 25 bp, Artificial
  Probe
aggtatttatattgtaagcagcatt

SEQ ID NO: 24037 - DNA, 25 bp, Artificial
  Probe
aaggtatttatattgtaagcagcat

SEQ ID NO: 24038 - DNA, 25 bp, Artificial
  Probe
tgtaagcagcattttgtatagttga

SEQ ID NO: 24039 - DNA, 25 bp, Artificial
  Probe
actgtctcagaagggaccatgaata

SEQ ID NO: 24040 - DNA, 25 bp, Artificial
  Probe
ttgtaagcagcattttgtatagttg

SEQ ID NO: 24041 - DNA, 25 bp, Artificial
  Probe
taactgtctcagaagggaccatgaa

SEQ ID NO: 24042 - DNA, 25 bp, Artificial
  Probe
ttaactgtctcagaagggaccatga

SEQ ID NO: 24043 - DNA, 25 bp, Artificial
  Probe
agtttaactgtctcagaagggacca

SEQ ID NO: 24044 - DNA, 25 bp, Artificial
  Probe
cttcgagccatagaactaaagccaa

SEQ ID NO: 24045 - DNA, 25 bp, Artificial
  Probe
gtaagcagcattttgtatagttgat

SEQ ID NO: 24046 - DNA, 25 bp, Artificial
  Probe
gaggtacaacagactatgcaatagt

SEQ ID NO: 24047 - DNA, 25 bp, Artificial
  Probe
ggtatttatattgtaagcagcattt

SEQ ID NO: 24048 - DNA, 25 bp, Artificial
  Probe
tgaataatggccgtcacttgttagg

SEQ ID NO: 24049 - DNA, 25 bp, Artificial
  Probe
ttcgagccatagaactaaagccaac

SEQ ID NO: 24050 - DNA, 25 bp, Artificial
  Probe
agcagcattttgtatagttgatatg

SEQ ID NO: 24051 - DNA, 25 bp, Artificial
  Probe
attgtaagcagcattttgtatagtt

SEQ ID NO: 24052 - DNA, 25 bp, Artificial
  Probe
aactgtctcagaagggaccatgaat

SEQ ID NO: 24053 - DNA, 25 bp, Artificial
  Probe
aagcagcattttgtatagttgatat

SEQ ID NO: 24054 - DNA, 25 bp, Artificial
  Probe
tattgtaagcagcattttgtatagt

SEQ ID NO: 24055 - DNA, 25 bp, Artificial
  Probe
taagcagcattttgtatagttgata

SEQ ID NO: 24056 - DNA, 25 bp, Artificial
  Probe
ctcgaggtacaacagactatgcaat

SEQ ID NO: 24057 - DNA, 25 bp, Artificial
  Probe
tctcagaagggaccatgaataatgg

SEQ ID NO: 24058 - DNA, 25 bp, Artificial
  Probe
taaaggtatttatattgtaagcagc

SEQ ID NO: 24059 - DNA, 25 bp, Artificial
  Probe
gaataatggccgtcacttgttaggg

SEQ ID NO: 24060 - DNA, 25 bp, Artificial
  Probe
atttatattgtaagcagcattttgt

SEQ ID NO: 24061 - DNA, 25 bp, Artificial
  Probe
tcgagccatagaactaaagccaacc

SEQ ID NO: 24062 - DNA, 25 bp, Artificial
  Probe
atattgtaagcagcattttgtatag

SEQ ID NO: 24063 - DNA, 25 bp, Artificial
  Probe
cacagcagtttaactgtctcagaag

SEQ ID NO: 24064 - DNA, 25 bp, Artificial
  Probe
ctcagaagggaccatgaataatggc

SEQ ID NO: 24065 - DNA, 25 bp, Artificial
  Probe
tttatattgtaagcagcattttgta

SEQ ID NO: 24066 - DNA, 25 bp, Artificial
  Probe
tcacagcagtttaactgtctcagaa

SEQ ID NO: 24067 - DNA, 25 bp, Artificial
  Probe
ctcacagcagtttaactgtctcaga

SEQ ID NO: 24068 - DNA, 25 bp, Artificial
  Probe
tctcacagcagtttaactgtctcag

SEQ ID NO: 24069 - DNA, 25 bp, Artificial
  Probe
ttatattgtaagcagcattttgtat

SEQ ID NO: 24070 - DNA, 25 bp, Artificial
  Probe
cagtttaactgtctcagaagggacc

SEQ ID NO: 24071 - DNA, 25 bp, Artificial
  Probe
gcttcctgttactaagatgtcttca

SEQ ID NO: 24072 - DNA, 25 bp, Artificial
  Probe
agcttcctgttactaagatgtcttc

SEQ ID NO: 24073 - DNA, 25 bp, Artificial
  Probe
ccagtatcatgtgatcttctcctcc

SEQ ID NO: 24074 - DNA, 25 bp, Artificial
  Probe
ttcaagactgtgcaatacttagaag

SEQ ID NO: 24075 - DNA, 25 bp, Artificial
  Probe
tcaagactgtgcaatacttagaagc

SEQ ID NO: 24076 - DNA, 25 bp, Artificial
  Probe
caagactgtgcaatacttagaagcc

SEQ ID NO: 24077 - DNA, 25 bp, Artificial
  Probe
gttcccagtatcatgtgatcttctc

SEQ ID NO: 24078 - DNA, 25 bp, Artificial
  Probe
tatcatgtgatcttctcctcccaac

SEQ ID NO: 24079 - DNA, 25 bp, Artificial
  Probe
gtatcatgtgatcttctcctcccaa

SEQ ID NO: 24080 - DNA, 25 bp, Artificial
  Probe
ttcccagtatcatgtgatcttctcc

SEQ ID NO: 24081 - DNA, 25 bp, Artificial
  Probe
cagtatcatgtgatcttctcctccc

SEQ ID NO: 24082 - DNA, 25 bp, Artificial
  Probe
cccagtatcatgtgatcttctcctc

SEQ ID NO: 24083 - DNA, 25 bp, Artificial
  Probe
cgttcccagtatcatgtgatcttct

SEQ ID NO: 24084 - DNA, 25 bp, Artificial
  Probe
agtatcatgtgatcttctcctccca

SEQ ID NO: 24085 - DNA, 25 bp, Artificial
  Probe
tcccagtatcatgtgatcttctcct

SEQ ID NO: 24086 - DNA, 25 bp, Artificial
  Probe
cataatgtgagacgttcccagtatc

SEQ ID NO: 24087 - DNA, 25 bp, Artificial
  Probe
gcagactaaagctactgtagaaaca

SEQ ID NO: 24088 - DNA, 25 bp, Artificial
  Probe
tttcaagactgtgcaatacttagaa

SEQ ID NO: 24089 - DNA, 25 bp, Artificial
  Probe
taatgtgagacgttcccagtatcat

SEQ ID NO: 24090 - DNA, 25 bp, Artificial
  Probe
ataatgtgagacgttcccagtatca

SEQ ID NO: 24091 - DNA, 25 bp, Artificial
  Probe
tcataatgtgagacgttcccagtat

SEQ ID NO: 24092 - DNA, 25 bp, Artificial
  Probe
aagcttcctgttactaagatgtctt

SEQ ID NO: 24093 - DNA, 25 bp, Artificial
  Probe
tgcagactaaagctactgtagaaac

SEQ ID NO: 24094 - DNA, 25 bp, Artificial
  Probe
caaaacagttctccaaaatacggtc

SEQ ID NO: 24095 - DNA, 25 bp, Artificial
  Probe
atcatgtgatcttctcctcccaact

SEQ ID NO: 24096 - DNA, 25 bp, Artificial
  Probe
aacaaaacagttctccaaaatacgg

SEQ ID NO: 24097 - DNA, 25 bp, Artificial
  Probe
caatacttagaagcccttgtgcctc

SEQ ID NO: 24098 - DNA, 25 bp, Artificial
  Probe
aatacttagaagcccttgtgcctct

SEQ ID NO: 24099 - DNA, 25 bp, Artificial
  Probe
acaaaacagttctccaaaatacggt

SEQ ID NO: 24100 - DNA, 25 bp, Artificial
  Probe
gtcaaacaaaacagttctccaaaat

SEQ ID NO: 24101 - DNA, 25 bp, Artificial
  Probe
aaacaaaacagttctccaaaatacg

SEQ ID NO: 24102 - DNA, 25 bp, Artificial
  Probe
acgttcccagtatcatgtgatcttc

SEQ ID NO: 24103 - DNA, 25 bp, Artificial
  Probe
gacgttcccagtatcatgtgatctt

SEQ ID NO: 24104 - DNA, 25 bp, Artificial
  Probe
aaatcctcagagtggtcttttcaac

SEQ ID NO: 24105 - DNA, 25 bp, Artificial
  Probe
caaatcctcagagtggtcttttcaa

SEQ ID NO: 24106 - DNA, 25 bp, Artificial
  Probe
tgtcaaacaaaacagttctccaaaa

SEQ ID NO: 24107 - DNA, 25 bp, Artificial
  Probe
gtgtcaaacaaaacagttctccaaa

SEQ ID NO: 24108 - DNA, 25 bp, Artificial
  Probe
gagacgttcccagtatcatgtgatc

SEQ ID NO: 24109 - DNA, 25 bp, Artificial
  Probe
gactgtgcaatacttagaagccctt

SEQ ID NO: 24110 - DNA, 25 bp, Artificial
  Probe
cttaaccgagtgtcaaacaaaacag

SEQ ID NO: 24111 - DNA, 25 bp, Artificial
  Probe
tcatgtgatcttctcctcccaactc

SEQ ID NO: 24112 - DNA, 25 bp, Artificial
  Probe
atacttagaagcccttgtgcctctc

SEQ ID NO: 24113 - DNA, 25 bp, Artificial
  Probe
aagactgtgcaatacttagaagccc

SEQ ID NO: 24114 - DNA, 25 bp, Artificial
  Probe
aatgtgagacgttcccagtatcatg

SEQ ID NO: 24115 - DNA, 25 bp, Artificial
  Probe
gtgatcttctcctcccaactccttt

SEQ ID NO: 24116 - DNA, 25 bp, Artificial
  Probe
tgacaagtgagaacattctactgag

SEQ ID NO: 24117 - DNA, 25 bp, Artificial
  Probe
atgacaagtgagaacattctactga

SEQ ID NO: 24118 - DNA, 25 bp, Artificial
  Probe
ggatgacaagtgagaacattctact

SEQ ID NO: 24119 - DNA, 25 bp, Artificial
  Probe
gatgacaagtgagaacattctactg

SEQ ID NO: 24120 - DNA, 25 bp, Artificial
  Probe
tgtctctgactactgactgttctat

SEQ ID NO: 24121 - DNA, 25 bp, Artificial
  Probe
atgtctctgactactgactgttcta

SEQ ID NO: 24122 - DNA, 25 bp, Artificial
  Probe
aatgtctctgactactgactgttct

SEQ ID NO: 24123 - DNA, 25 bp, Artificial
  Probe
gacaagtgagaacattctactgagc

SEQ ID NO: 24124 - DNA, 25 bp, Artificial
  Probe
gtctctgactactgactgttctata

SEQ ID NO: 24125 - DNA, 25 bp, Artificial
  Probe
aagtgagaacattctactgagcctc

SEQ ID NO: 24126 - DNA, 25 bp, Artificial
  Probe
caagtgagaacattctactgagcct

SEQ ID NO: 24127 - DNA, 25 bp, Artificial
  Probe
tctctgactactgactgttctatag

SEQ ID NO: 24128 - DNA, 25 bp, Artificial
  Probe
gtagggatgacaagtgagaacattc

SEQ ID NO: 24129 - DNA, 25 bp, Artificial
  Probe
acaagtgagaacattctactgagcc

SEQ ID NO: 24130 - DNA, 25 bp, Artificial
  Probe
agtagggatgacaagtgagaacatt

SEQ ID NO: 24131 - DNA, 25 bp, Artificial
  Probe
gagtagggatgacaagtgagaacat

SEQ ID NO: 24132 - DNA, 25 bp, Artificial
  Probe
gggatgacaagtgagaacattctac

SEQ ID NO: 24133 - DNA, 25 bp, Artificial
  Probe
agggatgacaagtgagaacattcta

SEQ ID NO: 24134 - DNA, 25 bp, Artificial
  Probe
tagggatgacaagtgagaacattct

SEQ ID NO: 24135 - DNA, 25 bp, Artificial
  Probe
aaatgtctctgactactgactgttc

SEQ ID NO: 24136 - DNA, 25 bp, Artificial
  Probe
ctaaatgtctctgactactgactgt

SEQ ID NO: 24137 - DNA, 25 bp, Artificial
  Probe
tctaaatgtctctgactactgactg

SEQ ID NO: 24138 - DNA, 25 bp, Artificial
  Probe
gtcccagcagatgttgatgaataac

SEQ ID NO: 24139 - DNA, 25 bp, Artificial
  Probe
taaatgtctctgactactgactgtt

SEQ ID NO: 24140 - DNA, 25 bp, Artificial
  Probe
ttctaaatgtctctgactactgact

SEQ ID NO: 24141 - DNA, 25 bp, Artificial
  Probe
tttctaaatgtctctgactactgac

SEQ ID NO: 24142 - DNA, 25 bp, Artificial
  Probe
ggtcccagcagatgttgatgaataa

SEQ ID NO: 24143 - DNA, 25 bp, Artificial
  Probe
agcagatgttgatgaataacaccat

SEQ ID NO: 24144 - DNA, 25 bp, Artificial
  Probe
gcagatgttgatgaataacaccatg

SEQ ID NO: 24145 - DNA, 25 bp, Artificial
  Probe
aagtagcccattggtttgagaagtc

SEQ ID NO: 24146 - DNA, 25 bp, Artificial
  Probe
cagcagatgttgatgaataacacca

SEQ ID NO: 24147 - DNA, 25 bp, Artificial
  Probe
ggagtagggatgacaagtgagaaca

SEQ ID NO: 24148 - DNA, 25 bp, Artificial
  Probe
ccagcagatgttgatgaataacacc

SEQ ID NO: 24149 - DNA, 25 bp, Artificial
  Probe
caagtagcccattggtttgagaagt

SEQ ID NO: 24150 - DNA, 25 bp, Artificial
  Probe
tctgtgttttagcgaagaaaggtag

SEQ ID NO: 24151 - DNA, 25 bp, Artificial
  Probe
catgagcaagactggcaaataacag

SEQ ID NO: 24152 - DNA, 25 bp, Artificial
  Probe
gtctgtgttttagcgaagaaaggta

SEQ ID NO: 24153 - DNA, 25 bp, Artificial
  Probe
ctgtgttttagcgaagaaaggtagg

SEQ ID NO: 24154 - DNA, 25 bp, Artificial
  Probe
tggtcccagcagatgttgatgaata

SEQ ID NO: 24155 - DNA, 25 bp, Artificial
  Probe
gtgttttagcgaagaaaggtaggtg

SEQ ID NO: 24156 - DNA, 25 bp, Artificial
  Probe
ttatctgggaaaccctcattcacaa

SEQ ID NO: 24157 - DNA, 25 bp, Artificial
  Probe
gggagtagggatgacaagtgagaac

SEQ ID NO: 24158 - DNA, 25 bp, Artificial
  Probe
tgtgttttagcgaagaaaggtaggt

SEQ ID NO: 24159 - DNA, 25 bp, Artificial
  Probe
agggagtagggatgacaagtgagaa

SEQ ID NO: 24160 - DNA, 25 bp, Artificial
  Probe
tatctgggaaaccctcattcacaag

SEQ ID NO: 24161 - DNA, 25 bp, Artificial
  Probe
caagaggaatggaggaacgatttag

SEQ ID NO: 24162 - DNA, 25 bp, Artificial
  Probe
gttcatgtgtgtggttgtgactatg

SEQ ID NO: 24163 - DNA, 25 bp, Artificial
  Probe
tacaatccattacacagccctagat

SEQ ID NO: 24164 - DNA, 25 bp, Artificial
  Probe
aagaggaatggaggaacgatttagg

SEQ ID NO: 24165 - DNA, 25 bp, Artificial
  Probe
ctacaatccattacacagccctaga

SEQ ID NO: 24166 - DNA, 25 bp, Artificial
  Probe
gagacaagcaacatcctagaagagg

SEQ ID NO: 24167 - DNA, 25 bp, Artificial
  Probe
ggagacaagcaacatcctagaagag

SEQ ID NO: 24168 - DNA, 25 bp, Artificial
  Probe
ctggagacaagcaacatcctagaag

SEQ ID NO: 24169 - DNA, 25 bp, Artificial
  Probe
aacacagtcgaaagccttctataaa

SEQ ID NO: 24170 - DNA, 25 bp, Artificial
  Probe
acaatccattacacagccctagatg

SEQ ID NO: 24171 - DNA, 25 bp, Artificial
  Probe
ttcatgtgtgtggttgtgactatgg

SEQ ID NO: 24172 - DNA, 25 bp, Artificial
  Probe
gaacacagtcgaaagccttctataa

SEQ ID NO: 24173 - DNA, 25 bp, Artificial
  Probe
agctcaaagatgtaatgttgggaaa

SEQ ID NO: 24174 - DNA, 25 bp, Artificial
  Probe
tggagacaagcaacatcctagaaga

SEQ ID NO: 24175 - DNA, 25 bp, Artificial
  Probe
cgttcatgtgtgtggttgtgactat

SEQ ID NO: 24176 - DNA, 25 bp, Artificial
  Probe
ccaagaggaatggaggaacgattta

SEQ ID NO: 24177 - DNA, 25 bp, Artificial
  Probe
agaggaatggaggaacgatttaggg

SEQ ID NO: 24178 - DNA, 25 bp, Artificial
  Probe
ggaacacagtcgaaagccttctata

SEQ ID NO: 24179 - DNA, 25 bp, Artificial
  Probe
gctcaaagatgtaatgttgggaaaa

SEQ ID NO: 24180 - DNA, 25 bp, Artificial
  Probe
gatgtaatgttgggaaaatgaaacc

SEQ ID NO: 24181 - DNA, 25 bp, Artificial
  Probe
cctggagacaagcaacatcctagaa

SEQ ID NO: 24182 - DNA, 25 bp, Artificial
  Probe
gccaccttagtagataccagaaccc

SEQ ID NO: 24183 - DNA, 25 bp, Artificial
  Probe
agatgtaatgttgggaaaatgaaac

SEQ ID NO: 24184 - DNA, 25 bp, Artificial
  Probe
caaagatgtaatgttgggaaaatga

SEQ ID NO: 24185 - DNA, 25 bp, Artificial
  Probe
tcaaagatgtaatgttgggaaaatg

SEQ ID NO: 24186 - DNA, 25 bp, Artificial
  Probe
aggcagactgtctacttttatttga

SEQ ID NO: 24187 - DNA, 25 bp, Artificial
  Probe
aagatgtaatgttgggaaaatgaaa

SEQ ID NO: 24188 - DNA, 25 bp, Artificial
  Probe
aaagatgtaatgttgggaaaatgaa

SEQ ID NO: 24189 - DNA, 25 bp, Artificial
  Probe
ctcaaagatgtaatgttgggaaaat

SEQ ID NO: 24190 - DNA, 25 bp, Artificial
  Probe
atgtgtgtggttgtgactatgggaa

SEQ ID NO: 24191 - DNA, 25 bp, Artificial
  Probe
caaatcagaagtcctgggaacacag

SEQ ID NO: 24192 - DNA, 25 bp, Artificial
  Probe
tgtgtgtggttgtgactatgggaaa

SEQ ID NO: 24193 - DNA, 25 bp, Artificial
  Probe
tgtaatgttgggaaaatgaaaccat

SEQ ID NO: 24194 - DNA, 25 bp, Artificial
  Probe
atgtaatgttgggaaaatgaaacca

SEQ ID NO: 24195 - DNA, 25 bp, Artificial
  Probe
cacagtcgaaagccttctataaaac

SEQ ID NO: 24196 - DNA, 25 bp, Artificial
  Probe
tgttgggaaaatgaaaccataaact

SEQ ID NO: 24197 - DNA, 25 bp, Artificial
  Probe
gcagactgtctacttttatttgacg

SEQ ID NO: 24198 - DNA, 25 bp, Artificial
  Probe
ggcagactgtctacttttatttgac

SEQ ID NO: 24199 - DNA, 25 bp, Artificial
  Probe
caggcagactgtctacttttatttg

SEQ ID NO: 24200 - DNA, 25 bp, Artificial
  Probe
acacagtcgaaagccttctataaaa

SEQ ID NO: 24201 - DNA, 25 bp, Artificial
  Probe
ccaggcagactgtctacttttattt

SEQ ID NO: 24202 - DNA, 25 bp, Artificial
  Probe
gctacaatccattacacagccctag

SEQ ID NO: 24203 - DNA, 25 bp, Artificial
  Probe
acagtcgaaagccttctataaaact

SEQ ID NO: 24204 - DNA, 25 bp, Artificial
  Probe
aaatcagaagtcctgggaacacagt

SEQ ID NO: 24205 - DNA, 25 bp, Artificial
  Probe
gttgggaaaatgaaaccataaactt

SEQ ID NO: 24206 - DNA, 25 bp, Artificial
  Probe
gaccaaataagccttaattcaccat

SEQ ID NO: 24207 - DNA, 25 bp, Artificial
  Probe
accaaataagccttaattcaccatt

SEQ ID NO: 24208 - DNA, 25 bp, Artificial
  Probe
aactctaaagattgaacgggacttg

SEQ ID NO: 24209 - DNA, 25 bp, Artificial
  Probe
tatggaactttgtggatctgtcttt

SEQ ID NO: 24210 - DNA, 25 bp, Artificial
  Probe
ttatggaactttgtggatctgtctt

SEQ ID NO: 24211 - DNA, 25 bp, Artificial
  Probe
tttatggaactttgtggatctgtct

SEQ ID NO: 24212 - DNA, 25 bp, Artificial
  Probe
caactctaaagattgaacgggactt

SEQ ID NO: 24213 - DNA, 25 bp, Artificial
  Probe
actttgtggatctgtctttggtaaa

SEQ ID NO: 24214 - DNA, 25 bp, Artificial
  Probe
aactttgtggatctgtctttggtaa

SEQ ID NO: 24215 - DNA, 25 bp, Artificial
  Probe
tgaccaaataagccttaattcacca

SEQ ID NO: 24216 - DNA, 25 bp, Artificial
  Probe
atcaaataaggtgaccaaataagcc

SEQ ID NO: 24217 - DNA, 25 bp, Artificial
  Probe
gaactttgtggatctgtctttggta

SEQ ID NO: 24218 - DNA, 25 bp, Artificial
  Probe
gtttatggaactttgtggatctgtc

SEQ ID NO: 24219 - DNA, 25 bp, Artificial
  Probe
ctctaaagattgaacgggacttgtg

SEQ ID NO: 24220 - DNA, 25 bp, Artificial
  Probe
tggtccctaatacagtaatgtttgt

SEQ ID NO: 24221 - DNA, 25 bp, Artificial
  Probe
acttggtccctaatacagtaatgtt

SEQ ID NO: 24222 - DNA, 25 bp, Artificial
  Probe
gacttggtccctaatacagtaatgt

SEQ ID NO: 24223 - DNA, 25 bp, Artificial
  Probe
tgacttggtccctaatacagtaatg

SEQ ID NO: 24224 - DNA, 25 bp, Artificial
  Probe
gtttgacttggtccctaatacagta

SEQ ID NO: 24225 - DNA, 25 bp, Artificial
  Probe
ttgttgtttgacttggtccctaata

SEQ ID NO: 24226 - DNA, 25 bp, Artificial
  Probe
atggaactttgtggatctgtctttg

SEQ ID NO: 24227 - DNA, 25 bp, Artificial
  Probe
actctaaagattgaacgggacttgt

SEQ ID NO: 24228 - DNA, 25 bp, Artificial
  Probe
tttgacttggtccctaatacagtaa

SEQ ID NO: 24229 - DNA, 25 bp, Artificial
  Probe
ttgtttgacttggtccctaatacag

SEQ ID NO: 24230 - DNA, 25 bp, Artificial
  Probe
aaagcaactctaaagattgaacggg

SEQ ID NO: 24231 - DNA, 25 bp, Artificial
  Probe
ttgacttggtccctaatacagtaat

SEQ ID NO: 24232 - DNA, 25 bp, Artificial
  Probe
gttgtttgacttggtccctaataca

SEQ ID NO: 24233 - DNA, 25 bp, Artificial
  Probe
tgttgtttgacttggtccctaatac

SEQ ID NO: 24234 - DNA, 25 bp, Artificial
  Probe
ggtttatggaactttgtggatctgt

SEQ ID NO: 24235 - DNA, 25 bp, Artificial
  Probe
aagggtttatggaactttgtggatc

SEQ ID NO: 24236 - DNA, 25 bp, Artificial
  Probe
tcaataaagggaaacagatgtagaa

SEQ ID NO: 24237 - DNA, 25 bp, Artificial
  Probe
ttggtccctaatacagtaatgtttg

SEQ ID NO: 24238 - DNA, 25 bp, Artificial
  Probe
tttgttgtttgacttggtccctaat

SEQ ID NO: 24239 - DNA, 25 bp, Artificial
  Probe
tttaacacagtgaggaaacctactc

SEQ ID NO: 24240 - DNA, 25 bp, Artificial
  Probe
tagcctctaatcaaataaggtgacc

SEQ ID NO: 24241 - DNA, 25 bp, Artificial
  Probe
aggtgaccaaataagccttaattca

SEQ ID NO: 24242 - DNA, 25 bp, Artificial
  Probe
tcaaataaggtgaccaaataagcct

SEQ ID NO: 24243 - DNA, 25 bp, Artificial
  Probe
cttggtccctaatacagtaatgttt

SEQ ID NO: 24244 - DNA, 25 bp, Artificial
  Probe
gcctctaatcaaataaggtgaccaa

SEQ ID NO: 24245 - DNA, 25 bp, Artificial
  Probe
atcaataaagggaaacagatgtaga

SEQ ID NO: 24246 - DNA, 25 bp, Artificial
  Probe
tgtttgacttggtccctaatacagt

SEQ ID NO: 24247 - DNA, 25 bp, Artificial
  Probe
aatcaaataaggtgaccaaataagc

SEQ ID NO: 24248 - DNA, 25 bp, Artificial
  Probe
gggtttatggaactttgtggatctg

SEQ ID NO: 24249 - DNA, 25 bp, Artificial
  Probe
agggtttatggaactttgtggatct

SEQ ID NO: 24250 - DNA, 25 bp, Artificial
  Probe
cctctaatcaaataaggtgaccaaa

SEQ ID NO: 24251 - DNA, 25 bp, Artificial
  Probe
aagagaagatagaaccttgattgcc

SEQ ID NO: 24252 - DNA, 25 bp, Artificial
  Probe
tttctttggcattgtttgttagcat

SEQ ID NO: 24253 - DNA, 25 bp, Artificial
  Probe
gcattgtttgttagcatctgaagaa

SEQ ID NO: 24254 - DNA, 25 bp, Artificial
  Probe
ttctttggcattgtttgttagcatc

SEQ ID NO: 24255 - DNA, 25 bp, Artificial
  Probe
aaagagaagatagaaccttgattgc

SEQ ID NO: 24256 - DNA, 25 bp, Artificial
  Probe
gtttctttggcattgtttgttagca

SEQ ID NO: 24257 - DNA, 25 bp, Artificial
  Probe
cattgtttgttagcatctgaagaaa

SEQ ID NO: 24258 - DNA, 25 bp, Artificial
  Probe
ctttggcattgtttgttagcatctg

SEQ ID NO: 24259 - DNA, 25 bp, Artificial
  Probe
tctttggcattgtttgttagcatct

SEQ ID NO: 24260 - DNA, 25 bp, Artificial
  Probe
cggtttctttggcattgtttgttag

SEQ ID NO: 24261 - DNA, 25 bp, Artificial
  Probe
ttggcattgtttgttagcatctgaa

SEQ ID NO: 24262 - DNA, 25 bp, Artificial
  Probe
tttggcattgtttgttagcatctga

SEQ ID NO: 24263 - DNA, 25 bp, Artificial
  Probe
ggtttctttggcattgtttgttagc

SEQ ID NO: 24264 - DNA, 25 bp, Artificial
  Probe
ggcattgtttgttagcatctgaaga

SEQ ID NO: 24265 - DNA, 25 bp, Artificial
  Probe
tcggtttctttggcattgtttgtta

SEQ ID NO: 24266 - DNA, 25 bp, Artificial
  Probe
agagaagatagaaccttgattgccc

SEQ ID NO: 24267 - DNA, 25 bp, Artificial
  Probe
agttctgtcttctggaattaaatca

SEQ ID NO: 24268 - DNA, 25 bp, Artificial
  Probe
tggcattgtttgttagcatctgaag

SEQ ID NO: 24269 - DNA, 25 bp, Artificial
  Probe
gttctgtcttctggaattaaatcaa

SEQ ID NO: 24270 - DNA, 25 bp, Artificial
  Probe
ttcggtttctttggcattgtttgtt

SEQ ID NO: 24271 - DNA, 25 bp, Artificial
  Probe
gtttgttagcatctgaagaaactca

SEQ ID NO: 24272 - DNA, 25 bp, Artificial
  Probe
tgtttgttagcatctgaagaaactc

SEQ ID NO: 24273 - DNA, 25 bp, Artificial
  Probe
ttgtttgttagcatctgaagaaact

SEQ ID NO: 24274 - DNA, 25 bp, Artificial
  Probe
gttcggtttctttggcattgtttgt

SEQ ID NO: 24275 - DNA, 25 bp, Artificial
  Probe
gctgaaaagagaagatagaaccttg

SEQ ID NO: 24276 - DNA, 25 bp, Artificial
  Probe
attgtttgttagcatctgaagaaac

SEQ ID NO: 24277 - DNA, 25 bp, Artificial
  Probe
ttctgtcttctggaattaaatcaat

SEQ ID NO: 24278 - DNA, 25 bp, Artificial
  Probe
cgctgaaaagagaagatagaacctt

SEQ ID NO: 24279 - DNA, 25 bp, Artificial
  Probe
attactagttctgtcttctggaatt

SEQ ID NO: 24280 - DNA, 25 bp, Artificial
  Probe
aattactagttctgtcttctggaat

SEQ ID NO: 24281 - DNA, 25 bp, Artificial
  Probe
tagttctgtcttctggaattaaatc

SEQ ID NO: 24282 - DNA, 25 bp, Artificial
  Probe
ctagttctgtcttctggaattaaat

SEQ ID NO: 24283 - DNA, 25 bp, Artificial
  Probe
acgctgaaaagagaagatagaacct

SEQ ID NO: 24284 - DNA, 25 bp, Artificial
  Probe
cacgctgaaaagagaagatagaacc

SEQ ID NO: 24285 - DNA, 25 bp, Artificial
  Probe
ccacgctgaaaagagaagatagaac

SEQ ID NO: 24286 - DNA, 25 bp, Artificial
  Probe
tctgtcttctggaattaaatcaatt

SEQ ID NO: 24287 - DNA, 25 bp, Artificial
  Probe
accacgctgaaaagagaagatagaa

SEQ ID NO: 24288 - DNA, 25 bp, Artificial
  Probe
ctgaaaagagaagatagaaccttga

SEQ ID NO: 24289 - DNA, 25 bp, Artificial
  Probe
ggttcggtttctttggcattgtttg

SEQ ID NO: 24290 - DNA, 25 bp, Artificial
  Probe
caaggaataccagttttctgttagg

SEQ ID NO: 24291 - DNA, 25 bp, Artificial
  Probe
tactagttctgtcttctggaattaa

SEQ ID NO: 24292 - DNA, 25 bp, Artificial
  Probe
ttactagttctgtcttctggaatta

SEQ ID NO: 24293 - DNA, 25 bp, Artificial
  Probe
aaggaataccagttttctgttagga

SEQ ID NO: 24294 - DNA, 25 bp, Artificial
  Probe
aggaataccagttttctgttaggat

SEQ ID NO: 24295 - DNA, 25 bp, Artificial
  Probe
aggttcggtttctttggcattgttt

SEQ ID NO: 24296 - DNA, 25 bp, Artificial
  Probe
gagtttgtctgtgttatatctgtgc

SEQ ID NO: 24297 - DNA, 25 bp, Artificial
  Probe
tggagtttgtctgtgttatatctgt

SEQ ID NO: 24298 - DNA, 25 bp, Artificial
  Probe
ggagtttgtctgtgttatatctgtg

SEQ ID NO: 24299 - DNA, 25 bp, Artificial
  Probe
ctggagtttgtctgtgttatatctg

SEQ ID NO: 24300 - DNA, 25 bp, Artificial
  Probe
actggagtttgtctgtgttatatct

SEQ ID NO: 24301 - DNA, 25 bp, Artificial
  Probe
agtttgtctgtgttatatctgtgcc

SEQ ID NO: 24302 - DNA, 25 bp, Artificial
  Probe
gatagatactggagtttgtctgtgt

SEQ ID NO: 24303 - DNA, 25 bp, Artificial
  Probe
tgatagatactggagtttgtctgtg

SEQ ID NO: 24304 - DNA, 25 bp, Artificial
  Probe
agatactggagtttgtctgtgttat

SEQ ID NO: 24305 - DNA, 25 bp, Artificial
  Probe
atagatactggagtttgtctgtgtt

SEQ ID NO: 24306 - DNA, 25 bp, Artificial
  Probe
ttgatagatactggagtttgtctgt

SEQ ID NO: 24307 - DNA, 25 bp, Artificial
  Probe
tagatactggagtttgtctgtgtta

SEQ ID NO: 24308 - DNA, 25 bp, Artificial
  Probe
gtttgtctgtgttatatctgtgccc

SEQ ID NO: 24309 - DNA, 25 bp, Artificial
  Probe
tactggagtttgtctgtgttatatc

SEQ ID NO: 24310 - DNA, 25 bp, Artificial
  Probe
gatactggagtttgtctgtgttata

SEQ ID NO: 24311 - DNA, 25 bp, Artificial
  Probe
tttgatagatactggagtttgtctg

SEQ ID NO: 24312 - DNA, 25 bp, Artificial
  Probe
cctttggataaattgtgatttgaca

SEQ ID NO: 24313 - DNA, 25 bp, Artificial
  Probe
atactggagtttgtctgtgttatat

SEQ ID NO: 24314 - DNA, 25 bp, Artificial
  Probe
catgagatgtttcctaatgcagaag

SEQ ID NO: 24315 - DNA, 25 bp, Artificial
  Probe
ccatgagatgtttcctaatgcagaa

SEQ ID NO: 24316 - DNA, 25 bp, Artificial
  Probe
tcctttggataaattgtgatttgac

SEQ ID NO: 24317 - DNA, 25 bp, Artificial
  Probe
gtgttatatctgtgccccttcttta

SEQ ID NO: 24318 - DNA, 25 bp, Artificial
  Probe
tgttatatctgtgccccttctttaa

SEQ ID NO: 24319 - DNA, 25 bp, Artificial
  Probe
atgagatgtttcctaatgcagaagg

SEQ ID NO: 24320 - DNA, 25 bp, Artificial
  Probe
ttcctttggataaattgtgatttga

SEQ ID NO: 24321 - DNA, 25 bp, Artificial
  Probe
gttcctttggataaattgtgatttg

SEQ ID NO: 24322 - DNA, 25 bp, Artificial
  Probe
ctaatgcagaaggaatctgttgtac

SEQ ID NO: 24323 - DNA, 25 bp, Artificial
  Probe
tgtgttatatctgtgccccttcttt

SEQ ID NO: 24324 - DNA, 25 bp, Artificial
  Probe
cctaatgcagaaggaatctgttgta

SEQ ID NO: 24325 - DNA, 25 bp, Artificial
  Probe
taatgcagaaggaatctgttgtacg

SEQ ID NO: 24326 - DNA, 25 bp, Artificial
  Probe
ctgtgttatatctgtgccccttctt

SEQ ID NO: 24327 - DNA, 25 bp, Artificial
  Probe
ctaaggccatgagatgtttcctaat

SEQ ID NO: 24328 - DNA, 25 bp, Artificial
  Probe
taaggccatgagatgtttcctaatg

SEQ ID NO: 24329 - DNA, 25 bp, Artificial
  Probe
gccatgagatgtttcctaatgcaga

SEQ ID NO: 24330 - DNA, 25 bp, Artificial
  Probe
tggataaattgtgatttgacaactg

SEQ ID NO: 24331 - DNA, 25 bp, Artificial
  Probe
ttttgatagatactggagtttgtct

SEQ ID NO: 24332 - DNA, 25 bp, Artificial
  Probe
tttgtctgtgttatatctgtgcccc

SEQ ID NO: 24333 - DNA, 25 bp, Artificial
  Probe
ggataaattgtgatttgacaactga

SEQ ID NO: 24334 - DNA, 25 bp, Artificial
  Probe
tctgtgttatatctgtgccccttct

SEQ ID NO: 24335 - DNA, 25 bp, Artificial
  Probe
gtctgtgttatatctgtgccccttc

SEQ ID NO: 24336 - DNA, 25 bp, Artificial
  Probe
tcctaatgcagaaggaatctgttgt

SEQ ID NO: 24337 - DNA, 25 bp, Artificial
  Probe
cctaaggccatgagatgtttcctaa

SEQ ID NO: 24338 - DNA, 25 bp, Artificial
  Probe
attttgatagatactggagtttgtc

SEQ ID NO: 24339 - DNA, 25 bp, Artificial
  Probe
ttggataaattgtgatttgacaact

SEQ ID NO: 24340 - DNA, 25 bp, Artificial
  Probe
atgcagaaggaatctgttgtacgtt

SEQ ID NO: 24341 - DNA, 25 bp, Artificial
  Probe
actgtatctattatgtgctctccat

SEQ ID NO: 24342 - DNA, 25 bp, Artificial
  Probe
aagtacaagtaacaagccacaacat

SEQ ID NO: 24343 - DNA, 25 bp, Artificial
  Probe
caccactgtatctattatgtgctct

SEQ ID NO: 24344 - DNA, 25 bp, Artificial
  Probe
cactgtatctattatgtgctctcca

SEQ ID NO: 24345 - DNA, 25 bp, Artificial
  Probe
ccactgtatctattatgtgctctcc

SEQ ID NO: 24346 - DNA, 25 bp, Artificial
  Probe
accactgtatctattatgtgctctc

SEQ ID NO: 24347 - DNA, 25 bp, Artificial
  Probe
acaccactgtatctattatgtgctc

SEQ ID NO: 24348 - DNA, 25 bp, Artificial
  Probe
aacaccactgtatctattatgtgct

SEQ ID NO: 24349 - DNA, 25 bp, Artificial
  Probe
agtacaagtaacaagccacaacatg

SEQ ID NO: 24350 - DNA, 25 bp, Artificial
  Probe
ctcttcaaagtacaagtaacaagcc

SEQ ID NO: 24351 - DNA, 25 bp, Artificial
  Probe
caaagtacaagtaacaagccacaac

SEQ ID NO: 24352 - DNA, 25 bp, Artificial
  Probe
tcaaagtacaagtaacaagccacaa

SEQ ID NO: 24353 - DNA, 25 bp, Artificial
  Probe
ttcaaagtacaagtaacaagccaca

SEQ ID NO: 24354 - DNA, 25 bp, Artificial
  Probe
cttcaaagtacaagtaacaagccac

SEQ ID NO: 24355 - DNA, 25 bp, Artificial
  Probe
tcttcaaagtacaagtaacaagcca

SEQ ID NO: 24356 - DNA, 25 bp, Artificial
  Probe
aaagtacaagtaacaagccacaaca

SEQ ID NO: 24357 - DNA, 25 bp, Artificial
  Probe
gcacactcttcaaagtacaagtaac

SEQ ID NO: 24358 - DNA, 25 bp, Artificial
  Probe
ctgtatctattatgtgctctccata

SEQ ID NO: 24359 - DNA, 25 bp, Artificial
  Probe
gggaaacaccactgtatctattatg

SEQ ID NO: 24360 - DNA, 25 bp, Artificial
  Probe
actcttcaaagtacaagtaacaagc

SEQ ID NO: 24361 - DNA, 25 bp, Artificial
  Probe
cacactcttcaaagtacaagtaaca

SEQ ID NO: 24362 - DNA, 25 bp, Artificial
  Probe
aaacaccactgtatctattatgtgc

SEQ ID NO: 24363 - DNA, 25 bp, Artificial
  Probe
ggcacactcttcaaagtacaagtaa

SEQ ID NO: 24364 - DNA, 25 bp, Artificial
  Probe
ggaaacaccactgtatctattatgt

SEQ ID NO: 24365 - DNA, 25 bp, Artificial
  Probe
acactcttcaaagtacaagtaacaa

SEQ ID NO: 24366 - DNA, 25 bp, Artificial
  Probe
ctgggaaacaccactgtatctatta

SEQ ID NO: 24367 - DNA, 25 bp, Artificial
  Probe
gtacaagtaacaagccacaacatgg

SEQ ID NO: 24368 - DNA, 25 bp, Artificial
  Probe
tgggaaacaccactgtatctattat

SEQ ID NO: 24369 - DNA, 25 bp, Artificial
  Probe
taactgggaaacaccactgtatcta

SEQ ID NO: 24370 - DNA, 25 bp, Artificial
  Probe
attatgtgctctccatatttaaggg

SEQ ID NO: 24371 - DNA, 25 bp, Artificial
  Probe
tttaactgggaaacaccactgtatc

SEQ ID NO: 24372 - DNA, 25 bp, Artificial
  Probe
cactcttcaaagtacaagtaacaag

SEQ ID NO: 24373 - DNA, 25 bp, Artificial
  Probe
tgtatctattatgtgctctccatat

SEQ ID NO: 24374 - DNA, 25 bp, Artificial
  Probe
actgggaaacaccactgtatctatt

SEQ ID NO: 24375 - DNA, 25 bp, Artificial
  Probe
aactgggaaacaccactgtatctat

SEQ ID NO: 24376 - DNA, 25 bp, Artificial
  Probe
tgatattcaaaggacagttctctaa

SEQ ID NO: 24377 - DNA, 25 bp, Artificial
  Probe
ctgatattcaaaggacagttctcta

SEQ ID NO: 24378 - DNA, 25 bp, Artificial
  Probe
ttaactgggaaacaccactgtatct

SEQ ID NO: 24379 - DNA, 25 bp, Artificial
  Probe
atgtgagccatgtttctacagtttg

SEQ ID NO: 24380 - DNA, 25 bp, Artificial
  Probe
taagttgcactgatattcaaaggac

SEQ ID NO: 24381 - DNA, 25 bp, Artificial
  Probe
gtaagttgcactgatattcaaagga

SEQ ID NO: 24382 - DNA, 25 bp, Artificial
  Probe
agtaagttgcactgatattcaaagg

SEQ ID NO: 24383 - DNA, 25 bp, Artificial
  Probe
aagttgcactgatattcaaaggaca

SEQ ID NO: 24384 - DNA, 25 bp, Artificial
  Probe
gaaacaccactgtatctattatgtg

SEQ ID NO: 24385 - DNA, 25 bp, Artificial
  Probe
ctcagcatgttcagatctaactcga

SEQ ID NO: 24386 - DNA, 25 bp, Artificial
  Probe
ctgacagtctttcttaaatgccttc

SEQ ID NO: 24387 - DNA, 25 bp, Artificial
  Probe
tgacagtctttcttaaatgccttct

SEQ ID NO: 24388 - DNA, 25 bp, Artificial
  Probe
tacctgacagtctttcttaaatgcc

SEQ ID NO: 24389 - DNA, 25 bp, Artificial
  Probe
ttacctgacagtctttcttaaatgc

SEQ ID NO: 24390 - DNA, 25 bp, Artificial
  Probe
tttcttaaatgccttctgtggtctc

SEQ ID NO: 24391 - DNA, 25 bp, Artificial
  Probe
ctttcttaaatgccttctgtggtct

SEQ ID NO: 24392 - DNA, 25 bp, Artificial
  Probe
tctttcttaaatgccttctgtggtc

SEQ ID NO: 24393 - DNA, 25 bp, Artificial
  Probe
agtctttcttaaatgccttctgtgg

SEQ ID NO: 24394 - DNA, 25 bp, Artificial
  Probe
taaccacagtgaccacttcttgtat

SEQ ID NO: 24395 - DNA, 25 bp, Artificial
  Probe
gtctttcttaaatgccttctgtggt

SEQ ID NO: 24396 - DNA, 25 bp, Artificial
  Probe
cctgacagtctttcttaaatgcctt

SEQ ID NO: 24397 - DNA, 25 bp, Artificial
  Probe
accacttcttgtatttctcacacat

SEQ ID NO: 24398 - DNA, 25 bp, Artificial
  Probe
tttgttgtttacctgacagtctttc

SEQ ID NO: 24399 - DNA, 25 bp, Artificial
  Probe
ctttgttgtttacctgacagtcttt

SEQ ID NO: 24400 - DNA, 25 bp, Artificial
  Probe
ctaaccacagtgaccacttcttgta

SEQ ID NO: 24401 - DNA, 25 bp, Artificial
  Probe
tgttgtttacctgacagtctttctt

SEQ ID NO: 24402 - DNA, 25 bp, Artificial
  Probe
ttgttgtttacctgacagtctttct

SEQ ID NO: 24403 - DNA, 25 bp, Artificial
  Probe
tctttgttgtttacctgacagtctt

SEQ ID NO: 24404 - DNA, 25 bp, Artificial
  Probe
gacagtctttcttaaatgccttctg

SEQ ID NO: 24405 - DNA, 25 bp, Artificial
  Probe
gaccacttcttgtatttctcacaca

SEQ ID NO: 24406 - DNA, 25 bp, Artificial
  Probe
tgaccacttcttgtatttctcacac

SEQ ID NO: 24407 - DNA, 25 bp, Artificial
  Probe
cagtctttcttaaatgccttctgtg

SEQ ID NO: 24408 - DNA, 25 bp, Artificial
  Probe
aaccacagtgaccacttcttgtatt

SEQ ID NO: 24409 - DNA, 25 bp, Artificial
  Probe
ttcttaaatgccttctgtggtctca

SEQ ID NO: 24410 - DNA, 25 bp, Artificial
  Probe
gcaagtgaaattcgtaaacagtata

SEQ ID NO: 24411 - DNA, 25 bp, Artificial
  Probe
gttgtttacctgacagtctttctta

SEQ ID NO: 24412 - DNA, 25 bp, Artificial
  Probe
acctgacagtctttcttaaatgcct

SEQ ID NO: 24413 - DNA, 25 bp, Artificial
  Probe
gtctttgttgtttacctgacagtct

SEQ ID NO: 24414 - DNA, 25 bp, Artificial
  Probe
ccacttcttgtatttctcacacatg

SEQ ID NO: 24415 - DNA, 25 bp, Artificial
  Probe
tgtttacctgacagtctttcttaaa

SEQ ID NO: 24416 - DNA, 25 bp, Artificial
  Probe
ttgtttacctgacagtctttcttaa

SEQ ID NO: 24417 - DNA, 25 bp, Artificial
  Probe
cagtgaccacttcttgtatttctca

SEQ ID NO: 24418 - DNA, 25 bp, Artificial
  Probe
acagtgaccacttcttgtatttctc

SEQ ID NO: 24419 - DNA, 25 bp, Artificial
  Probe
tgcaagtgaaattcgtaaacagtat

SEQ ID NO: 24420 - DNA, 25 bp, Artificial
  Probe
cacagtgaccacttcttgtatttct

SEQ ID NO: 24421 - DNA, 25 bp, Artificial
  Probe
gactaaccacagtgaccacttcttg

SEQ ID NO: 24422 - DNA, 25 bp, Artificial
  Probe
ttggtctttgttgtttacctgacag

SEQ ID NO: 24423 - DNA, 25 bp, Artificial
  Probe
tttacctgacagtctttcttaaatg

SEQ ID NO: 24424 - DNA, 25 bp, Artificial
  Probe
gtttacctgacagtctttcttaaat

SEQ ID NO: 24425 - DNA, 25 bp, Artificial
  Probe
gttggtctttgttgtttacctgaca

SEQ ID NO: 24426 - DNA, 25 bp, Artificial
  Probe
ccacagtgaccacttcttgtatttc

SEQ ID NO: 24427 - DNA, 25 bp, Artificial
  Probe
ggtctttgttgtttacctgacagtc

SEQ ID NO: 24428 - DNA, 25 bp, Artificial
  Probe
tcttaaatgccttctgtggtctcag

SEQ ID NO: 24429 - DNA, 25 bp, Artificial
  Probe
tgactaaccacagtgaccacttctt

SEQ ID NO: 24430 - DNA, 25 bp, Artificial
  Probe
attcgtaaacagtatacatcccatg

SEQ ID NO: 24431 - DNA, 25 bp, Artificial
  Probe
gaatcacagtgtaccgaaatgggag

SEQ ID NO: 24432 - DNA, 25 bp, Artificial
  Probe
aatcacagtgtaccgaaatgggagg

SEQ ID NO: 24433 - DNA, 25 bp, Artificial
  Probe
cgaatcacagtgtaccgaaatggga

SEQ ID NO: 24434 - DNA, 25 bp, Artificial
  Probe
ctgatgtggtgctgttcttcatcca

SEQ ID NO: 24435 - DNA, 25 bp, Artificial
  Probe
atgtatatggaaggcttgttgtgtt

SEQ ID NO: 24436 - DNA, 25 bp, Artificial
  Probe
aatgtatatggaaggcttgttgtgt

SEQ ID NO: 24437 - DNA, 25 bp, Artificial
  Probe
gtcaatgtatatggaaggcttgttg

SEQ ID NO: 24438 - DNA, 25 bp, Artificial
  Probe
agtcaatgtatatggaaggcttgtt

SEQ ID NO: 24439 - DNA, 25 bp, Artificial
  Probe
caatgtatatggaaggcttgttgtg

SEQ ID NO: 24440 - DNA, 25 bp, Artificial
  Probe
tcaatgtatatggaaggcttgttgt

SEQ ID NO: 24441 - DNA, 25 bp, Artificial
  Probe
tagtcaatgtatatggaaggcttgt

SEQ ID NO: 24442 - DNA, 25 bp, Artificial
  Probe
ttggaagatgattgtgtctgtaggt

SEQ ID NO: 24443 - DNA, 25 bp, Artificial
  Probe
atagtcaatgtatatggaaggcttg

SEQ ID NO: 24444 - DNA, 25 bp, Artificial
  Probe
aatagtcaatgtatatggaaggctt

SEQ ID NO: 24445 - DNA, 25 bp, Artificial
  Probe
aagatgattgtgtctgtaggtggtc

SEQ ID NO: 24446 - DNA, 25 bp, Artificial
  Probe
gaagatgattgtgtctgtaggtggt

SEQ ID NO: 24447 - DNA, 25 bp, Artificial
  Probe
tggaagatgattgtgtctgtaggtg

SEQ ID NO: 24448 - DNA, 25 bp, Artificial
  Probe
gatgattgtgtctgtaggtggtcaa

SEQ ID NO: 24449 - DNA, 25 bp, Artificial
  Probe
gtaggtggtcaaattatggagagtt

SEQ ID NO: 24450 - DNA, 25 bp, Artificial
  Probe
aggtggtcaaattatggagagttaa

SEQ ID NO: 24451 - DNA, 25 bp, Artificial
  Probe
ggtgtggcatattcttgaaatgaaa

SEQ ID NO: 24452 - DNA, 25 bp, Artificial
  Probe
ctgtaggtggtcaaattatggagag

SEQ ID NO: 24453 - DNA, 25 bp, Artificial
  Probe
tgtatatggaaggcttgttgtgttt

SEQ ID NO: 24454 - DNA, 25 bp, Artificial
  Probe
tgtgtctgtaggtggtcaaattatg

SEQ ID NO: 24455 - DNA, 25 bp, Artificial
  Probe
ggaagatgattgtgtctgtaggtgg

SEQ ID NO: 24456 - DNA, 25 bp, Artificial
  Probe
gatggtgtggcatattcttgaaatg

SEQ ID NO: 24457 - DNA, 25 bp, Artificial
  Probe
gtctgtaggtggtcaaattatggag

SEQ ID NO: 24458 - DNA, 25 bp, Artificial
  Probe
tttggaagatgattgtgtctgtagg

SEQ ID NO: 24459 - DNA, 25 bp, Artificial
  Probe
cttaaagcagtcaaagaaatggttc

SEQ ID NO: 24460 - DNA, 25 bp, Artificial
  Probe
taggtggtcaaattatggagagtta

SEQ ID NO: 24461 - DNA, 25 bp, Artificial
  Probe
tgtaggtggtcaaattatggagagt

SEQ ID NO: 24462 - DNA, 25 bp, Artificial
  Probe
atggtgtggcatattcttgaaatga

SEQ ID NO: 24463 - DNA, 25 bp, Artificial
  Probe
tgatggtgtggcatattcttgaaat

SEQ ID NO: 24464 - DNA, 25 bp, Artificial
  Probe
ttgtgtctgtaggtggtcaaattat

SEQ ID NO: 24465 - DNA, 25 bp, Artificial
  Probe
attgtgtctgtaggtggtcaaatta

SEQ ID NO: 24466 - DNA, 25 bp, Artificial
  Probe
tggtgtggcatattcttgaaatgaa

SEQ ID NO: 24467 - DNA, 25 bp, Artificial
  Probe
gtgtctgtaggtggtcaaattatgg

SEQ ID NO: 24468 - DNA, 25 bp, Artificial
  Probe
acttaaagcagtcaaagaaatggtt

SEQ ID NO: 24469 - DNA, 25 bp, Artificial
  Probe
aacttaaagcagtcaaagaaatggt

SEQ ID NO: 24470 - DNA, 25 bp, Artificial
  Probe
tctgtaggtggtcaaattatggaga

SEQ ID NO: 24471 - DNA, 25 bp, Artificial
  Probe
tgtctgtaggtggtcaaattatgga

SEQ ID NO: 24472 - DNA, 25 bp, Artificial
  Probe
ggcacagttccctagtaaatcattt

SEQ ID NO: 24473 - DNA, 25 bp, Artificial
  Probe
ggtggtcaaattatggagagttaat

SEQ ID NO: 24474 - DNA, 25 bp, Artificial
  Probe
ctgatggtgtggcatattcttgaaa

SEQ ID NO: 24475 - DNA, 25 bp, Artificial
  Probe
gattgtgtctgtaggtggtcaaatt

SEQ ID NO: 24476 - DNA, 25 bp, Artificial
  Probe
aaacttaaagcagtcaaagaaatgg

SEQ ID NO: 24477 - DNA, 25 bp, Artificial
  Probe
agatgattgtgtctgtaggtggtca

SEQ ID NO: 24478 - DNA, 25 bp, Artificial
  Probe
gcacagttccctagtaaatcattta

SEQ ID NO: 24479 - DNA, 25 bp, Artificial
  Probe
tttgtagacaatgttctcataaggc

SEQ ID NO: 24480 - DNA, 25 bp, Artificial
  Probe
cctcatagactatcacctgaagaac

SEQ ID NO: 24481 - DNA, 25 bp, Artificial
  Probe
acctcatagactatcacctgaagaa

SEQ ID NO: 24482 - DNA, 25 bp, Artificial
  Probe
ctcatagactatcacctgaagaacg

SEQ ID NO: 24483 - DNA, 25 bp, Artificial
  Probe
cacctcatagactatcacctgaaga

SEQ ID NO: 24484 - DNA, 25 bp, Artificial
  Probe
tcatagactatcacctgaagaacgg

SEQ ID NO: 24485 - DNA, 25 bp, Artificial
  Probe
ccacctcatagactatcacctgaag

SEQ ID NO: 24486 - DNA, 25 bp, Artificial
  Probe
catcagccacctcatagactatcac

SEQ ID NO: 24487 - DNA, 25 bp, Artificial
  Probe
catataaaccaaagacagaccgagt

SEQ ID NO: 24488 - DNA, 25 bp, Artificial
  Probe
ccatataaaccaaagacagaccgag

SEQ ID NO: 24489 - DNA, 25 bp, Artificial
  Probe
atcagccacctcatagactatcacc

SEQ ID NO: 24490 - DNA, 25 bp, Artificial
  Probe
atataaaccaaagacagaccgagtc

SEQ ID NO: 24491 - DNA, 25 bp, Artificial
  Probe
agcatcagccacctcatagactatc

SEQ ID NO: 24492 - DNA, 25 bp, Artificial
  Probe
catagactatcacctgaagaacggg

SEQ ID NO: 24493 - DNA, 25 bp, Artificial
  Probe
gccacctcatagactatcacctgaa

SEQ ID NO: 24494 - DNA, 25 bp, Artificial
  Probe
gcatcagccacctcatagactatca

SEQ ID NO: 24495 - DNA, 25 bp, Artificial
  Probe
gagcatcagccacctcatagactat

SEQ ID NO: 24496 - DNA, 25 bp, Artificial
  Probe
gccatataaaccaaagacagaccga

SEQ ID NO: 24497 - DNA, 25 bp, Artificial
  Probe
tttaacaaagacatccaaatgcagg

SEQ ID NO: 24498 - DNA, 25 bp, Artificial
  Probe
tcagccacctcatagactatcacct

SEQ ID NO: 24499 - DNA, 25 bp, Artificial
  Probe
ttaacaaagacatccaaatgcaggt

SEQ ID NO: 24500 - DNA, 25 bp, Artificial
  Probe
tataaaccaaagacagaccgagtcg

SEQ ID NO: 24501 - DNA, 25 bp, Artificial
  Probe
agccacctcatagactatcacctga

SEQ ID NO: 24502 - DNA, 25 bp, Artificial
  Probe
cgcctttaacaaagacatccaaatg

SEQ ID NO: 24503 - DNA, 25 bp, Artificial
  Probe
tcgcctttaacaaagacatccaaat

SEQ ID NO: 24504 - DNA, 25 bp, Artificial
  Probe
gcctttaacaaagacatccaaatgc

SEQ ID NO: 24505 - DNA, 25 bp, Artificial
  Probe
cagccacctcatagactatcacctg

SEQ ID NO: 24506 - DNA, 25 bp, Artificial
  Probe
atagactatcacctgaagaacgggt

SEQ ID NO: 24507 - DNA, 25 bp, Artificial
  Probe
gacttccttgtgagagacagcatca

SEQ ID NO: 24508 - DNA, 25 bp, Artificial
  Probe
agagcatcagccacctcatagacta

SEQ ID NO: 24509 - DNA, 25 bp, Artificial
  Probe
taacaaagacatccaaatgcaggtc

SEQ ID NO: 24510 - DNA, 25 bp, Artificial
  Probe
gtcgcctttaacaaagacatccaaa

SEQ ID NO: 24511 - DNA, 25 bp, Artificial
  Probe
tagactatcacctgaagaacgggtt

SEQ ID NO: 24512 - DNA, 25 bp, Artificial
  Probe
gaggccatataaaccaaagacagac

SEQ ID NO: 24513 - DNA, 25 bp, Artificial
  Probe
cctttaacaaagacatccaaatgca

SEQ ID NO: 24514 - DNA, 25 bp, Artificial
  Probe
ctttaacaaagacatccaaatgcag

SEQ ID NO: 24515 - DNA, 25 bp, Artificial
  Probe
gtgaggccatataaaccaaagacag

SEQ ID NO: 24516 - DNA, 25 bp, Artificial
  Probe
tgaggccatataaaccaaagacaga

SEQ ID NO: 24517 - DNA, 25 bp, Artificial
  Probe
agtcgcctttaacaaagacatccaa

SEQ ID NO: 24518 - DNA, 25 bp, Artificial
  Probe
aggccatataaaccaaagacagacc

SEQ ID NO: 24519 - DNA, 25 bp, Artificial
  Probe
gagtcgcctttaacaaagacatcca

SEQ ID NO: 24520 - DNA, 25 bp, Artificial
  Probe
ggacttccttgtgagagacagcatc

SEQ ID NO: 24521 - DNA, 25 bp, Artificial
  Probe
cagaatggttaccacctctccttcc

SEQ ID NO: 24522 - DNA, 25 bp, Artificial
  Probe
ccagaatggttaccacctctccttc

SEQ ID NO: 24523 - DNA, 25 bp, Artificial
  Probe
agactatcacctgaagaacgggttg

SEQ ID NO: 24524 - DNA, 25 bp, Artificial
  Probe
cagtgagacagagtcagggttcaag

SEQ ID NO: 24525 - DNA, 25 bp, Artificial
  Probe
catcagtcacctcattacttaccac

SEQ ID NO: 24526 - DNA, 25 bp, Artificial
  Probe
ctctactacaggaagatggagactt

SEQ ID NO: 24527 - DNA, 25 bp, Artificial
  Probe
cagcatcagtcacctcattacttac

SEQ ID NO: 24528 - DNA, 25 bp, Artificial
  Probe
acagcatcagtcacctcattactta

SEQ ID NO: 24529 - DNA, 25 bp, Artificial
  Probe
atcagtcacctcattacttaccacc

SEQ ID NO: 24530 - DNA, 25 bp, Artificial
  Probe
agcatcagtcacctcattacttacc

SEQ ID NO: 24531 - DNA, 25 bp, Artificial
  Probe
gcatcagtcacctcattacttacca

SEQ ID NO: 24532 - DNA, 25 bp, Artificial
  Probe
tcagtcacctcattacttaccacct

SEQ ID NO: 24533 - DNA, 25 bp, Artificial
  Probe
taaatatgttcacacgactcagatg

SEQ ID NO: 24534 - DNA, 25 bp, Artificial
  Probe
gctctactacaggaagatggagact

SEQ ID NO: 24535 - DNA, 25 bp, Artificial
  Probe
cagtcacctcattacttaccacctg

SEQ ID NO: 24536 - DNA, 25 bp, Artificial
  Probe
gacagcatcagtcacctcattactt

SEQ ID NO: 24537 - DNA, 25 bp, Artificial
  Probe
cataaatatgttcacacgactcaga

SEQ ID NO: 24538 - DNA, 25 bp, Artificial
  Probe
tcataaatatgttcacacgactcag

SEQ ID NO: 24539 - DNA, 25 bp, Artificial
  Probe
aaatatgttcacacgactcagatgc

SEQ ID NO: 24540 - DNA, 25 bp, Artificial
  Probe
ttcataaatatgttcacacgactca

SEQ ID NO: 24541 - DNA, 25 bp, Artificial
  Probe
ataaatatgttcacacgactcagat

SEQ ID NO: 24542 - DNA, 25 bp, Artificial
  Probe
acctcattacttaccacctggagag

SEQ ID NO: 24543 - DNA, 25 bp, Artificial
  Probe
agagaggtttccttcaagttcaaat

SEQ ID NO: 24544 - DNA, 25 bp, Artificial
  Probe
gtcacctcattacttaccacctgga

SEQ ID NO: 24545 - DNA, 25 bp, Artificial
  Probe
gagaggtttccttcaagttcaaatt

SEQ ID NO: 24546 - DNA, 25 bp, Artificial
  Probe
gaggctctactacaggaagatggag

SEQ ID NO: 24547 - DNA, 25 bp, Artificial
  Probe
gagagaggtttccttcaagttcaaa

SEQ ID NO: 24548 - DNA, 25 bp, Artificial
  Probe
aatatgttcacacgactcagatgca

SEQ ID NO: 24549 - DNA, 25 bp, Artificial
  Probe
cacctcattacttaccacctggaga

SEQ ID NO: 24550 - DNA, 25 bp, Artificial
  Probe
tcacctcattacttaccacctggag

SEQ ID NO: 24551 - DNA, 25 bp, Artificial
  Probe
tctactacaggaagatggagacttc

SEQ ID NO: 24552 - DNA, 25 bp, Artificial
  Probe
ggctctactacaggaagatggagac

SEQ ID NO: 24553 - DNA, 25 bp, Artificial
  Probe
agtcacctcattacttaccacctgg

SEQ ID NO: 24554 - DNA, 25 bp, Artificial
  Probe
tttcataaatatgttcacacgactc

SEQ ID NO: 24555 - DNA, 25 bp, Artificial
  Probe
aggctctactacaggaagatggaga

SEQ ID NO: 24556 - DNA, 25 bp, Artificial
  Probe
cagaggctctactacaggaagatgg

SEQ ID NO: 24557 - DNA, 25 bp, Artificial
  Probe
tgagagaggtttccttcaagttcaa

SEQ ID NO: 24558 - DNA, 25 bp, Artificial
  Probe
ctcattacttaccacctggagagca

SEQ ID NO: 24559 - DNA, 25 bp, Artificial
  Probe
ctagtcaggaagagtaccaccaacc

SEQ ID NO: 24560 - DNA, 25 bp, Artificial
  Probe
agaggctctactacaggaagatgga

SEQ ID NO: 24561 - DNA, 25 bp, Artificial
  Probe
ggtttccttcaagttcaaatttcat

SEQ ID NO: 24562 - DNA, 25 bp, Artificial
  Probe
tcattacttaccacctggagagcag

SEQ ID NO: 24563 - DNA, 25 bp, Artificial
  Probe
gtgagagaggtttccttcaagttca

SEQ ID NO: 24564 - DNA, 25 bp, Artificial
  Probe
aggtttccttcaagttcaaatttca

SEQ ID NO: 24565 - DNA, 25 bp, Artificial
  Probe
gcagaggctctactacaggaagatg

SEQ ID NO: 24566 - DNA, 25 bp, Artificial
  Probe
agaggtttccttcaagttcaaattt

SEQ ID NO: 24567 - DNA, 25 bp, Artificial
  Probe
gaggtttccttcaagttcaaatttc

SEQ ID NO: 24568 - DNA, 25 bp, Artificial
  Probe
atttcataaatatgttcacacgact

SEQ ID NO: 24569 - DNA, 25 bp, Artificial
  Probe
cctagtcaggaagagtaccaccaac

SEQ ID NO: 24570 - DNA, 25 bp, Artificial
  Probe
gtgattttattattggggctactgg

SEQ ID NO: 24571 - DNA, 25 bp, Artificial
  Probe
cgtgattttattattggggctactg

SEQ ID NO: 24572 - DNA, 25 bp, Artificial
  Probe
ccgtgattttattattggggctact

SEQ ID NO: 24573 - DNA, 25 bp, Artificial
  Probe
gattttattattggggctactggca

SEQ ID NO: 24574 - DNA, 25 bp, Artificial
  Probe
tgattttattattggggctactggc

SEQ ID NO: 24575 - DNA, 25 bp, Artificial
  Probe
attttattattggggctactggcag

SEQ ID NO: 24576 - DNA, 25 bp, Artificial
  Probe
gagcatcaacacatgacagcacatc

SEQ ID NO: 24577 - DNA, 25 bp, Artificial
  Probe
gattagagacaaatgggtctggaaa

SEQ ID NO: 24578 - DNA, 25 bp, Artificial
  Probe
attagagacaaatgggtctggaaac

SEQ ID NO: 24579 - DNA, 25 bp, Artificial
  Probe
gaacctcagtttggggattagagac

SEQ ID NO: 24580 - DNA, 25 bp, Artificial
  Probe
cagaacctcagtttggggattagag

SEQ ID NO: 24581 - DNA, 25 bp, Artificial
  Probe
agaacctcagtttggggattagaga

SEQ ID NO: 24582 - DNA, 25 bp, Artificial
  Probe
gagacaaatgggtctggaaacaatt

SEQ ID NO: 24583 - DNA, 25 bp, Artificial
  Probe
tagagacaaatgggtctggaaacaa

SEQ ID NO: 24584 - DNA, 25 bp, Artificial
  Probe
ttagagacaaatgggtctggaaaca

SEQ ID NO: 24585 - DNA, 25 bp, Artificial
  Probe
ggattagagacaaatgggtctggaa

SEQ ID NO: 24586 - DNA, 25 bp, Artificial
  Probe
ctcagtttggggattagagacaaat

SEQ ID NO: 24587 - DNA, 25 bp, Artificial
  Probe
tcagtttggggattagagacaaatg

SEQ ID NO: 24588 - DNA, 25 bp, Artificial
  Probe
acctcagtttggggattagagacaa

SEQ ID NO: 24589 - DNA, 25 bp, Artificial
  Probe
aacctcagtttggggattagagaca

SEQ ID NO: 24590 - DNA, 25 bp, Artificial
  Probe
ctgcacacccgtgattttattattg

SEQ ID NO: 24591 - DNA, 25 bp, Artificial
  Probe
agagacaaatgggtctggaaacaat

SEQ ID NO: 24592 - DNA, 25 bp, Artificial
  Probe
gacaaatgggtctggaaacaattgg

SEQ ID NO: 24593 - DNA, 25 bp, Artificial
  Probe
aaagtcgagcatcaacacatgacag

SEQ ID NO: 24594 - DNA, 25 bp, Artificial
  Probe
cagtttggggattagagacaaatgg

SEQ ID NO: 24595 - DNA, 25 bp, Artificial
  Probe
caaagtcgagcatcaacacatgaca

SEQ ID NO: 24596 - DNA, 25 bp, Artificial
  Probe
acaaagtcgagcatcaacacatgac

SEQ ID NO: 24597 - DNA, 25 bp, Artificial
  Probe
cctgcacacccgtgattttattatt

SEQ ID NO: 24598 - DNA, 25 bp, Artificial
  Probe
cccgtgattttattattggggctac

SEQ ID NO: 24599 - DNA, 25 bp, Artificial
  Probe
cctcagtttggggattagagacaaa

SEQ ID NO: 24600 - DNA, 25 bp, Artificial
  Probe
tgcacacccgtgattttattattgg

SEQ ID NO: 24601 - DNA, 25 bp, Artificial
  Probe
atcaacacatgacagcacatcccat

SEQ ID NO: 24602 - DNA, 25 bp, Artificial
  Probe
acccgtgattttattattggggcta

SEQ ID NO: 24603 - DNA, 25 bp, Artificial
  Probe
cacacccgtgattttattattgggg

SEQ ID NO: 24604 - DNA, 25 bp, Artificial
  Probe
tttggggattagagacaaatgggtc

SEQ ID NO: 24605 - DNA, 25 bp, Artificial
  Probe
agtttggggattagagacaaatggg

SEQ ID NO: 24606 - DNA, 25 bp, Artificial
  Probe
aacacatgacagcacatcccatctc

SEQ ID NO: 24607 - DNA, 25 bp, Artificial
  Probe
acaaatgggtctggaaacaattggg

SEQ ID NO: 24608 - DNA, 25 bp, Artificial
  Probe
gtttggggattagagacaaatgggt

SEQ ID NO: 24609 - DNA, 25 bp, Artificial
  Probe
gcagaacctcagtttggggattaga

SEQ ID NO: 24610 - DNA, 25 bp, Artificial
  Probe
gggattagagacaaatgggtctgga

SEQ ID NO: 24611 - DNA, 25 bp, Artificial
  Probe
gcacacccgtgattttattattggg

SEQ ID NO: 24612 - DNA, 25 bp, Artificial
  Probe
agacaaatgggtctggaaacaattg

SEQ ID NO: 24613 - DNA, 25 bp, Artificial
  Probe
ttttattattggggctactggcagc

SEQ ID NO: 24614 - DNA, 25 bp, Artificial
  Probe
ccctgcacacccgtgattttattat

SEQ ID NO: 24615 - DNA, 25 bp, Artificial
  Probe
aagtgaatctctccttgccttacag

SEQ ID NO: 24616 - DNA, 25 bp, Artificial
  Probe
tattgtactccatgctgtccttgaa

SEQ ID NO: 24617 - DNA, 25 bp, Artificial
  Probe
ctattgtactccatgctgtccttga

SEQ ID NO: 24618 - DNA, 25 bp, Artificial
  Probe
cacagtcttgctattgtactccatg

SEQ ID NO: 24619 - DNA, 25 bp, Artificial
  Probe
acacagtcttgctattgtactccat

SEQ ID NO: 24620 - DNA, 25 bp, Artificial
  Probe
ttattagtctttctatctcctgcca

SEQ ID NO: 24621 - DNA, 25 bp, Artificial
  Probe
tattagtctttctatctcctgccat

SEQ ID NO: 24622 - DNA, 25 bp, Artificial
  Probe
tcttgctattgtactccatgctgtc

SEQ ID NO: 24623 - DNA, 25 bp, Artificial
  Probe
ctttgagaagagtgatgactactgg

SEQ ID NO: 24624 - DNA, 25 bp, Artificial
  Probe
gaaagtgaatctctccttgccttac

SEQ ID NO: 24625 - DNA, 25 bp, Artificial
  Probe
attagtctttctatctcctgccatg

SEQ ID NO: 24626 - DNA, 25 bp, Artificial
  Probe
gtcttgctattgtactccatgctgt

SEQ ID NO: 24627 - DNA, 25 bp, Artificial
  Probe
gacacagtcttgctattgtactcca

SEQ ID NO: 24628 - DNA, 25 bp, Artificial
  Probe
agtcttgctattgtactccatgctg

SEQ ID NO: 24629 - DNA, 25 bp, Artificial
  Probe
cagtcttgctattgtactccatgct

SEQ ID NO: 24630 - DNA, 25 bp, Artificial
  Probe
tttattagtctttctatctcctgcc

SEQ ID NO: 24631 - DNA, 25 bp, Artificial
  Probe
aaagtgaatctctccttgccttaca

SEQ ID NO: 24632 - DNA, 25 bp, Artificial
  Probe
attgtactccatgctgtccttgaac

SEQ ID NO: 24633 - DNA, 25 bp, Artificial
  Probe
tttgagaagagtgatgactactggg

SEQ ID NO: 24634 - DNA, 25 bp, Artificial
  Probe
ctctacttctcaccacccatctttc

SEQ ID NO: 24635 - DNA, 25 bp, Artificial
  Probe
attgaatctggaccatgtggtagaa

SEQ ID NO: 24636 - DNA, 25 bp, Artificial
  Probe
tacccaccactttatcttaatcttt

SEQ ID NO: 24637 - DNA, 25 bp, Artificial
  Probe
acagtcttgctattgtactccatgc

SEQ ID NO: 24638 - DNA, 25 bp, Artificial
  Probe
ctacttctcaccacccatctttctg

SEQ ID NO: 24639 - DNA, 25 bp, Artificial
  Probe
tctacttctcaccacccatctttct

SEQ ID NO: 24640 - DNA, 25 bp, Artificial
  Probe
gattgaatctggaccatgtggtaga

SEQ ID NO: 24641 - DNA, 25 bp, Artificial
  Probe
gctattgtactccatgctgtccttg

SEQ ID NO: 24642 - DNA, 25 bp, Artificial
  Probe
cttgctattgtactccatgctgtcc

SEQ ID NO: 24643 - DNA, 25 bp, Artificial
  Probe
ggacacagtcttgctattgtactcc

SEQ ID NO: 24644 - DNA, 25 bp, Artificial
  Probe
actctacttctcaccacccatcttt

SEQ ID NO: 24645 - DNA, 25 bp, Artificial
  Probe
ttgaatctggaccatgtggtagaag

SEQ ID NO: 24646 - DNA, 25 bp, Artificial
  Probe
tttgggacacagtcttgctattgta

SEQ ID NO: 24647 - DNA, 25 bp, Artificial
  Probe
agattgaatctggaccatgtggtag

SEQ ID NO: 24648 - DNA, 25 bp, Artificial
  Probe
tttctctaggaaagtgaatctctcc

SEQ ID NO: 24649 - DNA, 25 bp, Artificial
  Probe
tgctattgtactccatgctgtcctt

SEQ ID NO: 24650 - DNA, 25 bp, Artificial
  Probe
ttgctattgtactccatgctgtcct

SEQ ID NO: 24651 - DNA, 25 bp, Artificial
  Probe
agtgaatctctccttgccttacagc

SEQ ID NO: 24652 - DNA, 25 bp, Artificial
  Probe
tctttgagaagagtgatgactactg

SEQ ID NO: 24653 - DNA, 25 bp, Artificial
  Probe
ctttattagtctttctatctcctgc

SEQ ID NO: 24654 - DNA, 25 bp, Artificial
  Probe
gctttattagtctttctatctcctg

SEQ ID NO: 24655 - DNA, 25 bp, Artificial
  Probe
ggaaagtgaatctctccttgcctta

SEQ ID NO: 24656 - DNA, 25 bp, Artificial
  Probe
cactctacttctcaccacccatctt

SEQ ID NO: 24657 - DNA, 25 bp, Artificial
  Probe
agaagagtgatgactactgggcttt

SEQ ID NO: 24658 - DNA, 25 bp, Artificial
  Probe
gaatctctccttgccttacagcatt

SEQ ID NO: 24659 - DNA, 25 bp, Artificial
  Probe
ttgggacacagtcttgctattgtac

SEQ ID NO: 24660 - DNA, 25 bp, Artificial
  Probe
caacacgaacattccttccataacc

SEQ ID NO: 24661 - DNA, 25 bp, Artificial
  Probe
ccaacacgaacattccttccataac

SEQ ID NO: 24662 - DNA, 25 bp, Artificial
  Probe
aacacgaacattccttccataacca

SEQ ID NO: 24663 - DNA, 25 bp, Artificial
  Probe
caagaaccacgagtttattgatgag

SEQ ID NO: 24664 - DNA, 25 bp, Artificial
  Probe
caccatcaagaaccacgagtttatt

SEQ ID NO: 24665 - DNA, 25 bp, Artificial
  Probe
aagaaccacgagtttattgatgagc

SEQ ID NO: 24666 - DNA, 25 bp, Artificial
  Probe
accatcaagaaccacgagtttattg

SEQ ID NO: 24667 - DNA, 25 bp, Artificial
  Probe
gaaccacgagtttattgatgagcag

SEQ ID NO: 24668 - DNA, 25 bp, Artificial
  Probe
agaaccacgagtttattgatgagca

SEQ ID NO: 24669 - DNA, 25 bp, Artificial
  Probe
ggttatcctatcttgtggatgatcc

SEQ ID NO: 24670 - DNA, 25 bp, Artificial
  Probe
ccaccatcaagaaccacgagtttat

SEQ ID NO: 24671 - DNA, 25 bp, Artificial
  Probe
aaagaccactgggttatcctatctt

SEQ ID NO: 24672 - DNA, 25 bp, Artificial
  Probe
cccaacacgaacattccttccataa

SEQ ID NO: 24673 - DNA, 25 bp, Artificial
  Probe
ctgtacgaacctccaccatcaagaa

SEQ ID NO: 24674 - DNA, 25 bp, Artificial
  Probe
aagaccactgggttatcctatcttg

SEQ ID NO: 24675 - DNA, 25 bp, Artificial
  Probe
gaccactgggttatcctatcttgtg

SEQ ID NO: 24676 - DNA, 25 bp, Artificial
  Probe
agaccactgggttatcctatcttgt

SEQ ID NO: 24677 - DNA, 25 bp, Artificial
  Probe
tcaagaaccacgagtttattgatga

SEQ ID NO: 24678 - DNA, 25 bp, Artificial
  Probe
ctacactgcttagaaaagaccactg

SEQ ID NO: 24679 - DNA, 25 bp, Artificial
  Probe
tgtacgaacctccaccatcaagaac

SEQ ID NO: 24680 - DNA, 25 bp, Artificial
  Probe
ccatcaagaaccacgagtttattga

SEQ ID NO: 24681 - DNA, 25 bp, Artificial
  Probe
tccaccatcaagaaccacgagttta

SEQ ID NO: 24682 - DNA, 25 bp, Artificial
  Probe
tcccaacacgaacattccttccata

SEQ ID NO: 24683 - DNA, 25 bp, Artificial
  Probe
gttatcctatcttgtggatgatccc

SEQ ID NO: 24684 - DNA, 25 bp, Artificial
  Probe
gggttatcctatcttgtggatgatc

SEQ ID NO: 24685 - DNA, 25 bp, Artificial
  Probe
tgggttatcctatcttgtggatgat

SEQ ID NO: 24686 - DNA, 25 bp, Artificial
  Probe
gtctgtacgaacctccaccatcaag

SEQ ID NO: 24687 - DNA, 25 bp, Artificial
  Probe
tagaaaagaccactgggttatccta

SEQ ID NO: 24688 - DNA, 25 bp, Artificial
  Probe
gaaaagaccactgggttatcctatc

SEQ ID NO: 24689 - DNA, 25 bp, Artificial
  Probe
cttagaaaagaccactgggttatcc

SEQ ID NO: 24690 - DNA, 25 bp, Artificial
  Probe
ctgggttatcctatcttgtggatga

SEQ ID NO: 24691 - DNA, 25 bp, Artificial
  Probe
aaaagaccactgggttatcctatct

SEQ ID NO: 24692 - DNA, 25 bp, Artificial
  Probe
agaaaagaccactgggttatcctat

SEQ ID NO: 24693 - DNA, 25 bp, Artificial
  Probe
ttagaaaagaccactgggttatcct

SEQ ID NO: 24694 - DNA, 25 bp, Artificial
  Probe
tacactgcttagaaaagaccactgg

SEQ ID NO: 24695 - DNA, 25 bp, Artificial
  Probe
actgggttatcctatcttgtggatg

SEQ ID NO: 24696 - DNA, 25 bp, Artificial
  Probe
cactgggttatcctatcttgtggat

SEQ ID NO: 24697 - DNA, 25 bp, Artificial
  Probe
gcttagaaaagaccactgggttatc

SEQ ID NO: 24698 - DNA, 25 bp, Artificial
  Probe
gtacgaacctccaccatcaagaacc

SEQ ID NO: 24699 - DNA, 25 bp, Artificial
  Probe
tctgtacgaacctccaccatcaaga

SEQ ID NO: 24700 - DNA, 25 bp, Artificial
  Probe
gttgtctgtacgaacctccaccatc

SEQ ID NO: 24701 - DNA, 25 bp, Artificial
  Probe
tgcttagaaaagaccactgggttat

SEQ ID NO: 24702 - DNA, 25 bp, Artificial
  Probe
ctgcttagaaaagaccactgggtta

SEQ ID NO: 24703 - DNA, 25 bp, Artificial
  Probe
ctatcttgtggatgatcccctgttg

SEQ ID NO: 24704 - DNA, 25 bp, Artificial
  Probe
ctccaccatcaagaaccacgagttt

SEQ ID NO: 24705 - DNA, 25 bp, Artificial
  Probe
cattaagagagagagattcctgctg

SEQ ID NO: 24706 - DNA, 25 bp, Artificial
  Probe
aaccattaagagagagagattcctg

SEQ ID NO: 24707 - DNA, 25 bp, Artificial
  Probe
attaagagagagagattcctgctgg

SEQ ID NO: 24708 - DNA, 25 bp, Artificial
  Probe
ccattaagagagagagattcctgct

SEQ ID NO: 24709 - DNA, 25 bp, Artificial
  Probe
accattaagagagagagattcctgc

SEQ ID NO: 24710 - DNA, 25 bp, Artificial
  Probe
tcatcctgctcttcattaaaccatt

SEQ ID NO: 24711 - DNA, 25 bp, Artificial
  Probe
gctacagtgacatttgaatatggac

SEQ ID NO: 24712 - DNA, 25 bp, Artificial
  Probe
ctcatcctgctcttcattaaaccat

SEQ ID NO: 24713 - DNA, 25 bp, Artificial
  Probe
tacagtgacatttgaatatggacct

SEQ ID NO: 24714 - DNA, 25 bp, Artificial
  Probe
aataccctcatcctgctcttcatta

SEQ ID NO: 24715 - DNA, 25 bp, Artificial
  Probe
ctacagtgacatttgaatatggacc

SEQ ID NO: 24716 - DNA, 25 bp, Artificial
  Probe
catcctgctcttcattaaaccatta

SEQ ID NO: 24717 - DNA, 25 bp, Artificial
  Probe
ataccctcatcctgctcttcattaa

SEQ ID NO: 24718 - DNA, 25 bp, Artificial
  Probe
aaaccattaagagagagagattcct

SEQ ID NO: 24719 - DNA, 25 bp, Artificial
  Probe
taccctcatcctgctcttcattaaa

SEQ ID NO: 24720 - DNA, 25 bp, Artificial
  Probe
tacatatctttaatcccagcacttg

SEQ ID NO: 24721 - DNA, 25 bp, Artificial
  Probe
ggtacatatctttaatcccagcact

SEQ ID NO: 24722 - DNA, 25 bp, Artificial
  Probe
tcctgctcttcattaaaccattaag

SEQ ID NO: 24723 - DNA, 25 bp, Artificial
  Probe
aatatggacctgtgggcttatgaaa

SEQ ID NO: 24724 - DNA, 25 bp, Artificial
  Probe
tttgaatatggacctgtgggcttat

SEQ ID NO: 24725 - DNA, 25 bp, Artificial
  Probe
atttgaatatggacctgtgggctta

SEQ ID NO: 24726 - DNA, 25 bp, Artificial
  Probe
atcctgctcttcattaaaccattaa

SEQ ID NO: 24727 - DNA, 25 bp, Artificial
  Probe
gtacatatctttaatcccagcactt

SEQ ID NO: 24728 - DNA, 25 bp, Artificial
  Probe
agtgacatttgaatatggacctgtg

SEQ ID NO: 24729 - DNA, 25 bp, Artificial
  Probe
cagtgacatttgaatatggacctgt

SEQ ID NO: 24730 - DNA, 25 bp, Artificial
  Probe
acagtgacatttgaatatggacctg

SEQ ID NO: 24731 - DNA, 25 bp, Artificial
  Probe
caataccctcatcctgctcttcatt

SEQ ID NO: 24732 - DNA, 25 bp, Artificial
  Probe
gaatatggacctgtgggcttatgaa

SEQ ID NO: 24733 - DNA, 25 bp, Artificial
  Probe
ctttcagatgaacagcaataccctc

SEQ ID NO: 24734 - DNA, 25 bp, Artificial
  Probe
taaaccattaagagagagagattcc

SEQ ID NO: 24735 - DNA, 25 bp, Artificial
  Probe
agctacagtgacatttgaatatgga

SEQ ID NO: 24736 - DNA, 25 bp, Artificial
  Probe
cctcatcctgctcttcattaaacca

SEQ ID NO: 24737 - DNA, 25 bp, Artificial
  Probe
accctcatcctgctcttcattaaac

SEQ ID NO: 24738 - DNA, 25 bp, Artificial
  Probe
atatggacctgtgggcttatgaaac

SEQ ID NO: 24739 - DNA, 25 bp, Artificial
  Probe
ttgaatatggacctgtgggcttatg

SEQ ID NO: 24740 - DNA, 25 bp, Artificial
  Probe
aagctacagtgacatttgaatatgg

SEQ ID NO: 24741 - DNA, 25 bp, Artificial
  Probe
ctgggtatggtggtacatatcttta

SEQ ID NO: 24742 - DNA, 25 bp, Artificial
  Probe
gtgacatttgaatatggacctgtgg

SEQ ID NO: 24743 - DNA, 25 bp, Artificial
  Probe
gaataaacagcgtatctgacaccag

SEQ ID NO: 24744 - DNA, 25 bp, Artificial
  Probe
tctttcagatgaacagcaataccct

SEQ ID NO: 24745 - DNA, 25 bp, Artificial
  Probe
acatatctttaatcccagcacttgg

SEQ ID NO: 24746 - DNA, 25 bp, Artificial
  Probe
tgggtatggtggtacatatctttaa

SEQ ID NO: 24747 - DNA, 25 bp, Artificial
  Probe
tggtggtacatatctttaatcccag

SEQ ID NO: 24748 - DNA, 25 bp, Artificial
  Probe
tggtacatatctttaatcccagcac

SEQ ID NO: 24749 - DNA, 25 bp, Artificial
  Probe
gtggtacatatctttaatcccagca

SEQ ID NO: 24750 - DNA, 25 bp, Artificial
  Probe
ttgtgaatagtgattgtggcatgtt

SEQ ID NO: 24751 - DNA, 25 bp, Artificial
  Probe
catgtgtaacagtgaatattggacc

SEQ ID NO: 24752 - DNA, 25 bp, Artificial
  Probe
atgtgtaacagtgaatattggacca

SEQ ID NO: 24753 - DNA, 25 bp, Artificial
  Probe
tcatgtgtaacagtgaatattggac

SEQ ID NO: 24754 - DNA, 25 bp, Artificial
  Probe
tgtgtaacagtgaatattggaccac

SEQ ID NO: 24755 - DNA, 25 bp, Artificial
  Probe
tatttgtgaatagtgattgtggcat

SEQ ID NO: 24756 - DNA, 25 bp, Artificial
  Probe
atttgtgaatagtgattgtggcatg

SEQ ID NO: 24757 - DNA, 25 bp, Artificial
  Probe
aaacattcagggtcctctcatttct

SEQ ID NO: 24758 - DNA, 25 bp, Artificial
  Probe
gtgaatagtgattgtggcatgtttg

SEQ ID NO: 24759 - DNA, 25 bp, Artificial
  Probe
tgtgaatagtgattgtggcatgttt

SEQ ID NO: 24760 - DNA, 25 bp, Artificial
  Probe
tttgtgaatagtgattgtggcatgt

SEQ ID NO: 24761 - DNA, 25 bp, Artificial
  Probe
gcctaactgctgttatttctaactg

SEQ ID NO: 24762 - DNA, 25 bp, Artificial
  Probe
gaaacagattcatgtgtaacagtga

SEQ ID NO: 24763 - DNA, 25 bp, Artificial
  Probe
agaaacagattcatgtgtaacagtg

SEQ ID NO: 24764 - DNA, 25 bp, Artificial
  Probe
ggaagaaacagattcatgtgtaaca

SEQ ID NO: 24765 - DNA, 25 bp, Artificial
  Probe
tggaagaaacagattcatgtgtaac

SEQ ID NO: 24766 - DNA, 25 bp, Artificial
  Probe
ctggaagaaacagattcatgtgtaa

SEQ ID NO: 24767 - DNA, 25 bp, Artificial
  Probe
aagaaacagattcatgtgtaacagt

SEQ ID NO: 24768 - DNA, 25 bp, Artificial
  Probe
tgaatagtgattgtggcatgtttgg

SEQ ID NO: 24769 - DNA, 25 bp, Artificial
  Probe
cctaactgctgttatttctaactga

SEQ ID NO: 24770 - DNA, 25 bp, Artificial
  Probe
gaagaaacagattcatgtgtaacag

SEQ ID NO: 24771 - DNA, 25 bp, Artificial
  Probe
taactgctgttatttctaactgaca

SEQ ID NO: 24772 - DNA, 25 bp, Artificial
  Probe
attcagggtcctctcatttctgttc

SEQ ID NO: 24773 - DNA, 25 bp, Artificial
  Probe
ttcatgtgtaacagtgaatattgga

SEQ ID NO: 24774 - DNA, 25 bp, Artificial
  Probe
agcctaactgctgttatttctaact

SEQ ID NO: 24775 - DNA, 25 bp, Artificial
  Probe
gaatagtgattgtggcatgtttggg

SEQ ID NO: 24776 - DNA, 25 bp, Artificial
  Probe
cattcagggtcctctcatttctgtt

SEQ ID NO: 24777 - DNA, 25 bp, Artificial
  Probe
aacattcagggtcctctcatttctg

SEQ ID NO: 24778 - DNA, 25 bp, Artificial
  Probe
cgtagcctaactgctgttatttcta

SEQ ID NO: 24779 - DNA, 25 bp, Artificial
  Probe
ctaactgctgttatttctaactgac

SEQ ID NO: 24780 - DNA, 25 bp, Artificial
  Probe
tagcctaactgctgttatttctaac

SEQ ID NO: 24781 - DNA, 25 bp, Artificial
  Probe
gtagcctaactgctgttatttctaa

SEQ ID NO: 24782 - DNA, 25 bp, Artificial
  Probe
taaaacattcagggtcctctcattt

SEQ ID NO: 24783 - DNA, 25 bp, Artificial
  Probe
gtaaaacattcagggtcctctcatt

SEQ ID NO: 24784 - DNA, 25 bp, Artificial
  Probe
tatgtgaaaattccttccttcgttt

SEQ ID NO: 24785 - DNA, 25 bp, Artificial
  Probe
ttatgtgaaaattccttccttcgtt

SEQ ID NO: 24786 - DNA, 25 bp, Artificial
  Probe
attatgtgaaaattccttccttcgt

SEQ ID NO: 24787 - DNA, 25 bp, Artificial
  Probe
aaaacattcagggtcctctcatttc

SEQ ID NO: 24788 - DNA, 25 bp, Artificial
  Probe
aaacagattcatgtgtaacagtgaa

SEQ ID NO: 24789 - DNA, 25 bp, Artificial
  Probe
gtgtaacagtgaatattggaccact

SEQ ID NO: 24790 - DNA, 25 bp, Artificial
  Probe
ggcatgtttggggatgttattttaa

SEQ ID NO: 24791 - DNA, 25 bp, Artificial
  Probe
ttttatgttaagccccgtagcctaa

SEQ ID NO: 24792 - DNA, 25 bp, Artificial
  Probe
ttcagggtcctctcatttctgttca

SEQ ID NO: 24793 - DNA, 25 bp, Artificial
  Probe
cattcactgtaaaacattcagggtc

SEQ ID NO: 24794 - DNA, 25 bp, Artificial
  Probe
atgtgaaaattccttccttcgtttt

SEQ ID NO: 24795 - DNA, 25 bp, Artificial
  Probe
agtgtgaatatgtctctgagaagtt

SEQ ID NO: 24796 - DNA, 25 bp, Artificial
  Probe
gagtgtgaatatgtctctgagaagt

SEQ ID NO: 24797 - DNA, 25 bp, Artificial
  Probe
cgagtgtgaatatgtctctgagaag

SEQ ID NO: 24798 - DNA, 25 bp, Artificial
  Probe
atgtccgagtgtgaatatgtctctg

SEQ ID NO: 24799 - DNA, 25 bp, Artificial
  Probe
gtgtgaatatgtctctgagaagtta

SEQ ID NO: 24800 - DNA, 25 bp, Artificial
  Probe
tgtgaatatgtctctgagaagttag

SEQ ID NO: 24801 - DNA, 25 bp, Artificial
  Probe
gtccgagtgtgaatatgtctctgag

SEQ ID NO: 24802 - DNA, 25 bp, Artificial
  Probe
ccgagtgtgaatatgtctctgagaa

SEQ ID NO: 24803 - DNA, 25 bp, Artificial
  Probe
cgcaaacaaagtgaaatcatacctc

SEQ ID NO: 24804 - DNA, 25 bp, Artificial
  Probe
ctccgcaaacaaagtgaaatcatac

SEQ ID NO: 24805 - DNA, 25 bp, Artificial
  Probe
tctccgcaaacaaagtgaaatcata

SEQ ID NO: 24806 - DNA, 25 bp, Artificial
  Probe
cgaagttatgacagatttcacactc

SEQ ID NO: 24807 - DNA, 25 bp, Artificial
  Probe
catgtccgagtgtgaatatgtctct

SEQ ID NO: 24808 - DNA, 25 bp, Artificial
  Probe
ctcatgtccgagtgtgaatatgtct

SEQ ID NO: 24809 - DNA, 25 bp, Artificial
  Probe
aaacaaagtgaaatcatacctcagc

SEQ ID NO: 24810 - DNA, 25 bp, Artificial
  Probe
gtgaatatgtctctgagaagttaga

SEQ ID NO: 24811 - DNA, 25 bp, Artificial
  Probe
gcaaacaaagtgaaatcatacctca

SEQ ID NO: 24812 - DNA, 25 bp, Artificial
  Probe
tcatgtccgagtgtgaatatgtctc

SEQ ID NO: 24813 - DNA, 25 bp, Artificial
  Probe
gaagttatgacagatttcacactca

SEQ ID NO: 24814 - DNA, 25 bp, Artificial
  Probe
atctccgcaaacaaagtgaaatcat

SEQ ID NO: 24815 - DNA, 25 bp, Artificial
  Probe
caaacaaagtgaaatcatacctcag

SEQ ID NO: 24816 - DNA, 25 bp, Artificial
  Probe
tccgagtgtgaatatgtctctgaga

SEQ ID NO: 24817 - DNA, 25 bp, Artificial
  Probe
tgtccgagtgtgaatatgtctctga

SEQ ID NO: 24818 - DNA, 25 bp, Artificial
  Probe
agttatgacagatttcacactcaaa

SEQ ID NO: 24819 - DNA, 25 bp, Artificial
  Probe
aagttatgacagatttcacactcaa

SEQ ID NO: 24820 - DNA, 25 bp, Artificial
  Probe
aaaggaaatggagttgaaggatctc

SEQ ID NO: 24821 - DNA, 25 bp, Artificial
  Probe
ccgcaaacaaagtgaaatcatacct

SEQ ID NO: 24822 - DNA, 25 bp, Artificial
  Probe
tccgcaaacaaagtgaaatcatacc

SEQ ID NO: 24823 - DNA, 25 bp, Artificial
  Probe
agtatcattaacctttacaacaggc

SEQ ID NO: 24824 - DNA, 25 bp, Artificial
  Probe
taaagacagacatcgaggagagtaa

SEQ ID NO: 24825 - DNA, 25 bp, Artificial
  Probe
aggaatccagaacggtctaccttag

SEQ ID NO: 24826 - DNA, 25 bp, Artificial
  Probe
ctaaagacagacatcgaggagagta

SEQ ID NO: 24827 - DNA, 25 bp, Artificial
  Probe
aaagacagacatcgaggagagtaaa

SEQ ID NO: 24828 - DNA, 25 bp, Artificial
  Probe
aaagtgaaatcatacctcagctcat

SEQ ID NO: 24829 - DNA, 25 bp, Artificial
  Probe
atatgtctctgagaagttagaggct

SEQ ID NO: 24830 - DNA, 25 bp, Artificial
  Probe
aatatgtctctgagaagttagaggc

SEQ ID NO: 24831 - DNA, 25 bp, Artificial
  Probe
aacaaagtgaaatcatacctcagct

SEQ ID NO: 24832 - DNA, 25 bp, Artificial
  Probe
tcgaagttatgacagatttcacact

SEQ ID NO: 24833 - DNA, 25 bp, Artificial
  Probe
gatctccgcaaacaaagtgaaatca

SEQ ID NO: 24834 - DNA, 25 bp, Artificial
  Probe
ccaagtatcattaacctttacaaca

SEQ ID NO: 24835 - DNA, 25 bp, Artificial
  Probe
caggaatccagaacggtctacctta

SEQ ID NO: 24836 - DNA, 25 bp, Artificial
  Probe
aaatctcttgcttctctggctttgt

SEQ ID NO: 24837 - DNA, 25 bp, Artificial
  Probe
aagtgaaatcatacctcagctcatg

SEQ ID NO: 24838 - DNA, 25 bp, Artificial
  Probe
caaagtgaaatcatacctcagctca

SEQ ID NO: 24839 - DNA, 25 bp, Artificial
  Probe
acaaagtgaaatcatacctcagctc

SEQ ID NO: 24840 - DNA, 25 bp, Artificial
  Probe
gtgcctaaggaatgtaagttcagct

SEQ ID NO: 24841 - DNA, 25 bp, Artificial
  Probe
ggtgcctaaggaatgtaagttcagc

SEQ ID NO: 24842 - DNA, 25 bp, Artificial
  Probe
gggtgcctaaggaatgtaagttcag

SEQ ID NO: 24843 - DNA, 25 bp, Artificial
  Probe
ctgggtgcctaaggaatgtaagttc

SEQ ID NO: 24844 - DNA, 25 bp, Artificial
  Probe
tgggtgcctaaggaatgtaagttca

SEQ ID NO: 24845 - DNA, 25 bp, Artificial
  Probe
actgggtgcctaaggaatgtaagtt

SEQ ID NO: 24846 - DNA, 25 bp, Artificial
  Probe
gagtcctttggaacctctcatcatg

SEQ ID NO: 24847 - DNA, 25 bp, Artificial
  Probe
gatagcaagaccgttgaaaactgtg

SEQ ID NO: 24848 - DNA, 25 bp, Artificial
  Probe
ggagtcctttggaacctctcatcat

SEQ ID NO: 24849 - DNA, 25 bp, Artificial
  Probe
atagcaagaccgttgaaaactgtgt

SEQ ID NO: 24850 - DNA, 25 bp, Artificial
  Probe
cactgggtgcctaaggaatgtaagt

SEQ ID NO: 24851 - DNA, 25 bp, Artificial
  Probe
aaactgtgtgtgcatcttgaggaac

SEQ ID NO: 24852 - DNA, 25 bp, Artificial
  Probe
gtgcatcttgaggaacctctcatac

SEQ ID NO: 24853 - DNA, 25 bp, Artificial
  Probe
ttgaaaactgtgtgtgcatcttgag

SEQ ID NO: 24854 - DNA, 25 bp, Artificial
  Probe
tgtgcatcttgaggaacctctcata

SEQ ID NO: 24855 - DNA, 25 bp, Artificial
  Probe
tgagatcgatagcaagaccgttgaa

SEQ ID NO: 24856 - DNA, 25 bp, Artificial
  Probe
tatcccagcacttgtgagactcctt

SEQ ID NO: 24857 - DNA, 25 bp, Artificial
  Probe
gttgaaaactgtgtgtgcatcttga

SEQ ID NO: 24858 - DNA, 25 bp, Artificial
  Probe
gagatcgatagcaagaccgttgaaa

SEQ ID NO: 24859 - DNA, 25 bp, Artificial
  Probe
cctttggaacctctcatcatgcgat

SEQ ID NO: 24860 - DNA, 25 bp, Artificial
  Probe
caggagtcctttggaacctctcatc

SEQ ID NO: 24861 - DNA, 25 bp, Artificial
  Probe
cgatagcaagaccgttgaaaactgt

SEQ ID NO: 24862 - DNA, 25 bp, Artificial
  Probe
tagcaagaccgttgaaaactgtgtg

SEQ ID NO: 24863 - DNA, 25 bp, Artificial
  Probe
gagaattcacctcttcaggacgacc

SEQ ID NO: 24864 - DNA, 25 bp, Artificial
  Probe
ggagaattcacctcttcaggacgac

SEQ ID NO: 24865 - DNA, 25 bp, Artificial
  Probe
cagtgagatcgatagcaagaccgtt

SEQ ID NO: 24866 - DNA, 25 bp, Artificial
  Probe
agtcctttggaacctctcatcatgc

SEQ ID NO: 24867 - DNA, 25 bp, Artificial
  Probe
ccactgggtgcctaaggaatgtaag

SEQ ID NO: 24868 - DNA, 25 bp, Artificial
  Probe
tgcatcttgaggaacctctcatacc

SEQ ID NO: 24869 - DNA, 25 bp, Artificial
  Probe
aaaactgtgtgtgcatcttgaggaa

SEQ ID NO: 24870 - DNA, 25 bp, Artificial
  Probe
gtgagatcgatagcaagaccgttga

SEQ ID NO: 24871 - DNA, 25 bp, Artificial
  Probe
agtgagatcgatagcaagaccgttg

SEQ ID NO: 24872 - DNA, 25 bp, Artificial
  Probe
ctttggaacctctcatcatgcgatg

SEQ ID NO: 24873 - DNA, 25 bp, Artificial
  Probe
aggagtcctttggaacctctcatca

SEQ ID NO: 24874 - DNA, 25 bp, Artificial
  Probe
tcgatagcaagaccgttgaaaactg

SEQ ID NO: 24875 - DNA, 25 bp, Artificial
  Probe
gagcagtgagatcgatagcaagacc

SEQ ID NO: 24876 - DNA, 25 bp, Artificial
  Probe
ggagcagtgagatcgatagcaagac

SEQ ID NO: 24877 - DNA, 25 bp, Artificial
  Probe
gaaaactgtgtgtgcatcttgagga

SEQ ID NO: 24878 - DNA, 25 bp, Artificial
  Probe
acaggagtcctttggaacctctcat

SEQ ID NO: 24879 - DNA, 25 bp, Artificial
  Probe
cgttgaaaactgtgtgtgcatcttg

SEQ ID NO: 24880 - DNA, 25 bp, Artificial
  Probe
ctgggagaattcacctcttcaggac

SEQ ID NO: 24881 - DNA, 25 bp, Artificial
  Probe
tgaaaactgtgtgtgcatcttgagg

SEQ ID NO: 24882 - DNA, 25 bp, Artificial
  Probe
gcatcttgaggaacctctcataccg

SEQ ID NO: 24883 - DNA, 25 bp, Artificial
  Probe
gtgtgcatcttgaggaacctctcat

SEQ ID NO: 24884 - DNA, 25 bp, Artificial
  Probe
gatcgatagcaagaccgttgaaaac

SEQ ID NO: 24885 - DNA, 25 bp, Artificial
  Probe
tttattagggcgaagagaaaggaag

SEQ ID NO: 24886 - DNA, 25 bp, Artificial
  Probe
gatcactgaatctgtcatcacttgc

SEQ ID NO: 24887 - DNA, 25 bp, Artificial
  Probe
ctgaatctgtcatcacttgcgagta

SEQ ID NO: 24888 - DNA, 25 bp, Artificial
  Probe
ccagaagatgacctttgagttattc

SEQ ID NO: 24889 - DNA, 25 bp, Artificial
  Probe
gccagaagatgacctttgagttatt

SEQ ID NO: 24890 - DNA, 25 bp, Artificial
  Probe
ccaagacctaccgtgattacttaag

SEQ ID NO: 24891 - DNA, 25 bp, Artificial
  Probe
tgccagaagatgacctttgagttat

SEQ ID NO: 24892 - DNA, 25 bp, Artificial
  Probe
tgaatctgtcatcacttgcgagtac

SEQ ID NO: 24893 - DNA, 25 bp, Artificial
  Probe
ttgccagaagatgacctttgagtta

SEQ ID NO: 24894 - DNA, 25 bp, Artificial
  Probe
atcactgaatctgtcatcacttgcg

SEQ ID NO: 24895 - DNA, 25 bp, Artificial
  Probe
gaatctgtcatcacttgcgagtacc

SEQ ID NO: 24896 - DNA, 25 bp, Artificial
  Probe
cactgaatctgtcatcacttgcgag

SEQ ID NO: 24897 - DNA, 25 bp, Artificial
  Probe
tcacttgatcactgaatctgtcatc

SEQ ID NO: 24898 - DNA, 25 bp, Artificial
  Probe
gtcacttgatcactgaatctgtcat

SEQ ID NO: 24899 - DNA, 25 bp, Artificial
  Probe
aatctgtcatcacttgcgagtacct

SEQ ID NO: 24900 - DNA, 25 bp, Artificial
  Probe
ttttattagggcgaagagaaaggaa

SEQ ID NO: 24901 - DNA, 25 bp, Artificial
  Probe
cttgccagaagatgacctttgagtt

SEQ ID NO: 24902 - DNA, 25 bp, Artificial
  Probe
gttttattagggcgaagagaaagga

SEQ ID NO: 24903 - DNA, 25 bp, Artificial
  Probe
agttttattagggcgaagagaaagg

SEQ ID NO: 24904 - DNA, 25 bp, Artificial
  Probe
actgaatctgtcatcacttgcgagt

SEQ ID NO: 24905 - DNA, 25 bp, Artificial
  Probe
tcactgaatctgtcatcacttgcga

SEQ ID NO: 24906 - DNA, 25 bp, Artificial
  Probe
cagaagatgacctttgagttattct

SEQ ID NO: 24907 - DNA, 25 bp, Artificial
  Probe
agaagatgacctttgagttattctc

SEQ ID NO: 24908 - DNA, 25 bp, Artificial
  Probe
atcacttgcgagtacctggatgaag

SEQ ID NO: 24909 - DNA, 25 bp, Artificial
  Probe
atctgtcatcacttgcgagtacctg

SEQ ID NO: 24910 - DNA, 25 bp, Artificial
  Probe
aagcatacccggagaagaagttatt

SEQ ID NO: 24911 - DNA, 25 bp, Artificial
  Probe
ggtcacttgatcactgaatctgtca

SEQ ID NO: 24912 - DNA, 25 bp, Artificial
  Probe
ttgatcactgaatctgtcatcactt

SEQ ID NO: 24913 - DNA, 25 bp, Artificial
  Probe
gaagcatacccggagaagaagttat

SEQ ID NO: 24914 - DNA, 25 bp, Artificial
  Probe
cttgatcactgaatctgtcatcact

SEQ ID NO: 24915 - DNA, 25 bp, Artificial
  Probe
tgatcactgaatctgtcatcacttg

SEQ ID NO: 24916 - DNA, 25 bp, Artificial
  Probe
acttgatcactgaatctgtcatcac

SEQ ID NO: 24917 - DNA, 25 bp, Artificial
  Probe
cacttgatcactgaatctgtcatca

SEQ ID NO: 24918 - DNA, 25 bp, Artificial
  Probe
gaagatgacctttgagttattctca

SEQ ID NO: 24919 - DNA, 25 bp, Artificial
  Probe
actggagctcaatgagtgtatagac

SEQ ID NO: 24920 - DNA, 25 bp, Artificial
  Probe
tgaagcatacccggagaagaagtta

SEQ ID NO: 24921 - DNA, 25 bp, Artificial
  Probe
cttgcgagtacctggatgaagcata

SEQ ID NO: 24922 - DNA, 25 bp, Artificial
  Probe
ctggagctcaatgagtgtatagacc

SEQ ID NO: 24923 - DNA, 25 bp, Artificial
  Probe
ttgcgagtacctggatgaagcatac

SEQ ID NO: 24924 - DNA, 25 bp, Artificial
  Probe
catcacttgcgagtacctggatgaa

SEQ ID NO: 24925 - DNA, 25 bp, Artificial
  Probe
atgaagcatacccggagaagaagtt

SEQ ID NO: 24926 - DNA, 25 bp, Artificial
  Probe
ggagctcaatgagtgtatagaccac

SEQ ID NO: 24927 - DNA, 25 bp, Artificial
  Probe
gatgaagcatacccggagaagaagt

SEQ ID NO: 24928 - DNA, 25 bp, Artificial
  Probe
tggagctcaatgagtgtatagacca

SEQ ID NO: 24929 - DNA, 25 bp, Artificial
  Probe
agcttgccagaagatgacctttgag

SEQ ID NO: 24930 - DNA, 25 bp, Artificial
  Probe
tcttgtagttgtcctagtcatcctt

SEQ ID NO: 24931 - DNA, 25 bp, Artificial
  Probe
atgtcttgtagttgtcctagtcatc

SEQ ID NO: 24932 - DNA, 25 bp, Artificial
  Probe
gtcttgtagttgtcctagtcatcct

SEQ ID NO: 24933 - DNA, 25 bp, Artificial
  Probe
gagcagaggaagcaagattgattac

SEQ ID NO: 24934 - DNA, 25 bp, Artificial
  Probe
atatgtcttgtagttgtcctagtca

SEQ ID NO: 24935 - DNA, 25 bp, Artificial
  Probe
tgtcttgtagttgtcctagtcatcc

SEQ ID NO: 24936 - DNA, 25 bp, Artificial
  Probe
tatgtcttgtagttgtcctagtcat

SEQ ID NO: 24937 - DNA, 25 bp, Artificial
  Probe
cagagatagcagttagtcgtacaac

SEQ ID NO: 24938 - DNA, 25 bp, Artificial
  Probe
gcagaggaagcaagattgattacaa

SEQ ID NO: 24939 - DNA, 25 bp, Artificial
  Probe
tgagcagaggaagcaagattgatta

SEQ ID NO: 24940 - DNA, 25 bp, Artificial
  Probe
agcagaggaagcaagattgattaca

SEQ ID NO: 24941 - DNA, 25 bp, Artificial
  Probe
aagcagagatagcagttagtcgtac

SEQ ID NO: 24942 - DNA, 25 bp, Artificial
  Probe
atgtaatgttgaatacctacggtgt

SEQ ID NO: 24943 - DNA, 25 bp, Artificial
  Probe
tgtaatgttgaatacctacggtgta

SEQ ID NO: 24944 - DNA, 25 bp, Artificial
  Probe
gcagagatagcagttagtcgtacaa

SEQ ID NO: 24945 - DNA, 25 bp, Artificial
  Probe
aatgtaatgttgaatacctacggtg

SEQ ID NO: 24946 - DNA, 25 bp, Artificial
  Probe
cattctacaacctacatagtgcaac

SEQ ID NO: 24947 - DNA, 25 bp, Artificial
  Probe
tcattctacaacctacatagtgcaa

SEQ ID NO: 24948 - DNA, 25 bp, Artificial
  Probe
ttcattctacaacctacatagtgca

SEQ ID NO: 24949 - DNA, 25 bp, Artificial
  Probe
acacctttcattctacaacctacat

SEQ ID NO: 24950 - DNA, 25 bp, Artificial
  Probe
attctacaacctacatagtgcaacc

SEQ ID NO: 24951 - DNA, 25 bp, Artificial
  Probe
tacacctttcattctacaacctaca

SEQ ID NO: 24952 - DNA, 25 bp, Artificial
  Probe
gtaatgttgaatacctacggtgtac

SEQ ID NO: 24953 - DNA, 25 bp, Artificial
  Probe
tttcattctacaacctacatagtgc

SEQ ID NO: 24954 - DNA, 25 bp, Artificial
  Probe
ttgagcagaggaagcaagattgatt

SEQ ID NO: 24955 - DNA, 25 bp, Artificial
  Probe
ttgtagttgtcctagtcatcctttg

SEQ ID NO: 24956 - DNA, 25 bp, Artificial
  Probe
cttgtagttgtcctagtcatccttt

SEQ ID NO: 24957 - DNA, 25 bp, Artificial
  Probe
aaagcagagatagcagttagtcgta

SEQ ID NO: 24958 - DNA, 25 bp, Artificial
  Probe
ttctacaacctacatagtgcaacct

SEQ ID NO: 24959 - DNA, 25 bp, Artificial
  Probe
tagtcttcaatatctgggagaaagg

SEQ ID NO: 24960 - DNA, 25 bp, Artificial
  Probe
cagaggaagcaagattgattacaaa

SEQ ID NO: 24961 - DNA, 25 bp, Artificial
  Probe
tatatgtcttgtagttgtcctagtc

SEQ ID NO: 24962 - DNA, 25 bp, Artificial
  Probe
caagcgtagtgagtctaaacttcta

SEQ ID NO: 24963 - DNA, 25 bp, Artificial
  Probe
agcgtagtgagtctaaacttctaaa

SEQ ID NO: 24964 - DNA, 25 bp, Artificial
  Probe
aagcgtagtgagtctaaacttctaa

SEQ ID NO: 24965 - DNA, 25 bp, Artificial
  Probe
agcagagatagcagttagtcgtaca

SEQ ID NO: 24966 - DNA, 25 bp, Artificial
  Probe
cacctttcattctacaacctacata

SEQ ID NO: 24967 - DNA, 25 bp, Artificial
  Probe
gtacacctttcattctacaacctac

SEQ ID NO: 24968 - DNA, 25 bp, Artificial
  Probe
agtcttcaatatctgggagaaaggg

SEQ ID NO: 24969 - DNA, 25 bp, Artificial
  Probe
gtagttgtcctagtcatcctttgag

SEQ ID NO: 24970 - DNA, 25 bp, Artificial
  Probe
tctacaacctacatagtgcaacctg

SEQ ID NO: 24971 - DNA, 25 bp, Artificial
  Probe
gcgtagtgagtctaaacttctaaat

SEQ ID NO: 24972 - DNA, 25 bp, Artificial
  Probe
cctttcattctacaacctacatagt

SEQ ID NO: 24973 - DNA, 25 bp, Artificial
  Probe
acctttcattctacaacctacatag

SEQ ID NO: 24974 - DNA, 25 bp, Artificial
  Probe
tgtagttgtcctagtcatcctttga

SEQ ID NO: 24975 - DNA, 25 bp, Artificial
  Probe
tctactaggtctcattgtgtcttca

SEQ ID NO: 24976 - DNA, 25 bp, Artificial
  Probe
tactaggtctcattgtgtcttcaag

SEQ ID NO: 24977 - DNA, 25 bp, Artificial
  Probe
ctactaggtctcattgtgtcttcaa

SEQ ID NO: 24978 - DNA, 25 bp, Artificial
  Probe
actaggtctcattgtgtcttcaagg

SEQ ID NO: 24979 - DNA, 25 bp, Artificial
  Probe
gtgatttatgggaaggacagtagtt

SEQ ID NO: 24980 - DNA, 25 bp, Artificial
  Probe
atttatgggaaggacagtagttcag

SEQ ID NO: 24981 - DNA, 25 bp, Artificial
  Probe
gatttatgggaaggacagtagttca

SEQ ID NO: 24982 - DNA, 25 bp, Artificial
  Probe
tgatttatgggaaggacagtagttc

SEQ ID NO: 24983 - DNA, 25 bp, Artificial
  Probe
ggtgatttatgggaaggacagtagt

SEQ ID NO: 24984 - DNA, 25 bp, Artificial
  Probe
tggtgatttatgggaaggacagtag

SEQ ID NO: 24985 - DNA, 25 bp, Artificial
  Probe
tttatgggaaggacagtagttcagc

SEQ ID NO: 24986 - DNA, 25 bp, Artificial
  Probe
ctggtgatttatgggaaggacagta

SEQ ID NO: 24987 - DNA, 25 bp, Artificial
  Probe
ctaggtctcattgtgtcttcaaggg

SEQ ID NO: 24988 - DNA, 25 bp, Artificial
  Probe
actctggtgatttatgggaaggaca

SEQ ID NO: 24989 - DNA, 25 bp, Artificial
  Probe
ctctggtgatttatgggaaggacag

SEQ ID NO: 24990 - DNA, 25 bp, Artificial
  Probe
ggaatttctgggttcttctggatgg

SEQ ID NO: 24991 - DNA, 25 bp, Artificial
  Probe
gggaatttctgggttcttctggatg

SEQ ID NO: 24992 - DNA, 25 bp, Artificial
  Probe
cactctggtgatttatgggaaggac

SEQ ID NO: 24993 - DNA, 25 bp, Artificial
  Probe
tctggtgatttatgggaaggacagt

SEQ ID NO: 24994 - DNA, 25 bp, Artificial
  Probe
agtaatagcattcactctggtgatt

SEQ ID NO: 24995 - DNA, 25 bp, Artificial
  Probe
aagtaatagcattcactctggtgat

SEQ ID NO: 24996 - DNA, 25 bp, Artificial
  Probe
aaaccccttctcaataaacaacatg

SEQ ID NO: 24997 - DNA, 25 bp, Artificial
  Probe
ttatgggaaggacagtagttcagct

SEQ ID NO: 24998 - DNA, 25 bp, Artificial
  Probe
gaatttctgggttcttctggatggc

SEQ ID NO: 24999 - DNA, 25 bp, Artificial
  Probe
agaacaaccagccctgtttatttac

SEQ ID NO: 25000 - DNA, 25 bp, Artificial
  Probe
cagaacaaccagccctgtttattta

SEQ ID NO: 25001 - DNA, 25 bp, Artificial
  Probe
gaacaaccagccctgtttatttaca

SEQ ID NO: 25002 - DNA, 25 bp, Artificial
  Probe
taggtctcattgtgtcttcaagggc

SEQ ID NO: 25003 - DNA, 25 bp, Artificial
  Probe
ctcattgtgtcttcaagggcttgtc

SEQ ID NO: 25004 - DNA, 25 bp, Artificial
  Probe
gtctcattgtgtcttcaagggcttg

SEQ ID NO: 25005 - DNA, 25 bp, Artificial
  Probe
attcactctggtgatttatgggaag

SEQ ID NO: 25006 - DNA, 25 bp, Artificial
  Probe
tagcattcactctggtgatttatgg

SEQ ID NO: 25007 - DNA, 25 bp, Artificial
  Probe
cattcactctggtgatttatgggaa

SEQ ID NO: 25008 - DNA, 25 bp, Artificial
  Probe
gtaatagcattcactctggtgattt

SEQ ID NO: 25009 - DNA, 25 bp, Artificial
  Probe
atagcattcactctggtgatttatg

SEQ ID NO: 25010 - DNA, 25 bp, Artificial
  Probe
ccagccctgtttatttacagacttt

SEQ ID NO: 25011 - DNA, 25 bp, Artificial
  Probe
tctcattgtgtcttcaagggcttgt

SEQ ID NO: 25012 - DNA, 25 bp, Artificial
  Probe
aacaaccagccctgtttatttacag

SEQ ID NO: 25013 - DNA, 25 bp, Artificial
  Probe
aatagcattcactctggtgatttat

SEQ ID NO: 25014 - DNA, 25 bp, Artificial
  Probe
ggtctcattgtgtcttcaagggctt

SEQ ID NO: 25015 - DNA, 25 bp, Artificial
  Probe
caaccagccctgtttatttacagac

SEQ ID NO: 25016 - DNA, 25 bp, Artificial
  Probe
accagccctgtttatttacagactt

SEQ ID NO: 25017 - DNA, 25 bp, Artificial
  Probe
aaccagccctgtttatttacagact

SEQ ID NO: 25018 - DNA, 25 bp, Artificial
  Probe
ttcactctggtgatttatgggaagg

SEQ ID NO: 25019 - DNA, 25 bp, Artificial
  Probe
taatagcattcactctggtgattta

SEQ ID NO: 25020 - DNA, 25 bp, Artificial
  Probe
aggtcattggatcttgtctgtaatt

SEQ ID NO: 25021 - DNA, 25 bp, Artificial
  Probe
caggtcattggatcttgtctgtaat

SEQ ID NO: 25022 - DNA, 25 bp, Artificial
  Probe
aatccagtgtcattgtgtcttccag

SEQ ID NO: 25023 - DNA, 25 bp, Artificial
  Probe
cctctttgcgtgttaaatactctca

SEQ ID NO: 25024 - DNA, 25 bp, Artificial
  Probe
atcaatccagtgtcattgtgtcttc

SEQ ID NO: 25025 - DNA, 25 bp, Artificial
  Probe
ggtcattggatcttgtctgtaattt

SEQ ID NO: 25026 - DNA, 25 bp, Artificial
  Probe
ggaccagatagatgatctcacagtt

SEQ ID NO: 25027 - DNA, 25 bp, Artificial
  Probe
gatcaatccagtgtcattgtgtctt

SEQ ID NO: 25028 - DNA, 25 bp, Artificial
  Probe
cccatcaacaactgttcttctctaa

SEQ ID NO: 25029 - DNA, 25 bp, Artificial
  Probe
ccatcaacaactgttcttctctaaa

SEQ ID NO: 25030 - DNA, 25 bp, Artificial
  Probe
ccaggtcattggatcttgtctgtaa

SEQ ID NO: 25031 - DNA, 25 bp, Artificial
  Probe
ctctttgcgtgttaaatactctcac

SEQ ID NO: 25032 - DNA, 25 bp, Artificial
  Probe
ctttgcgtgttaaatactctcactg

SEQ ID NO: 25033 - DNA, 25 bp, Artificial
  Probe
tctttgcgtgttaaatactctcact

SEQ ID NO: 25034 - DNA, 25 bp, Artificial
  Probe
gcctctttgcgtgttaaatactctc

SEQ ID NO: 25035 - DNA, 25 bp, Artificial
  Probe
atagatgatctcacagtttgtcacc

SEQ ID NO: 25036 - DNA, 25 bp, Artificial
  Probe
gatagatgatctcacagtttgtcac

SEQ ID NO: 25037 - DNA, 25 bp, Artificial
  Probe
aagatgggcatcaaactatatatcc

SEQ ID NO: 25038 - DNA, 25 bp, Artificial
  Probe
ctgacctagagcttgctatgttgac

SEQ ID NO: 25039 - DNA, 25 bp, Artificial
  Probe
acccatcaacaactgttcttctcta

SEQ ID NO: 25040 - DNA, 25 bp, Artificial
  Probe
tagatgatctcacagtttgtcacct

SEQ ID NO: 25041 - DNA, 25 bp, Artificial
  Probe
aatactctcactgcacttgaaccaa

SEQ ID NO: 25042 - DNA, 25 bp, Artificial
  Probe
ctttcgttattgtagcttctctctt

SEQ ID NO: 25043 - DNA, 25 bp, Artificial
  Probe
tttcgttattgtagcttctctcttt

SEQ ID NO: 25044 - DNA, 25 bp, Artificial
  Probe
tgttaaatactctcactgcacttga

SEQ ID NO: 25045 - DNA, 25 bp, Artificial
  Probe
tttgcgtgttaaatactctcactgc

SEQ ID NO: 25046 - DNA, 25 bp, Artificial
  Probe
tcaatccagtgtcattgtgtcttcc

SEQ ID NO: 25047 - DNA, 25 bp, Artificial
  Probe
ccagatagatgatctcacagtttgt

SEQ ID NO: 25048 - DNA, 25 bp, Artificial
  Probe
accagatagatgatctcacagtttg

SEQ ID NO: 25049 - DNA, 25 bp, Artificial
  Probe
gaccagatagatgatctcacagttt

SEQ ID NO: 25050 - DNA, 25 bp, Artificial
  Probe
ttaaatactctcactgcacttgaac

SEQ ID NO: 25051 - DNA, 25 bp, Artificial
  Probe
gttaaatactctcactgcacttgaa

SEQ ID NO: 25052 - DNA, 25 bp, Artificial
  Probe
atactctcactgcacttgaaccaac

SEQ ID NO: 25053 - DNA, 25 bp, Artificial
  Probe
taaatactctcactgcacttgaacc

SEQ ID NO: 25054 - DNA, 25 bp, Artificial
  Probe
ccaagataatcaaactggaggtttc

SEQ ID NO: 25055 - DNA, 25 bp, Artificial
  Probe
gtcatgttcacaccttaaatcttat

SEQ ID NO: 25056 - DNA, 25 bp, Artificial
  Probe
agatagatgatctcacagtttgtca

SEQ ID NO: 25057 - DNA, 25 bp, Artificial
  Probe
cagatagatgatctcacagtttgtc

SEQ ID NO: 25058 - DNA, 25 bp, Artificial
  Probe
caagataatcaaactggaggtttca

SEQ ID NO: 25059 - DNA, 25 bp, Artificial
  Probe
tctctaaaactcctgtattcctgtg

SEQ ID NO: 25060 - DNA, 25 bp, Artificial
  Probe
ctccaaacccaaaatatccaacttt

SEQ ID NO: 25061 - DNA, 25 bp, Artificial
  Probe
atctccaaacccaaaatatccaact

SEQ ID NO: 25062 - DNA, 25 bp, Artificial
  Probe
aatctccaaacccaaaatatccaac

SEQ ID NO: 25063 - DNA, 25 bp, Artificial
  Probe
tctccaaacccaaaatatccaactt

SEQ ID NO: 25064 - DNA, 25 bp, Artificial
  Probe
caatccagtgtcattgtgtcttcca

SEQ ID NO: 25065 - DNA, 25 bp, Artificial
  Probe
tggaactgagcattctgtaatattc

SEQ ID NO: 25066 - DNA, 25 bp, Artificial
  Probe
ggaactgagcattctgtaatattct

SEQ ID NO: 25067 - DNA, 25 bp, Artificial
  Probe
gcaccaatcatctataaactcaacc

SEQ ID NO: 25068 - DNA, 25 bp, Artificial
  Probe
atggaactgagcattctgtaatatt

SEQ ID NO: 25069 - DNA, 25 bp, Artificial
  Probe
gcaagtttagcaccaatcatctata

SEQ ID NO: 25070 - DNA, 25 bp, Artificial
  Probe
agcaccaatcatctataaactcaac

SEQ ID NO: 25071 - DNA, 25 bp, Artificial
  Probe
actgagcattctgtaatattctagg

SEQ ID NO: 25072 - DNA, 25 bp, Artificial
  Probe
tcaatggaactgagcattctgtaat

SEQ ID NO: 25073 - DNA, 25 bp, Artificial
  Probe
atcaatggaactgagcattctgtaa

SEQ ID NO: 25074 - DNA, 25 bp, Artificial
  Probe
aatcaatggaactgagcattctgta

SEQ ID NO: 25075 - DNA, 25 bp, Artificial
  Probe
taatcaatggaactgagcattctgt

SEQ ID NO: 25076 - DNA, 25 bp, Artificial
  Probe
ccaatcatctataaactcaaccaca

SEQ ID NO: 25077 - DNA, 25 bp, Artificial
  Probe
accaatcatctataaactcaaccac

SEQ ID NO: 25078 - DNA, 25 bp, Artificial
  Probe
caccaatcatctataaactcaacca

SEQ ID NO: 25079 - DNA, 25 bp, Artificial
  Probe
ataatcaatggaactgagcattctg

SEQ ID NO: 25080 - DNA, 25 bp, Artificial
  Probe
caatggaactgagcattctgtaata

SEQ ID NO: 25081 - DNA, 25 bp, Artificial
  Probe
ggcaagtttagcaccaatcatctat

SEQ ID NO: 25082 - DNA, 25 bp, Artificial
  Probe
tttagaggcaagtttagcaccaatc

SEQ ID NO: 25083 - DNA, 25 bp, Artificial
  Probe
caaagaaacttgacagtggattaca

SEQ ID NO: 25084 - DNA, 25 bp, Artificial
  Probe
acaaagaaacttgacagtggattac

SEQ ID NO: 25085 - DNA, 25 bp, Artificial
  Probe
cccgtaaggatattaaaccagattt

SEQ ID NO: 25086 - DNA, 25 bp, Artificial
  Probe
gacaaagaaacttgacagtggatta

SEQ ID NO: 25087 - DNA, 25 bp, Artificial
  Probe
aataatcaatggaactgagcattct

SEQ ID NO: 25088 - DNA, 25 bp, Artificial
  Probe
cgtaaggatattaaaccagatttgc

SEQ ID NO: 25089 - DNA, 25 bp, Artificial
  Probe
tgacaaagaaacttgacagtggatt

SEQ ID NO: 25090 - DNA, 25 bp, Artificial
  Probe
aaagaaacttgacagtggattacat

SEQ ID NO: 25091 - DNA, 25 bp, Artificial
  Probe
aatggaactgagcattctgtaatat

SEQ ID NO: 25092 - DNA, 25 bp, Artificial
  Probe
gaactctactctgttggtgaaagtg

SEQ ID NO: 25093 - DNA, 25 bp, Artificial
  Probe
aactctactctgttggtgaaagtga

SEQ ID NO: 25094 - DNA, 25 bp, Artificial
  Probe
accacatcagactcagaccagaatt

SEQ ID NO: 25095 - DNA, 25 bp, Artificial
  Probe
tactctgttggtgaaagtgacaaag

SEQ ID NO: 25096 - DNA, 25 bp, Artificial
  Probe
ctactctgttggtgaaagtgacaaa

SEQ ID NO: 25097 - DNA, 25 bp, Artificial
  Probe
tagcaccaatcatctataaactcaa

SEQ ID NO: 25098 - DNA, 25 bp, Artificial
  Probe
ttagcaccaatcatctataaactca

SEQ ID NO: 25099 - DNA, 25 bp, Artificial
  Probe
aggcaagtttagcaccaatcatcta

SEQ ID NO: 25100 - DNA, 25 bp, Artificial
  Probe
tagaggcaagtttagcaccaatcat

SEQ ID NO: 25101 - DNA, 25 bp, Artificial
  Probe
gtgacaaagaaacttgacagtggat

SEQ ID NO: 25102 - DNA, 25 bp, Artificial
  Probe
ctgttggtgaaagtgacaaagaaac

SEQ ID NO: 25103 - DNA, 25 bp, Artificial
  Probe
tctgttggtgaaagtgacaaagaaa

SEQ ID NO: 25104 - DNA, 25 bp, Artificial
  Probe
ccgtaaggatattaaaccagatttg

SEQ ID NO: 25105 - DNA, 25 bp, Artificial
  Probe
tgttggtgaaagtgacaaagaaact

SEQ ID NO: 25106 - DNA, 25 bp, Artificial
  Probe
ttctgtaatattctagggtcactcc

SEQ ID NO: 25107 - DNA, 25 bp, Artificial
  Probe
gcattctgtaatattctagggtcac

SEQ ID NO: 25108 - DNA, 25 bp, Artificial
  Probe
agcattctgtaatattctagggtca

SEQ ID NO: 25109 - DNA, 25 bp, Artificial
  Probe
tgagcattctgtaatattctagggt

SEQ ID NO: 25110 - DNA, 25 bp, Artificial
  Probe
ctcctgcctctacatattcatagtt

SEQ ID NO: 25111 - DNA, 25 bp, Artificial
  Probe
taatatcatagccgtggagagagtc

SEQ ID NO: 25112 - DNA, 25 bp, Artificial
  Probe
ctaatatcatagccgtggagagagt

SEQ ID NO: 25113 - DNA, 25 bp, Artificial
  Probe
ccttacagactagccatacttaaca

SEQ ID NO: 25114 - DNA, 25 bp, Artificial
  Probe
tctaatatcatagccgtggagagag

SEQ ID NO: 25115 - DNA, 25 bp, Artificial
  Probe
gccttacagactagccatacttaac

SEQ ID NO: 25116 - DNA, 25 bp, Artificial
  Probe
gtctaatatcatagccgtggagaga

SEQ ID NO: 25117 - DNA, 25 bp, Artificial
  Probe
agtctaatatcatagccgtggagag

SEQ ID NO: 25118 - DNA, 25 bp, Artificial
  Probe
gagtctaatatcatagccgtggaga

SEQ ID NO: 25119 - DNA, 25 bp, Artificial
  Probe
gctcctgcctctacatattcatagt

SEQ ID NO: 25120 - DNA, 25 bp, Artificial
  Probe
tgctcctgcctctacatattcatag

SEQ ID NO: 25121 - DNA, 25 bp, Artificial
  Probe
ctgctcctgcctctacatattcata

SEQ ID NO: 25122 - DNA, 25 bp, Artificial
  Probe
tgccttacagactagccatacttaa

SEQ ID NO: 25123 - DNA, 25 bp, Artificial
  Probe
ttgccttacagactagccatactta

SEQ ID NO: 25124 - DNA, 25 bp, Artificial
  Probe
catacttaacagtggaatgaggaag

SEQ ID NO: 25125 - DNA, 25 bp, Artificial
  Probe
tacagactagccatacttaacagtg

SEQ ID NO: 25126 - DNA, 25 bp, Artificial
  Probe
ggagtctaatatcatagccgtggag

SEQ ID NO: 25127 - DNA, 25 bp, Artificial
  Probe
cttacagactagccatacttaacag

SEQ ID NO: 25128 - DNA, 25 bp, Artificial
  Probe
attgccttacagactagccatactt

SEQ ID NO: 25129 - DNA, 25 bp, Artificial
  Probe
aattgccttacagactagccatact

SEQ ID NO: 25130 - DNA, 25 bp, Artificial
  Probe
ttacagactagccatacttaacagt

SEQ ID NO: 25131 - DNA, 25 bp, Artificial
  Probe
ctggagtctaatatcatagccgtgg

SEQ ID NO: 25132 - DNA, 25 bp, Artificial
  Probe
cctggagtctaatatcatagccgtg

SEQ ID NO: 25133 - DNA, 25 bp, Artificial
  Probe
tggagtctaatatcatagccgtgga

SEQ ID NO: 25134 - DNA, 25 bp, Artificial
  Probe
acctggagtctaatatcatagccgt

SEQ ID NO: 25135 - DNA, 25 bp, Artificial
  Probe
atccgacctggagtctaatatcata

SEQ ID NO: 25136 - DNA, 25 bp, Artificial
  Probe
tatccgacctggagtctaatatcat

SEQ ID NO: 25137 - DNA, 25 bp, Artificial
  Probe
tccgacctggagtctaatatcatag

SEQ ID NO: 25138 - DNA, 25 bp, Artificial
  Probe
ctatccgacctggagtctaatatca

SEQ ID NO: 25139 - DNA, 25 bp, Artificial
  Probe
ctcaacacaatcatggactacaacc

SEQ ID NO: 25140 - DNA, 25 bp, Artificial
  Probe
tagccatacttaacagtggaatgag

SEQ ID NO: 25141 - DNA, 25 bp, Artificial
  Probe
ccatacttaacagtggaatgaggaa

SEQ ID NO: 25142 - DNA, 25 bp, Artificial
  Probe
atatcatagccgtggagagagtcaa

SEQ ID NO: 25143 - DNA, 25 bp, Artificial
  Probe
aatatcatagccgtggagagagtca

SEQ ID NO: 25144 - DNA, 25 bp, Artificial
  Probe
ctagccatacttaacagtggaatga

SEQ ID NO: 25145 - DNA, 25 bp, Artificial
  Probe
gactagccatacttaacagtggaat

SEQ ID NO: 25146 - DNA, 25 bp, Artificial
  Probe
actagccatacttaacagtggaatg

SEQ ID NO: 25147 - DNA, 25 bp, Artificial
  Probe
agactagccatacttaacagtggaa

SEQ ID NO: 25148 - DNA, 25 bp, Artificial
  Probe
gacctggagtctaatatcatagccg

SEQ ID NO: 25149 - DNA, 25 bp, Artificial
  Probe
cgacctggagtctaatatcatagcc

SEQ ID NO: 25150 - DNA, 25 bp, Artificial
  Probe
ccgacctggagtctaatatcatagc

SEQ ID NO: 25151 - DNA, 25 bp, Artificial
  Probe
tgcctctacatattcatagtttcca

SEQ ID NO: 25152 - DNA, 25 bp, Artificial
  Probe
tcctgcctctacatattcatagttt

SEQ ID NO: 25153 - DNA, 25 bp, Artificial
  Probe
gctcaacacaatcatggactacaac

SEQ ID NO: 25154 - DNA, 25 bp, Artificial
  Probe
cagactagccatacttaacagtgga

SEQ ID NO: 25155 - DNA, 25 bp, Artificial
  Probe
ttctaaaggatacagcagcacaaat

SEQ ID NO: 25156 - DNA, 25 bp, Artificial
  Probe
taaaggatacagcagcacaaatgat

SEQ ID NO: 25157 - DNA, 25 bp, Artificial
  Probe
ctgaccttatctctgaaacctctga

SEQ ID NO: 25158 - DNA, 25 bp, Artificial
  Probe
ctaaaggatacagcagcacaaatga

SEQ ID NO: 25159 - DNA, 25 bp, Artificial
  Probe
tctaaaggatacagcagcacaaatg

SEQ ID NO: 25160 - DNA, 25 bp, Artificial
  Probe
gttctaaaggatacagcagcacaaa

SEQ ID NO: 25161 - DNA, 25 bp, Artificial
  Probe
aaaggatacagcagcacaaatgatg

SEQ ID NO: 25162 - DNA, 25 bp, Artificial
  Probe
cctgaccttatctctgaaacctctg

SEQ ID NO: 25163 - DNA, 25 bp, Artificial
  Probe
atgagtactgttgcaccattcctat

SEQ ID NO: 25164 - DNA, 25 bp, Artificial
  Probe
tgttctaaaggatacagcagcacaa

SEQ ID NO: 25165 - DNA, 25 bp, Artificial
  Probe
cacccagctatttcaagaatgtcag

SEQ ID NO: 25166 - DNA, 25 bp, Artificial
  Probe
gatgagtactgttgcaccattccta

SEQ ID NO: 25167 - DNA, 25 bp, Artificial
  Probe
tgagtactgttgcaccattcctatg

SEQ ID NO: 25168 - DNA, 25 bp, Artificial
  Probe
gcctgaccttatctctgaaacctct

SEQ ID NO: 25169 - DNA, 25 bp, Artificial
  Probe
acccagctatttcaagaatgtcagg

SEQ ID NO: 25170 - DNA, 25 bp, Artificial
  Probe
tgcctgaccttatctctgaaacctc

SEQ ID NO: 25171 - DNA, 25 bp, Artificial
  Probe
ctgcctgaccttatctctgaaacct

SEQ ID NO: 25172 - DNA, 25 bp, Artificial
  Probe
caaatgatgcttcctcctgagtgtg

SEQ ID NO: 25173 - DNA, 25 bp, Artificial
  Probe
catgcacccagctatttcaagaatg

SEQ ID NO: 25174 - DNA, 25 bp, Artificial
  Probe
atgcacccagctatttcaagaatgt

SEQ ID NO: 25175 - DNA, 25 bp, Artificial
  Probe
acatgcacccagctatttcaagaat

SEQ ID NO: 25176 - DNA, 25 bp, Artificial
  Probe
ttccttttgtctttgggtccttctt

SEQ ID NO: 25177 - DNA, 25 bp, Artificial
  Probe
aacatgcacccagctatttcaagaa

SEQ ID NO: 25178 - DNA, 25 bp, Artificial
  Probe
ctgctgcctgaccttatctctgaaa

SEQ ID NO: 25179 - DNA, 25 bp, Artificial
  Probe
gcacccagctatttcaagaatgtca

SEQ ID NO: 25180 - DNA, 25 bp, Artificial
  Probe
cacaaatgatgcttcctcctgagtg

SEQ ID NO: 25181 - DNA, 25 bp, Artificial
  Probe
tgcacccagctatttcaagaatgtc

SEQ ID NO: 25182 - DNA, 25 bp, Artificial
  Probe
gttccttttgtctttgggtccttct

SEQ ID NO: 25183 - DNA, 25 bp, Artificial
  Probe
acaaatgatgcttcctcctgagtgt

SEQ ID NO: 25184 - DNA, 25 bp, Artificial
  Probe
tgctgcctgaccttatctctgaaac

SEQ ID NO: 25185 - DNA, 25 bp, Artificial
  Probe
cccagctatttcaagaatgtcaggc

SEQ ID NO: 25186 - DNA, 25 bp, Artificial
  Probe
caacatgcacccagctatttcaaga

SEQ ID NO: 25187 - DNA, 25 bp, Artificial
  Probe
aaatgatgcttcctcctgagtgtgg

SEQ ID NO: 25188 - DNA, 25 bp, Artificial
  Probe
agctatttcaagaatgtcaggccac

SEQ ID NO: 25189 - DNA, 25 bp, Artificial
  Probe
cagctatttcaagaatgtcaggcca

SEQ ID NO: 25190 - DNA, 25 bp, Artificial
  Probe
caataaaagttcccataatagtgtg

SEQ ID NO: 25191 - DNA, 25 bp, Artificial
  Probe
ttctatgagttccaacatgcaccca

SEQ ID NO: 25192 - DNA, 25 bp, Artificial
  Probe
tcaataaaagttcccataatagtgt

SEQ ID NO: 25193 - DNA, 25 bp, Artificial
  Probe
ggttccttttgtctttgggtccttc

SEQ ID NO: 25194 - DNA, 25 bp, Artificial
  Probe
ctatttcaagaatgtcaggccaccc

SEQ ID NO: 25195 - DNA, 25 bp, Artificial
  Probe
aagagctgttggcatctgaggattt

SEQ ID NO: 25196 - DNA, 25 bp, Artificial
  Probe
aaagagctgttggcatctgaggatt

SEQ ID NO: 25197 - DNA, 25 bp, Artificial
  Probe
aataaaagttcccataatagtgtgg

SEQ ID NO: 25198 - DNA, 25 bp, Artificial
  Probe
ccaacatgcacccagctatttcaag

SEQ ID NO: 25199 - DNA, 25 bp, Artificial
  Probe
gttccaacatgcacccagctatttc

SEQ ID NO: 25200 - DNA, 25 bp, Artificial
  Probe
gtggacagaagatcctacacaagaa

SEQ ID NO: 25201 - DNA, 25 bp, Artificial
  Probe
atcctacacaagaaaggcaaagtat

SEQ ID NO: 25202 - DNA, 25 bp, Artificial
  Probe
tcctacacaagaaaggcaaagtata

SEQ ID NO: 25203 - DNA, 25 bp, Artificial
  Probe
gaagctgtgatttctgttacgaatt

SEQ ID NO: 25204 - DNA, 25 bp, Artificial
  Probe
gatcctacacaagaaaggcaaagta

SEQ ID NO: 25205 - DNA, 25 bp, Artificial
  Probe
gacagaagatcctacacaagaaagg

SEQ ID NO: 25206 - DNA, 25 bp, Artificial
  Probe
ggacagaagatcctacacaagaaag

SEQ ID NO: 25207 - DNA, 25 bp, Artificial
  Probe
aagatcctacacaagaaaggcaaag

SEQ ID NO: 25208 - DNA, 25 bp, Artificial
  Probe
gaagatcctacacaagaaaggcaaa

SEQ ID NO: 25209 - DNA, 25 bp, Artificial
  Probe
tggacagaagatcctacacaagaaa

SEQ ID NO: 25210 - DNA, 25 bp, Artificial
  Probe
ccagcagataaagcactttctctct

SEQ ID NO: 25211 - DNA, 25 bp, Artificial
  Probe
agaagatcctacacaagaaaggcaa

SEQ ID NO: 25212 - DNA, 25 bp, Artificial
  Probe
agatcctacacaagaaaggcaaagt

SEQ ID NO: 25213 - DNA, 25 bp, Artificial
  Probe
atttctgttacgaattcccatttcc

SEQ ID NO: 25214 - DNA, 25 bp, Artificial
  Probe
gtgatttctgttacgaattcccatt

SEQ ID NO: 25215 - DNA, 25 bp, Artificial
  Probe
aagctgtgatttctgttacgaattc

SEQ ID NO: 25216 - DNA, 25 bp, Artificial
  Probe
cctacacaagaaaggcaaagtatac

SEQ ID NO: 25217 - DNA, 25 bp, Artificial
  Probe
cagaagatcctacacaagaaaggca

SEQ ID NO: 25218 - DNA, 25 bp, Artificial
  Probe
acagaagatcctacacaagaaaggc

SEQ ID NO: 25219 - DNA, 25 bp, Artificial
  Probe
tgtgatttctgttacgaattcccat

SEQ ID NO: 25220 - DNA, 25 bp, Artificial
  Probe
tgatttctgttacgaattcccattt

SEQ ID NO: 25221 - DNA, 25 bp, Artificial
  Probe
gatttctgttacgaattcccatttc

SEQ ID NO: 25222 - DNA, 25 bp, Artificial
  Probe
ctgtgatttctgttacgaattccca

SEQ ID NO: 25223 - DNA, 25 bp, Artificial
  Probe
agaagctgtgatttctgttacgaat

SEQ ID NO: 25224 - DNA, 25 bp, Artificial
  Probe
tttctgttacgaattcccatttccc

SEQ ID NO: 25225 - DNA, 25 bp, Artificial
  Probe
agctgtgatttctgttacgaattcc

SEQ ID NO: 25226 - DNA, 25 bp, Artificial
  Probe
aagccagcagataaagcactttctc

SEQ ID NO: 25227 - DNA, 25 bp, Artificial
  Probe
gaagccagcagataaagcactttct

SEQ ID NO: 25228 - DNA, 25 bp, Artificial
  Probe
gccagcagataaagcactttctctc

SEQ ID NO: 25229 - DNA, 25 bp, Artificial
  Probe
ttctgttacgaattcccatttccca

SEQ ID NO: 25230 - DNA, 25 bp, Artificial
  Probe
gctgtgatttctgttacgaattccc

SEQ ID NO: 25231 - DNA, 25 bp, Artificial
  Probe
cagataaagcactttctctctgaaa

SEQ ID NO: 25232 - DNA, 25 bp, Artificial
  Probe
gcagataaagcactttctctctgaa

SEQ ID NO: 25233 - DNA, 25 bp, Artificial
  Probe
agccagcagataaagcactttctct

SEQ ID NO: 25234 - DNA, 25 bp, Artificial
  Probe
ggaagccagcagataaagcactttc

SEQ ID NO: 25235 - DNA, 25 bp, Artificial
  Probe
agcagataaagcactttctctctga

SEQ ID NO: 25236 - DNA, 25 bp, Artificial
  Probe
cagcagataaagcactttctctctg

SEQ ID NO: 25237 - DNA, 25 bp, Artificial
  Probe
tctgttacgaattcccatttcccac

SEQ ID NO: 25238 - DNA, 25 bp, Artificial
  Probe
gagagagggtaggaacatgaccttc

SEQ ID NO: 25239 - DNA, 25 bp, Artificial
  Probe
agataaagcactttctctctgaaaa

SEQ ID NO: 25240 - DNA, 25 bp, Artificial
  Probe
ccactgtggacagaagatcctacac

SEQ ID NO: 25241 - DNA, 25 bp, Artificial
  Probe
ttcgtgagagagggtaggaacatga

SEQ ID NO: 25242 - DNA, 25 bp, Artificial
  Probe
ctgtggacagaagatcctacacaag

SEQ ID NO: 25243 - DNA, 25 bp, Artificial
  Probe
acaagaaaggcaaagtatactggta

SEQ ID NO: 25244 - DNA, 25 bp, Artificial
  Probe
agaaaggcaaagtatactggtacaa

SEQ ID NO: 25245 - DNA, 25 bp, Artificial
  Probe
tcagttattaggagtaggagacaga

SEQ ID NO: 25246 - DNA, 25 bp, Artificial
  Probe
ttctggtcagttattaggagtagga

SEQ ID NO: 25247 - DNA, 25 bp, Artificial
  Probe
ctggtcagttattaggagtaggaga

SEQ ID NO: 25248 - DNA, 25 bp, Artificial
  Probe
tctggtcagttattaggagtaggag

SEQ ID NO: 25249 - DNA, 25 bp, Artificial
  Probe
agttattaggagtaggagacagatg

SEQ ID NO: 25250 - DNA, 25 bp, Artificial
  Probe
cagttattaggagtaggagacagat

SEQ ID NO: 25251 - DNA, 25 bp, Artificial
  Probe
gttattaggagtaggagacagatgt

SEQ ID NO: 25252 - DNA, 25 bp, Artificial
  Probe
attactcactggagagattggactt

SEQ ID NO: 25253 - DNA, 25 bp, Artificial
  Probe
aacattactcactggagagattgga

SEQ ID NO: 25254 - DNA, 25 bp, Artificial
  Probe
ggtcagttattaggagtaggagaca

SEQ ID NO: 25255 - DNA, 25 bp, Artificial
  Probe
tggtcagttattaggagtaggagac

SEQ ID NO: 25256 - DNA, 25 bp, Artificial
  Probe
gtcagttattaggagtaggagacag

SEQ ID NO: 25257 - DNA, 25 bp, Artificial
  Probe
cattactcactggagagattggact

SEQ ID NO: 25258 - DNA, 25 bp, Artificial
  Probe
acattactcactggagagattggac

SEQ ID NO: 25259 - DNA, 25 bp, Artificial
  Probe
attaggagtaggagacagatgtcaa

SEQ ID NO: 25260 - DNA, 25 bp, Artificial
  Probe
tattaggagtaggagacagatgtca

SEQ ID NO: 25261 - DNA, 25 bp, Artificial
  Probe
tttctggtcagttattaggagtagg

SEQ ID NO: 25262 - DNA, 25 bp, Artificial
  Probe
ttattaggagtaggagacagatgtc

SEQ ID NO: 25263 - DNA, 25 bp, Artificial
  Probe
gagagattggactttctggagttat

SEQ ID NO: 25264 - DNA, 25 bp, Artificial
  Probe
cagatgtcaaaccattagtctcgtt

SEQ ID NO: 25265 - DNA, 25 bp, Artificial
  Probe
agagattggactttctggagttatt

SEQ ID NO: 25266 - DNA, 25 bp, Artificial
  Probe
agatgtcaaaccattagtctcgttg

SEQ ID NO: 25267 - DNA, 25 bp, Artificial
  Probe
atgtcaaaccattagtctcgttgtc

SEQ ID NO: 25268 - DNA, 25 bp, Artificial
  Probe
gatgtcaaaccattagtctcgttgt

SEQ ID NO: 25269 - DNA, 25 bp, Artificial
  Probe
gagattggactttctggagttattt

SEQ ID NO: 25270 - DNA, 25 bp, Artificial
  Probe
ttactcactggagagattggacttt

SEQ ID NO: 25271 - DNA, 25 bp, Artificial
  Probe
ttggactttctggagttatttaacc

SEQ ID NO: 25272 - DNA, 25 bp, Artificial
  Probe
ggagagattggactttctggagtta

SEQ ID NO: 25273 - DNA, 25 bp, Artificial
  Probe
gtctacacatagagaaccaaggcag

SEQ ID NO: 25274 - DNA, 25 bp, Artificial
  Probe
tactcactggagagattggactttc

SEQ ID NO: 25275 - DNA, 25 bp, Artificial
  Probe
acagatgtcaaaccattagtctcgt

SEQ ID NO: 25276 - DNA, 25 bp, Artificial
  Probe
aaccattagtctcgttgtcactagc

SEQ ID NO: 25277 - DNA, 25 bp, Artificial
  Probe
gtcaaaccattagtctcgttgtcac

SEQ ID NO: 25278 - DNA, 25 bp, Artificial
  Probe
tcaaaccattagtctcgttgtcact

SEQ ID NO: 25279 - DNA, 25 bp, Artificial
  Probe
tggactttctggagttatttaacca

SEQ ID NO: 25280 - DNA, 25 bp, Artificial
  Probe
ggactttctggagttatttaaccac

SEQ ID NO: 25281 - DNA, 25 bp, Artificial
  Probe
aaaccattagtctcgttgtcactag

SEQ ID NO: 25282 - DNA, 25 bp, Artificial
  Probe
caaaccattagtctcgttgtcacta

SEQ ID NO: 25283 - DNA, 25 bp, Artificial
  Probe
tgtcaaaccattagtctcgttgtca

SEQ ID NO: 25284 - DNA, 25 bp, Artificial
  Probe
tgtctacacatagagaaccaaggca

SEQ ID NO: 25285 - DNA, 25 bp, Artificial
  Probe
taggagacagatgtcaaaccattag

SEQ ID NO: 25286 - DNA, 25 bp, Artificial
  Probe
gtaggagacagatgtcaaaccatta

SEQ ID NO: 25287 - DNA, 25 bp, Artificial
  Probe
ttaggagtaggagacagatgtcaaa

SEQ ID NO: 25288 - DNA, 25 bp, Artificial
  Probe
agattggactttctggagttattta

SEQ ID NO: 25289 - DNA, 25 bp, Artificial
  Probe
gactttctggagttatttaaccact

SEQ ID NO: 25290 - DNA, 25 bp, Artificial
  Probe
tagccaccatcttaaagcaaagtag

SEQ ID NO: 25291 - DNA, 25 bp, Artificial
  Probe
gtagccaccatcttaaagcaaagta

SEQ ID NO: 25292 - DNA, 25 bp, Artificial
  Probe
ctcaagagagtagccaccatcttaa

SEQ ID NO: 25293 - DNA, 25 bp, Artificial
  Probe
gagtagccaccatcttaaagcaaag

SEQ ID NO: 25294 - DNA, 25 bp, Artificial
  Probe
ctcaggagaggtattaacagtatta

SEQ ID NO: 25295 - DNA, 25 bp, Artificial
  Probe
agagtagccaccatcttaaagcaaa

SEQ ID NO: 25296 - DNA, 25 bp, Artificial
  Probe
agtagccaccatcttaaagcaaagt

SEQ ID NO: 25297 - DNA, 25 bp, Artificial
  Probe
tcaggagaggtattaacagtattat

SEQ ID NO: 25298 - DNA, 25 bp, Artificial
  Probe
gagagtagccaccatcttaaagcaa

SEQ ID NO: 25299 - DNA, 25 bp, Artificial
  Probe
caggagaggtattaacagtattatc

SEQ ID NO: 25300 - DNA, 25 bp, Artificial
  Probe
caagagagtagccaccatcttaaag

SEQ ID NO: 25301 - DNA, 25 bp, Artificial
  Probe
ttctaagaactcaagagagtagcca

SEQ ID NO: 25302 - DNA, 25 bp, Artificial
  Probe
tcaagagagtagccaccatcttaaa

SEQ ID NO: 25303 - DNA, 25 bp, Artificial
  Probe
agagagtagccaccatcttaaagca

SEQ ID NO: 25304 - DNA, 25 bp, Artificial
  Probe
tctaagaactcaagagagtagccac

SEQ ID NO: 25305 - DNA, 25 bp, Artificial
  Probe
catattgaaaagatgacattgcccc

SEQ ID NO: 25306 - DNA, 25 bp, Artificial
  Probe
agccaccatcttaaagcaaagtagc

SEQ ID NO: 25307 - DNA, 25 bp, Artificial
  Probe
atattgaaaagatgacattgccccg

SEQ ID NO: 25308 - DNA, 25 bp, Artificial
  Probe
ctaagaactcaagagagtagccacc

SEQ ID NO: 25309 - DNA, 25 bp, Artificial
  Probe
gttctaagaactcaagagagtagcc

SEQ ID NO: 25310 - DNA, 25 bp, Artificial
  Probe
aagagagtagccaccatcttaaagc

SEQ ID NO: 25311 - DNA, 25 bp, Artificial
  Probe
actcaagagagtagccaccatctta

SEQ ID NO: 25312 - DNA, 25 bp, Artificial
  Probe
taagaactcaagagagtagccacca

SEQ ID NO: 25313 - DNA, 25 bp, Artificial
  Probe
caaatctgccattggaggtgtcttc

SEQ ID NO: 25314 - DNA, 25 bp, Artificial
  Probe
aactcaagagagtagccaccatctt

SEQ ID NO: 25315 - DNA, 25 bp, Artificial
  Probe
aagaactcaagagagtagccaccat

SEQ ID NO: 25316 - DNA, 25 bp, Artificial
  Probe
cctcaggagaggtattaacagtatt

SEQ ID NO: 25317 - DNA, 25 bp, Artificial
  Probe
gcctcaggagaggtattaacagtat

SEQ ID NO: 25318 - DNA, 25 bp, Artificial
  Probe
tcatattgaaaagatgacattgccc

SEQ ID NO: 25319 - DNA, 25 bp, Artificial
  Probe
gaactcaagagagtagccaccatct

SEQ ID NO: 25320 - DNA, 25 bp, Artificial
  Probe
agaactcaagagagtagccaccatc

SEQ ID NO: 25321 - DNA, 25 bp, Artificial
  Probe
ttcatattgaaaagatgacattgcc

SEQ ID NO: 25322 - DNA, 25 bp, Artificial
  Probe
cttggcttggtcattccctaccttt

SEQ ID NO: 25323 - DNA, 25 bp, Artificial
  Probe
aaatctgccattggaggtgtcttcc

SEQ ID NO: 25324 - DNA, 25 bp, Artificial
  Probe
ggcctcaggagaggtattaacagta

SEQ ID NO: 25325 - DNA, 25 bp, Artificial
  Probe
tttcatattgaaaagatgacattgc

SEQ ID NO: 25326 - DNA, 25 bp, Artificial
  Probe
gagttcaagtctgacaatactgtgt

SEQ ID NO: 25327 - DNA, 25 bp, Artificial
  Probe
gtggagttcaagtctgacaatactg

SEQ ID NO: 25328 - DNA, 25 bp, Artificial
  Probe
ggagttcaagtctgacaatactgtg

SEQ ID NO: 25329 - DNA, 25 bp, Artificial
  Probe
tggagttcaagtctgacaatactgt

SEQ ID NO: 25330 - DNA, 25 bp, Artificial
  Probe
tgtggagttcaagtctgacaatact

SEQ ID NO: 25331 - DNA, 25 bp, Artificial
  Probe
gtgtggagttcaagtctgacaatac

SEQ ID NO: 25332 - DNA, 25 bp, Artificial
  Probe
ctaagacaagaaggagaagcagagc

SEQ ID NO: 25333 - DNA, 25 bp, Artificial
  Probe
cctaagacaagaaggagaagcagag

SEQ ID NO: 25334 - DNA, 25 bp, Artificial
  Probe
cgtgtggagttcaagtctgacaata

SEQ ID NO: 25335 - DNA, 25 bp, Artificial
  Probe
aatgatgtgtgcaagtatgatttcg

SEQ ID NO: 25336 - DNA, 25 bp, Artificial
  Probe
caatgatgtgtgcaagtatgatttc

SEQ ID NO: 25337 - DNA, 25 bp, Artificial
  Probe
taagacaagaaggagaagcagagcc

SEQ ID NO: 25338 - DNA, 25 bp, Artificial
  Probe
tatctccctgcaatttgacttcttc

SEQ ID NO: 25339 - DNA, 25 bp, Artificial
  Probe
gagaccctaagacaagaaggagaag

SEQ ID NO: 25340 - DNA, 25 bp, Artificial
  Probe
gtatctccctgcaatttgacttctt

SEQ ID NO: 25341 - DNA, 25 bp, Artificial
  Probe
tcatcacttcccagtacaacaacat

SEQ ID NO: 25342 - DNA, 25 bp, Artificial
  Probe
atgatgtgtgcaagtatgatttcgt

SEQ ID NO: 25343 - DNA, 25 bp, Artificial
  Probe
catcacttcccagtacaacaacatg

SEQ ID NO: 25344 - DNA, 25 bp, Artificial
  Probe
caatttgacttcttcgagactgagg

SEQ ID NO: 25345 - DNA, 25 bp, Artificial
  Probe
actcacagccgactctaaactacat

SEQ ID NO: 25346 - DNA, 25 bp, Artificial
  Probe
ctcacagccgactctaaactacatg

SEQ ID NO: 25347 - DNA, 25 bp, Artificial
  Probe
tgatgtgtgcaagtatgatttcgtg

SEQ ID NO: 25348 - DNA, 25 bp, Artificial
  Probe
gcaatttgacttcttcgagactgag

SEQ ID NO: 25349 - DNA, 25 bp, Artificial
  Probe
gtcatcacttcccagtacaacaaca

SEQ ID NO: 25350 - DNA, 25 bp, Artificial
  Probe
ggagaccctaagacaagaaggagaa

SEQ ID NO: 25351 - DNA, 25 bp, Artificial
  Probe
aatttgacttcttcgagactgaggg

SEQ ID NO: 25352 - DNA, 25 bp, Artificial
  Probe
gactctaaactacatggcaagttct

SEQ ID NO: 25353 - DNA, 25 bp, Artificial
  Probe
ctctaaactacatggcaagttctgt

SEQ ID NO: 25354 - DNA, 25 bp, Artificial
  Probe
actctaaactacatggcaagttctg

SEQ ID NO: 25355 - DNA, 25 bp, Artificial
  Probe
ctgcaatttgacttcttcgagactg

SEQ ID NO: 25356 - DNA, 25 bp, Artificial
  Probe
agttcaagtctgacaatactgtgtc

SEQ ID NO: 25357 - DNA, 25 bp, Artificial
  Probe
tctaaactacatggcaagttctgtg

SEQ ID NO: 25358 - DNA, 25 bp, Artificial
  Probe
gactcacagccgactctaaactaca

SEQ ID NO: 25359 - DNA, 25 bp, Artificial
  Probe
gatgtgtgcaagtatgatttcgtgg

SEQ ID NO: 25360 - DNA, 25 bp, Artificial
  Probe
cgtatctccctgcaatttgacttct

SEQ ID NO: 25361 - DNA, 25 bp, Artificial
  Probe
ggcaatgatgtgtgcaagtatgatt

SEQ ID NO: 25362 - DNA, 25 bp, Artificial
  Probe
tgcaatttgacttcttcgagactga

SEQ ID NO: 25363 - DNA, 25 bp, Artificial
  Probe
gaggagaccctaagacaagaaggag

SEQ ID NO: 25364 - DNA, 25 bp, Artificial
  Probe
cgactctaaactacatggcaagttc

SEQ ID NO: 25365 - DNA, 25 bp, Artificial
  Probe
gttcaagtctgacaatactgtgtcc

SEQ ID NO: 25366 - DNA, 25 bp, Artificial
  Probe
ccctaagacaagaaggagaagcaga

SEQ ID NO: 25367 - DNA, 25 bp, Artificial
  Probe
agaccctaagacaagaaggagaagc

SEQ ID NO: 25368 - DNA, 25 bp, Artificial
  Probe
ggtcatcacttcccagtacaacaac

SEQ ID NO: 25369 - DNA, 25 bp, Artificial
  Probe
aggtcatcacttcccagtacaacaa

SEQ ID NO: 25370 - DNA, 25 bp, Artificial
  Probe
ctaaactacatggcaagttctgtgg

SEQ ID NO: 25371 - DNA, 25 bp, Artificial
  Probe
caagaagttcgttagcaacattaca

SEQ ID NO: 25372 - DNA, 25 bp, Artificial
  Probe
acaagaagttcgttagcaacattac

SEQ ID NO: 25373 - DNA, 25 bp, Artificial
  Probe
gacaagaagttcgttagcaacatta

SEQ ID NO: 25374 - DNA, 25 bp, Artificial
  Probe
aaccaataaacttcgctacactttc

SEQ ID NO: 25375 - DNA, 25 bp, Artificial
  Probe
taaaggaaaggaggagactactacc

SEQ ID NO: 25376 - DNA, 25 bp, Artificial
  Probe
cgtcataaccaataaacttcgctac

SEQ ID NO: 25377 - DNA, 25 bp, Artificial
  Probe
cataaccaataaacttcgctacact

SEQ ID NO: 25378 - DNA, 25 bp, Artificial
  Probe
tcataaccaataaacttcgctacac

SEQ ID NO: 25379 - DNA, 25 bp, Artificial
  Probe
gtcataaccaataaacttcgctaca

SEQ ID NO: 25380 - DNA, 25 bp, Artificial
  Probe
caataaacttcgctacactttccac

SEQ ID NO: 25381 - DNA, 25 bp, Artificial
  Probe
taaccaataaacttcgctacacttt

SEQ ID NO: 25382 - DNA, 25 bp, Artificial
  Probe
ataaccaataaacttcgctacactt

SEQ ID NO: 25383 - DNA, 25 bp, Artificial
  Probe
ttaaaggaaaggaggagactactac

SEQ ID NO: 25384 - DNA, 25 bp, Artificial
  Probe
gttaaaggaaaggaggagactacta

SEQ ID NO: 25385 - DNA, 25 bp, Artificial
  Probe
tgagagatggcgtcataaccaataa

SEQ ID NO: 25386 - DNA, 25 bp, Artificial
  Probe
agttaaaggaaaggaggagactact

SEQ ID NO: 25387 - DNA, 25 bp, Artificial
  Probe
cagttaaaggaaaggaggagactac

SEQ ID NO: 25388 - DNA, 25 bp, Artificial
  Probe
ccaataaacttcgctacactttcca

SEQ ID NO: 25389 - DNA, 25 bp, Artificial
  Probe
accaataaacttcgctacactttcc

SEQ ID NO: 25390 - DNA, 25 bp, Artificial
  Probe
aataaacttcgctacactttccacg

SEQ ID NO: 25391 - DNA, 25 bp, Artificial
  Probe
ctgagagatggcgtcataaccaata

SEQ ID NO: 25392 - DNA, 25 bp, Artificial
  Probe
gcagttaaaggaaaggaggagacta

SEQ ID NO: 25393 - DNA, 25 bp, Artificial
  Probe
atcatttgaagtgttctgctcagtg

SEQ ID NO: 25394 - DNA, 25 bp, Artificial
  Probe
catcatttgaagtgttctgctcagt

SEQ ID NO: 25395 - DNA, 25 bp, Artificial
  Probe
gatggcgtcataaccaataaacttc

SEQ ID NO: 25396 - DNA, 25 bp, Artificial
  Probe
ttccagacaattcaacacgctcatc

SEQ ID NO: 25397 - DNA, 25 bp, Artificial
  Probe
cttccagacaattcaacacgctcat

SEQ ID NO: 25398 - DNA, 25 bp, Artificial
  Probe
agatggcgtcataaccaataaactt

SEQ ID NO: 25399 - DNA, 25 bp, Artificial
  Probe
cgacaagaagttcgttagcaacatt

SEQ ID NO: 25400 - DNA, 25 bp, Artificial
  Probe
gagagatggcgtcataaccaataaa

SEQ ID NO: 25401 - DNA, 25 bp, Artificial
  Probe
ccatcatttgaagtgttctgctcag

SEQ ID NO: 25402 - DNA, 25 bp, Artificial
  Probe
gagatggcgtcataaccaataaact

SEQ ID NO: 25403 - DNA, 25 bp, Artificial
  Probe
agagatggcgtcataaccaataaac

SEQ ID NO: 25404 - DNA, 25 bp, Artificial
  Probe
catttgaagtgttctgctcagtgtc

SEQ ID NO: 25405 - DNA, 25 bp, Artificial
  Probe
ggaggagactactaccgaggactag

SEQ ID NO: 25406 - DNA, 25 bp, Artificial
  Probe
aaaggaaaggaggagactactaccg

SEQ ID NO: 25407 - DNA, 25 bp, Artificial
  Probe
atttgaagtgttctgctcagtgtct

SEQ ID NO: 25408 - DNA, 25 bp, Artificial
  Probe
aggaggagactactaccgaggacta

SEQ ID NO: 25409 - DNA, 25 bp, Artificial
  Probe
gttcttcctcttggagaatgtcagg

SEQ ID NO: 25410 - DNA, 25 bp, Artificial
  Probe
ggttcttcctcttggagaatgtcag

SEQ ID NO: 25411 - DNA, 25 bp, Artificial
  Probe
cactaagctgtttggaggtttgttt

SEQ ID NO: 25412 - DNA, 25 bp, Artificial
  Probe
atggcgtcataaccaataaacttcg

SEQ ID NO: 25413 - DNA, 25 bp, Artificial
  Probe
tcatttgaagtgttctgctcagtgt

SEQ ID NO: 25414 - DNA, 25 bp, Artificial
  Probe
aaggaaaggaggagactactaccga

SEQ ID NO: 25415 - DNA, 25 bp, Artificial
  Probe
cccatcatttgaagtgttctgctca

SEQ ID NO: 25416 - DNA, 25 bp, Artificial
  Probe
caatgagaaggagaccatgcagttc

SEQ ID NO: 25417 - DNA, 25 bp, Artificial
  Probe
ttcaatggcaatgagaaggagacca

SEQ ID NO: 25418 - DNA, 25 bp, Artificial
  Probe
cttcaatggcaatgagaaggagacc

SEQ ID NO: 25419 - DNA, 25 bp, Artificial
  Probe
agagagagaatgcagagctggaaag

SEQ ID NO: 25420 - DNA, 25 bp, Artificial
  Probe
gagagagagaatgcagagctggaaa

SEQ ID NO: 25421 - DNA, 25 bp, Artificial
  Probe
aatgagaaggagaccatgcagttcc

SEQ ID NO: 25422 - DNA, 25 bp, Artificial
  Probe
caatggcaatgagaaggagaccatg

SEQ ID NO: 25423 - DNA, 25 bp, Artificial
  Probe
tcaatggcaatgagaaggagaccat

SEQ ID NO: 25424 - DNA, 25 bp, Artificial
  Probe
gaaggagaccatgcagttcctgaat

SEQ ID NO: 25425 - DNA, 25 bp, Artificial
  Probe
aaggagaccatgcagttcctgaatg

SEQ ID NO: 25426 - DNA, 25 bp, Artificial
  Probe
actgaggtagactccaattaaagat

SEQ ID NO: 25427 - DNA, 25 bp, Artificial
  Probe
gaaggaagttctacttgctgtctac

SEQ ID NO: 25428 - DNA, 25 bp, Artificial
  Probe
aatgtgcaaggaaggaagttctact

SEQ ID NO: 25429 - DNA, 25 bp, Artificial
  Probe
ctgaggtagactccaattaaagatt

SEQ ID NO: 25430 - DNA, 25 bp, Artificial
  Probe
agttctacttgctgtctacccattg

SEQ ID NO: 25431 - DNA, 25 bp, Artificial
  Probe
ggaaggaagttctacttgctgtcta

SEQ ID NO: 25432 - DNA, 25 bp, Artificial
  Probe
aaggaagttctacttgctgtctacc

SEQ ID NO: 25433 - DNA, 25 bp, Artificial
  Probe
taagtgaaatgtgcaaggaaggaag

SEQ ID NO: 25434 - DNA, 25 bp, Artificial
  Probe
gaaatgtgcaaggaaggaagttcta

SEQ ID NO: 25435 - DNA, 25 bp, Artificial
  Probe
aaatgtgcaaggaaggaagttctac

SEQ ID NO: 25436 - DNA, 25 bp, Artificial
  Probe
aaggaaggaagttctacttgctgtc

SEQ ID NO: 25437 - DNA, 25 bp, Artificial
  Probe
gtaagtgaaatgtgcaaggaaggaa

SEQ ID NO: 25438 - DNA, 25 bp, Artificial
  Probe
gttctacttgctgtctacccattgg

SEQ ID NO: 25439 - DNA, 25 bp, Artificial
  Probe
ggtagactccaattaaagattgact

SEQ ID NO: 25440 - DNA, 25 bp, Artificial
  Probe
aggtagactccaattaaagattgac

SEQ ID NO: 25441 - DNA, 25 bp, Artificial
  Probe
tgaggtagactccaattaaagattg

SEQ ID NO: 25442 - DNA, 25 bp, Artificial
  Probe
gaggtagactccaattaaagattga

SEQ ID NO: 25443 - DNA, 25 bp, Artificial
  Probe
atgtgcaaggaaggaagttctactt

SEQ ID NO: 25444 - DNA, 25 bp, Artificial
  Probe
aggaaggaagttctacttgctgtct

SEQ ID NO: 25445 - DNA, 25 bp, Artificial
  Probe
aagttctacttgctgtctacccatt

SEQ ID NO: 25446 - DNA, 25 bp, Artificial
  Probe
gtgaaatgtgcaaggaaggaagttc

SEQ ID NO: 25447 - DNA, 25 bp, Artificial
  Probe
caaggaaggaagttctacttgctgt

SEQ ID NO: 25448 - DNA, 25 bp, Artificial
  Probe
ctagctgttagagaaaggaccttta

SEQ ID NO: 25449 - DNA, 25 bp, Artificial
  Probe
tgaaatgtgcaaggaaggaagttct

SEQ ID NO: 25450 - DNA, 25 bp, Artificial
  Probe
gaagttctacttgctgtctacccat

SEQ ID NO: 25451 - DNA, 25 bp, Artificial
  Probe
agtgaaatgtgcaaggaaggaagtt

SEQ ID NO: 25452 - DNA, 25 bp, Artificial
  Probe
aagtgaaatgtgcaaggaaggaagt

SEQ ID NO: 25453 - DNA, 25 bp, Artificial
  Probe
ctacttgctgtctacccattggttg

SEQ ID NO: 25454 - DNA, 25 bp, Artificial
  Probe
cctcactctcctagctgttagagaa

SEQ ID NO: 25455 - DNA, 25 bp, Artificial
  Probe
ggtaagtgaaatgtgcaaggaagga

SEQ ID NO: 25456 - DNA, 25 bp, Artificial
  Probe
tctacttgctgtctacccattggtt

SEQ ID NO: 25457 - DNA, 25 bp, Artificial
  Probe
ttctacttgctgtctacccattggt

SEQ ID NO: 25458 - DNA, 25 bp, Artificial
  Probe
cctagctgttagagaaaggaccttt

SEQ ID NO: 25459 - DNA, 25 bp, Artificial
  Probe
tgggtaagtgaaatgtgcaaggaag

SEQ ID NO: 25460 - DNA, 25 bp, Artificial
  Probe
ctgggtaagtgaaatgtgcaaggaa

SEQ ID NO: 25461 - DNA, 25 bp, Artificial
  Probe
gtagactccaattaaagattgactt

SEQ ID NO: 25462 - DNA, 25 bp, Artificial
  Probe
cctcatgctgggtaagtgaaatgtg

SEQ ID NO: 25463 - DNA, 25 bp, Artificial
  Probe
tcactctcctagctgttagagaaag

SEQ ID NO: 25464 - DNA, 25 bp, Artificial
  Probe
ctcactctcctagctgttagagaaa

SEQ ID NO: 25465 - DNA, 25 bp, Artificial
  Probe
gtacctggacgagatcaacctgttg

SEQ ID NO: 25466 - DNA, 25 bp, Artificial
  Probe
tgtgcaaggaaggaagttctacttg

SEQ ID NO: 25467 - DNA, 25 bp, Artificial
  Probe
cactctcctagctgttagagaaagg

SEQ ID NO: 25468 - DNA, 25 bp, Artificial
  Probe
aaacaaacaaaaccggatagaactg

SEQ ID NO: 25469 - DNA, 25 bp, Artificial
  Probe
gggtaagtgaaatgtgcaaggaagg

SEQ ID NO: 25470 - DNA, 25 bp, Artificial
  Probe
ctcatgctgggtaagtgaaatgtgc

SEQ ID NO: 25471 - DNA, 25 bp, Artificial
  Probe
catgttcctgaaggagatcactatt

SEQ ID NO: 25472 - DNA, 25 bp, Artificial
  Probe
caaatgtggtcagtgatcctatctc

SEQ ID NO: 25473 - DNA, 25 bp, Artificial
  Probe
gagatcactatttgtctttccgatg

SEQ ID NO: 25474 - DNA, 25 bp, Artificial
  Probe
agatcactatttgtctttccgatgg

SEQ ID NO: 25475 - DNA, 25 bp, Artificial
  Probe
cctgaaggagatcactatttgtctt

SEQ ID NO: 25476 - DNA, 25 bp, Artificial
  Probe
gcatgttcctgaaggagatcactat

SEQ ID NO: 25477 - DNA, 25 bp, Artificial
  Probe
tgaaggagatcactatttgtctttc

SEQ ID NO: 25478 - DNA, 25 bp, Artificial
  Probe
ctgaaggagatcactatttgtcttt

SEQ ID NO: 25479 - DNA, 25 bp, Artificial
  Probe
gatcactatttgtctttccgatggc

SEQ ID NO: 25480 - DNA, 25 bp, Artificial
  Probe
aaatgtggtcagtgatcctatctcg

SEQ ID NO: 25481 - DNA, 25 bp, Artificial
  Probe
ggagatcactatttgtctttccgat

SEQ ID NO: 25482 - DNA, 25 bp, Artificial
  Probe
aaggagatcactatttgtctttccg

SEQ ID NO: 25483 - DNA, 25 bp, Artificial
  Probe
aatgtggtcagtgatcctatctcgg

SEQ ID NO: 25484 - DNA, 25 bp, Artificial
  Probe
gaaggagatcactatttgtctttcc

SEQ ID NO: 25485 - DNA, 25 bp, Artificial
  Probe
aggagatcactatttgtctttccga

SEQ ID NO: 25486 - DNA, 25 bp, Artificial
  Probe
ttcctgaaggagatcactatttgtc

SEQ ID NO: 25487 - DNA, 25 bp, Artificial
  Probe
gttcctgaaggagatcactatttgt

SEQ ID NO: 25488 - DNA, 25 bp, Artificial
  Probe
tgttcctgaaggagatcactatttg

SEQ ID NO: 25489 - DNA, 25 bp, Artificial
  Probe
atgttcctgaaggagatcactattt

SEQ ID NO: 25490 - DNA, 25 bp, Artificial
  Probe
gcaaatgtggtcagtgatcctatct

SEQ ID NO: 25491 - DNA, 25 bp, Artificial
  Probe
tcctgaaggagatcactatttgtct

SEQ ID NO: 25492 - DNA, 25 bp, Artificial
  Probe
tgcatgttcctgaaggagatcacta

SEQ ID NO: 25493 - DNA, 25 bp, Artificial
  Probe
atgtggtcagtgatcctatctcggt

SEQ ID NO: 25494 - DNA, 25 bp, Artificial
  Probe
tgcaaatgtggtcagtgatcctatc

SEQ ID NO: 25495 - DNA, 25 bp, Artificial
  Probe
ctgcaaatgtggtcagtgatcctat

SEQ ID NO: 25496 - DNA, 25 bp, Artificial
  Probe
ctggatgtggtcctagtgactcatc

SEQ ID NO: 25497 - DNA, 25 bp, Artificial
  Probe
atcactatttgtctttccgatggcc

SEQ ID NO: 25498 - DNA, 25 bp, Artificial
  Probe
gtgcatgttcctgaaggagatcact

SEQ ID NO: 25499 - DNA, 25 bp, Artificial
  Probe
ctgtgcatgttcctgaaggagatca

SEQ ID NO: 25500 - DNA, 25 bp, Artificial
  Probe
actgtgcatgttcctgaaggagatc

SEQ ID NO: 25501 - DNA, 25 bp, Artificial
  Probe
gctcaggtgctccaaaatagatgtg

SEQ ID NO: 25502 - DNA, 25 bp, Artificial
  Probe
tgtgcatgttcctgaaggagatcac

SEQ ID NO: 25503 - DNA, 25 bp, Artificial
  Probe
cactgtgcatgttcctgaaggagat

SEQ ID NO: 25504 - DNA, 25 bp, Artificial
  Probe
agtgatcctatctcggtcctgagac

SEQ ID NO: 25505 - DNA, 25 bp, Artificial
  Probe
cagtgatcctatctcggtcctgaga

SEQ ID NO: 25506 - DNA, 25 bp, Artificial
  Probe
ctcaggtgctccaaaatagatgtgg

SEQ ID NO: 25507 - DNA, 25 bp, Artificial
  Probe
tcagtgatcctatctcggtcctgag

SEQ ID NO: 25508 - DNA, 25 bp, Artificial
  Probe
atgtggtcctagtgactcatccctg

SEQ ID NO: 25509 - DNA, 25 bp, Artificial
  Probe
cctgcaaatgtggtcagtgatccta

SEQ ID NO: 25510 - DNA, 25 bp, Artificial
  Probe
gtcagtgatcctatctcggtcctga

SEQ ID NO: 25511 - DNA, 25 bp, Artificial
  Probe
gatgtggtcctagtgactcatccct

SEQ ID NO: 25512 - DNA, 25 bp, Artificial
  Probe
agctcaggtgctccaaaatagatgt

SEQ ID NO: 25513 - DNA, 25 bp, Artificial
  Probe
gatcctatctcggtcctgagacctc

SEQ ID NO: 25514 - DNA, 25 bp, Artificial
  Probe
ctactcaagctgtttctggcttcct

SEQ ID NO: 25515 - DNA, 25 bp, Artificial
  Probe
tactcaagctgtttctggcttcctg

SEQ ID NO: 25516 - DNA, 25 bp, Artificial
  Probe
aagaatggtgaagtgaagatgtgaa

SEQ ID NO: 25517 - DNA, 25 bp, Artificial
  Probe
agaatggtgaagtgaagatgtgaac

SEQ ID NO: 25518 - DNA, 25 bp, Artificial
  Probe
gaatggtgaagtgaagatgtgaact

SEQ ID NO: 25519 - DNA, 25 bp, Artificial
  Probe
gaaagaatggtgaagtgaagatgtg

SEQ ID NO: 25520 - DNA, 25 bp, Artificial
  Probe
aaagaatggtgaagtgaagatgtga

SEQ ID NO: 25521 - DNA, 25 bp, Artificial
  Probe
tttgagttaagggagggtagatact

SEQ ID NO: 25522 - DNA, 25 bp, Artificial
  Probe
cgaaagaatggtgaagtgaagatgt

SEQ ID NO: 25523 - DNA, 25 bp, Artificial
  Probe
ttgagttaagggagggtagatactg

SEQ ID NO: 25524 - DNA, 25 bp, Artificial
  Probe
aatggtgaagtgaagatgtgaactt

SEQ ID NO: 25525 - DNA, 25 bp, Artificial
  Probe
tacctttgggacacctagtatgttt

SEQ ID NO: 25526 - DNA, 25 bp, Artificial
  Probe
aaatcgaaagaatggtgaagtgaag

SEQ ID NO: 25527 - DNA, 25 bp, Artificial
  Probe
gaaatcgaaagaatggtgaagtgaa

SEQ ID NO: 25528 - DNA, 25 bp, Artificial
  Probe
ctacctttgggacacctagtatgtt

SEQ ID NO: 25529 - DNA, 25 bp, Artificial
  Probe
atcgaaagaatggtgaagtgaagat

SEQ ID NO: 25530 - DNA, 25 bp, Artificial
  Probe
aatcgaaagaatggtgaagtgaaga

SEQ ID NO: 25531 - DNA, 25 bp, Artificial
  Probe
agaaatcgaaagaatggtgaagtga

SEQ ID NO: 25532 - DNA, 25 bp, Artificial
  Probe
cagaaatcgaaagaatggtgaagtg

SEQ ID NO: 25533 - DNA, 25 bp, Artificial
  Probe
atggtgaagtgaagatgtgaacttg

SEQ ID NO: 25534 - DNA, 25 bp, Artificial
  Probe
gtcttaggtgagtgtgctgttgttg

SEQ ID NO: 25535 - DNA, 25 bp, Artificial
  Probe
tcgaaagaatggtgaagtgaagatg

SEQ ID NO: 25536 - DNA, 25 bp, Artificial
  Probe
tattcattgaacagctcggactgag

SEQ ID NO: 25537 - DNA, 25 bp, Artificial
  Probe
ctattcattgaacagctcggactga

SEQ ID NO: 25538 - DNA, 25 bp, Artificial
  Probe
tgtcttaggtgagtgtgctgttgtt

SEQ ID NO: 25539 - DNA, 25 bp, Artificial
  Probe
acctttgggacacctagtatgtttg

SEQ ID NO: 25540 - DNA, 25 bp, Artificial
  Probe
tgagttaagggagggtagatactgc

SEQ ID NO: 25541 - DNA, 25 bp, Artificial
  Probe
ttttgagttaagggagggtagatac

SEQ ID NO: 25542 - DNA, 25 bp, Artificial
  Probe
aattttgagttaagggagggtagat

SEQ ID NO: 25543 - DNA, 25 bp, Artificial
  Probe
cctacctttgggacacctagtatgt

SEQ ID NO: 25544 - DNA, 25 bp, Artificial
  Probe
tcacaagggattcagggactcattt

SEQ ID NO: 25545 - DNA, 25 bp, Artificial
  Probe
cagtaaacaaacacagcagcctagt

SEQ ID NO: 25546 - DNA, 25 bp, Artificial
  Probe
attcagggactcattttgctttctc

SEQ ID NO: 25547 - DNA, 25 bp, Artificial
  Probe
gattcagggactcattttgctttct

SEQ ID NO: 25548 - DNA, 25 bp, Artificial
  Probe
attttgagttaagggagggtagata

SEQ ID NO: 25549 - DNA, 25 bp, Artificial
  Probe
ctgtgtcttaggtgagtgtgctgtt

SEQ ID NO: 25550 - DNA, 25 bp, Artificial
  Probe
gagttaagggagggtagatactgcc

SEQ ID NO: 25551 - DNA, 25 bp, Artificial
  Probe
aaggaggctattcattgaacagctc

SEQ ID NO: 25552 - DNA, 25 bp, Artificial
  Probe
ccagaaatcgaaagaatggtgaagt

SEQ ID NO: 25553 - DNA, 25 bp, Artificial
  Probe
tggtgaagtgaagatgtgaacttgg

SEQ ID NO: 25554 - DNA, 25 bp, Artificial
  Probe
cccaaggaggctattcattgaacag

SEQ ID NO: 25555 - DNA, 25 bp, Artificial
  Probe
caaggaggctattcattgaacagct

SEQ ID NO: 25556 - DNA, 25 bp, Artificial
  Probe
ctcacaagggattcagggactcatt

SEQ ID NO: 25557 - DNA, 25 bp, Artificial
  Probe
gtgtcttaggtgagtgtgctgttgt

SEQ ID NO: 25558 - DNA, 25 bp, Artificial
  Probe
tgtgtcttaggtgagtgtgctgttg

SEQ ID NO: 25559 - DNA, 25 bp, Artificial
  Probe
aggtttcccagaaatcgaaagaatg

SEQ ID NO: 25560 - DNA, 25 bp, Artificial
  Probe
caggtttcccagaaatcgaaagaat

SEQ ID NO: 25561 - DNA, 25 bp, Artificial
  Probe
aaggaggacatcttcaaggacaatt

SEQ ID NO: 25562 - DNA, 25 bp, Artificial
  Probe
cattccatcctcaactcctcctatg

SEQ ID NO: 25563 - DNA, 25 bp, Artificial
  Probe
caaggaggacatcttcaaggacaat

SEQ ID NO: 25564 - DNA, 25 bp, Artificial
  Probe
ccattccatcctcaactcctcctat

SEQ ID NO: 25565 - DNA, 25 bp, Artificial
  Probe
ctacatcgccatcctcaacatcatc

SEQ ID NO: 25566 - DNA, 25 bp, Artificial
  Probe
aggaggacatcttcaaggacaattt

SEQ ID NO: 25567 - DNA, 25 bp, Artificial
  Probe
ctagagggatttgtactgtgtcact

SEQ ID NO: 25568 - DNA, 25 bp, Artificial
  Probe
tctacaacccagagaacatctacct

SEQ ID NO: 25569 - DNA, 25 bp, Artificial
  Probe
attccatcctcaactcctcctatgc

SEQ ID NO: 25570 - DNA, 25 bp, Artificial
  Probe
tagagggatttgtactgtgtcactc

SEQ ID NO: 25571 - DNA, 25 bp, Artificial
  Probe
tccattccatcctcaactcctccta

SEQ ID NO: 25572 - DNA, 25 bp, Artificial
  Probe
cgggtttacttctttgagagtattt

SEQ ID NO: 25573 - DNA, 25 bp, Artificial
  Probe
cctagagggatttgtactgtgtcac

SEQ ID NO: 25574 - DNA, 25 bp, Artificial
  Probe
gcgggtttacttctttgagagtatt

SEQ ID NO: 25575 - DNA, 25 bp, Artificial
  Probe
gatttgtactgtgtcactccattgc

SEQ ID NO: 25576 - DNA, 25 bp, Artificial
  Probe
ctacaacccagagaacatctacctg

SEQ ID NO: 25577 - DNA, 25 bp, Artificial
  Probe
ctacacttcctcatgactggctata

SEQ ID NO: 25578 - DNA, 25 bp, Artificial
  Probe
tgatccattccatcctcaactcctc

SEQ ID NO: 25579 - DNA, 25 bp, Artificial
  Probe
atttgtactgtgtcactccattgct

SEQ ID NO: 25580 - DNA, 25 bp, Artificial
  Probe
tacacttcctcatgactggctatac

SEQ ID NO: 25581 - DNA, 25 bp, Artificial
  Probe
ctacctcttggaacggctaaatgac

SEQ ID NO: 25582 - DNA, 25 bp, Artificial
  Probe
ggatttgtactgtgtcactccattg

SEQ ID NO: 25583 - DNA, 25 bp, Artificial
  Probe
gtgatccattccatcctcaactcct

SEQ ID NO: 25584 - DNA, 25 bp, Artificial
  Probe
tacaacccagagaacatctacctgt

SEQ ID NO: 25585 - DNA, 25 bp, Artificial
  Probe
tacatcgccatcctcaacatcatcc

SEQ ID NO: 25586 - DNA, 25 bp, Artificial
  Probe
gatccattccatcctcaactcctcc

SEQ ID NO: 25587 - DNA, 25 bp, Artificial
  Probe
catcctcaactcctcctatgccaag

SEQ ID NO: 25588 - DNA, 25 bp, Artificial
  Probe
atccattccatcctcaactcctcct

SEQ ID NO: 25589 - DNA, 25 bp, Artificial
  Probe
ggcgggtttacttctttgagagtat

SEQ ID NO: 25590 - DNA, 25 bp, Artificial
  Probe
gaggacatcttcaaggacaattttg

SEQ ID NO: 25591 - DNA, 25 bp, Artificial
  Probe
ggaggacatcttcaaggacaatttt

SEQ ID NO: 25592 - DNA, 25 bp, Artificial
  Probe
tcttggaacggctaaatgacaggta

SEQ ID NO: 25593 - DNA, 25 bp, Artificial
  Probe
tacctcttggaacggctaaatgaca

SEQ ID NO: 25594 - DNA, 25 bp, Artificial
  Probe
tttgtactgtgtcactccattgctg

SEQ ID NO: 25595 - DNA, 25 bp, Artificial
  Probe
gcaaggaggacatcttcaaggacaa

SEQ ID NO: 25596 - DNA, 25 bp, Artificial
  Probe
gggatttgtactgtgtcactccatt

SEQ ID NO: 25597 - DNA, 25 bp, Artificial
  Probe
agcctagagggatttgtactgtgtc

SEQ ID NO: 25598 - DNA, 25 bp, Artificial
  Probe
actacacttcctcatgactggctat

SEQ ID NO: 25599 - DNA, 25 bp, Artificial
  Probe
ctacaactccctcctcacgttaaag

SEQ ID NO: 25600 - DNA, 25 bp, Artificial
  Probe
cttggaacggctaaatgacaggtac

SEQ ID NO: 25601 - DNA, 25 bp, Artificial
  Probe
cctacctcttggaacggctaaatga

SEQ ID NO: 25602 - DNA, 25 bp, Artificial
  Probe
gctacatcgccatcctcaacatcat

SEQ ID NO: 25603 - DNA, 25 bp, Artificial
  Probe
gcctagagggatttgtactgtgtca

SEQ ID NO: 25604 - DNA, 25 bp, Artificial
  Probe
tacaactccctcctcacgttaaaga

SEQ ID NO: 25605 - DNA, 25 bp, Artificial
  Probe
cagtgacagcctagagggatttgta

SEQ ID NO: 25606 - DNA, 25 bp, Artificial
  Probe
ataggaaggaaggaaggatgatgta

SEQ ID NO: 25607 - DNA, 25 bp, Artificial
  Probe
taggaaggaaggaaggatgatgtag

SEQ ID NO: 25608 - DNA, 25 bp, Artificial
  Probe
gagataggaaggaaggaaggatgat

SEQ ID NO: 25609 - DNA, 25 bp, Artificial
  Probe
agataggaaggaaggaaggatgatg

SEQ ID NO: 25610 - DNA, 25 bp, Artificial
  Probe
gataggaaggaaggaaggatgatgt

SEQ ID NO: 25611 - DNA, 25 bp, Artificial
  Probe
ggaaggaaggaaggatgatgtagaa

SEQ ID NO: 25612 - DNA, 25 bp, Artificial
  Probe
aggatgatataatggaaggtaggaa

SEQ ID NO: 25613 - DNA, 25 bp, Artificial
  Probe
aaggatgatataatggaaggtagga

SEQ ID NO: 25614 - DNA, 25 bp, Artificial
  Probe
tgagataggaaggaaggaaggatga

SEQ ID NO: 25615 - DNA, 25 bp, Artificial
  Probe
gtgagataggaaggaaggaaggatg

SEQ ID NO: 25616 - DNA, 25 bp, Artificial
  Probe
aggaaggaaggaaggatgatgtaga

SEQ ID NO: 25617 - DNA, 25 bp, Artificial
  Probe
atataatggaaggtaggaatgaagg

SEQ ID NO: 25618 - DNA, 25 bp, Artificial
  Probe
tgtgatctaatatggctactcatct

SEQ ID NO: 25619 - DNA, 25 bp, Artificial
  Probe
ggatgatataatggaaggtaggaat

SEQ ID NO: 25620 - DNA, 25 bp, Artificial
  Probe
taatatggctactcatctaccacag

SEQ ID NO: 25621 - DNA, 25 bp, Artificial
  Probe
ctaatatggctactcatctaccaca

SEQ ID NO: 25622 - DNA, 25 bp, Artificial
  Probe
tctaatatggctactcatctaccac

SEQ ID NO: 25623 - DNA, 25 bp, Artificial
  Probe
gaaggaaggaaggatgatgtagaaa

SEQ ID NO: 25624 - DNA, 25 bp, Artificial
  Probe
ggtgagataggaaggaaggaaggat

SEQ ID NO: 25625 - DNA, 25 bp, Artificial
  Probe
ttgtgatctaatatggctactcatc

SEQ ID NO: 25626 - DNA, 25 bp, Artificial
  Probe
ataatggaaggtaggaatgaaggga

SEQ ID NO: 25627 - DNA, 25 bp, Artificial
  Probe
tataatggaaggtaggaatgaaggg

SEQ ID NO: 25628 - DNA, 25 bp, Artificial
  Probe
taatggaaggtaggaatgaagggaa

SEQ ID NO: 25629 - DNA, 25 bp, Artificial
  Probe
gatctaatatggctactcatctacc

SEQ ID NO: 25630 - DNA, 25 bp, Artificial
  Probe
gggagagaaaggatgatataatgga

SEQ ID NO: 25631 - DNA, 25 bp, Artificial
  Probe
aaagacagaggagggaaagtagaaa

SEQ ID NO: 25632 - DNA, 25 bp, Artificial
  Probe
tgatataatggaaggtaggaatgaa

SEQ ID NO: 25633 - DNA, 25 bp, Artificial
  Probe
tcccttgtgtaatgccaaatatgta

SEQ ID NO: 25634 - DNA, 25 bp, Artificial
  Probe
cccttgtgtaatgccaaatatgtat

SEQ ID NO: 25635 - DNA, 25 bp, Artificial
  Probe
cctatcccttgtgtaatgccaaata

SEQ ID NO: 25636 - DNA, 25 bp, Artificial
  Probe
aattgtgatctaatatggctactca

SEQ ID NO: 25637 - DNA, 25 bp, Artificial
  Probe
atcccttgtgtaatgccaaatatgt

SEQ ID NO: 25638 - DNA, 25 bp, Artificial
  Probe
tatcccttgtgtaatgccaaatatg

SEQ ID NO: 25639 - DNA, 25 bp, Artificial
  Probe
atgatataatggaaggtaggaatga

SEQ ID NO: 25640 - DNA, 25 bp, Artificial
  Probe
atctaatatggctactcatctacca

SEQ ID NO: 25641 - DNA, 25 bp, Artificial
  Probe
aagtgagtatccagaatttcagtga

SEQ ID NO: 25642 - DNA, 25 bp, Artificial
  Probe
ccctgggaatgaaatatatggctta

SEQ ID NO: 25643 - DNA, 25 bp, Artificial
  Probe
ctatcccttgtgtaatgccaaatat

SEQ ID NO: 25644 - DNA, 25 bp, Artificial
  Probe
tgtaggtaagtttctgatctttccc

SEQ ID NO: 25645 - DNA, 25 bp, Artificial
  Probe
attgtgatctaatatggctactcat

SEQ ID NO: 25646 - DNA, 25 bp, Artificial
  Probe
gggaatgtaggtaagtttctgatct

SEQ ID NO: 25647 - DNA, 25 bp, Artificial
  Probe
aaagtgagtatccagaatttcagtg

SEQ ID NO: 25648 - DNA, 25 bp, Artificial
  Probe
aatggaaggtaggaatgaagggaag

SEQ ID NO: 25649 - DNA, 25 bp, Artificial
  Probe
gatataatggaaggtaggaatgaag

SEQ ID NO: 25650 - DNA, 25 bp, Artificial
  Probe
gatgatataatggaaggtaggaatg

SEQ ID NO: 25651 - DNA, 25 bp, Artificial
  Probe
aacggatgtctgttatgtaggagaa

SEQ ID NO: 25652 - DNA, 25 bp, Artificial
  Probe
gtagtagagaggaggagagaagagg

SEQ ID NO: 25653 - DNA, 25 bp, Artificial
  Probe
ggtagtagagaggaggagagaagag

SEQ ID NO: 25654 - DNA, 25 bp, Artificial
  Probe
tagagaggataaataatgtggtcgc

SEQ ID NO: 25655 - DNA, 25 bp, Artificial
  Probe
tatgtaggagaaaggaagaagttgg

SEQ ID NO: 25656 - DNA, 25 bp, Artificial
  Probe
gagcttcattacttcagtctaacgt

SEQ ID NO: 25657 - DNA, 25 bp, Artificial
  Probe
tgagcttcattacttcagtctaacg

SEQ ID NO: 25658 - DNA, 25 bp, Artificial
  Probe
tgttatgtaggagaaaggaagaagt

SEQ ID NO: 25659 - DNA, 25 bp, Artificial
  Probe
caaagaactgtgtggagaagagaaa

SEQ ID NO: 25660 - DNA, 25 bp, Artificial
  Probe
tgtctgttatgtaggagaaaggaag

SEQ ID NO: 25661 - DNA, 25 bp, Artificial
  Probe
gatgtctgttatgtaggagaaagga

SEQ ID NO: 25662 - DNA, 25 bp, Artificial
  Probe
ggatgtctgttatgtaggagaaagg

SEQ ID NO: 25663 - DNA, 25 bp, Artificial
  Probe
gagaggataaataatgtggtcgcat

SEQ ID NO: 25664 - DNA, 25 bp, Artificial
  Probe
gtctgttatgtaggagaaaggaaga

SEQ ID NO: 25665 - DNA, 25 bp, Artificial
  Probe
cggatgtctgttatgtaggagaaag

SEQ ID NO: 25666 - DNA, 25 bp, Artificial
  Probe
gtagagaggataaataatgtggtcg

SEQ ID NO: 25667 - DNA, 25 bp, Artificial
  Probe
ctgttatgtaggagaaaggaagaag

SEQ ID NO: 25668 - DNA, 25 bp, Artificial
  Probe
atgtctgttatgtaggagaaaggaa

SEQ ID NO: 25669 - DNA, 25 bp, Artificial
  Probe
agagaggataaataatgtggtcgca

SEQ ID NO: 25670 - DNA, 25 bp, Artificial
  Probe
tctgttatgtaggagaaaggaagaa

SEQ ID NO: 25671 - DNA, 25 bp, Artificial
  Probe
acggatgtctgttatgtaggagaaa

SEQ ID NO: 25672 - DNA, 25 bp, Artificial
  Probe
aaacggatgtctgttatgtaggaga

SEQ ID NO: 25673 - DNA, 25 bp, Artificial
  Probe
tcttaggttatagagagatcagctc

SEQ ID NO: 25674 - DNA, 25 bp, Artificial
  Probe
taggagaaaggaagaagttgggatg

SEQ ID NO: 25675 - DNA, 25 bp, Artificial
  Probe
gtaggagaaaggaagaagttgggat

SEQ ID NO: 25676 - DNA, 25 bp, Artificial
  Probe
ttatgtaggagaaaggaagaagttg

SEQ ID NO: 25677 - DNA, 25 bp, Artificial
  Probe
gttatgtaggagaaaggaagaagtt

SEQ ID NO: 25678 - DNA, 25 bp, Artificial
  Probe
atgtaggagaaaggaagaagttggg

SEQ ID NO: 25679 - DNA, 25 bp, Artificial
  Probe
atgaacattcactattacttcccgt

SEQ ID NO: 25680 - DNA, 25 bp, Artificial
  Probe
tagaaagcaaagaactgtgtggaga

SEQ ID NO: 25681 - DNA, 25 bp, Artificial
  Probe
ctagaaagcaaagaactgtgtggag

SEQ ID NO: 25682 - DNA, 25 bp, Artificial
  Probe
aatgaacattcactattacttcccg

SEQ ID NO: 25683 - DNA, 25 bp, Artificial
  Probe
tcaatgaacattcactattacttcc

SEQ ID NO: 25684 - DNA, 25 bp, Artificial
  Probe
gagaggaaaggagggtagtagagag

SEQ ID NO: 25685 - DNA, 25 bp, Artificial
  Probe
tgtagagaggataaataatgtggtc

SEQ ID NO: 25686 - DNA, 25 bp, Artificial
  Probe
ctgtagagaggataaataatgtggt

SEQ ID NO: 25687 - DNA, 25 bp, Artificial
  Probe
aaaggaagaagttgggatgaggaag

SEQ ID NO: 25688 - DNA, 25 bp, Artificial
  Probe
gaaaggaagaagttgggatgaggaa

SEQ ID NO: 25689 - DNA, 25 bp, Artificial
  Probe
gaaagcaaagaactgtgtggagaag

SEQ ID NO: 25690 - DNA, 25 bp, Artificial
  Probe
tgaacattcactattacttcccgtg

SEQ ID NO: 25691 - DNA, 25 bp, Artificial
  Probe
aaagcaaagaactgtgtggagaaga

SEQ ID NO: 25692 - DNA, 25 bp, Artificial
  Probe
agaaagcaaagaactgtgtggagaa

SEQ ID NO: 25693 - DNA, 25 bp, Artificial
  Probe
ttctaaaggctgagcttcattactt

SEQ ID NO: 25694 - DNA, 25 bp, Artificial
  Probe
ttgttctaaaggctgagcttcatta

SEQ ID NO: 25695 - DNA, 25 bp, Artificial
  Probe
tagtagagaggaggagagaagaggg

SEQ ID NO: 25696 - DNA, 25 bp, Artificial
  Probe
aattagacattctatcgccttagca

SEQ ID NO: 25697 - DNA, 25 bp, Artificial
  Probe
attagacattctatcgccttagcat

SEQ ID NO: 25698 - DNA, 25 bp, Artificial
  Probe
caattagacattctatcgccttagc

SEQ ID NO: 25699 - DNA, 25 bp, Artificial
  Probe
accaattagacattctatcgcctta

SEQ ID NO: 25700 - DNA, 25 bp, Artificial
  Probe
tcgtgaccaattagacattctatcg

SEQ ID NO: 25701 - DNA, 25 bp, Artificial
  Probe
gtcgtgaccaattagacattctatc

SEQ ID NO: 25702 - DNA, 25 bp, Artificial
  Probe
gaccaattagacattctatcgcctt

SEQ ID NO: 25703 - DNA, 25 bp, Artificial
  Probe
ccaattagacattctatcgccttag

SEQ ID NO: 25704 - DNA, 25 bp, Artificial
  Probe
ttagacattctatcgccttagcatg

SEQ ID NO: 25705 - DNA, 25 bp, Artificial
  Probe
tgaccaattagacattctatcgcct

SEQ ID NO: 25706 - DNA, 25 bp, Artificial
  Probe
gtgaccaattagacattctatcgcc

SEQ ID NO: 25707 - DNA, 25 bp, Artificial
  Probe
cgtgaccaattagacattctatcgc

SEQ ID NO: 25708 - DNA, 25 bp, Artificial
  Probe
gttcttcctcacttcagtctcctct

SEQ ID NO: 25709 - DNA, 25 bp, Artificial
  Probe
tcccttcttctgctgtcatttctaa

SEQ ID NO: 25710 - DNA, 25 bp, Artificial
  Probe
cccttcttctgctgtcatttctaag

SEQ ID NO: 25711 - DNA, 25 bp, Artificial
  Probe
ctcccttcttctgctgtcatttcta

SEQ ID NO: 25712 - DNA, 25 bp, Artificial
  Probe
ttcttcctcacttcagtctcctctg

SEQ ID NO: 25713 - DNA, 25 bp, Artificial
  Probe
gtcatttctaagcaaggtccagtct

SEQ ID NO: 25714 - DNA, 25 bp, Artificial
  Probe
tcatttctaagcaaggtccagtctg

SEQ ID NO: 25715 - DNA, 25 bp, Artificial
  Probe
tgtcatttctaagcaaggtccagtc

SEQ ID NO: 25716 - DNA, 25 bp, Artificial
  Probe
tagacattctatcgccttagcatgt

SEQ ID NO: 25717 - DNA, 25 bp, Artificial
  Probe
agacattctatcgccttagcatgtt

SEQ ID NO: 25718 - DNA, 25 bp, Artificial
  Probe
cgttcttcctcacttcagtctcctc

SEQ ID NO: 25719 - DNA, 25 bp, Artificial
  Probe
ctgtcatttctaagcaaggtccagt

SEQ ID NO: 25720 - DNA, 25 bp, Artificial
  Probe
gtccgttcttcctcacttcagtctc

SEQ ID NO: 25721 - DNA, 25 bp, Artificial
  Probe
ccttcttctgctgtcatttctaagc

SEQ ID NO: 25722 - DNA, 25 bp, Artificial
  Probe
tgtcgtgaccaattagacattctat

SEQ ID NO: 25723 - DNA, 25 bp, Artificial
  Probe
gacattctatcgccttagcatgttt

SEQ ID NO: 25724 - DNA, 25 bp, Artificial
  Probe
acattctatcgccttagcatgtttg

SEQ ID NO: 25725 - DNA, 25 bp, Artificial
  Probe
cctcccttcttctgctgtcatttct

SEQ ID NO: 25726 - DNA, 25 bp, Artificial
  Probe
cattctatcgccttagcatgtttgc

SEQ ID NO: 25727 - DNA, 25 bp, Artificial
  Probe
cgttgcatgtcgtgaccaattagac

SEQ ID NO: 25728 - DNA, 25 bp, Artificial
  Probe
gctgtcatttctaagcaaggtccag

SEQ ID NO: 25729 - DNA, 25 bp, Artificial
  Probe
catttctaagcaaggtccagtctgc

SEQ ID NO: 25730 - DNA, 25 bp, Artificial
  Probe
tactgtaaagagacctacctcaggt

SEQ ID NO: 25731 - DNA, 25 bp, Artificial
  Probe
ttcctcacttcagtctcctctgcaa

SEQ ID NO: 25732 - DNA, 25 bp, Artificial
  Probe
ctgtaaagagacctacctcaggttg

SEQ ID NO: 25733 - DNA, 25 bp, Artificial
  Probe
actgtaaagagacctacctcaggtt

SEQ ID NO: 25734 - DNA, 25 bp, Artificial
  Probe
gttgcatgtcgtgaccaattagaca

SEQ ID NO: 25735 - DNA, 25 bp, Artificial
  Probe
cctcacttcagtctcctctgcaaag

SEQ ID NO: 25736 - DNA, 25 bp, Artificial
  Probe
gagcttctttctgcctcccttcttc

SEQ ID NO: 25737 - DNA, 25 bp, Artificial
  Probe
acttcagtctcctctgcaaagtctg

SEQ ID NO: 25738 - DNA, 25 bp, Artificial
  Probe
cacttcagtctcctctgcaaagtct

SEQ ID NO: 25739 - DNA, 25 bp, Artificial
  Probe
tcacttcagtctcctctgcaaagtc

SEQ ID NO: 25740 - DNA, 25 bp, Artificial
  Probe
ctcacttcagtctcctctgcaaagt

SEQ ID NO: 25741 - DNA, 25 bp, Artificial
  Probe
gttcttctttacgagatgctgattg

SEQ ID NO: 25742 - DNA, 25 bp, Artificial
  Probe
gagatgcgaagacaaatactttctg

SEQ ID NO: 25743 - DNA, 25 bp, Artificial
  Probe
ttcttctttacgagatgctgattgg

SEQ ID NO: 25744 - DNA, 25 bp, Artificial
  Probe
ggttcttctttacgagatgctgatt

SEQ ID NO: 25745 - DNA, 25 bp, Artificial
  Probe
ggagatgcgaagacaaatactttct

SEQ ID NO: 25746 - DNA, 25 bp, Artificial
  Probe
gatgcgaagacaaatactttctgtg

SEQ ID NO: 25747 - DNA, 25 bp, Artificial
  Probe
agatgcgaagacaaatactttctgt

SEQ ID NO: 25748 - DNA, 25 bp, Artificial
  Probe
gggagatgcgaagacaaatactttc

SEQ ID NO: 25749 - DNA, 25 bp, Artificial
  Probe
gaagacaaatactttctgtgggacg

SEQ ID NO: 25750 - DNA, 25 bp, Artificial
  Probe
cgaagacaaatactttctgtgggac

SEQ ID NO: 25751 - DNA, 25 bp, Artificial
  Probe
atgcgaagacaaatactttctgtgg

SEQ ID NO: 25752 - DNA, 25 bp, Artificial
  Probe
tgggagatgcgaagacaaatacttt

SEQ ID NO: 25753 - DNA, 25 bp, Artificial
  Probe
gggttcttctttacgagatgctgat

SEQ ID NO: 25754 - DNA, 25 bp, Artificial
  Probe
ctgggagatgcgaagacaaatactt

SEQ ID NO: 25755 - DNA, 25 bp, Artificial
  Probe
atcctttgtttcgagagatcaactg

SEQ ID NO: 25756 - DNA, 25 bp, Artificial
  Probe
catcctttgtttcgagagatcaact

SEQ ID NO: 25757 - DNA, 25 bp, Artificial
  Probe
atatgactgtagcaatttcgacaag

SEQ ID NO: 25758 - DNA, 25 bp, Artificial
  Probe
gatcttgctgggtcagaaatacaac

SEQ ID NO: 25759 - DNA, 25 bp, Artificial
  Probe
tatgactgtagcaatttcgacaagg

SEQ ID NO: 25760 - DNA, 25 bp, Artificial
  Probe
actgtagcaatttcgacaaggaatt

SEQ ID NO: 25761 - DNA, 25 bp, Artificial
  Probe
tcttctttacgagatgctgattggc

SEQ ID NO: 25762 - DNA, 25 bp, Artificial
  Probe
accatatgactgtagcaatttcgac

SEQ ID NO: 25763 - DNA, 25 bp, Artificial
  Probe
caccatatgactgtagcaatttcga

SEQ ID NO: 25764 - DNA, 25 bp, Artificial
  Probe
gactgtagcaatttcgacaaggaat

SEQ ID NO: 25765 - DNA, 25 bp, Artificial
  Probe
tgaaatcaccatatgactgtagcaa

SEQ ID NO: 25766 - DNA, 25 bp, Artificial
  Probe
atcaccatatgactgtagcaatttc

SEQ ID NO: 25767 - DNA, 25 bp, Artificial
  Probe
gaaatcaccatatgactgtagcaat

SEQ ID NO: 25768 - DNA, 25 bp, Artificial
  Probe
catatgactgtagcaatttcgacaa

SEQ ID NO: 25769 - DNA, 25 bp, Artificial
  Probe
tttgtttcgagagatcaactgggaa

SEQ ID NO: 25770 - DNA, 25 bp, Artificial
  Probe
tcaccatatgactgtagcaatttcg

SEQ ID NO: 25771 - DNA, 25 bp, Artificial
  Probe
aatcaccatatgactgtagcaattt

SEQ ID NO: 25772 - DNA, 25 bp, Artificial
  Probe
aaatcaccatatgactgtagcaatt

SEQ ID NO: 25773 - DNA, 25 bp, Artificial
  Probe
gcatcctttgtttcgagagatcaac

SEQ ID NO: 25774 - DNA, 25 bp, Artificial
  Probe
cttgagagaaaagagattgacccac

SEQ ID NO: 25775 - DNA, 25 bp, Artificial
  Probe
gcgaagacaaatactttctgtggga

SEQ ID NO: 25776 - DNA, 25 bp, Artificial
  Probe
agcatcctttgtttcgagagatcaa

SEQ ID NO: 25777 - DNA, 25 bp, Artificial
  Probe
ccatatgactgtagcaatttcgaca

SEQ ID NO: 25778 - DNA, 25 bp, Artificial
  Probe
agtgaaatcaccatatgactgtagc

SEQ ID NO: 25779 - DNA, 25 bp, Artificial
  Probe
aagagaatatgctgggagatgcgaa

SEQ ID NO: 25780 - DNA, 25 bp, Artificial
  Probe
aaagagaatatgctgggagatgcga

SEQ ID NO: 25781 - DNA, 25 bp, Artificial
  Probe
caaagagaatatgctgggagatgcg

SEQ ID NO: 25782 - DNA, 25 bp, Artificial
  Probe
ttgctgggtcagaaatacaaccatt

SEQ ID NO: 25783 - DNA, 25 bp, Artificial
  Probe
ctttggggttcttctttacgagatg

SEQ ID NO: 25784 - DNA, 25 bp, Artificial
  Probe
gtgaaatcaccatatgactgtagca

SEQ ID NO: 25785 - DNA, 25 bp, Artificial
  Probe
ttgtttcgagagatcaactgggaag

SEQ ID NO: 25786 - DNA, 25 bp, Artificial
  Probe
aatctctctcaatatcctgttagcg

SEQ ID NO: 25787 - DNA, 25 bp, Artificial
  Probe
tctctcaatatcctgttagcgacta

SEQ ID NO: 25788 - DNA, 25 bp, Artificial
  Probe
ctctcaatatcctgttagcgactat

SEQ ID NO: 25789 - DNA, 25 bp, Artificial
  Probe
atctctctcaatatcctgttagcga

SEQ ID NO: 25790 - DNA, 25 bp, Artificial
  Probe
ctctctcaatatcctgttagcgact

SEQ ID NO: 25791 - DNA, 25 bp, Artificial
  Probe
tctctctcaatatcctgttagcgac

SEQ ID NO: 25792 - DNA, 25 bp, Artificial
  Probe
atggaaggcttaattgtagagtgga

SEQ ID NO: 25793 - DNA, 25 bp, Artificial
  Probe
tctcaatatcctgttagcgactata

SEQ ID NO: 25794 - DNA, 25 bp, Artificial
  Probe
gaagagtgtgtctgattctgcttac

SEQ ID NO: 25795 - DNA, 25 bp, Artificial
  Probe
ccatgctaagtatatctgctagtgt

SEQ ID NO: 25796 - DNA, 25 bp, Artificial
  Probe
gccatgctaagtatatctgctagtg

SEQ ID NO: 25797 - DNA, 25 bp, Artificial
  Probe
tggaaggcttaattgtagagtggag

SEQ ID NO: 25798 - DNA, 25 bp, Artificial
  Probe
gatgacatcgtgaggaagattgatc

SEQ ID NO: 25799 - DNA, 25 bp, Artificial
  Probe
aagagtgtgtctgattctgcttact

SEQ ID NO: 25800 - DNA, 25 bp, Artificial
  Probe
catggaaggcttaattgtagagtgg

SEQ ID NO: 25801 - DNA, 25 bp, Artificial
  Probe
catgctaagtatatctgctagtgtt

SEQ ID NO: 25802 - DNA, 25 bp, Artificial
  Probe
tgatgacatcgtgaggaagattgat

SEQ ID NO: 25803 - DNA, 25 bp, Artificial
  Probe
tgctaagtatatctgctagtgttac

SEQ ID NO: 25804 - DNA, 25 bp, Artificial
  Probe
atgatgacatcgtgaggaagattga

SEQ ID NO: 25805 - DNA, 25 bp, Artificial
  Probe
gcatggaaggcttaattgtagagtg

SEQ ID NO: 25806 - DNA, 25 bp, Artificial
  Probe
taaggcatggaaggcttaattgtag

SEQ ID NO: 25807 - DNA, 25 bp, Artificial
  Probe
ggaaggcttaattgtagagtggagg

SEQ ID NO: 25808 - DNA, 25 bp, Artificial
  Probe
agagtgtgtctgattctgcttactg

SEQ ID NO: 25809 - DNA, 25 bp, Artificial
  Probe
agtatatctgctagtgttactggtt

SEQ ID NO: 25810 - DNA, 25 bp, Artificial
  Probe
aagtatatctgctagtgttactggt

SEQ ID NO: 25811 - DNA, 25 bp, Artificial
  Probe
tctgattctgcttactgccatttag

SEQ ID NO: 25812 - DNA, 25 bp, Artificial
  Probe
aaggcatggaaggcttaattgtaga

SEQ ID NO: 25813 - DNA, 25 bp, Artificial
  Probe
gtctgattctgcttactgccattta

SEQ ID NO: 25814 - DNA, 25 bp, Artificial
  Probe
gtccctacagaaatctctctcaata

SEQ ID NO: 25815 - DNA, 25 bp, Artificial
  Probe
ccctcagtttgaatcctcctataaa

SEQ ID NO: 25816 - DNA, 25 bp, Artificial
  Probe
aggcatggaaggcttaattgtagag

SEQ ID NO: 25817 - DNA, 25 bp, Artificial
  Probe
tccctcagtttgaatcctcctataa

SEQ ID NO: 25818 - DNA, 25 bp, Artificial
  Probe
ttccctcagtttgaatcctcctata

SEQ ID NO: 25819 - DNA, 25 bp, Artificial
  Probe
ctcaatatcctgttagcgactatag

SEQ ID NO: 25820 - DNA, 25 bp, Artificial
  Probe
gtgtctgattctgcttactgccatt

SEQ ID NO: 25821 - DNA, 25 bp, Artificial
  Probe
tatctgctagtgttactggtttctg

SEQ ID NO: 25822 - DNA, 25 bp, Artificial
  Probe
atgctaagtatatctgctagtgtta

SEQ ID NO: 25823 - DNA, 25 bp, Artificial
  Probe
ggcatggaaggcttaattgtagagt

SEQ ID NO: 25824 - DNA, 25 bp, Artificial
  Probe
aaatctctctcaatatcctgttagc

SEQ ID NO: 25825 - DNA, 25 bp, Artificial
  Probe
ctgattctgcttactgccatttagt

SEQ ID NO: 25826 - DNA, 25 bp, Artificial
  Probe
tatgttgtccctacagaaatctctc

SEQ ID NO: 25827 - DNA, 25 bp, Artificial
  Probe
cctgttagcgactataggaatcata

SEQ ID NO: 25828 - DNA, 25 bp, Artificial
  Probe
tcaatatcctgttagcgactatagg

SEQ ID NO: 25829 - DNA, 25 bp, Artificial
  Probe
ctagtgttactggtttctgagttcc

SEQ ID NO: 25830 - DNA, 25 bp, Artificial
  Probe
atatctgctagtgttactggtttct

SEQ ID NO: 25831 - DNA, 25 bp, Artificial
  Probe
atatacatcatctcctacatcgacc

SEQ ID NO: 25832 - DNA, 25 bp, Artificial
  Probe
cgacacgtctatatacatcatctcc

SEQ ID NO: 25833 - DNA, 25 bp, Artificial
  Probe
gacacgtctatatacatcatctcct

SEQ ID NO: 25834 - DNA, 25 bp, Artificial
  Probe
acgtctatatacatcatctcctaca

SEQ ID NO: 25835 - DNA, 25 bp, Artificial
  Probe
acacgtctatatacatcatctccta

SEQ ID NO: 25836 - DNA, 25 bp, Artificial
  Probe
cgtctatatacatcatctcctacat

SEQ ID NO: 25837 - DNA, 25 bp, Artificial
  Probe
cacgtctatatacatcatctcctac

SEQ ID NO: 25838 - DNA, 25 bp, Artificial
  Probe
cacgacacgtctatatacatcatct

SEQ ID NO: 25839 - DNA, 25 bp, Artificial
  Probe
acgacacgtctatatacatcatctc

SEQ ID NO: 25840 - DNA, 25 bp, Artificial
  Probe
tctatatacatcatctcctacatcg

SEQ ID NO: 25841 - DNA, 25 bp, Artificial
  Probe
gcacgacacgtctatatacatcatc

SEQ ID NO: 25842 - DNA, 25 bp, Artificial
  Probe
tatacatcatctcctacatcgaccc

SEQ ID NO: 25843 - DNA, 25 bp, Artificial
  Probe
agcacgacacgtctatatacatcat

SEQ ID NO: 25844 - DNA, 25 bp, Artificial
  Probe
tatatacatcatctcctacatcgac

SEQ ID NO: 25845 - DNA, 25 bp, Artificial
  Probe
ctatatacatcatctcctacatcga

SEQ ID NO: 25846 - DNA, 25 bp, Artificial
  Probe
gagcacgacacgtctatatacatca

SEQ ID NO: 25847 - DNA, 25 bp, Artificial
  Probe
cgagcacgacacgtctatatacatc

SEQ ID NO: 25848 - DNA, 25 bp, Artificial
  Probe
gtctatatacatcatctcctacatc

SEQ ID NO: 25849 - DNA, 25 bp, Artificial
  Probe
atacatcatctcctacatcgacccg

SEQ ID NO: 25850 - DNA, 25 bp, Artificial
  Probe
ttggaaagtcacaagagaaggcagg

SEQ ID NO: 25851 - DNA, 25 bp, Artificial
  Probe
gcgagcacgacacgtctatatacat

SEQ ID NO: 25852 - DNA, 25 bp, Artificial
  Probe
cacaagagaaggcaggctctaagac

SEQ ID NO: 25853 - DNA, 25 bp, Artificial
  Probe
gtcacaagagaaggcaggctctaag

SEQ ID NO: 25854 - DNA, 25 bp, Artificial
  Probe
cttggaaagtcacaagagaaggcag

SEQ ID NO: 25855 - DNA, 25 bp, Artificial
  Probe
tcacaagagaaggcaggctctaaga

SEQ ID NO: 25856 - DNA, 25 bp, Artificial
  Probe
tacatcatctcctacatcgacccgg

SEQ ID NO: 25857 - DNA, 25 bp, Artificial
  Probe
ccttggaaagtcacaagagaaggca

SEQ ID NO: 25858 - DNA, 25 bp, Artificial
  Probe
caggagatccagactttgaagaatc

SEQ ID NO: 25859 - DNA, 25 bp, Artificial
  Probe
agatccagactttgaagaatcagag

SEQ ID NO: 25860 - DNA, 25 bp, Artificial
  Probe
gagatccagactttgaagaatcaga

SEQ ID NO: 25861 - DNA, 25 bp, Artificial
  Probe
ggagatccagactttgaagaatcag

SEQ ID NO: 25862 - DNA, 25 bp, Artificial
  Probe
aggagatccagactttgaagaatca

SEQ ID NO: 25863 - DNA, 25 bp, Artificial
  Probe
atccagactttgaagaatcagagca

SEQ ID NO: 25864 - DNA, 25 bp, Artificial
  Probe
gatccagactttgaagaatcagagc

SEQ ID NO: 25865 - DNA, 25 bp, Artificial
  Probe
ccaggagatccagactttgaagaat

SEQ ID NO: 25866 - DNA, 25 bp, Artificial
  Probe
cagactttgaagaatcagagcactg

SEQ ID NO: 25867 - DNA, 25 bp, Artificial
  Probe
ccagactttgaagaatcagagcact

SEQ ID NO: 25868 - DNA, 25 bp, Artificial
  Probe
tccagactttgaagaatcagagcac

SEQ ID NO: 25869 - DNA, 25 bp, Artificial
  Probe
agactttgaagaatcagagcactgg

SEQ ID NO: 25870 - DNA, 25 bp, Artificial
  Probe
accaggagatccagactttgaagaa

SEQ ID NO: 25871 - DNA, 25 bp, Artificial
  Probe
gaccaggagatccagactttgaaga

SEQ ID NO: 25872 - DNA, 25 bp, Artificial
  Probe
gactttgaagaatcagagcactggc

SEQ ID NO: 25873 - DNA, 25 bp, Artificial
  Probe
ggaccaggagatccagactttgaag

SEQ ID NO: 25874 - DNA, 25 bp, Artificial
  Probe
caaggaccaggagatccagactttg

SEQ ID NO: 25875 - DNA, 25 bp, Artificial
  Probe
aggaccaggagatccagactttgaa

SEQ ID NO: 25876 - DNA, 25 bp, Artificial
  Probe
aaggaccaggagatccagactttga

SEQ ID NO: 25877 - DNA, 25 bp, Artificial
  Probe
atcaccagactcattcattcacttc

SEQ ID NO: 25878 - DNA, 25 bp, Artificial
  Probe
catcaccagactcattcattcactt

SEQ ID NO: 25879 - DNA, 25 bp, Artificial
  Probe
caccagactcattcattcacttcag

SEQ ID NO: 25880 - DNA, 25 bp, Artificial
  Probe
tattagtgacctctgacttgagttc

SEQ ID NO: 25881 - DNA, 25 bp, Artificial
  Probe
ccagactcattcattcacttcagtt

SEQ ID NO: 25882 - DNA, 25 bp, Artificial
  Probe
tcaccagactcattcattcacttca

SEQ ID NO: 25883 - DNA, 25 bp, Artificial
  Probe
ttattagtgacctctgacttgagtt

SEQ ID NO: 25884 - DNA, 25 bp, Artificial
  Probe
attagtgacctctgacttgagttca

SEQ ID NO: 25885 - DNA, 25 bp, Artificial
  Probe
ctgacttgagttcacctctacctaa

SEQ ID NO: 25886 - DNA, 25 bp, Artificial
  Probe
accagactcattcattcacttcagt

SEQ ID NO: 25887 - DNA, 25 bp, Artificial
  Probe
tctgacttgagttcacctctaccta

SEQ ID NO: 25888 - DNA, 25 bp, Artificial
  Probe
ccatcaccagactcattcattcact

SEQ ID NO: 25889 - DNA, 25 bp, Artificial
  Probe
ttcacctctacctaaatacaaaccc

SEQ ID NO: 25890 - DNA, 25 bp, Artificial
  Probe
taatggtcttgaaatcctatcctcc

SEQ ID NO: 25891 - DNA, 25 bp, Artificial
  Probe
attgccgataactcatttctctctc

SEQ ID NO: 25892 - DNA, 25 bp, Artificial
  Probe
gattgccgataactcatttctctct

SEQ ID NO: 25893 - DNA, 25 bp, Artificial
  Probe
ctgcgtagatacctccatattgctg

SEQ ID NO: 25894 - DNA, 25 bp, Artificial
  Probe
aatggtcttgaaatcctatcctcct

SEQ ID NO: 25895 - DNA, 25 bp, Artificial
  Probe
ttcttacacctaccaagtgaaccag

SEQ ID NO: 25896 - DNA, 25 bp, Artificial
  Probe
gaaccaggattgccgataactcatt

SEQ ID NO: 25897 - DNA, 25 bp, Artificial
  Probe
cgtagatacctccatattgctgtgc

SEQ ID NO: 25898 - DNA, 25 bp, Artificial
  Probe
gcgtagatacctccatattgctgtg

SEQ ID NO: 25899 - DNA, 25 bp, Artificial
  Probe
gttcacctctacctaaatacaaacc

SEQ ID NO: 25900 - DNA, 25 bp, Artificial
  Probe
atggtcttgaaatcctatcctcctg

SEQ ID NO: 25901 - DNA, 25 bp, Artificial
  Probe
cagactcattcattcacttcagttt

SEQ ID NO: 25902 - DNA, 25 bp, Artificial
  Probe
ggattgccgataactcatttctctc

SEQ ID NO: 25903 - DNA, 25 bp, Artificial
  Probe
ggtatccactgtttcaaagtcttag

SEQ ID NO: 25904 - DNA, 25 bp, Artificial
  Probe
gacttgagttcacctctacctaaat

SEQ ID NO: 25905 - DNA, 25 bp, Artificial
  Probe
agtttattagtgacctctgacttga

SEQ ID NO: 25906 - DNA, 25 bp, Artificial
  Probe
gttaatggtcttgaaatcctatcct

SEQ ID NO: 25907 - DNA, 25 bp, Artificial
  Probe
agttaatggtcttgaaatcctatcc

SEQ ID NO: 25908 - DNA, 25 bp, Artificial
  Probe
ccgataactcatttctctctccaga

SEQ ID NO: 25909 - DNA, 25 bp, Artificial
  Probe
aggattgccgataactcatttctct

SEQ ID NO: 25910 - DNA, 25 bp, Artificial
  Probe
caggattgccgataactcatttctc

SEQ ID NO: 25911 - DNA, 25 bp, Artificial
  Probe
tgacttgagttcacctctacctaaa

SEQ ID NO: 25912 - DNA, 25 bp, Artificial
  Probe
ctctgacttgagttcacctctacct

SEQ ID NO: 25913 - DNA, 25 bp, Artificial
  Probe
gacctctgacttgagttcacctcta

SEQ ID NO: 25914 - DNA, 25 bp, Artificial
  Probe
tttattagtgacctctgacttgagt

SEQ ID NO: 25915 - DNA, 25 bp, Artificial
  Probe
tgcgtagatacctccatattgctgt

SEQ ID NO: 25916 - DNA, 25 bp, Artificial
  Probe
ttaatggtcttgaaatcctatcctc

SEQ ID NO: 25917 - DNA, 25 bp, Artificial
  Probe
tgagttcacctctacctaaatacaa

SEQ ID NO: 25918 - DNA, 25 bp, Artificial
  Probe
ttgagttcacctctacctaaataca

SEQ ID NO: 25919 - DNA, 25 bp, Artificial
  Probe
gtttattagtgacctctgacttgag

SEQ ID NO: 25920 - DNA, 25 bp, Artificial
  Probe
agttcacctctacctaaatacaaac

SEQ ID NO: 25921 - DNA, 25 bp, Artificial
  Probe
gtatccactgtttcaaagtcttaga

SEQ ID NO: 25922 - DNA, 25 bp, Artificial
  Probe
gaatgatgagaactactctgccgag

SEQ ID NO: 25923 - DNA, 25 bp, Artificial
  Probe
caagagtttcactttgaccataacg

SEQ ID NO: 25924 - DNA, 25 bp, Artificial
  Probe
gcaagagtttcactttgaccataac

SEQ ID NO: 25925 - DNA, 25 bp, Artificial
  Probe
aagagtttcactttgaccataacgg

SEQ ID NO: 25926 - DNA, 25 bp, Artificial
  Probe
aggttcaacgatctgagatttgtag

SEQ ID NO: 25927 - DNA, 25 bp, Artificial
  Probe
ggcaagagtttcactttgaccataa

SEQ ID NO: 25928 - DNA, 25 bp, Artificial
  Probe
ggttcaacgatctgagatttgtagg

SEQ ID NO: 25929 - DNA, 25 bp, Artificial
  Probe
tacgaaatgcctctgctgttatgaa

SEQ ID NO: 25930 - DNA, 25 bp, Artificial
  Probe
caggttcaacgatctgagatttgta

SEQ ID NO: 25931 - DNA, 25 bp, Artificial
  Probe
cagagctattaaagtgacagtggac

SEQ ID NO: 25932 - DNA, 25 bp, Artificial
  Probe
aggcaagagtttcactttgaccata

SEQ ID NO: 25933 - DNA, 25 bp, Artificial
  Probe
acagagctattaaagtgacagtgga

SEQ ID NO: 25934 - DNA, 25 bp, Artificial
  Probe
gttcaacgatctgagatttgtaggc

SEQ ID NO: 25935 - DNA, 25 bp, Artificial
  Probe
gccacttaccacagagctattaaag

SEQ ID NO: 25936 - DNA, 25 bp, Artificial
  Probe
ctacgaaatgcctctgctgttatga

SEQ ID NO: 25937 - DNA, 25 bp, Artificial
  Probe
taccacagagctattaaagtgacag

SEQ ID NO: 25938 - DNA, 25 bp, Artificial
  Probe
ttaccacagagctattaaagtgaca

SEQ ID NO: 25939 - DNA, 25 bp, Artificial
  Probe
tctaaacctagtttgttctctgacc

SEQ ID NO: 25940 - DNA, 25 bp, Artificial
  Probe
gcttgatgactctaaacctagtttg

SEQ ID NO: 25941 - DNA, 25 bp, Artificial
  Probe
acgaaatgcctctgctgttatgaaa

SEQ ID NO: 25942 - DNA, 25 bp, Artificial
  Probe
ggaatgatgagaactactctgccga

SEQ ID NO: 25943 - DNA, 25 bp, Artificial
  Probe
cttaccacagagctattaaagtgac

SEQ ID NO: 25944 - DNA, 25 bp, Artificial
  Probe
actctaaacctagtttgttctctga

SEQ ID NO: 25945 - DNA, 25 bp, Artificial
  Probe
tgactctaaacctagtttgttctct

SEQ ID NO: 25946 - DNA, 25 bp, Artificial
  Probe
cataacggtcttcacaaatcctccc

SEQ ID NO: 25947 - DNA, 25 bp, Artificial
  Probe
ccataacggtcttcacaaatcctcc

SEQ ID NO: 25948 - DNA, 25 bp, Artificial
  Probe
agagctattaaagtgacagtggacg

SEQ ID NO: 25949 - DNA, 25 bp, Artificial
  Probe
ctaaacctagtttgttctctgaccg

SEQ ID NO: 25950 - DNA, 25 bp, Artificial
  Probe
ctctaaacctagtttgttctctgac

SEQ ID NO: 25951 - DNA, 25 bp, Artificial
  Probe
gactctaaacctagtttgttctctg

SEQ ID NO: 25952 - DNA, 25 bp, Artificial
  Probe
cacagagctattaaagtgacagtgg

SEQ ID NO: 25953 - DNA, 25 bp, Artificial
  Probe
ccacagagctattaaagtgacagtg

SEQ ID NO: 25954 - DNA, 25 bp, Artificial
  Probe
agagtttcactttgaccataacggt

SEQ ID NO: 25955 - DNA, 25 bp, Artificial
  Probe
tgatgactctaaacctagtttgttc

SEQ ID NO: 25956 - DNA, 25 bp, Artificial
  Probe
cttgatgactctaaacctagtttgt

SEQ ID NO: 25957 - DNA, 25 bp, Artificial
  Probe
accacagagctattaaagtgacagt

SEQ ID NO: 25958 - DNA, 25 bp, Artificial
  Probe
atgactctaaacctagtttgttctc

SEQ ID NO: 25959 - DNA, 25 bp, Artificial
  Probe
gatgactctaaacctagtttgttct

SEQ ID NO: 25960 - DNA, 25 bp, Artificial
  Probe
acagacagaagcttgatgactctaa

SEQ ID NO: 25961 - DNA, 25 bp, Artificial
  Probe
ttgatgactctaaacctagtttgtt

SEQ ID NO: 25962 - DNA, 25 bp, Artificial
  Probe
gaggcaagagtttcactttgaccat

SEQ ID NO: 25963 - DNA, 25 bp, Artificial
  Probe
agcttgatgactctaaacctagttt

SEQ ID NO: 25964 - DNA, 25 bp, Artificial
  Probe
aatgatgagaactactctgccgagc

SEQ ID NO: 25965 - DNA, 25 bp, Artificial
  Probe
accataacggtcttcacaaatcctc

SEQ ID NO: 25966 - DNA, 25 bp, Artificial
  Probe
ccaggttcaacgatctgagatttgt

SEQ ID NO: 25967 - DNA, 25 bp, Artificial
  Probe
ggagaacccagaacataatgacttt

SEQ ID NO: 25968 - DNA, 25 bp, Artificial
  Probe
gaaagtcttcctgataagtgctaca

SEQ ID NO: 25969 - DNA, 25 bp, Artificial
  Probe
gagaacccagaacataatgactttc

SEQ ID NO: 25970 - DNA, 25 bp, Artificial
  Probe
agaaagtcttcctgataagtgctac

SEQ ID NO: 25971 - DNA, 25 bp, Artificial
  Probe
aagtcttcctgataagtgctacagc

SEQ ID NO: 25972 - DNA, 25 bp, Artificial
  Probe
tgaggacatgaataaagaccagatt

SEQ ID NO: 25973 - DNA, 25 bp, Artificial
  Probe
atctacattgaagtgcctgtgtctg

SEQ ID NO: 25974 - DNA, 25 bp, Artificial
  Probe
catctacattgaagtgcctgtgtct

SEQ ID NO: 25975 - DNA, 25 bp, Artificial
  Probe
aatgaggacatgaataaagaccaga

SEQ ID NO: 25976 - DNA, 25 bp, Artificial
  Probe
agaatgaggacatgaataaagacca

SEQ ID NO: 25977 - DNA, 25 bp, Artificial
  Probe
aaagtcttcctgataagtgctacag

SEQ ID NO: 25978 - DNA, 25 bp, Artificial
  Probe
atgaggacatgaataaagaccagat

SEQ ID NO: 25979 - DNA, 25 bp, Artificial
  Probe
gaatgaggacatgaataaagaccag

SEQ ID NO: 25980 - DNA, 25 bp, Artificial
  Probe
gagaatgaggacatgaataaagacc

SEQ ID NO: 25981 - DNA, 25 bp, Artificial
  Probe
gaggacatgaataaagaccagattt

SEQ ID NO: 25982 - DNA, 25 bp, Artificial
  Probe
ctacattgaagtgcctgtgtctgag

SEQ ID NO: 25983 - DNA, 25 bp, Artificial
  Probe
agagaatgaggacatgaataaagac

SEQ ID NO: 25984 - DNA, 25 bp, Artificial
  Probe
acataatgactttctgaagctgaga

SEQ ID NO: 25985 - DNA, 25 bp, Artificial
  Probe
gaacataatgactttctgaagctga

SEQ ID NO: 25986 - DNA, 25 bp, Artificial
  Probe
aacataatgactttctgaagctgag

SEQ ID NO: 25987 - DNA, 25 bp, Artificial
  Probe
tctacattgaagtgcctgtgtctga

SEQ ID NO: 25988 - DNA, 25 bp, Artificial
  Probe
ccatctacattgaagtgcctgtgtc

SEQ ID NO: 25989 - DNA, 25 bp, Artificial
  Probe
tggagaacccagaacataatgactt

SEQ ID NO: 25990 - DNA, 25 bp, Artificial
  Probe
ctgataagtgctacagcatcaagtt

SEQ ID NO: 25991 - DNA, 25 bp, Artificial
  Probe
aaagaaagtcttcctgataagtgct

SEQ ID NO: 25992 - DNA, 25 bp, Artificial
  Probe
agaacccagaacataatgactttct

SEQ ID NO: 25993 - DNA, 25 bp, Artificial
  Probe
aagaaagtcttcctgataagtgcta

SEQ ID NO: 25994 - DNA, 25 bp, Artificial
  Probe
cagttgttttgttgtgttttggttt

SEQ ID NO: 25995 - DNA, 25 bp, Artificial
  Probe
tttcagttgttttgttgtgttttgg

SEQ ID NO: 25996 - DNA, 25 bp, Artificial
  Probe
aggatttcagttgttttgttgtgtt

SEQ ID NO: 25997 - DNA, 25 bp, Artificial
  Probe
agttgttttgttgtgttttggtttt

SEQ ID NO: 25998 - DNA, 25 bp, Artificial
  Probe
ggatttcagttgttttgttgtgttt

SEQ ID NO: 25999 - DNA, 25 bp, Artificial
  Probe
gaggatttcagttgttttgttgtgt

SEQ ID NO: 26000 - DNA, 25 bp, Artificial
  Probe
gtggagaacccagaacataatgact

SEQ ID NO: 26001 - DNA, 25 bp, Artificial
  Probe
tcagttgttttgttgtgttttggtt

SEQ ID NO: 26002 - DNA, 25 bp, Artificial
  Probe
ttcagttgttttgttgtgttttggt

SEQ ID NO: 26003 - DNA, 25 bp, Artificial
  Probe
gtacccatctacattgaagtgcctg

SEQ ID NO: 26004 - DNA, 25 bp, Artificial
  Probe
tgaataaagaccagattttgcttga

SEQ ID NO: 26005 - DNA, 25 bp, Artificial
  Probe
gtagagaatgaggacatgaataaag

SEQ ID NO: 26006 - DNA, 25 bp, Artificial
  Probe
ttcctgataagtgctacagcatcaa

SEQ ID NO: 26007 - DNA, 25 bp, Artificial
  Probe
tagagaatgaggacatgaataaaga

SEQ ID NO: 26008 - DNA, 25 bp, Artificial
  Probe
tcttcctgataagtgctacagcatc

SEQ ID NO: 26009 - DNA, 25 bp, Artificial
  Probe
atttcagttgttttgttgtgttttg

SEQ ID NO: 26010 - DNA, 25 bp, Artificial
  Probe
tgaggatttcagttgttttgttgtg

SEQ ID NO: 26011 - DNA, 25 bp, Artificial
  Probe
taatgactttctgaagctgagaaca

SEQ ID NO: 26012 - DNA, 25 bp, Artificial
  Probe
tatacctctctcttcatacacgagt

SEQ ID NO: 26013 - DNA, 25 bp, Artificial
  Probe
atacctctctcttcatacacgagtg

SEQ ID NO: 26014 - DNA, 25 bp, Artificial
  Probe
ctgcctgttaatgttagccatgtat

SEQ ID NO: 26015 - DNA, 25 bp, Artificial
  Probe
cctgttaatgttagccatgtatgta

SEQ ID NO: 26016 - DNA, 25 bp, Artificial
  Probe
gcctgttaatgttagccatgtatgt

SEQ ID NO: 26017 - DNA, 25 bp, Artificial
  Probe
tgcctgttaatgttagccatgtatg

SEQ ID NO: 26018 - DNA, 25 bp, Artificial
  Probe
tgatggacacagtatccttattaca

SEQ ID NO: 26019 - DNA, 25 bp, Artificial
  Probe
ggatctgttatgctaatagtagtgt

SEQ ID NO: 26020 - DNA, 25 bp, Artificial
  Probe
tggatctgttatgctaatagtagtg

SEQ ID NO: 26021 - DNA, 25 bp, Artificial
  Probe
gccatgtatgtatacctctctcttc

SEQ ID NO: 26022 - DNA, 25 bp, Artificial
  Probe
agccatgtatgtatacctctctctt

SEQ ID NO: 26023 - DNA, 25 bp, Artificial
  Probe
tagccatgtatgtatacctctctct

SEQ ID NO: 26024 - DNA, 25 bp, Artificial
  Probe
actgcctgttaatgttagccatgta

SEQ ID NO: 26025 - DNA, 25 bp, Artificial
  Probe
tgttagccatgtatgtatacctctc

SEQ ID NO: 26026 - DNA, 25 bp, Artificial
  Probe
ttattctaagagacgtgcatgtgag

SEQ ID NO: 26027 - DNA, 25 bp, Artificial
  Probe
gttagccatgtatgtatacctctct

SEQ ID NO: 26028 - DNA, 25 bp, Artificial
  Probe
tttcaaactgcctgttaatgttagc

SEQ ID NO: 26029 - DNA, 25 bp, Artificial
  Probe
atggacacagtatccttattacaag

SEQ ID NO: 26030 - DNA, 25 bp, Artificial
  Probe
gatggacacagtatccttattacaa

SEQ ID NO: 26031 - DNA, 25 bp, Artificial
  Probe
ttgatggacacagtatccttattac

SEQ ID NO: 26032 - DNA, 25 bp, Artificial
  Probe
ttagccatgtatgtatacctctctc

SEQ ID NO: 26033 - DNA, 25 bp, Artificial
  Probe
tggttggtaaatagaagcaatggat

SEQ ID NO: 26034 - DNA, 25 bp, Artificial
  Probe
atggttggtaaatagaagcaatgga

SEQ ID NO: 26035 - DNA, 25 bp, Artificial
  Probe
ccatgtatgtatacctctctcttca

SEQ ID NO: 26036 - DNA, 25 bp, Artificial
  Probe
atctgttatgctaatagtagtgtct

SEQ ID NO: 26037 - DNA, 25 bp, Artificial
  Probe
ggacgtagatagcatagacaggatc

SEQ ID NO: 26038 - DNA, 25 bp, Artificial
  Probe
aaggagttcatttctctgtagactg

SEQ ID NO: 26039 - DNA, 25 bp, Artificial
  Probe
caaggagttcatttctctgtagact

SEQ ID NO: 26040 - DNA, 25 bp, Artificial
  Probe
atgttagccatgtatgtatacctct

SEQ ID NO: 26041 - DNA, 25 bp, Artificial
  Probe
gattgacaaggagttcatttctctg

SEQ ID NO: 26042 - DNA, 25 bp, Artificial
  Probe
agattgacaaggagttcatttctct

SEQ ID NO: 26043 - DNA, 25 bp, Artificial
  Probe
ggagttcatttctctgtagactgta

SEQ ID NO: 26044 - DNA, 25 bp, Artificial
  Probe
ctagacttagtgtttctggttatgc

SEQ ID NO: 26045 - DNA, 25 bp, Artificial
  Probe
cgtttcaaactgcctgttaatgtta

SEQ ID NO: 26046 - DNA, 25 bp, Artificial
  Probe
gacaaggagttcatttctctgtaga

SEQ ID NO: 26047 - DNA, 25 bp, Artificial
  Probe
tggtaaatagaagcaatggatctgt

SEQ ID NO: 26048 - DNA, 25 bp, Artificial
  Probe
acaaggagttcatttctctgtagac

SEQ ID NO: 26049 - DNA, 25 bp, Artificial
  Probe
tgacaaggagttcatttctctgtag

SEQ ID NO: 26050 - DNA, 25 bp, Artificial
  Probe
ttgacaaggagttcatttctctgta

SEQ ID NO: 26051 - DNA, 25 bp, Artificial
  Probe
attgacaaggagttcatttctctgt

SEQ ID NO: 26052 - DNA, 25 bp, Artificial
  Probe
aggagttcatttctctgtagactgt

SEQ ID NO: 26053 - DNA, 25 bp, Artificial
  Probe
gtttcaaactgcctgttaatgttag

SEQ ID NO: 26054 - DNA, 25 bp, Artificial
  Probe
ggttggtaaatagaagcaatggatc

SEQ ID NO: 26055 - DNA, 25 bp, Artificial
  Probe
ttatgctgcacctagaattccttag

SEQ ID NO: 26056 - DNA, 25 bp, Artificial
  Probe
ggtaaatagaagcaatggatctgtt

SEQ ID NO: 26057 - DNA, 25 bp, Artificial
  Probe
gcttatggcaatggtgtaaaataaa

SEQ ID NO: 26058 - DNA, 25 bp, Artificial
  Probe
tggcaatggtgtaaaataaatactt

SEQ ID NO: 26059 - DNA, 25 bp, Artificial
  Probe
atggcaatggtgtaaaataaatact

SEQ ID NO: 26060 - DNA, 25 bp, Artificial
  Probe
ggcaatggtgtaaaataaatacttt

SEQ ID NO: 26061 - DNA, 25 bp, Artificial
  Probe
cttatggcaatggtgtaaaataaat

SEQ ID NO: 26062 - DNA, 25 bp, Artificial
  Probe
tatggcaatggtgtaaaataaatac

SEQ ID NO: 26063 - DNA, 25 bp, Artificial
  Probe
cactgttctccgagttctgaacctt

SEQ ID NO: 26064 - DNA, 25 bp, Artificial
  Probe
ctgttctccgagttctgaacctttg

SEQ ID NO: 26065 - DNA, 25 bp, Artificial
  Probe
actgttctccgagttctgaaccttt

SEQ ID NO: 26066 - DNA, 25 bp, Artificial
  Probe
ttatggcaatggtgtaaaataaata

SEQ ID NO: 26067 - DNA, 25 bp, Artificial
  Probe
tgttctccgagttctgaacctttgg

SEQ ID NO: 26068 - DNA, 25 bp, Artificial
  Probe
gcaatggtgtaaaataaatactttt

SEQ ID NO: 26069 - DNA, 25 bp, Artificial
  Probe
ggacaaagcaatattggctcctttt

SEQ ID NO: 26070 - DNA, 25 bp, Artificial
  Probe
ttgtgatgtagcctgtcaatgtcta

SEQ ID NO: 26071 - DNA, 25 bp, Artificial
  Probe
tgtgatgtagcctgtcaatgtctag

SEQ ID NO: 26072 - DNA, 25 bp, Artificial
  Probe
tttgtaaagacgaagaggaaagact

SEQ ID NO: 26073 - DNA, 25 bp, Artificial
  Probe
ttgtaaagacgaagaggaaagactg

SEQ ID NO: 26074 - DNA, 25 bp, Artificial
  Probe
ggagacacaggatttgataaacatt

SEQ ID NO: 26075 - DNA, 25 bp, Artificial
  Probe
atttgtaaagacgaagaggaaagac

SEQ ID NO: 26076 - DNA, 25 bp, Artificial
  Probe
aggaggaatagatttgtaaagacga

SEQ ID NO: 26077 - DNA, 25 bp, Artificial
  Probe
gggagacacaggatttgataaacat

SEQ ID NO: 26078 - DNA, 25 bp, Artificial
  Probe
gatttgtaaagacgaagaggaaaga

SEQ ID NO: 26079 - DNA, 25 bp, Artificial
  Probe
agatttgtaaagacgaagaggaaag

SEQ ID NO: 26080 - DNA, 25 bp, Artificial
  Probe
ttgggagacacaggatttgataaac

SEQ ID NO: 26081 - DNA, 25 bp, Artificial
  Probe
gttgggagacacaggatttgataaa

SEQ ID NO: 26082 - DNA, 25 bp, Artificial
  Probe
accaaacaattctaaacctccattt

SEQ ID NO: 26083 - DNA, 25 bp, Artificial
  Probe
gtaaagacgaagaggaaagactgac

SEQ ID NO: 26084 - DNA, 25 bp, Artificial
  Probe
tgtaaagacgaagaggaaagactga

SEQ ID NO: 26085 - DNA, 25 bp, Artificial
  Probe
ggaggaatagatttgtaaagacgaa

SEQ ID NO: 26086 - DNA, 25 bp, Artificial
  Probe
gtgccttctatttatcgttgactcc

SEQ ID NO: 26087 - DNA, 25 bp, Artificial
  Probe
ggtgccttctatttatcgttgactc

SEQ ID NO: 26088 - DNA, 25 bp, Artificial
  Probe
cggaatgatactttaggaggaatag

SEQ ID NO: 26089 - DNA, 25 bp, Artificial
  Probe
taccaaacaattctaaacctccatt

SEQ ID NO: 26090 - DNA, 25 bp, Artificial
  Probe
ttaccaaacaattctaaacctccat

SEQ ID NO: 26091 - DNA, 25 bp, Artificial
  Probe
attaccaaacaattctaaacctcca

SEQ ID NO: 26092 - DNA, 25 bp, Artificial
  Probe
tgggagacacaggatttgataaaca

SEQ ID NO: 26093 - DNA, 25 bp, Artificial
  Probe
aattgtgatgtagcctgtcaatgtc

SEQ ID NO: 26094 - DNA, 25 bp, Artificial
  Probe
taaagacgaagaggaaagactgacc

SEQ ID NO: 26095 - DNA, 25 bp, Artificial
  Probe
tagatttgtaaagacgaagaggaaa

SEQ ID NO: 26096 - DNA, 25 bp, Artificial
  Probe
aaatcaagtcacaactcctttctgg

SEQ ID NO: 26097 - DNA, 25 bp, Artificial
  Probe
gattaccaaacaattctaaacctcc

SEQ ID NO: 26098 - DNA, 25 bp, Artificial
  Probe
taggaggaatagatttgtaaagacg

SEQ ID NO: 26099 - DNA, 25 bp, Artificial
  Probe
atagatttgtaaagacgaagaggaa

SEQ ID NO: 26100 - DNA, 25 bp, Artificial
  Probe
aatagatttgtaaagacgaagagga

SEQ ID NO: 26101 - DNA, 25 bp, Artificial
  Probe
aggaatagatttgtaaagacgaaga

SEQ ID NO: 26102 - DNA, 25 bp, Artificial
  Probe
gatgtagcctgtcaatgtctagaac

SEQ ID NO: 26103 - DNA, 25 bp, Artificial
  Probe
gagacacaggatttgataaacattt

SEQ ID NO: 26104 - DNA, 25 bp, Artificial
  Probe
gaatagatttgtaaagacgaagagg

SEQ ID NO: 26105 - DNA, 25 bp, Artificial
  Probe
ggaatagatttgtaaagacgaagag

SEQ ID NO: 26106 - DNA, 25 bp, Artificial
  Probe
gaggaatagatttgtaaagacgaag

SEQ ID NO: 26107 - DNA, 25 bp, Artificial
  Probe
attgtgatgtagcctgtcaatgtct

SEQ ID NO: 26108 - DNA, 25 bp, Artificial
  Probe
gtgattaccaaacaattctaaacct

SEQ ID NO: 26109 - DNA, 25 bp, Artificial
  Probe
tgttgggagacacaggatttgataa

SEQ ID NO: 26110 - DNA, 25 bp, Artificial
  Probe
ttgttgggagacacaggatttgata

SEQ ID NO: 26111 - DNA, 25 bp, Artificial
  Probe
tgattaccaaacaattctaaacctc

SEQ ID NO: 26112 - DNA, 25 bp, Artificial
  Probe
tgatgtagcctgtcaatgtctagaa

SEQ ID NO: 26113 - DNA, 25 bp, Artificial
  Probe
atgtttcatttgttgggagacacag

SEQ ID NO: 26114 - DNA, 25 bp, Artificial
  Probe
gatgtttcatttgttgggagacaca

SEQ ID NO: 26115 - DNA, 25 bp, Artificial
  Probe
atgatggtggtgatgatgatgatta

SEQ ID NO: 26116 - DNA, 25 bp, Artificial
  Probe
tgatggtggtgatgatgatgattaa

SEQ ID NO: 26117 - DNA, 25 bp, Artificial
  Probe
tagttctctctctctctctctcctc

SEQ ID NO: 26118 - DNA, 25 bp, Artificial
  Probe
gatgatggtggtgatgatgatgatt

SEQ ID NO: 26119 - DNA, 25 bp, Artificial
  Probe
ctagttctctctctctctctctcct

SEQ ID NO: 26120 - DNA, 25 bp, Artificial
  Probe
tgatgatggtggtgatgatgatgat

SEQ ID NO: 26121 - DNA, 25 bp, Artificial
  Probe
agataggagattgttcatcatggtg

SEQ ID NO: 26122 - DNA, 25 bp, Artificial
  Probe
aagataggagattgttcatcatggt

SEQ ID NO: 26123 - DNA, 25 bp, Artificial
  Probe
gataggagattgttcatcatggtgg

SEQ ID NO: 26124 - DNA, 25 bp, Artificial
  Probe
ataggagattgttcatcatggtggt

SEQ ID NO: 26125 - DNA, 25 bp, Artificial
  Probe
gtgatgatggtggtgatgatgatga

SEQ ID NO: 26126 - DNA, 25 bp, Artificial
  Probe
gatggtggtgatgatgatgattaaa

SEQ ID NO: 26127 - DNA, 25 bp, Artificial
  Probe
taggagattgttcatcatggtggtg

SEQ ID NO: 26128 - DNA, 25 bp, Artificial
  Probe
tctgacttgaaagataggagattgt

SEQ ID NO: 26129 - DNA, 25 bp, Artificial
  Probe
ctgacttgaaagataggagattgtt

SEQ ID NO: 26130 - DNA, 25 bp, Artificial
  Probe
tgacttgaaagataggagattgttc

SEQ ID NO: 26131 - DNA, 25 bp, Artificial
  Probe
ttctgacttgaaagataggagattg

SEQ ID NO: 26132 - DNA, 25 bp, Artificial
  Probe
ggtgatgatggtggtgatgatgatg

SEQ ID NO: 26133 - DNA, 25 bp, Artificial
  Probe
gactagttctctctctctctctctc

SEQ ID NO: 26134 - DNA, 25 bp, Artificial
  Probe
agttctctctctctctctctcctcg

SEQ ID NO: 26135 - DNA, 25 bp, Artificial
  Probe
aaagataggagattgttcatcatgg

SEQ ID NO: 26136 - DNA, 25 bp, Artificial
  Probe
agactagttctctctctctctctct

SEQ ID NO: 26137 - DNA, 25 bp, Artificial
  Probe
ttctctctctctctctctcctcgtg

SEQ ID NO: 26138 - DNA, 25 bp, Artificial
  Probe
gttctctctctctctctctcctcgt

SEQ ID NO: 26139 - DNA, 25 bp, Artificial
  Probe
tggtgatgatggtggtgatgatgat

SEQ ID NO: 26140 - DNA, 25 bp, Artificial
  Probe
actagttctctctctctctctctcc

SEQ ID NO: 26141 - DNA, 25 bp, Artificial
  Probe
ctttaacagctacccgatatttccc

SEQ ID NO: 26142 - DNA, 25 bp, Artificial
  Probe
cagcatggatggatgaagagacaag

SEQ ID NO: 26143 - DNA, 25 bp, Artificial
  Probe
tttaacagctacccgatatttccca

SEQ ID NO: 26144 - DNA, 25 bp, Artificial
  Probe
gaaagataggagattgttcatcatg

SEQ ID NO: 26145 - DNA, 25 bp, Artificial
  Probe
gagattgttcatcatggtggtggtg

SEQ ID NO: 26146 - DNA, 25 bp, Artificial
  Probe
catggatggatgaagagacaagctg

SEQ ID NO: 26147 - DNA, 25 bp, Artificial
  Probe
ttaacagctacccgatatttcccag

SEQ ID NO: 26148 - DNA, 25 bp, Artificial
  Probe
agcaaacccttgtttacatcttcaa

SEQ ID NO: 26149 - DNA, 25 bp, Artificial
  Probe
aagcaaacccttgtttacatcttca

SEQ ID NO: 26150 - DNA, 25 bp, Artificial
  Probe
gtggtgatgatggtggtgatgatga

SEQ ID NO: 26151 - DNA, 25 bp, Artificial
  Probe
atggtggtgatgatgatgattaaaa

SEQ ID NO: 26152 - DNA, 25 bp, Artificial
  Probe
ggaagcaaacccttgtttacatctt

SEQ ID NO: 26153 - DNA, 25 bp, Artificial
  Probe
gacttgaaagataggagattgttca

SEQ ID NO: 26154 - DNA, 25 bp, Artificial
  Probe
gaagcaaacccttgtttacatcttc

SEQ ID NO: 26155 - DNA, 25 bp, Artificial
  Probe
tttctgacttgaaagataggagatt

SEQ ID NO: 26156 - DNA, 25 bp, Artificial
  Probe
ctacttctgactctctgtgtgtgcg

SEQ ID NO: 26157 - DNA, 25 bp, Artificial
  Probe
cgctacttctgactctctgtgtgtg

SEQ ID NO: 26158 - DNA, 25 bp, Artificial
  Probe
aggagattgttcatcatggtggtgg

SEQ ID NO: 26159 - DNA, 25 bp, Artificial
  Probe
ttgaatcagagcttgtaacagccag

SEQ ID NO: 26160 - DNA, 25 bp, Artificial
  Probe
ctatgttgagaaggaagtatggcat

SEQ ID NO: 26161 - DNA, 25 bp, Artificial
  Probe
atgtcctatcatctgttcattgtgg

SEQ ID NO: 26162 - DNA, 25 bp, Artificial
  Probe
atctatgttgagaaggaagtatggc

SEQ ID NO: 26163 - DNA, 25 bp, Artificial
  Probe
ctatcatctgttcattgtggcttgt

SEQ ID NO: 26164 - DNA, 25 bp, Artificial
  Probe
tatcatctgttcattgtggcttgtg

SEQ ID NO: 26165 - DNA, 25 bp, Artificial
  Probe
tctatgttgagaaggaagtatggca

SEQ ID NO: 26166 - DNA, 25 bp, Artificial
  Probe
catctatgttgagaaggaagtatgg

SEQ ID NO: 26167 - DNA, 25 bp, Artificial
  Probe
cctatcatctgttcattgtggcttg

SEQ ID NO: 26168 - DNA, 25 bp, Artificial
  Probe
tcctatcatctgttcattgtggctt

SEQ ID NO: 26169 - DNA, 25 bp, Artificial
  Probe
catgtcctatcatctgttcattgtg

SEQ ID NO: 26170 - DNA, 25 bp, Artificial
  Probe
ctgatctacatgatggctactacat

SEQ ID NO: 26171 - DNA, 25 bp, Artificial
  Probe
tatgttgagaaggaagtatggcatg

SEQ ID NO: 26172 - DNA, 25 bp, Artificial
  Probe
atggctactacatataactatgcgg

SEQ ID NO: 26173 - DNA, 25 bp, Artificial
  Probe
tctgagcataagtatctctaagtga

SEQ ID NO: 26174 - DNA, 25 bp, Artificial
  Probe
actctgagcataagtatctctaagt

SEQ ID NO: 26175 - DNA, 25 bp, Artificial
  Probe
ctgctgatctacatgatggctacta

SEQ ID NO: 26176 - DNA, 25 bp, Artificial
  Probe
ttgagaaggaagtatggcatgagaa

SEQ ID NO: 26177 - DNA, 25 bp, Artificial
  Probe
ctctgagcataagtatctctaagtg

SEQ ID NO: 26178 - DNA, 25 bp, Artificial
  Probe
gatggctactacatataactatgcg

SEQ ID NO: 26179 - DNA, 25 bp, Artificial
  Probe
aatattaacaccttgacacaccgtt

SEQ ID NO: 26180 - DNA, 25 bp, Artificial
  Probe
gctgatctacatgatggctactaca

SEQ ID NO: 26181 - DNA, 25 bp, Artificial
  Probe
tgctgatctacatgatggctactac

SEQ ID NO: 26182 - DNA, 25 bp, Artificial
  Probe
tgatctacatgatggctactacata

SEQ ID NO: 26183 - DNA, 25 bp, Artificial
  Probe
tcatctatgttgagaaggaagtatg

SEQ ID NO: 26184 - DNA, 25 bp, Artificial
  Probe
gtcctatcatctgttcattgtggct

SEQ ID NO: 26185 - DNA, 25 bp, Artificial
  Probe
tgtcctatcatctgttcattgtggc

SEQ ID NO: 26186 - DNA, 25 bp, Artificial
  Probe
atgttgagaaggaagtatggcatga

SEQ ID NO: 26187 - DNA, 25 bp, Artificial
  Probe
ctgagcataagtatctctaagtgaa

SEQ ID NO: 26188 - DNA, 25 bp, Artificial
  Probe
caatacggtatcattccttggaacg

SEQ ID NO: 26189 - DNA, 25 bp, Artificial
  Probe
gttgagaaggaagtatggcatgaga

SEQ ID NO: 26190 - DNA, 25 bp, Artificial
  Probe
tgatggctactacatataactatgc

SEQ ID NO: 26191 - DNA, 25 bp, Artificial
  Probe
gcaatacggtatcattccttggaac

SEQ ID NO: 26192 - DNA, 25 bp, Artificial
  Probe
aactctgagcataagtatctctaag

SEQ ID NO: 26193 - DNA, 25 bp, Artificial
  Probe
tgttgagaaggaagtatggcatgag

SEQ ID NO: 26194 - DNA, 25 bp, Artificial
  Probe
atattaacaccttgacacaccgttt

SEQ ID NO: 26195 - DNA, 25 bp, Artificial
  Probe
aactttcaatcaccttgctacatag

SEQ ID NO: 26196 - DNA, 25 bp, Artificial
  Probe
gataactttcaatcaccttgctaca

SEQ ID NO: 26197 - DNA, 25 bp, Artificial
  Probe
atggagactaaataggacttactgt

SEQ ID NO: 26198 - DNA, 25 bp, Artificial
  Probe
tgtgaagtgaacttagaggaaatga

SEQ ID NO: 26199 - DNA, 25 bp, Artificial
  Probe
ataactttcaatcaccttgctacat

SEQ ID NO: 26200 - DNA, 25 bp, Artificial
  Probe
gcatggagactaaataggacttact

SEQ ID NO: 26201 - DNA, 25 bp, Artificial
  Probe
gatctacatgatggctactacatat

SEQ ID NO: 26202 - DNA, 25 bp, Artificial
  Probe
catagcaactgttcccttacaacta

SEQ ID NO: 26203 - DNA, 25 bp, Artificial
  Probe
ctacatagcaactgttcccttacaa

SEQ ID NO: 26204 - DNA, 25 bp, Artificial
  Probe
ataggacttactgtacgtgaattac

SEQ ID NO: 26205 - DNA, 25 bp, Artificial
  Probe
tgagcaagatgatgaaggatgtatt

SEQ ID NO: 26206 - DNA, 25 bp, Artificial
  Probe
gtgagcaagatgatgaaggatgtat

SEQ ID NO: 26207 - DNA, 25 bp, Artificial
  Probe
gagcaagatgatgaaggatgtattc

SEQ ID NO: 26208 - DNA, 25 bp, Artificial
  Probe
agcaagatgatgaaggatgtattct

SEQ ID NO: 26209 - DNA, 25 bp, Artificial
  Probe
cgtgagcaagatgatgaaggatgta

SEQ ID NO: 26210 - DNA, 25 bp, Artificial
  Probe
atcgtgagcaagatgatgaaggatg

SEQ ID NO: 26211 - DNA, 25 bp, Artificial
  Probe
gcaagatgatgaaggatgtattctt

SEQ ID NO: 26212 - DNA, 25 bp, Artificial
  Probe
aaagagaacttcctattggcacaag

SEQ ID NO: 26213 - DNA, 25 bp, Artificial
  Probe
caaagagaacttcctattggcacaa

SEQ ID NO: 26214 - DNA, 25 bp, Artificial
  Probe
aagagaacttcctattggcacaagc

SEQ ID NO: 26215 - DNA, 25 bp, Artificial
  Probe
ccaagattgtcatcgtgagcaagat

SEQ ID NO: 26216 - DNA, 25 bp, Artificial
  Probe
cacaaagagaacttcctattggcac

SEQ ID NO: 26217 - DNA, 25 bp, Artificial
  Probe
caatatcctgctgctcaatctgctc

SEQ ID NO: 26218 - DNA, 25 bp, Artificial
  Probe
acaaagagaacttcctattggcaca

SEQ ID NO: 26219 - DNA, 25 bp, Artificial
  Probe
atatcctgctgctcaatctgctcat

SEQ ID NO: 26220 - DNA, 25 bp, Artificial
  Probe
tcgtgagcaagatgatgaaggatgt

SEQ ID NO: 26221 - DNA, 25 bp, Artificial
  Probe
cctctgtcttgacttcatgatcttc

SEQ ID NO: 26222 - DNA, 25 bp, Artificial
  Probe
tcctctgtcttgacttcatgatctt

SEQ ID NO: 26223 - DNA, 25 bp, Artificial
  Probe
aatatcctgctgctcaatctgctca

SEQ ID NO: 26224 - DNA, 25 bp, Artificial
  Probe
ctctgtcttgacttcatgatcttca

SEQ ID NO: 26225 - DNA, 25 bp, Artificial
  Probe
tctgtcttgacttcatgatcttcac

SEQ ID NO: 26226 - DNA, 25 bp, Artificial
  Probe
tcttgacttcatgatcttcacactg

SEQ ID NO: 26227 - DNA, 25 bp, Artificial
  Probe
gtcttgacttcatgatcttcacact

SEQ ID NO: 26228 - DNA, 25 bp, Artificial
  Probe
ctgtcttgacttcatgatcttcaca

SEQ ID NO: 26229 - DNA, 25 bp, Artificial
  Probe
tgtcttgacttcatgatcttcacac

SEQ ID NO: 26230 - DNA, 25 bp, Artificial
  Probe
tatcctgctgctcaatctgctcatc

SEQ ID NO: 26231 - DNA, 25 bp, Artificial
  Probe
caagattgtcatcgtgagcaagatg

SEQ ID NO: 26232 - DNA, 25 bp, Artificial
  Probe
cacttccgtgtctgtctctctaagg

SEQ ID NO: 26233 - DNA, 25 bp, Artificial
  Probe
gagaacttcctattggcacaagctc

SEQ ID NO: 26234 - DNA, 25 bp, Artificial
  Probe
cttgacttcatgatcttcacactgc

SEQ ID NO: 26235 - DNA, 25 bp, Artificial
  Probe
gcacaaagagaacttcctattggca

SEQ ID NO: 26236 - DNA, 25 bp, Artificial
  Probe
gtcctctgtcttgacttcatgatct

SEQ ID NO: 26237 - DNA, 25 bp, Artificial
  Probe
catcatcatctctcacctgcgtctc

SEQ ID NO: 26238 - DNA, 25 bp, Artificial
  Probe
ctcatcatcatctctcacctgcgtc

SEQ ID NO: 26239 - DNA, 25 bp, Artificial
  Probe
catcgtgagcaagatgatgaaggat

SEQ ID NO: 26240 - DNA, 25 bp, Artificial
  Probe
agagaacttcctattggcacaagct

SEQ ID NO: 26241 - DNA, 25 bp, Artificial
  Probe
cgtgtctgtctctctaaggaagcag

SEQ ID NO: 26242 - DNA, 25 bp, Artificial
  Probe
acttccgtgtctgtctctctaagga

SEQ ID NO: 26243 - DNA, 25 bp, Artificial
  Probe
gttcagctacaccttcaacaaagtg

SEQ ID NO: 26244 - DNA, 25 bp, Artificial
  Probe
ccaatatcctgctgctcaatctgct

SEQ ID NO: 26245 - DNA, 25 bp, Artificial
  Probe
ctgggacagatcagagagtatgacc

SEQ ID NO: 26246 - DNA, 25 bp, Artificial
  Probe
gcacttccgtgtctgtctctctaag

SEQ ID NO: 26247 - DNA, 25 bp, Artificial
  Probe
caagatgatgaaggatgtattcttt

SEQ ID NO: 26248 - DNA, 25 bp, Artificial
  Probe
tgtctgtctctctaaggaagcagag

SEQ ID NO: 26249 - DNA, 25 bp, Artificial
  Probe
catctaggtgtttgcatcctgagag

SEQ ID NO: 26250 - DNA, 25 bp, Artificial
  Probe
atgaagttatttattcgtgacccat

SEQ ID NO: 26251 - DNA, 25 bp, Artificial
  Probe
aagttatttattcgtgacccatgag

SEQ ID NO: 26252 - DNA, 25 bp, Artificial
  Probe
tgaagttatttattcgtgacccatg

SEQ ID NO: 26253 - DNA, 25 bp, Artificial
  Probe
gaagttatttattcgtgacccatga

SEQ ID NO: 26254 - DNA, 25 bp, Artificial
  Probe
agttatttattcgtgacccatgagc

SEQ ID NO: 26255 - DNA, 25 bp, Artificial
  Probe
tatgaagttatttattcgtgaccca

SEQ ID NO: 26256 - DNA, 25 bp, Artificial
  Probe
gttatttattcgtgacccatgagcc

SEQ ID NO: 26257 - DNA, 25 bp, Artificial
  Probe
cagtgtgcaaagtgtatatgaagtt

SEQ ID NO: 26258 - DNA, 25 bp, Artificial
  Probe
tgggaaagaaattcactgaggctac

SEQ ID NO: 26259 - DNA, 25 bp, Artificial
  Probe
agtgtgcaaagtgtatatgaagtta

SEQ ID NO: 26260 - DNA, 25 bp, Artificial
  Probe
atatgaagttatttattcgtgaccc

SEQ ID NO: 26261 - DNA, 25 bp, Artificial
  Probe
acagtgtgcaaagtgtatatgaagt

SEQ ID NO: 26262 - DNA, 25 bp, Artificial
  Probe
ctcccatttcttttattctccctga

SEQ ID NO: 26263 - DNA, 25 bp, Artificial
  Probe
ttccctcccatttcttttattctcc

SEQ ID NO: 26264 - DNA, 25 bp, Artificial
  Probe
gtttccctcccatttcttttattct

SEQ ID NO: 26265 - DNA, 25 bp, Artificial
  Probe
agtttccctcccatttcttttattc

SEQ ID NO: 26266 - DNA, 25 bp, Artificial
  Probe
ttatttattcgtgacccatgagccc

SEQ ID NO: 26267 - DNA, 25 bp, Artificial
  Probe
cctcccatttcttttattctccctg

SEQ ID NO: 26268 - DNA, 25 bp, Artificial
  Probe
tttccctcccatttcttttattctc

SEQ ID NO: 26269 - DNA, 25 bp, Artificial
  Probe
ggaaagaaattcactgaggctaccc

SEQ ID NO: 26270 - DNA, 25 bp, Artificial
  Probe
gggaaagaaattcactgaggctacc

SEQ ID NO: 26271 - DNA, 25 bp, Artificial
  Probe
gtgggaaagaaattcactgaggcta

SEQ ID NO: 26272 - DNA, 25 bp, Artificial
  Probe
gtgtgcaaagtgtatatgaagttat

SEQ ID NO: 26273 - DNA, 25 bp, Artificial
  Probe
tcccatttcttttattctccctgag

SEQ ID NO: 26274 - DNA, 25 bp, Artificial
  Probe
gagtttccctcccatttcttttatt

SEQ ID NO: 26275 - DNA, 25 bp, Artificial
  Probe
ccctcccatttcttttattctccct

SEQ ID NO: 26276 - DNA, 25 bp, Artificial
  Probe
tccctcccatttcttttattctccc

SEQ ID NO: 26277 - DNA, 25 bp, Artificial
  Probe
tacagtgtgcaaagtgtatatgaag

SEQ ID NO: 26278 - DNA, 25 bp, Artificial
  Probe
catttcttttattctccctgagccc

SEQ ID NO: 26279 - DNA, 25 bp, Artificial
  Probe
ccatttcttttattctccctgagcc

SEQ ID NO: 26280 - DNA, 25 bp, Artificial
  Probe
cccatttcttttattctccctgagc

SEQ ID NO: 26281 - DNA, 25 bp, Artificial
  Probe
tgtgcaaagtgtatatgaagttatt

SEQ ID NO: 26282 - DNA, 25 bp, Artificial
  Probe
atttcttttattctccctgagcccc

SEQ ID NO: 26283 - DNA, 25 bp, Artificial
  Probe
gtgcaaagtgtatatgaagttattt

SEQ ID NO: 26284 - DNA, 25 bp, Artificial
  Probe
aaatgtggaaataaacttcttacaa

SEQ ID NO: 26285 - DNA, 25 bp, Artificial
  Probe
gaaagaaattcactgaggctacccc

SEQ ID NO: 26286 - DNA, 25 bp, Artificial
  Probe
tatttattcgtgacccatgagcccg

SEQ ID NO: 26287 - DNA, 25 bp, Artificial
  Probe
acatacagtgtgcaaagtgtatatg

SEQ ID NO: 26288 - DNA, 25 bp, Artificial
  Probe
catacagtgtgcaaagtgtatatga

SEQ ID NO: 26289 - DNA, 25 bp, Artificial
  Probe
gtacatacagtgtgcaaagtgtata

SEQ ID NO: 26290 - DNA, 25 bp, Artificial
  Probe
atacagtgtgcaaagtgtatatgaa

SEQ ID NO: 26291 - DNA, 25 bp, Artificial
  Probe
aaagaaattcactgaggctacccct

SEQ ID NO: 26292 - DNA, 25 bp, Artificial
  Probe
tacatacagtgtgcaaagtgtatat

SEQ ID NO: 26293 - DNA, 25 bp, Artificial
  Probe
ctgtacatacagtgtgcaaagtgta

SEQ ID NO: 26294 - DNA, 25 bp, Artificial
  Probe
tttcttttattctccctgagccccg

SEQ ID NO: 26295 - DNA, 25 bp, Artificial
  Probe
tgacttcactgtgtatattacctgc

SEQ ID NO: 26296 - DNA, 25 bp, Artificial
  Probe
ttactcactggatacttatgctgaa

SEQ ID NO: 26297 - DNA, 25 bp, Artificial
  Probe
attactcactggatacttatgctga

SEQ ID NO: 26298 - DNA, 25 bp, Artificial
  Probe
aattactcactggatacttatgctg

SEQ ID NO: 26299 - DNA, 25 bp, Artificial
  Probe
tgaagttattattggttccacacat

SEQ ID NO: 26300 - DNA, 25 bp, Artificial
  Probe
atgacttcactgtgtatattacctg

SEQ ID NO: 26301 - DNA, 25 bp, Artificial
  Probe
gatgacttcactgtgtatattacct

SEQ ID NO: 26302 - DNA, 25 bp, Artificial
  Probe
gtgaagttattattggttccacaca

SEQ ID NO: 26303 - DNA, 25 bp, Artificial
  Probe
tgatgacttcactgtgtatattacc

SEQ ID NO: 26304 - DNA, 25 bp, Artificial
  Probe
acttcactgtgtatattacctgcaa

SEQ ID NO: 26305 - DNA, 25 bp, Artificial
  Probe
ttcactgtgtatattacctgcaaga

SEQ ID NO: 26306 - DNA, 25 bp, Artificial
  Probe
gacttcactgtgtatattacctgca

SEQ ID NO: 26307 - DNA, 25 bp, Artificial
  Probe
tcactgtgtatattacctgcaagat

SEQ ID NO: 26308 - DNA, 25 bp, Artificial
  Probe
cttcactgtgtatattacctgcaag

SEQ ID NO: 26309 - DNA, 25 bp, Artificial
  Probe
actcactggatacttatgctgaaat

SEQ ID NO: 26310 - DNA, 25 bp, Artificial
  Probe
gatacttatgctgaaattagtgcgg

SEQ ID NO: 26311 - DNA, 25 bp, Artificial
  Probe
ggatacttatgctgaaattagtgcg

SEQ ID NO: 26312 - DNA, 25 bp, Artificial
  Probe
gaagttattattggttccacacata

SEQ ID NO: 26313 - DNA, 25 bp, Artificial
  Probe
tactcactggatacttatgctgaaa

SEQ ID NO: 26314 - DNA, 25 bp, Artificial
  Probe
gaggacgcttatgttactggatttg

SEQ ID NO: 26315 - DNA, 25 bp, Artificial
  Probe
cactgtgtatattacctgcaagata

SEQ ID NO: 26316 - DNA, 25 bp, Artificial
  Probe
tggatacttatgctgaaattagtgc

SEQ ID NO: 26317 - DNA, 25 bp, Artificial
  Probe
ctcactggatacttatgctgaaatt

SEQ ID NO: 26318 - DNA, 25 bp, Artificial
  Probe
atacttatgctgaaattagtgcggg

SEQ ID NO: 26319 - DNA, 25 bp, Artificial
  Probe
gctgtatatgtgcccactaattact

SEQ ID NO: 26320 - DNA, 25 bp, Artificial
  Probe
tgtatatgtgcccactaattactca

SEQ ID NO: 26321 - DNA, 25 bp, Artificial
  Probe
taattactcactggatacttatgct

SEQ ID NO: 26322 - DNA, 25 bp, Artificial
  Probe
ctgtatatgtgcccactaattactc

SEQ ID NO: 26323 - DNA, 25 bp, Artificial
  Probe
ctaattactcactggatacttatgc

SEQ ID NO: 26324 - DNA, 25 bp, Artificial
  Probe
tgctgaataaatccaaggataaagt

SEQ ID NO: 26325 - DNA, 25 bp, Artificial
  Probe
actgtgtatattacctgcaagataa

SEQ ID NO: 26326 - DNA, 25 bp, Artificial
  Probe
agctgtatatgtgcccactaattac

SEQ ID NO: 26327 - DNA, 25 bp, Artificial
  Probe
cactggatacttatgctgaaattag

SEQ ID NO: 26328 - DNA, 25 bp, Artificial
  Probe
agttattattggttccacacatatt

SEQ ID NO: 26329 - DNA, 25 bp, Artificial
  Probe
aagttattattggttccacacatat

SEQ ID NO: 26330 - DNA, 25 bp, Artificial
  Probe
gcttatgttactggatttgccattt

SEQ ID NO: 26331 - DNA, 25 bp, Artificial
  Probe
atgatgacttcactgtgtatattac

SEQ ID NO: 26332 - DNA, 25 bp, Artificial
  Probe
actggatacttatgctgaaattagt

SEQ ID NO: 26333 - DNA, 25 bp, Artificial
  Probe
tcactggatacttatgctgaaatta

SEQ ID NO: 26334 - DNA, 25 bp, Artificial
  Probe
tgctttggtcaagacatgatgttaa

SEQ ID NO: 26335 - DNA, 25 bp, Artificial
  Probe
tgttactggatttgccatttctaat

SEQ ID NO: 26336 - DNA, 25 bp, Artificial
  Probe
atgttactggatttgccatttctaa

SEQ ID NO: 26337 - DNA, 25 bp, Artificial
  Probe
ttatgttactggatttgccatttct

SEQ ID NO: 26338 - DNA, 25 bp, Artificial
  Probe
atatgtgcccactaattactcactg

SEQ ID NO: 26339 - DNA, 25 bp, Artificial
  Probe
ctggatacttatgctgaaattagtg

SEQ ID NO: 26340 - DNA, 25 bp, Artificial
  Probe
gctttaccttcttcaactccatgag

SEQ ID NO: 26341 - DNA, 25 bp, Artificial
  Probe
ctatcctctcagtccatgttctcgg

SEQ ID NO: 26342 - DNA, 25 bp, Artificial
  Probe
gagctttaccttcttcaactccatg

SEQ ID NO: 26343 - DNA, 25 bp, Artificial
  Probe
agagctttaccttcttcaactccat

SEQ ID NO: 26344 - DNA, 25 bp, Artificial
  Probe
agctttaccttcttcaactccatga

SEQ ID NO: 26345 - DNA, 25 bp, Artificial
  Probe
ctcaacaacatcaacaacctcacgg

SEQ ID NO: 26346 - DNA, 25 bp, Artificial
  Probe
cctcaacaacatcaacaacctcacg

SEQ ID NO: 26347 - DNA, 25 bp, Artificial
  Probe
gctatcctctcagtccatgttctcg

SEQ ID NO: 26348 - DNA, 25 bp, Artificial
  Probe
cgctatcctctcagtccatgttctc

SEQ ID NO: 26349 - DNA, 25 bp, Artificial
  Probe
ttaccttcttcaactccatgagtcc

SEQ ID NO: 26350 - DNA, 25 bp, Artificial
  Probe
gcctcaacaacatcaacaacctcac

SEQ ID NO: 26351 - DNA, 25 bp, Artificial
  Probe
caagagctttaccttcttcaactcc

SEQ ID NO: 26352 - DNA, 25 bp, Artificial
  Probe
ccaagagctttaccttcttcaactc

SEQ ID NO: 26353 - DNA, 25 bp, Artificial
  Probe
caggttggttttgtgtttgcttttc

SEQ ID NO: 26354 - DNA, 25 bp, Artificial
  Probe
aagagctttaccttcttcaactcca

SEQ ID NO: 26355 - DNA, 25 bp, Artificial
  Probe
accaagagctttaccttcttcaact

SEQ ID NO: 26356 - DNA, 25 bp, Artificial
  Probe
caccaagagctttaccttcttcaac

SEQ ID NO: 26357 - DNA, 25 bp, Artificial
  Probe
tttaccttcttcaactccatgagtc

SEQ ID NO: 26358 - DNA, 25 bp, Artificial
  Probe
ctttaccttcttcaactccatgagt

SEQ ID NO: 26359 - DNA, 25 bp, Artificial
  Probe
aggttggttttgtgtttgcttttcc

SEQ ID NO: 26360 - DNA, 25 bp, Artificial
  Probe
ccaccaagagctttaccttcttcaa

SEQ ID NO: 26361 - DNA, 25 bp, Artificial
  Probe
cagctccatctcttccatgaccatg

SEQ ID NO: 26362 - DNA, 25 bp, Artificial
  Probe
ttcttcaactccatgagtccgctat

SEQ ID NO: 26363 - DNA, 25 bp, Artificial
  Probe
ctgtccaccaagagctttaccttct

SEQ ID NO: 26364 - DNA, 25 bp, Artificial
  Probe
gtccaccaagagctttaccttcttc

SEQ ID NO: 26365 - DNA, 25 bp, Artificial
  Probe
taccttcttcaactccatgagtccg

SEQ ID NO: 26366 - DNA, 25 bp, Artificial
  Probe
tcttcaactccatgagtccgctatc

SEQ ID NO: 26367 - DNA, 25 bp, Artificial
  Probe
tccaccaagagctttaccttcttca

SEQ ID NO: 26368 - DNA, 25 bp, Artificial
  Probe
cttcttcaactccatgagtccgcta

SEQ ID NO: 26369 - DNA, 25 bp, Artificial
  Probe
tgtccaccaagagctttaccttctt

SEQ ID NO: 26370 - DNA, 25 bp, Artificial
  Probe
ggttggttttgtgtttgcttttccg

SEQ ID NO: 26371 - DNA, 25 bp, Artificial
  Probe
ccaggttggttttgtgtttgctttt

SEQ ID NO: 26372 - DNA, 25 bp, Artificial
  Probe
cttcaactccatgagtccgctatcc

SEQ ID NO: 26373 - DNA, 25 bp, Artificial
  Probe
tccaggttggttttgtgtttgcttt

SEQ ID NO: 26374 - DNA, 25 bp, Artificial
  Probe
ttcaactccatgagtccgctatcct

SEQ ID NO: 26375 - DNA, 25 bp, Artificial
  Probe
ctccaggttggttttgtgtttgctt

SEQ ID NO: 26376 - DNA, 25 bp, Artificial
  Probe
gttggttttgtgtttgcttttccgg

SEQ ID NO: 26377 - DNA, 25 bp, Artificial
  Probe
caaatgccttaaacttcctcttacc

SEQ ID NO: 26378 - DNA, 25 bp, Artificial
  Probe
gccttaaacttcctcttacccataa

SEQ ID NO: 26379 - DNA, 25 bp, Artificial
  Probe
acaaatgccttaaacttcctcttac

SEQ ID NO: 26380 - DNA, 25 bp, Artificial
  Probe
aacttcctcttacccataaagcaaa

SEQ ID NO: 26381 - DNA, 25 bp, Artificial
  Probe
aaacttcctcttacccataaagcaa

SEQ ID NO: 26382 - DNA, 25 bp, Artificial
  Probe
ttacccataaagcaaaggacagaag

SEQ ID NO: 26383 - DNA, 25 bp, Artificial
  Probe
taaacttcctcttacccataaagca

SEQ ID NO: 26384 - DNA, 25 bp, Artificial
  Probe
ttgatacctctctgtcctgccttag

SEQ ID NO: 26385 - DNA, 25 bp, Artificial
  Probe
aaatgccttaaacttcctcttaccc

SEQ ID NO: 26386 - DNA, 25 bp, Artificial
  Probe
acttcctcttacccataaagcaaag

SEQ ID NO: 26387 - DNA, 25 bp, Artificial
  Probe
cccataaagcaaaggacagaagatt

SEQ ID NO: 26388 - DNA, 25 bp, Artificial
  Probe
tgccttaaacttcctcttacccata

SEQ ID NO: 26389 - DNA, 25 bp, Artificial
  Probe
ccataaagcaaaggacagaagattg

SEQ ID NO: 26390 - DNA, 25 bp, Artificial
  Probe
cttacccataaagcaaaggacagaa

SEQ ID NO: 26391 - DNA, 25 bp, Artificial
  Probe
tacccataaagcaaaggacagaaga

SEQ ID NO: 26392 - DNA, 25 bp, Artificial
  Probe
ctcttacccataaagcaaaggacag

SEQ ID NO: 26393 - DNA, 25 bp, Artificial
  Probe
ttaaacttcctcttacccataaagc

SEQ ID NO: 26394 - DNA, 25 bp, Artificial
  Probe
gttgatacctctctgtcctgcctta

SEQ ID NO: 26395 - DNA, 25 bp, Artificial
  Probe
cataaagcaaaggacagaagattgt

SEQ ID NO: 26396 - DNA, 25 bp, Artificial
  Probe
ccttaaacttcctcttacccataaa

SEQ ID NO: 26397 - DNA, 25 bp, Artificial
  Probe
atgccttaaacttcctcttacccat

SEQ ID NO: 26398 - DNA, 25 bp, Artificial
  Probe
aatgccttaaacttcctcttaccca

SEQ ID NO: 26399 - DNA, 25 bp, Artificial
  Probe
tcttacccataaagcaaaggacaga

SEQ ID NO: 26400 - DNA, 25 bp, Artificial
  Probe
acccataaagcaaaggacagaagat

SEQ ID NO: 26401 - DNA, 25 bp, Artificial
  Probe
gaagattgtccaacagagccatcat

SEQ ID NO: 26402 - DNA, 25 bp, Artificial
  Probe
caacagagccatcatgccatatagg

SEQ ID NO: 26403 - DNA, 25 bp, Artificial
  Probe
ccaacagagccatcatgccatatag

SEQ ID NO: 26404 - DNA, 25 bp, Artificial
  Probe
cttcctcttacccataaagcaaagg

SEQ ID NO: 26405 - DNA, 25 bp, Artificial
  Probe
cttagccattaaacagcagagtgtg

SEQ ID NO: 26406 - DNA, 25 bp, Artificial
  Probe
tccaacagagccatcatgccatata

SEQ ID NO: 26407 - DNA, 25 bp, Artificial
  Probe
cagaagattgtccaacagagccatc

SEQ ID NO: 26408 - DNA, 25 bp, Artificial
  Probe
ttagccattaaacagcagagtgtga

SEQ ID NO: 26409 - DNA, 25 bp, Artificial
  Probe
atgccaaacatctactcctgtgaaa

SEQ ID NO: 26410 - DNA, 25 bp, Artificial
  Probe
aagattgtccaacagagccatcatg

SEQ ID NO: 26411 - DNA, 25 bp, Artificial
  Probe
atatagggctaaggatgagggcttc

SEQ ID NO: 26412 - DNA, 25 bp, Artificial
  Probe
cttaaacttcctcttacccataaag

SEQ ID NO: 26413 - DNA, 25 bp, Artificial
  Probe
cctcttacccataaagcaaaggaca

SEQ ID NO: 26414 - DNA, 25 bp, Artificial
  Probe
agaagattgtccaacagagccatca

SEQ ID NO: 26415 - DNA, 25 bp, Artificial
  Probe
catatagggctaaggatgagggctt

SEQ ID NO: 26416 - DNA, 25 bp, Artificial
  Probe
tagccattaaacagcagagtgtgac

SEQ ID NO: 26417 - DNA, 25 bp, Artificial
  Probe
acagaagattgtccaacagagccat

SEQ ID NO: 26418 - DNA, 25 bp, Artificial
  Probe
tatagggctaaggatgagggcttct

SEQ ID NO: 26419 - DNA, 25 bp, Artificial
  Probe
tgttgatacctctctgtcctgcctt

SEQ ID NO: 26420 - DNA, 25 bp, Artificial
  Probe
gtccaacagagccatcatgccatat

SEQ ID NO: 26421 - DNA, 25 bp, Artificial
  Probe
aatctcacctatgtgtgtgcagtgt

SEQ ID NO: 26422 - DNA, 25 bp, Artificial
  Probe
cacctccgaatcccaatttctaatt

SEQ ID NO: 26423 - DNA, 25 bp, Artificial
  Probe
acctccgaatcccaatttctaatta

SEQ ID NO: 26424 - DNA, 25 bp, Artificial
  Probe
cctccgaatcccaatttctaattaa

SEQ ID NO: 26425 - DNA, 25 bp, Artificial
  Probe
ccacctccgaatcccaatttctaat

SEQ ID NO: 26426 - DNA, 25 bp, Artificial
  Probe
ccgaatcccaatttctaattaaagt

SEQ ID NO: 26427 - DNA, 25 bp, Artificial
  Probe
tccgaatcccaatttctaattaaag

SEQ ID NO: 26428 - DNA, 25 bp, Artificial
  Probe
ctccgaatcccaatttctaattaaa

SEQ ID NO: 26429 - DNA, 25 bp, Artificial
  Probe
ccaatttctaattaaagtttccacg

SEQ ID NO: 26430 - DNA, 25 bp, Artificial
  Probe
cccaatttctaattaaagtttccac

SEQ ID NO: 26431 - DNA, 25 bp, Artificial
  Probe
caacatgaaggaagaaacagctctt

SEQ ID NO: 26432 - DNA, 25 bp, Artificial
  Probe
tcccaatttctaattaaagtttcca

SEQ ID NO: 26433 - DNA, 25 bp, Artificial
  Probe
gcagaactggagatcttcgaactaa

SEQ ID NO: 26434 - DNA, 25 bp, Artificial
  Probe
caggtaaattgcagcgagtactttc

SEQ ID NO: 26435 - DNA, 25 bp, Artificial
  Probe
cccacctccgaatcccaatttctaa

SEQ ID NO: 26436 - DNA, 25 bp, Artificial
  Probe
agaactggagatcttcgaactaaac

SEQ ID NO: 26437 - DNA, 25 bp, Artificial
  Probe
cagaactggagatcttcgaactaaa

SEQ ID NO: 26438 - DNA, 25 bp, Artificial
  Probe
gcaacatgaaggaagaaacagctct

SEQ ID NO: 26439 - DNA, 25 bp, Artificial
  Probe
agcagaactggagatcttcgaacta

SEQ ID NO: 26440 - DNA, 25 bp, Artificial
  Probe
cgaatcccaatttctaattaaagtt

SEQ ID NO: 26441 - DNA, 25 bp, Artificial
  Probe
gaactggagatcttcgaactaaacg

SEQ ID NO: 26442 - DNA, 25 bp, Artificial
  Probe
aggtaaattgcagcgagtactttcc

SEQ ID NO: 26443 - DNA, 25 bp, Artificial
  Probe
atcccaatttctaattaaagtttcc

SEQ ID NO: 26444 - DNA, 25 bp, Artificial
  Probe
ccaggtaaattgcagcgagtacttt

SEQ ID NO: 26445 - DNA, 25 bp, Artificial
  Probe
ggcaacatgaaggaagaaacagctc

SEQ ID NO: 26446 - DNA, 25 bp, Artificial
  Probe
aactggagatcttcgaactaaacgc

SEQ ID NO: 26447 - DNA, 25 bp, Artificial
  Probe
ctggcaacatgaaggaagaaacagc

SEQ ID NO: 26448 - DNA, 25 bp, Artificial
  Probe
gctggcaacatgaaggaagaaacag

SEQ ID NO: 26449 - DNA, 25 bp, Artificial
  Probe
ctggagatcttcgaactaaacgctg

SEQ ID NO: 26450 - DNA, 25 bp, Artificial
  Probe
tggcaacatgaaggaagaaacagct

SEQ ID NO: 26451 - DNA, 25 bp, Artificial
  Probe
ggtaaattgcagcgagtactttccg

SEQ ID NO: 26452 - DNA, 25 bp, Artificial
  Probe
actggagatcttcgaactaaacgct

SEQ ID NO: 26453 - DNA, 25 bp, Artificial
  Probe
cagcagaactggagatcttcgaact

SEQ ID NO: 26454 - DNA, 25 bp, Artificial
  Probe
tcagcagaactggagatcttcgaac

SEQ ID NO: 26455 - DNA, 25 bp, Artificial
  Probe
cccaggtaaattgcagcgagtactt

SEQ ID NO: 26456 - DNA, 25 bp, Artificial
  Probe
tggagatcttcgaactaaacgctgg

SEQ ID NO: 26457 - DNA, 25 bp, Artificial
  Probe
aagtgatctctgcgcgaagaacttt

SEQ ID NO: 26458 - DNA, 25 bp, Artificial
  Probe
gtaaattgcagcgagtactttccgc

SEQ ID NO: 26459 - DNA, 25 bp, Artificial
  Probe
ggtatagaagcatggacagacaacc

SEQ ID NO: 26460 - DNA, 25 bp, Artificial
  Probe
gagaactgcttccagactctaaagg

SEQ ID NO: 26461 - DNA, 25 bp, Artificial
  Probe
agtttgttttgctggtatttgagag

SEQ ID NO: 26462 - DNA, 25 bp, Artificial
  Probe
gagtttgttttgctggtatttgaga

SEQ ID NO: 26463 - DNA, 25 bp, Artificial
  Probe
gtttgttttgctggtatttgagagt

SEQ ID NO: 26464 - DNA, 25 bp, Artificial
  Probe
tgagtttgttttgctggtatttgag

SEQ ID NO: 26465 - DNA, 25 bp, Artificial
  Probe
ctgagtttgttttgctggtatttga

SEQ ID NO: 26466 - DNA, 25 bp, Artificial
  Probe
ccagactctaaaggaaaactatcgt

SEQ ID NO: 26467 - DNA, 25 bp, Artificial
  Probe
tttgctggtatttgagagtaaaaca

SEQ ID NO: 26468 - DNA, 25 bp, Artificial
  Probe
tgttttgctggtatttgagagtaaa

SEQ ID NO: 26469 - DNA, 25 bp, Artificial
  Probe
ttgttttgctggtatttgagagtaa

SEQ ID NO: 26470 - DNA, 25 bp, Artificial
  Probe
tttgttttgctggtatttgagagta

SEQ ID NO: 26471 - DNA, 25 bp, Artificial
  Probe
gtatagaagcatggacagacaaccc

SEQ ID NO: 26472 - DNA, 25 bp, Artificial
  Probe
gggtatagaagcatggacagacaac

SEQ ID NO: 26473 - DNA, 25 bp, Artificial
  Probe
ggagaactgcttccagactctaaag

SEQ ID NO: 26474 - DNA, 25 bp, Artificial
  Probe
tgctggtatttgagagtaaaacatt

SEQ ID NO: 26475 - DNA, 25 bp, Artificial
  Probe
ttgctggtatttgagagtaaaacat

SEQ ID NO: 26476 - DNA, 25 bp, Artificial
  Probe
caaagagcaaactggggtatagaag

SEQ ID NO: 26477 - DNA, 25 bp, Artificial
  Probe
atcaaagagcaaactggggtataga

SEQ ID NO: 26478 - DNA, 25 bp, Artificial
  Probe
tcaaagagcaaactggggtatagaa

SEQ ID NO: 26479 - DNA, 25 bp, Artificial
  Probe
agaactgcttccagactctaaagga

SEQ ID NO: 26480 - DNA, 25 bp, Artificial
  Probe
gctgagtttgttttgctggtatttg

SEQ ID NO: 26481 - DNA, 25 bp, Artificial
  Probe
gctggtatttgagagtaaaacattt

SEQ ID NO: 26482 - DNA, 25 bp, Artificial
  Probe
gatcaaagagcaaactggggtatag

SEQ ID NO: 26483 - DNA, 25 bp, Artificial
  Probe
agactctaaaggaaaactatcgtcg

SEQ ID NO: 26484 - DNA, 25 bp, Artificial
  Probe
cagactctaaaggaaaactatcgtc

SEQ ID NO: 26485 - DNA, 25 bp, Artificial
  Probe
taaagacgatgctttcctggagaac

SEQ ID NO: 26486 - DNA, 25 bp, Artificial
  Probe
gtaaagacgatgctttcctggagaa

SEQ ID NO: 26487 - DNA, 25 bp, Artificial
  Probe
tccagactctaaaggaaaactatcg

SEQ ID NO: 26488 - DNA, 25 bp, Artificial
  Probe
gactctaaaggaaaactatcgtcgc

SEQ ID NO: 26489 - DNA, 25 bp, Artificial
  Probe
ggctgagtttgttttgctggtattt

SEQ ID NO: 26490 - DNA, 25 bp, Artificial
  Probe
aaagagcaaactggggtatagaagc

SEQ ID NO: 26491 - DNA, 25 bp, Artificial
  Probe
ggatcaaagagcaaactggggtata

SEQ ID NO: 26492 - DNA, 25 bp, Artificial
  Probe
ttttgctggtatttgagagtaaaac

SEQ ID NO: 26493 - DNA, 25 bp, Artificial
  Probe
gttttgctggtatttgagagtaaaa

SEQ ID NO: 26494 - DNA, 25 bp, Artificial
  Probe
tatagaagcatggacagacaaccca

SEQ ID NO: 26495 - DNA, 25 bp, Artificial
  Probe
tgaactgggtaaagacgatgctttc

SEQ ID NO: 26496 - DNA, 25 bp, Artificial
  Probe
ctgaactgggtaaagacgatgcttt

SEQ ID NO: 26497 - DNA, 25 bp, Artificial
  Probe
tatggctgagtttgttttgctggta

SEQ ID NO: 26498 - DNA, 25 bp, Artificial
  Probe
tgaagttcgggactggatcaaagag

SEQ ID NO: 26499 - DNA, 25 bp, Artificial
  Probe
ctgaagttcgggactggatcaaaga

SEQ ID NO: 26500 - DNA, 25 bp, Artificial
  Probe
atggctgagtttgttttgctggtat

SEQ ID NO: 26501 - DNA, 25 bp, Artificial
  Probe
cctgaactgggtaaagacgatgctt

SEQ ID NO: 26502 - DNA, 25 bp, Artificial
  Probe
aactgcttccagactctaaaggaaa

SEQ ID NO: 26503 - DNA, 25 bp, Artificial
  Probe
agagcaaactggggtatagaagcat

SEQ ID NO: 26504 - DNA, 25 bp, Artificial
  Probe
aatctcgtcatcttgaactacattg

SEQ ID NO: 26505 - DNA, 25 bp, Artificial
  Probe
atctcgtcatcttgaactacattgc

SEQ ID NO: 26506 - DNA, 25 bp, Artificial
  Probe
gctgcttcaatccctttctctatta

SEQ ID NO: 26507 - DNA, 25 bp, Artificial
  Probe
catactcaccatctgctacctgttg

SEQ ID NO: 26508 - DNA, 25 bp, Artificial
  Probe
agagaatttcaaagcacgattaagg

SEQ ID NO: 26509 - DNA, 25 bp, Artificial
  Probe
ggagagaatttcaaagcacgattaa

SEQ ID NO: 26510 - DNA, 25 bp, Artificial
  Probe
gtgggattatatgggtcttcatcat

SEQ ID NO: 26511 - DNA, 25 bp, Artificial
  Probe
ctgtgggattatatgggtcttcatc

SEQ ID NO: 26512 - DNA, 25 bp, Artificial
  Probe
gagaatttcaaagcacgattaaggg

SEQ ID NO: 26513 - DNA, 25 bp, Artificial
  Probe
tggagagaatttcaaagcacgatta

SEQ ID NO: 26514 - DNA, 25 bp, Artificial
  Probe
tcatactcaccatctgctacctgtt

SEQ ID NO: 26515 - DNA, 25 bp, Artificial
  Probe
ttcatactcaccatctgctacctgt

SEQ ID NO: 26516 - DNA, 25 bp, Artificial
  Probe
tctgtgggattatatgggtcttcat

SEQ ID NO: 26517 - DNA, 25 bp, Artificial
  Probe
cgtcatcttgaactacattgcatta

SEQ ID NO: 26518 - DNA, 25 bp, Artificial
  Probe
ctctgtgggattatatgggtcttca

SEQ ID NO: 26519 - DNA, 25 bp, Artificial
  Probe
tgtgggattatatgggtcttcatca

SEQ ID NO: 26520 - DNA, 25 bp, Artificial
  Probe
gagagaatttcaaagcacgattaag

SEQ ID NO: 26521 - DNA, 25 bp, Artificial
  Probe
atttcctaactgtgctgagtattgt

SEQ ID NO: 26522 - DNA, 25 bp, Artificial
  Probe
tcatcttgaactacattgcattagg

SEQ ID NO: 26523 - DNA, 25 bp, Artificial
  Probe
ctgcttcaatccctttctctattat

SEQ ID NO: 26524 - DNA, 25 bp, Artificial
  Probe
tcgtcatcttgaactacattgcatt

SEQ ID NO: 26525 - DNA, 25 bp, Artificial
  Probe
tttcctaactgtgctgagtattgtg

SEQ ID NO: 26526 - DNA, 25 bp, Artificial
  Probe
tactcaccatctgctacctgttgat

SEQ ID NO: 26527 - DNA, 25 bp, Artificial
  Probe
atactcaccatctgctacctgttga

SEQ ID NO: 26528 - DNA, 25 bp, Artificial
  Probe
ttcctaactgtgctgagtattgtgc

SEQ ID NO: 26529 - DNA, 25 bp, Artificial
  Probe
ctcgtcatcttgaactacattgcat

SEQ ID NO: 26530 - DNA, 25 bp, Artificial
  Probe
cctctgtgggattatatgggtcttc

SEQ ID NO: 26531 - DNA, 25 bp, Artificial
  Probe
ctggagagaatttcaaagcacgatt

SEQ ID NO: 26532 - DNA, 25 bp, Artificial
  Probe
tgcttcaatccctttctctattatt

SEQ ID NO: 26533 - DNA, 25 bp, Artificial
  Probe
tgggattatatgggtcttcatcatg

SEQ ID NO: 26534 - DNA, 25 bp, Artificial
  Probe
attatatgggtcttcatcatggctt

SEQ ID NO: 26535 - DNA, 25 bp, Artificial
  Probe
gattatatgggtcttcatcatggct

SEQ ID NO: 26536 - DNA, 25 bp, Artificial
  Probe
aaatctcgtcatcttgaactacatt

SEQ ID NO: 26537 - DNA, 25 bp, Artificial
  Probe
ttatatgggtcttcatcatggcttc

SEQ ID NO: 26538 - DNA, 25 bp, Artificial
  Probe
tatttcctaactgtgctgagtattg

SEQ ID NO: 26539 - DNA, 25 bp, Artificial
  Probe
gggattatatgggtcttcatcatgg

SEQ ID NO: 26540 - DNA, 25 bp, Artificial
  Probe
tttcatactcaccatctgctacctg

SEQ ID NO: 26541 - DNA, 25 bp, Artificial
  Probe
gtcatcttgaactacattgcattag

SEQ ID NO: 26542 - DNA, 25 bp, Artificial
  Probe
ggattatatgggtcttcatcatggc

SEQ ID NO: 26543 - DNA, 25 bp, Artificial
  Probe
agaatttcaaagcacgattaagggc

SEQ ID NO: 26544 - DNA, 25 bp, Artificial
  Probe
tctcgtcatcttgaactacattgca

SEQ ID NO: 26545 - DNA, 25 bp, Artificial
  Probe
catcttgaactacattgcattaggg

SEQ ID NO: 26546 - DNA, 25 bp, Artificial
  Probe
tatatgggtcttcatcatggcttcc

SEQ ID NO: 26547 - DNA, 25 bp, Artificial
  Probe
aaataacactacattgtgctttgag

SEQ ID NO: 26548 - DNA, 25 bp, Artificial
  Probe
gcttcaatccctttctctattattt

SEQ ID NO: 26549 - DNA, 25 bp, Artificial
  Probe
tgtcaccataattgtctgttacaca

SEQ ID NO: 26550 - DNA, 25 bp, Artificial
  Probe
ttgtcaccataattgtctgttacac

SEQ ID NO: 26551 - DNA, 25 bp, Artificial
  Probe
ttcatgccatatcatattcaacgag

SEQ ID NO: 26552 - DNA, 25 bp, Artificial
  Probe
cttcatgccatatcatattcaacga

SEQ ID NO: 26553 - DNA, 25 bp, Artificial
  Probe
gcttcatgccatatcatattcaacg

SEQ ID NO: 26554 - DNA, 25 bp, Artificial
  Probe
tgccatatcatattcaacgagctat

SEQ ID NO: 26555 - DNA, 25 bp, Artificial
  Probe
tatcatattcaacgagctatccacc

SEQ ID NO: 26556 - DNA, 25 bp, Artificial
  Probe
gccatatcatattcaacgagctatc

SEQ ID NO: 26557 - DNA, 25 bp, Artificial
  Probe
tcatgccatatcatattcaacgagc

SEQ ID NO: 26558 - DNA, 25 bp, Artificial
  Probe
atgccatatcatattcaacgagcta

SEQ ID NO: 26559 - DNA, 25 bp, Artificial
  Probe
gtcagcttcatgccatatcatattc

SEQ ID NO: 26560 - DNA, 25 bp, Artificial
  Probe
tcagcttcatgccatatcatattca

SEQ ID NO: 26561 - DNA, 25 bp, Artificial
  Probe
agtcagcttcatgccatatcatatt

SEQ ID NO: 26562 - DNA, 25 bp, Artificial
  Probe
ttagtcagcttcatgccatatcata

SEQ ID NO: 26563 - DNA, 25 bp, Artificial
  Probe
cagaagtcagtggtcataaccttat

SEQ ID NO: 26564 - DNA, 25 bp, Artificial
  Probe
ccatatcatattcaacgagctatcc

SEQ ID NO: 26565 - DNA, 25 bp, Artificial
  Probe
agcttcatgccatatcatattcaac

SEQ ID NO: 26566 - DNA, 25 bp, Artificial
  Probe
cagcttcatgccatatcatattcaa

SEQ ID NO: 26567 - DNA, 25 bp, Artificial
  Probe
tagtcagcttcatgccatatcatat

SEQ ID NO: 26568 - DNA, 25 bp, Artificial
  Probe
aagtcagtggtcataaccttatctc

SEQ ID NO: 26569 - DNA, 25 bp, Artificial
  Probe
gaagtcagtggtcataaccttatct

SEQ ID NO: 26570 - DNA, 25 bp, Artificial
  Probe
agaagtcagtggtcataaccttatc

SEQ ID NO: 26571 - DNA, 25 bp, Artificial
  Probe
agtcagtggtcataaccttatctct

SEQ ID NO: 26572 - DNA, 25 bp, Artificial
  Probe
cagtggtcataaccttatctctagc

SEQ ID NO: 26573 - DNA, 25 bp, Artificial
  Probe
ctagatcctgtgactctgtccttag

SEQ ID NO: 26574 - DNA, 25 bp, Artificial
  Probe
cataaccttatctctagctgcatca

SEQ ID NO: 26575 - DNA, 25 bp, Artificial
  Probe
gtcataaccttatctctagctgcat

SEQ ID NO: 26576 - DNA, 25 bp, Artificial
  Probe
catattcaacgagctatccaccttc

SEQ ID NO: 26577 - DNA, 25 bp, Artificial
  Probe
tcataaccttatctctagctgcatc

SEQ ID NO: 26578 - DNA, 25 bp, Artificial
  Probe
gtcagtggtcataaccttatctcta

SEQ ID NO: 26579 - DNA, 25 bp, Artificial
  Probe
atcatattcaacgagctatccacct

SEQ ID NO: 26580 - DNA, 25 bp, Artificial
  Probe
ataaccttatctctagctgcatcaa

SEQ ID NO: 26581 - DNA, 25 bp, Artificial
  Probe
atattcaacgagctatccaccttca

SEQ ID NO: 26582 - DNA, 25 bp, Artificial
  Probe
tcatattcaacgagctatccacctt

SEQ ID NO: 26583 - DNA, 25 bp, Artificial
  Probe
atatcatattcaacgagctatccac

SEQ ID NO: 26584 - DNA, 25 bp, Artificial
  Probe
catatcatattcaacgagctatcca

SEQ ID NO: 26585 - DNA, 25 bp, Artificial
  Probe
tcagtggtcataaccttatctctag

SEQ ID NO: 26586 - DNA, 25 bp, Artificial
  Probe
catgccatatcatattcaacgagct

SEQ ID NO: 26587 - DNA, 25 bp, Artificial
  Probe
actagatcctgtgactctgtcctta

SEQ ID NO: 26588 - DNA, 25 bp, Artificial
  Probe
tttgtgtgtgttggaatttggattt

SEQ ID NO: 26589 - DNA, 25 bp, Artificial
  Probe
ttggtcttgcattatgtgtcattaa

SEQ ID NO: 26590 - DNA, 25 bp, Artificial
  Probe
tcgaaggaaggctataggaatgatc

SEQ ID NO: 26591 - DNA, 25 bp, Artificial
  Probe
tggtcttgcattatgtgtcattaat

SEQ ID NO: 26592 - DNA, 25 bp, Artificial
  Probe
ctttaggagaaggctgtctacattt

SEQ ID NO: 26593 - DNA, 25 bp, Artificial
  Probe
ttaggagaaggctgtctacatttag

SEQ ID NO: 26594 - DNA, 25 bp, Artificial
  Probe
cttgttaatcttctcactcatctgc

SEQ ID NO: 26595 - DNA, 25 bp, Artificial
  Probe
tacatattccattcaagtgagagca

SEQ ID NO: 26596 - DNA, 25 bp, Artificial
  Probe
tgcttcatcttgttaatcttctcac

SEQ ID NO: 26597 - DNA, 25 bp, Artificial
  Probe
ccatctgcttcatcttgttaatctt

SEQ ID NO: 26598 - DNA, 25 bp, Artificial
  Probe
ctacatattccattcaagtgagagc

SEQ ID NO: 26599 - DNA, 25 bp, Artificial
  Probe
gcttcatcttgttaatcttctcact

SEQ ID NO: 26600 - DNA, 25 bp, Artificial
  Probe
ctgcttcatcttgttaatcttctca

SEQ ID NO: 26601 - DNA, 25 bp, Artificial
  Probe
acatattccattcaagtgagagcag

SEQ ID NO: 26602 - DNA, 25 bp, Artificial
  Probe
tctgcttcatcttgttaatcttctc

SEQ ID NO: 26603 - DNA, 25 bp, Artificial
  Probe
gccatctgcttcatcttgttaatct

SEQ ID NO: 26604 - DNA, 25 bp, Artificial
  Probe
atcaagtgaatcctccaatgaatgt

SEQ ID NO: 26605 - DNA, 25 bp, Artificial
  Probe
tcaagtgaatcctccaatgaatgtc

SEQ ID NO: 26606 - DNA, 25 bp, Artificial
  Probe
gctgttcactctatatgccattgat

SEQ ID NO: 26607 - DNA, 25 bp, Artificial
  Probe
tcttgttaatcttctcactcatctg

SEQ ID NO: 26608 - DNA, 25 bp, Artificial
  Probe
atctgcttcatcttgttaatcttct

SEQ ID NO: 26609 - DNA, 25 bp, Artificial
  Probe
catctgcttcatcttgttaatcttc

SEQ ID NO: 26610 - DNA, 25 bp, Artificial
  Probe
caagtgaatcctccaatgaatgtca

SEQ ID NO: 26611 - DNA, 25 bp, Artificial
  Probe
gatcaagtgaatcctccaatgaatg

SEQ ID NO: 26612 - DNA, 25 bp, Artificial
  Probe
catattccattcaagtgagagcagc

SEQ ID NO: 26613 - DNA, 25 bp, Artificial
  Probe
ctgttcactctatatgccattgatc

SEQ ID NO: 26614 - DNA, 25 bp, Artificial
  Probe
ttcatcttgttaatcttctcactca

SEQ ID NO: 26615 - DNA, 25 bp, Artificial
  Probe
tcatcttgttaatcttctcactcat

SEQ ID NO: 26616 - DNA, 25 bp, Artificial
  Probe
tctacatattccattcaagtgagag

SEQ ID NO: 26617 - DNA, 25 bp, Artificial
  Probe
catcttgttaatcttctcactcatc

SEQ ID NO: 26618 - DNA, 25 bp, Artificial
  Probe
gaatcctccaatgaatgtcacagtg

SEQ ID NO: 26619 - DNA, 25 bp, Artificial
  Probe
atcttgttaatcttctcactcatct

SEQ ID NO: 26620 - DNA, 25 bp, Artificial
  Probe
cttcatcttgttaatcttctcactc

SEQ ID NO: 26621 - DNA, 25 bp, Artificial
  Probe
tgaatcctccaatgaatgtcacagt

SEQ ID NO: 26622 - DNA, 25 bp, Artificial
  Probe
ttgttaatcttctcactcatctgca

SEQ ID NO: 26623 - DNA, 25 bp, Artificial
  Probe
ttctacatattccattcaagtgaga

SEQ ID NO: 26624 - DNA, 25 bp, Artificial
  Probe
tgtagaagaggatggatttgaagtc

SEQ ID NO: 26625 - DNA, 25 bp, Artificial
  Probe
ttgtagaagaggatggatttgaagt

SEQ ID NO: 26626 - DNA, 25 bp, Artificial
  Probe
gtagaagaggatggatttgaagtca

SEQ ID NO: 26627 - DNA, 25 bp, Artificial
  Probe
tcaaccgatttatgtgggaaagaaa

SEQ ID NO: 26628 - DNA, 25 bp, Artificial
  Probe
tttgtagaagaggatggatttgaag

SEQ ID NO: 26629 - DNA, 25 bp, Artificial
  Probe
ctttccagtccattgctttaagtat

SEQ ID NO: 26630 - DNA, 25 bp, Artificial
  Probe
cagagtgtatcacctatggacaagg

SEQ ID NO: 26631 - DNA, 25 bp, Artificial
  Probe
tagaagaggatggatttgaagtcat

SEQ ID NO: 26632 - DNA, 25 bp, Artificial
  Probe
cctgtggtgactgaatatgagaaac

SEQ ID NO: 26633 - DNA, 25 bp, Artificial
  Probe
atattccattcaagtgagagcagct

SEQ ID NO: 26634 - DNA, 25 bp, Artificial
  Probe
cctttccagtccattgctttaagta

SEQ ID NO: 26635 - DNA, 25 bp, Artificial
  Probe
gtcaaccgatttatgtgggaaagaa

SEQ ID NO: 26636 - DNA, 25 bp, Artificial
  Probe
tgactgaatatgagaaacctccttg

SEQ ID NO: 26637 - DNA, 25 bp, Artificial
  Probe
gtgactgaatatgagaaacctcctt

SEQ ID NO: 26638 - DNA, 25 bp, Artificial
  Probe
atgaatgtcacagtggaaattgaaa

SEQ ID NO: 26639 - DNA, 25 bp, Artificial
  Probe
tctattagtaactctgctgaagacc

SEQ ID NO: 26640 - DNA, 25 bp, Artificial
  Probe
ctctattagtaactctgctgaagac

SEQ ID NO: 26641 - DNA, 25 bp, Artificial
  Probe
acttctctattagtaactctgctga

SEQ ID NO: 26642 - DNA, 25 bp, Artificial
  Probe
tctctattagtaactctgctgaaga

SEQ ID NO: 26643 - DNA, 25 bp, Artificial
  Probe
ttctctattagtaactctgctgaag

SEQ ID NO: 26644 - DNA, 25 bp, Artificial
  Probe
cttctctattagtaactctgctgaa

SEQ ID NO: 26645 - DNA, 25 bp, Artificial
  Probe
gatttatgttggctcatccttatgg

SEQ ID NO: 26646 - DNA, 25 bp, Artificial
  Probe
ctattagtaactctgctgaagaccc

SEQ ID NO: 26647 - DNA, 25 bp, Artificial
  Probe
tattagtaactctgctgaagaccca

SEQ ID NO: 26648 - DNA, 25 bp, Artificial
  Probe
attagtaactctgctgaagacccat

SEQ ID NO: 26649 - DNA, 25 bp, Artificial
  Probe
ttagtaactctgctgaagacccatt

SEQ ID NO: 26650 - DNA, 25 bp, Artificial
  Probe
tagtaactctgctgaagacccattc

SEQ ID NO: 26651 - DNA, 25 bp, Artificial
  Probe
tacttaaagaactggggagaaggtt

SEQ ID NO: 26652 - DNA, 25 bp, Artificial
  Probe
gagacataaaggcagttttggacaa

SEQ ID NO: 26653 - DNA, 25 bp, Artificial
  Probe
agacataaaggcagttttggacaaa

SEQ ID NO: 26654 - DNA, 25 bp, Artificial
  Probe
taactctgctgaagacccattcatt

SEQ ID NO: 26655 - DNA, 25 bp, Artificial
  Probe
ggatttatgttggctcatccttatg

SEQ ID NO: 26656 - DNA, 25 bp, Artificial
  Probe
acttaaagaactggggagaaggttg

SEQ ID NO: 26657 - DNA, 25 bp, Artificial
  Probe
gtaactctgctgaagacccattcat

SEQ ID NO: 26658 - DNA, 25 bp, Artificial
  Probe
cttaaagaactggggagaaggttgg

SEQ ID NO: 26659 - DNA, 25 bp, Artificial
  Probe
ggagacataaaggcagttttggaca

SEQ ID NO: 26660 - DNA, 25 bp, Artificial
  Probe
tggagacataaaggcagttttggac

SEQ ID NO: 26661 - DNA, 25 bp, Artificial
  Probe
attggtgtagcagggttcagacttg

SEQ ID NO: 26662 - DNA, 25 bp, Artificial
  Probe
aactctgctgaagacccattcattg

SEQ ID NO: 26663 - DNA, 25 bp, Artificial
  Probe
gacataaaggcagttttggacaaac

SEQ ID NO: 26664 - DNA, 25 bp, Artificial
  Probe
ctggagacataaaggcagttttgga

SEQ ID NO: 26665 - DNA, 25 bp, Artificial
  Probe
agtaactctgctgaagacccattca

SEQ ID NO: 26666 - DNA, 25 bp, Artificial
  Probe
ggtgtagcagggttcagacttgatg

SEQ ID NO: 26667 - DNA, 25 bp, Artificial
  Probe
ttaaagaactggggagaaggttggg

SEQ ID NO: 26668 - DNA, 25 bp, Artificial
  Probe
cctggagacataaaggcagttttgg

SEQ ID NO: 26669 - DNA, 25 bp, Artificial
  Probe
attgtctttaacaatgatgactggg

SEQ ID NO: 26670 - DNA, 25 bp, Artificial
  Probe
caatgactgggtctgtgaacatcga

SEQ ID NO: 26671 - DNA, 25 bp, Artificial
  Probe
taatctaaatacaaaatggttctcc

SEQ ID NO: 26672 - DNA, 25 bp, Artificial
  Probe
aatgactgggtctgtgaacatcgat

SEQ ID NO: 26673 - DNA, 25 bp, Artificial
  Probe
gttttggacaaactacataatctaa

SEQ ID NO: 26674 - DNA, 25 bp, Artificial
  Probe
ggcagttttggacaaactacataat

SEQ ID NO: 26675 - DNA, 25 bp, Artificial
  Probe
ataaaggcagttttggacaaactac

SEQ ID NO: 26676 - DNA, 25 bp, Artificial
  Probe
cataaaggcagttttggacaaacta

SEQ ID NO: 26677 - DNA, 25 bp, Artificial
  Probe
aggcagttttggacaaactacataa

SEQ ID NO: 26678 - DNA, 25 bp, Artificial
  Probe
aaggcagttttggacaaactacata

SEQ ID NO: 26679 - DNA, 25 bp, Artificial
  Probe
gcagttttggacaaactacataatc

SEQ ID NO: 26680 - DNA, 25 bp, Artificial
  Probe
taaaggcagttttggacaaactaca

SEQ ID NO: 26681 - DNA, 25 bp, Artificial
  Probe
aaaggcagttttggacaaactacat

SEQ ID NO: 26682 - DNA, 25 bp, Artificial
  Probe
acataaaggcagttttggacaaact

SEQ ID NO: 26683 - DNA, 25 bp, Artificial
  Probe
cagttttggacaaactacataatct

SEQ ID NO: 26684 - DNA, 25 bp, Artificial
  Probe
tgatctactctgttaccaatggctt

SEQ ID NO: 26685 - DNA, 25 bp, Artificial
  Probe
ctgatctactctgttaccaatggct

SEQ ID NO: 26686 - DNA, 25 bp, Artificial
  Probe
ctactctgttaccaatggctttact

SEQ ID NO: 26687 - DNA, 25 bp, Artificial
  Probe
tctactctgttaccaatggctttac

SEQ ID NO: 26688 - DNA, 25 bp, Artificial
  Probe
actctgttaccaatggctttactag

SEQ ID NO: 26689 - DNA, 25 bp, Artificial
  Probe
atctactctgttaccaatggcttta

SEQ ID NO: 26690 - DNA, 25 bp, Artificial
  Probe
atggctgatctactctgttaccaat

SEQ ID NO: 26691 - DNA, 25 bp, Artificial
  Probe
tactctgttaccaatggctttacta

SEQ ID NO: 26692 - DNA, 25 bp, Artificial
  Probe
ggctgatctactctgttaccaatgg

SEQ ID NO: 26693 - DNA, 25 bp, Artificial
  Probe
gatctactctgttaccaatggcttt

SEQ ID NO: 26694 - DNA, 25 bp, Artificial
  Probe
aaacacaaactaaatggacaggctc

SEQ ID NO: 26695 - DNA, 25 bp, Artificial
  Probe
tggctgatctactctgttaccaatg

SEQ ID NO: 26696 - DNA, 25 bp, Artificial
  Probe
gctgatctactctgttaccaatggc

SEQ ID NO: 26697 - DNA, 25 bp, Artificial
  Probe
catggctgatctactctgttaccaa

SEQ ID NO: 26698 - DNA, 25 bp, Artificial
  Probe
tcaaaacacaaactaaatggacagg

SEQ ID NO: 26699 - DNA, 25 bp, Artificial
  Probe
tggggaatcaaaacacaaactaaat

SEQ ID NO: 26700 - DNA, 25 bp, Artificial
  Probe
atggggaatcaaaacacaaactaaa

SEQ ID NO: 26701 - DNA, 25 bp, Artificial
  Probe
gggaatcaaaacacaaactaaatgg

SEQ ID NO: 26702 - DNA, 25 bp, Artificial
  Probe
ggggaatcaaaacacaaactaaatg

SEQ ID NO: 26703 - DNA, 25 bp, Artificial
  Probe
ggaacgagaacggaaagtgagtatg

SEQ ID NO: 26704 - DNA, 25 bp, Artificial
  Probe
agtcaacgtctcctcatctgatctc

SEQ ID NO: 26705 - DNA, 25 bp, Artificial
  Probe
ctctgttaccaatggctttactagt

SEQ ID NO: 26706 - DNA, 25 bp, Artificial
  Probe
aaaacacaaactaaatggacaggct

SEQ ID NO: 26707 - DNA, 25 bp, Artificial
  Probe
caaaacacaaactaaatggacaggc

SEQ ID NO: 26708 - DNA, 25 bp, Artificial
  Probe
atcaaaacacaaactaaatggacag

SEQ ID NO: 26709 - DNA, 25 bp, Artificial
  Probe
ggaatcaaaacacaaactaaatgga

SEQ ID NO: 26710 - DNA, 25 bp, Artificial
  Probe
ctgttaccaatggctttactagtga

SEQ ID NO: 26711 - DNA, 25 bp, Artificial
  Probe
tctgttaccaatggctttactagtg

SEQ ID NO: 26712 - DNA, 25 bp, Artificial
  Probe
ttaccaatggctttactagtgacac

SEQ ID NO: 26713 - DNA, 25 bp, Artificial
  Probe
gttaccaatggctttactagtgaca

SEQ ID NO: 26714 - DNA, 25 bp, Artificial
  Probe
tgttaccaatggctttactagtgac

SEQ ID NO: 26715 - DNA, 25 bp, Artificial
  Probe
tggaacgagaacggaaagtgagtat

SEQ ID NO: 26716 - DNA, 25 bp, Artificial
  Probe
atggaacgagaacggaaagtgagta

SEQ ID NO: 26717 - DNA, 25 bp, Artificial
  Probe
aatgcatggctgatctactctgtta

SEQ ID NO: 26718 - DNA, 25 bp, Artificial
  Probe
catggggaatcaaaacacaaactaa

SEQ ID NO: 26719 - DNA, 25 bp, Artificial
  Probe
aatcaaaacacaaactaaatggaca

SEQ ID NO: 26720 - DNA, 25 bp, Artificial
  Probe
tcaacgtctcctcatctgatctcac

SEQ ID NO: 26721 - DNA, 25 bp, Artificial
  Probe
gtcaacgtctcctcatctgatctca

SEQ ID NO: 26722 - DNA, 25 bp, Artificial
  Probe
gaacgagaacggaaagtgagtatgc

SEQ ID NO: 26723 - DNA, 25 bp, Artificial
  Probe
acatggggaatcaaaacacaaacta

SEQ ID NO: 26724 - DNA, 25 bp, Artificial
  Probe
cagtcaacgtctcctcatctgatct

SEQ ID NO: 26725 - DNA, 25 bp, Artificial
  Probe
gaatcaaaacacaaactaaatggac

SEQ ID NO: 26726 - DNA, 25 bp, Artificial
  Probe
tgcatggctgatctactctgttacc

SEQ ID NO: 26727 - DNA, 25 bp, Artificial
  Probe
atgcatggctgatctactctgttac

SEQ ID NO: 26728 - DNA, 25 bp, Artificial
  Probe
aacacaaactaaatggacaggctcc

SEQ ID NO: 26729 - DNA, 25 bp, Artificial
  Probe
taactctattgaaggaacaggacac

SEQ ID NO: 26730 - DNA, 25 bp, Artificial
  Probe
ctccatccattaactccactaacat

SEQ ID NO: 26731 - DNA, 25 bp, Artificial
  Probe
tccatccattaactccactaacatt

SEQ ID NO: 26732 - DNA, 25 bp, Artificial
  Probe
ttaactctattgaaggaacaggaca

SEQ ID NO: 26733 - DNA, 25 bp, Artificial
  Probe
aactctattgaaggaacaggacact

SEQ ID NO: 26734 - DNA, 25 bp, Artificial
  Probe
cttccaacatattgattacacgact

SEQ ID NO: 26735 - DNA, 25 bp, Artificial
  Probe
tcttccaacatattgattacacgac

SEQ ID NO: 26736 - DNA, 25 bp, Artificial
  Probe
actcttccaacatattgattacacg

SEQ ID NO: 26737 - DNA, 25 bp, Artificial
  Probe
ctcttccaacatattgattacacga

SEQ ID NO: 26738 - DNA, 25 bp, Artificial
  Probe
ggtgtgctgaggtattaactctatt

SEQ ID NO: 26739 - DNA, 25 bp, Artificial
  Probe
ttagaataatgaagcctgctccatc

SEQ ID NO: 26740 - DNA, 25 bp, Artificial
  Probe
attaactctattgaaggaacaggac

SEQ ID NO: 26741 - DNA, 25 bp, Artificial
  Probe
gtgtgctgaggtattaactctattg

SEQ ID NO: 26742 - DNA, 25 bp, Artificial
  Probe
tgtgctgaggtattaactctattga

SEQ ID NO: 26743 - DNA, 25 bp, Artificial
  Probe
tggtgtgctgaggtattaactctat

SEQ ID NO: 26744 - DNA, 25 bp, Artificial
  Probe
gctgaggtattaactctattgaagg

SEQ ID NO: 26745 - DNA, 25 bp, Artificial
  Probe
ctgctccatccattaactccactaa

SEQ ID NO: 26746 - DNA, 25 bp, Artificial
  Probe
ttccaacatattgattacacgacta

SEQ ID NO: 26747 - DNA, 25 bp, Artificial
  Probe
gtgctgaggtattaactctattgaa

SEQ ID NO: 26748 - DNA, 25 bp, Artificial
  Probe
gctccatccattaactccactaaca

SEQ ID NO: 26749 - DNA, 25 bp, Artificial
  Probe
tgctccatccattaactccactaac

SEQ ID NO: 26750 - DNA, 25 bp, Artificial
  Probe
gtggtgtgctgaggtattaactcta

SEQ ID NO: 26751 - DNA, 25 bp, Artificial
  Probe
tccaacatattgattacacgactat

SEQ ID NO: 26752 - DNA, 25 bp, Artificial
  Probe
tgctgaggtattaactctattgaag

SEQ ID NO: 26753 - DNA, 25 bp, Artificial
  Probe
tagaataatgaagcctgctccatcc

SEQ ID NO: 26754 - DNA, 25 bp, Artificial
  Probe
actctattgaaggaacaggacactg

SEQ ID NO: 26755 - DNA, 25 bp, Artificial
  Probe
gcctcatcattagtgttcctttaga

SEQ ID NO: 26756 - DNA, 25 bp, Artificial
  Probe
gttgctttatgattgtgtttgatgg

SEQ ID NO: 26757 - DNA, 25 bp, Artificial
  Probe
taataatggtgttgaaaggaagcag

SEQ ID NO: 26758 - DNA, 25 bp, Artificial
  Probe
tgcctcatcattagtgttcctttag

SEQ ID NO: 26759 - DNA, 25 bp, Artificial
  Probe
ctgcctcatcattagtgttccttta

SEQ ID NO: 26760 - DNA, 25 bp, Artificial
  Probe
ccattaactccactaacatttgctc

SEQ ID NO: 26761 - DNA, 25 bp, Artificial
  Probe
tccattaactccactaacatttgct

SEQ ID NO: 26762 - DNA, 25 bp, Artificial
  Probe
atccattaactccactaacatttgc

SEQ ID NO: 26763 - DNA, 25 bp, Artificial
  Probe
gaaaccagaactcttgtgtgaaata

SEQ ID NO: 26764 - DNA, 25 bp, Artificial
  Probe
aataatggtgttgaaaggaagcaga

SEQ ID NO: 26765 - DNA, 25 bp, Artificial
  Probe
ttaactccactaacatttgctctcc

SEQ ID NO: 26766 - DNA, 25 bp, Artificial
  Probe
cattaactccactaacatttgctct

SEQ ID NO: 26767 - DNA, 25 bp, Artificial
  Probe
gttcctttagaataatgaagcctgc

SEQ ID NO: 26768 - DNA, 25 bp, Artificial
  Probe
aggtattaactctattgaaggaaca

SEQ ID NO: 26769 - DNA, 25 bp, Artificial
  Probe
attaactccactaacatttgctctc

SEQ ID NO: 26770 - DNA, 25 bp, Artificial
  Probe
ttgctttatgattgtgtttgatggc

SEQ ID NO: 26771 - DNA, 25 bp, Artificial
  Probe
agttgctttatgattgtgtttgatg

SEQ ID NO: 26772 - DNA, 25 bp, Artificial
  Probe
cagttgctttatgattgtgtttgat

SEQ ID NO: 26773 - DNA, 25 bp, Artificial
  Probe
ataataatggtgttgaaaggaagca

SEQ ID NO: 26774 - DNA, 25 bp, Artificial
  Probe
tatatggactgtgagagtggctatt

SEQ ID NO: 26775 - DNA, 25 bp, Artificial
  Probe
ctatatggactgtgagagtggctat

SEQ ID NO: 26776 - DNA, 25 bp, Artificial
  Probe
atatggactgtgagagtggctattc

SEQ ID NO: 26777 - DNA, 25 bp, Artificial
  Probe
tatggactgtgagagtggctattca

SEQ ID NO: 26778 - DNA, 25 bp, Artificial
  Probe
ctcattgcttccttgaatccagtct

SEQ ID NO: 26779 - DNA, 25 bp, Artificial
  Probe
attgcttccttgaatccagtctgtc

SEQ ID NO: 26780 - DNA, 25 bp, Artificial
  Probe
gtacagaatcacacagaatcacttt

SEQ ID NO: 26781 - DNA, 25 bp, Artificial
  Probe
tcattgcttccttgaatccagtctg

SEQ ID NO: 26782 - DNA, 25 bp, Artificial
  Probe
cattgcttccttgaatccagtctgt

SEQ ID NO: 26783 - DNA, 25 bp, Artificial
  Probe
gagtggctattcagtggtctgtaac

SEQ ID NO: 26784 - DNA, 25 bp, Artificial
  Probe
gctatatggactgtgagagtggcta

SEQ ID NO: 26785 - DNA, 25 bp, Artificial
  Probe
gcttccttgaatccagtctgtcttc

SEQ ID NO: 26786 - DNA, 25 bp, Artificial
  Probe
agagtggctattcagtggtctgtaa

SEQ ID NO: 26787 - DNA, 25 bp, Artificial
  Probe
gagagtggctattcagtggtctgta

SEQ ID NO: 26788 - DNA, 25 bp, Artificial
  Probe
cctcattgcttccttgaatccagtc

SEQ ID NO: 26789 - DNA, 25 bp, Artificial
  Probe
agtggctattcagtggtctgtaaca

SEQ ID NO: 26790 - DNA, 25 bp, Artificial
  Probe
tgcttccttgaatccagtctgtctt

SEQ ID NO: 26791 - DNA, 25 bp, Artificial
  Probe
ttgcttccttgaatccagtctgtct

SEQ ID NO: 26792 - DNA, 25 bp, Artificial
  Probe
ctccaagcccttctttcatctcaaa

SEQ ID NO: 26793 - DNA, 25 bp, Artificial
  Probe
gtggctattcagtggtctgtaacag

SEQ ID NO: 26794 - DNA, 25 bp, Artificial
  Probe
ttccttgaatccagtctgtcttcag

SEQ ID NO: 26795 - DNA, 25 bp, Artificial
  Probe
cttccttgaatccagtctgtcttca

SEQ ID NO: 26796 - DNA, 25 bp, Artificial
  Probe
atgtacagaatcacacagaatcact

SEQ ID NO: 26797 - DNA, 25 bp, Artificial
  Probe
tgtacagaatcacacagaatcactt

SEQ ID NO: 26798 - DNA, 25 bp, Artificial
  Probe
aatgtacagaatcacacagaatcac

SEQ ID NO: 26799 - DNA, 25 bp, Artificial
  Probe
atggactgtgagagtggctattcag

SEQ ID NO: 26800 - DNA, 25 bp, Artificial
  Probe
atgtccctcattgcttccttgaatc

SEQ ID NO: 26801 - DNA, 25 bp, Artificial
  Probe
tacagaatcacacagaatcactttt

SEQ ID NO: 26802 - DNA, 25 bp, Artificial
  Probe
atttcaaatgtccctcattgcttcc

SEQ ID NO: 26803 - DNA, 25 bp, Artificial
  Probe
catttcaaatgtccctcattgcttc

SEQ ID NO: 26804 - DNA, 25 bp, Artificial
  Probe
aatgtccctcattgcttccttgaat

SEQ ID NO: 26805 - DNA, 25 bp, Artificial
  Probe
tcagcatttcaaatgtccctcattg

SEQ ID NO: 26806 - DNA, 25 bp, Artificial
  Probe
gtcagcatttcaaatgtccctcatt

SEQ ID NO: 26807 - DNA, 25 bp, Artificial
  Probe
ttcagttccaaatgtacagaatcac

SEQ ID NO: 26808 - DNA, 25 bp, Artificial
  Probe
gtgagagtggctattcagtggtctg

SEQ ID NO: 26809 - DNA, 25 bp, Artificial
  Probe
ctgtgagagtggctattcagtggtc

SEQ ID NO: 26810 - DNA, 25 bp, Artificial
  Probe
aaatgtccctcattgcttccttgaa

SEQ ID NO: 26811 - DNA, 25 bp, Artificial
  Probe
ttcaaatgtccctcattgcttcctt

SEQ ID NO: 26812 - DNA, 25 bp, Artificial
  Probe
tttcaaatgtccctcattgcttcct

SEQ ID NO: 26813 - DNA, 25 bp, Artificial
  Probe
ctattcagtggtctgtaacagaagg

SEQ ID NO: 26814 - DNA, 25 bp, Artificial
  Probe
ccttgaatccagtctgtcttcagag

SEQ ID NO: 26815 - DNA, 25 bp, Artificial
  Probe
tttcagttccaaatgtacagaatca

SEQ ID NO: 26816 - DNA, 25 bp, Artificial
  Probe
tattcagtggtctgtaacagaagga

SEQ ID NO: 26817 - DNA, 25 bp, Artificial
  Probe
gctattcagtggtctgtaacagaag

SEQ ID NO: 26818 - DNA, 25 bp, Artificial
  Probe
ccaaatgtacagaatcacacagaat

SEQ ID NO: 26819 - DNA, 25 bp, Artificial
  Probe
tatcttactgtgtagtgagggaaag

SEQ ID NO: 26820 - DNA, 25 bp, Artificial
  Probe
ttatcttactgtgtagtgagggaaa

SEQ ID NO: 26821 - DNA, 25 bp, Artificial
  Probe
tttatcttactgtgtagtgagggaa

SEQ ID NO: 26822 - DNA, 25 bp, Artificial
  Probe
atttatcttactgtgtagtgaggga

SEQ ID NO: 26823 - DNA, 25 bp, Artificial
  Probe
catttatcttactgtgtagtgaggg

SEQ ID NO: 26824 - DNA, 25 bp, Artificial
  Probe
ttactgtgtagtgagggaaagacat

SEQ ID NO: 26825 - DNA, 25 bp, Artificial
  Probe
cttactgtgtagtgagggaaagaca

SEQ ID NO: 26826 - DNA, 25 bp, Artificial
  Probe
tcatttatcttactgtgtagtgagg

SEQ ID NO: 26827 - DNA, 25 bp, Artificial
  Probe
tgtaacctcaacctcaagcagaaag

SEQ ID NO: 26828 - DNA, 25 bp, Artificial
  Probe
tactgtgtagtgagggaaagacatg

SEQ ID NO: 26829 - DNA, 25 bp, Artificial
  Probe
agtcatttatcttactgtgtagtga

SEQ ID NO: 26830 - DNA, 25 bp, Artificial
  Probe
atcttactgtgtagtgagggaaaga

SEQ ID NO: 26831 - DNA, 25 bp, Artificial
  Probe
gtcatttatcttactgtgtagtgag

SEQ ID NO: 26832 - DNA, 25 bp, Artificial
  Probe
actgtaacctcaacctcaagcagaa

SEQ ID NO: 26833 - DNA, 25 bp, Artificial
  Probe
gcgaggcttttagtcatttatctta

SEQ ID NO: 26834 - DNA, 25 bp, Artificial
  Probe
tcttactgtgtagtgagggaaagac

SEQ ID NO: 26835 - DNA, 25 bp, Artificial
  Probe
cctcaagcagaaaggttacttcttc

SEQ ID NO: 26836 - DNA, 25 bp, Artificial
  Probe
ctgtaacctcaacctcaagcagaaa

SEQ ID NO: 26837 - DNA, 25 bp, Artificial
  Probe
gactgtaacctcaacctcaagcaga

SEQ ID NO: 26838 - DNA, 25 bp, Artificial
  Probe
ctcaagcagaaaggttacttcttcg

SEQ ID NO: 26839 - DNA, 25 bp, Artificial
  Probe
ctgactgtaacctcaacctcaagca

SEQ ID NO: 26840 - DNA, 25 bp, Artificial
  Probe
tgctgactgtaacctcaacctcaag

SEQ ID NO: 26841 - DNA, 25 bp, Artificial
  Probe
aaagtattatctgtgggttgtaatt

SEQ ID NO: 26842 - DNA, 25 bp, Artificial
  Probe
ttgtgtgtgctgactgtaacctcaa

SEQ ID NO: 26843 - DNA, 25 bp, Artificial
  Probe
tgacaaaagtattatctgtgggttg

SEQ ID NO: 26844 - DNA, 25 bp, Artificial
  Probe
ctttgtgtgtgctgactgtaacctc

SEQ ID NO: 26845 - DNA, 25 bp, Artificial
  Probe
cgaggcttttagtcatttatcttac

SEQ ID NO: 26846 - DNA, 25 bp, Artificial
  Probe
caagcagaaaggttacttcttcgtg

SEQ ID NO: 26847 - DNA, 25 bp, Artificial
  Probe
gtgctgactgtaacctcaacctcaa

SEQ ID NO: 26848 - DNA, 25 bp, Artificial
  Probe
tgactgtaacctcaacctcaagcag

SEQ ID NO: 26849 - DNA, 25 bp, Artificial
  Probe
tcaagcagaaaggttacttcttcgt

SEQ ID NO: 26850 - DNA, 25 bp, Artificial
  Probe
gtaacctcaacctcaagcagaaagg

SEQ ID NO: 26851 - DNA, 25 bp, Artificial
  Probe
tagtcatttatcttactgtgtagtg

SEQ ID NO: 26852 - DNA, 25 bp, Artificial
  Probe
cagaaaggttacttcttcgtggagg

SEQ ID NO: 26853 - DNA, 25 bp, Artificial
  Probe
caaaagtattatctgtgggttgtaa

SEQ ID NO: 26854 - DNA, 25 bp, Artificial
  Probe
aagcagaaaggttacttcttcgtgg

SEQ ID NO: 26855 - DNA, 25 bp, Artificial
  Probe
tggtgacatttaaagcaataacgtt

SEQ ID NO: 26856 - DNA, 25 bp, Artificial
  Probe
actgtgtagtgagggaaagacatgg

SEQ ID NO: 26857 - DNA, 25 bp, Artificial
  Probe
agcgaggcttttagtcatttatctt

SEQ ID NO: 26858 - DNA, 25 bp, Artificial
  Probe
ggcttttagtcatttatcttactgt

SEQ ID NO: 26859 - DNA, 25 bp, Artificial
  Probe
gcagaaaggttacttcttcgtggag

SEQ ID NO: 26860 - DNA, 25 bp, Artificial
  Probe
ggtgacatttaaagcaataacgttg

SEQ ID NO: 26861 - DNA, 25 bp, Artificial
  Probe
tttgtgtgtgctgactgtaacctca

SEQ ID NO: 26862 - DNA, 25 bp, Artificial
  Probe
aggcttttagtcatttatcttactg

SEQ ID NO: 26863 - DNA, 25 bp, Artificial
  Probe
gtgctttgtgtgtgctgactgtaac

SEQ ID NO: 26864 - DNA, 25 bp, Artificial
  Probe
ctgactgacttaggattcttgtctt

SEQ ID NO: 26865 - DNA, 25 bp, Artificial
  Probe
tgactgacttaggattcttgtcttg

SEQ ID NO: 26866 - DNA, 25 bp, Artificial
  Probe
ctgacttaggattcttgtcttggag

SEQ ID NO: 26867 - DNA, 25 bp, Artificial
  Probe
gactgacttaggattcttgtcttgg

SEQ ID NO: 26868 - DNA, 25 bp, Artificial
  Probe
actgacttaggattcttgtcttgga

SEQ ID NO: 26869 - DNA, 25 bp, Artificial
  Probe
gacttaggattcttgtcttggagga

SEQ ID NO: 26870 - DNA, 25 bp, Artificial
  Probe
gaggctgactgacttaggattcttg

SEQ ID NO: 26871 - DNA, 25 bp, Artificial
  Probe
acttaggattcttgtcttggaggac

SEQ ID NO: 26872 - DNA, 25 bp, Artificial
  Probe
tgacttaggattcttgtcttggagg

SEQ ID NO: 26873 - DNA, 25 bp, Artificial
  Probe
gctgactgacttaggattcttgtct

SEQ ID NO: 26874 - DNA, 25 bp, Artificial
  Probe
aggctgactgacttaggattcttgt

SEQ ID NO: 26875 - DNA, 25 bp, Artificial
  Probe
ggctgactgacttaggattcttgtc

SEQ ID NO: 26876 - DNA, 25 bp, Artificial
  Probe
ggaggctgactgacttaggattctt

SEQ ID NO: 26877 - DNA, 25 bp, Artificial
  Probe
ctgttcttcttcctggtggagaatt

SEQ ID NO: 26878 - DNA, 25 bp, Artificial
  Probe
aggaggctgactgacttaggattct

SEQ ID NO: 26879 - DNA, 25 bp, Artificial
  Probe
gggacaaaaccagaaacaaataaac

SEQ ID NO: 26880 - DNA, 25 bp, Artificial
  Probe
cgggacaaaaccagaaacaaataaa

SEQ ID NO: 26881 - DNA, 25 bp, Artificial
  Probe
ggacaaaaccagaaacaaataaaca

SEQ ID NO: 26882 - DNA, 25 bp, Artificial
  Probe
aagtctatgaccgccttgagtacag

SEQ ID NO: 26883 - DNA, 25 bp, Artificial
  Probe
gaagtctatgaccgccttgagtaca

SEQ ID NO: 26884 - DNA, 25 bp, Artificial
  Probe
caggaggctgactgacttaggattc

SEQ ID NO: 26885 - DNA, 25 bp, Artificial
  Probe
gacagcaatcctctctacaaaagtg

SEQ ID NO: 26886 - DNA, 25 bp, Artificial
  Probe
ttaggattcttgtcttggaggacag

SEQ ID NO: 26887 - DNA, 25 bp, Artificial
  Probe
cttaggattcttgtcttggaggaca

SEQ ID NO: 26888 - DNA, 25 bp, Artificial
  Probe
ggaagtctatgaccgccttgagtac

SEQ ID NO: 26889 - DNA, 25 bp, Artificial
  Probe
gacaaaaccagaaacaaataaacaa

SEQ ID NO: 26890 - DNA, 25 bp, Artificial
  Probe
tgttcttcttcctggtggagaattc

SEQ ID NO: 26891 - DNA, 25 bp, Artificial
  Probe
tggaagtctatgaccgccttgagta

SEQ ID NO: 26892 - DNA, 25 bp, Artificial
  Probe
taggattcttgtcttggaggacaga

SEQ ID NO: 26893 - DNA, 25 bp, Artificial
  Probe
aaaaccagaaacaaataaacaaaca

SEQ ID NO: 26894 - DNA, 25 bp, Artificial
  Probe
acaaaaccagaaacaaataaacaaa

SEQ ID NO: 26895 - DNA, 25 bp, Artificial
  Probe
caaaaccagaaacaaataaacaaac

SEQ ID NO: 26896 - DNA, 25 bp, Artificial
  Probe
gctgttcttcttcctggtggagaat

SEQ ID NO: 26897 - DNA, 25 bp, Artificial
  Probe
gttcttcttcctggtggagaattcg

SEQ ID NO: 26898 - DNA, 25 bp, Artificial
  Probe
ggacagcaatcctctctacaaaagt

SEQ ID NO: 26899 - DNA, 25 bp, Artificial
  Probe
caatcctctctacaaaagtgcggtc

SEQ ID NO: 26900 - DNA, 25 bp, Artificial
  Probe
caaagagaggacgctagacaaccag

SEQ ID NO: 26901 - DNA, 25 bp, Artificial
  Probe
ttaccggctctcagtggaagtctat

SEQ ID NO: 26902 - DNA, 25 bp, Artificial
  Probe
ctctacaaaagtgcggtcacaacta

SEQ ID NO: 26903 - DNA, 25 bp, Artificial
  Probe
aggattcttgtcttggaggacagag

SEQ ID NO: 26904 - DNA, 25 bp, Artificial
  Probe
caccataaagttctgcctcagactt

SEQ ID NO: 26905 - DNA, 25 bp, Artificial
  Probe
aatcctctctacaaaagtgcggtca

SEQ ID NO: 26906 - DNA, 25 bp, Artificial
  Probe
atactgagagtgagaccccaagaga

SEQ ID NO: 26907 - DNA, 25 bp, Artificial
  Probe
catactgagagtgagaccccaagag

SEQ ID NO: 26908 - DNA, 25 bp, Artificial
  Probe
tctacaaaagtgcggtcacaactac

SEQ ID NO: 26909 - DNA, 25 bp, Artificial
  Probe
gtgaaatgtttggtttggtttgttt

SEQ ID NO: 26910 - DNA, 25 bp, Artificial
  Probe
aaagactgtgaaatgtttggtttgg

SEQ ID NO: 26911 - DNA, 25 bp, Artificial
  Probe
tgtgaaatgtttggtttggtttgtt

SEQ ID NO: 26912 - DNA, 25 bp, Artificial
  Probe
gactgtgaaatgtttggtttggttt

SEQ ID NO: 26913 - DNA, 25 bp, Artificial
  Probe
ctgtgaaatgtttggtttggtttgt

SEQ ID NO: 26914 - DNA, 25 bp, Artificial
  Probe
actgtgaaatgtttggtttggtttg

SEQ ID NO: 26915 - DNA, 25 bp, Artificial
  Probe
taaagactgtgaaatgtttggtttg

SEQ ID NO: 26916 - DNA, 25 bp, Artificial
  Probe
agactgtgaaatgtttggtttggtt

SEQ ID NO: 26917 - DNA, 25 bp, Artificial
  Probe
aagactgtgaaatgtttggtttggt

SEQ ID NO: 26918 - DNA, 25 bp, Artificial
  Probe
ttaaagactgtgaaatgtttggttt

SEQ ID NO: 26919 - DNA, 25 bp, Artificial
  Probe
tttaaagactgtgaaatgtttggtt

SEQ ID NO: 26920 - DNA, 25 bp, Artificial
  Probe
tgaaatgtttggtttggtttgtttt

SEQ ID NO: 26921 - DNA, 25 bp, Artificial
  Probe
ttttaaagactgtgaaatgtttggt

SEQ ID NO: 26922 - DNA, 25 bp, Artificial
  Probe
cttctgtcagggagcacctttaact

SEQ ID NO: 26923 - DNA, 25 bp, Artificial
  Probe
ttctgtcagggagcacctttaactg

SEQ ID NO: 26924 - DNA, 25 bp, Artificial
  Probe
cctcatctcccagcttttcttcatg

SEQ ID NO: 26925 - DNA, 25 bp, Artificial
  Probe
ctcatctcccagcttttcttcatgc

SEQ ID NO: 26926 - DNA, 25 bp, Artificial
  Probe
atccctcatctcccagcttttcttc

SEQ ID NO: 26927 - DNA, 25 bp, Artificial
  Probe
ccctcatctcccagcttttcttcat

SEQ ID NO: 26928 - DNA, 25 bp, Artificial
  Probe
catccctcatctcccagcttttctt

SEQ ID NO: 26929 - DNA, 25 bp, Artificial
  Probe
tcagattgatcagcatcaccggaac

SEQ ID NO: 26930 - DNA, 25 bp, Artificial
  Probe
gtcagattgatcagcatcaccggaa

SEQ ID NO: 26931 - DNA, 25 bp, Artificial
  Probe
gggaagaacttaatggactttgatt

SEQ ID NO: 26932 - DNA, 25 bp, Artificial
  Probe
agaaaggatgttacaagtttgctaa

SEQ ID NO: 26933 - DNA, 25 bp, Artificial
  Probe
aagaaaggatgttacaagtttgcta

SEQ ID NO: 26934 - DNA, 25 bp, Artificial
  Probe
taagaaaggatgttacaagtttgct

SEQ ID NO: 26935 - DNA, 25 bp, Artificial
  Probe
gaaaggatgttacaagtttgctaaa

SEQ ID NO: 26936 - DNA, 25 bp, Artificial
  Probe
ttaagaaaggatgttacaagtttgc

SEQ ID NO: 26937 - DNA, 25 bp, Artificial
  Probe
tttgtttgcttaatttccttctgtt

SEQ ID NO: 26938 - DNA, 25 bp, Artificial
  Probe
ggaagaacttaatggactttgattt

SEQ ID NO: 26939 - DNA, 25 bp, Artificial
  Probe
ttgtttgcttaatttccttctgtta

SEQ ID NO: 26940 - DNA, 25 bp, Artificial
  Probe
tctgttaagaaaggatgttacaagt

SEQ ID NO: 26941 - DNA, 25 bp, Artificial
  Probe
taacagtgcatttaagagattggga

SEQ ID NO: 26942 - DNA, 25 bp, Artificial
  Probe
ctaacagtgcatttaagagattggg

SEQ ID NO: 26943 - DNA, 25 bp, Artificial
  Probe
agtgcatttaagagattgggagaaa

SEQ ID NO: 26944 - DNA, 25 bp, Artificial
  Probe
gctaacagtgcatttaagagattgg

SEQ ID NO: 26945 - DNA, 25 bp, Artificial
  Probe
tgtttgcttaatttccttctgttaa

SEQ ID NO: 26946 - DNA, 25 bp, Artificial
  Probe
cagtgcatttaagagattgggagaa

SEQ ID NO: 26947 - DNA, 25 bp, Artificial
  Probe
aacagtgcatttaagagattgggag

SEQ ID NO: 26948 - DNA, 25 bp, Artificial
  Probe
aagaacttaatggactttgatttca

SEQ ID NO: 26949 - DNA, 25 bp, Artificial
  Probe
ctgttaagaaaggatgttacaagtt

SEQ ID NO: 26950 - DNA, 25 bp, Artificial
  Probe
gttaagaaaggatgttacaagtttg

SEQ ID NO: 26951 - DNA, 25 bp, Artificial
  Probe
acagtgcatttaagagattgggaga

SEQ ID NO: 26952 - DNA, 25 bp, Artificial
  Probe
agagactgccaaatgaacttttaca

SEQ ID NO: 26953 - DNA, 25 bp, Artificial
  Probe
aagagattgggagaaaattagcaca

SEQ ID NO: 26954 - DNA, 25 bp, Artificial
  Probe
aagagactgccaaatgaacttttac

SEQ ID NO: 26955 - DNA, 25 bp, Artificial
  Probe
ctaaaagaagagaggggaagaactt

SEQ ID NO: 26956 - DNA, 25 bp, Artificial
  Probe
gaagaacttaatggactttgatttc

SEQ ID NO: 26957 - DNA, 25 bp, Artificial
  Probe
tgttaagaaaggatgttacaagttt

SEQ ID NO: 26958 - DNA, 25 bp, Artificial
  Probe
tgccaaatgaacttttacagaatgc

SEQ ID NO: 26959 - DNA, 25 bp, Artificial
  Probe
aagaagagaggggaagaacttaatg

SEQ ID NO: 26960 - DNA, 25 bp, Artificial
  Probe
aaaagaagagaggggaagaacttaa

SEQ ID NO: 26961 - DNA, 25 bp, Artificial
  Probe
agaacttaatggactttgatttcaa

SEQ ID NO: 26962 - DNA, 25 bp, Artificial
  Probe
tacaagtttgctaaaagaagagagg

SEQ ID NO: 26963 - DNA, 25 bp, Artificial
  Probe
ggggaagaacttaatggactttgat

SEQ ID NO: 26964 - DNA, 25 bp, Artificial
  Probe
aaagaagagaggggaagaacttaat

SEQ ID NO: 26965 - DNA, 25 bp, Artificial
  Probe
acaagtttgctaaaagaagagaggg

SEQ ID NO: 26966 - DNA, 25 bp, Artificial
  Probe
aggatgttacaagtttgctaaaaga

SEQ ID NO: 26967 - DNA, 25 bp, Artificial
  Probe
taagagattgggagaaaattagcac

SEQ ID NO: 26968 - DNA, 25 bp, Artificial
  Probe
ttgctaaaagaagagaggggaagaa

SEQ ID NO: 26969 - DNA, 25 bp, Artificial
  Probe
taaaagaagagaggggaagaactta

SEQ ID NO: 26970 - DNA, 25 bp, Artificial
  Probe
tttgctaaaagaagagaggggaaga

SEQ ID NO: 26971 - DNA, 25 bp, Artificial
  Probe
gtttgctaaaagaagagaggggaag

SEQ ID NO: 26972 - DNA, 25 bp, Artificial
  Probe
gaggggaagaacttaatggactttg

SEQ ID NO: 26973 - DNA, 25 bp, Artificial
  Probe
agaggggaagaacttaatggacttt

SEQ ID NO: 26974 - DNA, 25 bp, Artificial
  Probe
gaagagaggggaagaacttaatgga

SEQ ID NO: 26975 - DNA, 25 bp, Artificial
  Probe
agaagagaggggaagaacttaatgg

SEQ ID NO: 26976 - DNA, 25 bp, Artificial
  Probe
aatactaagatagcttgtgacctgg

SEQ ID NO: 26977 - DNA, 25 bp, Artificial
  Probe
atactaagatagcttgtgacctgga

SEQ ID NO: 26978 - DNA, 25 bp, Artificial
  Probe
ctaagatagcttgtgacctggagta

SEQ ID NO: 26979 - DNA, 25 bp, Artificial
  Probe
tactaagatagcttgtgacctggag

SEQ ID NO: 26980 - DNA, 25 bp, Artificial
  Probe
ctctcaaattcctacccatctctag

SEQ ID NO: 26981 - DNA, 25 bp, Artificial
  Probe
gctctcaaattcctacccatctcta

SEQ ID NO: 26982 - DNA, 25 bp, Artificial
  Probe
gccaacaattaaagcaaatactaag

SEQ ID NO: 26983 - DNA, 25 bp, Artificial
  Probe
actaagatagcttgtgacctggagt

SEQ ID NO: 26984 - DNA, 25 bp, Artificial
  Probe
gcaaatactaagatagcttgtgacc

SEQ ID NO: 26985 - DNA, 25 bp, Artificial
  Probe
aaatactaagatagcttgtgacctg

SEQ ID NO: 26986 - DNA, 25 bp, Artificial
  Probe
caaatactaagatagcttgtgacct

SEQ ID NO: 26987 - DNA, 25 bp, Artificial
  Probe
ggctctcaaattcctacccatctct

SEQ ID NO: 26988 - DNA, 25 bp, Artificial
  Probe
tctcaaattcctacccatctctagg

SEQ ID NO: 26989 - DNA, 25 bp, Artificial
  Probe
gctgccaacaattaaagcaaatact

SEQ ID NO: 26990 - DNA, 25 bp, Artificial
  Probe
agcaaatactaagatagcttgtgac

SEQ ID NO: 26991 - DNA, 25 bp, Artificial
  Probe
ctgccaacaattaaagcaaatacta

SEQ ID NO: 26992 - DNA, 25 bp, Artificial
  Probe
ctcaaattcctacccatctctaggg

SEQ ID NO: 26993 - DNA, 25 bp, Artificial
  Probe
ccaacaattaaagcaaatactaaga

SEQ ID NO: 26994 - DNA, 25 bp, Artificial
  Probe
tgccaacaattaaagcaaatactaa

SEQ ID NO: 26995 - DNA, 25 bp, Artificial
  Probe
ctctccctgctgccaacaattaaag

SEQ ID NO: 26996 - DNA, 25 bp, Artificial
  Probe
tggctctcaaattcctacccatctc

SEQ ID NO: 26997 - DNA, 25 bp, Artificial
  Probe
aagcaaatactaagatagcttgtga

SEQ ID NO: 26998 - DNA, 25 bp, Artificial
  Probe
aaattcctacccatctctaggggac

SEQ ID NO: 26999 - DNA, 25 bp, Artificial
  Probe
caaattcctacccatctctagggga

SEQ ID NO: 27000 - DNA, 25 bp, Artificial
  Probe
tcaaattcctacccatctctagggg

SEQ ID NO: 27001 - DNA, 25 bp, Artificial
  Probe
aaagcaaatactaagatagcttgtg

SEQ ID NO: 27002 - DNA, 25 bp, Artificial
  Probe
aattcctacccatctctaggggaca

SEQ ID NO: 27003 - DNA, 25 bp, Artificial
  Probe
attcctacccatctctaggggacag

SEQ ID NO: 27004 - DNA, 25 bp, Artificial
  Probe
taaagcaaatactaagatagcttgt

SEQ ID NO: 27005 - DNA, 25 bp, Artificial
  Probe
ttaaagcaaatactaagatagcttg

SEQ ID NO: 27006 - DNA, 25 bp, Artificial
  Probe
tacctgttgctgtaagaaatgagaa

SEQ ID NO: 27007 - DNA, 25 bp, Artificial
  Probe
acctgttgctgtaagaaatgagaac

SEQ ID NO: 27008 - DNA, 25 bp, Artificial
  Probe
ctgttgctgtaagaaatgagaaccc

SEQ ID NO: 27009 - DNA, 25 bp, Artificial
  Probe
cctgttgctgtaagaaatgagaacc

SEQ ID NO: 27010 - DNA, 25 bp, Artificial
  Probe
ttacctgttgctgtaagaaatgaga

SEQ ID NO: 27011 - DNA, 25 bp, Artificial
  Probe
tttacctgttgctgtaagaaatgag

SEQ ID NO: 27012 - DNA, 25 bp, Artificial
  Probe
tgttgctgtaagaaatgagaaccct

SEQ ID NO: 27013 - DNA, 25 bp, Artificial
  Probe
ttttacctgttgctgtaagaaatga

SEQ ID NO: 27014 - DNA, 25 bp, Artificial
  Probe
tttctccgatccatccccttttgtt

SEQ ID NO: 27015 - DNA, 25 bp, Artificial
  Probe
ctttctccgatccatccccttttgt

SEQ ID NO: 27016 - DNA, 25 bp, Artificial
  Probe
ttctccgatccatccccttttgttg

SEQ ID NO: 27017 - DNA, 25 bp, Artificial
  Probe
tgacatcagatgacaagaggtctat

SEQ ID NO: 27018 - DNA, 25 bp, Artificial
  Probe
gagtacagttccttaattcaggctt

SEQ ID NO: 27019 - DNA, 25 bp, Artificial
  Probe
gacatcagatgacaagaggtctata

SEQ ID NO: 27020 - DNA, 25 bp, Artificial
  Probe
atgagtacagttccttaattcaggc

SEQ ID NO: 27021 - DNA, 25 bp, Artificial
  Probe
agacaatgagtacagttccttaatt

SEQ ID NO: 27022 - DNA, 25 bp, Artificial
  Probe
aagacaatgagtacagttccttaat

SEQ ID NO: 27023 - DNA, 25 bp, Artificial
  Probe
gacaatgagtacagttccttaattc

SEQ ID NO: 27024 - DNA, 25 bp, Artificial
  Probe
acaatgagtacagttccttaattca

SEQ ID NO: 27025 - DNA, 25 bp, Artificial
  Probe
tgagtacagttccttaattcaggct

SEQ ID NO: 27026 - DNA, 25 bp, Artificial
  Probe
aatgagtacagttccttaattcagg

SEQ ID NO: 27027 - DNA, 25 bp, Artificial
  Probe
tgcctctgatgaataaagacaatga

SEQ ID NO: 27028 - DNA, 25 bp, Artificial
  Probe
ctgcctctgatgaataaagacaatg

SEQ ID NO: 27029 - DNA, 25 bp, Artificial
  Probe
caatgagtacagttccttaattcag

SEQ ID NO: 27030 - DNA, 25 bp, Artificial
  Probe
cctgcctctgatgaataaagacaat

SEQ ID NO: 27031 - DNA, 25 bp, Artificial
  Probe
catcagatgacaagaggtctatagc

SEQ ID NO: 27032 - DNA, 25 bp, Artificial
  Probe
gcctctgatgaataaagacaatgag

SEQ ID NO: 27033 - DNA, 25 bp, Artificial
  Probe
atcagatgacaagaggtctatagca

SEQ ID NO: 27034 - DNA, 25 bp, Artificial
  Probe
atgacaagaggtctatagcacatct

SEQ ID NO: 27035 - DNA, 25 bp, Artificial
  Probe
agatgacaagaggtctatagcacat

SEQ ID NO: 27036 - DNA, 25 bp, Artificial
  Probe
acatcagatgacaagaggtctatag

SEQ ID NO: 27037 - DNA, 25 bp, Artificial
  Probe
tgacaagaggtctatagcacatctc

SEQ ID NO: 27038 - DNA, 25 bp, Artificial
  Probe
tcagatgacaagaggtctatagcac

SEQ ID NO: 27039 - DNA, 25 bp, Artificial
  Probe
cctctgatgaataaagacaatgagt

SEQ ID NO: 27040 - DNA, 25 bp, Artificial
  Probe
cagatgacaagaggtctatagcaca

SEQ ID NO: 27041 - DNA, 25 bp, Artificial
  Probe
agtacagttccttaattcaggcttt

SEQ ID NO: 27042 - DNA, 25 bp, Artificial
  Probe
aaagacaatgagtacagttccttaa

SEQ ID NO: 27043 - DNA, 25 bp, Artificial
  Probe
aataaagacaatgagtacagttcct

SEQ ID NO: 27044 - DNA, 25 bp, Artificial
  Probe
ccctgcctctgatgaataaagacaa

SEQ ID NO: 27045 - DNA, 25 bp, Artificial
  Probe
aaccctgcctctgatgaataaagac

SEQ ID NO: 27046 - DNA, 25 bp, Artificial
  Probe
caaccctgcctctgatgaataaaga

SEQ ID NO: 27047 - DNA, 25 bp, Artificial
  Probe
ataaagacaatgagtacagttcctt

SEQ ID NO: 27048 - DNA, 25 bp, Artificial
  Probe
gaataaagacaatgagtacagttcc

SEQ ID NO: 27049 - DNA, 25 bp, Artificial
  Probe
taaagacaatgagtacagttcctta

SEQ ID NO: 27050 - DNA, 25 bp, Artificial
  Probe
gatgacaagaggtctatagcacatc

SEQ ID NO: 27051 - DNA, 25 bp, Artificial
  Probe
ccaaccctgcctctgatgaataaag

SEQ ID NO: 27052 - DNA, 25 bp, Artificial
  Probe
tttgtgactagcttactacggaacc

SEQ ID NO: 27053 - DNA, 25 bp, Artificial
  Probe
ccctttgatacaaatcagttggatt

SEQ ID NO: 27054 - DNA, 25 bp, Artificial
  Probe
tgaataaagacaatgagtacagttc

SEQ ID NO: 27055 - DNA, 25 bp, Artificial
  Probe
gatgaataaagacaatgagtacagt

SEQ ID NO: 27056 - DNA, 25 bp, Artificial
  Probe
tgatgaataaagacaatgagtacag

SEQ ID NO: 27057 - DNA, 25 bp, Artificial
  Probe
ctgatgaataaagacaatgagtaca

SEQ ID NO: 27058 - DNA, 25 bp, Artificial
  Probe
gtgactagcttactacggaaccgaa

SEQ ID NO: 27059 - DNA, 25 bp, Artificial
  Probe
gacaagaggtctatagcacatctct

SEQ ID NO: 27060 - DNA, 25 bp, Artificial
  Probe
accctgcctctgatgaataaagaca

SEQ ID NO: 27061 - DNA, 25 bp, Artificial
  Probe
ataggtctgtctgtggctttgagaa

SEQ ID NO: 27062 - DNA, 25 bp, Artificial
  Probe
atcaagtctatcaacacctggaatt

SEQ ID NO: 27063 - DNA, 25 bp, Artificial
  Probe
gatcaagtctatcaacacctggaat

SEQ ID NO: 27064 - DNA, 25 bp, Artificial
  Probe
taagatcaagtctatcaacacctgg

SEQ ID NO: 27065 - DNA, 25 bp, Artificial
  Probe
agatcaagtctatcaacacctggaa

SEQ ID NO: 27066 - DNA, 25 bp, Artificial
  Probe
aagatcaagtctatcaacacctgga

SEQ ID NO: 27067 - DNA, 25 bp, Artificial
  Probe
aactggaactaatgagactcaacat

SEQ ID NO: 27068 - DNA, 25 bp, Artificial
  Probe
actggaactaatgagactcaacata

SEQ ID NO: 27069 - DNA, 25 bp, Artificial
  Probe
ataagatcaagtctatcaacacctg

SEQ ID NO: 27070 - DNA, 25 bp, Artificial
  Probe
gcagtgtaaagatttcattaaccgt

SEQ ID NO: 27071 - DNA, 25 bp, Artificial
  Probe
gggcagtgtaaagatttcattaacc

SEQ ID NO: 27072 - DNA, 25 bp, Artificial
  Probe
tggaactaatgagactcaacataag

SEQ ID NO: 27073 - DNA, 25 bp, Artificial
  Probe
ctggaactaatgagactcaacataa

SEQ ID NO: 27074 - DNA, 25 bp, Artificial
  Probe
agggcagtgtaaagatttcattaac

SEQ ID NO: 27075 - DNA, 25 bp, Artificial
  Probe
aggagaaactggaactaatgagact

SEQ ID NO: 27076 - DNA, 25 bp, Artificial
  Probe
ggcagtgtaaagatttcattaaccg

SEQ ID NO: 27077 - DNA, 25 bp, Artificial
  Probe
ggaactaatgagactcaacataaga

SEQ ID NO: 27078 - DNA, 25 bp, Artificial
  Probe
aaagggcagtgtaaagatttcatta

SEQ ID NO: 27079 - DNA, 25 bp, Artificial
  Probe
agatttcattaaccgtctcacagaa

SEQ ID NO: 27080 - DNA, 25 bp, Artificial
  Probe
aagatttcattaaccgtctcacaga

SEQ ID NO: 27081 - DNA, 25 bp, Artificial
  Probe
aaagatttcattaaccgtctcacag

SEQ ID NO: 27082 - DNA, 25 bp, Artificial
  Probe
aagggcagtgtaaagatttcattaa

SEQ ID NO: 27083 - DNA, 25 bp, Artificial
  Probe
gttcaaatccaaacacatacatctg

SEQ ID NO: 27084 - DNA, 25 bp, Artificial
  Probe
cagtgtaaagatttcattaaccgtc

SEQ ID NO: 27085 - DNA, 25 bp, Artificial
  Probe
actaatgagactcaacataagacaa

SEQ ID NO: 27086 - DNA, 25 bp, Artificial
  Probe
aactaatgagactcaacataagaca

SEQ ID NO: 27087 - DNA, 25 bp, Artificial
  Probe
ttcattaaccgtctcacagaaacag

SEQ ID NO: 27088 - DNA, 25 bp, Artificial
  Probe
caagaggactaagagtttggttgag

SEQ ID NO: 27089 - DNA, 25 bp, Artificial
  Probe
ggagaaactggaactaatgagactc

SEQ ID NO: 27090 - DNA, 25 bp, Artificial
  Probe
taaagatttcattaaccgtctcaca

SEQ ID NO: 27091 - DNA, 25 bp, Artificial
  Probe
tgtaaagatttcattaaccgtctca

SEQ ID NO: 27092 - DNA, 25 bp, Artificial
  Probe
agtgtaaagatttcattaaccgtct

SEQ ID NO: 27093 - DNA, 25 bp, Artificial
  Probe
caagtctatcaacacctggaattct

SEQ ID NO: 27094 - DNA, 25 bp, Artificial
  Probe
tcaagtctatcaacacctggaattc

SEQ ID NO: 27095 - DNA, 25 bp, Artificial
  Probe
ttcaaatccaaacacatacatctgt

SEQ ID NO: 27096 - DNA, 25 bp, Artificial
  Probe
gtaaagatttcattaaccgtctcac

SEQ ID NO: 27097 - DNA, 25 bp, Artificial
  Probe
gtgtaaagatttcattaaccgtctc

SEQ ID NO: 27098 - DNA, 25 bp, Artificial
  Probe
aagtctatcaacacctggaattctt

SEQ ID NO: 27099 - DNA, 25 bp, Artificial
  Probe
agtctatcaacacctggaattcttc

SEQ ID NO: 27100 - DNA, 25 bp, Artificial
  Probe
caggagaaactggaactaatgagac

SEQ ID NO: 27101 - DNA, 25 bp, Artificial
  Probe
gaactaatgagactcaacataagac

SEQ ID NO: 27102 - DNA, 25 bp, Artificial
  Probe
aaactggaactaatgagactcaaca

SEQ ID NO: 27103 - DNA, 25 bp, Artificial
  Probe
gaaactggaactaatgagactcaac

SEQ ID NO: 27104 - DNA, 25 bp, Artificial
  Probe
agaaactggaactaatgagactcaa

SEQ ID NO: 27105 - DNA, 25 bp, Artificial
  Probe
aagaggactaagagtttggttgagg

SEQ ID NO: 27106 - DNA, 25 bp, Artificial
  Probe
gagaaactggaactaatgagactca

SEQ ID NO: 27107 - DNA, 25 bp, Artificial
  Probe
ccagatattacaactgtgtgtcctt

SEQ ID NO: 27108 - DNA, 25 bp, Artificial
  Probe
cagccagatattacaactgtgtgtc

SEQ ID NO: 27109 - DNA, 25 bp, Artificial
  Probe
cagaagagtttgagcagatagaaag

SEQ ID NO: 27110 - DNA, 25 bp, Artificial
  Probe
atagaaagcaggcatagacaagaag

SEQ ID NO: 27111 - DNA, 25 bp, Artificial
  Probe
gatagaaagcaggcatagacaagaa

SEQ ID NO: 27112 - DNA, 25 bp, Artificial
  Probe
agaagagtttgagcagatagaaagc

SEQ ID NO: 27113 - DNA, 25 bp, Artificial
  Probe
aagagtttgagcagatagaaagcag

SEQ ID NO: 27114 - DNA, 25 bp, Artificial
  Probe
gaagagtttgagcagatagaaagca

SEQ ID NO: 27115 - DNA, 25 bp, Artificial
  Probe
agatagaaagcaggcatagacaaga

SEQ ID NO: 27116 - DNA, 25 bp, Artificial
  Probe
cagatagaaagcaggcatagacaag

SEQ ID NO: 27117 - DNA, 25 bp, Artificial
  Probe
tcagaagagtttgagcagatagaaa

SEQ ID NO: 27118 - DNA, 25 bp, Artificial
  Probe
gccagatattacaactgtgtgtcct

SEQ ID NO: 27119 - DNA, 25 bp, Artificial
  Probe
agccagatattacaactgtgtgtcc

SEQ ID NO: 27120 - DNA, 25 bp, Artificial
  Probe
atattacaactgtgtgtcctttcct

SEQ ID NO: 27121 - DNA, 25 bp, Artificial
  Probe
gatattacaactgtgtgtcctttcc

SEQ ID NO: 27122 - DNA, 25 bp, Artificial
  Probe
tattacaactgtgtgtcctttcctg

SEQ ID NO: 27123 - DNA, 25 bp, Artificial
  Probe
agatattacaactgtgtgtcctttc

SEQ ID NO: 27124 - DNA, 25 bp, Artificial
  Probe
cagatattacaactgtgtgtccttt

SEQ ID NO: 27125 - DNA, 25 bp, Artificial
  Probe
tagaaagcaggcatagacaagaagg

SEQ ID NO: 27126 - DNA, 25 bp, Artificial
  Probe
tttgagcagatagaaagcaggcata

SEQ ID NO: 27127 - DNA, 25 bp, Artificial
  Probe
catccaccacagctctacatatcac

SEQ ID NO: 27128 - DNA, 25 bp, Artificial
  Probe
agagtttgagcagatagaaagcagg

SEQ ID NO: 27129 - DNA, 25 bp, Artificial
  Probe
ttgagcagatagaaagcaggcatag

SEQ ID NO: 27130 - DNA, 25 bp, Artificial
  Probe
gcagccagatattacaactgtgtgt

SEQ ID NO: 27131 - DNA, 25 bp, Artificial
  Probe
caggatgaagacgtttgaagaattg

SEQ ID NO: 27132 - DNA, 25 bp, Artificial
  Probe
gcagatagaaagcaggcatagacaa

SEQ ID NO: 27133 - DNA, 25 bp, Artificial
  Probe
gagcagatagaaagcaggcatagac

SEQ ID NO: 27134 - DNA, 25 bp, Artificial
  Probe
aacctacaaagcctctgtggataac

SEQ ID NO: 27135 - DNA, 25 bp, Artificial
  Probe
caacctacaaagcctctgtggataa

SEQ ID NO: 27136 - DNA, 25 bp, Artificial
  Probe
ccaggatgaagacgtttgaagaatt

SEQ ID NO: 27137 - DNA, 25 bp, Artificial
  Probe
tgagcagatagaaagcaggcataga

SEQ ID NO: 27138 - DNA, 25 bp, Artificial
  Probe
tacaaagcctctgtggataaccaaa

SEQ ID NO: 27139 - DNA, 25 bp, Artificial
  Probe
attacaactgtgtgtcctttcctgg

SEQ ID NO: 27140 - DNA, 25 bp, Artificial
  Probe
aggatgaagacgtttgaagaattgc

SEQ ID NO: 27141 - DNA, 25 bp, Artificial
  Probe
agcagatagaaagcaggcatagaca

SEQ ID NO: 27142 - DNA, 25 bp, Artificial
  Probe
tccaggatgaagacgtttgaagaat

SEQ ID NO: 27143 - DNA, 25 bp, Artificial
  Probe
gtttgagcagatagaaagcaggcat

SEQ ID NO: 27144 - DNA, 25 bp, Artificial
  Probe
ctacaaagcctctgtggataaccaa

SEQ ID NO: 27145 - DNA, 25 bp, Artificial
  Probe
atccaccacagctctacatatcacg

SEQ ID NO: 27146 - DNA, 25 bp, Artificial
  Probe
ggcagccagatattacaactgtgtg

SEQ ID NO: 27147 - DNA, 25 bp, Artificial
  Probe
ctccaggatgaagacgtttgaagaa

SEQ ID NO: 27148 - DNA, 25 bp, Artificial
  Probe
gcatccaccacagctctacatatca

SEQ ID NO: 27149 - DNA, 25 bp, Artificial
  Probe
acaacctacaaagcctctgtggata

SEQ ID NO: 27150 - DNA, 25 bp, Artificial
  Probe
tacaacctacaaagcctctgtggat

SEQ ID NO: 27151 - DNA, 25 bp, Artificial
  Probe
gagtttgagcagatagaaagcaggc

SEQ ID NO: 27152 - DNA, 25 bp, Artificial
  Probe
cgttgtttgaaattacagtgcctct

SEQ ID NO: 27153 - DNA, 25 bp, Artificial
  Probe
ctcagcaagacgttgtttgaaatta

SEQ ID NO: 27154 - DNA, 25 bp, Artificial
  Probe
tcagcaagacgttgtttgaaattac

SEQ ID NO: 27155 - DNA, 25 bp, Artificial
  Probe
caagacgttgtttgaaattacagtg

SEQ ID NO: 27156 - DNA, 25 bp, Artificial
  Probe
agcaagacgttgtttgaaattacag

SEQ ID NO: 27157 - DNA, 25 bp, Artificial
  Probe
aagacgttgtttgaaattacagtgc

SEQ ID NO: 27158 - DNA, 25 bp, Artificial
  Probe
gcaagacgttgtttgaaattacagt

SEQ ID NO: 27159 - DNA, 25 bp, Artificial
  Probe
cagcaagacgttgtttgaaattaca

SEQ ID NO: 27160 - DNA, 25 bp, Artificial
  Probe
acgttgtttgaaattacagtgcctc

SEQ ID NO: 27161 - DNA, 25 bp, Artificial
  Probe
gacgttgtttgaaattacagtgcct

SEQ ID NO: 27162 - DNA, 25 bp, Artificial
  Probe
agacgttgtttgaaattacagtgcc

SEQ ID NO: 27163 - DNA, 25 bp, Artificial
  Probe
cctcagcaagacgttgtttgaaatt

SEQ ID NO: 27164 - DNA, 25 bp, Artificial
  Probe
tacctcagcaagacgttgtttgaaa

SEQ ID NO: 27165 - DNA, 25 bp, Artificial
  Probe
ttacctcagcaagacgttgtttgaa

SEQ ID NO: 27166 - DNA, 25 bp, Artificial
  Probe
acctcagcaagacgttgtttgaaat

SEQ ID NO: 27167 - DNA, 25 bp, Artificial
  Probe
gttacctcagcaagacgttgtttga

SEQ ID NO: 27168 - DNA, 25 bp, Artificial
  Probe
ggttacctcagcaagacgttgtttg

SEQ ID NO: 27169 - DNA, 25 bp, Artificial
  Probe
aggttacctcagcaagacgttgttt

SEQ ID NO: 27170 - DNA, 25 bp, Artificial
  Probe
actttcttcacgcacatacatctat

SEQ ID NO: 27171 - DNA, 25 bp, Artificial
  Probe
gactttcttcacgcacatacatcta

SEQ ID NO: 27172 - DNA, 25 bp, Artificial
  Probe
ctttcttcacgcacatacatctatg

SEQ ID NO: 27173 - DNA, 25 bp, Artificial
  Probe
ctgactttcttcacgcacatacatc

SEQ ID NO: 27174 - DNA, 25 bp, Artificial
  Probe
tgactttcttcacgcacatacatct

SEQ ID NO: 27175 - DNA, 25 bp, Artificial
  Probe
tcacacatctgttactgactgcctg

SEQ ID NO: 27176 - DNA, 25 bp, Artificial
  Probe
gctgactttcttcacgcacatacat

SEQ ID NO: 27177 - DNA, 25 bp, Artificial
  Probe
ttactgactgcctgctgactttctt

SEQ ID NO: 27178 - DNA, 25 bp, Artificial
  Probe
tactgactgcctgctgactttcttc

SEQ ID NO: 27179 - DNA, 25 bp, Artificial
  Probe
gttactgactgcctgctgactttct

SEQ ID NO: 27180 - DNA, 25 bp, Artificial
  Probe
tgttactgactgcctgctgactttc

SEQ ID NO: 27181 - DNA, 25 bp, Artificial
  Probe
ctgttactgactgcctgctgacttt

SEQ ID NO: 27182 - DNA, 25 bp, Artificial
  Probe
gcacagtcacacatctgttactgac

SEQ ID NO: 27183 - DNA, 25 bp, Artificial
  Probe
ctgctgactttcttcacgcacatac

SEQ ID NO: 27184 - DNA, 25 bp, Artificial
  Probe
gtcacacatctgttactgactgcct

SEQ ID NO: 27185 - DNA, 25 bp, Artificial
  Probe
tgctgactttcttcacgcacataca

SEQ ID NO: 27186 - DNA, 25 bp, Artificial
  Probe
cgcacagtcacacatctgttactga

SEQ ID NO: 27187 - DNA, 25 bp, Artificial
  Probe
tcactaacttcttcagcaacagtaa

SEQ ID NO: 27188 - DNA, 25 bp, Artificial
  Probe
atcactaacttcttcagcaacagta

SEQ ID NO: 27189 - DNA, 25 bp, Artificial
  Probe
catcagcaacaacataagtgtcatc

SEQ ID NO: 27190 - DNA, 25 bp, Artificial
  Probe
gatcactaacttcttcagcaacagt

SEQ ID NO: 27191 - DNA, 25 bp, Artificial
  Probe
ccatcagcaacaacataagtgtcat

SEQ ID NO: 27192 - DNA, 25 bp, Artificial
  Probe
atcagcaacaacataagtgtcatcg

SEQ ID NO: 27193 - DNA, 25 bp, Artificial
  Probe
atctctttctacctcagactctttg

SEQ ID NO: 27194 - DNA, 25 bp, Artificial
  Probe
caacaacataagtgtcatcgaatcg

SEQ ID NO: 27195 - DNA, 25 bp, Artificial
  Probe
ctttctacctcagactctttgaagt

SEQ ID NO: 27196 - DNA, 25 bp, Artificial
  Probe
tctttctacctcagactctttgaag

SEQ ID NO: 27197 - DNA, 25 bp, Artificial
  Probe
ctctttctacctcagactctttgaa

SEQ ID NO: 27198 - DNA, 25 bp, Artificial
  Probe
tctctttctacctcagactctttga

SEQ ID NO: 27199 - DNA, 25 bp, Artificial
  Probe
ctaacttcttcagcaacagtaaagc

SEQ ID NO: 27200 - DNA, 25 bp, Artificial
  Probe
cactaacttcttcagcaacagtaaa

SEQ ID NO: 27201 - DNA, 25 bp, Artificial
  Probe
gcaacaacataagtgtcatcgaatc

SEQ ID NO: 27202 - DNA, 25 bp, Artificial
  Probe
ttgaaagcctagaaagtctgaagaa

SEQ ID NO: 27203 - DNA, 25 bp, Artificial
  Probe
attgaaagcctagaaagtctgaaga

SEQ ID NO: 27204 - DNA, 25 bp, Artificial
  Probe
cattgaaagcctagaaagtctgaag

SEQ ID NO: 27205 - DNA, 25 bp, Artificial
  Probe
gccagattatctctttctacctcag

SEQ ID NO: 27206 - DNA, 25 bp, Artificial
  Probe
actaacttcttcagcaacagtaaag

SEQ ID NO: 27207 - DNA, 25 bp, Artificial
  Probe
agcaacaacataagtgtcatcgaat

SEQ ID NO: 27208 - DNA, 25 bp, Artificial
  Probe
taacttcttcagcaacagtaaagca

SEQ ID NO: 27209 - DNA, 25 bp, Artificial
  Probe
agccagattatctctttctacctca

SEQ ID NO: 27210 - DNA, 25 bp, Artificial
  Probe
tgaaagcctagaaagtctgaagaac

SEQ ID NO: 27211 - DNA, 25 bp, Artificial
  Probe
tcattgaaagcctagaaagtctgaa

SEQ ID NO: 27212 - DNA, 25 bp, Artificial
  Probe
gaaagcctagaaagtctgaagaact

SEQ ID NO: 27213 - DNA, 25 bp, Artificial
  Probe
ctcattgaaagcctagaaagtctga

SEQ ID NO: 27214 - DNA, 25 bp, Artificial
  Probe
aaagcctagaaagtctgaagaacta

SEQ ID NO: 27215 - DNA, 25 bp, Artificial
  Probe
agcctagaaagtctgaagaactatt

SEQ ID NO: 27216 - DNA, 25 bp, Artificial
  Probe
aagcctagaaagtctgaagaactat

SEQ ID NO: 27217 - DNA, 25 bp, Artificial
  Probe
actcattgaaagcctagaaagtctg

SEQ ID NO: 27218 - DNA, 25 bp, Artificial
  Probe
cactcattgaaagcctagaaagtct

SEQ ID NO: 27219 - DNA, 25 bp, Artificial
  Probe
gagccagattatctctttctacctc

SEQ ID NO: 27220 - DNA, 25 bp, Artificial
  Probe
ccagattatctctttctacctcaga

SEQ ID NO: 27221 - DNA, 25 bp, Artificial
  Probe
acactcattgaaagcctagaaagtc

SEQ ID NO: 27222 - DNA, 25 bp, Artificial
  Probe
acttcttcagcaacagtaaagcaaa

SEQ ID NO: 27223 - DNA, 25 bp, Artificial
  Probe
aacttcttcagcaacagtaaagcaa

SEQ ID NO: 27224 - DNA, 25 bp, Artificial
  Probe
cacactcattgaaagcctagaaagt

SEQ ID NO: 27225 - DNA, 25 bp, Artificial
  Probe
tatctctttctacctcagactcttt

SEQ ID NO: 27226 - DNA, 25 bp, Artificial
  Probe
ttatctctttctacctcagactctt

SEQ ID NO: 27227 - DNA, 25 bp, Artificial
  Probe
cagcaacaacataagtgtcatcgaa

SEQ ID NO: 27228 - DNA, 25 bp, Artificial
  Probe
gcctagaaagtctgaagaactattt

SEQ ID NO: 27229 - DNA, 25 bp, Artificial
  Probe
attatctctttctacctcagactct

SEQ ID NO: 27230 - DNA, 25 bp, Artificial
  Probe
aacaacataagtgtcatcgaatcgc

SEQ ID NO: 27231 - DNA, 25 bp, Artificial
  Probe
gattatctctttctacctcagactc

SEQ ID NO: 27232 - DNA, 25 bp, Artificial
  Probe
ctgctggattgagattcatcttcat

SEQ ID NO: 27233 - DNA, 25 bp, Artificial
  Probe
ttgtctatgaactgacgaagatgtg

SEQ ID NO: 27234 - DNA, 25 bp, Artificial
  Probe
gttgtctatgaactgacgaagatgt

SEQ ID NO: 27235 - DNA, 25 bp, Artificial
  Probe
ctggattgagattcatcttcatgga

SEQ ID NO: 27236 - DNA, 25 bp, Artificial
  Probe
gattgagattcatcttcatggacca

SEQ ID NO: 27237 - DNA, 25 bp, Artificial
  Probe
tggattgagattcatcttcatggac

SEQ ID NO: 27238 - DNA, 25 bp, Artificial
  Probe
attgagattcatcttcatggaccac

SEQ ID NO: 27239 - DNA, 25 bp, Artificial
  Probe
ggattgagattcatcttcatggacc

SEQ ID NO: 27240 - DNA, 25 bp, Artificial
  Probe
tgctggattgagattcatcttcatg

SEQ ID NO: 27241 - DNA, 25 bp, Artificial
  Probe
ttgagattcatcttcatggaccact

SEQ ID NO: 27242 - DNA, 25 bp, Artificial
  Probe
gctggattgagattcatcttcatgg

SEQ ID NO: 27243 - DNA, 25 bp, Artificial
  Probe
caaccctatttcttcagtgtcttaa

SEQ ID NO: 27244 - DNA, 25 bp, Artificial
  Probe
cctgctggattgagattcatcttca

SEQ ID NO: 27245 - DNA, 25 bp, Artificial
  Probe
tgagattcatcttcatggaccactg

SEQ ID NO: 27246 - DNA, 25 bp, Artificial
  Probe
acaaccctatttcttcagtgtctta

SEQ ID NO: 27247 - DNA, 25 bp, Artificial
  Probe
ttcttcagtgtcttaagtcatgtgc

SEQ ID NO: 27248 - DNA, 25 bp, Artificial
  Probe
aagttgtctatgaactgacgaagat

SEQ ID NO: 27249 - DNA, 25 bp, Artificial
  Probe
tgtctatgaactgacgaagatgtgc

SEQ ID NO: 27250 - DNA, 25 bp, Artificial
  Probe
ttgaagttgtctatgaactgacgaa

SEQ ID NO: 27251 - DNA, 25 bp, Artificial
  Probe
agttgtctatgaactgacgaagatg

SEQ ID NO: 27252 - DNA, 25 bp, Artificial
  Probe
gaagttgtctatgaactgacgaaga

SEQ ID NO: 27253 - DNA, 25 bp, Artificial
  Probe
tgaagttgtctatgaactgacgaag

SEQ ID NO: 27254 - DNA, 25 bp, Artificial
  Probe
cttcagtgtcttaagtcatgtgctc

SEQ ID NO: 27255 - DNA, 25 bp, Artificial
  Probe
cacaaccctatttcttcagtgtctt

SEQ ID NO: 27256 - DNA, 25 bp, Artificial
  Probe
gttggacaaggtgctaactcagatg

SEQ ID NO: 27257 - DNA, 25 bp, Artificial
  Probe
tcttcagtgtcttaagtcatgtgct

SEQ ID NO: 27258 - DNA, 25 bp, Artificial
  Probe
ttcagtgtcttaagtcatgtgctca

SEQ ID NO: 27259 - DNA, 25 bp, Artificial
  Probe
cacggctttgaagttgtctatgaac

SEQ ID NO: 27260 - DNA, 25 bp, Artificial
  Probe
gagattcatcttcatggaccactgc

SEQ ID NO: 27261 - DNA, 25 bp, Artificial
  Probe
tcagtgtcttaagtcatgtgctcag

SEQ ID NO: 27262 - DNA, 25 bp, Artificial
  Probe
atttccacagaatagacgaaggcag

SEQ ID NO: 27263 - DNA, 25 bp, Artificial
  Probe
catttccacagaatagacgaaggca

SEQ ID NO: 27264 - DNA, 25 bp, Artificial
  Probe
accctatttcttcagtgtcttaagt

SEQ ID NO: 27265 - DNA, 25 bp, Artificial
  Probe
tttcttcagtgtcttaagtcatgtg

SEQ ID NO: 27266 - DNA, 25 bp, Artificial
  Probe
gtctatgaactgacgaagatgtgca

SEQ ID NO: 27267 - DNA, 25 bp, Artificial
  Probe
ccctatttcttcagtgtcttaagtc

SEQ ID NO: 27268 - DNA, 25 bp, Artificial
  Probe
ttggacaaggtgctaactcagatgg

SEQ ID NO: 27269 - DNA, 25 bp, Artificial
  Probe
ccacggctttgaagttgtctatgaa

SEQ ID NO: 27270 - DNA, 25 bp, Artificial
  Probe
gatgcacacgattcccatttctatc

SEQ ID NO: 27271 - DNA, 25 bp, Artificial
  Probe
ctttgaagttgtctatgaactgacg

SEQ ID NO: 27272 - DNA, 25 bp, Artificial
  Probe
tttgaagttgtctatgaactgacga

SEQ ID NO: 27273 - DNA, 25 bp, Artificial
  Probe
gctttgaagttgtctatgaactgac

SEQ ID NO: 27274 - DNA, 25 bp, Artificial
  Probe
aaccctatttcttcagtgtcttaag

SEQ ID NO: 27275 - DNA, 25 bp, Artificial
  Probe
ggttggacaaggtgctaactcagat

SEQ ID NO: 27276 - DNA, 25 bp, Artificial
  Probe
gatagaaaacaccagaaggcacatt

SEQ ID NO: 27277 - DNA, 25 bp, Artificial
  Probe
atgtggtactactatgtccttcgta

SEQ ID NO: 27278 - DNA, 25 bp, Artificial
  Probe
caatgtggtactactatgtccttcg

SEQ ID NO: 27279 - DNA, 25 bp, Artificial
  Probe
aatgtggtactactatgtccttcgt

SEQ ID NO: 27280 - DNA, 25 bp, Artificial
  Probe
gcaatgtggtactactatgtccttc

SEQ ID NO: 27281 - DNA, 25 bp, Artificial
  Probe
tgcaatgtggtactactatgtcctt

SEQ ID NO: 27282 - DNA, 25 bp, Artificial
  Probe
tggtactactatgtccttcgtagat

SEQ ID NO: 27283 - DNA, 25 bp, Artificial
  Probe
gtggtactactatgtccttcgtaga

SEQ ID NO: 27284 - DNA, 25 bp, Artificial
  Probe
actactatgtccttcgtagattgtt

SEQ ID NO: 27285 - DNA, 25 bp, Artificial
  Probe
tgtggtactactatgtccttcgtag

SEQ ID NO: 27286 - DNA, 25 bp, Artificial
  Probe
ggtactactatgtccttcgtagatt

SEQ ID NO: 27287 - DNA, 25 bp, Artificial
  Probe
ttgaacctgtcccattgtatctctc

SEQ ID NO: 27288 - DNA, 25 bp, Artificial
  Probe
tactactatgtccttcgtagattgt

SEQ ID NO: 27289 - DNA, 25 bp, Artificial
  Probe
tggtgtcattcagaaagttgtcaga

SEQ ID NO: 27290 - DNA, 25 bp, Artificial
  Probe
gtactactatgtccttcgtagattg

SEQ ID NO: 27291 - DNA, 25 bp, Artificial
  Probe
gtgtcattcagaaagttgtcagacc

SEQ ID NO: 27292 - DNA, 25 bp, Artificial
  Probe
ggtgtcattcagaaagttgtcagac

SEQ ID NO: 27293 - DNA, 25 bp, Artificial
  Probe
ccaaacccatgtgaatgtgaagaaa

SEQ ID NO: 27294 - DNA, 25 bp, Artificial
  Probe
ttcagtttagtgtcctgtgtgcttt

SEQ ID NO: 27295 - DNA, 25 bp, Artificial
  Probe
tttcagtttagtgtcctgtgtgctt

SEQ ID NO: 27296 - DNA, 25 bp, Artificial
  Probe
tgaacctgtcccattgtatctctcc

SEQ ID NO: 27297 - DNA, 25 bp, Artificial
  Probe
atggaagctgttggtgtaaggagaa

SEQ ID NO: 27298 - DNA, 25 bp, Artificial
  Probe
ctactatgtccttcgtagattgttt

SEQ ID NO: 27299 - DNA, 25 bp, Artificial
  Probe
ttttcaaactactgattctggggtc

SEQ ID NO: 27300 - DNA, 25 bp, Artificial
  Probe
ggagtcgttttcaaactactgattc

SEQ ID NO: 27301 - DNA, 25 bp, Artificial
  Probe
gtcgttttcaaactactgattctgg

SEQ ID NO: 27302 - DNA, 25 bp, Artificial
  Probe
agtcgttttcaaactactgattctg

SEQ ID NO: 27303 - DNA, 25 bp, Artificial
  Probe
aaacccatgtgaatgtgaagaaaag

SEQ ID NO: 27304 - DNA, 25 bp, Artificial
  Probe
ttgcaatgtggtactactatgtcct

SEQ ID NO: 27305 - DNA, 25 bp, Artificial
  Probe
gagtcgttttcaaactactgattct

SEQ ID NO: 27306 - DNA, 25 bp, Artificial
  Probe
tttcaaactactgattctggggtct

SEQ ID NO: 27307 - DNA, 25 bp, Artificial
  Probe
caaacccatgtgaatgtgaagaaaa

SEQ ID NO: 27308 - DNA, 25 bp, Artificial
  Probe
tactatgtccttcgtagattgtttt

SEQ ID NO: 27309 - DNA, 25 bp, Artificial
  Probe
gttttcaaactactgattctggggt

SEQ ID NO: 27310 - DNA, 25 bp, Artificial
  Probe
tcgttttcaaactactgattctggg

SEQ ID NO: 27311 - DNA, 25 bp, Artificial
  Probe
gggagtcgttttcaaactactgatt

SEQ ID NO: 27312 - DNA, 25 bp, Artificial
  Probe
cccaaacccatgtgaatgtgaagaa

SEQ ID NO: 27313 - DNA, 25 bp, Artificial
  Probe
tggaagctgttggtgtaaggagaag

SEQ ID NO: 27314 - DNA, 25 bp, Artificial
  Probe
catggaagctgttggtgtaaggaga

SEQ ID NO: 27315 - DNA, 25 bp, Artificial
  Probe
ttcaaactactgattctggggtctg

SEQ ID NO: 27316 - DNA, 25 bp, Artificial
  Probe
cgttttcaaactactgattctgggg

SEQ ID NO: 27317 - DNA, 25 bp, Artificial
  Probe
aacccatgtgaatgtgaagaaaagc

SEQ ID NO: 27318 - DNA, 25 bp, Artificial
  Probe
gtttgcaatgtggtactactatgtc

SEQ ID NO: 27319 - DNA, 25 bp, Artificial
  Probe
atcgtttgcaatgtggtactactat

SEQ ID NO: 27320 - DNA, 25 bp, Artificial
  Probe
tttgcaatgtggtactactatgtcc

SEQ ID NO: 27321 - DNA, 25 bp, Artificial
  Probe
ggggagtcgttttcaaactactgat

SEQ ID NO: 27322 - DNA, 25 bp, Artificial
  Probe
agaaggactctattatgtctacacc

SEQ ID NO: 27323 - DNA, 25 bp, Artificial
  Probe
gggcgaagaaaggatattataccat

SEQ ID NO: 27324 - DNA, 25 bp, Artificial
  Probe
agtgggcgaagaaaggatattatac

SEQ ID NO: 27325 - DNA, 25 bp, Artificial
  Probe
cagtgggcgaagaaaggatattata

SEQ ID NO: 27326 - DNA, 25 bp, Artificial
  Probe
ctattatgtctacacccaagtcacc

SEQ ID NO: 27327 - DNA, 25 bp, Artificial
  Probe
tctattatgtctacacccaagtcac

SEQ ID NO: 27328 - DNA, 25 bp, Artificial
  Probe
tattatgtctacacccaagtcacct

SEQ ID NO: 27329 - DNA, 25 bp, Artificial
  Probe
ctctattatgtctacacccaagtca

SEQ ID NO: 27330 - DNA, 25 bp, Artificial
  Probe
gagaaggactctattatgtctacac

SEQ ID NO: 27331 - DNA, 25 bp, Artificial
  Probe
gtgggcgaagaaaggatattatacc

SEQ ID NO: 27332 - DNA, 25 bp, Artificial
  Probe
ggagtatttgaattacaagcaggtg

SEQ ID NO: 27333 - DNA, 25 bp, Artificial
  Probe
tcagtgggcgaagaaaggatattat

SEQ ID NO: 27334 - DNA, 25 bp, Artificial
  Probe
actctattatgtctacacccaagtc

SEQ ID NO: 27335 - DNA, 25 bp, Artificial
  Probe
gaggagatgagaaggcaatttgaag

SEQ ID NO: 27336 - DNA, 25 bp, Artificial
  Probe
attatgtctacacccaagtcacctt

SEQ ID NO: 27337 - DNA, 25 bp, Artificial
  Probe
ggcgaagaaaggatattataccatg

SEQ ID NO: 27338 - DNA, 25 bp, Artificial
  Probe
cggagtatttgaattacaagcaggt

SEQ ID NO: 27339 - DNA, 25 bp, Artificial
  Probe
ttcagtgggcgaagaaaggatatta

SEQ ID NO: 27340 - DNA, 25 bp, Artificial
  Probe
ggactctattatgtctacacccaag

SEQ ID NO: 27341 - DNA, 25 bp, Artificial
  Probe
aggactctattatgtctacacccaa

SEQ ID NO: 27342 - DNA, 25 bp, Artificial
  Probe
aaggactctattatgtctacaccca

SEQ ID NO: 27343 - DNA, 25 bp, Artificial
  Probe
gaaggactctattatgtctacaccc

SEQ ID NO: 27344 - DNA, 25 bp, Artificial
  Probe
gagatgagaaggcaatttgaagacc

SEQ ID NO: 27345 - DNA, 25 bp, Artificial
  Probe
ggagatgagaaggcaatttgaagac

SEQ ID NO: 27346 - DNA, 25 bp, Artificial
  Probe
aggagatgagaaggcaatttgaaga

SEQ ID NO: 27347 - DNA, 25 bp, Artificial
  Probe
gagtatttgaattacaagcaggtgc

SEQ ID NO: 27348 - DNA, 25 bp, Artificial
  Probe
ttgggcggagtatttgaattacaag

SEQ ID NO: 27349 - DNA, 25 bp, Artificial
  Probe
cttgggcggagtatttgaattacaa

SEQ ID NO: 27350 - DNA, 25 bp, Artificial
  Probe
gactctattatgtctacacccaagt

SEQ ID NO: 27351 - DNA, 25 bp, Artificial
  Probe
ttatgtctacacccaagtcaccttc

SEQ ID NO: 27352 - DNA, 25 bp, Artificial
  Probe
tgaggagatgagaaggcaatttgaa

SEQ ID NO: 27353 - DNA, 25 bp, Artificial
  Probe
gcgaagaaaggatattataccatga

SEQ ID NO: 27354 - DNA, 25 bp, Artificial
  Probe
aactgtgaggagatgagaaggcaat

SEQ ID NO: 27355 - DNA, 25 bp, Artificial
  Probe
gtgggtcagagagaatcttactcag

SEQ ID NO: 27356 - DNA, 25 bp, Artificial
  Probe
cagtgggtcagagagaatcttactc

SEQ ID NO: 27357 - DNA, 25 bp, Artificial
  Probe
actgtgaggagatgagaaggcaatt

SEQ ID NO: 27358 - DNA, 25 bp, Artificial
  Probe
agtgggtcagagagaatcttactca

SEQ ID NO: 27359 - DNA, 25 bp, Artificial
  Probe
cacttgggcggagtatttgaattac

SEQ ID NO: 27360 - DNA, 25 bp, Artificial
  Probe
tcacttgggcggagtatttgaatta

SEQ ID NO: 27361 - DNA, 25 bp, Artificial
  Probe
cagtaatgcagcatctgttcttcag

SEQ ID NO: 27362 - DNA, 25 bp, Artificial
  Probe
ctgtgaggagatgagaaggcaattt

SEQ ID NO: 27363 - DNA, 25 bp, Artificial
  Probe
tatgtctacacccaagtcaccttct

SEQ ID NO: 27364 - DNA, 25 bp, Artificial
  Probe
gcggagtatttgaattacaagcagg

SEQ ID NO: 27365 - DNA, 25 bp, Artificial
  Probe
ggcggagtatttgaattacaagcag

SEQ ID NO: 27366 - DNA, 25 bp, Artificial
  Probe
tgggcgaagaaaggatattatacca

SEQ ID NO: 27367 - DNA, 25 bp, Artificial
  Probe
acctcgtcagtgtttctgttattaa

SEQ ID NO: 27368 - DNA, 25 bp, Artificial
  Probe
aacctcgtcagtgtttctgttatta

SEQ ID NO: 27369 - DNA, 25 bp, Artificial
  Probe
cctcgtcagtgtttctgttattaag

SEQ ID NO: 27370 - DNA, 25 bp, Artificial
  Probe
cgtcagtgtttctgttattaagaca

SEQ ID NO: 27371 - DNA, 25 bp, Artificial
  Probe
aacagaagatgtggaataaagttgt

SEQ ID NO: 27372 - DNA, 25 bp, Artificial
  Probe
tcgtcagtgtttctgttattaagac

SEQ ID NO: 27373 - DNA, 25 bp, Artificial
  Probe
ctcgtcagtgtttctgttattaaga

SEQ ID NO: 27374 - DNA, 25 bp, Artificial
  Probe
gaacctcgtcagtgtttctgttatt

SEQ ID NO: 27375 - DNA, 25 bp, Artificial
  Probe
acagaagatgtggaataaagttgta

SEQ ID NO: 27376 - DNA, 25 bp, Artificial
  Probe
actgacagtgactttcatgttattt

SEQ ID NO: 27377 - DNA, 25 bp, Artificial
  Probe
cagaagatgtggaataaagttgtat

SEQ ID NO: 27378 - DNA, 25 bp, Artificial
  Probe
taacagaagatgtggaataaagttg

SEQ ID NO: 27379 - DNA, 25 bp, Artificial
  Probe
ttgtaatataacagaagatgtggaa

SEQ ID NO: 27380 - DNA, 25 bp, Artificial
  Probe
tgtaatataacagaagatgtggaat

SEQ ID NO: 27381 - DNA, 25 bp, Artificial
  Probe
ataacagaagatgtggaataaagtt

SEQ ID NO: 27382 - DNA, 25 bp, Artificial
  Probe
gacagtgactttcatgttattttgc

SEQ ID NO: 27383 - DNA, 25 bp, Artificial
  Probe
ctttcatgttattttgcacgagtac

SEQ ID NO: 27384 - DNA, 25 bp, Artificial
  Probe
cgaacctcgtcagtgtttctgttat

SEQ ID NO: 27385 - DNA, 25 bp, Artificial
  Probe
tttgtaatataacagaagatgtgga

SEQ ID NO: 27386 - DNA, 25 bp, Artificial
  Probe
tgacagtgactttcatgttattttg

SEQ ID NO: 27387 - DNA, 25 bp, Artificial
  Probe
actttcatgttattttgcacgagta

SEQ ID NO: 27388 - DNA, 25 bp, Artificial
  Probe
gactttcatgttattttgcacgagt

SEQ ID NO: 27389 - DNA, 25 bp, Artificial
  Probe
tgactttcatgttattttgcacgag

SEQ ID NO: 27390 - DNA, 25 bp, Artificial
  Probe
ctgacagtgactttcatgttatttt

SEQ ID NO: 27391 - DNA, 25 bp, Artificial
  Probe
ttcatgttattttgcacgagtacag

SEQ ID NO: 27392 - DNA, 25 bp, Artificial
  Probe
tttcatgttattttgcacgagtaca

SEQ ID NO: 27393 - DNA, 25 bp, Artificial
  Probe
acagtgactttcatgttattttgca

SEQ ID NO: 27394 - DNA, 25 bp, Artificial
  Probe
catgttattttgcacgagtacagta

SEQ ID NO: 27395 - DNA, 25 bp, Artificial
  Probe
gaatgaagagagggaaagggctttt

SEQ ID NO: 27396 - DNA, 25 bp, Artificial
  Probe
ggaatgaagagagggaaagggcttt

SEQ ID NO: 27397 - DNA, 25 bp, Artificial
  Probe
tataacagaagatgtggaataaagt

SEQ ID NO: 27398 - DNA, 25 bp, Artificial
  Probe
atgttattttgcacgagtacagtaa

SEQ ID NO: 27399 - DNA, 25 bp, Artificial
  Probe
tcatgttattttgcacgagtacagt

SEQ ID NO: 27400 - DNA, 25 bp, Artificial
  Probe
cagtgactttcatgttattttgcac

SEQ ID NO: 27401 - DNA, 25 bp, Artificial
  Probe
gtgactttcatgttattttgcacga

SEQ ID NO: 27402 - DNA, 25 bp, Artificial
  Probe
agtgactttcatgttattttgcacg

SEQ ID NO: 27403 - DNA, 25 bp, Artificial
  Probe
tgttattttgcacgagtacagtaac

SEQ ID NO: 27404 - DNA, 25 bp, Artificial
  Probe
atttgtaatataacagaagatgtgg

SEQ ID NO: 27405 - DNA, 25 bp, Artificial
  Probe
catgaaccctcgggaatgaagagag

SEQ ID NO: 27406 - DNA, 25 bp, Artificial
  Probe
aatgaagagagggaaagggcttttc

SEQ ID NO: 27407 - DNA, 25 bp, Artificial
  Probe
tcgaacctcgtcagtgtttctgtta

SEQ ID NO: 27408 - DNA, 25 bp, Artificial
  Probe
tacactgacagtgactttcatgtta

SEQ ID NO: 27409 - DNA, 25 bp, Artificial
  Probe
acactgacagtgactttcatgttat

SEQ ID NO: 27410 - DNA, 25 bp, Artificial
  Probe
atacactgacagtgactttcatgtt

SEQ ID NO: 27411 - DNA, 25 bp, Artificial
  Probe
tatacactgacagtgactttcatgt

SEQ ID NO: 27412 - DNA, 25 bp, Artificial
  Probe
gtcaatctaccatgtgtaacttcag

SEQ ID NO: 27413 - DNA, 25 bp, Artificial
  Probe
caatctaccatgtgtaacttcagac

SEQ ID NO: 27414 - DNA, 25 bp, Artificial
  Probe
tcaatctaccatgtgtaacttcaga

SEQ ID NO: 27415 - DNA, 25 bp, Artificial
  Probe
agtcaatctaccatgtgtaacttca

SEQ ID NO: 27416 - DNA, 25 bp, Artificial
  Probe
acaagtcaatctaccatgtgtaact

SEQ ID NO: 27417 - DNA, 25 bp, Artificial
  Probe
gagacaagtcaatctaccatgtgta

SEQ ID NO: 27418 - DNA, 25 bp, Artificial
  Probe
atctaccatgtgtaacttcagacaa

SEQ ID NO: 27419 - DNA, 25 bp, Artificial
  Probe
aatctaccatgtgtaacttcagaca

SEQ ID NO: 27420 - DNA, 25 bp, Artificial
  Probe
gacaagtcaatctaccatgtgtaac

SEQ ID NO: 27421 - DNA, 25 bp, Artificial
  Probe
agacaagtcaatctaccatgtgtaa

SEQ ID NO: 27422 - DNA, 25 bp, Artificial
  Probe
ctgtggatagcttgcattaattgta

SEQ ID NO: 27423 - DNA, 25 bp, Artificial
  Probe
tgagacaagtcaatctaccatgtgt

SEQ ID NO: 27424 - DNA, 25 bp, Artificial
  Probe
atggtcatttcagatgtatggtgtt

SEQ ID NO: 27425 - DNA, 25 bp, Artificial
  Probe
tgtggatagcttgcattaattgtat

SEQ ID NO: 27426 - DNA, 25 bp, Artificial
  Probe
tggtcatttcagatgtatggtgttt

SEQ ID NO: 27427 - DNA, 25 bp, Artificial
  Probe
aatggtcatttcagatgtatggtgt

SEQ ID NO: 27428 - DNA, 25 bp, Artificial
  Probe
tctaccatgtgtaacttcagacaaa

SEQ ID NO: 27429 - DNA, 25 bp, Artificial
  Probe
ttgagacaagtcaatctaccatgtg

SEQ ID NO: 27430 - DNA, 25 bp, Artificial
  Probe
ctaccatgtgtaacttcagacaaag

SEQ ID NO: 27431 - DNA, 25 bp, Artificial
  Probe
caagtcaatctaccatgtgtaactt

SEQ ID NO: 27432 - DNA, 25 bp, Artificial
  Probe
gtggatagcttgcattaattgtata

SEQ ID NO: 27433 - DNA, 25 bp, Artificial
  Probe
aagtcaatctaccatgtgtaacttc

SEQ ID NO: 27434 - DNA, 25 bp, Artificial
  Probe
cagctacagtatcaaagtgcattac

SEQ ID NO: 27435 - DNA, 25 bp, Artificial
  Probe
acagctacagtatcaaagtgcatta

SEQ ID NO: 27436 - DNA, 25 bp, Artificial
  Probe
aaatggtcatttcagatgtatggtg

SEQ ID NO: 27437 - DNA, 25 bp, Artificial
  Probe
aacagctacagtatcaaagtgcatt

SEQ ID NO: 27438 - DNA, 25 bp, Artificial
  Probe
cttcagacaaagtggaactaagcct

SEQ ID NO: 27439 - DNA, 25 bp, Artificial
  Probe
atcaaagtgcattactgtgaagttt

SEQ ID NO: 27440 - DNA, 25 bp, Artificial
  Probe
gtatcaaagtgcattactgtgaagt

SEQ ID NO: 27441 - DNA, 25 bp, Artificial
  Probe
caacagctacagtatcaaagtgcat

SEQ ID NO: 27442 - DNA, 25 bp, Artificial
  Probe
tatcaaagtgcattactgtgaagtt

SEQ ID NO: 27443 - DNA, 25 bp, Artificial
  Probe
aaagctgtttattcttccttgtaag

SEQ ID NO: 27444 - DNA, 25 bp, Artificial
  Probe
ggtcatttcagatgtatggtgtttt

SEQ ID NO: 27445 - DNA, 25 bp, Artificial
  Probe
gctgtggatagcttgcattaattgt

SEQ ID NO: 27446 - DNA, 25 bp, Artificial
  Probe
attttggattttggttgtgttgaat

SEQ ID NO: 27447 - DNA, 25 bp, Artificial
  Probe
ttggattttggttgtgttgaatttt

SEQ ID NO: 27448 - DNA, 25 bp, Artificial
  Probe
tttggattttggttgtgttgaattt

SEQ ID NO: 27449 - DNA, 25 bp, Artificial
  Probe
ttttggattttggttgtgttgaatt

SEQ ID NO: 27450 - DNA, 25 bp, Artificial
  Probe
ttcagacaaagtggaactaagcctg

SEQ ID NO: 27451 - DNA, 25 bp, Artificial
  Probe
tgtaacttcagacaaagtggaacta

SEQ ID NO: 27452 - DNA, 25 bp, Artificial
  Probe
tggatagcttgcattaattgtatat

SEQ ID NO: 27453 - DNA, 25 bp, Artificial
  Probe
atgtgtaacttcagacaaagtggaa

SEQ ID NO: 27454 - DNA, 25 bp, Artificial
  Probe
agctacagtatcaaagtgcattact

SEQ ID NO: 27455 - DNA, 25 bp, Artificial
  Probe
agtatcaaagtgcattactgtgaag

SEQ ID NO: 27456 - DNA, 25 bp, Artificial
  Probe
taccatgtgtaacttcagacaaagt

SEQ ID NO: 27457 - DNA, 25 bp, Artificial
  Probe
cctagagcatattagcataaccaca

SEQ ID NO: 27458 - DNA, 25 bp, Artificial
  Probe
gcctagagcatattagcataaccac

SEQ ID NO: 27459 - DNA, 25 bp, Artificial
  Probe
ctagagcatattagcataaccacat

SEQ ID NO: 27460 - DNA, 25 bp, Artificial
  Probe
tagagcatattagcataaccacatt

SEQ ID NO: 27461 - DNA, 25 bp, Artificial
  Probe
atattagcataaccacatttcaggg

SEQ ID NO: 27462 - DNA, 25 bp, Artificial
  Probe
agcatattagcataaccacatttca

SEQ ID NO: 27463 - DNA, 25 bp, Artificial
  Probe
gtaatcagaagccagttgagaccaa

SEQ ID NO: 27464 - DNA, 25 bp, Artificial
  Probe
gcatattagcataaccacatttcag

SEQ ID NO: 27465 - DNA, 25 bp, Artificial
  Probe
agagcatattagcataaccacattt

SEQ ID NO: 27466 - DNA, 25 bp, Artificial
  Probe
actctgttactctgctttcactgta

SEQ ID NO: 27467 - DNA, 25 bp, Artificial
  Probe
gagcatattagcataaccacatttc

SEQ ID NO: 27468 - DNA, 25 bp, Artificial
  Probe
catattagcataaccacatttcagg

SEQ ID NO: 27469 - DNA, 25 bp, Artificial
  Probe
agtgcctagagcatattagcataac

SEQ ID NO: 27470 - DNA, 25 bp, Artificial
  Probe
cagtgcctagagcatattagcataa

SEQ ID NO: 27471 - DNA, 25 bp, Artificial
  Probe
gactctgttactctgctttcactgt

SEQ ID NO: 27472 - DNA, 25 bp, Artificial
  Probe
gtgcctagagcatattagcataacc

SEQ ID NO: 27473 - DNA, 25 bp, Artificial
  Probe
tctgttactctgctttcactgtaag

SEQ ID NO: 27474 - DNA, 25 bp, Artificial
  Probe
ctctgttactctgctttcactgtaa

SEQ ID NO: 27475 - DNA, 25 bp, Artificial
  Probe
tttcctctctttctccttaccctgt

SEQ ID NO: 27476 - DNA, 25 bp, Artificial
  Probe
tgcctagagcatattagcataacca

SEQ ID NO: 27477 - DNA, 25 bp, Artificial
  Probe
ccagtgcctagagcatattagcata

SEQ ID NO: 27478 - DNA, 25 bp, Artificial
  Probe
ctgcggtaacaacaggaatcatgta

SEQ ID NO: 27479 - DNA, 25 bp, Artificial
  Probe
ggactctgttactctgctttcactg

SEQ ID NO: 27480 - DNA, 25 bp, Artificial
  Probe
tgcggtaacaacaggaatcatgtac

SEQ ID NO: 27481 - DNA, 25 bp, Artificial
  Probe
ttcctctctttctccttaccctgtg

SEQ ID NO: 27482 - DNA, 25 bp, Artificial
  Probe
tattagcataaccacatttcagggg

SEQ ID NO: 27483 - DNA, 25 bp, Artificial
  Probe
cggtaacaacaggaatcatgtacag

SEQ ID NO: 27484 - DNA, 25 bp, Artificial
  Probe
ttttcctctctttctccttaccctg

SEQ ID NO: 27485 - DNA, 25 bp, Artificial
  Probe
gtaacaacaggaatcatgtacagcc

SEQ ID NO: 27486 - DNA, 25 bp, Artificial
  Probe
ggtaacaacaggaatcatgtacagc

SEQ ID NO: 27487 - DNA, 25 bp, Artificial
  Probe
attagcataaccacatttcagggga

SEQ ID NO: 27488 - DNA, 25 bp, Artificial
  Probe
taacaacaggaatcatgtacagcct

SEQ ID NO: 27489 - DNA, 25 bp, Artificial
  Probe
gggactctgttactctgctttcact

SEQ ID NO: 27490 - DNA, 25 bp, Artificial
  Probe
agggactctgttactctgctttcac

SEQ ID NO: 27491 - DNA, 25 bp, Artificial
  Probe
tttgggtaatcagaagccagttgag

SEQ ID NO: 27492 - DNA, 25 bp, Artificial
  Probe
gactgcggtaacaacaggaatcatg

SEQ ID NO: 27493 - DNA, 25 bp, Artificial
  Probe
tgactgcggtaacaacaggaatcat

SEQ ID NO: 27494 - DNA, 25 bp, Artificial
  Probe
ggtaatcagaagccagttgagacca

SEQ ID NO: 27495 - DNA, 25 bp, Artificial
  Probe
gtttgggtaatcagaagccagttga

SEQ ID NO: 27496 - DNA, 25 bp, Artificial
  Probe
ctttcgatggacatgtgacctatag

SEQ ID NO: 27497 - DNA, 25 bp, Artificial
  Probe
ttagcataaccacatttcaggggac

SEQ ID NO: 27498 - DNA, 25 bp, Artificial
  Probe
tctttcgatggacatgtgacctata

SEQ ID NO: 27499 - DNA, 25 bp, Artificial
  Probe
atagcccagtgcctagagcatatta

SEQ ID NO: 27500 - DNA, 25 bp, Artificial
  Probe
tatagcccagtgcctagagcatatt

SEQ ID NO: 27501 - DNA, 25 bp, Artificial
  Probe
cagggactctgttactctgctttca

SEQ ID NO: 27502 - DNA, 25 bp, Artificial
  Probe
tgaaagtgatttctccctcttcctg

SEQ ID NO: 27503 - DNA, 25 bp, Artificial
  Probe
gtgaaagtgatttctccctcttcct

SEQ ID NO: 27504 - DNA, 25 bp, Artificial
  Probe
gaggacacagaggaagagagaggag

SEQ ID NO: 27505 - DNA, 25 bp, Artificial
  Probe
agaggaagagagaggagtgaccttg

SEQ ID NO: 27506 - DNA, 25 bp, Artificial
  Probe
cagaggaagagagaggagtgacctt

SEQ ID NO: 27507 - DNA, 25 bp, Artificial
  Probe
gacacagaggaagagagaggagtga

SEQ ID NO: 27508 - DNA, 25 bp, Artificial
  Probe
ggtgaaagtgatttctccctcttcc

SEQ ID NO: 27509 - DNA, 25 bp, Artificial
  Probe
acacagaggaagagagaggagtgac

SEQ ID NO: 27510 - DNA, 25 bp, Artificial
  Probe
gaaagtgatttctccctcttcctgc

SEQ ID NO: 27511 - DNA, 25 bp, Artificial
  Probe
catccagggtgaaagtgatttctcc

SEQ ID NO: 27512 - DNA, 25 bp, Artificial
  Probe
ccatccagggtgaaagtgatttctc

SEQ ID NO: 27513 - DNA, 25 bp, Artificial
  Probe
gggtgaaagtgatttctccctcttc

SEQ ID NO: 27514 - DNA, 25 bp, Artificial
  Probe
aaagtgatttctccctcttcctgca

SEQ ID NO: 27515 - DNA, 25 bp, Artificial
  Probe
accatccagggtgaaagtgatttct

SEQ ID NO: 27516 - DNA, 25 bp, Artificial
  Probe
atccagggtgaaagtgatttctccc

SEQ ID NO: 27517 - DNA, 25 bp, Artificial
  Probe
aagtgatttctccctcttcctgcac

SEQ ID NO: 27518 - DNA, 25 bp, Artificial
  Probe
gtacagcagccttcaaggagatctg

SEQ ID NO: 27519 - DNA, 25 bp, Artificial
  Probe
gaaagggtaccatatcctcacctcc

SEQ ID NO: 27520 - DNA, 25 bp, Artificial
  Probe
ggaaagggtaccatatcctcacctc

SEQ ID NO: 27521 - DNA, 25 bp, Artificial
  Probe
ctgggaaagggtaccatatcctcac

SEQ ID NO: 27522 - DNA, 25 bp, Artificial
  Probe
gggaaagggtaccatatcctcacct

SEQ ID NO: 27523 - DNA, 25 bp, Artificial
  Probe
tgggaaagggtaccatatcctcacc

SEQ ID NO: 27524 - DNA, 25 bp, Artificial
  Probe
aaagggtaccatatcctcacctccc

SEQ ID NO: 27525 - DNA, 25 bp, Artificial
  Probe
actaacttaatcatgtgcttccaac

SEQ ID NO: 27526 - DNA, 25 bp, Artificial
  Probe
caactaacttaatcatgtgcttcca

SEQ ID NO: 27527 - DNA, 25 bp, Artificial
  Probe
aactaacttaatcatgtgcttccaa

SEQ ID NO: 27528 - DNA, 25 bp, Artificial
  Probe
ctaacttaatcatgtgcttccaaca

SEQ ID NO: 27529 - DNA, 25 bp, Artificial
  Probe
taacttaatcatgtgcttccaacac

SEQ ID NO: 27530 - DNA, 25 bp, Artificial
  Probe
catcaactcaactcccacatcatac

SEQ ID NO: 27531 - DNA, 25 bp, Artificial
  Probe
cctttggcaactaacttaatcatgt

SEQ ID NO: 27532 - DNA, 25 bp, Artificial
  Probe
ccctttggcaactaacttaatcatg

SEQ ID NO: 27533 - DNA, 25 bp, Artificial
  Probe
aatacccttgttaattgccctttgg

SEQ ID NO: 27534 - DNA, 25 bp, Artificial
  Probe
ctttggcaactaacttaatcatgtg

SEQ ID NO: 27535 - DNA, 25 bp, Artificial
  Probe
atcaactcaactcccacatcatacc

SEQ ID NO: 27536 - DNA, 25 bp, Artificial
  Probe
ccatcaactcaactcccacatcata

SEQ ID NO: 27537 - DNA, 25 bp, Artificial
  Probe
tttcccgtttaattaggcaataccc

SEQ ID NO: 27538 - DNA, 25 bp, Artificial
  Probe
gcaactaacttaatcatgtgcttcc

SEQ ID NO: 27539 - DNA, 25 bp, Artificial
  Probe
ggcaactaacttaatcatgtgcttc

SEQ ID NO: 27540 - DNA, 25 bp, Artificial
  Probe
tggcaactaacttaatcatgtgctt

SEQ ID NO: 27541 - DNA, 25 bp, Artificial
  Probe
ttggcaactaacttaatcatgtgct

SEQ ID NO: 27542 - DNA, 25 bp, Artificial
  Probe
cgtttaattaggcaatacccttgtt

SEQ ID NO: 27543 - DNA, 25 bp, Artificial
  Probe
ttacagggcaatattattcttgtgg

SEQ ID NO: 27544 - DNA, 25 bp, Artificial
  Probe
taagggacatgacttgggattcaaa

SEQ ID NO: 27545 - DNA, 25 bp, Artificial
  Probe
ttaagggacatgacttgggattcaa

SEQ ID NO: 27546 - DNA, 25 bp, Artificial
  Probe
tacagggcaatattattcttgtggc

SEQ ID NO: 27547 - DNA, 25 bp, Artificial
  Probe
cagggcaatattattcttgtggcaa

SEQ ID NO: 27548 - DNA, 25 bp, Artificial
  Probe
gagggagggacagaattgactagat

SEQ ID NO: 27549 - DNA, 25 bp, Artificial
  Probe
caatacccttgttaattgccctttg

SEQ ID NO: 27550 - DNA, 25 bp, Artificial
  Probe
catgacttgggattcaaagggattg

SEQ ID NO: 27551 - DNA, 25 bp, Artificial
  Probe
caactcaactcccacatcatacctg

SEQ ID NO: 27552 - DNA, 25 bp, Artificial
  Probe
tcaactcaactcccacatcatacct

SEQ ID NO: 27553 - DNA, 25 bp, Artificial
  Probe
ccgtttaattaggcaatacccttgt

SEQ ID NO: 27554 - DNA, 25 bp, Artificial
  Probe
agggagggacagaattgactagatc

SEQ ID NO: 27555 - DNA, 25 bp, Artificial
  Probe
acatgacttgggattcaaagggatt

SEQ ID NO: 27556 - DNA, 25 bp, Artificial
  Probe
acttacagggcaatattattcttgt

SEQ ID NO: 27557 - DNA, 25 bp, Artificial
  Probe
gttaagggacatgacttgggattca

SEQ ID NO: 27558 - DNA, 25 bp, Artificial
  Probe
aatagggaaaacttacagggcaata

SEQ ID NO: 27559 - DNA, 25 bp, Artificial
  Probe
taaatagggaaaacttacagggcaa

SEQ ID NO: 27560 - DNA, 25 bp, Artificial
  Probe
atagggaaaacttacagggcaatat

SEQ ID NO: 27561 - DNA, 25 bp, Artificial
  Probe
ctaaatagggaaaacttacagggca

SEQ ID NO: 27562 - DNA, 25 bp, Artificial
  Probe
actaaatagggaaaacttacagggc

SEQ ID NO: 27563 - DNA, 25 bp, Artificial
  Probe
aacacctattaaagacaaaactggc

SEQ ID NO: 27564 - DNA, 25 bp, Artificial
  Probe
aaatagggaaaacttacagggcaat

SEQ ID NO: 27565 - DNA, 25 bp, Artificial
  Probe
ccaacacactaaatagggaaaactt

SEQ ID NO: 27566 - DNA, 25 bp, Artificial
  Probe
cacctattaaagacaaaactggctg

SEQ ID NO: 27567 - DNA, 25 bp, Artificial
  Probe
cagtgacttttcttttcccgtttaa

SEQ ID NO: 27568 - DNA, 25 bp, Artificial
  Probe
cttacagggcaatattattcttgtg

SEQ ID NO: 27569 - DNA, 25 bp, Artificial
  Probe
acacctattaaagacaaaactggct

SEQ ID NO: 27570 - DNA, 25 bp, Artificial
  Probe
gacaccatgaaccttccttctacaa

SEQ ID NO: 27571 - DNA, 25 bp, Artificial
  Probe
cttctatccctgtcctagtcctaac

SEQ ID NO: 27572 - DNA, 25 bp, Artificial
  Probe
tcttctatccctgtcctagtcctaa

SEQ ID NO: 27573 - DNA, 25 bp, Artificial
  Probe
tatccctgtcctagtcctaactttc

SEQ ID NO: 27574 - DNA, 25 bp, Artificial
  Probe
ctatccctgtcctagtcctaacttt

SEQ ID NO: 27575 - DNA, 25 bp, Artificial
  Probe
gtcttctatccctgtcctagtccta

SEQ ID NO: 27576 - DNA, 25 bp, Artificial
  Probe
cagacaccatgaaccttccttctac

SEQ ID NO: 27577 - DNA, 25 bp, Artificial
  Probe
tctatccctgtcctagtcctaactt

SEQ ID NO: 27578 - DNA, 25 bp, Artificial
  Probe
ttctatccctgtcctagtcctaact

SEQ ID NO: 27579 - DNA, 25 bp, Artificial
  Probe
agacaccatgaaccttccttctaca

SEQ ID NO: 27580 - DNA, 25 bp, Artificial
  Probe
caccatgaaccttccttctacaaag

SEQ ID NO: 27581 - DNA, 25 bp, Artificial
  Probe
acaccatgaaccttccttctacaaa

SEQ ID NO: 27582 - DNA, 25 bp, Artificial
  Probe
ccagacaccatgaaccttccttcta

SEQ ID NO: 27583 - DNA, 25 bp, Artificial
  Probe
atccctgtcctagtcctaactttcc

SEQ ID NO: 27584 - DNA, 25 bp, Artificial
  Probe
cgtcttctatccctgtcctagtcct

SEQ ID NO: 27585 - DNA, 25 bp, Artificial
  Probe
ctccagacaccatgaaccttccttc

SEQ ID NO: 27586 - DNA, 25 bp, Artificial
  Probe
gaacccgtcttctatccctgtccta

SEQ ID NO: 27587 - DNA, 25 bp, Artificial
  Probe
tatttggaccactgcaccgaagata

SEQ ID NO: 27588 - DNA, 25 bp, Artificial
  Probe
tccagacaccatgaaccttccttct

SEQ ID NO: 27589 - DNA, 25 bp, Artificial
  Probe
aacccgtcttctatccctgtcctag

SEQ ID NO: 27590 - DNA, 25 bp, Artificial
  Probe
ctagtcctaactttcccctctcctc

SEQ ID NO: 27591 - DNA, 25 bp, Artificial
  Probe
cagagtctgaacccgtcttctatcc

SEQ ID NO: 27592 - DNA, 25 bp, Artificial
  Probe
ccagagtctgaacccgtcttctatc

SEQ ID NO: 27593 - DNA, 25 bp, Artificial
  Probe
cctaggcaataaagacgtttctctg

SEQ ID NO: 27594 - DNA, 25 bp, Artificial
  Probe
tccctgtcctagtcctaactttccc

SEQ ID NO: 27595 - DNA, 25 bp, Artificial
  Probe
gtcctagtcctaactttcccctctc

SEQ ID NO: 27596 - DNA, 25 bp, Artificial
  Probe
cctcagactccttgggtatttggac

SEQ ID NO: 27597 - DNA, 25 bp, Artificial
  Probe
gagtctgaacccgtcttctatccct

SEQ ID NO: 27598 - DNA, 25 bp, Artificial
  Probe
agagtctgaacccgtcttctatccc

SEQ ID NO: 27599 - DNA, 25 bp, Artificial
  Probe
ctcagactccttgggtatttggacc

SEQ ID NO: 27600 - DNA, 25 bp, Artificial
  Probe
tccagagtctgaacccgtcttctat

SEQ ID NO: 27601 - DNA, 25 bp, Artificial
  Probe
atccagagtctgaacccgtcttcta

SEQ ID NO: 27602 - DNA, 25 bp, Artificial
  Probe
ctgtcctagtcctaactttcccctc

SEQ ID NO: 27603 - DNA, 25 bp, Artificial
  Probe
ccgtcttctatccctgtcctagtcc

SEQ ID NO: 27604 - DNA, 25 bp, Artificial
  Probe
cccgtcttctatccctgtcctagtc

SEQ ID NO: 27605 - DNA, 25 bp, Artificial
  Probe
accatgaaccttccttctacaaagg

SEQ ID NO: 27606 - DNA, 25 bp, Artificial
  Probe
ccctaggcaataaagacgtttctct

SEQ ID NO: 27607 - DNA, 25 bp, Artificial
  Probe
tccctaggcaataaagacgtttctc

SEQ ID NO: 27608 - DNA, 25 bp, Artificial
  Probe
tctgaacccgtcttctatccctgtc

SEQ ID NO: 27609 - DNA, 25 bp, Artificial
  Probe
agtctgaacccgtcttctatccctg

SEQ ID NO: 27610 - DNA, 25 bp, Artificial
  Probe
tgtcctagtcctaactttcccctct

SEQ ID NO: 27611 - DNA, 25 bp, Artificial
  Probe
cactgcaccgaagataccatctctc

SEQ ID NO: 27612 - DNA, 25 bp, Artificial
  Probe
gactccttgggtatttggaccactg

SEQ ID NO: 27613 - DNA, 25 bp, Artificial
  Probe
cagactccttgggtatttggaccac

SEQ ID NO: 27614 - DNA, 25 bp, Artificial
  Probe
gtccctaggcaataaagacgtttct

SEQ ID NO: 27615 - DNA, 25 bp, Artificial
  Probe
ccacactaagcagttactaagagat

SEQ ID NO: 27616 - DNA, 25 bp, Artificial
  Probe
ctctctccagatattcagtgtgatg

SEQ ID NO: 27617 - DNA, 25 bp, Artificial
  Probe
ctctccagatattcagtgtgatgac

SEQ ID NO: 27618 - DNA, 25 bp, Artificial
  Probe
tctctccagatattcagtgtgatga

SEQ ID NO: 27619 - DNA, 25 bp, Artificial
  Probe
actctctccagatattcagtgtgat

SEQ ID NO: 27620 - DNA, 25 bp, Artificial
  Probe
tctccagatattcagtgtgatgacc

SEQ ID NO: 27621 - DNA, 25 bp, Artificial
  Probe
gccacactaagcagttactaagaga

SEQ ID NO: 27622 - DNA, 25 bp, Artificial
  Probe
atatcactgtgaccatctccaattc

SEQ ID NO: 27623 - DNA, 25 bp, Artificial
  Probe
atcctgttcagaatgtggaagaatg

SEQ ID NO: 27624 - DNA, 25 bp, Artificial
  Probe
gattataagagtgaagcatctgaca

SEQ ID NO: 27625 - DNA, 25 bp, Artificial
  Probe
gttgttcgtagccacacattatctc

SEQ ID NO: 27626 - DNA, 25 bp, Artificial
  Probe
cacactaagcagttactaagagata

SEQ ID NO: 27627 - DNA, 25 bp, Artificial
  Probe
gatcctgttcagaatgtggaagaat

SEQ ID NO: 27628 - DNA, 25 bp, Artificial
  Probe
cccatcacattacgagatttacaga

SEQ ID NO: 27629 - DNA, 25 bp, Artificial
  Probe
ctgtgaccatctccaattccaatga

SEQ ID NO: 27630 - DNA, 25 bp, Artificial
  Probe
attataagagtgaagcatctgacaa

SEQ ID NO: 27631 - DNA, 25 bp, Artificial
  Probe
ataagagtgaagcatctgacaaaga

SEQ ID NO: 27632 - DNA, 25 bp, Artificial
  Probe
tgttcagaatgtggaagaatggcat

SEQ ID NO: 27633 - DNA, 25 bp, Artificial
  Probe
taggacaatctagcaacatcaaaca

SEQ ID NO: 27634 - DNA, 25 bp, Artificial
  Probe
ctctctttaggacaatctagcaaca

SEQ ID NO: 27635 - DNA, 25 bp, Artificial
  Probe
actctctttaggacaatctagcaac

SEQ ID NO: 27636 - DNA, 25 bp, Artificial
  Probe
ggacaatctagcaacatcaaacaaa

SEQ ID NO: 27637 - DNA, 25 bp, Artificial
  Probe
tctttaggacaatctagcaacatca

SEQ ID NO: 27638 - DNA, 25 bp, Artificial
  Probe
acaatctagcaacatcaaacaaact

SEQ ID NO: 27639 - DNA, 25 bp, Artificial
  Probe
ccatcacattacgagatttacagat

SEQ ID NO: 27640 - DNA, 25 bp, Artificial
  Probe
aagccactctctccagatattcagt

SEQ ID NO: 27641 - DNA, 25 bp, Artificial
  Probe
gacaatctagcaacatcaaacaaac

SEQ ID NO: 27642 - DNA, 25 bp, Artificial
  Probe
tctctttaggacaatctagcaacat

SEQ ID NO: 27643 - DNA, 25 bp, Artificial
  Probe
tgttgttcgtagccacacattatct

SEQ ID NO: 27644 - DNA, 25 bp, Artificial
  Probe
caatctagcaacatcaaacaaactg

SEQ ID NO: 27645 - DNA, 25 bp, Artificial
  Probe
taagagtgaagcatctgacaaagac

SEQ ID NO: 27646 - DNA, 25 bp, Artificial
  Probe
ttaggacaatctagcaacatcaaac

SEQ ID NO: 27647 - DNA, 25 bp, Artificial
  Probe
ctctttaggacaatctagcaacatc

SEQ ID NO: 27648 - DNA, 25 bp, Artificial
  Probe
cactgtgaccatctccaattccaat

SEQ ID NO: 27649 - DNA, 25 bp, Artificial
  Probe
tatcactgtgaccatctccaattcc

SEQ ID NO: 27650 - DNA, 25 bp, Artificial
  Probe
aggacaatctagcaacatcaaacaa

SEQ ID NO: 27651 - DNA, 25 bp, Artificial
  Probe
ctttaggacaatctagcaacatcaa

SEQ ID NO: 27652 - DNA, 25 bp, Artificial
  Probe
tgtgaccatctccaattccaatgag

SEQ ID NO: 27653 - DNA, 25 bp, Artificial
  Probe
actgtgaccatctccaattccaatg

SEQ ID NO: 27654 - DNA, 25 bp, Artificial
  Probe
gatatcactgtgaccatctccaatt

SEQ ID NO: 27655 - DNA, 25 bp, Artificial
  Probe
ctccaattccaatgagaagtctttg

SEQ ID NO: 27656 - DNA, 25 bp, Artificial
  Probe
catgaacatcagcctgactaactct

SEQ ID NO: 27657 - DNA, 25 bp, Artificial
  Probe
ctctaatcattggcagcagtatcgg

SEQ ID NO: 27658 - DNA, 25 bp, Artificial
  Probe
cctctaatcattggcagcagtatcg

SEQ ID NO: 27659 - DNA, 25 bp, Artificial
  Probe
tataagagtgaagcatctgacaaag

SEQ ID NO: 27660 - DNA, 25 bp, Artificial
  Probe
ggaagtctaatgtctggagattact

SEQ ID NO: 27661 - DNA, 25 bp, Artificial
  Probe
aagtctaatgtctggagattactcg

SEQ ID NO: 27662 - DNA, 25 bp, Artificial
  Probe
gtctaatgtctggagattactcgtg

SEQ ID NO: 27663 - DNA, 25 bp, Artificial
  Probe
agtctaatgtctggagattactcgt

SEQ ID NO: 27664 - DNA, 25 bp, Artificial
  Probe
gaagtctaatgtctggagattactc

SEQ ID NO: 27665 - DNA, 25 bp, Artificial
  Probe
tctaatgtctggagattactcgtgc

SEQ ID NO: 27666 - DNA, 25 bp, Artificial
  Probe
aagtcataatacagggtagaaaggc

SEQ ID NO: 27667 - DNA, 25 bp, Artificial
  Probe
cgatgaaagatggatgcgatataag

SEQ ID NO: 27668 - DNA, 25 bp, Artificial
  Probe
agtgttgtttcttatctgtttccca

SEQ ID NO: 27669 - DNA, 25 bp, Artificial
  Probe
aagtgttgtttcttatctgtttccc

SEQ ID NO: 27670 - DNA, 25 bp, Artificial
  Probe
gggaagtctaatgtctggagattac

SEQ ID NO: 27671 - DNA, 25 bp, Artificial
  Probe
agggaagtctaatgtctggagatta

SEQ ID NO: 27672 - DNA, 25 bp, Artificial
  Probe
gatgaaagatggatgcgatataaga

SEQ ID NO: 27673 - DNA, 25 bp, Artificial
  Probe
ctaatgtctggagattactcgtgcc

SEQ ID NO: 27674 - DNA, 25 bp, Artificial
  Probe
tgaaagatggatgcgatataagaaa

SEQ ID NO: 27675 - DNA, 25 bp, Artificial
  Probe
aaagatggatgcgatataagaaaga

SEQ ID NO: 27676 - DNA, 25 bp, Artificial
  Probe
atgaaagatggatgcgatataagaa

SEQ ID NO: 27677 - DNA, 25 bp, Artificial
  Probe
aaagtgttgtttcttatctgtttcc

SEQ ID NO: 27678 - DNA, 25 bp, Artificial
  Probe
aagatggatgcgatataagaaagat

SEQ ID NO: 27679 - DNA, 25 bp, Artificial
  Probe
gaaagatggatgcgatataagaaag

SEQ ID NO: 27680 - DNA, 25 bp, Artificial
  Probe
gtgttgtttcttatctgtttcccag

SEQ ID NO: 27681 - DNA, 25 bp, Artificial
  Probe
gctaagtcataatacagggtagaaa

SEQ ID NO: 27682 - DNA, 25 bp, Artificial
  Probe
gatggatgcgatataagaaagatca

SEQ ID NO: 27683 - DNA, 25 bp, Artificial
  Probe
agatggatgcgatataagaaagatc

SEQ ID NO: 27684 - DNA, 25 bp, Artificial
  Probe
tttcccagctaagtcataatacagg

SEQ ID NO: 27685 - DNA, 25 bp, Artificial
  Probe
ccagctaagtcataatacagggtag

SEQ ID NO: 27686 - DNA, 25 bp, Artificial
  Probe
cagggaagtctaatgtctggagatt

SEQ ID NO: 27687 - DNA, 25 bp, Artificial
  Probe
tataaagacacagaagtcaggtccc

SEQ ID NO: 27688 - DNA, 25 bp, Artificial
  Probe
tggatgcgatataagaaagatcatt

SEQ ID NO: 27689 - DNA, 25 bp, Artificial
  Probe
gtttcccagctaagtcataatacag

SEQ ID NO: 27690 - DNA, 25 bp, Artificial
  Probe
cagctaagtcataatacagggtaga

SEQ ID NO: 27691 - DNA, 25 bp, Artificial
  Probe
tgttgtttcttatctgtttcccagc

SEQ ID NO: 27692 - DNA, 25 bp, Artificial
  Probe
atggatgcgatataagaaagatcat

SEQ ID NO: 27693 - DNA, 25 bp, Artificial
  Probe
ttataaagacacagaagtcaggtcc

SEQ ID NO: 27694 - DNA, 25 bp, Artificial
  Probe
taagtcataatacagggtagaaagg

SEQ ID NO: 27695 - DNA, 25 bp, Artificial
  Probe
agctaagtcataatacagggtagaa

SEQ ID NO: 27696 - DNA, 25 bp, Artificial
  Probe
tgtttcccagctaagtcataataca

SEQ ID NO: 27697 - DNA, 25 bp, Artificial
  Probe
tttcttatctgtttcccagctaagt

SEQ ID NO: 27698 - DNA, 25 bp, Artificial
  Probe
tgtttcttatctgtttcccagctaa

SEQ ID NO: 27699 - DNA, 25 bp, Artificial
  Probe
ttgtttcttatctgtttcccagcta

SEQ ID NO: 27700 - DNA, 25 bp, Artificial
  Probe
atctgtttcccagctaagtcataat

SEQ ID NO: 27701 - DNA, 25 bp, Artificial
  Probe
cttatctgtttcccagctaagtcat

SEQ ID NO: 27702 - DNA, 25 bp, Artificial
  Probe
ttcttatctgtttcccagctaagtc

SEQ ID NO: 27703 - DNA, 25 bp, Artificial
  Probe
gtttcttatctgtttcccagctaag

SEQ ID NO: 27704 - DNA, 25 bp, Artificial
  Probe
ctgtttcccagctaagtcataatac

SEQ ID NO: 27705 - DNA, 25 bp, Artificial
  Probe
atatccaatccgaccaacttcaacc

SEQ ID NO: 27706 - DNA, 25 bp, Artificial
  Probe
tgtccaaggaaatgtagaatcagtt

SEQ ID NO: 27707 - DNA, 25 bp, Artificial
  Probe
ttgtccaaggaaatgtagaatcagt

SEQ ID NO: 27708 - DNA, 25 bp, Artificial
  Probe
gttgtccaaggaaatgtagaatcag

SEQ ID NO: 27709 - DNA, 25 bp, Artificial
  Probe
gtgttgtccaaggaaatgtagaatc

SEQ ID NO: 27710 - DNA, 25 bp, Artificial
  Probe
tgttgtccaaggaaatgtagaatca

SEQ ID NO: 27711 - DNA, 25 bp, Artificial
  Probe
agtgttgtccaaggaaatgtagaat

SEQ ID NO: 27712 - DNA, 25 bp, Artificial
  Probe
aatgatatccaatccgaccaacttc

SEQ ID NO: 27713 - DNA, 25 bp, Artificial
  Probe
gtccaaggaaatgtagaatcagttt

SEQ ID NO: 27714 - DNA, 25 bp, Artificial
  Probe
ccaaggaaatgtagaatcagtttgt

SEQ ID NO: 27715 - DNA, 25 bp, Artificial
  Probe
cagtgttgtccaaggaaatgtagaa

SEQ ID NO: 27716 - DNA, 25 bp, Artificial
  Probe
tccaaggaaatgtagaatcagtttg

SEQ ID NO: 27717 - DNA, 25 bp, Artificial
  Probe
gatatccaatccgaccaacttcaac

SEQ ID NO: 27718 - DNA, 25 bp, Artificial
  Probe
atgatatccaatccgaccaacttca

SEQ ID NO: 27719 - DNA, 25 bp, Artificial
  Probe
aggaaatgtagaatcagtttgtaga

SEQ ID NO: 27720 - DNA, 25 bp, Artificial
  Probe
tgatatccaatccgaccaacttcaa

SEQ ID NO: 27721 - DNA, 25 bp, Artificial
  Probe
tatccaatccgaccaacttcaacca

SEQ ID NO: 27722 - DNA, 25 bp, Artificial
  Probe
ccagtgttgtccaaggaaatgtaga

SEQ ID NO: 27723 - DNA, 25 bp, Artificial
  Probe
aaggaaatgtagaatcagtttgtag

SEQ ID NO: 27724 - DNA, 25 bp, Artificial
  Probe
caaggaaatgtagaatcagtttgta

SEQ ID NO: 27725 - DNA, 25 bp, Artificial
  Probe
aaatgatatccaatccgaccaactt

SEQ ID NO: 27726 - DNA, 25 bp, Artificial
  Probe
ggaaatgtagaatcagtttgtagat

SEQ ID NO: 27727 - DNA, 25 bp, Artificial
  Probe
tccagtgttgtccaaggaaatgtag

SEQ ID NO: 27728 - DNA, 25 bp, Artificial
  Probe
ctccagtgttgtccaaggaaatgta

SEQ ID NO: 27729 - DNA, 25 bp, Artificial
  Probe
gatccaaaatgatatccaatccgac

SEQ ID NO: 27730 - DNA, 25 bp, Artificial
  Probe
agatccaaaatgatatccaatccga

SEQ ID NO: 27731 - DNA, 25 bp, Artificial
  Probe
gagatccaaaatgatatccaatccg

SEQ ID NO: 27732 - DNA, 25 bp, Artificial
  Probe
aaaatgatatccaatccgaccaact

SEQ ID NO: 27733 - DNA, 25 bp, Artificial
  Probe
caaaatgatatccaatccgaccaac

SEQ ID NO: 27734 - DNA, 25 bp, Artificial
  Probe
atccaaaatgatatccaatccgacc

SEQ ID NO: 27735 - DNA, 25 bp, Artificial
  Probe
tgagatccaaaatgatatccaatcc

SEQ ID NO: 27736 - DNA, 25 bp, Artificial
  Probe
ccaaaatgatatccaatccgaccaa

SEQ ID NO: 27737 - DNA, 25 bp, Artificial
  Probe
gaactgagatccaaaatgatatcca

SEQ ID NO: 27738 - DNA, 25 bp, Artificial
  Probe
aatgtagaatcagtttgtagataga

SEQ ID NO: 27739 - DNA, 25 bp, Artificial
  Probe
aactgagatccaaaatgatatccaa

SEQ ID NO: 27740 - DNA, 25 bp, Artificial
  Probe
tccaaaatgatatccaatccgacca

SEQ ID NO: 27741 - DNA, 25 bp, Artificial
  Probe
actgagatccaaaatgatatccaat

SEQ ID NO: 27742 - DNA, 25 bp, Artificial
  Probe
cggaactgagatccaaaatgatatc

SEQ ID NO: 27743 - DNA, 25 bp, Artificial
  Probe
ggaactgagatccaaaatgatatcc

SEQ ID NO: 27744 - DNA, 25 bp, Artificial
  Probe
atgtagaatcagtttgtagatagat

SEQ ID NO: 27745 - DNA, 25 bp, Artificial
  Probe
ctgagatccaaaatgatatccaatc

SEQ ID NO: 27746 - DNA, 25 bp, Artificial
  Probe
aggattttgacaaagagcctgactc

SEQ ID NO: 27747 - DNA, 25 bp, Artificial
  Probe
catccaggaacaagccctatgtctc

SEQ ID NO: 27748 - DNA, 25 bp, Artificial
  Probe
ccggaactgagatccaaaatgatat

SEQ ID NO: 27749 - DNA, 25 bp, Artificial
  Probe
cctccagtgttgtccaaggaaatgt

SEQ ID NO: 27750 - DNA, 25 bp, Artificial
  Probe
cctttcctgaacttgtaaatgtgaa

SEQ ID NO: 27751 - DNA, 25 bp, Artificial
  Probe
aagcctttcctgaacttgtaaatgt

SEQ ID NO: 27752 - DNA, 25 bp, Artificial
  Probe
aaagcctttcctgaacttgtaaatg

SEQ ID NO: 27753 - DNA, 25 bp, Artificial
  Probe
gcctttcctgaacttgtaaatgtga

SEQ ID NO: 27754 - DNA, 25 bp, Artificial
  Probe
agcctttcctgaacttgtaaatgtg

SEQ ID NO: 27755 - DNA, 25 bp, Artificial
  Probe
tttcctgaacttgtaaatgtgaaag

SEQ ID NO: 27756 - DNA, 25 bp, Artificial
  Probe
ctttcctgaacttgtaaatgtgaaa

SEQ ID NO: 27757 - DNA, 25 bp, Artificial
  Probe
ttcctgaacttgtaaatgtgaaagt

SEQ ID NO: 27758 - DNA, 25 bp, Artificial
  Probe
aaaagcctttcctgaacttgtaaat

SEQ ID NO: 27759 - DNA, 25 bp, Artificial
  Probe
tcctgaacttgtaaatgtgaaagta

SEQ ID NO: 27760 - DNA, 25 bp, Artificial
  Probe
cctgaacttgtaaatgtgaaagtaa

SEQ ID NO: 27761 - DNA, 25 bp, Artificial
  Probe
ctgaacttgtaaatgtgaaagtaaa

SEQ ID NO: 27762 - DNA, 25 bp, Artificial
  Probe
tgaacttgtaaatgtgaaagtaaaa

SEQ ID NO: 27763 - DNA, 25 bp, Artificial
  Probe
aggaagattcagagagagacaacag

SEQ ID NO: 27764 - DNA, 25 bp, Artificial
  Probe
gaggaagattcagagagagacaaca

SEQ ID NO: 27765 - DNA, 25 bp, Artificial
  Probe
cttctctactatctcactcagcacc

SEQ ID NO: 27766 - DNA, 25 bp, Artificial
  Probe
ccttctctactatctcactcagcac

SEQ ID NO: 27767 - DNA, 25 bp, Artificial
  Probe
tagtgacagtgacagtgactcagat

SEQ ID NO: 27768 - DNA, 25 bp, Artificial
  Probe
ggaggaagattcagagagagacaac

SEQ ID NO: 27769 - DNA, 25 bp, Artificial
  Probe
ggaagattcagagagagacaacagg

SEQ ID NO: 27770 - DNA, 25 bp, Artificial
  Probe
tggaggaagattcagagagagacaa

SEQ ID NO: 27771 - DNA, 25 bp, Artificial
  Probe
gtgccttctctactatctcactcag

SEQ ID NO: 27772 - DNA, 25 bp, Artificial
  Probe
ctagtgacagtgacagtgactcaga

SEQ ID NO: 27773 - DNA, 25 bp, Artificial
  Probe
tctagtgacagtgacagtgactcag

SEQ ID NO: 27774 - DNA, 25 bp, Artificial
  Probe
ggagtttcaaattctaaagccagag

SEQ ID NO: 27775 - DNA, 25 bp, Artificial
  Probe
tttcaaattctaaagccagagcaag

SEQ ID NO: 27776 - DNA, 25 bp, Artificial
  Probe
gccttctctactatctcactcagca

SEQ ID NO: 27777 - DNA, 25 bp, Artificial
  Probe
tgccttctctactatctcactcagc

SEQ ID NO: 27778 - DNA, 25 bp, Artificial
  Probe
gtttcaaattctaaagccagagcaa

SEQ ID NO: 27779 - DNA, 25 bp, Artificial
  Probe
aaacttcactatttccctgagatgt

SEQ ID NO: 27780 - DNA, 25 bp, Artificial
  Probe
acaaacttcactatttccctgagat

SEQ ID NO: 27781 - DNA, 25 bp, Artificial
  Probe
aagacaaacttcactatttccctga

SEQ ID NO: 27782 - DNA, 25 bp, Artificial
  Probe
gagtttcaaattctaaagccagagc

SEQ ID NO: 27783 - DNA, 25 bp, Artificial
  Probe
caaacttcactatttccctgagatg

SEQ ID NO: 27784 - DNA, 25 bp, Artificial
  Probe
gacaaacttcactatttccctgaga

SEQ ID NO: 27785 - DNA, 25 bp, Artificial
  Probe
agacaaacttcactatttccctgag

SEQ ID NO: 27786 - DNA, 25 bp, Artificial
  Probe
cagggctttctttgtactaatgatg

SEQ ID NO: 27787 - DNA, 25 bp, Artificial
  Probe
ctgtagtgccttctctactatctca

SEQ ID NO: 27788 - DNA, 25 bp, Artificial
  Probe
agtttcaaattctaaagccagagca

SEQ ID NO: 27789 - DNA, 25 bp, Artificial
  Probe
tgtagtgccttctctactatctcac

SEQ ID NO: 27790 - DNA, 25 bp, Artificial
  Probe
gggagtttcaaattctaaagccaga

SEQ ID NO: 27791 - DNA, 25 bp, Artificial
  Probe
ttgggatagcagtggatggattaaa

SEQ ID NO: 27792 - DNA, 25 bp, Artificial
  Probe
ttctagtgacagtgacagtgactca

SEQ ID NO: 27793 - DNA, 25 bp, Artificial
  Probe
cctgtagtgccttctctactatctc

SEQ ID NO: 27794 - DNA, 25 bp, Artificial
  Probe
ctggaggaagattcagagagagaca

SEQ ID NO: 27795 - DNA, 25 bp, Artificial
  Probe
agggctttctttgtactaatgatgc

SEQ ID NO: 27796 - DNA, 25 bp, Artificial
  Probe
cttcactatttccctgagatgtgta

SEQ ID NO: 27797 - DNA, 25 bp, Artificial
  Probe
aacttcactatttccctgagatgtg

SEQ ID NO: 27798 - DNA, 25 bp, Artificial
  Probe
acagggctttctttgtactaatgat

SEQ ID NO: 27799 - DNA, 25 bp, Artificial
  Probe
gaagattcagagagagacaacaggg

SEQ ID NO: 27800 - DNA, 25 bp, Artificial
  Probe
agtgacagtgacagtgactcagatc

SEQ ID NO: 27801 - DNA, 25 bp, Artificial
  Probe
gttgggatagcagtggatggattaa

SEQ ID NO: 27802 - DNA, 25 bp, Artificial
  Probe
gagttaaatccagctttgaggtttc

SEQ ID NO: 27803 - DNA, 25 bp, Artificial
  Probe
cacagggctttctttgtactaatga

SEQ ID NO: 27804 - DNA, 25 bp, Artificial
  Probe
tgagttaaatccagctttgaggttt

SEQ ID NO: 27805 - DNA, 25 bp, Artificial
  Probe
acacagggctttctttgtactaatg

SEQ ID NO: 27806 - DNA, 25 bp, Artificial
  Probe
cacacagggctttctttgtactaat

SEQ ID NO: 27807 - DNA, 25 bp, Artificial
  Probe
acttcactatttccctgagatgtgt

SEQ ID NO: 27808 - DNA, 25 bp, Artificial
  Probe
atgccttggaaagtattctcagagt

SEQ ID NO: 27809 - DNA, 25 bp, Artificial
  Probe
cattcatgccttggaaagtattctc

SEQ ID NO: 27810 - DNA, 25 bp, Artificial
  Probe
attcatgccttggaaagtattctca

SEQ ID NO: 27811 - DNA, 25 bp, Artificial
  Probe
ttcaacaccatagacatgagctagg

SEQ ID NO: 27812 - DNA, 25 bp, Artificial
  Probe
ttcatgccttggaaagtattctcag

SEQ ID NO: 27813 - DNA, 25 bp, Artificial
  Probe
catgccttggaaagtattctcagag

SEQ ID NO: 27814 - DNA, 25 bp, Artificial
  Probe
tgccttggaaagtattctcagagtc

SEQ ID NO: 27815 - DNA, 25 bp, Artificial
  Probe
gatgaagtcgtacagcagcagtaag

SEQ ID NO: 27816 - DNA, 25 bp, Artificial
  Probe
tcatgccttggaaagtattctcaga

SEQ ID NO: 27817 - DNA, 25 bp, Artificial
  Probe
agatgaagtcgtacagcagcagtaa

SEQ ID NO: 27818 - DNA, 25 bp, Artificial
  Probe
ttggaaagtattctcagagtcccag

SEQ ID NO: 27819 - DNA, 25 bp, Artificial
  Probe
cttggaaagtattctcagagtccca

SEQ ID NO: 27820 - DNA, 25 bp, Artificial
  Probe
ctaaagtggaccagttggaaggtat

SEQ ID NO: 27821 - DNA, 25 bp, Artificial
  Probe
aaagtattctcagagtcccagcttc

SEQ ID NO: 27822 - DNA, 25 bp, Artificial
  Probe
gaaagtattctcagagtcccagctt

SEQ ID NO: 27823 - DNA, 25 bp, Artificial
  Probe
ccattcatgccttggaaagtattct

SEQ ID NO: 27824 - DNA, 25 bp, Artificial
  Probe
agatcaacaatcattatctgccttt

SEQ ID NO: 27825 - DNA, 25 bp, Artificial
  Probe
ccttggaaagtattctcagagtccc

SEQ ID NO: 27826 - DNA, 25 bp, Artificial
  Probe
gatttgaagaaggaaaaggaagaca

SEQ ID NO: 27827 - DNA, 25 bp, Artificial
  Probe
agatttgaagaaggaaaaggaagac

SEQ ID NO: 27828 - DNA, 25 bp, Artificial
  Probe
taaagtggaccagttggaaggtatg

SEQ ID NO: 27829 - DNA, 25 bp, Artificial
  Probe
gagaagatttgaagaaggaaaagga

SEQ ID NO: 27830 - DNA, 25 bp, Artificial
  Probe
tttgaagaaggaaaaggaagacaag

SEQ ID NO: 27831 - DNA, 25 bp, Artificial
  Probe
cccattcatgccttggaaagtattc

SEQ ID NO: 27832 - DNA, 25 bp, Artificial
  Probe
aagatttgaagaaggaaaaggaaga

SEQ ID NO: 27833 - DNA, 25 bp, Artificial
  Probe
agaagatttgaagaaggaaaaggaa

SEQ ID NO: 27834 - DNA, 25 bp, Artificial
  Probe
cagatgaagtcgtacagcagcagta

SEQ ID NO: 27835 - DNA, 25 bp, Artificial
  Probe
gccttggaaagtattctcagagtcc

SEQ ID NO: 27836 - DNA, 25 bp, Artificial
  Probe
atttgaagaaggaaaaggaagacaa

SEQ ID NO: 27837 - DNA, 25 bp, Artificial
  Probe
ttgaagaaggaaaaggaagacaagg

SEQ ID NO: 27838 - DNA, 25 bp, Artificial
  Probe
gaagatttgaagaaggaaaaggaag

SEQ ID NO: 27839 - DNA, 25 bp, Artificial
  Probe
tctaaagtggaccagttggaaggta

SEQ ID NO: 27840 - DNA, 25 bp, Artificial
  Probe
atgaagtcgtacagcagcagtaagg

SEQ ID NO: 27841 - DNA, 25 bp, Artificial
  Probe
acccattcatgccttggaaagtatt

SEQ ID NO: 27842 - DNA, 25 bp, Artificial
  Probe
gatcaacaatcattatctgcctttt

SEQ ID NO: 27843 - DNA, 25 bp, Artificial
  Probe
aagtattctcagagtcccagcttcc

SEQ ID NO: 27844 - DNA, 25 bp, Artificial
  Probe
ttctaaagtggaccagttggaaggt

SEQ ID NO: 27845 - DNA, 25 bp, Artificial
  Probe
ttttgctgctagtgatgaaaaccat

SEQ ID NO: 27846 - DNA, 25 bp, Artificial
  Probe
cacccattcatgccttggaaagtat

SEQ ID NO: 27847 - DNA, 25 bp, Artificial
  Probe
tcaacaccatagacatgagctaggg

SEQ ID NO: 27848 - DNA, 25 bp, Artificial
  Probe
tggaaagtattctcagagtcccagc

SEQ ID NO: 27849 - DNA, 25 bp, Artificial
  Probe
cttctaaagtggaccagttggaagg

SEQ ID NO: 27850 - DNA, 25 bp, Artificial
  Probe
ggaaagtattctcagagtcccagct

SEQ ID NO: 27851 - DNA, 25 bp, Artificial
  Probe
ggcttctaaagtggaccagttggaa

SEQ ID NO: 27852 - DNA, 25 bp, Artificial
  Probe
tacagcagcagtaaggactcctctc

SEQ ID NO: 27853 - DNA, 25 bp, Artificial
  Probe
ttactcactgggcagaaataaagac

SEQ ID NO: 27854 - DNA, 25 bp, Artificial
  Probe
tttactcactgggcagaaataaaga

SEQ ID NO: 27855 - DNA, 25 bp, Artificial
  Probe
cctttactcactgggcagaaataaa

SEQ ID NO: 27856 - DNA, 25 bp, Artificial
  Probe
tactcactgggcagaaataaagaca

SEQ ID NO: 27857 - DNA, 25 bp, Artificial
  Probe
acctttactcactgggcagaaataa

SEQ ID NO: 27858 - DNA, 25 bp, Artificial
  Probe
cacctttactcactgggcagaaata

SEQ ID NO: 27859 - DNA, 25 bp, Artificial
  Probe
aagagtccacaaccatccttctgag

SEQ ID NO: 27860 - DNA, 25 bp, Artificial
  Probe
aaataaagacagtgtcagaggcttc

SEQ ID NO: 27861 - DNA, 25 bp, Artificial
  Probe
gaaataaagacagtgtcagaggctt

SEQ ID NO: 27862 - DNA, 25 bp, Artificial
  Probe
ctaaacttccacaacaaaccctcca

SEQ ID NO: 27863 - DNA, 25 bp, Artificial
  Probe
ctcgttatcaccaccgaatgtctag

SEQ ID NO: 27864 - DNA, 25 bp, Artificial
  Probe
agaaataaagacagtgtcagaggct

SEQ ID NO: 27865 - DNA, 25 bp, Artificial
  Probe
cagaaataaagacagtgtcagaggc

SEQ ID NO: 27866 - DNA, 25 bp, Artificial
  Probe
gcagaaataaagacagtgtcagagg

SEQ ID NO: 27867 - DNA, 25 bp, Artificial
  Probe
ggcagaaataaagacagtgtcagag

SEQ ID NO: 27868 - DNA, 25 bp, Artificial
  Probe
ttatcaccaccgaatgtctagcgag

SEQ ID NO: 27869 - DNA, 25 bp, Artificial
  Probe
taaacttccacaacaaaccctccac

SEQ ID NO: 27870 - DNA, 25 bp, Artificial
  Probe
actcactgggcagaaataaagacag

SEQ ID NO: 27871 - DNA, 25 bp, Artificial
  Probe
gaatgtctagcgagcctaaacttcc

SEQ ID NO: 27872 - DNA, 25 bp, Artificial
  Probe
cctaaacttccacaacaaaccctcc

SEQ ID NO: 27873 - DNA, 25 bp, Artificial
  Probe
gttatcaccaccgaatgtctagcga

SEQ ID NO: 27874 - DNA, 25 bp, Artificial
  Probe
aataaagacagtgtcagaggcttcc

SEQ ID NO: 27875 - DNA, 25 bp, Artificial
  Probe
cgaatgtctagcgagcctaaacttc

SEQ ID NO: 27876 - DNA, 25 bp, Artificial
  Probe
gggcagaaataaagacagtgtcaga

SEQ ID NO: 27877 - DNA, 25 bp, Artificial
  Probe
aatgtctagcgagcctaaacttcca

SEQ ID NO: 27878 - DNA, 25 bp, Artificial
  Probe
tcacctttactcactgggcagaaat

SEQ ID NO: 27879 - DNA, 25 bp, Artificial
  Probe
tgggcagaaataaagacagtgtcag

SEQ ID NO: 27880 - DNA, 25 bp, Artificial
  Probe
ctgggcagaaataaagacagtgtca

SEQ ID NO: 27881 - DNA, 25 bp, Artificial
  Probe
gcctaaacttccacaacaaaccctc

SEQ ID NO: 27882 - DNA, 25 bp, Artificial
  Probe
gagcctaaacttccacaacaaaccc

SEQ ID NO: 27883 - DNA, 25 bp, Artificial
  Probe
ctttactcactgggcagaaataaag

SEQ ID NO: 27884 - DNA, 25 bp, Artificial
  Probe
ataaagacagtgtcagaggcttcca

SEQ ID NO: 27885 - DNA, 25 bp, Artificial
  Probe
cgagcctaaacttccacaacaaacc

SEQ ID NO: 27886 - DNA, 25 bp, Artificial
  Probe
tagcgagcctaaacttccacaacaa

SEQ ID NO: 27887 - DNA, 25 bp, Artificial
  Probe
atgtctagcgagcctaaacttccac

SEQ ID NO: 27888 - DNA, 25 bp, Artificial
  Probe
agcctaaacttccacaacaaaccct

SEQ ID NO: 27889 - DNA, 25 bp, Artificial
  Probe
gaagagtccacaaccatccttctga

SEQ ID NO: 27890 - DNA, 25 bp, Artificial
  Probe
tcgttatcaccaccgaatgtctagc

SEQ ID NO: 27891 - DNA, 25 bp, Artificial
  Probe
gctcgttatcaccaccgaatgtcta

SEQ ID NO: 27892 - DNA, 25 bp, Artificial
  Probe
tctagcgagcctaaacttccacaac

SEQ ID NO: 27893 - DNA, 25 bp, Artificial
  Probe
gtctagcgagcctaaacttccacaa

SEQ ID NO: 27894 - DNA, 25 bp, Artificial
  Probe
gtcacctttactcactgggcagaaa

SEQ ID NO: 27895 - DNA, 25 bp, Artificial
  Probe
ccgaatgtctagcgagcctaaactt

SEQ ID NO: 27896 - DNA, 25 bp, Artificial
  Probe
ctagcgagcctaaacttccacaaca

SEQ ID NO: 27897 - DNA, 25 bp, Artificial
  Probe
aaacttccacaacaaaccctccaca

SEQ ID NO: 27898 - DNA, 25 bp, Artificial
  Probe
acttgattgaacggagaagaagatt

SEQ ID NO: 27899 - DNA, 25 bp, Artificial
  Probe
aacttgattgaacggagaagaagat

SEQ ID NO: 27900 - DNA, 25 bp, Artificial
  Probe
caacttgattgaacggagaagaaga

SEQ ID NO: 27901 - DNA, 25 bp, Artificial
  Probe
acaacttgattgaacggagaagaag

SEQ ID NO: 27902 - DNA, 25 bp, Artificial
  Probe
cacaacttgattgaacggagaagaa

SEQ ID NO: 27903 - DNA, 25 bp, Artificial
  Probe
tcacaacttgattgaacggagaaga

SEQ ID NO: 27904 - DNA, 25 bp, Artificial
  Probe
cttgattgaacggagaagaagattt

SEQ ID NO: 27905 - DNA, 25 bp, Artificial
  Probe
ttgaacggagaagaagatttaacat

SEQ ID NO: 27906 - DNA, 25 bp, Artificial
  Probe
attgaacggagaagaagatttaaca

SEQ ID NO: 27907 - DNA, 25 bp, Artificial
  Probe
ttgattgaacggagaagaagattta

SEQ ID NO: 27908 - DNA, 25 bp, Artificial
  Probe
tgattgaacggagaagaagatttaa

SEQ ID NO: 27909 - DNA, 25 bp, Artificial
  Probe
gattgaacggagaagaagatttaac

SEQ ID NO: 27910 - DNA, 25 bp, Artificial
  Probe
aatgaccgcattaaggaactaggta

SEQ ID NO: 27911 - DNA, 25 bp, Artificial
  Probe
cgcattaaggaactaggtactttga

SEQ ID NO: 27912 - DNA, 25 bp, Artificial
  Probe
tgaacggagaagaagatttaacata

SEQ ID NO: 27913 - DNA, 25 bp, Artificial
  Probe
gaccgcattaaggaactaggtactt

SEQ ID NO: 27914 - DNA, 25 bp, Artificial
  Probe
atgaccgcattaaggaactaggtac

SEQ ID NO: 27915 - DNA, 25 bp, Artificial
  Probe
gcattaaggaactaggtactttgat

SEQ ID NO: 27916 - DNA, 25 bp, Artificial
  Probe
ccgcattaaggaactaggtactttg

SEQ ID NO: 27917 - DNA, 25 bp, Artificial
  Probe
atcacaacttgattgaacggagaag

SEQ ID NO: 27918 - DNA, 25 bp, Artificial
  Probe
gaacggagaagaagatttaacataa

SEQ ID NO: 27919 - DNA, 25 bp, Artificial
  Probe
aacataaatgaccgcattaaggaac

SEQ ID NO: 27920 - DNA, 25 bp, Artificial
  Probe
tgaccgcattaaggaactaggtact

SEQ ID NO: 27921 - DNA, 25 bp, Artificial
  Probe
taaatgaccgcattaaggaactagg

SEQ ID NO: 27922 - DNA, 25 bp, Artificial
  Probe
cataaatgaccgcattaaggaacta

SEQ ID NO: 27923 - DNA, 25 bp, Artificial
  Probe
acataaatgaccgcattaaggaact

SEQ ID NO: 27924 - DNA, 25 bp, Artificial
  Probe
ataaatgaccgcattaaggaactag

SEQ ID NO: 27925 - DNA, 25 bp, Artificial
  Probe
taacataaatgaccgcattaaggaa

SEQ ID NO: 27926 - DNA, 25 bp, Artificial
  Probe
ttaacataaatgaccgcattaagga

SEQ ID NO: 27927 - DNA, 25 bp, Artificial
  Probe
accgcattaaggaactaggtacttt

SEQ ID NO: 27928 - DNA, 25 bp, Artificial
  Probe
agaagatttaacataaatgaccgca

SEQ ID NO: 27929 - DNA, 25 bp, Artificial
  Probe
tttaacataaatgaccgcattaagg

SEQ ID NO: 27930 - DNA, 25 bp, Artificial
  Probe
ctaggtactttgattcccaagtcaa

SEQ ID NO: 27931 - DNA, 25 bp, Artificial
  Probe
aactaggtactttgattcccaagtc

SEQ ID NO: 27932 - DNA, 25 bp, Artificial
  Probe
gaactaggtactttgattcccaagt

SEQ ID NO: 27933 - DNA, 25 bp, Artificial
  Probe
aacggagaagaagatttaacataaa

SEQ ID NO: 27934 - DNA, 25 bp, Artificial
  Probe
gaagatttaacataaatgaccgcat

SEQ ID NO: 27935 - DNA, 25 bp, Artificial
  Probe
aagaagatttaacataaatgaccgc

SEQ ID NO: 27936 - DNA, 25 bp, Artificial
  Probe
actaggtactttgattcccaagtca

SEQ ID NO: 27937 - DNA, 25 bp, Artificial
  Probe
aaatgaccgcattaaggaactaggt

SEQ ID NO: 27938 - DNA, 25 bp, Artificial
  Probe
aagatttaacataaatgaccgcatt

SEQ ID NO: 27939 - DNA, 25 bp, Artificial
  Probe
cacagagtctgaagcaagagcattg

SEQ ID NO: 27940 - DNA, 25 bp, Artificial
  Probe
cattaaggaactaggtactttgatt

SEQ ID NO: 27941 - DNA, 25 bp, Artificial
  Probe
attaaggaactaggtactttgattc

SEQ ID NO: 27942 - DNA, 25 bp, Artificial
  Probe
agatttaacataaatgaccgcatta

SEQ ID NO: 27943 - DNA, 25 bp, Artificial
  Probe
tacatcggagacataccttcaccta

SEQ ID NO: 27944 - DNA, 25 bp, Artificial
  Probe
ctacatcggagacataccttcacct

SEQ ID NO: 27945 - DNA, 25 bp, Artificial
  Probe
acatcggagacataccttcacctac

SEQ ID NO: 27946 - DNA, 25 bp, Artificial
  Probe
agacataccttcacctaccagtcag

SEQ ID NO: 27947 - DNA, 25 bp, Artificial
  Probe
gagacataccttcacctaccagtca

SEQ ID NO: 27948 - DNA, 25 bp, Artificial
  Probe
cataccttcacctaccagtcaggat

SEQ ID NO: 27949 - DNA, 25 bp, Artificial
  Probe
ataccttcacctaccagtcaggatc

SEQ ID NO: 27950 - DNA, 25 bp, Artificial
  Probe
catcggagacataccttcacctacc

SEQ ID NO: 27951 - DNA, 25 bp, Artificial
  Probe
cctacatcggagacataccttcacc

SEQ ID NO: 27952 - DNA, 25 bp, Artificial
  Probe
ggagacataccttcacctaccagtc

SEQ ID NO: 27953 - DNA, 25 bp, Artificial
  Probe
atcggagacataccttcacctacca

SEQ ID NO: 27954 - DNA, 25 bp, Artificial
  Probe
ctgcctacatcggagacataccttc

SEQ ID NO: 27955 - DNA, 25 bp, Artificial
  Probe
gacataccttcacctaccagtcagg

SEQ ID NO: 27956 - DNA, 25 bp, Artificial
  Probe
gcctacatcggagacataccttcac

SEQ ID NO: 27957 - DNA, 25 bp, Artificial
  Probe
acataccttcacctaccagtcagga

SEQ ID NO: 27958 - DNA, 25 bp, Artificial
  Probe
tcggagacataccttcacctaccag

SEQ ID NO: 27959 - DNA, 25 bp, Artificial
  Probe
tgcctacatcggagacataccttca

SEQ ID NO: 27960 - DNA, 25 bp, Artificial
  Probe
cggagacataccttcacctaccagt

SEQ ID NO: 27961 - DNA, 25 bp, Artificial
  Probe
gaagctgcctacatcggagacatac

SEQ ID NO: 27962 - DNA, 25 bp, Artificial
  Probe
agaagctgcctacatcggagacata

SEQ ID NO: 27963 - DNA, 25 bp, Artificial
  Probe
taccttcacctaccagtcaggatcg

SEQ ID NO: 27964 - DNA, 25 bp, Artificial
  Probe
tgtatccgaagaagctgcctacatc

SEQ ID NO: 27965 - DNA, 25 bp, Artificial
  Probe
gtgtatccgaagaagctgcctacat

SEQ ID NO: 27966 - DNA, 25 bp, Artificial
  Probe
gtatccgaagaagctgcctacatcg

SEQ ID NO: 27967 - DNA, 25 bp, Artificial
  Probe
ttttagccctggtgtgtatccgaag

SEQ ID NO: 27968 - DNA, 25 bp, Artificial
  Probe
cttttagccctggtgtgtatccgaa

SEQ ID NO: 27969 - DNA, 25 bp, Artificial
  Probe
ctgagaacaacataggatcaagcaa

SEQ ID NO: 27970 - DNA, 25 bp, Artificial
  Probe
ttgctgagaacaacataggatcaag

SEQ ID NO: 27971 - DNA, 25 bp, Artificial
  Probe
caagaatgccaccatcactcaatac

SEQ ID NO: 27972 - DNA, 25 bp, Artificial
  Probe
tcaagaatgccaccatcactcaata

SEQ ID NO: 27973 - DNA, 25 bp, Artificial
  Probe
tgagaacaacataggatcaagcaac

SEQ ID NO: 27974 - DNA, 25 bp, Artificial
  Probe
gagaacaacataggatcaagcaacc

SEQ ID NO: 27975 - DNA, 25 bp, Artificial
  Probe
ctagagccagagactacataccatg

SEQ ID NO: 27976 - DNA, 25 bp, Artificial
  Probe
cctagagccagagactacataccat

SEQ ID NO: 27977 - DNA, 25 bp, Artificial
  Probe
gagagcaaatgtccaaagaagaatg

SEQ ID NO: 27978 - DNA, 25 bp, Artificial
  Probe
agagagcaaatgtccaaagaagaat

SEQ ID NO: 27979 - DNA, 25 bp, Artificial
  Probe
atcaagaatgccaccatcactcaat

SEQ ID NO: 27980 - DNA, 25 bp, Artificial
  Probe
aagagagcaaatgtccaaagaagaa

SEQ ID NO: 27981 - DNA, 25 bp, Artificial
  Probe
ctattggcgtttctgattatgttgc

SEQ ID NO: 27982 - DNA, 25 bp, Artificial
  Probe
gctattggcgtttctgattatgttg

SEQ ID NO: 27983 - DNA, 25 bp, Artificial
  Probe
gaagagagcaaatgtccaaagaaga

SEQ ID NO: 27984 - DNA, 25 bp, Artificial
  Probe
tgctattggcgtttctgattatgtt

SEQ ID NO: 27985 - DNA, 25 bp, Artificial
  Probe
aagaatgccaccatcactcaatacc

SEQ ID NO: 27986 - DNA, 25 bp, Artificial
  Probe
tgaagagagcaaatgtccaaagaag

SEQ ID NO: 27987 - DNA, 25 bp, Artificial
  Probe
ctgaagagagcaaatgtccaaagaa

SEQ ID NO: 27988 - DNA, 25 bp, Artificial
  Probe
aactgaagagagcaaatgtccaaag

SEQ ID NO: 27989 - DNA, 25 bp, Artificial
  Probe
caactgaagagagcaaatgtccaaa

SEQ ID NO: 27990 - DNA, 25 bp, Artificial
  Probe
gtgctattggcgtttctgattatgt

SEQ ID NO: 27991 - DNA, 25 bp, Artificial
  Probe
aagatcaagaatgccaccatcactc

SEQ ID NO: 27992 - DNA, 25 bp, Artificial
  Probe
gaagatcaagaatgccaccatcact

SEQ ID NO: 27993 - DNA, 25 bp, Artificial
  Probe
tttgctgagaacaacataggatcaa

SEQ ID NO: 27994 - DNA, 25 bp, Artificial
  Probe
actgaagagagcaaatgtccaaaga

SEQ ID NO: 27995 - DNA, 25 bp, Artificial
  Probe
gaatgccaccatcactcaataccag

SEQ ID NO: 27996 - DNA, 25 bp, Artificial
  Probe
cagagactacataccatgtggatat

SEQ ID NO: 27997 - DNA, 25 bp, Artificial
  Probe
gatcaagaatgccaccatcactcaa

SEQ ID NO: 27998 - DNA, 25 bp, Artificial
  Probe
ccagagactacataccatgtggata

SEQ ID NO: 27999 - DNA, 25 bp, Artificial
  Probe
tgaagatcaagaatgccaccatcac

SEQ ID NO: 28000 - DNA, 25 bp, Artificial
  Probe
agagactacataccatgtggatatt

SEQ ID NO: 28001 - DNA, 25 bp, Artificial
  Probe
cgtgctattggcgtttctgattatg

SEQ ID NO: 28002 - DNA, 25 bp, Artificial
  Probe
agaatgccaccatcactcaatacca

SEQ ID NO: 28003 - DNA, 25 bp, Artificial
  Probe
ttcccaagaaattaggacacttcca

SEQ ID NO: 28004 - DNA, 25 bp, Artificial
  Probe
tagagccagagactacataccatgt

SEQ ID NO: 28005 - DNA, 25 bp, Artificial
  Probe
caccatcactcaataccagctcaag

SEQ ID NO: 28006 - DNA, 25 bp, Artificial
  Probe
gtgaagatcaagaatgccaccatca

SEQ ID NO: 28007 - DNA, 25 bp, Artificial
  Probe
agagcaaatgtccaaagaagaatgg

SEQ ID NO: 28008 - DNA, 25 bp, Artificial
  Probe
tttcccaagaaattaggacacttcc

SEQ ID NO: 28009 - DNA, 25 bp, Artificial
  Probe
tattggcgtttctgattatgttgca

SEQ ID NO: 28010 - DNA, 25 bp, Artificial
  Probe
tcccaagaaattaggacacttccag

SEQ ID NO: 28011 - DNA, 25 bp, Artificial
  Probe
agatcaagaatgccaccatcactca

SEQ ID NO: 28012 - DNA, 25 bp, Artificial
  Probe
agaacaacataggatcaagcaaccc

SEQ ID NO: 28013 - DNA, 25 bp, Artificial
  Probe
agatgctacttatagccattcttgg

SEQ ID NO: 28014 - DNA, 25 bp, Artificial
  Probe
tctctctctctctctctctctcata

SEQ ID NO: 28015 - DNA, 25 bp, Artificial
  Probe
ctctctctctctctctcatatctct

SEQ ID NO: 28016 - DNA, 25 bp, Artificial
  Probe
tctctctctctctctctcatatctc

SEQ ID NO: 28017 - DNA, 25 bp, Artificial
  Probe
ctctctctctctctctctcatatct

SEQ ID NO: 28018 - DNA, 25 bp, Artificial
  Probe
tctctctctctctctctctcatatc

SEQ ID NO: 28019 - DNA, 25 bp, Artificial
  Probe
ctctctctctctctctctctcatat

SEQ ID NO: 28020 - DNA, 25 bp, Artificial
  Probe
ctctctctctctctctctctctcat

SEQ ID NO: 28021 - DNA, 25 bp, Artificial
  Probe
tctctctctctctcatatctctact

SEQ ID NO: 28022 - DNA, 25 bp, Artificial
  Probe
ctctctctctctctcatatctctac

SEQ ID NO: 28023 - DNA, 25 bp, Artificial
  Probe
tctctctctctctctcatatctcta

SEQ ID NO: 28024 - DNA, 25 bp, Artificial
  Probe
gtgtctctctctctctctctctctc

SEQ ID NO: 28025 - DNA, 25 bp, Artificial
  Probe
ctctctctctctcatatctctactt

SEQ ID NO: 28026 - DNA, 25 bp, Artificial
  Probe
cgtgtctctctctctctctctctct

SEQ ID NO: 28027 - DNA, 25 bp, Artificial
  Probe
tcgtgtctctctctctctctctctc

SEQ ID NO: 28028 - DNA, 25 bp, Artificial
  Probe
ctcgtgtctctctctctctctctct

SEQ ID NO: 28029 - DNA, 25 bp, Artificial
  Probe
tctcgtgtctctctctctctctctc

SEQ ID NO: 28030 - DNA, 25 bp, Artificial
  Probe
ttccactaccttaatgtgtccactc

SEQ ID NO: 28031 - DNA, 25 bp, Artificial
  Probe
cttccactaccttaatgtgtccact

SEQ ID NO: 28032 - DNA, 25 bp, Artificial
  Probe
gttctcgtgtctctctctctctctc

SEQ ID NO: 28033 - DNA, 25 bp, Artificial
  Probe
ttctcgtgtctctctctctctctct

SEQ ID NO: 28034 - DNA, 25 bp, Artificial
  Probe
attctgagaaatgtgaaacttaggg

SEQ ID NO: 28035 - DNA, 25 bp, Artificial
  Probe
ctctcatatctctacttatacctcc

SEQ ID NO: 28036 - DNA, 25 bp, Artificial
  Probe
tctctctctctcatatctctactta

SEQ ID NO: 28037 - DNA, 25 bp, Artificial
  Probe
ccttccactaccttaatgtgtccac

SEQ ID NO: 28038 - DNA, 25 bp, Artificial
  Probe
tctcatatctctacttatacctccc

SEQ ID NO: 28039 - DNA, 25 bp, Artificial
  Probe
cagccttccactaccttaatgtgtc

SEQ ID NO: 28040 - DNA, 25 bp, Artificial
  Probe
tccactaccttaatgtgtccactcc

SEQ ID NO: 28041 - DNA, 25 bp, Artificial
  Probe
aattctgagaaatgtgaaacttagg

SEQ ID NO: 28042 - DNA, 25 bp, Artificial
  Probe
ttggttctcgtgtctctctctctct

SEQ ID NO: 28043 - DNA, 25 bp, Artificial
  Probe
catggctatgcagttatggaagaaa

SEQ ID NO: 28044 - DNA, 25 bp, Artificial
  Probe
ggttctcgtgtctctctctctctct

SEQ ID NO: 28045 - DNA, 25 bp, Artificial
  Probe
tctctcatatctctacttatacctc

SEQ ID NO: 28046 - DNA, 25 bp, Artificial
  Probe
ctctctcatatctctacttatacct

SEQ ID NO: 28047 - DNA, 25 bp, Artificial
  Probe
tctctctcatatctctacttatacc

SEQ ID NO: 28048 - DNA, 25 bp, Artificial
  Probe
ctctctctctcatatctctacttat

SEQ ID NO: 28049 - DNA, 25 bp, Artificial
  Probe
tttgttttctgttttggtttggttc

SEQ ID NO: 28050 - DNA, 25 bp, Artificial
  Probe
ttgttttctgttttggtttggttct

SEQ ID NO: 28051 - DNA, 25 bp, Artificial
  Probe
atatctctacttatacctcccctgg

SEQ ID NO: 28052 - DNA, 25 bp, Artificial
  Probe
ttttgttttctgttttggtttggtt

SEQ ID NO: 28053 - DNA, 25 bp, Artificial
  Probe
tgttttctgttttggtttggttctc

SEQ ID NO: 28054 - DNA, 25 bp, Artificial
  Probe
tttggttctcgtgtctctctctctc

SEQ ID NO: 28055 - DNA, 25 bp, Artificial
  Probe
tggttctcgtgtctctctctctctc

SEQ ID NO: 28056 - DNA, 25 bp, Artificial
  Probe
catatctctacttatacctcccctg

SEQ ID NO: 28057 - DNA, 25 bp, Artificial
  Probe
tcatatctctacttatacctcccct

SEQ ID NO: 28058 - DNA, 25 bp, Artificial
  Probe
agccttccactaccttaatgtgtcc

SEQ ID NO: 28059 - DNA, 25 bp, Artificial
  Probe
ggttcagtcttatatgatggtcctc

SEQ ID NO: 28060 - DNA, 25 bp, Artificial
  Probe
gttcagtcttatatgatggtcctca

SEQ ID NO: 28061 - DNA, 25 bp, Artificial
  Probe
tgccactatctacaatcccattatc

SEQ ID NO: 28062 - DNA, 25 bp, Artificial
  Probe
gccactatctacaatcccattatct

SEQ ID NO: 28063 - DNA, 25 bp, Artificial
  Probe
aatgtgagatttgatgctaaactgg

SEQ ID NO: 28064 - DNA, 25 bp, Artificial
  Probe
gtgccactatctacaatcccattat

SEQ ID NO: 28065 - DNA, 25 bp, Artificial
  Probe
caatgtgagatttgatgctaaactg

SEQ ID NO: 28066 - DNA, 25 bp, Artificial
  Probe
atgtgagatttgatgctaaactggc

SEQ ID NO: 28067 - DNA, 25 bp, Artificial
  Probe
gggttcagtcttatatgatggtcct

SEQ ID NO: 28068 - DNA, 25 bp, Artificial
  Probe
gtcttatatgatggtcctcatggtc

SEQ ID NO: 28069 - DNA, 25 bp, Artificial
  Probe
cagtcttatatgatggtcctcatgg

SEQ ID NO: 28070 - DNA, 25 bp, Artificial
  Probe
cttatatgatggtcctcatggtcac

SEQ ID NO: 28071 - DNA, 25 bp, Artificial
  Probe
tcttatatgatggtcctcatggtca

SEQ ID NO: 28072 - DNA, 25 bp, Artificial
  Probe
agtcttatatgatggtcctcatggt

SEQ ID NO: 28073 - DNA, 25 bp, Artificial
  Probe
tcagtcttatatgatggtcctcatg

SEQ ID NO: 28074 - DNA, 25 bp, Artificial
  Probe
ttcagtcttatatgatggtcctcat

SEQ ID NO: 28075 - DNA, 25 bp, Artificial
  Probe
agtgccactatctacaatcccatta

SEQ ID NO: 28076 - DNA, 25 bp, Artificial
  Probe
ccattatctatgtctttatgaaccg

SEQ ID NO: 28077 - DNA, 25 bp, Artificial
  Probe
ttatatgatggtcctcatggtcacg

SEQ ID NO: 28078 - DNA, 25 bp, Artificial
  Probe
aagtgccactatctacaatcccatt

SEQ ID NO: 28079 - DNA, 25 bp, Artificial
  Probe
aaagtgccactatctacaatcccat

SEQ ID NO: 28080 - DNA, 25 bp, Artificial
  Probe
ccctttggcaatgtgagatttgatg

SEQ ID NO: 28081 - DNA, 25 bp, Artificial
  Probe
ccactatctacaatcccattatcta

SEQ ID NO: 28082 - DNA, 25 bp, Artificial
  Probe
cccattatctatgtctttatgaacc

SEQ ID NO: 28083 - DNA, 25 bp, Artificial
  Probe
tatctatgtctttatgaaccggcag

SEQ ID NO: 28084 - DNA, 25 bp, Artificial
  Probe
ttatctatgtctttatgaaccggca

SEQ ID NO: 28085 - DNA, 25 bp, Artificial
  Probe
gcaatgtgagatttgatgctaaact

SEQ ID NO: 28086 - DNA, 25 bp, Artificial
  Probe
attatctatgtctttatgaaccggc

SEQ ID NO: 28087 - DNA, 25 bp, Artificial
  Probe
ggcaatgtgagatttgatgctaaac

SEQ ID NO: 28088 - DNA, 25 bp, Artificial
  Probe
tctacaatcccattatctatgtctt

SEQ ID NO: 28089 - DNA, 25 bp, Artificial
  Probe
tggcaatgtgagatttgatgctaaa

SEQ ID NO: 28090 - DNA, 25 bp, Artificial
  Probe
ttggcaatgtgagatttgatgctaa

SEQ ID NO: 28091 - DNA, 25 bp, Artificial
  Probe
tttggcaatgtgagatttgatgcta

SEQ ID NO: 28092 - DNA, 25 bp, Artificial
  Probe
tatcctggggttcagtcttatatga

SEQ ID NO: 28093 - DNA, 25 bp, Artificial
  Probe
gtatcctggggttcagtcttatatg

SEQ ID NO: 28094 - DNA, 25 bp, Artificial
  Probe
tcccattatctatgtctttatgaac

SEQ ID NO: 28095 - DNA, 25 bp, Artificial
  Probe
atcctggggttcagtcttatatgat

SEQ ID NO: 28096 - DNA, 25 bp, Artificial
  Probe
atctacaatcccattatctatgtct

SEQ ID NO: 28097 - DNA, 25 bp, Artificial
  Probe
tggggttcagtcttatatgatggtc

SEQ ID NO: 28098 - DNA, 25 bp, Artificial
  Probe
tatatgatggtcctcatggtcacgt

SEQ ID NO: 28099 - DNA, 25 bp, Artificial
  Probe
cgtatcctggggttcagtcttatat

SEQ ID NO: 28100 - DNA, 25 bp, Artificial
  Probe
tcctggggttcagtcttatatgatg

SEQ ID NO: 28101 - DNA, 25 bp, Artificial
  Probe
ctccctaccatcctactttgccaaa

SEQ ID NO: 28102 - DNA, 25 bp, Artificial
  Probe
ctggggttcagtcttatatgatggt

SEQ ID NO: 28103 - DNA, 25 bp, Artificial
  Probe
ctacaatcccattatctatgtcttt

SEQ ID NO: 28104 - DNA, 25 bp, Artificial
  Probe
gaactcatgggtaatgtggtcaaac

SEQ ID NO: 28105 - DNA, 25 bp, Artificial
  Probe
catgggtaatgtggtcaaacaactc

SEQ ID NO: 28106 - DNA, 25 bp, Artificial
  Probe
ctcatgggtaatgtggtcaaacaac

SEQ ID NO: 28107 - DNA, 25 bp, Artificial
  Probe
ggaactcatgggtaatgtggtcaaa

SEQ ID NO: 28108 - DNA, 25 bp, Artificial
  Probe
tcatgggtaatgtggtcaaacaact

SEQ ID NO: 28109 - DNA, 25 bp, Artificial
  Probe
actcatgggtaatgtggtcaaacaa

SEQ ID NO: 28110 - DNA, 25 bp, Artificial
  Probe
aactcatgggtaatgtggtcaaaca

SEQ ID NO: 28111 - DNA, 25 bp, Artificial
  Probe
atgggtaatgtggtcaaacaactcg

SEQ ID NO: 28112 - DNA, 25 bp, Artificial
  Probe
atggaactcatgggtaatgtggtca

SEQ ID NO: 28113 - DNA, 25 bp, Artificial
  Probe
tggaactcatgggtaatgtggtcaa

SEQ ID NO: 28114 - DNA, 25 bp, Artificial
  Probe
gggtaatgtggtcaaacaactcgtg

SEQ ID NO: 28115 - DNA, 25 bp, Artificial
  Probe
gaatgcagatcctcatgatccagta

SEQ ID NO: 28116 - DNA, 25 bp, Artificial
  Probe
aatgcagatcctcatgatccagtac

SEQ ID NO: 28117 - DNA, 25 bp, Artificial
  Probe
aagtccgaatgcagatcctcatgat

SEQ ID NO: 28118 - DNA, 25 bp, Artificial
  Probe
tgggtaatgtggtcaaacaactcgt

SEQ ID NO: 28119 - DNA, 25 bp, Artificial
  Probe
gtaatgtggtcaaacaactcgtgcc

SEQ ID NO: 28120 - DNA, 25 bp, Artificial
  Probe
ggtaatgtggtcaaacaactcgtgc

SEQ ID NO: 28121 - DNA, 25 bp, Artificial
  Probe
catggaactcatgggtaatgtggtc

SEQ ID NO: 28122 - DNA, 25 bp, Artificial
  Probe
caagtccgaatgcagatcctcatga

SEQ ID NO: 28123 - DNA, 25 bp, Artificial
  Probe
gagcatggaactcatgggtaatgtg

SEQ ID NO: 28124 - DNA, 25 bp, Artificial
  Probe
ctgagcatggaactcatgggtaatg

SEQ ID NO: 28125 - DNA, 25 bp, Artificial
  Probe
tctgagcatggaactcatgggtaat

SEQ ID NO: 28126 - DNA, 25 bp, Artificial
  Probe
ctggaagaacacagccaatgtgaat

SEQ ID NO: 28127 - DNA, 25 bp, Artificial
  Probe
atgcagatcctcatgatccagtacc

SEQ ID NO: 28128 - DNA, 25 bp, Artificial
  Probe
gtacctctgagcatggaactcatgg

SEQ ID NO: 28129 - DNA, 25 bp, Artificial
  Probe
tggaagaacacagccaatgtgaatg

SEQ ID NO: 28130 - DNA, 25 bp, Artificial
  Probe
tgagcatggaactcatgggtaatgt

SEQ ID NO: 28131 - DNA, 25 bp, Artificial
  Probe
ctctgagcatggaactcatgggtaa

SEQ ID NO: 28132 - DNA, 25 bp, Artificial
  Probe
agtccgaatgcagatcctcatgatc

SEQ ID NO: 28133 - DNA, 25 bp, Artificial
  Probe
cgaatgcagatcctcatgatccagt

SEQ ID NO: 28134 - DNA, 25 bp, Artificial
  Probe
aagaacacagccaatgtgaatgcag

SEQ ID NO: 28135 - DNA, 25 bp, Artificial
  Probe
gaagaacacagccaatgtgaatgca

SEQ ID NO: 28136 - DNA, 25 bp, Artificial
  Probe
agcatggaactcatgggtaatgtgg

SEQ ID NO: 28137 - DNA, 25 bp, Artificial
  Probe
cagccaatgtgaatgcagaccaaaa

SEQ ID NO: 28138 - DNA, 25 bp, Artificial
  Probe
gcatggaactcatgggtaatgtggt

SEQ ID NO: 28139 - DNA, 25 bp, Artificial
  Probe
ggaagaacacagccaatgtgaatgc

SEQ ID NO: 28140 - DNA, 25 bp, Artificial
  Probe
ccgaatgcagatcctcatgatccag

SEQ ID NO: 28141 - DNA, 25 bp, Artificial
  Probe
gtccgaatgcagatcctcatgatcc

SEQ ID NO: 28142 - DNA, 25 bp, Artificial
  Probe
gaacacagccaatgtgaatgcagac

SEQ ID NO: 28143 - DNA, 25 bp, Artificial
  Probe
agatcctcatgatccagtacccgag

SEQ ID NO: 28144 - DNA, 25 bp, Artificial
  Probe
cagatcctcatgatccagtacccga

SEQ ID NO: 28145 - DNA, 25 bp, Artificial
  Probe
ggtacctctgagcatggaactcatg

SEQ ID NO: 28146 - DNA, 25 bp, Artificial
  Probe
tggtacctctgagcatggaactcat

SEQ ID NO: 28147 - DNA, 25 bp, Artificial
  Probe
ggtttcctcttcggtatctttgtaa

SEQ ID NO: 28148 - DNA, 25 bp, Artificial
  Probe
gggttgatttgggtttgtttcttaa

SEQ ID NO: 28149 - DNA, 25 bp, Artificial
  Probe
tgtttcttaaattcattgctccagg

SEQ ID NO: 28150 - DNA, 25 bp, Artificial
  Probe
gaaacattacattggctccttcatc

SEQ ID NO: 28151 - DNA, 25 bp, Artificial
  Probe
gtttcttaaattcattgctccagga

SEQ ID NO: 28152 - DNA, 25 bp, Artificial
  Probe
tgggtttgtttcttaaattcattgc

SEQ ID NO: 28153 - DNA, 25 bp, Artificial
  Probe
gtttcctcttcggtatctttgtaac

SEQ ID NO: 28154 - DNA, 25 bp, Artificial
  Probe
tgggttgatttgggtttgtttctta

SEQ ID NO: 28155 - DNA, 25 bp, Artificial
  Probe
ggttgatttgggtttgtttcttaaa

SEQ ID NO: 28156 - DNA, 25 bp, Artificial
  Probe
gggtttgtttcttaaattcattgct

SEQ ID NO: 28157 - DNA, 25 bp, Artificial
  Probe
aagtgaaacattacattggctcctt

SEQ ID NO: 28158 - DNA, 25 bp, Artificial
  Probe
aaacattacattggctccttcatcc

SEQ ID NO: 28159 - DNA, 25 bp, Artificial
  Probe
tttcttaaattcattgctccaggat

SEQ ID NO: 28160 - DNA, 25 bp, Artificial
  Probe
ttgtttcttaaattcattgctccag

SEQ ID NO: 28161 - DNA, 25 bp, Artificial
  Probe
ttcttaaattcattgctccaggatc

SEQ ID NO: 28162 - DNA, 25 bp, Artificial
  Probe
agtgaaacattacattggctccttc

SEQ ID NO: 28163 - DNA, 25 bp, Artificial
  Probe
tcttaaattcattgctccaggatcg

SEQ ID NO: 28164 - DNA, 25 bp, Artificial
  Probe
ctttataacgctgtatgtcatcacc

SEQ ID NO: 28165 - DNA, 25 bp, Artificial
  Probe
gctctttataacgctgtatgtcatc

SEQ ID NO: 28166 - DNA, 25 bp, Artificial
  Probe
tttgtttcttaaattcattgctcca

SEQ ID NO: 28167 - DNA, 25 bp, Artificial
  Probe
caagtgaaacattacattggctcct

SEQ ID NO: 28168 - DNA, 25 bp, Artificial
  Probe
tctttataacgctgtatgtcatcac

SEQ ID NO: 28169 - DNA, 25 bp, Artificial
  Probe
tttataacgctgtatgtcatcaccc

SEQ ID NO: 28170 - DNA, 25 bp, Artificial
  Probe
gtttgtttcttaaattcattgctcc

SEQ ID NO: 28171 - DNA, 25 bp, Artificial
  Probe
ggtttgtttcttaaattcattgctc

SEQ ID NO: 28172 - DNA, 25 bp, Artificial
  Probe
atcgctctttataacgctgtatgtc

SEQ ID NO: 28173 - DNA, 25 bp, Artificial
  Probe
gatcgctctttataacgctgtatgt

SEQ ID NO: 28174 - DNA, 25 bp, Artificial
  Probe
ctctttataacgctgtatgtcatca

SEQ ID NO: 28175 - DNA, 25 bp, Artificial
  Probe
tttgtgggttgatttgggtttgttt

SEQ ID NO: 28176 - DNA, 25 bp, Artificial
  Probe
cgctctttataacgctgtatgtcat

SEQ ID NO: 28177 - DNA, 25 bp, Artificial
  Probe
gtgggttgatttgggtttgtttctt

SEQ ID NO: 28178 - DNA, 25 bp, Artificial
  Probe
aggtttcctcttcggtatctttgta

SEQ ID NO: 28179 - DNA, 25 bp, Artificial
  Probe
ggatcgctctttataacgctgtatg

SEQ ID NO: 28180 - DNA, 25 bp, Artificial
  Probe
aggatcgctctttataacgctgtat

SEQ ID NO: 28181 - DNA, 25 bp, Artificial
  Probe
tcggtatctttgtaaccctttatga

SEQ ID NO: 28182 - DNA, 25 bp, Artificial
  Probe
ctcttcggtatctttgtaacccttt

SEQ ID NO: 28183 - DNA, 25 bp, Artificial
  Probe
tttcctcttcggtatctttgtaacc

SEQ ID NO: 28184 - DNA, 25 bp, Artificial
  Probe
tcttcggtatctttgtaacccttta

SEQ ID NO: 28185 - DNA, 25 bp, Artificial
  Probe
tctttgtaaccctttatgatcctag

SEQ ID NO: 28186 - DNA, 25 bp, Artificial
  Probe
attgctccaggatcgctctttataa

SEQ ID NO: 28187 - DNA, 25 bp, Artificial
  Probe
caaggtttcctcttcggtatctttg

SEQ ID NO: 28188 - DNA, 25 bp, Artificial
  Probe
gagttgactttgtgggttgatttgg

SEQ ID NO: 28189 - DNA, 25 bp, Artificial
  Probe
ggagttgactttgtgggttgatttg

SEQ ID NO: 28190 - DNA, 25 bp, Artificial
  Probe
ttgtgggttgatttgggtttgtttc

SEQ ID NO: 28191 - DNA, 25 bp, Artificial
  Probe
ctttgtgggttgatttgggtttgtt

SEQ ID NO: 28192 - DNA, 25 bp, Artificial
  Probe
aatctctattccatgtcaggctatg

SEQ ID NO: 28193 - DNA, 25 bp, Artificial
  Probe
gaagtctgcctctgagttacatctt

SEQ ID NO: 28194 - DNA, 25 bp, Artificial
  Probe
aagaagtctgcctctgagttacatc

SEQ ID NO: 28195 - DNA, 25 bp, Artificial
  Probe
agtcagccttcaaacattatcagat

SEQ ID NO: 28196 - DNA, 25 bp, Artificial
  Probe
caagtaaggaaccaaagaatctgtc

SEQ ID NO: 28197 - DNA, 25 bp, Artificial
  Probe
aacaagtcagccttcaaacattatc

SEQ ID NO: 28198 - DNA, 25 bp, Artificial
  Probe
gtcagccttcaaacattatcagatg

SEQ ID NO: 28199 - DNA, 25 bp, Artificial
  Probe
agaagtctgcctctgagttacatct

SEQ ID NO: 28200 - DNA, 25 bp, Artificial
  Probe
ccaagtaaggaaccaaagaatctgt

SEQ ID NO: 28201 - DNA, 25 bp, Artificial
  Probe
aagtcagccttcaaacattatcaga

SEQ ID NO: 28202 - DNA, 25 bp, Artificial
  Probe
caagtcagccttcaaacattatcag

SEQ ID NO: 28203 - DNA, 25 bp, Artificial
  Probe
tttaacaagtcagccttcaaacatt

SEQ ID NO: 28204 - DNA, 25 bp, Artificial
  Probe
ctttaacaagtcagccttcaaacat

SEQ ID NO: 28205 - DNA, 25 bp, Artificial
  Probe
gaatctctattccatgtcaggctat

SEQ ID NO: 28206 - DNA, 25 bp, Artificial
  Probe
aagtaaggaaccaaagaatctgtcg

SEQ ID NO: 28207 - DNA, 25 bp, Artificial
  Probe
aatgactcgtgactgttccaaatac

SEQ ID NO: 28208 - DNA, 25 bp, Artificial
  Probe
acaagtcagccttcaaacattatca

SEQ ID NO: 28209 - DNA, 25 bp, Artificial
  Probe
gtctttaacaagtcagccttcaaac

SEQ ID NO: 28210 - DNA, 25 bp, Artificial
  Probe
tgaatctctattccatgtcaggcta

SEQ ID NO: 28211 - DNA, 25 bp, Artificial
  Probe
ttaacaagtcagccttcaaacatta

SEQ ID NO: 28212 - DNA, 25 bp, Artificial
  Probe
gaatgactcgtgactgttccaaata

SEQ ID NO: 28213 - DNA, 25 bp, Artificial
  Probe
taacaagtcagccttcaaacattat

SEQ ID NO: 28214 - DNA, 25 bp, Artificial
  Probe
tctttaacaagtcagccttcaaaca

SEQ ID NO: 28215 - DNA, 25 bp, Artificial
  Probe
cagccttcaaacattatcagatgag

SEQ ID NO: 28216 - DNA, 25 bp, Artificial
  Probe
agccttcaaacattatcagatgagt

SEQ ID NO: 28217 - DNA, 25 bp, Artificial
  Probe
tcagccttcaaacattatcagatga

SEQ ID NO: 28218 - DNA, 25 bp, Artificial
  Probe
gggttcttgctgacatccaaatata

SEQ ID NO: 28219 - DNA, 25 bp, Artificial
  Probe
gccttcaaacattatcagatgagtt

SEQ ID NO: 28220 - DNA, 25 bp, Artificial
  Probe
ctcgtgactgttccaaatactgaaa

SEQ ID NO: 28221 - DNA, 25 bp, Artificial
  Probe
cccaagtaaggaaccaaagaatctg

SEQ ID NO: 28222 - DNA, 25 bp, Artificial
  Probe
atgactcgtgactgttccaaatact

SEQ ID NO: 28223 - DNA, 25 bp, Artificial
  Probe
aagtctgcctctgagttacatcttt

SEQ ID NO: 28224 - DNA, 25 bp, Artificial
  Probe
aaagaagtctgcctctgagttacat

SEQ ID NO: 28225 - DNA, 25 bp, Artificial
  Probe
cgtctttaacaagtcagccttcaaa

SEQ ID NO: 28226 - DNA, 25 bp, Artificial
  Probe
ggttcttgctgacatccaaatatat

SEQ ID NO: 28227 - DNA, 25 bp, Artificial
  Probe
actcgtgactgttccaaatactgaa

SEQ ID NO: 28228 - DNA, 25 bp, Artificial
  Probe
caaacgctagaacagacattgatct

SEQ ID NO: 28229 - DNA, 25 bp, Artificial
  Probe
tatcccaagtaaggaaccaaagaat

SEQ ID NO: 28230 - DNA, 25 bp, Artificial
  Probe
gtatcccaagtaaggaaccaaagaa

SEQ ID NO: 28231 - DNA, 25 bp, Artificial
  Probe
gactcgtgactgttccaaatactga

SEQ ID NO: 28232 - DNA, 25 bp, Artificial
  Probe
ccttcaaacattatcagatgagttc

SEQ ID NO: 28233 - DNA, 25 bp, Artificial
  Probe
atcccaagtaaggaaccaaagaatc

SEQ ID NO: 28234 - DNA, 25 bp, Artificial
  Probe
agaatgactcgtgactgttccaaat

SEQ ID NO: 28235 - DNA, 25 bp, Artificial
  Probe
taaggaaccaaagaatctgtcgaag

SEQ ID NO: 28236 - DNA, 25 bp, Artificial
  Probe
ttctgaggctgatgactggtgtatc

SEQ ID NO: 28237 - DNA, 25 bp, Artificial
  Probe
attgagacgaggaactactctgaag

SEQ ID NO: 28238 - DNA, 25 bp, Artificial
  Probe
cattgagacgaggaactactctgaa

SEQ ID NO: 28239 - DNA, 25 bp, Artificial
  Probe
ttaatgtcttccctaccttcttcac

SEQ ID NO: 28240 - DNA, 25 bp, Artificial
  Probe
tttaatgtcttccctaccttcttca

SEQ ID NO: 28241 - DNA, 25 bp, Artificial
  Probe
tctttaatgtcttccctaccttctt

SEQ ID NO: 28242 - DNA, 25 bp, Artificial
  Probe
ttctttaatgtcttccctaccttct

SEQ ID NO: 28243 - DNA, 25 bp, Artificial
  Probe
ctttaatgtcttccctaccttcttc

SEQ ID NO: 28244 - DNA, 25 bp, Artificial
  Probe
tttctttaatgtcttccctaccttc

SEQ ID NO: 28245 - DNA, 25 bp, Artificial
  Probe
taatgtcttccctaccttcttcacg

SEQ ID NO: 28246 - DNA, 25 bp, Artificial
  Probe
gatttctttaatgtcttccctacct

SEQ ID NO: 28247 - DNA, 25 bp, Artificial
  Probe
agatttctttaatgtcttccctacc

SEQ ID NO: 28248 - DNA, 25 bp, Artificial
  Probe
atttctttaatgtcttccctacctt

SEQ ID NO: 28249 - DNA, 25 bp, Artificial
  Probe
ttgagacgaggaactactctgaagg

SEQ ID NO: 28250 - DNA, 25 bp, Artificial
  Probe
gagcattgagacgaggaactactct

SEQ ID NO: 28251 - DNA, 25 bp, Artificial
  Probe
ttcccattctgcaaatagtgtcttt

SEQ ID NO: 28252 - DNA, 25 bp, Artificial
  Probe
tttcccattctgcaaatagtgtctt

SEQ ID NO: 28253 - DNA, 25 bp, Artificial
  Probe
tcccattctgcaaatagtgtctttc

SEQ ID NO: 28254 - DNA, 25 bp, Artificial
  Probe
gcattgagacgaggaactactctga

SEQ ID NO: 28255 - DNA, 25 bp, Artificial
  Probe
agcattgagacgaggaactactctg

SEQ ID NO: 28256 - DNA, 25 bp, Artificial
  Probe
gaggagcattgagacgaggaactac

SEQ ID NO: 28257 - DNA, 25 bp, Artificial
  Probe
catagtgtggtttcctgagggattc

SEQ ID NO: 28258 - DNA, 25 bp, Artificial
  Probe
tgctttcctttgttttaatcccctc

SEQ ID NO: 28259 - DNA, 25 bp, Artificial
  Probe
atagtgtggtttcctgagggattct

SEQ ID NO: 28260 - DNA, 25 bp, Artificial
  Probe
aggagcattgagacgaggaactact

SEQ ID NO: 28261 - DNA, 25 bp, Artificial
  Probe
ggagcattgagacgaggaactactc

SEQ ID NO: 28262 - DNA, 25 bp, Artificial
  Probe
gtgctttcctttgttttaatcccct

SEQ ID NO: 28263 - DNA, 25 bp, Artificial
  Probe
cttctccaaagaaagccatgctaag

SEQ ID NO: 28264 - DNA, 25 bp, Artificial
  Probe
tagatttctttaatgtcttccctac

SEQ ID NO: 28265 - DNA, 25 bp, Artificial
  Probe
ttttaatcccctcgcccattatgat

SEQ ID NO: 28266 - DNA, 25 bp, Artificial
  Probe
acatagtgtggtttcctgagggatt

SEQ ID NO: 28267 - DNA, 25 bp, Artificial
  Probe
ctcgcccattatgattttcccattc

SEQ ID NO: 28268 - DNA, 25 bp, Artificial
  Probe
ttctccaaagaaagccatgctaaga

SEQ ID NO: 28269 - DNA, 25 bp, Artificial
  Probe
gagggattctgacaaaatgtggttt

SEQ ID NO: 28270 - DNA, 25 bp, Artificial
  Probe
agggattctgacaaaatgtggtttt

SEQ ID NO: 28271 - DNA, 25 bp, Artificial
  Probe
cgcccattatgattttcccattctg

SEQ ID NO: 28272 - DNA, 25 bp, Artificial
  Probe
tcgcccattatgattttcccattct

SEQ ID NO: 28273 - DNA, 25 bp, Artificial
  Probe
ctttcctttgttttaatcccctcgc

SEQ ID NO: 28274 - DNA, 25 bp, Artificial
  Probe
gctttcctttgttttaatcccctcg

SEQ ID NO: 28275 - DNA, 25 bp, Artificial
  Probe
aatagatttctttaatgtcttccct

SEQ ID NO: 28276 - DNA, 25 bp, Artificial
  Probe
acttctccaaagaaagccatgctaa

SEQ ID NO: 28277 - DNA, 25 bp, Artificial
  Probe
tttcctgagggattctgacaaaatg

SEQ ID NO: 28278 - DNA, 25 bp, Artificial
  Probe
gtttcctgagggattctgacaaaat

SEQ ID NO: 28279 - DNA, 25 bp, Artificial
  Probe
gaaaattgcatctggctgtgtataa

SEQ ID NO: 28280 - DNA, 25 bp, Artificial
  Probe
ttgttttaatcccctcgcccattat

SEQ ID NO: 28281 - DNA, 25 bp, Artificial
  Probe
aattgcatctggctgtgtataaaac

SEQ ID NO: 28282 - DNA, 25 bp, Artificial
  Probe
aggataatagtgaactgaatgtcgc

SEQ ID NO: 28283 - DNA, 25 bp, Artificial
  Probe
ggataatagtgaactgaatgtcgca

SEQ ID NO: 28284 - DNA, 25 bp, Artificial
  Probe
gataatagtgaactgaatgtcgcag

SEQ ID NO: 28285 - DNA, 25 bp, Artificial
  Probe
ctatctaggatgataccaccgagta

SEQ ID NO: 28286 - DNA, 25 bp, Artificial
  Probe
taggataatagtgaactgaatgtcg

SEQ ID NO: 28287 - DNA, 25 bp, Artificial
  Probe
tacaatacagtgcgtatgtcttgaa

SEQ ID NO: 28288 - DNA, 25 bp, Artificial
  Probe
ttacaatacagtgcgtatgtcttga

SEQ ID NO: 28289 - DNA, 25 bp, Artificial
  Probe
gttacaatacagtgcgtatgtcttg

SEQ ID NO: 28290 - DNA, 25 bp, Artificial
  Probe
ataatagtgaactgaatgtcgcagg

SEQ ID NO: 28291 - DNA, 25 bp, Artificial
  Probe
tgttacaatacagtgcgtatgtctt

SEQ ID NO: 28292 - DNA, 25 bp, Artificial
  Probe
tgttatacagagcataggagagatt

SEQ ID NO: 28293 - DNA, 25 bp, Artificial
  Probe
ttgttatacagagcataggagagat

SEQ ID NO: 28294 - DNA, 25 bp, Artificial
  Probe
tatctaggatgataccaccgagtac

SEQ ID NO: 28295 - DNA, 25 bp, Artificial
  Probe
gtgttacaatacagtgcgtatgtct

SEQ ID NO: 28296 - DNA, 25 bp, Artificial
  Probe
atagtgaactgaatgtcgcaggata

SEQ ID NO: 28297 - DNA, 25 bp, Artificial
  Probe
tgtgttacaatacagtgcgtatgtc

SEQ ID NO: 28298 - DNA, 25 bp, Artificial
  Probe
tagtgaactgaatgtcgcaggataa

SEQ ID NO: 28299 - DNA, 25 bp, Artificial
  Probe
taatagtgaactgaatgtcgcagga

SEQ ID NO: 28300 - DNA, 25 bp, Artificial
  Probe
acaatacagtgcgtatgtcttgaac

SEQ ID NO: 28301 - DNA, 25 bp, Artificial
  Probe
ctcccattatctctcttctttcctg

SEQ ID NO: 28302 - DNA, 25 bp, Artificial
  Probe
tctcccattatctctcttctttcct

SEQ ID NO: 28303 - DNA, 25 bp, Artificial
  Probe
gcttctcccattatctctcttcttt

SEQ ID NO: 28304 - DNA, 25 bp, Artificial
  Probe
ttctcccattatctctcttctttcc

SEQ ID NO: 28305 - DNA, 25 bp, Artificial
  Probe
aagagctatctaggatgataccacc

SEQ ID NO: 28306 - DNA, 25 bp, Artificial
  Probe
aatagtgaactgaatgtcgcaggat

SEQ ID NO: 28307 - DNA, 25 bp, Artificial
  Probe
aatacagtgcgtatgtcttgaacct

SEQ ID NO: 28308 - DNA, 25 bp, Artificial
  Probe
caatacagtgcgtatgtcttgaacc

SEQ ID NO: 28309 - DNA, 25 bp, Artificial
  Probe
gctcaaactatttccagatgacttc

SEQ ID NO: 28310 - DNA, 25 bp, Artificial
  Probe
tatgtcttgaacctccagaaagtct

SEQ ID NO: 28311 - DNA, 25 bp, Artificial
  Probe
gtatgtcttgaacctccagaaagtc

SEQ ID NO: 28312 - DNA, 25 bp, Artificial
  Probe
cttctcccattatctctcttctttc

SEQ ID NO: 28313 - DNA, 25 bp, Artificial
  Probe
ctcaaactatttccagatgacttca

SEQ ID NO: 28314 - DNA, 25 bp, Artificial
  Probe
gctatctaggatgataccaccgagt

SEQ ID NO: 28315 - DNA, 25 bp, Artificial
  Probe
atacagtgcgtatgtcttgaacctc

SEQ ID NO: 28316 - DNA, 25 bp, Artificial
  Probe
tgtttgttatacagagcataggaga

SEQ ID NO: 28317 - DNA, 25 bp, Artificial
  Probe
tctaggataatagtgaactgaatgt

SEQ ID NO: 28318 - DNA, 25 bp, Artificial
  Probe
tttgttatacagagcataggagaga

SEQ ID NO: 28319 - DNA, 25 bp, Artificial
  Probe
gtttgttatacagagcataggagag

SEQ ID NO: 28320 - DNA, 25 bp, Artificial
  Probe
ctatttccagatgacttcatatccc

SEQ ID NO: 28321 - DNA, 25 bp, Artificial
  Probe
ctaggataatagtgaactgaatgtc

SEQ ID NO: 28322 - DNA, 25 bp, Artificial
  Probe
gttatacagagcataggagagattt

SEQ ID NO: 28323 - DNA, 25 bp, Artificial
  Probe
ttgtttgttatacagagcataggag

SEQ ID NO: 28324 - DNA, 25 bp, Artificial
  Probe
agaaagtctgaaggctactaatcct

SEQ ID NO: 28325 - DNA, 25 bp, Artificial
  Probe
ggctactaatccttatactaagtga

SEQ ID NO: 28326 - DNA, 25 bp, Artificial
  Probe
aatgtcgcaggataaaggtcaagaa

SEQ ID NO: 28327 - DNA, 25 bp, Artificial
  Probe
aggagtatgaataggattgaggacc

SEQ ID NO: 28328 - DNA, 25 bp, Artificial
  Probe
gctaggagtatgaataggattgagg

SEQ ID NO: 28329 - DNA, 25 bp, Artificial
  Probe
taggagtatgaataggattgaggac

SEQ ID NO: 28330 - DNA, 25 bp, Artificial
  Probe
ctaggagtatgaataggattgagga

SEQ ID NO: 28331 - DNA, 25 bp, Artificial
  Probe
aggaagctaggagtatgaataggat

SEQ ID NO: 28332 - DNA, 25 bp, Artificial
  Probe
tctgaggaagctaggagtatgaata

SEQ ID NO: 28333 - DNA, 25 bp, Artificial
  Probe
gaggaagctaggagtatgaatagga

SEQ ID NO: 28334 - DNA, 25 bp, Artificial
  Probe
ctgaggaagctaggagtatgaatag

SEQ ID NO: 28335 - DNA, 25 bp, Artificial
  Probe
tgaggaagctaggagtatgaatagg

SEQ ID NO: 28336 - DNA, 25 bp, Artificial
  Probe
ggaagctaggagtatgaataggatt

SEQ ID NO: 28337 - DNA, 25 bp, Artificial
  Probe
ttctgaggaagctaggagtatgaat

SEQ ID NO: 28338 - DNA, 25 bp, Artificial
  Probe
agctaggagtatgaataggattgag

SEQ ID NO: 28339 - DNA, 25 bp, Artificial
  Probe
aagctaggagtatgaataggattga

SEQ ID NO: 28340 - DNA, 25 bp, Artificial
  Probe
gaagctaggagtatgaataggattg

SEQ ID NO: 28341 - DNA, 25 bp, Artificial
  Probe
ctatgcctttgtgtaagtctcagag

SEQ ID NO: 28342 - DNA, 25 bp, Artificial
  Probe
tactatgcctttgtgtaagtctcag

SEQ ID NO: 28343 - DNA, 25 bp, Artificial
  Probe
taggtgtgattcttcagtttggaaa

SEQ ID NO: 28344 - DNA, 25 bp, Artificial
  Probe
ggagtatgaataggattgaggaccc

SEQ ID NO: 28345 - DNA, 25 bp, Artificial
  Probe
gtaggtgtgattcttcagtttggaa

SEQ ID NO: 28346 - DNA, 25 bp, Artificial
  Probe
atgtaggtgtgattcttcagtttgg

SEQ ID NO: 28347 - DNA, 25 bp, Artificial
  Probe
actatgcctttgtgtaagtctcaga

SEQ ID NO: 28348 - DNA, 25 bp, Artificial
  Probe
gtactatgcctttgtgtaagtctca

SEQ ID NO: 28349 - DNA, 25 bp, Artificial
  Probe
catgtaggtgtgattcttcagtttg

SEQ ID NO: 28350 - DNA, 25 bp, Artificial
  Probe
tcatgtaggtgtgattcttcagttt

SEQ ID NO: 28351 - DNA, 25 bp, Artificial
  Probe
tgtaggtgtgattcttcagtttgga

SEQ ID NO: 28352 - DNA, 25 bp, Artificial
  Probe
gagtatgaataggattgaggaccct

SEQ ID NO: 28353 - DNA, 25 bp, Artificial
  Probe
tatgcctttgtgtaagtctcagaga

SEQ ID NO: 28354 - DNA, 25 bp, Artificial
  Probe
agtatgaataggattgaggaccctg

SEQ ID NO: 28355 - DNA, 25 bp, Artificial
  Probe
aggtgtgattcttcagtttggaaac

SEQ ID NO: 28356 - DNA, 25 bp, Artificial
  Probe
acaagtcacagtgaataaactagga

SEQ ID NO: 28357 - DNA, 25 bp, Artificial
  Probe
gagatcagagaggttggaggatttc

SEQ ID NO: 28358 - DNA, 25 bp, Artificial
  Probe
caagtcacagtgaataaactaggaa

SEQ ID NO: 28359 - DNA, 25 bp, Artificial
  Probe
ctgagatcagagaggttggaggatt

SEQ ID NO: 28360 - DNA, 25 bp, Artificial
  Probe
tgtgattcttcagtttggaaaccat

SEQ ID NO: 28361 - DNA, 25 bp, Artificial
  Probe
cacaagtcacagtgaataaactagg

SEQ ID NO: 28362 - DNA, 25 bp, Artificial
  Probe
gtgattcttcagtttggaaaccatg

SEQ ID NO: 28363 - DNA, 25 bp, Artificial
  Probe
tgagatcagagaggttggaggattt

SEQ ID NO: 28364 - DNA, 25 bp, Artificial
  Probe
tacaagttgcctaaccctcccttaa

SEQ ID NO: 28365 - DNA, 25 bp, Artificial
  Probe
cttctgaggaagctaggagtatgaa

SEQ ID NO: 28366 - DNA, 25 bp, Artificial
  Probe
agtcacagtgaataaactaggaatt

SEQ ID NO: 28367 - DNA, 25 bp, Artificial
  Probe
aagtcacagtgaataaactaggaat

SEQ ID NO: 28368 - DNA, 25 bp, Artificial
  Probe
gtgtgattcttcagtttggaaacca

SEQ ID NO: 28369 - DNA, 25 bp, Artificial
  Probe
ataatatccccttttcttgcctcag

SEQ ID NO: 28370 - DNA, 25 bp, Artificial
  Probe
tcataatatccccttttcttgcctc

SEQ ID NO: 28371 - DNA, 25 bp, Artificial
  Probe
atcataatatccccttttcttgcct

SEQ ID NO: 28372 - DNA, 25 bp, Artificial
  Probe
attaccgataaacacacacccataa

SEQ ID NO: 28373 - DNA, 25 bp, Artificial
  Probe
ttaccgataaacacacacccataag

SEQ ID NO: 28374 - DNA, 25 bp, Artificial
  Probe
aattaccgataaacacacacccata

SEQ ID NO: 28375 - DNA, 25 bp, Artificial
  Probe
taaattaccgataaacacacaccca

SEQ ID NO: 28376 - DNA, 25 bp, Artificial
  Probe
ttaaattaccgataaacacacaccc

SEQ ID NO: 28377 - DNA, 25 bp, Artificial
  Probe
aaattaccgataaacacacacccat

SEQ ID NO: 28378 - DNA, 25 bp, Artificial
  Probe
agttggaagttggaatgactggttc

SEQ ID NO: 28379 - DNA, 25 bp, Artificial
  Probe
gagttggaagttggaatgactggtt

SEQ ID NO: 28380 - DNA, 25 bp, Artificial
  Probe
ttgagttggaagttggaatgactgg

SEQ ID NO: 28381 - DNA, 25 bp, Artificial
  Probe
tttgagttggaagttggaatgactg

SEQ ID NO: 28382 - DNA, 25 bp, Artificial
  Probe
taccgataaacacacacccataagg

SEQ ID NO: 28383 - DNA, 25 bp, Artificial
  Probe
cacacagtggatggagtgaagtatg

SEQ ID NO: 28384 - DNA, 25 bp, Artificial
  Probe
ttgtactgatcgcagaagcaataaa

SEQ ID NO: 28385 - DNA, 25 bp, Artificial
  Probe
tttgtactgatcgcagaagcaataa

SEQ ID NO: 28386 - DNA, 25 bp, Artificial
  Probe
tactgatcgcagaagcaataaagac

SEQ ID NO: 28387 - DNA, 25 bp, Artificial
  Probe
gtactgatcgcagaagcaataaaga

SEQ ID NO: 28388 - DNA, 25 bp, Artificial
  Probe
caggctgagttactgacaagtgatg

SEQ ID NO: 28389 - DNA, 25 bp, Artificial
  Probe
tgtactgatcgcagaagcaataaag

SEQ ID NO: 28390 - DNA, 25 bp, Artificial
  Probe
aaattaagactaagggcaaggaggc

SEQ ID NO: 28391 - DNA, 25 bp, Artificial
  Probe
taacccagaagcatgaatttcacac

SEQ ID NO: 28392 - DNA, 25 bp, Artificial
  Probe
ttcactggaacccgaagtataacac

SEQ ID NO: 28393 - DNA, 25 bp, Artificial
  Probe
gtttgtactgatcgcagaagcaata

SEQ ID NO: 28394 - DNA, 25 bp, Artificial
  Probe
ctgaagctgagagtttgtactgatc

SEQ ID NO: 28395 - DNA, 25 bp, Artificial
  Probe
actgaagctgagagtttgtactgat

SEQ ID NO: 28396 - DNA, 25 bp, Artificial
  Probe
tgagttggaagttggaatgactggt

SEQ ID NO: 28397 - DNA, 25 bp, Artificial
  Probe
aagtgatgggtccatgctatgtatg

SEQ ID NO: 28398 - DNA, 25 bp, Artificial
  Probe
caagtgatgggtccatgctatgtat

SEQ ID NO: 28399 - DNA, 25 bp, Artificial
  Probe
tttaaattaccgataaacacacacc

SEQ ID NO: 28400 - DNA, 25 bp, Artificial
  Probe
caaaattaagactaagggcaaggag

SEQ ID NO: 28401 - DNA, 25 bp, Artificial
  Probe
gacaaaattaagactaagggcaagg

SEQ ID NO: 28402 - DNA, 25 bp, Artificial
  Probe
ggacaaaattaagactaagggcaag

SEQ ID NO: 28403 - DNA, 25 bp, Artificial
  Probe
acaaaattaagactaagggcaagga

SEQ ID NO: 28404 - DNA, 25 bp, Artificial
  Probe
atgccctggacaaaattaagactaa

SEQ ID NO: 28405 - DNA, 25 bp, Artificial
  Probe
ctgagttactgacaagtgatgggtc

SEQ ID NO: 28406 - DNA, 25 bp, Artificial
  Probe
aggctgagttactgacaagtgatgg

SEQ ID NO: 28407 - DNA, 25 bp, Artificial
  Probe
tggacaaaattaagactaagggcaa

SEQ ID NO: 28408 - DNA, 25 bp, Artificial
  Probe
aaaattaagactaagggcaaggagg

SEQ ID NO: 28409 - DNA, 25 bp, Artificial
  Probe
aattaagactaagggcaaggaggct

SEQ ID NO: 28410 - DNA, 25 bp, Artificial
  Probe
gatgccctggacaaaattaagacta

SEQ ID NO: 28411 - DNA, 25 bp, Artificial
  Probe
cttttgagttggaagttggaatgac

SEQ ID NO: 28412 - DNA, 25 bp, Artificial
  Probe
tcttttgagttggaagttggaatga

SEQ ID NO: 28413 - DNA, 25 bp, Artificial
  Probe
gtcttttgagttggaagttggaatg

SEQ ID NO: 28414 - DNA, 25 bp, Artificial
  Probe
tgagagtttgtactgatcgcagaag

SEQ ID NO: 28415 - DNA, 25 bp, Artificial
  Probe
ctgagagtttgtactgatcgcagaa

SEQ ID NO: 28416 - DNA, 25 bp, Artificial
  Probe
ctggacaaaattaagactaagggca

SEQ ID NO: 28417 - DNA, 25 bp, Artificial
  Probe
gatgccttcattcagaactatgtgg

SEQ ID NO: 28418 - DNA, 25 bp, Artificial
  Probe
ggatgccttcattcagaactatgtg

SEQ ID NO: 28419 - DNA, 25 bp, Artificial
  Probe
gtggatgccttcattcagaactatg

SEQ ID NO: 28420 - DNA, 25 bp, Artificial
  Probe
atgccttcattcagaactatgtgga

SEQ ID NO: 28421 - DNA, 25 bp, Artificial
  Probe
tggatgccttcattcagaactatgt

SEQ ID NO: 28422 - DNA, 25 bp, Artificial
  Probe
agtggatgccttcattcagaactat

SEQ ID NO: 28423 - DNA, 25 bp, Artificial
  Probe
gagtggatgccttcattcagaacta

SEQ ID NO: 28424 - DNA, 25 bp, Artificial
  Probe
cttcagtttcttctccatcttctcc

SEQ ID NO: 28425 - DNA, 25 bp, Artificial
  Probe
ccttcagtttcttctccatcttctc

SEQ ID NO: 28426 - DNA, 25 bp, Artificial
  Probe
tgccttcattcagaactatgtggac

SEQ ID NO: 28427 - DNA, 25 bp, Artificial
  Probe
ttcagtttcttctccatcttctcct

SEQ ID NO: 28428 - DNA, 25 bp, Artificial
  Probe
accttcagtttcttctccatcttct

SEQ ID NO: 28429 - DNA, 25 bp, Artificial
  Probe
caccttcagtttcttctccatcttc

SEQ ID NO: 28430 - DNA, 25 bp, Artificial
  Probe
atcaccttcagtttcttctccatct

SEQ ID NO: 28431 - DNA, 25 bp, Artificial
  Probe
catcaccttcagtttcttctccatc

SEQ ID NO: 28432 - DNA, 25 bp, Artificial
  Probe
tcaccttcagtttcttctccatctt

SEQ ID NO: 28433 - DNA, 25 bp, Artificial
  Probe
gccttcattcagaactatgtggacc

SEQ ID NO: 28434 - DNA, 25 bp, Artificial
  Probe
ccatcaccttcagtttcttctccat

SEQ ID NO: 28435 - DNA, 25 bp, Artificial
  Probe
tcagtttcttctccatcttctcctg

SEQ ID NO: 28436 - DNA, 25 bp, Artificial
  Probe
ccttcattcagaactatgtggaccc

SEQ ID NO: 28437 - DNA, 25 bp, Artificial
  Probe
catctttgaggagagggttttacta

SEQ ID NO: 28438 - DNA, 25 bp, Artificial
  Probe
cagtttcttctccatcttctcctgg

SEQ ID NO: 28439 - DNA, 25 bp, Artificial
  Probe
atctttgaggagagggttttactag

SEQ ID NO: 28440 - DNA, 25 bp, Artificial
  Probe
ggagtggatgccttcattcagaact

SEQ ID NO: 28441 - DNA, 25 bp, Artificial
  Probe
tctttgaggagagggttttactagg

SEQ ID NO: 28442 - DNA, 25 bp, Artificial
  Probe
gaatgtggagactactgagggctac

SEQ ID NO: 28443 - DNA, 25 bp, Artificial
  Probe
agaatgtggagactactgagggcta

SEQ ID NO: 28444 - DNA, 25 bp, Artificial
  Probe
tggagtggatgccttcattcagaac

SEQ ID NO: 28445 - DNA, 25 bp, Artificial
  Probe
caaggtttgctgtccagaactgtag

SEQ ID NO: 28446 - DNA, 25 bp, Artificial
  Probe
ctgccatcaccttcagtttcttctc

SEQ ID NO: 28447 - DNA, 25 bp, Artificial
  Probe
agaactgtagtcccttggctgttac

SEQ ID NO: 28448 - DNA, 25 bp, Artificial
  Probe
ctggagtggatgccttcattcagaa

SEQ ID NO: 28449 - DNA, 25 bp, Artificial
  Probe
aaggtttgctgtccagaactgtagt

SEQ ID NO: 28450 - DNA, 25 bp, Artificial
  Probe
tcaaggtttgctgtccagaactgta

SEQ ID NO: 28451 - DNA, 25 bp, Artificial
  Probe
cttcacccagaatgtggagactact

SEQ ID NO: 28452 - DNA, 25 bp, Artificial
  Probe
agtttcttctccatcttctcctggg

SEQ ID NO: 28453 - DNA, 25 bp, Artificial
  Probe
gcatctttgaggagagggttttact

SEQ ID NO: 28454 - DNA, 25 bp, Artificial
  Probe
ctttgaggagagggttttactaggc

SEQ ID NO: 28455 - DNA, 25 bp, Artificial
  Probe
cagaactgtagtcccttggctgtta

SEQ ID NO: 28456 - DNA, 25 bp, Artificial
  Probe
cttcattcagaactatgtggacccc

SEQ ID NO: 28457 - DNA, 25 bp, Artificial
  Probe
ttcacccagaatgtggagactactg

SEQ ID NO: 28458 - DNA, 25 bp, Artificial
  Probe
aggtttgctgtccagaactgtagtc

SEQ ID NO: 28459 - DNA, 25 bp, Artificial
  Probe
gccatcaccttcagtttcttctcca

SEQ ID NO: 28460 - DNA, 25 bp, Artificial
  Probe
tgccatcaccttcagtttcttctcc

SEQ ID NO: 28461 - DNA, 25 bp, Artificial
  Probe
cttctctcaaggtttgctgtccaga

SEQ ID NO: 28462 - DNA, 25 bp, Artificial
  Probe
aaagtttagtgttctgttctgcctt

SEQ ID NO: 28463 - DNA, 25 bp, Artificial
  Probe
aagtttagtgttctgttctgccttc

SEQ ID NO: 28464 - DNA, 25 bp, Artificial
  Probe
gaaagtttagtgttctgttctgcct

SEQ ID NO: 28465 - DNA, 25 bp, Artificial
  Probe
ttagtgttctgttctgccttcagtg

SEQ ID NO: 28466 - DNA, 25 bp, Artificial
  Probe
agtttagtgttctgttctgccttca

SEQ ID NO: 28467 - DNA, 25 bp, Artificial
  Probe
gtttagtgttctgttctgccttcag

SEQ ID NO: 28468 - DNA, 25 bp, Artificial
  Probe
tagtgttctgttctgccttcagtga

SEQ ID NO: 28469 - DNA, 25 bp, Artificial
  Probe
tttagtgttctgttctgccttcagt

SEQ ID NO: 28470 - DNA, 25 bp, Artificial
  Probe
agaaagtttagtgttctgttctgcc

SEQ ID NO: 28471 - DNA, 25 bp, Artificial
  Probe
ctctgaatttgatgaaaactgaagt

SEQ ID NO: 28472 - DNA, 25 bp, Artificial
  Probe
tctctgaatttgatgaaaactgaag

SEQ ID NO: 28473 - DNA, 25 bp, Artificial
  Probe
agtgttctgttctgccttcagtgac

SEQ ID NO: 28474 - DNA, 25 bp, Artificial
  Probe
tgaatttgatgaaaactgaagtaca

SEQ ID NO: 28475 - DNA, 25 bp, Artificial
  Probe
tctgaatttgatgaaaactgaagta

SEQ ID NO: 28476 - DNA, 25 bp, Artificial
  Probe
ctgaatttgatgaaaactgaagtac

SEQ ID NO: 28477 - DNA, 25 bp, Artificial
  Probe
gaatttgatgaaaactgaagtacat

SEQ ID NO: 28478 - DNA, 25 bp, Artificial
  Probe
tgtgttcccaaaccaagaacttgtc

SEQ ID NO: 28479 - DNA, 25 bp, Artificial
  Probe
aatttgatgaaaactgaagtacatt

SEQ ID NO: 28480 - DNA, 25 bp, Artificial
  Probe
tgttctgttctgccttcagtgacag

SEQ ID NO: 28481 - DNA, 25 bp, Artificial
  Probe
gtaacttacagaaagtttagtgttc

SEQ ID NO: 28482 - DNA, 25 bp, Artificial
  Probe
taacttacagaaagtttagtgttct

SEQ ID NO: 28483 - DNA, 25 bp, Artificial
  Probe
ttccaccttcattaacagactactc

SEQ ID NO: 28484 - DNA, 25 bp, Artificial
  Probe
ccaccttcattaacagactactcag

SEQ ID NO: 28485 - DNA, 25 bp, Artificial
  Probe
attccaccttcattaacagactact

SEQ ID NO: 28486 - DNA, 25 bp, Artificial
  Probe
gctattccaccttcattaacagact

SEQ ID NO: 28487 - DNA, 25 bp, Artificial
  Probe
tgctattccaccttcattaacagac

SEQ ID NO: 28488 - DNA, 25 bp, Artificial
  Probe
tccaccttcattaacagactactca

SEQ ID NO: 28489 - DNA, 25 bp, Artificial
  Probe
gcaagcaagaagaagattgatgtta

SEQ ID NO: 28490 - DNA, 25 bp, Artificial
  Probe
caccttcattaacagactactcagt

SEQ ID NO: 28491 - DNA, 25 bp, Artificial
  Probe
aattctcaatgactgttctgatgtg

SEQ ID NO: 28492 - DNA, 25 bp, Artificial
  Probe
caatgactgttctgatgtggatgag

SEQ ID NO: 28493 - DNA, 25 bp, Artificial
  Probe
attctcaatgactgttctgatgtgg

SEQ ID NO: 28494 - DNA, 25 bp, Artificial
  Probe
ctgcctatgagagtctgatactaga

SEQ ID NO: 28495 - DNA, 25 bp, Artificial
  Probe
atgactgttctgatgtggatgagat

SEQ ID NO: 28496 - DNA, 25 bp, Artificial
  Probe
tgcctatgagagtctgatactagat

SEQ ID NO: 28497 - DNA, 25 bp, Artificial
  Probe
tactccatgtctgtgtatcttgtac

SEQ ID NO: 28498 - DNA, 25 bp, Artificial
  Probe
gcctatgagagtctgatactagatg

SEQ ID NO: 28499 - DNA, 25 bp, Artificial
  Probe
attactccatgtctgtgtatcttgt

SEQ ID NO: 28500 - DNA, 25 bp, Artificial
  Probe
tattccaccttcattaacagactac

SEQ ID NO: 28501 - DNA, 25 bp, Artificial
  Probe
ctgctgctattccaccttcattaac

SEQ ID NO: 28502 - DNA, 25 bp, Artificial
  Probe
aatgactgttctgatgtggatgaga

SEQ ID NO: 28503 - DNA, 25 bp, Artificial
  Probe
taacagactactcagtaccattcca

SEQ ID NO: 28504 - DNA, 25 bp, Artificial
  Probe
ttaacagactactcagtaccattcc

SEQ ID NO: 28505 - DNA, 25 bp, Artificial
  Probe
ctgctattccaccttcattaacaga

SEQ ID NO: 28506 - DNA, 25 bp, Artificial
  Probe
ttactccatgtctgtgtatcttgta

SEQ ID NO: 28507 - DNA, 25 bp, Artificial
  Probe
cctatgagagtctgatactagatgg

SEQ ID NO: 28508 - DNA, 25 bp, Artificial
  Probe
accttcattaacagactactcagta

SEQ ID NO: 28509 - DNA, 25 bp, Artificial
  Probe
ctcaatgactgttctgatgtggatg

SEQ ID NO: 28510 - DNA, 25 bp, Artificial
  Probe
tctcaatgactgttctgatgtggat

SEQ ID NO: 28511 - DNA, 25 bp, Artificial
  Probe
ctattccaccttcattaacagacta

SEQ ID NO: 28512 - DNA, 25 bp, Artificial
  Probe
agaattactccatgtctgtgtatct

SEQ ID NO: 28513 - DNA, 25 bp, Artificial
  Probe
aattactccatgtctgtgtatcttg

SEQ ID NO: 28514 - DNA, 25 bp, Artificial
  Probe
ttcattaacagactactcagtacca

SEQ ID NO: 28515 - DNA, 25 bp, Artificial
  Probe
tcaatgactgttctgatgtggatga

SEQ ID NO: 28516 - DNA, 25 bp, Artificial
  Probe
ttctcaatgactgttctgatgtgga

SEQ ID NO: 28517 - DNA, 25 bp, Artificial
  Probe
gctgcctatgagagtctgatactag

SEQ ID NO: 28518 - DNA, 25 bp, Artificial
  Probe
tcattaacagactactcagtaccat

SEQ ID NO: 28519 - DNA, 25 bp, Artificial
  Probe
gaattactccatgtctgtgtatctt

SEQ ID NO: 28520 - DNA, 25 bp, Artificial
  Probe
tgctgctattccaccttcattaaca

SEQ ID NO: 28521 - DNA, 25 bp, Artificial
  Probe
gcaagaagaagattgatgttattga

SEQ ID NO: 28522 - DNA, 25 bp, Artificial
  Probe
agcaagaagaagattgatgttattg

SEQ ID NO: 28523 - DNA, 25 bp, Artificial
  Probe
caagcaagaagaagattgatgttat

SEQ ID NO: 28524 - DNA, 25 bp, Artificial
  Probe
cttggaacatcttctgatactgtgc

SEQ ID NO: 28525 - DNA, 25 bp, Artificial
  Probe
gcttggaacatcttctgatactgtg

SEQ ID NO: 28526 - DNA, 25 bp, Artificial
  Probe
cttcattaacagactactcagtacc

SEQ ID NO: 28527 - DNA, 25 bp, Artificial
  Probe
ccttcattaacagactactcagtac

SEQ ID NO: 28528 - DNA, 25 bp, Artificial
  Probe
atcacaggtaatgagatgaaaggag

SEQ ID NO: 28529 - DNA, 25 bp, Artificial
  Probe
atcttgagaagaaggatgtgtaaca

SEQ ID NO: 28530 - DNA, 25 bp, Artificial
  Probe
tctttctcctgggaacaagtaagta

SEQ ID NO: 28531 - DNA, 25 bp, Artificial
  Probe
cacaggtaatgagatgaaaggagga

SEQ ID NO: 28532 - DNA, 25 bp, Artificial
  Probe
gattgatcctgaactcctctgcttc

SEQ ID NO: 28533 - DNA, 25 bp, Artificial
  Probe
ctttctcctgggaacaagtaagtac

SEQ ID NO: 28534 - DNA, 25 bp, Artificial
  Probe
tcttgagaagaaggatgtgtaacat

SEQ ID NO: 28535 - DNA, 25 bp, Artificial
  Probe
tcacaggtaatgagatgaaaggagg

SEQ ID NO: 28536 - DNA, 25 bp, Artificial
  Probe
ttgagaagaaggatgtgtaacattg

SEQ ID NO: 28537 - DNA, 25 bp, Artificial
  Probe
cttgagaagaaggatgtgtaacatt

SEQ ID NO: 28538 - DNA, 25 bp, Artificial
  Probe
ctgacatcacaggtaatgagatgaa

SEQ ID NO: 28539 - DNA, 25 bp, Artificial
  Probe
gtctttctcctgggaacaagtaagt

SEQ ID NO: 28540 - DNA, 25 bp, Artificial
  Probe
aaaccatttaaagctaggagaaggg

SEQ ID NO: 28541 - DNA, 25 bp, Artificial
  Probe
tgagaagaaggatgtgtaacattgc

SEQ ID NO: 28542 - DNA, 25 bp, Artificial
  Probe
catcttgagaagaaggatgtgtaac

SEQ ID NO: 28543 - DNA, 25 bp, Artificial
  Probe
gcatcttgagaagaaggatgtgtaa

SEQ ID NO: 28544 - DNA, 25 bp, Artificial
  Probe
atttaaagctaggagaagggaggaa

SEQ ID NO: 28545 - DNA, 25 bp, Artificial
  Probe
tttaaagctaggagaagggaggaaa

SEQ ID NO: 28546 - DNA, 25 bp, Artificial
  Probe
agtgtatactcaggaggacagagag

SEQ ID NO: 28547 - DNA, 25 bp, Artificial
  Probe
aaccatttaaagctaggagaaggga

SEQ ID NO: 28548 - DNA, 25 bp, Artificial
  Probe
ttaaagctaggagaagggaggaaag

SEQ ID NO: 28549 - DNA, 25 bp, Artificial
  Probe
catttaaagctaggagaagggagga

SEQ ID NO: 28550 - DNA, 25 bp, Artificial
  Probe
tgtctttctcctgggaacaagtaag

SEQ ID NO: 28551 - DNA, 25 bp, Artificial
  Probe
ctgtctttctcctgggaacaagtaa

SEQ ID NO: 28552 - DNA, 25 bp, Artificial
  Probe
agcatcttgagaagaaggatgtgta

SEQ ID NO: 28553 - DNA, 25 bp, Artificial
  Probe
ggagtaagcaatcactgacctctca

SEQ ID NO: 28554 - DNA, 25 bp, Artificial
  Probe
cagtgtatactcaggaggacagaga

SEQ ID NO: 28555 - DNA, 25 bp, Artificial
  Probe
accatttaaagctaggagaagggag

SEQ ID NO: 28556 - DNA, 25 bp, Artificial
  Probe
ctgttgcatagacctactctttctc

SEQ ID NO: 28557 - DNA, 25 bp, Artificial
  Probe
tgttgcatagacctactctttctct

SEQ ID NO: 28558 - DNA, 25 bp, Artificial
  Probe
aagaaggatgtgtaacattgcattc

SEQ ID NO: 28559 - DNA, 25 bp, Artificial
  Probe
gaagaaggatgtgtaacattgcatt

SEQ ID NO: 28560 - DNA, 25 bp, Artificial
  Probe
agaagaaggatgtgtaacattgcat

SEQ ID NO: 28561 - DNA, 25 bp, Artificial
  Probe
catagacctactctttctctagctg

SEQ ID NO: 28562 - DNA, 25 bp, Artificial
  Probe
ccatttaaagctaggagaagggagg

SEQ ID NO: 28563 - DNA, 25 bp, Artificial
  Probe
atagacctactctttctctagctgc

SEQ ID NO: 28564 - DNA, 25 bp, Artificial
  Probe
gcatagacctactctttctctagct

SEQ ID NO: 28565 - DNA, 25 bp, Artificial
  Probe
gagaagaaggatgtgtaacattgca

SEQ ID NO: 28566 - DNA, 25 bp, Artificial
  Probe
agaaggatgtgtaacattgcattcc

SEQ ID NO: 28567 - DNA, 25 bp, Artificial
  Probe
gttgcatagacctactctttctcta

SEQ ID NO: 28568 - DNA, 25 bp, Artificial
  Probe
ttgcatagacctactctttctctag

SEQ ID NO: 28569 - DNA, 25 bp, Artificial
  Probe
cttccactaagcaggctgaggataa

SEQ ID NO: 28570 - DNA, 25 bp, Artificial
  Probe
tagacctactctttctctagctgct

SEQ ID NO: 28571 - DNA, 25 bp, Artificial
  Probe
tgcatagacctactctttctctagc

SEQ ID NO: 28572 - DNA, 25 bp, Artificial
  Probe
gctgttgcatagacctactctttct

SEQ ID NO: 28573 - DNA, 25 bp, Artificial
  Probe
ccctatttattctcatcagccatct

SEQ ID NO: 28574 - DNA, 25 bp, Artificial
  Probe
catacccagccctatttattctcat

SEQ ID NO: 28575 - DNA, 25 bp, Artificial
  Probe
atacccagccctatttattctcatc

SEQ ID NO: 28576 - DNA, 25 bp, Artificial
  Probe
atttattctcatcagccatcttccc

SEQ ID NO: 28577 - DNA, 25 bp, Artificial
  Probe
tacccagccctatttattctcatca

SEQ ID NO: 28578 - DNA, 25 bp, Artificial
  Probe
attcccatctctgaacataacaatg

SEQ ID NO: 28579 - DNA, 25 bp, Artificial
  Probe
gccctatttattctcatcagccatc

SEQ ID NO: 28580 - DNA, 25 bp, Artificial
  Probe
ttattctcatcagccatcttccctt

SEQ ID NO: 28581 - DNA, 25 bp, Artificial
  Probe
tttattctcatcagccatcttccct

SEQ ID NO: 28582 - DNA, 25 bp, Artificial
  Probe
tatttattctcatcagccatcttcc

SEQ ID NO: 28583 - DNA, 25 bp, Artificial
  Probe
cctatttattctcatcagccatctt

SEQ ID NO: 28584 - DNA, 25 bp, Artificial
  Probe
agccctatttattctcatcagccat

SEQ ID NO: 28585 - DNA, 25 bp, Artificial
  Probe
gtattcccatctctgaacataacaa

SEQ ID NO: 28586 - DNA, 25 bp, Artificial
  Probe
acccagccctatttattctcatcag

SEQ ID NO: 28587 - DNA, 25 bp, Artificial
  Probe
tattctcatcagccatcttcccttc

SEQ ID NO: 28588 - DNA, 25 bp, Artificial
  Probe
tgtattcccatctctgaacataaca

SEQ ID NO: 28589 - DNA, 25 bp, Artificial
  Probe
cctctctaactctgcctggattacc

SEQ ID NO: 28590 - DNA, 25 bp, Artificial
  Probe
ctagtacagagagcctatgggagta

SEQ ID NO: 28591 - DNA, 25 bp, Artificial
  Probe
ctgacatcacaggcaatgagataaa

SEQ ID NO: 28592 - DNA, 25 bp, Artificial
  Probe
ctgagaagaaggatgtcaaacactg

SEQ ID NO: 28593 - DNA, 25 bp, Artificial
  Probe
cagccctatttattctcatcagcca

SEQ ID NO: 28594 - DNA, 25 bp, Artificial
  Probe
tattcccatctctgaacataacaat

SEQ ID NO: 28595 - DNA, 25 bp, Artificial
  Probe
ctatttattctcatcagccatcttc

SEQ ID NO: 28596 - DNA, 25 bp, Artificial
  Probe
ttctcatcagccatcttcccttcta

SEQ ID NO: 28597 - DNA, 25 bp, Artificial
  Probe
ctgcatggatctactctttctctag

SEQ ID NO: 28598 - DNA, 25 bp, Artificial
  Probe
tctgcatggatctactctttctcta

SEQ ID NO: 28599 - DNA, 25 bp, Artificial
  Probe
ctctctaactctgcctggattacca

SEQ ID NO: 28600 - DNA, 25 bp, Artificial
  Probe
cttctgcatggatctactctttctc

SEQ ID NO: 28601 - DNA, 25 bp, Artificial
  Probe
ttctgcatggatctactctttctct

SEQ ID NO: 28602 - DNA, 25 bp, Artificial
  Probe
ccagccctatttattctcatcagcc

SEQ ID NO: 28603 - DNA, 25 bp, Artificial
  Probe
cccagccctatttattctcatcagc

SEQ ID NO: 28604 - DNA, 25 bp, Artificial
  Probe
ccatctctgaacataacaatgtggc

SEQ ID NO: 28605 - DNA, 25 bp, Artificial
  Probe
attctcatcagccatcttcccttct

SEQ ID NO: 28606 - DNA, 25 bp, Artificial
  Probe
cctgagaagaaggatgtcaaacact

SEQ ID NO: 28607 - DNA, 25 bp, Artificial
  Probe
ctcatcagccatcttcccttctact

SEQ ID NO: 28608 - DNA, 25 bp, Artificial
  Probe
tctcatcagccatcttcccttctac

SEQ ID NO: 28609 - DNA, 25 bp, Artificial
  Probe
atgagataaaaggaggcaagagaaa

SEQ ID NO: 28610 - DNA, 25 bp, Artificial
  Probe
aatgagataaaaggaggcaagagaa

SEQ ID NO: 28611 - DNA, 25 bp, Artificial
  Probe
tgagataaaaggaggcaagagaaag

SEQ ID NO: 28612 - DNA, 25 bp, Artificial
  Probe
caatgagataaaaggaggcaagaga

SEQ ID NO: 28613 - DNA, 25 bp, Artificial
  Probe
gataaaaggaggcaagagaaaggag

SEQ ID NO: 28614 - DNA, 25 bp, Artificial
  Probe
gagataaaaggaggcaagagaaagg

SEQ ID NO: 28615 - DNA, 25 bp, Artificial
  Probe
ttcccatctctgaacataacaatgt

SEQ ID NO: 28616 - DNA, 25 bp, Artificial
  Probe
tactctttctctagacccttactcg

SEQ ID NO: 28617 - DNA, 25 bp, Artificial
  Probe
ccctctctaactctgcctggattac

SEQ ID NO: 28618 - DNA, 25 bp, Artificial
  Probe
tagaacagtcagagagcgtgtaatt

SEQ ID NO: 28619 - DNA, 25 bp, Artificial
  Probe
ctagaacagtcagagagcgtgtaat

SEQ ID NO: 28620 - DNA, 25 bp, Artificial
  Probe
actcggtctgtgaacctattgataa

SEQ ID NO: 28621 - DNA, 25 bp, Artificial
  Probe
aactcggtctgtgaacctattgata

SEQ ID NO: 28622 - DNA, 25 bp, Artificial
  Probe
taattggtttgggctctcagataaa

SEQ ID NO: 28623 - DNA, 25 bp, Artificial
  Probe
ggtttagtgatgacagaattagcct

SEQ ID NO: 28624 - DNA, 25 bp, Artificial
  Probe
aattggtttgggctctcagataaat

SEQ ID NO: 28625 - DNA, 25 bp, Artificial
  Probe
gtaattggtttgggctctcagataa

SEQ ID NO: 28626 - DNA, 25 bp, Artificial
  Probe
tggtttagtgatgacagaattagcc

SEQ ID NO: 28627 - DNA, 25 bp, Artificial
  Probe
gataaagcaaagcaaaggttcactt

SEQ ID NO: 28628 - DNA, 25 bp, Artificial
  Probe
gtgaacctattgataaagcaaagca

SEQ ID NO: 28629 - DNA, 25 bp, Artificial
  Probe
tgtgaacctattgataaagcaaagc

SEQ ID NO: 28630 - DNA, 25 bp, Artificial
  Probe
attggtttgggctctcagataaatg

SEQ ID NO: 28631 - DNA, 25 bp, Artificial
  Probe
tgaacctattgataaagcaaagcaa

SEQ ID NO: 28632 - DNA, 25 bp, Artificial
  Probe
gtctgtgaacctattgataaagcaa

SEQ ID NO: 28633 - DNA, 25 bp, Artificial
  Probe
attgataaagcaaagcaaaggttca

SEQ ID NO: 28634 - DNA, 25 bp, Artificial
  Probe
ttcacagacctagaacagtcagaga

SEQ ID NO: 28635 - DNA, 25 bp, Artificial
  Probe
ttgataaagcaaagcaaaggttcac

SEQ ID NO: 28636 - DNA, 25 bp, Artificial
  Probe
agcctaatttatgaacaagagacaa

SEQ ID NO: 28637 - DNA, 25 bp, Artificial
  Probe
gtttagtgatgacagaattagccta

SEQ ID NO: 28638 - DNA, 25 bp, Artificial
  Probe
atataaatgttgtctactgcccttt

SEQ ID NO: 28639 - DNA, 25 bp, Artificial
  Probe
tctgtgaacctattgataaagcaaa

SEQ ID NO: 28640 - DNA, 25 bp, Artificial
  Probe
agaacagtcagagagcgtgtaattg

SEQ ID NO: 28641 - DNA, 25 bp, Artificial
  Probe
ggttcactttgtaaataacactggt

SEQ ID NO: 28642 - DNA, 25 bp, Artificial
  Probe
tgtaattggtttgggctctcagata

SEQ ID NO: 28643 - DNA, 25 bp, Artificial
  Probe
tattgataaagcaaagcaaaggttc

SEQ ID NO: 28644 - DNA, 25 bp, Artificial
  Probe
ctattgataaagcaaagcaaaggtt

SEQ ID NO: 28645 - DNA, 25 bp, Artificial
  Probe
aacctattgataaagcaaagcaaag

SEQ ID NO: 28646 - DNA, 25 bp, Artificial
  Probe
gaacctattgataaagcaaagcaaa

SEQ ID NO: 28647 - DNA, 25 bp, Artificial
  Probe
ttgggctctcagataaatgtggatt

SEQ ID NO: 28648 - DNA, 25 bp, Artificial
  Probe
tttgggctctcagataaatgtggat

SEQ ID NO: 28649 - DNA, 25 bp, Artificial
  Probe
aggttcactttgtaaataacactgg

SEQ ID NO: 28650 - DNA, 25 bp, Artificial
  Probe
ctgtgaacctattgataaagcaaag

SEQ ID NO: 28651 - DNA, 25 bp, Artificial
  Probe
ctggtttagtgatgacagaattagc

SEQ ID NO: 28652 - DNA, 25 bp, Artificial
  Probe
tcacagacctagaacagtcagagag

SEQ ID NO: 28653 - DNA, 25 bp, Artificial
  Probe
tgataaagcaaagcaaaggttcact

SEQ ID NO: 28654 - DNA, 25 bp, Artificial
  Probe
tgtatataaatgttgtctactgccc

SEQ ID NO: 28655 - DNA, 25 bp, Artificial
  Probe
ttagtgatgacagaattagcctaat

SEQ ID NO: 28656 - DNA, 25 bp, Artificial
  Probe
ttctgatgaatgataaacgctgctg

SEQ ID NO: 28657 - DNA, 25 bp, Artificial
  Probe
cctattgataaagcaaagcaaaggt

SEQ ID NO: 28658 - DNA, 25 bp, Artificial
  Probe
acctattgataaagcaaagcaaagg

SEQ ID NO: 28659 - DNA, 25 bp, Artificial
  Probe
atgaatgataaacgctgctgtcaaa

SEQ ID NO: 28660 - DNA, 25 bp, Artificial
  Probe
gtatataaatgttgtctactgccct

SEQ ID NO: 28661 - DNA, 25 bp, Artificial
  Probe
gcctaatttatgaacaagagacaaa

SEQ ID NO: 28662 - DNA, 25 bp, Artificial
  Probe
tagcctaatttatgaacaagagaca

SEQ ID NO: 28663 - DNA, 25 bp, Artificial
  Probe
gctaacaatacagaacagaacactc

SEQ ID NO: 28664 - DNA, 25 bp, Artificial
  Probe
aacaatacagaacagaacactcagg

SEQ ID NO: 28665 - DNA, 25 bp, Artificial
  Probe
taacaatacagaacagaacactcag

SEQ ID NO: 28666 - DNA, 25 bp, Artificial
  Probe
ctaacaatacagaacagaacactca

SEQ ID NO: 28667 - DNA, 25 bp, Artificial
  Probe
tacagaacagaacactcaggagaat

SEQ ID NO: 28668 - DNA, 25 bp, Artificial
  Probe
atacagaacagaacactcaggagaa

SEQ ID NO: 28669 - DNA, 25 bp, Artificial
  Probe
aatacagaacagaacactcaggaga

SEQ ID NO: 28670 - DNA, 25 bp, Artificial
  Probe
caatacagaacagaacactcaggag

SEQ ID NO: 28671 - DNA, 25 bp, Artificial
  Probe
acaatacagaacagaacactcagga

SEQ ID NO: 28672 - DNA, 25 bp, Artificial
  Probe
agaacagaacactcaggagaatgaa

SEQ ID NO: 28673 - DNA, 25 bp, Artificial
  Probe
agctaacaatacagaacagaacact

SEQ ID NO: 28674 - DNA, 25 bp, Artificial
  Probe
acagaacagaacactcaggagaatg

SEQ ID NO: 28675 - DNA, 25 bp, Artificial
  Probe
cagaacagaacactcaggagaatga

SEQ ID NO: 28676 - DNA, 25 bp, Artificial
  Probe
tactggatatggaaacaaagaggag

SEQ ID NO: 28677 - DNA, 25 bp, Artificial
  Probe
gtcgtggtttatactggatatggaa

SEQ ID NO: 28678 - DNA, 25 bp, Artificial
  Probe
ctgtgtcgtggtttatactggatat

SEQ ID NO: 28679 - DNA, 25 bp, Artificial
  Probe
tgtgtcgtggtttatactggatatg

SEQ ID NO: 28680 - DNA, 25 bp, Artificial
  Probe
tcgtggtttatactggatatggaaa

SEQ ID NO: 28681 - DNA, 25 bp, Artificial
  Probe
atactggatatggaaacaaagagga

SEQ ID NO: 28682 - DNA, 25 bp, Artificial
  Probe
tgattctgacatttgggatgataca

SEQ ID NO: 28683 - DNA, 25 bp, Artificial
  Probe
tgatgattctgacatttgggatgat

SEQ ID NO: 28684 - DNA, 25 bp, Artificial
  Probe
tgtcgtggtttatactggatatgga

SEQ ID NO: 28685 - DNA, 25 bp, Artificial
  Probe
gtgtcgtggtttatactggatatgg

SEQ ID NO: 28686 - DNA, 25 bp, Artificial
  Probe
catttgggatgatacagcattgata

SEQ ID NO: 28687 - DNA, 25 bp, Artificial
  Probe
acatttgggatgatacagcattgat

SEQ ID NO: 28688 - DNA, 25 bp, Artificial
  Probe
gagtgatgattctgacatttgggat

SEQ ID NO: 28689 - DNA, 25 bp, Artificial
  Probe
ggatatggaaacaaagaggagcaaa

SEQ ID NO: 28690 - DNA, 25 bp, Artificial
  Probe
atgattctgacatttgggatgatac

SEQ ID NO: 28691 - DNA, 25 bp, Artificial
  Probe
gtgatgattctgacatttgggatga

SEQ ID NO: 28692 - DNA, 25 bp, Artificial
  Probe
agtgatgattctgacatttgggatg

SEQ ID NO: 28693 - DNA, 25 bp, Artificial
  Probe
tttgggatgatacagcattgataaa

SEQ ID NO: 28694 - DNA, 25 bp, Artificial
  Probe
gatgattctgacatttgggatgata

SEQ ID NO: 28695 - DNA, 25 bp, Artificial
  Probe
atttgggatgatacagcattgataa

SEQ ID NO: 28696 - DNA, 25 bp, Artificial
  Probe
gacatttgggatgatacagcattga

SEQ ID NO: 28697 - DNA, 25 bp, Artificial
  Probe
aacagaacactcaggagaatgaaag

SEQ ID NO: 28698 - DNA, 25 bp, Artificial
  Probe
gaacagaacactcaggagaatgaaa

SEQ ID NO: 28699 - DNA, 25 bp, Artificial
  Probe
cctgtgtcgtggtttatactggata

SEQ ID NO: 28700 - DNA, 25 bp, Artificial
  Probe
tgacatttgggatgatacagcattg

SEQ ID NO: 28701 - DNA, 25 bp, Artificial
  Probe
agagtgatgattctgacatttggga

SEQ ID NO: 28702 - DNA, 25 bp, Artificial
  Probe
gattctgacatttgggatgatacag

SEQ ID NO: 28703 - DNA, 25 bp, Artificial
  Probe
tggatatggaaacaaagaggagcaa

SEQ ID NO: 28704 - DNA, 25 bp, Artificial
  Probe
tatactggatatggaaacaaagagg

SEQ ID NO: 28705 - DNA, 25 bp, Artificial
  Probe
tcacatacaaattaagaagttcagc

SEQ ID NO: 28706 - DNA, 25 bp, Artificial
  Probe
gctcacatacaaattaagaagttca

SEQ ID NO: 28707 - DNA, 25 bp, Artificial
  Probe
tgctcacatacaaattaagaagttc

SEQ ID NO: 28708 - DNA, 25 bp, Artificial
  Probe
actatggagacattgagattggttc

SEQ ID NO: 28709 - DNA, 25 bp, Artificial
  Probe
gactatggagacattgagattggtt

SEQ ID NO: 28710 - DNA, 25 bp, Artificial
  Probe
gaggactatggagacattgagattg

SEQ ID NO: 28711 - DNA, 25 bp, Artificial
  Probe
agaggactatggagacattgagatt

SEQ ID NO: 28712 - DNA, 25 bp, Artificial
  Probe
ctatggagacattgagattggttct

SEQ ID NO: 28713 - DNA, 25 bp, Artificial
  Probe
cagaggactatggagacattgagat

SEQ ID NO: 28714 - DNA, 25 bp, Artificial
  Probe
aggactatggagacattgagattgg

SEQ ID NO: 28715 - DNA, 25 bp, Artificial
  Probe
ggactatggagacattgagattggt

SEQ ID NO: 28716 - DNA, 25 bp, Artificial
  Probe
ttctcacaagagttccagcagtaac

SEQ ID NO: 28717 - DNA, 25 bp, Artificial
  Probe
gttctcacaagagttccagcagtaa

SEQ ID NO: 28718 - DNA, 25 bp, Artificial
  Probe
agattggttctcacaagagttccag

SEQ ID NO: 28719 - DNA, 25 bp, Artificial
  Probe
ccagaggactatggagacattgaga

SEQ ID NO: 28720 - DNA, 25 bp, Artificial
  Probe
tatggagacattgagattggttctc

SEQ ID NO: 28721 - DNA, 25 bp, Artificial
  Probe
ttacccagaggactatggagacatt

SEQ ID NO: 28722 - DNA, 25 bp, Artificial
  Probe
ctcacaagagttccagcagtaacct

SEQ ID NO: 28723 - DNA, 25 bp, Artificial
  Probe
tctcacaagagttccagcagtaacc

SEQ ID NO: 28724 - DNA, 25 bp, Artificial
  Probe
ggttctcacaagagttccagcagta

SEQ ID NO: 28725 - DNA, 25 bp, Artificial
  Probe
cttacccagaggactatggagacat

SEQ ID NO: 28726 - DNA, 25 bp, Artificial
  Probe
gattggttctcacaagagttccagc

SEQ ID NO: 28727 - DNA, 25 bp, Artificial
  Probe
tacccagaggactatggagacattg

SEQ ID NO: 28728 - DNA, 25 bp, Artificial
  Probe
gagattggttctcacaagagttcca

SEQ ID NO: 28729 - DNA, 25 bp, Artificial
  Probe
tcacaagagttccagcagtaacctg

SEQ ID NO: 28730 - DNA, 25 bp, Artificial
  Probe
gagacaacgaccagtatgtgctcat

SEQ ID NO: 28731 - DNA, 25 bp, Artificial
  Probe
attggttctcacaagagttccagca

SEQ ID NO: 28732 - DNA, 25 bp, Artificial
  Probe
cccagaggactatggagacattgag

SEQ ID NO: 28733 - DNA, 25 bp, Artificial
  Probe
agacaacgaccagtatgtgctcatg

SEQ ID NO: 28734 - DNA, 25 bp, Artificial
  Probe
ttggttctcacaagagttccagcag

SEQ ID NO: 28735 - DNA, 25 bp, Artificial
  Probe
caatagctgcaagagcgatgactac

SEQ ID NO: 28736 - DNA, 25 bp, Artificial
  Probe
atagctgcaagagcgatgactacat

SEQ ID NO: 28737 - DNA, 25 bp, Artificial
  Probe
acccagaggactatggagacattga

SEQ ID NO: 28738 - DNA, 25 bp, Artificial
  Probe
ccttacccagaggactatggagaca

SEQ ID NO: 28739 - DNA, 25 bp, Artificial
  Probe
aatagctgcaagagcgatgactaca

SEQ ID NO: 28740 - DNA, 25 bp, Artificial
  Probe
cagaagatagcgggtacatgcgaat

SEQ ID NO: 28741 - DNA, 25 bp, Artificial
  Probe
agaagatagcgggtacatgcgaatg

SEQ ID NO: 28742 - DNA, 25 bp, Artificial
  Probe
tagctgcaagagcgatgactacatg

SEQ ID NO: 28743 - DNA, 25 bp, Artificial
  Probe
ccaatagctgcaagagcgatgacta

SEQ ID NO: 28744 - DNA, 25 bp, Artificial
  Probe
gacaacgaccagtatgtgctcatga

SEQ ID NO: 28745 - DNA, 25 bp, Artificial
  Probe
gaagatagcgggtacatgcgaatgt

SEQ ID NO: 28746 - DNA, 25 bp, Artificial
  Probe
ctcttacaaggctccctgtacttgc

SEQ ID NO: 28747 - DNA, 25 bp, Artificial
  Probe
gctcttacaaggctccctgtacttg

SEQ ID NO: 28748 - DNA, 25 bp, Artificial
  Probe
acctgacttcttctcagcagctttg

SEQ ID NO: 28749 - DNA, 25 bp, Artificial
  Probe
cacctgacttcttctcagcagcttt

SEQ ID NO: 28750 - DNA, 25 bp, Artificial
  Probe
ccaatggggactacctcaacatgtc

SEQ ID NO: 28751 - DNA, 25 bp, Artificial
  Probe
caatggggactacctcaacatgtcc

SEQ ID NO: 28752 - DNA, 25 bp, Artificial
  Probe
ttcatcaacagattctcagcaacaa

SEQ ID NO: 28753 - DNA, 25 bp, Artificial
  Probe
atcaacagattctcagcaacaagtt

SEQ ID NO: 28754 - DNA, 25 bp, Artificial
  Probe
gattctcagcaacaagttcctcatt

SEQ ID NO: 28755 - DNA, 25 bp, Artificial
  Probe
tcatcaacagattctcagcaacaag

SEQ ID NO: 28756 - DNA, 25 bp, Artificial
  Probe
attgtacgaatgagagaattgctgt

SEQ ID NO: 28757 - DNA, 25 bp, Artificial
  Probe
catcaacagattctcagcaacaagt

SEQ ID NO: 28758 - DNA, 25 bp, Artificial
  Probe
tcaacagattctcagcaacaagttc

SEQ ID NO: 28759 - DNA, 25 bp, Artificial
  Probe
gttcatcaacagattctcagcaaca

SEQ ID NO: 28760 - DNA, 25 bp, Artificial
  Probe
attctcagcaacaagttcctcattg

SEQ ID NO: 28761 - DNA, 25 bp, Artificial
  Probe
ttgtacgaatgagagaattgctgtg

SEQ ID NO: 28762 - DNA, 25 bp, Artificial
  Probe
agattctcagcaacaagttcctcat

SEQ ID NO: 28763 - DNA, 25 bp, Artificial
  Probe
tacgaatgagagaattgctgtggaa

SEQ ID NO: 28764 - DNA, 25 bp, Artificial
  Probe
caacagattctcagcaacaagttcc

SEQ ID NO: 28765 - DNA, 25 bp, Artificial
  Probe
aacagattctcagcaacaagttcct

SEQ ID NO: 28766 - DNA, 25 bp, Artificial
  Probe
cagattctcagcaacaagttcctca

SEQ ID NO: 28767 - DNA, 25 bp, Artificial
  Probe
acagattctcagcaacaagttcctc

SEQ ID NO: 28768 - DNA, 25 bp, Artificial
  Probe
cattgtacgaatgagagaattgctg

SEQ ID NO: 28769 - DNA, 25 bp, Artificial
  Probe
gtacgaatgagagaattgctgtgga

SEQ ID NO: 28770 - DNA, 25 bp, Artificial
  Probe
acgaatgagagaattgctgtggaag

SEQ ID NO: 28771 - DNA, 25 bp, Artificial
  Probe
tgtacgaatgagagaattgctgtgg

SEQ ID NO: 28772 - DNA, 25 bp, Artificial
  Probe
tggcttccttaataaacttcgtgct

SEQ ID NO: 28773 - DNA, 25 bp, Artificial
  Probe
caacaagttcctcattgtacgaatg

SEQ ID NO: 28774 - DNA, 25 bp, Artificial
  Probe
tgttcatcaacagattctcagcaac

SEQ ID NO: 28775 - DNA, 25 bp, Artificial
  Probe
caaaccagcttagtaaagtcctgtc

SEQ ID NO: 28776 - DNA, 25 bp, Artificial
  Probe
gcaacaagttcctcattgtacgaat

SEQ ID NO: 28777 - DNA, 25 bp, Artificial
  Probe
ctcagcaacaagttcctcattgtac

SEQ ID NO: 28778 - DNA, 25 bp, Artificial
  Probe
tctcagcaacaagttcctcattgta

SEQ ID NO: 28779 - DNA, 25 bp, Artificial
  Probe
catatagccccagattcaattcgtg

SEQ ID NO: 28780 - DNA, 25 bp, Artificial
  Probe
ttctcagcaacaagttcctcattgt

SEQ ID NO: 28781 - DNA, 25 bp, Artificial
  Probe
ccaaaccagcttagtaaagtcctgt

SEQ ID NO: 28782 - DNA, 25 bp, Artificial
  Probe
agcaacaagttcctcattgtacgaa

SEQ ID NO: 28783 - DNA, 25 bp, Artificial
  Probe
aaaccagcttagtaaagtcctgtcg

SEQ ID NO: 28784 - DNA, 25 bp, Artificial
  Probe
tctatcagaggctggtggagttcat

SEQ ID NO: 28785 - DNA, 25 bp, Artificial
  Probe
ttctatcagaggctggtggagttca

SEQ ID NO: 28786 - DNA, 25 bp, Artificial
  Probe
ccatatagccccagattcaattcgt

SEQ ID NO: 28787 - DNA, 25 bp, Artificial
  Probe
tttctatcagaggctggtggagttc

SEQ ID NO: 28788 - DNA, 25 bp, Artificial
  Probe
cagattcaattcgtgggagtttggg

SEQ ID NO: 28789 - DNA, 25 bp, Artificial
  Probe
ctatcagaggctggtggagttcatg

SEQ ID NO: 28790 - DNA, 25 bp, Artificial
  Probe
gaatgagagaattgctgtggaagcc

SEQ ID NO: 28791 - DNA, 25 bp, Artificial
  Probe
cccaaaccagcttagtaaagtcctg

SEQ ID NO: 28792 - DNA, 25 bp, Artificial
  Probe
cagcaacaagttcctcattgtacga

SEQ ID NO: 28793 - DNA, 25 bp, Artificial
  Probe
tcagcaacaagttcctcattgtacg

SEQ ID NO: 28794 - DNA, 25 bp, Artificial
  Probe
cgaatgagagaattgctgtggaagc

SEQ ID NO: 28795 - DNA, 25 bp, Artificial
  Probe
tcattgtacgaatgagagaattgct

SEQ ID NO: 28796 - DNA, 25 bp, Artificial
  Probe
aacaagttcctcattgtacgaatga

SEQ ID NO: 28797 - DNA, 25 bp, Artificial
  Probe
ctctgagagtaattcgctagtgtaa

SEQ ID NO: 28798 - DNA, 25 bp, Artificial
  Probe
tattgagaacactctgtaccattgt

SEQ ID NO: 28799 - DNA, 25 bp, Artificial
  Probe
tgtattgagaacactctgtaccatt

SEQ ID NO: 28800 - DNA, 25 bp, Artificial
  Probe
gtattgagaacactctgtaccattg

SEQ ID NO: 28801 - DNA, 25 bp, Artificial
  Probe
attgagaacactctgtaccattgtg

SEQ ID NO: 28802 - DNA, 25 bp, Artificial
  Probe
ctgagatgagttagtttagaggcta

SEQ ID NO: 28803 - DNA, 25 bp, Artificial
  Probe
cgtctgagatgagttagtttagagg

SEQ ID NO: 28804 - DNA, 25 bp, Artificial
  Probe
tctgagatgagttagtttagaggct

SEQ ID NO: 28805 - DNA, 25 bp, Artificial
  Probe
gtctgagatgagttagtttagaggc

SEQ ID NO: 28806 - DNA, 25 bp, Artificial
  Probe
tctgagagtaattcgctagtgtaaa

SEQ ID NO: 28807 - DNA, 25 bp, Artificial
  Probe
ctgagagtaattcgctagtgtaaag

SEQ ID NO: 28808 - DNA, 25 bp, Artificial
  Probe
tgagatgagttagtttagaggctaa

SEQ ID NO: 28809 - DNA, 25 bp, Artificial
  Probe
acgtctgagatgagttagtttagag

SEQ ID NO: 28810 - DNA, 25 bp, Artificial
  Probe
ttgagaacactctgtaccattgtgc

SEQ ID NO: 28811 - DNA, 25 bp, Artificial
  Probe
aacgtctgagatgagttagtttaga

SEQ ID NO: 28812 - DNA, 25 bp, Artificial
  Probe
caggaacggagatggttgagtagag

SEQ ID NO: 28813 - DNA, 25 bp, Artificial
  Probe
tgagagtaattcgctagtgtaaagc

SEQ ID NO: 28814 - DNA, 25 bp, Artificial
  Probe
agaacactctgtaccattgtgcaag

SEQ ID NO: 28815 - DNA, 25 bp, Artificial
  Probe
gagaacactctgtaccattgtgcaa

SEQ ID NO: 28816 - DNA, 25 bp, Artificial
  Probe
gagagtaattcgctagtgtaaagct

SEQ ID NO: 28817 - DNA, 25 bp, Artificial
  Probe
gaacggagatggttgagtagagcag

SEQ ID NO: 28818 - DNA, 25 bp, Artificial
  Probe
tagcaggaacggagatggttgagta

SEQ ID NO: 28819 - DNA, 25 bp, Artificial
  Probe
actctgagagtaattcgctagtgta

SEQ ID NO: 28820 - DNA, 25 bp, Artificial
  Probe
ttttggtggaaatctgaaaactgtg

SEQ ID NO: 28821 - DNA, 25 bp, Artificial
  Probe
caaacgtctgagatgagttagttta

SEQ ID NO: 28822 - DNA, 25 bp, Artificial
  Probe
aaacgtctgagatgagttagtttag

SEQ ID NO: 28823 - DNA, 25 bp, Artificial
  Probe
ggcaaacgtctgagatgagttagtt

SEQ ID NO: 28824 - DNA, 25 bp, Artificial
  Probe
tttggtggaaatctgaaaactgtgc

SEQ ID NO: 28825 - DNA, 25 bp, Artificial
  Probe
gcaaacgtctgagatgagttagttt

SEQ ID NO: 28826 - DNA, 25 bp, Artificial
  Probe
ctctgtaccattgtgcaaggagtac

SEQ ID NO: 28827 - DNA, 25 bp, Artificial
  Probe
gaacactctgtaccattgtgcaagg

SEQ ID NO: 28828 - DNA, 25 bp, Artificial
  Probe
tgagaacactctgtaccattgtgca

SEQ ID NO: 28829 - DNA, 25 bp, Artificial
  Probe
cactctgagagtaattcgctagtgt

SEQ ID NO: 28830 - DNA, 25 bp, Artificial
  Probe
aacactctgtaccattgtgcaagga

SEQ ID NO: 28831 - DNA, 25 bp, Artificial
  Probe
cacggttttggtggaaatctgaaaa

SEQ ID NO: 28832 - DNA, 25 bp, Artificial
  Probe
cagcactctgagagtaattcgctag

SEQ ID NO: 28833 - DNA, 25 bp, Artificial
  Probe
ggtggaaatctgaaaactgtgcaat

SEQ ID NO: 28834 - DNA, 25 bp, Artificial
  Probe
agcactctgagagtaattcgctagt

SEQ ID NO: 28835 - DNA, 25 bp, Artificial
  Probe
tcagcactctgagagtaattcgcta

SEQ ID NO: 28836 - DNA, 25 bp, Artificial
  Probe
ggcttcagcactctgagagtaattc

SEQ ID NO: 28837 - DNA, 25 bp, Artificial
  Probe
ctaatccggcgactactaccagttg

SEQ ID NO: 28838 - DNA, 25 bp, Artificial
  Probe
acactctgtaccattgtgcaaggag

SEQ ID NO: 28839 - DNA, 25 bp, Artificial
  Probe
actctgtaccattgtgcaaggagta

SEQ ID NO: 28840 - DNA, 25 bp, Artificial
  Probe
agagtaattcgctagtgtaaagctt

SEQ ID NO: 28841 - DNA, 25 bp, Artificial
  Probe
cttcagcactctgagagtaattcgc

SEQ ID NO: 28842 - DNA, 25 bp, Artificial
  Probe
tacagatgaatgaatcggaactacc

SEQ ID NO: 28843 - DNA, 25 bp, Artificial
  Probe
ctctacagatgaatgaatcggaact

SEQ ID NO: 28844 - DNA, 25 bp, Artificial
  Probe
ctacagatgaatgaatcggaactac

SEQ ID NO: 28845 - DNA, 25 bp, Artificial
  Probe
tctctacagatgaatgaatcggaac

SEQ ID NO: 28846 - DNA, 25 bp, Artificial
  Probe
gtctctacagatgaatgaatcggaa

SEQ ID NO: 28847 - DNA, 25 bp, Artificial
  Probe
tctacagatgaatgaatcggaacta

SEQ ID NO: 28848 - DNA, 25 bp, Artificial
  Probe
cctatccaccaagaattacgacatc

SEQ ID NO: 28849 - DNA, 25 bp, Artificial
  Probe
agtctctacagatgaatgaatcgga

SEQ ID NO: 28850 - DNA, 25 bp, Artificial
  Probe
cagtctctacagatgaatgaatcgg

SEQ ID NO: 28851 - DNA, 25 bp, Artificial
  Probe
tcctatccaccaagaattacgacat

SEQ ID NO: 28852 - DNA, 25 bp, Artificial
  Probe
ctatccaccaagaattacgacatcg

SEQ ID NO: 28853 - DNA, 25 bp, Artificial
  Probe
ctcctatccaccaagaattacgaca

SEQ ID NO: 28854 - DNA, 25 bp, Artificial
  Probe
caggctcctatccaccaagaattac

SEQ ID NO: 28855 - DNA, 25 bp, Artificial
  Probe
gctcctatccaccaagaattacgac

SEQ ID NO: 28856 - DNA, 25 bp, Artificial
  Probe
cttgtagaatcttcagggtggaatg

SEQ ID NO: 28857 - DNA, 25 bp, Artificial
  Probe
tcttgtagaatcttcagggtggaat

SEQ ID NO: 28858 - DNA, 25 bp, Artificial
  Probe
tatccaccaagaattacgacatcgc

SEQ ID NO: 28859 - DNA, 25 bp, Artificial
  Probe
ttgtagaatcttcagggtggaatgt

SEQ ID NO: 28860 - DNA, 25 bp, Artificial
  Probe
agatgaatgaatcggaactacccag

SEQ ID NO: 28861 - DNA, 25 bp, Artificial
  Probe
ccaggctcctatccaccaagaatta

SEQ ID NO: 28862 - DNA, 25 bp, Artificial
  Probe
tagaatcttcagggtggaatgtgtg

SEQ ID NO: 28863 - DNA, 25 bp, Artificial
  Probe
gtagaatcttcagggtggaatgtgt

SEQ ID NO: 28864 - DNA, 25 bp, Artificial
  Probe
tgtagaatcttcagggtggaatgtg

SEQ ID NO: 28865 - DNA, 25 bp, Artificial
  Probe
cagatgaatgaatcggaactaccca

SEQ ID NO: 28866 - DNA, 25 bp, Artificial
  Probe
acagatgaatgaatcggaactaccc

SEQ ID NO: 28867 - DNA, 25 bp, Artificial
  Probe
ggctcctatccaccaagaattacga

SEQ ID NO: 28868 - DNA, 25 bp, Artificial
  Probe
aggctcctatccaccaagaattacg

SEQ ID NO: 28869 - DNA, 25 bp, Artificial
  Probe
cttgtcttgtatgtgcatcacgtag

SEQ ID NO: 28870 - DNA, 25 bp, Artificial
  Probe
aaataaagccattatgttaagaggg

SEQ ID NO: 28871 - DNA, 25 bp, Artificial
  Probe
ttgtcttgtatgtgcatcacgtaga

SEQ ID NO: 28872 - DNA, 25 bp, Artificial
  Probe
tcttgtcttgtatgtgcatcacgta

SEQ ID NO: 28873 - DNA, 25 bp, Artificial
  Probe
gaatcttcagggtggaatgtgtgat

SEQ ID NO: 28874 - DNA, 25 bp, Artificial
  Probe
ctgatgatgggtttcgatgatgaag

SEQ ID NO: 28875 - DNA, 25 bp, Artificial
  Probe
tgtcttgtatgtgcatcacgtagag

SEQ ID NO: 28876 - DNA, 25 bp, Artificial
  Probe
aatcttcagggtggaatgtgtgatg

SEQ ID NO: 28877 - DNA, 25 bp, Artificial
  Probe
taaagccattatgttaagaggggac

SEQ ID NO: 28878 - DNA, 25 bp, Artificial
  Probe
ttcttgtagaatcttcagggtggaa

SEQ ID NO: 28879 - DNA, 25 bp, Artificial
  Probe
ataggaaagtgcatggaggaagttt

SEQ ID NO: 28880 - DNA, 25 bp, Artificial
  Probe
aataggaaagtgcatggaggaagtt

SEQ ID NO: 28881 - DNA, 25 bp, Artificial
  Probe
gatgaatgaatcggaactacccagc

SEQ ID NO: 28882 - DNA, 25 bp, Artificial
  Probe
ataaagccattatgttaagagggga

SEQ ID NO: 28883 - DNA, 25 bp, Artificial
  Probe
atccaccaagaattacgacatcgct

SEQ ID NO: 28884 - DNA, 25 bp, Artificial
  Probe
caaataaagccattatgttaagagg

SEQ ID NO: 28885 - DNA, 25 bp, Artificial
  Probe
ctatacccacatcatccaccagagg

SEQ ID NO: 28886 - DNA, 25 bp, Artificial
  Probe
cctatacccacatcatccaccagag

SEQ ID NO: 28887 - DNA, 25 bp, Artificial
  Probe
cagcctaagaaccaagaagatgtaa

SEQ ID NO: 28888 - DNA, 25 bp, Artificial
  Probe
tcagcctaagaaccaagaagatgta

SEQ ID NO: 28889 - DNA, 25 bp, Artificial
  Probe
ctcagcctaagaaccaagaagatgt

SEQ ID NO: 28890 - DNA, 25 bp, Artificial
  Probe
agcctaagaaccaagaagatgtaaa

SEQ ID NO: 28891 - DNA, 25 bp, Artificial
  Probe
cctcagcctaagaaccaagaagatg

SEQ ID NO: 28892 - DNA, 25 bp, Artificial
  Probe
tcctcagcctaagaaccaagaagat

SEQ ID NO: 28893 - DNA, 25 bp, Artificial
  Probe
ttcatattgcatcatagtgtgtcat

SEQ ID NO: 28894 - DNA, 25 bp, Artificial
  Probe
attcatattgcatcatagtgtgtca

SEQ ID NO: 28895 - DNA, 25 bp, Artificial
  Probe
cttgtccaatggatgaagttgattc

SEQ ID NO: 28896 - DNA, 25 bp, Artificial
  Probe
tcttgtccaatggatgaagttgatt

SEQ ID NO: 28897 - DNA, 25 bp, Artificial
  Probe
gcatcatagtgtgtcatatttaagc

SEQ ID NO: 28898 - DNA, 25 bp, Artificial
  Probe
gtttaaggcagtaagtttatatggc

SEQ ID NO: 28899 - DNA, 25 bp, Artificial
  Probe
gattcatattgcatcatagtgtgtc

SEQ ID NO: 28900 - DNA, 25 bp, Artificial
  Probe
gtcttgtccaatggatgaagttgat

SEQ ID NO: 28901 - DNA, 25 bp, Artificial
  Probe
ctcctcagcctaagaaccaagaaga

SEQ ID NO: 28902 - DNA, 25 bp, Artificial
  Probe
tcatattgcatcatagtgtgtcata

SEQ ID NO: 28903 - DNA, 25 bp, Artificial
  Probe
aatgctatcatctttcacctgaagt

SEQ ID NO: 28904 - DNA, 25 bp, Artificial
  Probe
atgctatcatctttcacctgaagtc

SEQ ID NO: 28905 - DNA, 25 bp, Artificial
  Probe
taatgctatcatctttcacctgaag

SEQ ID NO: 28906 - DNA, 25 bp, Artificial
  Probe
tttctgtgtgcttaattgtttctta

SEQ ID NO: 28907 - DNA, 25 bp, Artificial
  Probe
ttaatgctatcatctttcacctgaa

SEQ ID NO: 28908 - DNA, 25 bp, Artificial
  Probe
cccttcttggaaacaataagctatt

SEQ ID NO: 28909 - DNA, 25 bp, Artificial
  Probe
tctgtgtgcttaattgtttcttaaa

SEQ ID NO: 28910 - DNA, 25 bp, Artificial
  Probe
ttctgtgtgcttaattgtttcttaa

SEQ ID NO: 28911 - DNA, 25 bp, Artificial
  Probe
ttgtccaatggatgaagttgattca

SEQ ID NO: 28912 - DNA, 25 bp, Artificial
  Probe
ctatcatctttcacctgaagtcgaa

SEQ ID NO: 28913 - DNA, 25 bp, Artificial
  Probe
catattgcatcatagtgtgtcatat

SEQ ID NO: 28914 - DNA, 25 bp, Artificial
  Probe
tgtttaaggcagtaagtttatatgg

SEQ ID NO: 28915 - DNA, 25 bp, Artificial
  Probe
gcccttcttggaaacaataagctat

SEQ ID NO: 28916 - DNA, 25 bp, Artificial
  Probe
cctcctcagcctaagaaccaagaag

SEQ ID NO: 28917 - DNA, 25 bp, Artificial
  Probe
attaatgctatcatctttcacctga

SEQ ID NO: 28918 - DNA, 25 bp, Artificial
  Probe
ggtcttgtccaatggatgaagttga

SEQ ID NO: 28919 - DNA, 25 bp, Artificial
  Probe
ggttcaatattatgtttaaggcagt

SEQ ID NO: 28920 - DNA, 25 bp, Artificial
  Probe
tcatagtgtgtcatatttaagctca

SEQ ID NO: 28921 - DNA, 25 bp, Artificial
  Probe
tgattcatattgcatcatagtgtgt

SEQ ID NO: 28922 - DNA, 25 bp, Artificial
  Probe
tgctatcatctttcacctgaagtcg

SEQ ID NO: 28923 - DNA, 25 bp, Artificial
  Probe
aggttcaatattatgtttaaggcag

SEQ ID NO: 28924 - DNA, 25 bp, Artificial
  Probe
gcctaagaaccaagaagatgtaaaa

SEQ ID NO: 28925 - DNA, 25 bp, Artificial
  Probe
ctgtgtgcttaattgtttcttaaat

SEQ ID NO: 28926 - DNA, 25 bp, Artificial
  Probe
tgttttctgtgtgcttaattgtttc

SEQ ID NO: 28927 - DNA, 25 bp, Artificial
  Probe
gttttctgtgtgcttaattgtttct

SEQ ID NO: 28928 - DNA, 25 bp, Artificial
  Probe
tggtcttgtccaatggatgaagttg

SEQ ID NO: 28929 - DNA, 25 bp, Artificial
  Probe
gtggtcttgtccaatggatgaagtt

SEQ ID NO: 28930 - DNA, 25 bp, Artificial
  Probe
atattgcatcatagtgtgtcatatt

SEQ ID NO: 28931 - DNA, 25 bp, Artificial
  Probe
tatcatctttcacctgaagtcgaaa

SEQ ID NO: 28932 - DNA, 25 bp, Artificial
  Probe
ccttaccttcagtatgtgttggata

SEQ ID NO: 28933 - DNA, 25 bp, Artificial
  Probe
ttgctggcttaactacttcttatga

SEQ ID NO: 28934 - DNA, 25 bp, Artificial
  Probe
taccttaccttcagtatgtgttgga

SEQ ID NO: 28935 - DNA, 25 bp, Artificial
  Probe
tgctggcttaactacttcttatgaa

SEQ ID NO: 28936 - DNA, 25 bp, Artificial
  Probe
attgctggcttaactacttcttatg

SEQ ID NO: 28937 - DNA, 25 bp, Artificial
  Probe
tctactcattatcactcatacctgg

SEQ ID NO: 28938 - DNA, 25 bp, Artificial
  Probe
tctgaggtgtatgaagtctgaagaa

SEQ ID NO: 28939 - DNA, 25 bp, Artificial
  Probe
ttctgaggtgtatgaagtctgaaga

SEQ ID NO: 28940 - DNA, 25 bp, Artificial
  Probe
accttaccttcagtatgtgttggat

SEQ ID NO: 28941 - DNA, 25 bp, Artificial
  Probe
tatctgcctgccttcttcattctaa

SEQ ID NO: 28942 - DNA, 25 bp, Artificial
  Probe
tccttcttctactcattatcactca

SEQ ID NO: 28943 - DNA, 25 bp, Artificial
  Probe
aattgctggcttaactacttcttat

SEQ ID NO: 28944 - DNA, 25 bp, Artificial
  Probe
ccgagagatacaataggaaccttct

SEQ ID NO: 28945 - DNA, 25 bp, Artificial
  Probe
ctatctgcctgccttcttcattcta

SEQ ID NO: 28946 - DNA, 25 bp, Artificial
  Probe
tgttccttcttctactcattatcac

SEQ ID NO: 28947 - DNA, 25 bp, Artificial
  Probe
cttaccttcagtatgtgttggatat

SEQ ID NO: 28948 - DNA, 25 bp, Artificial
  Probe
gttccttcttctactcattatcact

SEQ ID NO: 28949 - DNA, 25 bp, Artificial
  Probe
ataccttaccttcagtatgtgttgg

SEQ ID NO: 28950 - DNA, 25 bp, Artificial
  Probe
ttaccttcagtatgtgttggatatt

SEQ ID NO: 28951 - DNA, 25 bp, Artificial
  Probe
ccttcttctactcattatcactcat

SEQ ID NO: 28952 - DNA, 25 bp, Artificial
  Probe
ttccttcttctactcattatcactc

SEQ ID NO: 28953 - DNA, 25 bp, Artificial
  Probe
agaagtcagttggatcaggaatcaa

SEQ ID NO: 28954 - DNA, 25 bp, Artificial
  Probe
ttctactcattatcactcatacctg

SEQ ID NO: 28955 - DNA, 25 bp, Artificial
  Probe
ttgttccttcttctactcattatca

SEQ ID NO: 28956 - DNA, 25 bp, Artificial
  Probe
gagaagtcagttggatcaggaatca

SEQ ID NO: 28957 - DNA, 25 bp, Artificial
  Probe
atctgcctgccttcttcattctaag

SEQ ID NO: 28958 - DNA, 25 bp, Artificial
  Probe
ctactcattatcactcatacctggg

SEQ ID NO: 28959 - DNA, 25 bp, Artificial
  Probe
cttctactcattatcactcatacct

SEQ ID NO: 28960 - DNA, 25 bp, Artificial
  Probe
tcttctactcattatcactcatacc

SEQ ID NO: 28961 - DNA, 25 bp, Artificial
  Probe
ctgtccctctgtaactttatgctaa

SEQ ID NO: 28962 - DNA, 25 bp, Artificial
  Probe
tctgtaactttatgctaacctgtga

SEQ ID NO: 28963 - DNA, 25 bp, Artificial
  Probe
cctctgtaactttatgctaacctgt

SEQ ID NO: 28964 - DNA, 25 bp, Artificial
  Probe
tgtccctctgtaactttatgctaac

SEQ ID NO: 28965 - DNA, 25 bp, Artificial
  Probe
agaagttcaagattactctcaagaa

SEQ ID NO: 28966 - DNA, 25 bp, Artificial
  Probe
aagaagttcaagattactctcaaga

SEQ ID NO: 28967 - DNA, 25 bp, Artificial
  Probe
ctgaggtgtatgaagtctgaagaaa

SEQ ID NO: 28968 - DNA, 25 bp, Artificial
  Probe
ctctgtaactttatgctaacctgtg

SEQ ID NO: 28969 - DNA, 25 bp, Artificial
  Probe
ccttctgtccctctgtaactttatg

SEQ ID NO: 28970 - DNA, 25 bp, Artificial
  Probe
tgagaagtcagttggatcaggaatc

SEQ ID NO: 28971 - DNA, 25 bp, Artificial
  Probe
tctgtccctctgtaactttatgcta

SEQ ID NO: 28972 - DNA, 25 bp, Artificial
  Probe
gaagaagttcaagattactctcaag

SEQ ID NO: 28973 - DNA, 25 bp, Artificial
  Probe
ccctctgtaactttatgctaacctg

SEQ ID NO: 28974 - DNA, 25 bp, Artificial
  Probe
tccctctgtaactttatgctaacct

SEQ ID NO: 28975 - DNA, 25 bp, Artificial
  Probe
gtccctctgtaactttatgctaacc

SEQ ID NO: 28976 - DNA, 25 bp, Artificial
  Probe
ctcaatcaagggaagtatgtgtttc

SEQ ID NO: 28977 - DNA, 25 bp, Artificial
  Probe
attgctacccttactttcctccatt

SEQ ID NO: 28978 - DNA, 25 bp, Artificial
  Probe
aattgctacccttactttcctccat

SEQ ID NO: 28979 - DNA, 25 bp, Artificial
  Probe
caaattgctacccttactttcctcc

SEQ ID NO: 28980 - DNA, 25 bp, Artificial
  Probe
ccaaattgctacccttactttcctc

SEQ ID NO: 28981 - DNA, 25 bp, Artificial
  Probe
aaattgctacccttactttcctcca

SEQ ID NO: 28982 - DNA, 25 bp, Artificial
  Probe
accaaattgctacccttactttcct

SEQ ID NO: 28983 - DNA, 25 bp, Artificial
  Probe
cccttactttcctccattggttaag

SEQ ID NO: 28984 - DNA, 25 bp, Artificial
  Probe
ttgctacccttactttcctccattg

SEQ ID NO: 28985 - DNA, 25 bp, Artificial
  Probe
tacccttactttcctccattggtta

SEQ ID NO: 28986 - DNA, 25 bp, Artificial
  Probe
acccttactttcctccattggttaa

SEQ ID NO: 28987 - DNA, 25 bp, Artificial
  Probe
ctacccttactttcctccattggtt

SEQ ID NO: 28988 - DNA, 25 bp, Artificial
  Probe
tgctacccttactttcctccattgg

SEQ ID NO: 28989 - DNA, 25 bp, Artificial
  Probe
gctacccttactttcctccattggt

SEQ ID NO: 28990 - DNA, 25 bp, Artificial
  Probe
tctatctatctgttttgttcattca

SEQ ID NO: 28991 - DNA, 25 bp, Artificial
  Probe
ctatctatctgttttgttcattcaa

SEQ ID NO: 28992 - DNA, 25 bp, Artificial
  Probe
atctatctatctgttttgttcattc

SEQ ID NO: 28993 - DNA, 25 bp, Artificial
  Probe
tctatctatctatctgttttgttca

SEQ ID NO: 28994 - DNA, 25 bp, Artificial
  Probe
atctatctgttttgttcattcaaat

SEQ ID NO: 28995 - DNA, 25 bp, Artificial
  Probe
tctatctgttttgttcattcaaata

SEQ ID NO: 28996 - DNA, 25 bp, Artificial
  Probe
tatctatctgttttgttcattcaaa

SEQ ID NO: 28997 - DNA, 25 bp, Artificial
  Probe
aagtctcatctgtctcttcagtgtc

SEQ ID NO: 28998 - DNA, 25 bp, Artificial
  Probe
agtctcatctgtctcttcagtgtca

SEQ ID NO: 28999 - DNA, 25 bp, Artificial
  Probe
gtctcatctgtctcttcagtgtcac

SEQ ID NO: 29000 - DNA, 25 bp, Artificial
  Probe
ttggaaagaaagttgatgatagctc

SEQ ID NO: 29001 - DNA, 25 bp, Artificial
  Probe
tggaaagaaagttgatgatagctct

SEQ ID NO: 29002 - DNA, 25 bp, Artificial
  Probe
ggaaagaaagttgatgatagctctg

SEQ ID NO: 29003 - DNA, 25 bp, Artificial
  Probe
tttggaaagaaagttgatgatagct

SEQ ID NO: 29004 - DNA, 25 bp, Artificial
  Probe
gttgatgatagctctgaactttcca

SEQ ID NO: 29005 - DNA, 25 bp, Artificial
  Probe
aagaaagttgatgatagctctgaac

SEQ ID NO: 29006 - DNA, 25 bp, Artificial
  Probe
ctcatctgtctcttcagtgtcacct

SEQ ID NO: 29007 - DNA, 25 bp, Artificial
  Probe
tctcatctgtctcttcagtgtcacc

SEQ ID NO: 29008 - DNA, 25 bp, Artificial
  Probe
gaaagaaagttgatgatagctctga

SEQ ID NO: 29009 - DNA, 25 bp, Artificial
  Probe
agaagtctcatctgtctcttcagtg

SEQ ID NO: 29010 - DNA, 25 bp, Artificial
  Probe
gaaattgcatcttacagctctttgg

SEQ ID NO: 29011 - DNA, 25 bp, Artificial
  Probe
gaagtctcatctgtctcttcagtgt

SEQ ID NO: 29012 - DNA, 25 bp, Artificial
  Probe
attgcatcttacagctctttggaaa

SEQ ID NO: 29013 - DNA, 25 bp, Artificial
  Probe
aattgcatcttacagctctttggaa

SEQ ID NO: 29014 - DNA, 25 bp, Artificial
  Probe
aaattgcatcttacagctctttgga

SEQ ID NO: 29015 - DNA, 25 bp, Artificial
  Probe
aaagaaagttgatgatagctctgaa

SEQ ID NO: 29016 - DNA, 25 bp, Artificial
  Probe
cgaaattgcatcttacagctctttg

SEQ ID NO: 29017 - DNA, 25 bp, Artificial
  Probe
tcgaaattgcatcttacagctcttt

SEQ ID NO: 29018 - DNA, 25 bp, Artificial
  Probe
ttgatgatagctctgaactttccag

SEQ ID NO: 29019 - DNA, 25 bp, Artificial
  Probe
tcatctgtctcttcagtgtcacctg

SEQ ID NO: 29020 - DNA, 25 bp, Artificial
  Probe
ctttggaaagaaagttgatgatagc

SEQ ID NO: 29021 - DNA, 25 bp, Artificial
  Probe
ttgcatcttacagctctttggaaag

SEQ ID NO: 29022 - DNA, 25 bp, Artificial
  Probe
cataaagtttgcctccaacctgttg

SEQ ID NO: 29023 - DNA, 25 bp, Artificial
  Probe
cagaagtctcatctgtctcttcagt

SEQ ID NO: 29024 - DNA, 25 bp, Artificial
  Probe
gctctttggaaagaaagttgatgat

SEQ ID NO: 29025 - DNA, 25 bp, Artificial
  Probe
cttcagtgtcacctgcataaagttt

SEQ ID NO: 29026 - DNA, 25 bp, Artificial
  Probe
ttacagctctttggaaagaaagttg

SEQ ID NO: 29027 - DNA, 25 bp, Artificial
  Probe
cttacagctctttggaaagaaagtt

SEQ ID NO: 29028 - DNA, 25 bp, Artificial
  Probe
tcttacagctctttggaaagaaagt

SEQ ID NO: 29029 - DNA, 25 bp, Artificial
  Probe
tacagctctttggaaagaaagttga

SEQ ID NO: 29030 - DNA, 25 bp, Artificial
  Probe
catcttacagctctttggaaagaaa

SEQ ID NO: 29031 - DNA, 25 bp, Artificial
  Probe
atcttacagctctttggaaagaaag

SEQ ID NO: 29032 - DNA, 25 bp, Artificial
  Probe
ttcagtgtcacctgcataaagtttg

SEQ ID NO: 29033 - DNA, 25 bp, Artificial
  Probe
agctctttggaaagaaagttgatga

SEQ ID NO: 29034 - DNA, 25 bp, Artificial
  Probe
cagctctttggaaagaaagttgatg

SEQ ID NO: 29035 - DNA, 25 bp, Artificial
  Probe
acagctctttggaaagaaagttgat

SEQ ID NO: 29036 - DNA, 25 bp, Artificial
  Probe
agaaagttgatgatagctctgaact

SEQ ID NO: 29037 - DNA, 25 bp, Artificial
  Probe
tgtctcttcagtgtcacctgcataa

SEQ ID NO: 29038 - DNA, 25 bp, Artificial
  Probe
gcatcttacagctctttggaaagaa

SEQ ID NO: 29039 - DNA, 25 bp, Artificial
  Probe
tcttcagtgtcacctgcataaagtt

SEQ ID NO: 29040 - DNA, 25 bp, Artificial
  Probe
agttgatgatagctctgaactttcc

SEQ ID NO: 29041 - DNA, 25 bp, Artificial
  Probe
tctcttcagtgtcacctgcataaag

SEQ ID NO: 29042 - DNA, 25 bp, Artificial
  Probe
aactatggcaacaattctccttcaa

SEQ ID NO: 29043 - DNA, 25 bp, Artificial
  Probe
ttggagcaagtagatcagttctatg

SEQ ID NO: 29044 - DNA, 25 bp, Artificial
  Probe
tggagcaagtagatcagttctatga

SEQ ID NO: 29045 - DNA, 25 bp, Artificial
  Probe
tctaacaatgaaactatggcaacaa

SEQ ID NO: 29046 - DNA, 25 bp, Artificial
  Probe
ttaagggaagagaggagaatactgg

SEQ ID NO: 29047 - DNA, 25 bp, Artificial
  Probe
taggaaagttcttcagggaaagttt

SEQ ID NO: 29048 - DNA, 25 bp, Artificial
  Probe
ttaggaaagttcttcagggaaagtt

SEQ ID NO: 29049 - DNA, 25 bp, Artificial
  Probe
gcttctaacaatgaaactatggcaa

SEQ ID NO: 29050 - DNA, 25 bp, Artificial
  Probe
attaggaaagttcttcagggaaagt

SEQ ID NO: 29051 - DNA, 25 bp, Artificial
  Probe
aatgaaactatggcaacaattctcc

SEQ ID NO: 29052 - DNA, 25 bp, Artificial
  Probe
actatggcaacaattctccttcaaa

SEQ ID NO: 29053 - DNA, 25 bp, Artificial
  Probe
aaactatggcaacaattctccttca

SEQ ID NO: 29054 - DNA, 25 bp, Artificial
  Probe
acaatgaaactatggcaacaattct

SEQ ID NO: 29055 - DNA, 25 bp, Artificial
  Probe
ttctaacaatgaaactatggcaaca

SEQ ID NO: 29056 - DNA, 25 bp, Artificial
  Probe
gaaactatggcaacaattctccttc

SEQ ID NO: 29057 - DNA, 25 bp, Artificial
  Probe
gctgtggtcatttcaaattgcttaa

SEQ ID NO: 29058 - DNA, 25 bp, Artificial
  Probe
atgaaactatggcaacaattctcct

SEQ ID NO: 29059 - DNA, 25 bp, Artificial
  Probe
caatgaaactatggcaacaattctc

SEQ ID NO: 29060 - DNA, 25 bp, Artificial
  Probe
tgaaactatggcaacaattctcctt

SEQ ID NO: 29061 - DNA, 25 bp, Artificial
  Probe
aacaatgaaactatggcaacaattc

SEQ ID NO: 29062 - DNA, 25 bp, Artificial
  Probe
ttcagtttcagaaagacagaggaat

SEQ ID NO: 29063 - DNA, 25 bp, Artificial
  Probe
ctaacaatgaaactatggcaacaat

SEQ ID NO: 29064 - DNA, 25 bp, Artificial
  Probe
cttctaacaatgaaactatggcaac

SEQ ID NO: 29065 - DNA, 25 bp, Artificial
  Probe
aattaggaaagttcttcagggaaag

SEQ ID NO: 29066 - DNA, 25 bp, Artificial
  Probe
gaattaggaaagttcttcagggaaa

SEQ ID NO: 29067 - DNA, 25 bp, Artificial
  Probe
cttcagtttcagaaagacagaggaa

SEQ ID NO: 29068 - DNA, 25 bp, Artificial
  Probe
ttctatgatgacaactttcctatgg

SEQ ID NO: 29069 - DNA, 25 bp, Artificial
  Probe
tcagtttcagaaagacagaggaatg

SEQ ID NO: 29070 - DNA, 25 bp, Artificial
  Probe
aacctgctattgattcacaatctaa

SEQ ID NO: 29071 - DNA, 25 bp, Artificial
  Probe
ggagcaagtagatcagttctatgat

SEQ ID NO: 29072 - DNA, 25 bp, Artificial
  Probe
gcaagtagatcagttctatgatgac

SEQ ID NO: 29073 - DNA, 25 bp, Artificial
  Probe
agcaagtagatcagttctatgatga

SEQ ID NO: 29074 - DNA, 25 bp, Artificial
  Probe
gagcaagtagatcagttctatgatg

SEQ ID NO: 29075 - DNA, 25 bp, Artificial
  Probe
taacaatgaaactatggcaacaatt

SEQ ID NO: 29076 - DNA, 25 bp, Artificial
  Probe
agtttcagaaagacagaggaatgtg

SEQ ID NO: 29077 - DNA, 25 bp, Artificial
  Probe
cagtttcagaaagacagaggaatgt

SEQ ID NO: 29078 - DNA, 25 bp, Artificial
  Probe
aaagttcttcagggaaagtttcacg

SEQ ID NO: 29079 - DNA, 25 bp, Artificial
  Probe
tacaattggatgaacagttaggtcg

SEQ ID NO: 29080 - DNA, 25 bp, Artificial
  Probe
atgtagctgtggtcatttcaaattg

SEQ ID NO: 29081 - DNA, 25 bp, Artificial
  Probe
catgtagctgtggtcatttcaaatt

SEQ ID NO: 29082 - DNA, 25 bp, Artificial
  Probe
ttcagaaagacagaggaatgtggaa

SEQ ID NO: 29083 - DNA, 25 bp, Artificial
  Probe
tctatgatgacaactttcctatgga

SEQ ID NO: 29084 - DNA, 25 bp, Artificial
  Probe
atacaattggatgaacagttaggtc

SEQ ID NO: 29085 - DNA, 25 bp, Artificial
  Probe
agcttctaacaatgaaactatggca

SEQ ID NO: 29086 - DNA, 25 bp, Artificial
  Probe
tagcttctaacaatgaaactatggc

SEQ ID NO: 29087 - DNA, 25 bp, Artificial
  Probe
taaccagagctgacaatctataacc

SEQ ID NO: 29088 - DNA, 25 bp, Artificial
  Probe
gtaaccagagctgacaatctataac

SEQ ID NO: 29089 - DNA, 25 bp, Artificial
  Probe
agtaaccagagctgacaatctataa

SEQ ID NO: 29090 - DNA, 25 bp, Artificial
  Probe
cagtaaccagagctgacaatctata

SEQ ID NO: 29091 - DNA, 25 bp, Artificial
  Probe
caaactttcaacttcagggtgattt

SEQ ID NO: 29092 - DNA, 25 bp, Artificial
  Probe
ccaaactttcaacttcagggtgatt

SEQ ID NO: 29093 - DNA, 25 bp, Artificial
  Probe
gcagtaaccagagctgacaatctat

SEQ ID NO: 29094 - DNA, 25 bp, Artificial
  Probe
tccaaactttcaacttcagggtgat

SEQ ID NO: 29095 - DNA, 25 bp, Artificial
  Probe
aaccagagctgacaatctataaccc

SEQ ID NO: 29096 - DNA, 25 bp, Artificial
  Probe
ctccaaactttcaacttcagggtga

SEQ ID NO: 29097 - DNA, 25 bp, Artificial
  Probe
ttagcagtaaccagagctgacaatc

SEQ ID NO: 29098 - DNA, 25 bp, Artificial
  Probe
aaactttcaacttcagggtgatttt

SEQ ID NO: 29099 - DNA, 25 bp, Artificial
  Probe
agcagtaaccagagctgacaatcta

SEQ ID NO: 29100 - DNA, 25 bp, Artificial
  Probe
tagcagtaaccagagctgacaatct

SEQ ID NO: 29101 - DNA, 25 bp, Artificial
  Probe
tttagcagtaaccagagctgacaat

SEQ ID NO: 29102 - DNA, 25 bp, Artificial
  Probe
ggcacctccaaactttcaacttcag

SEQ ID NO: 29103 - DNA, 25 bp, Artificial
  Probe
cctccaaactttcaacttcagggtg

SEQ ID NO: 29104 - DNA, 25 bp, Artificial
  Probe
cacctccaaactttcaacttcaggg

SEQ ID NO: 29105 - DNA, 25 bp, Artificial
  Probe
gcacctccaaactttcaacttcagg

SEQ ID NO: 29106 - DNA, 25 bp, Artificial
  Probe
acctccaaactttcaacttcagggt

SEQ ID NO: 29107 - DNA, 25 bp, Artificial
  Probe
gtggcacctccaaactttcaacttc

SEQ ID NO: 29108 - DNA, 25 bp, Artificial
  Probe
accagagctgacaatctataacccc

SEQ ID NO: 29109 - DNA, 25 bp, Artificial
  Probe
ttttagcagtaaccagagctgacaa

SEQ ID NO: 29110 - DNA, 25 bp, Artificial
  Probe
tggcacctccaaactttcaacttca

SEQ ID NO: 29111 - DNA, 25 bp, Artificial
  Probe
cttcttgcgtttggtattgagaatt

SEQ ID NO: 29112 - DNA, 25 bp, Artificial
  Probe
aattttatcccattccctctcctct

SEQ ID NO: 29113 - DNA, 25 bp, Artificial
  Probe
attttatcccattccctctcctctg

SEQ ID NO: 29114 - DNA, 25 bp, Artificial
  Probe
ccttcttgcgtttggtattgagaat

SEQ ID NO: 29115 - DNA, 25 bp, Artificial
  Probe
aaattttatcccattccctctcctc

SEQ ID NO: 29116 - DNA, 25 bp, Artificial
  Probe
tgtgaaattttatcccattccctct

SEQ ID NO: 29117 - DNA, 25 bp, Artificial
  Probe
gaaattttatcccattccctctcct

SEQ ID NO: 29118 - DNA, 25 bp, Artificial
  Probe
tgaaattttatcccattccctctcc

SEQ ID NO: 29119 - DNA, 25 bp, Artificial
  Probe
gtgaaattttatcccattccctctc

SEQ ID NO: 29120 - DNA, 25 bp, Artificial
  Probe
atgtgaaattttatcccattccctc

SEQ ID NO: 29121 - DNA, 25 bp, Artificial
  Probe
gacctttcttttgtatgaacagctc

SEQ ID NO: 29122 - DNA, 25 bp, Artificial
  Probe
acctttcttttgtatgaacagctct

SEQ ID NO: 29123 - DNA, 25 bp, Artificial
  Probe
ttcttgcgtttggtattgagaattc

SEQ ID NO: 29124 - DNA, 25 bp, Artificial
  Probe
ctcgacctttcttttgtatgaacag

SEQ ID NO: 29125 - DNA, 25 bp, Artificial
  Probe
ttatcccattccctctcctctgctt

SEQ ID NO: 29126 - DNA, 25 bp, Artificial
  Probe
tttatcccattccctctcctctgct

SEQ ID NO: 29127 - DNA, 25 bp, Artificial
  Probe
actcgacctttcttttgtatgaaca

SEQ ID NO: 29128 - DNA, 25 bp, Artificial
  Probe
cccttcttgcgtttggtattgagaa

SEQ ID NO: 29129 - DNA, 25 bp, Artificial
  Probe
tatgtgaaattttatcccattccct

SEQ ID NO: 29130 - DNA, 25 bp, Artificial
  Probe
cgacctttcttttgtatgaacagct

SEQ ID NO: 29131 - DNA, 25 bp, Artificial
  Probe
tatcccattccctctcctctgcttc

SEQ ID NO: 29132 - DNA, 25 bp, Artificial
  Probe
tcgacctttcttttgtatgaacagc

SEQ ID NO: 29133 - DNA, 25 bp, Artificial
  Probe
gccggggccaaatttatacttatat

SEQ ID NO: 29134 - DNA, 25 bp, Artificial
  Probe
ttttatcccattccctctcctctgc

SEQ ID NO: 29135 - DNA, 25 bp, Artificial
  Probe
atatgtgaaattttatcccattccc

SEQ ID NO: 29136 - DNA, 25 bp, Artificial
  Probe
agccggggccaaatttatacttata

SEQ ID NO: 29137 - DNA, 25 bp, Artificial
  Probe
ccggggccaaatttatacttatata

SEQ ID NO: 29138 - DNA, 25 bp, Artificial
  Probe
cagccggggccaaatttatacttat

SEQ ID NO: 29139 - DNA, 25 bp, Artificial
  Probe
aatatgtgaaattttatcccattcc

SEQ ID NO: 29140 - DNA, 25 bp, Artificial
  Probe
ccccttcttgcgtttggtattgaga

SEQ ID NO: 29141 - DNA, 25 bp, Artificial
  Probe
cggggccaaatttatacttatataa

SEQ ID NO: 29142 - DNA, 25 bp, Artificial
  Probe
tgggtaaaccatgaaggggagaaac

SEQ ID NO: 29143 - DNA, 25 bp, Artificial
  Probe
gtgggtaaaccatgaaggggagaaa

SEQ ID NO: 29144 - DNA, 25 bp, Artificial
  Probe
ttcaccccttcttgcgtttggtatt

SEQ ID NO: 29145 - DNA, 25 bp, Artificial
  Probe
gggtaaaccatgaaggggagaaacc

SEQ ID NO: 29146 - DNA, 25 bp, Artificial
  Probe
ccagccggggccaaatttatactta

SEQ ID NO: 29147 - DNA, 25 bp, Artificial
  Probe
ggtaaaccatgaaggggagaaaccc

SEQ ID NO: 29148 - DNA, 25 bp, Artificial
  Probe
ggtattaacttactggtctgattga

SEQ ID NO: 29149 - DNA, 25 bp, Artificial
  Probe
aggtattaacttactggtctgattg

SEQ ID NO: 29150 - DNA, 25 bp, Artificial
  Probe
acaggtattaacttactggtctgat

SEQ ID NO: 29151 - DNA, 25 bp, Artificial
  Probe
attaacttactggtctgattgacag

SEQ ID NO: 29152 - DNA, 25 bp, Artificial
  Probe
tacaggtattaacttactggtctga

SEQ ID NO: 29153 - DNA, 25 bp, Artificial
  Probe
caggtattaacttactggtctgatt

SEQ ID NO: 29154 - DNA, 25 bp, Artificial
  Probe
tataatatcagcacataagggcagc

SEQ ID NO: 29155 - DNA, 25 bp, Artificial
  Probe
cgtataatatcagcacataagggca

SEQ ID NO: 29156 - DNA, 25 bp, Artificial
  Probe
gtacaggtattaacttactggtctg

SEQ ID NO: 29157 - DNA, 25 bp, Artificial
  Probe
gtataatatcagcacataagggcag

SEQ ID NO: 29158 - DNA, 25 bp, Artificial
  Probe
ttgacagactttggtaacaatccta

SEQ ID NO: 29159 - DNA, 25 bp, Artificial
  Probe
acagactttggtaacaatcctatga

SEQ ID NO: 29160 - DNA, 25 bp, Artificial
  Probe
tgacagactttggtaacaatcctat

SEQ ID NO: 29161 - DNA, 25 bp, Artificial
  Probe
cagactttggtaacaatcctatgac

SEQ ID NO: 29162 - DNA, 25 bp, Artificial
  Probe
gacagactttggtaacaatcctatg

SEQ ID NO: 29163 - DNA, 25 bp, Artificial
  Probe
gagaaggaatgatgtcagcctctac

SEQ ID NO: 29164 - DNA, 25 bp, Artificial
  Probe
tattaacttactggtctgattgaca

SEQ ID NO: 29165 - DNA, 25 bp, Artificial
  Probe
ccacctctatactgtagcaaacaat

SEQ ID NO: 29166 - DNA, 25 bp, Artificial
  Probe
gtattaacttactggtctgattgac

SEQ ID NO: 29167 - DNA, 25 bp, Artificial
  Probe
gaatgatgtcagcctctacagaacc

SEQ ID NO: 29168 - DNA, 25 bp, Artificial
  Probe
ggaatgatgtcagcctctacagaac

SEQ ID NO: 29169 - DNA, 25 bp, Artificial
  Probe
gaaggaatgatgtcagcctctacag

SEQ ID NO: 29170 - DNA, 25 bp, Artificial
  Probe
cacctctatactgtagcaaacaatt

SEQ ID NO: 29171 - DNA, 25 bp, Artificial
  Probe
tctacagaacccttggagaactttc

SEQ ID NO: 29172 - DNA, 25 bp, Artificial
  Probe
ttccagtagaagttgtcacaagcac

SEQ ID NO: 29173 - DNA, 25 bp, Artificial
  Probe
aggaatgatgtcagcctctacagaa

SEQ ID NO: 29174 - DNA, 25 bp, Artificial
  Probe
aaggaatgatgtcagcctctacaga

SEQ ID NO: 29175 - DNA, 25 bp, Artificial
  Probe
agaaggaatgatgtcagcctctaca

SEQ ID NO: 29176 - DNA, 25 bp, Artificial
  Probe
ctctacagaacccttggagaacttt

SEQ ID NO: 29177 - DNA, 25 bp, Artificial
  Probe
acctctatactgtagcaaacaattt

SEQ ID NO: 29178 - DNA, 25 bp, Artificial
  Probe
agactttggtaacaatcctatgacc

SEQ ID NO: 29179 - DNA, 25 bp, Artificial
  Probe
gacagcaaagccataaacgtataat

SEQ ID NO: 29180 - DNA, 25 bp, Artificial
  Probe
acgtataatatcagcacataagggc

SEQ ID NO: 29181 - DNA, 25 bp, Artificial
  Probe
gccataaacgtataatatcagcaca

SEQ ID NO: 29182 - DNA, 25 bp, Artificial
  Probe
ctttggtaacaatcctatgacccag

SEQ ID NO: 29183 - DNA, 25 bp, Artificial
  Probe
gactttggtaacaatcctatgaccc

SEQ ID NO: 29184 - DNA, 25 bp, Artificial
  Probe
agacagcaaagccataaacgtataa

SEQ ID NO: 29185 - DNA, 25 bp, Artificial
  Probe
aagacagcaaagccataaacgtata

SEQ ID NO: 29186 - DNA, 25 bp, Artificial
  Probe
cctctatactgtagcaaacaatttc

SEQ ID NO: 29187 - DNA, 25 bp, Artificial
  Probe
agccataaacgtataatatcagcac

SEQ ID NO: 29188 - DNA, 25 bp, Artificial
  Probe
ctttccagtagaagttgtcacaagc

SEQ ID NO: 29189 - DNA, 25 bp, Artificial
  Probe
tttggtaacaatcctatgacccaga

SEQ ID NO: 29190 - DNA, 25 bp, Artificial
  Probe
acagcaaagccataaacgtataata

SEQ ID NO: 29191 - DNA, 25 bp, Artificial
  Probe
attgacagactttggtaacaatcct

SEQ ID NO: 29192 - DNA, 25 bp, Artificial
  Probe
ctgattgacagactttggtaacaat

SEQ ID NO: 29193 - DNA, 25 bp, Artificial
  Probe
gacagattcagcaatgtggactatg

SEQ ID NO: 29194 - DNA, 25 bp, Artificial
  Probe
ctactacgagatatgcgacttcctc

SEQ ID NO: 29195 - DNA, 25 bp, Artificial
  Probe
tgacagattcagcaatgtggactat

SEQ ID NO: 29196 - DNA, 25 bp, Artificial
  Probe
agattcagcaatgtggactatggtg

SEQ ID NO: 29197 - DNA, 25 bp, Artificial
  Probe
cagattcagcaatgtggactatggt

SEQ ID NO: 29198 - DNA, 25 bp, Artificial
  Probe
tactacgagatatgcgacttcctca

SEQ ID NO: 29199 - DNA, 25 bp, Artificial
  Probe
gattcagcaatgtggactatggtgt

SEQ ID NO: 29200 - DNA, 25 bp, Artificial
  Probe
cctactacgagatatgcgacttcct

SEQ ID NO: 29201 - DNA, 25 bp, Artificial
  Probe
cagaggagctgaagtacatagaatt

SEQ ID NO: 29202 - DNA, 25 bp, Artificial
  Probe
tagcccaacacctagatttcattaa

SEQ ID NO: 29203 - DNA, 25 bp, Artificial
  Probe
ctctggcatcttctgagaatcaagt

SEQ ID NO: 29204 - DNA, 25 bp, Artificial
  Probe
actctggcatcttctgagaatcaag

SEQ ID NO: 29205 - DNA, 25 bp, Artificial
  Probe
ttcactctggcatcttctgagaatc

SEQ ID NO: 29206 - DNA, 25 bp, Artificial
  Probe
cttcactctggcatcttctgagaat

SEQ ID NO: 29207 - DNA, 25 bp, Artificial
  Probe
atagcccaacacctagatttcatta

SEQ ID NO: 29208 - DNA, 25 bp, Artificial
  Probe
gatagcccaacacctagatttcatt

SEQ ID NO: 29209 - DNA, 25 bp, Artificial
  Probe
tctggcatcttctgagaatcaagtg

SEQ ID NO: 29210 - DNA, 25 bp, Artificial
  Probe
cactctggcatcttctgagaatcaa

SEQ ID NO: 29211 - DNA, 25 bp, Artificial
  Probe
agatagcccaacacctagatttcat

SEQ ID NO: 29212 - DNA, 25 bp, Artificial
  Probe
attcagcaatgtggactatggtgtg

SEQ ID NO: 29213 - DNA, 25 bp, Artificial
  Probe
acagattcagcaatgtggactatgg

SEQ ID NO: 29214 - DNA, 25 bp, Artificial
  Probe
agaggagctgaagtacatagaattc

SEQ ID NO: 29215 - DNA, 25 bp, Artificial
  Probe
agcccaacacctagatttcattaat

SEQ ID NO: 29216 - DNA, 25 bp, Artificial
  Probe
tacgagatatgcgacttcctcagag

SEQ ID NO: 29217 - DNA, 25 bp, Artificial
  Probe
ctacgagatatgcgacttcctcaga

SEQ ID NO: 29218 - DNA, 25 bp, Artificial
  Probe
cagatagcccaacacctagatttca

SEQ ID NO: 29219 - DNA, 25 bp, Artificial
  Probe
tcactctggcatcttctgagaatca

SEQ ID NO: 29220 - DNA, 25 bp, Artificial
  Probe
ctggcatcttctgagaatcaagtgg

SEQ ID NO: 29221 - DNA, 25 bp, Artificial
  Probe
actacgagatatgcgacttcctcag

SEQ ID NO: 29222 - DNA, 25 bp, Artificial
  Probe
ccagatagcccaacacctagatttc

SEQ ID NO: 29223 - DNA, 25 bp, Artificial
  Probe
gcccaacacctagatttcattaatc

SEQ ID NO: 29224 - DNA, 25 bp, Artificial
  Probe
gcctactacgagatatgcgacttcc

SEQ ID NO: 29225 - DNA, 25 bp, Artificial
  Probe
ggtgaagtacctgaagaacaagcag

SEQ ID NO: 29226 - DNA, 25 bp, Artificial
  Probe
tcagaggagctgaagtacatagaat

SEQ ID NO: 29227 - DNA, 25 bp, Artificial
  Probe
catcttctgagaatcaagtgggagc

SEQ ID NO: 29228 - DNA, 25 bp, Artificial
  Probe
gcatcttctgagaatcaagtgggag

SEQ ID NO: 29229 - DNA, 25 bp, Artificial
  Probe
ctcagaggagctgaagtacatagaa

SEQ ID NO: 29230 - DNA, 25 bp, Artificial
  Probe
gtgaagtacctgaagaacaagcagc

SEQ ID NO: 29231 - DNA, 25 bp, Artificial
  Probe
cccagatagcccaacacctagattt

SEQ ID NO: 29232 - DNA, 25 bp, Artificial
  Probe
ttcagcaatgtggactatggtgtgg

SEQ ID NO: 29233 - DNA, 25 bp, Artificial
  Probe
gcttcactctggcatcttctgagaa

SEQ ID NO: 29234 - DNA, 25 bp, Artificial
  Probe
ctgacagattcagcaatgtggacta

SEQ ID NO: 29235 - DNA, 25 bp, Artificial
  Probe
atcttctgagaatcaagtgggagct

SEQ ID NO: 29236 - DNA, 25 bp, Artificial
  Probe
tgaagtacctgaagaacaagcagct

SEQ ID NO: 29237 - DNA, 25 bp, Artificial
  Probe
gtgggcagtggatttggatgatttc

SEQ ID NO: 29238 - DNA, 25 bp, Artificial
  Probe
aaatcactgtgttgacttactaggg

SEQ ID NO: 29239 - DNA, 25 bp, Artificial
  Probe
gttggtcctatgttgactgtttctc

SEQ ID NO: 29240 - DNA, 25 bp, Artificial
  Probe
ttggtcctatgttgactgtttctca

SEQ ID NO: 29241 - DNA, 25 bp, Artificial
  Probe
aatcactgtgttgacttactagggc

SEQ ID NO: 29242 - DNA, 25 bp, Artificial
  Probe
ggtcctatgttgactgtttctcaca

SEQ ID NO: 29243 - DNA, 25 bp, Artificial
  Probe
tggtcctatgttgactgtttctcac

SEQ ID NO: 29244 - DNA, 25 bp, Artificial
  Probe
ggttggtcctatgttgactgtttct

SEQ ID NO: 29245 - DNA, 25 bp, Artificial
  Probe
atcactgtgttgacttactagggct

SEQ ID NO: 29246 - DNA, 25 bp, Artificial
  Probe
aaaatcactgtgttgacttactagg

SEQ ID NO: 29247 - DNA, 25 bp, Artificial
  Probe
cagaaaatcactgtgttgacttact

SEQ ID NO: 29248 - DNA, 25 bp, Artificial
  Probe
gggttggtcctatgttgactgtttc

SEQ ID NO: 29249 - DNA, 25 bp, Artificial
  Probe
agaaaatcactgtgttgacttacta

SEQ ID NO: 29250 - DNA, 25 bp, Artificial
  Probe
gaaaatcactgtgttgacttactag

SEQ ID NO: 29251 - DNA, 25 bp, Artificial
  Probe
ctatgttgactgtttctcacagaac

SEQ ID NO: 29252 - DNA, 25 bp, Artificial
  Probe
cctatgttgactgtttctcacagaa

SEQ ID NO: 29253 - DNA, 25 bp, Artificial
  Probe
tatgttgactgtttctcacagaacc

SEQ ID NO: 29254 - DNA, 25 bp, Artificial
  Probe
tcctatgttgactgtttctcacaga

SEQ ID NO: 29255 - DNA, 25 bp, Artificial
  Probe
gtcctatgttgactgtttctcacag

SEQ ID NO: 29256 - DNA, 25 bp, Artificial
  Probe
gttgactgtttctcacagaaccttc

SEQ ID NO: 29257 - DNA, 25 bp, Artificial
  Probe
atgttgactgtttctcacagaacct

SEQ ID NO: 29258 - DNA, 25 bp, Artificial
  Probe
tgcacataatacttccctgtattta

SEQ ID NO: 29259 - DNA, 25 bp, Artificial
  Probe
tgtatagtgtaaaatgtgaatgact

SEQ ID NO: 29260 - DNA, 25 bp, Artificial
  Probe
tgttgactgtttctcacagaacctt

SEQ ID NO: 29261 - DNA, 25 bp, Artificial
  Probe
gcacataatacttccctgtatttat

SEQ ID NO: 29262 - DNA, 25 bp, Artificial
  Probe
atgtatagtgtaaaatgtgaatgac

SEQ ID NO: 29263 - DNA, 25 bp, Artificial
  Probe
acagaaaatcactgtgttgacttac

SEQ ID NO: 29264 - DNA, 25 bp, Artificial
  Probe
gtatagtgtaaaatgtgaatgactt

SEQ ID NO: 29265 - DNA, 25 bp, Artificial
  Probe
catgtatagtgtaaaatgtgaatga

SEQ ID NO: 29266 - DNA, 25 bp, Artificial
  Probe
ggggttggtcctatgttgactgttt

SEQ ID NO: 29267 - DNA, 25 bp, Artificial
  Probe
atagtgtaaaatgtgaatgactttt

SEQ ID NO: 29268 - DNA, 25 bp, Artificial
  Probe
acatgtatagtgtaaaatgtgaatg

SEQ ID NO: 29269 - DNA, 25 bp, Artificial
  Probe
tcaagtgtaaggatctggaagagag

SEQ ID NO: 29270 - DNA, 25 bp, Artificial
  Probe
aagtgtaaggatctggaagagagtg

SEQ ID NO: 29271 - DNA, 25 bp, Artificial
  Probe
caagtgtaaggatctggaagagagt

SEQ ID NO: 29272 - DNA, 25 bp, Artificial
  Probe
ctcaagtgtaaggatctggaagaga

SEQ ID NO: 29273 - DNA, 25 bp, Artificial
  Probe
aagtggatgatgaaattgtggagtt

SEQ ID NO: 29274 - DNA, 25 bp, Artificial
  Probe
cctcaagtgtaaggatctggaagag

SEQ ID NO: 29275 - DNA, 25 bp, Artificial
  Probe
agtggatgatgaaattgtggagttc

SEQ ID NO: 29276 - DNA, 25 bp, Artificial
  Probe
tagtctctgggttgaggcattatta

SEQ ID NO: 29277 - DNA, 25 bp, Artificial
  Probe
gtctctgggttgaggcattattaaa

SEQ ID NO: 29278 - DNA, 25 bp, Artificial
  Probe
caagtggatgatgaaattgtggagt

SEQ ID NO: 29279 - DNA, 25 bp, Artificial
  Probe
agtgtaaggatctggaagagagtgg

SEQ ID NO: 29280 - DNA, 25 bp, Artificial
  Probe
agtctctgggttgaggcattattaa

SEQ ID NO: 29281 - DNA, 25 bp, Artificial
  Probe
gtagtctctgggttgaggcattatt

SEQ ID NO: 29282 - DNA, 25 bp, Artificial
  Probe
gtggatgatgaaattgtggagttcg

SEQ ID NO: 29283 - DNA, 25 bp, Artificial
  Probe
gcaagtggatgatgaaattgtggag

SEQ ID NO: 29284 - DNA, 25 bp, Artificial
  Probe
tgtagtctctgggttgaggcattat

SEQ ID NO: 29285 - DNA, 25 bp, Artificial
  Probe
atgtagtctctgggttgaggcatta

SEQ ID NO: 29286 - DNA, 25 bp, Artificial
  Probe
atattacccctctccaaagatgact

SEQ ID NO: 29287 - DNA, 25 bp, Artificial
  Probe
tggatgatgaaattgtggagttcgg

SEQ ID NO: 29288 - DNA, 25 bp, Artificial
  Probe
cctttgccagagtgaacagtatcag

SEQ ID NO: 29289 - DNA, 25 bp, Artificial
  Probe
tctctgggttgaggcattattaaaa

SEQ ID NO: 29290 - DNA, 25 bp, Artificial
  Probe
tattacccctctccaaagatgactg

SEQ ID NO: 29291 - DNA, 25 bp, Artificial
  Probe
gtgtaaggatctggaagagagtggc

SEQ ID NO: 29292 - DNA, 25 bp, Artificial
  Probe
gatgatgaaattgtggagttcggct

SEQ ID NO: 29293 - DNA, 25 bp, Artificial
  Probe
atgatgaaattgtggagttcggctc

SEQ ID NO: 29294 - DNA, 25 bp, Artificial
  Probe
aatattacccctctccaaagatgac

SEQ ID NO: 29295 - DNA, 25 bp, Artificial
  Probe
caatattacccctctccaaagatga

SEQ ID NO: 29296 - DNA, 25 bp, Artificial
  Probe
ctttgccagagtgaacagtatcagc

SEQ ID NO: 29297 - DNA, 25 bp, Artificial
  Probe
ccctcaagtgtaaggatctggaaga

SEQ ID NO: 29298 - DNA, 25 bp, Artificial
  Probe
ctgcaagtggatgatgaaattgtgg

SEQ ID NO: 29299 - DNA, 25 bp, Artificial
  Probe
cctgcaagtggatgatgaaattgtg

SEQ ID NO: 29300 - DNA, 25 bp, Artificial
  Probe
tccctcaagtgtaaggatctggaag

SEQ ID NO: 29301 - DNA, 25 bp, Artificial
  Probe
ctccctcaagtgtaaggatctggaa

SEQ ID NO: 29302 - DNA, 25 bp, Artificial
  Probe
gcaatattacccctctccaaagatg

SEQ ID NO: 29303 - DNA, 25 bp, Artificial
  Probe
tgcaagtggatgatgaaattgtgga

SEQ ID NO: 29304 - DNA, 25 bp, Artificial
  Probe
gatgtagtctctgggttgaggcatt

SEQ ID NO: 29305 - DNA, 25 bp, Artificial
  Probe
gatgaaattgtggagttcggctctg

SEQ ID NO: 29306 - DNA, 25 bp, Artificial
  Probe
ggatgatgaaattgtggagttcggc

SEQ ID NO: 29307 - DNA, 25 bp, Artificial
  Probe
tgcaatattacccctctccaaagat

SEQ ID NO: 29308 - DNA, 25 bp, Artificial
  Probe
tgatgaaattgtggagttcggctct

SEQ ID NO: 29309 - DNA, 25 bp, Artificial
  Probe
attctctcggctccctcaagtgtaa

SEQ ID NO: 29310 - DNA, 25 bp, Artificial
  Probe
atgaaattgtggagttcggctctgt

SEQ ID NO: 29311 - DNA, 25 bp, Artificial
  Probe
cctctccaaagatgactgcttcctg

SEQ ID NO: 29312 - DNA, 25 bp, Artificial
  Probe
aaattgtggagttcggctctgtgaa

SEQ ID NO: 29313 - DNA, 25 bp, Artificial
  Probe
tttgccagagtgaacagtatcagcc

SEQ ID NO: 29314 - DNA, 25 bp, Artificial
  Probe
gttggagatgaagtggtgttgataa

SEQ ID NO: 29315 - DNA, 25 bp, Artificial
  Probe
cgtggactatggtggatataagagg

SEQ ID NO: 29316 - DNA, 25 bp, Artificial
  Probe
atgagtgagatgacaggcaatacag

SEQ ID NO: 29317 - DNA, 25 bp, Artificial
  Probe
ggttggagatgaagtggtgttgata

SEQ ID NO: 29318 - DNA, 25 bp, Artificial
  Probe
ctatggagtgtggttggagatgaag

SEQ ID NO: 29319 - DNA, 25 bp, Artificial
  Probe
tacgtggactatggtggatataaga

SEQ ID NO: 29320 - DNA, 25 bp, Artificial
  Probe
ctacgtggactatggtggatataag

SEQ ID NO: 29321 - DNA, 25 bp, Artificial
  Probe
ttggagatgaagtggtgttgataaa

SEQ ID NO: 29322 - DNA, 25 bp, Artificial
  Probe
actatggtggatataagagggtgaa

SEQ ID NO: 29323 - DNA, 25 bp, Artificial
  Probe
agagatttaacagcagagtaacgaa

SEQ ID NO: 29324 - DNA, 25 bp, Artificial
  Probe
ggacagagatttaacagcagagtaa

SEQ ID NO: 29325 - DNA, 25 bp, Artificial
  Probe
gactatggtggatataagagggtga

SEQ ID NO: 29326 - DNA, 25 bp, Artificial
  Probe
gacagagatttaacagcagagtaac

SEQ ID NO: 29327 - DNA, 25 bp, Artificial
  Probe
tatggtggatataagagggtgaaag

SEQ ID NO: 29328 - DNA, 25 bp, Artificial
  Probe
ctatggtggatataagagggtgaaa

SEQ ID NO: 29329 - DNA, 25 bp, Artificial
  Probe
gagatttaacagcagagtaacgaaa

SEQ ID NO: 29330 - DNA, 25 bp, Artificial
  Probe
cagagatttaacagcagagtaacga

SEQ ID NO: 29331 - DNA, 25 bp, Artificial
  Probe
atggtggatataagagggtgaaagt

SEQ ID NO: 29332 - DNA, 25 bp, Artificial
  Probe
acagagatttaacagcagagtaacg

SEQ ID NO: 29333 - DNA, 25 bp, Artificial
  Probe
aggacagagatttaacagcagagta

SEQ ID NO: 29334 - DNA, 25 bp, Artificial
  Probe
acgtggactatggtggatataagag

SEQ ID NO: 29335 - DNA, 25 bp, Artificial
  Probe
tatggagtgtggttggagatgaagt

SEQ ID NO: 29336 - DNA, 25 bp, Artificial
  Probe
gctacgtggactatggtggatataa

SEQ ID NO: 29337 - DNA, 25 bp, Artificial
  Probe
tggagatgaagtggtgttgataaac

SEQ ID NO: 29338 - DNA, 25 bp, Artificial
  Probe
tggtggatataagagggtgaaagtc

SEQ ID NO: 29339 - DNA, 25 bp, Artificial
  Probe
ggactatggtggatataagagggtg

SEQ ID NO: 29340 - DNA, 25 bp, Artificial
  Probe
gtggactatggtggatataagaggg

SEQ ID NO: 29341 - DNA, 25 bp, Artificial
  Probe
catgagtgagatgacaggcaataca

SEQ ID NO: 29342 - DNA, 25 bp, Artificial
  Probe
tggactatggtggatataagagggt

SEQ ID NO: 29343 - DNA, 25 bp, Artificial
  Probe
caggacagagatttaacagcagagt

SEQ ID NO: 29344 - DNA, 25 bp, Artificial
  Probe
ggtggatataagagggtgaaagtcg

SEQ ID NO: 29345 - DNA, 25 bp, Artificial
  Probe
ccatgagtgagatgacaggcaatac

SEQ ID NO: 29346 - DNA, 25 bp, Artificial
  Probe
gatgtacctctgttactctcagcct

SEQ ID NO: 29347 - DNA, 25 bp, Artificial
  Probe
agatgtacctctgttactctcagcc

SEQ ID NO: 29348 - DNA, 25 bp, Artificial
  Probe
ccaggacagagatttaacagcagag

SEQ ID NO: 29349 - DNA, 25 bp, Artificial
  Probe
cttcctctgattcagctatggagtg

SEQ ID NO: 29350 - DNA, 25 bp, Artificial
  Probe
gtggatataagagggtgaaagtcga

SEQ ID NO: 29351 - DNA, 25 bp, Artificial
  Probe
atgtacctctgttactctcagcctg

SEQ ID NO: 29352 - DNA, 25 bp, Artificial
  Probe
tggttggagatgaagtggtgttgat

SEQ ID NO: 29353 - DNA, 25 bp, Artificial
  Probe
ggagatgaagtggtgttgataaacc

SEQ ID NO: 29354 - DNA, 25 bp, Artificial
  Probe
gctatggagtgtggttggagatgaa

SEQ ID NO: 29355 - DNA, 25 bp, Artificial
  Probe
gagatgaagtggtgttgataaaccg

SEQ ID NO: 29356 - DNA, 25 bp, Artificial
  Probe
cgctacgtggactatggtggatata

SEQ ID NO: 29357 - DNA, 25 bp, Artificial
  Probe
atggagtgtggttggagatgaagtg

SEQ ID NO: 29358 - DNA, 25 bp, Artificial
  Probe
ttcctctgattcagctatggagtgt

SEQ ID NO: 29359 - DNA, 25 bp, Artificial
  Probe
gattggcagcagaagtataggagtc

SEQ ID NO: 29360 - DNA, 25 bp, Artificial
  Probe
gcagcagaagtataggagtcagatc

SEQ ID NO: 29361 - DNA, 25 bp, Artificial
  Probe
gaacttctactacgtcatcctgtac

SEQ ID NO: 29362 - DNA, 25 bp, Artificial
  Probe
agaacttctactacgtcatcctgta

SEQ ID NO: 29363 - DNA, 25 bp, Artificial
  Probe
aacttctactacgtcatcctgtacc

SEQ ID NO: 29364 - DNA, 25 bp, Artificial
  Probe
ctgataaagaacgagagtccatctg

SEQ ID NO: 29365 - DNA, 25 bp, Artificial
  Probe
cttctactacgtcatcctgtacctc

SEQ ID NO: 29366 - DNA, 25 bp, Artificial
  Probe
attggcagcagaagtataggagtca

SEQ ID NO: 29367 - DNA, 25 bp, Artificial
  Probe
gagaacttctactacgtcatcctgt

SEQ ID NO: 29368 - DNA, 25 bp, Artificial
  Probe
tctactacgtcatcctgtacctcat

SEQ ID NO: 29369 - DNA, 25 bp, Artificial
  Probe
ctactacgtcatcctgtacctcatg

SEQ ID NO: 29370 - DNA, 25 bp, Artificial
  Probe
cctgataaagaacgagagtccatct

SEQ ID NO: 29371 - DNA, 25 bp, Artificial
  Probe
ggcagcagaagtataggagtcagat

SEQ ID NO: 29372 - DNA, 25 bp, Artificial
  Probe
ttctactacgtcatcctgtacctca

SEQ ID NO: 29373 - DNA, 25 bp, Artificial
  Probe
acttctactacgtcatcctgtacct

SEQ ID NO: 29374 - DNA, 25 bp, Artificial
  Probe
aggattggcagcagaagtataggag

SEQ ID NO: 29375 - DNA, 25 bp, Artificial
  Probe
gaggattggcagcagaagtatagga

SEQ ID NO: 29376 - DNA, 25 bp, Artificial
  Probe
aagtataggagtcagatcttgcatc

SEQ ID NO: 29377 - DNA, 25 bp, Artificial
  Probe
gaagtataggagtcagatcttgcat

SEQ ID NO: 29378 - DNA, 25 bp, Artificial
  Probe
ccctgataaagaacgagagtccatc

SEQ ID NO: 29379 - DNA, 25 bp, Artificial
  Probe
cgagaacttctactacgtcatcctg

SEQ ID NO: 29380 - DNA, 25 bp, Artificial
  Probe
cagaagtataggagtcagatcttgc

SEQ ID NO: 29381 - DNA, 25 bp, Artificial
  Probe
gcagaagtataggagtcagatcttg

SEQ ID NO: 29382 - DNA, 25 bp, Artificial
  Probe
agcagaagtataggagtcagatctt

SEQ ID NO: 29383 - DNA, 25 bp, Artificial
  Probe
agaagtataggagtcagatcttgca

SEQ ID NO: 29384 - DNA, 25 bp, Artificial
  Probe
ttggcagcagaagtataggagtcag

SEQ ID NO: 29385 - DNA, 25 bp, Artificial
  Probe
ggattggcagcagaagtataggagt

SEQ ID NO: 29386 - DNA, 25 bp, Artificial
  Probe
tggaggattggcagcagaagtatag

SEQ ID NO: 29387 - DNA, 25 bp, Artificial
  Probe
cagcagaagtataggagtcagatct

SEQ ID NO: 29388 - DNA, 25 bp, Artificial
  Probe
gagtggatgccgagaacttctacta

SEQ ID NO: 29389 - DNA, 25 bp, Artificial
  Probe
gaaacatgaccactttagccaactt

SEQ ID NO: 29390 - DNA, 25 bp, Artificial
  Probe
tgataaagaacgagagtccatctgc

SEQ ID NO: 29391 - DNA, 25 bp, Artificial
  Probe
ttcacagtgtcaccctgataaagaa

SEQ ID NO: 29392 - DNA, 25 bp, Artificial
  Probe
aaacatgaccactttagccaacttg

SEQ ID NO: 29393 - DNA, 25 bp, Artificial
  Probe
tactacgtcatcctgtacctcatgg

SEQ ID NO: 29394 - DNA, 25 bp, Artificial
  Probe
agtggatgccgagaacttctactac

SEQ ID NO: 29395 - DNA, 25 bp, Artificial
  Probe
accctgataaagaacgagagtccat

SEQ ID NO: 29396 - DNA, 25 bp, Artificial
  Probe
gtcaccctgataaagaacgagagtc

SEQ ID NO: 29397 - DNA, 25 bp, Artificial
  Probe
gtggaggattggcagcagaagtata

SEQ ID NO: 29398 - DNA, 25 bp, Artificial
  Probe
tcacagtgtcaccctgataaagaac

SEQ ID NO: 29399 - DNA, 25 bp, Artificial
  Probe
gttcacagtgtcaccctgataaaga

SEQ ID NO: 29400 - DNA, 25 bp, Artificial
  Probe
gataaagaacgagagtccatctgcc

SEQ ID NO: 29401 - DNA, 25 bp, Artificial
  Probe
ccgagaacttctactacgtcatcct

SEQ ID NO: 29402 - DNA, 25 bp, Artificial
  Probe
gtgtcaccctgataaagaacgagag

SEQ ID NO: 29403 - DNA, 25 bp, Artificial
  Probe
aacatgaccactttagccaacttga

SEQ ID NO: 29404 - DNA, 25 bp, Artificial
  Probe
gaatgacagcagtagcagtaatagg

SEQ ID NO: 29405 - DNA, 25 bp, Artificial
  Probe
ggaatgacagcagtagcagtaatag

SEQ ID NO: 29406 - DNA, 25 bp, Artificial
  Probe
atgacagcagtagcagtaataggaa

SEQ ID NO: 29407 - DNA, 25 bp, Artificial
  Probe
aatgacagcagtagcagtaatagga

SEQ ID NO: 29408 - DNA, 25 bp, Artificial
  Probe
aggaatgacagcagtagcagtaata

SEQ ID NO: 29409 - DNA, 25 bp, Artificial
  Probe
taggaatgacagcagtagcagtaat

SEQ ID NO: 29410 - DNA, 25 bp, Artificial
  Probe
ttaggaatgacagcagtagcagtaa

SEQ ID NO: 29411 - DNA, 25 bp, Artificial
  Probe
cttaggaatgacagcagtagcagta

SEQ ID NO: 29412 - DNA, 25 bp, Artificial
  Probe
gacagcagtagcagtaataggaaag

SEQ ID NO: 29413 - DNA, 25 bp, Artificial
  Probe
aacattaggtcctgagaaagattcc

SEQ ID NO: 29414 - DNA, 25 bp, Artificial
  Probe
caacattaggtcctgagaaagattc

SEQ ID NO: 29415 - DNA, 25 bp, Artificial
  Probe
tgacagcagtagcagtaataggaaa

SEQ ID NO: 29416 - DNA, 25 bp, Artificial
  Probe
cttcaacattaggtcctgagaaaga

SEQ ID NO: 29417 - DNA, 25 bp, Artificial
  Probe
acattaggtcctgagaaagattcca

SEQ ID NO: 29418 - DNA, 25 bp, Artificial
  Probe
tcaacattaggtcctgagaaagatt

SEQ ID NO: 29419 - DNA, 25 bp, Artificial
  Probe
ttcaacattaggtcctgagaaagat

SEQ ID NO: 29420 - DNA, 25 bp, Artificial
  Probe
attaggtcctgagaaagattccaga

SEQ ID NO: 29421 - DNA, 25 bp, Artificial
  Probe
cattaggtcctgagaaagattccag

SEQ ID NO: 29422 - DNA, 25 bp, Artificial
  Probe
gagaaagattccagagtcagtgtca

SEQ ID NO: 29423 - DNA, 25 bp, Artificial
  Probe
aagattccagagtcagtgtcacaaa

SEQ ID NO: 29424 - DNA, 25 bp, Artificial
  Probe
aaagattccagagtcagtgtcacaa

SEQ ID NO: 29425 - DNA, 25 bp, Artificial
  Probe
ttaggtcctgagaaagattccagag

SEQ ID NO: 29426 - DNA, 25 bp, Artificial
  Probe
tgagaaagattccagagtcagtgtc

SEQ ID NO: 29427 - DNA, 25 bp, Artificial
  Probe
agaaagattccagagtcagtgtcac

SEQ ID NO: 29428 - DNA, 25 bp, Artificial
  Probe
acagcagtagcagtaataggaaagc

SEQ ID NO: 29429 - DNA, 25 bp, Artificial
  Probe
gaaagattccagagtcagtgtcaca

SEQ ID NO: 29430 - DNA, 25 bp, Artificial
  Probe
taggtcctgagaaagattccagagt

SEQ ID NO: 29431 - DNA, 25 bp, Artificial
  Probe
ccttaggaatgacagcagtagcagt

SEQ ID NO: 29432 - DNA, 25 bp, Artificial
  Probe
tagcagtaataggaaagccgcaaag

SEQ ID NO: 29433 - DNA, 25 bp, Artificial
  Probe
cagcagtagcagtaataggaaagcc

SEQ ID NO: 29434 - DNA, 25 bp, Artificial
  Probe
gtagcagtaataggaaagccgcaaa

SEQ ID NO: 29435 - DNA, 25 bp, Artificial
  Probe
agtcagtgtcacaaaaccatttatg

SEQ ID NO: 29436 - DNA, 25 bp, Artificial
  Probe
gagtcagtgtcacaaaaccatttat

SEQ ID NO: 29437 - DNA, 25 bp, Artificial
  Probe
agagtcagtgtcacaaaaccattta

SEQ ID NO: 29438 - DNA, 25 bp, Artificial
  Probe
tgtcacaaaaccatttatgttaccc

SEQ ID NO: 29439 - DNA, 25 bp, Artificial
  Probe
gtcacaaaaccatttatgttacccc

SEQ ID NO: 29440 - DNA, 25 bp, Artificial
  Probe
aggtcctgagaaagattccagagtc

SEQ ID NO: 29441 - DNA, 25 bp, Artificial
  Probe
gtcagtgtcacaaaaccatttatgt

SEQ ID NO: 29442 - DNA, 25 bp, Artificial
  Probe
tcagtgtcacaaaaccatttatgtt

SEQ ID NO: 29443 - DNA, 25 bp, Artificial
  Probe
gtgtcacaaaaccatttatgttacc

SEQ ID NO: 29444 - DNA, 25 bp, Artificial
  Probe
cagagtcagtgtcacaaaaccattt

SEQ ID NO: 29445 - DNA, 25 bp, Artificial
  Probe
ggtcctgagaaagattccagagtca

SEQ ID NO: 29446 - DNA, 25 bp, Artificial
  Probe
gattccagagtcagtgtcacaaaac

SEQ ID NO: 29447 - DNA, 25 bp, Artificial
  Probe
agattccagagtcagtgtcacaaaa

SEQ ID NO: 29448 - DNA, 25 bp, Artificial
  Probe
agtagcagtaataggaaagccgcaa

SEQ ID NO: 29449 - DNA, 25 bp, Artificial
  Probe
cttcaacattaggtcctgagaaagg

SEQ ID NO: 29450 - DNA, 25 bp, Artificial
  Probe
aacattaggtcctgagaaagggaaa

SEQ ID NO: 29451 - DNA, 25 bp, Artificial
  Probe
ttcaacattaggtcctgagaaaggg

SEQ ID NO: 29452 - DNA, 25 bp, Artificial
  Probe
acattaggtcctgagaaagggaaag

SEQ ID NO: 29453 - DNA, 25 bp, Artificial
  Probe
caacattaggtcctgagaaagggaa

SEQ ID NO: 29454 - DNA, 25 bp, Artificial
  Probe
tcaacattaggtcctgagaaaggga

SEQ ID NO: 29455 - DNA, 25 bp, Artificial
  Probe
cattaggtcctgagaaagggaaagc

SEQ ID NO: 29456 - DNA, 25 bp, Artificial
  Probe
attaggtcctgagaaagggaaagcc

SEQ ID NO: 29457 - DNA, 25 bp, Artificial
  Probe
caagcataactaaagagacggagag

SEQ ID NO: 29458 - DNA, 25 bp, Artificial
  Probe
tagagaaagggtggaagagaagatg

SEQ ID NO: 29459 - DNA, 25 bp, Artificial
  Probe
aagagcaagcataactaaagagacg

SEQ ID NO: 29460 - DNA, 25 bp, Artificial
  Probe
taagagcaagcataactaaagagac

SEQ ID NO: 29461 - DNA, 25 bp, Artificial
  Probe
cataactaaagagacggagagtgag

SEQ ID NO: 29462 - DNA, 25 bp, Artificial
  Probe
aagcataactaaagagacggagagt

SEQ ID NO: 29463 - DNA, 25 bp, Artificial
  Probe
atagaaacatgaccaccaatatgct

SEQ ID NO: 29464 - DNA, 25 bp, Artificial
  Probe
ttaagagcaagcataactaaagaga

SEQ ID NO: 29465 - DNA, 25 bp, Artificial
  Probe
cccatagaaacatgaccaccaatat

SEQ ID NO: 29466 - DNA, 25 bp, Artificial
  Probe
ataactaaagagacggagagtgagc

SEQ ID NO: 29467 - DNA, 25 bp, Artificial
  Probe
tagaaacatgaccaccaatatgctc

SEQ ID NO: 29468 - DNA, 25 bp, Artificial
  Probe
gcataactaaagagacggagagtga

SEQ ID NO: 29469 - DNA, 25 bp, Artificial
  Probe
agcataactaaagagacggagagtg

SEQ ID NO: 29470 - DNA, 25 bp, Artificial
  Probe
gcaagcataactaaagagacggaga

SEQ ID NO: 29471 - DNA, 25 bp, Artificial
  Probe
agcaagcataactaaagagacggag

SEQ ID NO: 29472 - DNA, 25 bp, Artificial
  Probe
gagcaagcataactaaagagacgga

SEQ ID NO: 29473 - DNA, 25 bp, Artificial
  Probe
agagcaagcataactaaagagacgg

SEQ ID NO: 29474 - DNA, 25 bp, Artificial
  Probe
ttctaccatgaaatccttctcgaag

SEQ ID NO: 29475 - DNA, 25 bp, Artificial
  Probe
ttaccagaagactcgaatcctcctc

SEQ ID NO: 29476 - DNA, 25 bp, Artificial
  Probe
catagaaacatgaccaccaatatgc

SEQ ID NO: 29477 - DNA, 25 bp, Artificial
  Probe
ccatagaaacatgaccaccaatatg

SEQ ID NO: 29478 - DNA, 25 bp, Artificial
  Probe
cttaccagaagactcgaatcctcct

SEQ ID NO: 29479 - DNA, 25 bp, Artificial
  Probe
attaagagcaagcataactaaagag

SEQ ID NO: 29480 - DNA, 25 bp, Artificial
  Probe
ctaccatgaaatccttctcgaagac

SEQ ID NO: 29481 - DNA, 25 bp, Artificial
  Probe
tctaccatgaaatccttctcgaaga

SEQ ID NO: 29482 - DNA, 25 bp, Artificial
  Probe
acttcgttatcatgaatgccatatg

SEQ ID NO: 29483 - DNA, 25 bp, Artificial
  Probe
ttagtgatggcttcatcgtctgtat

SEQ ID NO: 29484 - DNA, 25 bp, Artificial
  Probe
catgaaatccttctcgaagaccaag

SEQ ID NO: 29485 - DNA, 25 bp, Artificial
  Probe
cttatcccaactctggaaagaatat

SEQ ID NO: 29486 - DNA, 25 bp, Artificial
  Probe
ggttctctttctaccatgaaatcct

SEQ ID NO: 29487 - DNA, 25 bp, Artificial
  Probe
tctttctaccatgaaatccttctcg

SEQ ID NO: 29488 - DNA, 25 bp, Artificial
  Probe
aattaagagcaagcataactaaaga

SEQ ID NO: 29489 - DNA, 25 bp, Artificial
  Probe
tagtgatggcttcatcgtctgtatg

SEQ ID NO: 29490 - DNA, 25 bp, Artificial
  Probe
cttagtgatggcttcatcgtctgta

SEQ ID NO: 29491 - DNA, 25 bp, Artificial
  Probe
tcttatcccaactctggaaagaata

SEQ ID NO: 29492 - DNA, 25 bp, Artificial
  Probe
tctctttctaccatgaaatccttct

SEQ ID NO: 29493 - DNA, 25 bp, Artificial
  Probe
tacttcgttatcatgaatgccatat

SEQ ID NO: 29494 - DNA, 25 bp, Artificial
  Probe
agagaaagggtggaagagaagatgg

SEQ ID NO: 29495 - DNA, 25 bp, Artificial
  Probe
tattccaagggagacagccgatata

SEQ ID NO: 29496 - DNA, 25 bp, Artificial
  Probe
taccatgaaatccttctcgaagacc

SEQ ID NO: 29497 - DNA, 25 bp, Artificial
  Probe
ctctttctaccatgaaatccttctc

SEQ ID NO: 29498 - DNA, 25 bp, Artificial
  Probe
gttctctttctaccatgaaatcctt

SEQ ID NO: 29499 - DNA, 25 bp, Artificial
  Probe
gcccatagaaacatgaccaccaata

SEQ ID NO: 29500 - DNA, 25 bp, Artificial
  Probe
atatcctggttggcctattctcctt

SEQ ID NO: 29501 - DNA, 25 bp, Artificial
  Probe
gagactggacaacttcgtgcctaat

SEQ ID NO: 29502 - DNA, 25 bp, Artificial
  Probe
ccactcagactacctattaaccata

SEQ ID NO: 29503 - DNA, 25 bp, Artificial
  Probe
gaagtatgactgttaatgaagccaa

SEQ ID NO: 29504 - DNA, 25 bp, Artificial
  Probe
ggaagtatgactgttaatgaagcca

SEQ ID NO: 29505 - DNA, 25 bp, Artificial
  Probe
cctcatatagagtatcaccgaatgc

SEQ ID NO: 29506 - DNA, 25 bp, Artificial
  Probe
gcctcatatagagtatcaccgaatg

SEQ ID NO: 29507 - DNA, 25 bp, Artificial
  Probe
gaatgcctcatatagagtatcaccg

SEQ ID NO: 29508 - DNA, 25 bp, Artificial
  Probe
tgaatgcctcatatagagtatcacc

SEQ ID NO: 29509 - DNA, 25 bp, Artificial
  Probe
gtggttcatctgattgactactacg

SEQ ID NO: 29510 - DNA, 25 bp, Artificial
  Probe
cgtggttcatctgattgactactac

SEQ ID NO: 29511 - DNA, 25 bp, Artificial
  Probe
tgcctcatatagagtatcaccgaat

SEQ ID NO: 29512 - DNA, 25 bp, Artificial
  Probe
atgcctcatatagagtatcaccgaa

SEQ ID NO: 29513 - DNA, 25 bp, Artificial
  Probe
aatgcctcatatagagtatcaccga

SEQ ID NO: 29514 - DNA, 25 bp, Artificial
  Probe
aaccatatctgttaagacatcagcc

SEQ ID NO: 29515 - DNA, 25 bp, Artificial
  Probe
gcgtggttcatctgattgactacta

SEQ ID NO: 29516 - DNA, 25 bp, Artificial
  Probe
tatagagtatcaccgaatgcagcta

SEQ ID NO: 29517 - DNA, 25 bp, Artificial
  Probe
ctttacctgaccaaacctctgtata

SEQ ID NO: 29518 - DNA, 25 bp, Artificial
  Probe
gactgttaatgaagccaaagagaaa

SEQ ID NO: 29519 - DNA, 25 bp, Artificial
  Probe
tcatatagagtatcaccgaatgcag

SEQ ID NO: 29520 - DNA, 25 bp, Artificial
  Probe
atgactgttaatgaagccaaagaga

SEQ ID NO: 29521 - DNA, 25 bp, Artificial
  Probe
taaccatatctgttaagacatcagc

SEQ ID NO: 29522 - DNA, 25 bp, Artificial
  Probe
tgactgttaatgaagccaaagagaa

SEQ ID NO: 29523 - DNA, 25 bp, Artificial
  Probe
actacctttaccaacaagactgaaa

SEQ ID NO: 29524 - DNA, 25 bp, Artificial
  Probe
gtatgactgttaatgaagccaaaga

SEQ ID NO: 29525 - DNA, 25 bp, Artificial
  Probe
cactcagactacctattaaccatat

SEQ ID NO: 29526 - DNA, 25 bp, Artificial
  Probe
gactacctttaccaacaagactgaa

SEQ ID NO: 29527 - DNA, 25 bp, Artificial
  Probe
atatagagtatcaccgaatgcagct

SEQ ID NO: 29528 - DNA, 25 bp, Artificial
  Probe
actgttaatgaagccaaagagaaat

SEQ ID NO: 29529 - DNA, 25 bp, Artificial
  Probe
tatgactgttaatgaagccaaagag

SEQ ID NO: 29530 - DNA, 25 bp, Artificial
  Probe
cccactcagactacctattaaccat

SEQ ID NO: 29531 - DNA, 25 bp, Artificial
  Probe
tgattgactactacgttcagatgtg

SEQ ID NO: 29532 - DNA, 25 bp, Artificial
  Probe
ggttcatctgattgactactacgtt

SEQ ID NO: 29533 - DNA, 25 bp, Artificial
  Probe
acgggaaattcagattggattctat

SEQ ID NO: 29534 - DNA, 25 bp, Artificial
  Probe
ttcatctgattgactactacgttca

SEQ ID NO: 29535 - DNA, 25 bp, Artificial
  Probe
catatagagtatcaccgaatgcagc

SEQ ID NO: 29536 - DNA, 25 bp, Artificial
  Probe
cgggaaattcagattggattctatc

SEQ ID NO: 29537 - DNA, 25 bp, Artificial
  Probe
ctcatatagagtatcaccgaatgca

SEQ ID NO: 29538 - DNA, 25 bp, Artificial
  Probe
gttcatctgattgactactacgttc

SEQ ID NO: 29539 - DNA, 25 bp, Artificial
  Probe
gacgggaaattcagattggattcta

SEQ ID NO: 29540 - DNA, 25 bp, Artificial
  Probe
accatatctgttaagacatcagccg

SEQ ID NO: 29541 - DNA, 25 bp, Artificial
  Probe
actcagactacctattaaccatatc

SEQ ID NO: 29542 - DNA, 25 bp, Artificial
  Probe
ctcccactcagactacctattaacc

SEQ ID NO: 29543 - DNA, 25 bp, Artificial
  Probe
ctatcatatgtgtcaagtccaagct

SEQ ID NO: 29544 - DNA, 25 bp, Artificial
  Probe
tctatcatatgtgtcaagtccaagc

SEQ ID NO: 29545 - DNA, 25 bp, Artificial
  Probe
agactgaaagattacttggaagagt

SEQ ID NO: 29546 - DNA, 25 bp, Artificial
  Probe
agtatgactgttaatgaagccaaag

SEQ ID NO: 29547 - DNA, 25 bp, Artificial
  Probe
tggacacttaacaagacctgagaag

SEQ ID NO: 29548 - DNA, 25 bp, Artificial
  Probe
ctggacacttaacaagacctgagaa

SEQ ID NO: 29549 - DNA, 25 bp, Artificial
  Probe
ctctggacacttaacaagacctgag

SEQ ID NO: 29550 - DNA, 25 bp, Artificial
  Probe
tctggacacttaacaagacctgaga

SEQ ID NO: 29551 - DNA, 25 bp, Artificial
  Probe
actctggacacttaacaagacctga

SEQ ID NO: 29552 - DNA, 25 bp, Artificial
  Probe
cactctggacacttaacaagacctg

SEQ ID NO: 29553 - DNA, 25 bp, Artificial
  Probe
cctgggctattgacataataaactt

SEQ ID NO: 29554 - DNA, 25 bp, Artificial
  Probe
ccctgggctattgacataataaact

SEQ ID NO: 29555 - DNA, 25 bp, Artificial
  Probe
cacttaacaagacctgagaaggctt

SEQ ID NO: 29556 - DNA, 25 bp, Artificial
  Probe
ggacacttaacaagacctgagaagg

SEQ ID NO: 29557 - DNA, 25 bp, Artificial
  Probe
tgttcgtactactgatacccatgtg

SEQ ID NO: 29558 - DNA, 25 bp, Artificial
  Probe
gtgttcgtactactgatacccatgt

SEQ ID NO: 29559 - DNA, 25 bp, Artificial
  Probe
gacacttaacaagacctgagaaggc

SEQ ID NO: 29560 - DNA, 25 bp, Artificial
  Probe
agtgttcgtactactgatacccatg

SEQ ID NO: 29561 - DNA, 25 bp, Artificial
  Probe
ctcaggcaaagacgactacatcaat

SEQ ID NO: 29562 - DNA, 25 bp, Artificial
  Probe
cttaacaagacctgagaaggctttg

SEQ ID NO: 29563 - DNA, 25 bp, Artificial
  Probe
acttaacaagacctgagaaggcttt

SEQ ID NO: 29564 - DNA, 25 bp, Artificial
  Probe
gttcgtactactgatacccatgtgg

SEQ ID NO: 29565 - DNA, 25 bp, Artificial
  Probe
acacttaacaagacctgagaaggct

SEQ ID NO: 29566 - DNA, 25 bp, Artificial
  Probe
ttcgtactactgatacccatgtgga

SEQ ID NO: 29567 - DNA, 25 bp, Artificial
  Probe
tcaggcaaagacgactacatcaatg

SEQ ID NO: 29568 - DNA, 25 bp, Artificial
  Probe
tgggctattgacataataaacttac

SEQ ID NO: 29569 - DNA, 25 bp, Artificial
  Probe
tcgtactactgatacccatgtggag

SEQ ID NO: 29570 - DNA, 25 bp, Artificial
  Probe
aacagaaagtgtccgtcattgtcat

SEQ ID NO: 29571 - DNA, 25 bp, Artificial
  Probe
gggctattgacataataaacttact

SEQ ID NO: 29572 - DNA, 25 bp, Artificial
  Probe
ctgggctattgacataataaactta

SEQ ID NO: 29573 - DNA, 25 bp, Artificial
  Probe
ccactctggacacttaacaagacct

SEQ ID NO: 29574 - DNA, 25 bp, Artificial
  Probe
gaacagaaagtgtccgtcattgtca

SEQ ID NO: 29575 - DNA, 25 bp, Artificial
  Probe
tgaacagaaagtgtccgtcattgtc

SEQ ID NO: 29576 - DNA, 25 bp, Artificial
  Probe
ttaacaagacctgagaaggctttgc

SEQ ID NO: 29577 - DNA, 25 bp, Artificial
  Probe
gcaaagacgactacatcaatgctag

SEQ ID NO: 29578 - DNA, 25 bp, Artificial
  Probe
ctgagcagtgttcgtactactgata

SEQ ID NO: 29579 - DNA, 25 bp, Artificial
  Probe
tgagcagtgttcgtactactgatac

SEQ ID NO: 29580 - DNA, 25 bp, Artificial
  Probe
acagaaagtgtccgtcattgtcatg

SEQ ID NO: 29581 - DNA, 25 bp, Artificial
  Probe
catgaacagaaagtgtccgtcattg

SEQ ID NO: 29582 - DNA, 25 bp, Artificial
  Probe
atgaacagaaagtgtccgtcattgt

SEQ ID NO: 29583 - DNA, 25 bp, Artificial
  Probe
ggctattgacataataaacttactc

SEQ ID NO: 29584 - DNA, 25 bp, Artificial
  Probe
gagcagtgttcgtactactgatacc

SEQ ID NO: 29585 - DNA, 25 bp, Artificial
  Probe
gatccactctggacacttaacaaga

SEQ ID NO: 29586 - DNA, 25 bp, Artificial
  Probe
gtactactgatacccatgtggagcg

SEQ ID NO: 29587 - DNA, 25 bp, Artificial
  Probe
cgtactactgatacccatgtggagc

SEQ ID NO: 29588 - DNA, 25 bp, Artificial
  Probe
tactactgatacccatgtggagcga

SEQ ID NO: 29589 - DNA, 25 bp, Artificial
  Probe
ggcaaagacgactacatcaatgcta

SEQ ID NO: 29590 - DNA, 25 bp, Artificial
  Probe
atccactctggacacttaacaagac

SEQ ID NO: 29591 - DNA, 25 bp, Artificial
  Probe
cagtgttcgtactactgatacccat

SEQ ID NO: 29592 - DNA, 25 bp, Artificial
  Probe
gcaactgactgtccttaatgatgat

SEQ ID NO: 29593 - DNA, 25 bp, Artificial
  Probe
tatgttatgtaagcaactggactcc

SEQ ID NO: 29594 - DNA, 25 bp, Artificial
  Probe
ttatgttatgtaagcaactggactc

SEQ ID NO: 29595 - DNA, 25 bp, Artificial
  Probe
actgactgtccttaatgatgatctc

SEQ ID NO: 29596 - DNA, 25 bp, Artificial
  Probe
aactgactgtccttaatgatgatct

SEQ ID NO: 29597 - DNA, 25 bp, Artificial
  Probe
caactgactgtccttaatgatgatc

SEQ ID NO: 29598 - DNA, 25 bp, Artificial
  Probe
ctgactgtccttaatgatgatctca

SEQ ID NO: 29599 - DNA, 25 bp, Artificial
  Probe
cttatgttatgtaagcaactggact

SEQ ID NO: 29600 - DNA, 25 bp, Artificial
  Probe
tatgcaactgactgtccttaatgat

SEQ ID NO: 29601 - DNA, 25 bp, Artificial
  Probe
ttatgcaactgactgtccttaatga

SEQ ID NO: 29602 - DNA, 25 bp, Artificial
  Probe
atagacgattggatttatgtggagg

SEQ ID NO: 29603 - DNA, 25 bp, Artificial
  Probe
atgcaactgactgtccttaatgatg

SEQ ID NO: 29604 - DNA, 25 bp, Artificial
  Probe
tatagacgattggatttatgtggag

SEQ ID NO: 29605 - DNA, 25 bp, Artificial
  Probe
tgactgtccttaatgatgatctcat

SEQ ID NO: 29606 - DNA, 25 bp, Artificial
  Probe
tgcaactgactgtccttaatgatga

SEQ ID NO: 29607 - DNA, 25 bp, Artificial
  Probe
tgatctcataaacatttgtgtgtgg

SEQ ID NO: 29608 - DNA, 25 bp, Artificial
  Probe
gatctcataaacatttgtgtgtggg

SEQ ID NO: 29609 - DNA, 25 bp, Artificial
  Probe
tagacgattggatttatgtggaggc

SEQ ID NO: 29610 - DNA, 25 bp, Artificial
  Probe
gggaatgaatttgaagtctaaagtt

SEQ ID NO: 29611 - DNA, 25 bp, Artificial
  Probe
gatcagcttctgctctgtctatata

SEQ ID NO: 29612 - DNA, 25 bp, Artificial
  Probe
atatagacgattggatttatgtgga

SEQ ID NO: 29613 - DNA, 25 bp, Artificial
  Probe
atgttatgtaagcaactggactccc

SEQ ID NO: 29614 - DNA, 25 bp, Artificial
  Probe
atgatctcataaacatttgtgtgtg

SEQ ID NO: 29615 - DNA, 25 bp, Artificial
  Probe
gactgtccttaatgatgatctcata

SEQ ID NO: 29616 - DNA, 25 bp, Artificial
  Probe
gatgatctcataaacatttgtgtgt

SEQ ID NO: 29617 - DNA, 25 bp, Artificial
  Probe
tgatgatctcataaacatttgtgtg

SEQ ID NO: 29618 - DNA, 25 bp, Artificial
  Probe
actgtccttaatgatgatctcataa

SEQ ID NO: 29619 - DNA, 25 bp, Artificial
  Probe
ggatggggaatgaatttgaagtcta

SEQ ID NO: 29620 - DNA, 25 bp, Artificial
  Probe
ggggaatgaatttgaagtctaaagt

SEQ ID NO: 29621 - DNA, 25 bp, Artificial
  Probe
tggggaatgaatttgaagtctaaag

SEQ ID NO: 29622 - DNA, 25 bp, Artificial
  Probe
gatggggaatgaatttgaagtctaa

SEQ ID NO: 29623 - DNA, 25 bp, Artificial
  Probe
gacgattggatttatgtggaggcag

SEQ ID NO: 29624 - DNA, 25 bp, Artificial
  Probe
atggggaatgaatttgaagtctaaa

SEQ ID NO: 29625 - DNA, 25 bp, Artificial
  Probe
tgaatttgaagtctaaagttaaagc

SEQ ID NO: 29626 - DNA, 25 bp, Artificial
  Probe
cagatggcaactgatgacttgtgtg

SEQ ID NO: 29627 - DNA, 25 bp, Artificial
  Probe
agacgattggatttatgtggaggca

SEQ ID NO: 29628 - DNA, 25 bp, Artificial
  Probe
aaacagtaaacatgagacaaagttt

SEQ ID NO: 29629 - DNA, 25 bp, Artificial
  Probe
tgatcagcttctgctctgtctatat

SEQ ID NO: 29630 - DNA, 25 bp, Artificial
  Probe
atgatcagcttctgctctgtctata

SEQ ID NO: 29631 - DNA, 25 bp, Artificial
  Probe
atcagcttctgctctgtctatatag

SEQ ID NO: 29632 - DNA, 25 bp, Artificial
  Probe
atctcataaacatttgtgtgtgggg

SEQ ID NO: 29633 - DNA, 25 bp, Artificial
  Probe
agttaaagctagaaatcagatgatc

SEQ ID NO: 29634 - DNA, 25 bp, Artificial
  Probe
tatatagacgattggatttatgtgg

SEQ ID NO: 29635 - DNA, 25 bp, Artificial
  Probe
aaagttaaagctagaaatcagatga

SEQ ID NO: 29636 - DNA, 25 bp, Artificial
  Probe
gggatggggaatgaatttgaagtct

SEQ ID NO: 29637 - DNA, 25 bp, Artificial
  Probe
tatacagacgtgaggacagaagatt

SEQ ID NO: 29638 - DNA, 25 bp, Artificial
  Probe
ttatacagacgtgaggacagaagat

SEQ ID NO: 29639 - DNA, 25 bp, Artificial
  Probe
ctccttgattggcatttcctttaat

SEQ ID NO: 29640 - DNA, 25 bp, Artificial
  Probe
cgtgaggacagaagattggatattt

SEQ ID NO: 29641 - DNA, 25 bp, Artificial
  Probe
aatccttctctgatgtcagtgtcat

SEQ ID NO: 29642 - DNA, 25 bp, Artificial
  Probe
acgtgaggacagaagattggatatt

SEQ ID NO: 29643 - DNA, 25 bp, Artificial
  Probe
tgaaacgggacagaataagaggatt

SEQ ID NO: 29644 - DNA, 25 bp, Artificial
  Probe
gacgtgaggacagaagattggatat

SEQ ID NO: 29645 - DNA, 25 bp, Artificial
  Probe
gcaattctcagcatggatttataca

SEQ ID NO: 29646 - DNA, 25 bp, Artificial
  Probe
atacagacgtgaggacagaagattg

SEQ ID NO: 29647 - DNA, 25 bp, Artificial
  Probe
gctccttgattggcatttcctttaa

SEQ ID NO: 29648 - DNA, 25 bp, Artificial
  Probe
ttctcagcatggatttatacagacg

SEQ ID NO: 29649 - DNA, 25 bp, Artificial
  Probe
gtgaaacgggacagaataagaggat

SEQ ID NO: 29650 - DNA, 25 bp, Artificial
  Probe
tcagtgaaacgggacagaataagag

SEQ ID NO: 29651 - DNA, 25 bp, Artificial
  Probe
attctcagcatggatttatacagac

SEQ ID NO: 29652 - DNA, 25 bp, Artificial
  Probe
ttcagtgaaacgggacagaataaga

SEQ ID NO: 29653 - DNA, 25 bp, Artificial
  Probe
caattctcagcatggatttatacag

SEQ ID NO: 29654 - DNA, 25 bp, Artificial
  Probe
agacgtgaggacagaagattggata

SEQ ID NO: 29655 - DNA, 25 bp, Artificial
  Probe
atttatacagacgtgaggacagaag

SEQ ID NO: 29656 - DNA, 25 bp, Artificial
  Probe
gatttatacagacgtgaggacagaa

SEQ ID NO: 29657 - DNA, 25 bp, Artificial
  Probe
aattctcagcatggatttatacaga

SEQ ID NO: 29658 - DNA, 25 bp, Artificial
  Probe
atttcctttaatgctgcaacaactc

SEQ ID NO: 29659 - DNA, 25 bp, Artificial
  Probe
gaaacgggacagaataagaggattc

SEQ ID NO: 29660 - DNA, 25 bp, Artificial
  Probe
tttatacagacgtgaggacagaaga

SEQ ID NO: 29661 - DNA, 25 bp, Artificial
  Probe
catggatttatacagacgtgaggac

SEQ ID NO: 29662 - DNA, 25 bp, Artificial
  Probe
tccttgattggcatttcctttaatg

SEQ ID NO: 29663 - DNA, 25 bp, Artificial
  Probe
attcagtgaaacgggacagaataag

SEQ ID NO: 29664 - DNA, 25 bp, Artificial
  Probe
atggatttatacagacgtgaggaca

SEQ ID NO: 29665 - DNA, 25 bp, Artificial
  Probe
agtgaaacgggacagaataagagga

SEQ ID NO: 29666 - DNA, 25 bp, Artificial
  Probe
cagtgaaacgggacagaataagagg

SEQ ID NO: 29667 - DNA, 25 bp, Artificial
  Probe
cattcagtgaaacgggacagaataa

SEQ ID NO: 29668 - DNA, 25 bp, Artificial
  Probe
aaatccttctctgatgtcagtgtca

SEQ ID NO: 29669 - DNA, 25 bp, Artificial
  Probe
ttcatggctgcattaatccctattc

SEQ ID NO: 29670 - DNA, 25 bp, Artificial
  Probe
cttcatggctgcattaatccctatt

SEQ ID NO: 29671 - DNA, 25 bp, Artificial
  Probe
ggatttatacagacgtgaggacaga

SEQ ID NO: 29672 - DNA, 25 bp, Artificial
  Probe
cagcatggatttatacagacgtgag

SEQ ID NO: 29673 - DNA, 25 bp, Artificial
  Probe
ctcagcatggatttatacagacgtg

SEQ ID NO: 29674 - DNA, 25 bp, Artificial
  Probe
atccttctctgatgtcagtgtcatc

SEQ ID NO: 29675 - DNA, 25 bp, Artificial
  Probe
tttcctttaatgctgcaacaactca

SEQ ID NO: 29676 - DNA, 25 bp, Artificial
  Probe
tctcagcatggatttatacagacgt

SEQ ID NO: 29677 - DNA, 25 bp, Artificial
  Probe
tggatttatacagacgtgaggacag

SEQ ID NO: 29678 - DNA, 25 bp, Artificial
  Probe
cgacatcctaaaatccttctctgat

SEQ ID NO: 29679 - DNA, 25 bp, Artificial
  Probe
tcttcatggctgcattaatccctat

SEQ ID NO: 29680 - DNA, 25 bp, Artificial
  Probe
gacgacatcctaaaatccttctctg

SEQ ID NO: 29681 - DNA, 25 bp, Artificial
  Probe
gattggatattttctgctgtttcac

SEQ ID NO: 29682 - DNA, 25 bp, Artificial
  Probe
tacataagaacacacaggaggacat

SEQ ID NO: 29683 - DNA, 25 bp, Artificial
  Probe
aagagtacataagaacacacaggag

SEQ ID NO: 29684 - DNA, 25 bp, Artificial
  Probe
gctaagagtacataagaacacacag

SEQ ID NO: 29685 - DNA, 25 bp, Artificial
  Probe
gatgctagtaccatagttccaatcc

SEQ ID NO: 29686 - DNA, 25 bp, Artificial
  Probe
taagagtacataagaacacacagga

SEQ ID NO: 29687 - DNA, 25 bp, Artificial
  Probe
ctaagagtacataagaacacacagg

SEQ ID NO: 29688 - DNA, 25 bp, Artificial
  Probe
gagtacataagaacacacaggagga

SEQ ID NO: 29689 - DNA, 25 bp, Artificial
  Probe
agagtacataagaacacacaggagg

SEQ ID NO: 29690 - DNA, 25 bp, Artificial
  Probe
ataagaacacacaggaggacatcac

SEQ ID NO: 29691 - DNA, 25 bp, Artificial
  Probe
cataagaacacacaggaggacatca

SEQ ID NO: 29692 - DNA, 25 bp, Artificial
  Probe
acataagaacacacaggaggacatc

SEQ ID NO: 29693 - DNA, 25 bp, Artificial
  Probe
agtacataagaacacacaggaggac

SEQ ID NO: 29694 - DNA, 25 bp, Artificial
  Probe
agctaagagtacataagaacacaca

SEQ ID NO: 29695 - DNA, 25 bp, Artificial
  Probe
gtacataagaacacacaggaggaca

SEQ ID NO: 29696 - DNA, 25 bp, Artificial
  Probe
ggatgctagtaccatagttccaatc

SEQ ID NO: 29697 - DNA, 25 bp, Artificial
  Probe
aagctaagagtacataagaacacac

SEQ ID NO: 29698 - DNA, 25 bp, Artificial
  Probe
gagagatgaatgggtaaactttgtg

SEQ ID NO: 29699 - DNA, 25 bp, Artificial
  Probe
tgagagatgaatgggtaaactttgt

SEQ ID NO: 29700 - DNA, 25 bp, Artificial
  Probe
agagatgaatgggtaaactttgtgt

SEQ ID NO: 29701 - DNA, 25 bp, Artificial
  Probe
tgtatgagagatgaatgggtaaact

SEQ ID NO: 29702 - DNA, 25 bp, Artificial
  Probe
atgagagatgaatgggtaaactttg

SEQ ID NO: 29703 - DNA, 25 bp, Artificial
  Probe
gagatgaatgggtaaactttgtgtt

SEQ ID NO: 29704 - DNA, 25 bp, Artificial
  Probe
gaatcctggttcaacactttcaatg

SEQ ID NO: 29705 - DNA, 25 bp, Artificial
  Probe
tttatttctctgtgaatcctggttc

SEQ ID NO: 29706 - DNA, 25 bp, Artificial
  Probe
tttgtgtttgagagtccaaggtatt

SEQ ID NO: 29707 - DNA, 25 bp, Artificial
  Probe
gagtggtctcatgtgagtgtcataa

SEQ ID NO: 29708 - DNA, 25 bp, Artificial
  Probe
ctttgtgtttgagagtccaaggtat

SEQ ID NO: 29709 - DNA, 25 bp, Artificial
  Probe
atcacaagatgggacacatattgag

SEQ ID NO: 29710 - DNA, 25 bp, Artificial
  Probe
gtatgagagatgaatgggtaaactt

SEQ ID NO: 29711 - DNA, 25 bp, Artificial
  Probe
taagaacacacaggaggacatcaca

SEQ ID NO: 29712 - DNA, 25 bp, Artificial
  Probe
ctggttcaacactttcaatgtatga

SEQ ID NO: 29713 - DNA, 25 bp, Artificial
  Probe
cctggttcaacactttcaatgtatg

SEQ ID NO: 29714 - DNA, 25 bp, Artificial
  Probe
tcctggttcaacactttcaatgtat

SEQ ID NO: 29715 - DNA, 25 bp, Artificial
  Probe
atcctggttcaacactttcaatgta

SEQ ID NO: 29716 - DNA, 25 bp, Artificial
  Probe
aatcctggttcaacactttcaatgt

SEQ ID NO: 29717 - DNA, 25 bp, Artificial
  Probe
tatgagagatgaatgggtaaacttt

SEQ ID NO: 29718 - DNA, 25 bp, Artificial
  Probe
gtcataaactctttgagacagggtc

SEQ ID NO: 29719 - DNA, 25 bp, Artificial
  Probe
atgctagtaccatagttccaatccc

SEQ ID NO: 29720 - DNA, 25 bp, Artificial
  Probe
tggcaaagctaagagtacataagaa

SEQ ID NO: 29721 - DNA, 25 bp, Artificial
  Probe
ggcaaagctaagagtacataagaac

SEQ ID NO: 29722 - DNA, 25 bp, Artificial
  Probe
actttgtgtttgagagtccaaggta

SEQ ID NO: 29723 - DNA, 25 bp, Artificial
  Probe
atggcaaagctaagagtacataaga

SEQ ID NO: 29724 - DNA, 25 bp, Artificial
  Probe
gcaaagctaagagtacataagaaca

SEQ ID NO: 29725 - DNA, 25 bp, Artificial
  Probe
aacacacaggaggacatcacaagat

SEQ ID NO: 29726 - DNA, 25 bp, Artificial
  Probe
gaaatggcaaagctaagagtacata

SEQ ID NO: 29727 - DNA, 25 bp, Artificial
  Probe
gagagaagcacagataccactaaga

SEQ ID NO: 29728 - DNA, 25 bp, Artificial
  Probe
agagaagcacagataccactaagac

SEQ ID NO: 29729 - DNA, 25 bp, Artificial
  Probe
ggagagaagcacagataccactaag

SEQ ID NO: 29730 - DNA, 25 bp, Artificial
  Probe
gagaagcacagataccactaagacg

SEQ ID NO: 29731 - DNA, 25 bp, Artificial
  Probe
agaagcacagataccactaagacgc

SEQ ID NO: 29732 - DNA, 25 bp, Artificial
  Probe
gggagagaagcacagataccactaa

SEQ ID NO: 29733 - DNA, 25 bp, Artificial
  Probe
gaagcacagataccactaagacgca

SEQ ID NO: 29734 - DNA, 25 bp, Artificial
  Probe
catatgtggagatcattgagcagcc

SEQ ID NO: 29735 - DNA, 25 bp, Artificial
  Probe
aagcacagataccactaagacgcac

SEQ ID NO: 29736 - DNA, 25 bp, Artificial
  Probe
cagataccactaagacgcacccaat

SEQ ID NO: 29737 - DNA, 25 bp, Artificial
  Probe
ccatatgtggagatcattgagcagc

SEQ ID NO: 29738 - DNA, 25 bp, Artificial
  Probe
gccatatgtggagatcattgagcag

SEQ ID NO: 29739 - DNA, 25 bp, Artificial
  Probe
atatgtggagatcattgagcagccc

SEQ ID NO: 29740 - DNA, 25 bp, Artificial
  Probe
gacgatctgtttcccctcatctttc

SEQ ID NO: 29741 - DNA, 25 bp, Artificial
  Probe
atctgtttcccctcatctttccctc

SEQ ID NO: 29742 - DNA, 25 bp, Artificial
  Probe
gatctgtttcccctcatctttccct

SEQ ID NO: 29743 - DNA, 25 bp, Artificial
  Probe
ttctgggccatatgtggagatcatt

SEQ ID NO: 29744 - DNA, 25 bp, Artificial
  Probe
acgatctgtttcccctcatctttcc

SEQ ID NO: 29745 - DNA, 25 bp, Artificial
  Probe
gtttcccctcatctttccctcagag

SEQ ID NO: 29746 - DNA, 25 bp, Artificial
  Probe
ggccatatgtggagatcattgagca

SEQ ID NO: 29747 - DNA, 25 bp, Artificial
  Probe
cttctgggccatatgtggagatcat

SEQ ID NO: 29748 - DNA, 25 bp, Artificial
  Probe
ggggagagaagcacagataccacta

SEQ ID NO: 29749 - DNA, 25 bp, Artificial
  Probe
tctgtttcccctcatctttccctca

SEQ ID NO: 29750 - DNA, 25 bp, Artificial
  Probe
tgggccatatgtggagatcattgag

SEQ ID NO: 29751 - DNA, 25 bp, Artificial
  Probe
ctgggccatatgtggagatcattga

SEQ ID NO: 29752 - DNA, 25 bp, Artificial
  Probe
tctgggccatatgtggagatcattg

SEQ ID NO: 29753 - DNA, 25 bp, Artificial
  Probe
tgtttcccctcatctttccctcaga

SEQ ID NO: 29754 - DNA, 25 bp, Artificial
  Probe
ctgtttcccctcatctttccctcag

SEQ ID NO: 29755 - DNA, 25 bp, Artificial
  Probe
ggacgatctgtttcccctcatcttt

SEQ ID NO: 29756 - DNA, 25 bp, Artificial
  Probe
cgatctgtttcccctcatctttccc

SEQ ID NO: 29757 - DNA, 25 bp, Artificial
  Probe
attcctggggagagaagcacagata

SEQ ID NO: 29758 - DNA, 25 bp, Artificial
  Probe
tattcctggggagagaagcacagat

SEQ ID NO: 29759 - DNA, 25 bp, Artificial
  Probe
catggacgatctgtttcccctcatc

SEQ ID NO: 29760 - DNA, 25 bp, Artificial
  Probe
atggacgatctgtttcccctcatct

SEQ ID NO: 29761 - DNA, 25 bp, Artificial
  Probe
aagcacggatggataaagagtattt

SEQ ID NO: 29762 - DNA, 25 bp, Artificial
  Probe
aaagcacggatggataaagagtatt

SEQ ID NO: 29763 - DNA, 25 bp, Artificial
  Probe
cacggatggataaagagtatttgtc

SEQ ID NO: 29764 - DNA, 25 bp, Artificial
  Probe
taaagcacggatggataaagagtat

SEQ ID NO: 29765 - DNA, 25 bp, Artificial
  Probe
ataaagcacggatggataaagagta

SEQ ID NO: 29766 - DNA, 25 bp, Artificial
  Probe
gataaagcacggatggataaagagt

SEQ ID NO: 29767 - DNA, 25 bp, Artificial
  Probe
agcacggatggataaagagtatttg

SEQ ID NO: 29768 - DNA, 25 bp, Artificial
  Probe
taaagagtatttgtcccttatggct

SEQ ID NO: 29769 - DNA, 25 bp, Artificial
  Probe
aaagagtatttgtcccttatggctg

SEQ ID NO: 29770 - DNA, 25 bp, Artificial
  Probe
gcacggatggataaagagtatttgt

SEQ ID NO: 29771 - DNA, 25 bp, Artificial
  Probe
ggataaagcacggatggataaagag

SEQ ID NO: 29772 - DNA, 25 bp, Artificial
  Probe
caggataaagcacggatggataaag

SEQ ID NO: 29773 - DNA, 25 bp, Artificial
  Probe
aggataaagcacggatggataaaga

SEQ ID NO: 29774 - DNA, 25 bp, Artificial
  Probe
ctctacgggaagatgataacaggat

SEQ ID NO: 29775 - DNA, 25 bp, Artificial
  Probe
aagagtatttgtcccttatggctga

SEQ ID NO: 29776 - DNA, 25 bp, Artificial
  Probe
ataaagagtatttgtcccttatggc

SEQ ID NO: 29777 - DNA, 25 bp, Artificial
  Probe
agagtatttgtcccttatggctgag

SEQ ID NO: 29778 - DNA, 25 bp, Artificial
  Probe
tcaggataaagcacggatggataaa

SEQ ID NO: 29779 - DNA, 25 bp, Artificial
  Probe
ctcaggataaagcacggatggataa

SEQ ID NO: 29780 - DNA, 25 bp, Artificial
  Probe
tctacgggaagatgataacaggatc

SEQ ID NO: 29781 - DNA, 25 bp, Artificial
  Probe
ctcagagacacgaagcattaccaac

SEQ ID NO: 29782 - DNA, 25 bp, Artificial
  Probe
ggatggataaagagtatttgtccct

SEQ ID NO: 29783 - DNA, 25 bp, Artificial
  Probe
acggatggataaagagtatttgtcc

SEQ ID NO: 29784 - DNA, 25 bp, Artificial
  Probe
cactctacgggaagatgataacagg

SEQ ID NO: 29785 - DNA, 25 bp, Artificial
  Probe
actctacgggaagatgataacagga

SEQ ID NO: 29786 - DNA, 25 bp, Artificial
  Probe
cggatggataaagagtatttgtccc

SEQ ID NO: 29787 - DNA, 25 bp, Artificial
  Probe
ccgtctctcatgtctacaactcaga

SEQ ID NO: 29788 - DNA, 25 bp, Artificial
  Probe
cagaggaccagaatgacctaaggaa

SEQ ID NO: 29789 - DNA, 25 bp, Artificial
  Probe
accgtctctcatgtctacaactcag

SEQ ID NO: 29790 - DNA, 25 bp, Artificial
  Probe
gatgataacaggatcttgagaccct

SEQ ID NO: 29791 - DNA, 25 bp, Artificial
  Probe
gcactctacgggaagatgataacag

SEQ ID NO: 29792 - DNA, 25 bp, Artificial
  Probe
gatggataaagagtatttgtccctt

SEQ ID NO: 29793 - DNA, 25 bp, Artificial
  Probe
cagagacacgaagcattaccaacac

SEQ ID NO: 29794 - DNA, 25 bp, Artificial
  Probe
tcagagacacgaagcattaccaaca

SEQ ID NO: 29795 - DNA, 25 bp, Artificial
  Probe
tctctcatgtctacaactcagagtc

SEQ ID NO: 29796 - DNA, 25 bp, Artificial
  Probe
caccgtctctcatgtctacaactca

SEQ ID NO: 29797 - DNA, 25 bp, Artificial
  Probe
tatttgtcccttatggctgagctag

SEQ ID NO: 29798 - DNA, 25 bp, Artificial
  Probe
gtctctcatgtctacaactcagagt

SEQ ID NO: 29799 - DNA, 25 bp, Artificial
  Probe
gtatttgtcccttatggctgagcta

SEQ ID NO: 29800 - DNA, 25 bp, Artificial
  Probe
gataaagagtatttgtcccttatgg

SEQ ID NO: 29801 - DNA, 25 bp, Artificial
  Probe
atggcactctacgggaagatgataa

SEQ ID NO: 29802 - DNA, 25 bp, Artificial
  Probe
aatggcactctacgggaagatgata

SEQ ID NO: 29803 - DNA, 25 bp, Artificial
  Probe
ctacgggaagatgataacaggatct

SEQ ID NO: 29804 - DNA, 25 bp, Artificial
  Probe
agatgataacaggatcttgagaccc

SEQ ID NO: 29805 - DNA, 25 bp, Artificial
  Probe
acgactgtgtgtactaagtgtggag

SEQ ID NO: 29806 - DNA, 25 bp, Artificial
  Probe
tttgattaagtgaccagggttcttt

SEQ ID NO: 29807 - DNA, 25 bp, Artificial
  Probe
ttgattaagtgaccagggttctttg

SEQ ID NO: 29808 - DNA, 25 bp, Artificial
  Probe
aaatatactgaggaaagggtggctt

SEQ ID NO: 29809 - DNA, 25 bp, Artificial
  Probe
gaaatatactgaggaaagggtggct

SEQ ID NO: 29810 - DNA, 25 bp, Artificial
  Probe
gggaaatatactgaggaaagggtgg

SEQ ID NO: 29811 - DNA, 25 bp, Artificial
  Probe
ggaaatatactgaggaaagggtggc

SEQ ID NO: 29812 - DNA, 25 bp, Artificial
  Probe
aatatactgaggaaagggtggcttt

SEQ ID NO: 29813 - DNA, 25 bp, Artificial
  Probe
ttttgattaagtgaccagggttctt

SEQ ID NO: 29814 - DNA, 25 bp, Artificial
  Probe
tgattaagtgaccagggttctttgg

SEQ ID NO: 29815 - DNA, 25 bp, Artificial
  Probe
cagtcttcttttaggatcaggtttg

SEQ ID NO: 29816 - DNA, 25 bp, Artificial
  Probe
ccagtcttcttttaggatcaggttt

SEQ ID NO: 29817 - DNA, 25 bp, Artificial
  Probe
cttttgattaagtgaccagggttct

SEQ ID NO: 29818 - DNA, 25 bp, Artificial
  Probe
agtcttcttttaggatcaggtttgc

SEQ ID NO: 29819 - DNA, 25 bp, Artificial
  Probe
cttgccagtcttcttttaggatcag

SEQ ID NO: 29820 - DNA, 25 bp, Artificial
  Probe
ctccagcatttagcatgaagtcctc

SEQ ID NO: 29821 - DNA, 25 bp, Artificial
  Probe
ggggaaatatactgaggaaagggtg

SEQ ID NO: 29822 - DNA, 25 bp, Artificial
  Probe
gtggggaaatatactgaggaaaggg

SEQ ID NO: 29823 - DNA, 25 bp, Artificial
  Probe
gattaagtgaccagggttctttggg

SEQ ID NO: 29824 - DNA, 25 bp, Artificial
  Probe
tggggaaatatactgaggaaagggt

SEQ ID NO: 29825 - DNA, 25 bp, Artificial
  Probe
cgtggggaaatatactgaggaaagg

SEQ ID NO: 29826 - DNA, 25 bp, Artificial
  Probe
ccagcatttagcatgaagtcctcag

SEQ ID NO: 29827 - DNA, 25 bp, Artificial
  Probe
gcttttgattaagtgaccagggttc

SEQ ID NO: 29828 - DNA, 25 bp, Artificial
  Probe
gccagtcttcttttaggatcaggtt

SEQ ID NO: 29829 - DNA, 25 bp, Artificial
  Probe
ttgccagtcttcttttaggatcagg

SEQ ID NO: 29830 - DNA, 25 bp, Artificial
  Probe
gtcttcttttaggatcaggtttgca

SEQ ID NO: 29831 - DNA, 25 bp, Artificial
  Probe
tccagcatttagcatgaagtcctca

SEQ ID NO: 29832 - DNA, 25 bp, Artificial
  Probe
atatactgaggaaagggtggctttt

SEQ ID NO: 29833 - DNA, 25 bp, Artificial
  Probe
acgtggggaaatatactgaggaaag

SEQ ID NO: 29834 - DNA, 25 bp, Artificial
  Probe
cagcatttagcatgaagtcctcagc

SEQ ID NO: 29835 - DNA, 25 bp, Artificial
  Probe
gaaagggtggcttttgattaagtga

SEQ ID NO: 29836 - DNA, 25 bp, Artificial
  Probe
aaagggtggcttttgattaagtgac

SEQ ID NO: 29837 - DNA, 25 bp, Artificial
  Probe
ccttgccagtcttcttttaggatca

SEQ ID NO: 29838 - DNA, 25 bp, Artificial
  Probe
gaggaaagggtggcttttgattaag

SEQ ID NO: 29839 - DNA, 25 bp, Artificial
  Probe
ggcttttgattaagtgaccagggtt

SEQ ID NO: 29840 - DNA, 25 bp, Artificial
  Probe
gatcaggtttgcaaggtacagaatc

SEQ ID NO: 29841 - DNA, 25 bp, Artificial
  Probe
tgccagtcttcttttaggatcaggt

SEQ ID NO: 29842 - DNA, 25 bp, Artificial
  Probe
catttagcatgaagtcctcagccct

SEQ ID NO: 29843 - DNA, 25 bp, Artificial
  Probe
tttaggatcaggtttgcaaggtaca

SEQ ID NO: 29844 - DNA, 25 bp, Artificial
  Probe
tatactgaggaaagggtggcttttg

SEQ ID NO: 29845 - DNA, 25 bp, Artificial
  Probe
ggaaagggtggcttttgattaagtg

SEQ ID NO: 29846 - DNA, 25 bp, Artificial
  Probe
aggaaagggtggcttttgattaagt

SEQ ID NO: 29847 - DNA, 25 bp, Artificial
  Probe
tgaggaaagggtggcttttgattaa

SEQ ID NO: 29848 - DNA, 25 bp, Artificial
  Probe
atcaggtttgcaaggtacagaatca

SEQ ID NO: 29849 - DNA, 25 bp, Artificial
  Probe
ttaggatcaggtttgcaaggtacag

SEQ ID NO: 29850 - DNA, 25 bp, Artificial
  Probe
ctgaggaaagggtggcttttgatta

SEQ ID NO: 29851 - DNA, 25 bp, Artificial
  Probe
caagacacatagctctataaggctg

SEQ ID NO: 29852 - DNA, 25 bp, Artificial
  Probe
acaagacacatagctctataaggct

SEQ ID NO: 29853 - DNA, 25 bp, Artificial
  Probe
cacatagctctataaggctgcatac

SEQ ID NO: 29854 - DNA, 25 bp, Artificial
  Probe
acacatagctctataaggctgcata

SEQ ID NO: 29855 - DNA, 25 bp, Artificial
  Probe
aagacacatagctctataaggctgc

SEQ ID NO: 29856 - DNA, 25 bp, Artificial
  Probe
acatagctctataaggctgcatacg

SEQ ID NO: 29857 - DNA, 25 bp, Artificial
  Probe
gacacatagctctataaggctgcat

SEQ ID NO: 29858 - DNA, 25 bp, Artificial
  Probe
catagctctataaggctgcatacgg

SEQ ID NO: 29859 - DNA, 25 bp, Artificial
  Probe
atagctctataaggctgcatacggt

SEQ ID NO: 29860 - DNA, 25 bp, Artificial
  Probe
agacacatagctctataaggctgca

SEQ ID NO: 29861 - DNA, 25 bp, Artificial
  Probe
tagctctataaggctgcatacggtg

SEQ ID NO: 29862 - DNA, 25 bp, Artificial
  Probe
catatcaagactactatgaggtggt

SEQ ID NO: 29863 - DNA, 25 bp, Artificial
  Probe
tatcaagactactatgaggtggtac

SEQ ID NO: 29864 - DNA, 25 bp, Artificial
  Probe
tccatatcaagactactatgaggtg

SEQ ID NO: 29865 - DNA, 25 bp, Artificial
  Probe
gtccatatcaagactactatgaggt

SEQ ID NO: 29866 - DNA, 25 bp, Artificial
  Probe
ccatatcaagactactatgaggtgg

SEQ ID NO: 29867 - DNA, 25 bp, Artificial
  Probe
atatcaagactactatgaggtggta

SEQ ID NO: 29868 - DNA, 25 bp, Artificial
  Probe
ctctcctatctaccacctaaactct

SEQ ID NO: 29869 - DNA, 25 bp, Artificial
  Probe
tctcctatctaccacctaaactctg

SEQ ID NO: 29870 - DNA, 25 bp, Artificial
  Probe
agacacagcaaacataacttcattt

SEQ ID NO: 29871 - DNA, 25 bp, Artificial
  Probe
caccatttatcctccacttatcctc

SEQ ID NO: 29872 - DNA, 25 bp, Artificial
  Probe
catttatcctccacttatcctcctt

SEQ ID NO: 29873 - DNA, 25 bp, Artificial
  Probe
tcctatctaccacctaaactctgtc

SEQ ID NO: 29874 - DNA, 25 bp, Artificial
  Probe
ctcctatctaccacctaaactctgt

SEQ ID NO: 29875 - DNA, 25 bp, Artificial
  Probe
atcccattccaaactattccatcag

SEQ ID NO: 29876 - DNA, 25 bp, Artificial
  Probe
atttatcctccacttatcctccttc

SEQ ID NO: 29877 - DNA, 25 bp, Artificial
  Probe
atttggctttaagtgtctgaggaat

SEQ ID NO: 29878 - DNA, 25 bp, Artificial
  Probe
cctctcctatctaccacctaaactc

SEQ ID NO: 29879 - DNA, 25 bp, Artificial
  Probe
cactctggagggaaatggaattatt

SEQ ID NO: 29880 - DNA, 25 bp, Artificial
  Probe
tttatcctccacttatcctccttcc

SEQ ID NO: 29881 - DNA, 25 bp, Artificial
  Probe
tagacacagcaaacataacttcatt

SEQ ID NO: 29882 - DNA, 25 bp, Artificial
  Probe
ccatttatcctccacttatcctcct

SEQ ID NO: 29883 - DNA, 25 bp, Artificial
  Probe
ttcccaccatttatcctccacttat

SEQ ID NO: 29884 - DNA, 25 bp, Artificial
  Probe
aagagagcaaacaacaaagttacag

SEQ ID NO: 29885 - DNA, 25 bp, Artificial
  Probe
gcaaacaacaaagttacagttacct

SEQ ID NO: 29886 - DNA, 25 bp, Artificial
  Probe
agcaaacaacaaagttacagttacc

SEQ ID NO: 29887 - DNA, 25 bp, Artificial
  Probe
gagagcaaacaacaaagttacagtt

SEQ ID NO: 29888 - DNA, 25 bp, Artificial
  Probe
caagagagcaaacaacaaagttaca

SEQ ID NO: 29889 - DNA, 25 bp, Artificial
  Probe
acaagagagcaaacaacaaagttac

SEQ ID NO: 29890 - DNA, 25 bp, Artificial
  Probe
cacaagagagcaaacaacaaagtta

SEQ ID NO: 29891 - DNA, 25 bp, Artificial
  Probe
gagcaaacaacaaagttacagttac

SEQ ID NO: 29892 - DNA, 25 bp, Artificial
  Probe
accatttatcctccacttatcctcc

SEQ ID NO: 29893 - DNA, 25 bp, Artificial
  Probe
agagcaaacaacaaagttacagtta

SEQ ID NO: 29894 - DNA, 25 bp, Artificial
  Probe
ctagacacagcaaacataacttcat

SEQ ID NO: 29895 - DNA, 25 bp, Artificial
  Probe
ctatctaccacctaaactctgtccc

SEQ ID NO: 29896 - DNA, 25 bp, Artificial
  Probe
cctatctaccacctaaactctgtcc

SEQ ID NO: 29897 - DNA, 25 bp, Artificial
  Probe
tcactctggagggaaatggaattat

SEQ ID NO: 29898 - DNA, 25 bp, Artificial
  Probe
agagagcaaacaacaaagttacagt

SEQ ID NO: 29899 - DNA, 25 bp, Artificial
  Probe
ccaccatttatcctccacttatcct

SEQ ID NO: 29900 - DNA, 25 bp, Artificial
  Probe
tcccaccatttatcctccacttatc

SEQ ID NO: 29901 - DNA, 25 bp, Artificial
  Probe
tttggctttaagtgtctgaggaatg

SEQ ID NO: 29902 - DNA, 25 bp, Artificial
  Probe
catttggctttaagtgtctgaggaa

SEQ ID NO: 29903 - DNA, 25 bp, Artificial
  Probe
ctttaagtgtctgaggaatggaact

SEQ ID NO: 29904 - DNA, 25 bp, Artificial
  Probe
cttcatttggctttaagtgtctgag

SEQ ID NO: 29905 - DNA, 25 bp, Artificial
  Probe
ccattccaaactattccatcagtct

SEQ ID NO: 29906 - DNA, 25 bp, Artificial
  Probe
attccaaactattccatcagtctgt

SEQ ID NO: 29907 - DNA, 25 bp, Artificial
  Probe
gtctcggatacattggcttaaacag

SEQ ID NO: 29908 - DNA, 25 bp, Artificial
  Probe
cagtctcggatacattggcttaaac

SEQ ID NO: 29909 - DNA, 25 bp, Artificial
  Probe
agtctcggatacattggcttaaaca

SEQ ID NO: 29910 - DNA, 25 bp, Artificial
  Probe
tctcggatacattggcttaaacagg

SEQ ID NO: 29911 - DNA, 25 bp, Artificial
  Probe
gcagtctcggatacattggcttaaa

SEQ ID NO: 29912 - DNA, 25 bp, Artificial
  Probe
ctcggatacattggcttaaacaggg

SEQ ID NO: 29913 - DNA, 25 bp, Artificial
  Probe
ggcagtctcggatacattggcttaa

SEQ ID NO: 29914 - DNA, 25 bp, Artificial
  Probe
ggatacattggcttaaacagggctg

SEQ ID NO: 29915 - DNA, 25 bp, Artificial
  Probe
gatacattggcttaaacagggctgc

SEQ ID NO: 29916 - DNA, 25 bp, Artificial
  Probe
gatcatcaatgaagtcctctaccaa

SEQ ID NO: 29917 - DNA, 25 bp, Artificial
  Probe
gcatttactctcctttctactctca

SEQ ID NO: 29918 - DNA, 25 bp, Artificial
  Probe
ggcatttactctcctttctactctc

SEQ ID NO: 29919 - DNA, 25 bp, Artificial
  Probe
ttactctcctttctactctcaaacc

SEQ ID NO: 29920 - DNA, 25 bp, Artificial
  Probe
tattgcagaactattccagatccag

SEQ ID NO: 29921 - DNA, 25 bp, Artificial
  Probe
gtattgcagaactattccagatcca

SEQ ID NO: 29922 - DNA, 25 bp, Artificial
  Probe
cactttctcaattcgttacttcagg

SEQ ID NO: 29923 - DNA, 25 bp, Artificial
  Probe
tactctcctttctactctcaaaccc

SEQ ID NO: 29924 - DNA, 25 bp, Artificial
  Probe
gcactttctcaattcgttacttcag

SEQ ID NO: 29925 - DNA, 25 bp, Artificial
  Probe
catcaatgaagtcctctaccaaatg

SEQ ID NO: 29926 - DNA, 25 bp, Artificial
  Probe
ggtattgcagaactattccagatcc

SEQ ID NO: 29927 - DNA, 25 bp, Artificial
  Probe
ttctcaattcgttacttcaggcaaa

SEQ ID NO: 29928 - DNA, 25 bp, Artificial
  Probe
tttctcaattcgttacttcaggcaa

SEQ ID NO: 29929 - DNA, 25 bp, Artificial
  Probe
tcaatgaagtcctctaccaaatgat

SEQ ID NO: 29930 - DNA, 25 bp, Artificial
  Probe
atcaatgaagtcctctaccaaatga

SEQ ID NO: 29931 - DNA, 25 bp, Artificial
  Probe
aatgaagtcctctaccaaatgatcc

SEQ ID NO: 29932 - DNA, 25 bp, Artificial
  Probe
caatgaagtcctctaccaaatgatc

SEQ ID NO: 29933 - DNA, 25 bp, Artificial
  Probe
ctttctcaattcgttacttcaggca

SEQ ID NO: 29934 - DNA, 25 bp, Artificial
  Probe
actttctcaattcgttacttcaggc

SEQ ID NO: 29935 - DNA, 25 bp, Artificial
  Probe
agaactattccagatccagcaaata

SEQ ID NO: 29936 - DNA, 25 bp, Artificial
  Probe
cagaactattccagatccagcaaat

SEQ ID NO: 29937 - DNA, 25 bp, Artificial
  Probe
agcaaatagcacttgggtaaagaag

SEQ ID NO: 29938 - DNA, 25 bp, Artificial
  Probe
ggcactttctcaattcgttacttca

SEQ ID NO: 29939 - DNA, 25 bp, Artificial
  Probe
tttactctcctttctactctcaaac

SEQ ID NO: 29940 - DNA, 25 bp, Artificial
  Probe
tcatcaatgaagtcctctaccaaat

SEQ ID NO: 29941 - DNA, 25 bp, Artificial
  Probe
atcatcaatgaagtcctctaccaaa

SEQ ID NO: 29942 - DNA, 25 bp, Artificial
  Probe
cagcaaatagcacttgggtaaagaa

SEQ ID NO: 29943 - DNA, 25 bp, Artificial
  Probe
catttactctcctttctactctcaa

SEQ ID NO: 29944 - DNA, 25 bp, Artificial
  Probe
aatggtattgcagaactattccaga

SEQ ID NO: 29945 - DNA, 25 bp, Artificial
  Probe
atggtattgcagaactattccagat

SEQ ID NO: 29946 - DNA, 25 bp, Artificial
  Probe
tggtattgcagaactattccagatc

SEQ ID NO: 29947 - DNA, 25 bp, Artificial
  Probe
aggcatttactctcctttctactct

SEQ ID NO: 29948 - DNA, 25 bp, Artificial
  Probe
atgaagtcctctaccaaatgatccc

SEQ ID NO: 29949 - DNA, 25 bp, Artificial
  Probe
gggcactttctcaattcgttacttc

SEQ ID NO: 29950 - DNA, 25 bp, Artificial
  Probe
tattccagatccagcaaatagcact

SEQ ID NO: 29951 - DNA, 25 bp, Artificial
  Probe
caatggtattgcagaactattccag

SEQ ID NO: 29952 - DNA, 25 bp, Artificial
  Probe
agtcctctaccaaatgatcccagta

SEQ ID NO: 29953 - DNA, 25 bp, Artificial
  Probe
gaagtcctctaccaaatgatcccag

SEQ ID NO: 29954 - DNA, 25 bp, Artificial
  Probe
ccaatggtattgcagaactattcca

SEQ ID NO: 29955 - DNA, 25 bp, Artificial
  Probe
atttactctcctttctactctcaaa

SEQ ID NO: 29956 - DNA, 25 bp, Artificial
  Probe
attccagatccagcaaatagcactt

SEQ ID NO: 29957 - DNA, 25 bp, Artificial
  Probe
attgcagaactattccagatccagc

SEQ ID NO: 29958 - DNA, 25 bp, Artificial
  Probe
tgggcactttctcaattcgttactt

SEQ ID NO: 29959 - DNA, 25 bp, Artificial
  Probe
ctgatcatcaatgaagtcctctacc

SEQ ID NO: 29960 - DNA, 25 bp, Artificial
  Probe
cctgatcatcaatgaagtcctctac

SEQ ID NO: 29961 - DNA, 25 bp, Artificial
  Probe
gctaagtctcatggatcaggtatct

SEQ ID NO: 29962 - DNA, 25 bp, Artificial
  Probe
ctaagtctcatggatcaggtatctg

SEQ ID NO: 29963 - DNA, 25 bp, Artificial
  Probe
taagtctcatggatcaggtatctgg

SEQ ID NO: 29964 - DNA, 25 bp, Artificial
  Probe
ggctaagtctcatggatcaggtatc

SEQ ID NO: 29965 - DNA, 25 bp, Artificial
  Probe
cggctaagtctcatggatcaggtat

SEQ ID NO: 29966 - DNA, 25 bp, Artificial
  Probe
acagttcagagaccttctcctctac

SEQ ID NO: 29967 - DNA, 25 bp, Artificial
  Probe
cacagttcagagaccttctcctcta

SEQ ID NO: 29968 - DNA, 25 bp, Artificial
  Probe
aagtctcatggatcaggtatctggg

SEQ ID NO: 29969 - DNA, 25 bp, Artificial
  Probe
cagttcagagaccttctcctctacc

SEQ ID NO: 29970 - DNA, 25 bp, Artificial
  Probe
cccatcctttgctcacaattccaag

SEQ ID NO: 29971 - DNA, 25 bp, Artificial
  Probe
gttcagagaccttctcctctaccac

SEQ ID NO: 29972 - DNA, 25 bp, Artificial
  Probe
agttcagagaccttctcctctacca

SEQ ID NO: 29973 - DNA, 25 bp, Artificial
  Probe
gtctctctcaggaaaagcagtgaag

SEQ ID NO: 29974 - DNA, 25 bp, Artificial
  Probe
tggaaaacgtctctctcaggaaaag

SEQ ID NO: 29975 - DNA, 25 bp, Artificial
  Probe
gtggaaaacgtctctctcaggaaaa

SEQ ID NO: 29976 - DNA, 25 bp, Artificial
  Probe
catggatcaggtatctggggtagag

SEQ ID NO: 29977 - DNA, 25 bp, Artificial
  Probe
ctcatggatcaggtatctggggtag

SEQ ID NO: 29978 - DNA, 25 bp, Artificial
  Probe
tctctctcaggaaaagcagtgaagg

SEQ ID NO: 29979 - DNA, 25 bp, Artificial
  Probe
ttcagagaccttctcctctaccacc

SEQ ID NO: 29980 - DNA, 25 bp, Artificial
  Probe
aaaacgtctctctcaggaaaagcag

SEQ ID NO: 29981 - DNA, 25 bp, Artificial
  Probe
gaaaacgtctctctcaggaaaagca

SEQ ID NO: 29982 - DNA, 25 bp, Artificial
  Probe
tcatggatcaggtatctggggtaga

SEQ ID NO: 29983 - DNA, 25 bp, Artificial
  Probe
tctcatggatcaggtatctggggta

SEQ ID NO: 29984 - DNA, 25 bp, Artificial
  Probe
gaggaagtgatgagccatccacatc

SEQ ID NO: 29985 - DNA, 25 bp, Artificial
  Probe
cgtctctctcaggaaaagcagtgaa

SEQ ID NO: 29986 - DNA, 25 bp, Artificial
  Probe
ggaaaacgtctctctcaggaaaagc

SEQ ID NO: 29987 - DNA, 25 bp, Artificial
  Probe
tgtggaaaacgtctctctcaggaaa

SEQ ID NO: 29988 - DNA, 25 bp, Artificial
  Probe
ccacagttcagagaccttctcctct

SEQ ID NO: 29989 - DNA, 25 bp, Artificial
  Probe
ccatcctttgctcacaattccaagc

SEQ ID NO: 29990 - DNA, 25 bp, Artificial
  Probe
atggatcaggtatctggggtagagg

SEQ ID NO: 29991 - DNA, 25 bp, Artificial
  Probe
aaacgtctctctcaggaaaagcagt

SEQ ID NO: 29992 - DNA, 25 bp, Artificial
  Probe
ctgtggaaaacgtctctctcaggaa

SEQ ID NO: 29993 - DNA, 25 bp, Artificial
  Probe
agtctcatggatcaggtatctgggg

SEQ ID NO: 29994 - DNA, 25 bp, Artificial
  Probe
aacgtctctctcaggaaaagcagtg

SEQ ID NO: 29995 - DNA, 25 bp, Artificial
  Probe
gtctcatggatcaggtatctggggt

SEQ ID NO: 29996 - DNA, 25 bp, Artificial
  Probe
ctctgtggaaaacgtctctctcagg

SEQ ID NO: 29997 - DNA, 25 bp, Artificial
  Probe
cctctgtggaaaacgtctctctcag

SEQ ID NO: 29998 - DNA, 25 bp, Artificial
  Probe
tctgtggaaaacgtctctctcagga

SEQ ID NO: 29999 - DNA, 25 bp, Artificial
  Probe
gtagcagtataggagtccgcaatag

SEQ ID NO: 30000 - DNA, 25 bp, Artificial
  Probe
aattgggatgtcatagtatttggct

SEQ ID NO: 30001 - DNA, 25 bp, Artificial
  Probe
attgggatgtcatagtatttggctg

SEQ ID NO: 30002 - DNA, 25 bp, Artificial
  Probe
taattgggatgtcatagtatttggc

SEQ ID NO: 30003 - DNA, 25 bp, Artificial
  Probe
tttgtgtttactaattgggatgtca

SEQ ID NO: 30004 - DNA, 25 bp, Artificial
  Probe
tcacttcacaaatatccaatgggtc

SEQ ID NO: 30005 - DNA, 25 bp, Artificial
  Probe
ttcgtctttgtaaagcgttatgttt

SEQ ID NO: 30006 - DNA, 25 bp, Artificial
  Probe
attcgtctttgtaaagcgttatgtt

SEQ ID NO: 30007 - DNA, 25 bp, Artificial
  Probe
ttgtgtttactaattgggatgtcat

SEQ ID NO: 30008 - DNA, 25 bp, Artificial
  Probe
cttcacaaatatccaatgggtcaca

SEQ ID NO: 30009 - DNA, 25 bp, Artificial
  Probe
acttcacaaatatccaatgggtcac

SEQ ID NO: 30010 - DNA, 25 bp, Artificial
  Probe
cacttcacaaatatccaatgggtca

SEQ ID NO: 30011 - DNA, 25 bp, Artificial
  Probe
gtcacttcacaaatatccaatgggt

SEQ ID NO: 30012 - DNA, 25 bp, Artificial
  Probe
tattcgtctttgtaaagcgttatgt

SEQ ID NO: 30013 - DNA, 25 bp, Artificial
  Probe
ttcacaaatatccaatgggtcacac

SEQ ID NO: 30014 - DNA, 25 bp, Artificial
  Probe
ggtagcagtataggagtccgcaata

SEQ ID NO: 30015 - DNA, 25 bp, Artificial
  Probe
gtggaagctgtgcatatggtatatt

SEQ ID NO: 30016 - DNA, 25 bp, Artificial
  Probe
cacaaatatccaatgggtcacacat

SEQ ID NO: 30017 - DNA, 25 bp, Artificial
  Probe
tgtgtttactaattgggatgtcata

SEQ ID NO: 30018 - DNA, 25 bp, Artificial
  Probe
ttattcgtctttgtaaagcgttatg

SEQ ID NO: 30019 - DNA, 25 bp, Artificial
  Probe
gtgtcacttcacaaatatccaatgg

SEQ ID NO: 30020 - DNA, 25 bp, Artificial
  Probe
tgtcacttcacaaatatccaatggg

SEQ ID NO: 30021 - DNA, 25 bp, Artificial
  Probe
tagcagtataggagtccgcaatagc

SEQ ID NO: 30022 - DNA, 25 bp, Artificial
  Probe
acaaatatccaatgggtcacacatg

SEQ ID NO: 30023 - DNA, 25 bp, Artificial
  Probe
agataactatttcatgtatgtggca

SEQ ID NO: 30024 - DNA, 25 bp, Artificial
  Probe
gtgtttactaattgggatgtcatag

SEQ ID NO: 30025 - DNA, 25 bp, Artificial
  Probe
tcacaaatatccaatgggtcacaca

SEQ ID NO: 30026 - DNA, 25 bp, Artificial
  Probe
ctaattgggatgtcatagtatttgg

SEQ ID NO: 30027 - DNA, 25 bp, Artificial
  Probe
tttattcgtctttgtaaagcgttat

SEQ ID NO: 30028 - DNA, 25 bp, Artificial
  Probe
agtgtcacttcacaaatatccaatg

SEQ ID NO: 30029 - DNA, 25 bp, Artificial
  Probe
gagtgtcacttcacaaatatccaat

SEQ ID NO: 30030 - DNA, 25 bp, Artificial
  Probe
ggtggaagctgtgcatatggtatat

SEQ ID NO: 30031 - DNA, 25 bp, Artificial
  Probe
gataactatttcatgtatgtggcaa

SEQ ID NO: 30032 - DNA, 25 bp, Artificial
  Probe
ttgggatgtcatagtatttggctgc

SEQ ID NO: 30033 - DNA, 25 bp, Artificial
  Probe
cgagtgtcacttcacaaatatccaa

SEQ ID NO: 30034 - DNA, 25 bp, Artificial
  Probe
tggaagctgtgcatatggtatattt

SEQ ID NO: 30035 - DNA, 25 bp, Artificial
  Probe
cacgagtgtcacttcacaaatatcc

SEQ ID NO: 30036 - DNA, 25 bp, Artificial
  Probe
tgtttactaattgggatgtcatagt

SEQ ID NO: 30037 - DNA, 25 bp, Artificial
  Probe
ttgtaaagcgttatgttttgtgttt

SEQ ID NO: 30038 - DNA, 25 bp, Artificial
  Probe
tttgtaaagcgttatgttttgtgtt

SEQ ID NO: 30039 - DNA, 25 bp, Artificial
  Probe
ataactatttcatgtatgtggcaaa

SEQ ID NO: 30040 - DNA, 25 bp, Artificial
  Probe
tacacataataattgaaagtggcaa

SEQ ID NO: 30041 - DNA, 25 bp, Artificial
  Probe
ttacacataataattgaaagtggca

SEQ ID NO: 30042 - DNA, 25 bp, Artificial
  Probe
acgagtgtcacttcacaaatatcca

SEQ ID NO: 30043 - DNA, 25 bp, Artificial
  Probe
cgtctttgtaaagcgttatgttttg

SEQ ID NO: 30044 - DNA, 25 bp, Artificial
  Probe
taagagaatcaccagataagcagac

SEQ ID NO: 30045 - DNA, 25 bp, Artificial
  Probe
ttaagagaatcaccagataagcaga

SEQ ID NO: 30046 - DNA, 25 bp, Artificial
  Probe
aagagaatcaccagataagcagacc

SEQ ID NO: 30047 - DNA, 25 bp, Artificial
  Probe
gagaatcaccagataagcagaccag

SEQ ID NO: 30048 - DNA, 25 bp, Artificial
  Probe
gctttatttacttcttccacccttt

SEQ ID NO: 30049 - DNA, 25 bp, Artificial
  Probe
ccatccagtcctttatccaatagta

SEQ ID NO: 30050 - DNA, 25 bp, Artificial
  Probe
tagatataatagagccctcggttgt

SEQ ID NO: 30051 - DNA, 25 bp, Artificial
  Probe
gtagatataatagagccctcggttg

SEQ ID NO: 30052 - DNA, 25 bp, Artificial
  Probe
agcactttaagagaatcaccagata

SEQ ID NO: 30053 - DNA, 25 bp, Artificial
  Probe
atggtagatataatagagccctcgg

SEQ ID NO: 30054 - DNA, 25 bp, Artificial
  Probe
ggtagatataatagagccctcggtt

SEQ ID NO: 30055 - DNA, 25 bp, Artificial
  Probe
cagcactttaagagaatcaccagat

SEQ ID NO: 30056 - DNA, 25 bp, Artificial
  Probe
agagaatcaccagataagcagacca

SEQ ID NO: 30057 - DNA, 25 bp, Artificial
  Probe
gcactttaagagaatcaccagataa

SEQ ID NO: 30058 - DNA, 25 bp, Artificial
  Probe
tttaagagaatcaccagataagcag

SEQ ID NO: 30059 - DNA, 25 bp, Artificial
  Probe
agatataatagagccctcggttgtg

SEQ ID NO: 30060 - DNA, 25 bp, Artificial
  Probe
ctttaagagaatcaccagataagca

SEQ ID NO: 30061 - DNA, 25 bp, Artificial
  Probe
actttaagagaatcaccagataagc

SEQ ID NO: 30062 - DNA, 25 bp, Artificial
  Probe
tggtagatataatagagccctcggt

SEQ ID NO: 30063 - DNA, 25 bp, Artificial
  Probe
catccagtcctttatccaatagtag

SEQ ID NO: 30064 - DNA, 25 bp, Artificial
  Probe
catggtagatataatagagccctcg

SEQ ID NO: 30065 - DNA, 25 bp, Artificial
  Probe
gactttagagggaaacatggtagat

SEQ ID NO: 30066 - DNA, 25 bp, Artificial
  Probe
ctgactttagagggaaacatggtag

SEQ ID NO: 30067 - DNA, 25 bp, Artificial
  Probe
tgactttagagggaaacatggtaga

SEQ ID NO: 30068 - DNA, 25 bp, Artificial
  Probe
gccatccagtcctttatccaatagt

SEQ ID NO: 30069 - DNA, 25 bp, Artificial
  Probe
cagtcctttatccaatagtaggtcc

SEQ ID NO: 30070 - DNA, 25 bp, Artificial
  Probe
ccagtcctttatccaatagtaggtc

SEQ ID NO: 30071 - DNA, 25 bp, Artificial
  Probe
tccagtcctttatccaatagtaggt

SEQ ID NO: 30072 - DNA, 25 bp, Artificial
  Probe
acatggtagatataatagagccctc

SEQ ID NO: 30073 - DNA, 25 bp, Artificial
  Probe
actttagagggaaacatggtagata

SEQ ID NO: 30074 - DNA, 25 bp, Artificial
  Probe
tcctttatccaatagtaggtccctg

SEQ ID NO: 30075 - DNA, 25 bp, Artificial
  Probe
gtcctttatccaatagtaggtccct

SEQ ID NO: 30076 - DNA, 25 bp, Artificial
  Probe
agtcctttatccaatagtaggtccc

SEQ ID NO: 30077 - DNA, 25 bp, Artificial
  Probe
gaataatccctgtccatcctgtgag

SEQ ID NO: 30078 - DNA, 25 bp, Artificial
  Probe
atccagtcctttatccaatagtagg

SEQ ID NO: 30079 - DNA, 25 bp, Artificial
  Probe
agctttatttacttcttccaccctt

SEQ ID NO: 30080 - DNA, 25 bp, Artificial
  Probe
gatataatagagccctcggttgtgg

SEQ ID NO: 30081 - DNA, 25 bp, Artificial
  Probe
gagctttatttacttcttccaccct

SEQ ID NO: 30082 - DNA, 25 bp, Artificial
  Probe
aacatggtagatataatagagccct

SEQ ID NO: 30083 - DNA, 25 bp, Artificial
  Probe
ccagcactttaagagaatcaccaga

SEQ ID NO: 30084 - DNA, 25 bp, Artificial
  Probe
gcagagctttatttacttcttccac

SEQ ID NO: 30085 - DNA, 25 bp, Artificial
  Probe
cagagctttatttacttcttccacc

SEQ ID NO: 30086 - DNA, 25 bp, Artificial
  Probe
agagctttatttacttcttccaccc

SEQ ID NO: 30087 - DNA, 25 bp, Artificial
  Probe
ttgggcagagctttatttacttctt

SEQ ID NO: 30088 - DNA, 25 bp, Artificial
  Probe
ctctactctggtgaggaataatccc

SEQ ID NO: 30089 - DNA, 25 bp, Artificial
  Probe
agttatgtaagaagaaggcagtcaa

SEQ ID NO: 30090 - DNA, 25 bp, Artificial
  Probe
tagttatgtaagaagaaggcagtca

SEQ ID NO: 30091 - DNA, 25 bp, Artificial
  Probe
gttatgtaagaagaaggcagtcaac

SEQ ID NO: 30092 - DNA, 25 bp, Artificial
  Probe
ttagttatgtaagaagaaggcagtc

SEQ ID NO: 30093 - DNA, 25 bp, Artificial
  Probe
ttatgtaagaagaaggcagtcaaca

SEQ ID NO: 30094 - DNA, 25 bp, Artificial
  Probe
tatgtaagaagaaggcagtcaacag

SEQ ID NO: 30095 - DNA, 25 bp, Artificial
  Probe
taagaagaaggcagtcaacagtctc

SEQ ID NO: 30096 - DNA, 25 bp, Artificial
  Probe
gtaagaagaaggcagtcaacagtct

SEQ ID NO: 30097 - DNA, 25 bp, Artificial
  Probe
gcaccttaaccatattaattgttcg

SEQ ID NO: 30098 - DNA, 25 bp, Artificial
  Probe
agagtcattgcaccttaaccatatt

SEQ ID NO: 30099 - DNA, 25 bp, Artificial
  Probe
gaaacttagcaccaaataaactccc

SEQ ID NO: 30100 - DNA, 25 bp, Artificial
  Probe
tgaaacttagcaccaaataaactcc

SEQ ID NO: 30101 - DNA, 25 bp, Artificial
  Probe
atgtaagaagaaggcagtcaacagt

SEQ ID NO: 30102 - DNA, 25 bp, Artificial
  Probe
aagagtcattgcaccttaaccatat

SEQ ID NO: 30103 - DNA, 25 bp, Artificial
  Probe
gagtcattgcaccttaaccatatta

SEQ ID NO: 30104 - DNA, 25 bp, Artificial
  Probe
tattcaagagtcattgcaccttaac

SEQ ID NO: 30105 - DNA, 25 bp, Artificial
  Probe
caagagtcattgcaccttaaccata

SEQ ID NO: 30106 - DNA, 25 bp, Artificial
  Probe
tgaccgaaagtacattgtatctgaa

SEQ ID NO: 30107 - DNA, 25 bp, Artificial
  Probe
ttattcaagagtcattgcaccttaa

SEQ ID NO: 30108 - DNA, 25 bp, Artificial
  Probe
gtgaccgaaagtacattgtatctga

SEQ ID NO: 30109 - DNA, 25 bp, Artificial
  Probe
tgtaagaagaaggcagtcaacagtc

SEQ ID NO: 30110 - DNA, 25 bp, Artificial
  Probe
agtcattgcaccttaaccatattaa

SEQ ID NO: 30111 - DNA, 25 bp, Artificial
  Probe
attcaagagtcattgcaccttaacc

SEQ ID NO: 30112 - DNA, 25 bp, Artificial
  Probe
gaccgaaagtacattgtatctgaaa

SEQ ID NO: 30113 - DNA, 25 bp, Artificial
  Probe
atgaaacttagcaccaaataaactc

SEQ ID NO: 30114 - DNA, 25 bp, Artificial
  Probe
gagaatatctgcaacatcgtcactg

SEQ ID NO: 30115 - DNA, 25 bp, Artificial
  Probe
cgtccagatgtactatgaaatgatt

SEQ ID NO: 30116 - DNA, 25 bp, Artificial
  Probe
ccatgaaacttagcaccaaataaac

SEQ ID NO: 30117 - DNA, 25 bp, Artificial
  Probe
tttagttatgtaagaagaaggcagt

SEQ ID NO: 30118 - DNA, 25 bp, Artificial
  Probe
accgaaagtacattgtatctgaaat

SEQ ID NO: 30119 - DNA, 25 bp, Artificial
  Probe
gagtaaggaggatttgggctttagt

SEQ ID NO: 30120 - DNA, 25 bp, Artificial
  Probe
tgagtaaggaggatttgggctttag

SEQ ID NO: 30121 - DNA, 25 bp, Artificial
  Probe
ctgagtaaggaggatttgggcttta

SEQ ID NO: 30122 - DNA, 25 bp, Artificial
  Probe
caccaacgtccagatgtactatgaa

SEQ ID NO: 30123 - DNA, 25 bp, Artificial
  Probe
ttgtgaccgaaagtacattgtatct

SEQ ID NO: 30124 - DNA, 25 bp, Artificial
  Probe
gttgtgaccgaaagtacattgtatc

SEQ ID NO: 30125 - DNA, 25 bp, Artificial
  Probe
tgcaccttaaccatattaattgttc

SEQ ID NO: 30126 - DNA, 25 bp, Artificial
  Probe
agtaaggaggatttgggctttagtg

SEQ ID NO: 30127 - DNA, 25 bp, Artificial
  Probe
tgtgaccgaaagtacattgtatctg

SEQ ID NO: 30128 - DNA, 25 bp, Artificial
  Probe
catgaaacttagcaccaaataaact

SEQ ID NO: 30129 - DNA, 25 bp, Artificial
  Probe
gtcattgcaccttaaccatattaat

SEQ ID NO: 30130 - DNA, 25 bp, Artificial
  Probe
aagaaggcagtcaacagtctcagat

SEQ ID NO: 30131 - DNA, 25 bp, Artificial
  Probe
caccttaaccatattaattgttcga

SEQ ID NO: 30132 - DNA, 25 bp, Artificial
  Probe
tcaagagtcattgcaccttaaccat

SEQ ID NO: 30133 - DNA, 25 bp, Artificial
  Probe
aacgtccagatgtactatgaaatga

SEQ ID NO: 30134 - DNA, 25 bp, Artificial
  Probe
cttctgtcttccgttcttagaggta

SEQ ID NO: 30135 - DNA, 25 bp, Artificial
  Probe
tctcacttctgtcttccgttcttag

SEQ ID NO: 30136 - DNA, 25 bp, Artificial
  Probe
ctctcacttctgtcttccgttctta

SEQ ID NO: 30137 - DNA, 25 bp, Artificial
  Probe
tcttaggatctgactattggctgag

SEQ ID NO: 30138 - DNA, 25 bp, Artificial
  Probe
tcacttctgtcttccgttcttagag

SEQ ID NO: 30139 - DNA, 25 bp, Artificial
  Probe
ctcacttctgtcttccgttcttaga

SEQ ID NO: 30140 - DNA, 25 bp, Artificial
  Probe
ttctgtcttccgttcttagaggtac

SEQ ID NO: 30141 - DNA, 25 bp, Artificial
  Probe
gtcttaggatctgactattggctga

SEQ ID NO: 30142 - DNA, 25 bp, Artificial
  Probe
tgtttagagatggacttggcttatt

SEQ ID NO: 30143 - DNA, 25 bp, Artificial
  Probe
ctgtcttccgttcttagaggtactg

SEQ ID NO: 30144 - DNA, 25 bp, Artificial
  Probe
ctgtttagagatggacttggcttat

SEQ ID NO: 30145 - DNA, 25 bp, Artificial
  Probe
cacttctgtcttccgttcttagagg

SEQ ID NO: 30146 - DNA, 25 bp, Artificial
  Probe
tctgtcttccgttcttagaggtact

SEQ ID NO: 30147 - DNA, 25 bp, Artificial
  Probe
gtttagagatggacttggcttattt

SEQ ID NO: 30148 - DNA, 25 bp, Artificial
  Probe
cttaggatctgactattggctgagc

SEQ ID NO: 30149 - DNA, 25 bp, Artificial
  Probe
ttggtcttaggatctgactattggc

SEQ ID NO: 30150 - DNA, 25 bp, Artificial
  Probe
acttctgtcttccgttcttagaggt

SEQ ID NO: 30151 - DNA, 25 bp, Artificial
  Probe
tctctcacttctgtcttccgttctt

SEQ ID NO: 30152 - DNA, 25 bp, Artificial
  Probe
ggtcttaggatctgactattggctg

SEQ ID NO: 30153 - DNA, 25 bp, Artificial
  Probe
gattctttcacatggtctcactttg

SEQ ID NO: 30154 - DNA, 25 bp, Artificial
  Probe
tggtcttaggatctgactattggct

SEQ ID NO: 30155 - DNA, 25 bp, Artificial
  Probe
attctttcacatggtctcactttgg

SEQ ID NO: 30156 - DNA, 25 bp, Artificial
  Probe
tgattctttcacatggtctcacttt

SEQ ID NO: 30157 - DNA, 25 bp, Artificial
  Probe
gtctctcacttctgtcttccgttct

SEQ ID NO: 30158 - DNA, 25 bp, Artificial
  Probe
tttggtcttaggatctgactattgg

SEQ ID NO: 30159 - DNA, 25 bp, Artificial
  Probe
ctctacttctacctagctccctatc

SEQ ID NO: 30160 - DNA, 25 bp, Artificial
  Probe
tctctacttctacctagctccctat

SEQ ID NO: 30161 - DNA, 25 bp, Artificial
  Probe
ctgattctttcacatggtctcactt

SEQ ID NO: 30162 - DNA, 25 bp, Artificial
  Probe
tttcaaagctccatctacaaacaat

SEQ ID NO: 30163 - DNA, 25 bp, Artificial
  Probe
gctgtttagagatggacttggctta

SEQ ID NO: 30164 - DNA, 25 bp, Artificial
  Probe
ttcaaagctccatctacaaacaatg

SEQ ID NO: 30165 - DNA, 25 bp, Artificial
  Probe
cctttggtcttaggatctgactatt

SEQ ID NO: 30166 - DNA, 25 bp, Artificial
  Probe
ctacttctacctagctccctatcct

SEQ ID NO: 30167 - DNA, 25 bp, Artificial
  Probe
ccctttggtcttaggatctgactat

SEQ ID NO: 30168 - DNA, 25 bp, Artificial
  Probe
gtcctcctccatctacttccacaag

SEQ ID NO: 30169 - DNA, 25 bp, Artificial
  Probe
ctttggtcttaggatctgactattg

SEQ ID NO: 30170 - DNA, 25 bp, Artificial
  Probe
tctacttctacctagctccctatcc

SEQ ID NO: 30171 - DNA, 25 bp, Artificial
  Probe
agtctctcacttctgtcttccgttc

SEQ ID NO: 30172 - DNA, 25 bp, Artificial
  Probe
tacttctacctagctccctatcctg

SEQ ID NO: 30173 - DNA, 25 bp, Artificial
  Probe
ctgactgtggtctatgccttctgta

SEQ ID NO: 30174 - DNA, 25 bp, Artificial
  Probe
gagtctctcacttctgtcttccgtt

SEQ ID NO: 30175 - DNA, 25 bp, Artificial
  Probe
tttctaaagtgggtctgtcttagcc

SEQ ID NO: 30176 - DNA, 25 bp, Artificial
  Probe
tgtcttccgttcttagaggtactgc

SEQ ID NO: 30177 - DNA, 25 bp, Artificial
  Probe
gaggagtctctcacttctgtcttcc

SEQ ID NO: 30178 - DNA, 25 bp, Artificial
  Probe
cctctctctcatcctgctgtttaga

SEQ ID NO: 30179 - DNA, 25 bp, Artificial
  Probe
agtatgtatatgtctgacagcatgt

SEQ ID NO: 30180 - DNA, 25 bp, Artificial
  Probe
aatcaagtacacaattcacacaggc

SEQ ID NO: 30181 - DNA, 25 bp, Artificial
  Probe
gtatgtatatgtctgacagcatgtt

SEQ ID NO: 30182 - DNA, 25 bp, Artificial
  Probe
atcaagtacacaattcacacaggct

SEQ ID NO: 30183 - DNA, 25 bp, Artificial
  Probe
aagtatgtatatgtctgacagcatg

SEQ ID NO: 30184 - DNA, 25 bp, Artificial
  Probe
attcatttaggctatggaagaaacc

SEQ ID NO: 30185 - DNA, 25 bp, Artificial
  Probe
caagtacacaattcacacaggcttc

SEQ ID NO: 30186 - DNA, 25 bp, Artificial
  Probe
aaatcaagtacacaattcacacagg

SEQ ID NO: 30187 - DNA, 25 bp, Artificial
  Probe
tcaagtacacaattcacacaggctt

SEQ ID NO: 30188 - DNA, 25 bp, Artificial
  Probe
gagaagactgctaaactgacttaga

SEQ ID NO: 30189 - DNA, 25 bp, Artificial
  Probe
agactgctaaactgacttagatgaa

SEQ ID NO: 30190 - DNA, 25 bp, Artificial
  Probe
aagactgctaaactgacttagatga

SEQ ID NO: 30191 - DNA, 25 bp, Artificial
  Probe
gaagactgctaaactgacttagatg

SEQ ID NO: 30192 - DNA, 25 bp, Artificial
  Probe
agaagactgctaaactgacttagat

SEQ ID NO: 30193 - DNA, 25 bp, Artificial
  Probe
ttcatttaggctatggaagaaacct

SEQ ID NO: 30194 - DNA, 25 bp, Artificial
  Probe
cgagaagactgctaaactgacttag

SEQ ID NO: 30195 - DNA, 25 bp, Artificial
  Probe
taatgagacacacatgaaaggcaaa

SEQ ID NO: 30196 - DNA, 25 bp, Artificial
  Probe
taagtaatgagacacacatgaaagg

SEQ ID NO: 30197 - DNA, 25 bp, Artificial
  Probe
gactgctaaactgacttagatgaat

SEQ ID NO: 30198 - DNA, 25 bp, Artificial
  Probe
aagtaatgagacacacatgaaaggc

SEQ ID NO: 30199 - DNA, 25 bp, Artificial
  Probe
ctatggaagaaacctaccagttacc

SEQ ID NO: 30200 - DNA, 25 bp, Artificial
  Probe
tttagaaagcaagcatgtgatgtgt

SEQ ID NO: 30201 - DNA, 25 bp, Artificial
  Probe
aagtacacaattcacacaggcttcc

SEQ ID NO: 30202 - DNA, 25 bp, Artificial
  Probe
tatggaagaaacctaccagttacct

SEQ ID NO: 30203 - DNA, 25 bp, Artificial
  Probe
tatatgtctgacagcatgtttgtga

SEQ ID NO: 30204 - DNA, 25 bp, Artificial
  Probe
gtatatgtctgacagcatgtttgtg

SEQ ID NO: 30205 - DNA, 25 bp, Artificial
  Probe
gtaatgagacacacatgaaaggcaa

SEQ ID NO: 30206 - DNA, 25 bp, Artificial
  Probe
tgtatatgtctgacagcatgtttgt

SEQ ID NO: 30207 - DNA, 25 bp, Artificial
  Probe
atgtatatgtctgacagcatgtttg

SEQ ID NO: 30208 - DNA, 25 bp, Artificial
  Probe
actgctaaactgacttagatgaatt

SEQ ID NO: 30209 - DNA, 25 bp, Artificial
  Probe
gctatggaagaaacctaccagttac

SEQ ID NO: 30210 - DNA, 25 bp, Artificial
  Probe
taagtatgtatatgtctgacagcat

SEQ ID NO: 30211 - DNA, 25 bp, Artificial
  Probe
ataagtatgtatatgtctgacagca

SEQ ID NO: 30212 - DNA, 25 bp, Artificial
  Probe
atatgtctgacagcatgtttgtgat

SEQ ID NO: 30213 - DNA, 25 bp, Artificial
  Probe
tttgtgatcgagaagactgctaaac

SEQ ID NO: 30214 - DNA, 25 bp, Artificial
  Probe
gtttgtgatcgagaagactgctaaa

SEQ ID NO: 30215 - DNA, 25 bp, Artificial
  Probe
tcgagaagactgctaaactgactta

SEQ ID NO: 30216 - DNA, 25 bp, Artificial
  Probe
atggaagaaacctaccagttacctt

SEQ ID NO: 30217 - DNA, 25 bp, Artificial
  Probe
aatgagacacacatgaaaggcaaag

SEQ ID NO: 30218 - DNA, 25 bp, Artificial
  Probe
tggaagaaacctaccagttaccttt

SEQ ID NO: 30219 - DNA, 25 bp, Artificial
  Probe
tatgtctgacagcatgtttgtgatc

SEQ ID NO: 30220 - DNA, 25 bp, Artificial
  Probe
aaagaacaaacaacacattgcattt

SEQ ID NO: 30221 - DNA, 25 bp, Artificial
  Probe
gaaagcaagcatgtgatgtgtgtat

SEQ ID NO: 30222 - DNA, 25 bp, Artificial
  Probe
ttagaaagcaagcatgtgatgtgtg

SEQ ID NO: 30223 - DNA, 25 bp, Artificial
  Probe
ggctatggaagaaacctaccagtta

SEQ ID NO: 30224 - DNA, 25 bp, Artificial
  Probe
cagcacaaggtaagagtctacagag

SEQ ID NO: 30225 - DNA, 25 bp, Artificial
  Probe
tagtcaattatcacagggttctcag

SEQ ID NO: 30226 - DNA, 25 bp, Artificial
  Probe
gtagtcaattatcacagggttctca

SEQ ID NO: 30227 - DNA, 25 bp, Artificial
  Probe
tttcgtagtcaattatcacagggtt

SEQ ID NO: 30228 - DNA, 25 bp, Artificial
  Probe
atttcgtagtcaattatcacagggt

SEQ ID NO: 30229 - DNA, 25 bp, Artificial
  Probe
ttcgtagtcaattatcacagggttc

SEQ ID NO: 30230 - DNA, 25 bp, Artificial
  Probe
gagtcttctctgttcaggatgctac

SEQ ID NO: 30231 - DNA, 25 bp, Artificial
  Probe
gatttcgtagtcaattatcacaggg

SEQ ID NO: 30232 - DNA, 25 bp, Artificial
  Probe
cgtagtcaattatcacagggttctc

SEQ ID NO: 30233 - DNA, 25 bp, Artificial
  Probe
tcgtagtcaattatcacagggttct

SEQ ID NO: 30234 - DNA, 25 bp, Artificial
  Probe
tgagtcttctctgttcaggatgcta

SEQ ID NO: 30235 - DNA, 25 bp, Artificial
  Probe
agatttcgtagtcaattatcacagg

SEQ ID NO: 30236 - DNA, 25 bp, Artificial
  Probe
ctgtgagtcttctctgttcaggatg

SEQ ID NO: 30237 - DNA, 25 bp, Artificial
  Probe
tctgtgagtcttctctgttcaggat

SEQ ID NO: 30238 - DNA, 25 bp, Artificial
  Probe
atctgtgagtcttctctgttcagga

SEQ ID NO: 30239 - DNA, 25 bp, Artificial
  Probe
gatctgtgagtcttctctgttcagg

SEQ ID NO: 30240 - DNA, 25 bp, Artificial
  Probe
agtcttctctgttcaggatgctaca

SEQ ID NO: 30241 - DNA, 25 bp, Artificial
  Probe
gggtagagatttcgtagtcaattat

SEQ ID NO: 30242 - DNA, 25 bp, Artificial
  Probe
agagatttcgtagtcaattatcaca

SEQ ID NO: 30243 - DNA, 25 bp, Artificial
  Probe
agcacaaggtaagagtctacagagc

SEQ ID NO: 30244 - DNA, 25 bp, Artificial
  Probe
gagatttcgtagtcaattatcacag

SEQ ID NO: 30245 - DNA, 25 bp, Artificial
  Probe
agtcaattatcacagggttctcagc

SEQ ID NO: 30246 - DNA, 25 bp, Artificial
  Probe
tctttacaccactcagtaagggaaa

SEQ ID NO: 30247 - DNA, 25 bp, Artificial
  Probe
gattgattctctgctcctccctttc

SEQ ID NO: 30248 - DNA, 25 bp, Artificial
  Probe
gcagcacaaggtaagagtctacaga

SEQ ID NO: 30249 - DNA, 25 bp, Artificial
  Probe
gtctttacaccactcagtaagggaa

SEQ ID NO: 30250 - DNA, 25 bp, Artificial
  Probe
ggtagagatttcgtagtcaattatc

SEQ ID NO: 30251 - DNA, 25 bp, Artificial
  Probe
attgattctctgctcctccctttct

SEQ ID NO: 30252 - DNA, 25 bp, Artificial
  Probe
taggggtagagatttcgtagtcaat

SEQ ID NO: 30253 - DNA, 25 bp, Artificial
  Probe
cacaaggtaagagtctacagagcgg

SEQ ID NO: 30254 - DNA, 25 bp, Artificial
  Probe
gtgagtcttctctgttcaggatgct

SEQ ID NO: 30255 - DNA, 25 bp, Artificial
  Probe
agattgattctctgctcctcccttt

SEQ ID NO: 30256 - DNA, 25 bp, Artificial
  Probe
aagattgattctctgctcctccctt

SEQ ID NO: 30257 - DNA, 25 bp, Artificial
  Probe
aaagattgattctctgctcctccct

SEQ ID NO: 30258 - DNA, 25 bp, Artificial
  Probe
ggggtagagatttcgtagtcaatta

SEQ ID NO: 30259 - DNA, 25 bp, Artificial
  Probe
gtcaattatcacagggttctcagct

SEQ ID NO: 30260 - DNA, 25 bp, Artificial
  Probe
gtaggggtagagatttcgtagtcaa

SEQ ID NO: 30261 - DNA, 25 bp, Artificial
  Probe
aggggtagagatttcgtagtcaatt

SEQ ID NO: 30262 - DNA, 25 bp, Artificial
  Probe
gccctaaatgtttgacatctttctg

SEQ ID NO: 30263 - DNA, 25 bp, Artificial
  Probe
tgtgagtcttctctgttcaggatgc

SEQ ID NO: 30264 - DNA, 25 bp, Artificial
  Probe
cagtaggggtagagatttcgtagtc

SEQ ID NO: 30265 - DNA, 25 bp, Artificial
  Probe
gtcagtaggggtagagatttcgtag

SEQ ID NO: 30266 - DNA, 25 bp, Artificial
  Probe
ccctaaatgtttgacatctttctga

SEQ ID NO: 30267 - DNA, 25 bp, Artificial
  Probe
ttgattctctgctcctccctttctc

SEQ ID NO: 30268 - DNA, 25 bp, Artificial
  Probe
agtaggggtagagatttcgtagtca

SEQ ID NO: 30269 - DNA, 25 bp, Artificial
  Probe
tacttcaatgacaagcagcagatta

SEQ ID NO: 30270 - DNA, 25 bp, Artificial
  Probe
cttcaatgacaagcagcagattatc

SEQ ID NO: 30271 - DNA, 25 bp, Artificial
  Probe
acttcaatgacaagcagcagattat

SEQ ID NO: 30272 - DNA, 25 bp, Artificial
  Probe
caatgacaagcagcagattatctac

SEQ ID NO: 30273 - DNA, 25 bp, Artificial
  Probe
tcaatgacaagcagcagattatcta

SEQ ID NO: 30274 - DNA, 25 bp, Artificial
  Probe
ttcaatgacaagcagcagattatct

SEQ ID NO: 30275 - DNA, 25 bp, Artificial
  Probe
ctacttcaatgacaagcagcagatt

SEQ ID NO: 30276 - DNA, 25 bp, Artificial
  Probe
caacatgctctacttcaatgacaag

SEQ ID NO: 30277 - DNA, 25 bp, Artificial
  Probe
ccaatcaacatgctctacttcaatg

SEQ ID NO: 30278 - DNA, 25 bp, Artificial
  Probe
aatgacaagcagcagattatctacg

SEQ ID NO: 30279 - DNA, 25 bp, Artificial
  Probe
aatcaacatgctctacttcaatgac

SEQ ID NO: 30280 - DNA, 25 bp, Artificial
  Probe
caatcaacatgctctacttcaatga

SEQ ID NO: 30281 - DNA, 25 bp, Artificial
  Probe
atcaacatgctctacttcaatgaca

SEQ ID NO: 30282 - DNA, 25 bp, Artificial
  Probe
tcaacatgctctacttcaatgacaa

SEQ ID NO: 30283 - DNA, 25 bp, Artificial
  Probe
tctacttcaatgacaagcagcagat

SEQ ID NO: 30284 - DNA, 25 bp, Artificial
  Probe
ctctacttcaatgacaagcagcaga

SEQ ID NO: 30285 - DNA, 25 bp, Artificial
  Probe
atgacaagcagcagattatctacgg

SEQ ID NO: 30286 - DNA, 25 bp, Artificial
  Probe
cccaatcaacatgctctacttcaat

SEQ ID NO: 30287 - DNA, 25 bp, Artificial
  Probe
aacatgctctacttcaatgacaagc

SEQ ID NO: 30288 - DNA, 25 bp, Artificial
  Probe
cttcatggagcttcgagttctagag

SEQ ID NO: 30289 - DNA, 25 bp, Artificial
  Probe
caagcagcagattatctacggcaag

SEQ ID NO: 30290 - DNA, 25 bp, Artificial
  Probe
ttcatggagcttcgagttctagaga

SEQ ID NO: 30291 - DNA, 25 bp, Artificial
  Probe
cagcagattatctacggcaagatcc

SEQ ID NO: 30292 - DNA, 25 bp, Artificial
  Probe
aagcagcagattatctacggcaaga

SEQ ID NO: 30293 - DNA, 25 bp, Artificial
  Probe
tcatggagcttcgagttctagagaa

SEQ ID NO: 30294 - DNA, 25 bp, Artificial
  Probe
gcagcagattatctacggcaagatc

SEQ ID NO: 30295 - DNA, 25 bp, Artificial
  Probe
acaagcagcagattatctacggcaa

SEQ ID NO: 30296 - DNA, 25 bp, Artificial
  Probe
agcagcagattatctacggcaagat

SEQ ID NO: 30297 - DNA, 25 bp, Artificial
  Probe
cagattatctacggcaagatccctg

SEQ ID NO: 30298 - DNA, 25 bp, Artificial
  Probe
ccttcatggagcttcgagttctaga

SEQ ID NO: 30299 - DNA, 25 bp, Artificial
  Probe
gacaagcagcagattatctacggca

SEQ ID NO: 30300 - DNA, 25 bp, Artificial
  Probe
tgacaagcagcagattatctacggc

SEQ ID NO: 30301 - DNA, 25 bp, Artificial
  Probe
gctctacttcaatgacaagcagcag

SEQ ID NO: 30302 - DNA, 25 bp, Artificial
  Probe
agattatctacggcaagatccctgg

SEQ ID NO: 30303 - DNA, 25 bp, Artificial
  Probe
gagcttcgagttctagagaacacaa

SEQ ID NO: 30304 - DNA, 25 bp, Artificial
  Probe
catgttcatgcaaaagtatccacac

SEQ ID NO: 30305 - DNA, 25 bp, Artificial
  Probe
atgttcatgcaaaagtatccacaca

SEQ ID NO: 30306 - DNA, 25 bp, Artificial
  Probe
ccccaatcaacatgctctacttcaa

SEQ ID NO: 30307 - DNA, 25 bp, Artificial
  Probe
ccagtgtgaatacatgttcatgcaa

SEQ ID NO: 30308 - DNA, 25 bp, Artificial
  Probe
catggagcttcgagttctagagaac

SEQ ID NO: 30309 - DNA, 25 bp, Artificial
  Probe
gtccccaatcaacatgctctacttc

SEQ ID NO: 30310 - DNA, 25 bp, Artificial
  Probe
ttcgagttctagagaacacaaagag

SEQ ID NO: 30311 - DNA, 25 bp, Artificial
  Probe
cttcgagttctagagaacacaaaga

SEQ ID NO: 30312 - DNA, 25 bp, Artificial
  Probe
gagttctagagaacacaaagaggtc

SEQ ID NO: 30313 - DNA, 25 bp, Artificial
  Probe
gcagattatctacggcaagatccct

SEQ ID NO: 30314 - DNA, 25 bp, Artificial
  Probe
cactccttcagtacacatcctatgg

SEQ ID NO: 30315 - DNA, 25 bp, Artificial
  Probe
actccttcagtacacatcctatggt

SEQ ID NO: 30316 - DNA, 25 bp, Artificial
  Probe
ctccttcagtacacatcctatggtg

SEQ ID NO: 30317 - DNA, 25 bp, Artificial
  Probe
gcactccttcagtacacatcctatg

SEQ ID NO: 30318 - DNA, 25 bp, Artificial
  Probe
attgacctggacaaagtagtgttac

SEQ ID NO: 30319 - DNA, 25 bp, Artificial
  Probe
cattgacctggacaaagtagtgtta

SEQ ID NO: 30320 - DNA, 25 bp, Artificial
  Probe
cttcatcgctactccaaagttcttg

SEQ ID NO: 30321 - DNA, 25 bp, Artificial
  Probe
cagtaatctttggaaacaccagaag

SEQ ID NO: 30322 - DNA, 25 bp, Artificial
  Probe
tatctctggattgtggctggcttag

SEQ ID NO: 30323 - DNA, 25 bp, Artificial
  Probe
ctatctctggattgtggctggctta

SEQ ID NO: 30324 - DNA, 25 bp, Artificial
  Probe
ttcatcgctactccaaagttcttga

SEQ ID NO: 30325 - DNA, 25 bp, Artificial
  Probe
ccagtaatctttggaaacaccagaa

SEQ ID NO: 30326 - DNA, 25 bp, Artificial
  Probe
agtaatctttggaaacaccagaagc

SEQ ID NO: 30327 - DNA, 25 bp, Artificial
  Probe
cttggatgacagtcacagacagaag

SEQ ID NO: 30328 - DNA, 25 bp, Artificial
  Probe
tagtgttacccaactttcgctcaaa

SEQ ID NO: 30329 - DNA, 25 bp, Artificial
  Probe
gtgttacccaactttcgctcaaatc

SEQ ID NO: 30330 - DNA, 25 bp, Artificial
  Probe
ttgacctggacaaagtagtgttacc

SEQ ID NO: 30331 - DNA, 25 bp, Artificial
  Probe
cacagactttcaaggaccaaggatt

SEQ ID NO: 30332 - DNA, 25 bp, Artificial
  Probe
atcacacagactttcaaggaccaag

SEQ ID NO: 30333 - DNA, 25 bp, Artificial
  Probe
tcatcgctactccaaagttcttgag

SEQ ID NO: 30334 - DNA, 25 bp, Artificial
  Probe
ccttcatcgctactccaaagttctt

SEQ ID NO: 30335 - DNA, 25 bp, Artificial
  Probe
acagactttcaaggaccaaggattg

SEQ ID NO: 30336 - DNA, 25 bp, Artificial
  Probe
tgcactccttcagtacacatcctat

SEQ ID NO: 30337 - DNA, 25 bp, Artificial
  Probe
atgcactccttcagtacacatccta

SEQ ID NO: 30338 - DNA, 25 bp, Artificial
  Probe
gatcacacagactttcaaggaccaa

SEQ ID NO: 30339 - DNA, 25 bp, Artificial
  Probe
agtgttacccaactttcgctcaaat

SEQ ID NO: 30340 - DNA, 25 bp, Artificial
  Probe
ctggacaaagtagtgttacccaact

SEQ ID NO: 30341 - DNA, 25 bp, Artificial
  Probe
gtagtgttacccaactttcgctcaa

SEQ ID NO: 30342 - DNA, 25 bp, Artificial
  Probe
taatctttggaaacaccagaagctg

SEQ ID NO: 30343 - DNA, 25 bp, Artificial
  Probe
gtaatctttggaaacaccagaagct

SEQ ID NO: 30344 - DNA, 25 bp, Artificial
  Probe
cccagtaatctttggaaacaccaga

SEQ ID NO: 30345 - DNA, 25 bp, Artificial
  Probe
catcgctactccaaagttcttgagg

SEQ ID NO: 30346 - DNA, 25 bp, Artificial
  Probe
caaggattggaagtcttaaaacaag

SEQ ID NO: 30347 - DNA, 25 bp, Artificial
  Probe
aatcagattccgtgacctcctcttt

SEQ ID NO: 30348 - DNA, 25 bp, Artificial
  Probe
caccttcatcgctactccaaagttc

SEQ ID NO: 30349 - DNA, 25 bp, Artificial
  Probe
ccattgacctggacaaagtagtgtt

SEQ ID NO: 30350 - DNA, 25 bp, Artificial
  Probe
acacagactttcaaggaccaaggat

SEQ ID NO: 30351 - DNA, 25 bp, Artificial
  Probe
accttcatcgctactccaaagttct

SEQ ID NO: 30352 - DNA, 25 bp, Artificial
  Probe
aaggaccaaggattggaagtcttaa

SEQ ID NO: 30353 - DNA, 25 bp, Artificial
  Probe
tggacaaagtagtgttacccaactt

SEQ ID NO: 30354 - DNA, 25 bp, Artificial
  Probe
agtagtgttacccaactttcgctca

SEQ ID NO: 30355 - DNA, 25 bp, Artificial
  Probe
ttggatgacagtcacagacagaagg

SEQ ID NO: 30356 - DNA, 25 bp, Artificial
  Probe
cctggacaaagtagtgttacccaac

SEQ ID NO: 30357 - DNA, 25 bp, Artificial
  Probe
tgttacccaactttcgctcaaatcg

SEQ ID NO: 30358 - DNA, 25 bp, Artificial
  Probe
tgacctggacaaagtagtgttaccc

SEQ ID NO: 30359 - DNA, 25 bp, Artificial
  Probe
tgctatcaagttagacctgagagag

SEQ ID NO: 30360 - DNA, 25 bp, Artificial
  Probe
gtgctatcaagttagacctgagaga

SEQ ID NO: 30361 - DNA, 25 bp, Artificial
  Probe
ctatcaagttagacctgagagagcc

SEQ ID NO: 30362 - DNA, 25 bp, Artificial
  Probe
cacgagaaactgtattaaagggttg

SEQ ID NO: 30363 - DNA, 25 bp, Artificial
  Probe
ggctcatagatccaggagatgtatg

SEQ ID NO: 30364 - DNA, 25 bp, Artificial
  Probe
tatgaaacttacacacactcacact

SEQ ID NO: 30365 - DNA, 25 bp, Artificial
  Probe
gtatgaaacttacacacactcacac

SEQ ID NO: 30366 - DNA, 25 bp, Artificial
  Probe
ggtgctatcaagttagacctgagag

SEQ ID NO: 30367 - DNA, 25 bp, Artificial
  Probe
caacacgagaaactgtattaaaggg

SEQ ID NO: 30368 - DNA, 25 bp, Artificial
  Probe
ccacaacacgagaaactgtattaaa

SEQ ID NO: 30369 - DNA, 25 bp, Artificial
  Probe
acgagaaactgtattaaagggttgc

SEQ ID NO: 30370 - DNA, 25 bp, Artificial
  Probe
acacgagaaactgtattaaagggtt

SEQ ID NO: 30371 - DNA, 25 bp, Artificial
  Probe
aacacgagaaactgtattaaagggt

SEQ ID NO: 30372 - DNA, 25 bp, Artificial
  Probe
acaacacgagaaactgtattaaagg

SEQ ID NO: 30373 - DNA, 25 bp, Artificial
  Probe
accacaacacgagaaactgtattaa

SEQ ID NO: 30374 - DNA, 25 bp, Artificial
  Probe
atgaaacttacacacactcacactg

SEQ ID NO: 30375 - DNA, 25 bp, Artificial
  Probe
gatccaggagatgtatgaaacttac

SEQ ID NO: 30376 - DNA, 25 bp, Artificial
  Probe
agatccaggagatgtatgaaactta

SEQ ID NO: 30377 - DNA, 25 bp, Artificial
  Probe
tagatccaggagatgtatgaaactt

SEQ ID NO: 30378 - DNA, 25 bp, Artificial
  Probe
atagatccaggagatgtatgaaact

SEQ ID NO: 30379 - DNA, 25 bp, Artificial
  Probe
cacaacacgagaaactgtattaaag

SEQ ID NO: 30380 - DNA, 25 bp, Artificial
  Probe
caccacaacacgagaaactgtatta

SEQ ID NO: 30381 - DNA, 25 bp, Artificial
  Probe
gtggtgctatcaagttagacctgag

SEQ ID NO: 30382 - DNA, 25 bp, Artificial
  Probe
tggtgctatcaagttagacctgaga

SEQ ID NO: 30383 - DNA, 25 bp, Artificial
  Probe
gctatcaagttagacctgagagagc

SEQ ID NO: 30384 - DNA, 25 bp, Artificial
  Probe
catagatccaggagatgtatgaaac

SEQ ID NO: 30385 - DNA, 25 bp, Artificial
  Probe
tccaggagatgtatgaaacttacac

SEQ ID NO: 30386 - DNA, 25 bp, Artificial
  Probe
tgtatgaaacttacacacactcaca

SEQ ID NO: 30387 - DNA, 25 bp, Artificial
  Probe
ggagatgtatgaaacttacacacac

SEQ ID NO: 30388 - DNA, 25 bp, Artificial
  Probe
aggagatgtatgaaacttacacaca

SEQ ID NO: 30389 - DNA, 25 bp, Artificial
  Probe
ccaggagatgtatgaaacttacaca

SEQ ID NO: 30390 - DNA, 25 bp, Artificial
  Probe
caggagatgtatgaaacttacacac

SEQ ID NO: 30391 - DNA, 25 bp, Artificial
  Probe
atgtatgaaacttacacacactcac

SEQ ID NO: 30392 - DNA, 25 bp, Artificial
  Probe
atccaggagatgtatgaaacttaca

SEQ ID NO: 30393 - DNA, 25 bp, Artificial
  Probe
gaaacttacacacactcacactggt

SEQ ID NO: 30394 - DNA, 25 bp, Artificial
  Probe
gatgtatgaaacttacacacactca

SEQ ID NO: 30395 - DNA, 25 bp, Artificial
  Probe
tatcaagttagacctgagagagccc

SEQ ID NO: 30396 - DNA, 25 bp, Artificial
  Probe
tcaccacaacacgagaaactgtatt

SEQ ID NO: 30397 - DNA, 25 bp, Artificial
  Probe
agatgtatgaaacttacacacactc

SEQ ID NO: 30398 - DNA, 25 bp, Artificial
  Probe
gagatgtatgaaacttacacacact

SEQ ID NO: 30399 - DNA, 25 bp, Artificial
  Probe
cgagaaactgtattaaagggttgca

SEQ ID NO: 30400 - DNA, 25 bp, Artificial
  Probe
gagaaactgtattaaagggttgcag

SEQ ID NO: 30401 - DNA, 25 bp, Artificial
  Probe
ctgtcctggaactcgatttgtagaa

SEQ ID NO: 30402 - DNA, 25 bp, Artificial
  Probe
tgaaacttacacacactcacactgg

SEQ ID NO: 30403 - DNA, 25 bp, Artificial
  Probe
gggctcatagatccaggagatgtat

SEQ ID NO: 30404 - DNA, 25 bp, Artificial
  Probe
cgagttcaggatctataaggactac

SEQ ID NO: 30405 - DNA, 25 bp, Artificial
  Probe
ccgagttcaggatctataaggacta

SEQ ID NO: 30406 - DNA, 25 bp, Artificial
  Probe
gagttcaggatctataaggactaca

SEQ ID NO: 30407 - DNA, 25 bp, Artificial
  Probe
gttcaggatctataaggactacatc

SEQ ID NO: 30408 - DNA, 25 bp, Artificial
  Probe
agttcaggatctataaggactacat

SEQ ID NO: 30409 - DNA, 25 bp, Artificial
  Probe
gaccttccagatcacagtctatcag

SEQ ID NO: 30410 - DNA, 25 bp, Artificial
  Probe
cttccagatcacagtctatcaggtg

SEQ ID NO: 30411 - DNA, 25 bp, Artificial
  Probe
agccgagttcaggatctataaggac

SEQ ID NO: 30412 - DNA, 25 bp, Artificial
  Probe
cagccgagttcaggatctataagga

SEQ ID NO: 30413 - DNA, 25 bp, Artificial
  Probe
gccgagttcaggatctataaggact

SEQ ID NO: 30414 - DNA, 25 bp, Artificial
  Probe
accaagcagaagtccctgtaataaa

SEQ ID NO: 30415 - DNA, 25 bp, Artificial
  Probe
aaccaagcagaagtccctgtaataa

SEQ ID NO: 30416 - DNA, 25 bp, Artificial
  Probe
aaaccaagcagaagtccctgtaata

SEQ ID NO: 30417 - DNA, 25 bp, Artificial
  Probe
gatatctgtcctctacttcgacgac

SEQ ID NO: 30418 - DNA, 25 bp, Artificial
  Probe
ccttccagatcacagtctatcaggt

SEQ ID NO: 30419 - DNA, 25 bp, Artificial
  Probe
accttccagatcacagtctatcagg

SEQ ID NO: 30420 - DNA, 25 bp, Artificial
  Probe
tcaggatctataaggactacatccg

SEQ ID NO: 30421 - DNA, 25 bp, Artificial
  Probe
cttccctctgaactcctacatgaac

SEQ ID NO: 30422 - DNA, 25 bp, Artificial
  Probe
aatgtcttccaagaaagaatccgtt

SEQ ID NO: 30423 - DNA, 25 bp, Artificial
  Probe
aaatgtcttccaagaaagaatccgt

SEQ ID NO: 30424 - DNA, 25 bp, Artificial
  Probe
ttcaggatctataaggactacatcc

SEQ ID NO: 30425 - DNA, 25 bp, Artificial
  Probe
ctccaagactccaaagaaccaagag

SEQ ID NO: 30426 - DNA, 25 bp, Artificial
  Probe
atgtcttccaagaaagaatccgttg

SEQ ID NO: 30427 - DNA, 25 bp, Artificial
  Probe
agaagtccctgtaataaaatgtcac

SEQ ID NO: 30428 - DNA, 25 bp, Artificial
  Probe
ttccagatcacagtctatcaggtgc

SEQ ID NO: 30429 - DNA, 25 bp, Artificial
  Probe
gagaccttccagatcacagtctatc

SEQ ID NO: 30430 - DNA, 25 bp, Artificial
  Probe
ccttccctctgaactcctacatgaa

SEQ ID NO: 30431 - DNA, 25 bp, Artificial
  Probe
gcagccgagttcaggatctataagg

SEQ ID NO: 30432 - DNA, 25 bp, Artificial
  Probe
gcagaagtccctgtaataaaatgtc

SEQ ID NO: 30433 - DNA, 25 bp, Artificial
  Probe
agcagaagtccctgtaataaaatgt

SEQ ID NO: 30434 - DNA, 25 bp, Artificial
  Probe
gaagtccctgtaataaaatgtcaca

SEQ ID NO: 30435 - DNA, 25 bp, Artificial
  Probe
agaccttccagatcacagtctatca

SEQ ID NO: 30436 - DNA, 25 bp, Artificial
  Probe
gatcacagtctatcaggtgctccag

SEQ ID NO: 30437 - DNA, 25 bp, Artificial
  Probe
cagatcacagtctatcaggtgctcc

SEQ ID NO: 30438 - DNA, 25 bp, Artificial
  Probe
ccagatcacagtctatcaggtgctc

SEQ ID NO: 30439 - DNA, 25 bp, Artificial
  Probe
aagcagaagtccctgtaataaaatg

SEQ ID NO: 30440 - DNA, 25 bp, Artificial
  Probe
caagcagaagtccctgtaataaaat

SEQ ID NO: 30441 - DNA, 25 bp, Artificial
  Probe
ttgacaacgagaccttccagatcac

SEQ ID NO: 30442 - DNA, 25 bp, Artificial
  Probe
gtttgacaacgagaccttccagatc

SEQ ID NO: 30443 - DNA, 25 bp, Artificial
  Probe
ccaagcagaagtccctgtaataaaa

SEQ ID NO: 30444 - DNA, 25 bp, Artificial
  Probe
aagtccctgtaataaaatgtcacaa

SEQ ID NO: 30445 - DNA, 25 bp, Artificial
  Probe
cagaagtccctgtaataaaatgtca

SEQ ID NO: 30446 - DNA, 25 bp, Artificial
  Probe
agtccctgtaataaaatgtcacaat

SEQ ID NO: 30447 - DNA, 25 bp, Artificial
  Probe
cgatatctgtcctctacttcgacga

SEQ ID NO: 30448 - DNA, 25 bp, Artificial
  Probe
ttccctctgaactcctacatgaacg

SEQ ID NO: 30449 - DNA, 25 bp, Artificial
  Probe
ataggagcattcacattctactgag

SEQ ID NO: 30450 - DNA, 25 bp, Artificial
  Probe
tataggagcattcacattctactga

SEQ ID NO: 30451 - DNA, 25 bp, Artificial
  Probe
agcattcacattctactgagcattc

SEQ ID NO: 30452 - DNA, 25 bp, Artificial
  Probe
gagcattcacattctactgagcatt

SEQ ID NO: 30453 - DNA, 25 bp, Artificial
  Probe
gcattcacattctactgagcattca

SEQ ID NO: 30454 - DNA, 25 bp, Artificial
  Probe
taggagcattcacattctactgagc

SEQ ID NO: 30455 - DNA, 25 bp, Artificial
  Probe
ctataggagcattcacattctactg

SEQ ID NO: 30456 - DNA, 25 bp, Artificial
  Probe
taaggaacggctttatcttgaattg

SEQ ID NO: 30457 - DNA, 25 bp, Artificial
  Probe
gtaaggaacggctttatcttgaatt

SEQ ID NO: 30458 - DNA, 25 bp, Artificial
  Probe
ggtaaggaacggctttatcttgaat

SEQ ID NO: 30459 - DNA, 25 bp, Artificial
  Probe
ggagcattcacattctactgagcat

SEQ ID NO: 30460 - DNA, 25 bp, Artificial
  Probe
tggtaaggaacggctttatcttgaa

SEQ ID NO: 30461 - DNA, 25 bp, Artificial
  Probe
cattgctaccaatcttgtcgtcttc

SEQ ID NO: 30462 - DNA, 25 bp, Artificial
  Probe
aaggaacggctttatcttgaattgc

SEQ ID NO: 30463 - DNA, 25 bp, Artificial
  Probe
ctggtaaggaacggctttatcttga

SEQ ID NO: 30464 - DNA, 25 bp, Artificial
  Probe
gcagttgtctctgtgtttctctaac

SEQ ID NO: 30465 - DNA, 25 bp, Artificial
  Probe
atcatctggaccattgctaccaatc

SEQ ID NO: 30466 - DNA, 25 bp, Artificial
  Probe
aggagcattcacattctactgagca

SEQ ID NO: 30467 - DNA, 25 bp, Artificial
  Probe
tttatcttgaattgcagagtgaagc

SEQ ID NO: 30468 - DNA, 25 bp, Artificial
  Probe
gctttatcttgaattgcagagtgaa

SEQ ID NO: 30469 - DNA, 25 bp, Artificial
  Probe
gagtgtcttcaccatctgcttcatc

SEQ ID NO: 30470 - DNA, 25 bp, Artificial
  Probe
atctggaccattgctaccaatcttg

SEQ ID NO: 30471 - DNA, 25 bp, Artificial
  Probe
catctggaccattgctaccaatctt

SEQ ID NO: 30472 - DNA, 25 bp, Artificial
  Probe
tttctctaacatcaactgctgcctc

SEQ ID NO: 30473 - DNA, 25 bp, Artificial
  Probe
atttgtggagtgcctctacttcatc

SEQ ID NO: 30474 - DNA, 25 bp, Artificial
  Probe
gatctttggcttcctccttcctatg

SEQ ID NO: 30475 - DNA, 25 bp, Artificial
  Probe
catcatctggaccattgctaccaat

SEQ ID NO: 30476 - DNA, 25 bp, Artificial
  Probe
gtgtcttcaccatctgcttcatcag

SEQ ID NO: 30477 - DNA, 25 bp, Artificial
  Probe
cattcacattctactgagcattcag

SEQ ID NO: 30478 - DNA, 25 bp, Artificial
  Probe
catttgtggagtgcctctacttcat

SEQ ID NO: 30479 - DNA, 25 bp, Artificial
  Probe
ttatcttgaattgcagagtgaagca

SEQ ID NO: 30480 - DNA, 25 bp, Artificial
  Probe
ctttatcttgaattgcagagtgaag

SEQ ID NO: 30481 - DNA, 25 bp, Artificial
  Probe
gttttctgctattactttgccatca

SEQ ID NO: 30482 - DNA, 25 bp, Artificial
  Probe
tgttttctgctattactttgccatc

SEQ ID NO: 30483 - DNA, 25 bp, Artificial
  Probe
gatgttttctgctattactttgcca

SEQ ID NO: 30484 - DNA, 25 bp, Artificial
  Probe
ttgtggagtgcctctacttcatcag

SEQ ID NO: 30485 - DNA, 25 bp, Artificial
  Probe
ggctttatcttgaattgcagagtga

SEQ ID NO: 30486 - DNA, 25 bp, Artificial
  Probe
attcacattctactgagcattcagg

SEQ ID NO: 30487 - DNA, 25 bp, Artificial
  Probe
tttctgctattactttgccatcaaa

SEQ ID NO: 30488 - DNA, 25 bp, Artificial
  Probe
gtttctctaacatcaactgctgcct

SEQ ID NO: 30489 - DNA, 25 bp, Artificial
  Probe
tatcttgaattgcagagtgaagcag

SEQ ID NO: 30490 - DNA, 25 bp, Artificial
  Probe
cgatgttttctgctattactttgcc

SEQ ID NO: 30491 - DNA, 25 bp, Artificial
  Probe
ccattgctaccaatcttgtcgtctt

SEQ ID NO: 30492 - DNA, 25 bp, Artificial
  Probe
atgttttctgctattactttgccat

SEQ ID NO: 30493 - DNA, 25 bp, Artificial
  Probe
agtgtcttcaccatctgcttcatca

SEQ ID NO: 30494 - DNA, 25 bp, Artificial
  Probe
gagcgtattatagaggtccacatcg

SEQ ID NO: 30495 - DNA, 25 bp, Artificial
  Probe
aagaagagactcacatcaccacaac

SEQ ID NO: 30496 - DNA, 25 bp, Artificial
  Probe
gttcgtctttcctttctctttcttt

SEQ ID NO: 30497 - DNA, 25 bp, Artificial
  Probe
agttcgtctttcctttctctttctt

SEQ ID NO: 30498 - DNA, 25 bp, Artificial
  Probe
tctttcctttctctttctttactgc

SEQ ID NO: 30499 - DNA, 25 bp, Artificial
  Probe
caaactggagcgtattatagaggtc

SEQ ID NO: 30500 - DNA, 25 bp, Artificial
  Probe
cgtctttcctttctctttctttact

SEQ ID NO: 30501 - DNA, 25 bp, Artificial
  Probe
tcgtctttcctttctctttctttac

SEQ ID NO: 30502 - DNA, 25 bp, Artificial
  Probe
gtttctgagttcgtctttcctttct

SEQ ID NO: 30503 - DNA, 25 bp, Artificial
  Probe
agtttctgagttcgtctttcctttc

SEQ ID NO: 30504 - DNA, 25 bp, Artificial
  Probe
aagtttctgagttcgtctttccttt

SEQ ID NO: 30505 - DNA, 25 bp, Artificial
  Probe
gaagtttctgagttcgtctttcctt

SEQ ID NO: 30506 - DNA, 25 bp, Artificial
  Probe
gcgtattatagaggtccacatcgaa

SEQ ID NO: 30507 - DNA, 25 bp, Artificial
  Probe
ggagcgtattatagaggtccacatc

SEQ ID NO: 30508 - DNA, 25 bp, Artificial
  Probe
ttcgtctttcctttctctttcttta

SEQ ID NO: 30509 - DNA, 25 bp, Artificial
  Probe
acggatatcaggatggcaatagtag

SEQ ID NO: 30510 - DNA, 25 bp, Artificial
  Probe
gacggatatcaggatggcaatagta

SEQ ID NO: 30511 - DNA, 25 bp, Artificial
  Probe
tcagtccatgacattatgaaggctt

SEQ ID NO: 30512 - DNA, 25 bp, Artificial
  Probe
gagttcgtctttcctttctctttct

SEQ ID NO: 30513 - DNA, 25 bp, Artificial
  Probe
tgagttcgtctttcctttctctttc

SEQ ID NO: 30514 - DNA, 25 bp, Artificial
  Probe
ctgagttcgtctttcctttctcttt

SEQ ID NO: 30515 - DNA, 25 bp, Artificial
  Probe
tttctgagttcgtctttcctttctc

SEQ ID NO: 30516 - DNA, 25 bp, Artificial
  Probe
aaagaagagactcacatcaccacaa

SEQ ID NO: 30517 - DNA, 25 bp, Artificial
  Probe
gtctttcctttctctttctttactg

SEQ ID NO: 30518 - DNA, 25 bp, Artificial
  Probe
cagagaaggacaaccaaatgaaacc

SEQ ID NO: 30519 - DNA, 25 bp, Artificial
  Probe
gaaggacaaccaaatgaaacccaaa

SEQ ID NO: 30520 - DNA, 25 bp, Artificial
  Probe
tctgagttcgtctttcctttctctt

SEQ ID NO: 30521 - DNA, 25 bp, Artificial
  Probe
ttctgagttcgtctttcctttctct

SEQ ID NO: 30522 - DNA, 25 bp, Artificial
  Probe
gagaagtttctgagttcgtctttcc

SEQ ID NO: 30523 - DNA, 25 bp, Artificial
  Probe
agcgtattatagaggtccacatcga

SEQ ID NO: 30524 - DNA, 25 bp, Artificial
  Probe
acttatgtccgcagctagatttaaa

SEQ ID NO: 30525 - DNA, 25 bp, Artificial
  Probe
ctcacagcctaccagaaatctctag

SEQ ID NO: 30526 - DNA, 25 bp, Artificial
  Probe
agaagtttctgagttcgtctttcct

SEQ ID NO: 30527 - DNA, 25 bp, Artificial
  Probe
cgtattatagaggtccacatcgaaa

SEQ ID NO: 30528 - DNA, 25 bp, Artificial
  Probe
aaggacaaccaaatgaaacccaaac

SEQ ID NO: 30529 - DNA, 25 bp, Artificial
  Probe
tcaaagaagagactcacatcaccac

SEQ ID NO: 30530 - DNA, 25 bp, Artificial
  Probe
cacttatgtccgcagctagatttaa

SEQ ID NO: 30531 - DNA, 25 bp, Artificial
  Probe
gtggatgaaatcaaccaaatacgag

SEQ ID NO: 30532 - DNA, 25 bp, Artificial
  Probe
tcagtggatgaaatcaaccaaatac

SEQ ID NO: 30533 - DNA, 25 bp, Artificial
  Probe
agtggatgaaatcaaccaaatacga

SEQ ID NO: 30534 - DNA, 25 bp, Artificial
  Probe
cagtggatgaaatcaaccaaatacg

SEQ ID NO: 30535 - DNA, 25 bp, Artificial
  Probe
gcagagaaggacaaccaaatgaaac

SEQ ID NO: 30536 - DNA, 25 bp, Artificial
  Probe
ctctttctttactgcaatctcactg

SEQ ID NO: 30537 - DNA, 25 bp, Artificial
  Probe
tctctttctttactgcaatctcact

SEQ ID NO: 30538 - DNA, 25 bp, Artificial
  Probe
aaacccaaactggagcgtattatag

SEQ ID NO: 30539 - DNA, 25 bp, Artificial
  Probe
aatgagtgtggtgactgtgtattaa

SEQ ID NO: 30540 - DNA, 25 bp, Artificial
  Probe
ttaatgagtgtggtgactgtgtatt

SEQ ID NO: 30541 - DNA, 25 bp, Artificial
  Probe
taatgagtgtggtgactgtgtatta

SEQ ID NO: 30542 - DNA, 25 bp, Artificial
  Probe
ttggatgaggtacactgtaatgatt

SEQ ID NO: 30543 - DNA, 25 bp, Artificial
  Probe
gttggatgaggtacactgtaatgat

SEQ ID NO: 30544 - DNA, 25 bp, Artificial
  Probe
tagttggatgaggtacactgtaatg

SEQ ID NO: 30545 - DNA, 25 bp, Artificial
  Probe
agattggtagttcttggtatagaga

SEQ ID NO: 30546 - DNA, 25 bp, Artificial
  Probe
ttagttggatgaggtacactgtaat

SEQ ID NO: 30547 - DNA, 25 bp, Artificial
  Probe
agttggatgaggtacactgtaatga

SEQ ID NO: 30548 - DNA, 25 bp, Artificial
  Probe
tgagtgtggtgactgtgtattaatt

SEQ ID NO: 30549 - DNA, 25 bp, Artificial
  Probe
atgagtgtggtgactgtgtattaat

SEQ ID NO: 30550 - DNA, 25 bp, Artificial
  Probe
attaatgagtgtggtgactgtgtat

SEQ ID NO: 30551 - DNA, 25 bp, Artificial
  Probe
cagtgtgtggtattgcataatatga

SEQ ID NO: 30552 - DNA, 25 bp, Artificial
  Probe
agtgtgtggtattgcataatatgaa

SEQ ID NO: 30553 - DNA, 25 bp, Artificial
  Probe
tggatgaggtacactgtaatgattt

SEQ ID NO: 30554 - DNA, 25 bp, Artificial
  Probe
gaattgcctctgtgctctaaccatt

SEQ ID NO: 30555 - DNA, 25 bp, Artificial
  Probe
tctatgcttctttctcacaaatgaa

SEQ ID NO: 30556 - DNA, 25 bp, Artificial
  Probe
atctatgcttctttctcacaaatga

SEQ ID NO: 30557 - DNA, 25 bp, Artificial
  Probe
aatctatgcttctttctcacaaatg

SEQ ID NO: 30558 - DNA, 25 bp, Artificial
  Probe
gtgtgtggtattgcataatatgaat

SEQ ID NO: 30559 - DNA, 25 bp, Artificial
  Probe
gagtgtggtgactgtgtattaattt

SEQ ID NO: 30560 - DNA, 25 bp, Artificial
  Probe
aaatctatgcttctttctcacaaat

SEQ ID NO: 30561 - DNA, 25 bp, Artificial
  Probe
gattggtagttcttggtatagagaa

SEQ ID NO: 30562 - DNA, 25 bp, Artificial
  Probe
aagattggtagttcttggtatagag

SEQ ID NO: 30563 - DNA, 25 bp, Artificial
  Probe
agaattgcctctgtgctctaaccat

SEQ ID NO: 30564 - DNA, 25 bp, Artificial
  Probe
tagaattgcctctgtgctctaacca

SEQ ID NO: 30565 - DNA, 25 bp, Artificial
  Probe
gcagtgtgtggtattgcataatatg

SEQ ID NO: 30566 - DNA, 25 bp, Artificial
  Probe
aaatcccttagtttggctttgaaaa

SEQ ID NO: 30567 - DNA, 25 bp, Artificial
  Probe
aaaatcccttagtttggctttgaaa

SEQ ID NO: 30568 - DNA, 25 bp, Artificial
  Probe
taaaatcccttagtttggctttgaa

SEQ ID NO: 30569 - DNA, 25 bp, Artificial
  Probe
ataaaatcccttagtttggctttga

SEQ ID NO: 30570 - DNA, 25 bp, Artificial
  Probe
ctatgcttctttctcacaaatgaaa

SEQ ID NO: 30571 - DNA, 25 bp, Artificial
  Probe
tgtgtggtattgcataatatgaata

SEQ ID NO: 30572 - DNA, 25 bp, Artificial
  Probe
aataaaatcccttagtttggctttg

SEQ ID NO: 30573 - DNA, 25 bp, Artificial
  Probe
cttagaattgcctctgtgctctaac

SEQ ID NO: 30574 - DNA, 25 bp, Artificial
  Probe
gctaaataatttgctaagtatgctt

SEQ ID NO: 30575 - DNA, 25 bp, Artificial
  Probe
ggatgaggtacactgtaatgatttt

SEQ ID NO: 30576 - DNA, 25 bp, Artificial
  Probe
tatgcttctttctcacaaatgaaat

SEQ ID NO: 30577 - DNA, 25 bp, Artificial
  Probe
gccttagaattgcctctgtgctcta

SEQ ID NO: 30578 - DNA, 25 bp, Artificial
  Probe
aaataaaatcccttagtttggcttt

SEQ ID NO: 30579 - DNA, 25 bp, Artificial
  Probe
gtgtggtgactgtgtattaattttc

SEQ ID NO: 30580 - DNA, 25 bp, Artificial
  Probe
ctttatgatctgaagaattttgggg

SEQ ID NO: 30581 - DNA, 25 bp, Artificial
  Probe
ccttagaattgcctctgtgctctaa

SEQ ID NO: 30582 - DNA, 25 bp, Artificial
  Probe
aaaatctatgcttctttctcacaaa

SEQ ID NO: 30583 - DNA, 25 bp, Artificial
  Probe
ttggtagttcttggtatagagaaat

SEQ ID NO: 30584 - DNA, 25 bp, Artificial
  Probe
gggcagaatgagtttgatttcactg

SEQ ID NO: 30585 - DNA, 25 bp, Artificial
  Probe
tgatgtctctggtggtagaattggg

SEQ ID NO: 30586 - DNA, 25 bp, Artificial
  Probe
gacatcaattcccaccgatttaccg

SEQ ID NO: 30587 - DNA, 25 bp, Artificial
  Probe
cgacatcaattcccaccgatttacc

SEQ ID NO: 30588 - DNA, 25 bp, Artificial
  Probe
gcgacatcaattcccaccgatttac

SEQ ID NO: 30589 - DNA, 25 bp, Artificial
  Probe
gatgtctctggtggtagaattgggg

SEQ ID NO: 30590 - DNA, 25 bp, Artificial
  Probe
ctctggtggtagaattggggctaga

SEQ ID NO: 30591 - DNA, 25 bp, Artificial
  Probe
tctctggtggtagaattggggctag

SEQ ID NO: 30592 - DNA, 25 bp, Artificial
  Probe
atcaattcccaccgatttaccggac

SEQ ID NO: 30593 - DNA, 25 bp, Artificial
  Probe
catcaattcccaccgatttaccgga

SEQ ID NO: 30594 - DNA, 25 bp, Artificial
  Probe
agagagattagagatgtcaagccat

SEQ ID NO: 30595 - DNA, 25 bp, Artificial
  Probe
gagagagattagagatgtcaagcca

SEQ ID NO: 30596 - DNA, 25 bp, Artificial
  Probe
atgagagagattagagatgtcaagc

SEQ ID NO: 30597 - DNA, 25 bp, Artificial
  Probe
tgagagagattagagatgtcaagcc

SEQ ID NO: 30598 - DNA, 25 bp, Artificial
  Probe
gagagattagagatgtcaagccatg

SEQ ID NO: 30599 - DNA, 25 bp, Artificial
  Probe
ccatgagagagattagagatgtcaa

SEQ ID NO: 30600 - DNA, 25 bp, Artificial
  Probe
catgagagagattagagatgtcaag

SEQ ID NO: 30601 - DNA, 25 bp, Artificial
  Probe
atcatcaactgtttcaccttcttct

SEQ ID NO: 30602 - DNA, 25 bp, Artificial
  Probe
catcatcaactgtttcaccttcttc

SEQ ID NO: 30603 - DNA, 25 bp, Artificial
  Probe
tcatcaactgtttcaccttcttctg

SEQ ID NO: 30604 - DNA, 25 bp, Artificial
  Probe
acatcatcaactgtttcaccttctt

SEQ ID NO: 30605 - DNA, 25 bp, Artificial
  Probe
tcccatgagagagattagagatgtc

SEQ ID NO: 30606 - DNA, 25 bp, Artificial
  Probe
gtcccatgagagagattagagatgt

SEQ ID NO: 30607 - DNA, 25 bp, Artificial
  Probe
aggtcccatgagagagattagagat

SEQ ID NO: 30608 - DNA, 25 bp, Artificial
  Probe
cacatcatcaactgtttcaccttct

SEQ ID NO: 30609 - DNA, 25 bp, Artificial
  Probe
cccatgagagagattagagatgtca

SEQ ID NO: 30610 - DNA, 25 bp, Artificial
  Probe
gacagcaactatgaagggaaggatt

SEQ ID NO: 30611 - DNA, 25 bp, Artificial
  Probe
ggtcccatgagagagattagagatg

SEQ ID NO: 30612 - DNA, 25 bp, Artificial
  Probe
catcaactgtttcaccttcttctgc

SEQ ID NO: 30613 - DNA, 25 bp, Artificial
  Probe
atcaactgtttcaccttcttctgct

SEQ ID NO: 30614 - DNA, 25 bp, Artificial
  Probe
acagcaactatgaagggaaggattc

SEQ ID NO: 30615 - DNA, 25 bp, Artificial
  Probe
caggtcccatgagagagattagaga

SEQ ID NO: 30616 - DNA, 25 bp, Artificial
  Probe
gaagacagcaactatgaagggaagg

SEQ ID NO: 30617 - DNA, 25 bp, Artificial
  Probe
ggaagacagcaactatgaagggaag

SEQ ID NO: 30618 - DNA, 25 bp, Artificial
  Probe
tcaactgtttcaccttcttctgctc

SEQ ID NO: 30619 - DNA, 25 bp, Artificial
  Probe
agacagcaactatgaagggaaggat

SEQ ID NO: 30620 - DNA, 25 bp, Artificial
  Probe
tcaggtcccatgagagagattagag

SEQ ID NO: 30621 - DNA, 25 bp, Artificial
  Probe
gcacatcatcaactgtttcaccttc

SEQ ID NO: 30622 - DNA, 25 bp, Artificial
  Probe
aagacagcaactatgaagggaagga

SEQ ID NO: 30623 - DNA, 25 bp, Artificial
  Probe
ctggaccaatctcactaagggaaga

SEQ ID NO: 30624 - DNA, 25 bp, Artificial
  Probe
tggaagacagcaactatgaagggaa

SEQ ID NO: 30625 - DNA, 25 bp, Artificial
  Probe
caaggaattgaaggtggtcttcttg

SEQ ID NO: 30626 - DNA, 25 bp, Artificial
  Probe
aaggaattgaaggtggtcttcttgg

SEQ ID NO: 30627 - DNA, 25 bp, Artificial
  Probe
ccaaggaattgaaggtggtcttctt

SEQ ID NO: 30628 - DNA, 25 bp, Artificial
  Probe
tggaccaatctcactaagggaagag

SEQ ID NO: 30629 - DNA, 25 bp, Artificial
  Probe
caactgtttcaccttcttctgctcc

SEQ ID NO: 30630 - DNA, 25 bp, Artificial
  Probe
ctcactaagggaagagaaacccaat

SEQ ID NO: 30631 - DNA, 25 bp, Artificial
  Probe
gagcttcctcatggtcttcagagtt

SEQ ID NO: 30632 - DNA, 25 bp, Artificial
  Probe
tcactaagggaagagaaacccaatg

SEQ ID NO: 30633 - DNA, 25 bp, Artificial
  Probe
caatctcactaagggaagagaaacc

SEQ ID NO: 30634 - DNA, 25 bp, Artificial
  Probe
ccaatctcactaagggaagagaaac

SEQ ID NO: 30635 - DNA, 25 bp, Artificial
  Probe
cttcctcatggtcttcagagtttgc

SEQ ID NO: 30636 - DNA, 25 bp, Artificial
  Probe
gcttcctcatggtcttcagagtttg

SEQ ID NO: 30637 - DNA, 25 bp, Artificial
  Probe
aactgtttcaccttcttctgctcca

SEQ ID NO: 30638 - DNA, 25 bp, Artificial
  Probe
accaatctcactaagggaagagaaa

SEQ ID NO: 30639 - DNA, 25 bp, Artificial
  Probe
atcagtgtatgctacgactagatgt

SEQ ID NO: 30640 - DNA, 25 bp, Artificial
  Probe
gatcagtgtatgctacgactagatg

SEQ ID NO: 30641 - DNA, 25 bp, Artificial
  Probe
agagaagagaagtacgagaaggaag

SEQ ID NO: 30642 - DNA, 25 bp, Artificial
  Probe
gagaagagaagtacgagaaggaagt

SEQ ID NO: 30643 - DNA, 25 bp, Artificial
  Probe
cagagaagagaagtacgagaaggaa

SEQ ID NO: 30644 - DNA, 25 bp, Artificial
  Probe
cagtgtatgctacgactagatgttg

SEQ ID NO: 30645 - DNA, 25 bp, Artificial
  Probe
tcagtgtatgctacgactagatgtt

SEQ ID NO: 30646 - DNA, 25 bp, Artificial
  Probe
agaagagaagtacgagaaggaagtg

SEQ ID NO: 30647 - DNA, 25 bp, Artificial
  Probe
agtgtatgctacgactagatgttgt

SEQ ID NO: 30648 - DNA, 25 bp, Artificial
  Probe
gtgtatgctacgactagatgttgtc

SEQ ID NO: 30649 - DNA, 25 bp, Artificial
  Probe
gtattccaagacccagtataaccaa

SEQ ID NO: 30650 - DNA, 25 bp, Artificial
  Probe
tattccaagacccagtataaccaag

SEQ ID NO: 30651 - DNA, 25 bp, Artificial
  Probe
tgtatgctacgactagatgttgtcc

SEQ ID NO: 30652 - DNA, 25 bp, Artificial
  Probe
attccaagacccagtataaccaagt

SEQ ID NO: 30653 - DNA, 25 bp, Artificial
  Probe
gtatgaatggcagaaattgtcagat

SEQ ID NO: 30654 - DNA, 25 bp, Artificial
  Probe
agtatgaatggcagaaattgtcaga

SEQ ID NO: 30655 - DNA, 25 bp, Artificial
  Probe
cagtatgaatggcagaaattgtcag

SEQ ID NO: 30656 - DNA, 25 bp, Artificial
  Probe
gaagagaagtacgagaaggaagtgc

SEQ ID NO: 30657 - DNA, 25 bp, Artificial
  Probe
tatgaatggcagaaattgtcagatt

SEQ ID NO: 30658 - DNA, 25 bp, Artificial
  Probe
gcagaaattgtcagattcccagaaa

SEQ ID NO: 30659 - DNA, 25 bp, Artificial
  Probe
agttctgagtattctgggacctaca

SEQ ID NO: 30660 - DNA, 25 bp, Artificial
  Probe
tgatcagtgtatgctacgactagat

SEQ ID NO: 30661 - DNA, 25 bp, Artificial
  Probe
gcagagaagagaagtacgagaagga

SEQ ID NO: 30662 - DNA, 25 bp, Artificial
  Probe
atgaatggcagaaattgtcagattc

SEQ ID NO: 30663 - DNA, 25 bp, Artificial
  Probe
gcagtatgaatggcagaaattgtca

SEQ ID NO: 30664 - DNA, 25 bp, Artificial
  Probe
aacgcagagaagagaagtacgagaa

SEQ ID NO: 30665 - DNA, 25 bp, Artificial
  Probe
gttctgagtattctgggacctacag

SEQ ID NO: 30666 - DNA, 25 bp, Artificial
  Probe
cagttctgagtattctgggacctac

SEQ ID NO: 30667 - DNA, 25 bp, Artificial
  Probe
ttccaagacccagtataaccaagtc

SEQ ID NO: 30668 - DNA, 25 bp, Artificial
  Probe
gagaagtacgagaaggaagtgcatc

SEQ ID NO: 30669 - DNA, 25 bp, Artificial
  Probe
ctgagtattctgggacctacagttg

SEQ ID NO: 30670 - DNA, 25 bp, Artificial
  Probe
tctgagtattctgggacctacagtt

SEQ ID NO: 30671 - DNA, 25 bp, Artificial
  Probe
ttctgagtattctgggacctacagt

SEQ ID NO: 30672 - DNA, 25 bp, Artificial
  Probe
ggtattccaagacccagtataacca

SEQ ID NO: 30673 - DNA, 25 bp, Artificial
  Probe
acgcagagaagagaagtacgagaag

SEQ ID NO: 30674 - DNA, 25 bp, Artificial
  Probe
agagaagtacgagaaggaagtgcat

SEQ ID NO: 30675 - DNA, 25 bp, Artificial
  Probe
tgaatggcagaaattgtcagattcc

SEQ ID NO: 30676 - DNA, 25 bp, Artificial
  Probe
gtatgctacgactagatgttgtccc

SEQ ID NO: 30677 - DNA, 25 bp, Artificial
  Probe
agaagtacgagaaggaagtgcatca

SEQ ID NO: 30678 - DNA, 25 bp, Artificial
  Probe
aagagaagtacgagaaggaagtgca

SEQ ID NO: 30679 - DNA, 25 bp, Artificial
  Probe
ggcagaaattgtcagattcccagaa

SEQ ID NO: 30680 - DNA, 25 bp, Artificial
  Probe
tatgctacgactagatgttgtccct

SEQ ID NO: 30681 - DNA, 25 bp, Artificial
  Probe
cagaaattgtcagattcccagaaaa

SEQ ID NO: 30682 - DNA, 25 bp, Artificial
  Probe
aaattgtcagattcccagaaaatgc

SEQ ID NO: 30683 - DNA, 25 bp, Artificial
  Probe
gaatggcagaaattgtcagattccc

SEQ ID NO: 30684 - DNA, 25 bp, Artificial
  Probe
cataggaaggaagaggagaagagaa

SEQ ID NO: 30685 - DNA, 25 bp, Artificial
  Probe
actctaatcatctgtgtataaggca

SEQ ID NO: 30686 - DNA, 25 bp, Artificial
  Probe
aacataggaaggaagaggagaagag

SEQ ID NO: 30687 - DNA, 25 bp, Artificial
  Probe
gaacataggaaggaagaggagaaga

SEQ ID NO: 30688 - DNA, 25 bp, Artificial
  Probe
tgaacataggaaggaagaggagaag

SEQ ID NO: 30689 - DNA, 25 bp, Artificial
  Probe
acataggaaggaagaggagaagaga

SEQ ID NO: 30690 - DNA, 25 bp, Artificial
  Probe
aatgagcagttcgttcactctaatc

SEQ ID NO: 30691 - DNA, 25 bp, Artificial
  Probe
gaatgagcagttcgttcactctaat

SEQ ID NO: 30692 - DNA, 25 bp, Artificial
  Probe
cagttcgttcactctaatcatctgt

SEQ ID NO: 30693 - DNA, 25 bp, Artificial
  Probe
gagcagttcgttcactctaatcatc

SEQ ID NO: 30694 - DNA, 25 bp, Artificial
  Probe
tctaatcatctgtgtataaggcagt

SEQ ID NO: 30695 - DNA, 25 bp, Artificial
  Probe
ttcgttcactctaatcatctgtgta

SEQ ID NO: 30696 - DNA, 25 bp, Artificial
  Probe
tcgttcactctaatcatctgtgtat

SEQ ID NO: 30697 - DNA, 25 bp, Artificial
  Probe
agttcgttcactctaatcatctgtg

SEQ ID NO: 30698 - DNA, 25 bp, Artificial
  Probe
agcagttcgttcactctaatcatct

SEQ ID NO: 30699 - DNA, 25 bp, Artificial
  Probe
gttcgttcactctaatcatctgtgt

SEQ ID NO: 30700 - DNA, 25 bp, Artificial
  Probe
tgttgaatgcttacatggtcttaac

SEQ ID NO: 30701 - DNA, 25 bp, Artificial
  Probe
ctctaatcatctgtgtataaggcag

SEQ ID NO: 30702 - DNA, 25 bp, Artificial
  Probe
cactctaatcatctgtgtataaggc

SEQ ID NO: 30703 - DNA, 25 bp, Artificial
  Probe
ctaatcatctgtgtataaggcagtt

SEQ ID NO: 30704 - DNA, 25 bp, Artificial
  Probe
tgagcagttcgttcactctaatcat

SEQ ID NO: 30705 - DNA, 25 bp, Artificial
  Probe
atgagcagttcgttcactctaatca

SEQ ID NO: 30706 - DNA, 25 bp, Artificial
  Probe
gcagttcgttcactctaatcatctg

SEQ ID NO: 30707 - DNA, 25 bp, Artificial
  Probe
ataggaaggaagaggagaagagaaa

SEQ ID NO: 30708 - DNA, 25 bp, Artificial
  Probe
tattgtcctggctaaatgtagttct

SEQ ID NO: 30709 - DNA, 25 bp, Artificial
  Probe
taacgcagagtcagatgtataaaga

SEQ ID NO: 30710 - DNA, 25 bp, Artificial
  Probe
attgtcctggctaaatgtagttctg

SEQ ID NO: 30711 - DNA, 25 bp, Artificial
  Probe
ctaacgcagagtcagatgtataaag

SEQ ID NO: 30712 - DNA, 25 bp, Artificial
  Probe
gtcttaaccactgtaaacaccaaat

SEQ ID NO: 30713 - DNA, 25 bp, Artificial
  Probe
gccgttcagtttactatattgtcct

SEQ ID NO: 30714 - DNA, 25 bp, Artificial
  Probe
atgccgttcagtttactatattgtc

SEQ ID NO: 30715 - DNA, 25 bp, Artificial
  Probe
gatgccgttcagtttactatattgt

SEQ ID NO: 30716 - DNA, 25 bp, Artificial
  Probe
agagctgtagatagaggacaagata

SEQ ID NO: 30717 - DNA, 25 bp, Artificial
  Probe
gttgaatgcttacatggtcttaacc

SEQ ID NO: 30718 - DNA, 25 bp, Artificial
  Probe
cgttcactctaatcatctgtgtata

SEQ ID NO: 30719 - DNA, 25 bp, Artificial
  Probe
atcatctgtgtataaggcagttatt

SEQ ID NO: 30720 - DNA, 25 bp, Artificial
  Probe
aatcatctgtgtataaggcagttat

SEQ ID NO: 30721 - DNA, 25 bp, Artificial
  Probe
tgccgttcagtttactatattgtcc

SEQ ID NO: 30722 - DNA, 25 bp, Artificial
  Probe
gtgtataaggcagttatttcagtgg

SEQ ID NO: 30723 - DNA, 25 bp, Artificial
  Probe
gagagctgtagatagaggacaagat

SEQ ID NO: 30724 - DNA, 25 bp, Artificial
  Probe
tgtataaggcagttatttcagtggg

SEQ ID NO: 30725 - DNA, 25 bp, Artificial
  Probe
gaaacaaacgccttctttaacagat

SEQ ID NO: 30726 - DNA, 25 bp, Artificial
  Probe
tctaacgcagagtcagatgtataaa

SEQ ID NO: 30727 - DNA, 25 bp, Artificial
  Probe
aggtaggtttattggaaattgaggc

SEQ ID NO: 30728 - DNA, 25 bp, Artificial
  Probe
aaacaaacgccttctttaacagatg

SEQ ID NO: 30729 - DNA, 25 bp, Artificial
  Probe
atatgtggtaggctatattgactcc

SEQ ID NO: 30730 - DNA, 25 bp, Artificial
  Probe
tatgtggtaggctatattgactcca

SEQ ID NO: 30731 - DNA, 25 bp, Artificial
  Probe
aatatggtctatccttccagagttg

SEQ ID NO: 30732 - DNA, 25 bp, Artificial
  Probe
atgtggtaggctatattgactccaa

SEQ ID NO: 30733 - DNA, 25 bp, Artificial
  Probe
atatggtctatccttccagagttgg

SEQ ID NO: 30734 - DNA, 25 bp, Artificial
  Probe
tatatgtggtaggctatattgactc

SEQ ID NO: 30735 - DNA, 25 bp, Artificial
  Probe
atattgactccaaattcatcagcct

SEQ ID NO: 30736 - DNA, 25 bp, Artificial
  Probe
ttagtcaagagcatttctcctttca

SEQ ID NO: 30737 - DNA, 25 bp, Artificial
  Probe
cttagtcaagagcatttctcctttc

SEQ ID NO: 30738 - DNA, 25 bp, Artificial
  Probe
ggtaggctatattgactccaaattc

SEQ ID NO: 30739 - DNA, 25 bp, Artificial
  Probe
tagtcaagagcatttctcctttcag

SEQ ID NO: 30740 - DNA, 25 bp, Artificial
  Probe
tattgactccaaattcatcagcctc

SEQ ID NO: 30741 - DNA, 25 bp, Artificial
  Probe
ccttagtcaagagcatttctccttt

SEQ ID NO: 30742 - DNA, 25 bp, Artificial
  Probe
gttatatgtggtaggctatattgac

SEQ ID NO: 30743 - DNA, 25 bp, Artificial
  Probe
tatattgactccaaattcatcagcc

SEQ ID NO: 30744 - DNA, 25 bp, Artificial
  Probe
ggctatattgactccaaattcatca

SEQ ID NO: 30745 - DNA, 25 bp, Artificial
  Probe
aggctatattgactccaaattcatc

SEQ ID NO: 30746 - DNA, 25 bp, Artificial
  Probe
ttatatgtggtaggctatattgact

SEQ ID NO: 30747 - DNA, 25 bp, Artificial
  Probe
agttatatgtggtaggctatattga

SEQ ID NO: 30748 - DNA, 25 bp, Artificial
  Probe
gtaggctatattgactccaaattca

SEQ ID NO: 30749 - DNA, 25 bp, Artificial
  Probe
ggcattccgtcctaacaatatttaa

SEQ ID NO: 30750 - DNA, 25 bp, Artificial
  Probe
ttaaatatcaggctggtagggttcg

SEQ ID NO: 30751 - DNA, 25 bp, Artificial
  Probe
tttaaatatcaggctggtagggttc

SEQ ID NO: 30752 - DNA, 25 bp, Artificial
  Probe
caatgaacgctaattcctggtcctc

SEQ ID NO: 30753 - DNA, 25 bp, Artificial
  Probe
gtggtaggctatattgactccaaat

SEQ ID NO: 30754 - DNA, 25 bp, Artificial
  Probe
ctatattgactccaaattcatcagc

SEQ ID NO: 30755 - DNA, 25 bp, Artificial
  Probe
gctatattgactccaaattcatcag

SEQ ID NO: 30756 - DNA, 25 bp, Artificial
  Probe
tggtaggctatattgactccaaatt

SEQ ID NO: 30757 - DNA, 25 bp, Artificial
  Probe
attgactccaaattcatcagcctct

SEQ ID NO: 30758 - DNA, 25 bp, Artificial
  Probe
cccttaaatatggtctatccttcca

SEQ ID NO: 30759 - DNA, 25 bp, Artificial
  Probe
aaatatggtctatccttccagagtt

SEQ ID NO: 30760 - DNA, 25 bp, Artificial
  Probe
tgtggtaggctatattgactccaaa

SEQ ID NO: 30761 - DNA, 25 bp, Artificial
  Probe
taggctatattgactccaaattcat

SEQ ID NO: 30762 - DNA, 25 bp, Artificial
  Probe
aagttatatgtggtaggctatattg

SEQ ID NO: 30763 - DNA, 25 bp, Artificial
  Probe
gcattccgtcctaacaatatttaaa

SEQ ID NO: 30764 - DNA, 25 bp, Artificial
  Probe
taaatatggtctatccttccagagt

SEQ ID NO: 30765 - DNA, 25 bp, Artificial
  Probe
ccttaaatatggtctatccttccag

SEQ ID NO: 30766 - DNA, 25 bp, Artificial
  Probe
ttgactccaaattcatcagcctctc

SEQ ID NO: 30767 - DNA, 25 bp, Artificial
  Probe
gccttagtcaagagcatttctcctt

SEQ ID NO: 30768 - DNA, 25 bp, Artificial
  Probe
ccccttaaatatggtctatccttcc

SEQ ID NO: 30769 - DNA, 25 bp, Artificial
  Probe
agtcaagagcatttctcctttcagg

SEQ ID NO: 30770 - DNA, 25 bp, Artificial
  Probe
gactccaaattcatcagcctctctg

SEQ ID NO: 30771 - DNA, 25 bp, Artificial
  Probe
taaatatcaggctggtagggttcgg

SEQ ID NO: 30772 - DNA, 25 bp, Artificial
  Probe
aatgaacgctaattcctggtcctcc

SEQ ID NO: 30773 - DNA, 25 bp, Artificial
  Probe
tgactccaaattcatcagcctctct

SEQ ID NO: 30774 - DNA, 25 bp, Artificial
  Probe
tatatctgtgtggtgtttaatgctg

SEQ ID NO: 30775 - DNA, 25 bp, Artificial
  Probe
atatctgtgtggtgtttaatgctgg

SEQ ID NO: 30776 - DNA, 25 bp, Artificial
  Probe
ttctcactatggatgtaccttataa

SEQ ID NO: 30777 - DNA, 25 bp, Artificial
  Probe
cactatggatgtaccttataaatgc

SEQ ID NO: 30778 - DNA, 25 bp, Artificial
  Probe
tatctgtgtggtgtttaatgctggc

SEQ ID NO: 30779 - DNA, 25 bp, Artificial
  Probe
actatggatgtaccttataaatgca

SEQ ID NO: 30780 - DNA, 25 bp, Artificial
  Probe
tttctcactatggatgtaccttata

SEQ ID NO: 30781 - DNA, 25 bp, Artificial
  Probe
tctcactatggatgtaccttataaa

SEQ ID NO: 30782 - DNA, 25 bp, Artificial
  Probe
tagcaggactctgagttttgactaa

SEQ ID NO: 30783 - DNA, 25 bp, Artificial
  Probe
ttagcaggactctgagttttgacta

SEQ ID NO: 30784 - DNA, 25 bp, Artificial
  Probe
gattagcaggactctgagttttgac

SEQ ID NO: 30785 - DNA, 25 bp, Artificial
  Probe
agattagcaggactctgagttttga

SEQ ID NO: 30786 - DNA, 25 bp, Artificial
  Probe
gaatcttttgtgtttcttcaagttt

SEQ ID NO: 30787 - DNA, 25 bp, Artificial
  Probe
attagcaggactctgagttttgact

SEQ ID NO: 30788 - DNA, 25 bp, Artificial
  Probe
gactttattttctcactatggatgt

SEQ ID NO: 30789 - DNA, 25 bp, Artificial
  Probe
tcactatggatgtaccttataaatg

SEQ ID NO: 30790 - DNA, 25 bp, Artificial
  Probe
ttttctcactatggatgtaccttat

SEQ ID NO: 30791 - DNA, 25 bp, Artificial
  Probe
attttctcactatggatgtacctta

SEQ ID NO: 30792 - DNA, 25 bp, Artificial
  Probe
tattttctcactatggatgtacctt

SEQ ID NO: 30793 - DNA, 25 bp, Artificial
  Probe
ttattttctcactatggatgtacct

SEQ ID NO: 30794 - DNA, 25 bp, Artificial
  Probe
ctcactatggatgtaccttataaat

SEQ ID NO: 30795 - DNA, 25 bp, Artificial
  Probe
cattcattgttagctgattcgaaat

SEQ ID NO: 30796 - DNA, 25 bp, Artificial
  Probe
aatcttttgtgtttcttcaagtttt

SEQ ID NO: 30797 - DNA, 25 bp, Artificial
  Probe
agactttattttctcactatggatg

SEQ ID NO: 30798 - DNA, 25 bp, Artificial
  Probe
tttattttctcactatggatgtacc

SEQ ID NO: 30799 - DNA, 25 bp, Artificial
  Probe
agaatcttttgtgtttcttcaagtt

SEQ ID NO: 30800 - DNA, 25 bp, Artificial
  Probe
attgttagctgattcgaaatgatat

SEQ ID NO: 30801 - DNA, 25 bp, Artificial
  Probe
attcattgttagctgattcgaaatg

SEQ ID NO: 30802 - DNA, 25 bp, Artificial
  Probe
aagactttattttctcactatggat

SEQ ID NO: 30803 - DNA, 25 bp, Artificial
  Probe
catcaggacagactcttctggacac

SEQ ID NO: 30804 - DNA, 25 bp, Artificial
  Probe
tagaatcttttgtgtttcttcaagt

SEQ ID NO: 30805 - DNA, 25 bp, Artificial
  Probe
actttattttctcactatggatgta

SEQ ID NO: 30806 - DNA, 25 bp, Artificial
  Probe
cattgttagctgattcgaaatgata

SEQ ID NO: 30807 - DNA, 25 bp, Artificial
  Probe
tgttagctgattcgaaatgatataa

SEQ ID NO: 30808 - DNA, 25 bp, Artificial
  Probe
ttgttagctgattcgaaatgatata

SEQ ID NO: 30809 - DNA, 25 bp, Artificial
  Probe
cagattagcaggactctgagttttg

SEQ ID NO: 30810 - DNA, 25 bp, Artificial
  Probe
ctatggatgtaccttataaatgcat

SEQ ID NO: 30811 - DNA, 25 bp, Artificial
  Probe
ctttattttctcactatggatgtac

SEQ ID NO: 30812 - DNA, 25 bp, Artificial
  Probe
taagactttattttctcactatgga

SEQ ID NO: 30813 - DNA, 25 bp, Artificial
  Probe
caatagaatcttttgtgtttcttca

SEQ ID NO: 30814 - DNA, 25 bp, Artificial
  Probe
atagaatcttttgtgtttcttcaag

SEQ ID NO: 30815 - DNA, 25 bp, Artificial
  Probe
gttagctgattcgaaatgatataaa

SEQ ID NO: 30816 - DNA, 25 bp, Artificial
  Probe
acgtgtacaatagaatcttttgtgt

SEQ ID NO: 30817 - DNA, 25 bp, Artificial
  Probe
acaatagaatcttttgtgtttcttc

SEQ ID NO: 30818 - DNA, 25 bp, Artificial
  Probe
aatagaatcttttgtgtttcttcaa

SEQ ID NO: 30819 - DNA, 25 bp, Artificial
  Probe
atgaacatacattcttcttctggtg

SEQ ID NO: 30820 - DNA, 25 bp, Artificial
  Probe
acatacattcttcttctggtgtcaa

SEQ ID NO: 30821 - DNA, 25 bp, Artificial
  Probe
aacatacattcttcttctggtgtca

SEQ ID NO: 30822 - DNA, 25 bp, Artificial
  Probe
tgaacatacattcttcttctggtgt

SEQ ID NO: 30823 - DNA, 25 bp, Artificial
  Probe
gaacatacattcttcttctggtgtc

SEQ ID NO: 30824 - DNA, 25 bp, Artificial
  Probe
gtaagaactggtcagaagatgatct

SEQ ID NO: 30825 - DNA, 25 bp, Artificial
  Probe
agtaagaactggtcagaagatgatc

SEQ ID NO: 30826 - DNA, 25 bp, Artificial
  Probe
tatgaacatacattcttcttctggt

SEQ ID NO: 30827 - DNA, 25 bp, Artificial
  Probe
catacattcttcttctggtgtcaaa

SEQ ID NO: 30828 - DNA, 25 bp, Artificial
  Probe
atatgaacatacattcttcttctgg

SEQ ID NO: 30829 - DNA, 25 bp, Artificial
  Probe
taattaaggctgtcaatctcttccc

SEQ ID NO: 30830 - DNA, 25 bp, Artificial
  Probe
ccagatgggaagtcattgctaatta

SEQ ID NO: 30831 - DNA, 25 bp, Artificial
  Probe
cagatgggaagtcattgctaattat

SEQ ID NO: 30832 - DNA, 25 bp, Artificial
  Probe
ttaattaaggctgtcaatctcttcc

SEQ ID NO: 30833 - DNA, 25 bp, Artificial
  Probe
tccagatgggaagtcattgctaatt

SEQ ID NO: 30834 - DNA, 25 bp, Artificial
  Probe
taagaactggtcagaagatgatctg

SEQ ID NO: 30835 - DNA, 25 bp, Artificial
  Probe
agatgggaagtcattgctaattata

SEQ ID NO: 30836 - DNA, 25 bp, Artificial
  Probe
ctccagatgggaagtcattgctaat

SEQ ID NO: 30837 - DNA, 25 bp, Artificial
  Probe
gacaaactccagatgggaagtcatt

SEQ ID NO: 30838 - DNA, 25 bp, Artificial
  Probe
atgggaagtcattgctaattatatg

SEQ ID NO: 30839 - DNA, 25 bp, Artificial
  Probe
cagtaagaactggtcagaagatgat

SEQ ID NO: 30840 - DNA, 25 bp, Artificial
  Probe
ctgcaattattaattaaggctgtca

SEQ ID NO: 30841 - DNA, 25 bp, Artificial
  Probe
tggtcagaagatgatctgcaattat

SEQ ID NO: 30842 - DNA, 25 bp, Artificial
  Probe
acaaactccagatgggaagtcattg

SEQ ID NO: 30843 - DNA, 25 bp, Artificial
  Probe
ctggtcagaagatgatctgcaatta

SEQ ID NO: 30844 - DNA, 25 bp, Artificial
  Probe
gatgggaagtcattgctaattatat

SEQ ID NO: 30845 - DNA, 25 bp, Artificial
  Probe
tctgcaattattaattaaggctgtc

SEQ ID NO: 30846 - DNA, 25 bp, Artificial
  Probe
tacattcttcttctggtgtcaaaag

SEQ ID NO: 30847 - DNA, 25 bp, Artificial
  Probe
ggtcagaagatgatctgcaattatt

SEQ ID NO: 30848 - DNA, 25 bp, Artificial
  Probe
attaattaaggctgtcaatctcttc

SEQ ID NO: 30849 - DNA, 25 bp, Artificial
  Probe
tgcaattattaattaaggctgtcaa

SEQ ID NO: 30850 - DNA, 25 bp, Artificial
  Probe
atacattcttcttctggtgtcaaaa

SEQ ID NO: 30851 - DNA, 25 bp, Artificial
  Probe
aagaactggtcagaagatgatctgc

SEQ ID NO: 30852 - DNA, 25 bp, Artificial
  Probe
actccagatgggaagtcattgctaa

SEQ ID NO: 30853 - DNA, 25 bp, Artificial
  Probe
aactccagatgggaagtcattgcta

SEQ ID NO: 30854 - DNA, 25 bp, Artificial
  Probe
tgggaagtcattgctaattatatga

SEQ ID NO: 30855 - DNA, 25 bp, Artificial
  Probe
atctgcaattattaattaaggctgt

SEQ ID NO: 30856 - DNA, 25 bp, Artificial
  Probe
aattaaggctgtcaatctcttcccc

SEQ ID NO: 30857 - DNA, 25 bp, Artificial
  Probe
actggtcagaagatgatctgcaatt

SEQ ID NO: 30858 - DNA, 25 bp, Artificial
  Probe
aactggtcagaagatgatctgcaat

SEQ ID NO: 30859 - DNA, 25 bp, Artificial
  Probe
ggaagtcattgctaattatatgaac

SEQ ID NO: 30860 - DNA, 25 bp, Artificial
  Probe
tgatctgcaattattaattaaggct

SEQ ID NO: 30861 - DNA, 25 bp, Artificial
  Probe
gatctgcaattattaattaaggctg

SEQ ID NO: 30862 - DNA, 25 bp, Artificial
  Probe
acattcttcttctggtgtcaaaaga

SEQ ID NO: 30863 - DNA, 25 bp, Artificial
  Probe
gcaattattaattaaggctgtcaat

SEQ ID NO: 30864 - DNA, 25 bp, Artificial
  Probe
aagtttgacaggatttgggatagag

SEQ ID NO: 30865 - DNA, 25 bp, Artificial
  Probe
caagtttgacaggatttgggataga

SEQ ID NO: 30866 - DNA, 25 bp, Artificial
  Probe
tttgacaggatttgggatagaggag

SEQ ID NO: 30867 - DNA, 25 bp, Artificial
  Probe
gtttgacaggatttgggatagagga

SEQ ID NO: 30868 - DNA, 25 bp, Artificial
  Probe
agtttgacaggatttgggatagagg

SEQ ID NO: 30869 - DNA, 25 bp, Artificial
  Probe
gcaagtttgacaggatttgggatag

SEQ ID NO: 30870 - DNA, 25 bp, Artificial
  Probe
caggatttgggatagaggagcattg

SEQ ID NO: 30871 - DNA, 25 bp, Artificial
  Probe
gatttgggatagaggagcattggtg

SEQ ID NO: 30872 - DNA, 25 bp, Artificial
  Probe
acaggatttgggatagaggagcatt

SEQ ID NO: 30873 - DNA, 25 bp, Artificial
  Probe
catttccttatactgttgcagcatt

SEQ ID NO: 30874 - DNA, 25 bp, Artificial
  Probe
atttccttatactgttgcagcattt

SEQ ID NO: 30875 - DNA, 25 bp, Artificial
  Probe
ggcaagtttgacaggatttgggata

SEQ ID NO: 30876 - DNA, 25 bp, Artificial
  Probe
acatttccttatactgttgcagcat

SEQ ID NO: 30877 - DNA, 25 bp, Artificial
  Probe
gacaggatttgggatagaggagcat

SEQ ID NO: 30878 - DNA, 25 bp, Artificial
  Probe
tcttatgatccaacaaaacacacag

SEQ ID NO: 30879 - DNA, 25 bp, Artificial
  Probe
cttatgatccaacaaaacacacagg

SEQ ID NO: 30880 - DNA, 25 bp, Artificial
  Probe
ttcttatgatccaacaaaacacaca

SEQ ID NO: 30881 - DNA, 25 bp, Artificial
  Probe
aacatcggcaagtttgacaggattt

SEQ ID NO: 30882 - DNA, 25 bp, Artificial
  Probe
aggatttgggatagaggagcattgg

SEQ ID NO: 30883 - DNA, 25 bp, Artificial
  Probe
ttgacaggatttgggatagaggagc

SEQ ID NO: 30884 - DNA, 25 bp, Artificial
  Probe
cctttcttatgatccaacaaaacac

SEQ ID NO: 30885 - DNA, 25 bp, Artificial
  Probe
tcctttcttatgatccaacaaaaca

SEQ ID NO: 30886 - DNA, 25 bp, Artificial
  Probe
acccagtcaatccctgtaagagttt

SEQ ID NO: 30887 - DNA, 25 bp, Artificial
  Probe
gtcctttcttatgatccaacaaaac

SEQ ID NO: 30888 - DNA, 25 bp, Artificial
  Probe
tttcttatgatccaacaaaacacac

SEQ ID NO: 30889 - DNA, 25 bp, Artificial
  Probe
ctttcttatgatccaacaaaacaca

SEQ ID NO: 30890 - DNA, 25 bp, Artificial
  Probe
aaacacccagtcaatccctgtaaga

SEQ ID NO: 30891 - DNA, 25 bp, Artificial
  Probe
ttgtcctttcttatgatccaacaaa

SEQ ID NO: 30892 - DNA, 25 bp, Artificial
  Probe
ggatttgggatagaggagcattggt

SEQ ID NO: 30893 - DNA, 25 bp, Artificial
  Probe
tgtcctttcttatgatccaacaaaa

SEQ ID NO: 30894 - DNA, 25 bp, Artificial
  Probe
cttgaggaggtggatgctcttgaag

SEQ ID NO: 30895 - DNA, 25 bp, Artificial
  Probe
ttatgatccaacaaaacacacaggc

SEQ ID NO: 30896 - DNA, 25 bp, Artificial
  Probe
atttgggatagaggagcattggtgg

SEQ ID NO: 30897 - DNA, 25 bp, Artificial
  Probe
gttgtcctttcttatgatccaacaa

SEQ ID NO: 30898 - DNA, 25 bp, Artificial
  Probe
acatcggcaagtttgacaggatttg

SEQ ID NO: 30899 - DNA, 25 bp, Artificial
  Probe
cacccagtcaatccctgtaagagtt

SEQ ID NO: 30900 - DNA, 25 bp, Artificial
  Probe
aacacccagtcaatccctgtaagag

SEQ ID NO: 30901 - DNA, 25 bp, Artificial
  Probe
ggttgtcctttcttatgatccaaca

SEQ ID NO: 30902 - DNA, 25 bp, Artificial
  Probe
tggttgtcctttcttatgatccaac

SEQ ID NO: 30903 - DNA, 25 bp, Artificial
  Probe
gaacatttccttatactgttgcagc

SEQ ID NO: 30904 - DNA, 25 bp, Artificial
  Probe
gagttccaagacagccaggatacac

SEQ ID NO: 30905 - DNA, 25 bp, Artificial
  Probe
gtgagttccaagacagccaggatac

SEQ ID NO: 30906 - DNA, 25 bp, Artificial
  Probe
aacatttccttatactgttgcagca

SEQ ID NO: 30907 - DNA, 25 bp, Artificial
  Probe
aggaggtggatgctcttgaagaaag

SEQ ID NO: 30908 - DNA, 25 bp, Artificial
  Probe
gaggaggtggatgctcttgaagaaa

SEQ ID NO: 30909 - DNA, 25 bp, Artificial
  Probe
ctgcctttaatttatcgtgcttact

SEQ ID NO: 30910 - DNA, 25 bp, Artificial
  Probe
atgtgttccctgcctttaatttatc

SEQ ID NO: 30911 - DNA, 25 bp, Artificial
  Probe
cctgcctttaatttatcgtgcttac

SEQ ID NO: 30912 - DNA, 25 bp, Artificial
  Probe
tgcctttaatttatcgtgcttacta

SEQ ID NO: 30913 - DNA, 25 bp, Artificial
  Probe
ccctgcctttaatttatcgtgctta

SEQ ID NO: 30914 - DNA, 25 bp, Artificial
  Probe
tgttccctgcctttaatttatcgtg

SEQ ID NO: 30915 - DNA, 25 bp, Artificial
  Probe
gtgttccctgcctttaatttatcgt

SEQ ID NO: 30916 - DNA, 25 bp, Artificial
  Probe
tgtgttccctgcctttaatttatcg

SEQ ID NO: 30917 - DNA, 25 bp, Artificial
  Probe
catgtgttccctgcctttaatttat

SEQ ID NO: 30918 - DNA, 25 bp, Artificial
  Probe
aaatacagcacacattcggacaaag

SEQ ID NO: 30919 - DNA, 25 bp, Artificial
  Probe
ccatgtgttccctgcctttaattta

SEQ ID NO: 30920 - DNA, 25 bp, Artificial
  Probe
gcctttaatttatcgtgcttactat

SEQ ID NO: 30921 - DNA, 25 bp, Artificial
  Probe
tccctgcctttaatttatcgtgctt

SEQ ID NO: 30922 - DNA, 25 bp, Artificial
  Probe
ttccctgcctttaatttatcgtgct

SEQ ID NO: 30923 - DNA, 25 bp, Artificial
  Probe
gttccctgcctttaatttatcgtgc

SEQ ID NO: 30924 - DNA, 25 bp, Artificial
  Probe
aatacagcacacattcggacaaaga

SEQ ID NO: 30925 - DNA, 25 bp, Artificial
  Probe
atacagcacacattcggacaaagaa

SEQ ID NO: 30926 - DNA, 25 bp, Artificial
  Probe
ttaatttatcgtgcttactatggag

SEQ ID NO: 30927 - DNA, 25 bp, Artificial
  Probe
aatttatcgtgcttactatggagcc

SEQ ID NO: 30928 - DNA, 25 bp, Artificial
  Probe
taatttatcgtgcttactatggagc

SEQ ID NO: 30929 - DNA, 25 bp, Artificial
  Probe
atttatcgtgcttactatggagcct

SEQ ID NO: 30930 - DNA, 25 bp, Artificial
  Probe
accatgtgttccctgcctttaattt

SEQ ID NO: 30931 - DNA, 25 bp, Artificial
  Probe
ttatcgtgcttactatggagccttt

SEQ ID NO: 30932 - DNA, 25 bp, Artificial
  Probe
tttatcgtgcttactatggagcctt

SEQ ID NO: 30933 - DNA, 25 bp, Artificial
  Probe
tttaatttatcgtgcttactatgga

SEQ ID NO: 30934 - DNA, 25 bp, Artificial
  Probe
tacagcacacattcggacaaagaac

SEQ ID NO: 30935 - DNA, 25 bp, Artificial
  Probe
aaaatacagcacacattcggacaaa

SEQ ID NO: 30936 - DNA, 25 bp, Artificial
  Probe
ctttaatttatcgtgcttactatgg

SEQ ID NO: 30937 - DNA, 25 bp, Artificial
  Probe
cctttaatttatcgtgcttactatg

SEQ ID NO: 30938 - DNA, 25 bp, Artificial
  Probe
gaaaatacagcacacattcggacaa

SEQ ID NO: 30939 - DNA, 25 bp, Artificial
  Probe
acattcggacaaagaactgtggttg

SEQ ID NO: 30940 - DNA, 25 bp, Artificial
  Probe
ctgtggttggaaaagccttacaatt

SEQ ID NO: 30941 - DNA, 25 bp, Artificial
  Probe
aagaactgtggttggaaaagcctta

SEQ ID NO: 30942 - DNA, 25 bp, Artificial
  Probe
aagccttacaattgaaatccttaaa

SEQ ID NO: 30943 - DNA, 25 bp, Artificial
  Probe
aaagccttacaattgaaatccttaa

SEQ ID NO: 30944 - DNA, 25 bp, Artificial
  Probe
ccctgaaagagcatttacttttctt

SEQ ID NO: 30945 - DNA, 25 bp, Artificial
  Probe
caccatgtgttccctgcctttaatt

SEQ ID NO: 30946 - DNA, 25 bp, Artificial
  Probe
ggacaaagaactgtggttggaaaag

SEQ ID NO: 30947 - DNA, 25 bp, Artificial
  Probe
tgaaagagcatttacttttcttcca

SEQ ID NO: 30948 - DNA, 25 bp, Artificial
  Probe
tgaaaatacagcacacattcggaca

SEQ ID NO: 30949 - DNA, 25 bp, Artificial
  Probe
agagcatttacttttcttccagaag

SEQ ID NO: 30950 - DNA, 25 bp, Artificial
  Probe
aagagcatttacttttcttccagaa

SEQ ID NO: 30951 - DNA, 25 bp, Artificial
  Probe
aaagagcatttacttttcttccaga

SEQ ID NO: 30952 - DNA, 25 bp, Artificial
  Probe
ctgaaaatacagcacacattcggac

SEQ ID NO: 30953 - DNA, 25 bp, Artificial
  Probe
gaaagagcatttacttttcttccag

SEQ ID NO: 30954 - DNA, 25 bp, Artificial
  Probe
gagcatcttcagactattacctacc

SEQ ID NO: 30955 - DNA, 25 bp, Artificial
  Probe
gcatcttcagactattacctaccag

SEQ ID NO: 30956 - DNA, 25 bp, Artificial
  Probe
agcatcttcagactattacctacca

SEQ ID NO: 30957 - DNA, 25 bp, Artificial
  Probe
gttaggatgccattcacaatcatta

SEQ ID NO: 30958 - DNA, 25 bp, Artificial
  Probe
taggatgccattcacaatcattatg

SEQ ID NO: 30959 - DNA, 25 bp, Artificial
  Probe
ctattacctaccagtattgtccaga

SEQ ID NO: 30960 - DNA, 25 bp, Artificial
  Probe
agagcatcttcagactattacctac

SEQ ID NO: 30961 - DNA, 25 bp, Artificial
  Probe
tattacctaccagtattgtccagaa

SEQ ID NO: 30962 - DNA, 25 bp, Artificial
  Probe
ttaggatgccattcacaatcattat

SEQ ID NO: 30963 - DNA, 25 bp, Artificial
  Probe
actattacctaccagtattgtccag

SEQ ID NO: 30964 - DNA, 25 bp, Artificial
  Probe
catcttcagactattacctaccagt

SEQ ID NO: 30965 - DNA, 25 bp, Artificial
  Probe
ttagagcatcttcagactattacct

SEQ ID NO: 30966 - DNA, 25 bp, Artificial
  Probe
aggatgccattcacaatcattatga

SEQ ID NO: 30967 - DNA, 25 bp, Artificial
  Probe
cgttaggatgccattcacaatcatt

SEQ ID NO: 30968 - DNA, 25 bp, Artificial
  Probe
gactattacctaccagtattgtcca

SEQ ID NO: 30969 - DNA, 25 bp, Artificial
  Probe
tcagactattacctaccagtattgt

SEQ ID NO: 30970 - DNA, 25 bp, Artificial
  Probe
agactattacctaccagtattgtcc

SEQ ID NO: 30971 - DNA, 25 bp, Artificial
  Probe
atgacctatgctgttactctggaac

SEQ ID NO: 30972 - DNA, 25 bp, Artificial
  Probe
tagagcatcttcagactattaccta

SEQ ID NO: 30973 - DNA, 25 bp, Artificial
  Probe
ttgtaatgtctgcctgattcaccat

SEQ ID NO: 30974 - DNA, 25 bp, Artificial
  Probe
tcttcagactattacctaccagtat

SEQ ID NO: 30975 - DNA, 25 bp, Artificial
  Probe
atcttcagactattacctaccagta

SEQ ID NO: 30976 - DNA, 25 bp, Artificial
  Probe
ttacctaccagtattgtccagaaac

SEQ ID NO: 30977 - DNA, 25 bp, Artificial
  Probe
cagactattacctaccagtattgtc

SEQ ID NO: 30978 - DNA, 25 bp, Artificial
  Probe
catgacctatgctgttactctggaa

SEQ ID NO: 30979 - DNA, 25 bp, Artificial
  Probe
attacctaccagtattgtccagaaa

SEQ ID NO: 30980 - DNA, 25 bp, Artificial
  Probe
tcctccatctgaactgactgaagaa

SEQ ID NO: 30981 - DNA, 25 bp, Artificial
  Probe
ttcctccatctgaactgactgaaga

SEQ ID NO: 30982 - DNA, 25 bp, Artificial
  Probe
attatgaactttgggtgtgtctgtc

SEQ ID NO: 30983 - DNA, 25 bp, Artificial
  Probe
ttcagactattacctaccagtattg

SEQ ID NO: 30984 - DNA, 25 bp, Artificial
  Probe
cattatgaactttgggtgtgtctgt

SEQ ID NO: 30985 - DNA, 25 bp, Artificial
  Probe
aacggactatatactgaaaggtgag

SEQ ID NO: 30986 - DNA, 25 bp, Artificial
  Probe
tacctaccagtattgtccagaaact

SEQ ID NO: 30987 - DNA, 25 bp, Artificial
  Probe
cttcagactattacctaccagtatt

SEQ ID NO: 30988 - DNA, 25 bp, Artificial
  Probe
tcaatcaaatcagcggcatttaata

SEQ ID NO: 30989 - DNA, 25 bp, Artificial
  Probe
ttcaatcaaatcagcggcatttaat

SEQ ID NO: 30990 - DNA, 25 bp, Artificial
  Probe
tttcaatcaaatcagcggcatttaa

SEQ ID NO: 30991 - DNA, 25 bp, Artificial
  Probe
aatcattatgaactttgggtgtgtc

SEQ ID NO: 30992 - DNA, 25 bp, Artificial
  Probe
caatcattatgaactttgggtgtgt

SEQ ID NO: 30993 - DNA, 25 bp, Artificial
  Probe
cggactatatactgaaaggtgagtt

SEQ ID NO: 30994 - DNA, 25 bp, Artificial
  Probe
atcattatgaactttgggtgtgtct

SEQ ID NO: 30995 - DNA, 25 bp, Artificial
  Probe
ttgttaactgactgtatgctgagag

SEQ ID NO: 30996 - DNA, 25 bp, Artificial
  Probe
acggactatatactgaaaggtgagt

SEQ ID NO: 30997 - DNA, 25 bp, Artificial
  Probe
caatcaaatcagcggcatttaataa

SEQ ID NO: 30998 - DNA, 25 bp, Artificial
  Probe
taacggactatatactgaaaggtga

SEQ ID NO: 30999 - DNA, 25 bp, Artificial
  Probe
aataagcgtagccacattactgttc

SEQ ID NO: 31000 - DNA, 25 bp, Artificial
  Probe
gcaggtgcatgtatctacttctatt

SEQ ID NO: 31001 - DNA, 25 bp, Artificial
  Probe
cgtgatttgggtttggaatactatg

SEQ ID NO: 31002 - DNA, 25 bp, Artificial
  Probe
aatcaaataagcgtagccacattac

SEQ ID NO: 31003 - DNA, 25 bp, Artificial
  Probe
aaatcaaataagcgtagccacatta

SEQ ID NO: 31004 - DNA, 25 bp, Artificial
  Probe
gtgatttgggtttggaatactatgt

SEQ ID NO: 31005 - DNA, 25 bp, Artificial
  Probe
atcaaataagcgtagccacattact

SEQ ID NO: 31006 - DNA, 25 bp, Artificial
  Probe
caaatcaaataagcgtagccacatt

SEQ ID NO: 31007 - DNA, 25 bp, Artificial
  Probe
aacatctttggaaacagaaaccttt

SEQ ID NO: 31008 - DNA, 25 bp, Artificial
  Probe
gtaacatctttggaaacagaaacct

SEQ ID NO: 31009 - DNA, 25 bp, Artificial
  Probe
agtaacatctttggaaacagaaacc

SEQ ID NO: 31010 - DNA, 25 bp, Artificial
  Probe
tcaaataagcgtagccacattactg

SEQ ID NO: 31011 - DNA, 25 bp, Artificial
  Probe
taacatctttggaaacagaaacctt

SEQ ID NO: 31012 - DNA, 25 bp, Artificial
  Probe
gcgtgatttgggtttggaatactat

SEQ ID NO: 31013 - DNA, 25 bp, Artificial
  Probe
cagtaacatctttggaaacagaaac

SEQ ID NO: 31014 - DNA, 25 bp, Artificial
  Probe
ctagagatgaaatccttgccaatgg

SEQ ID NO: 31015 - DNA, 25 bp, Artificial
  Probe
aaataagcgtagccacattactgtt

SEQ ID NO: 31016 - DNA, 25 bp, Artificial
  Probe
tgatttgggtttggaatactatgta

SEQ ID NO: 31017 - DNA, 25 bp, Artificial
  Probe
ccaaatcaaataagcgtagccacat

SEQ ID NO: 31018 - DNA, 25 bp, Artificial
  Probe
gctagagatgaaatccttgccaatg

SEQ ID NO: 31019 - DNA, 25 bp, Artificial
  Probe
ataagcgtagccacattactgttcg

SEQ ID NO: 31020 - DNA, 25 bp, Artificial
  Probe
caaataagcgtagccacattactgt

SEQ ID NO: 31021 - DNA, 25 bp, Artificial
  Probe
gatttgggtttggaatactatgtag

SEQ ID NO: 31022 - DNA, 25 bp, Artificial
  Probe
ccagtaacatctttggaaacagaaa

SEQ ID NO: 31023 - DNA, 25 bp, Artificial
  Probe
tgctagagatgaaatccttgccaat

SEQ ID NO: 31024 - DNA, 25 bp, Artificial
  Probe
tgcgtgatttgggtttggaatacta

SEQ ID NO: 31025 - DNA, 25 bp, Artificial
  Probe
atttgggtttggaatactatgtagt

SEQ ID NO: 31026 - DNA, 25 bp, Artificial
  Probe
gataagaagggaatgcaaagaaagg

SEQ ID NO: 31027 - DNA, 25 bp, Artificial
  Probe
ggataagaagggaatgcaaagaaag

SEQ ID NO: 31028 - DNA, 25 bp, Artificial
  Probe
gaaaggataagaagggaatgcaaag

SEQ ID NO: 31029 - DNA, 25 bp, Artificial
  Probe
aggataagaagggaatgcaaagaaa

SEQ ID NO: 31030 - DNA, 25 bp, Artificial
  Probe
aaggataagaagggaatgcaaagaa

SEQ ID NO: 31031 - DNA, 25 bp, Artificial
  Probe
aaaggataagaagggaatgcaaaga

SEQ ID NO: 31032 - DNA, 25 bp, Artificial
  Probe
agaaaggataagaagggaatgcaaa

SEQ ID NO: 31033 - DNA, 25 bp, Artificial
  Probe
aagaaaggataagaagggaatgcaa

SEQ ID NO: 31034 - DNA, 25 bp, Artificial
  Probe
aaagaaaggataagaagggaatgca

SEQ ID NO: 31035 - DNA, 25 bp, Artificial
  Probe
cccagtaacatctttggaaacagaa

SEQ ID NO: 31036 - DNA, 25 bp, Artificial
  Probe
tagagatgaaatccttgccaatgga

SEQ ID NO: 31037 - DNA, 25 bp, Artificial
  Probe
ataagaagggaatgcaaagaaaggg

SEQ ID NO: 31038 - DNA, 25 bp, Artificial
  Probe
tgggtttggaatactatgtagtagg

SEQ ID NO: 31039 - DNA, 25 bp, Artificial
  Probe
gggtttggaatactatgtagtagga

SEQ ID NO: 31040 - DNA, 25 bp, Artificial
  Probe
ctgctagagatgaaatccttgccaa

SEQ ID NO: 31041 - DNA, 25 bp, Artificial
  Probe
caggtgcatgtatctacttctattt

SEQ ID NO: 31042 - DNA, 25 bp, Artificial
  Probe
atgcgtgatttgggtttggaatact

SEQ ID NO: 31043 - DNA, 25 bp, Artificial
  Probe
aaaagaaaggataagaagggaatgc

SEQ ID NO: 31044 - DNA, 25 bp, Artificial
  Probe
cagttgctttattctcccattgaaa

SEQ ID NO: 31045 - DNA, 25 bp, Artificial
  Probe
ctgttctattccgaatgtctgagga

SEQ ID NO: 31046 - DNA, 25 bp, Artificial
  Probe
tgttctattccgaatgtctgaggac

SEQ ID NO: 31047 - DNA, 25 bp, Artificial
  Probe
gaggactcaataccattccactgtt

SEQ ID NO: 31048 - DNA, 25 bp, Artificial
  Probe
gactcaataccattccactgtttgt

SEQ ID NO: 31049 - DNA, 25 bp, Artificial
  Probe
gtgatccgaggactcaataccattc

SEQ ID NO: 31050 - DNA, 25 bp, Artificial
  Probe
gctgttctattccgaatgtctgagg

SEQ ID NO: 31051 - DNA, 25 bp, Artificial
  Probe
actcaataccattccactgtttgtg

SEQ ID NO: 31052 - DNA, 25 bp, Artificial
  Probe
gcagttgctttattctcccattgaa

SEQ ID NO: 31053 - DNA, 25 bp, Artificial
  Probe
tgtgatccgaggactcaataccatt

SEQ ID NO: 31054 - DNA, 25 bp, Artificial
  Probe
ttgtgatccgaggactcaataccat

SEQ ID NO: 31055 - DNA, 25 bp, Artificial
  Probe
ggactcaataccattccactgtttg

SEQ ID NO: 31056 - DNA, 25 bp, Artificial
  Probe
aggactcaataccattccactgttt

SEQ ID NO: 31057 - DNA, 25 bp, Artificial
  Probe
gattgtgatccgaggactcaatacc

SEQ ID NO: 31058 - DNA, 25 bp, Artificial
  Probe
ctcaataccattccactgtttgtgc

SEQ ID NO: 31059 - DNA, 25 bp, Artificial
  Probe
agttgctttattctcccattgaaaa

SEQ ID NO: 31060 - DNA, 25 bp, Artificial
  Probe
gatccgaggactcaataccattcca

SEQ ID NO: 31061 - DNA, 25 bp, Artificial
  Probe
tgatccgaggactcaataccattcc

SEQ ID NO: 31062 - DNA, 25 bp, Artificial
  Probe
aatggcttggaatgagactgctgat

SEQ ID NO: 31063 - DNA, 25 bp, Artificial
  Probe
atccgaggactcaataccattccac

SEQ ID NO: 31064 - DNA, 25 bp, Artificial
  Probe
attgtgatccgaggactcaatacca

SEQ ID NO: 31065 - DNA, 25 bp, Artificial
  Probe
ctgtttgtgcagttgctttattctc

SEQ ID NO: 31066 - DNA, 25 bp, Artificial
  Probe
tgtttgtgcagttgctttattctcc

SEQ ID NO: 31067 - DNA, 25 bp, Artificial
  Probe
gacaagccacaggactacaagaaac

SEQ ID NO: 31068 - DNA, 25 bp, Artificial
  Probe
gttgctttattctcccattgaaaat

SEQ ID NO: 31069 - DNA, 25 bp, Artificial
  Probe
cgaggactcaataccattccactgt

SEQ ID NO: 31070 - DNA, 25 bp, Artificial
  Probe
ctcccattgaaaatatccaaagagt

SEQ ID NO: 31071 - DNA, 25 bp, Artificial
  Probe
tctcccattgaaaatatccaaagag

SEQ ID NO: 31072 - DNA, 25 bp, Artificial
  Probe
ttctcccattgaaaatatccaaaga

SEQ ID NO: 31073 - DNA, 25 bp, Artificial
  Probe
ccattgaaaatatccaaagagtagc

SEQ ID NO: 31074 - DNA, 25 bp, Artificial
  Probe
tgcagttgctttattctcccattga

SEQ ID NO: 31075 - DNA, 25 bp, Artificial
  Probe
gtgcagttgctttattctcccattg

SEQ ID NO: 31076 - DNA, 25 bp, Artificial
  Probe
ttctattccgaatgtctgaggacaa

SEQ ID NO: 31077 - DNA, 25 bp, Artificial
  Probe
ggattgtgatccgaggactcaatac

SEQ ID NO: 31078 - DNA, 25 bp, Artificial
  Probe
gtttgtgcagttgctttattctccc

SEQ ID NO: 31079 - DNA, 25 bp, Artificial
  Probe
tcccattgaaaatatccaaagagta

SEQ ID NO: 31080 - DNA, 25 bp, Artificial
  Probe
tctattccgaatgtctgaggacaag

SEQ ID NO: 31081 - DNA, 25 bp, Artificial
  Probe
tgtgcagttgctttattctcccatt

SEQ ID NO: 31082 - DNA, 25 bp, Artificial
  Probe
ttgtgcagttgctttattctcccat

SEQ ID NO: 31083 - DNA, 25 bp, Artificial
  Probe
atggcttggaatgagactgctgatc

SEQ ID NO: 31084 - DNA, 25 bp, Artificial
  Probe
cccattgaaaatatccaaagagtag

SEQ ID NO: 31085 - DNA, 25 bp, Artificial
  Probe
gttctattccgaatgtctgaggaca

SEQ ID NO: 31086 - DNA, 25 bp, Artificial
  Probe
ttgaaaatatccaaagagtagctgc

SEQ ID NO: 31087 - DNA, 25 bp, Artificial
  Probe
attctcccattgaaaatatccaaag

SEQ ID NO: 31088 - DNA, 25 bp, Artificial
  Probe
tttgtgcagttgctttattctccca

SEQ ID NO: 31089 - DNA, 25 bp, Artificial
  Probe
gaagaagagcaagaagaaggagaag

SEQ ID NO: 31090 - DNA, 25 bp, Artificial
  Probe
tgaagaagagcaagaagaaggagaa

SEQ ID NO: 31091 - DNA, 25 bp, Artificial
  Probe
ctgaagaagagcaagaagaaggaga

SEQ ID NO: 31092 - DNA, 25 bp, Artificial
  Probe
aagaagagcaagaagaaggagaagg

SEQ ID NO: 31093 - DNA, 25 bp, Artificial
  Probe
gatgactaccaatgctgacactgat

SEQ ID NO: 31094 - DNA, 25 bp, Artificial
  Probe
atgactaccaatgctgacactgatg

SEQ ID NO: 31095 - DNA, 25 bp, Artificial
  Probe
gaagagcaagaagaaggagaaggtg

SEQ ID NO: 31096 - DNA, 25 bp, Artificial
  Probe
agaagagcaagaagaaggagaaggt

SEQ ID NO: 31097 - DNA, 25 bp, Artificial
  Probe
gagaaggtggaatcctgattagtgg

SEQ ID NO: 31098 - DNA, 25 bp, Artificial
  Probe
ttcctgaagaagagcaagaagaagg

SEQ ID NO: 31099 - DNA, 25 bp, Artificial
  Probe
gcaagaagaaggagaaggtggaatc

SEQ ID NO: 31100 - DNA, 25 bp, Artificial
  Probe
ggagaaggtggaatcctgattagtg

SEQ ID NO: 31101 - DNA, 25 bp, Artificial
  Probe
agatgactaccaatgctgacactga

SEQ ID NO: 31102 - DNA, 25 bp, Artificial
  Probe
cctgaagaagagcaagaagaaggag

SEQ ID NO: 31103 - DNA, 25 bp, Artificial
  Probe
agcaagaagaaggagaaggtggaat

SEQ ID NO: 31104 - DNA, 25 bp, Artificial
  Probe
caagaagaaggagaaggtggaatcc

SEQ ID NO: 31105 - DNA, 25 bp, Artificial
  Probe
ttcagaggatgccaagaagacagaa

SEQ ID NO: 31106 - DNA, 25 bp, Artificial
  Probe
cagatgactaccaatgctgacactg

SEQ ID NO: 31107 - DNA, 25 bp, Artificial
  Probe
tcagaggatgccaagaagacagaag

SEQ ID NO: 31108 - DNA, 25 bp, Artificial
  Probe
caagaaggaggtggaaaggaagaag

SEQ ID NO: 31109 - DNA, 25 bp, Artificial
  Probe
gagcaagaagaaggagaaggtggaa

SEQ ID NO: 31110 - DNA, 25 bp, Artificial
  Probe
aagagcaagaagaaggagaaggtgg

SEQ ID NO: 31111 - DNA, 25 bp, Artificial
  Probe
cttccttaccttctcccaactctga

SEQ ID NO: 31112 - DNA, 25 bp, Artificial
  Probe
cagaggatgccaagaagacagaagt

SEQ ID NO: 31113 - DNA, 25 bp, Artificial
  Probe
ggaaaggaagaagctagaacaggag

SEQ ID NO: 31114 - DNA, 25 bp, Artificial
  Probe
acaagaaggaggtggaaaggaagaa

SEQ ID NO: 31115 - DNA, 25 bp, Artificial
  Probe
aagaagctagaacaggagcaagaag

SEQ ID NO: 31116 - DNA, 25 bp, Artificial
  Probe
gaagaagctagaacaggagcaagaa

SEQ ID NO: 31117 - DNA, 25 bp, Artificial
  Probe
ttccttaccttctcccaactctgag

SEQ ID NO: 31118 - DNA, 25 bp, Artificial
  Probe
agaggatgccaagaagacagaagtc

SEQ ID NO: 31119 - DNA, 25 bp, Artificial
  Probe
aaggtggaatcctgattagtggctc

SEQ ID NO: 31120 - DNA, 25 bp, Artificial
  Probe
gaaggtggaatcctgattagtggct

SEQ ID NO: 31121 - DNA, 25 bp, Artificial
  Probe
agaaggtggaatcctgattagtggc

SEQ ID NO: 31122 - DNA, 25 bp, Artificial
  Probe
ctccttccttaccttctcccaactc

SEQ ID NO: 31123 - DNA, 25 bp, Artificial
  Probe
gaggtggaaaggaagaagctagaac

SEQ ID NO: 31124 - DNA, 25 bp, Artificial
  Probe
ctccttcctgaagaagagcaagaag

SEQ ID NO: 31125 - DNA, 25 bp, Artificial
  Probe
ccagatgactaccaatgctgacact

SEQ ID NO: 31126 - DNA, 25 bp, Artificial
  Probe
aggatgccaagaagacagaagtcag

SEQ ID NO: 31127 - DNA, 25 bp, Artificial
  Probe
gaggatgccaagaagacagaagtca

SEQ ID NO: 31128 - DNA, 25 bp, Artificial
  Probe
gtggaaaggaagaagctagaacagg

SEQ ID NO: 31129 - DNA, 25 bp, Artificial
  Probe
ggtggaaaggaagaagctagaacag

SEQ ID NO: 31130 - DNA, 25 bp, Artificial
  Probe
agagcaagaagaaggagaaggtgga

SEQ ID NO: 31131 - DNA, 25 bp, Artificial
  Probe
tggaaaggaagaagctagaacagga

SEQ ID NO: 31132 - DNA, 25 bp, Artificial
  Probe
ccttccttaccttctcccaactctg

SEQ ID NO: 31133 - DNA, 25 bp, Artificial
  Probe
tccttccttaccttctcccaactct

SEQ ID NO: 31134 - DNA, 25 bp, Artificial
  Probe
ctcaacgcaatcatatacggactac

SEQ ID NO: 31135 - DNA, 25 bp, Artificial
  Probe
caatcatatacggactactgaacca

SEQ ID NO: 31136 - DNA, 25 bp, Artificial
  Probe
tcaacttcataggtcttattgtggc

SEQ ID NO: 31137 - DNA, 25 bp, Artificial
  Probe
ctcaacttcataggtcttattgtgg

SEQ ID NO: 31138 - DNA, 25 bp, Artificial
  Probe
ccactcaacttcataggtcttattg

SEQ ID NO: 31139 - DNA, 25 bp, Artificial
  Probe
aatcatatacggactactgaaccaa

SEQ ID NO: 31140 - DNA, 25 bp, Artificial
  Probe
caacgcaatcatatacggactactg

SEQ ID NO: 31141 - DNA, 25 bp, Artificial
  Probe
tcaacgcaatcatatacggactact

SEQ ID NO: 31142 - DNA, 25 bp, Artificial
  Probe
gcaatcatatacggactactgaacc

SEQ ID NO: 31143 - DNA, 25 bp, Artificial
  Probe
actcaacttcataggtcttattgtg

SEQ ID NO: 31144 - DNA, 25 bp, Artificial
  Probe
cactcaacttcataggtcttattgt

SEQ ID NO: 31145 - DNA, 25 bp, Artificial
  Probe
acaagaggattatcatctcactgtg

SEQ ID NO: 31146 - DNA, 25 bp, Artificial
  Probe
cgcaatcatatacggactactgaac

SEQ ID NO: 31147 - DNA, 25 bp, Artificial
  Probe
caagaggattatcatctcactgtgc

SEQ ID NO: 31148 - DNA, 25 bp, Artificial
  Probe
ctgatatggacactgacactcatag

SEQ ID NO: 31149 - DNA, 25 bp, Artificial
  Probe
tacaagaggattatcatctcactgt

SEQ ID NO: 31150 - DNA, 25 bp, Artificial
  Probe
acgcaatcatatacggactactgaa

SEQ ID NO: 31151 - DNA, 25 bp, Artificial
  Probe
aacgcaatcatatacggactactga

SEQ ID NO: 31152 - DNA, 25 bp, Artificial
  Probe
cctcaacgcaatcatatacggacta

SEQ ID NO: 31153 - DNA, 25 bp, Artificial
  Probe
ggagtacaagaggattatcatctca

SEQ ID NO: 31154 - DNA, 25 bp, Artificial
  Probe
aaggagtacaagaggattatcatct

SEQ ID NO: 31155 - DNA, 25 bp, Artificial
  Probe
aggagtacaagaggattatcatctc

SEQ ID NO: 31156 - DNA, 25 bp, Artificial
  Probe
gtacaagaggattatcatctcactg

SEQ ID NO: 31157 - DNA, 25 bp, Artificial
  Probe
cctgatatggacactgacactcata

SEQ ID NO: 31158 - DNA, 25 bp, Artificial
  Probe
agtacaagaggattatcatctcact

SEQ ID NO: 31159 - DNA, 25 bp, Artificial
  Probe
gagtacaagaggattatcatctcac

SEQ ID NO: 31160 - DNA, 25 bp, Artificial
  Probe
cccactcaacttcataggtcttatt

SEQ ID NO: 31161 - DNA, 25 bp, Artificial
  Probe
tgatatggacactgacactcatagc

SEQ ID NO: 31162 - DNA, 25 bp, Artificial
  Probe
ctagttactacctggcgtatttcaa

SEQ ID NO: 31163 - DNA, 25 bp, Artificial
  Probe
tagttactacctggcgtatttcaac

SEQ ID NO: 31164 - DNA, 25 bp, Artificial
  Probe
tttcagaaaggagtacaagaggatt

SEQ ID NO: 31165 - DNA, 25 bp, Artificial
  Probe
aatttcagaaaggagtacaagagga

SEQ ID NO: 31166 - DNA, 25 bp, Artificial
  Probe
atcatatacggactactgaaccaaa

SEQ ID NO: 31167 - DNA, 25 bp, Artificial
  Probe
atttcagaaaggagtacaagaggat

SEQ ID NO: 31168 - DNA, 25 bp, Artificial
  Probe
gatatggacactgacactcatagcc

SEQ ID NO: 31169 - DNA, 25 bp, Artificial
  Probe
ttcagaaaggagtacaagaggatta

SEQ ID NO: 31170 - DNA, 25 bp, Artificial
  Probe
aagaggattatcatctcactgtgca

SEQ ID NO: 31171 - DNA, 25 bp, Artificial
  Probe
agaaaggagtacaagaggattatca

SEQ ID NO: 31172 - DNA, 25 bp, Artificial
  Probe
tcagaaaggagtacaagaggattat

SEQ ID NO: 31173 - DNA, 25 bp, Artificial
  Probe
tgattattgtcactttctgctactt

SEQ ID NO: 31174 - DNA, 25 bp, Artificial
  Probe
cagaaaggagtacaagaggattatc

SEQ ID NO: 31175 - DNA, 25 bp, Artificial
  Probe
gttcctgatatggacactgacactc

SEQ ID NO: 31176 - DNA, 25 bp, Artificial
  Probe
agttactacctggcgtatttcaaca

SEQ ID NO: 31177 - DNA, 25 bp, Artificial
  Probe
atgattattgtcactttctgctact

SEQ ID NO: 31178 - DNA, 25 bp, Artificial
  Probe
tcctgatatggacactgacactcat

SEQ ID NO: 31179 - DNA, 25 bp, Artificial
  Probe
ttaatttatttccactgtcacacgc

SEQ ID NO: 31180 - DNA, 25 bp, Artificial
  Probe
atttatttccactgtcacacgcata

SEQ ID NO: 31181 - DNA, 25 bp, Artificial
  Probe
taatttatttccactgtcacacgca

SEQ ID NO: 31182 - DNA, 25 bp, Artificial
  Probe
tttatttccactgtcacacgcatag

SEQ ID NO: 31183 - DNA, 25 bp, Artificial
  Probe
tttaatttatttccactgtcacacg

SEQ ID NO: 31184 - DNA, 25 bp, Artificial
  Probe
aatttatttccactgtcacacgcat

SEQ ID NO: 31185 - DNA, 25 bp, Artificial
  Probe
tatttccactgtcacacgcatagat

SEQ ID NO: 31186 - DNA, 25 bp, Artificial
  Probe
ttatttccactgtcacacgcataga

SEQ ID NO: 31187 - DNA, 25 bp, Artificial
  Probe
aaatcacgcaaacatcacagagaga

SEQ ID NO: 31188 - DNA, 25 bp, Artificial
  Probe
aggcagacctaaactgatcctaaag

SEQ ID NO: 31189 - DNA, 25 bp, Artificial
  Probe
caggcagacctaaactgatcctaaa

SEQ ID NO: 31190 - DNA, 25 bp, Artificial
  Probe
ggcgttttaatttatttccactgtc

SEQ ID NO: 31191 - DNA, 25 bp, Artificial
  Probe
atttccactgtcacacgcatagatc

SEQ ID NO: 31192 - DNA, 25 bp, Artificial
  Probe
aatcacgcaaacatcacagagagac

SEQ ID NO: 31193 - DNA, 25 bp, Artificial
  Probe
cggcgttttaatttatttccactgt

SEQ ID NO: 31194 - DNA, 25 bp, Artificial
  Probe
cagacctaaactgatcctaaagccc

SEQ ID NO: 31195 - DNA, 25 bp, Artificial
  Probe
gcgttttaatttatttccactgtca

SEQ ID NO: 31196 - DNA, 25 bp, Artificial
  Probe
tctgacggcgttttaatttatttcc

SEQ ID NO: 31197 - DNA, 25 bp, Artificial
  Probe
gtctgacggcgttttaatttatttc

SEQ ID NO: 31198 - DNA, 25 bp, Artificial
  Probe
gacggcgttttaatttatttccact

SEQ ID NO: 31199 - DNA, 25 bp, Artificial
  Probe
ctgacggcgttttaatttatttcca

SEQ ID NO: 31200 - DNA, 25 bp, Artificial
  Probe
acggcgttttaatttatttccactg

SEQ ID NO: 31201 - DNA, 25 bp, Artificial
  Probe
tgacggcgttttaatttatttccac

SEQ ID NO: 31202 - DNA, 25 bp, Artificial
  Probe
gaagaaccaaaatcacgcaaacatc

SEQ ID NO: 31203 - DNA, 25 bp, Artificial
  Probe
gcagacctaaactgatcctaaagcc

SEQ ID NO: 31204 - DNA, 25 bp, Artificial
  Probe
ggcagacctaaactgatcctaaagc

SEQ ID NO: 31205 - DNA, 25 bp, Artificial
  Probe
aaaatcacgcaaacatcacagagag

SEQ ID NO: 31206 - DNA, 25 bp, Artificial
  Probe
aagaaccaaaatcacgcaaacatca

SEQ ID NO: 31207 - DNA, 25 bp, Artificial
  Probe
caaaatcacgcaaacatcacagaga

SEQ ID NO: 31208 - DNA, 25 bp, Artificial
  Probe
atcacgcaaacatcacagagagact

SEQ ID NO: 31209 - DNA, 25 bp, Artificial
  Probe
cgttttaatttatttccactgtcac

SEQ ID NO: 31210 - DNA, 25 bp, Artificial
  Probe
agaaccaaaatcacgcaaacatcac

SEQ ID NO: 31211 - DNA, 25 bp, Artificial
  Probe
ggaagaaccaaaatcacgcaaacat

SEQ ID NO: 31212 - DNA, 25 bp, Artificial
  Probe
tatggaagaaccaaaatcacgcaaa

SEQ ID NO: 31213 - DNA, 25 bp, Artificial
  Probe
aaccaaaatcacgcaaacatcacag

SEQ ID NO: 31214 - DNA, 25 bp, Artificial
  Probe
gaaccaaaatcacgcaaacatcaca

SEQ ID NO: 31215 - DNA, 25 bp, Artificial
  Probe
ccaaaatcacgcaaacatcacagag

SEQ ID NO: 31216 - DNA, 25 bp, Artificial
  Probe
ctatggaagaaccaaaatcacgcaa

SEQ ID NO: 31217 - DNA, 25 bp, Artificial
  Probe
gcaggcagacctaaactgatcctaa

SEQ ID NO: 31218 - DNA, 25 bp, Artificial
  Probe
cactgtcacacgcatagatctacac

SEQ ID NO: 31219 - DNA, 25 bp, Artificial
  Probe
ttttaatttatttccactgtcacac

SEQ ID NO: 31220 - DNA, 25 bp, Artificial
  Probe
gttttaatttatttccactgtcaca

SEQ ID NO: 31221 - DNA, 25 bp, Artificial
  Probe
tcacgcaaacatcacagagagactc

SEQ ID NO: 31222 - DNA, 25 bp, Artificial
  Probe
ttccactgtcacacgcatagatcta

SEQ ID NO: 31223 - DNA, 25 bp, Artificial
  Probe
agacctaaactgatcctaaagcccc

SEQ ID NO: 31224 - DNA, 25 bp, Artificial
  Probe
cactacaataacttcttcttcgctg

SEQ ID NO: 31225 - DNA, 25 bp, Artificial
  Probe
ttcttcttcgtcattgtcatcctac

SEQ ID NO: 31226 - DNA, 25 bp, Artificial
  Probe
cattgtcatcctactggctatcatc

SEQ ID NO: 31227 - DNA, 25 bp, Artificial
  Probe
ccactacaataacttcttcttcgct

SEQ ID NO: 31228 - DNA, 25 bp, Artificial
  Probe
tcattgtcatcctactggctatcat

SEQ ID NO: 31229 - DNA, 25 bp, Artificial
  Probe
cttcttcgtcattgtcatcctactg

SEQ ID NO: 31230 - DNA, 25 bp, Artificial
  Probe
tcttcttcgtcattgtcatcctact

SEQ ID NO: 31231 - DNA, 25 bp, Artificial
  Probe
actacaataacttcttcttcgctgc

SEQ ID NO: 31232 - DNA, 25 bp, Artificial
  Probe
attgtcatcctactggctatcatcc

SEQ ID NO: 31233 - DNA, 25 bp, Artificial
  Probe
gtcattgtcatcctactggctatca

SEQ ID NO: 31234 - DNA, 25 bp, Artificial
  Probe
ctacaataacttcttcttcgctgcc

SEQ ID NO: 31235 - DNA, 25 bp, Artificial
  Probe
ggctggtgatgaatatgaactgtac

SEQ ID NO: 31236 - DNA, 25 bp, Artificial
  Probe
gccactacaataacttcttcttcgc

SEQ ID NO: 31237 - DNA, 25 bp, Artificial
  Probe
ttcttcgtcattgtcatcctactgg

SEQ ID NO: 31238 - DNA, 25 bp, Artificial
  Probe
aacaagagcaagtgaaggaagacat

SEQ ID NO: 31239 - DNA, 25 bp, Artificial
  Probe
cggctggtgatgaatatgaactgta

SEQ ID NO: 31240 - DNA, 25 bp, Artificial
  Probe
cgtcattgtcatcctactggctatc

SEQ ID NO: 31241 - DNA, 25 bp, Artificial
  Probe
tttcttcttcgtcattgtcatccta

SEQ ID NO: 31242 - DNA, 25 bp, Artificial
  Probe
tcgtcattgtcatcctactggctat

SEQ ID NO: 31243 - DNA, 25 bp, Artificial
  Probe
ctggtgatgaatatgaactgtaccg

SEQ ID NO: 31244 - DNA, 25 bp, Artificial
  Probe
gctggtgatgaatatgaactgtacc

SEQ ID NO: 31245 - DNA, 25 bp, Artificial
  Probe
caacaagagcaagtgaaggaagaca

SEQ ID NO: 31246 - DNA, 25 bp, Artificial
  Probe
ttcgtcattgtcatcctactggcta

SEQ ID NO: 31247 - DNA, 25 bp, Artificial
  Probe
ctggctgtagtggtctacttgtata

SEQ ID NO: 31248 - DNA, 25 bp, Artificial
  Probe
tcatcttcacagacaactctttcct

SEQ ID NO: 31249 - DNA, 25 bp, Artificial
  Probe
agtcatcttcacagacaactctttc

SEQ ID NO: 31250 - DNA, 25 bp, Artificial
  Probe
acaagagcaagtgaaggaagacatg

SEQ ID NO: 31251 - DNA, 25 bp, Artificial
  Probe
catcttcacagacaactctttcctg

SEQ ID NO: 31252 - DNA, 25 bp, Artificial
  Probe
gtcatcttcacagacaactctttcc

SEQ ID NO: 31253 - DNA, 25 bp, Artificial
  Probe
ttgtcatcctactggctatcatcca

SEQ ID NO: 31254 - DNA, 25 bp, Artificial
  Probe
ccagggtctgattattgatgctttc

SEQ ID NO: 31255 - DNA, 25 bp, Artificial
  Probe
tagtggtctacttgtatacggtggt

SEQ ID NO: 31256 - DNA, 25 bp, Artificial
  Probe
ccaacaagagcaagtgaaggaagac

SEQ ID NO: 31257 - DNA, 25 bp, Artificial
  Probe
gaccaacaagagcaagtgaaggaag

SEQ ID NO: 31258 - DNA, 25 bp, Artificial
  Probe
atccagggtctgattattgatgctt

SEQ ID NO: 31259 - DNA, 25 bp, Artificial
  Probe
tccagggtctgattattgatgcttt

SEQ ID NO: 31260 - DNA, 25 bp, Artificial
  Probe
ggccactacaataacttcttcttcg

SEQ ID NO: 31261 - DNA, 25 bp, Artificial
  Probe
cagggtctgattattgatgctttcg

SEQ ID NO: 31262 - DNA, 25 bp, Artificial
  Probe
tttggagtcatcttcacagacaact

SEQ ID NO: 31263 - DNA, 25 bp, Artificial
  Probe
gtttggagtcatcttcacagacaac

SEQ ID NO: 31264 - DNA, 25 bp, Artificial
  Probe
agtttggagtcatcttcacagacaa

SEQ ID NO: 31265 - DNA, 25 bp, Artificial
  Probe
aagtttggagtcatcttcacagaca

SEQ ID NO: 31266 - DNA, 25 bp, Artificial
  Probe
agggtctgattattgatgctttcgg

SEQ ID NO: 31267 - DNA, 25 bp, Artificial
  Probe
tacaataacttcttcttcgctgccc

SEQ ID NO: 31268 - DNA, 25 bp, Artificial
  Probe
accaacaagagcaagtgaaggaaga

SEQ ID NO: 31269 - DNA, 25 bp, Artificial
  Probe
catcaatgactacctggacatctat

SEQ ID NO: 31270 - DNA, 25 bp, Artificial
  Probe
atcaatgactacctggacatctatt

SEQ ID NO: 31271 - DNA, 25 bp, Artificial
  Probe
gcatcaatgactacctggacatcta

SEQ ID NO: 31272 - DNA, 25 bp, Artificial
  Probe
aatgactacctggacatctattgcc

SEQ ID NO: 31273 - DNA, 25 bp, Artificial
  Probe
aacggtacatcctatacatggtgaa

SEQ ID NO: 31274 - DNA, 25 bp, Artificial
  Probe
gaacggtacatcctatacatggtga

SEQ ID NO: 31275 - DNA, 25 bp, Artificial
  Probe
acggtacatcctatacatggtgaac

SEQ ID NO: 31276 - DNA, 25 bp, Artificial
  Probe
tactactacatctctgccacacctc

SEQ ID NO: 31277 - DNA, 25 bp, Artificial
  Probe
tcaatgactacctggacatctattg

SEQ ID NO: 31278 - DNA, 25 bp, Artificial
  Probe
gagcatcaatgactacctggacatc

SEQ ID NO: 31279 - DNA, 25 bp, Artificial
  Probe
ggtacatcctatacatggtgaacgg

SEQ ID NO: 31280 - DNA, 25 bp, Artificial
  Probe
caatgactacctggacatctattgc

SEQ ID NO: 31281 - DNA, 25 bp, Artificial
  Probe
atggaacggtacatcctatacatgg

SEQ ID NO: 31282 - DNA, 25 bp, Artificial
  Probe
agcatcaatgactacctggacatct

SEQ ID NO: 31283 - DNA, 25 bp, Artificial
  Probe
gtactactacatctctgccacacct

SEQ ID NO: 31284 - DNA, 25 bp, Artificial
  Probe
cggtacatcctatacatggtgaacg

SEQ ID NO: 31285 - DNA, 25 bp, Artificial
  Probe
gcatggaacggtacatcctatacat

SEQ ID NO: 31286 - DNA, 25 bp, Artificial
  Probe
gtacatcctatacatggtgaacggc

SEQ ID NO: 31287 - DNA, 25 bp, Artificial
  Probe
ggaacggtacatcctatacatggtg

SEQ ID NO: 31288 - DNA, 25 bp, Artificial
  Probe
gacacgagtactactacatctctgc

SEQ ID NO: 31289 - DNA, 25 bp, Artificial
  Probe
tgagcatcaatgactacctggacat

SEQ ID NO: 31290 - DNA, 25 bp, Artificial
  Probe
tggaacggtacatcctatacatggt

SEQ ID NO: 31291 - DNA, 25 bp, Artificial
  Probe
ggacacgagtactactacatctctg

SEQ ID NO: 31292 - DNA, 25 bp, Artificial
  Probe
ctggacacgagtactactacatctc

SEQ ID NO: 31293 - DNA, 25 bp, Artificial
  Probe
catggaacggtacatcctatacatg

SEQ ID NO: 31294 - DNA, 25 bp, Artificial
  Probe
tggacacgagtactactacatctct

SEQ ID NO: 31295 - DNA, 25 bp, Artificial
  Probe
gagtactactacatctctgccacac

SEQ ID NO: 31296 - DNA, 25 bp, Artificial
  Probe
aattctccgagaagttccaactctt

SEQ ID NO: 31297 - DNA, 25 bp, Artificial
  Probe
gtgagcatcaatgactacctggaca

SEQ ID NO: 31298 - DNA, 25 bp, Artificial
  Probe
cctggacacgagtactactacatct

SEQ ID NO: 31299 - DNA, 25 bp, Artificial
  Probe
tacatcctatacatggtgaacggcg

SEQ ID NO: 31300 - DNA, 25 bp, Artificial
  Probe
atgactacctggacatctattgccc

SEQ ID NO: 31301 - DNA, 25 bp, Artificial
  Probe
ctataccgtggaggtgagcatcaat

SEQ ID NO: 31302 - DNA, 25 bp, Artificial
  Probe
acctggacacgagtactactacatc

SEQ ID NO: 31303 - DNA, 25 bp, Artificial
  Probe
gacctggacacgagtactactacat

SEQ ID NO: 31304 - DNA, 25 bp, Artificial
  Probe
attctccgagaagttccaactcttc

SEQ ID NO: 31305 - DNA, 25 bp, Artificial
  Probe
agtactactacatctctgccacacc

SEQ ID NO: 31306 - DNA, 25 bp, Artificial
  Probe
tataccgtggaggtgagcatcaatg

SEQ ID NO: 31307 - DNA, 25 bp, Artificial
  Probe
cgagtactactacatctctgccaca

SEQ ID NO: 31308 - DNA, 25 bp, Artificial
  Probe
acgagtactactacatctctgccac

SEQ ID NO: 31309 - DNA, 25 bp, Artificial
  Probe
cacgagtactactacatctctgcca

SEQ ID NO: 31310 - DNA, 25 bp, Artificial
  Probe
acacgagtactactacatctctgcc

SEQ ID NO: 31311 - DNA, 25 bp, Artificial
  Probe
actactacatctctgccacacctcc

SEQ ID NO: 31312 - DNA, 25 bp, Artificial
  Probe
cgcatggaacggtacatcctataca

SEQ ID NO: 31313 - DNA, 25 bp, Artificial
  Probe
caaattctccgagaagttccaactc

SEQ ID NO: 31314 - DNA, 25 bp, Artificial
  Probe
catcacatctggaggaatcacttac

SEQ ID NO: 31315 - DNA, 25 bp, Artificial
  Probe
atcacatctggaggaatcacttacc

SEQ ID NO: 31316 - DNA, 25 bp, Artificial
  Probe
ttgtgtgtgttacctgctctaagaa

SEQ ID NO: 31317 - DNA, 25 bp, Artificial
  Probe
tacagtattaatcaaccgaggacac

SEQ ID NO: 31318 - DNA, 25 bp, Artificial
  Probe
ttacagtattaatcaaccgaggaca

SEQ ID NO: 31319 - DNA, 25 bp, Artificial
  Probe
gtattactgcgtggattgctacaag

SEQ ID NO: 31320 - DNA, 25 bp, Artificial
  Probe
tgtgtgtgttacctgctctaagaag

SEQ ID NO: 31321 - DNA, 25 bp, Artificial
  Probe
tattactgcgtggattgctacaaga

SEQ ID NO: 31322 - DNA, 25 bp, Artificial
  Probe
gtattaatcaaccgaggacacacag

SEQ ID NO: 31323 - DNA, 25 bp, Artificial
  Probe
cagtattaatcaaccgaggacacac

SEQ ID NO: 31324 - DNA, 25 bp, Artificial
  Probe
tattaatcaaccgaggacacacagt

SEQ ID NO: 31325 - DNA, 25 bp, Artificial
  Probe
agtattaatcaaccgaggacacaca

SEQ ID NO: 31326 - DNA, 25 bp, Artificial
  Probe
acagtattaatcaaccgaggacaca

SEQ ID NO: 31327 - DNA, 25 bp, Artificial
  Probe
agtattactgcgtggattgctacaa

SEQ ID NO: 31328 - DNA, 25 bp, Artificial
  Probe
ctctttcaaattgctctttctgtct

SEQ ID NO: 31329 - DNA, 25 bp, Artificial
  Probe
ttcacctctttcaaattgctctttc

SEQ ID NO: 31330 - DNA, 25 bp, Artificial
  Probe
tttcacctctttcaaattgctcttt

SEQ ID NO: 31331 - DNA, 25 bp, Artificial
  Probe
ctttcacctctttcaaattgctctt

SEQ ID NO: 31332 - DNA, 25 bp, Artificial
  Probe
cctctttcaaattgctctttctgtc

SEQ ID NO: 31333 - DNA, 25 bp, Artificial
  Probe
tctttcaaattgctctttctgtctt

SEQ ID NO: 31334 - DNA, 25 bp, Artificial
  Probe
cacctctttcaaattgctctttctg

SEQ ID NO: 31335 - DNA, 25 bp, Artificial
  Probe
tcacctctttcaaattgctctttct

SEQ ID NO: 31336 - DNA, 25 bp, Artificial
  Probe
attactgcgtggattgctacaagaa

SEQ ID NO: 31337 - DNA, 25 bp, Artificial
  Probe
acctctttcaaattgctctttctgt

SEQ ID NO: 31338 - DNA, 25 bp, Artificial
  Probe
ccatcacatctggaggaatcactta

SEQ ID NO: 31339 - DNA, 25 bp, Artificial
  Probe
ctttcaaattgctctttctgtcttt

SEQ ID NO: 31340 - DNA, 25 bp, Artificial
  Probe
aaattgctctttctgtctttgctct

SEQ ID NO: 31341 - DNA, 25 bp, Artificial
  Probe
gctctttctgtctttgctctcattt

SEQ ID NO: 31342 - DNA, 25 bp, Artificial
  Probe
aattgctctttctgtctttgctctc

SEQ ID NO: 31343 - DNA, 25 bp, Artificial
  Probe
ctttgtgtgtgttacctgctctaag

SEQ ID NO: 31344 - DNA, 25 bp, Artificial
  Probe
tttgtgtgtgttacctgctctaaga

SEQ ID NO: 31345 - DNA, 25 bp, Artificial
  Probe
gctttcacctctttcaaattgctct

SEQ ID NO: 31346 - DNA, 25 bp, Artificial
  Probe
ttactgcgtggattgctacaagaac

SEQ ID NO: 31347 - DNA, 25 bp, Artificial
  Probe
tttacagtattaatcaaccgaggac

SEQ ID NO: 31348 - DNA, 25 bp, Artificial
  Probe
tgctctttctgtctttgctctcatt

SEQ ID NO: 31349 - DNA, 25 bp, Artificial
  Probe
ttgctctttctgtctttgctctcat

SEQ ID NO: 31350 - DNA, 25 bp, Artificial
  Probe
attgctctttctgtctttgctctca

SEQ ID NO: 31351 - DNA, 25 bp, Artificial
  Probe
tcacatctggaggaatcacttacca

SEQ ID NO: 31352 - DNA, 25 bp, Artificial
  Probe
aataatttctctgttgctgcaatgg

SEQ ID NO: 31353 - DNA, 25 bp, Artificial
  Probe
aaataatttctctgttgctgcaatg

SEQ ID NO: 31354 - DNA, 25 bp, Artificial
  Probe
ggctttcacctctttcaaattgctc

SEQ ID NO: 31355 - DNA, 25 bp, Artificial
  Probe
attaatcaaccgaggacacacagtg

SEQ ID NO: 31356 - DNA, 25 bp, Artificial
  Probe
tggaggaatcacttaccaggatcag

SEQ ID NO: 31357 - DNA, 25 bp, Artificial
  Probe
ctctttctgtctttgctctcatttt

SEQ ID NO: 31358 - DNA, 25 bp, Artificial
  Probe
tactgcgtggattgctacaagaact

SEQ ID NO: 31359 - DNA, 25 bp, Artificial
  Probe
gataagcaagtacagacagacacac

SEQ ID NO: 31360 - DNA, 25 bp, Artificial
  Probe
taggacaggatattctctatgcact

SEQ ID NO: 31361 - DNA, 25 bp, Artificial
  Probe
gacgataagcaagtacagacagaca

SEQ ID NO: 31362 - DNA, 25 bp, Artificial
  Probe
tgacgataagcaagtacagacagac

SEQ ID NO: 31363 - DNA, 25 bp, Artificial
  Probe
ggacaggatattctctatgcacttg

SEQ ID NO: 31364 - DNA, 25 bp, Artificial
  Probe
aggacaggatattctctatgcactt

SEQ ID NO: 31365 - DNA, 25 bp, Artificial
  Probe
gacaggatattctctatgcacttgc

SEQ ID NO: 31366 - DNA, 25 bp, Artificial
  Probe
cgataagcaagtacagacagacaca

SEQ ID NO: 31367 - DNA, 25 bp, Artificial
  Probe
acgataagcaagtacagacagacac

SEQ ID NO: 31368 - DNA, 25 bp, Artificial
  Probe
gttaccactacacatggaatagcaa

SEQ ID NO: 31369 - DNA, 25 bp, Artificial
  Probe
ctgacgataagcaagtacagacaga

SEQ ID NO: 31370 - DNA, 25 bp, Artificial
  Probe
ataagcaagtacagacagacacacg

SEQ ID NO: 31371 - DNA, 25 bp, Artificial
  Probe
caacaagaagaacacaaccgatcac

SEQ ID NO: 31372 - DNA, 25 bp, Artificial
  Probe
ttggttaccactacacatggaatag

SEQ ID NO: 31373 - DNA, 25 bp, Artificial
  Probe
cttggttaccactacacatggaata

SEQ ID NO: 31374 - DNA, 25 bp, Artificial
  Probe
ataggacaggatattctctatgcac

SEQ ID NO: 31375 - DNA, 25 bp, Artificial
  Probe
actgacgataagcaagtacagacag

SEQ ID NO: 31376 - DNA, 25 bp, Artificial
  Probe
gactgacgataagcaagtacagaca

SEQ ID NO: 31377 - DNA, 25 bp, Artificial
  Probe
aataggacaggatattctctatgca

SEQ ID NO: 31378 - DNA, 25 bp, Artificial
  Probe
cactacacatggaatagcaaacata

SEQ ID NO: 31379 - DNA, 25 bp, Artificial
  Probe
aaccgaggaaacaacaaagaacaag

SEQ ID NO: 31380 - DNA, 25 bp, Artificial
  Probe
tcttggttaccactacacatggaat

SEQ ID NO: 31381 - DNA, 25 bp, Artificial
  Probe
ggttaccactacacatggaatagca

SEQ ID NO: 31382 - DNA, 25 bp, Artificial
  Probe
ggactgacgataagcaagtacagac

SEQ ID NO: 31383 - DNA, 25 bp, Artificial
  Probe
caaccgaggaaacaacaaagaacaa

SEQ ID NO: 31384 - DNA, 25 bp, Artificial
  Probe
caccatactcactgtttccttagta

SEQ ID NO: 31385 - DNA, 25 bp, Artificial
  Probe
actacacatggaatagcaaacatat

SEQ ID NO: 31386 - DNA, 25 bp, Artificial
  Probe
cacaacgcaacaagaagaacacaac

SEQ ID NO: 31387 - DNA, 25 bp, Artificial
  Probe
gatttgttacaacacacagagcaac

SEQ ID NO: 31388 - DNA, 25 bp, Artificial
  Probe
cttcatgcagtgtctgtagagctat

SEQ ID NO: 31389 - DNA, 25 bp, Artificial
  Probe
taagcaagtacagacagacacacga

SEQ ID NO: 31390 - DNA, 25 bp, Artificial
  Probe
ctcttggttaccactacacatggaa

SEQ ID NO: 31391 - DNA, 25 bp, Artificial
  Probe
ccatactcactgtttccttagtaca

SEQ ID NO: 31392 - DNA, 25 bp, Artificial
  Probe
accatactcactgtttccttagtac

SEQ ID NO: 31393 - DNA, 25 bp, Artificial
  Probe
tggttaccactacacatggaatagc

SEQ ID NO: 31394 - DNA, 25 bp, Artificial
  Probe
gcaccatactcactgtttccttagt

SEQ ID NO: 31395 - DNA, 25 bp, Artificial
  Probe
ttaccactacacatggaatagcaaa

SEQ ID NO: 31396 - DNA, 25 bp, Artificial
  Probe
ttcatgcagtgtctgtagagctatg

SEQ ID NO: 31397 - DNA, 25 bp, Artificial
  Probe
cactttcatgtcctatgtcgagaac

SEQ ID NO: 31398 - DNA, 25 bp, Artificial
  Probe
taccactacacatggaatagcaaac

SEQ ID NO: 31399 - DNA, 25 bp, Artificial
  Probe
tattcacaaccttcatgcagtgtct

SEQ ID NO: 31400 - DNA, 25 bp, Artificial
  Probe
gtattcacaaccttcatgcagtgtc

SEQ ID NO: 31401 - DNA, 25 bp, Artificial
  Probe
ggcaccatactcactgtttccttag

SEQ ID NO: 31402 - DNA, 25 bp, Artificial
  Probe
cataggcaccatactcactgtttcc

SEQ ID NO: 31403 - DNA, 25 bp, Artificial
  Probe
ccataggcaccatactcactgtttc

SEQ ID NO: 31404 - DNA, 25 bp, Artificial
  Probe
ttgctacctgcgaatatggatactg

SEQ ID NO: 31405 - DNA, 25 bp, Artificial
  Probe
ttgtcaccagttacttcctagctta

SEQ ID NO: 31406 - DNA, 25 bp, Artificial
  Probe
gttacttcctagcttacttcaacag

SEQ ID NO: 31407 - DNA, 25 bp, Artificial
  Probe
ccagttacttcctagcttacttcaa

SEQ ID NO: 31408 - DNA, 25 bp, Artificial
  Probe
agttacttcctagcttacttcaaca

SEQ ID NO: 31409 - DNA, 25 bp, Artificial
  Probe
caccagttacttcctagcttacttc

SEQ ID NO: 31410 - DNA, 25 bp, Artificial
  Probe
cagttacttcctagcttacttcaac

SEQ ID NO: 31411 - DNA, 25 bp, Artificial
  Probe
accagttacttcctagcttacttca

SEQ ID NO: 31412 - DNA, 25 bp, Artificial
  Probe
tcaccagttacttcctagcttactt

SEQ ID NO: 31413 - DNA, 25 bp, Artificial
  Probe
tgtcaccagttacttcctagcttac

SEQ ID NO: 31414 - DNA, 25 bp, Artificial
  Probe
gtcaccagttacttcctagcttact

SEQ ID NO: 31415 - DNA, 25 bp, Artificial
  Probe
tttgctacctgcgaatatggatact

SEQ ID NO: 31416 - DNA, 25 bp, Artificial
  Probe
gaatctattcctgcaccttcatcca

SEQ ID NO: 31417 - DNA, 25 bp, Artificial
  Probe
ctacctgcgaatatggatactggtg

SEQ ID NO: 31418 - DNA, 25 bp, Artificial
  Probe
ttacttcctagcttacttcaacagc

SEQ ID NO: 31419 - DNA, 25 bp, Artificial
  Probe
gctgccttaatgctattgtctacgg

SEQ ID NO: 31420 - DNA, 25 bp, Artificial
  Probe
tgctacctgcgaatatggatactgg

SEQ ID NO: 31421 - DNA, 25 bp, Artificial
  Probe
aatctattcctgcaccttcatccag

SEQ ID NO: 31422 - DNA, 25 bp, Artificial
  Probe
tttgtcaccagttacttcctagctt

SEQ ID NO: 31423 - DNA, 25 bp, Artificial
  Probe
cttaatgctattgtctacgggctcc

SEQ ID NO: 31424 - DNA, 25 bp, Artificial
  Probe
ccttaatgctattgtctacgggctc

SEQ ID NO: 31425 - DNA, 25 bp, Artificial
  Probe
ctgccttaatgctattgtctacggg

SEQ ID NO: 31426 - DNA, 25 bp, Artificial
  Probe
cgaatctattcctgcaccttcatcc

SEQ ID NO: 31427 - DNA, 25 bp, Artificial
  Probe
ttaatgctattgtctacgggctcct

SEQ ID NO: 31428 - DNA, 25 bp, Artificial
  Probe
cttttgctacctgcgaatatggata

SEQ ID NO: 31429 - DNA, 25 bp, Artificial
  Probe
atctattcctgcaccttcatccaga

SEQ ID NO: 31430 - DNA, 25 bp, Artificial
  Probe
ttttgctacctgcgaatatggatac

SEQ ID NO: 31431 - DNA, 25 bp, Artificial
  Probe
gcgaatctattcctgcaccttcatc

SEQ ID NO: 31432 - DNA, 25 bp, Artificial
  Probe
gctacctgcgaatatggatactggt

SEQ ID NO: 31433 - DNA, 25 bp, Artificial
  Probe
agctgccttaatgctattgtctacg

SEQ ID NO: 31434 - DNA, 25 bp, Artificial
  Probe
taatgctattgtctacgggctcctg

SEQ ID NO: 31435 - DNA, 25 bp, Artificial
  Probe
tttcctaaccatgttcgcagtgttt

SEQ ID NO: 31436 - DNA, 25 bp, Artificial
  Probe
tacctgcgaatatggatactggtgc

SEQ ID NO: 31437 - DNA, 25 bp, Artificial
  Probe
cctgcgaatatggatactggtgctc

SEQ ID NO: 31438 - DNA, 25 bp, Artificial
  Probe
tctattcctgcaccttcatccagac

SEQ ID NO: 31439 - DNA, 25 bp, Artificial
  Probe
tattcctgcaccttcatccagacag

SEQ ID NO: 31440 - DNA, 25 bp, Artificial
  Probe
ctattcctgcaccttcatccagaca

SEQ ID NO: 31441 - DNA, 25 bp, Artificial
  Probe
ttcctaaccatgttcgcagtgtttg

SEQ ID NO: 31442 - DNA, 25 bp, Artificial
  Probe
gtttcctaaccatgttcgcagtgtt

SEQ ID NO: 31443 - DNA, 25 bp, Artificial
  Probe
ttttgtcaccagttacttcctagct

SEQ ID NO: 31444 - DNA, 25 bp, Artificial
  Probe
ccttttgctacctgcgaatatggat

SEQ ID NO: 31445 - DNA, 25 bp, Artificial
  Probe
gtgtccttttgctacctgcgaatat

SEQ ID NO: 31446 - DNA, 25 bp, Artificial
  Probe
tgtccttttgctacctgcgaatatg

SEQ ID NO: 31447 - DNA, 25 bp, Artificial
  Probe
ctagaatatgacccgcgaatctatt

SEQ ID NO: 31448 - DNA, 25 bp, Artificial
  Probe
tacttcctagcttacttcaacagct

SEQ ID NO: 31449 - DNA, 25 bp, Artificial
  Probe
cagttcaagaacctcaaatggaaac

SEQ ID NO: 31450 - DNA, 25 bp, Artificial
  Probe
agttcaagaacctcaaatggaaacg

SEQ ID NO: 31451 - DNA, 25 bp, Artificial
  Probe
tccaaggacaatctacgtatctcag

SEQ ID NO: 31452 - DNA, 25 bp, Artificial
  Probe
gaacctcaaatggaaacgtgatatg

SEQ ID NO: 31453 - DNA, 25 bp, Artificial
  Probe
agaacctcaaatggaaacgtgatat

SEQ ID NO: 31454 - DNA, 25 bp, Artificial
  Probe
aagaacctcaaatggaaacgtgata

SEQ ID NO: 31455 - DNA, 25 bp, Artificial
  Probe
gatgacaaatcccaggatgcaatag

SEQ ID NO: 31456 - DNA, 25 bp, Artificial
  Probe
ccagttcaagaacctcaaatggaaa

SEQ ID NO: 31457 - DNA, 25 bp, Artificial
  Probe
tgatgacaaatcccaggatgcaata

SEQ ID NO: 31458 - DNA, 25 bp, Artificial
  Probe
gtccaaggacaatctacgtatctca

SEQ ID NO: 31459 - DNA, 25 bp, Artificial
  Probe
ctcaaatggaaacgtgatatgcagt

SEQ ID NO: 31460 - DNA, 25 bp, Artificial
  Probe
ttcaagaacctcaaatggaaacgtg

SEQ ID NO: 31461 - DNA, 25 bp, Artificial
  Probe
caagaacctcaaatggaaacgtgat

SEQ ID NO: 31462 - DNA, 25 bp, Artificial
  Probe
gttcaagaacctcaaatggaaacgt

SEQ ID NO: 31463 - DNA, 25 bp, Artificial
  Probe
gttctctgacaccacatcatccaca

SEQ ID NO: 31464 - DNA, 25 bp, Artificial
  Probe
tcaaatggaaacgtgatatgcagtg

SEQ ID NO: 31465 - DNA, 25 bp, Artificial
  Probe
aacctcaaatggaaacgtgatatgc

SEQ ID NO: 31466 - DNA, 25 bp, Artificial
  Probe
ttctctgacaccacatcatccacag

SEQ ID NO: 31467 - DNA, 25 bp, Artificial
  Probe
caaggacaatctacgtatctcagcc

SEQ ID NO: 31468 - DNA, 25 bp, Artificial
  Probe
ccaaggacaatctacgtatctcagc

SEQ ID NO: 31469 - DNA, 25 bp, Artificial
  Probe
gacaatctacgtatctcagccagag

SEQ ID NO: 31470 - DNA, 25 bp, Artificial
  Probe
attggtctgatcgttggactgacaa

SEQ ID NO: 31471 - DNA, 25 bp, Artificial
  Probe
aattggtctgatcgttggactgaca

SEQ ID NO: 31472 - DNA, 25 bp, Artificial
  Probe
ggtccaaggacaatctacgtatctc

SEQ ID NO: 31473 - DNA, 25 bp, Artificial
  Probe
cctcaaatggaaacgtgatatgcag

SEQ ID NO: 31474 - DNA, 25 bp, Artificial
  Probe
atgacaaatcccaggatgcaatagg

SEQ ID NO: 31475 - DNA, 25 bp, Artificial
  Probe
aaggacaatctacgtatctcagcca

SEQ ID NO: 31476 - DNA, 25 bp, Artificial
  Probe
ctggtccaaggacaatctacgtatc

SEQ ID NO: 31477 - DNA, 25 bp, Artificial
  Probe
tcaagaacctcaaatggaaacgtga

SEQ ID NO: 31478 - DNA, 25 bp, Artificial
  Probe
tggtccaaggacaatctacgtatct

SEQ ID NO: 31479 - DNA, 25 bp, Artificial
  Probe
tattcctggaaatgcaagcacagat

SEQ ID NO: 31480 - DNA, 25 bp, Artificial
  Probe
acctcaaatggaaacgtgatatgca

SEQ ID NO: 31481 - DNA, 25 bp, Artificial
  Probe
aggacaatctacgtatctcagccag

SEQ ID NO: 31482 - DNA, 25 bp, Artificial
  Probe
caaatggaaacgtgatatgcagtgc

SEQ ID NO: 31483 - DNA, 25 bp, Artificial
  Probe
ggacaatctacgtatctcagccaga

SEQ ID NO: 31484 - DNA, 25 bp, Artificial
  Probe
acaactctgggtctgctgatgttag

SEQ ID NO: 31485 - DNA, 25 bp, Artificial
  Probe
ctgatgacaaatcccaggatgcaat

SEQ ID NO: 31486 - DNA, 25 bp, Artificial
  Probe
ctattcctggaaatgcaagcacaga

SEQ ID NO: 31487 - DNA, 25 bp, Artificial
  Probe
gccagttcaagaacctcaaatggaa

SEQ ID NO: 31488 - DNA, 25 bp, Artificial
  Probe
gacaactctgggtctgctgatgtta

SEQ ID NO: 31489 - DNA, 25 bp, Artificial
  Probe
caattggtctgatcgttggactgac

SEQ ID NO: 31490 - DNA, 25 bp, Artificial
  Probe
caactctgggtctgctgatgttagg

SEQ ID NO: 31491 - DNA, 25 bp, Artificial
  Probe
acaatctacgtatctcagccagagc

SEQ ID NO: 31492 - DNA, 25 bp, Artificial
  Probe
aactctgggtctgctgatgttagga

SEQ ID NO: 31493 - DNA, 25 bp, Artificial
  Probe
aaatggaaacgtgatatgcagtgcc

SEQ ID NO: 31494 - DNA, 25 bp, Artificial
  Probe
cagtctgttcttcattctggtgtag

SEQ ID NO: 31495 - DNA, 25 bp, Artificial
  Probe
agtctgttcttcattctggtgtagc

SEQ ID NO: 31496 - DNA, 25 bp, Artificial
  Probe
taagggttatcgggtagggattatt

SEQ ID NO: 31497 - DNA, 25 bp, Artificial
  Probe
ctgttcttcattctggtgtagcttc

SEQ ID NO: 31498 - DNA, 25 bp, Artificial
  Probe
gtaagggttatcgggtagggattat

SEQ ID NO: 31499 - DNA, 25 bp, Artificial
  Probe
tctgttcttcattctggtgtagctt

SEQ ID NO: 31500 - DNA, 25 bp, Artificial
  Probe
aagggttatcgggtagggattattg

SEQ ID NO: 31501 - DNA, 25 bp, Artificial
  Probe
agtaagggttatcgggtagggatta

SEQ ID NO: 31502 - DNA, 25 bp, Artificial
  Probe
gtctgttcttcattctggtgtagct

SEQ ID NO: 31503 - DNA, 25 bp, Artificial
  Probe
tgttcttcattctggtgtagcttcc

SEQ ID NO: 31504 - DNA, 25 bp, Artificial
  Probe
gttatcgggtagggattattgtggg

SEQ ID NO: 31505 - DNA, 25 bp, Artificial
  Probe
ggttatcgggtagggattattgtgg

SEQ ID NO: 31506 - DNA, 25 bp, Artificial
  Probe
gggttatcgggtagggattattgtg

SEQ ID NO: 31507 - DNA, 25 bp, Artificial
  Probe
agggttatcgggtagggattattgt

SEQ ID NO: 31508 - DNA, 25 bp, Artificial
  Probe
gagtaagggttatcgggtagggatt

SEQ ID NO: 31509 - DNA, 25 bp, Artificial
  Probe
cagtgagtaagggttatcgggtagg

SEQ ID NO: 31510 - DNA, 25 bp, Artificial
  Probe
tgagtaagggttatcgggtagggat

SEQ ID NO: 31511 - DNA, 25 bp, Artificial
  Probe
aaggacccagtctgttcttcattct

SEQ ID NO: 31512 - DNA, 25 bp, Artificial
  Probe
gttcttcattctggtgtagcttccc

SEQ ID NO: 31513 - DNA, 25 bp, Artificial
  Probe
gcagtgagtaagggttatcgggtag

SEQ ID NO: 31514 - DNA, 25 bp, Artificial
  Probe
aggacccagtctgttcttcattctg

SEQ ID NO: 31515 - DNA, 25 bp, Artificial
  Probe
atccatttgccctcacttacccttc

SEQ ID NO: 31516 - DNA, 25 bp, Artificial
  Probe
gtgagtaagggttatcgggtaggga

SEQ ID NO: 31517 - DNA, 25 bp, Artificial
  Probe
agtgagtaagggttatcgggtaggg

SEQ ID NO: 31518 - DNA, 25 bp, Artificial
  Probe
agcagtgagtaagggttatcgggta

SEQ ID NO: 31519 - DNA, 25 bp, Artificial
  Probe
catccatttgccctcacttaccctt

SEQ ID NO: 31520 - DNA, 25 bp, Artificial
  Probe
gattattgtggggctcatccatttg

SEQ ID NO: 31521 - DNA, 25 bp, Artificial
  Probe
ttatcgggtagggattattgtgggg

SEQ ID NO: 31522 - DNA, 25 bp, Artificial
  Probe
gaaggacccagtctgttcttcattc

SEQ ID NO: 31523 - DNA, 25 bp, Artificial
  Probe
ttcttcattctggtgtagcttccca

SEQ ID NO: 31524 - DNA, 25 bp, Artificial
  Probe
ccagtctgttcttcattctggtgta

SEQ ID NO: 31525 - DNA, 25 bp, Artificial
  Probe
tgtgcagcagtgagtaagggttatc

SEQ ID NO: 31526 - DNA, 25 bp, Artificial
  Probe
ggtagggattattgtggggctcatc

SEQ ID NO: 31527 - DNA, 25 bp, Artificial
  Probe
ggaaggacccagtctgttcttcatt

SEQ ID NO: 31528 - DNA, 25 bp, Artificial
  Probe
ctgtgcagcagtgagtaagggttat

SEQ ID NO: 31529 - DNA, 25 bp, Artificial
  Probe
attattgtggggctcatccatttgc

SEQ ID NO: 31530 - DNA, 25 bp, Artificial
  Probe
ggattattgtggggctcatccattt

SEQ ID NO: 31531 - DNA, 25 bp, Artificial
  Probe
ctaccctgactttcatgggcctatg

SEQ ID NO: 31532 - DNA, 25 bp, Artificial
  Probe
tcttcattctggtgtagcttcccag

SEQ ID NO: 31533 - DNA, 25 bp, Artificial
  Probe
gacccagtctgttcttcattctggt

SEQ ID NO: 31534 - DNA, 25 bp, Artificial
  Probe
gtagggattattgtggggctcatcc

SEQ ID NO: 31535 - DNA, 25 bp, Artificial
  Probe
cccagtctgttcttcattctggtgt

SEQ ID NO: 31536 - DNA, 25 bp, Artificial
  Probe
acccagtctgttcttcattctggtg

SEQ ID NO: 31537 - DNA, 25 bp, Artificial
  Probe
gggattattgtggggctcatccatt

SEQ ID NO: 31538 - DNA, 25 bp, Artificial
  Probe
tagggattattgtggggctcatcca

SEQ ID NO: 31539 - DNA, 25 bp, Artificial
  Probe
gaatgagaggatagaacctacagtg

SEQ ID NO: 31540 - DNA, 25 bp, Artificial
  Probe
aatgagaggatagaacctacagtgt

SEQ ID NO: 31541 - DNA, 25 bp, Artificial
  Probe
ggaatgagaggatagaacctacagt

SEQ ID NO: 31542 - DNA, 25 bp, Artificial
  Probe
atgagaggatagaacctacagtgtg

SEQ ID NO: 31543 - DNA, 25 bp, Artificial
  Probe
cataaaggagtgggtagtgtaagca

SEQ ID NO: 31544 - DNA, 25 bp, Artificial
  Probe
tgagaggatagaacctacagtgtgg

SEQ ID NO: 31545 - DNA, 25 bp, Artificial
  Probe
ggcataaaggagtgggtagtgtaag

SEQ ID NO: 31546 - DNA, 25 bp, Artificial
  Probe
gggaatgagaggatagaacctacag

SEQ ID NO: 31547 - DNA, 25 bp, Artificial
  Probe
gtgggaatgagaggatagaacctac

SEQ ID NO: 31548 - DNA, 25 bp, Artificial
  Probe
tgggaatgagaggatagaacctaca

SEQ ID NO: 31549 - DNA, 25 bp, Artificial
  Probe
ataaaggagtgggtagtgtaagcac

SEQ ID NO: 31550 - DNA, 25 bp, Artificial
  Probe
gcataaaggagtgggtagtgtaagc

SEQ ID NO: 31551 - DNA, 25 bp, Artificial
  Probe
gaagctgagtcaaagacactaacag

SEQ ID NO: 31552 - DNA, 25 bp, Artificial
  Probe
tgattcagttttcgtgcctctttaa

SEQ ID NO: 31553 - DNA, 25 bp, Artificial
  Probe
ggtgggaatgagaggatagaaccta

SEQ ID NO: 31554 - DNA, 25 bp, Artificial
  Probe
gggcataaaggagtgggtagtgtaa

SEQ ID NO: 31555 - DNA, 25 bp, Artificial
  Probe
gaggaagctgagtcaaagacactaa

SEQ ID NO: 31556 - DNA, 25 bp, Artificial
  Probe
aggaagctgagtcaaagacactaac

SEQ ID NO: 31557 - DNA, 25 bp, Artificial
  Probe
tatctcagaagcccaaggaagagtg

SEQ ID NO: 31558 - DNA, 25 bp, Artificial
  Probe
gtatctcagaagcccaaggaagagt

SEQ ID NO: 31559 - DNA, 25 bp, Artificial
  Probe
gagaggatagaacctacagtgtggg

SEQ ID NO: 31560 - DNA, 25 bp, Artificial
  Probe
aagctgagtcaaagacactaacagg

SEQ ID NO: 31561 - DNA, 25 bp, Artificial
  Probe
ggaagctgagtcaaagacactaaca

SEQ ID NO: 31562 - DNA, 25 bp, Artificial
  Probe
gattcagttttcgtgcctctttaaa

SEQ ID NO: 31563 - DNA, 25 bp, Artificial
  Probe
agaggaagctgagtcaaagacacta

SEQ ID NO: 31564 - DNA, 25 bp, Artificial
  Probe
ctctttaaaacctccgcaaattctg

SEQ ID NO: 31565 - DNA, 25 bp, Artificial
  Probe
agggcataaaggagtgggtagtgta

SEQ ID NO: 31566 - DNA, 25 bp, Artificial
  Probe
cctctttaaaacctccgcaaattct

SEQ ID NO: 31567 - DNA, 25 bp, Artificial
  Probe
ggtatctcagaagcccaaggaagag

SEQ ID NO: 31568 - DNA, 25 bp, Artificial
  Probe
ctgattcagttttcgtgcctcttta

SEQ ID NO: 31569 - DNA, 25 bp, Artificial
  Probe
attcagttttcgtgcctctttaaaa

SEQ ID NO: 31570 - DNA, 25 bp, Artificial
  Probe
gagaggaagctgagtcaaagacact

SEQ ID NO: 31571 - DNA, 25 bp, Artificial
  Probe
gtgggtagtgtaagcactttctttg

SEQ ID NO: 31572 - DNA, 25 bp, Artificial
  Probe
agtgggtagtgtaagcactttcttt

SEQ ID NO: 31573 - DNA, 25 bp, Artificial
  Probe
agctgagtcaaagacactaacaggg

SEQ ID NO: 31574 - DNA, 25 bp, Artificial
  Probe
cctccttccttttcccacagattct

SEQ ID NO: 31575 - DNA, 25 bp, Artificial
  Probe
gcctctttaaaacctccgcaaattc

SEQ ID NO: 31576 - DNA, 25 bp, Artificial
  Probe
ctccttccttttcccacagattctg

SEQ ID NO: 31577 - DNA, 25 bp, Artificial
  Probe
gagtgggtagtgtaagcactttctt

SEQ ID NO: 31578 - DNA, 25 bp, Artificial
  Probe
caggagaggaagctgagtcaaagac

SEQ ID NO: 31579 - DNA, 25 bp, Artificial
  Probe
taaaggagtgggtagtgtaagcact

SEQ ID NO: 31580 - DNA, 25 bp, Artificial
  Probe
ttaaaacctccgcaaattctgcttc

SEQ ID NO: 31581 - DNA, 25 bp, Artificial
  Probe
gggtgggaatgagaggatagaacct

SEQ ID NO: 31582 - DNA, 25 bp, Artificial
  Probe
tgggtagtgtaagcactttctttgg

SEQ ID NO: 31583 - DNA, 25 bp, Artificial
  Probe
tttaaaacctccgcaaattctgctt

SEQ ID NO: 31584 - DNA, 25 bp, Artificial
  Probe
taatcttcaaggatgaggagaacag

SEQ ID NO: 31585 - DNA, 25 bp, Artificial
  Probe
gacataatcttcaaggatgaggaga

SEQ ID NO: 31586 - DNA, 25 bp, Artificial
  Probe
ataatcttcaaggatgaggagaaca

SEQ ID NO: 31587 - DNA, 25 bp, Artificial
  Probe
acataatcttcaaggatgaggagaa

SEQ ID NO: 31588 - DNA, 25 bp, Artificial
  Probe
cgacataatcttcaaggatgaggag

SEQ ID NO: 31589 - DNA, 25 bp, Artificial
  Probe
cataatcttcaaggatgaggagaac

SEQ ID NO: 31590 - DNA, 25 bp, Artificial
  Probe
ccgacataatcttcaaggatgagga

SEQ ID NO: 31591 - DNA, 25 bp, Artificial
  Probe
aatcttcaaggatgaggagaacagc

SEQ ID NO: 31592 - DNA, 25 bp, Artificial
  Probe
cccgacataatcttcaaggatgagg

SEQ ID NO: 31593 - DNA, 25 bp, Artificial
  Probe
ctacaaccccgacataatcttcaag

SEQ ID NO: 31594 - DNA, 25 bp, Artificial
  Probe
atcttcaaggatgaggagaacagcg

SEQ ID NO: 31595 - DNA, 25 bp, Artificial
  Probe
caactacaaccccgacataatcttc

SEQ ID NO: 31596 - DNA, 25 bp, Artificial
  Probe
actacaaccccgacataatcttcaa

SEQ ID NO: 31597 - DNA, 25 bp, Artificial
  Probe
aactacaaccccgacataatcttca

SEQ ID NO: 31598 - DNA, 25 bp, Artificial
  Probe
tacaaccccgacataatcttcaagg

SEQ ID NO: 31599 - DNA, 25 bp, Artificial
  Probe
ccaactacaaccccgacataatctt

SEQ ID NO: 31600 - DNA, 25 bp, Artificial
  Probe
caaccccgacataatcttcaaggat

SEQ ID NO: 31601 - DNA, 25 bp, Artificial
  Probe
ctacaagcagtttgtgcctagtatg

SEQ ID NO: 31602 - DNA, 25 bp, Artificial
  Probe
tctacaagcagtttgtgcctagtat

SEQ ID NO: 31603 - DNA, 25 bp, Artificial
  Probe
aaccccgacataatcttcaaggatg

SEQ ID NO: 31604 - DNA, 25 bp, Artificial
  Probe
ccccgacataatcttcaaggatgag

SEQ ID NO: 31605 - DNA, 25 bp, Artificial
  Probe
ctctacaagcagtttgtgcctagta

SEQ ID NO: 31606 - DNA, 25 bp, Artificial
  Probe
accccgacataatcttcaaggatga

SEQ ID NO: 31607 - DNA, 25 bp, Artificial
  Probe
acaaccccgacataatcttcaagga

SEQ ID NO: 31608 - DNA, 25 bp, Artificial
  Probe
tacaagcagtttgtgcctagtatgc

SEQ ID NO: 31609 - DNA, 25 bp, Artificial
  Probe
cccaactacaaccccgacataatct

SEQ ID NO: 31610 - DNA, 25 bp, Artificial
  Probe
ccccaactacaaccccgacataatc

SEQ ID NO: 31611 - DNA, 25 bp, Artificial
  Probe
gctctacaagcagtttgtgcctagt

SEQ ID NO: 31612 - DNA, 25 bp, Artificial
  Probe
atactgaactgtaccaacattgact

SEQ ID NO: 31613 - DNA, 25 bp, Artificial
  Probe
tactgaactgtaccaacattgactg

SEQ ID NO: 31614 - DNA, 25 bp, Artificial
  Probe
aatactgaactgtaccaacattgac

SEQ ID NO: 31615 - DNA, 25 bp, Artificial
  Probe
gaatactgaactgtaccaacattga

SEQ ID NO: 31616 - DNA, 25 bp, Artificial
  Probe
agaatactgaactgtaccaacattg

SEQ ID NO: 31617 - DNA, 25 bp, Artificial
  Probe
caagaatactgaactgtaccaacat

SEQ ID NO: 31618 - DNA, 25 bp, Artificial
  Probe
gcaagaatactgaactgtaccaaca

SEQ ID NO: 31619 - DNA, 25 bp, Artificial
  Probe
aagaatactgaactgtaccaacatt

SEQ ID NO: 31620 - DNA, 25 bp, Artificial
  Probe
ttgacttggaaccatgaacacctaa

SEQ ID NO: 31621 - DNA, 25 bp, Artificial
  Probe
ctgcaagaatactgaactgtaccaa

SEQ ID NO: 31622 - DNA, 25 bp, Artificial
  Probe
gctttatggaagtgtggattctttg

SEQ ID NO: 31623 - DNA, 25 bp, Artificial
  Probe
tggaagtgtggattctttgatagag

SEQ ID NO: 31624 - DNA, 25 bp, Artificial
  Probe
atggaagtgtggattctttgataga

SEQ ID NO: 31625 - DNA, 25 bp, Artificial
  Probe
tgcaagaatactgaactgtaccaac

SEQ ID NO: 31626 - DNA, 25 bp, Artificial
  Probe
ctttatggaagtgtggattctttga

SEQ ID NO: 31627 - DNA, 25 bp, Artificial
  Probe
aagtgtggattctttgatagagcaa

SEQ ID NO: 31628 - DNA, 25 bp, Artificial
  Probe
gaagtgtggattctttgatagagca

SEQ ID NO: 31629 - DNA, 25 bp, Artificial
  Probe
cttgacttggaaccatgaacaccta

SEQ ID NO: 31630 - DNA, 25 bp, Artificial
  Probe
agtgtggattctttgatagagcaag

SEQ ID NO: 31631 - DNA, 25 bp, Artificial
  Probe
tttatggaagtgtggattctttgat

SEQ ID NO: 31632 - DNA, 25 bp, Artificial
  Probe
ggaagtgtggattctttgatagagc

SEQ ID NO: 31633 - DNA, 25 bp, Artificial
  Probe
gaactgtaccaacattgactgcttg

SEQ ID NO: 31634 - DNA, 25 bp, Artificial
  Probe
tatggaagtgtggattctttgatag

SEQ ID NO: 31635 - DNA, 25 bp, Artificial
  Probe
ttatggaagtgtggattctttgata

SEQ ID NO: 31636 - DNA, 25 bp, Artificial
  Probe
tgaactgtaccaacattgactgctt

SEQ ID NO: 31637 - DNA, 25 bp, Artificial
  Probe
cctgcaagaatactgaactgtacca

SEQ ID NO: 31638 - DNA, 25 bp, Artificial
  Probe
tagctttatggaagtgtggattctt

SEQ ID NO: 31639 - DNA, 25 bp, Artificial
  Probe
ttagctttatggaagtgtggattct

SEQ ID NO: 31640 - DNA, 25 bp, Artificial
  Probe
agctttatggaagtgtggattcttt

SEQ ID NO: 31641 - DNA, 25 bp, Artificial
  Probe
tttagctttatggaagtgtggattc

SEQ ID NO: 31642 - DNA, 25 bp, Artificial
  Probe
ctttagctttatggaagtgtggatt

SEQ ID NO: 31643 - DNA, 25 bp, Artificial
  Probe
ctgaactgtaccaacattgactgct

SEQ ID NO: 31644 - DNA, 25 bp, Artificial
  Probe
tggtgtcctttgaagtcaagaagat

SEQ ID NO: 31645 - DNA, 25 bp, Artificial
  Probe
ctttgatagagcaagacctcctcag

SEQ ID NO: 31646 - DNA, 25 bp, Artificial
  Probe
tgacttggaaccatgaacacctaaa

SEQ ID NO: 31647 - DNA, 25 bp, Artificial
  Probe
actgaactgtaccaacattgactgc

SEQ ID NO: 31648 - DNA, 25 bp, Artificial
  Probe
ctggtgtcctttgaagtcaagaaga

SEQ ID NO: 31649 - DNA, 25 bp, Artificial
  Probe
tgtggattctttgatagagcaagac

SEQ ID NO: 31650 - DNA, 25 bp, Artificial
  Probe
gtgtggattctttgatagagcaaga

SEQ ID NO: 31651 - DNA, 25 bp, Artificial
  Probe
gattctttgatagagcaagacctcc

SEQ ID NO: 31652 - DNA, 25 bp, Artificial
  Probe
ggattctttgatagagcaagacctc

SEQ ID NO: 31653 - DNA, 25 bp, Artificial
  Probe
attctttgatagagcaagacctcct

SEQ ID NO: 31654 - DNA, 25 bp, Artificial
  Probe
aattcaagcactggtcctgttcaaa

SEQ ID NO: 31655 - DNA, 25 bp, Artificial
  Probe
aaattcaagcactggtcctgttcaa

SEQ ID NO: 31656 - DNA, 25 bp, Artificial
  Probe
tggattctttgatagagcaagacct

SEQ ID NO: 31657 - DNA, 25 bp, Artificial
  Probe
cttcattgatacaagccagttcatc

SEQ ID NO: 31658 - DNA, 25 bp, Artificial
  Probe
tcattgatacaagccagttcatctt

SEQ ID NO: 31659 - DNA, 25 bp, Artificial
  Probe
ttcattgatacaagccagttcatct

SEQ ID NO: 31660 - DNA, 25 bp, Artificial
  Probe
cattgatacaagccagttcatctta

SEQ ID NO: 31661 - DNA, 25 bp, Artificial
  Probe
attgatacaagccagttcatcttaa

SEQ ID NO: 31662 - DNA, 25 bp, Artificial
  Probe
cctgagaatgaacaaagaccaattt

SEQ ID NO: 31663 - DNA, 25 bp, Artificial
  Probe
aactcccaattctcttcatcatctt

SEQ ID NO: 31664 - DNA, 25 bp, Artificial
  Probe
ctgagtcggttaaagaaatggctat

SEQ ID NO: 31665 - DNA, 25 bp, Artificial
  Probe
atacaagccagttcatcttaaatcg

SEQ ID NO: 31666 - DNA, 25 bp, Artificial
  Probe
acctgagaatgaacaaagaccaatt

SEQ ID NO: 31667 - DNA, 25 bp, Artificial
  Probe
taactcccaattctcttcatcatct

SEQ ID NO: 31668 - DNA, 25 bp, Artificial
  Probe
tgagtcggttaaagaaatggctatg

SEQ ID NO: 31669 - DNA, 25 bp, Artificial
  Probe
cacctgagaatgaacaaagaccaat

SEQ ID NO: 31670 - DNA, 25 bp, Artificial
  Probe
actcccaattctcttcatcatcttg

SEQ ID NO: 31671 - DNA, 25 bp, Artificial
  Probe
ttaactcccaattctcttcatcatc

SEQ ID NO: 31672 - DNA, 25 bp, Artificial
  Probe
caattctcttcatcatcttgggaca

SEQ ID NO: 31673 - DNA, 25 bp, Artificial
  Probe
gattaactcccaattctcttcatca

SEQ ID NO: 31674 - DNA, 25 bp, Artificial
  Probe
gagtcggttaaagaaatggctatgg

SEQ ID NO: 31675 - DNA, 25 bp, Artificial
  Probe
ttgatacaagccagttcatcttaaa

SEQ ID NO: 31676 - DNA, 25 bp, Artificial
  Probe
tgatacaagccagttcatcttaaat

SEQ ID NO: 31677 - DNA, 25 bp, Artificial
  Probe
gatacaagccagttcatcttaaatc

SEQ ID NO: 31678 - DNA, 25 bp, Artificial
  Probe
gctttctcaaggtcccttattaact

SEQ ID NO: 31679 - DNA, 25 bp, Artificial
  Probe
attaactcccaattctcttcatcat

SEQ ID NO: 31680 - DNA, 25 bp, Artificial
  Probe
ggattaactcccaattctcttcatc

SEQ ID NO: 31681 - DNA, 25 bp, Artificial
  Probe
tctcaaggtcccttattaactactt

SEQ ID NO: 31682 - DNA, 25 bp, Artificial
  Probe
ttctcaaggtcccttattaactact

SEQ ID NO: 31683 - DNA, 25 bp, Artificial
  Probe
tacaagccagttcatcttaaatcga

SEQ ID NO: 31684 - DNA, 25 bp, Artificial
  Probe
tcacctgagaatgaacaaagaccaa

SEQ ID NO: 31685 - DNA, 25 bp, Artificial
  Probe
cgctttctcaaggtcccttattaac

SEQ ID NO: 31686 - DNA, 25 bp, Artificial
  Probe
agtcggttaaagaaatggctatggg

SEQ ID NO: 31687 - DNA, 25 bp, Artificial
  Probe
ctcaaggtcccttattaactacttt

SEQ ID NO: 31688 - DNA, 25 bp, Artificial
  Probe
tttctcaaggtcccttattaactac

SEQ ID NO: 31689 - DNA, 25 bp, Artificial
  Probe
aaagtagttcaagaagggaagagct

SEQ ID NO: 31690 - DNA, 25 bp, Artificial
  Probe
acaagccagttcatcttaaatcgac

SEQ ID NO: 31691 - DNA, 25 bp, Artificial
  Probe
ctttctcaaggtcccttattaacta

SEQ ID NO: 31692 - DNA, 25 bp, Artificial
  Probe
gctgagtcggttaaagaaatggcta

SEQ ID NO: 31693 - DNA, 25 bp, Artificial
  Probe
ttaagctaactgtgtggtaataatt

SEQ ID NO: 31694 - DNA, 25 bp, Artificial
  Probe
aagtagttcaagaagggaagagctg

SEQ ID NO: 31695 - DNA, 25 bp, Artificial
  Probe
ggaaaagtagttcaagaagggaaga

SEQ ID NO: 31696 - DNA, 25 bp, Artificial
  Probe
tggaaaagtagttcaagaagggaag

SEQ ID NO: 31697 - DNA, 25 bp, Artificial
  Probe
gaaaagtagttcaagaagggaagag

SEQ ID NO: 31698 - DNA, 25 bp, Artificial
  Probe
gtcacctgagaatgaacaaagacca

SEQ ID NO: 31699 - DNA, 25 bp, Artificial
  Probe
tgtcacctgagaatgaacaaagacc

SEQ ID NO: 31700 - DNA, 25 bp, Artificial
  Probe
ctgctgctgagtcggttaaagaaat

SEQ ID NO: 31701 - DNA, 25 bp, Artificial
  Probe
aaaagtagttcaagaagggaagagc

SEQ ID NO: 31702 - DNA, 25 bp, Artificial
  Probe
agatggacacactgataactaacaa

SEQ ID NO: 31703 - DNA, 25 bp, Artificial
  Probe
acactgataactaacaatgcctctg

SEQ ID NO: 31704 - DNA, 25 bp, Artificial
  Probe
cacactgataactaacaatgcctct

SEQ ID NO: 31705 - DNA, 25 bp, Artificial
  Probe
atggacacactgataactaacaatg

SEQ ID NO: 31706 - DNA, 25 bp, Artificial
  Probe
acacactgataactaacaatgcctc

SEQ ID NO: 31707 - DNA, 25 bp, Artificial
  Probe
gacacactgataactaacaatgcct

SEQ ID NO: 31708 - DNA, 25 bp, Artificial
  Probe
gatggacacactgataactaacaat

SEQ ID NO: 31709 - DNA, 25 bp, Artificial
  Probe
tggacacactgataactaacaatgc

SEQ ID NO: 31710 - DNA, 25 bp, Artificial
  Probe
agatgttctgaattgccacttctag

SEQ ID NO: 31711 - DNA, 25 bp, Artificial
  Probe
ctgataactaacaatgcctctgtct

SEQ ID NO: 31712 - DNA, 25 bp, Artificial
  Probe
ggacacactgataactaacaatgcc

SEQ ID NO: 31713 - DNA, 25 bp, Artificial
  Probe
tgataactaacaatgcctctgtctg

SEQ ID NO: 31714 - DNA, 25 bp, Artificial
  Probe
actgataactaacaatgcctctgtc

SEQ ID NO: 31715 - DNA, 25 bp, Artificial
  Probe
cactgataactaacaatgcctctgt

SEQ ID NO: 31716 - DNA, 25 bp, Artificial
  Probe
cagatggacacactgataactaaca

SEQ ID NO: 31717 - DNA, 25 bp, Artificial
  Probe
gatgttctgaattgccacttctagg

SEQ ID NO: 31718 - DNA, 25 bp, Artificial
  Probe
gataactaacaatgcctctgtctgc

SEQ ID NO: 31719 - DNA, 25 bp, Artificial
  Probe
tgaaagacagtgttccaatgaagat

SEQ ID NO: 31720 - DNA, 25 bp, Artificial
  Probe
atgaaagacagtgttccaatgaaga

SEQ ID NO: 31721 - DNA, 25 bp, Artificial
  Probe
gcctagaaattagaccatctctgtg

SEQ ID NO: 31722 - DNA, 25 bp, Artificial
  Probe
gaaagacagtgttccaatgaagatc

SEQ ID NO: 31723 - DNA, 25 bp, Artificial
  Probe
catgaaagacagtgttccaatgaag

SEQ ID NO: 31724 - DNA, 25 bp, Artificial
  Probe
gaataaaccttcaaatcctgctaaa

SEQ ID NO: 31725 - DNA, 25 bp, Artificial
  Probe
gttgggaataaaccttcaaatcctg

SEQ ID NO: 31726 - DNA, 25 bp, Artificial
  Probe
ggaataaaccttcaaatcctgctaa

SEQ ID NO: 31727 - DNA, 25 bp, Artificial
  Probe
gagtggcatgaagaaagagatgatc

SEQ ID NO: 31728 - DNA, 25 bp, Artificial
  Probe
gggaataaaccttcaaatcctgcta

SEQ ID NO: 31729 - DNA, 25 bp, Artificial
  Probe
ctttgacacaactttctcccacttc

SEQ ID NO: 31730 - DNA, 25 bp, Artificial
  Probe
aagacagtgttccaatgaagatctc

SEQ ID NO: 31731 - DNA, 25 bp, Artificial
  Probe
agagtggcatgaagaaagagatgat

SEQ ID NO: 31732 - DNA, 25 bp, Artificial
  Probe
cctagaaattagaccatctctgtgg

SEQ ID NO: 31733 - DNA, 25 bp, Artificial
  Probe
aactttctcccacttcaaggatttc

SEQ ID NO: 31734 - DNA, 25 bp, Artificial
  Probe
caactttctcccacttcaaggattt

SEQ ID NO: 31735 - DNA, 25 bp, Artificial
  Probe
agacagtgttccaatgaagatctct

SEQ ID NO: 31736 - DNA, 25 bp, Artificial
  Probe
ttgggaataaaccttcaaatcctgc

SEQ ID NO: 31737 - DNA, 25 bp, Artificial
  Probe
gagagtggcatgaagaaagagatga

SEQ ID NO: 31738 - DNA, 25 bp, Artificial
  Probe
atgttctgaattgccacttctaggg

SEQ ID NO: 31739 - DNA, 25 bp, Artificial
  Probe
tttgacacaactttctcccacttca

SEQ ID NO: 31740 - DNA, 25 bp, Artificial
  Probe
gacctgtgaaggatgtaagggattt

SEQ ID NO: 31741 - DNA, 25 bp, Artificial
  Probe
aaacctttgacacaactttctccca

SEQ ID NO: 31742 - DNA, 25 bp, Artificial
  Probe
gacagtgttccaatgaagatctctg

SEQ ID NO: 31743 - DNA, 25 bp, Artificial
  Probe
caaacctttgacacaactttctccc

SEQ ID NO: 31744 - DNA, 25 bp, Artificial
  Probe
tcagatggacacactgataactaac

SEQ ID NO: 31745 - DNA, 25 bp, Artificial
  Probe
acaactttctcccacttcaaggatt

SEQ ID NO: 31746 - DNA, 25 bp, Artificial
  Probe
cagtgttccaatgaagatctctgtg

SEQ ID NO: 31747 - DNA, 25 bp, Artificial
  Probe
tggtattggtcaattatcctagtgt

SEQ ID NO: 31748 - DNA, 25 bp, Artificial
  Probe
tggtcaattatcctagtgtcttgtt

SEQ ID NO: 31749 - DNA, 25 bp, Artificial
  Probe
ttggtcaattatcctagtgtcttgt

SEQ ID NO: 31750 - DNA, 25 bp, Artificial
  Probe
ggtattggtcaattatcctagtgtc

SEQ ID NO: 31751 - DNA, 25 bp, Artificial
  Probe
ccttggtattggtcaattatcctag

SEQ ID NO: 31752 - DNA, 25 bp, Artificial
  Probe
attggtcaattatcctagtgtcttg

SEQ ID NO: 31753 - DNA, 25 bp, Artificial
  Probe
ttggtattggtcaattatcctagtg

SEQ ID NO: 31754 - DNA, 25 bp, Artificial
  Probe
gtattggtcaattatcctagtgtct

SEQ ID NO: 31755 - DNA, 25 bp, Artificial
  Probe
cttggtattggtcaattatcctagt

SEQ ID NO: 31756 - DNA, 25 bp, Artificial
  Probe
ctatggttgtggagagtggatgaac

SEQ ID NO: 31757 - DNA, 25 bp, Artificial
  Probe
gttctatggttgtggagagtggatg

SEQ ID NO: 31758 - DNA, 25 bp, Artificial
  Probe
tattggtcaattatcctagtgtctt

SEQ ID NO: 31759 - DNA, 25 bp, Artificial
  Probe
tctatggttgtggagagtggatgaa

SEQ ID NO: 31760 - DNA, 25 bp, Artificial
  Probe
ttctatggttgtggagagtggatga

SEQ ID NO: 31761 - DNA, 25 bp, Artificial
  Probe
ctgtgttctatggttgtggagagtg

SEQ ID NO: 31762 - DNA, 25 bp, Artificial
  Probe
aaaggttatgctgtgtttcatttgc

SEQ ID NO: 31763 - DNA, 25 bp, Artificial
  Probe
taaaggttatgctgtgtttcatttg

SEQ ID NO: 31764 - DNA, 25 bp, Artificial
  Probe
tgttctatggttgtggagagtggat

SEQ ID NO: 31765 - DNA, 25 bp, Artificial
  Probe
cccttggtattggtcaattatccta

SEQ ID NO: 31766 - DNA, 25 bp, Artificial
  Probe
gttcccttggtattggtcaattatc

SEQ ID NO: 31767 - DNA, 25 bp, Artificial
  Probe
ttcccttggtattggtcaattatcc

SEQ ID NO: 31768 - DNA, 25 bp, Artificial
  Probe
ggttcccttggtattggtcaattat

SEQ ID NO: 31769 - DNA, 25 bp, Artificial
  Probe
ggagagtggatgaacaggtaaatct

SEQ ID NO: 31770 - DNA, 25 bp, Artificial
  Probe
tggagagtggatgaacaggtaaatc

SEQ ID NO: 31771 - DNA, 25 bp, Artificial
  Probe
ggtcaattatcctagtgtcttgttt

SEQ ID NO: 31772 - DNA, 25 bp, Artificial
  Probe
tcccttggtattggtcaattatcct

SEQ ID NO: 31773 - DNA, 25 bp, Artificial
  Probe
aaggttatgctgtgtttcatttgct

SEQ ID NO: 31774 - DNA, 25 bp, Artificial
  Probe
gtggagagtggatgaacaggtaaat

SEQ ID NO: 31775 - DNA, 25 bp, Artificial
  Probe
gagagtggatgaacaggtaaatctg

SEQ ID NO: 31776 - DNA, 25 bp, Artificial
  Probe
ttaaaggttatgctgtgtttcattt

SEQ ID NO: 31777 - DNA, 25 bp, Artificial
  Probe
atcctagtgtcttgtttatagctgt

SEQ ID NO: 31778 - DNA, 25 bp, Artificial
  Probe
ttgtggagagtggatgaacaggtaa

SEQ ID NO: 31779 - DNA, 25 bp, Artificial
  Probe
ttatgctgtgtttcatttgctgctt

SEQ ID NO: 31780 - DNA, 25 bp, Artificial
  Probe
aggttatgctgtgtttcatttgctg

SEQ ID NO: 31781 - DNA, 25 bp, Artificial
  Probe
tatggttgtggagagtggatgaaca

SEQ ID NO: 31782 - DNA, 25 bp, Artificial
  Probe
tcctagtgtcttgtttatagctgta

SEQ ID NO: 31783 - DNA, 25 bp, Artificial
  Probe
aggttcccttggtattggtcaatta

SEQ ID NO: 31784 - DNA, 25 bp, Artificial
  Probe
gtgttctatggttgtggagagtgga

SEQ ID NO: 31785 - DNA, 25 bp, Artificial
  Probe
cctgtgttctatggttgtggagagt

SEQ ID NO: 31786 - DNA, 25 bp, Artificial
  Probe
gttatgctgtgtttcatttgctgct

SEQ ID NO: 31787 - DNA, 25 bp, Artificial
  Probe
cctagtgtcttgtttatagctgtat

SEQ ID NO: 31788 - DNA, 25 bp, Artificial
  Probe
tgtgttctatggttgtggagagtgg

SEQ ID NO: 31789 - DNA, 25 bp, Artificial
  Probe
gttgtggagagtggatgaacaggta

SEQ ID NO: 31790 - DNA, 25 bp, Artificial
  Probe
tttaaaggttatgctgtgtttcatt

SEQ ID NO: 31791 - DNA, 25 bp, Artificial
  Probe
tatcctagtgtcttgtttatagctg

SEQ ID NO: 31792 - DNA, 25 bp, Artificial
  Probe
ttattcctgtggtgatactcattgg

SEQ ID NO: 31793 - DNA, 25 bp, Artificial
  Probe
ggttattcctgtggtgatactcatt

SEQ ID NO: 31794 - DNA, 25 bp, Artificial
  Probe
gttattcctgtggtgatactcattg

SEQ ID NO: 31795 - DNA, 25 bp, Artificial
  Probe
gtggtgatactcattggagattagt

SEQ ID NO: 31796 - DNA, 25 bp, Artificial
  Probe
tgtggtgatactcattggagattag

SEQ ID NO: 31797 - DNA, 25 bp, Artificial
  Probe
ctgtggtgatactcattggagatta

SEQ ID NO: 31798 - DNA, 25 bp, Artificial
  Probe
tggttattcctgtggtgatactcat

SEQ ID NO: 31799 - DNA, 25 bp, Artificial
  Probe
ttggttattcctgtggtgatactca

SEQ ID NO: 31800 - DNA, 25 bp, Artificial
  Probe
tattcctgtggtgatactcattgga

SEQ ID NO: 31801 - DNA, 25 bp, Artificial
  Probe
cctgtggtgatactcattggagatt

SEQ ID NO: 31802 - DNA, 25 bp, Artificial
  Probe
tttggttattcctgtggtgatactc

SEQ ID NO: 31803 - DNA, 25 bp, Artificial
  Probe
ctcctgatggtaacatttctctttg

SEQ ID NO: 31804 - DNA, 25 bp, Artificial
  Probe
tctcctgatggtaacatttctcttt

SEQ ID NO: 31805 - DNA, 25 bp, Artificial
  Probe
atctcctgatggtaacatttctctt

SEQ ID NO: 31806 - DNA, 25 bp, Artificial
  Probe
tggtgatactcattggagattagta

SEQ ID NO: 31807 - DNA, 25 bp, Artificial
  Probe
tcctgatggtaacatttctctttgg

SEQ ID NO: 31808 - DNA, 25 bp, Artificial
  Probe
attcctgtggtgatactcattggag

SEQ ID NO: 31809 - DNA, 25 bp, Artificial
  Probe
tggagattagtaacctataacaagt

SEQ ID NO: 31810 - DNA, 25 bp, Artificial
  Probe
cctgatggtaacatttctctttggg

SEQ ID NO: 31811 - DNA, 25 bp, Artificial
  Probe
aattgtgcctttatgtactggtaag

SEQ ID NO: 31812 - DNA, 25 bp, Artificial
  Probe
aaattgtgcctttatgtactggtaa

SEQ ID NO: 31813 - DNA, 25 bp, Artificial
  Probe
tagtaacctataacaagtacacgaa

SEQ ID NO: 31814 - DNA, 25 bp, Artificial
  Probe
ttagtaacctataacaagtacacga

SEQ ID NO: 31815 - DNA, 25 bp, Artificial
  Probe
attgtgcctttatgtactggtaagt

SEQ ID NO: 31816 - DNA, 25 bp, Artificial
  Probe
tgatactcattggagattagtaacc

SEQ ID NO: 31817 - DNA, 25 bp, Artificial
  Probe
ggtgatactcattggagattagtaa

SEQ ID NO: 31818 - DNA, 25 bp, Artificial
  Probe
tcctgtggtgatactcattggagat

SEQ ID NO: 31819 - DNA, 25 bp, Artificial
  Probe
gatactcattggagattagtaacct

SEQ ID NO: 31820 - DNA, 25 bp, Artificial
  Probe
aaagagctgtcaggattaaagtcaa

SEQ ID NO: 31821 - DNA, 25 bp, Artificial
  Probe
taaagagctgtcaggattaaagtca

SEQ ID NO: 31822 - DNA, 25 bp, Artificial
  Probe
ttcctgtggtgatactcattggaga

SEQ ID NO: 31823 - DNA, 25 bp, Artificial
  Probe
tctatcatctcctgatggtaacatt

SEQ ID NO: 31824 - DNA, 25 bp, Artificial
  Probe
aatctatcatctcctgatggtaaca

SEQ ID NO: 31825 - DNA, 25 bp, Artificial
  Probe
ataaagagctgtcaggattaaagtc

SEQ ID NO: 31826 - DNA, 25 bp, Artificial
  Probe
agtaacctataacaagtacacgaaa

SEQ ID NO: 31827 - DNA, 25 bp, Artificial
  Probe
gcctttatgtactggtaagtatggt

SEQ ID NO: 31828 - DNA, 25 bp, Artificial
  Probe
tgcctttatgtactggtaagtatgg

SEQ ID NO: 31829 - DNA, 25 bp, Artificial
  Probe
atctatcatctcctgatggtaacat

SEQ ID NO: 31830 - DNA, 25 bp, Artificial
  Probe
ttgtgcctttatgtactggtaagta

SEQ ID NO: 31831 - DNA, 25 bp, Artificial
  Probe
tgtgcctttatgtactggtaagtat

SEQ ID NO: 31832 - DNA, 25 bp, Artificial
  Probe
tttgtggttgattactccaagtgag

SEQ ID NO: 31833 - DNA, 25 bp, Artificial
  Probe
gtgcctttatgtactggtaagtatg

SEQ ID NO: 31834 - DNA, 25 bp, Artificial
  Probe
cattggagattagtaacctataaca

SEQ ID NO: 31835 - DNA, 25 bp, Artificial
  Probe
aataaagagctgtcaggattaaagt

SEQ ID NO: 31836 - DNA, 25 bp, Artificial
  Probe
attagtaacctataacaagtacacg

SEQ ID NO: 31837 - DNA, 25 bp, Artificial
  Probe
cattcgtggaccagtgaagaagaag

SEQ ID NO: 31838 - DNA, 25 bp, Artificial
  Probe
tttgtcccatgtcagcattcatcaa

SEQ ID NO: 31839 - DNA, 25 bp, Artificial
  Probe
tgatggcaaatacaaatgttgtgag

SEQ ID NO: 31840 - DNA, 25 bp, Artificial
  Probe
gtgatggcaaatacaaatgttgtga

SEQ ID NO: 31841 - DNA, 25 bp, Artificial
  Probe
tgtgatggcaaatacaaatgttgtg

SEQ ID NO: 31842 - DNA, 25 bp, Artificial
  Probe
gatggcaaatacaaatgttgtgagg

SEQ ID NO: 31843 - DNA, 25 bp, Artificial
  Probe
ttgtcccatgtcagcattcatcaag

SEQ ID NO: 31844 - DNA, 25 bp, Artificial
  Probe
attcgtggaccagtgaagaagaagc

SEQ ID NO: 31845 - DNA, 25 bp, Artificial
  Probe
atggcaaatacaaatgttgtgaggg

SEQ ID NO: 31846 - DNA, 25 bp, Artificial
  Probe
ccattcgtggaccagtgaagaagaa

SEQ ID NO: 31847 - DNA, 25 bp, Artificial
  Probe
attcatcaagcccctaaggaaatgc

SEQ ID NO: 31848 - DNA, 25 bp, Artificial
  Probe
cattcatcaagcccctaaggaaatg

SEQ ID NO: 31849 - DNA, 25 bp, Artificial
  Probe
gcattcatcaagcccctaaggaaat

SEQ ID NO: 31850 - DNA, 25 bp, Artificial
  Probe
ttttgtcccatgtcagcattcatca

SEQ ID NO: 31851 - DNA, 25 bp, Artificial
  Probe
aataaataaaggcaatcatttctct

SEQ ID NO: 31852 - DNA, 25 bp, Artificial
  Probe
ttctggaaactacttccctgctttc

SEQ ID NO: 31853 - DNA, 25 bp, Artificial
  Probe
catttgaataatgtttatttctgcc

SEQ ID NO: 31854 - DNA, 25 bp, Artificial
  Probe
gttctggaaactacttccctgcttt

SEQ ID NO: 31855 - DNA, 25 bp, Artificial
  Probe
atgtcagcattcatcaagcccctaa

SEQ ID NO: 31856 - DNA, 25 bp, Artificial
  Probe
agcattcatcaagcccctaaggaaa

SEQ ID NO: 31857 - DNA, 25 bp, Artificial
  Probe
ctggaaactacttccctgctttcag

SEQ ID NO: 31858 - DNA, 25 bp, Artificial
  Probe
tctggaaactacttccctgctttca

SEQ ID NO: 31859 - DNA, 25 bp, Artificial
  Probe
atgttctggaaactacttccctgct

SEQ ID NO: 31860 - DNA, 25 bp, Artificial
  Probe
tgtcagcattcatcaagcccctaag

SEQ ID NO: 31861 - DNA, 25 bp, Artificial
  Probe
tgttctggaaactacttccctgctt

SEQ ID NO: 31862 - DNA, 25 bp, Artificial
  Probe
cagcattcatcaagcccctaaggaa

SEQ ID NO: 31863 - DNA, 25 bp, Artificial
  Probe
catgtcagcattcatcaagccccta

SEQ ID NO: 31864 - DNA, 25 bp, Artificial
  Probe
ttcatcaagcccctaaggaaatgct

SEQ ID NO: 31865 - DNA, 25 bp, Artificial
  Probe
atcaagcccctaaggaaatgctgtt

SEQ ID NO: 31866 - DNA, 25 bp, Artificial
  Probe
gctttggacatttgaataatgttta

SEQ ID NO: 31867 - DNA, 25 bp, Artificial
  Probe
tcatcaagcccctaaggaaatgctg

SEQ ID NO: 31868 - DNA, 25 bp, Artificial
  Probe
catcaagcccctaaggaaatgctgt

SEQ ID NO: 31869 - DNA, 25 bp, Artificial
  Probe
tggaaactacttccctgctttcagg

SEQ ID NO: 31870 - DNA, 25 bp, Artificial
  Probe
acatttgaataatgtttatttctgc

SEQ ID NO: 31871 - DNA, 25 bp, Artificial
  Probe
cattggagaggatggtcatgtctac

SEQ ID NO: 31872 - DNA, 25 bp, Artificial
  Probe
tcattggagaggatggtcatgtcta

SEQ ID NO: 31873 - DNA, 25 bp, Artificial
  Probe
ctgccctaaatcttctgaaatgtgg

SEQ ID NO: 31874 - DNA, 25 bp, Artificial
  Probe
tctaactatgaggtcaaaggacatc

SEQ ID NO: 31875 - DNA, 25 bp, Artificial
  Probe
ctaactatgaggtcaaaggacatcg

SEQ ID NO: 31876 - DNA, 25 bp, Artificial
  Probe
atctaactatgaggtcaaaggacat

SEQ ID NO: 31877 - DNA, 25 bp, Artificial
  Probe
gctgccctaaatcttctgaaatgtg

SEQ ID NO: 31878 - DNA, 25 bp, Artificial
  Probe
gtgctgccctaaatcttctgaaatg

SEQ ID NO: 31879 - DNA, 25 bp, Artificial
  Probe
gatctaactatgaggtcaaaggaca

SEQ ID NO: 31880 - DNA, 25 bp, Artificial
  Probe
tgctgccctaaatcttctgaaatgt

SEQ ID NO: 31881 - DNA, 25 bp, Artificial
  Probe
tcctgagatctaactatgaggtcaa

SEQ ID NO: 31882 - DNA, 25 bp, Artificial
  Probe
ttcctgagatctaactatgaggtca

SEQ ID NO: 31883 - DNA, 25 bp, Artificial
  Probe
cttcctgagatctaactatgaggtc

SEQ ID NO: 31884 - DNA, 25 bp, Artificial
  Probe
attggagaggatggtcatgtctacg

SEQ ID NO: 31885 - DNA, 25 bp, Artificial
  Probe
ctcattggagaggatggtcatgtct

SEQ ID NO: 31886 - DNA, 25 bp, Artificial
  Probe
gcttcctgagatctaactatgaggt

SEQ ID NO: 31887 - DNA, 25 bp, Artificial
  Probe
taactatgaggtcaaaggacatcga

SEQ ID NO: 31888 - DNA, 25 bp, Artificial
  Probe
gagatcttgagaccttgtggagttc

SEQ ID NO: 31889 - DNA, 25 bp, Artificial
  Probe
gagagtgagatcttgagaccttgtg

SEQ ID NO: 31890 - DNA, 25 bp, Artificial
  Probe
gagaggatggtcatgtctacgaagg

SEQ ID NO: 31891 - DNA, 25 bp, Artificial
  Probe
ggagaggatggtcatgtctacgaag

SEQ ID NO: 31892 - DNA, 25 bp, Artificial
  Probe
ggcttcctgagatctaactatgagg

SEQ ID NO: 31893 - DNA, 25 bp, Artificial
  Probe
ctaaatcttctgaaatgtggggtgt

SEQ ID NO: 31894 - DNA, 25 bp, Artificial
  Probe
taaatcttctgaaatgtggggtgtc

SEQ ID NO: 31895 - DNA, 25 bp, Artificial
  Probe
ctatgaggtcaaaggacatcgagat

SEQ ID NO: 31896 - DNA, 25 bp, Artificial
  Probe
cgtgctgccctaaatcttctgaaat

SEQ ID NO: 31897 - DNA, 25 bp, Artificial
  Probe
tatgaggtcaaaggacatcgagatg

SEQ ID NO: 31898 - DNA, 25 bp, Artificial
  Probe
gagatctaactatgaggtcaaagga

SEQ ID NO: 31899 - DNA, 25 bp, Artificial
  Probe
cctaaatcttctgaaatgtggggtg

SEQ ID NO: 31900 - DNA, 25 bp, Artificial
  Probe
aactatgaggtcaaaggacatcgag

SEQ ID NO: 31901 - DNA, 25 bp, Artificial
  Probe
tgagatcttgagaccttgtggagtt

SEQ ID NO: 31902 - DNA, 25 bp, Artificial
  Probe
actaccgagagtgagatcttgagac

SEQ ID NO: 31903 - DNA, 25 bp, Artificial
  Probe
tgagatctaactatgaggtcaaagg

SEQ ID NO: 31904 - DNA, 25 bp, Artificial
  Probe
atgtctatcggcatcaccttcatgg

SEQ ID NO: 31905 - DNA, 25 bp, Artificial
  Probe
ccatgtctatcggcatcaccttcat

SEQ ID NO: 31906 - DNA, 25 bp, Artificial
  Probe
gggcttcctgagatctaactatgag

SEQ ID NO: 31907 - DNA, 25 bp, Artificial
  Probe
aaatcttctgaaatgtggggtgtct

SEQ ID NO: 31908 - DNA, 25 bp, Artificial
  Probe
agtgagatcttgagaccttgtggag

SEQ ID NO: 31909 - DNA, 25 bp, Artificial
  Probe
gagtgagatcttgagaccttgtgga

SEQ ID NO: 31910 - DNA, 25 bp, Artificial
  Probe
agatctaactatgaggtcaaaggac

SEQ ID NO: 31911 - DNA, 25 bp, Artificial
  Probe
tggagaggatggtcatgtctacgaa

SEQ ID NO: 31912 - DNA, 25 bp, Artificial
  Probe
ttggagaggatggtcatgtctacga

SEQ ID NO: 31913 - DNA, 25 bp, Artificial
  Probe
actatgaggtcaaaggacatcgaga

SEQ ID NO: 31914 - DNA, 25 bp, Artificial
  Probe
cctgagatctaactatgaggtcaaa

SEQ ID NO: 31915 - DNA, 25 bp, Artificial
  Probe
ctgagatctaactatgaggtcaaag

SEQ ID NO: 31916 - DNA, 25 bp, Artificial
  Probe
ggactcacagaataagttatatgct

SEQ ID NO: 31917 - DNA, 25 bp, Artificial
  Probe
aacggtctgtaggaatgtgaaatag

SEQ ID NO: 31918 - DNA, 25 bp, Artificial
  Probe
gaacggtctgtaggaatgtgaaata

SEQ ID NO: 31919 - DNA, 25 bp, Artificial
  Probe
tttggtgtgatttgaatgtaaagcc

SEQ ID NO: 31920 - DNA, 25 bp, Artificial
  Probe
taggaacggtctgtaggaatgtgaa

SEQ ID NO: 31921 - DNA, 25 bp, Artificial
  Probe
cccattgactttgttcctgtattat

SEQ ID NO: 31922 - DNA, 25 bp, Artificial
  Probe
actcacagaataagttatatgctct

SEQ ID NO: 31923 - DNA, 25 bp, Artificial
  Probe
tcacagaataagttatatgctctct

SEQ ID NO: 31924 - DNA, 25 bp, Artificial
  Probe
aatgttatgatactgtgggatgttt

SEQ ID NO: 31925 - DNA, 25 bp, Artificial
  Probe
acggtctgtaggaatgtgaaatagt

SEQ ID NO: 31926 - DNA, 25 bp, Artificial
  Probe
gactcacagaataagttatatgctc

SEQ ID NO: 31927 - DNA, 25 bp, Artificial
  Probe
atgtactttggtgtgatttgaatgt

SEQ ID NO: 31928 - DNA, 25 bp, Artificial
  Probe
ctcacagaataagttatatgctctc

SEQ ID NO: 31929 - DNA, 25 bp, Artificial
  Probe
gggactcacagaataagttatatgc

SEQ ID NO: 31930 - DNA, 25 bp, Artificial
  Probe
gatttgaatgtaaagccctggagac

SEQ ID NO: 31931 - DNA, 25 bp, Artificial
  Probe
tgtactttggtgtgatttgaatgta

SEQ ID NO: 31932 - DNA, 25 bp, Artificial
  Probe
ccattgactttgttcctgtattatg

SEQ ID NO: 31933 - DNA, 25 bp, Artificial
  Probe
tgatttgaatgtaaagccctggaga

SEQ ID NO: 31934 - DNA, 25 bp, Artificial
  Probe
gtgatttgaatgtaaagccctggag

SEQ ID NO: 31935 - DNA, 25 bp, Artificial
  Probe
gtaggaacggtctgtaggaatgtga

SEQ ID NO: 31936 - DNA, 25 bp, Artificial
  Probe
tgttatgatactgtgggatgtttaa

SEQ ID NO: 31937 - DNA, 25 bp, Artificial
  Probe
catgtactttggtgtgatttgaatg

SEQ ID NO: 31938 - DNA, 25 bp, Artificial
  Probe
ttggtgtgatttgaatgtaaagccc

SEQ ID NO: 31939 - DNA, 25 bp, Artificial
  Probe
tgtcactttaatgttgtgttacctg

SEQ ID NO: 31940 - DNA, 25 bp, Artificial
  Probe
atgttatgatactgtgggatgttta

SEQ ID NO: 31941 - DNA, 25 bp, Artificial
  Probe
taatgttatgatactgtgggatgtt

SEQ ID NO: 31942 - DNA, 25 bp, Artificial
  Probe
gtcactttaatgttgtgttacctgc

SEQ ID NO: 31943 - DNA, 25 bp, Artificial
  Probe
gactttgttcctgtattatgtaggg

SEQ ID NO: 31944 - DNA, 25 bp, Artificial
  Probe
atgtcactttaatgttgtgttacct

SEQ ID NO: 31945 - DNA, 25 bp, Artificial
  Probe
actgtgggatgtttaaatgtatgac

SEQ ID NO: 31946 - DNA, 25 bp, Artificial
  Probe
ataatgttatgatactgtgggatgt

SEQ ID NO: 31947 - DNA, 25 bp, Artificial
  Probe
cattgactttgttcctgtattatgt

SEQ ID NO: 31948 - DNA, 25 bp, Artificial
  Probe
gtactttggtgtgatttgaatgtaa

SEQ ID NO: 31949 - DNA, 25 bp, Artificial
  Probe
ctgtgggatgtttaaatgtatgact

SEQ ID NO: 31950 - DNA, 25 bp, Artificial
  Probe
gagacctcatgtcactttaatgttg

SEQ ID NO: 31951 - DNA, 25 bp, Artificial
  Probe
tgtgatttgaatgtaaagccctgga

SEQ ID NO: 31952 - DNA, 25 bp, Artificial
  Probe
gtgtgatttgaatgtaaagccctgg

SEQ ID NO: 31953 - DNA, 25 bp, Artificial
  Probe
ggtgtgatttgaatgtaaagccctg

SEQ ID NO: 31954 - DNA, 25 bp, Artificial
  Probe
agacctcatgtcactttaatgttgt

SEQ ID NO: 31955 - DNA, 25 bp, Artificial
  Probe
tactttggtgtgatttgaatgtaaa

SEQ ID NO: 31956 - DNA, 25 bp, Artificial
  Probe
ggagacctcatgtcactttaatgtt

SEQ ID NO: 31957 - DNA, 25 bp, Artificial
  Probe
cctcatgtcactttaatgttgtgtt

SEQ ID NO: 31958 - DNA, 25 bp, Artificial
  Probe
gacctcatgtcactttaatgttgtg

SEQ ID NO: 31959 - DNA, 25 bp, Artificial
  Probe
tgactttgttcctgtattatgtagg

SEQ ID NO: 31960 - DNA, 25 bp, Artificial
  Probe
tggtgtgatttgaatgtaaagccct

SEQ ID NO: 31961 - DNA, 25 bp, Artificial
  Probe
tactaagtaccaacttctcctgtct

SEQ ID NO: 31962 - DNA, 25 bp, Artificial
  Probe
ctactaagtaccaacttctcctgtc

SEQ ID NO: 31963 - DNA, 25 bp, Artificial
  Probe
cctactaagtaccaacttctcctgt

SEQ ID NO: 31964 - DNA, 25 bp, Artificial
  Probe
taagtaccaacttctcctgtctgtt

SEQ ID NO: 31965 - DNA, 25 bp, Artificial
  Probe
ctaagtaccaacttctcctgtctgt

SEQ ID NO: 31966 - DNA, 25 bp, Artificial
  Probe
actaagtaccaacttctcctgtctg

SEQ ID NO: 31967 - DNA, 25 bp, Artificial
  Probe
taccaacttctcctgtctgtttgtg

SEQ ID NO: 31968 - DNA, 25 bp, Artificial
  Probe
agtaccaacttctcctgtctgtttg

SEQ ID NO: 31969 - DNA, 25 bp, Artificial
  Probe
gtaccaacttctcctgtctgtttgt

SEQ ID NO: 31970 - DNA, 25 bp, Artificial
  Probe
agcttcatttctacctagattacaa

SEQ ID NO: 31971 - DNA, 25 bp, Artificial
  Probe
gcttcatttctacctagattacaat

SEQ ID NO: 31972 - DNA, 25 bp, Artificial
  Probe
aacttctcctgtctgtttgtggatc

SEQ ID NO: 31973 - DNA, 25 bp, Artificial
  Probe
ctccctactaagtaccaacttctcc

SEQ ID NO: 31974 - DNA, 25 bp, Artificial
  Probe
cctccctactaagtaccaacttctc

SEQ ID NO: 31975 - DNA, 25 bp, Artificial
  Probe
aactaagcagtacccaacattggat

SEQ ID NO: 31976 - DNA, 25 bp, Artificial
  Probe
caacttctcctgtctgtttgtggat

SEQ ID NO: 31977 - DNA, 25 bp, Artificial
  Probe
ccctactaagtaccaacttctcctg

SEQ ID NO: 31978 - DNA, 25 bp, Artificial
  Probe
tccctactaagtaccaacttctcct

SEQ ID NO: 31979 - DNA, 25 bp, Artificial
  Probe
aagtaccaacttctcctgtctgttt

SEQ ID NO: 31980 - DNA, 25 bp, Artificial
  Probe
tacaatagttattaagtccttggaa

SEQ ID NO: 31981 - DNA, 25 bp, Artificial
  Probe
ttacaatagttattaagtccttgga

SEQ ID NO: 31982 - DNA, 25 bp, Artificial
  Probe
actaagcagtacccaacattggatg

SEQ ID NO: 31983 - DNA, 25 bp, Artificial
  Probe
acaatagttattaagtccttggaaa

SEQ ID NO: 31984 - DNA, 25 bp, Artificial
  Probe
catctacctggagggtgaagtctac

SEQ ID NO: 31985 - DNA, 25 bp, Artificial
  Probe
cccaactaagcagtacccaacattg

SEQ ID NO: 31986 - DNA, 25 bp, Artificial
  Probe
ctcaaactcaagcttcatttctacc

SEQ ID NO: 31987 - DNA, 25 bp, Artificial
  Probe
cctcaaactcaagcttcatttctac

SEQ ID NO: 31988 - DNA, 25 bp, Artificial
  Probe
caactaagcagtacccaacattgga

SEQ ID NO: 31989 - DNA, 25 bp, Artificial
  Probe
tcaaactcaagcttcatttctacct

SEQ ID NO: 31990 - DNA, 25 bp, Artificial
  Probe
acctcaaactcaagcttcatttcta

SEQ ID NO: 31991 - DNA, 25 bp, Artificial
  Probe
ccctccctactaagtaccaacttct

SEQ ID NO: 31992 - DNA, 25 bp, Artificial
  Probe
tcatctacctggagggtgaagtcta

SEQ ID NO: 31993 - DNA, 25 bp, Artificial
  Probe
tcccaactaagcagtacccaacatt

SEQ ID NO: 31994 - DNA, 25 bp, Artificial
  Probe
caaactcaagcttcatttctaccta

SEQ ID NO: 31995 - DNA, 25 bp, Artificial
  Probe
aacctcaaactcaagcttcatttct

SEQ ID NO: 31996 - DNA, 25 bp, Artificial
  Probe
aactcaagcttcatttctacctaga

SEQ ID NO: 31997 - DNA, 25 bp, Artificial
  Probe
gaacctcaaactcaagcttcatttc

SEQ ID NO: 31998 - DNA, 25 bp, Artificial
  Probe
aaactcaagcttcatttctacctag

SEQ ID NO: 31999 - DNA, 25 bp, Artificial
  Probe
actcaagcttcatttctacctagat

SEQ ID NO: 32000 - DNA, 25 bp, Artificial
  Probe
atctacctggagggtgaagtctaca

SEQ ID NO: 32001 - DNA, 25 bp, Artificial
  Probe
gagaaagaagtgccactgaatggaa

SEQ ID NO: 32002 - DNA, 25 bp, Artificial
  Probe
agtacccaacattggatgtgatctg

SEQ ID NO: 32003 - DNA, 25 bp, Artificial
  Probe
cagtacccaacattggatgtgatct

SEQ ID NO: 32004 - DNA, 25 bp, Artificial
  Probe
agaaagaagtgccactgaatggaac

SEQ ID NO: 32005 - DNA, 25 bp, Artificial
  Probe
ctcaagcttcatttctacctagatt

SEQ ID NO: 32006 - DNA, 25 bp, Artificial
  Probe
gctacgaagacgatgactatgtatc

SEQ ID NO: 32007 - DNA, 25 bp, Artificial
  Probe
ctacgaagacgatgactatgtatca

SEQ ID NO: 32008 - DNA, 25 bp, Artificial
  Probe
tacgaagacgatgactatgtatcaa

SEQ ID NO: 32009 - DNA, 25 bp, Artificial
  Probe
ggctacgaagacgatgactatgtat

SEQ ID NO: 32010 - DNA, 25 bp, Artificial
  Probe
aggctacgaagacgatgactatgta

SEQ ID NO: 32011 - DNA, 25 bp, Artificial
  Probe
tatcaaagaaacccaaacaggaaga

SEQ ID NO: 32012 - DNA, 25 bp, Artificial
  Probe
gtatcaaagaaacccaaacaggaag

SEQ ID NO: 32013 - DNA, 25 bp, Artificial
  Probe
tcttctgaccttgcacttaatatgg

SEQ ID NO: 32014 - DNA, 25 bp, Artificial
  Probe
gatgctctctaaccagtgtaaatga

SEQ ID NO: 32015 - DNA, 25 bp, Artificial
  Probe
atgctctctaaccagtgtaaatgac

SEQ ID NO: 32016 - DNA, 25 bp, Artificial
  Probe
tatggttacaaagaagaggaaaggc

SEQ ID NO: 32017 - DNA, 25 bp, Artificial
  Probe
ttcttctgaccttgcacttaatatg

SEQ ID NO: 32018 - DNA, 25 bp, Artificial
  Probe
cattcttctgaccttgcacttaata

SEQ ID NO: 32019 - DNA, 25 bp, Artificial
  Probe
ggtagatgctctctaaccagtgtaa

SEQ ID NO: 32020 - DNA, 25 bp, Artificial
  Probe
agatgctctctaaccagtgtaaatg

SEQ ID NO: 32021 - DNA, 25 bp, Artificial
  Probe
ctgtcacagctactggatataatga

SEQ ID NO: 32022 - DNA, 25 bp, Artificial
  Probe
ggttacaaagaagaggaaaggctac

SEQ ID NO: 32023 - DNA, 25 bp, Artificial
  Probe
tcattcttctgaccttgcacttaat

SEQ ID NO: 32024 - DNA, 25 bp, Artificial
  Probe
cctgtcacagctactggatataatg

SEQ ID NO: 32025 - DNA, 25 bp, Artificial
  Probe
ctagggctggaattactatggaaag

SEQ ID NO: 32026 - DNA, 25 bp, Artificial
  Probe
tgtcacagctactggatataatgaa

SEQ ID NO: 32027 - DNA, 25 bp, Artificial
  Probe
atcaaagaaacccaaacaggaagag

SEQ ID NO: 32028 - DNA, 25 bp, Artificial
  Probe
tctagggctggaattactatggaaa

SEQ ID NO: 32029 - DNA, 25 bp, Artificial
  Probe
gatgacctggtagatgctctctaac

SEQ ID NO: 32030 - DNA, 25 bp, Artificial
  Probe
acgaagacgatgactatgtatcaaa

SEQ ID NO: 32031 - DNA, 25 bp, Artificial
  Probe
tggttacaaagaagaggaaaggcta

SEQ ID NO: 32032 - DNA, 25 bp, Artificial
  Probe
cgatgactatgtatcaaagaaaccc

SEQ ID NO: 32033 - DNA, 25 bp, Artificial
  Probe
atatggttacaaagaagaggaaagg

SEQ ID NO: 32034 - DNA, 25 bp, Artificial
  Probe
cgaagacgatgactatgtatcaaag

SEQ ID NO: 32035 - DNA, 25 bp, Artificial
  Probe
tacaaagaagaggaaaggctacgaa

SEQ ID NO: 32036 - DNA, 25 bp, Artificial
  Probe
ttacaaagaagaggaaaggctacga

SEQ ID NO: 32037 - DNA, 25 bp, Artificial
  Probe
gttacaaagaagaggaaaggctacg

SEQ ID NO: 32038 - DNA, 25 bp, Artificial
  Probe
ctctagggctggaattactatggaa

SEQ ID NO: 32039 - DNA, 25 bp, Artificial
  Probe
attcttctgaccttgcacttaatat

SEQ ID NO: 32040 - DNA, 25 bp, Artificial
  Probe
aaggctacgaagacgatgactatgt

SEQ ID NO: 32041 - DNA, 25 bp, Artificial
  Probe
acgatgactatgtatcaaagaaacc

SEQ ID NO: 32042 - DNA, 25 bp, Artificial
  Probe
gactatgtatcaaagaaacccaaac

SEQ ID NO: 32043 - DNA, 25 bp, Artificial
  Probe
atgtatcaaagaaacccaaacagga

SEQ ID NO: 32044 - DNA, 25 bp, Artificial
  Probe
tgtatcaaagaaacccaaacaggaa

SEQ ID NO: 32045 - DNA, 25 bp, Artificial
  Probe
aagttggagcgatgtcattcttctg

SEQ ID NO: 32046 - DNA, 25 bp, Artificial
  Probe
gatctgaagaagttgctattctgaa

SEQ ID NO: 32047 - DNA, 25 bp, Artificial
  Probe
cttagtagaattgcattgacagatg

SEQ ID NO: 32048 - DNA, 25 bp, Artificial
  Probe
tatgtatcaaagaaacccaaacagg

SEQ ID NO: 32049 - DNA, 25 bp, Artificial
  Probe
tgctctctaaccagtgtaaatgact

SEQ ID NO: 32050 - DNA, 25 bp, Artificial
  Probe
gatgactatgtatcaaagaaaccca

SEQ ID NO: 32051 - DNA, 25 bp, Artificial
  Probe
tggcataggttatcacatcagtaag

SEQ ID NO: 32052 - DNA, 25 bp, Artificial
  Probe
cataggttatcacatcagtaagcga

SEQ ID NO: 32053 - DNA, 25 bp, Artificial
  Probe
ataggttatcacatcagtaagcgat

SEQ ID NO: 32054 - DNA, 25 bp, Artificial
  Probe
atggcataggttatcacatcagtaa

SEQ ID NO: 32055 - DNA, 25 bp, Artificial
  Probe
ggcataggttatcacatcagtaagc

SEQ ID NO: 32056 - DNA, 25 bp, Artificial
  Probe
agatacattggtcacattcaagatg

SEQ ID NO: 32057 - DNA, 25 bp, Artificial
  Probe
cagatacattggtcacattcaagat

SEQ ID NO: 32058 - DNA, 25 bp, Artificial
  Probe
gcataggttatcacatcagtaagcg

SEQ ID NO: 32059 - DNA, 25 bp, Artificial
  Probe
taggttatcacatcagtaagcgatc

SEQ ID NO: 32060 - DNA, 25 bp, Artificial
  Probe
cattcaagatgtctccaatccgatg

SEQ ID NO: 32061 - DNA, 25 bp, Artificial
  Probe
aatccgatggcataggttatcacat

SEQ ID NO: 32062 - DNA, 25 bp, Artificial
  Probe
ccagatacattggtcacattcaaga

SEQ ID NO: 32063 - DNA, 25 bp, Artificial
  Probe
gttatcctgataatcaccatatcgg

SEQ ID NO: 32064 - DNA, 25 bp, Artificial
  Probe
aggttatcacatcagtaagcgatcc

SEQ ID NO: 32065 - DNA, 25 bp, Artificial
  Probe
caatccgatggcataggttatcaca

SEQ ID NO: 32066 - DNA, 25 bp, Artificial
  Probe
tatcctgataatcaccatatcggag

SEQ ID NO: 32067 - DNA, 25 bp, Artificial
  Probe
aaggctaattgatagatagaagtgt

SEQ ID NO: 32068 - DNA, 25 bp, Artificial
  Probe
attgccagatacattggtcacattc

SEQ ID NO: 32069 - DNA, 25 bp, Artificial
  Probe
ttatcctgataatcaccatatcgga

SEQ ID NO: 32070 - DNA, 25 bp, Artificial
  Probe
tgttatcctgataatcaccatatcg

SEQ ID NO: 32071 - DNA, 25 bp, Artificial
  Probe
cattgccagatacattggtcacatt

SEQ ID NO: 32072 - DNA, 25 bp, Artificial
  Probe
atcctgataatcaccatatcggagc

SEQ ID NO: 32073 - DNA, 25 bp, Artificial
  Probe
aggcaaaggctaattgatagataga

SEQ ID NO: 32074 - DNA, 25 bp, Artificial
  Probe
ggcaaaggctaattgatagatagaa

SEQ ID NO: 32075 - DNA, 25 bp, Artificial
  Probe
ataatcaccatatcggagccaccat

SEQ ID NO: 32076 - DNA, 25 bp, Artificial
  Probe
gccagatacattggtcacattcaag

SEQ ID NO: 32077 - DNA, 25 bp, Artificial
  Probe
aggctaattgatagatagaagtgta

SEQ ID NO: 32078 - DNA, 25 bp, Artificial
  Probe
tacattggtcacattcaagatgtct

SEQ ID NO: 32079 - DNA, 25 bp, Artificial
  Probe
ctgataatcaccatatcggagccac

SEQ ID NO: 32080 - DNA, 25 bp, Artificial
  Probe
atacattggtcacattcaagatgtc

SEQ ID NO: 32081 - DNA, 25 bp, Artificial
  Probe
gatacattggtcacattcaagatgt

SEQ ID NO: 32082 - DNA, 25 bp, Artificial
  Probe
ttgtgttatcctgataatcaccata

SEQ ID NO: 32083 - DNA, 25 bp, Artificial
  Probe
attcaagatgtctccaatccgatgg

SEQ ID NO: 32084 - DNA, 25 bp, Artificial
  Probe
taggcaaaggctaattgatagatag

SEQ ID NO: 32085 - DNA, 25 bp, Artificial
  Probe
gatggcataggttatcacatcagta

SEQ ID NO: 32086 - DNA, 25 bp, Artificial
  Probe
tgccagatacattggtcacattcaa

SEQ ID NO: 32087 - DNA, 25 bp, Artificial
  Probe
ttgccagatacattggtcacattca

SEQ ID NO: 32088 - DNA, 25 bp, Artificial
  Probe
acattggtcacattcaagatgtctc

SEQ ID NO: 32089 - DNA, 25 bp, Artificial
  Probe
tgtgttatcctgataatcaccatat

SEQ ID NO: 32090 - DNA, 25 bp, Artificial
  Probe
ctccaatccgatggcataggttatc

SEQ ID NO: 32091 - DNA, 25 bp, Artificial
  Probe
ctaggcaaaggctaattgatagata

SEQ ID NO: 32092 - DNA, 25 bp, Artificial
  Probe
gtcacattcaagatgtctccaatcc

SEQ ID NO: 32093 - DNA, 25 bp, Artificial
  Probe
ggtcacattcaagatgtctccaatc

SEQ ID NO: 32094 - DNA, 25 bp, Artificial
  Probe
gcaaaggctaattgatagatagaag

SEQ ID NO: 32095 - DNA, 25 bp, Artificial
  Probe
cattggtcacattcaagatgtctcc

SEQ ID NO: 32096 - DNA, 25 bp, Artificial
  Probe
attagtcaaggtgtccaagaagaac

SEQ ID NO: 32097 - DNA, 25 bp, Artificial
  Probe
aattagtcaaggtgtccaagaagaa

SEQ ID NO: 32098 - DNA, 25 bp, Artificial
  Probe
tagtcaaggtgtccaagaagaacat

SEQ ID NO: 32099 - DNA, 25 bp, Artificial
  Probe
aattgaacctcctccaagtagtcag

SEQ ID NO: 32100 - DNA, 25 bp, Artificial
  Probe
ttagtcaaggtgtccaagaagaaca

SEQ ID NO: 32101 - DNA, 25 bp, Artificial
  Probe
aatagagaccgagttgaaagaagag

SEQ ID NO: 32102 - DNA, 25 bp, Artificial
  Probe
aaatagagaccgagttgaaagaaga

SEQ ID NO: 32103 - DNA, 25 bp, Artificial
  Probe
aaattagtcaaggtgtccaagaaga

SEQ ID NO: 32104 - DNA, 25 bp, Artificial
  Probe
taagcccaaacctttccgtattaaa

SEQ ID NO: 32105 - DNA, 25 bp, Artificial
  Probe
ctaagcccaaacctttccgtattaa

SEQ ID NO: 32106 - DNA, 25 bp, Artificial
  Probe
gaagagcttaggaagatgcaagaag

SEQ ID NO: 32107 - DNA, 25 bp, Artificial
  Probe
agtcaaggtgtccaagaagaacatc

SEQ ID NO: 32108 - DNA, 25 bp, Artificial
  Probe
tatattccacctaagcccaaacctt

SEQ ID NO: 32109 - DNA, 25 bp, Artificial
  Probe
cagaaattgaacctcctccaagtag

SEQ ID NO: 32110 - DNA, 25 bp, Artificial
  Probe
gaaattgaacctcctccaagtagtc

SEQ ID NO: 32111 - DNA, 25 bp, Artificial
  Probe
cttaggaagatgcaagaagtgtgtg

SEQ ID NO: 32112 - DNA, 25 bp, Artificial
  Probe
agaaattgaacctcctccaagtagt

SEQ ID NO: 32113 - DNA, 25 bp, Artificial
  Probe
aaggtgtccaagaagaacatccaag

SEQ ID NO: 32114 - DNA, 25 bp, Artificial
  Probe
aagagcttaggaagatgcaagaagt

SEQ ID NO: 32115 - DNA, 25 bp, Artificial
  Probe
ttaggaagatgcaagaagtgtgtga

SEQ ID NO: 32116 - DNA, 25 bp, Artificial
  Probe
atatattccacctaagcccaaacct

SEQ ID NO: 32117 - DNA, 25 bp, Artificial
  Probe
atagagaccgagttgaaagaagagc

SEQ ID NO: 32118 - DNA, 25 bp, Artificial
  Probe
gagaatgaggacagtgatgaccatg

SEQ ID NO: 32119 - DNA, 25 bp, Artificial
  Probe
aaattgaacctcctccaagtagtca

SEQ ID NO: 32120 - DNA, 25 bp, Artificial
  Probe
caaggtgtccaagaagaacatccaa

SEQ ID NO: 32121 - DNA, 25 bp, Artificial
  Probe
atattccacctaagcccaaaccttt

SEQ ID NO: 32122 - DNA, 25 bp, Artificial
  Probe
ctccaagtagtcagcaaagagaaac

SEQ ID NO: 32123 - DNA, 25 bp, Artificial
  Probe
taggaagatgcaagaagtgtgtgag

SEQ ID NO: 32124 - DNA, 25 bp, Artificial
  Probe
aatgtcaggaggaagagcttaggaa

SEQ ID NO: 32125 - DNA, 25 bp, Artificial
  Probe
gaggaggagaatgaggacagtgatg

SEQ ID NO: 32126 - DNA, 25 bp, Artificial
  Probe
agagcttaggaagatgcaagaagtg

SEQ ID NO: 32127 - DNA, 25 bp, Artificial
  Probe
ggaagagcttaggaagatgcaagaa

SEQ ID NO: 32128 - DNA, 25 bp, Artificial
  Probe
tccaagtagtcagcaaagagaaacc

SEQ ID NO: 32129 - DNA, 25 bp, Artificial
  Probe
cctaagcccaaacctttccgtatta

SEQ ID NO: 32130 - DNA, 25 bp, Artificial
  Probe
ggagaatgaggacagtgatgaccat

SEQ ID NO: 32131 - DNA, 25 bp, Artificial
  Probe
tcaggaggaagagcttaggaagatg

SEQ ID NO: 32132 - DNA, 25 bp, Artificial
  Probe
gtcaggaggaagagcttaggaagat

SEQ ID NO: 32133 - DNA, 25 bp, Artificial
  Probe
gtcaaggtgtccaagaagaacatcc

SEQ ID NO: 32134 - DNA, 25 bp, Artificial
  Probe
tattccacctaagcccaaacctttc

SEQ ID NO: 32135 - DNA, 25 bp, Artificial
  Probe
gagcttaggaagatgcaagaagtgt

SEQ ID NO: 32136 - DNA, 25 bp, Artificial
  Probe
cctccaagtagtcagcaaagagaaa

SEQ ID NO: 32137 - DNA, 25 bp, Artificial
  Probe
gaggaagagcttaggaagatgcaag

SEQ ID NO: 32138 - DNA, 25 bp, Artificial
  Probe
gaggagaatgaggacagtgatgacc

SEQ ID NO: 32139 - DNA, 25 bp, Artificial
  Probe
ggaggagaatgaggacagtgatgac

SEQ ID NO: 32140 - DNA, 25 bp, Artificial
  Probe
cccaaacctttccgtattaaagaaa

SEQ ID NO: 32141 - DNA, 25 bp, Artificial
  Probe
aacaaggctattggtgcttagaatt

SEQ ID NO: 32142 - DNA, 25 bp, Artificial
  Probe
caacaaggctattggtgcttagaat

SEQ ID NO: 32143 - DNA, 25 bp, Artificial
  Probe
cattggatgactctgattcacttgg

SEQ ID NO: 32144 - DNA, 25 bp, Artificial
  Probe
agccgattattatagcagaatactt

SEQ ID NO: 32145 - DNA, 25 bp, Artificial
  Probe
aagccgattattatagcagaatact

SEQ ID NO: 32146 - DNA, 25 bp, Artificial
  Probe
gctatgctcaagatgacttctcctt

SEQ ID NO: 32147 - DNA, 25 bp, Artificial
  Probe
ctaagtcgaagcagtctcctatctc

SEQ ID NO: 32148 - DNA, 25 bp, Artificial
  Probe
tcaaagccgattattatagcagaat

SEQ ID NO: 32149 - DNA, 25 bp, Artificial
  Probe
aagtcgaagcagtctcctatctcta

SEQ ID NO: 32150 - DNA, 25 bp, Artificial
  Probe
taagtcgaagcagtctcctatctct

SEQ ID NO: 32151 - DNA, 25 bp, Artificial
  Probe
atcaaagccgattattatagcagaa

SEQ ID NO: 32152 - DNA, 25 bp, Artificial
  Probe
cttggatgagaatgaatgcagagtc

SEQ ID NO: 32153 - DNA, 25 bp, Artificial
  Probe
acaaggctattggtgcttagaattt

SEQ ID NO: 32154 - DNA, 25 bp, Artificial
  Probe
attggatgactctgattcacttggc

SEQ ID NO: 32155 - DNA, 25 bp, Artificial
  Probe
atgactctgattcacttggcgattc

SEQ ID NO: 32156 - DNA, 25 bp, Artificial
  Probe
gatgactctgattcacttggcgatt

SEQ ID NO: 32157 - DNA, 25 bp, Artificial
  Probe
tcattggatgactctgattcacttg

SEQ ID NO: 32158 - DNA, 25 bp, Artificial
  Probe
tccatgtgaaagatgataggctaaa

SEQ ID NO: 32159 - DNA, 25 bp, Artificial
  Probe
ttccatgtgaaagatgataggctaa

SEQ ID NO: 32160 - DNA, 25 bp, Artificial
  Probe
attccatgtgaaagatgataggcta

SEQ ID NO: 32161 - DNA, 25 bp, Artificial
  Probe
gattccatgtgaaagatgataggct

SEQ ID NO: 32162 - DNA, 25 bp, Artificial
  Probe
gccactaattcacatttaccaataa

SEQ ID NO: 32163 - DNA, 25 bp, Artificial
  Probe
ccatgtgaaagatgataggctaaat

SEQ ID NO: 32164 - DNA, 25 bp, Artificial
  Probe
aacactctgtagtatgtagggttta

SEQ ID NO: 32165 - DNA, 25 bp, Artificial
  Probe
agtcgaagcagtctcctatctctac

SEQ ID NO: 32166 - DNA, 25 bp, Artificial
  Probe
cgaagcagtctcctatctctacacc

SEQ ID NO: 32167 - DNA, 25 bp, Artificial
  Probe
acactctgtagtatgtagggtttat

SEQ ID NO: 32168 - DNA, 25 bp, Artificial
  Probe
agtctcctatctctacacccacaag

SEQ ID NO: 32169 - DNA, 25 bp, Artificial
  Probe
ttggatgagaatgaatgcagagtca

SEQ ID NO: 32170 - DNA, 25 bp, Artificial
  Probe
tccttggatgagaatgaatgcagag

SEQ ID NO: 32171 - DNA, 25 bp, Artificial
  Probe
tcgaagcagtctcctatctctacac

SEQ ID NO: 32172 - DNA, 25 bp, Artificial
  Probe
gtcgaagcagtctcctatctctaca

SEQ ID NO: 32173 - DNA, 25 bp, Artificial
  Probe
cctaagtcgaagcagtctcctatct

SEQ ID NO: 32174 - DNA, 25 bp, Artificial
  Probe
cgattccatgtgaaagatgataggc

SEQ ID NO: 32175 - DNA, 25 bp, Artificial
  Probe
gcgattccatgtgaaagatgatagg

SEQ ID NO: 32176 - DNA, 25 bp, Artificial
  Probe
ggcgattccatgtgaaagatgatag

SEQ ID NO: 32177 - DNA, 25 bp, Artificial
  Probe
cagtctcctatctctacacccacaa

SEQ ID NO: 32178 - DNA, 25 bp, Artificial
  Probe
ccttggatgagaatgaatgcagagt

SEQ ID NO: 32179 - DNA, 25 bp, Artificial
  Probe
cactctgtagtatgtagggtttatt

SEQ ID NO: 32180 - DNA, 25 bp, Artificial
  Probe
acctaagtcgaagcagtctcctatc

SEQ ID NO: 32181 - DNA, 25 bp, Artificial
  Probe
gttccgctatgctcaagatgacttc

SEQ ID NO: 32182 - DNA, 25 bp, Artificial
  Probe
catgtgaaagatgataggctaaatc

SEQ ID NO: 32183 - DNA, 25 bp, Artificial
  Probe
ctccttggatgagaatgaatgcaga

SEQ ID NO: 32184 - DNA, 25 bp, Artificial
  Probe
ttccgctatgctcaagatgacttct

SEQ ID NO: 32185 - DNA, 25 bp, Artificial
  Probe
aatcaaagccgattattatagcaga

SEQ ID NO: 32186 - DNA, 25 bp, Artificial
  Probe
cgttcattgctctgtcaagtctgag

SEQ ID NO: 32187 - DNA, 25 bp, Artificial
  Probe
cacgttcattgctctgtcaagtctg

SEQ ID NO: 32188 - DNA, 25 bp, Artificial
  Probe
acgttcattgctctgtcaagtctga

SEQ ID NO: 32189 - DNA, 25 bp, Artificial
  Probe
gaccgaaataagtacggactactgg

SEQ ID NO: 32190 - DNA, 25 bp, Artificial
  Probe
ctgctcttcattgcggacaatcatg

SEQ ID NO: 32191 - DNA, 25 bp, Artificial
  Probe
cgaccgaaataagtacggactactg

SEQ ID NO: 32192 - DNA, 25 bp, Artificial
  Probe
cttcattgcggacaatcatgcagaa

SEQ ID NO: 32193 - DNA, 25 bp, Artificial
  Probe
ttcattgcggacaatcatgcagaac

SEQ ID NO: 32194 - DNA, 25 bp, Artificial
  Probe
ctcttcattgcggacaatcatgcag

SEQ ID NO: 32195 - DNA, 25 bp, Artificial
  Probe
tttccaggtcatcgagactcaggat

SEQ ID NO: 32196 - DNA, 25 bp, Artificial
  Probe
tcttcattgcggacaatcatgcaga

SEQ ID NO: 32197 - DNA, 25 bp, Artificial
  Probe
accgaaataagtacggactactggc

SEQ ID NO: 32198 - DNA, 25 bp, Artificial
  Probe
gcgaccgaaataagtacggactact

SEQ ID NO: 32199 - DNA, 25 bp, Artificial
  Probe
gactgggtgtattacgagtccaagg

SEQ ID NO: 32200 - DNA, 25 bp, Artificial
  Probe
cgactgggtgtattacgagtccaag

SEQ ID NO: 32201 - DNA, 25 bp, Artificial
  Probe
cttcgactgggtgtattacgagtcc

SEQ ID NO: 32202 - DNA, 25 bp, Artificial
  Probe
cttcagcgatgtgctcattttcctg

SEQ ID NO: 32203 - DNA, 25 bp, Artificial
  Probe
ccgaaataagtacggactactggcg

SEQ ID NO: 32204 - DNA, 25 bp, Artificial
  Probe
caccttcagcgatgtgctcattttc

SEQ ID NO: 32205 - DNA, 25 bp, Artificial
  Probe
tcgactgggtgtattacgagtccaa

SEQ ID NO: 32206 - DNA, 25 bp, Artificial
  Probe
ttcgactgggtgtattacgagtcca

SEQ ID NO: 32207 - DNA, 25 bp, Artificial
  Probe
gcttcgactgggtgtattacgagtc

SEQ ID NO: 32208 - DNA, 25 bp, Artificial
  Probe
actctcagttcagttcaccttcaag

SEQ ID NO: 32209 - DNA, 25 bp, Artificial
  Probe
gactctcagttcagttcaccttcaa

SEQ ID NO: 32210 - DNA, 25 bp, Artificial
  Probe
acattccagtctgtctttacaacat

SEQ ID NO: 32211 - DNA, 25 bp, Artificial
  Probe
aacattccagtctgtctttacaaca

SEQ ID NO: 32212 - DNA, 25 bp, Artificial
  Probe
cattccagtctgtctttacaacatg

SEQ ID NO: 32213 - DNA, 25 bp, Artificial
  Probe
ggactctcagttcagttcaccttca

SEQ ID NO: 32214 - DNA, 25 bp, Artificial
  Probe
catggactgatttatcatccctgtc

SEQ ID NO: 32215 - DNA, 25 bp, Artificial
  Probe
aaagctgtttctcttctatctgtag

SEQ ID NO: 32216 - DNA, 25 bp, Artificial
  Probe
tcatggactgatttatcatccctgt

SEQ ID NO: 32217 - DNA, 25 bp, Artificial
  Probe
attccagtctgtctttacaacatgg

SEQ ID NO: 32218 - DNA, 25 bp, Artificial
  Probe
acagaagtccagtaacaaaatgaaa

SEQ ID NO: 32219 - DNA, 25 bp, Artificial
  Probe
aacagaagtccagtaacaaaatgaa

SEQ ID NO: 32220 - DNA, 25 bp, Artificial
  Probe
aaacagaagtccagtaacaaaatga

SEQ ID NO: 32221 - DNA, 25 bp, Artificial
  Probe
cccattttacccaacagacttaact

SEQ ID NO: 32222 - DNA, 25 bp, Artificial
  Probe
tttacccaacagacttaactgcatg

SEQ ID NO: 32223 - DNA, 25 bp, Artificial
  Probe
ctcgtcttagaatgcatgatgtgtt

SEQ ID NO: 32224 - DNA, 25 bp, Artificial
  Probe
aactcgtcttagaatgcatgatgtg

SEQ ID NO: 32225 - DNA, 25 bp, Artificial
  Probe
caactcgtcttagaatgcatgatgt

SEQ ID NO: 32226 - DNA, 25 bp, Artificial
  Probe
aatcaactcgtcttagaatgcatga

SEQ ID NO: 32227 - DNA, 25 bp, Artificial
  Probe
aaaacagaagtccagtaacaaaatg

SEQ ID NO: 32228 - DNA, 25 bp, Artificial
  Probe
cccaacagacttaactgcatgattt

SEQ ID NO: 32229 - DNA, 25 bp, Artificial
  Probe
cagaagtccagtaacaaaatgaaaa

SEQ ID NO: 32230 - DNA, 25 bp, Artificial
  Probe
tcaactcgtcttagaatgcatgatg

SEQ ID NO: 32231 - DNA, 25 bp, Artificial
  Probe
tacccaacagacttaactgcatgat

SEQ ID NO: 32232 - DNA, 25 bp, Artificial
  Probe
ccattttacccaacagacttaactg

SEQ ID NO: 32233 - DNA, 25 bp, Artificial
  Probe
ttacccaacagacttaactgcatga

SEQ ID NO: 32234 - DNA, 25 bp, Artificial
  Probe
cattttacccaacagacttaactgc

SEQ ID NO: 32235 - DNA, 25 bp, Artificial
  Probe
ctgaaaattcaaggtagaactttgc

SEQ ID NO: 32236 - DNA, 25 bp, Artificial
  Probe
tagtctgaaaacaagcccattttac

SEQ ID NO: 32237 - DNA, 25 bp, Artificial
  Probe
actcgtcttagaatgcatgatgtgt

SEQ ID NO: 32238 - DNA, 25 bp, Artificial
  Probe
gcccattttacccaacagacttaac

SEQ ID NO: 32239 - DNA, 25 bp, Artificial
  Probe
agcccattttacccaacagacttaa

SEQ ID NO: 32240 - DNA, 25 bp, Artificial
  Probe
aagcccattttacccaacagactta

SEQ ID NO: 32241 - DNA, 25 bp, Artificial
  Probe
atagtctgaaaacaagcccatttta

SEQ ID NO: 32242 - DNA, 25 bp, Artificial
  Probe
tatagtctgaaaacaagcccatttt

SEQ ID NO: 32243 - DNA, 25 bp, Artificial
  Probe
acccaacagacttaactgcatgatt

SEQ ID NO: 32244 - DNA, 25 bp, Artificial
  Probe
ctatagtctgaaaacaagcccattt

SEQ ID NO: 32245 - DNA, 25 bp, Artificial
  Probe
ttagaatgcatgatgtgtttgtacg

SEQ ID NO: 32246 - DNA, 25 bp, Artificial
  Probe
gtcttagaatgcatgatgtgtttgt

SEQ ID NO: 32247 - DNA, 25 bp, Artificial
  Probe
tggaactacaacagaaatctgaaaa

SEQ ID NO: 32248 - DNA, 25 bp, Artificial
  Probe
agtctgaaaacaagcccattttacc

SEQ ID NO: 32249 - DNA, 25 bp, Artificial
  Probe
cgtcttagaatgcatgatgtgtttg

SEQ ID NO: 32250 - DNA, 25 bp, Artificial
  Probe
tagaatgcatgatgtgtttgtacgt

SEQ ID NO: 32251 - DNA, 25 bp, Artificial
  Probe
tcgtcttagaatgcatgatgtgttt

SEQ ID NO: 32252 - DNA, 25 bp, Artificial
  Probe
atcaactcgtcttagaatgcatgat

SEQ ID NO: 32253 - DNA, 25 bp, Artificial
  Probe
caccaagaatcaacttccatccatc

SEQ ID NO: 32254 - DNA, 25 bp, Artificial
  Probe
ctccatgcctgtgtagttgataatc

SEQ ID NO: 32255 - DNA, 25 bp, Artificial
  Probe
tcaccaagaatcaacttccatccat

SEQ ID NO: 32256 - DNA, 25 bp, Artificial
  Probe
ttcaccaagaatcaacttccatcca

SEQ ID NO: 32257 - DNA, 25 bp, Artificial
  Probe
aattcaccaagaatcaacttccatc

SEQ ID NO: 32258 - DNA, 25 bp, Artificial
  Probe
tccatgcctgtgtagttgataatca

SEQ ID NO: 32259 - DNA, 25 bp, Artificial
  Probe
actccatgcctgtgtagttgataat

SEQ ID NO: 32260 - DNA, 25 bp, Artificial
  Probe
accaagaatcaacttccatccatcc

SEQ ID NO: 32261 - DNA, 25 bp, Artificial
  Probe
atctttcaagtatgtgctacccaat

SEQ ID NO: 32262 - DNA, 25 bp, Artificial
  Probe
attcaccaagaatcaacttccatcc

SEQ ID NO: 32263 - DNA, 25 bp, Artificial
  Probe
tatctttcaagtatgtgctacccaa

SEQ ID NO: 32264 - DNA, 25 bp, Artificial
  Probe
atatctttcaagtatgtgctaccca

SEQ ID NO: 32265 - DNA, 25 bp, Artificial
  Probe
ctttcaagtatgtgctacccaattc

SEQ ID NO: 32266 - DNA, 25 bp, Artificial
  Probe
tctttcaagtatgtgctacccaatt

SEQ ID NO: 32267 - DNA, 25 bp, Artificial
  Probe
ggcacagtggcatagttaaattaaa

SEQ ID NO: 32268 - DNA, 25 bp, Artificial
  Probe
agggaacaccaatatctttcaagta

SEQ ID NO: 32269 - DNA, 25 bp, Artificial
  Probe
tagggaacaccaatatctttcaagt

SEQ ID NO: 32270 - DNA, 25 bp, Artificial
  Probe
gtagggaacaccaatatctttcaag

SEQ ID NO: 32271 - DNA, 25 bp, Artificial
  Probe
aggcacagtggcatagttaaattaa

SEQ ID NO: 32272 - DNA, 25 bp, Artificial
  Probe
gttgaaattattcttgagtgggctg

SEQ ID NO: 32273 - DNA, 25 bp, Artificial
  Probe
agttgaaattattcttgagtgggct

SEQ ID NO: 32274 - DNA, 25 bp, Artificial
  Probe
tagttgaaattattcttgagtgggc

SEQ ID NO: 32275 - DNA, 25 bp, Artificial
  Probe
gcacagtggcatagttaaattaaag

SEQ ID NO: 32276 - DNA, 25 bp, Artificial
  Probe
aatatctttcaagtatgtgctaccc

SEQ ID NO: 32277 - DNA, 25 bp, Artificial
  Probe
gggaacaccaatatctttcaagtat

SEQ ID NO: 32278 - DNA, 25 bp, Artificial
  Probe
tttcaagtatgtgctacccaattcc

SEQ ID NO: 32279 - DNA, 25 bp, Artificial
  Probe
gactccatgcctgtgtagttgataa

SEQ ID NO: 32280 - DNA, 25 bp, Artificial
  Probe
caggcacagtggcatagttaaatta

SEQ ID NO: 32281 - DNA, 25 bp, Artificial
  Probe
tgatcgccatagcttggtattataa

SEQ ID NO: 32282 - DNA, 25 bp, Artificial
  Probe
tgtagggaacaccaatatctttcaa

SEQ ID NO: 32283 - DNA, 25 bp, Artificial
  Probe
atgtagggaacaccaatatctttca

SEQ ID NO: 32284 - DNA, 25 bp, Artificial
  Probe
ttgaaattattcttgagtgggctgg

SEQ ID NO: 32285 - DNA, 25 bp, Artificial
  Probe
gtgatcgccatagcttggtattata

SEQ ID NO: 32286 - DNA, 25 bp, Artificial
  Probe
gatcgccatagcttggtattataag

SEQ ID NO: 32287 - DNA, 25 bp, Artificial
  Probe
accaatatctttcaagtatgtgcta

SEQ ID NO: 32288 - DNA, 25 bp, Artificial
  Probe
aagtatgtgctacccaattcctctt

SEQ ID NO: 32289 - DNA, 25 bp, Artificial
  Probe
ttcaagtatgtgctacccaattcct

SEQ ID NO: 32290 - DNA, 25 bp, Artificial
  Probe
cccaatactactcccactgctttaa

SEQ ID NO: 32291 - DNA, 25 bp, Artificial
  Probe
agtatgtgctacccaattcctcttc

SEQ ID NO: 32292 - DNA, 25 bp, Artificial
  Probe
ggaacaccaatatctttcaagtatg

SEQ ID NO: 32293 - DNA, 25 bp, Artificial
  Probe
caatatctttcaagtatgtgctacc

SEQ ID NO: 32294 - DNA, 25 bp, Artificial
  Probe
ccaatatctttcaagtatgtgctac

SEQ ID NO: 32295 - DNA, 25 bp, Artificial
  Probe
acaccaatatctttcaagtatgtgc

SEQ ID NO: 32296 - DNA, 25 bp, Artificial
  Probe
cctcttcaaccgaatgttaggtctt

SEQ ID NO: 32297 - DNA, 25 bp, Artificial
  Probe
aatcaacttccatccatccctcttc

SEQ ID NO: 32298 - DNA, 25 bp, Artificial
  Probe
actcatctctctacctgttgtcatt

SEQ ID NO: 32299 - DNA, 25 bp, Artificial
  Probe
aagatcaacagtaccagtcagaatt

SEQ ID NO: 32300 - DNA, 25 bp, Artificial
  Probe
caagatcaacagtaccagtcagaat

SEQ ID NO: 32301 - DNA, 25 bp, Artificial
  Probe
gactcatctctctacctgttgtcat

SEQ ID NO: 32302 - DNA, 25 bp, Artificial
  Probe
ctcatagtctcagaatccatcgaag

SEQ ID NO: 32303 - DNA, 25 bp, Artificial
  Probe
aagttccaagatcaacagtaccagt

SEQ ID NO: 32304 - DNA, 25 bp, Artificial
  Probe
ccaagatcaacagtaccagtcagaa

SEQ ID NO: 32305 - DNA, 25 bp, Artificial
  Probe
ttccaagatcaacagtaccagtcag

SEQ ID NO: 32306 - DNA, 25 bp, Artificial
  Probe
ctcatctctctacctgttgtcattt

SEQ ID NO: 32307 - DNA, 25 bp, Artificial
  Probe
tcatctctctacctgttgtcatttg

SEQ ID NO: 32308 - DNA, 25 bp, Artificial
  Probe
agttccaagatcaacagtaccagtc

SEQ ID NO: 32309 - DNA, 25 bp, Artificial
  Probe
gttccaagatcaacagtaccagtca

SEQ ID NO: 32310 - DNA, 25 bp, Artificial
  Probe
tcatagtctcagaatccatcgaagc

SEQ ID NO: 32311 - DNA, 25 bp, Artificial
  Probe
gctcatagtctcagaatccatcgaa

SEQ ID NO: 32312 - DNA, 25 bp, Artificial
  Probe
tccaagatcaacagtaccagtcaga

SEQ ID NO: 32313 - DNA, 25 bp, Artificial
  Probe
catctctctacctgttgtcatttgc

SEQ ID NO: 32314 - DNA, 25 bp, Artificial
  Probe
gctggcaaataatctaaagagaaag

SEQ ID NO: 32315 - DNA, 25 bp, Artificial
  Probe
gtcaaagttccaagatcaacagtac

SEQ ID NO: 32316 - DNA, 25 bp, Artificial
  Probe
agtcaaagttccaagatcaacagta

SEQ ID NO: 32317 - DNA, 25 bp, Artificial
  Probe
aaagtcaaagttccaagatcaacag

SEQ ID NO: 32318 - DNA, 25 bp, Artificial
  Probe
gaaagtcaaagttccaagatcaaca

SEQ ID NO: 32319 - DNA, 25 bp, Artificial
  Probe
agatcaacagtaccagtcagaattc

SEQ ID NO: 32320 - DNA, 25 bp, Artificial
  Probe
cagtacactcaggagagaatgtgac

SEQ ID NO: 32321 - DNA, 25 bp, Artificial
  Probe
aagtcaaagttccaagatcaacagt

SEQ ID NO: 32322 - DNA, 25 bp, Artificial
  Probe
aaagttccaagatcaacagtaccag

SEQ ID NO: 32323 - DNA, 25 bp, Artificial
  Probe
tcaaagttccaagatcaacagtacc

SEQ ID NO: 32324 - DNA, 25 bp, Artificial
  Probe
cgaaagtcaaagttccaagatcaac

SEQ ID NO: 32325 - DNA, 25 bp, Artificial
  Probe
acgaaagtcaaagttccaagatcaa

SEQ ID NO: 32326 - DNA, 25 bp, Artificial
  Probe
tggcaaataatctaaagagaaagga

SEQ ID NO: 32327 - DNA, 25 bp, Artificial
  Probe
caaagttccaagatcaacagtacca

SEQ ID NO: 32328 - DNA, 25 bp, Artificial
  Probe
agctcatagtctcagaatccatcga

SEQ ID NO: 32329 - DNA, 25 bp, Artificial
  Probe
ggcaaataatctaaagagaaaggac

SEQ ID NO: 32330 - DNA, 25 bp, Artificial
  Probe
ctggcaaataatctaaagagaaagg

SEQ ID NO: 32331 - DNA, 25 bp, Artificial
  Probe
acagtacactcaggagagaatgtga

SEQ ID NO: 32332 - DNA, 25 bp, Artificial
  Probe
tttcattctgtcaaaggagggatca

SEQ ID NO: 32333 - DNA, 25 bp, Artificial
  Probe
gtcctcatagtcctttcgattctag

SEQ ID NO: 32334 - DNA, 25 bp, Artificial
  Probe
atctctctacctgttgtcatttgcc

SEQ ID NO: 32335 - DNA, 25 bp, Artificial
  Probe
atagtctcagaatccatcgaagcct

SEQ ID NO: 32336 - DNA, 25 bp, Artificial
  Probe
catagtctcagaatccatcgaagcc

SEQ ID NO: 32337 - DNA, 25 bp, Artificial
  Probe
ctcatagtcctttcgattctagctg

SEQ ID NO: 32338 - DNA, 25 bp, Artificial
  Probe
cgactcatctctctacctgttgtca

SEQ ID NO: 32339 - DNA, 25 bp, Artificial
  Probe
ggtcctcatagtcctttcgattcta

SEQ ID NO: 32340 - DNA, 25 bp, Artificial
  Probe
gcaaataatctaaagagaaaggaca

SEQ ID NO: 32341 - DNA, 25 bp, Artificial
  Probe
gacgaaagtcaaagttccaagatca

SEQ ID NO: 32342 - DNA, 25 bp, Artificial
  Probe
cctcatagtcctttcgattctagct

SEQ ID NO: 32343 - DNA, 25 bp, Artificial
  Probe
gcctaagtctgaggaagcataattc

SEQ ID NO: 32344 - DNA, 25 bp, Artificial
  Probe
agcctaagtctgaggaagcataatt

SEQ ID NO: 32345 - DNA, 25 bp, Artificial
  Probe
taagtgtctgaaatgtctacggaaa

SEQ ID NO: 32346 - DNA, 25 bp, Artificial
  Probe
ttaagtgtctgaaatgtctacggaa

SEQ ID NO: 32347 - DNA, 25 bp, Artificial
  Probe
tttaagtgtctgaaatgtctacgga

SEQ ID NO: 32348 - DNA, 25 bp, Artificial
  Probe
gtttaagtgtctgaaatgtctacgg

SEQ ID NO: 32349 - DNA, 25 bp, Artificial
  Probe
ggtttaagtgtctgaaatgtctacg

SEQ ID NO: 32350 - DNA, 25 bp, Artificial
  Probe
gagcctaagtctgaggaagcataat

SEQ ID NO: 32351 - DNA, 25 bp, Artificial
  Probe
aagtgtctgaaatgtctacggaaag

SEQ ID NO: 32352 - DNA, 25 bp, Artificial
  Probe
ataattccaacctgaggacagagtg

SEQ ID NO: 32353 - DNA, 25 bp, Artificial
  Probe
cataattccaacctgaggacagagt

SEQ ID NO: 32354 - DNA, 25 bp, Artificial
  Probe
catcttgatagagcttacctcctgg

SEQ ID NO: 32355 - DNA, 25 bp, Artificial
  Probe
ccatcttgatagagcttacctcctg

SEQ ID NO: 32356 - DNA, 25 bp, Artificial
  Probe
tcatcttaatctgcaattcaagttg

SEQ ID NO: 32357 - DNA, 25 bp, Artificial
  Probe
catcttaatctgcaattcaagttga

SEQ ID NO: 32358 - DNA, 25 bp, Artificial
  Probe
aagcataattccaacctgaggacag

SEQ ID NO: 32359 - DNA, 25 bp, Artificial
  Probe
gaagcataattccaacctgaggaca

SEQ ID NO: 32360 - DNA, 25 bp, Artificial
  Probe
ttcatcttaatctgcaattcaagtt

SEQ ID NO: 32361 - DNA, 25 bp, Artificial
  Probe
agtcttagtttaattacaccaccaa

SEQ ID NO: 32362 - DNA, 25 bp, Artificial
  Probe
gggtttcatcttaatctgcaattca

SEQ ID NO: 32363 - DNA, 25 bp, Artificial
  Probe
agggtttcatcttaatctgcaattc

SEQ ID NO: 32364 - DNA, 25 bp, Artificial
  Probe
gcataattccaacctgaggacagag

SEQ ID NO: 32365 - DNA, 25 bp, Artificial
  Probe
aatctgcaattcaagttgatattca

SEQ ID NO: 32366 - DNA, 25 bp, Artificial
  Probe
gaagggtttcatcttaatctgcaat

SEQ ID NO: 32367 - DNA, 25 bp, Artificial
  Probe
catctgatgagcagttggaacagtt

SEQ ID NO: 32368 - DNA, 25 bp, Artificial
  Probe
atcttaatctgcaattcaagttgat

SEQ ID NO: 32369 - DNA, 25 bp, Artificial
  Probe
aagggtttcatcttaatctgcaatt

SEQ ID NO: 32370 - DNA, 25 bp, Artificial
  Probe
agtgtctgaaatgtctacggaaagc

SEQ ID NO: 32371 - DNA, 25 bp, Artificial
  Probe
ggagcctaagtctgaggaagcataa

SEQ ID NO: 32372 - DNA, 25 bp, Artificial
  Probe
agcataattccaacctgaggacaga

SEQ ID NO: 32373 - DNA, 25 bp, Artificial
  Probe
atgagccatcttgatagagcttacc

SEQ ID NO: 32374 - DNA, 25 bp, Artificial
  Probe
cttagtacttaagcggcttgcataa

SEQ ID NO: 32375 - DNA, 25 bp, Artificial
  Probe
gatgagccatcttgatagagcttac

SEQ ID NO: 32376 - DNA, 25 bp, Artificial
  Probe
ggtttcatcttaatctgcaattcaa

SEQ ID NO: 32377 - DNA, 25 bp, Artificial
  Probe
gtcttagtttaattacaccaccaaa

SEQ ID NO: 32378 - DNA, 25 bp, Artificial
  Probe
tgatgagccatcttgatagagctta

SEQ ID NO: 32379 - DNA, 25 bp, Artificial
  Probe
ttagctgatgagccatcttgataga

SEQ ID NO: 32380 - DNA, 25 bp, Artificial
  Probe
atctgatgagcagttggaacagttt

SEQ ID NO: 32381 - DNA, 25 bp, Artificial
  Probe
tagtcttagtttaattacaccacca

SEQ ID NO: 32382 - DNA, 25 bp, Artificial
  Probe
gagccatcttgatagagcttacctc

SEQ ID NO: 32383 - DNA, 25 bp, Artificial
  Probe
tagctgatgagccatcttgatagag

SEQ ID NO: 32384 - DNA, 25 bp, Artificial
  Probe
aaagtaatccagtgttcatgtttaa

SEQ ID NO: 32385 - DNA, 25 bp, Artificial
  Probe
tcttaatctgcaattcaagttgata

SEQ ID NO: 32386 - DNA, 25 bp, Artificial
  Probe
gccatcttgatagagcttacctcct

SEQ ID NO: 32387 - DNA, 25 bp, Artificial
  Probe
ctaagtctgaggaagcataattcca

SEQ ID NO: 32388 - DNA, 25 bp, Artificial
  Probe
ttggtagcatctatgaggacttgaa

SEQ ID NO: 32389 - DNA, 25 bp, Artificial
  Probe
ctatgaggacttgaagatgtaccag

SEQ ID NO: 32390 - DNA, 25 bp, Artificial
  Probe
tggtagcatctatgaggacttgaag

SEQ ID NO: 32391 - DNA, 25 bp, Artificial
  Probe
cttggtagcatctatgaggacttga

SEQ ID NO: 32392 - DNA, 25 bp, Artificial
  Probe
ggtagcatctatgaggacttgaaga

SEQ ID NO: 32393 - DNA, 25 bp, Artificial
  Probe
cagatccttacagagtgaagatgaa

SEQ ID NO: 32394 - DNA, 25 bp, Artificial
  Probe
agatccttacagagtgaagatgaag

SEQ ID NO: 32395 - DNA, 25 bp, Artificial
  Probe
tctatgaggacttgaagatgtacca

SEQ ID NO: 32396 - DNA, 25 bp, Artificial
  Probe
gatccttacagagtgaagatgaagc

SEQ ID NO: 32397 - DNA, 25 bp, Artificial
  Probe
aagcagatccttacagagtgaagat

SEQ ID NO: 32398 - DNA, 25 bp, Artificial
  Probe
tatgaggacttgaagatgtaccagt

SEQ ID NO: 32399 - DNA, 25 bp, Artificial
  Probe
cttgaagatgtaccagtcagagttc

SEQ ID NO: 32400 - DNA, 25 bp, Artificial
  Probe
acttgaagatgtaccagtcagagtt

SEQ ID NO: 32401 - DNA, 25 bp, Artificial
  Probe
gcagatccttacagagtgaagatga

SEQ ID NO: 32402 - DNA, 25 bp, Artificial
  Probe
agcagatccttacagagtgaagatg

SEQ ID NO: 32403 - DNA, 25 bp, Artificial
  Probe
gaagcagatccttacagagtgaaga

SEQ ID NO: 32404 - DNA, 25 bp, Artificial
  Probe
agaagcagatccttacagagtgaag

SEQ ID NO: 32405 - DNA, 25 bp, Artificial
  Probe
gagaagcagatccttacagagtgaa

SEQ ID NO: 32406 - DNA, 25 bp, Artificial
  Probe
ttgaagatgtaccagtcagagttcc

SEQ ID NO: 32407 - DNA, 25 bp, Artificial
  Probe
atccttacagagtgaagatgaagct

SEQ ID NO: 32408 - DNA, 25 bp, Artificial
  Probe
gaagatgtaccagtcagagttccag

SEQ ID NO: 32409 - DNA, 25 bp, Artificial
  Probe
gtagcatctatgaggacttgaagat

SEQ ID NO: 32410 - DNA, 25 bp, Artificial
  Probe
atctatgaggacttgaagatgtacc

SEQ ID NO: 32411 - DNA, 25 bp, Artificial
  Probe
agtgaagatgaagctctgtatcctg

SEQ ID NO: 32412 - DNA, 25 bp, Artificial
  Probe
gagtgaagatgaagctctgtatcct

SEQ ID NO: 32413 - DNA, 25 bp, Artificial
  Probe
ccttggtagcatctatgaggacttg

SEQ ID NO: 32414 - DNA, 25 bp, Artificial
  Probe
tccttacagagtgaagatgaagctc

SEQ ID NO: 32415 - DNA, 25 bp, Artificial
  Probe
tgaagatgtaccagtcagagttcca

SEQ ID NO: 32416 - DNA, 25 bp, Artificial
  Probe
cttcagctcctgtaggaatctgtaa

SEQ ID NO: 32417 - DNA, 25 bp, Artificial
  Probe
ctattgatgagctaatgcggtctct

SEQ ID NO: 32418 - DNA, 25 bp, Artificial
  Probe
ttcagctcctgtaggaatctgtaac

SEQ ID NO: 32419 - DNA, 25 bp, Artificial
  Probe
aagacttctttgatgatgaccctgt

SEQ ID NO: 32420 - DNA, 25 bp, Artificial
  Probe
aagatgtaccagtcagagttccagg

SEQ ID NO: 32421 - DNA, 25 bp, Artificial
  Probe
tattgatgagctaatgcggtctctg

SEQ ID NO: 32422 - DNA, 25 bp, Artificial
  Probe
agacttctttgatgatgaccctgtg

SEQ ID NO: 32423 - DNA, 25 bp, Artificial
  Probe
aaacatgctgatggctattgatgag

SEQ ID NO: 32424 - DNA, 25 bp, Artificial
  Probe
gaaacatgctgatggctattgatga

SEQ ID NO: 32425 - DNA, 25 bp, Artificial
  Probe
agaaacatgctgatggctattgatg

SEQ ID NO: 32426 - DNA, 25 bp, Artificial
  Probe
tcaacagggtgatgaactatctgag

SEQ ID NO: 32427 - DNA, 25 bp, Artificial
  Probe
aattgaaacattactcttgcactgc

SEQ ID NO: 32428 - DNA, 25 bp, Artificial
  Probe
aagagacttcttccataataagagg

SEQ ID NO: 32429 - DNA, 25 bp, Artificial
  Probe
cttaccactggaactccacaagaat

SEQ ID NO: 32430 - DNA, 25 bp, Artificial
  Probe
aaattgaaacattactcttgcactg

SEQ ID NO: 32431 - DNA, 25 bp, Artificial
  Probe
gtgaagatgaagctctgtatcctgc

SEQ ID NO: 32432 - DNA, 25 bp, Artificial
  Probe
attgaaacattactcttgcactgct

SEQ ID NO: 32433 - DNA, 25 bp, Artificial
  Probe
acagtattagattcacagttgccat

SEQ ID NO: 32434 - DNA, 25 bp, Artificial
  Probe
tacagtattagattcacagttgcca

SEQ ID NO: 32435 - DNA, 25 bp, Artificial
  Probe
cagtattagattcacagttgccata

SEQ ID NO: 32436 - DNA, 25 bp, Artificial
  Probe
gtacagtattagattcacagttgcc

SEQ ID NO: 32437 - DNA, 25 bp, Artificial
  Probe
agtattagattcacagttgccatat

SEQ ID NO: 32438 - DNA, 25 bp, Artificial
  Probe
tgaaggaacttaactattgcactga

SEQ ID NO: 32439 - DNA, 25 bp, Artificial
  Probe
gaaggaacttaactattgcactgaa

SEQ ID NO: 32440 - DNA, 25 bp, Artificial
  Probe
atgaaggaacttaactattgcactg

SEQ ID NO: 32441 - DNA, 25 bp, Artificial
  Probe
accctccttgtcaaatctataatct

SEQ ID NO: 32442 - DNA, 25 bp, Artificial
  Probe
tataattaacctgcctccaattcaa

SEQ ID NO: 32443 - DNA, 25 bp, Artificial
  Probe
gcaaccctccttgtcaaatctataa

SEQ ID NO: 32444 - DNA, 25 bp, Artificial
  Probe
atataattaacctgcctccaattca

SEQ ID NO: 32445 - DNA, 25 bp, Artificial
  Probe
aaccctccttgtcaaatctataatc

SEQ ID NO: 32446 - DNA, 25 bp, Artificial
  Probe
tttcctgttgtaacttctggtgtac

SEQ ID NO: 32447 - DNA, 25 bp, Artificial
  Probe
gatcccaaactacttgataaactgc

SEQ ID NO: 32448 - DNA, 25 bp, Artificial
  Probe
ccctccttgtcaaatctataatctt

SEQ ID NO: 32449 - DNA, 25 bp, Artificial
  Probe
caaccctccttgtcaaatctataat

SEQ ID NO: 32450 - DNA, 25 bp, Artificial
  Probe
tatgaaggaacttaactattgcact

SEQ ID NO: 32451 - DNA, 25 bp, Artificial
  Probe
gtattagattcacagttgccatata

SEQ ID NO: 32452 - DNA, 25 bp, Artificial
  Probe
agatcccaaactacttgataaactg

SEQ ID NO: 32453 - DNA, 25 bp, Artificial
  Probe
aatataattaacctgcctccaattc

SEQ ID NO: 32454 - DNA, 25 bp, Artificial
  Probe
ataattaacctgcctccaattcaaa

SEQ ID NO: 32455 - DNA, 25 bp, Artificial
  Probe
atatgaaggaacttaactattgcac

SEQ ID NO: 32456 - DNA, 25 bp, Artificial
  Probe
ttagattcacagttgccatatatag

SEQ ID NO: 32457 - DNA, 25 bp, Artificial
  Probe
atcccaaactacttgataaactgca

SEQ ID NO: 32458 - DNA, 25 bp, Artificial
  Probe
aaggaacttaactattgcactgaaa

SEQ ID NO: 32459 - DNA, 25 bp, Artificial
  Probe
tcccaaactacttgataaactgcac

SEQ ID NO: 32460 - DNA, 25 bp, Artificial
  Probe
ttttcctgttgtaacttctggtgta

SEQ ID NO: 32461 - DNA, 25 bp, Artificial
  Probe
tgtacagtattagattcacagttgc

SEQ ID NO: 32462 - DNA, 25 bp, Artificial
  Probe
tgcaaccctccttgtcaaatctata

SEQ ID NO: 32463 - DNA, 25 bp, Artificial
  Probe
cctccttgtcaaatctataatcttt

SEQ ID NO: 32464 - DNA, 25 bp, Artificial
  Probe
ttaacctgcctccaattcaaaatag

SEQ ID NO: 32465 - DNA, 25 bp, Artificial
  Probe
tagatcccaaactacttgataaact

SEQ ID NO: 32466 - DNA, 25 bp, Artificial
  Probe
gacttttcctgttgtaacttctggt

SEQ ID NO: 32467 - DNA, 25 bp, Artificial
  Probe
attaacctgcctccaattcaaaata

SEQ ID NO: 32468 - DNA, 25 bp, Artificial
  Probe
taaatggagggcgttttgtattgtt

SEQ ID NO: 32469 - DNA, 25 bp, Artificial
  Probe
cttttcctgttgtaacttctggtgt

SEQ ID NO: 32470 - DNA, 25 bp, Artificial
  Probe
acttttcctgttgtaacttctggtg

SEQ ID NO: 32471 - DNA, 25 bp, Artificial
  Probe
aatatgaaggaacttaactattgca

SEQ ID NO: 32472 - DNA, 25 bp, Artificial
  Probe
taacctgcctccaattcaaaatagc

SEQ ID NO: 32473 - DNA, 25 bp, Artificial
  Probe
attagattcacagttgccatatata

SEQ ID NO: 32474 - DNA, 25 bp, Artificial
  Probe
tattagattcacagttgccatatat

SEQ ID NO: 32475 - DNA, 25 bp, Artificial
  Probe
aattaacctgcctccaattcaaaat

SEQ ID NO: 32476 - DNA, 25 bp, Artificial
  Probe
gtaaaacccacaaatgacttctgta

SEQ ID NO: 32477 - DNA, 25 bp, Artificial
  Probe
ttgtaacttctggtgtacatctgaa

SEQ ID NO: 32478 - DNA, 25 bp, Artificial
  Probe
ctttgatattggaaccctgaggaat

SEQ ID NO: 32479 - DNA, 25 bp, Artificial
  Probe
tttgatattggaaccctgaggaatc

SEQ ID NO: 32480 - DNA, 25 bp, Artificial
  Probe
aagcctttgatattggaaccctgag

SEQ ID NO: 32481 - DNA, 25 bp, Artificial
  Probe
cctttgatattggaaccctgaggaa

SEQ ID NO: 32482 - DNA, 25 bp, Artificial
  Probe
ttgatattggaaccctgaggaatcc

SEQ ID NO: 32483 - DNA, 25 bp, Artificial
  Probe
caagcctttgatattggaaccctga

SEQ ID NO: 32484 - DNA, 25 bp, Artificial
  Probe
gatattggaaccctgaggaatcctg

SEQ ID NO: 32485 - DNA, 25 bp, Artificial
  Probe
tgatattggaaccctgaggaatcct

SEQ ID NO: 32486 - DNA, 25 bp, Artificial
  Probe
attcctgaaacgttatttataccgc

SEQ ID NO: 32487 - DNA, 25 bp, Artificial
  Probe
gcctttgatattggaaccctgagga

SEQ ID NO: 32488 - DNA, 25 bp, Artificial
  Probe
agcctttgatattggaaccctgagg

SEQ ID NO: 32489 - DNA, 25 bp, Artificial
  Probe
cattcctgaaacgttatttataccg

SEQ ID NO: 32490 - DNA, 25 bp, Artificial
  Probe
gcgagatatcattcctgaaacgtta

SEQ ID NO: 32491 - DNA, 25 bp, Artificial
  Probe
cgagatatcattcctgaaacgttat

SEQ ID NO: 32492 - DNA, 25 bp, Artificial
  Probe
ttcctgaaacgttatttataccgcg

SEQ ID NO: 32493 - DNA, 25 bp, Artificial
  Probe
atattggaaccctgaggaatcctgc

SEQ ID NO: 32494 - DNA, 25 bp, Artificial
  Probe
tcattcctgaaacgttatttatacc

SEQ ID NO: 32495 - DNA, 25 bp, Artificial
  Probe
gagatatcattcctgaaacgttatt

SEQ ID NO: 32496 - DNA, 25 bp, Artificial
  Probe
ggcgagatatcattcctgaaacgtt

SEQ ID NO: 32497 - DNA, 25 bp, Artificial
  Probe
agatatcattcctgaaacgttattt

SEQ ID NO: 32498 - DNA, 25 bp, Artificial
  Probe
cggcgagatatcattcctgaaacgt

SEQ ID NO: 32499 - DNA, 25 bp, Artificial
  Probe
ctgcggcgagatatcattcctgaaa

SEQ ID NO: 32500 - DNA, 25 bp, Artificial
  Probe
ccaagcctttgatattggaaccctg

SEQ ID NO: 32501 - DNA, 25 bp, Artificial
  Probe
cacggatgtccgggatttcattaat

SEQ ID NO: 32502 - DNA, 25 bp, Artificial
  Probe
cacccaagcctttgatattggaacc

SEQ ID NO: 32503 - DNA, 25 bp, Artificial
  Probe
atcattcctgaaacgttatttatac

SEQ ID NO: 32504 - DNA, 25 bp, Artificial
  Probe
ataacacggatgtccgggatttcat

SEQ ID NO: 32505 - DNA, 25 bp, Artificial
  Probe
cccaagcctttgatattggaaccct

SEQ ID NO: 32506 - DNA, 25 bp, Artificial
  Probe
acacggatgtccgggatttcattaa

SEQ ID NO: 32507 - DNA, 25 bp, Artificial
  Probe
aacacggatgtccgggatttcatta

SEQ ID NO: 32508 - DNA, 25 bp, Artificial
  Probe
taacacggatgtccgggatttcatt

SEQ ID NO: 32509 - DNA, 25 bp, Artificial
  Probe
gatatcattcctgaaacgttattta

SEQ ID NO: 32510 - DNA, 25 bp, Artificial
  Probe
acccaagcctttgatattggaaccc

SEQ ID NO: 32511 - DNA, 25 bp, Artificial
  Probe
gataacacggatgtccgggatttca

SEQ ID NO: 32512 - DNA, 25 bp, Artificial
  Probe
acggatgtccgggatttcattaatg

SEQ ID NO: 32513 - DNA, 25 bp, Artificial
  Probe
cattaatgagcgcctcaaagagcac

SEQ ID NO: 32514 - DNA, 25 bp, Artificial
  Probe
tctactccactcagaagaactcctc

SEQ ID NO: 32515 - DNA, 25 bp, Artificial
  Probe
gtctactccactcagaagaactcct

SEQ ID NO: 32516 - DNA, 25 bp, Artificial
  Probe
ctactccactcagaagaactcctcg

SEQ ID NO: 32517 - DNA, 25 bp, Artificial
  Probe
caagtatgagagctggaagaagtgg

SEQ ID NO: 32518 - DNA, 25 bp, Artificial
  Probe
cgtctactccactcagaagaactcc

SEQ ID NO: 32519 - DNA, 25 bp, Artificial
  Probe
gcaagtatgagagctggaagaagtg

SEQ ID NO: 32520 - DNA, 25 bp, Artificial
  Probe
acgtctactccactcagaagaactc

SEQ ID NO: 32521 - DNA, 25 bp, Artificial
  Probe
tactccactcagaagaactcctcgg

SEQ ID NO: 32522 - DNA, 25 bp, Artificial
  Probe
aagtatgagagctggaagaagtggc

SEQ ID NO: 32523 - DNA, 25 bp, Artificial
  Probe
ggcaagtatgagagctggaagaagt

SEQ ID NO: 32524 - DNA, 25 bp, Artificial
  Probe
gggcaagtatgagagctggaagaag

SEQ ID NO: 32525 - DNA, 25 bp, Artificial
  Probe
gtatgagagctggaagaagtggctg

SEQ ID NO: 32526 - DNA, 25 bp, Artificial
  Probe
agtatgagagctggaagaagtggct

SEQ ID NO: 32527 - DNA, 25 bp, Artificial
  Probe
gaactcctcggagcagtttgagaag

SEQ ID NO: 32528 - DNA, 25 bp, Artificial
  Probe
gaagaactcctcggagcagtttgag

SEQ ID NO: 32529 - DNA, 25 bp, Artificial
  Probe
cgtggcaatctgtatgactataagg

SEQ ID NO: 32530 - DNA, 25 bp, Artificial
  Probe
ccgtggcaatctgtatgactataag

SEQ ID NO: 32531 - DNA, 25 bp, Artificial
  Probe
tataagtgaccgtggcaatctgtat

SEQ ID NO: 32532 - DNA, 25 bp, Artificial
  Probe
atataagtgaccgtggcaatctgta

SEQ ID NO: 32533 - DNA, 25 bp, Artificial
  Probe
atattgtatataagtgaccgtggca

SEQ ID NO: 32534 - DNA, 25 bp, Artificial
  Probe
tattgtatataagtgaccgtggcaa

SEQ ID NO: 32535 - DNA, 25 bp, Artificial
  Probe
gtatataagtgaccgtggcaatctg

SEQ ID NO: 32536 - DNA, 25 bp, Artificial
  Probe
gaccgtggcaatctgtatgactata

SEQ ID NO: 32537 - DNA, 25 bp, Artificial
  Probe
ttgtatataagtgaccgtggcaatc

SEQ ID NO: 32538 - DNA, 25 bp, Artificial
  Probe
tatataagtgaccgtggcaatctgt

SEQ ID NO: 32539 - DNA, 25 bp, Artificial
  Probe
tgtatataagtgaccgtggcaatct

SEQ ID NO: 32540 - DNA, 25 bp, Artificial
  Probe
aatattgtatataagtgaccgtggc

SEQ ID NO: 32541 - DNA, 25 bp, Artificial
  Probe
ctgtatgactataagggagacgatg

SEQ ID NO: 32542 - DNA, 25 bp, Artificial
  Probe
tgactgttatttattggaccctgag

SEQ ID NO: 32543 - DNA, 25 bp, Artificial
  Probe
ctgactgttatttattggaccctga

SEQ ID NO: 32544 - DNA, 25 bp, Artificial
  Probe
ggcaatctgtatgactataagggag

SEQ ID NO: 32545 - DNA, 25 bp, Artificial
  Probe
actgactgttatttattggaccctg

SEQ ID NO: 32546 - DNA, 25 bp, Artificial
  Probe
tggcaatctgtatgactataaggga

SEQ ID NO: 32547 - DNA, 25 bp, Artificial
  Probe
gtggcaatctgtatgactataaggg

SEQ ID NO: 32548 - DNA, 25 bp, Artificial
  Probe
ataagtgaccgtggcaatctgtatg

SEQ ID NO: 32549 - DNA, 25 bp, Artificial
  Probe
tgtatgactataagggagacgatgg

SEQ ID NO: 32550 - DNA, 25 bp, Artificial
  Probe
tctgtatgactataagggagacgat

SEQ ID NO: 32551 - DNA, 25 bp, Artificial
  Probe
atctgtatgactataagggagacga

SEQ ID NO: 32552 - DNA, 25 bp, Artificial
  Probe
aactgactgttatttattggaccct

SEQ ID NO: 32553 - DNA, 25 bp, Artificial
  Probe
gcaatctgtatgactataagggaga

SEQ ID NO: 32554 - DNA, 25 bp, Artificial
  Probe
attgtatataagtgaccgtggcaat

SEQ ID NO: 32555 - DNA, 25 bp, Artificial
  Probe
ctgttatttattggaccctgaggac

SEQ ID NO: 32556 - DNA, 25 bp, Artificial
  Probe
gactgttatttattggaccctgagg

SEQ ID NO: 32557 - DNA, 25 bp, Artificial
  Probe
aatctgtatgactataagggagacg

SEQ ID NO: 32558 - DNA, 25 bp, Artificial
  Probe
aaactgactgttatttattggaccc

SEQ ID NO: 32559 - DNA, 25 bp, Artificial
  Probe
actgttatttattggaccctgagga

SEQ ID NO: 32560 - DNA, 25 bp, Artificial
  Probe
caaactgactgttatttattggacc

SEQ ID NO: 32561 - DNA, 25 bp, Artificial
  Probe
gtatgactataagggagacgatggc

SEQ ID NO: 32562 - DNA, 25 bp, Artificial
  Probe
caatctgtatgactataagggagac

SEQ ID NO: 32563 - DNA, 25 bp, Artificial
  Probe
tgaccgtggcaatctgtatgactat

SEQ ID NO: 32564 - DNA, 25 bp, Artificial
  Probe
tatgactataagggagacgatggca

SEQ ID NO: 32565 - DNA, 25 bp, Artificial
  Probe
taagtgaccgtggcaatctgtatga

SEQ ID NO: 32566 - DNA, 25 bp, Artificial
  Probe
tgttatttattggaccctgaggacg

SEQ ID NO: 32567 - DNA, 25 bp, Artificial
  Probe
acaaactgactgttatttattggac

SEQ ID NO: 32568 - DNA, 25 bp, Artificial
  Probe
atgactataagggagacgatggcat

SEQ ID NO: 32569 - DNA, 25 bp, Artificial
  Probe
ttatttattggaccctgaggacgga

SEQ ID NO: 32570 - DNA, 25 bp, Artificial
  Probe
gttatttattggaccctgaggacgg

SEQ ID NO: 32571 - DNA, 25 bp, Artificial
  Probe
gtgaccgtggcaatctgtatgacta

SEQ ID NO: 32572 - DNA, 25 bp, Artificial
  Probe
tatttattggaccctgaggacggag

SEQ ID NO: 32573 - DNA, 25 bp, Artificial
  Probe
taatattgtatataagtgaccgtgg

SEQ ID NO: 32574 - DNA, 25 bp, Artificial
  Probe
ctgaagatagagagtgaacctcctt

SEQ ID NO: 32575 - DNA, 25 bp, Artificial
  Probe
gaatggagttgttaggagtcatgtg

SEQ ID NO: 32576 - DNA, 25 bp, Artificial
  Probe
aagatagagagtgaacctccttcct

SEQ ID NO: 32577 - DNA, 25 bp, Artificial
  Probe
aatggagttgttaggagtcatgtgt

SEQ ID NO: 32578 - DNA, 25 bp, Artificial
  Probe
ggaatggagttgttaggagtcatgt

SEQ ID NO: 32579 - DNA, 25 bp, Artificial
  Probe
atagagagtgaacctccttcctgag

SEQ ID NO: 32580 - DNA, 25 bp, Artificial
  Probe
gatagagagtgaacctccttcctga

SEQ ID NO: 32581 - DNA, 25 bp, Artificial
  Probe
agatagagagtgaacctccttcctg

SEQ ID NO: 32582 - DNA, 25 bp, Artificial
  Probe
cctgaagatagagagtgaacctcct

SEQ ID NO: 32583 - DNA, 25 bp, Artificial
  Probe
tgctgatgtctgctttctgattaaa

SEQ ID NO: 32584 - DNA, 25 bp, Artificial
  Probe
ctaccctgaagatagagagtgaacc

SEQ ID NO: 32585 - DNA, 25 bp, Artificial
  Probe
cctaccctgaagatagagagtgaac

SEQ ID NO: 32586 - DNA, 25 bp, Artificial
  Probe
ctgctgatgtctgctttctgattaa

SEQ ID NO: 32587 - DNA, 25 bp, Artificial
  Probe
atggagttgttaggagtcatgtgtg

SEQ ID NO: 32588 - DNA, 25 bp, Artificial
  Probe
taccctgaagatagagagtgaacct

SEQ ID NO: 32589 - DNA, 25 bp, Artificial
  Probe
ctagtggaagaaagtgacaaacctc

SEQ ID NO: 32590 - DNA, 25 bp, Artificial
  Probe
tctgctgatgtctgctttctgatta

SEQ ID NO: 32591 - DNA, 25 bp, Artificial
  Probe
tagtggaagaaagtgacaaacctca

SEQ ID NO: 32592 - DNA, 25 bp, Artificial
  Probe
gatgagcacattctctgttggacat

SEQ ID NO: 32593 - DNA, 25 bp, Artificial
  Probe
tgaagatagagagtgaacctccttc

SEQ ID NO: 32594 - DNA, 25 bp, Artificial
  Probe
gctgtgatttgtttaacccttcaga

SEQ ID NO: 32595 - DNA, 25 bp, Artificial
  Probe
tggagttgttaggagtcatgtgtga

SEQ ID NO: 32596 - DNA, 25 bp, Artificial
  Probe
agcacattctctgttggacatgaag

SEQ ID NO: 32597 - DNA, 25 bp, Artificial
  Probe
gagcacattctctgttggacatgaa

SEQ ID NO: 32598 - DNA, 25 bp, Artificial
  Probe
gaagatagagagtgaacctccttcc

SEQ ID NO: 32599 - DNA, 25 bp, Artificial
  Probe
agcagaaagagagatgagcacattc

SEQ ID NO: 32600 - DNA, 25 bp, Artificial
  Probe
gagcagaaagagagatgagcacatt

SEQ ID NO: 32601 - DNA, 25 bp, Artificial
  Probe
gtctgctttctgattaaagtgtctc

SEQ ID NO: 32602 - DNA, 25 bp, Artificial
  Probe
tgctttctgattaaagtgtctcctt

SEQ ID NO: 32603 - DNA, 25 bp, Artificial
  Probe
tgtctgctttctgattaaagtgtct

SEQ ID NO: 32604 - DNA, 25 bp, Artificial
  Probe
atgtctgctttctgattaaagtgtc

SEQ ID NO: 32605 - DNA, 25 bp, Artificial
  Probe
gatgtctgctttctgattaaagtgt

SEQ ID NO: 32606 - DNA, 25 bp, Artificial
  Probe
tgatgtctgctttctgattaaagtg

SEQ ID NO: 32607 - DNA, 25 bp, Artificial
  Probe
gctgatgtctgctttctgattaaag

SEQ ID NO: 32608 - DNA, 25 bp, Artificial
  Probe
atgagcacattctctgttggacatg

SEQ ID NO: 32609 - DNA, 25 bp, Artificial
  Probe
ctgatgtctgctttctgattaaagt

SEQ ID NO: 32610 - DNA, 25 bp, Artificial
  Probe
ctgctttctgattaaagtgtctcct

SEQ ID NO: 32611 - DNA, 25 bp, Artificial
  Probe
tctgctttctgattaaagtgtctcc

SEQ ID NO: 32612 - DNA, 25 bp, Artificial
  Probe
gctagtggaagaaagtgacaaacct

SEQ ID NO: 32613 - DNA, 25 bp, Artificial
  Probe
accctgaagatagagagtgaacctc

SEQ ID NO: 32614 - DNA, 25 bp, Artificial
  Probe
gagctgtgatttgtttaacccttca

SEQ ID NO: 32615 - DNA, 25 bp, Artificial
  Probe
gtctgctgatgtctgctttctgatt

SEQ ID NO: 32616 - DNA, 25 bp, Artificial
  Probe
agatgagcacattctctgttggaca

SEQ ID NO: 32617 - DNA, 25 bp, Artificial
  Probe
ggagctgtgatttgtttaacccttc

SEQ ID NO: 32618 - DNA, 25 bp, Artificial
  Probe
gggaatggagttgttaggagtcatg

SEQ ID NO: 32619 - DNA, 25 bp, Artificial
  Probe
aatatccaacctgtccgatacaaca

SEQ ID NO: 32620 - DNA, 25 bp, Artificial
  Probe
aaccgcagacctaacttcatataaa

SEQ ID NO: 32621 - DNA, 25 bp, Artificial
  Probe
aaaccgcagacctaacttcatataa

SEQ ID NO: 32622 - DNA, 25 bp, Artificial
  Probe
ttaaaccgcagacctaacttcatat

SEQ ID NO: 32623 - DNA, 25 bp, Artificial
  Probe
taaaccgcagacctaacttcatata

SEQ ID NO: 32624 - DNA, 25 bp, Artificial
  Probe
acgcatccatttctgtgattatgat

SEQ ID NO: 32625 - DNA, 25 bp, Artificial
  Probe
ttaattcgccaaatatccaacctgt

SEQ ID NO: 32626 - DNA, 25 bp, Artificial
  Probe
tgtccgatacaacagaaggagtaac

SEQ ID NO: 32627 - DNA, 25 bp, Artificial
  Probe
gttaattcgccaaatatccaacctg

SEQ ID NO: 32628 - DNA, 25 bp, Artificial
  Probe
agttaattcgccaaatatccaacct

SEQ ID NO: 32629 - DNA, 25 bp, Artificial
  Probe
cagttaattcgccaaatatccaacc

SEQ ID NO: 32630 - DNA, 25 bp, Artificial
  Probe
ccagttaattcgccaaatatccaac

SEQ ID NO: 32631 - DNA, 25 bp, Artificial
  Probe
taattcgccaaatatccaacctgtc

SEQ ID NO: 32632 - DNA, 25 bp, Artificial
  Probe
gacgcatccatttctgtgattatga

SEQ ID NO: 32633 - DNA, 25 bp, Artificial
  Probe
tctgccagttaattcgccaaatatc

SEQ ID NO: 32634 - DNA, 25 bp, Artificial
  Probe
ctctgccagttaattcgccaaatat

SEQ ID NO: 32635 - DNA, 25 bp, Artificial
  Probe
gaagtcctgatagacaagctgagat

SEQ ID NO: 32636 - DNA, 25 bp, Artificial
  Probe
aaatatccaacctgtccgatacaac

SEQ ID NO: 32637 - DNA, 25 bp, Artificial
  Probe
caaatatccaacctgtccgatacaa

SEQ ID NO: 32638 - DNA, 25 bp, Artificial
  Probe
aagtcctgatagacaagctgagatg

SEQ ID NO: 32639 - DNA, 25 bp, Artificial
  Probe
gtccgatacaacagaaggagtaacc

SEQ ID NO: 32640 - DNA, 25 bp, Artificial
  Probe
gccagttaattcgccaaatatccaa

SEQ ID NO: 32641 - DNA, 25 bp, Artificial
  Probe
tttaaaccgcagacctaacttcata

SEQ ID NO: 32642 - DNA, 25 bp, Artificial
  Probe
ctgccagttaattcgccaaatatcc

SEQ ID NO: 32643 - DNA, 25 bp, Artificial
  Probe
aaactggcaattcacaatccaaatt

SEQ ID NO: 32644 - DNA, 25 bp, Artificial
  Probe
ctttaaaccgcagacctaacttcat

SEQ ID NO: 32645 - DNA, 25 bp, Artificial
  Probe
cgacgcatccatttctgtgattatg

SEQ ID NO: 32646 - DNA, 25 bp, Artificial
  Probe
gaaactggcaattcacaatccaaat

SEQ ID NO: 32647 - DNA, 25 bp, Artificial
  Probe
catttctgtgattatgatggttgca

SEQ ID NO: 32648 - DNA, 25 bp, Artificial
  Probe
ccaaatatccaacctgtccgataca

SEQ ID NO: 32649 - DNA, 25 bp, Artificial
  Probe
aagtttatacaaagtcgtctcattt

SEQ ID NO: 32650 - DNA, 25 bp, Artificial
  Probe
aaagtttatacaaagtcgtctcatt

SEQ ID NO: 32651 - DNA, 25 bp, Artificial
  Probe
attcacaatccaaatttacctgcca

SEQ ID NO: 32652 - DNA, 25 bp, Artificial
  Probe
tgccagttaattcgccaaatatcca

SEQ ID NO: 32653 - DNA, 25 bp, Artificial
  Probe
caattcacaatccaaatttacctgc

SEQ ID NO: 32654 - DNA, 25 bp, Artificial
  Probe
gcaattcacaatccaaatttacctg

SEQ ID NO: 32655 - DNA, 25 bp, Artificial
  Probe
aattcacaatccaaatttacctgcc

SEQ ID NO: 32656 - DNA, 25 bp, Artificial
  Probe
ggcaattcacaatccaaatttacct

SEQ ID NO: 32657 - DNA, 25 bp, Artificial
  Probe
actctgccagttaattcgccaaata

SEQ ID NO: 32658 - DNA, 25 bp, Artificial
  Probe
atcctttaaaccgcagacctaactt

SEQ ID NO: 32659 - DNA, 25 bp, Artificial
  Probe
accgcagacctaacttcatataaaa

SEQ ID NO: 32660 - DNA, 25 bp, Artificial
  Probe
gcacaaaagtttatacaaagtcgtc

SEQ ID NO: 32661 - DNA, 25 bp, Artificial
  Probe
atttctgtgattatgatggttgcac

SEQ ID NO: 32662 - DNA, 25 bp, Artificial
  Probe
ttcacaatccaaatttacctgccac

SEQ ID NO: 32663 - DNA, 25 bp, Artificial
  Probe
ggaagtcctgatagacaagctgaga

SEQ ID NO: 32664 - DNA, 25 bp, Artificial
  Probe
aatactgatgttggttcgcttgatg

SEQ ID NO: 32665 - DNA, 25 bp, Artificial
  Probe
gaatactgatgttggttcgcttgat

SEQ ID NO: 32666 - DNA, 25 bp, Artificial
  Probe
gatgttggttcgcttgatgagattc

SEQ ID NO: 32667 - DNA, 25 bp, Artificial
  Probe
atactgatgttggttcgcttgatga

SEQ ID NO: 32668 - DNA, 25 bp, Artificial
  Probe
ggtaacactggagacacagagataa

SEQ ID NO: 32669 - DNA, 25 bp, Artificial
  Probe
acacataaaggagaacattcaggtc

SEQ ID NO: 32670 - DNA, 25 bp, Artificial
  Probe
tcacacataaaggagaacattcagg

SEQ ID NO: 32671 - DNA, 25 bp, Artificial
  Probe
tgatgttggttcgcttgatgagatt

SEQ ID NO: 32672 - DNA, 25 bp, Artificial
  Probe
cacacataaaggagaacattcaggt

SEQ ID NO: 32673 - DNA, 25 bp, Artificial
  Probe
acataaaggagaacattcaggtctt

SEQ ID NO: 32674 - DNA, 25 bp, Artificial
  Probe
cacataaaggagaacattcaggtct

SEQ ID NO: 32675 - DNA, 25 bp, Artificial
  Probe
tagattcctttgtccttgtgtgaga

SEQ ID NO: 32676 - DNA, 25 bp, Artificial
  Probe
gtagattcctttgtccttgtgtgag

SEQ ID NO: 32677 - DNA, 25 bp, Artificial
  Probe
tactgatgttggttcgcttgatgag

SEQ ID NO: 32678 - DNA, 25 bp, Artificial
  Probe
tggtaacactggagacacagagata

SEQ ID NO: 32679 - DNA, 25 bp, Artificial
  Probe
gaggaatactgatgttggttcgctt

SEQ ID NO: 32680 - DNA, 25 bp, Artificial
  Probe
gagtccagagaaactaaggtcaatg

SEQ ID NO: 32681 - DNA, 25 bp, Artificial
  Probe
ctcacacataaaggagaacattcag

SEQ ID NO: 32682 - DNA, 25 bp, Artificial
  Probe
gagcaaatgtttctcatcaggaatg

SEQ ID NO: 32683 - DNA, 25 bp, Artificial
  Probe
tgagtccagagaaactaaggtcaat

SEQ ID NO: 32684 - DNA, 25 bp, Artificial
  Probe
atgttggttcgcttgatgagattca

SEQ ID NO: 32685 - DNA, 25 bp, Artificial
  Probe
ctgatgttggttcgcttgatgagat

SEQ ID NO: 32686 - DNA, 25 bp, Artificial
  Probe
aaagtgagtccagagaaactaaggt

SEQ ID NO: 32687 - DNA, 25 bp, Artificial
  Probe
ggaatactgatgttggttcgcttga

SEQ ID NO: 32688 - DNA, 25 bp, Artificial
  Probe
aggaatactgatgttggttcgcttg

SEQ ID NO: 32689 - DNA, 25 bp, Artificial
  Probe
gtaacactggagacacagagataaa

SEQ ID NO: 32690 - DNA, 25 bp, Artificial
  Probe
atggtaacactggagacacagagat

SEQ ID NO: 32691 - DNA, 25 bp, Artificial
  Probe
aagtgagtccagagaaactaaggtc

SEQ ID NO: 32692 - DNA, 25 bp, Artificial
  Probe
ggtagattcctttgtccttgtgtga

SEQ ID NO: 32693 - DNA, 25 bp, Artificial
  Probe
gtgagtccagagaaactaaggtcaa

SEQ ID NO: 32694 - DNA, 25 bp, Artificial
  Probe
gagaacattcaggtctttgacttcc

SEQ ID NO: 32695 - DNA, 25 bp, Artificial
  Probe
ggagaacattcaggtctttgacttc

SEQ ID NO: 32696 - DNA, 25 bp, Artificial
  Probe
gaacattcaggtctttgacttccag

SEQ ID NO: 32697 - DNA, 25 bp, Artificial
  Probe
aggagaacattcaggtctttgactt

SEQ ID NO: 32698 - DNA, 25 bp, Artificial
  Probe
aaggagaacattcaggtctttgact

SEQ ID NO: 32699 - DNA, 25 bp, Artificial
  Probe
ctaatgagggctgagcaaatgtttc

SEQ ID NO: 32700 - DNA, 25 bp, Artificial
  Probe
attcaggtctttgacttccagttga

SEQ ID NO: 32701 - DNA, 25 bp, Artificial
  Probe
cattcaggtctttgacttccagttg

SEQ ID NO: 32702 - DNA, 25 bp, Artificial
  Probe
agaacattcaggtctttgacttcca

SEQ ID NO: 32703 - DNA, 25 bp, Artificial
  Probe
agtgagtccagagaaactaaggtca

SEQ ID NO: 32704 - DNA, 25 bp, Artificial
  Probe
taaaggagaacattcaggtctttga

SEQ ID NO: 32705 - DNA, 25 bp, Artificial
  Probe
tccagagaaactaaggtcaatggtt

SEQ ID NO: 32706 - DNA, 25 bp, Artificial
  Probe
taatgagggctgagcaaatgtttct

SEQ ID NO: 32707 - DNA, 25 bp, Artificial
  Probe
acattcaggtctttgacttccagtt

SEQ ID NO: 32708 - DNA, 25 bp, Artificial
  Probe
aacattcaggtctttgacttccagt

SEQ ID NO: 32709 - DNA, 25 bp, Artificial
  Probe
agttggacttaatgaggttatgagc

SEQ ID NO: 32710 - DNA, 25 bp, Artificial
  Probe
aatgaggttatgagcttgatcttgt

SEQ ID NO: 32711 - DNA, 25 bp, Artificial
  Probe
ttggacttaatgaggttatgagctt

SEQ ID NO: 32712 - DNA, 25 bp, Artificial
  Probe
ggacttaatgaggttatgagcttga

SEQ ID NO: 32713 - DNA, 25 bp, Artificial
  Probe
atgaggttatgagcttgatcttgtc

SEQ ID NO: 32714 - DNA, 25 bp, Artificial
  Probe
tggacttaatgaggttatgagcttg

SEQ ID NO: 32715 - DNA, 25 bp, Artificial
  Probe
gttggacttaatgaggttatgagct

SEQ ID NO: 32716 - DNA, 25 bp, Artificial
  Probe
taatgaggttatgagcttgatcttg

SEQ ID NO: 32717 - DNA, 25 bp, Artificial
  Probe
acttaatgaggttatgagcttgatc

SEQ ID NO: 32718 - DNA, 25 bp, Artificial
  Probe
gacttaatgaggttatgagcttgat

SEQ ID NO: 32719 - DNA, 25 bp, Artificial
  Probe
cttaatgaggttatgagcttgatct

SEQ ID NO: 32720 - DNA, 25 bp, Artificial
  Probe
ttaatgaggttatgagcttgatctt

SEQ ID NO: 32721 - DNA, 25 bp, Artificial
  Probe
atcttgtccacccatctaagtctag

SEQ ID NO: 32722 - DNA, 25 bp, Artificial
  Probe
gaggttatgagcttgatcttgtcca

SEQ ID NO: 32723 - DNA, 25 bp, Artificial
  Probe
tgaggttatgagcttgatcttgtcc

SEQ ID NO: 32724 - DNA, 25 bp, Artificial
  Probe
gatcttgtccacccatctaagtcta

SEQ ID NO: 32725 - DNA, 25 bp, Artificial
  Probe
aggttatgagcttgatcttgtccac

SEQ ID NO: 32726 - DNA, 25 bp, Artificial
  Probe
atctaagtctagggtggtaacactg

SEQ ID NO: 32727 - DNA, 25 bp, Artificial
  Probe
catctaagtctagggtggtaacact

SEQ ID NO: 32728 - DNA, 25 bp, Artificial
  Probe
aagttggacttaatgaggttatgag

SEQ ID NO: 32729 - DNA, 25 bp, Artificial
  Probe
ttgatcttgtccacccatctaagtc

SEQ ID NO: 32730 - DNA, 25 bp, Artificial
  Probe
cttgatcttgtccacccatctaagt

SEQ ID NO: 32731 - DNA, 25 bp, Artificial
  Probe
cttctgctagatgtgttcctgacct

SEQ ID NO: 32732 - DNA, 25 bp, Artificial
  Probe
tcttgtccacccatctaagtctagg

SEQ ID NO: 32733 - DNA, 25 bp, Artificial
  Probe
tgatcttgtccacccatctaagtct

SEQ ID NO: 32734 - DNA, 25 bp, Artificial
  Probe
ccatctaagtctagggtggtaacac

SEQ ID NO: 32735 - DNA, 25 bp, Artificial
  Probe
aaaggactatgtctctcccatcaga

SEQ ID NO: 32736 - DNA, 25 bp, Artificial
  Probe
ttctgctagatgtgttcctgacctg

SEQ ID NO: 32737 - DNA, 25 bp, Artificial
  Probe
tatcagactgagactttgggaggaa

SEQ ID NO: 32738 - DNA, 25 bp, Artificial
  Probe
cggtaactaggcacaatataaaagg

SEQ ID NO: 32739 - DNA, 25 bp, Artificial
  Probe
ctatcagactgagactttgggagga

SEQ ID NO: 32740 - DNA, 25 bp, Artificial
  Probe
ctaagtctagggtggtaacactgga

SEQ ID NO: 32741 - DNA, 25 bp, Artificial
  Probe
tctaagtctagggtggtaacactgg

SEQ ID NO: 32742 - DNA, 25 bp, Artificial
  Probe
gcttgatcttgtccacccatctaag

SEQ ID NO: 32743 - DNA, 25 bp, Artificial
  Probe
ctgcttctgctagatgtgttcctga

SEQ ID NO: 32744 - DNA, 25 bp, Artificial
  Probe
aggcacaatataaaaggtttctaca

SEQ ID NO: 32745 - DNA, 25 bp, Artificial
  Probe
taagtctagggtggtaacactggac

SEQ ID NO: 32746 - DNA, 25 bp, Artificial
  Probe
ggttatgagcttgatcttgtccacc

SEQ ID NO: 32747 - DNA, 25 bp, Artificial
  Probe
accaaagttggacttaatgaggtta

SEQ ID NO: 32748 - DNA, 25 bp, Artificial
  Probe
ggtaactaggcacaatataaaaggt

SEQ ID NO: 32749 - DNA, 25 bp, Artificial
  Probe
atcagactgagactttgggaggaaa

SEQ ID NO: 32750 - DNA, 25 bp, Artificial
  Probe
tgcttctgctagatgtgttcctgac

SEQ ID NO: 32751 - DNA, 25 bp, Artificial
  Probe
tttgtgtatgtggtctccctcttcc

SEQ ID NO: 32752 - DNA, 25 bp, Artificial
  Probe
ccaaagttggacttaatgaggttat

SEQ ID NO: 32753 - DNA, 25 bp, Artificial
  Probe
actaggcacaatataaaaggtttct

SEQ ID NO: 32754 - DNA, 25 bp, Artificial
  Probe
acattggtgtcatggtggagttcag

SEQ ID NO: 32755 - DNA, 25 bp, Artificial
  Probe
gcccgaaaacctcagtatgacatct

SEQ ID NO: 32756 - DNA, 25 bp, Artificial
  Probe
tcttcaagagtcagtggttcatcat

SEQ ID NO: 32757 - DNA, 25 bp, Artificial
  Probe
cttcaagagtcagtggttcatcatg

SEQ ID NO: 32758 - DNA, 25 bp, Artificial
  Probe
tctactccaagaaatacattgcctt

SEQ ID NO: 32759 - DNA, 25 bp, Artificial
  Probe
ctctactccaagaaatacattgcct

SEQ ID NO: 32760 - DNA, 25 bp, Artificial
  Probe
ctactccaagaaatacattgccttt

SEQ ID NO: 32761 - DNA, 25 bp, Artificial
  Probe
cctctactccaagaaatacattgcc

SEQ ID NO: 32762 - DNA, 25 bp, Artificial
  Probe
ccctctactccaagaaatacattgc

SEQ ID NO: 32763 - DNA, 25 bp, Artificial
  Probe
ttcaagagtcagtggttcatcatgc

SEQ ID NO: 32764 - DNA, 25 bp, Artificial
  Probe
ctcatcagcatcttcacagccattc

SEQ ID NO: 32765 - DNA, 25 bp, Artificial
  Probe
tactccaagaaatacattgcctttc

SEQ ID NO: 32766 - DNA, 25 bp, Artificial
  Probe
gaaatacattgcctttctcatcagc

SEQ ID NO: 32767 - DNA, 25 bp, Artificial
  Probe
tcatcagcatcttcacagccattct

SEQ ID NO: 32768 - DNA, 25 bp, Artificial
  Probe
tctcatcagcatcttcacagccatt

SEQ ID NO: 32769 - DNA, 25 bp, Artificial
  Probe
ttctcatcagcatcttcacagccat

SEQ ID NO: 32770 - DNA, 25 bp, Artificial
  Probe
tcaagagtcagtggttcatcatgct

SEQ ID NO: 32771 - DNA, 25 bp, Artificial
  Probe
cccctctactccaagaaatacattg

SEQ ID NO: 32772 - DNA, 25 bp, Artificial
  Probe
caagagtcagtggttcatcatgctg

SEQ ID NO: 32773 - DNA, 25 bp, Artificial
  Probe
aatacattgcctttctcatcagcat

SEQ ID NO: 32774 - DNA, 25 bp, Artificial
  Probe
catcagcatcttcacagccattctg

SEQ ID NO: 32775 - DNA, 25 bp, Artificial
  Probe
aaatacattgcctttctcatcagca

SEQ ID NO: 32776 - DNA, 25 bp, Artificial
  Probe
atacattgcctttctcatcagcatc

SEQ ID NO: 32777 - DNA, 25 bp, Artificial
  Probe
ctttctcatcagcatcttcacagcc

SEQ ID NO: 32778 - DNA, 25 bp, Artificial
  Probe
cctttctcatcagcatcttcacagc

SEQ ID NO: 32779 - DNA, 25 bp, Artificial
  Probe
gcctttctcatcagcatcttcacag

SEQ ID NO: 32780 - DNA, 25 bp, Artificial
  Probe
gcccctctactccaagaaatacatt

SEQ ID NO: 32781 - DNA, 25 bp, Artificial
  Probe
ctcttcaagagtcagtggttcatca

SEQ ID NO: 32782 - DNA, 25 bp, Artificial
  Probe
ctgattgggatgtgctggctaattg

SEQ ID NO: 32783 - DNA, 25 bp, Artificial
  Probe
ttctgattgggatgtgctggctaat

SEQ ID NO: 32784 - DNA, 25 bp, Artificial
  Probe
tacattgcctttctcatcagcatct

SEQ ID NO: 32785 - DNA, 25 bp, Artificial
  Probe
tctgattgggatgtgctggctaatt

SEQ ID NO: 32786 - DNA, 25 bp, Artificial
  Probe
cattgcctttctcatcagcatcttc

SEQ ID NO: 32787 - DNA, 25 bp, Artificial
  Probe
cctcttcaagagtcagtggttcatc

SEQ ID NO: 32788 - DNA, 25 bp, Artificial
  Probe
catcctcttcaagagtcagtggttc

SEQ ID NO: 32789 - DNA, 25 bp, Artificial
  Probe
tttctcatcagcatcttcacagcca

SEQ ID NO: 32790 - DNA, 25 bp, Artificial
  Probe
attgcctttctcatcagcatcttca

SEQ ID NO: 32791 - DNA, 25 bp, Artificial
  Probe
tgcccctctactccaagaaatacat

SEQ ID NO: 32792 - DNA, 25 bp, Artificial
  Probe
aagagtcagtggttcatcatgctgg

SEQ ID NO: 32793 - DNA, 25 bp, Artificial
  Probe
tcctcttcaagagtcagtggttcat

SEQ ID NO: 32794 - DNA, 25 bp, Artificial
  Probe
atcctcttcaagagtcagtggttca

SEQ ID NO: 32795 - DNA, 25 bp, Artificial
  Probe
acattgcctttctcatcagcatctt

SEQ ID NO: 32796 - DNA, 25 bp, Artificial
  Probe
ttgcccctctactccaagaaataca

SEQ ID NO: 32797 - DNA, 25 bp, Artificial
  Probe
ctttcccgactgctctaccatcttg

SEQ ID NO: 32798 - DNA, 25 bp, Artificial
  Probe
cttctgattgggatgtgctggctaa

SEQ ID NO: 32799 - DNA, 25 bp, Artificial
  Probe
gaactttcccgactgctctaccatc

SEQ ID NO: 32800 - DNA, 25 bp, Artificial
  Probe
aacattctgatgtccggtaggaaga

SEQ ID NO: 32801 - DNA, 25 bp, Artificial
  Probe
aacttcatcagcaaggtcaacacta

SEQ ID NO: 32802 - DNA, 25 bp, Artificial
  Probe
ttgctatgctgtgtactcttaacga

SEQ ID NO: 32803 - DNA, 25 bp, Artificial
  Probe
cttcatcagcaaggtcaacactact

SEQ ID NO: 32804 - DNA, 25 bp, Artificial
  Probe
acttcatcagcaaggtcaacactac

SEQ ID NO: 32805 - DNA, 25 bp, Artificial
  Probe
tgctatgctgtgtactcttaacgac

SEQ ID NO: 32806 - DNA, 25 bp, Artificial
  Probe
atttgctatgctgtgtactcttaac

SEQ ID NO: 32807 - DNA, 25 bp, Artificial
  Probe
aatttgctatgctgtgtactcttaa

SEQ ID NO: 32808 - DNA, 25 bp, Artificial
  Probe
gctatgctgtgtactcttaacgaca

SEQ ID NO: 32809 - DNA, 25 bp, Artificial
  Probe
tttgctatgctgtgtactcttaacg

SEQ ID NO: 32810 - DNA, 25 bp, Artificial
  Probe
ttcatcagcaaggtcaacactactg

SEQ ID NO: 32811 - DNA, 25 bp, Artificial
  Probe
aaatttgctatgctgtgtactctta

SEQ ID NO: 32812 - DNA, 25 bp, Artificial
  Probe
aaacttcatcagcaaggtcaacact

SEQ ID NO: 32813 - DNA, 25 bp, Artificial
  Probe
caaacttcatcagcaaggtcaacac

SEQ ID NO: 32814 - DNA, 25 bp, Artificial
  Probe
tcatcagcaaggtcaacactactgt

SEQ ID NO: 32815 - DNA, 25 bp, Artificial
  Probe
aaatgcgtttccacagacaactctt

SEQ ID NO: 32816 - DNA, 25 bp, Artificial
  Probe
ctatgctgtgtactcttaacgacag

SEQ ID NO: 32817 - DNA, 25 bp, Artificial
  Probe
ccaaacttcatcagcaaggtcaaca

SEQ ID NO: 32818 - DNA, 25 bp, Artificial
  Probe
aatgcgtttccacagacaactcttc

SEQ ID NO: 32819 - DNA, 25 bp, Artificial
  Probe
taaaatgcgtttccacagacaactc

SEQ ID NO: 32820 - DNA, 25 bp, Artificial
  Probe
ctaaaatgcgtttccacagacaact

SEQ ID NO: 32821 - DNA, 25 bp, Artificial
  Probe
catcagcaaggtcaacactactgtt

SEQ ID NO: 32822 - DNA, 25 bp, Artificial
  Probe
tttccacagacaactcttctcccag

SEQ ID NO: 32823 - DNA, 25 bp, Artificial
  Probe
tatgctgtgtactcttaacgacagg

SEQ ID NO: 32824 - DNA, 25 bp, Artificial
  Probe
gtttccacagacaactcttctccca

SEQ ID NO: 32825 - DNA, 25 bp, Artificial
  Probe
cccaaacttcatcagcaaggtcaac

SEQ ID NO: 32826 - DNA, 25 bp, Artificial
  Probe
atgcgtttccacagacaactcttct

SEQ ID NO: 32827 - DNA, 25 bp, Artificial
  Probe
aaaatgcgtttccacagacaactct

SEQ ID NO: 32828 - DNA, 25 bp, Artificial
  Probe
gctaaaatgcgtttccacagacaac

SEQ ID NO: 32829 - DNA, 25 bp, Artificial
  Probe
atgctgtgtactcttaacgacaggt

SEQ ID NO: 32830 - DNA, 25 bp, Artificial
  Probe
caactgcctagatcttcggagcttc

SEQ ID NO: 32831 - DNA, 25 bp, Artificial
  Probe
aacactactgttgccttaggctgta

SEQ ID NO: 32832 - DNA, 25 bp, Artificial
  Probe
ggctaaaatgcgtttccacagacaa

SEQ ID NO: 32833 - DNA, 25 bp, Artificial
  Probe
tgctgtgtactcttaacgacaggtg

SEQ ID NO: 32834 - DNA, 25 bp, Artificial
  Probe
acactactgttgccttaggctgtac

SEQ ID NO: 32835 - DNA, 25 bp, Artificial
  Probe
ctactgttgccttaggctgtacctg

SEQ ID NO: 32836 - DNA, 25 bp, Artificial
  Probe
cactactgttgccttaggctgtacc

SEQ ID NO: 32837 - DNA, 25 bp, Artificial
  Probe
actactgttgccttaggctgtacct

SEQ ID NO: 32838 - DNA, 25 bp, Artificial
  Probe
catgaccccaaacttcatcagcaag

SEQ ID NO: 32839 - DNA, 25 bp, Artificial
  Probe
ctggaaaagtccttctcccagaacc

SEQ ID NO: 32840 - DNA, 25 bp, Artificial
  Probe
tgtttgtggtattaggtttgctttg

SEQ ID NO: 32841 - DNA, 25 bp, Artificial
  Probe
atgtttgtggtattaggtttgcttt

SEQ ID NO: 32842 - DNA, 25 bp, Artificial
  Probe
aatgtttgtggtattaggtttgctt

SEQ ID NO: 32843 - DNA, 25 bp, Artificial
  Probe
caatgtttgtggtattaggtttgct

SEQ ID NO: 32844 - DNA, 25 bp, Artificial
  Probe
catggatgtagcatatggaagagag

SEQ ID NO: 32845 - DNA, 25 bp, Artificial
  Probe
atggatgtagcatatggaagagagt

SEQ ID NO: 32846 - DNA, 25 bp, Artificial
  Probe
tggatgtagcatatggaagagagtt

SEQ ID NO: 32847 - DNA, 25 bp, Artificial
  Probe
gggttagggtggaagagagttattc

SEQ ID NO: 32848 - DNA, 25 bp, Artificial
  Probe
gggaagaaagatgagggtgtctaaa

SEQ ID NO: 32849 - DNA, 25 bp, Artificial
  Probe
agggttagggtggaagagagttatt

SEQ ID NO: 32850 - DNA, 25 bp, Artificial
  Probe
gagggttagggtggaagagagttat

SEQ ID NO: 32851 - DNA, 25 bp, Artificial
  Probe
ccaatgtttgtggtattaggtttgc

SEQ ID NO: 32852 - DNA, 25 bp, Artificial
  Probe
tgggaagaaagatgagggtgtctaa

SEQ ID NO: 32853 - DNA, 25 bp, Artificial
  Probe
tttataatgtgggactcagtctggg

SEQ ID NO: 32854 - DNA, 25 bp, Artificial
  Probe
ggatgtagcatatggaagagagttt

SEQ ID NO: 32855 - DNA, 25 bp, Artificial
  Probe
ctgggaagaaagatgagggtgtcta

SEQ ID NO: 32856 - DNA, 25 bp, Artificial
  Probe
gtggaagagagttattcctgaagaa

SEQ ID NO: 32857 - DNA, 25 bp, Artificial
  Probe
gaagaaagatgagggtgtctaaaac

SEQ ID NO: 32858 - DNA, 25 bp, Artificial
  Probe
ggaagaaagatgagggtgtctaaaa

SEQ ID NO: 32859 - DNA, 25 bp, Artificial
  Probe
tataatgtgggactcagtctgggaa

SEQ ID NO: 32860 - DNA, 25 bp, Artificial
  Probe
ttataatgtgggactcagtctggga

SEQ ID NO: 32861 - DNA, 25 bp, Artificial
  Probe
ggtggaagagagttattcctgaaga

SEQ ID NO: 32862 - DNA, 25 bp, Artificial
  Probe
gatgtatgttgggacatggaaagac

SEQ ID NO: 32863 - DNA, 25 bp, Artificial
  Probe
aagaaagatgagggtgtctaaaacc

SEQ ID NO: 32864 - DNA, 25 bp, Artificial
  Probe
ttttataatgtgggactcagtctgg

SEQ ID NO: 32865 - DNA, 25 bp, Artificial
  Probe
ggactcagtctgggaagaaagatga

SEQ ID NO: 32866 - DNA, 25 bp, Artificial
  Probe
ataatgtgggactcagtctgggaag

SEQ ID NO: 32867 - DNA, 25 bp, Artificial
  Probe
ggagggttagggtggaagagagtta

SEQ ID NO: 32868 - DNA, 25 bp, Artificial
  Probe
gaaagatgagggtgtctaaaacctg

SEQ ID NO: 32869 - DNA, 25 bp, Artificial
  Probe
agaaagatgagggtgtctaaaacct

SEQ ID NO: 32870 - DNA, 25 bp, Artificial
  Probe
attgaaacatcattgtaatgaagct

SEQ ID NO: 32871 - DNA, 25 bp, Artificial
  Probe
ggatgtatgttgggacatggaaaga

SEQ ID NO: 32872 - DNA, 25 bp, Artificial
  Probe
aggatgtatgttgggacatggaaag

SEQ ID NO: 32873 - DNA, 25 bp, Artificial
  Probe
tgttttggtcttttgttgttttatt

SEQ ID NO: 32874 - DNA, 25 bp, Artificial
  Probe
ttgttttggtcttttgttgttttat

SEQ ID NO: 32875 - DNA, 25 bp, Artificial
  Probe
attttataatgtgggactcagtctg

SEQ ID NO: 32876 - DNA, 25 bp, Artificial
  Probe
tggaagagagttattcctgaagaaa

SEQ ID NO: 32877 - DNA, 25 bp, Artificial
  Probe
atgtatgttgggacatggaaagacc

SEQ ID NO: 32878 - DNA, 25 bp, Artificial
  Probe
caggatgtatgttgggacatggaaa

SEQ ID NO: 32879 - DNA, 25 bp, Artificial
  Probe
ttagggtggaagagagttattcctg

SEQ ID NO: 32880 - DNA, 25 bp, Artificial
  Probe
gttagggtggaagagagttattcct

SEQ ID NO: 32881 - DNA, 25 bp, Artificial
  Probe
gtctgggaagaaagatgagggtgtc

SEQ ID NO: 32882 - DNA, 25 bp, Artificial
  Probe
cagtctgggaagaaagatgagggtg

SEQ ID NO: 32883 - DNA, 25 bp, Artificial
  Probe
tctgggaagaaagatgagggtgtct

SEQ ID NO: 32884 - DNA, 25 bp, Artificial
  Probe
aattgaaacatcattgtaatgaagc

SEQ ID NO: 32885 - DNA, 25 bp, Artificial
  Probe
caagatggcttctattacctgtacg

SEQ ID NO: 32886 - DNA, 25 bp, Artificial
  Probe
cttctattacctgtacgccaacatt

SEQ ID NO: 32887 - DNA, 25 bp, Artificial
  Probe
taaccaagatggcttctattacctg

SEQ ID NO: 32888 - DNA, 25 bp, Artificial
  Probe
ttaaccaagatggcttctattacct

SEQ ID NO: 32889 - DNA, 25 bp, Artificial
  Probe
accaagatggcttctattacctgta

SEQ ID NO: 32890 - DNA, 25 bp, Artificial
  Probe
ccaagatggcttctattacctgtac

SEQ ID NO: 32891 - DNA, 25 bp, Artificial
  Probe
aagatggcttctattacctgtacgc

SEQ ID NO: 32892 - DNA, 25 bp, Artificial
  Probe
aaccaagatggcttctattacctgt

SEQ ID NO: 32893 - DNA, 25 bp, Artificial
  Probe
ataaagtcagtctgtcctcttggta

SEQ ID NO: 32894 - DNA, 25 bp, Artificial
  Probe
ggctttcaaagttcaagacatagac

SEQ ID NO: 32895 - DNA, 25 bp, Artificial
  Probe
gctttcaaagttcaagacatagact

SEQ ID NO: 32896 - DNA, 25 bp, Artificial
  Probe
gggctttcaaagttcaagacataga

SEQ ID NO: 32897 - DNA, 25 bp, Artificial
  Probe
gatctctaacatgacgttaagcaac

SEQ ID NO: 32898 - DNA, 25 bp, Artificial
  Probe
tttcaaagttcaagacatagactga

SEQ ID NO: 32899 - DNA, 25 bp, Artificial
  Probe
taaagtcagtctgtcctcttggtac

SEQ ID NO: 32900 - DNA, 25 bp, Artificial
  Probe
cataaagtcagtctgtcctcttggt

SEQ ID NO: 32901 - DNA, 25 bp, Artificial
  Probe
ttctattacctgtacgccaacattt

SEQ ID NO: 32902 - DNA, 25 bp, Artificial
  Probe
cttctcaggagttccagctatgatg

SEQ ID NO: 32903 - DNA, 25 bp, Artificial
  Probe
gcttctattacctgtacgccaacat

SEQ ID NO: 32904 - DNA, 25 bp, Artificial
  Probe
tctattacctgtacgccaacatttg

SEQ ID NO: 32905 - DNA, 25 bp, Artificial
  Probe
ctttcaaagttcaagacatagactg

SEQ ID NO: 32906 - DNA, 25 bp, Artificial
  Probe
ccaagttcgcataacctgatgaaag

SEQ ID NO: 32907 - DNA, 25 bp, Artificial
  Probe
gttcccataaagtcagtctgtcctc

SEQ ID NO: 32908 - DNA, 25 bp, Artificial
  Probe
ttcccataaagtcagtctgtcctct

SEQ ID NO: 32909 - DNA, 25 bp, Artificial
  Probe
cccataaagtcagtctgtcctcttg

SEQ ID NO: 32910 - DNA, 25 bp, Artificial
  Probe
tcccataaagtcagtctgtcctctt

SEQ ID NO: 32911 - DNA, 25 bp, Artificial
  Probe
aaatcccaagttcgcataacctgat

SEQ ID NO: 32912 - DNA, 25 bp, Artificial
  Probe
gttaaccaagatggcttctattacc

SEQ ID NO: 32913 - DNA, 25 bp, Artificial
  Probe
agatctctaacatgacgttaagcaa

SEQ ID NO: 32914 - DNA, 25 bp, Artificial
  Probe
aagatctctaacatgacgttaagca

SEQ ID NO: 32915 - DNA, 25 bp, Artificial
  Probe
caagatctctaacatgacgttaagc

SEQ ID NO: 32916 - DNA, 25 bp, Artificial
  Probe
ccaagatctctaacatgacgttaag

SEQ ID NO: 32917 - DNA, 25 bp, Artificial
  Probe
gccaagatctctaacatgacgttaa

SEQ ID NO: 32918 - DNA, 25 bp, Artificial
  Probe
caagttcgcataacctgatgaaagg

SEQ ID NO: 32919 - DNA, 25 bp, Artificial
  Probe
ttaaaaccagcatcaaaatcccaag

SEQ ID NO: 32920 - DNA, 25 bp, Artificial
  Probe
ctattacctgtacgccaacatttgc

SEQ ID NO: 32921 - DNA, 25 bp, Artificial
  Probe
gttaaaaccagcatcaaaatcccaa

SEQ ID NO: 32922 - DNA, 25 bp, Artificial
  Probe
tgtcgttaaaaccagcatcaaaatc

SEQ ID NO: 32923 - DNA, 25 bp, Artificial
  Probe
atgtcgttaaaaccagcatcaaaat

SEQ ID NO: 32924 - DNA, 25 bp, Artificial
  Probe
aatcccaagttcgcataacctgatg

SEQ ID NO: 32925 - DNA, 25 bp, Artificial
  Probe
tatgtcgttaaaaccagcatcaaaa

SEQ ID NO: 32926 - DNA, 25 bp, Artificial
  Probe
atatgtcgttaaaaccagcatcaaa

SEQ ID NO: 32927 - DNA, 25 bp, Artificial
  Probe
gtatatgtcgttaaaaccagcatca

SEQ ID NO: 32928 - DNA, 25 bp, Artificial
  Probe
taaaaccagcatcaaaatcccaagt

SEQ ID NO: 32929 - DNA, 25 bp, Artificial
  Probe
taagcaacggaaaactaagggttaa

SEQ ID NO: 32930 - DNA, 25 bp, Artificial
  Probe
ttaagagtgctgaatgaagatcctg

SEQ ID NO: 32931 - DNA, 25 bp, Artificial
  Probe
taagagtgctgaatgaagatcctgt

SEQ ID NO: 32932 - DNA, 25 bp, Artificial
  Probe
tcctgtccctaaatcataactcaat

SEQ ID NO: 32933 - DNA, 25 bp, Artificial
  Probe
atcctgtccctaaatcataactcaa

SEQ ID NO: 32934 - DNA, 25 bp, Artificial
  Probe
aagagtgctgaatgaagatcctgtc

SEQ ID NO: 32935 - DNA, 25 bp, Artificial
  Probe
catccctaaccttgactttgcttaa

SEQ ID NO: 32936 - DNA, 25 bp, Artificial
  Probe
agaaataattcgtggcagaacaaag

SEQ ID NO: 32937 - DNA, 25 bp, Artificial
  Probe
tagaaataattcgtggcagaacaaa

SEQ ID NO: 32938 - DNA, 25 bp, Artificial
  Probe
ctagaaataattcgtggcagaacaa

SEQ ID NO: 32939 - DNA, 25 bp, Artificial
  Probe
ctgaatgaagatcctgtccctaaat

SEQ ID NO: 32940 - DNA, 25 bp, Artificial
  Probe
aacctagaaataattcgtggcagaa

SEQ ID NO: 32941 - DNA, 25 bp, Artificial
  Probe
tgaatgaagatcctgtccctaaatc

SEQ ID NO: 32942 - DNA, 25 bp, Artificial
  Probe
gaaattctcaagactgtgaaggaaa

SEQ ID NO: 32943 - DNA, 25 bp, Artificial
  Probe
cctgtccctaaatcataactcaatt

SEQ ID NO: 32944 - DNA, 25 bp, Artificial
  Probe
gatcctgtccctaaatcataactca

SEQ ID NO: 32945 - DNA, 25 bp, Artificial
  Probe
cttaagagtgctgaatgaagatcct

SEQ ID NO: 32946 - DNA, 25 bp, Artificial
  Probe
gaacctagaaataattcgtggcaga

SEQ ID NO: 32947 - DNA, 25 bp, Artificial
  Probe
agaacctagaaataattcgtggcag

SEQ ID NO: 32948 - DNA, 25 bp, Artificial
  Probe
gagaacctagaaataattcgtggca

SEQ ID NO: 32949 - DNA, 25 bp, Artificial
  Probe
tgagaacctagaaataattcgtggc

SEQ ID NO: 32950 - DNA, 25 bp, Artificial
  Probe
gggaactagaaattctcaagactgt

SEQ ID NO: 32951 - DNA, 25 bp, Artificial
  Probe
ttctcaagactgtgaaggaaataac

SEQ ID NO: 32952 - DNA, 25 bp, Artificial
  Probe
agatcctgtccctaaatcataactc

SEQ ID NO: 32953 - DNA, 25 bp, Artificial
  Probe
acatccctaaccttgactttgctta

SEQ ID NO: 32954 - DNA, 25 bp, Artificial
  Probe
ttgcttaagagtgctgaatgaagat

SEQ ID NO: 32955 - DNA, 25 bp, Artificial
  Probe
ggaactagaaattctcaagactgtg

SEQ ID NO: 32956 - DNA, 25 bp, Artificial
  Probe
cctagaaataattcgtggcagaaca

SEQ ID NO: 32957 - DNA, 25 bp, Artificial
  Probe
acctagaaataattcgtggcagaac

SEQ ID NO: 32958 - DNA, 25 bp, Artificial
  Probe
ttgagaacctagaaataattcgtgg

SEQ ID NO: 32959 - DNA, 25 bp, Artificial
  Probe
tctcaagactgtgaaggaaataaca

SEQ ID NO: 32960 - DNA, 25 bp, Artificial
  Probe
agaaattctcaagactgtgaaggaa

SEQ ID NO: 32961 - DNA, 25 bp, Artificial
  Probe
aagatcctgtccctaaatcataact

SEQ ID NO: 32962 - DNA, 25 bp, Artificial
  Probe
aaattctcaagactgtgaaggaaat

SEQ ID NO: 32963 - DNA, 25 bp, Artificial
  Probe
tgcttaagagtgctgaatgaagatc

SEQ ID NO: 32964 - DNA, 25 bp, Artificial
  Probe
tagaaattctcaagactgtgaagga

SEQ ID NO: 32965 - DNA, 25 bp, Artificial
  Probe
gaatgaagatcctgtccctaaatca

SEQ ID NO: 32966 - DNA, 25 bp, Artificial
  Probe
gaaataattcgtggcagaacaaagc

SEQ ID NO: 32967 - DNA, 25 bp, Artificial
  Probe
gaaataacagggtctttgctgattc

SEQ ID NO: 32968 - DNA, 25 bp, Artificial
  Probe
gaagatcctgtccctaaatcataac

SEQ ID NO: 32969 - DNA, 25 bp, Artificial
  Probe
cgggaactagaaattctcaagactg

SEQ ID NO: 32970 - DNA, 25 bp, Artificial
  Probe
ctagaaattctcaagactgtgaagg

SEQ ID NO: 32971 - DNA, 25 bp, Artificial
  Probe
tgtgaaggaaataacagggtctttg

SEQ ID NO: 32972 - DNA, 25 bp, Artificial
  Probe
aaataacagggtctttgctgattca

SEQ ID NO: 32973 - DNA, 25 bp, Artificial
  Probe
acgggaactagaaattctcaagact

SEQ ID NO: 32974 - DNA, 25 bp, Artificial
  Probe
cacgggaactagaaattctcaagac

SEQ ID NO: 32975 - DNA, 25 bp, Artificial
  Probe
ggtcctcaagttatttattgccaaa

SEQ ID NO: 32976 - DNA, 25 bp, Artificial
  Probe
tttgggtcctcaagttatttattgc

SEQ ID NO: 32977 - DNA, 25 bp, Artificial
  Probe
gggtcctcaagttatttattgccaa

SEQ ID NO: 32978 - DNA, 25 bp, Artificial
  Probe
ttgggtcctcaagttatttattgcc

SEQ ID NO: 32979 - DNA, 25 bp, Artificial
  Probe
tgggtcctcaagttatttattgcca

SEQ ID NO: 32980 - DNA, 25 bp, Artificial
  Probe
aataacttaaacagtctcccgccac

SEQ ID NO: 32981 - DNA, 25 bp, Artificial
  Probe
caataacttaaacagtctcccgcca

SEQ ID NO: 32982 - DNA, 25 bp, Artificial
  Probe
gaaggccaataacttaaacagtctc

SEQ ID NO: 32983 - DNA, 25 bp, Artificial
  Probe
ccaataacttaaacagtctcccgcc

SEQ ID NO: 32984 - DNA, 25 bp, Artificial
  Probe
gtcctcaagttatttattgccaaaa

SEQ ID NO: 32985 - DNA, 25 bp, Artificial
  Probe
aaggccaataacttaaacagtctcc

SEQ ID NO: 32986 - DNA, 25 bp, Artificial
  Probe
ggaaggccaataacttaaacagtct

SEQ ID NO: 32987 - DNA, 25 bp, Artificial
  Probe
cagggaaggccaataacttaaacag

SEQ ID NO: 32988 - DNA, 25 bp, Artificial
  Probe
gggaaggccaataacttaaacagtc

SEQ ID NO: 32989 - DNA, 25 bp, Artificial
  Probe
ttttgggtcctcaagttatttattg

SEQ ID NO: 32990 - DNA, 25 bp, Artificial
  Probe
ccacgcactaaaggagaagtttgac

SEQ ID NO: 32991 - DNA, 25 bp, Artificial
  Probe
gccaataacttaaacagtctcccgc

SEQ ID NO: 32992 - DNA, 25 bp, Artificial
  Probe
agggaaggccaataacttaaacagt

SEQ ID NO: 32993 - DNA, 25 bp, Artificial
  Probe
aggccaataacttaaacagtctccc

SEQ ID NO: 32994 - DNA, 25 bp, Artificial
  Probe
cacgcactaaaggagaagtttgacg

SEQ ID NO: 32995 - DNA, 25 bp, Artificial
  Probe
ccagggaaggccaataacttaaaca

SEQ ID NO: 32996 - DNA, 25 bp, Artificial
  Probe
ataacttaaacagtctcccgccacc

SEQ ID NO: 32997 - DNA, 25 bp, Artificial
  Probe
cccagggaaggccaataacttaaac

SEQ ID NO: 32998 - DNA, 25 bp, Artificial
  Probe
ggccaataacttaaacagtctcccg

SEQ ID NO: 32999 - DNA, 25 bp, Artificial
  Probe
ctcctgtgaggtaaagacatgctgg

SEQ ID NO: 33000 - DNA, 25 bp, Artificial
  Probe
caggctcctgtgaggtaaagacatg

SEQ ID NO: 33001 - DNA, 25 bp, Artificial
  Probe
tcaggctcctgtgaggtaaagacat

SEQ ID NO: 33002 - DNA, 25 bp, Artificial
  Probe
gcccagggaaggccaataacttaaa

SEQ ID NO: 33003 - DNA, 25 bp, Artificial
  Probe
atatctacaaccacaagaacaactt

SEQ ID NO: 33004 - DNA, 25 bp, Artificial
  Probe
ttccgtaatccaccatgacttataa

SEQ ID NO: 33005 - DNA, 25 bp, Artificial
  Probe
tatatctacaaccacaagaacaact

SEQ ID NO: 33006 - DNA, 25 bp, Artificial
  Probe
tttaagtttgtttccgtaatccacc

SEQ ID NO: 33007 - DNA, 25 bp, Artificial
  Probe
taagtttgtttccgtaatccaccat

SEQ ID NO: 33008 - DNA, 25 bp, Artificial
  Probe
ttaagtttgtttccgtaatccacca

SEQ ID NO: 33009 - DNA, 25 bp, Artificial
  Probe
atctacaaccacaagaacaactttc

SEQ ID NO: 33010 - DNA, 25 bp, Artificial
  Probe
tattcttacgtgtgaggctcatatt

SEQ ID NO: 33011 - DNA, 25 bp, Artificial
  Probe
ttattcttacgtgtgaggctcatat

SEQ ID NO: 33012 - DNA, 25 bp, Artificial
  Probe
agatttctttgttccttctccactc

SEQ ID NO: 33013 - DNA, 25 bp, Artificial
  Probe
tcacaaccagttacagatttctttg

SEQ ID NO: 33014 - DNA, 25 bp, Artificial
  Probe
atcacaaccagttacagatttcttt

SEQ ID NO: 33015 - DNA, 25 bp, Artificial
  Probe
cagatttctttgttccttctccact

SEQ ID NO: 33016 - DNA, 25 bp, Artificial
  Probe
gatttctttgttccttctccactcc

SEQ ID NO: 33017 - DNA, 25 bp, Artificial
  Probe
tatctacaaccacaagaacaacttt

SEQ ID NO: 33018 - DNA, 25 bp, Artificial
  Probe
gatcacaaccagttacagatttctt

SEQ ID NO: 33019 - DNA, 25 bp, Artificial
  Probe
tacagatttctttgttccttctcca

SEQ ID NO: 33020 - DNA, 25 bp, Artificial
  Probe
accagttacagatttctttgttcct

SEQ ID NO: 33021 - DNA, 25 bp, Artificial
  Probe
aaccagttacagatttctttgttcc

SEQ ID NO: 33022 - DNA, 25 bp, Artificial
  Probe
tttccgtaatccaccatgacttata

SEQ ID NO: 33023 - DNA, 25 bp, Artificial
  Probe
ccagttacagatttctttgttcctt

SEQ ID NO: 33024 - DNA, 25 bp, Artificial
  Probe
tctacaaccacaagaacaactttcg

SEQ ID NO: 33025 - DNA, 25 bp, Artificial
  Probe
gtttccgtaatccaccatgacttat

SEQ ID NO: 33026 - DNA, 25 bp, Artificial
  Probe
tccgtaatccaccatgacttataaa

SEQ ID NO: 33027 - DNA, 25 bp, Artificial
  Probe
acagatttctttgttccttctccac

SEQ ID NO: 33028 - DNA, 25 bp, Artificial
  Probe
ttacagatttctttgttccttctcc

SEQ ID NO: 33029 - DNA, 25 bp, Artificial
  Probe
caaccagttacagatttctttgttc

SEQ ID NO: 33030 - DNA, 25 bp, Artificial
  Probe
cgtaatccaccatgacttataaagg

SEQ ID NO: 33031 - DNA, 25 bp, Artificial
  Probe
ccgtaatccaccatgacttataaag

SEQ ID NO: 33032 - DNA, 25 bp, Artificial
  Probe
atatatctacaaccacaagaacaac

SEQ ID NO: 33033 - DNA, 25 bp, Artificial
  Probe
cagttacagatttctttgttccttc

SEQ ID NO: 33034 - DNA, 25 bp, Artificial
  Probe
agttacagatttctttgttccttct

SEQ ID NO: 33035 - DNA, 25 bp, Artificial
  Probe
atttctttgttccttctccactccc

SEQ ID NO: 33036 - DNA, 25 bp, Artificial
  Probe
tgtttccgtaatccaccatgactta

SEQ ID NO: 33037 - DNA, 25 bp, Artificial
  Probe
gttacagatttctttgttccttctc

SEQ ID NO: 33038 - DNA, 25 bp, Artificial
  Probe
ctacaaccacaagaacaactttcgg

SEQ ID NO: 33039 - DNA, 25 bp, Artificial
  Probe
aagtttgtttccgtaatccaccatg

SEQ ID NO: 33040 - DNA, 25 bp, Artificial
  Probe
cgagtagtggtgtttacaactaatt

SEQ ID NO: 33041 - DNA, 25 bp, Artificial
  Probe
ccaccatgacttataaaggatcaat

SEQ ID NO: 33042 - DNA, 25 bp, Artificial
  Probe
gcgagtagtggtgtttacaactaat

SEQ ID NO: 33043 - DNA, 25 bp, Artificial
  Probe
agcttatatatctacaaccacaaga

SEQ ID NO: 33044 - DNA, 25 bp, Artificial
  Probe
gcttatatatctacaaccacaagaa

SEQ ID NO: 33045 - DNA, 25 bp, Artificial
  Probe
gtgtgaggctcatatttggaatacg

SEQ ID NO: 33046 - DNA, 25 bp, Artificial
  Probe
cgtgtgaggctcatatttggaatac

SEQ ID NO: 33047 - DNA, 25 bp, Artificial
  Probe
tccaccatgacttataaaggatcaa

SEQ ID NO: 33048 - DNA, 25 bp, Artificial
  Probe
atatcgtcctgtgcattgagaatag

SEQ ID NO: 33049 - DNA, 25 bp, Artificial
  Probe
tatatcgtcctgtgcattgagaata

SEQ ID NO: 33050 - DNA, 25 bp, Artificial
  Probe
ctatatcgtcctgtgcattgagaat

SEQ ID NO: 33051 - DNA, 25 bp, Artificial
  Probe
cctgtgcattgagaatagcttcatg

SEQ ID NO: 33052 - DNA, 25 bp, Artificial
  Probe
tcctgtgcattgagaatagcttcat

SEQ ID NO: 33053 - DNA, 25 bp, Artificial
  Probe
tatcgtcctgtgcattgagaatagc

SEQ ID NO: 33054 - DNA, 25 bp, Artificial
  Probe
gctatatcgtcctgtgcattgagaa

SEQ ID NO: 33055 - DNA, 25 bp, Artificial
  Probe
attgagaatagcttcatgacctctt

SEQ ID NO: 33056 - DNA, 25 bp, Artificial
  Probe
cattgagaatagcttcatgacctct

SEQ ID NO: 33057 - DNA, 25 bp, Artificial
  Probe
gtcctgtgcattgagaatagcttca

SEQ ID NO: 33058 - DNA, 25 bp, Artificial
  Probe
ctgtgcattgagaatagcttcatga

SEQ ID NO: 33059 - DNA, 25 bp, Artificial
  Probe
agctatatcgtcctgtgcattgaga

SEQ ID NO: 33060 - DNA, 25 bp, Artificial
  Probe
tgtgcattgagaatagcttcatgac

SEQ ID NO: 33061 - DNA, 25 bp, Artificial
  Probe
tgaaggatgaggtactatctcccag

SEQ ID NO: 33062 - DNA, 25 bp, Artificial
  Probe
gcattgagaatagcttcatgacctc

SEQ ID NO: 33063 - DNA, 25 bp, Artificial
  Probe
ctaggatacgaccctgtgtagttca

SEQ ID NO: 33064 - DNA, 25 bp, Artificial
  Probe
taggatacgaccctgtgtagttcac

SEQ ID NO: 33065 - DNA, 25 bp, Artificial
  Probe
cagctatatcgtcctgtgcattgag

SEQ ID NO: 33066 - DNA, 25 bp, Artificial
  Probe
gtgcattgagaatagcttcatgacc

SEQ ID NO: 33067 - DNA, 25 bp, Artificial
  Probe
tgcattgagaatagcttcatgacct

SEQ ID NO: 33068 - DNA, 25 bp, Artificial
  Probe
cgtcctgtgcattgagaatagcttc

SEQ ID NO: 33069 - DNA, 25 bp, Artificial
  Probe
cttcatgacctctttctccaaatag

SEQ ID NO: 33070 - DNA, 25 bp, Artificial
  Probe
gcttcatgacctctttctccaaata

SEQ ID NO: 33071 - DNA, 25 bp, Artificial
  Probe
atcgtcctgtgcattgagaatagct

SEQ ID NO: 33072 - DNA, 25 bp, Artificial
  Probe
gaatagcttcatgacctctttctcc

SEQ ID NO: 33073 - DNA, 25 bp, Artificial
  Probe
catgacctctttctccaaatagggc

SEQ ID NO: 33074 - DNA, 25 bp, Artificial
  Probe
atagcttcatgacctctttctccaa

SEQ ID NO: 33075 - DNA, 25 bp, Artificial
  Probe
aatagcttcatgacctctttctcca

SEQ ID NO: 33076 - DNA, 25 bp, Artificial
  Probe
ttgagaatagcttcatgacctcttt

SEQ ID NO: 33077 - DNA, 25 bp, Artificial
  Probe
tgagaatagcttcatgacctctttc

SEQ ID NO: 33078 - DNA, 25 bp, Artificial
  Probe
tagcttcatgacctctttctccaaa

SEQ ID NO: 33079 - DNA, 25 bp, Artificial
  Probe
tcgtcctgtgcattgagaatagctt

SEQ ID NO: 33080 - DNA, 25 bp, Artificial
  Probe
gaaggatgaggtactatctcccagc

SEQ ID NO: 33081 - DNA, 25 bp, Artificial
  Probe
ttcatgacctctttctccaaatagg

SEQ ID NO: 33082 - DNA, 25 bp, Artificial
  Probe
agcttcatgacctctttctccaaat

SEQ ID NO: 33083 - DNA, 25 bp, Artificial
  Probe
gctaggatacgaccctgtgtagttc

SEQ ID NO: 33084 - DNA, 25 bp, Artificial
  Probe
tcatgacctctttctccaaataggg

SEQ ID NO: 33085 - DNA, 25 bp, Artificial
  Probe
agaatagcttcatgacctctttctc

SEQ ID NO: 33086 - DNA, 25 bp, Artificial
  Probe
gagaatagcttcatgacctctttct

SEQ ID NO: 33087 - DNA, 25 bp, Artificial
  Probe
aaggatgaggtactatctcccagct

SEQ ID NO: 33088 - DNA, 25 bp, Artificial
  Probe
aacagctatatcgtcctgtgcattg

SEQ ID NO: 33089 - DNA, 25 bp, Artificial
  Probe
atacgaccctgtgtagttcacattt

SEQ ID NO: 33090 - DNA, 25 bp, Artificial
  Probe
gatacgaccctgtgtagttcacatt

SEQ ID NO: 33091 - DNA, 25 bp, Artificial
  Probe
acagctatatcgtcctgtgcattga

SEQ ID NO: 33092 - DNA, 25 bp, Artificial
  Probe
atgacctctttctccaaatagggcc

SEQ ID NO: 33093 - DNA, 25 bp, Artificial
  Probe
ggcagatataaatgagtccaatgtg

SEQ ID NO: 33094 - DNA, 25 bp, Artificial
  Probe
gcagatataaatgagtccaatgtgt

SEQ ID NO: 33095 - DNA, 25 bp, Artificial
  Probe
cattatctcatcttgccaagcgaag

SEQ ID NO: 33096 - DNA, 25 bp, Artificial
  Probe
gtcaaacattatctcatcttgccaa

SEQ ID NO: 33097 - DNA, 25 bp, Artificial
  Probe
aagtcaaacattatctcatcttgcc

SEQ ID NO: 33098 - DNA, 25 bp, Artificial
  Probe
agtcaaacattatctcatcttgcca

SEQ ID NO: 33099 - DNA, 25 bp, Artificial
  Probe
gcagaaagtcaaacattatctcatc

SEQ ID NO: 33100 - DNA, 25 bp, Artificial
  Probe
aatgagtccaatgtgtatgtggtga

SEQ ID NO: 33101 - DNA, 25 bp, Artificial
  Probe
acattatctcatcttgccaagcgaa

SEQ ID NO: 33102 - DNA, 25 bp, Artificial
  Probe
aacattatctcatcttgccaagcga

SEQ ID NO: 33103 - DNA, 25 bp, Artificial
  Probe
gacctcatccagaacttcctgaatg

SEQ ID NO: 33104 - DNA, 25 bp, Artificial
  Probe
agacctcatccagaacttcctgaat

SEQ ID NO: 33105 - DNA, 25 bp, Artificial
  Probe
tcaaacattatctcatcttgccaag

SEQ ID NO: 33106 - DNA, 25 bp, Artificial
  Probe
aaagtcaaacattatctcatcttgc

SEQ ID NO: 33107 - DNA, 25 bp, Artificial
  Probe
caaacattatctcatcttgccaagc

SEQ ID NO: 33108 - DNA, 25 bp, Artificial
  Probe
aagacctcatccagaacttcctgaa

SEQ ID NO: 33109 - DNA, 25 bp, Artificial
  Probe
cacctacagtacgtggcagatataa

SEQ ID NO: 33110 - DNA, 25 bp, Artificial
  Probe
tggcagatataaatgagtccaatgt

SEQ ID NO: 33111 - DNA, 25 bp, Artificial
  Probe
atgagtccaatgtgtatgtggtgac

SEQ ID NO: 33112 - DNA, 25 bp, Artificial
  Probe
taaatgagtccaatgtgtatgtggt

SEQ ID NO: 33113 - DNA, 25 bp, Artificial
  Probe
gtggcagatataaatgagtccaatg

SEQ ID NO: 33114 - DNA, 25 bp, Artificial
  Probe
gaggagtgtctcagataataccctg

SEQ ID NO: 33115 - DNA, 25 bp, Artificial
  Probe
ctcatccagaacttcctgaatgctg

SEQ ID NO: 33116 - DNA, 25 bp, Artificial
  Probe
gtctggatacaccaacaggcatatc

SEQ ID NO: 33117 - DNA, 25 bp, Artificial
  Probe
ataaatgagtccaatgtgtatgtgg

SEQ ID NO: 33118 - DNA, 25 bp, Artificial
  Probe
cctacagtacgtggcagatataaat

SEQ ID NO: 33119 - DNA, 25 bp, Artificial
  Probe
agtacgtggcagatataaatgagtc

SEQ ID NO: 33120 - DNA, 25 bp, Artificial
  Probe
cgtggcagatataaatgagtccaat

SEQ ID NO: 33121 - DNA, 25 bp, Artificial
  Probe
cagtacgtggcagatataaatgagt

SEQ ID NO: 33122 - DNA, 25 bp, Artificial
  Probe
acagtacgtggcagatataaatgag

SEQ ID NO: 33123 - DNA, 25 bp, Artificial
  Probe
tacagtacgtggcagatataaatga

SEQ ID NO: 33124 - DNA, 25 bp, Artificial
  Probe
ctacagtacgtggcagatataaatg

SEQ ID NO: 33125 - DNA, 25 bp, Artificial
  Probe
gagtgtctcagataataccctggtg

SEQ ID NO: 33126 - DNA, 25 bp, Artificial
  Probe
agctatataagaattatcagcaggc

SEQ ID NO: 33127 - DNA, 25 bp, Artificial
  Probe
gtacgtggcagatataaatgagtcc

SEQ ID NO: 33128 - DNA, 25 bp, Artificial
  Probe
acctacagtacgtggcagatataaa

SEQ ID NO: 33129 - DNA, 25 bp, Artificial
  Probe
attatctcatcttgccaagcgaaga

SEQ ID NO: 33130 - DNA, 25 bp, Artificial
  Probe
aaacattatctcatcttgccaagcg

SEQ ID NO: 33131 - DNA, 25 bp, Artificial
  Probe
aaatgagtccaatgtgtatgtggtg

SEQ ID NO: 33132 - DNA, 25 bp, Artificial
  Probe
tgcagaaagtcaaacattatctcat

SEQ ID NO: 33133 - DNA, 25 bp, Artificial
  Probe
tataaatgagtccaatgtgtatgtg

SEQ ID NO: 33134 - DNA, 25 bp, Artificial
  Probe
cagaaagtcaaacattatctcatct

SEQ ID NO: 33135 - DNA, 25 bp, Artificial
  Probe
acacctacagtacgtggcagatata

SEQ ID NO: 33136 - DNA, 25 bp, Artificial
  Probe
gctttggaaacgattcttctgcttc

SEQ ID NO: 33137 - DNA, 25 bp, Artificial
  Probe
cttgaggagtgtctcagataatacc

SEQ ID NO: 33138 - DNA, 25 bp, Artificial
  Probe
acacatagattcacctgtaaaactt

SEQ ID NO: 33139 - DNA, 25 bp, Artificial
  Probe
aacacatagattcacctgtaaaact

SEQ ID NO: 33140 - DNA, 25 bp, Artificial
  Probe
aaacacatagattcacctgtaaaac

SEQ ID NO: 33141 - DNA, 25 bp, Artificial
  Probe
cacatagattcacctgtaaaacttt

SEQ ID NO: 33142 - DNA, 25 bp, Artificial
  Probe
tttagcagttctgcaaatactcgtg

SEQ ID NO: 33143 - DNA, 25 bp, Artificial
  Probe
attttagcagttctgcaaatactcg

SEQ ID NO: 33144 - DNA, 25 bp, Artificial
  Probe
acatagattcacctgtaaaacttta

SEQ ID NO: 33145 - DNA, 25 bp, Artificial
  Probe
ttttagcagttctgcaaatactcgt

SEQ ID NO: 33146 - DNA, 25 bp, Artificial
  Probe
ttagcagttctgcaaatactcgtgc

SEQ ID NO: 33147 - DNA, 25 bp, Artificial
  Probe
tattttagcagttctgcaaatactc

SEQ ID NO: 33148 - DNA, 25 bp, Artificial
  Probe
catagattcacctgtaaaactttat

SEQ ID NO: 33149 - DNA, 25 bp, Artificial
  Probe
gttctgcaaatactcgtgccgaatt

SEQ ID NO: 33150 - DNA, 25 bp, Artificial
  Probe
ttattttagcagttctgcaaatact

SEQ ID NO: 33151 - DNA, 25 bp, Artificial
  Probe
agattcacctgtaaaactttatttt

SEQ ID NO: 33152 - DNA, 25 bp, Artificial
  Probe
ttctgcaaatactcgtgccgaattc

SEQ ID NO: 33153 - DNA, 25 bp, Artificial
  Probe
tttattttagcagttctgcaaatac

SEQ ID NO: 33154 - DNA, 25 bp, Artificial
  Probe
agttctgcaaatactcgtgccgaat

SEQ ID NO: 33155 - DNA, 25 bp, Artificial
  Probe
gaagaagaagaggaagagagagaag

SEQ ID NO: 33156 - DNA, 25 bp, Artificial
  Probe
agaagaagaagaggaagagagagaa

SEQ ID NO: 33157 - DNA, 25 bp, Artificial
  Probe
aagaagaagaagaggaagagagaga

SEQ ID NO: 33158 - DNA, 25 bp, Artificial
  Probe
caagaagaagaagaggaagagagag

SEQ ID NO: 33159 - DNA, 25 bp, Artificial
  Probe
attatggcaagaagaagaagaggaa

SEQ ID NO: 33160 - DNA, 25 bp, Artificial
  Probe
ttatggcaagaagaagaagaggaag

SEQ ID NO: 33161 - DNA, 25 bp, Artificial
  Probe
aattatggcaagaagaagaagagga

SEQ ID NO: 33162 - DNA, 25 bp, Artificial
  Probe
caattatggcaagaagaagaagagg

SEQ ID NO: 33163 - DNA, 25 bp, Artificial
  Probe
agagacaattatggcaagaagaaga

SEQ ID NO: 33164 - DNA, 25 bp, Artificial
  Probe
gagagacaattatggcaagaagaag

SEQ ID NO: 33165 - DNA, 25 bp, Artificial
  Probe
acaattatggcaagaagaagaagag

SEQ ID NO: 33166 - DNA, 25 bp, Artificial
  Probe
gacaattatggcaagaagaagaaga

SEQ ID NO: 33167 - DNA, 25 bp, Artificial
  Probe
agacaattatggcaagaagaagaag

SEQ ID NO: 33168 - DNA, 25 bp, Artificial
  Probe
gagacaattatggcaagaagaagaa

SEQ ID NO: 33169 - DNA, 25 bp, Artificial
  Probe
tatggcaagaagaagaagaggaaga

SEQ ID NO: 33170 - DNA, 25 bp, Artificial
  Probe
aagacctcatattaagaagcctctg

SEQ ID NO: 33171 - DNA, 25 bp, Artificial
  Probe
cgagagacaattatggcaagaagaa

SEQ ID NO: 33172 - DNA, 25 bp, Artificial
  Probe
aagaagaagaggaagagagagaagc

SEQ ID NO: 33173 - DNA, 25 bp, Artificial
  Probe
gacctcatattaagaagcctctgaa

SEQ ID NO: 33174 - DNA, 25 bp, Artificial
  Probe
ctcatattaagaagcctctgaatgc

SEQ ID NO: 33175 - DNA, 25 bp, Artificial
  Probe
agacctcatattaagaagcctctga

SEQ ID NO: 33176 - DNA, 25 bp, Artificial
  Probe
gcaagaagaagaagaggaagagaga

SEQ ID NO: 33177 - DNA, 25 bp, Artificial
  Probe
acctcatattaagaagcctctgaat

SEQ ID NO: 33178 - DNA, 25 bp, Artificial
  Probe
cctcatattaagaagcctctgaatg

SEQ ID NO: 33179 - DNA, 25 bp, Artificial
  Probe
ctacaggaatctacttcaggtacag

SEQ ID NO: 33180 - DNA, 25 bp, Artificial
  Probe
tacaggaatctacttcaggtacagg

SEQ ID NO: 33181 - DNA, 25 bp, Artificial
  Probe
gctacaggaatctacttcaggtaca

SEQ ID NO: 33182 - DNA, 25 bp, Artificial
  Probe
atggcaagaagaagaagaggaagag

SEQ ID NO: 33183 - DNA, 25 bp, Artificial
  Probe
ggcaagaagaagaagaggaagagag

SEQ ID NO: 33184 - DNA, 25 bp, Artificial
  Probe
caggaatctacttcaggtacaggtc

SEQ ID NO: 33185 - DNA, 25 bp, Artificial
  Probe
gaagaagaggaagagagagaagcta

SEQ ID NO: 33186 - DNA, 25 bp, Artificial
  Probe
aagctacaggaatctacttcaggta

SEQ ID NO: 33187 - DNA, 25 bp, Artificial
  Probe
aagagagagaagctacaggaatcta

SEQ ID NO: 33188 - DNA, 25 bp, Artificial
  Probe
aagaagaggaagagagagaagctac

SEQ ID NO: 33189 - DNA, 25 bp, Artificial
  Probe
agagagaagctacaggaatctactt

SEQ ID NO: 33190 - DNA, 25 bp, Artificial
  Probe
gagagagaagctacaggaatctact

SEQ ID NO: 33191 - DNA, 25 bp, Artificial
  Probe
agagagagaagctacaggaatctac

SEQ ID NO: 33192 - DNA, 25 bp, Artificial
  Probe
agctacaggaatctacttcaggtac

SEQ ID NO: 33193 - DNA, 25 bp, Artificial
  Probe
gaagagagagaagctacaggaatct

SEQ ID NO: 33194 - DNA, 25 bp, Artificial
  Probe
gaagaggaagagagagaagctacag

SEQ ID NO: 33195 - DNA, 25 bp, Artificial
  Probe
acaggaatctacttcaggtacaggt

SEQ ID NO: 33196 - DNA, 25 bp, Artificial
  Probe
ggaagagagagaagctacaggaatc

SEQ ID NO: 33197 - DNA, 25 bp, Artificial
  Probe
agaagaggaagagagagaagctaca

SEQ ID NO: 33198 - DNA, 25 bp, Artificial
  Probe
tggcaagaagaagaagaggaagaga

SEQ ID NO: 33199 - DNA, 25 bp, Artificial
  Probe
aaagacctcatattaagaagcctct

SEQ ID NO: 33200 - DNA, 25 bp, Artificial
  Probe
aattcacacacacacacacatacac

SEQ ID NO: 33201 - DNA, 25 bp, Artificial
  Probe
cctctctttctctgtcttcattgta

SEQ ID NO: 33202 - DNA, 25 bp, Artificial
  Probe
agccaaactctacatttcaggataa

SEQ ID NO: 33203 - DNA, 25 bp, Artificial
  Probe
tgagattcttcagttctgtgtgctt

SEQ ID NO: 33204 - DNA, 25 bp, Artificial
  Probe
ttgagattcttcagttctgtgtgct

SEQ ID NO: 33205 - DNA, 25 bp, Artificial
  Probe
tttgtctttgtctttctttgctttg

SEQ ID NO: 33206 - DNA, 25 bp, Artificial
  Probe
cagccaaactctacatttcaggata

SEQ ID NO: 33207 - DNA, 25 bp, Artificial
  Probe
acatacacaccaaattgaacaaact

SEQ ID NO: 33208 - DNA, 25 bp, Artificial
  Probe
cacatacacaccaaattgaacaaac

SEQ ID NO: 33209 - DNA, 25 bp, Artificial
  Probe
acacatacacaccaaattgaacaaa

SEQ ID NO: 33210 - DNA, 25 bp, Artificial
  Probe
catacacaccaaattgaacaaactg

SEQ ID NO: 33211 - DNA, 25 bp, Artificial
  Probe
gccaaactctacatttcaggataat

SEQ ID NO: 33212 - DNA, 25 bp, Artificial
  Probe
cacacatacacaccaaattgaacaa

SEQ ID NO: 33213 - DNA, 25 bp, Artificial
  Probe
gaacaaactggaaattctcactctg

SEQ ID NO: 33214 - DNA, 25 bp, Artificial
  Probe
tgtttccctagtgtttgagattctt

SEQ ID NO: 33215 - DNA, 25 bp, Artificial
  Probe
ttgtttccctagtgtttgagattct

SEQ ID NO: 33216 - DNA, 25 bp, Artificial
  Probe
gttgtttccctagtgtttgagattc

SEQ ID NO: 33217 - DNA, 25 bp, Artificial
  Probe
gtttccctagtgtttgagattcttc

SEQ ID NO: 33218 - DNA, 25 bp, Artificial
  Probe
tgttgtttccctagtgtttgagatt

SEQ ID NO: 33219 - DNA, 25 bp, Artificial
  Probe
attcacacacacacacacatacaca

SEQ ID NO: 33220 - DNA, 25 bp, Artificial
  Probe
ttgtctttgtctttctttgctttgc

SEQ ID NO: 33221 - DNA, 25 bp, Artificial
  Probe
tatccttccagccaaactctacatt

SEQ ID NO: 33222 - DNA, 25 bp, Artificial
  Probe
cacacacatacacaccaaattgaac

SEQ ID NO: 33223 - DNA, 25 bp, Artificial
  Probe
caaattcacacacacacacacatac

SEQ ID NO: 33224 - DNA, 25 bp, Artificial
  Probe
tcaaattcacacacacacacacata

SEQ ID NO: 33225 - DNA, 25 bp, Artificial
  Probe
ttgaacaaactggaaattctcactc

SEQ ID NO: 33226 - DNA, 25 bp, Artificial
  Probe
gtttgagattcttcagttctgtgtg

SEQ ID NO: 33227 - DNA, 25 bp, Artificial
  Probe
gtgtttgagattcttcagttctgtg

SEQ ID NO: 33228 - DNA, 25 bp, Artificial
  Probe
agtgtttgagattcttcagttctgt

SEQ ID NO: 33229 - DNA, 25 bp, Artificial
  Probe
tgaacaaactggaaattctcactct

SEQ ID NO: 33230 - DNA, 25 bp, Artificial
  Probe
gtaagaacggacatgctagtgagag

SEQ ID NO: 33231 - DNA, 25 bp, Artificial
  Probe
tgtttgagattcttcagttctgtgt

SEQ ID NO: 33232 - DNA, 25 bp, Artificial
  Probe
attgaacaaactggaaattctcact

SEQ ID NO: 33233 - DNA, 25 bp, Artificial
  Probe
gtgttgtttccctagtgtttgagat

SEQ ID NO: 33234 - DNA, 25 bp, Artificial
  Probe
acacacatacacaccaaattgaaca

SEQ ID NO: 33235 - DNA, 25 bp, Artificial
  Probe
acacacacatacacaccaaattgaa

SEQ ID NO: 33236 - DNA, 25 bp, Artificial
  Probe
aaattcacacacacacacacataca

SEQ ID NO: 33237 - DNA, 25 bp, Artificial
  Probe
cttccagccaaactctacatttcag

SEQ ID NO: 33238 - DNA, 25 bp, Artificial
  Probe
ctatccttccagccaaactctacat

SEQ ID NO: 33239 - DNA, 25 bp, Artificial
  Probe
ttccctagtgtttgagattcttcag

SEQ ID NO: 33240 - DNA, 25 bp, Artificial
  Probe
tttccctagtgtttgagattcttca

SEQ ID NO: 33241 - DNA, 25 bp, Artificial
  Probe
cggtcatagtaaactcctatccttc

SEQ ID NO: 33242 - DNA, 25 bp, Artificial
  Probe
ccctagtgtttgagattcttcagtt

SEQ ID NO: 33243 - DNA, 25 bp, Artificial
  Probe
catagtaaactcctatccttccagc

SEQ ID NO: 33244 - DNA, 25 bp, Artificial
  Probe
ggtcatagtaaactcctatccttcc

SEQ ID NO: 33245 - DNA, 25 bp, Artificial
  Probe
ctgtaagtccgtgtatatagtgtgt

SEQ ID NO: 33246 - DNA, 25 bp, Artificial
  Probe
tctgtaagtccgtgtatatagtgtg

SEQ ID NO: 33247 - DNA, 25 bp, Artificial
  Probe
tgtaagtccgtgtatatagtgtgtt

SEQ ID NO: 33248 - DNA, 25 bp, Artificial
  Probe
caaggagtctttgattgggtataga

SEQ ID NO: 33249 - DNA, 25 bp, Artificial
  Probe
gcaaggagtctttgattgggtatag

SEQ ID NO: 33250 - DNA, 25 bp, Artificial
  Probe
aagtccgtgtatatagtgtgtttgc

SEQ ID NO: 33251 - DNA, 25 bp, Artificial
  Probe
taagtccgtgtatatagtgtgtttg

SEQ ID NO: 33252 - DNA, 25 bp, Artificial
  Probe
gtaagtccgtgtatatagtgtgttt

SEQ ID NO: 33253 - DNA, 25 bp, Artificial
  Probe
tctttgattgggtatagactcacgg

SEQ ID NO: 33254 - DNA, 25 bp, Artificial
  Probe
ggcaaggagtctttgattgggtata

SEQ ID NO: 33255 - DNA, 25 bp, Artificial
  Probe
tcgtgacaagtttggtaggacattt

SEQ ID NO: 33256 - DNA, 25 bp, Artificial
  Probe
ttcgtgacaagtttggtaggacatt

SEQ ID NO: 33257 - DNA, 25 bp, Artificial
  Probe
cgtgtatatagtgtgtttgcagttt

SEQ ID NO: 33258 - DNA, 25 bp, Artificial
  Probe
cgtgacaagtttggtaggacatttg

SEQ ID NO: 33259 - DNA, 25 bp, Artificial
  Probe
tgtatatagtgtgtttgcagtttca

SEQ ID NO: 33260 - DNA, 25 bp, Artificial
  Probe
ccgtgtatatagtgtgtttgcagtt

SEQ ID NO: 33261 - DNA, 25 bp, Artificial
  Probe
ctttgattgggtatagactcacggg

SEQ ID NO: 33262 - DNA, 25 bp, Artificial
  Probe
gtgtatatagtgtgtttgcagtttc

SEQ ID NO: 33263 - DNA, 25 bp, Artificial
  Probe
gttcgtgacaagtttggtaggacat

SEQ ID NO: 33264 - DNA, 25 bp, Artificial
  Probe
gtccgtgtatatagtgtgtttgcag

SEQ ID NO: 33265 - DNA, 25 bp, Artificial
  Probe
attgggtatagactcacgggtgata

SEQ ID NO: 33266 - DNA, 25 bp, Artificial
  Probe
tgtttgcagtttcactttaagggaa

SEQ ID NO: 33267 - DNA, 25 bp, Artificial
  Probe
tccgtgtatatagtgtgtttgcagt

SEQ ID NO: 33268 - DNA, 25 bp, Artificial
  Probe
agtccgtgtatatagtgtgtttgca

SEQ ID NO: 33269 - DNA, 25 bp, Artificial
  Probe
tttgattgggtatagactcacgggt

SEQ ID NO: 33270 - DNA, 25 bp, Artificial
  Probe
gtgtgtttgcagtttcactttaagg

SEQ ID NO: 33271 - DNA, 25 bp, Artificial
  Probe
gtatatagtgtgtttgcagtttcac

SEQ ID NO: 33272 - DNA, 25 bp, Artificial
  Probe
tttgcagtttcactttaagggaaag

SEQ ID NO: 33273 - DNA, 25 bp, Artificial
  Probe
gtttgcagtttcactttaagggaaa

SEQ ID NO: 33274 - DNA, 25 bp, Artificial
  Probe
gtgtttgcagtttcactttaaggga

SEQ ID NO: 33275 - DNA, 25 bp, Artificial
  Probe
tgtgtttgcagtttcactttaaggg

SEQ ID NO: 33276 - DNA, 25 bp, Artificial
  Probe
ttgattgggtatagactcacgggtg

SEQ ID NO: 33277 - DNA, 25 bp, Artificial
  Probe
gattgggtatagactcacgggtgat

SEQ ID NO: 33278 - DNA, 25 bp, Artificial
  Probe
tgacaagtttggtaggacatttgtg

SEQ ID NO: 33279 - DNA, 25 bp, Artificial
  Probe
gtgacaagtttggtaggacatttgt

SEQ ID NO: 33280 - DNA, 25 bp, Artificial
  Probe
ttgggtatagactcacgggtgatac

SEQ ID NO: 33281 - DNA, 25 bp, Artificial
  Probe
tttgttctcgtgaaagactttgcac

SEQ ID NO: 33282 - DNA, 25 bp, Artificial
  Probe
aaggagtctttgattgggtatagac

SEQ ID NO: 33283 - DNA, 25 bp, Artificial
  Probe
gtctttgattgggtatagactcacg

SEQ ID NO: 33284 - DNA, 25 bp, Artificial
  Probe
gacaagtttggtaggacatttgtgg

SEQ ID NO: 33285 - DNA, 25 bp, Artificial
  Probe
caagtttggtaggacatttgtgggc

SEQ ID NO: 33286 - DNA, 25 bp, Artificial
  Probe
gggcaaggagtctttgattgggtat

SEQ ID NO: 33287 - DNA, 25 bp, Artificial
  Probe
tagtgtgtttgcagtttcactttaa

SEQ ID NO: 33288 - DNA, 25 bp, Artificial
  Probe
agtgtgtttgcagtttcactttaag

SEQ ID NO: 33289 - DNA, 25 bp, Artificial
  Probe
atagtgtgtttgcagtttcacttta

SEQ ID NO: 33290 - DNA, 25 bp, Artificial
  Probe
tttaccaaatcaagcatcgtctcag

SEQ ID NO: 33291 - DNA, 25 bp, Artificial
  Probe
tcatagttctgatgtctttgacctt

SEQ ID NO: 33292 - DNA, 25 bp, Artificial
  Probe
ttcatagttctgatgtctttgacct

SEQ ID NO: 33293 - DNA, 25 bp, Artificial
  Probe
ttaccaaatcaagcatcgtctcaga

SEQ ID NO: 33294 - DNA, 25 bp, Artificial
  Probe
catagttctgatgtctttgaccttt

SEQ ID NO: 33295 - DNA, 25 bp, Artificial
  Probe
attcatagttctgatgtctttgacc

SEQ ID NO: 33296 - DNA, 25 bp, Artificial
  Probe
gattccaaagctcctaaatgtgatc

SEQ ID NO: 33297 - DNA, 25 bp, Artificial
  Probe
taccaaatcaagcatcgtctcagag

SEQ ID NO: 33298 - DNA, 25 bp, Artificial
  Probe
tcagcatgactactttattccaaat

SEQ ID NO: 33299 - DNA, 25 bp, Artificial
  Probe
atcagcatgactactttattccaaa

SEQ ID NO: 33300 - DNA, 25 bp, Artificial
  Probe
aatcagcatgactactttattccaa

SEQ ID NO: 33301 - DNA, 25 bp, Artificial
  Probe
ctggaacataccaaaccctagagat

SEQ ID NO: 33302 - DNA, 25 bp, Artificial
  Probe
catgtgctatcacgccatatttaaa

SEQ ID NO: 33303 - DNA, 25 bp, Artificial
  Probe
tggaacataccaaaccctagagatg

SEQ ID NO: 33304 - DNA, 25 bp, Artificial
  Probe
ttccaaatatctaccaaggagtagc

SEQ ID NO: 33305 - DNA, 25 bp, Artificial
  Probe
cataccaaaccctagagatgtttcc

SEQ ID NO: 33306 - DNA, 25 bp, Artificial
  Probe
tccaaatatctaccaaggagtagcc

SEQ ID NO: 33307 - DNA, 25 bp, Artificial
  Probe
ctacactgttttaccaaatcaagca

SEQ ID NO: 33308 - DNA, 25 bp, Artificial
  Probe
ggattccaaagctcctaaatgtgat

SEQ ID NO: 33309 - DNA, 25 bp, Artificial
  Probe
acactgttttaccaaatcaagcatc

SEQ ID NO: 33310 - DNA, 25 bp, Artificial
  Probe
gttttaccaaatcaagcatcgtctc

SEQ ID NO: 33311 - DNA, 25 bp, Artificial
  Probe
tacactgttttaccaaatcaagcat

SEQ ID NO: 33312 - DNA, 25 bp, Artificial
  Probe
cctacactgttttaccaaatcaagc

SEQ ID NO: 33313 - DNA, 25 bp, Artificial
  Probe
cagcatgactactttattccaaata

SEQ ID NO: 33314 - DNA, 25 bp, Artificial
  Probe
ttttaccaaatcaagcatcgtctca

SEQ ID NO: 33315 - DNA, 25 bp, Artificial
  Probe
ctgttttaccaaatcaagcatcgtc

SEQ ID NO: 33316 - DNA, 25 bp, Artificial
  Probe
acataccaaaccctagagatgtttc

SEQ ID NO: 33317 - DNA, 25 bp, Artificial
  Probe
tgttttaccaaatcaagcatcgtct

SEQ ID NO: 33318 - DNA, 25 bp, Artificial
  Probe
cactgttttaccaaatcaagcatcg

SEQ ID NO: 33319 - DNA, 25 bp, Artificial
  Probe
ataccaaaccctagagatgtttccc

SEQ ID NO: 33320 - DNA, 25 bp, Artificial
  Probe
actttattccaaatatctaccaagg

SEQ ID NO: 33321 - DNA, 25 bp, Artificial
  Probe
aattaacaagacatgtgctatcacg

SEQ ID NO: 33322 - DNA, 25 bp, Artificial
  Probe
actgttttaccaaatcaagcatcgt

SEQ ID NO: 33323 - DNA, 25 bp, Artificial
  Probe
ttattccaaatatctaccaaggagt

SEQ ID NO: 33324 - DNA, 25 bp, Artificial
  Probe
ggaacataccaaaccctagagatgt

SEQ ID NO: 33325 - DNA, 25 bp, Artificial
  Probe
attccaaagctcctaaatgtgatca

SEQ ID NO: 33326 - DNA, 25 bp, Artificial
  Probe
ttccaaagctcctaaatgtgatcaa

SEQ ID NO: 33327 - DNA, 25 bp, Artificial
  Probe
attccaaatatctaccaaggagtag

SEQ ID NO: 33328 - DNA, 25 bp, Artificial
  Probe
caaagctcctaaatgtgatcaacta

SEQ ID NO: 33329 - DNA, 25 bp, Artificial
  Probe
tgctatcacgccatatttaaattgt

SEQ ID NO: 33330 - DNA, 25 bp, Artificial
  Probe
tgcccctcaaaagctatattctaaa

SEQ ID NO: 33331 - DNA, 25 bp, Artificial
  Probe
atgtgatcaactatagactttgccc

SEQ ID NO: 33332 - DNA, 25 bp, Artificial
  Probe
ccaaagctcctaaatgtgatcaact

SEQ ID NO: 33333 - DNA, 25 bp, Artificial
  Probe
tccaaagctcctaaatgtgatcaac

SEQ ID NO: 33334 - DNA, 25 bp, Artificial
  Probe
cctggaacataccaaaccctagaga

SEQ ID NO: 33335 - DNA, 25 bp, Artificial
  Probe
acctaaggagagataagacagagag

SEQ ID NO: 33336 - DNA, 25 bp, Artificial
  Probe
cctaaggagagataagacagagaga

SEQ ID NO: 33337 - DNA, 25 bp, Artificial
  Probe
gaagagtagaagaggtaggagtctg

SEQ ID NO: 33338 - DNA, 25 bp, Artificial
  Probe
tacctaaggagagataagacagaga

SEQ ID NO: 33339 - DNA, 25 bp, Artificial
  Probe
ctacctaaggagagataagacagag

SEQ ID NO: 33340 - DNA, 25 bp, Artificial
  Probe
ctaaggagagataagacagagagaa

SEQ ID NO: 33341 - DNA, 25 bp, Artificial
  Probe
aagagtagaagaggtaggagtctgt

SEQ ID NO: 33342 - DNA, 25 bp, Artificial
  Probe
tctacctaaggagagataagacaga

SEQ ID NO: 33343 - DNA, 25 bp, Artificial
  Probe
gagtagaagaggtaggagtctgtct

SEQ ID NO: 33344 - DNA, 25 bp, Artificial
  Probe
agagtagaagaggtaggagtctgtc

SEQ ID NO: 33345 - DNA, 25 bp, Artificial
  Probe
ggaagagtagaagaggtaggagtct

SEQ ID NO: 33346 - DNA, 25 bp, Artificial
  Probe
tagatgagttagccacagtgaacaa

SEQ ID NO: 33347 - DNA, 25 bp, Artificial
  Probe
tctgttatggacttggagaatgacc

SEQ ID NO: 33348 - DNA, 25 bp, Artificial
  Probe
ctagatgagttagccacagtgaaca

SEQ ID NO: 33349 - DNA, 25 bp, Artificial
  Probe
gatggatataggagactgagtggct

SEQ ID NO: 33350 - DNA, 25 bp, Artificial
  Probe
tttgaagggaagagtagaagaggta

SEQ ID NO: 33351 - DNA, 25 bp, Artificial
  Probe
ttgaagggaagagtagaagaggtag

SEQ ID NO: 33352 - DNA, 25 bp, Artificial
  Probe
agatgagttagccacagtgaacaag

SEQ ID NO: 33353 - DNA, 25 bp, Artificial
  Probe
aggtttgaagggaagagtagaagag

SEQ ID NO: 33354 - DNA, 25 bp, Artificial
  Probe
gaggtttgaagggaagagtagaaga

SEQ ID NO: 33355 - DNA, 25 bp, Artificial
  Probe
atggatataggagactgagtggctc

SEQ ID NO: 33356 - DNA, 25 bp, Artificial
  Probe
cttctgttatggacttggagaatga

SEQ ID NO: 33357 - DNA, 25 bp, Artificial
  Probe
ttctgttatggacttggagaatgac

SEQ ID NO: 33358 - DNA, 25 bp, Artificial
  Probe
gtttgaagggaagagtagaagaggt

SEQ ID NO: 33359 - DNA, 25 bp, Artificial
  Probe
tgtgtttgatcctactctacctaag

SEQ ID NO: 33360 - DNA, 25 bp, Artificial
  Probe
ctgtgtttgatcctactctacctaa

SEQ ID NO: 33361 - DNA, 25 bp, Artificial
  Probe
aagggaagagtagaagaggtaggag

SEQ ID NO: 33362 - DNA, 25 bp, Artificial
  Probe
agtagaagaggtaggagtctgtctt

SEQ ID NO: 33363 - DNA, 25 bp, Artificial
  Probe
gaagggaagagtagaagaggtagga

SEQ ID NO: 33364 - DNA, 25 bp, Artificial
  Probe
taaggagagataagacagagagaaa

SEQ ID NO: 33365 - DNA, 25 bp, Artificial
  Probe
taatgcagcttataatctagtggtt

SEQ ID NO: 33366 - DNA, 25 bp, Artificial
  Probe
ttaatgcagcttataatctagtggt

SEQ ID NO: 33367 - DNA, 25 bp, Artificial
  Probe
tgaagggaagagtagaagaggtagg

SEQ ID NO: 33368 - DNA, 25 bp, Artificial
  Probe
ggtttgaagggaagagtagaagagg

SEQ ID NO: 33369 - DNA, 25 bp, Artificial
  Probe
ggaggtttgaagggaagagtagaag

SEQ ID NO: 33370 - DNA, 25 bp, Artificial
  Probe
gcttctgttatggacttggagaatg

SEQ ID NO: 33371 - DNA, 25 bp, Artificial
  Probe
ggatggatataggagactgagtggc

SEQ ID NO: 33372 - DNA, 25 bp, Artificial
  Probe
cctctacttcaagcctctgactcaa

SEQ ID NO: 33373 - DNA, 25 bp, Artificial
  Probe
ctctacttcaagcctctgactcaaa

SEQ ID NO: 33374 - DNA, 25 bp, Artificial
  Probe
gtgatctgagttgcactaagtcaag

SEQ ID NO: 33375 - DNA, 25 bp, Artificial
  Probe
gatgagttagccacagtgaacaagg

SEQ ID NO: 33376 - DNA, 25 bp, Artificial
  Probe
gtgtttgatcctactctacctaagg

SEQ ID NO: 33377 - DNA, 25 bp, Artificial
  Probe
gggaagagtagaagaggtaggagtc

SEQ ID NO: 33378 - DNA, 25 bp, Artificial
  Probe
cttagccctagagaggtgttgatag

SEQ ID NO: 33379 - DNA, 25 bp, Artificial
  Probe
attcttccctctacttcaagcctct

SEQ ID NO: 33380 - DNA, 25 bp, Artificial
  Probe
atgatgctgatgtctgaacaagatc

SEQ ID NO: 33381 - DNA, 25 bp, Artificial
  Probe
catgatgctgatgtctgaacaagat

SEQ ID NO: 33382 - DNA, 25 bp, Artificial
  Probe
caaggagcttctgaacaggatcttc

SEQ ID NO: 33383 - DNA, 25 bp, Artificial
  Probe
gatcttcaacagacgctccattcac

SEQ ID NO: 33384 - DNA, 25 bp, Artificial
  Probe
atcttcaacagacgctccattcact

SEQ ID NO: 33385 - DNA, 25 bp, Artificial
  Probe
accaagaagatcagcaccttcatag

SEQ ID NO: 33386 - DNA, 25 bp, Artificial
  Probe
acatgatgctgatgtctgaacaaga

SEQ ID NO: 33387 - DNA, 25 bp, Artificial
  Probe
cttctgaacaggatcttcaacagac

SEQ ID NO: 33388 - DNA, 25 bp, Artificial
  Probe
caccaagaagatcagcaccttcata

SEQ ID NO: 33389 - DNA, 25 bp, Artificial
  Probe
ccaagaagatcagcaccttcatagg

SEQ ID NO: 33390 - DNA, 25 bp, Artificial
  Probe
agcttctgaacaggatcttcaacag

SEQ ID NO: 33391 - DNA, 25 bp, Artificial
  Probe
gagcttctgaacaggatcttcaaca

SEQ ID NO: 33392 - DNA, 25 bp, Artificial
  Probe
cttcaacagacgctccattcactct

SEQ ID NO: 33393 - DNA, 25 bp, Artificial
  Probe
tcttcaacagacgctccattcactc

SEQ ID NO: 33394 - DNA, 25 bp, Artificial
  Probe
ttctgaacaggatcttcaacagacg

SEQ ID NO: 33395 - DNA, 25 bp, Artificial
  Probe
gcttctgaacaggatcttcaacaga

SEQ ID NO: 33396 - DNA, 25 bp, Artificial
  Probe
ggagcttctgaacaggatcttcaac

SEQ ID NO: 33397 - DNA, 25 bp, Artificial
  Probe
aggatcttcaacagacgctccattc

SEQ ID NO: 33398 - DNA, 25 bp, Artificial
  Probe
aggagcttctgaacaggatcttcaa

SEQ ID NO: 33399 - DNA, 25 bp, Artificial
  Probe
aaggagcttctgaacaggatcttca

SEQ ID NO: 33400 - DNA, 25 bp, Artificial
  Probe
gcaaggagcttctgaacaggatctt

SEQ ID NO: 33401 - DNA, 25 bp, Artificial
  Probe
aagaagatcagcaccttcataggga

SEQ ID NO: 33402 - DNA, 25 bp, Artificial
  Probe
caagaagatcagcaccttcataggg

SEQ ID NO: 33403 - DNA, 25 bp, Artificial
  Probe
ggatcttcaacagacgctccattca

SEQ ID NO: 33404 - DNA, 25 bp, Artificial
  Probe
caggatcttcaacagacgctccatt

SEQ ID NO: 33405 - DNA, 25 bp, Artificial
  Probe
ctttgcaccctatgtgattaccagg

SEQ ID NO: 33406 - DNA, 25 bp, Artificial
  Probe
gatcagcaccttcatagggaccttc

SEQ ID NO: 33407 - DNA, 25 bp, Artificial
  Probe
agaagatcagcaccttcatagggac

SEQ ID NO: 33408 - DNA, 25 bp, Artificial
  Probe
gctttgcaccctatgtgattaccag

SEQ ID NO: 33409 - DNA, 25 bp, Artificial
  Probe
tgaacaggatcttcaacagacgctc

SEQ ID NO: 33410 - DNA, 25 bp, Artificial
  Probe
ctgaacaggatcttcaacagacgct

SEQ ID NO: 33411 - DNA, 25 bp, Artificial
  Probe
ccaccaagaagatcagcaccttcat

SEQ ID NO: 33412 - DNA, 25 bp, Artificial
  Probe
agatcagcaccttcatagggacctt

SEQ ID NO: 33413 - DNA, 25 bp, Artificial
  Probe
aagatcagcaccttcatagggacct

SEQ ID NO: 33414 - DNA, 25 bp, Artificial
  Probe
ctgttagtggacatccatcccagtg

SEQ ID NO: 33415 - DNA, 25 bp, Artificial
  Probe
tctgaacaggatcttcaacagacgc

SEQ ID NO: 33416 - DNA, 25 bp, Artificial
  Probe
ccattgtctggcgattgacatgatg

SEQ ID NO: 33417 - DNA, 25 bp, Artificial
  Probe
gtgactctcacagccagaacattct

SEQ ID NO: 33418 - DNA, 25 bp, Artificial
  Probe
gaagatcagcaccttcatagggacc

SEQ ID NO: 33419 - DNA, 25 bp, Artificial
  Probe
gttagtggacatccatcccagtgtg

SEQ ID NO: 33420 - DNA, 25 bp, Artificial
  Probe
ggaacgatgtctggaggaacagaag

SEQ ID NO: 33421 - DNA, 25 bp, Artificial
  Probe
tgactctcacagccagaacattctg

SEQ ID NO: 33422 - DNA, 25 bp, Artificial
  Probe
ttagtggacatccatcccagtgtga

SEQ ID NO: 33423 - DNA, 25 bp, Artificial
  Probe
ttcaacagacgctccattcactctg

SEQ ID NO: 33424 - DNA, 25 bp, Artificial
  Probe
tttgcaccctatgtgattaccaggc

SEQ ID NO: 33425 - DNA, 25 bp, Artificial
  Probe
gccatagtagtgtcagtagataacc

SEQ ID NO: 33426 - DNA, 25 bp, Artificial
  Probe
agaagccatagtagtgtcagtagat

SEQ ID NO: 33427 - DNA, 25 bp, Artificial
  Probe
aagagaagccatagtagtgtcagta

SEQ ID NO: 33428 - DNA, 25 bp, Artificial
  Probe
attacttcaaggtctgtattcggtt

SEQ ID NO: 33429 - DNA, 25 bp, Artificial
  Probe
gattacttcaaggtctgtattcggt

SEQ ID NO: 33430 - DNA, 25 bp, Artificial
  Probe
agccatagtagtgtcagtagataac

SEQ ID NO: 33431 - DNA, 25 bp, Artificial
  Probe
agagaagccatagtagtgtcagtag

SEQ ID NO: 33432 - DNA, 25 bp, Artificial
  Probe
gagaagccatagtagtgtcagtaga

SEQ ID NO: 33433 - DNA, 25 bp, Artificial
  Probe
gaagccatagtagtgtcagtagata

SEQ ID NO: 33434 - DNA, 25 bp, Artificial
  Probe
attgctacttatattcatccgtgcc

SEQ ID NO: 33435 - DNA, 25 bp, Artificial
  Probe
tattgctacttatattcatccgtgc

SEQ ID NO: 33436 - DNA, 25 bp, Artificial
  Probe
ccatagtagtgtcagtagataacct

SEQ ID NO: 33437 - DNA, 25 bp, Artificial
  Probe
aagccatagtagtgtcagtagataa

SEQ ID NO: 33438 - DNA, 25 bp, Artificial
  Probe
gaagagaagccatagtagtgtcagt

SEQ ID NO: 33439 - DNA, 25 bp, Artificial
  Probe
tgattacttcaaggtctgtattcgg

SEQ ID NO: 33440 - DNA, 25 bp, Artificial
  Probe
gtgattacttcaaggtctgtattcg

SEQ ID NO: 33441 - DNA, 25 bp, Artificial
  Probe
cttcatcctcatcttcctcatcctc

SEQ ID NO: 33442 - DNA, 25 bp, Artificial
  Probe
ttgaagagaagccatagtagtgtca

SEQ ID NO: 33443 - DNA, 25 bp, Artificial
  Probe
catcttcctcatcctcatcctcatc

SEQ ID NO: 33444 - DNA, 25 bp, Artificial
  Probe
catcctcatcttcctcatcctcatc

SEQ ID NO: 33445 - DNA, 25 bp, Artificial
  Probe
gcagtgattacttcaaggtctgtat

SEQ ID NO: 33446 - DNA, 25 bp, Artificial
  Probe
tgaagagaagccatagtagtgtcag

SEQ ID NO: 33447 - DNA, 25 bp, Artificial
  Probe
agtgattacttcaaggtctgtattc

SEQ ID NO: 33448 - DNA, 25 bp, Artificial
  Probe
tcatcttcctcatcctcatcctcat

SEQ ID NO: 33449 - DNA, 25 bp, Artificial
  Probe
tcatcctcatcttcctcatcctcat

SEQ ID NO: 33450 - DNA, 25 bp, Artificial
  Probe
cagtgattacttcaaggtctgtatt

SEQ ID NO: 33451 - DNA, 25 bp, Artificial
  Probe
agcagtgattacttcaaggtctgta

SEQ ID NO: 33452 - DNA, 25 bp, Artificial
  Probe
ttcatcctcatcttcctcatcctca

SEQ ID NO: 33453 - DNA, 25 bp, Artificial
  Probe
ttagcttcatcctcatcttcctcat

SEQ ID NO: 33454 - DNA, 25 bp, Artificial
  Probe
taaccagttagcttcatcctcatct

SEQ ID NO: 33455 - DNA, 25 bp, Artificial
  Probe
cgatattgctacttatattcatccg

SEQ ID NO: 33456 - DNA, 25 bp, Artificial
  Probe
tagcttcatcctcatcttcctcatc

SEQ ID NO: 33457 - DNA, 25 bp, Artificial
  Probe
ctcatcttcctcatcctcatcctca

SEQ ID NO: 33458 - DNA, 25 bp, Artificial
  Probe
tttgaagagaagccatagtagtgtc

SEQ ID NO: 33459 - DNA, 25 bp, Artificial
  Probe
atttgaagagaagccatagtagtgt

SEQ ID NO: 33460 - DNA, 25 bp, Artificial
  Probe
gaactactggcgatttgtaaagaaa

SEQ ID NO: 33461 - DNA, 25 bp, Artificial
  Probe
ttacttcaaggtctgtattcggttt

SEQ ID NO: 33462 - DNA, 25 bp, Artificial
  Probe
agttagcttcatcctcatcttcctc

SEQ ID NO: 33463 - DNA, 25 bp, Artificial
  Probe
tgaactactggcgatttgtaaagaa

SEQ ID NO: 33464 - DNA, 25 bp, Artificial
  Probe
ttgaactactggcgatttgtaaaga

SEQ ID NO: 33465 - DNA, 25 bp, Artificial
  Probe
tcttgaactactggcgatttgtaaa

SEQ ID NO: 33466 - DNA, 25 bp, Artificial
  Probe
atcttcctcatcctcatcctcatcc

SEQ ID NO: 33467 - DNA, 25 bp, Artificial
  Probe
atcctcatcttcctcatcctcatcc

SEQ ID NO: 33468 - DNA, 25 bp, Artificial
  Probe
catatagatgtattgtagcttgcca

SEQ ID NO: 33469 - DNA, 25 bp, Artificial
  Probe
caaagacactccaccaatagcatat

SEQ ID NO: 33470 - DNA, 25 bp, Artificial
  Probe
tagataagtcacagttacccaagga

SEQ ID NO: 33471 - DNA, 25 bp, Artificial
  Probe
atagataagtcacagttacccaagg

SEQ ID NO: 33472 - DNA, 25 bp, Artificial
  Probe
agataagtcacagttacccaaggat

SEQ ID NO: 33473 - DNA, 25 bp, Artificial
  Probe
gataagtcacagttacccaaggatc

SEQ ID NO: 33474 - DNA, 25 bp, Artificial
  Probe
aggttgatatagataagtcacagtt

SEQ ID NO: 33475 - DNA, 25 bp, Artificial
  Probe
ctttactggtatcagcaacacagag

SEQ ID NO: 33476 - DNA, 25 bp, Artificial
  Probe
ataagtcacagttacccaaggatcg

SEQ ID NO: 33477 - DNA, 25 bp, Artificial
  Probe
tatagataagtcacagttacccaag

SEQ ID NO: 33478 - DNA, 25 bp, Artificial
  Probe
gatatagataagtcacagttaccca

SEQ ID NO: 33479 - DNA, 25 bp, Artificial
  Probe
aactccactctcaagatccagtctg

SEQ ID NO: 33480 - DNA, 25 bp, Artificial
  Probe
caactccactctcaagatccagtct

SEQ ID NO: 33481 - DNA, 25 bp, Artificial
  Probe
tcaactccactctcaagatccagtc

SEQ ID NO: 33482 - DNA, 25 bp, Artificial
  Probe
agtcaactccactctcaagatccag

SEQ ID NO: 33483 - DNA, 25 bp, Artificial
  Probe
atgcaatcatacaggaaagtcagac

SEQ ID NO: 33484 - DNA, 25 bp, Artificial
  Probe
gcaatcatacaggaaagtcagactg

SEQ ID NO: 33485 - DNA, 25 bp, Artificial
  Probe
tgatatagataagtcacagttaccc

SEQ ID NO: 33486 - DNA, 25 bp, Artificial
  Probe
gtcaactccactctcaagatccagt

SEQ ID NO: 33487 - DNA, 25 bp, Artificial
  Probe
atatagataagtcacagttacccaa

SEQ ID NO: 33488 - DNA, 25 bp, Artificial
  Probe
tatgcaatcatacaggaaagtcaga

SEQ ID NO: 33489 - DNA, 25 bp, Artificial
  Probe
ccagatatgcaatcatacaggaaag

SEQ ID NO: 33490 - DNA, 25 bp, Artificial
  Probe
taagtcacagttacccaaggatcgt

SEQ ID NO: 33491 - DNA, 25 bp, Artificial
  Probe
cccagatatgcaatcatacaggaaa

SEQ ID NO: 33492 - DNA, 25 bp, Artificial
  Probe
atatgcaatcatacaggaaagtcag

SEQ ID NO: 33493 - DNA, 25 bp, Artificial
  Probe
gatatgcaatcatacaggaaagtca

SEQ ID NO: 33494 - DNA, 25 bp, Artificial
  Probe
cagatatgcaatcatacaggaaagt

SEQ ID NO: 33495 - DNA, 25 bp, Artificial
  Probe
ttgatatagataagtcacagttacc

SEQ ID NO: 33496 - DNA, 25 bp, Artificial
  Probe
ggttgatatagataagtcacagtta

SEQ ID NO: 33497 - DNA, 25 bp, Artificial
  Probe
tgcaatcatacaggaaagtcagact

SEQ ID NO: 33498 - DNA, 25 bp, Artificial
  Probe
agatatgcaatcatacaggaaagtc

SEQ ID NO: 33499 - DNA, 25 bp, Artificial
  Probe
tcccattttgaaacactatcttctt

SEQ ID NO: 33500 - DNA, 25 bp, Artificial
  Probe
ttcccattttgaaacactatcttct

SEQ ID NO: 33501 - DNA, 25 bp, Artificial
  Probe
tcattcccattttgaaacactatct

SEQ ID NO: 33502 - DNA, 25 bp, Artificial
  Probe
cccattttgaaacactatcttcttt

SEQ ID NO: 33503 - DNA, 25 bp, Artificial
  Probe
cattcccattttgaaacactatctt

SEQ ID NO: 33504 - DNA, 25 bp, Artificial
  Probe
caatcattcccattttgaaacacta

SEQ ID NO: 33505 - DNA, 25 bp, Artificial
  Probe
attcccattttgaaacactatcttc

SEQ ID NO: 33506 - DNA, 25 bp, Artificial
  Probe
agtcacagttacccaaggatcgttt

SEQ ID NO: 33507 - DNA, 25 bp, Artificial
  Probe
aagtcacagttacccaaggatcgtt

SEQ ID NO: 33508 - DNA, 25 bp, Artificial
  Probe
atcattcccattttgaaacactatc

SEQ ID NO: 33509 - DNA, 25 bp, Artificial
  Probe
aatcattcccattttgaaacactat

SEQ ID NO: 33510 - DNA, 25 bp, Artificial
  Probe
cactctcaagatccagtctgcaaag

SEQ ID NO: 33511 - DNA, 25 bp, Artificial
  Probe
ccggcttctagtttactttcagaat

SEQ ID NO: 33512 - DNA, 25 bp, Artificial
  Probe
atcatacaggaaagtcagactgttt

SEQ ID NO: 33513 - DNA, 25 bp, Artificial
  Probe
aatcatacaggaaagtcagactgtt

SEQ ID NO: 33514 - DNA, 25 bp, Artificial
  Probe
caatcatacaggaaagtcagactgt

SEQ ID NO: 33515 - DNA, 25 bp, Artificial
  Probe
tcaccatcatcacttccacttatag

SEQ ID NO: 33516 - DNA, 25 bp, Artificial
  Probe
ccatcatcacttccacttataggta

SEQ ID NO: 33517 - DNA, 25 bp, Artificial
  Probe
caccatcatcacttccacttatagg

SEQ ID NO: 33518 - DNA, 25 bp, Artificial
  Probe
atcaccatcatcacttccacttata

SEQ ID NO: 33519 - DNA, 25 bp, Artificial
  Probe
gatcaccatcatcacttccacttat

SEQ ID NO: 33520 - DNA, 25 bp, Artificial
  Probe
catcatcacttccacttataggtaa

SEQ ID NO: 33521 - DNA, 25 bp, Artificial
  Probe
ctctcttagaaccaccatgtcattc

SEQ ID NO: 33522 - DNA, 25 bp, Artificial
  Probe
tctctcttagaaccaccatgtcatt

SEQ ID NO: 33523 - DNA, 25 bp, Artificial
  Probe
ctcttagaaccaccatgtcattcac

SEQ ID NO: 33524 - DNA, 25 bp, Artificial
  Probe
aatatcactatgcttggctggagtt

SEQ ID NO: 33525 - DNA, 25 bp, Artificial
  Probe
tctcttagaaccaccatgtcattca

SEQ ID NO: 33526 - DNA, 25 bp, Artificial
  Probe
accatcatcacttccacttataggt

SEQ ID NO: 33527 - DNA, 25 bp, Artificial
  Probe
atatcactatgcttggctggagttc

SEQ ID NO: 33528 - DNA, 25 bp, Artificial
  Probe
ttagaaccaccatgtcattcacctt

SEQ ID NO: 33529 - DNA, 25 bp, Artificial
  Probe
caaggttctctgatggtgtttaatc

SEQ ID NO: 33530 - DNA, 25 bp, Artificial
  Probe
ctccttccataggctaagactcaag

SEQ ID NO: 33531 - DNA, 25 bp, Artificial
  Probe
aaggttctctgatggtgtttaatcc

SEQ ID NO: 33532 - DNA, 25 bp, Artificial
  Probe
caatatcactatgcttggctggagt

SEQ ID NO: 33533 - DNA, 25 bp, Artificial
  Probe
tctccttccataggctaagactcaa

SEQ ID NO: 33534 - DNA, 25 bp, Artificial
  Probe
tcaaggttctctgatggtgtttaat

SEQ ID NO: 33535 - DNA, 25 bp, Artificial
  Probe
cttagaaccaccatgtcattcacct

SEQ ID NO: 33536 - DNA, 25 bp, Artificial
  Probe
tcttagaaccaccatgtcattcacc

SEQ ID NO: 33537 - DNA, 25 bp, Artificial
  Probe
ttgtcctcatgtttctgttgtttac

SEQ ID NO: 33538 - DNA, 25 bp, Artificial
  Probe
gattgtcctcatgtttctgttgttt

SEQ ID NO: 33539 - DNA, 25 bp, Artificial
  Probe
tgtagatagaaattgccagttcatt

SEQ ID NO: 33540 - DNA, 25 bp, Artificial
  Probe
ccatgtagatagaaattgccagttc

SEQ ID NO: 33541 - DNA, 25 bp, Artificial
  Probe
attgtcctcatgtttctgttgttta

SEQ ID NO: 33542 - DNA, 25 bp, Artificial
  Probe
atgtagatagaaattgccagttcat

SEQ ID NO: 33543 - DNA, 25 bp, Artificial
  Probe
taagggacgccatgtagatagaaat

SEQ ID NO: 33544 - DNA, 25 bp, Artificial
  Probe
ttctctcttagaaccaccatgtcat

SEQ ID NO: 33545 - DNA, 25 bp, Artificial
  Probe
atcacttccacttataggtaaatcc

SEQ ID NO: 33546 - DNA, 25 bp, Artificial
  Probe
catgtagatagaaattgccagttca

SEQ ID NO: 33547 - DNA, 25 bp, Artificial
  Probe
ttaagggacgccatgtagatagaaa

SEQ ID NO: 33548 - DNA, 25 bp, Artificial
  Probe
tttaagggacgccatgtagatagaa

SEQ ID NO: 33549 - DNA, 25 bp, Artificial
  Probe
gccatgtagatagaaattgccagtt

SEQ ID NO: 33550 - DNA, 25 bp, Artificial
  Probe
cctcagatggatatttgacacatat

SEQ ID NO: 33551 - DNA, 25 bp, Artificial
  Probe
aagtggtaacctgacctctatggaa

SEQ ID NO: 33552 - DNA, 25 bp, Artificial
  Probe
gagttcctcagatggatatttgaca

SEQ ID NO: 33553 - DNA, 25 bp, Artificial
  Probe
ttcctcagatggatatttgacacat

SEQ ID NO: 33554 - DNA, 25 bp, Artificial
  Probe
agttcctcagatggatatttgacac

SEQ ID NO: 33555 - DNA, 25 bp, Artificial
  Probe
gttcctcagatggatatttgacaca

SEQ ID NO: 33556 - DNA, 25 bp, Artificial
  Probe
catgtcattcacctttgctgttagt

SEQ ID NO: 33557 - DNA, 25 bp, Artificial
  Probe
ctttaagggacgccatgtagataga

SEQ ID NO: 33558 - DNA, 25 bp, Artificial
  Probe
ggagttcctcagatggatatttgac

SEQ ID NO: 33559 - DNA, 25 bp, Artificial
  Probe
ctggagttcctcagatggatatttg

SEQ ID NO: 33560 - DNA, 25 bp, Artificial
  Probe
atggtggattggattctatgagatt

SEQ ID NO: 33561 - DNA, 25 bp, Artificial
  Probe
catggtggattggattctatgagat

SEQ ID NO: 33562 - DNA, 25 bp, Artificial
  Probe
taaggaacttcttgattgatgggag

SEQ ID NO: 33563 - DNA, 25 bp, Artificial
  Probe
ttaaggaacttcttgattgatggga

SEQ ID NO: 33564 - DNA, 25 bp, Artificial
  Probe
gggactttaaggaacttcttgattg

SEQ ID NO: 33565 - DNA, 25 bp, Artificial
  Probe
agggactttaaggaacttcttgatt

SEQ ID NO: 33566 - DNA, 25 bp, Artificial
  Probe
aagggactttaaggaacttcttgat

SEQ ID NO: 33567 - DNA, 25 bp, Artificial
  Probe
gaacttcttgattgatgggaggaaa

SEQ ID NO: 33568 - DNA, 25 bp, Artificial
  Probe
tttaaggaacttcttgattgatggg

SEQ ID NO: 33569 - DNA, 25 bp, Artificial
  Probe
ggactttaaggaacttcttgattga

SEQ ID NO: 33570 - DNA, 25 bp, Artificial
  Probe
gcatggtggattggattctatgaga

SEQ ID NO: 33571 - DNA, 25 bp, Artificial
  Probe
ttccttctcccaagacaatgactat

SEQ ID NO: 33572 - DNA, 25 bp, Artificial
  Probe
tttccttctcccaagacaatgacta

SEQ ID NO: 33573 - DNA, 25 bp, Artificial
  Probe
ccttctcccaagacaatgactatct

SEQ ID NO: 33574 - DNA, 25 bp, Artificial
  Probe
tccttctcccaagacaatgactatc

SEQ ID NO: 33575 - DNA, 25 bp, Artificial
  Probe
tttctttgtagactcttgctgcttg

SEQ ID NO: 33576 - DNA, 25 bp, Artificial
  Probe
ctttaaggaacttcttgattgatgg

SEQ ID NO: 33577 - DNA, 25 bp, Artificial
  Probe
ggcatggtggattggattctatgag

SEQ ID NO: 33578 - DNA, 25 bp, Artificial
  Probe
ggaacttcttgattgatgggaggaa

SEQ ID NO: 33579 - DNA, 25 bp, Artificial
  Probe
aaggaacttcttgattgatgggagg

SEQ ID NO: 33580 - DNA, 25 bp, Artificial
  Probe
ttctttgtagactcttgctgcttga

SEQ ID NO: 33581 - DNA, 25 bp, Artificial
  Probe
ctttccttctcccaagacaatgact

SEQ ID NO: 33582 - DNA, 25 bp, Artificial
  Probe
actttaaggaacttcttgattgatg

SEQ ID NO: 33583 - DNA, 25 bp, Artificial
  Probe
caggcatggtggattggattctatg

SEQ ID NO: 33584 - DNA, 25 bp, Artificial
  Probe
gactttaaggaacttcttgattgat

SEQ ID NO: 33585 - DNA, 25 bp, Artificial
  Probe
aggcatggtggattggattctatga

SEQ ID NO: 33586 - DNA, 25 bp, Artificial
  Probe
gggtagatgcctttcttcacagttt

SEQ ID NO: 33587 - DNA, 25 bp, Artificial
  Probe
aggaacttcttgattgatgggagga

SEQ ID NO: 33588 - DNA, 25 bp, Artificial
  Probe
cttctcccaagacaatgactatctt

SEQ ID NO: 33589 - DNA, 25 bp, Artificial
  Probe
tctttgtagactcttgctgcttgag

SEQ ID NO: 33590 - DNA, 25 bp, Artificial
  Probe
ttctcccaagacaatgactatcttt

SEQ ID NO: 33591 - DNA, 25 bp, Artificial
  Probe
cctttccttctcccaagacaatgac

SEQ ID NO: 33592 - DNA, 25 bp, Artificial
  Probe
ttcttgattgatgggaggaaaacta

SEQ ID NO: 33593 - DNA, 25 bp, Artificial
  Probe
gaacagtgggtagatgcctttcttc

SEQ ID NO: 33594 - DNA, 25 bp, Artificial
  Probe
gacaatgactatcttttctccccac

SEQ ID NO: 33595 - DNA, 25 bp, Artificial
  Probe
aacttcttgattgatgggaggaaaa

SEQ ID NO: 33596 - DNA, 25 bp, Artificial
  Probe
tcttgattgatgggaggaaaactag

SEQ ID NO: 33597 - DNA, 25 bp, Artificial
  Probe
ttgagcaaatctaaaaggagttgtg

SEQ ID NO: 33598 - DNA, 25 bp, Artificial
  Probe
caatgactatcttttctccccacac

SEQ ID NO: 33599 - DNA, 25 bp, Artificial
  Probe
cttcttgattgatgggaggaaaact

SEQ ID NO: 33600 - DNA, 25 bp, Artificial
  Probe
cttgagcaaatctaaaaggagttgt

SEQ ID NO: 33601 - DNA, 25 bp, Artificial
  Probe
caaatctaaaaggagttgtggtgat

SEQ ID NO: 33602 - DNA, 25 bp, Artificial
  Probe
aatgactatcttttctccccacact

SEQ ID NO: 33603 - DNA, 25 bp, Artificial
  Probe
acttcttgattgatgggaggaaaac

SEQ ID NO: 33604 - DNA, 25 bp, Artificial
  Probe
ttttctttgtagactcttgctgctt

SEQ ID NO: 33605 - DNA, 25 bp, Artificial
  Probe
gttaccattacaccttgtctgagta

SEQ ID NO: 33606 - DNA, 25 bp, Artificial
  Probe
ttaccattacaccttgtctgagtag

SEQ ID NO: 33607 - DNA, 25 bp, Artificial
  Probe
tagttaccattacaccttgtctgag

SEQ ID NO: 33608 - DNA, 25 bp, Artificial
  Probe
tgttagttaccattacaccttgtct

SEQ ID NO: 33609 - DNA, 25 bp, Artificial
  Probe
taccattacaccttgtctgagtagt

SEQ ID NO: 33610 - DNA, 25 bp, Artificial
  Probe
gttagttaccattacaccttgtctg

SEQ ID NO: 33611 - DNA, 25 bp, Artificial
  Probe
ttagttaccattacaccttgtctga

SEQ ID NO: 33612 - DNA, 25 bp, Artificial
  Probe
ttgttagttaccattacaccttgtc

SEQ ID NO: 33613 - DNA, 25 bp, Artificial
  Probe
agttaccattacaccttgtctgagt

SEQ ID NO: 33614 - DNA, 25 bp, Artificial
  Probe
gtctgagtagtgttccgagttcttg

SEQ ID NO: 33615 - DNA, 25 bp, Artificial
  Probe
cttgtctgagtagtgttccgagttc

SEQ ID NO: 33616 - DNA, 25 bp, Artificial
  Probe
gtgtcttcagtggtttgttagttac

SEQ ID NO: 33617 - DNA, 25 bp, Artificial
  Probe
agtgtcttcagtggtttgttagtta

SEQ ID NO: 33618 - DNA, 25 bp, Artificial
  Probe
accattacaccttgtctgagtagtg

SEQ ID NO: 33619 - DNA, 25 bp, Artificial
  Probe
tatgtctggatcattcaggcagtac

SEQ ID NO: 33620 - DNA, 25 bp, Artificial
  Probe
gtatgtctggatcattcaggcagta

SEQ ID NO: 33621 - DNA, 25 bp, Artificial
  Probe
cagtgtcttcagtggtttgttagtt

SEQ ID NO: 33622 - DNA, 25 bp, Artificial
  Probe
tgtctgagtagtgttccgagttctt

SEQ ID NO: 33623 - DNA, 25 bp, Artificial
  Probe
ttgtctgagtagtgttccgagttct

SEQ ID NO: 33624 - DNA, 25 bp, Artificial
  Probe
ctcagtgtcttcagtggtttgttag

SEQ ID NO: 33625 - DNA, 25 bp, Artificial
  Probe
tcagtgtcttcagtggtttgttagt

SEQ ID NO: 33626 - DNA, 25 bp, Artificial
  Probe
gtctggatcattcaggcagtacatt

SEQ ID NO: 33627 - DNA, 25 bp, Artificial
  Probe
tttgttagttaccattacaccttgt

SEQ ID NO: 33628 - DNA, 25 bp, Artificial
  Probe
ttccatcgggtgtctttaaatagtt

SEQ ID NO: 33629 - DNA, 25 bp, Artificial
  Probe
gtttgttagttaccattacaccttg

SEQ ID NO: 33630 - DNA, 25 bp, Artificial
  Probe
agttccatcgggtgtctttaaatag

SEQ ID NO: 33631 - DNA, 25 bp, Artificial
  Probe
gagttccatcgggtgtctttaaata

SEQ ID NO: 33632 - DNA, 25 bp, Artificial
  Probe
actcagtgtcttcagtggtttgtta

SEQ ID NO: 33633 - DNA, 25 bp, Artificial
  Probe
tccatcgggtgtctttaaatagttg

SEQ ID NO: 33634 - DNA, 25 bp, Artificial
  Probe
gttccatcgggtgtctttaaatagt

SEQ ID NO: 33635 - DNA, 25 bp, Artificial
  Probe
tgtgaagtgagttaaatgagctttc

SEQ ID NO: 33636 - DNA, 25 bp, Artificial
  Probe
ttgtgaagtgagttaaatgagcttt

SEQ ID NO: 33637 - DNA, 25 bp, Artificial
  Probe
tttgtgaagtgagttaaatgagctt

SEQ ID NO: 33638 - DNA, 25 bp, Artificial
  Probe
ccttgtctgagtagtgttccgagtt

SEQ ID NO: 33639 - DNA, 25 bp, Artificial
  Probe
ggtttgttagttaccattacacctt

SEQ ID NO: 33640 - DNA, 25 bp, Artificial
  Probe
ttaaatagttgcagaagggatacgt

SEQ ID NO: 33641 - DNA, 25 bp, Artificial
  Probe
tgtcttcagtggtttgttagttacc

SEQ ID NO: 33642 - DNA, 25 bp, Artificial
  Probe
taaatagttgcagaagggatacgtc

SEQ ID NO: 33643 - DNA, 25 bp, Artificial
  Probe
tttaaatagttgcagaagggatacg

SEQ ID NO: 33644 - DNA, 25 bp, Artificial
  Probe
tgtctttaaatagttgcagaaggga

SEQ ID NO: 33645 - DNA, 25 bp, Artificial
  Probe
gtgtctttaaatagttgcagaaggg

SEQ ID NO: 33646 - DNA, 25 bp, Artificial
  Probe
ggtgtctttaaatagttgcagaagg

SEQ ID NO: 33647 - DNA, 25 bp, Artificial
  Probe
gggtgtctttaaatagttgcagaag

SEQ ID NO: 33648 - DNA, 25 bp, Artificial
  Probe
agaagggatacgtcatctgttaatg

SEQ ID NO: 33649 - DNA, 25 bp, Artificial
  Probe
tggatcattcaggcagtacatttga

SEQ ID NO: 33650 - DNA, 25 bp, Artificial
  Probe
atgacaccattggatgttacttaga

SEQ ID NO: 33651 - DNA, 25 bp, Artificial
  Probe
gacaccattggatgttacttagaca

SEQ ID NO: 33652 - DNA, 25 bp, Artificial
  Probe
tgacaccattggatgttacttagac

SEQ ID NO: 33653 - DNA, 25 bp, Artificial
  Probe
catgacaccattggatgttacttag

SEQ ID NO: 33654 - DNA, 25 bp, Artificial
  Probe
gcatgacaccattggatgttactta

SEQ ID NO: 33655 - DNA, 25 bp, Artificial
  Probe
tgaagaagaatttaagtttccacca

SEQ ID NO: 33656 - DNA, 25 bp, Artificial
  Probe
attatggagaggaattcactatgca

SEQ ID NO: 33657 - DNA, 25 bp, Artificial
  Probe
acaccattggatgttacttagacat

SEQ ID NO: 33658 - DNA, 25 bp, Artificial
  Probe
gtgaaacagtttaagaagtacatcg

SEQ ID NO: 33659 - DNA, 25 bp, Artificial
  Probe
cgtgaaacagtttaagaagtacatc

SEQ ID NO: 33660 - DNA, 25 bp, Artificial
  Probe
gaagaagaatttaagtttccaccaa

SEQ ID NO: 33661 - DNA, 25 bp, Artificial
  Probe
ttggtgaagaagaatttaagtttcc

SEQ ID NO: 33662 - DNA, 25 bp, Artificial
  Probe
gtgaagaagaatttaagtttccacc

SEQ ID NO: 33663 - DNA, 25 bp, Artificial
  Probe
ggtgaagaagaatttaagtttccac

SEQ ID NO: 33664 - DNA, 25 bp, Artificial
  Probe
aagaagaatttaagtttccaccaaa

SEQ ID NO: 33665 - DNA, 25 bp, Artificial
  Probe
tggtgaagaagaatttaagtttcca

SEQ ID NO: 33666 - DNA, 25 bp, Artificial
  Probe
aattatggagaggaattcactatgc

SEQ ID NO: 33667 - DNA, 25 bp, Artificial
  Probe
tgaaacagtttaagaagtacatcga

SEQ ID NO: 33668 - DNA, 25 bp, Artificial
  Probe
aacaacgtgaaacagtttaagaagt

SEQ ID NO: 33669 - DNA, 25 bp, Artificial
  Probe
tgaacaacgtgaaacagtttaagaa

SEQ ID NO: 33670 - DNA, 25 bp, Artificial
  Probe
ttgaacaacgtgaaacagtttaaga

SEQ ID NO: 33671 - DNA, 25 bp, Artificial
  Probe
cttgaacaacgtgaaacagtttaag

SEQ ID NO: 33672 - DNA, 25 bp, Artificial
  Probe
acgtgaaacagtttaagaagtacat

SEQ ID NO: 33673 - DNA, 25 bp, Artificial
  Probe
gaacaacgtgaaacagtttaagaag

SEQ ID NO: 33674 - DNA, 25 bp, Artificial
  Probe
ccttgaacaacgtgaaacagtttaa

SEQ ID NO: 33675 - DNA, 25 bp, Artificial
  Probe
taaattgcgggagcttctcataatt

SEQ ID NO: 33676 - DNA, 25 bp, Artificial
  Probe
aacgtgaaacagtttaagaagtaca

SEQ ID NO: 33677 - DNA, 25 bp, Artificial
  Probe
acaacgtgaaacagtttaagaagta

SEQ ID NO: 33678 - DNA, 25 bp, Artificial
  Probe
ctaaattgcgggagcttctcataat

SEQ ID NO: 33679 - DNA, 25 bp, Artificial
  Probe
catttgaaatacctgcacacataaa

SEQ ID NO: 33680 - DNA, 25 bp, Artificial
  Probe
tgctgaattgaaatttaactttggt

SEQ ID NO: 33681 - DNA, 25 bp, Artificial
  Probe
caacgtgaaacagtttaagaagtac

SEQ ID NO: 33682 - DNA, 25 bp, Artificial
  Probe
gctgaattgaaatttaactttggtg

SEQ ID NO: 33683 - DNA, 25 bp, Artificial
  Probe
accttgaacaacgtgaaacagttta

SEQ ID NO: 33684 - DNA, 25 bp, Artificial
  Probe
tgcatgacaccattggatgttactt

SEQ ID NO: 33685 - DNA, 25 bp, Artificial
  Probe
tgtgttttgaagaatgctgaattga

SEQ ID NO: 33686 - DNA, 25 bp, Artificial
  Probe
ctgtgttttgaagaatgctgaattg

SEQ ID NO: 33687 - DNA, 25 bp, Artificial
  Probe
tatggagaggaattcactatgcatg

SEQ ID NO: 33688 - DNA, 25 bp, Artificial
  Probe
ttatggagaggaattcactatgcat

SEQ ID NO: 33689 - DNA, 25 bp, Artificial
  Probe
gtgttttgaagaatgctgaattgaa

SEQ ID NO: 33690 - DNA, 25 bp, Artificial
  Probe
cctgtgttttgaagaatgctgaatt

SEQ ID NO: 33691 - DNA, 25 bp, Artificial
  Probe
cttggtctggcatttgaaatacctg

SEQ ID NO: 33692 - DNA, 25 bp, Artificial
  Probe
tctctaagaatggaaaagaccttgg

SEQ ID NO: 33693 - DNA, 25 bp, Artificial
  Probe
aaattgcgggagcttctcataattg

SEQ ID NO: 33694 - DNA, 25 bp, Artificial
  Probe
gaattcactatgcatgacaccattg

SEQ ID NO: 33695 - DNA, 25 bp, Artificial
  Probe
aatagaggattgtggaagaactacc

SEQ ID NO: 33696 - DNA, 25 bp, Artificial
  Probe
atagaggattgtggaagaactacca

SEQ ID NO: 33697 - DNA, 25 bp, Artificial
  Probe
tagaggattgtggaagaactaccaa

SEQ ID NO: 33698 - DNA, 25 bp, Artificial
  Probe
cggtaaatagaggattgtggaagaa

SEQ ID NO: 33699 - DNA, 25 bp, Artificial
  Probe
cagtttcggtaaatagaggattgtg

SEQ ID NO: 33700 - DNA, 25 bp, Artificial
  Probe
gtttcggtaaatagaggattgtgga

SEQ ID NO: 33701 - DNA, 25 bp, Artificial
  Probe
agtttcggtaaatagaggattgtgg

SEQ ID NO: 33702 - DNA, 25 bp, Artificial
  Probe
ccagtttcggtaaatagaggattgt

SEQ ID NO: 33703 - DNA, 25 bp, Artificial
  Probe
ggtaaatagaggattgtggaagaac

SEQ ID NO: 33704 - DNA, 25 bp, Artificial
  Probe
tttcggtaaatagaggattgtggaa

SEQ ID NO: 33705 - DNA, 25 bp, Artificial
  Probe
ttcggtaaatagaggattgtggaag

SEQ ID NO: 33706 - DNA, 25 bp, Artificial
  Probe
cttggaaactgtagtcttacggaaa

SEQ ID NO: 33707 - DNA, 25 bp, Artificial
  Probe
tcggtaaatagaggattgtggaaga

SEQ ID NO: 33708 - DNA, 25 bp, Artificial
  Probe
gaagtctccagtttcggtaaataga

SEQ ID NO: 33709 - DNA, 25 bp, Artificial
  Probe
aggattgtggaagaactaccaattc

SEQ ID NO: 33710 - DNA, 25 bp, Artificial
  Probe
gaggattgtggaagaactaccaatt

SEQ ID NO: 33711 - DNA, 25 bp, Artificial
  Probe
aaatagaggattgtggaagaactac

SEQ ID NO: 33712 - DNA, 25 bp, Artificial
  Probe
gtaaatagaggattgtggaagaact

SEQ ID NO: 33713 - DNA, 25 bp, Artificial
  Probe
aagtctccagtttcggtaaatagag

SEQ ID NO: 33714 - DNA, 25 bp, Artificial
  Probe
agaggattgtggaagaactaccaat

SEQ ID NO: 33715 - DNA, 25 bp, Artificial
  Probe
agtctccagtttcggtaaatagagg

SEQ ID NO: 33716 - DNA, 25 bp, Artificial
  Probe
ccttggaaactgtagtcttacggaa

SEQ ID NO: 33717 - DNA, 25 bp, Artificial
  Probe
ctccagtttcggtaaatagaggatt

SEQ ID NO: 33718 - DNA, 25 bp, Artificial
  Probe
ctgacctagaactcttggactcctg

SEQ ID NO: 33719 - DNA, 25 bp, Artificial
  Probe
tccagtttcggtaaatagaggattg

SEQ ID NO: 33720 - DNA, 25 bp, Artificial
  Probe
tctccagtttcggtaaatagaggat

SEQ ID NO: 33721 - DNA, 25 bp, Artificial
  Probe
catcccttggaaactgtagtcttac

SEQ ID NO: 33722 - DNA, 25 bp, Artificial
  Probe
ctagaactcttggactcctgctacc

SEQ ID NO: 33723 - DNA, 25 bp, Artificial
  Probe
cctagaactcttggactcctgctac

SEQ ID NO: 33724 - DNA, 25 bp, Artificial
  Probe
ggaagtctccagtttcggtaaatag

SEQ ID NO: 33725 - DNA, 25 bp, Artificial
  Probe
gtctccagtttcggtaaatagagga

SEQ ID NO: 33726 - DNA, 25 bp, Artificial
  Probe
acctagaactcttggactcctgcta

SEQ ID NO: 33727 - DNA, 25 bp, Artificial
  Probe
taaatagaggattgtggaagaacta

SEQ ID NO: 33728 - DNA, 25 bp, Artificial
  Probe
atcccttggaaactgtagtcttacg

SEQ ID NO: 33729 - DNA, 25 bp, Artificial
  Probe
gcatcccttggaaactgtagtctta

SEQ ID NO: 33730 - DNA, 25 bp, Artificial
  Probe
caacttcctgagtaactgggactac

SEQ ID NO: 33731 - DNA, 25 bp, Artificial
  Probe
ttggaaactgtagtcttacggaaaa

SEQ ID NO: 33732 - DNA, 25 bp, Artificial
  Probe
aacttcctgagtaactgggactaca

SEQ ID NO: 33733 - DNA, 25 bp, Artificial
  Probe
aaactgtagtcttacggaaaaggag

SEQ ID NO: 33734 - DNA, 25 bp, Artificial
  Probe
gaaactgtagtcttacggaaaagga

SEQ ID NO: 33735 - DNA, 25 bp, Artificial
  Probe
tggaaactgtagtcttacggaaaag

SEQ ID NO: 33736 - DNA, 25 bp, Artificial
  Probe
cagtaacccagtcgatacaacagag

SEQ ID NO: 33737 - DNA, 25 bp, Artificial
  Probe
gattaccacagtaacccagtcgata

SEQ ID NO: 33738 - DNA, 25 bp, Artificial
  Probe
agtaacccagtcgatacaacagaga

SEQ ID NO: 33739 - DNA, 25 bp, Artificial
  Probe
ggaaactgtagtcttacggaaaagg

SEQ ID NO: 33740 - DNA, 25 bp, Artificial
  Probe
ctagaagagagccttgttaccagaa

SEQ ID NO: 33741 - DNA, 25 bp, Artificial
  Probe
tagaagagagccttgttaccagaaa

SEQ ID NO: 33742 - DNA, 25 bp, Artificial
  Probe
ctctattcagcctttaccagtgatg

SEQ ID NO: 33743 - DNA, 25 bp, Artificial
  Probe
gaaactccttattccctcaacagtg

SEQ ID NO: 33744 - DNA, 25 bp, Artificial
  Probe
agcaaggatgttaactgagtagatc

SEQ ID NO: 33745 - DNA, 25 bp, Artificial
  Probe
cagcaaaggacacatgaattatgag

SEQ ID NO: 33746 - DNA, 25 bp, Artificial
  Probe
aacctctattcagcctttaccagtg

SEQ ID NO: 33747 - DNA, 25 bp, Artificial
  Probe
caacctctattcagcctttaccagt

SEQ ID NO: 33748 - DNA, 25 bp, Artificial
  Probe
acaacctctattcagcctttaccag

SEQ ID NO: 33749 - DNA, 25 bp, Artificial
  Probe
gacaacctctattcagcctttacca

SEQ ID NO: 33750 - DNA, 25 bp, Artificial
  Probe
gcaaggatgttaactgagtagatct

SEQ ID NO: 33751 - DNA, 25 bp, Artificial
  Probe
cctctattcagcctttaccagtgat

SEQ ID NO: 33752 - DNA, 25 bp, Artificial
  Probe
aaggatgttaactgagtagatctgg

SEQ ID NO: 33753 - DNA, 25 bp, Artificial
  Probe
agaagagagccttgttaccagaaag

SEQ ID NO: 33754 - DNA, 25 bp, Artificial
  Probe
agcaaaggacacatgaattatgagg

SEQ ID NO: 33755 - DNA, 25 bp, Artificial
  Probe
atatgtatctgaagtgggtagagct

SEQ ID NO: 33756 - DNA, 25 bp, Artificial
  Probe
caaggatgttaactgagtagatctg

SEQ ID NO: 33757 - DNA, 25 bp, Artificial
  Probe
cagcaaggatgttaactgagtagat

SEQ ID NO: 33758 - DNA, 25 bp, Artificial
  Probe
tttgatgtggaaacactgtgatata

SEQ ID NO: 33759 - DNA, 25 bp, Artificial
  Probe
tgctgcatttaactggttatttctt

SEQ ID NO: 33760 - DNA, 25 bp, Artificial
  Probe
gtgctgcatttaactggttatttct

SEQ ID NO: 33761 - DNA, 25 bp, Artificial
  Probe
gctgcatttaactggttatttcttg

SEQ ID NO: 33762 - DNA, 25 bp, Artificial
  Probe
ccatttcaataccaagcctttctgc

SEQ ID NO: 33763 - DNA, 25 bp, Artificial
  Probe
gccatttcaataccaagcctttctg

SEQ ID NO: 33764 - DNA, 25 bp, Artificial
  Probe
cgaaactccttattccctcaacagt

SEQ ID NO: 33765 - DNA, 25 bp, Artificial
  Probe
caaaggacacatgaattatgagggc

SEQ ID NO: 33766 - DNA, 25 bp, Artificial
  Probe
gcaaaggacacatgaattatgaggg

SEQ ID NO: 33767 - DNA, 25 bp, Artificial
  Probe
gcagcaaaggacacatgaattatga

SEQ ID NO: 33768 - DNA, 25 bp, Artificial
  Probe
ttgttaccagaaagcctcatgtaag

SEQ ID NO: 33769 - DNA, 25 bp, Artificial
  Probe
cttgttaccagaaagcctcatgtaa

SEQ ID NO: 33770 - DNA, 25 bp, Artificial
  Probe
cagaaagcctcatgtaagccaaatc

SEQ ID NO: 33771 - DNA, 25 bp, Artificial
  Probe
agtgctgcatttaactggttatttc

SEQ ID NO: 33772 - DNA, 25 bp, Artificial
  Probe
ctagtgctgcatttaactggttatt

SEQ ID NO: 33773 - DNA, 25 bp, Artificial
  Probe
ttgatgtggaaacactgtgatatat

SEQ ID NO: 33774 - DNA, 25 bp, Artificial
  Probe
tgccatttcaataccaagcctttct

SEQ ID NO: 33775 - DNA, 25 bp, Artificial
  Probe
gtgccatttcaataccaagcctttc

SEQ ID NO: 33776 - DNA, 25 bp, Artificial
  Probe
aagccaaatcccatatgtatctgaa

SEQ ID NO: 33777 - DNA, 25 bp, Artificial
  Probe
tagtgctgcatttaactggttattt

SEQ ID NO: 33778 - DNA, 25 bp, Artificial
  Probe
agccaaatcccatatgtatctgaag

SEQ ID NO: 33779 - DNA, 25 bp, Artificial
  Probe
tgtaagccaaatcccatatgtatct

SEQ ID NO: 33780 - DNA, 25 bp, Artificial
  Probe
ccttgttaccagaaagcctcatgta

SEQ ID NO: 33781 - DNA, 25 bp, Artificial
  Probe
gccaaatcccatatgtatctgaagt

SEQ ID NO: 33782 - DNA, 25 bp, Artificial
  Probe
ccgaaactccttattccctcaacag

SEQ ID NO: 33783 - DNA, 25 bp, Artificial
  Probe
ccaaatcccatatgtatctgaagtg

SEQ ID NO: 33784 - DNA, 25 bp, Artificial
  Probe
taagccaaatcccatatgtatctga

SEQ ID NO: 33785 - DNA, 25 bp, Artificial
  Probe
tcaatcaagggcttcaggttaagaa

SEQ ID NO: 33786 - DNA, 25 bp, Artificial
  Probe
attcttctccaatgggtcatcactt

SEQ ID NO: 33787 - DNA, 25 bp, Artificial
  Probe
ttcttctccaatgggtcatcacttt

SEQ ID NO: 33788 - DNA, 25 bp, Artificial
  Probe
aactcaatcaagggcttcaggttaa

SEQ ID NO: 33789 - DNA, 25 bp, Artificial
  Probe
gattcttctccaatgggtcatcact

SEQ ID NO: 33790 - DNA, 25 bp, Artificial
  Probe
ctcaatcaagggcttcaggttaaga

SEQ ID NO: 33791 - DNA, 25 bp, Artificial
  Probe
actcaatcaagggcttcaggttaag

SEQ ID NO: 33792 - DNA, 25 bp, Artificial
  Probe
gaactcaatcaagggcttcaggtta

SEQ ID NO: 33793 - DNA, 25 bp, Artificial
  Probe
ggattcttctccaatgggtcatcac

SEQ ID NO: 33794 - DNA, 25 bp, Artificial
  Probe
caatcaagggcttcaggttaagaag

SEQ ID NO: 33795 - DNA, 25 bp, Artificial
  Probe
tcttctccaatgggtcatcactttt

SEQ ID NO: 33796 - DNA, 25 bp, Artificial
  Probe
tccatctaggacagtgtgttacgtg

SEQ ID NO: 33797 - DNA, 25 bp, Artificial
  Probe
atctaggacagtgtgttacgtgcag

SEQ ID NO: 33798 - DNA, 25 bp, Artificial
  Probe
aatcaagggcttcaggttaagaagg

SEQ ID NO: 33799 - DNA, 25 bp, Artificial
  Probe
catctaggacagtgtgttacgtgca

SEQ ID NO: 33800 - DNA, 25 bp, Artificial
  Probe
tcggattcttctccaatgggtcatc

SEQ ID NO: 33801 - DNA, 25 bp, Artificial
  Probe
ccactgagactactgataccgtctg

SEQ ID NO: 33802 - DNA, 25 bp, Artificial
  Probe
cggattcttctccaatgggtcatca

SEQ ID NO: 33803 - DNA, 25 bp, Artificial
  Probe
gtcggattcttctccaatgggtcat

SEQ ID NO: 33804 - DNA, 25 bp, Artificial
  Probe
atcaagggcttcaggttaagaagga

SEQ ID NO: 33805 - DNA, 25 bp, Artificial
  Probe
ttacgtgcagtgacaaacagtacct

SEQ ID NO: 33806 - DNA, 25 bp, Artificial
  Probe
gttacgtgcagtgacaaacagtacc

SEQ ID NO: 33807 - DNA, 25 bp, Artificial
  Probe
gacactgtttgtacctgcaaggaag

SEQ ID NO: 33808 - DNA, 25 bp, Artificial
  Probe
cactgagactactgataccgtctgc

SEQ ID NO: 33809 - DNA, 25 bp, Artificial
  Probe
tcaagggcttcaggttaagaaggag

SEQ ID NO: 33810 - DNA, 25 bp, Artificial
  Probe
agacactgtttgtacctgcaaggaa

SEQ ID NO: 33811 - DNA, 25 bp, Artificial
  Probe
tacgtgcagtgacaaacagtacctc

SEQ ID NO: 33812 - DNA, 25 bp, Artificial
  Probe
gagactactgataccgtctgccaac

SEQ ID NO: 33813 - DNA, 25 bp, Artificial
  Probe
tgcagtgacaaacagtacctccaag

SEQ ID NO: 33814 - DNA, 25 bp, Artificial
  Probe
tgagactactgataccgtctgccaa

SEQ ID NO: 33815 - DNA, 25 bp, Artificial
  Probe
tgttacgtgcagtgacaaacagtac

SEQ ID NO: 33816 - DNA, 25 bp, Artificial
  Probe
gtgttacgtgcagtgacaaacagta

SEQ ID NO: 33817 - DNA, 25 bp, Artificial
  Probe
cagtgtgttacgtgcagtgacaaac

SEQ ID NO: 33818 - DNA, 25 bp, Artificial
  Probe
cagacactgtttgtacctgcaagga

SEQ ID NO: 33819 - DNA, 25 bp, Artificial
  Probe
tcagacactgtttgtacctgcaagg

SEQ ID NO: 33820 - DNA, 25 bp, Artificial
  Probe
caagggcttcaggttaagaaggagg

SEQ ID NO: 33821 - DNA, 25 bp, Artificial
  Probe
gtccatctaggacagtgtgttacgt

SEQ ID NO: 33822 - DNA, 25 bp, Artificial
  Probe
gaattctcagctcactggaacaggg

SEQ ID NO: 33823 - DNA, 25 bp, Artificial
  Probe
ggtccatctaggacagtgtgttacg

SEQ ID NO: 33824 - DNA, 25 bp, Artificial
  Probe
cggtccatctaggacagtgtgttac

SEQ ID NO: 33825 - DNA, 25 bp, Artificial
  Probe
agtgacaaacagtacctccaaggtg

SEQ ID NO: 33826 - DNA, 25 bp, Artificial
  Probe
cagtgacaaacagtacctccaaggt

SEQ ID NO: 33827 - DNA, 25 bp, Artificial
  Probe
gtgtgttacgtgcagtgacaaacag

SEQ ID NO: 33828 - DNA, 25 bp, Artificial
  Probe
ttagcagacctagatatgttctcct

SEQ ID NO: 33829 - DNA, 25 bp, Artificial
  Probe
cttagcagacctagatatgttctcc

SEQ ID NO: 33830 - DNA, 25 bp, Artificial
  Probe
tagcagacctagatatgttctcctc

SEQ ID NO: 33831 - DNA, 25 bp, Artificial
  Probe
agacctagatatgttctcctcagtg

SEQ ID NO: 33832 - DNA, 25 bp, Artificial
  Probe
cagacctagatatgttctcctcagt

SEQ ID NO: 33833 - DNA, 25 bp, Artificial
  Probe
acttagcagacctagatatgttctc

SEQ ID NO: 33834 - DNA, 25 bp, Artificial
  Probe
tgaacttagcagacctagatatgtt

SEQ ID NO: 33835 - DNA, 25 bp, Artificial
  Probe
aacttagcagacctagatatgttct

SEQ ID NO: 33836 - DNA, 25 bp, Artificial
  Probe
gacctagatatgttctcctcagtgg

SEQ ID NO: 33837 - DNA, 25 bp, Artificial
  Probe
ctgaacttagcagacctagatatgt

SEQ ID NO: 33838 - DNA, 25 bp, Artificial
  Probe
gcagacctagatatgttctcctcag

SEQ ID NO: 33839 - DNA, 25 bp, Artificial
  Probe
tagatatgttctcctcagtggattg

SEQ ID NO: 33840 - DNA, 25 bp, Artificial
  Probe
cctagatatgttctcctcagtggat

SEQ ID NO: 33841 - DNA, 25 bp, Artificial
  Probe
agcagacctagatatgttctcctca

SEQ ID NO: 33842 - DNA, 25 bp, Artificial
  Probe
ctagatatgttctcctcagtggatt

SEQ ID NO: 33843 - DNA, 25 bp, Artificial
  Probe
catttagcacctcaaagtcagtttc

SEQ ID NO: 33844 - DNA, 25 bp, Artificial
  Probe
acctagatatgttctcctcagtgga

SEQ ID NO: 33845 - DNA, 25 bp, Artificial
  Probe
cttccactccagtaaattctcatcc

SEQ ID NO: 33846 - DNA, 25 bp, Artificial
  Probe
atttagcacctcaaagtcagtttcc

SEQ ID NO: 33847 - DNA, 25 bp, Artificial
  Probe
agatatgttctcctcagtggattgc

SEQ ID NO: 33848 - DNA, 25 bp, Artificial
  Probe
acttccactccagtaaattctcatc

SEQ ID NO: 33849 - DNA, 25 bp, Artificial
  Probe
gacttccactccagtaaattctcat

SEQ ID NO: 33850 - DNA, 25 bp, Artificial
  Probe
ttccactccagtaaattctcatcca

SEQ ID NO: 33851 - DNA, 25 bp, Artificial
  Probe
tgacttccactccagtaaattctca

SEQ ID NO: 33852 - DNA, 25 bp, Artificial
  Probe
tccactccagtaaattctcatccac

SEQ ID NO: 33853 - DNA, 25 bp, Artificial
  Probe
ctgacttccactccagtaaattctc

SEQ ID NO: 33854 - DNA, 25 bp, Artificial
  Probe
gcatttagcacctcaaagtcagttt

SEQ ID NO: 33855 - DNA, 25 bp, Artificial
  Probe
tttagcacctcaaagtcagtttcct

SEQ ID NO: 33856 - DNA, 25 bp, Artificial
  Probe
aagtatgaagccctcagagaagaag

SEQ ID NO: 33857 - DNA, 25 bp, Artificial
  Probe
caagtatgaagccctcagagaagaa

SEQ ID NO: 33858 - DNA, 25 bp, Artificial
  Probe
cacctcaaagtcagtttcctcaaga

SEQ ID NO: 33859 - DNA, 25 bp, Artificial
  Probe
ttagcacctcaaagtcagtttcctc

SEQ ID NO: 33860 - DNA, 25 bp, Artificial
  Probe
tcaaagagaacactccttccacaaa

SEQ ID NO: 33861 - DNA, 25 bp, Artificial
  Probe
ttcaaagagaacactccttccacaa

SEQ ID NO: 33862 - DNA, 25 bp, Artificial
  Probe
gacaagtatgaagccctcagagaag

SEQ ID NO: 33863 - DNA, 25 bp, Artificial
  Probe
cagatttcatggctttcggtaacag

SEQ ID NO: 33864 - DNA, 25 bp, Artificial
  Probe
ttgctgacttccactccagtaaatt

SEQ ID NO: 33865 - DNA, 25 bp, Artificial
  Probe
tttgctgacttccactccagtaaat

SEQ ID NO: 33866 - DNA, 25 bp, Artificial
  Probe
aaagtcagtttcctcaagacctcag

SEQ ID NO: 33867 - DNA, 25 bp, Artificial
  Probe
ctcaaagtcagtttcctcaagacct

SEQ ID NO: 33868 - DNA, 25 bp, Artificial
  Probe
gatgacaagtatgaagccctcagag

SEQ ID NO: 33869 - DNA, 25 bp, Artificial
  Probe
atatgttctcctcagtggattgcag

SEQ ID NO: 33870 - DNA, 25 bp, Artificial
  Probe
gatatgttctcctcagtggattgca

SEQ ID NO: 33871 - DNA, 25 bp, Artificial
  Probe
tcaaagtcagtttcctcaagacctc

SEQ ID NO: 33872 - DNA, 25 bp, Artificial
  Probe
ccactccagtaaattctcatccacg

SEQ ID NO: 33873 - DNA, 25 bp, Artificial
  Probe
catccacagaatagacttgaagaca

SEQ ID NO: 33874 - DNA, 25 bp, Artificial
  Probe
cttgtgtagagatgtgactgagaac

SEQ ID NO: 33875 - DNA, 25 bp, Artificial
  Probe
gagcatccacagaatagacttgaag

SEQ ID NO: 33876 - DNA, 25 bp, Artificial
  Probe
cttcttgtgtagagatgtgactgag

SEQ ID NO: 33877 - DNA, 25 bp, Artificial
  Probe
atccacagaatagacttgaagacaa

SEQ ID NO: 33878 - DNA, 25 bp, Artificial
  Probe
tgatgaggatgagaaggagatgatg

SEQ ID NO: 33879 - DNA, 25 bp, Artificial
  Probe
tcttgtgtagagatgtgactgagaa

SEQ ID NO: 33880 - DNA, 25 bp, Artificial
  Probe
ttcttgtgtagagatgtgactgaga

SEQ ID NO: 33881 - DNA, 25 bp, Artificial
  Probe
tcttcttgtgtagagatgtgactga

SEQ ID NO: 33882 - DNA, 25 bp, Artificial
  Probe
gcatccacagaatagacttgaagac

SEQ ID NO: 33883 - DNA, 25 bp, Artificial
  Probe
agagcatccacagaatagacttgaa

SEQ ID NO: 33884 - DNA, 25 bp, Artificial
  Probe
gaagagcatccacagaatagacttg

SEQ ID NO: 33885 - DNA, 25 bp, Artificial
  Probe
agcatccacagaatagacttgaaga

SEQ ID NO: 33886 - DNA, 25 bp, Artificial
  Probe
aagagcatccacagaatagacttga

SEQ ID NO: 33887 - DNA, 25 bp, Artificial
  Probe
tgaagagcatccacagaatagactt

SEQ ID NO: 33888 - DNA, 25 bp, Artificial
  Probe
ttcaatgagtcttctcttgcttcag

SEQ ID NO: 33889 - DNA, 25 bp, Artificial
  Probe
ttgtgtagagatgtgactgagaacc

SEQ ID NO: 33890 - DNA, 25 bp, Artificial
  Probe
tgaaccagttccagagatgtaataa

SEQ ID NO: 33891 - DNA, 25 bp, Artificial
  Probe
catgaaccagttccagagatgtaat

SEQ ID NO: 33892 - DNA, 25 bp, Artificial
  Probe
atgaaccagttccagagatgtaata

SEQ ID NO: 33893 - DNA, 25 bp, Artificial
  Probe
aaggagatgatgctcttcttgtgta

SEQ ID NO: 33894 - DNA, 25 bp, Artificial
  Probe
gtgtagagatgtgactgagaacctg

SEQ ID NO: 33895 - DNA, 25 bp, Artificial
  Probe
ggagatgatgctcttcttgtgtaga

SEQ ID NO: 33896 - DNA, 25 bp, Artificial
  Probe
aggagatgatgctcttcttgtgtag

SEQ ID NO: 33897 - DNA, 25 bp, Artificial
  Probe
gatgaggatgagaaggagatgatgc

SEQ ID NO: 33898 - DNA, 25 bp, Artificial
  Probe
ttgtgacaagaacttacctgtaacc

SEQ ID NO: 33899 - DNA, 25 bp, Artificial
  Probe
aatatgaatgctctccaggcttctc

SEQ ID NO: 33900 - DNA, 25 bp, Artificial
  Probe
tgtgtagagatgtgactgagaacct

SEQ ID NO: 33901 - DNA, 25 bp, Artificial
  Probe
tgaacagagaagtcttagacattgt

SEQ ID NO: 33902 - DNA, 25 bp, Artificial
  Probe
ctgaagagcatccacagaatagact

SEQ ID NO: 33903 - DNA, 25 bp, Artificial
  Probe
ctgaacagagaagtcttagacattg

SEQ ID NO: 33904 - DNA, 25 bp, Artificial
  Probe
tctgaacagagaagtcttagacatt

SEQ ID NO: 33905 - DNA, 25 bp, Artificial
  Probe
atgaggatgagaaggagatgatgct

SEQ ID NO: 33906 - DNA, 25 bp, Artificial
  Probe
gaatatcagcatgaaccagttccag

SEQ ID NO: 33907 - DNA, 25 bp, Artificial
  Probe
aactggagaaactgaatttgattgg

SEQ ID NO: 33908 - DNA, 25 bp, Artificial
  Probe
gtgattgaactggagaaactgaatt

SEQ ID NO: 33909 - DNA, 25 bp, Artificial
  Probe
gaatgtgtgtgacttcttatgatta

SEQ ID NO: 33910 - DNA, 25 bp, Artificial
  Probe
tttggtaaagaatgtgtgtgacttc

SEQ ID NO: 33911 - DNA, 25 bp, Artificial
  Probe
gtttggtaaagaatgtgtgtgactt

SEQ ID NO: 33912 - DNA, 25 bp, Artificial
  Probe
tgtttggtaaagaatgtgtgtgact

SEQ ID NO: 33913 - DNA, 25 bp, Artificial
  Probe
gtgtttggtaaagaatgtgtgtgac

SEQ ID NO: 33914 - DNA, 25 bp, Artificial
  Probe
atgactactgtggaatgctttcttt

SEQ ID NO: 33915 - DNA, 25 bp, Artificial
  Probe
aatatcagcatgaaccagttccaga

SEQ ID NO: 33916 - DNA, 25 bp, Artificial
  Probe
actggagaaactgaatttgattggt

SEQ ID NO: 33917 - DNA, 25 bp, Artificial
  Probe
ggtgattgaactggagaaactgaat

SEQ ID NO: 33918 - DNA, 25 bp, Artificial
  Probe
tatatgagtcttctcttggaggctc

SEQ ID NO: 33919 - DNA, 25 bp, Artificial
  Probe
atatatgagtcttctcttggaggct

SEQ ID NO: 33920 - DNA, 25 bp, Artificial
  Probe
aatatatgagtcttctcttggaggc

SEQ ID NO: 33921 - DNA, 25 bp, Artificial
  Probe
atatgttggactctatccttgtctg

SEQ ID NO: 33922 - DNA, 25 bp, Artificial
  Probe
gtctgaatatgttggactctatcct

SEQ ID NO: 33923 - DNA, 25 bp, Artificial
  Probe
tgaatatgttggactctatccttgt

SEQ ID NO: 33924 - DNA, 25 bp, Artificial
  Probe
aatatgttggactctatccttgtct

SEQ ID NO: 33925 - DNA, 25 bp, Artificial
  Probe
tggaatatatgagtcttctcttgga

SEQ ID NO: 33926 - DNA, 25 bp, Artificial
  Probe
gaatatgttggactctatccttgtc

SEQ ID NO: 33927 - DNA, 25 bp, Artificial
  Probe
ctgaatatgttggactctatccttg

SEQ ID NO: 33928 - DNA, 25 bp, Artificial
  Probe
tatgttggactctatccttgtctgg

SEQ ID NO: 33929 - DNA, 25 bp, Artificial
  Probe
tctgaatatgttggactctatcctt

SEQ ID NO: 33930 - DNA, 25 bp, Artificial
  Probe
atatgagtcttctcttggaggctct

SEQ ID NO: 33931 - DNA, 25 bp, Artificial
  Probe
atcactttggctactctttggtaat

SEQ ID NO: 33932 - DNA, 25 bp, Artificial
  Probe
aatcactttggctactctttggtaa

SEQ ID NO: 33933 - DNA, 25 bp, Artificial
  Probe
aaatcactttggctactctttggta

SEQ ID NO: 33934 - DNA, 25 bp, Artificial
  Probe
actttggctactctttggtaattct

SEQ ID NO: 33935 - DNA, 25 bp, Artificial
  Probe
cactttggctactctttggtaattc

SEQ ID NO: 33936 - DNA, 25 bp, Artificial
  Probe
tcactttggctactctttggtaatt

SEQ ID NO: 33937 - DNA, 25 bp, Artificial
  Probe
taatggaaggtctttctcaatcaca

SEQ ID NO: 33938 - DNA, 25 bp, Artificial
  Probe
tagcaataatggaaggtctttctca

SEQ ID NO: 33939 - DNA, 25 bp, Artificial
  Probe
gctactctttggtaattcttggact

SEQ ID NO: 33940 - DNA, 25 bp, Artificial
  Probe
tttggctactctttggtaattcttg

SEQ ID NO: 33941 - DNA, 25 bp, Artificial
  Probe
gcaataatggaaggtctttctcaat

SEQ ID NO: 33942 - DNA, 25 bp, Artificial
  Probe
agcaataatggaaggtctttctcaa

SEQ ID NO: 33943 - DNA, 25 bp, Artificial
  Probe
gaatatatgagtcttctcttggagg

SEQ ID NO: 33944 - DNA, 25 bp, Artificial
  Probe
ggaatatatgagtcttctcttggag

SEQ ID NO: 33945 - DNA, 25 bp, Artificial
  Probe
ttagttactcttctgggtgctacat

SEQ ID NO: 33946 - DNA, 25 bp, Artificial
  Probe
gtttagttactcttctgggtgctac

SEQ ID NO: 33947 - DNA, 25 bp, Artificial
  Probe
attcagaaatcactttggctactct

SEQ ID NO: 33948 - DNA, 25 bp, Artificial
  Probe
ctttggctactctttggtaattctt

SEQ ID NO: 33949 - DNA, 25 bp, Artificial
  Probe
cagaaatcactttggctactctttg

SEQ ID NO: 33950 - DNA, 25 bp, Artificial
  Probe
tcagaaatcactttggctactcttt

SEQ ID NO: 33951 - DNA, 25 bp, Artificial
  Probe
ttcagaaatcactttggctactctt

SEQ ID NO: 33952 - DNA, 25 bp, Artificial
  Probe
tattcagaaatcactttggctactc

SEQ ID NO: 33953 - DNA, 25 bp, Artificial
  Probe
tttagttactcttctgggtgctaca

SEQ ID NO: 33954 - DNA, 25 bp, Artificial
  Probe
tccattctgtatttatccgagagtt

SEQ ID NO: 33955 - DNA, 25 bp, Artificial
  Probe
ttccattctgtatttatccgagagt

SEQ ID NO: 33956 - DNA, 25 bp, Artificial
  Probe
ttggctactctttggtaattcttgg

SEQ ID NO: 33957 - DNA, 25 bp, Artificial
  Probe
tgtgttgctctcaaagattattcag

SEQ ID NO: 33958 - DNA, 25 bp, Artificial
  Probe
gaaatcactttggctactctttggt

SEQ ID NO: 33959 - DNA, 25 bp, Artificial
  Probe
gtgttgctctcaaagattattcaga

SEQ ID NO: 33960 - DNA, 25 bp, Artificial
  Probe
tagttactcttctgggtgctacatc

SEQ ID NO: 33961 - DNA, 25 bp, Artificial
  Probe
aatggaaggtctttctcaatcacac

SEQ ID NO: 33962 - DNA, 25 bp, Artificial
  Probe
ataatggaaggtctttctcaatcac

SEQ ID NO: 33963 - DNA, 25 bp, Artificial
  Probe
ctttcagtgttatgtcttcctttct

SEQ ID NO: 33964 - DNA, 25 bp, Artificial
  Probe
tatctaaatgcccaagagaagttca

SEQ ID NO: 33965 - DNA, 25 bp, Artificial
  Probe
atctaaatgcccaagagaagttcaa

SEQ ID NO: 33966 - DNA, 25 bp, Artificial
  Probe
tctaaatgcccaagagaagttcaaa

SEQ ID NO: 33967 - DNA, 25 bp, Artificial
  Probe
ttcagtgttatgtcttcctttcttt

SEQ ID NO: 33968 - DNA, 25 bp, Artificial
  Probe
tttcagtgttatgtcttcctttctt

SEQ ID NO: 33969 - DNA, 25 bp, Artificial
  Probe
actttcagtgttatgtcttcctttc

SEQ ID NO: 33970 - DNA, 25 bp, Artificial
  Probe
atatctaaatgcccaagagaagttc

SEQ ID NO: 33971 - DNA, 25 bp, Artificial
  Probe
aactttcagtgttatgtcttccttt

SEQ ID NO: 33972 - DNA, 25 bp, Artificial
  Probe
tcagtgttatgtcttcctttcttta

SEQ ID NO: 33973 - DNA, 25 bp, Artificial
  Probe
agagtctccctcagtcttaaataaa

SEQ ID NO: 33974 - DNA, 25 bp, Artificial
  Probe
gagtctccctcagtcttaaataaag

SEQ ID NO: 33975 - DNA, 25 bp, Artificial
  Probe
agagagtctccctcagtcttaaata

SEQ ID NO: 33976 - DNA, 25 bp, Artificial
  Probe
ttatgattcttgctgattgtcaaag

SEQ ID NO: 33977 - DNA, 25 bp, Artificial
  Probe
gagagtctccctcagtcttaaataa

SEQ ID NO: 33978 - DNA, 25 bp, Artificial
  Probe
tatatctaaatgcccaagagaagtt

SEQ ID NO: 33979 - DNA, 25 bp, Artificial
  Probe
tttatgattcttgctgattgtcaaa

SEQ ID NO: 33980 - DNA, 25 bp, Artificial
  Probe
cagtgttatgtcttcctttctttaa

SEQ ID NO: 33981 - DNA, 25 bp, Artificial
  Probe
atttatgattcttgctgattgtcaa

SEQ ID NO: 33982 - DNA, 25 bp, Artificial
  Probe
aatttatgattcttgctgattgtca

SEQ ID NO: 33983 - DNA, 25 bp, Artificial
  Probe
cgaatttatgattcttgctgattgt

SEQ ID NO: 33984 - DNA, 25 bp, Artificial
  Probe
taactttcagtgttatgtcttcctt

SEQ ID NO: 33985 - DNA, 25 bp, Artificial
  Probe
tatgattcttgctgattgtcaaagc

SEQ ID NO: 33986 - DNA, 25 bp, Artificial
  Probe
taaatgcccaagagaagttcaaaag

SEQ ID NO: 33987 - DNA, 25 bp, Artificial
  Probe
ctaaatgcccaagagaagttcaaaa

SEQ ID NO: 33988 - DNA, 25 bp, Artificial
  Probe
atatatctaaatgcccaagagaagt

SEQ ID NO: 33989 - DNA, 25 bp, Artificial
  Probe
catgatagagccctatagcctactc

SEQ ID NO: 33990 - DNA, 25 bp, Artificial
  Probe
agtctccctcagtcttaaataaaga

SEQ ID NO: 33991 - DNA, 25 bp, Artificial
  Probe
aaatgcccaagagaagttcaaaaga

SEQ ID NO: 33992 - DNA, 25 bp, Artificial
  Probe
tgtcaaagcagaaaagaaatactct

SEQ ID NO: 33993 - DNA, 25 bp, Artificial
  Probe
ttgtcaaagcagaaaagaaatactc

SEQ ID NO: 33994 - DNA, 25 bp, Artificial
  Probe
aatgcccaagagaagttcaaaagac

SEQ ID NO: 33995 - DNA, 25 bp, Artificial
  Probe
tcaccttgttcagacagatgtcctc

SEQ ID NO: 33996 - DNA, 25 bp, Artificial
  Probe
gaatttatgattcttgctgattgtc

SEQ ID NO: 33997 - DNA, 25 bp, Artificial
  Probe
attgtcaaagcagaaaagaaatact

SEQ ID NO: 33998 - DNA, 25 bp, Artificial
  Probe
ctgattgtcaaagcagaaaagaaat

SEQ ID NO: 33999 - DNA, 25 bp, Artificial
  Probe
gtcaccttgttcagacagatgtcct

SEQ ID NO: 34000 - DNA, 25 bp, Artificial
  Probe
agtgttatgtcttcctttctttaaa

SEQ ID NO: 34001 - DNA, 25 bp, Artificial
  Probe
gattgtcaaagcagaaaagaaatac

SEQ ID NO: 34002 - DNA, 25 bp, Artificial
  Probe
gagagagtctccctcagtcttaaat

SEQ ID NO: 34003 - DNA, 25 bp, Artificial
  Probe
atattttagaagctctggcgtacat

SEQ ID NO: 34004 - DNA, 25 bp, Artificial
  Probe
aagatattttagaagctctggcgta

SEQ ID NO: 34005 - DNA, 25 bp, Artificial
  Probe
accattaaaggatttaacacattgt

SEQ ID NO: 34006 - DNA, 25 bp, Artificial
  Probe
agatattttagaagctctggcgtac

SEQ ID NO: 34007 - DNA, 25 bp, Artificial
  Probe
aaagatattttagaagctctggcgt

SEQ ID NO: 34008 - DNA, 25 bp, Artificial
  Probe
tttaactttgataatgtgttgccca

SEQ ID NO: 34009 - DNA, 25 bp, Artificial
  Probe
ttaactttgataatgtgttgcccaa

SEQ ID NO: 34010 - DNA, 25 bp, Artificial
  Probe
gagttagtgagcaggcaacatttaa

SEQ ID NO: 34011 - DNA, 25 bp, Artificial
  Probe
taactttgataatgtgttgcccaac

SEQ ID NO: 34012 - DNA, 25 bp, Artificial
  Probe
aagtgacttggatggcatgtttatt

SEQ ID NO: 34013 - DNA, 25 bp, Artificial
  Probe
tgacttggatggcatgtttattgag

SEQ ID NO: 34014 - DNA, 25 bp, Artificial
  Probe
gtgacttggatggcatgtttattga

SEQ ID NO: 34015 - DNA, 25 bp, Artificial
  Probe
agtgacttggatggcatgtttattg

SEQ ID NO: 34016 - DNA, 25 bp, Artificial
  Probe
taggagttagtgagcaggcaacatt

SEQ ID NO: 34017 - DNA, 25 bp, Artificial
  Probe
agttagtgagcaggcaacatttaaa

SEQ ID NO: 34018 - DNA, 25 bp, Artificial
  Probe
cacagcaaacttcttcagtcaatgg

SEQ ID NO: 34019 - DNA, 25 bp, Artificial
  Probe
ggagttagtgagcaggcaacattta

SEQ ID NO: 34020 - DNA, 25 bp, Artificial
  Probe
gacttggatggcatgtttattgagc

SEQ ID NO: 34021 - DNA, 25 bp, Artificial
  Probe
ctaggagttagtgagcaggcaacat

SEQ ID NO: 34022 - DNA, 25 bp, Artificial
  Probe
ttgataatgtgttgcccaaccaaag

SEQ ID NO: 34023 - DNA, 25 bp, Artificial
  Probe
ctttgataatgtgttgcccaaccaa

SEQ ID NO: 34024 - DNA, 25 bp, Artificial
  Probe
aactttgataatgtgttgcccaacc

SEQ ID NO: 34025 - DNA, 25 bp, Artificial
  Probe
ctcatggacggagataccttggatt

SEQ ID NO: 34026 - DNA, 25 bp, Artificial
  Probe
acccctccttttagttttcttgatt

SEQ ID NO: 34027 - DNA, 25 bp, Artificial
  Probe
acggagataccttggattttaactt

SEQ ID NO: 34028 - DNA, 25 bp, Artificial
  Probe
gacggagataccttggattttaact

SEQ ID NO: 34029 - DNA, 25 bp, Artificial
  Probe
cttcacccctccttttagttttctt

SEQ ID NO: 34030 - DNA, 25 bp, Artificial
  Probe
cacccctccttttagttttcttgat

SEQ ID NO: 34031 - DNA, 25 bp, Artificial
  Probe
ttcacccctccttttagttttcttg

SEQ ID NO: 34032 - DNA, 25 bp, Artificial
  Probe
cggagataccttggattttaacttt

SEQ ID NO: 34033 - DNA, 25 bp, Artificial
  Probe
cataacaaaatgatgaaccccagtt

SEQ ID NO: 34034 - DNA, 25 bp, Artificial
  Probe
atggacggagataccttggatttta

SEQ ID NO: 34035 - DNA, 25 bp, Artificial
  Probe
ggacggagataccttggattttaac

SEQ ID NO: 34036 - DNA, 25 bp, Artificial
  Probe
cccctccttttagttttcttgatta

SEQ ID NO: 34037 - DNA, 25 bp, Artificial
  Probe
gcacagcaaacttcttcagtcaatg

SEQ ID NO: 34038 - DNA, 25 bp, Artificial
  Probe
tggacggagataccttggattttaa

SEQ ID NO: 34039 - DNA, 25 bp, Artificial
  Probe
tcatggacggagataccttggattt

SEQ ID NO: 34040 - DNA, 25 bp, Artificial
  Probe
ttttaactttgataatgtgttgccc

SEQ ID NO: 34041 - DNA, 25 bp, Artificial
  Probe
ggagataccttggattttaactttg

SEQ ID NO: 34042 - DNA, 25 bp, Artificial
  Probe
actttgataatgtgttgcccaacca

SEQ ID NO: 34043 - DNA, 25 bp, Artificial
  Probe
tcacccctccttttagttttcttga

SEQ ID NO: 34044 - DNA, 25 bp, Artificial
  Probe
ccttcacccctccttttagttttct

SEQ ID NO: 34045 - DNA, 25 bp, Artificial
  Probe
cccagtgaagacacctttacaagtg

SEQ ID NO: 34046 - DNA, 25 bp, Artificial
  Probe
tttgataatgtgttgcccaaccaaa

SEQ ID NO: 34047 - DNA, 25 bp, Artificial
  Probe
ggcaacatttaaaagtccttcagat

SEQ ID NO: 34048 - DNA, 25 bp, Artificial
  Probe
ttagtgagcaggcaacatttaaaag

SEQ ID NO: 34049 - DNA, 25 bp, Artificial
  Probe
gaagacacctttacaagtgcctctg

SEQ ID NO: 34050 - DNA, 25 bp, Artificial
  Probe
tagtgagcaggcaacatttaaaagt

SEQ ID NO: 34051 - DNA, 25 bp, Artificial
  Probe
gttagtgagcaggcaacatttaaaa

SEQ ID NO: 34052 - DNA, 25 bp, Artificial
  Probe
cctaactcagtcatgccagcctatg

SEQ ID NO: 34053 - DNA, 25 bp, Artificial
  Probe
gtacattgactttaggaaggacctg

SEQ ID NO: 34054 - DNA, 25 bp, Artificial
  Probe
tacattgactttaggaaggacctgg

SEQ ID NO: 34055 - DNA, 25 bp, Artificial
  Probe
attgactttaggaaggacctgggtt

SEQ ID NO: 34056 - DNA, 25 bp, Artificial
  Probe
ctgtacattgactttaggaaggacc

SEQ ID NO: 34057 - DNA, 25 bp, Artificial
  Probe
gctgtacattgactttaggaaggac

SEQ ID NO: 34058 - DNA, 25 bp, Artificial
  Probe
agctgtacattgactttaggaagga

SEQ ID NO: 34059 - DNA, 25 bp, Artificial
  Probe
acattgactttaggaaggacctggg

SEQ ID NO: 34060 - DNA, 25 bp, Artificial
  Probe
cattgactttaggaaggacctgggt

SEQ ID NO: 34061 - DNA, 25 bp, Artificial
  Probe
tgtacattgactttaggaaggacct

SEQ ID NO: 34062 - DNA, 25 bp, Artificial
  Probe
ttgactttaggaaggacctgggttg

SEQ ID NO: 34063 - DNA, 25 bp, Artificial
  Probe
ctttaggaaggacctgggttggaag

SEQ ID NO: 34064 - DNA, 25 bp, Artificial
  Probe
tttaggaaggacctgggttggaagt

SEQ ID NO: 34065 - DNA, 25 bp, Artificial
  Probe
actttaggaaggacctgggttggaa

SEQ ID NO: 34066 - DNA, 25 bp, Artificial
  Probe
ctgtatttaaggacacctgcacccc

SEQ ID NO: 34067 - DNA, 25 bp, Artificial
  Probe
aaggatgtcattgagcagtattcag

SEQ ID NO: 34068 - DNA, 25 bp, Artificial
  Probe
gaaggatgtcattgagcagtattca

SEQ ID NO: 34069 - DNA, 25 bp, Artificial
  Probe
tgaaggatgtcattgagcagtattc

SEQ ID NO: 34070 - DNA, 25 bp, Artificial
  Probe
gtgaaggatgtcattgagcagtatt

SEQ ID NO: 34071 - DNA, 25 bp, Artificial
  Probe
gatgtcattgagcagtattcagcag

SEQ ID NO: 34072 - DNA, 25 bp, Artificial
  Probe
tgtgaaggatgtcattgagcagtat

SEQ ID NO: 34073 - DNA, 25 bp, Artificial
  Probe
atgtgaaggatgtcattgagcagta

SEQ ID NO: 34074 - DNA, 25 bp, Artificial
  Probe
aggatgtcattgagcagtattcagc

SEQ ID NO: 34075 - DNA, 25 bp, Artificial
  Probe
atgtcattgagcagtattcagcagg

SEQ ID NO: 34076 - DNA, 25 bp, Artificial
  Probe
ggatgtcattgagcagtattcagca

SEQ ID NO: 34077 - DNA, 25 bp, Artificial
  Probe
gatgtgaaggatgtcattgagcagt

SEQ ID NO: 34078 - DNA, 25 bp, Artificial
  Probe
tgatgtgaaggatgtcattgagcag

SEQ ID NO: 34079 - DNA, 25 bp, Artificial
  Probe
tatgatgtgaaggatgtcattgagc

SEQ ID NO: 34080 - DNA, 25 bp, Artificial
  Probe
atatgatgtgaaggatgtcattgag

SEQ ID NO: 34081 - DNA, 25 bp, Artificial
  Probe
gtcattgagcagtattcagcaggac

SEQ ID NO: 34082 - DNA, 25 bp, Artificial
  Probe
cattgagcagtattcagcaggacac

SEQ ID NO: 34083 - DNA, 25 bp, Artificial
  Probe
atgatgtgaaggatgtcattgagca

SEQ ID NO: 34084 - DNA, 25 bp, Artificial
  Probe
tcattgagcagtattcagcaggaca

SEQ ID NO: 34085 - DNA, 25 bp, Artificial
  Probe
tgtcattgagcagtattcagcagga

SEQ ID NO: 34086 - DNA, 25 bp, Artificial
  Probe
ccatatgatgtgaaggatgtcattg

SEQ ID NO: 34087 - DNA, 25 bp, Artificial
  Probe
catatgatgtgaaggatgtcattga

SEQ ID NO: 34088 - DNA, 25 bp, Artificial
  Probe
gccatatgatgtgaaggatgtcatt

SEQ ID NO: 34089 - DNA, 25 bp, Artificial
  Probe
tagccaaaaggaaattcaaggagac

SEQ ID NO: 34090 - DNA, 25 bp, Artificial
  Probe
gtagccaaaaggaaattcaaggaga

SEQ ID NO: 34091 - DNA, 25 bp, Artificial
  Probe
gattctgaagttcctggtagccaaa

SEQ ID NO: 34092 - DNA, 25 bp, Artificial
  Probe
ggtagccaaaaggaaattcaaggag

SEQ ID NO: 34093 - DNA, 25 bp, Artificial
  Probe
ggattctgaagttcctggtagccaa

SEQ ID NO: 34094 - DNA, 25 bp, Artificial
  Probe
attgagcagtattcagcaggacacc

SEQ ID NO: 34095 - DNA, 25 bp, Artificial
  Probe
gttctgtcaggattctgaagttcct

SEQ ID NO: 34096 - DNA, 25 bp, Artificial
  Probe
caaaaggaaattcaaggagacgctg

SEQ ID NO: 34097 - DNA, 25 bp, Artificial
  Probe
catccgttctgtcaggattctgaag

SEQ ID NO: 34098 - DNA, 25 bp, Artificial
  Probe
tgagcttacggtggatgatgtcatg

SEQ ID NO: 34099 - DNA, 25 bp, Artificial
  Probe
gtgagcttacggtggatgatgtcat

SEQ ID NO: 34100 - DNA, 25 bp, Artificial
  Probe
ggccatatgatgtgaaggatgtcat

SEQ ID NO: 34101 - DNA, 25 bp, Artificial
  Probe
cgttctgtcaggattctgaagttcc

SEQ ID NO: 34102 - DNA, 25 bp, Artificial
  Probe
ccgttctgtcaggattctgaagttc

SEQ ID NO: 34103 - DNA, 25 bp, Artificial
  Probe
atccgttctgtcaggattctgaagt

SEQ ID NO: 34104 - DNA, 25 bp, Artificial
  Probe
tcatccgttctgtcaggattctgaa

SEQ ID NO: 34105 - DNA, 25 bp, Artificial
  Probe
ctggtagccaaaaggaaattcaagg

SEQ ID NO: 34106 - DNA, 25 bp, Artificial
  Probe
cctggtagccaaaaggaaattcaag

SEQ ID NO: 34107 - DNA, 25 bp, Artificial
  Probe
attctgaagttcctggtagccaaaa

SEQ ID NO: 34108 - DNA, 25 bp, Artificial
  Probe
aatccgcataagcatctcccagaag

SEQ ID NO: 34109 - DNA, 25 bp, Artificial
  Probe
gaatccgcataagcatctcccagaa

SEQ ID NO: 34110 - DNA, 25 bp, Artificial
  Probe
tccgttctgtcaggattctgaagtt

SEQ ID NO: 34111 - DNA, 25 bp, Artificial
  Probe
tggtagccaaaaggaaattcaagga

SEQ ID NO: 34112 - DNA, 25 bp, Artificial
  Probe
ccacaagaatgagttgatgcttaac

SEQ ID NO: 34113 - DNA, 25 bp, Artificial
  Probe
cccacaagaatgagttgatgcttaa

SEQ ID NO: 34114 - DNA, 25 bp, Artificial
  Probe
cacaagaatgagttgatgcttaact

SEQ ID NO: 34115 - DNA, 25 bp, Artificial
  Probe
ctgtgtagaagacaaacctggaatc

SEQ ID NO: 34116 - DNA, 25 bp, Artificial
  Probe
gttgatgcttaactccagccttatg

SEQ ID NO: 34117 - DNA, 25 bp, Artificial
  Probe
tctgtgtagaagacaaacctggaat

SEQ ID NO: 34118 - DNA, 25 bp, Artificial
  Probe
gaagaggtggagttctgtgtagaag

SEQ ID NO: 34119 - DNA, 25 bp, Artificial
  Probe
aagaggtggagttctgtgtagaaga

SEQ ID NO: 34120 - DNA, 25 bp, Artificial
  Probe
agttgatgcttaactccagccttat

SEQ ID NO: 34121 - DNA, 25 bp, Artificial
  Probe
ctggaagaggtggagttctgtgtag

SEQ ID NO: 34122 - DNA, 25 bp, Artificial
  Probe
tgtgtagaagacaaacctggaatcc

SEQ ID NO: 34123 - DNA, 25 bp, Artificial
  Probe
gtacttgaaaggcaaagatgtggtg

SEQ ID NO: 34124 - DNA, 25 bp, Artificial
  Probe
aggtggagttctgtgtagaagacaa

SEQ ID NO: 34125 - DNA, 25 bp, Artificial
  Probe
gagttctgtgtagaagacaaacctg

SEQ ID NO: 34126 - DNA, 25 bp, Artificial
  Probe
tggaagaggtggagttctgtgtaga

SEQ ID NO: 34127 - DNA, 25 bp, Artificial
  Probe
gtggagttctgtgtagaagacaaac

SEQ ID NO: 34128 - DNA, 25 bp, Artificial
  Probe
agaggtggagttctgtgtagaagac

SEQ ID NO: 34129 - DNA, 25 bp, Artificial
  Probe
tagaagacaaacctggaatccactt

SEQ ID NO: 34130 - DNA, 25 bp, Artificial
  Probe
ttctgtgtagaagacaaacctggaa

SEQ ID NO: 34131 - DNA, 25 bp, Artificial
  Probe
ttgatgcttaactccagccttatgc

SEQ ID NO: 34132 - DNA, 25 bp, Artificial
  Probe
tacttgaaaggcaaagatgtggtgg

SEQ ID NO: 34133 - DNA, 25 bp, Artificial
  Probe
gaggtggagttctgtgtagaagaca

SEQ ID NO: 34134 - DNA, 25 bp, Artificial
  Probe
ggaagaggtggagttctgtgtagaa

SEQ ID NO: 34135 - DNA, 25 bp, Artificial
  Probe
gcccacaagaatgagttgatgctta

SEQ ID NO: 34136 - DNA, 25 bp, Artificial
  Probe
ggagttctgtgtagaagacaaacct

SEQ ID NO: 34137 - DNA, 25 bp, Artificial
  Probe
gatggtggcaacaaggtggtaattg

SEQ ID NO: 34138 - DNA, 25 bp, Artificial
  Probe
gtagaagacaaacctggaatccact

SEQ ID NO: 34139 - DNA, 25 bp, Artificial
  Probe
ggtacttgaaaggcaaagatgtggt

SEQ ID NO: 34140 - DNA, 25 bp, Artificial
  Probe
gttctgtgtagaagacaaacctgga

SEQ ID NO: 34141 - DNA, 25 bp, Artificial
  Probe
agttctgtgtagaagacaaacctgg

SEQ ID NO: 34142 - DNA, 25 bp, Artificial
  Probe
tggagttctgtgtagaagacaaacc

SEQ ID NO: 34143 - DNA, 25 bp, Artificial
  Probe
ggtggagttctgtgtagaagacaaa

SEQ ID NO: 34144 - DNA, 25 bp, Artificial
  Probe
tgtagaagacaaacctggaatccac

SEQ ID NO: 34145 - DNA, 25 bp, Artificial
  Probe
gtgtagaagacaaacctggaatcca

SEQ ID NO: 34146 - DNA, 25 bp, Artificial
  Probe
cttaactccagccttatgcggatca

SEQ ID NO: 34147 - DNA, 25 bp, Artificial
  Probe
aacaaggtggtaattggtggctttg

SEQ ID NO: 34148 - DNA, 25 bp, Artificial
  Probe
caacaaggtggtaattggtggcttt

SEQ ID NO: 34149 - DNA, 25 bp, Artificial
  Probe
aagacaaacctggaatccacttcac

SEQ ID NO: 34150 - DNA, 25 bp, Artificial
  Probe
ttaactccagccttatgcggatcac

SEQ ID NO: 34151 - DNA, 25 bp, Artificial
  Probe
cggtacttgaaaggcaaagatgtgg

SEQ ID NO: 34152 - DNA, 25 bp, Artificial
  Probe
agaagacaaacctggaatccacttc

SEQ ID NO: 34153 - DNA, 25 bp, Artificial
  Probe
gaagacaaacctggaatccacttca

SEQ ID NO: 34154 - DNA, 25 bp, Artificial
  Probe
gacaaacctggaatccacttcacac

SEQ ID NO: 34155 - DNA, 25 bp, Artificial
  Probe
agacaaacctggaatccacttcaca

SEQ ID NO: 34156 - DNA, 25 bp, Artificial
  Probe
tccactggggacactagaatctttt

SEQ ID NO: 34157 - DNA, 25 bp, Artificial
  Probe
ggaggttacttggatgaatatgact

SEQ ID NO: 34158 - DNA, 25 bp, Artificial
  Probe
aggaggttacttggatgaatatgac

SEQ ID NO: 34159 - DNA, 25 bp, Artificial
  Probe
tggatgaatatgactgaaggatgtt

SEQ ID NO: 34160 - DNA, 25 bp, Artificial
  Probe
ttggatgaatatgactgaaggatgt

SEQ ID NO: 34161 - DNA, 25 bp, Artificial
  Probe
cacatacacacacacacacacatac

SEQ ID NO: 34162 - DNA, 25 bp, Artificial
  Probe
aggttacttggatgaatatgactga

SEQ ID NO: 34163 - DNA, 25 bp, Artificial
  Probe
acttggatgaatatgactgaaggat

SEQ ID NO: 34164 - DNA, 25 bp, Artificial
  Probe
gaggttacttggatgaatatgactg

SEQ ID NO: 34165 - DNA, 25 bp, Artificial
  Probe
cttggatgaatatgactgaaggatg

SEQ ID NO: 34166 - DNA, 25 bp, Artificial
  Probe
aaggaggttacttggatgaatatga

SEQ ID NO: 34167 - DNA, 25 bp, Artificial
  Probe
tatacacacacacactcacacactc

SEQ ID NO: 34168 - DNA, 25 bp, Artificial
  Probe
tacttggatgaatatgactgaagga

SEQ ID NO: 34169 - DNA, 25 bp, Artificial
  Probe
ggttacttggatgaatatgactgaa

SEQ ID NO: 34170 - DNA, 25 bp, Artificial
  Probe
acacatacacacacacacacacata

SEQ ID NO: 34171 - DNA, 25 bp, Artificial
  Probe
ggatgaatatgactgaaggatgtta

SEQ ID NO: 34172 - DNA, 25 bp, Artificial
  Probe
ttacttggatgaatatgactgaagg

SEQ ID NO: 34173 - DNA, 25 bp, Artificial
  Probe
tgaatatgactgaaggatgttatgt

SEQ ID NO: 34174 - DNA, 25 bp, Artificial
  Probe
ccattaacagaggactagcaaggaa

SEQ ID NO: 34175 - DNA, 25 bp, Artificial
  Probe
gttacttggatgaatatgactgaag

SEQ ID NO: 34176 - DNA, 25 bp, Artificial
  Probe
ctctatgggtaatgtgcctgataat

SEQ ID NO: 34177 - DNA, 25 bp, Artificial
  Probe
ctatgtaagcagaaaggtgtggtat

SEQ ID NO: 34178 - DNA, 25 bp, Artificial
  Probe
agaaaggtgtggtatgtttgtaatg

SEQ ID NO: 34179 - DNA, 25 bp, Artificial
  Probe
cagaaaggtgtggtatgtttgtaat

SEQ ID NO: 34180 - DNA, 25 bp, Artificial
  Probe
tatgtaagcagaaaggtgtggtatg

SEQ ID NO: 34181 - DNA, 25 bp, Artificial
  Probe
acacatacccattaacagaggacta

SEQ ID NO: 34182 - DNA, 25 bp, Artificial
  Probe
gaaaggtgtggtatgtttgtaatgc

SEQ ID NO: 34183 - DNA, 25 bp, Artificial
  Probe
actctatgggtaatgtgcctgataa

SEQ ID NO: 34184 - DNA, 25 bp, Artificial
  Probe
ctgtcacaaaggaaagcatttagtc

SEQ ID NO: 34185 - DNA, 25 bp, Artificial
  Probe
ctatgggtaatgtgcctgataatac

SEQ ID NO: 34186 - DNA, 25 bp, Artificial
  Probe
tctatgggtaatgtgcctgataata

SEQ ID NO: 34187 - DNA, 25 bp, Artificial
  Probe
cacatacccattaacagaggactag

SEQ ID NO: 34188 - DNA, 25 bp, Artificial
  Probe
cattaacagaggactagcaaggaaa

SEQ ID NO: 34189 - DNA, 25 bp, Artificial
  Probe
tattctaccaactggagtattgtac

SEQ ID NO: 34190 - DNA, 25 bp, Artificial
  Probe
acaaaggaggttacttggatgaata

SEQ ID NO: 34191 - DNA, 25 bp, Artificial
  Probe
taagcagaaaggtgtggtatgtttg

SEQ ID NO: 34192 - DNA, 25 bp, Artificial
  Probe
gtaagcagaaaggtgtggtatgttt

SEQ ID NO: 34193 - DNA, 25 bp, Artificial
  Probe
gacaaaggaggttacttggatgaat

SEQ ID NO: 34194 - DNA, 25 bp, Artificial
  Probe
atacccattaacagaggactagcaa

SEQ ID NO: 34195 - DNA, 25 bp, Artificial
  Probe
acatacacacacacacacacatacc

SEQ ID NO: 34196 - DNA, 25 bp, Artificial
  Probe
cacacacacatacccattaacagag

SEQ ID NO: 34197 - DNA, 25 bp, Artificial
  Probe
gcagaaaggtgtggtatgtttgtaa

SEQ ID NO: 34198 - DNA, 25 bp, Artificial
  Probe
aaatgccgtactgaaacactatgat

SEQ ID NO: 34199 - DNA, 25 bp, Artificial
  Probe
aaaggaggttacttggatgaatatg

SEQ ID NO: 34200 - DNA, 25 bp, Artificial
  Probe
atgaatatgactgaaggatgttatg

SEQ ID NO: 34201 - DNA, 25 bp, Artificial
  Probe
gtatacacacacacactcacacact

SEQ ID NO: 34202 - DNA, 25 bp, Artificial
  Probe
ttcttcacatccaaccatttccaaa

SEQ ID NO: 34203 - DNA, 25 bp, Artificial
  Probe
tcttcacatccaaccatttccaaag

SEQ ID NO: 34204 - DNA, 25 bp, Artificial
  Probe
gttcttcacatccaaccatttccaa

SEQ ID NO: 34205 - DNA, 25 bp, Artificial
  Probe
catgcttagcttatttgaccaaaga

SEQ ID NO: 34206 - DNA, 25 bp, Artificial
  Probe
atgcttagcttatttgaccaaagag

SEQ ID NO: 34207 - DNA, 25 bp, Artificial
  Probe
cttcacatccaaccatttccaaagc

SEQ ID NO: 34208 - DNA, 25 bp, Artificial
  Probe
ttcacatccaaccatttccaaagcc

SEQ ID NO: 34209 - DNA, 25 bp, Artificial
  Probe
tgcttagcttatttgaccaaagagc

SEQ ID NO: 34210 - DNA, 25 bp, Artificial
  Probe
cttagcttatttgaccaaagagccc

SEQ ID NO: 34211 - DNA, 25 bp, Artificial
  Probe
ttagcttatttgaccaaagagccct

SEQ ID NO: 34212 - DNA, 25 bp, Artificial
  Probe
cctcaaaacctgcatcaataaaaca

SEQ ID NO: 34213 - DNA, 25 bp, Artificial
  Probe
ctcaaaacctgcatcaataaaacaa

SEQ ID NO: 34214 - DNA, 25 bp, Artificial
  Probe
gcttagcttatttgaccaaagagcc

SEQ ID NO: 34215 - DNA, 25 bp, Artificial
  Probe
tagcttatttgaccaaagagccctc

SEQ ID NO: 34216 - DNA, 25 bp, Artificial
  Probe
tcaaaacctgcatcaataaaacaaa

SEQ ID NO: 34217 - DNA, 25 bp, Artificial
  Probe
gcctcaaaacctgcatcaataaaac

SEQ ID NO: 34218 - DNA, 25 bp, Artificial
  Probe
caaaacctgcatcaataaaacaaaa

SEQ ID NO: 34219 - DNA, 25 bp, Artificial
  Probe
gcttatttgaccaaagagccctctt

SEQ ID NO: 34220 - DNA, 25 bp, Artificial
  Probe
agcttatttgaccaaagagccctct

SEQ ID NO: 34221 - DNA, 25 bp, Artificial
  Probe
gagaggagtccaatggttgccaaat

SEQ ID NO: 34222 - DNA, 25 bp, Artificial
  Probe
tgcctcaaaacctgcatcaataaaa

SEQ ID NO: 34223 - DNA, 25 bp, Artificial
  Probe
ggttcttcacatccaaccatttcca

SEQ ID NO: 34224 - DNA, 25 bp, Artificial
  Probe
gtgcctcaaaacctgcatcaataaa

SEQ ID NO: 34225 - DNA, 25 bp, Artificial
  Probe
catccaaggctttctgtcttgcttc

SEQ ID NO: 34226 - DNA, 25 bp, Artificial
  Probe
cttatttgaccaaagagccctcttt

SEQ ID NO: 34227 - DNA, 25 bp, Artificial
  Probe
tgtgcctcaaaacctgcatcaataa

SEQ ID NO: 34228 - DNA, 25 bp, Artificial
  Probe
ctgtgcctcaaaacctgcatcaata

SEQ ID NO: 34229 - DNA, 25 bp, Artificial
  Probe
ctcttttgttccacggaattgcaac

SEQ ID NO: 34230 - DNA, 25 bp, Artificial
  Probe
ttatttgaccaaagagccctctttt

SEQ ID NO: 34231 - DNA, 25 bp, Artificial
  Probe
tatttgaccaaagagccctcttttg

SEQ ID NO: 34232 - DNA, 25 bp, Artificial
  Probe
ctctggattaccccagtgagaatct

SEQ ID NO: 34233 - DNA, 25 bp, Artificial
  Probe
gatcctgtttggcctagcctacttc

SEQ ID NO: 34234 - DNA, 25 bp, Artificial
  Probe
tctggattaccccagtgagaatctg

SEQ ID NO: 34235 - DNA, 25 bp, Artificial
  Probe
cctcttttgttccacggaattgcaa

SEQ ID NO: 34236 - DNA, 25 bp, Artificial
  Probe
tcttttgttccacggaattgcaacc

SEQ ID NO: 34237 - DNA, 25 bp, Artificial
  Probe
atttgaccaaagagccctcttttgt

SEQ ID NO: 34238 - DNA, 25 bp, Artificial
  Probe
tttgaccaaagagccctcttttgtt

SEQ ID NO: 34239 - DNA, 25 bp, Artificial
  Probe
ctggattaccccagtgagaatctgg

SEQ ID NO: 34240 - DNA, 25 bp, Artificial
  Probe
ttgaccaaagagccctcttttgttc

SEQ ID NO: 34241 - DNA, 25 bp, Artificial
  Probe
gctctggattaccccagtgagaatc

SEQ ID NO: 34242 - DNA, 25 bp, Artificial
  Probe
agctctggattaccccagtgagaat

SEQ ID NO: 34243 - DNA, 25 bp, Artificial
  Probe
gtcagtagaggcttaaccacaacaa

SEQ ID NO: 34244 - DNA, 25 bp, Artificial
  Probe
agtagaggcttaaccacaacaaatg

SEQ ID NO: 34245 - DNA, 25 bp, Artificial
  Probe
cagtagaggcttaaccacaacaaat

SEQ ID NO: 34246 - DNA, 25 bp, Artificial
  Probe
tcagtagaggcttaaccacaacaaa

SEQ ID NO: 34247 - DNA, 25 bp, Artificial
  Probe
aattagatgctgggaaggaagactc

SEQ ID NO: 34248 - DNA, 25 bp, Artificial
  Probe
taattagatgctgggaaggaagact

SEQ ID NO: 34249 - DNA, 25 bp, Artificial
  Probe
taggtcagtagaggcttaaccacaa

SEQ ID NO: 34250 - DNA, 25 bp, Artificial
  Probe
gtatctcccaagattaaccttcact

SEQ ID NO: 34251 - DNA, 25 bp, Artificial
  Probe
tttcctgttcatacatttgtgctgc

SEQ ID NO: 34252 - DNA, 25 bp, Artificial
  Probe
tatctcccaagattaaccttcactt

SEQ ID NO: 34253 - DNA, 25 bp, Artificial
  Probe
aggtcagtagaggcttaaccacaac

SEQ ID NO: 34254 - DNA, 25 bp, Artificial
  Probe
ttttcctgttcatacatttgtgctg

SEQ ID NO: 34255 - DNA, 25 bp, Artificial
  Probe
ggtcagtagaggcttaaccacaaca

SEQ ID NO: 34256 - DNA, 25 bp, Artificial
  Probe
ctgttcatacatttgtgctgcccat

SEQ ID NO: 34257 - DNA, 25 bp, Artificial
  Probe
ttcctgttcatacatttgtgctgcc

SEQ ID NO: 34258 - DNA, 25 bp, Artificial
  Probe
ctaattagatgctgggaaggaagac

SEQ ID NO: 34259 - DNA, 25 bp, Artificial
  Probe
tgttcatacatttgtgctgcccatg

SEQ ID NO: 34260 - DNA, 25 bp, Artificial
  Probe
cctaattagatgctgggaaggaaga

SEQ ID NO: 34261 - DNA, 25 bp, Artificial
  Probe
acatttgtgctgcccatgtatcttg

SEQ ID NO: 34262 - DNA, 25 bp, Artificial
  Probe
catttgtgctgcccatgtatcttgg

SEQ ID NO: 34263 - DNA, 25 bp, Artificial
  Probe
tacatttgtgctgcccatgtatctt

SEQ ID NO: 34264 - DNA, 25 bp, Artificial
  Probe
gttcatacatttgtgctgcccatgt

SEQ ID NO: 34265 - DNA, 25 bp, Artificial
  Probe
aaataactgtatgtgtgattctttt

SEQ ID NO: 34266 - DNA, 25 bp, Artificial
  Probe
aaaataactgtatgtgtgattcttt

SEQ ID NO: 34267 - DNA, 25 bp, Artificial
  Probe
ttcatacatttgtgctgcccatgta

SEQ ID NO: 34268 - DNA, 25 bp, Artificial
  Probe
tcctaattagatgctgggaaggaag

SEQ ID NO: 34269 - DNA, 25 bp, Artificial
  Probe
ctcctaattagatgctgggaaggaa

SEQ ID NO: 34270 - DNA, 25 bp, Artificial
  Probe
gcctcctaattagatgctgggaagg

SEQ ID NO: 34271 - DNA, 25 bp, Artificial
  Probe
cgcctcctaattagatgctgggaag

SEQ ID NO: 34272 - DNA, 25 bp, Artificial
  Probe
cctcctaattagatgctgggaagga

SEQ ID NO: 34273 - DNA, 25 bp, Artificial
  Probe
ccgacgagtgtaaattcaaagaaat

SEQ ID NO: 34274 - DNA, 25 bp, Artificial
  Probe
taccgacgagtgtaaattcaaagaa

SEQ ID NO: 34275 - DNA, 25 bp, Artificial
  Probe
caactacaacgcctacgaatcctac

SEQ ID NO: 34276 - DNA, 25 bp, Artificial
  Probe
accgacgagtgtaaattcaaagaaa

SEQ ID NO: 34277 - DNA, 25 bp, Artificial
  Probe
acaactacaacgcctacgaatccta

SEQ ID NO: 34278 - DNA, 25 bp, Artificial
  Probe
cgacgagtgtaaattcaaagaaata

SEQ ID NO: 34279 - DNA, 25 bp, Artificial
  Probe
ttaccgacgagtgtaaattcaaaga

SEQ ID NO: 34280 - DNA, 25 bp, Artificial
  Probe
caacaactacaacgcctacgaatcc

SEQ ID NO: 34281 - DNA, 25 bp, Artificial
  Probe
ccaacaactacaacgcctacgaatc

SEQ ID NO: 34282 - DNA, 25 bp, Artificial
  Probe
aacaactacaacgcctacgaatcct

SEQ ID NO: 34283 - DNA, 25 bp, Artificial
  Probe
aaatacttctccccaacaactacaa

SEQ ID NO: 34284 - DNA, 25 bp, Artificial
  Probe
gacgagtgtaaattcaaagaaatac

SEQ ID NO: 34285 - DNA, 25 bp, Artificial
  Probe
aatacttctccccaacaactacaac

SEQ ID NO: 34286 - DNA, 25 bp, Artificial
  Probe
acgagtgtaaattcaaagaaatact

SEQ ID NO: 34287 - DNA, 25 bp, Artificial
  Probe
aactacaacgcctacgaatcctacg

SEQ ID NO: 34288 - DNA, 25 bp, Artificial
  Probe
gaaatacttctccccaacaactaca

SEQ ID NO: 34289 - DNA, 25 bp, Artificial
  Probe
cgagtgtaaattcaaagaaatactt

SEQ ID NO: 34290 - DNA, 25 bp, Artificial
  Probe
atacttctccccaacaactacaacg

SEQ ID NO: 34291 - DNA, 25 bp, Artificial
  Probe
gtatgttcatggccctcagtaagaa

SEQ ID NO: 34292 - DNA, 25 bp, Artificial
  Probe
tttaccgacgagtgtaaattcaaag

SEQ ID NO: 34293 - DNA, 25 bp, Artificial
  Probe
ctttaccgacgagtgtaaattcaaa

SEQ ID NO: 34294 - DNA, 25 bp, Artificial
  Probe
tttctttaccgacgagtgtaaattc

SEQ ID NO: 34295 - DNA, 25 bp, Artificial
  Probe
ctttctttaccgacgagtgtaaatt

SEQ ID NO: 34296 - DNA, 25 bp, Artificial
  Probe
tctttaccgacgagtgtaaattcaa

SEQ ID NO: 34297 - DNA, 25 bp, Artificial
  Probe
ttctttaccgacgagtgtaaattca

SEQ ID NO: 34298 - DNA, 25 bp, Artificial
  Probe
agaaatacttctccccaacaactac

SEQ ID NO: 34299 - DNA, 25 bp, Artificial
  Probe
aaagaaatacttctccccaacaact

SEQ ID NO: 34300 - DNA, 25 bp, Artificial
  Probe
caaagaaatacttctccccaacaac

SEQ ID NO: 34301 - DNA, 25 bp, Artificial
  Probe
tcaaagaaatacttctccccaacaa

SEQ ID NO: 34302 - DNA, 25 bp, Artificial
  Probe
ttcaaagaaatacttctccccaaca

SEQ ID NO: 34303 - DNA, 25 bp, Artificial
  Probe
aagaaatacttctccccaacaacta

SEQ ID NO: 34304 - DNA, 25 bp, Artificial
  Probe
cctttctttaccgacgagtgtaaat

SEQ ID NO: 34305 - DNA, 25 bp, Artificial
  Probe
attcaaagaaatacttctccccaac

SEQ ID NO: 34306 - DNA, 25 bp, Artificial
  Probe
gtgcctttctttaccgacgagtgta

SEQ ID NO: 34307 - DNA, 25 bp, Artificial
  Probe
tgcctttctttaccgacgagtgtaa

SEQ ID NO: 34308 - DNA, 25 bp, Artificial
  Probe
aattcaaagaaatacttctccccaa

SEQ ID NO: 34309 - DNA, 25 bp, Artificial
  Probe
aaattcaaagaaatacttctcccca

SEQ ID NO: 34310 - DNA, 25 bp, Artificial
  Probe
gtaaattcaaagaaatacttctccc

SEQ ID NO: 34311 - DNA, 25 bp, Artificial
  Probe
ggtatgttcatggccctcagtaaga

SEQ ID NO: 34312 - DNA, 25 bp, Artificial
  Probe
aagctcttcggtgtgcctttcttta

SEQ ID NO: 34313 - DNA, 25 bp, Artificial
  Probe
tgtaaattcaaagaaatacttctcc

SEQ ID NO: 34314 - DNA, 25 bp, Artificial
  Probe
taaattcaaagaaatacttctcccc

SEQ ID NO: 34315 - DNA, 25 bp, Artificial
  Probe
gcctttctttaccgacgagtgtaaa

SEQ ID NO: 34316 - DNA, 25 bp, Artificial
  Probe
tatgttcatggccctcagtaagaac

SEQ ID NO: 34317 - DNA, 25 bp, Artificial
  Probe
tacttctccccaacaactacaacgc

SEQ ID NO: 34318 - DNA, 25 bp, Artificial
  Probe
cctatcatggaatacacaagcactt

SEQ ID NO: 34319 - DNA, 25 bp, Artificial
  Probe
caacatgaagacctcaatgaagtag

SEQ ID NO: 34320 - DNA, 25 bp, Artificial
  Probe
atgaagacctcaatgaagtagccaa

SEQ ID NO: 34321 - DNA, 25 bp, Artificial
  Probe
gctattggtctggtggatagtagtt

SEQ ID NO: 34322 - DNA, 25 bp, Artificial
  Probe
aacatgaagacctcaatgaagtagc

SEQ ID NO: 34323 - DNA, 25 bp, Artificial
  Probe
tatgaagctattggtctggtggata

SEQ ID NO: 34324 - DNA, 25 bp, Artificial
  Probe
gcaacatgaagacctcaatgaagta

SEQ ID NO: 34325 - DNA, 25 bp, Artificial
  Probe
tattggtctggtggatagtagtttg

SEQ ID NO: 34326 - DNA, 25 bp, Artificial
  Probe
tttctttatgtaggagcaggaatcg

SEQ ID NO: 34327 - DNA, 25 bp, Artificial
  Probe
ctatgaagctattggtctggtggat

SEQ ID NO: 34328 - DNA, 25 bp, Artificial
  Probe
aatcgaacaagcctctgtgaatatt

SEQ ID NO: 34329 - DNA, 25 bp, Artificial
  Probe
gagcaacatgaagacctcaatgaag

SEQ ID NO: 34330 - DNA, 25 bp, Artificial
  Probe
aagctattggtctggtggatagtag

SEQ ID NO: 34331 - DNA, 25 bp, Artificial
  Probe
gaagctattggtctggtggatagta

SEQ ID NO: 34332 - DNA, 25 bp, Artificial
  Probe
gaatcgaacaagcctctgtgaatat

SEQ ID NO: 34333 - DNA, 25 bp, Artificial
  Probe
agtagccaaactcttcaacattcat

SEQ ID NO: 34334 - DNA, 25 bp, Artificial
  Probe
aagtagccaaactcttcaacattca

SEQ ID NO: 34335 - DNA, 25 bp, Artificial
  Probe
catgaagacctcaatgaagtagcca

SEQ ID NO: 34336 - DNA, 25 bp, Artificial
  Probe
acatgaagacctcaatgaagtagcc

SEQ ID NO: 34337 - DNA, 25 bp, Artificial
  Probe
ctatcatggaatacacaagcacttt

SEQ ID NO: 34338 - DNA, 25 bp, Artificial
  Probe
gaagacctcaatgaagtagccaaac

SEQ ID NO: 34339 - DNA, 25 bp, Artificial
  Probe
ctattggtctggtggatagtagttt

SEQ ID NO: 34340 - DNA, 25 bp, Artificial
  Probe
gtagccaaactcttcaacattcatg

SEQ ID NO: 34341 - DNA, 25 bp, Artificial
  Probe
agcaacatgaagacctcaatgaagt

SEQ ID NO: 34342 - DNA, 25 bp, Artificial
  Probe
atgaagctattggtctggtggatag

SEQ ID NO: 34343 - DNA, 25 bp, Artificial
  Probe
ttatgtaggagcaggaatcgaacaa

SEQ ID NO: 34344 - DNA, 25 bp, Artificial
  Probe
aaggaagatcattaaagacggtgag

SEQ ID NO: 34345 - DNA, 25 bp, Artificial
  Probe
caaggaagatcattaaagacggtga

SEQ ID NO: 34346 - DNA, 25 bp, Artificial
  Probe
atcttctacctcagggacaaagttg

SEQ ID NO: 34347 - DNA, 25 bp, Artificial
  Probe
catcttctacctcagggacaaagtt

SEQ ID NO: 34348 - DNA, 25 bp, Artificial
  Probe
tatgtaggagcaggaatcgaacaag

SEQ ID NO: 34349 - DNA, 25 bp, Artificial
  Probe
agctattggtctggtggatagtagt

SEQ ID NO: 34350 - DNA, 25 bp, Artificial
  Probe
gaagatcattaaagacggtgagcaa

SEQ ID NO: 34351 - DNA, 25 bp, Artificial
  Probe
attggtctggtggatagtagtttgc

SEQ ID NO: 34352 - DNA, 25 bp, Artificial
  Probe
acctcaatgaagtagccaaactctt

SEQ ID NO: 34353 - DNA, 25 bp, Artificial
  Probe
aagacctcaatgaagtagccaaact

SEQ ID NO: 34354 - DNA, 25 bp, Artificial
  Probe
tgaagacctcaatgaagtagccaaa

SEQ ID NO: 34355 - DNA, 25 bp, Artificial
  Probe
attaaagacggtgagcaacatgaag

SEQ ID NO: 34356 - DNA, 25 bp, Artificial
  Probe
aagatcattaaagacggtgagcaac

SEQ ID NO: 34357 - DNA, 25 bp, Artificial
  Probe
gatcattaaagacggtgagcaacat

SEQ ID NO: 34358 - DNA, 25 bp, Artificial
  Probe
gcaaggaagatcattaaagacggtg

SEQ ID NO: 34359 - DNA, 25 bp, Artificial
  Probe
gattgtgctatggaacgtctttaac

SEQ ID NO: 34360 - DNA, 25 bp, Artificial
  Probe
ctttatgtaggagcaggaatcgaac

SEQ ID NO: 34361 - DNA, 25 bp, Artificial
  Probe
tctttatgtaggagcaggaatcgaa

SEQ ID NO: 34362 - DNA, 25 bp, Artificial
  Probe
tgaatccctatcatggaatacacaa

SEQ ID NO: 34363 - DNA, 25 bp, Artificial
  Probe
cctcacactcagatcatcttctcaa

SEQ ID NO: 34364 - DNA, 25 bp, Artificial
  Probe
ctcacactcagatcatcttctcaaa

SEQ ID NO: 34365 - DNA, 25 bp, Artificial
  Probe
aacaaggaggagaagttcccaaatg

SEQ ID NO: 34366 - DNA, 25 bp, Artificial
  Probe
caacaaggaggagaagttcccaaat

SEQ ID NO: 34367 - DNA, 25 bp, Artificial
  Probe
acactcagatcatcttctcaaaact

SEQ ID NO: 34368 - DNA, 25 bp, Artificial
  Probe
cacactcagatcatcttctcaaaac

SEQ ID NO: 34369 - DNA, 25 bp, Artificial
  Probe
tcacactcagatcatcttctcaaaa

SEQ ID NO: 34370 - DNA, 25 bp, Artificial
  Probe
ccctcacactcagatcatcttctca

SEQ ID NO: 34371 - DNA, 25 bp, Artificial
  Probe
accctcacactcagatcatcttctc

SEQ ID NO: 34372 - DNA, 25 bp, Artificial
  Probe
gaccctcacactcagatcatcttct

SEQ ID NO: 34373 - DNA, 25 bp, Artificial
  Probe
agaccctcacactcagatcatcttc

SEQ ID NO: 34374 - DNA, 25 bp, Artificial
  Probe
cactcagatcatcttctcaaaactc

SEQ ID NO: 34375 - DNA, 25 bp, Artificial
  Probe
actcagatcatcttctcaaaactcg

SEQ ID NO: 34376 - DNA, 25 bp, Artificial
  Probe
cagaccctcacactcagatcatctt

SEQ ID NO: 34377 - DNA, 25 bp, Artificial
  Probe
ctcagatcatcttctcaaaactcga

SEQ ID NO: 34378 - DNA, 25 bp, Artificial
  Probe
acaaggaggagaagttcccaaatgg

SEQ ID NO: 34379 - DNA, 25 bp, Artificial
  Probe
ccaacaaggaggagaagttcccaaa

SEQ ID NO: 34380 - DNA, 25 bp, Artificial
  Probe
ccagaccctcacactcagatcatct

SEQ ID NO: 34381 - DNA, 25 bp, Artificial
  Probe
tcagatcatcttctcaaaactcgag

SEQ ID NO: 34382 - DNA, 25 bp, Artificial
  Probe
caaggaggagaagttcccaaatggg

SEQ ID NO: 34383 - DNA, 25 bp, Artificial
  Probe
gtttcatcggcagaccttcctattg

SEQ ID NO: 34384 - DNA, 25 bp, Artificial
  Probe
tttcatcggcagaccttcctattgg

SEQ ID NO: 34385 - DNA, 25 bp, Artificial
  Probe
ctagtcttgccactcacgtttcatc

SEQ ID NO: 34386 - DNA, 25 bp, Artificial
  Probe
cgtttcatcggcagaccttcctatt

SEQ ID NO: 34387 - DNA, 25 bp, Artificial
  Probe
tctagtcttgccactcacgtttcat

SEQ ID NO: 34388 - DNA, 25 bp, Artificial
  Probe
ctctagtcttgccactcacgtttca

SEQ ID NO: 34389 - DNA, 25 bp, Artificial
  Probe
actctagtcttgccactcacgtttc

SEQ ID NO: 34390 - DNA, 25 bp, Artificial
  Probe
gcaatctctatggagcctatgtgcc

SEQ ID NO: 34391 - DNA, 25 bp, Artificial
  Probe
cactctagtcttgccactcacgttt

SEQ ID NO: 34392 - DNA, 25 bp, Artificial
  Probe
cttctggtgctgcactattcaaacc

SEQ ID NO: 34393 - DNA, 25 bp, Artificial
  Probe
tagtcttgccactcacgtttcatcg

SEQ ID NO: 34394 - DNA, 25 bp, Artificial
  Probe
gcttctggtgctgcactattcaaac

SEQ ID NO: 34395 - DNA, 25 bp, Artificial
  Probe
ggcaatctctatggagcctatgtgc

SEQ ID NO: 34396 - DNA, 25 bp, Artificial
  Probe
gggcaatctctatggagcctatgtg

SEQ ID NO: 34397 - DNA, 25 bp, Artificial
  Probe
aacatcatactcataattcaccacg

SEQ ID NO: 34398 - DNA, 25 bp, Artificial
  Probe
ccaacatcatactcataattcacca

SEQ ID NO: 34399 - DNA, 25 bp, Artificial
  Probe
accaacatcatactcataattcacc

SEQ ID NO: 34400 - DNA, 25 bp, Artificial
  Probe
ccaccaacatcatactcataattca

SEQ ID NO: 34401 - DNA, 25 bp, Artificial
  Probe
taattcaccacgccaactactacta

SEQ ID NO: 34402 - DNA, 25 bp, Artificial
  Probe
acatcatactcataattcaccacgc

SEQ ID NO: 34403 - DNA, 25 bp, Artificial
  Probe
cataattcaccacgccaactactac

SEQ ID NO: 34404 - DNA, 25 bp, Artificial
  Probe
ataattcaccacgccaactactact

SEQ ID NO: 34405 - DNA, 25 bp, Artificial
  Probe
tcataattcaccacgccaactacta

SEQ ID NO: 34406 - DNA, 25 bp, Artificial
  Probe
tactcataattcaccacgccaacta

SEQ ID NO: 34407 - DNA, 25 bp, Artificial
  Probe
catcatactcataattcaccacgcc

SEQ ID NO: 34408 - DNA, 25 bp, Artificial
  Probe
caactactactacagcaacactgat

SEQ ID NO: 34409 - DNA, 25 bp, Artificial
  Probe
caacatcatactcataattcaccac

SEQ ID NO: 34410 - DNA, 25 bp, Artificial
  Probe
caccaacatcatactcataattcac

SEQ ID NO: 34411 - DNA, 25 bp, Artificial
  Probe
ctactactacagcaacactgatagc

SEQ ID NO: 34412 - DNA, 25 bp, Artificial
  Probe
actactactacagcaacactgatag

SEQ ID NO: 34413 - DNA, 25 bp, Artificial
  Probe
atcatactcataattcaccacgcca

SEQ ID NO: 34414 - DNA, 25 bp, Artificial
  Probe
aactactactacagcaacactgata

SEQ ID NO: 34415 - DNA, 25 bp, Artificial
  Probe
catactcataattcaccacgccaac

SEQ ID NO: 34416 - DNA, 25 bp, Artificial
  Probe
atactcataattcaccacgccaact

SEQ ID NO: 34417 - DNA, 25 bp, Artificial
  Probe
tcatactcataattcaccacgccaa

SEQ ID NO: 34418 - DNA, 25 bp, Artificial
  Probe
aattcaccacgccaactactactac

SEQ ID NO: 34419 - DNA, 25 bp, Artificial
  Probe
gaatagttgcctagatccattcctt

SEQ ID NO: 34420 - DNA, 25 bp, Artificial
  Probe
ccaactactactacagcaacactga

SEQ ID NO: 34421 - DNA, 25 bp, Artificial
  Probe
gcctgaatagttgcctagatccatt

SEQ ID NO: 34422 - DNA, 25 bp, Artificial
  Probe
ctcataattcaccacgccaactact

SEQ ID NO: 34423 - DNA, 25 bp, Artificial
  Probe
ctgaatagttgcctagatccattcc

SEQ ID NO: 34424 - DNA, 25 bp, Artificial
  Probe
cctgaatagttgcctagatccattc

SEQ ID NO: 34425 - DNA, 25 bp, Artificial
  Probe
cccaccaacatcatactcataattc

SEQ ID NO: 34426 - DNA, 25 bp, Artificial
  Probe
tgaatagttgcctagatccattcct

SEQ ID NO: 34427 - DNA, 25 bp, Artificial
  Probe
ttatgtatctcatagctctctgcct

SEQ ID NO: 34428 - DNA, 25 bp, Artificial
  Probe
actcataattcaccacgccaactac

SEQ ID NO: 34429 - DNA, 25 bp, Artificial
  Probe
ttgcctagatccattcctttacttt

SEQ ID NO: 34430 - DNA, 25 bp, Artificial
  Probe
tagttgcctagatccattcctttac

SEQ ID NO: 34431 - DNA, 25 bp, Artificial
  Probe
aatagttgcctagatccattccttt

SEQ ID NO: 34432 - DNA, 25 bp, Artificial
  Probe
gttgcctagatccattcctttactt

SEQ ID NO: 34433 - DNA, 25 bp, Artificial
  Probe
tatgtatctcatagctctctgcctg

SEQ ID NO: 34434 - DNA, 25 bp, Artificial
  Probe
atagttgcctagatccattccttta

SEQ ID NO: 34435 - DNA, 25 bp, Artificial
  Probe
attcaccacgccaactactactaca

SEQ ID NO: 34436 - DNA, 25 bp, Artificial
  Probe
agcctgaatagttgcctagatccat

SEQ ID NO: 34437 - DNA, 25 bp, Artificial
  Probe
agttgcctagatccattcctttact

SEQ ID NO: 34438 - DNA, 25 bp, Artificial
  Probe
tactactacagcaacactgatagct

SEQ ID NO: 34439 - DNA, 25 bp, Artificial
  Probe
gccaactactactacagcaacactg

SEQ ID NO: 34440 - DNA, 25 bp, Artificial
  Probe
ctactacagcaacactgatagcttg

SEQ ID NO: 34441 - DNA, 25 bp, Artificial
  Probe
ttcaccacgccaactactactacag

SEQ ID NO: 34442 - DNA, 25 bp, Artificial
  Probe
attcttctaacagtccttcatccaa

SEQ ID NO: 34443 - DNA, 25 bp, Artificial
  Probe
gccattataccttgttatcatccgt

SEQ ID NO: 34444 - DNA, 25 bp, Artificial
  Probe
tgccattataccttgttatcatccg

SEQ ID NO: 34445 - DNA, 25 bp, Artificial
  Probe
ctgccattataccttgttatcatcc

SEQ ID NO: 34446 - DNA, 25 bp, Artificial
  Probe
aattcttctaacagtccttcatcca

SEQ ID NO: 34447 - DNA, 25 bp, Artificial
  Probe
ctgtgtcaattagaactgtagcatt

SEQ ID NO: 34448 - DNA, 25 bp, Artificial
  Probe
ctctataacagaaccttacctccag

SEQ ID NO: 34449 - DNA, 25 bp, Artificial
  Probe
tctgtgtcaattagaactgtagcat

SEQ ID NO: 34450 - DNA, 25 bp, Artificial
  Probe
tgtgtcaattagaactgtagcattc

SEQ ID NO: 34451 - DNA, 25 bp, Artificial
  Probe
tctgccattataccttgttatcatc

SEQ ID NO: 34452 - DNA, 25 bp, Artificial
  Probe
gctctataacagaaccttacctcca

SEQ ID NO: 34453 - DNA, 25 bp, Artificial
  Probe
ttgaatctgaattggcatctgagac

SEQ ID NO: 34454 - DNA, 25 bp, Artificial
  Probe
gttgaatctgaattggcatctgaga

SEQ ID NO: 34455 - DNA, 25 bp, Artificial
  Probe
gaatctgaattggcatctgagactc

SEQ ID NO: 34456 - DNA, 25 bp, Artificial
  Probe
ccattataccttgttatcatccgta

SEQ ID NO: 34457 - DNA, 25 bp, Artificial
  Probe
ttctcttaattccattcgtgtatca

SEQ ID NO: 34458 - DNA, 25 bp, Artificial
  Probe
tacaagacaatgttaagactggttc

SEQ ID NO: 34459 - DNA, 25 bp, Artificial
  Probe
atctgccattataccttgttatcat

SEQ ID NO: 34460 - DNA, 25 bp, Artificial
  Probe
attctatctgccattataccttgtt

SEQ ID NO: 34461 - DNA, 25 bp, Artificial
  Probe
ggctctataacagaaccttacctcc

SEQ ID NO: 34462 - DNA, 25 bp, Artificial
  Probe
acaagacaatgttaagactggttcc

SEQ ID NO: 34463 - DNA, 25 bp, Artificial
  Probe
tctataacagaaccttacctccagg

SEQ ID NO: 34464 - DNA, 25 bp, Artificial
  Probe
ggttgaatctgaattggcatctgag

SEQ ID NO: 34465 - DNA, 25 bp, Artificial
  Probe
tgaatctgaattggcatctgagact

SEQ ID NO: 34466 - DNA, 25 bp, Artificial
  Probe
gtacaagacaatgttaagactggtt

SEQ ID NO: 34467 - DNA, 25 bp, Artificial
  Probe
cctattctatctgccattatacctt

SEQ ID NO: 34468 - DNA, 25 bp, Artificial
  Probe
tctcttaattccattcgtgtatcac

SEQ ID NO: 34469 - DNA, 25 bp, Artificial
  Probe
actgtagcattctggtcaagttctt

SEQ ID NO: 34470 - DNA, 25 bp, Artificial
  Probe
tatctgccattataccttgttatca

SEQ ID NO: 34471 - DNA, 25 bp, Artificial
  Probe
ttctatctgccattataccttgtta

SEQ ID NO: 34472 - DNA, 25 bp, Artificial
  Probe
ttcttctaacagtccttcatccaaa

SEQ ID NO: 34473 - DNA, 25 bp, Artificial
  Probe
ctgtagcattctggtcaagttcttg

SEQ ID NO: 34474 - DNA, 25 bp, Artificial
  Probe
gagttccctattctatctgccatta

SEQ ID NO: 34475 - DNA, 25 bp, Artificial
  Probe
aatggttctattgactctatcactt

SEQ ID NO: 34476 - DNA, 25 bp, Artificial
  Probe
tctatctgccattataccttgttat

SEQ ID NO: 34477 - DNA, 25 bp, Artificial
  Probe
tattctatctgccattataccttgt

SEQ ID NO: 34478 - DNA, 25 bp, Artificial
  Probe
ttgtgcgtagaaattgagttgtatc

SEQ ID NO: 34479 - DNA, 25 bp, Artificial
  Probe
ctttgtgcgtagaaattgagttgta

SEQ ID NO: 34480 - DNA, 25 bp, Artificial
  Probe
tttgtgcgtagaaattgagttgtat

SEQ ID NO: 34481 - DNA, 25 bp, Artificial
  Probe
tccctattctatctgccattatacc

SEQ ID NO: 34482 - DNA, 25 bp, Artificial
  Probe
ccctattctatctgccattatacct

SEQ ID NO: 34483 - DNA, 25 bp, Artificial
  Probe
gtagcattctggtcaagttcttgtg

SEQ ID NO: 34484 - DNA, 25 bp, Artificial
  Probe
atcaatgaactaaacctggaagaag

SEQ ID NO: 34485 - DNA, 25 bp, Artificial
  Probe
agttccctattctatctgccattat

SEQ ID NO: 34486 - DNA, 25 bp, Artificial
  Probe
atcacttaatccaaatcaaccgagg

SEQ ID NO: 34487 - DNA, 25 bp, Artificial
  Probe
gataggttcatcgaaggtgttaatg

SEQ ID NO: 34488 - DNA, 25 bp, Artificial
  Probe
ggataggttcatcgaaggtgttaat

SEQ ID NO: 34489 - DNA, 25 bp, Artificial
  Probe
ataggttcatcgaaggtgttaatgg

SEQ ID NO: 34490 - DNA, 25 bp, Artificial
  Probe
cgatggattaaaggtgcttatgttt

SEQ ID NO: 34491 - DNA, 25 bp, Artificial
  Probe
taggttcatcgaaggtgttaatgga

SEQ ID NO: 34492 - DNA, 25 bp, Artificial
  Probe
ccgatggattaaaggtgcttatgtt

SEQ ID NO: 34493 - DNA, 25 bp, Artificial
  Probe
agaacatcacctacaactgctacca

SEQ ID NO: 34494 - DNA, 25 bp, Artificial
  Probe
ctacgataaggctatccgcttcttg

SEQ ID NO: 34495 - DNA, 25 bp, Artificial
  Probe
tgttataaatgttaagtgtgcctgg

SEQ ID NO: 34496 - DNA, 25 bp, Artificial
  Probe
ttataaatgttaagtgtgcctggct

SEQ ID NO: 34497 - DNA, 25 bp, Artificial
  Probe
gttataaatgttaagtgtgcctggc

SEQ ID NO: 34498 - DNA, 25 bp, Artificial
  Probe
cggataggttcatcgaaggtgttaa

SEQ ID NO: 34499 - DNA, 25 bp, Artificial
  Probe
tataaatgttaagtgtgcctggctt

SEQ ID NO: 34500 - DNA, 25 bp, Artificial
  Probe
gaacatcacctacaactgctaccag

SEQ ID NO: 34501 - DNA, 25 bp, Artificial
  Probe
cagaacatcacctacaactgctacc

SEQ ID NO: 34502 - DNA, 25 bp, Artificial
  Probe
tttccgatggattaaaggtgcttat

SEQ ID NO: 34503 - DNA, 25 bp, Artificial
  Probe
ataaatgttaagtgtgcctggcttt

SEQ ID NO: 34504 - DNA, 25 bp, Artificial
  Probe
aggttcatcgaaggtgttaatggac

SEQ ID NO: 34505 - DNA, 25 bp, Artificial
  Probe
ttccgatggattaaaggtgcttatg

SEQ ID NO: 34506 - DNA, 25 bp, Artificial
  Probe
ttgttataaatgttaagtgtgcctg

SEQ ID NO: 34507 - DNA, 25 bp, Artificial
  Probe
cttcaaagtctactgcaatttcaca

SEQ ID NO: 34508 - DNA, 25 bp, Artificial
  Probe
ctccttcaaagtctactgcaatttc

SEQ ID NO: 34509 - DNA, 25 bp, Artificial
  Probe
ccttcaaagtctactgcaatttcac

SEQ ID NO: 34510 - DNA, 25 bp, Artificial
  Probe
tccttcaaagtctactgcaatttca

SEQ ID NO: 34511 - DNA, 25 bp, Artificial
  Probe
caataaattggaaattcgcccagtc

SEQ ID NO: 34512 - DNA, 25 bp, Artificial
  Probe
taaatgttaagtgtgcctggctttc

SEQ ID NO: 34513 - DNA, 25 bp, Artificial
  Probe
aataaattggaaattcgcccagtca

SEQ ID NO: 34514 - DNA, 25 bp, Artificial
  Probe
actccttcaaagtctactgcaattt

SEQ ID NO: 34515 - DNA, 25 bp, Artificial
  Probe
tccgatggattaaaggtgcttatgt

SEQ ID NO: 34516 - DNA, 25 bp, Artificial
  Probe
ataaattggaaattcgcccagtcag

SEQ ID NO: 34517 - DNA, 25 bp, Artificial
  Probe
ctttccgatggattaaaggtgctta

SEQ ID NO: 34518 - DNA, 25 bp, Artificial
  Probe
aatgtgcaataaattggaaattcgc

SEQ ID NO: 34519 - DNA, 25 bp, Artificial
  Probe
ttcaaagtctactgcaatttcacag

SEQ ID NO: 34520 - DNA, 25 bp, Artificial
  Probe
tacgataaggctatccgcttcttgg

SEQ ID NO: 34521 - DNA, 25 bp, Artificial
  Probe
attgttataaatgttaagtgtgcct

SEQ ID NO: 34522 - DNA, 25 bp, Artificial
  Probe
atgtgcaataaattggaaattcgcc

SEQ ID NO: 34523 - DNA, 25 bp, Artificial
  Probe
acaagaatgtgcaataaattggaaa

SEQ ID NO: 34524 - DNA, 25 bp, Artificial
  Probe
cgggacagtatttgaaaatcacttt

SEQ ID NO: 34525 - DNA, 25 bp, Artificial
  Probe
gctacgataaggctatccgcttctt

SEQ ID NO: 34526 - DNA, 25 bp, Artificial
  Probe
gaccttcaactctgccatcctgatt

SEQ ID NO: 34527 - DNA, 25 bp, Artificial
  Probe
caaagtctactgcaatttcacagct

SEQ ID NO: 34528 - DNA, 25 bp, Artificial
  Probe
tcaaagtctactgcaatttcacagc

SEQ ID NO: 34529 - DNA, 25 bp, Artificial
  Probe
gcaataaattggaaattcgcccagt

SEQ ID NO: 34530 - DNA, 25 bp, Artificial
  Probe
cttcaactctgccatcctgatttcc

SEQ ID NO: 34531 - DNA, 25 bp, Artificial
  Probe
ccttcaactctgccatcctgatttc

SEQ ID NO: 34532 - DNA, 25 bp, Artificial
  Probe
catggagtgtcgcagtattacttac

SEQ ID NO: 34533 - DNA, 25 bp, Artificial
  Probe
gagtgtcgcagtattacttactact

SEQ ID NO: 34534 - DNA, 25 bp, Artificial
  Probe
ggagtgtcgcagtattacttactac

SEQ ID NO: 34535 - DNA, 25 bp, Artificial
  Probe
tggagtgtcgcagtattacttacta

SEQ ID NO: 34536 - DNA, 25 bp, Artificial
  Probe
ataaacgaacccataggagaaacag

SEQ ID NO: 34537 - DNA, 25 bp, Artificial
  Probe
tcataaacgaacccataggagaaac

SEQ ID NO: 34538 - DNA, 25 bp, Artificial
  Probe
gagccagagaaacatcaaactttaa

SEQ ID NO: 34539 - DNA, 25 bp, Artificial
  Probe
aggagaaacagcaagtaaatacagg

SEQ ID NO: 34540 - DNA, 25 bp, Artificial
  Probe
cccataggagaaacagcaagtaaat

SEQ ID NO: 34541 - DNA, 25 bp, Artificial
  Probe
cataaacgaacccataggagaaaca

SEQ ID NO: 34542 - DNA, 25 bp, Artificial
  Probe
atggagtgtcgcagtattacttact

SEQ ID NO: 34543 - DNA, 25 bp, Artificial
  Probe
tccatttatatgagccagagaaaca

SEQ ID NO: 34544 - DNA, 25 bp, Artificial
  Probe
agagacaggagggtttctatgatat

SEQ ID NO: 34545 - DNA, 25 bp, Artificial
  Probe
ctaagcaagcactttacacacattc

SEQ ID NO: 34546 - DNA, 25 bp, Artificial
  Probe
cagagacaggagggtttctatgata

SEQ ID NO: 34547 - DNA, 25 bp, Artificial
  Probe
taggagaaacagcaagtaaatacag

SEQ ID NO: 34548 - DNA, 25 bp, Artificial
  Probe
ccataggagaaacagcaagtaaata

SEQ ID NO: 34549 - DNA, 25 bp, Artificial
  Probe
ccatttatatgagccagagaaacat

SEQ ID NO: 34550 - DNA, 25 bp, Artificial
  Probe
ttccatttatatgagccagagaaac

SEQ ID NO: 34551 - DNA, 25 bp, Artificial
  Probe
atatgagccagagaaacatcaaact

SEQ ID NO: 34552 - DNA, 25 bp, Artificial
  Probe
tatgagccagagaaacatcaaactt

SEQ ID NO: 34553 - DNA, 25 bp, Artificial
  Probe
tgagccagagaaacatcaaacttta

SEQ ID NO: 34554 - DNA, 25 bp, Artificial
  Probe
ctcataaacgaacccataggagaaa

SEQ ID NO: 34555 - DNA, 25 bp, Artificial
  Probe
gagacaggagggtttctatgatata

SEQ ID NO: 34556 - DNA, 25 bp, Artificial
  Probe
acccataggagaaacagcaagtaaa

SEQ ID NO: 34557 - DNA, 25 bp, Artificial
  Probe
aacccataggagaaacagcaagtaa

SEQ ID NO: 34558 - DNA, 25 bp, Artificial
  Probe
atgagccagagaaacatcaaacttt

SEQ ID NO: 34559 - DNA, 25 bp, Artificial
  Probe
tatatgagccagagaaacatcaaac

SEQ ID NO: 34560 - DNA, 25 bp, Artificial
  Probe
ataggagaaacagcaagtaaataca

SEQ ID NO: 34561 - DNA, 25 bp, Artificial
  Probe
aatcagtgttaatacatagtgggcg

SEQ ID NO: 34562 - DNA, 25 bp, Artificial
  Probe
aaatcagtgttaatacatagtgggc

SEQ ID NO: 34563 - DNA, 25 bp, Artificial
  Probe
ggagaaacagcaagtaaatacaggc

SEQ ID NO: 34564 - DNA, 25 bp, Artificial
  Probe
gaacccataggagaaacagcaagta

SEQ ID NO: 34565 - DNA, 25 bp, Artificial
  Probe
attccatttatatgagccagagaaa

SEQ ID NO: 34566 - DNA, 25 bp, Artificial
  Probe
taagcaagcactttacacacattcc

SEQ ID NO: 34567 - DNA, 25 bp, Artificial
  Probe
cataggagaaacagcaagtaaatac

SEQ ID NO: 34568 - DNA, 25 bp, Artificial
  Probe
ttatatgagccagagaaacatcaaa

SEQ ID NO: 34569 - DNA, 25 bp, Artificial
  Probe
tttatatgagccagagaaacatcaa

SEQ ID NO: 34570 - DNA, 25 bp, Artificial
  Probe
catttatatgagccagagaaacatc

SEQ ID NO: 34571 - DNA, 25 bp, Artificial
  Probe
agacaggagggtttctatgatatag

SEQ ID NO: 34572 - DNA, 25 bp, Artificial
  Probe
aattccatttatatgagccagagaa

SEQ ID NO: 34573 - DNA, 25 bp, Artificial
  Probe
cagtgttaatacatagtgggcgaag

SEQ ID NO: 34574 - DNA, 25 bp, Artificial
  Probe
atttatatgagccagagaaacatca

SEQ ID NO: 34575 - DNA, 25 bp, Artificial
  Probe
atcagtgttaatacatagtgggcga

SEQ ID NO: 34576 - DNA, 25 bp, Artificial
  Probe
agccagagaaacatcaaactttaaa

SEQ ID NO: 34577 - DNA, 25 bp, Artificial
  Probe
ctgtagtcttctgagtaattggagc

SEQ ID NO: 34578 - DNA, 25 bp, Artificial
  Probe
cactgtagtcttctgagtaattgga

SEQ ID NO: 34579 - DNA, 25 bp, Artificial
  Probe
actgtagtcttctgagtaattggag

SEQ ID NO: 34580 - DNA, 25 bp, Artificial
  Probe
atacagattaccttcagtcaggaga

SEQ ID NO: 34581 - DNA, 25 bp, Artificial
  Probe
tacagattaccttcagtcaggagaa

SEQ ID NO: 34582 - DNA, 25 bp, Artificial
  Probe
acagattaccttcagtcaggagaat

SEQ ID NO: 34583 - DNA, 25 bp, Artificial
  Probe
gtagtcttctgagtaattggagcta

SEQ ID NO: 34584 - DNA, 25 bp, Artificial
  Probe
tagtcttctgagtaattggagctac

SEQ ID NO: 34585 - DNA, 25 bp, Artificial
  Probe
tatacagattaccttcagtcaggag

SEQ ID NO: 34586 - DNA, 25 bp, Artificial
  Probe
tgtagtcttctgagtaattggagct

SEQ ID NO: 34587 - DNA, 25 bp, Artificial
  Probe
cagattaccttcagtcaggagaatc

SEQ ID NO: 34588 - DNA, 25 bp, Artificial
  Probe
ccactgtagtcttctgagtaattgg

SEQ ID NO: 34589 - DNA, 25 bp, Artificial
  Probe
tctacagtgcattcagtattctacc

SEQ ID NO: 34590 - DNA, 25 bp, Artificial
  Probe
taccttcagtcaggagaatctcatt

SEQ ID NO: 34591 - DNA, 25 bp, Artificial
  Probe
ttaccttcagtcaggagaatctcat

SEQ ID NO: 34592 - DNA, 25 bp, Artificial
  Probe
attaccttcagtcaggagaatctca

SEQ ID NO: 34593 - DNA, 25 bp, Artificial
  Probe
ctctgcctctactccatatcatgtg

SEQ ID NO: 34594 - DNA, 25 bp, Artificial
  Probe
tgtctacagtgcattcagtattcta

SEQ ID NO: 34595 - DNA, 25 bp, Artificial
  Probe
agtcttctgagtaattggagctacc

SEQ ID NO: 34596 - DNA, 25 bp, Artificial
  Probe
gtctacagtgcattcagtattctac

SEQ ID NO: 34597 - DNA, 25 bp, Artificial
  Probe
gattaccttcagtcaggagaatctc

SEQ ID NO: 34598 - DNA, 25 bp, Artificial
  Probe
ctgctctgcctctactccatatcat

SEQ ID NO: 34599 - DNA, 25 bp, Artificial
  Probe
cccactgtagtcttctgagtaattg

SEQ ID NO: 34600 - DNA, 25 bp, Artificial
  Probe
tctcatttatagaggcagaatctcc

SEQ ID NO: 34601 - DNA, 25 bp, Artificial
  Probe
ctgtctacagtgcattcagtattct

SEQ ID NO: 34602 - DNA, 25 bp, Artificial
  Probe
ggagacatgatgccatttgattaaa

SEQ ID NO: 34603 - DNA, 25 bp, Artificial
  Probe
aggagacatgatgccatttgattaa

SEQ ID NO: 34604 - DNA, 25 bp, Artificial
  Probe
cctgtctacagtgcattcagtattc

SEQ ID NO: 34605 - DNA, 25 bp, Artificial
  Probe
agacatgatgccatttgattaaagt

SEQ ID NO: 34606 - DNA, 25 bp, Artificial
  Probe
tcatttatagaggcagaatctcctg

SEQ ID NO: 34607 - DNA, 25 bp, Artificial
  Probe
caggagacatgatgccatttgatta

SEQ ID NO: 34608 - DNA, 25 bp, Artificial
  Probe
ctcatttatagaggcagaatctcct

SEQ ID NO: 34609 - DNA, 25 bp, Artificial
  Probe
ttctgagtaattggagctaccacat

SEQ ID NO: 34610 - DNA, 25 bp, Artificial
  Probe
gtatacagattaccttcagtcagga

SEQ ID NO: 34611 - DNA, 25 bp, Artificial
  Probe
gagacatgatgccatttgattaaag

SEQ ID NO: 34612 - DNA, 25 bp, Artificial
  Probe
caggagaatctcatttatagaggca

SEQ ID NO: 34613 - DNA, 25 bp, Artificial
  Probe
ggagaatctcatttatagaggcaga

SEQ ID NO: 34614 - DNA, 25 bp, Artificial
  Probe
aggagaatctcatttatagaggcag

SEQ ID NO: 34615 - DNA, 25 bp, Artificial
  Probe
tcaggagaatctcatttatagaggc

SEQ ID NO: 34616 - DNA, 25 bp, Artificial
  Probe
gacatgatgccatttgattaaagtt

SEQ ID NO: 34617 - DNA, 25 bp, Artificial
  Probe
ctgagtaattggagctaccacatct

SEQ ID NO: 34618 - DNA, 25 bp, Artificial
  Probe
tctgagtaattggagctaccacatc

SEQ ID NO: 34619 - DNA, 25 bp, Artificial
  Probe
tcttctgagtaattggagctaccac

SEQ ID NO: 34620 - DNA, 25 bp, Artificial
  Probe
gtcttctgagtaattggagctacca

SEQ ID NO: 34621 - DNA, 25 bp, Artificial
  Probe
acatgatgccatttgattaaagttt

SEQ ID NO: 34622 - DNA, 25 bp, Artificial
  Probe
tctattccttctcttcttgtgttgg

SEQ ID NO: 34623 - DNA, 25 bp, Artificial
  Probe
tgtctattccttctcttcttgtgtt

SEQ ID NO: 34624 - DNA, 25 bp, Artificial
  Probe
gtctattccttctcttcttgtgttg

SEQ ID NO: 34625 - DNA, 25 bp, Artificial
  Probe
atgtctattccttctcttcttgtgt

SEQ ID NO: 34626 - DNA, 25 bp, Artificial
  Probe
ccttctcttcttgtgttggatacat

SEQ ID NO: 34627 - DNA, 25 bp, Artificial
  Probe
catgtctattccttctcttcttgtg

SEQ ID NO: 34628 - DNA, 25 bp, Artificial
  Probe
tcatgtctattccttctcttcttgt

SEQ ID NO: 34629 - DNA, 25 bp, Artificial
  Probe
tctcttcttgtgttggatacataga

SEQ ID NO: 34630 - DNA, 25 bp, Artificial
  Probe
acggatgtatatagaagtcttcagt

SEQ ID NO: 34631 - DNA, 25 bp, Artificial
  Probe
ctattccttctcttcttgtgttgga

SEQ ID NO: 34632 - DNA, 25 bp, Artificial
  Probe
tcttcttgtgttggatacatagatg

SEQ ID NO: 34633 - DNA, 25 bp, Artificial
  Probe
ttccttctcttcttgtgttggatac

SEQ ID NO: 34634 - DNA, 25 bp, Artificial
  Probe
attccttctcttcttgtgttggata

SEQ ID NO: 34635 - DNA, 25 bp, Artificial
  Probe
tattccttctcttcttgtgttggat

SEQ ID NO: 34636 - DNA, 25 bp, Artificial
  Probe
ttctcttcttgtgttggatacatag

SEQ ID NO: 34637 - DNA, 25 bp, Artificial
  Probe
cttctcttcttgtgttggatacata

SEQ ID NO: 34638 - DNA, 25 bp, Artificial
  Probe
acacatcatgtctattccttctctt

SEQ ID NO: 34639 - DNA, 25 bp, Artificial
  Probe
atgtatatagaagtcttcagttggc

SEQ ID NO: 34640 - DNA, 25 bp, Artificial
  Probe
atcatgtctattccttctcttcttg

SEQ ID NO: 34641 - DNA, 25 bp, Artificial
  Probe
catcatgtctattccttctcttctt

SEQ ID NO: 34642 - DNA, 25 bp, Artificial
  Probe
ctcttcttgtgttggatacatagat

SEQ ID NO: 34643 - DNA, 25 bp, Artificial
  Probe
acatcatgtctattccttctcttct

SEQ ID NO: 34644 - DNA, 25 bp, Artificial
  Probe
cacatcatgtctattccttctcttc

SEQ ID NO: 34645 - DNA, 25 bp, Artificial
  Probe
cttcttgtgttggatacatagatgt

SEQ ID NO: 34646 - DNA, 25 bp, Artificial
  Probe
ctgtaggaatgcctctagtcatctt

SEQ ID NO: 34647 - DNA, 25 bp, Artificial
  Probe
tccttctcttcttgtgttggataca

SEQ ID NO: 34648 - DNA, 25 bp, Artificial
  Probe
tacacatcatgtctattccttctct

SEQ ID NO: 34649 - DNA, 25 bp, Artificial
  Probe
ataaatgtaagcaatgtgggaaagg

SEQ ID NO: 34650 - DNA, 25 bp, Artificial
  Probe
cactggagagaaaccctataaatgt

SEQ ID NO: 34651 - DNA, 25 bp, Artificial
  Probe
acactggagagaaaccctataaatg

SEQ ID NO: 34652 - DNA, 25 bp, Artificial
  Probe
cacactggagagaaaccctataaat

SEQ ID NO: 34653 - DNA, 25 bp, Artificial
  Probe
cctataaatgtaagcagtgtgggaa

SEQ ID NO: 34654 - DNA, 25 bp, Artificial
  Probe
tgtaggaatgcctctagtcatcttg

SEQ ID NO: 34655 - DNA, 25 bp, Artificial
  Probe
ataaatgtaagcagtgtgggaaagt

SEQ ID NO: 34656 - DNA, 25 bp, Artificial
  Probe
cggatgtatatagaagtcttcagtt

SEQ ID NO: 34657 - DNA, 25 bp, Artificial
  Probe
aacggatgtatatagaagtcttcag

SEQ ID NO: 34658 - DNA, 25 bp, Artificial
  Probe
aaccctataaatgtaagcaatgtgg

SEQ ID NO: 34659 - DNA, 25 bp, Artificial
  Probe
aaaccctataaatgtaagcagtgtg

SEQ ID NO: 34660 - DNA, 25 bp, Artificial
  Probe
ctagtcatcttggtggtagtcacaa

SEQ ID NO: 34661 - DNA, 25 bp, Artificial
  Probe
aaccctataaatgtaagcagtgtgg

SEQ ID NO: 34662 - DNA, 25 bp, Artificial
  Probe
tcacactggagagaaaccctataaa

SEQ ID NO: 34663 - DNA, 25 bp, Artificial
  Probe
atgtaaattgtgtggtaaagccttc

SEQ ID NO: 34664 - DNA, 25 bp, Artificial
  Probe
tgtatgtaaattgtgtggtaaagcc

SEQ ID NO: 34665 - DNA, 25 bp, Artificial
  Probe
taaatgtaagcaatgtgggaaaggt

SEQ ID NO: 34666 - DNA, 25 bp, Artificial
  Probe
cctataaatgtaagcaatgtgggaa

SEQ ID NO: 34667 - DNA, 25 bp, Artificial
  Probe
aatggtgtgtgtgatagagtgaatg

SEQ ID NO: 34668 - DNA, 25 bp, Artificial
  Probe
cctgagaagtgaagaatgattgctt

SEQ ID NO: 34669 - DNA, 25 bp, Artificial
  Probe
aacatcgctcagaactattgattca

SEQ ID NO: 34670 - DNA, 25 bp, Artificial
  Probe
acatcgctcagaactattgattcaa

SEQ ID NO: 34671 - DNA, 25 bp, Artificial
  Probe
cgttcttaggactacagatcattaa

SEQ ID NO: 34672 - DNA, 25 bp, Artificial
  Probe
taaatggtgtgtgtgatagagtgaa

SEQ ID NO: 34673 - DNA, 25 bp, Artificial
  Probe
aaatggtgtgtgtgatagagtgaat

SEQ ID NO: 34674 - DNA, 25 bp, Artificial
  Probe
gtaaagaggtatcagtgtgggttaa

SEQ ID NO: 34675 - DNA, 25 bp, Artificial
  Probe
agtaaagaggtatcagtgtgggtta

SEQ ID NO: 34676 - DNA, 25 bp, Artificial
  Probe
tagtaaagaggtatcagtgtgggtt

SEQ ID NO: 34677 - DNA, 25 bp, Artificial
  Probe
ttaaatggtgtgtgtgatagagtga

SEQ ID NO: 34678 - DNA, 25 bp, Artificial
  Probe
gttaaatggtgtgtgtgatagagtg

SEQ ID NO: 34679 - DNA, 25 bp, Artificial
  Probe
tgttaaatggtgtgtgtgatagagt

SEQ ID NO: 34680 - DNA, 25 bp, Artificial
  Probe
atggagaacaactcttatcctcgtt

SEQ ID NO: 34681 - DNA, 25 bp, Artificial
  Probe
aaagaggtatcagtgtgggttaatt

SEQ ID NO: 34682 - DNA, 25 bp, Artificial
  Probe
gacgttcttaggactacagatcatt

SEQ ID NO: 34683 - DNA, 25 bp, Artificial
  Probe
gtatcagtgtgggttaattgttgtg

SEQ ID NO: 34684 - DNA, 25 bp, Artificial
  Probe
ttgttaaatggtgtgtgtgatagag

SEQ ID NO: 34685 - DNA, 25 bp, Artificial
  Probe
aagaggtatcagtgtgggttaattg

SEQ ID NO: 34686 - DNA, 25 bp, Artificial
  Probe
gaggtatcagtgtgggttaattgtt

SEQ ID NO: 34687 - DNA, 25 bp, Artificial
  Probe
taaagaggtatcagtgtgggttaat

SEQ ID NO: 34688 - DNA, 25 bp, Artificial
  Probe
tgtgtgtgatagagtgaatgctgtg

SEQ ID NO: 34689 - DNA, 25 bp, Artificial
  Probe
gtgtgtgtgatagagtgaatgctgt

SEQ ID NO: 34690 - DNA, 25 bp, Artificial
  Probe
gatggagaacaactcttatcctcgt

SEQ ID NO: 34691 - DNA, 25 bp, Artificial
  Probe
tgatggagaacaactcttatcctcg

SEQ ID NO: 34692 - DNA, 25 bp, Artificial
  Probe
aggtatcagtgtgggttaattgttg

SEQ ID NO: 34693 - DNA, 25 bp, Artificial
  Probe
atggtgtgtgtgatagagtgaatgc

SEQ ID NO: 34694 - DNA, 25 bp, Artificial
  Probe
attgttaaatggtgtgtgtgataga

SEQ ID NO: 34695 - DNA, 25 bp, Artificial
  Probe
ggtatcagtgtgggttaattgttgt

SEQ ID NO: 34696 - DNA, 25 bp, Artificial
  Probe
tgacgttcttaggactacagatcat

SEQ ID NO: 34697 - DNA, 25 bp, Artificial
  Probe
acgttcttaggactacagatcatta

SEQ ID NO: 34698 - DNA, 25 bp, Artificial
  Probe
aaacatcgctcagaactattgattc

SEQ ID NO: 34699 - DNA, 25 bp, Artificial
  Probe
ctagtaaagaggtatcagtgtgggt

SEQ ID NO: 34700 - DNA, 25 bp, Artificial
  Probe
agaggtatcagtgtgggttaattgt

SEQ ID NO: 34701 - DNA, 25 bp, Artificial
  Probe
ttctagtaaagaggtatcagtgtgg

SEQ ID NO: 34702 - DNA, 25 bp, Artificial
  Probe
caatgttgggtagtgaatcaggaag

SEQ ID NO: 34703 - DNA, 25 bp, Artificial
  Probe
tctagtaaagaggtatcagtgtggg

SEQ ID NO: 34704 - DNA, 25 bp, Artificial
  Probe
tatcagtgtgggttaattgttgtgc

SEQ ID NO: 34705 - DNA, 25 bp, Artificial
  Probe
gtgagatgaaagatacaatggaatg

SEQ ID NO: 34706 - DNA, 25 bp, Artificial
  Probe
aaagcagggtgtgagatgaaagata

SEQ ID NO: 34707 - DNA, 25 bp, Artificial
  Probe
gttgactgacgttcttaggactaca

SEQ ID NO: 34708 - DNA, 25 bp, Artificial
  Probe
ggtgtgagatgaaagatacaatgga

SEQ ID NO: 34709 - DNA, 25 bp, Artificial
  Probe
agggtgtgagatgaaagatacaatg

SEQ ID NO: 34710 - DNA, 25 bp, Artificial
  Probe
cagggtgtgagatgaaagatacaat

SEQ ID NO: 34711 - DNA, 25 bp, Artificial
  Probe
gtgtgagatgaaagatacaatggaa

SEQ ID NO: 34712 - DNA, 25 bp, Artificial
  Probe
ggtttaggtttgtagtgtttggttt

SEQ ID NO: 34713 - DNA, 25 bp, Artificial
  Probe
taggtttaggtttgtagtgtttggt

SEQ ID NO: 34714 - DNA, 25 bp, Artificial
  Probe
aggtttaggtttgtagtgtttggtt

SEQ ID NO: 34715 - DNA, 25 bp, Artificial
  Probe
ttaggtttaggtttgtagtgtttgg

SEQ ID NO: 34716 - DNA, 25 bp, Artificial
  Probe
gtgtttaggtttaggtttgtagtgt

SEQ ID NO: 34717 - DNA, 25 bp, Artificial
  Probe
agtgtttaggtttaggtttgtagtg

SEQ ID NO: 34718 - DNA, 25 bp, Artificial
  Probe
cagtgtttaggtttaggtttgtagt

SEQ ID NO: 34719 - DNA, 25 bp, Artificial
  Probe
tgtttaggtttaggtttgtagtgtt

SEQ ID NO: 34720 - DNA, 25 bp, Artificial
  Probe
acttgttcatgggctgtttctattt

SEQ ID NO: 34721 - DNA, 25 bp, Artificial
  Probe
cacagtgtttaggtttaggtttgta

SEQ ID NO: 34722 - DNA, 25 bp, Artificial
  Probe
acagtgtttaggtttaggtttgtag

SEQ ID NO: 34723 - DNA, 25 bp, Artificial
  Probe
aacttgttcatgggctgtttctatt

SEQ ID NO: 34724 - DNA, 25 bp, Artificial
  Probe
tttaggtttaggtttgtagtgtttg

SEQ ID NO: 34725 - DNA, 25 bp, Artificial
  Probe
gtttaggtttaggtttgtagtgttt

SEQ ID NO: 34726 - DNA, 25 bp, Artificial
  Probe
acacagtgtttaggtttaggtttgt

SEQ ID NO: 34727 - DNA, 25 bp, Artificial
  Probe
ctgtagctccaagtgatgttctgag

SEQ ID NO: 34728 - DNA, 25 bp, Artificial
  Probe
taggtttgtagtgtttggttttgtg

SEQ ID NO: 34729 - DNA, 25 bp, Artificial
  Probe
ttaggtttgtagtgtttggttttgt

SEQ ID NO: 34730 - DNA, 25 bp, Artificial
  Probe
ggagagagtaggaggtaatttccca

SEQ ID NO: 34731 - DNA, 25 bp, Artificial
  Probe
aaacttgttcatgggctgtttctat

SEQ ID NO: 34732 - DNA, 25 bp, Artificial
  Probe
tttaggtttgtagtgtttggttttg

SEQ ID NO: 34733 - DNA, 25 bp, Artificial
  Probe
gtttaggtttgtagtgtttggtttt

SEQ ID NO: 34734 - DNA, 25 bp, Artificial
  Probe
tgatgttctgaggctccaagtgatg

SEQ ID NO: 34735 - DNA, 25 bp, Artificial
  Probe
gtgatgttctgaggctccaagtgat

SEQ ID NO: 34736 - DNA, 25 bp, Artificial
  Probe
cctgtagctccaagtgatgttctga

SEQ ID NO: 34737 - DNA, 25 bp, Artificial
  Probe
gacctgtagctccaagtgatgttct

SEQ ID NO: 34738 - DNA, 25 bp, Artificial
  Probe
cttgttcatgggctgtttctatttt

SEQ ID NO: 34739 - DNA, 25 bp, Artificial
  Probe
aagtgatgttctgaggctccaagtg

SEQ ID NO: 34740 - DNA, 25 bp, Artificial
  Probe
caagtgatgttctgaggctccaagt

SEQ ID NO: 34741 - DNA, 25 bp, Artificial
  Probe
tgttcatgggctgtttctattttaa

SEQ ID NO: 34742 - DNA, 25 bp, Artificial
  Probe
ttgttcatgggctgtttctatttta

SEQ ID NO: 34743 - DNA, 25 bp, Artificial
  Probe
acctgtagctccaagtgatgttctg

SEQ ID NO: 34744 - DNA, 25 bp, Artificial
  Probe
tgacctgtagctccaagtgatgttc

SEQ ID NO: 34745 - DNA, 25 bp, Artificial
  Probe
ctgacctgtagctccaagtgatgtt

SEQ ID NO: 34746 - DNA, 25 bp, Artificial
  Probe
tgtagctccaagtgatgttctgagg

SEQ ID NO: 34747 - DNA, 25 bp, Artificial
  Probe
tttgtagtgtttggttttgtgcctc

SEQ ID NO: 34748 - DNA, 25 bp, Artificial
  Probe
gtttgtagtgtttggttttgtgcct

SEQ ID NO: 34749 - DNA, 25 bp, Artificial
  Probe
aggtttgtagtgtttggttttgtgc

SEQ ID NO: 34750 - DNA, 25 bp, Artificial
  Probe
gttcatgggctgtttctattttaaa

SEQ ID NO: 34751 - DNA, 25 bp, Artificial
  Probe
aacacagtgtttaggtttaggtttg

SEQ ID NO: 34752 - DNA, 25 bp, Artificial
  Probe
atgtcaggctcaaaccacttctcag

SEQ ID NO: 34753 - DNA, 25 bp, Artificial
  Probe
gatgtcaggctcaaaccacttctca

SEQ ID NO: 34754 - DNA, 25 bp, Artificial
  Probe
aaaacttgttcatgggctgtttcta

SEQ ID NO: 34755 - DNA, 25 bp, Artificial
  Probe
ggtttgtagtgtttggttttgtgcc

SEQ ID NO: 34756 - DNA, 25 bp, Artificial
  Probe
ctcaaaccacttctcaggttaatgg

SEQ ID NO: 34757 - DNA, 25 bp, Artificial
  Probe
gtacgatgtatctgtatgatgtgct

SEQ ID NO: 34758 - DNA, 25 bp, Artificial
  Probe
tgtacgatgtatctgtatgatgtgc

SEQ ID NO: 34759 - DNA, 25 bp, Artificial
  Probe
tgtgtacgatgtatctgtatgatgt

SEQ ID NO: 34760 - DNA, 25 bp, Artificial
  Probe
gtgtacgatgtatctgtatgatgtg

SEQ ID NO: 34761 - DNA, 25 bp, Artificial
  Probe
gatagagcacttagatactggtcct

SEQ ID NO: 34762 - DNA, 25 bp, Artificial
  Probe
agatagagcacttagatactggtcc

SEQ ID NO: 34763 - DNA, 25 bp, Artificial
  Probe
tacgatgtatctgtatgatgtgctt

SEQ ID NO: 34764 - DNA, 25 bp, Artificial
  Probe
atgtgtacgatgtatctgtatgatg

SEQ ID NO: 34765 - DNA, 25 bp, Artificial
  Probe
gtagatagagcacttagatactggt

SEQ ID NO: 34766 - DNA, 25 bp, Artificial
  Probe
tagatagagcacttagatactggtc

SEQ ID NO: 34767 - DNA, 25 bp, Artificial
  Probe
tccttaatgtgtacgatgtatctgt

SEQ ID NO: 34768 - DNA, 25 bp, Artificial
  Probe
atagagcacttagatactggtcctc

SEQ ID NO: 34769 - DNA, 25 bp, Artificial
  Probe
atgctaagcctgagttcctagttaa

SEQ ID NO: 34770 - DNA, 25 bp, Artificial
  Probe
aatgctaagcctgagttcctagtta

SEQ ID NO: 34771 - DNA, 25 bp, Artificial
  Probe
gacctcctcctaagaccattacttg

SEQ ID NO: 34772 - DNA, 25 bp, Artificial
  Probe
ttcaagttctaggaccgactatatt

SEQ ID NO: 34773 - DNA, 25 bp, Artificial
  Probe
ttccttaatgtgtacgatgtatctg

SEQ ID NO: 34774 - DNA, 25 bp, Artificial
  Probe
ccttaatgtgtacgatgtatctgta

SEQ ID NO: 34775 - DNA, 25 bp, Artificial
  Probe
ttatatccattgctcttaccctcac

SEQ ID NO: 34776 - DNA, 25 bp, Artificial
  Probe
gaatgctaagcctgagttcctagtt

SEQ ID NO: 34777 - DNA, 25 bp, Artificial
  Probe
aatgtgtacgatgtatctgtatgat

SEQ ID NO: 34778 - DNA, 25 bp, Artificial
  Probe
tagagcacttagatactggtcctcc

SEQ ID NO: 34779 - DNA, 25 bp, Artificial
  Probe
cgatgtatctgtatgatgtgctttg

SEQ ID NO: 34780 - DNA, 25 bp, Artificial
  Probe
tgtgctttgattatatccattgctc

SEQ ID NO: 34781 - DNA, 25 bp, Artificial
  Probe
acgatgtatctgtatgatgtgcttt

SEQ ID NO: 34782 - DNA, 25 bp, Artificial
  Probe
tgaaatgggaatggtttatgttgaa

SEQ ID NO: 34783 - DNA, 25 bp, Artificial
  Probe
ttgaaatgggaatggtttatgttga

SEQ ID NO: 34784 - DNA, 25 bp, Artificial
  Probe
gtgctttgattatatccattgctct

SEQ ID NO: 34785 - DNA, 25 bp, Artificial
  Probe
cttgaaatgggaatggtttatgttg

SEQ ID NO: 34786 - DNA, 25 bp, Artificial
  Probe
tcttgaaatgggaatggtttatgtt

SEQ ID NO: 34787 - DNA, 25 bp, Artificial
  Probe
catctgctttactgtgtttactgta

SEQ ID NO: 34788 - DNA, 25 bp, Artificial
  Probe
attatatccattgctcttaccctca

SEQ ID NO: 34789 - DNA, 25 bp, Artificial
  Probe
aatgggaatggtttatgttgaatca

SEQ ID NO: 34790 - DNA, 25 bp, Artificial
  Probe
tgattatatccattgctcttaccct

SEQ ID NO: 34791 - DNA, 25 bp, Artificial
  Probe
gatgtatctgtatgatgtgctttga

SEQ ID NO: 34792 - DNA, 25 bp, Artificial
  Probe
ttggtaagaatttaacatccttggc

SEQ ID NO: 34793 - DNA, 25 bp, Artificial
  Probe
gccatcctcatttcctttcagaata

SEQ ID NO: 34794 - DNA, 25 bp, Artificial
  Probe
agtagatagagcacttagatactgg

SEQ ID NO: 34795 - DNA, 25 bp, Artificial
  Probe
ttcttgaaatgggaatggtttatgt

SEQ ID NO: 34796 - DNA, 25 bp, Artificial
  Probe
atgtgctttgattatatccattgct

SEQ ID NO: 34797 - DNA, 25 bp, Artificial
  Probe
tgctttgattatatccattgctctt

SEQ ID NO: 34798 - DNA, 25 bp, Artificial
  Probe
gcgtatattgtatgaagtaatgagt

SEQ ID NO: 34799 - DNA, 25 bp, Artificial
  Probe
tatatccattgctcttaccctcacc

SEQ ID NO: 34800 - DNA, 25 bp, Artificial
  Probe
gatgtgctttgattatatccattgc

SEQ ID NO: 34801 - DNA, 25 bp, Artificial
  Probe
atgggaatggtttatgttgaatcat

SEQ ID NO: 34802 - DNA, 25 bp, Artificial
  Probe
atctctttccaaacctgttcttagt

SEQ ID NO: 34803 - DNA, 25 bp, Artificial
  Probe
catctctttccaaacctgttcttag

SEQ ID NO: 34804 - DNA, 25 bp, Artificial
  Probe
tctttccaaacctgttcttagtagt

SEQ ID NO: 34805 - DNA, 25 bp, Artificial
  Probe
tctctttccaaacctgttcttagta

SEQ ID NO: 34806 - DNA, 25 bp, Artificial
  Probe
ctctttccaaacctgttcttagtag

SEQ ID NO: 34807 - DNA, 25 bp, Artificial
  Probe
ttccaaacctgttcttagtagtacg

SEQ ID NO: 34808 - DNA, 25 bp, Artificial
  Probe
acatctctttccaaacctgttctta

SEQ ID NO: 34809 - DNA, 25 bp, Artificial
  Probe
ctttccaaacctgttcttagtagta

SEQ ID NO: 34810 - DNA, 25 bp, Artificial
  Probe
tttccaaacctgttcttagtagtac

SEQ ID NO: 34811 - DNA, 25 bp, Artificial
  Probe
tccaaacctgttcttagtagtacgt

SEQ ID NO: 34812 - DNA, 25 bp, Artificial
  Probe
ccaaacctgttcttagtagtacgtt

SEQ ID NO: 34813 - DNA, 25 bp, Artificial
  Probe
cacctcgacaagtagtaatcctttg

SEQ ID NO: 34814 - DNA, 25 bp, Artificial
  Probe
ccacctcgacaagtagtaatccttt

SEQ ID NO: 34815 - DNA, 25 bp, Artificial
  Probe
acctgttcttagtagtacgtttaaa

SEQ ID NO: 34816 - DNA, 25 bp, Artificial
  Probe
aggatgcacagatggtctcttagag

SEQ ID NO: 34817 - DNA, 25 bp, Artificial
  Probe
gaacccacctcgacaagtagtaatc

SEQ ID NO: 34818 - DNA, 25 bp, Artificial
  Probe
caggatgcacagatggtctcttaga

SEQ ID NO: 34819 - DNA, 25 bp, Artificial
  Probe
aacctgttcttagtagtacgtttaa

SEQ ID NO: 34820 - DNA, 25 bp, Artificial
  Probe
attttgctcatcccttcaagagttt

SEQ ID NO: 34821 - DNA, 25 bp, Artificial
  Probe
aacatctctttccaaacctgttctt

SEQ ID NO: 34822 - DNA, 25 bp, Artificial
  Probe
aaacatctctttccaaacctgttct

SEQ ID NO: 34823 - DNA, 25 bp, Artificial
  Probe
gatgcacagatggtctcttagagct

SEQ ID NO: 34824 - DNA, 25 bp, Artificial
  Probe
caaacctgttcttagtagtacgttt

SEQ ID NO: 34825 - DNA, 25 bp, Artificial
  Probe
cattttgctcatcccttcaagagtt

SEQ ID NO: 34826 - DNA, 25 bp, Artificial
  Probe
ttttgctcatcccttcaagagtttg

SEQ ID NO: 34827 - DNA, 25 bp, Artificial
  Probe
ctcattttgctcatcccttcaagag

SEQ ID NO: 34828 - DNA, 25 bp, Artificial
  Probe
cactcattttgctcatcccttcaag

SEQ ID NO: 34829 - DNA, 25 bp, Artificial
  Probe
actcattttgctcatcccttcaaga

SEQ ID NO: 34830 - DNA, 25 bp, Artificial
  Probe
cccacctcgacaagtagtaatcctt

SEQ ID NO: 34831 - DNA, 25 bp, Artificial
  Probe
tttgctcatcccttcaagagtttga

SEQ ID NO: 34832 - DNA, 25 bp, Artificial
  Probe
tcattttgctcatcccttcaagagt

SEQ ID NO: 34833 - DNA, 25 bp, Artificial
  Probe
ttgaaaacatctctttccaaacctg

SEQ ID NO: 34834 - DNA, 25 bp, Artificial
  Probe
atgcacagatggtctcttagagctg

SEQ ID NO: 34835 - DNA, 25 bp, Artificial
  Probe
aacccacctcgacaagtagtaatcc

SEQ ID NO: 34836 - DNA, 25 bp, Artificial
  Probe
ggaacccacctcgacaagtagtaat

SEQ ID NO: 34837 - DNA, 25 bp, Artificial
  Probe
tgaaaacatctctttccaaacctgt

SEQ ID NO: 34838 - DNA, 25 bp, Artificial
  Probe
aaacctgttcttagtagtacgttta

SEQ ID NO: 34839 - DNA, 25 bp, Artificial
  Probe
tttgaaaacatctctttccaaacct

SEQ ID NO: 34840 - DNA, 25 bp, Artificial
  Probe
ggatgcacagatggtctcttagagc

SEQ ID NO: 34841 - DNA, 25 bp, Artificial
  Probe
ctagtagaaagccagggtgttcgag

SEQ ID NO: 34842 - DNA, 25 bp, Artificial
  Probe
acccacctcgacaagtagtaatcct

SEQ ID NO: 34843 - DNA, 25 bp, Artificial
  Probe
tctgtgccctttggcttctaataaa

SEQ ID NO: 34844 - DNA, 25 bp, Artificial
  Probe
ttctgtgccctttggcttctaataa

SEQ ID NO: 34845 - DNA, 25 bp, Artificial
  Probe
aaaacatctctttccaaacctgttc

SEQ ID NO: 34846 - DNA, 25 bp, Artificial
  Probe
gaaaacatctctttccaaacctgtt

SEQ ID NO: 34847 - DNA, 25 bp, Artificial
  Probe
ctgatgtaactgtgaggcttagatt

SEQ ID NO: 34848 - DNA, 25 bp, Artificial
  Probe
tgatgtaactgtgaggcttagattc

SEQ ID NO: 34849 - DNA, 25 bp, Artificial
  Probe
taacaatgtgctggaggattatacc

SEQ ID NO: 34850 - DNA, 25 bp, Artificial
  Probe
gatgtaactgtgaggcttagattcc

SEQ ID NO: 34851 - DNA, 25 bp, Artificial
  Probe
tgataacaatgtgctggaggattat

SEQ ID NO: 34852 - DNA, 25 bp, Artificial
  Probe
ttgataacaatgtgctggaggatta

SEQ ID NO: 34853 - DNA, 25 bp, Artificial
  Probe
ataacaatgtgctggaggattatac

SEQ ID NO: 34854 - DNA, 25 bp, Artificial
  Probe
gataacaatgtgctggaggattata

SEQ ID NO: 34855 - DNA, 25 bp, Artificial
  Probe
atgtaactgtgaggcttagattcct

SEQ ID NO: 34856 - DNA, 25 bp, Artificial
  Probe
taactgtgaggcttagattcctgac

SEQ ID NO: 34857 - DNA, 25 bp, Artificial
  Probe
gtaactgtgaggcttagattcctga

SEQ ID NO: 34858 - DNA, 25 bp, Artificial
  Probe
cctgatgtaactgtgaggcttagat

SEQ ID NO: 34859 - DNA, 25 bp, Artificial
  Probe
tgtaactgtgaggcttagattcctg

SEQ ID NO: 34860 - DNA, 25 bp, Artificial
  Probe
aacaatgtgctggaggattataccg

SEQ ID NO: 34861 - DNA, 25 bp, Artificial
  Probe
caatgtgctggaggattataccgac

SEQ ID NO: 34862 - DNA, 25 bp, Artificial
  Probe
tttgataacaatgtgctggaggatt

SEQ ID NO: 34863 - DNA, 25 bp, Artificial
  Probe
aatgtgctggaggattataccgact

SEQ ID NO: 34864 - DNA, 25 bp, Artificial
  Probe
tgatgtctgctttgataacaatgtg

SEQ ID NO: 34865 - DNA, 25 bp, Artificial
  Probe
ctgatgtctgctttgataacaatgt

SEQ ID NO: 34866 - DNA, 25 bp, Artificial
  Probe
cctgatgtctgctttgataacaatg

SEQ ID NO: 34867 - DNA, 25 bp, Artificial
  Probe
ctttgataacaatgtgctggaggat

SEQ ID NO: 34868 - DNA, 25 bp, Artificial
  Probe
acctgatgtctgctttgataacaat

SEQ ID NO: 34869 - DNA, 25 bp, Artificial
  Probe
gatgtctgctttgataacaatgtgc

SEQ ID NO: 34870 - DNA, 25 bp, Artificial
  Probe
tttatactcctttggctggtatctg

SEQ ID NO: 34871 - DNA, 25 bp, Artificial
  Probe
acaatgtgctggaggattataccga

SEQ ID NO: 34872 - DNA, 25 bp, Artificial
  Probe
cactatctatggtgaccctctaaac

SEQ ID NO: 34873 - DNA, 25 bp, Artificial
  Probe
acactatctatggtgaccctctaaa

SEQ ID NO: 34874 - DNA, 25 bp, Artificial
  Probe
aacatgagccctcagttacattaaa

SEQ ID NO: 34875 - DNA, 25 bp, Artificial
  Probe
aaacatgagccctcagttacattaa

SEQ ID NO: 34876 - DNA, 25 bp, Artificial
  Probe
atttatactcctttggctggtatct

SEQ ID NO: 34877 - DNA, 25 bp, Artificial
  Probe
gacactatctatggtgaccctctaa

SEQ ID NO: 34878 - DNA, 25 bp, Artificial
  Probe
atgtctgctttgataacaatgtgct

SEQ ID NO: 34879 - DNA, 25 bp, Artificial
  Probe
ttctggattaaacccttccttatgg

SEQ ID NO: 34880 - DNA, 25 bp, Artificial
  Probe
gacctgatgtctgctttgataacaa

SEQ ID NO: 34881 - DNA, 25 bp, Artificial
  Probe
ccttccttatggtctatctttggac

SEQ ID NO: 34882 - DNA, 25 bp, Artificial
  Probe
ttccttatggtctatctttggactc

SEQ ID NO: 34883 - DNA, 25 bp, Artificial
  Probe
cttccttatggtctatctttggact

SEQ ID NO: 34884 - DNA, 25 bp, Artificial
  Probe
gtcttgactttgacctagcatttca

SEQ ID NO: 34885 - DNA, 25 bp, Artificial
  Probe
caatttatactcctttggctggtat

SEQ ID NO: 34886 - DNA, 25 bp, Artificial
  Probe
actgtggtggtgtttctggattaaa

SEQ ID NO: 34887 - DNA, 25 bp, Artificial
  Probe
agacactatctatggtgaccctcta

SEQ ID NO: 34888 - DNA, 25 bp, Artificial
  Probe
aacccttccttatggtctatctttg

SEQ ID NO: 34889 - DNA, 25 bp, Artificial
  Probe
tccttatggtctatctttggactcc

SEQ ID NO: 34890 - DNA, 25 bp, Artificial
  Probe
aatttatactcctttggctggtatc

SEQ ID NO: 34891 - DNA, 25 bp, Artificial
  Probe
ggattaaacccttccttatggtcta

SEQ ID NO: 34892 - DNA, 25 bp, Artificial
  Probe
tatatgaagcagatgaacgcaagat

SEQ ID NO: 34893 - DNA, 25 bp, Artificial
  Probe
accaccattcagacagattacattg

SEQ ID NO: 34894 - DNA, 25 bp, Artificial
  Probe
caccaccattcagacagattacatt

SEQ ID NO: 34895 - DNA, 25 bp, Artificial
  Probe
atatgaagcagatgaacgcaagatt

SEQ ID NO: 34896 - DNA, 25 bp, Artificial
  Probe
gtatatgaagcagatgaacgcaaga

SEQ ID NO: 34897 - DNA, 25 bp, Artificial
  Probe
caccattcagacagattacattgtt

SEQ ID NO: 34898 - DNA, 25 bp, Artificial
  Probe
tatgaagcagatgaacgcaagattc

SEQ ID NO: 34899 - DNA, 25 bp, Artificial
  Probe
ccaccattcagacagattacattgt

SEQ ID NO: 34900 - DNA, 25 bp, Artificial
  Probe
ggtatatgaagcagatgaacgcaag

SEQ ID NO: 34901 - DNA, 25 bp, Artificial
  Probe
accgacaataaccagacaagaactt

SEQ ID NO: 34902 - DNA, 25 bp, Artificial
  Probe
ctggtggtatatgaagcagatgaac

SEQ ID NO: 34903 - DNA, 25 bp, Artificial
  Probe
tatggacaacttgaatcatctcctg

SEQ ID NO: 34904 - DNA, 25 bp, Artificial
  Probe
ttatggacaacttgaatcatctcct

SEQ ID NO: 34905 - DNA, 25 bp, Artificial
  Probe
actggtggtatatgaagcagatgaa

SEQ ID NO: 34906 - DNA, 25 bp, Artificial
  Probe
tggtatatgaagcagatgaacgcaa

SEQ ID NO: 34907 - DNA, 25 bp, Artificial
  Probe
tggtggtatatgaagcagatgaacg

SEQ ID NO: 34908 - DNA, 25 bp, Artificial
  Probe
catcaagcctaatgtgaaggagttc

SEQ ID NO: 34909 - DNA, 25 bp, Artificial
  Probe
gactggtggtatatgaagcagatga

SEQ ID NO: 34910 - DNA, 25 bp, Artificial
  Probe
ctgactggtggtatatgaagcagat

SEQ ID NO: 34911 - DNA, 25 bp, Artificial
  Probe
tcacacgatttcaaacatttctcaa

SEQ ID NO: 34912 - DNA, 25 bp, Artificial
  Probe
cacacgatttcaaacatttctcaag

SEQ ID NO: 34913 - DNA, 25 bp, Artificial
  Probe
gcataagtcatttctcctaagttcc

SEQ ID NO: 34914 - DNA, 25 bp, Artificial
  Probe
caatatcctatggctgtttctcaag

SEQ ID NO: 34915 - DNA, 25 bp, Artificial
  Probe
acacgatttcaaacatttctcaaga

SEQ ID NO: 34916 - DNA, 25 bp, Artificial
  Probe
atcacacgatttcaaacatttctca

SEQ ID NO: 34917 - DNA, 25 bp, Artificial
  Probe
caccgacaataaccagacaagaact

SEQ ID NO: 34918 - DNA, 25 bp, Artificial
  Probe
tgactggtggtatatgaagcagatg

SEQ ID NO: 34919 - DNA, 25 bp, Artificial
  Probe
ttctgactggtggtatatgaagcag

SEQ ID NO: 34920 - DNA, 25 bp, Artificial
  Probe
atggacaacttgaatcatctcctga

SEQ ID NO: 34921 - DNA, 25 bp, Artificial
  Probe
tcaccgacaataaccagacaagaac

SEQ ID NO: 34922 - DNA, 25 bp, Artificial
  Probe
gcaccaccattcagacagattacat

SEQ ID NO: 34923 - DNA, 25 bp, Artificial
  Probe
atttctgactggtggtatatgaagc

SEQ ID NO: 34924 - DNA, 25 bp, Artificial
  Probe
catttctgactggtggtatatgaag

SEQ ID NO: 34925 - DNA, 25 bp, Artificial
  Probe
tggacaacttgaatcatctcctgaa

SEQ ID NO: 34926 - DNA, 25 bp, Artificial
  Probe
agcataagtcatttctcctaagttc

SEQ ID NO: 34927 - DNA, 25 bp, Artificial
  Probe
caataaccagacaagaactttgcta

SEQ ID NO: 34928 - DNA, 25 bp, Artificial
  Probe
cgacaataaccagacaagaactttg

SEQ ID NO: 34929 - DNA, 25 bp, Artificial
  Probe
gacaacttgaatcatctcctgaaag

SEQ ID NO: 34930 - DNA, 25 bp, Artificial
  Probe
ggcagcacaagtaataagaggaact

SEQ ID NO: 34931 - DNA, 25 bp, Artificial
  Probe
gacaataaccagacaagaactttgc

SEQ ID NO: 34932 - DNA, 25 bp, Artificial
  Probe
ccgacaataaccagacaagaacttt

SEQ ID NO: 34933 - DNA, 25 bp, Artificial
  Probe
gtggtatatgaagcagatgaacgca

SEQ ID NO: 34934 - DNA, 25 bp, Artificial
  Probe
tcatttctcctaagttccactaaca

SEQ ID NO: 34935 - DNA, 25 bp, Artificial
  Probe
catttctcaagaacaacttacccac

SEQ ID NO: 34936 - DNA, 25 bp, Artificial
  Probe
aacatttctcaagaacaacttaccc

SEQ ID NO: 34937 - DNA, 25 bp, Artificial
  Probe
taattcatcaggatgtggagtgcta

SEQ ID NO: 34938 - DNA, 25 bp, Artificial
  Probe
attcatcaggatgtggagtgctaat

SEQ ID NO: 34939 - DNA, 25 bp, Artificial
  Probe
aattcatcaggatgtggagtgctaa

SEQ ID NO: 34940 - DNA, 25 bp, Artificial
  Probe
ttaattcatcaggatgtggagtgct

SEQ ID NO: 34941 - DNA, 25 bp, Artificial
  Probe
gttcagatgtctatccactgtctcc

SEQ ID NO: 34942 - DNA, 25 bp, Artificial
  Probe
ggttcagatgtctatccactgtctc

SEQ ID NO: 34943 - DNA, 25 bp, Artificial
  Probe
ttcagatgtctatccactgtctcca

SEQ ID NO: 34944 - DNA, 25 bp, Artificial
  Probe
ttcatcaggatgtggagtgctaatg

SEQ ID NO: 34945 - DNA, 25 bp, Artificial
  Probe
atgtctatccactgtctccaccttc

SEQ ID NO: 34946 - DNA, 25 bp, Artificial
  Probe
ctcctaccatcctgctgtctgtatt

SEQ ID NO: 34947 - DNA, 25 bp, Artificial
  Probe
gatgtctatccactgtctccacctt

SEQ ID NO: 34948 - DNA, 25 bp, Artificial
  Probe
gttctaccaagaggagggagataac

SEQ ID NO: 34949 - DNA, 25 bp, Artificial
  Probe
agttctaccaagaggagggagataa

SEQ ID NO: 34950 - DNA, 25 bp, Artificial
  Probe
tttaattcatcaggatgtggagtgc

SEQ ID NO: 34951 - DNA, 25 bp, Artificial
  Probe
ctatccactgtctccaccttctctg

SEQ ID NO: 34952 - DNA, 25 bp, Artificial
  Probe
tctatccactgtctccaccttctct

SEQ ID NO: 34953 - DNA, 25 bp, Artificial
  Probe
gtctatccactgtctccaccttctc

SEQ ID NO: 34954 - DNA, 25 bp, Artificial
  Probe
tcagatgtctatccactgtctccac

SEQ ID NO: 34955 - DNA, 25 bp, Artificial
  Probe
cagttctaccaagaggagggagata

SEQ ID NO: 34956 - DNA, 25 bp, Artificial
  Probe
catcaggatgtggagtgctaatgtg

SEQ ID NO: 34957 - DNA, 25 bp, Artificial
  Probe
tcatcaggatgtggagtgctaatgt

SEQ ID NO: 34958 - DNA, 25 bp, Artificial
  Probe
cctaccatcctgctgtctgtatttg

SEQ ID NO: 34959 - DNA, 25 bp, Artificial
  Probe
tcctaccatcctgctgtctgtattt

SEQ ID NO: 34960 - DNA, 25 bp, Artificial
  Probe
agatgtctatccactgtctccacct

SEQ ID NO: 34961 - DNA, 25 bp, Artificial
  Probe
cttctctgcttcactcctaccatcc

SEQ ID NO: 34962 - DNA, 25 bp, Artificial
  Probe
ccttctctgcttcactcctaccatc

SEQ ID NO: 34963 - DNA, 25 bp, Artificial
  Probe
tgtctatccactgtctccaccttct

SEQ ID NO: 34964 - DNA, 25 bp, Artificial
  Probe
ttctaccaagaggagggagataacg

SEQ ID NO: 34965 - DNA, 25 bp, Artificial
  Probe
actcctaccatcctgctgtctgtat

SEQ ID NO: 34966 - DNA, 25 bp, Artificial
  Probe
atcaggatgtggagtgctaatgtgg

SEQ ID NO: 34967 - DNA, 25 bp, Artificial
  Probe
tagcagggttcagatgtctatccac

SEQ ID NO: 34968 - DNA, 25 bp, Artificial
  Probe
gtagcagggttcagatgtctatcca

SEQ ID NO: 34969 - DNA, 25 bp, Artificial
  Probe
ttctctgcttcactcctaccatcct

SEQ ID NO: 34970 - DNA, 25 bp, Artificial
  Probe
cagatgtctatccactgtctccacc

SEQ ID NO: 34971 - DNA, 25 bp, Artificial
  Probe
aaactagaagtgttgtttcctcatg

SEQ ID NO: 34972 - DNA, 25 bp, Artificial
  Probe
agattttgtttgtccaggtcaatac

SEQ ID NO: 34973 - DNA, 25 bp, Artificial
  Probe
tctgcttctcaagattttgtttgtc

SEQ ID NO: 34974 - DNA, 25 bp, Artificial
  Probe
ttctgcttctcaagattttgtttgt

SEQ ID NO: 34975 - DNA, 25 bp, Artificial
  Probe
caagattttgtttgtccaggtcaat

SEQ ID NO: 34976 - DNA, 25 bp, Artificial
  Probe
cttctcaagattttgtttgtccagg

SEQ ID NO: 34977 - DNA, 25 bp, Artificial
  Probe
cttctgcttctcaagattttgtttg

SEQ ID NO: 34978 - DNA, 25 bp, Artificial
  Probe
gcttctgcttctcaagattttgttt

SEQ ID NO: 34979 - DNA, 25 bp, Artificial
  Probe
accttctctgcttcactcctaccat

SEQ ID NO: 34980 - DNA, 25 bp, Artificial
  Probe
aagattttgtttgtccaggtcaata

SEQ ID NO: 34981 - DNA, 25 bp, Artificial
  Probe
ttctcaagattttgtttgtccaggt

SEQ ID NO: 34982 - DNA, 25 bp, Artificial
  Probe
actcggatgtgaagagataccagtg

SEQ ID NO: 34983 - DNA, 25 bp, Artificial
  Probe
cactcggatgtgaagagataccagt

SEQ ID NO: 34984 - DNA, 25 bp, Artificial
  Probe
ccactcggatgtgaagagataccag

SEQ ID NO: 34985 - DNA, 25 bp, Artificial
  Probe
tacttcttcaccttcatattctgcc

SEQ ID NO: 34986 - DNA, 25 bp, Artificial
  Probe
ctacttcttcaccttcatattctgc

SEQ ID NO: 34987 - DNA, 25 bp, Artificial
  Probe
gcgtctacttcttcaccttcatatt

SEQ ID NO: 34988 - DNA, 25 bp, Artificial
  Probe
cgtctacttcttcaccttcatattc

SEQ ID NO: 34989 - DNA, 25 bp, Artificial
  Probe
tgcgtctacttcttcaccttcatat

SEQ ID NO: 34990 - DNA, 25 bp, Artificial
  Probe
cttcttcaccttcatattctgccac

SEQ ID NO: 34991 - DNA, 25 bp, Artificial
  Probe
acttcttcaccttcatattctgcca

SEQ ID NO: 34992 - DNA, 25 bp, Artificial
  Probe
ctgcgtctacttcttcaccttcata

SEQ ID NO: 34993 - DNA, 25 bp, Artificial
  Probe
tctacttcttcaccttcatattctg

SEQ ID NO: 34994 - DNA, 25 bp, Artificial
  Probe
gtctacttcttcaccttcatattct

SEQ ID NO: 34995 - DNA, 25 bp, Artificial
  Probe
ttcttcaccttcatattctgccacg

SEQ ID NO: 34996 - DNA, 25 bp, Artificial
  Probe
cttcaccttcatattctgccacgaa

SEQ ID NO: 34997 - DNA, 25 bp, Artificial
  Probe
tctgcgtctacttcttcaccttcat

SEQ ID NO: 34998 - DNA, 25 bp, Artificial
  Probe
tcttcaccttcatattctgccacga

SEQ ID NO: 34999 - DNA, 25 bp, Artificial
  Probe
ctctgcgtctacttcttcaccttca

SEQ ID NO: 35000 - DNA, 25 bp, Artificial
  Probe
accacatagggtaacaatggcatta

SEQ ID NO: 35001 - DNA, 25 bp, Artificial
  Probe
ttcatattctgccacgaagtgcttg

SEQ ID NO: 35002 - DNA, 25 bp, Artificial
  Probe
cctctgcgtctacttcttcaccttc

SEQ ID NO: 35003 - DNA, 25 bp, Artificial
  Probe
tattctgccacgaagtgcttgagta

SEQ ID NO: 35004 - DNA, 25 bp, Artificial
  Probe
catattctgccacgaagtgcttgag

SEQ ID NO: 35005 - DNA, 25 bp, Artificial
  Probe
ttcaccttcatattctgccacgaag

SEQ ID NO: 35006 - DNA, 25 bp, Artificial
  Probe
gaaacctgaggaacttggaagttta

SEQ ID NO: 35007 - DNA, 25 bp, Artificial
  Probe
tatagcaagatgggtgaggtcttca

SEQ ID NO: 35008 - DNA, 25 bp, Artificial
  Probe
aaacctgaggaacttggaagtttac

SEQ ID NO: 35009 - DNA, 25 bp, Artificial
  Probe
atattctgccacgaagtgcttgagt

SEQ ID NO: 35010 - DNA, 25 bp, Artificial
  Probe
tcatattctgccacgaagtgcttga

SEQ ID NO: 35011 - DNA, 25 bp, Artificial
  Probe
ggaacttggaagtttacgagtgaaa

SEQ ID NO: 35012 - DNA, 25 bp, Artificial
  Probe
taccacatagggtaacaatggcatt

SEQ ID NO: 35013 - DNA, 25 bp, Artificial
  Probe
cttcatattctgccacgaagtgctt

SEQ ID NO: 35014 - DNA, 25 bp, Artificial
  Probe
ctatagcaagatgggtgaggtcttc

SEQ ID NO: 35015 - DNA, 25 bp, Artificial
  Probe
aggaacttggaagtttacgagtgaa

SEQ ID NO: 35016 - DNA, 25 bp, Artificial
  Probe
tacagaaaacccagttaatcgtttc

SEQ ID NO: 35017 - DNA, 25 bp, Artificial
  Probe
caccttcatattctgccacgaagtg

SEQ ID NO: 35018 - DNA, 25 bp, Artificial
  Probe
gaggaacttggaagtttacgagtga

SEQ ID NO: 35019 - DNA, 25 bp, Artificial
  Probe
ctgaggaacttggaagtttacgagt

SEQ ID NO: 35020 - DNA, 25 bp, Artificial
  Probe
tgaaacctgaggaacttggaagttt

SEQ ID NO: 35021 - DNA, 25 bp, Artificial
  Probe
tcaccttcatattctgccacgaagt

SEQ ID NO: 35022 - DNA, 25 bp, Artificial
  Probe
tgaggaacttggaagtttacgagtg

SEQ ID NO: 35023 - DNA, 25 bp, Artificial
  Probe
ctgaaacctgaggaacttggaagtt

SEQ ID NO: 35024 - DNA, 25 bp, Artificial
  Probe
aacctgaggaacttggaagtttacg

SEQ ID NO: 35025 - DNA, 25 bp, Artificial
  Probe
cctgaaacctgaggaacttggaagt

SEQ ID NO: 35026 - DNA, 25 bp, Artificial
  Probe
cctgaggaacttggaagtttacgag

SEQ ID NO: 35027 - DNA, 25 bp, Artificial
  Probe
cctatagcaagatgggtgaggtctt

SEQ ID NO: 35028 - DNA, 25 bp, Artificial
  Probe
catggacacctatagcaagatgggt

SEQ ID NO: 35029 - DNA, 25 bp, Artificial
  Probe
acctgaggaacttggaagtttacga

SEQ ID NO: 35030 - DNA, 25 bp, Artificial
  Probe
cggacattgaatatctggacttcta

SEQ ID NO: 35031 - DNA, 25 bp, Artificial
  Probe
aatgttagtcagaccaagattcgta

SEQ ID NO: 35032 - DNA, 25 bp, Artificial
  Probe
atgttagtcagaccaagattcgtat

SEQ ID NO: 35033 - DNA, 25 bp, Artificial
  Probe
gttagtcagaccaagattcgtatca

SEQ ID NO: 35034 - DNA, 25 bp, Artificial
  Probe
tgttagtcagaccaagattcgtatc

SEQ ID NO: 35035 - DNA, 25 bp, Artificial
  Probe
tagtcagaccaagattcgtatcatc

SEQ ID NO: 35036 - DNA, 25 bp, Artificial
  Probe
tatctaagaagacgaaggaagaggt

SEQ ID NO: 35037 - DNA, 25 bp, Artificial
  Probe
ttagtcagaccaagattcgtatcat

SEQ ID NO: 35038 - DNA, 25 bp, Artificial
  Probe
ttgaatatctggacttctacaagcc

SEQ ID NO: 35039 - DNA, 25 bp, Artificial
  Probe
atatctaagaagacgaaggaagagg

SEQ ID NO: 35040 - DNA, 25 bp, Artificial
  Probe
ggacattgaatatctggacttctac

SEQ ID NO: 35041 - DNA, 25 bp, Artificial
  Probe
tcggacattgaatatctggacttct

SEQ ID NO: 35042 - DNA, 25 bp, Artificial
  Probe
attgaatatctggacttctacaagc

SEQ ID NO: 35043 - DNA, 25 bp, Artificial
  Probe
ccgtcatattcaagcacatagaagg

SEQ ID NO: 35044 - DNA, 25 bp, Artificial
  Probe
atctaagaagacgaaggaagaggtg

SEQ ID NO: 35045 - DNA, 25 bp, Artificial
  Probe
gacattgaatatctggacttctaca

SEQ ID NO: 35046 - DNA, 25 bp, Artificial
  Probe
tattaagtggaatgttagtcagacc

SEQ ID NO: 35047 - DNA, 25 bp, Artificial
  Probe
cgtcatattcaagcacatagaaggc

SEQ ID NO: 35048 - DNA, 25 bp, Artificial
  Probe
gccgtcatattcaagcacatagaag

SEQ ID NO: 35049 - DNA, 25 bp, Artificial
  Probe
gtcggacattgaatatctggacttc

SEQ ID NO: 35050 - DNA, 25 bp, Artificial
  Probe
gtatcatctcgaccatcatcttcat

SEQ ID NO: 35051 - DNA, 25 bp, Artificial
  Probe
tatcatctcgaccatcatcttcatc

SEQ ID NO: 35052 - DNA, 25 bp, Artificial
  Probe
taagtggaatgttagtcagaccaag

SEQ ID NO: 35053 - DNA, 25 bp, Artificial
  Probe
ttaagtggaatgttagtcagaccaa

SEQ ID NO: 35054 - DNA, 25 bp, Artificial
  Probe
attaagtggaatgttagtcagacca

SEQ ID NO: 35055 - DNA, 25 bp, Artificial
  Probe
acattgaatatctggacttctacaa

SEQ ID NO: 35056 - DNA, 25 bp, Artificial
  Probe
tggaatgttagtcagaccaagattc

SEQ ID NO: 35057 - DNA, 25 bp, Artificial
  Probe
gtggaatgttagtcagaccaagatt

SEQ ID NO: 35058 - DNA, 25 bp, Artificial
  Probe
gaatgttagtcagaccaagattcgt

SEQ ID NO: 35059 - DNA, 25 bp, Artificial
  Probe
ggaatgttagtcagaccaagattcg

SEQ ID NO: 35060 - DNA, 25 bp, Artificial
  Probe
agtggaatgttagtcagaccaagat

SEQ ID NO: 35061 - DNA, 25 bp, Artificial
  Probe
cattgaatatctggacttctacaag

SEQ ID NO: 35062 - DNA, 25 bp, Artificial
  Probe
aagtggaatgttagtcagaccaaga

SEQ ID NO: 35063 - DNA, 25 bp, Artificial
  Probe
gtcagaccaagattcgtatcatctc

SEQ ID NO: 35064 - DNA, 25 bp, Artificial
  Probe
ggtgatatctaagaagacgaaggaa

SEQ ID NO: 35065 - DNA, 25 bp, Artificial
  Probe
ggtcggacattgaatatctggactt

SEQ ID NO: 35066 - DNA, 25 bp, Artificial
  Probe
agtcagaccaagattcgtatcatct

SEQ ID NO: 35067 - DNA, 25 bp, Artificial
  Probe
atcatctcgaccatcatcttcatcc

SEQ ID NO: 35068 - DNA, 25 bp, Artificial
  Probe
cgtatcatctcgaccatcatcttca

SEQ ID NO: 35069 - DNA, 25 bp, Artificial
  Probe
tcatattcaagcacatagaaggctg

SEQ ID NO: 35070 - DNA, 25 bp, Artificial
  Probe
gtcatattcaagcacatagaaggct

SEQ ID NO: 35071 - DNA, 25 bp, Artificial
  Probe
tgatatctaagaagacgaaggaaga

SEQ ID NO: 35072 - DNA, 25 bp, Artificial
  Probe
gtgatatctaagaagacgaaggaag

SEQ ID NO: 35073 - DNA, 25 bp, Artificial
  Probe
tctaagaagacgaaggaagaggtgg

SEQ ID NO: 35074 - DNA, 25 bp, Artificial
  Probe
tgaatatctggacttctacaagccc

SEQ ID NO: 35075 - DNA, 25 bp, Artificial
  Probe
ctgtgtgtatatgaggaggaagagg

SEQ ID NO: 35076 - DNA, 25 bp, Artificial
  Probe
tacagtctgcttcaacagtccatat

SEQ ID NO: 35077 - DNA, 25 bp, Artificial
  Probe
aatacatggctgtcttcctcaattc

SEQ ID NO: 35078 - DNA, 25 bp, Artificial
  Probe
gacagacagatgacagacagacaga

SEQ ID NO: 35079 - DNA, 25 bp, Artificial
  Probe
ctctaccttccaagtgctaagactg

SEQ ID NO: 35080 - DNA, 25 bp, Artificial
  Probe
caatacatggctgtcttcctcaatt

SEQ ID NO: 35081 - DNA, 25 bp, Artificial
  Probe
ttaagcaaggtctcttacagtccag

SEQ ID NO: 35082 - DNA, 25 bp, Artificial
  Probe
cctgtgtgtatatgaggaggaagag

SEQ ID NO: 35083 - DNA, 25 bp, Artificial
  Probe
gcctctttaatccctgtgtgtatat

SEQ ID NO: 35084 - DNA, 25 bp, Artificial
  Probe
agatgacagacagacagacaaatta

SEQ ID NO: 35085 - DNA, 25 bp, Artificial
  Probe
cagacagatgacagacagacagaca

SEQ ID NO: 35086 - DNA, 25 bp, Artificial
  Probe
acagacagatgacagacagacagac

SEQ ID NO: 35087 - DNA, 25 bp, Artificial
  Probe
agcctctttaatccctgtgtgtata

SEQ ID NO: 35088 - DNA, 25 bp, Artificial
  Probe
tagcctctttaatccctgtgtgtat

SEQ ID NO: 35089 - DNA, 25 bp, Artificial
  Probe
atacatggctgtcttcctcaattct

SEQ ID NO: 35090 - DNA, 25 bp, Artificial
  Probe
cttctatcactgttcatttgggaga

SEQ ID NO: 35091 - DNA, 25 bp, Artificial
  Probe
ctaagactgcatgtattgtaccacc

SEQ ID NO: 35092 - DNA, 25 bp, Artificial
  Probe
ctcagacttcagtttgccttattta

SEQ ID NO: 35093 - DNA, 25 bp, Artificial
  Probe
ttctatcactgttcatttgggagac

SEQ ID NO: 35094 - DNA, 25 bp, Artificial
  Probe
cagatgacagacagacagacaaatt

SEQ ID NO: 35095 - DNA, 25 bp, Artificial
  Probe
tgacagacagacagacaaattatct

SEQ ID NO: 35096 - DNA, 25 bp, Artificial
  Probe
agacagatgacagacagacagacaa

SEQ ID NO: 35097 - DNA, 25 bp, Artificial
  Probe
cctcagacttcagtttgccttattt

SEQ ID NO: 35098 - DNA, 25 bp, Artificial
  Probe
atgacagacagacagacaaattatc

SEQ ID NO: 35099 - DNA, 25 bp, Artificial
  Probe
gatgacagacagacagacaaattat

SEQ ID NO: 35100 - DNA, 25 bp, Artificial
  Probe
gagcctgcttctatcactgttcatt

SEQ ID NO: 35101 - DNA, 25 bp, Artificial
  Probe
cctctttaatccctgtgtgtatatg

SEQ ID NO: 35102 - DNA, 25 bp, Artificial
  Probe
tcagacttcagtttgccttatttaa

SEQ ID NO: 35103 - DNA, 25 bp, Artificial
  Probe
agtctctccacatcatagaattatg

SEQ ID NO: 35104 - DNA, 25 bp, Artificial
  Probe
gcttctatcactgttcatttgggag

SEQ ID NO: 35105 - DNA, 25 bp, Artificial
  Probe
taagactgcatgtattgtaccacca

SEQ ID NO: 35106 - DNA, 25 bp, Artificial
  Probe
gctaagactgcatgtattgtaccac

SEQ ID NO: 35107 - DNA, 25 bp, Artificial
  Probe
gtacagtctgcttcaacagtccata

SEQ ID NO: 35108 - DNA, 25 bp, Artificial
  Probe
ctgcttctatcactgttcatttggg

SEQ ID NO: 35109 - DNA, 25 bp, Artificial
  Probe
cctgcttctatcactgttcatttgg

SEQ ID NO: 35110 - DNA, 25 bp, Artificial
  Probe
acagatgacagacagacagacaaat

SEQ ID NO: 35111 - DNA, 25 bp, Artificial
  Probe
gtagcctctttaatccctgtgtgta

SEQ ID NO: 35112 - DNA, 25 bp, Artificial
  Probe
aaataaatgtgagacttgcctgctg

SEQ ID NO: 35113 - DNA, 25 bp, Artificial
  Probe
ctatcactgttcatttgggagacct

SEQ ID NO: 35114 - DNA, 25 bp, Artificial
  Probe
tatcactgttcatttgggagacctc

SEQ ID NO: 35115 - DNA, 25 bp, Artificial
  Probe
tatatgaggaggaagagggacagac

SEQ ID NO: 35116 - DNA, 25 bp, Artificial
  Probe
gtatatgaggaggaagagggacaga

SEQ ID NO: 35117 - DNA, 25 bp, Artificial
  Probe
tacatggctgtcttcctcaattctg

SEQ ID NO: 35118 - DNA, 25 bp, Artificial
  Probe
cctctaccttccaagtgctaagact

SEQ ID NO: 35119 - DNA, 25 bp, Artificial
  Probe
aaggtctcttacagtccaggctaac

SEQ ID NO: 35120 - DNA, 25 bp, Artificial
  Probe
tgattacctcacacagaatatccag

SEQ ID NO: 35121 - DNA, 25 bp, Artificial
  Probe
gcttctggacttggtgttaattcaa

SEQ ID NO: 35122 - DNA, 25 bp, Artificial
  Probe
gattacctcacacagaatatccagg

SEQ ID NO: 35123 - DNA, 25 bp, Artificial
  Probe
tacgcttctggacttggtgttaatt

SEQ ID NO: 35124 - DNA, 25 bp, Artificial
  Probe
ctatgctctcttgtttggtgattac

SEQ ID NO: 35125 - DNA, 25 bp, Artificial
  Probe
ctacgcttctggacttggtgttaat

SEQ ID NO: 35126 - DNA, 25 bp, Artificial
  Probe
cctatgctctcttgtttggtgatta

SEQ ID NO: 35127 - DNA, 25 bp, Artificial
  Probe
attacctcacacagaatatccaggc

SEQ ID NO: 35128 - DNA, 25 bp, Artificial
  Probe
tcctatgctctcttgtttggtgatt

SEQ ID NO: 35129 - DNA, 25 bp, Artificial
  Probe
ttggtgttaattcaagtcaggcgaa

SEQ ID NO: 35130 - DNA, 25 bp, Artificial
  Probe
cgcttctggacttggtgttaattca

SEQ ID NO: 35131 - DNA, 25 bp, Artificial
  Probe
acgcttctggacttggtgttaattc

SEQ ID NO: 35132 - DNA, 25 bp, Artificial
  Probe
tctacgcttctggacttggtgttaa

SEQ ID NO: 35133 - DNA, 25 bp, Artificial
  Probe
tggtgttaattcaagtcaggcgaag

SEQ ID NO: 35134 - DNA, 25 bp, Artificial
  Probe
gtcctatgctctcttgtttggtgat

SEQ ID NO: 35135 - DNA, 25 bp, Artificial
  Probe
cactgacccattatcgtcttgaatc

SEQ ID NO: 35136 - DNA, 25 bp, Artificial
  Probe
aggaagcagaagccatctatcagag

SEQ ID NO: 35137 - DNA, 25 bp, Artificial
  Probe
gaatatccaggcagctaaagagatg

SEQ ID NO: 35138 - DNA, 25 bp, Artificial
  Probe
agaatatccaggcagctaaagagat

SEQ ID NO: 35139 - DNA, 25 bp, Artificial
  Probe
ttacctcacacagaatatccaggca

SEQ ID NO: 35140 - DNA, 25 bp, Artificial
  Probe
tatgctctcttgtttggtgattacc

SEQ ID NO: 35141 - DNA, 25 bp, Artificial
  Probe
caggaagcagaagccatctatcaga

SEQ ID NO: 35142 - DNA, 25 bp, Artificial
  Probe
ggcagctaaagagatgtttgagaaa

SEQ ID NO: 35143 - DNA, 25 bp, Artificial
  Probe
ctctacgcttctggacttggtgtta

SEQ ID NO: 35144 - DNA, 25 bp, Artificial
  Probe
atatccaggcagctaaagagatgtt

SEQ ID NO: 35145 - DNA, 25 bp, Artificial
  Probe
aatatccaggcagctaaagagatgt

SEQ ID NO: 35146 - DNA, 25 bp, Artificial
  Probe
cttctggacttggtgttaattcaag

SEQ ID NO: 35147 - DNA, 25 bp, Artificial
  Probe
tatccaggcagctaaagagatgttt

SEQ ID NO: 35148 - DNA, 25 bp, Artificial
  Probe
cagaatatccaggcagctaaagaga

SEQ ID NO: 35149 - DNA, 25 bp, Artificial
  Probe
tacctcacacagaatatccaggcag

SEQ ID NO: 35150 - DNA, 25 bp, Artificial
  Probe
ggtgttaattcaagtcaggcgaagg

SEQ ID NO: 35151 - DNA, 25 bp, Artificial
  Probe
actgacccattatcgtcttgaatcc

SEQ ID NO: 35152 - DNA, 25 bp, Artificial
  Probe
acaaactggtcttggctttctctac

SEQ ID NO: 35153 - DNA, 25 bp, Artificial
  Probe
aagagatgtttgagaaactgactga

SEQ ID NO: 35154 - DNA, 25 bp, Artificial
  Probe
agagatgtttgagaaactgactgag

SEQ ID NO: 35155 - DNA, 25 bp, Artificial
  Probe
aaagagatgtttgagaaactgactg

SEQ ID NO: 35156 - DNA, 25 bp, Artificial
  Probe
acagaatatccaggcagctaaagag

SEQ ID NO: 35157 - DNA, 25 bp, Artificial
  Probe
tcacacagaatatccaggcagctaa

SEQ ID NO: 35158 - DNA, 25 bp, Artificial
  Probe
gttaattcaagtcaggcgaaggctc

SEQ ID NO: 35159 - DNA, 25 bp, Artificial
  Probe
gctaaagagatgtttgagaaactga

SEQ ID NO: 35160 - DNA, 25 bp, Artificial
  Probe
aggcagctaaagagatgtttgagaa

SEQ ID NO: 35161 - DNA, 25 bp, Artificial
  Probe
atgtttgagaaactgactgaggaag

SEQ ID NO: 35162 - DNA, 25 bp, Artificial
  Probe
gatgtttgagaaactgactgaggaa

SEQ ID NO: 35163 - DNA, 25 bp, Artificial
  Probe
gacaaactggtcttggctttctcta

SEQ ID NO: 35164 - DNA, 25 bp, Artificial
  Probe
cacagaatatccaggcagctaaaga

SEQ ID NO: 35165 - DNA, 25 bp, Artificial
  Probe
aatgtggtgagtgtcaataaggaac

SEQ ID NO: 35166 - DNA, 25 bp, Artificial
  Probe
caatgtggtgagtgtcaataaggaa

SEQ ID NO: 35167 - DNA, 25 bp, Artificial
  Probe
taccaacatcctgaagtaccacatt

SEQ ID NO: 35168 - DNA, 25 bp, Artificial
  Probe
ttaccaacatcctgaagtaccacat

SEQ ID NO: 35169 - DNA, 25 bp, Artificial
  Probe
aacaatgtggtgagtgtcaataagg

SEQ ID NO: 35170 - DNA, 25 bp, Artificial
  Probe
acaatgtggtgagtgtcaataagga

SEQ ID NO: 35171 - DNA, 25 bp, Artificial
  Probe
cttaccaacatcctgaagtaccaca

SEQ ID NO: 35172 - DNA, 25 bp, Artificial
  Probe
aaacaatgtggtgagtgtcaataag

SEQ ID NO: 35173 - DNA, 25 bp, Artificial
  Probe
accaacatcctgaagtaccacattg

SEQ ID NO: 35174 - DNA, 25 bp, Artificial
  Probe
aaatgccaaggaacttaccaacatc

SEQ ID NO: 35175 - DNA, 25 bp, Artificial
  Probe
aattctgtgttcaaagatggtgtcc

SEQ ID NO: 35176 - DNA, 25 bp, Artificial
  Probe
caaatgccaaggaacttaccaacat

SEQ ID NO: 35177 - DNA, 25 bp, Artificial
  Probe
gaacttaccaacatcctgaagtacc

SEQ ID NO: 35178 - DNA, 25 bp, Artificial
  Probe
ggaacttaccaacatcctgaagtac

SEQ ID NO: 35179 - DNA, 25 bp, Artificial
  Probe
atgtggtgagtgtcaataaggaacc

SEQ ID NO: 35180 - DNA, 25 bp, Artificial
  Probe
aacttaccaacatcctgaagtacca

SEQ ID NO: 35181 - DNA, 25 bp, Artificial
  Probe
tatcgaaatagcctctgcattgaaa

SEQ ID NO: 35182 - DNA, 25 bp, Artificial
  Probe
ttatcgaaatagcctctgcattgaa

SEQ ID NO: 35183 - DNA, 25 bp, Artificial
  Probe
tttatcgaaatagcctctgcattga

SEQ ID NO: 35184 - DNA, 25 bp, Artificial
  Probe
gtttatcgaaatagcctctgcattg

SEQ ID NO: 35185 - DNA, 25 bp, Artificial
  Probe
tgtttatcgaaatagcctctgcatt

SEQ ID NO: 35186 - DNA, 25 bp, Artificial
  Probe
ttgtttatcgaaatagcctctgcat

SEQ ID NO: 35187 - DNA, 25 bp, Artificial
  Probe
tttgtttatcgaaatagcctctgca

SEQ ID NO: 35188 - DNA, 25 bp, Artificial
  Probe
acttaccaacatcctgaagtaccac

SEQ ID NO: 35189 - DNA, 25 bp, Artificial
  Probe
aatgccaaggaacttaccaacatcc

SEQ ID NO: 35190 - DNA, 25 bp, Artificial
  Probe
tgtggtgagtgtcaataaggaacct

SEQ ID NO: 35191 - DNA, 25 bp, Artificial
  Probe
attctgtgttcaaagatggtgtccc

SEQ ID NO: 35192 - DNA, 25 bp, Artificial
  Probe
gaattctgtgttcaaagatggtgtc

SEQ ID NO: 35193 - DNA, 25 bp, Artificial
  Probe
aaaacaatgtggtgagtgtcaataa

SEQ ID NO: 35194 - DNA, 25 bp, Artificial
  Probe
aggaacttaccaacatcctgaagta

SEQ ID NO: 35195 - DNA, 25 bp, Artificial
  Probe
caaatgaagactttgcttctgaacc

SEQ ID NO: 35196 - DNA, 25 bp, Artificial
  Probe
ccaaatgaagactttgcttctgaac

SEQ ID NO: 35197 - DNA, 25 bp, Artificial
  Probe
aaatgaagactttgcttctgaacca

SEQ ID NO: 35198 - DNA, 25 bp, Artificial
  Probe
caaggaacttaccaacatcctgaag

SEQ ID NO: 35199 - DNA, 25 bp, Artificial
  Probe
aaggaacttaccaacatcctgaagt

SEQ ID NO: 35200 - DNA, 25 bp, Artificial
  Probe
ttttgtttatcgaaatagcctctgc

SEQ ID NO: 35201 - DNA, 25 bp, Artificial
  Probe
aagactttgcttctgaaccacatgg

SEQ ID NO: 35202 - DNA, 25 bp, Artificial
  Probe
aatgaagactttgcttctgaaccac

SEQ ID NO: 35203 - DNA, 25 bp, Artificial
  Probe
gagctgaacaaactcttggcaaatg

SEQ ID NO: 35204 - DNA, 25 bp, Artificial
  Probe
gccaaatgaagactttgcttctgaa

SEQ ID NO: 35205 - DNA, 25 bp, Artificial
  Probe
caacatcctgaagtaccacattggg

SEQ ID NO: 35206 - DNA, 25 bp, Artificial
  Probe
atcgaaatagcctctgcattgaaaa

SEQ ID NO: 35207 - DNA, 25 bp, Artificial
  Probe
ccaaggaacttaccaacatcctgaa

SEQ ID NO: 35208 - DNA, 25 bp, Artificial
  Probe
gaagactttgcttctgaaccacatg

SEQ ID NO: 35209 - DNA, 25 bp, Artificial
  Probe
tgaagactttgcttctgaaccacat

SEQ ID NO: 35210 - DNA, 25 bp, Artificial
  Probe
cattatgctgatgttgatgacagaa

SEQ ID NO: 35211 - DNA, 25 bp, Artificial
  Probe
ttatgctgatgttgatgacagaatt

SEQ ID NO: 35212 - DNA, 25 bp, Artificial
  Probe
attatgctgatgttgatgacagaat

SEQ ID NO: 35213 - DNA, 25 bp, Artificial
  Probe
tgacagaatttatttggatgccttg

SEQ ID NO: 35214 - DNA, 25 bp, Artificial
  Probe
tgatgacagaatttatttggatgcc

SEQ ID NO: 35215 - DNA, 25 bp, Artificial
  Probe
agaatttatttggatgccttgtgtg

SEQ ID NO: 35216 - DNA, 25 bp, Artificial
  Probe
cagaatttatttggatgccttgtgt

SEQ ID NO: 35217 - DNA, 25 bp, Artificial
  Probe
gatgacagaatttatttggatgcct

SEQ ID NO: 35218 - DNA, 25 bp, Artificial
  Probe
aatttatttggatgccttgtgtgtc

SEQ ID NO: 35219 - DNA, 25 bp, Artificial
  Probe
gaatttatttggatgccttgtgtgt

SEQ ID NO: 35220 - DNA, 25 bp, Artificial
  Probe
atgacagaatttatttggatgcctt

SEQ ID NO: 35221 - DNA, 25 bp, Artificial
  Probe
atttatttggatgccttgtgtgtca

SEQ ID NO: 35222 - DNA, 25 bp, Artificial
  Probe
cagaattgcattgttatgtggttgg

SEQ ID NO: 35223 - DNA, 25 bp, Artificial
  Probe
ttagcaagactttatgaggcaggat

SEQ ID NO: 35224 - DNA, 25 bp, Artificial
  Probe
ttgatgacagaatttatttggatgc

SEQ ID NO: 35225 - DNA, 25 bp, Artificial
  Probe
gacagaatttatttggatgccttgt

SEQ ID NO: 35226 - DNA, 25 bp, Artificial
  Probe
acagaatttatttggatgccttgtg

SEQ ID NO: 35227 - DNA, 25 bp, Artificial
  Probe
ttatttggatgccttgtgtgtcaat

SEQ ID NO: 35228 - DNA, 25 bp, Artificial
  Probe
tatttggatgccttgtgtgtcaatt

SEQ ID NO: 35229 - DNA, 25 bp, Artificial
  Probe
ttcaccagaattgcattgttatgtg

SEQ ID NO: 35230 - DNA, 25 bp, Artificial
  Probe
aagactttatgaggcaggatcaaat

SEQ ID NO: 35231 - DNA, 25 bp, Artificial
  Probe
tttatttggatgccttgtgtgtcaa

SEQ ID NO: 35232 - DNA, 25 bp, Artificial
  Probe
agactttatgaggcaggatcaaatc

SEQ ID NO: 35233 - DNA, 25 bp, Artificial
  Probe
tacacattatgctgatgttgatgac

SEQ ID NO: 35234 - DNA, 25 bp, Artificial
  Probe
acattatgctgatgttgatgacaga

SEQ ID NO: 35235 - DNA, 25 bp, Artificial
  Probe
cacattatgctgatgttgatgacag

SEQ ID NO: 35236 - DNA, 25 bp, Artificial
  Probe
tgctgatgttgatgacagaatttat

SEQ ID NO: 35237 - DNA, 25 bp, Artificial
  Probe
atgctgatgttgatgacagaattta

SEQ ID NO: 35238 - DNA, 25 bp, Artificial
  Probe
tatgctgatgttgatgacagaattt

SEQ ID NO: 35239 - DNA, 25 bp, Artificial
  Probe
caagactttatgaggcaggatcaaa

SEQ ID NO: 35240 - DNA, 25 bp, Artificial
  Probe
acacattatgctgatgttgatgaca

SEQ ID NO: 35241 - DNA, 25 bp, Artificial
  Probe
cttagcaagactttatgaggcagga

SEQ ID NO: 35242 - DNA, 25 bp, Artificial
  Probe
tttgagtatcttacagcttgccttt

SEQ ID NO: 35243 - DNA, 25 bp, Artificial
  Probe
tgtggtttgaagtttagtttaatgt

SEQ ID NO: 35244 - DNA, 25 bp, Artificial
  Probe
atacacattatgctgatgttgatga

SEQ ID NO: 35245 - DNA, 25 bp, Artificial
  Probe
tagcaagactttatgaggcaggatc

SEQ ID NO: 35246 - DNA, 25 bp, Artificial
  Probe
ctttgagtatcttacagcttgcctt

SEQ ID NO: 35247 - DNA, 25 bp, Artificial
  Probe
ccagaattgcattgttatgtggttg

SEQ ID NO: 35248 - DNA, 25 bp, Artificial
  Probe
gctgatgttgatgacagaatttatt

SEQ ID NO: 35249 - DNA, 25 bp, Artificial
  Probe
gaattgcattgttatgtggttggct

SEQ ID NO: 35250 - DNA, 25 bp, Artificial
  Probe
agaattgcattgttatgtggttggc

SEQ ID NO: 35251 - DNA, 25 bp, Artificial
  Probe
tttcaccagaattgcattgttatgt

SEQ ID NO: 35252 - DNA, 25 bp, Artificial
  Probe
tgtttcaccagaattgcattgttat

SEQ ID NO: 35253 - DNA, 25 bp, Artificial
  Probe
gtttcaccagaattgcattgttatg

SEQ ID NO: 35254 - DNA, 25 bp, Artificial
  Probe
tgagctgatttcttaccctaaatgt

SEQ ID NO: 35255 - DNA, 25 bp, Artificial
  Probe
tagaaagagatgaatgggaagacag

SEQ ID NO: 35256 - DNA, 25 bp, Artificial
  Probe
ttagaaagagatgaatgggaagaca

SEQ ID NO: 35257 - DNA, 25 bp, Artificial
  Probe
ggctttcttctcttatttcggttat

SEQ ID NO: 35258 - DNA, 25 bp, Artificial
  Probe
gggctttcttctcttatttcggtta

SEQ ID NO: 35259 - DNA, 25 bp, Artificial
  Probe
gaaagagatgaatgggaagacagag

SEQ ID NO: 35260 - DNA, 25 bp, Artificial
  Probe
agaaagagatgaatgggaagacaga

SEQ ID NO: 35261 - DNA, 25 bp, Artificial
  Probe
tttagaaagagatgaatgggaagac

SEQ ID NO: 35262 - DNA, 25 bp, Artificial
  Probe
aagtgggctttcttctcttatttcg

SEQ ID NO: 35263 - DNA, 25 bp, Artificial
  Probe
tataaacaagagcaatcactccact

SEQ ID NO: 35264 - DNA, 25 bp, Artificial
  Probe
ctataaacaagagcaatcactccac

SEQ ID NO: 35265 - DNA, 25 bp, Artificial
  Probe
cctataaacaagagcaatcactcca

SEQ ID NO: 35266 - DNA, 25 bp, Artificial
  Probe
ataaacaagagcaatcactccactg

SEQ ID NO: 35267 - DNA, 25 bp, Artificial
  Probe
gctttcttctcttatttcggttatt

SEQ ID NO: 35268 - DNA, 25 bp, Artificial
  Probe
gcctataaacaagagcaatcactcc

SEQ ID NO: 35269 - DNA, 25 bp, Artificial
  Probe
tgggctttcttctcttatttcggtt

SEQ ID NO: 35270 - DNA, 25 bp, Artificial
  Probe
aaagagatgaatgggaagacagagc

SEQ ID NO: 35271 - DNA, 25 bp, Artificial
  Probe
cactgtagatcagagagaccagatc

SEQ ID NO: 35272 - DNA, 25 bp, Artificial
  Probe
gcactgtagatcagagagaccagat

SEQ ID NO: 35273 - DNA, 25 bp, Artificial
  Probe
agtgggctttcttctcttatttcgg

SEQ ID NO: 35274 - DNA, 25 bp, Artificial
  Probe
agggaatcctgcctataaacaagag

SEQ ID NO: 35275 - DNA, 25 bp, Artificial
  Probe
taaacaagagcaatcactccactgt

SEQ ID NO: 35276 - DNA, 25 bp, Artificial
  Probe
gtgggctttcttctcttatttcggt

SEQ ID NO: 35277 - DNA, 25 bp, Artificial
  Probe
taatcaacatgtcgatggcttatct

SEQ ID NO: 35278 - DNA, 25 bp, Artificial
  Probe
ttaatcaacatgtcgatggcttatc

SEQ ID NO: 35279 - DNA, 25 bp, Artificial
  Probe
cttaatcaacatgtcgatggcttat

SEQ ID NO: 35280 - DNA, 25 bp, Artificial
  Probe
acttaatcaacatgtcgatggctta

SEQ ID NO: 35281 - DNA, 25 bp, Artificial
  Probe
gggaatcctgcctataaacaagagc

SEQ ID NO: 35282 - DNA, 25 bp, Artificial
  Probe
ctgtagatcagagagaccagatcgt

SEQ ID NO: 35283 - DNA, 25 bp, Artificial
  Probe
actgtagatcagagagaccagatcg

SEQ ID NO: 35284 - DNA, 25 bp, Artificial
  Probe
tgtagatcagagagaccagatcgtc

SEQ ID NO: 35285 - DNA, 25 bp, Artificial
  Probe
ttcggttattttgatggaatgactt

SEQ ID NO: 35286 - DNA, 25 bp, Artificial
  Probe
tttcggttattttgatggaatgact

SEQ ID NO: 35287 - DNA, 25 bp, Artificial
  Probe
aatcaacatgtcgatggcttatctg

SEQ ID NO: 35288 - DNA, 25 bp, Artificial
  Probe
aatcctgcctataaacaagagcaat

SEQ ID NO: 35289 - DNA, 25 bp, Artificial
  Probe
tagggaatcctgcctataaacaaga

SEQ ID NO: 35290 - DNA, 25 bp, Artificial
  Probe
gtagggaatcctgcctataaacaag

SEQ ID NO: 35291 - DNA, 25 bp, Artificial
  Probe
aatgacttaatcaacatgtcgatgg

SEQ ID NO: 35292 - DNA, 25 bp, Artificial
  Probe
atggaatgacttaatcaacatgtcg

SEQ ID NO: 35293 - DNA, 25 bp, Artificial
  Probe
ggaatgacttaatcaacatgtcgat

SEQ ID NO: 35294 - DNA, 25 bp, Artificial
  Probe
tggaatgacttaatcaacatgtcga

SEQ ID NO: 35295 - DNA, 25 bp, Artificial
  Probe
tcggttattttgatggaatgactta

SEQ ID NO: 35296 - DNA, 25 bp, Artificial
  Probe
atcctgcctataaacaagagcaatc

SEQ ID NO: 35297 - DNA, 25 bp, Artificial
  Probe
tgcctataaacaagagcaatcactc

SEQ ID NO: 35298 - DNA, 25 bp, Artificial
  Probe
ctgcctataaacaagagcaatcact

SEQ ID NO: 35299 - DNA, 25 bp, Artificial
  Probe
gaatcctgcctataaacaagagcaa

SEQ ID NO: 35300 - DNA, 25 bp, Artificial
  Probe
ctcgtgtgcttggattgttgtataa

SEQ ID NO: 35301 - DNA, 25 bp, Artificial
  Probe
gcttcagccattgttatgtaatctt

SEQ ID NO: 35302 - DNA, 25 bp, Artificial
  Probe
tgcttcagccattgttatgtaatct

SEQ ID NO: 35303 - DNA, 25 bp, Artificial
  Probe
gtgcttcagccattgttatgtaatc

SEQ ID NO: 35304 - DNA, 25 bp, Artificial
  Probe
agtgcttcagccattgttatgtaat

SEQ ID NO: 35305 - DNA, 25 bp, Artificial
  Probe
aagtgcttcagccattgttatgtaa

SEQ ID NO: 35306 - DNA, 25 bp, Artificial
  Probe
caagtgcttcagccattgttatgta

SEQ ID NO: 35307 - DNA, 25 bp, Artificial
  Probe
gataacacaagaatcttcagacttc

SEQ ID NO: 35308 - DNA, 25 bp, Artificial
  Probe
cctggctctgttccttatagtttac

SEQ ID NO: 35309 - DNA, 25 bp, Artificial
  Probe
ggctctgttccttatagtttactgt

SEQ ID NO: 35310 - DNA, 25 bp, Artificial
  Probe
tggctctgttccttatagtttactg

SEQ ID NO: 35311 - DNA, 25 bp, Artificial
  Probe
ctggctctgttccttatagtttact

SEQ ID NO: 35312 - DNA, 25 bp, Artificial
  Probe
tctgttccttatagtttactgtggc

SEQ ID NO: 35313 - DNA, 25 bp, Artificial
  Probe
acctggctctgttccttatagttta

SEQ ID NO: 35314 - DNA, 25 bp, Artificial
  Probe
gctctgttccttatagtttactgtg

SEQ ID NO: 35315 - DNA, 25 bp, Artificial
  Probe
tcgtgtgcttggattgttgtataaa

SEQ ID NO: 35316 - DNA, 25 bp, Artificial
  Probe
cctcgtgtgcttggattgttgtata

SEQ ID NO: 35317 - DNA, 25 bp, Artificial
  Probe
tcagccattgttatgtaatctttgt

SEQ ID NO: 35318 - DNA, 25 bp, Artificial
  Probe
gttccttatagtttactgtggcgag

SEQ ID NO: 35319 - DNA, 25 bp, Artificial
  Probe
ctctgttccttatagtttactgtgg

SEQ ID NO: 35320 - DNA, 25 bp, Artificial
  Probe
tttctgtgagacttcatattgctga

SEQ ID NO: 35321 - DNA, 25 bp, Artificial
  Probe
ctgttccttatagtttactgtggcg

SEQ ID NO: 35322 - DNA, 25 bp, Artificial
  Probe
aatagcaatttatacatcctggcgg

SEQ ID NO: 35323 - DNA, 25 bp, Artificial
  Probe
ttaagtggtatggatctgtttagca

SEQ ID NO: 35324 - DNA, 25 bp, Artificial
  Probe
tccagatagaatccatagtttgtct

SEQ ID NO: 35325 - DNA, 25 bp, Artificial
  Probe
cagataacacaagaatcttcagact

SEQ ID NO: 35326 - DNA, 25 bp, Artificial
  Probe
tcagataacacaagaatcttcagac

SEQ ID NO: 35327 - DNA, 25 bp, Artificial
  Probe
tgttccttatagtttactgtggcga

SEQ ID NO: 35328 - DNA, 25 bp, Artificial
  Probe
taagtggtatggatctgtttagcat

SEQ ID NO: 35329 - DNA, 25 bp, Artificial
  Probe
aacccaacagcaaatagcaatttat

SEQ ID NO: 35330 - DNA, 25 bp, Artificial
  Probe
aaatagcaatttatacatcctggcg

SEQ ID NO: 35331 - DNA, 25 bp, Artificial
  Probe
aacctggctctgttccttatagttt

SEQ ID NO: 35332 - DNA, 25 bp, Artificial
  Probe
tttaagtggtatggatctgtttagc

SEQ ID NO: 35333 - DNA, 25 bp, Artificial
  Probe
atctaacgaggtaacacaagaaatt

SEQ ID NO: 35334 - DNA, 25 bp, Artificial
  Probe
acccaacagcaaatagcaatttata

SEQ ID NO: 35335 - DNA, 25 bp, Artificial
  Probe
caacccaacagcaaatagcaattta

SEQ ID NO: 35336 - DNA, 25 bp, Artificial
  Probe
ttcagccattgttatgtaatctttg

SEQ ID NO: 35337 - DNA, 25 bp, Artificial
  Probe
cccaacagcaaatagcaatttatac

SEQ ID NO: 35338 - DNA, 25 bp, Artificial
  Probe
ttccagatagaatccatagtttgtc

SEQ ID NO: 35339 - DNA, 25 bp, Artificial
  Probe
ttctgtgagacttcatattgctgaa

SEQ ID NO: 35340 - DNA, 25 bp, Artificial
  Probe
gatctaacgaggtaacacaagaaat

SEQ ID NO: 35341 - DNA, 25 bp, Artificial
  Probe
cttcagccattgttatgtaatcttt

SEQ ID NO: 35342 - DNA, 25 bp, Artificial
  Probe
caaatagcaatttatacatcctggc

SEQ ID NO: 35343 - DNA, 25 bp, Artificial
  Probe
gcaaatagcaatttatacatcctgg

SEQ ID NO: 35344 - DNA, 25 bp, Artificial
  Probe
catattgaacacacaagtgcttcag

SEQ ID NO: 35345 - DNA, 25 bp, Artificial
  Probe
tctcactttgacacgattctggttt

SEQ ID NO: 35346 - DNA, 25 bp, Artificial
  Probe
ctctcactttgacacgattctggtt

SEQ ID NO: 35347 - DNA, 25 bp, Artificial
  Probe
ctagctctcactttgacacgattct

SEQ ID NO: 35348 - DNA, 25 bp, Artificial
  Probe
tagctctcactttgacacgattctg

SEQ ID NO: 35349 - DNA, 25 bp, Artificial
  Probe
actagctctcactttgacacgattc

SEQ ID NO: 35350 - DNA, 25 bp, Artificial
  Probe
cactagctctcactttgacacgatt

SEQ ID NO: 35351 - DNA, 25 bp, Artificial
  Probe
ctcactttgacacgattctggtttt

SEQ ID NO: 35352 - DNA, 25 bp, Artificial
  Probe
aatctgacggattagaggccaagat

SEQ ID NO: 35353 - DNA, 25 bp, Artificial
  Probe
taatctgacggattagaggccaaga

SEQ ID NO: 35354 - DNA, 25 bp, Artificial
  Probe
ccactagctctcactttgacacgat

SEQ ID NO: 35355 - DNA, 25 bp, Artificial
  Probe
gctctcactttgacacgattctggt

SEQ ID NO: 35356 - DNA, 25 bp, Artificial
  Probe
atctgacggattagaggccaagatg

SEQ ID NO: 35357 - DNA, 25 bp, Artificial
  Probe
ccagatcactttacctgcaccttct

SEQ ID NO: 35358 - DNA, 25 bp, Artificial
  Probe
agctctcactttgacacgattctgg

SEQ ID NO: 35359 - DNA, 25 bp, Artificial
  Probe
ctgacggattagaggccaagatgtc

SEQ ID NO: 35360 - DNA, 25 bp, Artificial
  Probe
cttccacccagatcactttacctgc

SEQ ID NO: 35361 - DNA, 25 bp, Artificial
  Probe
gcttccacccagatcactttacctg

SEQ ID NO: 35362 - DNA, 25 bp, Artificial
  Probe
tctgacggattagaggccaagatgt

SEQ ID NO: 35363 - DNA, 25 bp, Artificial
  Probe
cagatcactttacctgcaccttctg

SEQ ID NO: 35364 - DNA, 25 bp, Artificial
  Probe
cccagatcactttacctgcaccttc

SEQ ID NO: 35365 - DNA, 25 bp, Artificial
  Probe
agatcactttacctgcaccttctgc

SEQ ID NO: 35366 - DNA, 25 bp, Artificial
  Probe
cccactgtgtgaaaaccatttccac

SEQ ID NO: 35367 - DNA, 25 bp, Artificial
  Probe
gtgtgaaaaccatttccacgctcag

SEQ ID NO: 35368 - DNA, 25 bp, Artificial
  Probe
ctgtgtgaaaaccatttccacgctc

SEQ ID NO: 35369 - DNA, 25 bp, Artificial
  Probe
ccactgtgtgaaaaccatttccacg

SEQ ID NO: 35370 - DNA, 25 bp, Artificial
  Probe
agaacactaatgaatacctggagaa

SEQ ID NO: 35371 - DNA, 25 bp, Artificial
  Probe
attgatgatgagtcctatgaagcca

SEQ ID NO: 35372 - DNA, 25 bp, Artificial
  Probe
cattgatgatgagtcctatgaagcc

SEQ ID NO: 35373 - DNA, 25 bp, Artificial
  Probe
ggcattgatgatgagtcctatgaag

SEQ ID NO: 35374 - DNA, 25 bp, Artificial
  Probe
actaaccagaacactaatgaatacc

SEQ ID NO: 35375 - DNA, 25 bp, Artificial
  Probe
ttgatgatgagtcctatgaagccat

SEQ ID NO: 35376 - DNA, 25 bp, Artificial
  Probe
ctaaccagaacactaatgaatacct

SEQ ID NO: 35377 - DNA, 25 bp, Artificial
  Probe
gcattgatgatgagtcctatgaagc

SEQ ID NO: 35378 - DNA, 25 bp, Artificial
  Probe
cagaacactaatgaatacctggaga

SEQ ID NO: 35379 - DNA, 25 bp, Artificial
  Probe
atgactaaccagaacactaatgaat

SEQ ID NO: 35380 - DNA, 25 bp, Artificial
  Probe
tgactaaccagaacactaatgaata

SEQ ID NO: 35381 - DNA, 25 bp, Artificial
  Probe
tatgactaaccagaacactaatgaa

SEQ ID NO: 35382 - DNA, 25 bp, Artificial
  Probe
taaccagaacactaatgaatacctg

SEQ ID NO: 35383 - DNA, 25 bp, Artificial
  Probe
gactaaccagaacactaatgaatac

SEQ ID NO: 35384 - DNA, 25 bp, Artificial
  Probe
aaagtaatggagatgtttcagccta

SEQ ID NO: 35385 - DNA, 25 bp, Artificial
  Probe
atatgactaaccagaacactaatga

SEQ ID NO: 35386 - DNA, 25 bp, Artificial
  Probe
cggcattgatgatgagtcctatgaa

SEQ ID NO: 35387 - DNA, 25 bp, Artificial
  Probe
ctaatgttgggaggagatggctata

SEQ ID NO: 35388 - DNA, 25 bp, Artificial
  Probe
aagtaatggagatgtttcagcctag

SEQ ID NO: 35389 - DNA, 25 bp, Artificial
  Probe
caaagtaatggagatgtttcagcct

SEQ ID NO: 35390 - DNA, 25 bp, Artificial
  Probe
taatgttgggaggagatggctatac

SEQ ID NO: 35391 - DNA, 25 bp, Artificial
  Probe
gtttcaacttgccaatgctaatgtt

SEQ ID NO: 35392 - DNA, 25 bp, Artificial
  Probe
gtaatggagatgtttcagcctagtg

SEQ ID NO: 35393 - DNA, 25 bp, Artificial
  Probe
agtaatggagatgtttcagcctagt

SEQ ID NO: 35394 - DNA, 25 bp, Artificial
  Probe
cttcaatctgaccatcaaaggacat

SEQ ID NO: 35395 - DNA, 25 bp, Artificial
  Probe
aatatgactaaccagaacactaatg

SEQ ID NO: 35396 - DNA, 25 bp, Artificial
  Probe
taggttgcttcaatctgaccatcaa

SEQ ID NO: 35397 - DNA, 25 bp, Artificial
  Probe
ctaggttgcttcaatctgaccatca

SEQ ID NO: 35398 - DNA, 25 bp, Artificial
  Probe
acggcattgatgatgagtcctatga

SEQ ID NO: 35399 - DNA, 25 bp, Artificial
  Probe
gagtttcaacttgccaatgctaatg

SEQ ID NO: 35400 - DNA, 25 bp, Artificial
  Probe
agagtttcaacttgccaatgctaat

SEQ ID NO: 35401 - DNA, 25 bp, Artificial
  Probe
aatttccatctgctcctctgacaaa

SEQ ID NO: 35402 - DNA, 25 bp, Artificial
  Probe
aagagtttcaacttgccaatgctaa

SEQ ID NO: 35403 - DNA, 25 bp, Artificial
  Probe
ttcaatctgaccatcaaaggacatg

SEQ ID NO: 35404 - DNA, 25 bp, Artificial
  Probe
gacggcattgatgatgagtcctatg

SEQ ID NO: 35405 - DNA, 25 bp, Artificial
  Probe
atgatgagtcctatgaagccatctt

SEQ ID NO: 35406 - DNA, 25 bp, Artificial
  Probe
agtttcaacttgccaatgctaatgt

SEQ ID NO: 35407 - DNA, 25 bp, Artificial
  Probe
acaatgactactttgaatactttgg

SEQ ID NO: 35408 - DNA, 25 bp, Artificial
  Probe
agacggcattgatgatgagtcctat

SEQ ID NO: 35409 - DNA, 25 bp, Artificial
  Probe
gaagagtttcaacttgccaatgcta

SEQ ID NO: 35410 - DNA, 25 bp, Artificial
  Probe
taatggagatgtttcagcctagtgc

SEQ ID NO: 35411 - DNA, 25 bp, Artificial
  Probe
ctctttgagaacttgagaatgctgc

SEQ ID NO: 35412 - DNA, 25 bp, Artificial
  Probe
gctctttgagaacttgagaatgctg

SEQ ID NO: 35413 - DNA, 25 bp, Artificial
  Probe
gatgatgagtcctatgaagccatct

SEQ ID NO: 35414 - DNA, 25 bp, Artificial
  Probe
ttgcttcaatctgaccatcaaagga

SEQ ID NO: 35415 - DNA, 25 bp, Artificial
  Probe
atatgtatgaagttggagcagagag

SEQ ID NO: 35416 - DNA, 25 bp, Artificial
  Probe
gatatgtatgaagttggagcagaga

SEQ ID NO: 35417 - DNA, 25 bp, Artificial
  Probe
tgatatgtatgaagttggagcagag

SEQ ID NO: 35418 - DNA, 25 bp, Artificial
  Probe
gtgatatgtatgaagttggagcaga

SEQ ID NO: 35419 - DNA, 25 bp, Artificial
  Probe
tatgtatgaagttggagcagagagt

SEQ ID NO: 35420 - DNA, 25 bp, Artificial
  Probe
gacatagtaattggtatcctggagc

SEQ ID NO: 35421 - DNA, 25 bp, Artificial
  Probe
ggtgatatgtatgaagttggagcag

SEQ ID NO: 35422 - DNA, 25 bp, Artificial
  Probe
caggtgatatgtatgaagttggagc

SEQ ID NO: 35423 - DNA, 25 bp, Artificial
  Probe
tgacatagtaattggtatcctggag

SEQ ID NO: 35424 - DNA, 25 bp, Artificial
  Probe
aggtgatatgtatgaagttggagca

SEQ ID NO: 35425 - DNA, 25 bp, Artificial
  Probe
atgacatagtaattggtatcctgga

SEQ ID NO: 35426 - DNA, 25 bp, Artificial
  Probe
acaggtgatatgtatgaagttggag

SEQ ID NO: 35427 - DNA, 25 bp, Artificial
  Probe
aacaggtgatatgtatgaagttgga

SEQ ID NO: 35428 - DNA, 25 bp, Artificial
  Probe
tggaacaggtgatatgtatgaagtt

SEQ ID NO: 35429 - DNA, 25 bp, Artificial
  Probe
gaacaggtgatatgtatgaagttgg

SEQ ID NO: 35430 - DNA, 25 bp, Artificial
  Probe
ggaacaggtgatatgtatgaagttg

SEQ ID NO: 35431 - DNA, 25 bp, Artificial
  Probe
gtacattgatattgacatccaccat

SEQ ID NO: 35432 - DNA, 25 bp, Artificial
  Probe
ctggaacaggtgatatgtatgaagt

SEQ ID NO: 35433 - DNA, 25 bp, Artificial
  Probe
aatgacatagtaattggtatcctgg

SEQ ID NO: 35434 - DNA, 25 bp, Artificial
  Probe
atgtatgaagttggagcagagagtg

SEQ ID NO: 35435 - DNA, 25 bp, Artificial
  Probe
tacattgatattgacatccaccatg

SEQ ID NO: 35436 - DNA, 25 bp, Artificial
  Probe
gaatcagaactcacgccagtatcta

SEQ ID NO: 35437 - DNA, 25 bp, Artificial
  Probe
cattgatgaccagagttacaagcac

SEQ ID NO: 35438 - DNA, 25 bp, Artificial
  Probe
catagtaattggtatcctggagctg

SEQ ID NO: 35439 - DNA, 25 bp, Artificial
  Probe
acatagtaattggtatcctggagct

SEQ ID NO: 35440 - DNA, 25 bp, Artificial
  Probe
aatcagaactcacgccagtatctag

SEQ ID NO: 35441 - DNA, 25 bp, Artificial
  Probe
gatggacaggtctctggaacattat

SEQ ID NO: 35442 - DNA, 25 bp, Artificial
  Probe
cctttcctcaaactctcatataccc

SEQ ID NO: 35443 - DNA, 25 bp, Artificial
  Probe
ccctttcctcaaactctcatatacc

SEQ ID NO: 35444 - DNA, 25 bp, Artificial
  Probe
atggacaggtctctggaacattatg

SEQ ID NO: 35445 - DNA, 25 bp, Artificial
  Probe
ctttcctcaaactctcatatacccg

SEQ ID NO: 35446 - DNA, 25 bp, Artificial
  Probe
ttcctcaaactctcatatacccgat

SEQ ID NO: 35447 - DNA, 25 bp, Artificial
  Probe
tttcctcaaactctcatatacccga

SEQ ID NO: 35448 - DNA, 25 bp, Artificial
  Probe
tatgaaacatctctgctggtagaag

SEQ ID NO: 35449 - DNA, 25 bp, Artificial
  Probe
atatgaaacatctctgctggtagaa

SEQ ID NO: 35450 - DNA, 25 bp, Artificial
  Probe
atagtaattggtatcctggagctgc

SEQ ID NO: 35451 - DNA, 25 bp, Artificial
  Probe
aggtctctggaacattatgggtaat

SEQ ID NO: 35452 - DNA, 25 bp, Artificial
  Probe
aaggaaagcgatgtggagatttaag

SEQ ID NO: 35453 - DNA, 25 bp, Artificial
  Probe
ctcaaactctcatatacccgatgga

SEQ ID NO: 35454 - DNA, 25 bp, Artificial
  Probe
tcctcaaactctcatatacccgatg

SEQ ID NO: 35455 - DNA, 25 bp, Artificial
  Probe
attgatgaccagagttacaagcacc

SEQ ID NO: 35456 - DNA, 25 bp, Artificial
  Probe
caaggaaagcgatgtggagatttaa

SEQ ID NO: 35457 - DNA, 25 bp, Artificial
  Probe
ggaaagcgatgtggagatttaagag

SEQ ID NO: 35458 - DNA, 25 bp, Artificial
  Probe
atgaaacatctctgctggtagaaga

SEQ ID NO: 35459 - DNA, 25 bp, Artificial
  Probe
aaactctcatatacccgatggacag

SEQ ID NO: 35460 - DNA, 25 bp, Artificial
  Probe
aacaagcagaatcaactctctcctc

SEQ ID NO: 35461 - DNA, 25 bp, Artificial
  Probe
aacaataactcctcctccaacaagc

SEQ ID NO: 35462 - DNA, 25 bp, Artificial
  Probe
caacaagcagaatcaactctctcct

SEQ ID NO: 35463 - DNA, 25 bp, Artificial
  Probe
tccaacaagcagaatcaactctctc

SEQ ID NO: 35464 - DNA, 25 bp, Artificial
  Probe
ctccaacaagcagaatcaactctct

SEQ ID NO: 35465 - DNA, 25 bp, Artificial
  Probe
aaacaataactcctcctccaacaag

SEQ ID NO: 35466 - DNA, 25 bp, Artificial
  Probe
acaagcagaatcaactctctcctct

SEQ ID NO: 35467 - DNA, 25 bp, Artificial
  Probe
caataactcctcctccaacaagcag

SEQ ID NO: 35468 - DNA, 25 bp, Artificial
  Probe
taactcctcctccaacaagcagaat

SEQ ID NO: 35469 - DNA, 25 bp, Artificial
  Probe
ataactcctcctccaacaagcagaa

SEQ ID NO: 35470 - DNA, 25 bp, Artificial
  Probe
aataactcctcctccaacaagcaga

SEQ ID NO: 35471 - DNA, 25 bp, Artificial
  Probe
ctcctccaacaagcagaatcaactc

SEQ ID NO: 35472 - DNA, 25 bp, Artificial
  Probe
ccaacaagcagaatcaactctctcc

SEQ ID NO: 35473 - DNA, 25 bp, Artificial
  Probe
cctccaacaagcagaatcaactctc

SEQ ID NO: 35474 - DNA, 25 bp, Artificial
  Probe
acaataactcctcctccaacaagca

SEQ ID NO: 35475 - DNA, 25 bp, Artificial
  Probe
agaatcaactctctcctctggaagg

SEQ ID NO: 35476 - DNA, 25 bp, Artificial
  Probe
tcctccaacaagcagaatcaactct

SEQ ID NO: 35477 - DNA, 25 bp, Artificial
  Probe
aaaacaataactcctcctccaacaa

SEQ ID NO: 35478 - DNA, 25 bp, Artificial
  Probe
ctcctcctccaacaagcagaatcaa

SEQ ID NO: 35479 - DNA, 25 bp, Artificial
  Probe
aactcctcctccaacaagcagaatc

SEQ ID NO: 35480 - DNA, 25 bp, Artificial
  Probe
gaaaacaataactcctcctccaaca

SEQ ID NO: 35481 - DNA, 25 bp, Artificial
  Probe
aaagggagaacaccgaaaacaataa

SEQ ID NO: 35482 - DNA, 25 bp, Artificial
  Probe
agaacaccgaaaacaataactcctc

SEQ ID NO: 35483 - DNA, 25 bp, Artificial
  Probe
gaaagggagaacaccgaaaacaata

SEQ ID NO: 35484 - DNA, 25 bp, Artificial
  Probe
cctcctccaacaagcagaatcaact

SEQ ID NO: 35485 - DNA, 25 bp, Artificial
  Probe
tcctcctccaacaagcagaatcaac

SEQ ID NO: 35486 - DNA, 25 bp, Artificial
  Probe
aagggagaacaccgaaaacaataac

SEQ ID NO: 35487 - DNA, 25 bp, Artificial
  Probe
cgaaaacaataactcctcctccaac

SEQ ID NO: 35488 - DNA, 25 bp, Artificial
  Probe
tcatgtccagctcagaagaggaatt

SEQ ID NO: 35489 - DNA, 25 bp, Artificial
  Probe
cagaatcaactctctcctctggaag

SEQ ID NO: 35490 - DNA, 25 bp, Artificial
  Probe
gagaacaccgaaaacaataactcct

SEQ ID NO: 35491 - DNA, 25 bp, Artificial
  Probe
gaacaccgaaaacaataactcctcc

SEQ ID NO: 35492 - DNA, 25 bp, Artificial
  Probe
aacaccgaaaacaataactcctcct

SEQ ID NO: 35493 - DNA, 25 bp, Artificial
  Probe
agggagaacaccgaaaacaataact

SEQ ID NO: 35494 - DNA, 25 bp, Artificial
  Probe
ctactgttttaaggagaagtctcgg

SEQ ID NO: 35495 - DNA, 25 bp, Artificial
  Probe
ctcatgtccagctcagaagaggaat

SEQ ID NO: 35496 - DNA, 25 bp, Artificial
  Probe
gctactgttttaaggagaagtctcg

SEQ ID NO: 35497 - DNA, 25 bp, Artificial
  Probe
catgtccagctcagaagaggaattc

SEQ ID NO: 35498 - DNA, 25 bp, Artificial
  Probe
gggagaacaccgaaaacaataactc

SEQ ID NO: 35499 - DNA, 25 bp, Artificial
  Probe
ccgaaaacaataactcctcctccaa

SEQ ID NO: 35500 - DNA, 25 bp, Artificial
  Probe
acaccgaaaacaataactcctcctc

SEQ ID NO: 35501 - DNA, 25 bp, Artificial
  Probe
caagcagaatcaactctctcctctg

SEQ ID NO: 35502 - DNA, 25 bp, Artificial
  Probe
agctactgttttaaggagaagtctc

SEQ ID NO: 35503 - DNA, 25 bp, Artificial
  Probe
tactgttttaaggagaagtctcggg

SEQ ID NO: 35504 - DNA, 25 bp, Artificial
  Probe
gatggcgaagagactagctactgtt

SEQ ID NO: 35505 - DNA, 25 bp, Artificial
  Probe
ccgtttctattactcttctggttcc

SEQ ID NO: 35506 - DNA, 25 bp, Artificial
  Probe
cgtttctattactcttctggttcca

SEQ ID NO: 35507 - DNA, 25 bp, Artificial
  Probe
ttctattactcttctggttccagct

SEQ ID NO: 35508 - DNA, 25 bp, Artificial
  Probe
tctattactcttctggttccagctc

SEQ ID NO: 35509 - DNA, 25 bp, Artificial
  Probe
accgtttctattactcttctggttc

SEQ ID NO: 35510 - DNA, 25 bp, Artificial
  Probe
aaaccgtttctattactcttctggt

SEQ ID NO: 35511 - DNA, 25 bp, Artificial
  Probe
ctattactcttctggttccagctcg

SEQ ID NO: 35512 - DNA, 25 bp, Artificial
  Probe
tttctattactcttctggttccagc

SEQ ID NO: 35513 - DNA, 25 bp, Artificial
  Probe
gtttctattactcttctggttccag

SEQ ID NO: 35514 - DNA, 25 bp, Artificial
  Probe
aaaaccgtttctattactcttctgg

SEQ ID NO: 35515 - DNA, 25 bp, Artificial
  Probe
tattactcttctggttccagctcgc

SEQ ID NO: 35516 - DNA, 25 bp, Artificial
  Probe
aaccgtttctattactcttctggtt

SEQ ID NO: 35517 - DNA, 25 bp, Artificial
  Probe
gaaaaccgtttctattactcttctg

SEQ ID NO: 35518 - DNA, 25 bp, Artificial
  Probe
gttggattggcatcatcgtcacaac

SEQ ID NO: 35519 - DNA, 25 bp, Artificial
  Probe
acagtcgtttggagaaaaccgtttc

SEQ ID NO: 35520 - DNA, 25 bp, Artificial
  Probe
cgtttggagaaaaccgtttctatta

SEQ ID NO: 35521 - DNA, 25 bp, Artificial
  Probe
tggagaaaaccgtttctattactct

SEQ ID NO: 35522 - DNA, 25 bp, Artificial
  Probe
ttggagaaaaccgtttctattactc

SEQ ID NO: 35523 - DNA, 25 bp, Artificial
  Probe
cacagtcgtttggagaaaaccgttt

SEQ ID NO: 35524 - DNA, 25 bp, Artificial
  Probe
ggagaaaaccgtttctattactctt

SEQ ID NO: 35525 - DNA, 25 bp, Artificial
  Probe
tcgtttggagaaaaccgtttctatt

SEQ ID NO: 35526 - DNA, 25 bp, Artificial
  Probe
gtttggagaaaaccgtttctattac

SEQ ID NO: 35527 - DNA, 25 bp, Artificial
  Probe
taacagttctcccctgtatccgaat

SEQ ID NO: 35528 - DNA, 25 bp, Artificial
  Probe
tttggagaaaaccgtttctattact

SEQ ID NO: 35529 - DNA, 25 bp, Artificial
  Probe
ttaacagttctcccctgtatccgaa

SEQ ID NO: 35530 - DNA, 25 bp, Artificial
  Probe
gtcgtttggagaaaaccgtttctat

SEQ ID NO: 35531 - DNA, 25 bp, Artificial
  Probe
agaaaaccgtttctattactcttct

SEQ ID NO: 35532 - DNA, 25 bp, Artificial
  Probe
gagaaaaccgtttctattactcttc

SEQ ID NO: 35533 - DNA, 25 bp, Artificial
  Probe
agtcgtttggagaaaaccgtttcta

SEQ ID NO: 35534 - DNA, 25 bp, Artificial
  Probe
gatgcacagtcgtttggagaaaacc

SEQ ID NO: 35535 - DNA, 25 bp, Artificial
  Probe
ggatgcacagtcgtttggagaaaac

SEQ ID NO: 35536 - DNA, 25 bp, Artificial
  Probe
aacagttctcccctgtatccgaatg

SEQ ID NO: 35537 - DNA, 25 bp, Artificial
  Probe
gttaacagttctcccctgtatccga

SEQ ID NO: 35538 - DNA, 25 bp, Artificial
  Probe
cagtcgtttggagaaaaccgtttct

SEQ ID NO: 35539 - DNA, 25 bp, Artificial
  Probe
aaagcacaatctatctgatacccac

SEQ ID NO: 35540 - DNA, 25 bp, Artificial
  Probe
agcacaatctatctgatacccactt

SEQ ID NO: 35541 - DNA, 25 bp, Artificial
  Probe
aagcacaatctatctgatacccact

SEQ ID NO: 35542 - DNA, 25 bp, Artificial
  Probe
gcacaatctatctgatacccacttg

SEQ ID NO: 35543 - DNA, 25 bp, Artificial
  Probe
aaaagcacaatctatctgataccca

SEQ ID NO: 35544 - DNA, 25 bp, Artificial
  Probe
ccccgactcttgtaaatacactaaa

SEQ ID NO: 35545 - DNA, 25 bp, Artificial
  Probe
cccgactcttgtaaatacactaaaa

SEQ ID NO: 35546 - DNA, 25 bp, Artificial
  Probe
gtgaacctcctctttggtcctctag

SEQ ID NO: 35547 - DNA, 25 bp, Artificial
  Probe
tgtgaacctcctctttggtcctcta

SEQ ID NO: 35548 - DNA, 25 bp, Artificial
  Probe
ctaccgacttggtgtacatagcttt

SEQ ID NO: 35549 - DNA, 25 bp, Artificial
  Probe
tgaacctcctctttggtcctctagg

SEQ ID NO: 35550 - DNA, 25 bp, Artificial
  Probe
ggtgctaccgacttggtgtacatag

SEQ ID NO: 35551 - DNA, 25 bp, Artificial
  Probe
agaacatccgcgagactctagaaag

SEQ ID NO: 35552 - DNA, 25 bp, Artificial
  Probe
taccgacttggtgtacatagctttt

SEQ ID NO: 35553 - DNA, 25 bp, Artificial
  Probe
gagaacatccgcgagactctagaaa

SEQ ID NO: 35554 - DNA, 25 bp, Artificial
  Probe
gacttggtgtacatagcttttccca

SEQ ID NO: 35555 - DNA, 25 bp, Artificial
  Probe
cgacttggtgtacatagcttttccc

SEQ ID NO: 35556 - DNA, 25 bp, Artificial
  Probe
ccgacttggtgtacatagcttttcc

SEQ ID NO: 35557 - DNA, 25 bp, Artificial
  Probe
accgacttggtgtacatagcttttc

SEQ ID NO: 35558 - DNA, 25 bp, Artificial
  Probe
gctaccgacttggtgtacatagctt

SEQ ID NO: 35559 - DNA, 25 bp, Artificial
  Probe
atatgttgtattgtgggttcttagc

SEQ ID NO: 35560 - DNA, 25 bp, Artificial
  Probe
cttccaagccttcattgacttcatg

SEQ ID NO: 35561 - DNA, 25 bp, Artificial
  Probe
ccttccaagccttcattgacttcat

SEQ ID NO: 35562 - DNA, 25 bp, Artificial
  Probe
ttccaagccttcattgacttcatgt

SEQ ID NO: 35563 - DNA, 25 bp, Artificial
  Probe
gaccttccaagccttcattgacttc

SEQ ID NO: 35564 - DNA, 25 bp, Artificial
  Probe
aagtccttctctacagccctctatg

SEQ ID NO: 35565 - DNA, 25 bp, Artificial
  Probe
caagtccttctctacagccctctat

SEQ ID NO: 35566 - DNA, 25 bp, Artificial
  Probe
tccaagccttcattgacttcatgtc

SEQ ID NO: 35567 - DNA, 25 bp, Artificial
  Probe
cttgactacaagtccttctctacag

SEQ ID NO: 35568 - DNA, 25 bp, Artificial
  Probe
cgcttctggtctgctaaatatatat

SEQ ID NO: 35569 - DNA, 25 bp, Artificial
  Probe
ccttgactacaagtccttctctaca

SEQ ID NO: 35570 - DNA, 25 bp, Artificial
  Probe
accttccaagccttcattgacttca

SEQ ID NO: 35571 - DNA, 25 bp, Artificial
  Probe
tatatgttgtattgtgggttcttag

SEQ ID NO: 35572 - DNA, 25 bp, Artificial
  Probe
ctacaagtccttctctacagccctc

SEQ ID NO: 35573 - DNA, 25 bp, Artificial
  Probe
ttgactacaagtccttctctacagc

SEQ ID NO: 35574 - DNA, 25 bp, Artificial
  Probe
acaagtccttctctacagccctcta

SEQ ID NO: 35575 - DNA, 25 bp, Artificial
  Probe
tacaagtccttctctacagccctct

SEQ ID NO: 35576 - DNA, 25 bp, Artificial
  Probe
gcttctggtctgctaaatatatatg

SEQ ID NO: 35577 - DNA, 25 bp, Artificial
  Probe
gcgcttctggtctgctaaatatata

SEQ ID NO: 35578 - DNA, 25 bp, Artificial
  Probe
agtccttctctacagccctctatgg

SEQ ID NO: 35579 - DNA, 25 bp, Artificial
  Probe
actacaagtccttctctacagccct

SEQ ID NO: 35580 - DNA, 25 bp, Artificial
  Probe
tgactacaagtccttctctacagcc

SEQ ID NO: 35581 - DNA, 25 bp, Artificial
  Probe
atatatgttgtattgtgggttctta

SEQ ID NO: 35582 - DNA, 25 bp, Artificial
  Probe
tatatatgttgtattgtgggttctt

SEQ ID NO: 35583 - DNA, 25 bp, Artificial
  Probe
ctggtctgctaaatatatatgttgt

SEQ ID NO: 35584 - DNA, 25 bp, Artificial
  Probe
cccttgactacaagtccttctctac

SEQ ID NO: 35585 - DNA, 25 bp, Artificial
  Probe
tctggtctgctaaatatatatgttg

SEQ ID NO: 35586 - DNA, 25 bp, Artificial
  Probe
cttctggtctgctaaatatatatgt

SEQ ID NO: 35587 - DNA, 25 bp, Artificial
  Probe
ccaagccttcattgacttcatgtca

SEQ ID NO: 35588 - DNA, 25 bp, Artificial
  Probe
ttctggtctgctaaatatatatgtt

SEQ ID NO: 35589 - DNA, 25 bp, Artificial
  Probe
gcccttgactacaagtccttctcta

SEQ ID NO: 35590 - DNA, 25 bp, Artificial
  Probe
atatatatgttgtattgtgggttct

SEQ ID NO: 35591 - DNA, 25 bp, Artificial
  Probe
tggtctgctaaatatatatgttgta

SEQ ID NO: 35592 - DNA, 25 bp, Artificial
  Probe
gactacaagtccttctctacagccc

SEQ ID NO: 35593 - DNA, 25 bp, Artificial
  Probe
aatatatatgttgtattgtgggttc

SEQ ID NO: 35594 - DNA, 25 bp, Artificial
  Probe
ccctctggggatgggagaataaaac

SEQ ID NO: 35595 - DNA, 25 bp, Artificial
  Probe
accctctggggatgggagaataaaa

SEQ ID NO: 35596 - DNA, 25 bp, Artificial
  Probe
cttctctacagccctctatggggag

SEQ ID NO: 35597 - DNA, 25 bp, Artificial
  Probe
aacactatgcttctgaggagatcaa

SEQ ID NO: 35598 - DNA, 25 bp, Artificial
  Probe
ctatgcttctgaggagatcaaggaa

SEQ ID NO: 35599 - DNA, 25 bp, Artificial
  Probe
acactatgcttctgaggagatcaag

SEQ ID NO: 35600 - DNA, 25 bp, Artificial
  Probe
cactatgcttctgaggagatcaagg

SEQ ID NO: 35601 - DNA, 25 bp, Artificial
  Probe
actatgcttctgaggagatcaagga

SEQ ID NO: 35602 - DNA, 25 bp, Artificial
  Probe
gaaacactatgcttctgaggagatc

SEQ ID NO: 35603 - DNA, 25 bp, Artificial
  Probe
tatgcttctgaggagatcaaggaaa

SEQ ID NO: 35604 - DNA, 25 bp, Artificial
  Probe
ggaaacactatgcttctgaggagat

SEQ ID NO: 35605 - DNA, 25 bp, Artificial
  Probe
aaggaaacactatgcttctgaggag

SEQ ID NO: 35606 - DNA, 25 bp, Artificial
  Probe
catccaggacaaacacaagaaactc

SEQ ID NO: 35607 - DNA, 25 bp, Artificial
  Probe
aaacactatgcttctgaggagatca

SEQ ID NO: 35608 - DNA, 25 bp, Artificial
  Probe
caaggaaacactatgcttctgagga

SEQ ID NO: 35609 - DNA, 25 bp, Artificial
  Probe
tcatgctctggatggaagatgtcat

SEQ ID NO: 35610 - DNA, 25 bp, Artificial
  Probe
aggaaacactatgcttctgaggaga

SEQ ID NO: 35611 - DNA, 25 bp, Artificial
  Probe
caccgtggagactttacagagaatg

SEQ ID NO: 35612 - DNA, 25 bp, Artificial
  Probe
gaggagcttggaagagatcagaaca

SEQ ID NO: 35613 - DNA, 25 bp, Artificial
  Probe
tcatcaaggcatcaaagctgaaatc

SEQ ID NO: 35614 - DNA, 25 bp, Artificial
  Probe
gatcagaacaccgtggagactttac

SEQ ID NO: 35615 - DNA, 25 bp, Artificial
  Probe
agatcagaacaccgtggagacttta

SEQ ID NO: 35616 - DNA, 25 bp, Artificial
  Probe
ctttgaacatgacatccaagctctg

SEQ ID NO: 35617 - DNA, 25 bp, Artificial
  Probe
acaccgtggagactttacagagaat

SEQ ID NO: 35618 - DNA, 25 bp, Artificial
  Probe
ctcatgctctggatggaagatgtca

SEQ ID NO: 35619 - DNA, 25 bp, Artificial
  Probe
tgaggagcttggaagagatcagaac

SEQ ID NO: 35620 - DNA, 25 bp, Artificial
  Probe
aacaccgtggagactttacagagaa

SEQ ID NO: 35621 - DNA, 25 bp, Artificial
  Probe
atcagaacaccgtggagactttaca

SEQ ID NO: 35622 - DNA, 25 bp, Artificial
  Probe
aggagcttggaagagatcagaacac

SEQ ID NO: 35623 - DNA, 25 bp, Artificial
  Probe
ataagttttaccatgatgccaagga

SEQ ID NO: 35624 - DNA, 25 bp, Artificial
  Probe
gagactttacagagaatgcacacca

SEQ ID NO: 35625 - DNA, 25 bp, Artificial
  Probe
tggagactttacagagaatgcacac

SEQ ID NO: 35626 - DNA, 25 bp, Artificial
  Probe
gaagagatcagaacaccgtggagac

SEQ ID NO: 35627 - DNA, 25 bp, Artificial
  Probe
cataagttttaccatgatgccaagg

SEQ ID NO: 35628 - DNA, 25 bp, Artificial
  Probe
tgaggagatcaaggaaaagttactg

SEQ ID NO: 35629 - DNA, 25 bp, Artificial
  Probe
ctgaggagatcaaggaaaagttact

SEQ ID NO: 35630 - DNA, 25 bp, Artificial
  Probe
tctgaggagatcaaggaaaagttac

SEQ ID NO: 35631 - DNA, 25 bp, Artificial
  Probe
taagttttaccatgatgccaaggag

SEQ ID NO: 35632 - DNA, 25 bp, Artificial
  Probe
gaggagatcaaggaaaagttactgc

SEQ ID NO: 35633 - DNA, 25 bp, Artificial
  Probe
cttctgaggagatcaaggaaaagtt

SEQ ID NO: 35634 - DNA, 25 bp, Artificial
  Probe
tttacagagaatgcacaccaccttt

SEQ ID NO: 35635 - DNA, 25 bp, Artificial
  Probe
atccaggacaaacacaagaaactcc

SEQ ID NO: 35636 - DNA, 25 bp, Artificial
  Probe
ttctgaggagatcaaggaaaagtta

SEQ ID NO: 35637 - DNA, 25 bp, Artificial
  Probe
agactttacagagaatgcacaccac

SEQ ID NO: 35638 - DNA, 25 bp, Artificial
  Probe
accacctttgaacatgacatccaag

SEQ ID NO: 35639 - DNA, 25 bp, Artificial
  Probe
gaacaccgtggagactttacagaga

SEQ ID NO: 35640 - DNA, 25 bp, Artificial
  Probe
agaacaccgtggagactttacagag

SEQ ID NO: 35641 - DNA, 25 bp, Artificial
  Probe
gacaaacacaagaaactccctgagg

SEQ ID NO: 35642 - DNA, 25 bp, Artificial
  Probe
acttatatgttaagagcacagaagg

SEQ ID NO: 35643 - DNA, 25 bp, Artificial
  Probe
gtctctcaaatcccatactgtcaaa

SEQ ID NO: 35644 - DNA, 25 bp, Artificial
  Probe
gctaaccttggtactcaattcagta

SEQ ID NO: 35645 - DNA, 25 bp, Artificial
  Probe
tatctttaatgccatcaccactctt

SEQ ID NO: 35646 - DNA, 25 bp, Artificial
  Probe
acaacttatatgttaagagcacaga

SEQ ID NO: 35647 - DNA, 25 bp, Artificial
  Probe
agcacttgtctatttctgttgtcat

SEQ ID NO: 35648 - DNA, 25 bp, Artificial
  Probe
ctatctttaatgccatcaccactct

SEQ ID NO: 35649 - DNA, 25 bp, Artificial
  Probe
tcacttccctatctttaatgccatc

SEQ ID NO: 35650 - DNA, 25 bp, Artificial
  Probe
ttctgtaagctgtgtaggttctcaa

SEQ ID NO: 35651 - DNA, 25 bp, Artificial
  Probe
acttccctatctttaatgccatcac

SEQ ID NO: 35652 - DNA, 25 bp, Artificial
  Probe
cacttccctatctttaatgccatca

SEQ ID NO: 35653 - DNA, 25 bp, Artificial
  Probe
gtcacttccctatctttaatgccat

SEQ ID NO: 35654 - DNA, 25 bp, Artificial
  Probe
atctttaatgccatcaccactcttt

SEQ ID NO: 35655 - DNA, 25 bp, Artificial
  Probe
gttcaaccttctgtaagctgtgtag

SEQ ID NO: 35656 - DNA, 25 bp, Artificial
  Probe
aagttaaagtatgatgcttctcgtg

SEQ ID NO: 35657 - DNA, 25 bp, Artificial
  Probe
gagcacagaagggacttatctttag

SEQ ID NO: 35658 - DNA, 25 bp, Artificial
  Probe
cctatctttaatgccatcaccactc

SEQ ID NO: 35659 - DNA, 25 bp, Artificial
  Probe
cttccctatctttaatgccatcacc

SEQ ID NO: 35660 - DNA, 25 bp, Artificial
  Probe
cagtcacttccctatctttaatgcc

SEQ ID NO: 35661 - DNA, 25 bp, Artificial
  Probe
ccagtcacttccctatctttaatgc

SEQ ID NO: 35662 - DNA, 25 bp, Artificial
  Probe
gccagtcacttccctatctttaatg

SEQ ID NO: 35663 - DNA, 25 bp, Artificial
  Probe
tgtctctcaaatcccatactgtcaa

SEQ ID NO: 35664 - DNA, 25 bp, Artificial
  Probe
ctttaatgccatcaccactctttct

SEQ ID NO: 35665 - DNA, 25 bp, Artificial
  Probe
tctttaatgccatcaccactctttc

SEQ ID NO: 35666 - DNA, 25 bp, Artificial
  Probe
agagcacagaagggacttatcttta

SEQ ID NO: 35667 - DNA, 25 bp, Artificial
  Probe
tctgtaagctgtgtaggttctcaag

SEQ ID NO: 35668 - DNA, 25 bp, Artificial
  Probe
ggacttatctttagttgaatgccac

SEQ ID NO: 35669 - DNA, 25 bp, Artificial
  Probe
agtcacttccctatctttaatgcca

SEQ ID NO: 35670 - DNA, 25 bp, Artificial
  Probe
tgccagtcacttccctatctttaat

SEQ ID NO: 35671 - DNA, 25 bp, Artificial
  Probe
aaagttaaagtatgatgcttctcgt

SEQ ID NO: 35672 - DNA, 25 bp, Artificial
  Probe
agggacttatctttagttgaatgcc

SEQ ID NO: 35673 - DNA, 25 bp, Artificial
  Probe
gcacagaagggacttatctttagtt

SEQ ID NO: 35674 - DNA, 25 bp, Artificial
  Probe
tttaatgccatcaccactctttctg

SEQ ID NO: 35675 - DNA, 25 bp, Artificial
  Probe
cttatctttagttgaatgccactgt

SEQ ID NO: 35676 - DNA, 25 bp, Artificial
  Probe
acttatctttagttgaatgccactg

SEQ ID NO: 35677 - DNA, 25 bp, Artificial
  Probe
ggctaaccttggtactcaattcagt

SEQ ID NO: 35678 - DNA, 25 bp, Artificial
  Probe
cttctgtaagctgtgtaggttctca

SEQ ID NO: 35679 - DNA, 25 bp, Artificial
  Probe
gggacttatctttagttgaatgcca

SEQ ID NO: 35680 - DNA, 25 bp, Artificial
  Probe
tatctttagttgaatgccactgtgt

SEQ ID NO: 35681 - DNA, 25 bp, Artificial
  Probe
ttatctttagttgaatgccactgtg

SEQ ID NO: 35682 - DNA, 25 bp, Artificial
  Probe
agttaaagtatgatgcttctcgtgc

SEQ ID NO: 35683 - DNA, 25 bp, Artificial
  Probe
gacttatctttagttgaatgccact

SEQ ID NO: 35684 - DNA, 25 bp, Artificial
  Probe
aagggacttatctttagttgaatgc

SEQ ID NO: 35685 - DNA, 25 bp, Artificial
  Probe
acagaagggacttatctttagttga

SEQ ID NO: 35686 - DNA, 25 bp, Artificial
  Probe
cacagaagggacttatctttagttg

SEQ ID NO: 35687 - DNA, 25 bp, Artificial
  Probe
ttacgaagtctattcacagtgtctt

SEQ ID NO: 35688 - DNA, 25 bp, Artificial
  Probe
aagtctattcacagtgtcttcctca

SEQ ID NO: 35689 - DNA, 25 bp, Artificial
  Probe
ctaagagtgagttcgtgagttccag

SEQ ID NO: 35690 - DNA, 25 bp, Artificial
  Probe
gtctaagagtgagttcgtgagttcc

SEQ ID NO: 35691 - DNA, 25 bp, Artificial
  Probe
ggtctaagagtgagttcgtgagttc

SEQ ID NO: 35692 - DNA, 25 bp, Artificial
  Probe
agtctattcacagtgtcttcctcac

SEQ ID NO: 35693 - DNA, 25 bp, Artificial
  Probe
atattaagaggaggaaggagggaag

SEQ ID NO: 35694 - DNA, 25 bp, Artificial
  Probe
tatattaagaggaggaaggagggaa

SEQ ID NO: 35695 - DNA, 25 bp, Artificial
  Probe
ttatattaagaggaggaaggaggga

SEQ ID NO: 35696 - DNA, 25 bp, Artificial
  Probe
tctaagagtgagttcgtgagttcca

SEQ ID NO: 35697 - DNA, 25 bp, Artificial
  Probe
ggtctttacgaagtctattcacagt

SEQ ID NO: 35698 - DNA, 25 bp, Artificial
  Probe
gggtctttacgaagtctattcacag

SEQ ID NO: 35699 - DNA, 25 bp, Artificial
  Probe
ctgggtctttacgaagtctattcac

SEQ ID NO: 35700 - DNA, 25 bp, Artificial
  Probe
tttacgaagtctattcacagtgtct

SEQ ID NO: 35701 - DNA, 25 bp, Artificial
  Probe
tctttacgaagtctattcacagtgt

SEQ ID NO: 35702 - DNA, 25 bp, Artificial
  Probe
ctttacgaagtctattcacagtgtc

SEQ ID NO: 35703 - DNA, 25 bp, Artificial
  Probe
gtctttacgaagtctattcacagtg

SEQ ID NO: 35704 - DNA, 25 bp, Artificial
  Probe
tggtctaagagtgagttcgtgagtt

SEQ ID NO: 35705 - DNA, 25 bp, Artificial
  Probe
tttatattaagaggaggaaggaggg

SEQ ID NO: 35706 - DNA, 25 bp, Artificial
  Probe
tgggtctttacgaagtctattcaca

SEQ ID NO: 35707 - DNA, 25 bp, Artificial
  Probe
tcctgggtctttacgaagtctattc

SEQ ID NO: 35708 - DNA, 25 bp, Artificial
  Probe
cctgggtctttacgaagtctattca

SEQ ID NO: 35709 - DNA, 25 bp, Artificial
  Probe
gtcctgggtctttacgaagtctatt

SEQ ID NO: 35710 - DNA, 25 bp, Artificial
  Probe
gggatcacctatggcttatttatac

SEQ ID NO: 35711 - DNA, 25 bp, Artificial
  Probe
ctggtctaagagtgagttcgtgagt

SEQ ID NO: 35712 - DNA, 25 bp, Artificial
  Probe
taagagtgagttcgtgagttccagg

SEQ ID NO: 35713 - DNA, 25 bp, Artificial
  Probe
tacgaagtctattcacagtgtcttc

SEQ ID NO: 35714 - DNA, 25 bp, Artificial
  Probe
gaagtctattcacagtgtcttcctc

SEQ ID NO: 35715 - DNA, 25 bp, Artificial
  Probe
ggatcacctatggcttatttatact

SEQ ID NO: 35716 - DNA, 25 bp, Artificial
  Probe
tattaagaggaggaaggagggaagc

SEQ ID NO: 35717 - DNA, 25 bp, Artificial
  Probe
cctggtctaagagtgagttcgtgag

SEQ ID NO: 35718 - DNA, 25 bp, Artificial
  Probe
gttgttaaagactcggctgtaactc

SEQ ID NO: 35719 - DNA, 25 bp, Artificial
  Probe
cgaagtctattcacagtgtcttcct

SEQ ID NO: 35720 - DNA, 25 bp, Artificial
  Probe
ttgttaaagactcggctgtaactca

SEQ ID NO: 35721 - DNA, 25 bp, Artificial
  Probe
ctgttgttaaagactcggctgtaac

SEQ ID NO: 35722 - DNA, 25 bp, Artificial
  Probe
acgaagtctattcacagtgtcttcc

SEQ ID NO: 35723 - DNA, 25 bp, Artificial
  Probe
tgttgttaaagactcggctgtaact

SEQ ID NO: 35724 - DNA, 25 bp, Artificial
  Probe
ggtcctgggtctttacgaagtctat

SEQ ID NO: 35725 - DNA, 25 bp, Artificial
  Probe
tgttaaagactcggctgtaactcag

SEQ ID NO: 35726 - DNA, 25 bp, Artificial
  Probe
cacacccagctagataaagtccttc

SEQ ID NO: 35727 - DNA, 25 bp, Artificial
  Probe
gctgttgttaaagactcggctgtaa

SEQ ID NO: 35728 - DNA, 25 bp, Artificial
  Probe
ttatttattttggtacttggagcgg

SEQ ID NO: 35729 - DNA, 25 bp, Artificial
  Probe
ggggatcacctatggcttatttata

SEQ ID NO: 35730 - DNA, 25 bp, Artificial
  Probe
ttaaagactcggctgtaactcagga

SEQ ID NO: 35731 - DNA, 25 bp, Artificial
  Probe
tatttattttggtacttggagcggg

SEQ ID NO: 35732 - DNA, 25 bp, Artificial
  Probe
tactggatgtgagattacagaggat

SEQ ID NO: 35733 - DNA, 25 bp, Artificial
  Probe
ctactggatgtgagattacagagga

SEQ ID NO: 35734 - DNA, 25 bp, Artificial
  Probe
actggatgtgagattacagaggatc

SEQ ID NO: 35735 - DNA, 25 bp, Artificial
  Probe
cctactggatgtgagattacagagg

SEQ ID NO: 35736 - DNA, 25 bp, Artificial
  Probe
attggcttggaggagttgataacag

SEQ ID NO: 35737 - DNA, 25 bp, Artificial
  Probe
tagcatctctgggaatcttctcttt

SEQ ID NO: 35738 - DNA, 25 bp, Artificial
  Probe
ttagcatctctgggaatcttctctt

SEQ ID NO: 35739 - DNA, 25 bp, Artificial
  Probe
gcctactggatgtgagattacagag

SEQ ID NO: 35740 - DNA, 25 bp, Artificial
  Probe
atgtgagattacagaggatcttacg

SEQ ID NO: 35741 - DNA, 25 bp, Artificial
  Probe
tggatgtgagattacagaggatctt

SEQ ID NO: 35742 - DNA, 25 bp, Artificial
  Probe
cattggcttggaggagttgataaca

SEQ ID NO: 35743 - DNA, 25 bp, Artificial
  Probe
ggatgtgagattacagaggatctta

SEQ ID NO: 35744 - DNA, 25 bp, Artificial
  Probe
gttagcatctctgggaatcttctct

SEQ ID NO: 35745 - DNA, 25 bp, Artificial
  Probe
cttggaggagttgataacagatgcc

SEQ ID NO: 35746 - DNA, 25 bp, Artificial
  Probe
ggcttggaggagttgataacagatg

SEQ ID NO: 35747 - DNA, 25 bp, Artificial
  Probe
ctggatgtgagattacagaggatct

SEQ ID NO: 35748 - DNA, 25 bp, Artificial
  Probe
tgttagcatctctgggaatcttctc

SEQ ID NO: 35749 - DNA, 25 bp, Artificial
  Probe
tgcctactggatgtgagattacaga

SEQ ID NO: 35750 - DNA, 25 bp, Artificial
  Probe
gtgcctactggatgtgagattacag

SEQ ID NO: 35751 - DNA, 25 bp, Artificial
  Probe
gtgttagcatctctgggaatcttct

SEQ ID NO: 35752 - DNA, 25 bp, Artificial
  Probe
gatgtgagattacagaggatcttac

SEQ ID NO: 35753 - DNA, 25 bp, Artificial
  Probe
agcatctctgggaatcttctctttc

SEQ ID NO: 35754 - DNA, 25 bp, Artificial
  Probe
tggcttggaggagttgataacagat

SEQ ID NO: 35755 - DNA, 25 bp, Artificial
  Probe
ctgtgttagcatctctgggaatctt

SEQ ID NO: 35756 - DNA, 25 bp, Artificial
  Probe
tgtgttagcatctctgggaatcttc

SEQ ID NO: 35757 - DNA, 25 bp, Artificial
  Probe
gcttggaggagttgataacagatgc

SEQ ID NO: 35758 - DNA, 25 bp, Artificial
  Probe
ttggcttggaggagttgataacaga

SEQ ID NO: 35759 - DNA, 25 bp, Artificial
  Probe
gtgagattacagaggatcttacgtc

SEQ ID NO: 35760 - DNA, 25 bp, Artificial
  Probe
tgtgagattacagaggatcttacgt

SEQ ID NO: 35761 - DNA, 25 bp, Artificial
  Probe
tgagattacagaggatcttacgtcc

SEQ ID NO: 35762 - DNA, 25 bp, Artificial
  Probe
ccattggcttggaggagttgataac

SEQ ID NO: 35763 - DNA, 25 bp, Artificial
  Probe
tgaataccggatcaatgtgactgag

SEQ ID NO: 35764 - DNA, 25 bp, Artificial
  Probe
gagtgaataccggatcaatgtgact

SEQ ID NO: 35765 - DNA, 25 bp, Artificial
  Probe
ttctggagtgaataccggatcaatg

SEQ ID NO: 35766 - DNA, 25 bp, Artificial
  Probe
gttctggagtgaataccggatcaat

SEQ ID NO: 35767 - DNA, 25 bp, Artificial
  Probe
cgtgcctactggatgtgagattaca

SEQ ID NO: 35768 - DNA, 25 bp, Artificial
  Probe
gtgaataccggatcaatgtgactga

SEQ ID NO: 35769 - DNA, 25 bp, Artificial
  Probe
agtgaataccggatcaatgtgactg

SEQ ID NO: 35770 - DNA, 25 bp, Artificial
  Probe
ttggaggagttgataacagatgccg

SEQ ID NO: 35771 - DNA, 25 bp, Artificial
  Probe
ccaagcagtagactatgaaaacttt

SEQ ID NO: 35772 - DNA, 25 bp, Artificial
  Probe
tttctttgacacctgaactccaaac

SEQ ID NO: 35773 - DNA, 25 bp, Artificial
  Probe
gccaagcagtagactatgaaaactt

SEQ ID NO: 35774 - DNA, 25 bp, Artificial
  Probe
cttttctttgacacctgaactccaa

SEQ ID NO: 35775 - DNA, 25 bp, Artificial
  Probe
gaataccggatcaatgtgactgagg

SEQ ID NO: 35776 - DNA, 25 bp, Artificial
  Probe
aaaacttttcttgtacttggagtcc

SEQ ID NO: 35777 - DNA, 25 bp, Artificial
  Probe
gcttatatcaccatctccacatcat

SEQ ID NO: 35778 - DNA, 25 bp, Artificial
  Probe
atccacagagacctcaagagtaata

SEQ ID NO: 35779 - DNA, 25 bp, Artificial
  Probe
tccacagagacctcaagagtaataa

SEQ ID NO: 35780 - DNA, 25 bp, Artificial
  Probe
ccacagagacctcaagagtaataat

SEQ ID NO: 35781 - DNA, 25 bp, Artificial
  Probe
ttatatcaccatctccacatcattg

SEQ ID NO: 35782 - DNA, 25 bp, Artificial
  Probe
catccacagagacctcaagagtaat

SEQ ID NO: 35783 - DNA, 25 bp, Artificial
  Probe
atatcaccatctccacatcattgag

SEQ ID NO: 35784 - DNA, 25 bp, Artificial
  Probe
tatatcaccatctccacatcattga

SEQ ID NO: 35785 - DNA, 25 bp, Artificial
  Probe
cttatatcaccatctccacatcatt

SEQ ID NO: 35786 - DNA, 25 bp, Artificial
  Probe
atcatccacagagacctcaagagta

SEQ ID NO: 35787 - DNA, 25 bp, Artificial
  Probe
tcatccacagagacctcaagagtaa

SEQ ID NO: 35788 - DNA, 25 bp, Artificial
  Probe
cagcttatatcaccatctccacatc

SEQ ID NO: 35789 - DNA, 25 bp, Artificial
  Probe
agcttatatcaccatctccacatca

SEQ ID NO: 35790 - DNA, 25 bp, Artificial
  Probe
cacagagacctcaagagtaataata

SEQ ID NO: 35791 - DNA, 25 bp, Artificial
  Probe
caatcatccacagagacctcaagag

SEQ ID NO: 35792 - DNA, 25 bp, Artificial
  Probe
cttattcaaacatcaacaacaggga

SEQ ID NO: 35793 - DNA, 25 bp, Artificial
  Probe
ttctgtatgaactgatgactggtca

SEQ ID NO: 35794 - DNA, 25 bp, Artificial
  Probe
ccgaagtaatcagaatgcaagataa

SEQ ID NO: 35795 - DNA, 25 bp, Artificial
  Probe
gctaccttattcaaacatcaacaac

SEQ ID NO: 35796 - DNA, 25 bp, Artificial
  Probe
ttattcaaacatcaacaacagggat

SEQ ID NO: 35797 - DNA, 25 bp, Artificial
  Probe
aatcatccacagagacctcaagagt

SEQ ID NO: 35798 - DNA, 25 bp, Artificial
  Probe
tcaatcatccacagagacctcaaga

SEQ ID NO: 35799 - DNA, 25 bp, Artificial
  Probe
ccagcttatatcaccatctccacat

SEQ ID NO: 35800 - DNA, 25 bp, Artificial
  Probe
ctccagcttatatcaccatctccac

SEQ ID NO: 35801 - DNA, 25 bp, Artificial
  Probe
tattcaaacatcaacaacagggatc

SEQ ID NO: 35802 - DNA, 25 bp, Artificial
  Probe
attcaaacatcaacaacagggatca

SEQ ID NO: 35803 - DNA, 25 bp, Artificial
  Probe
gtcaatcatccacagagacctcaag

SEQ ID NO: 35804 - DNA, 25 bp, Artificial
  Probe
caagtcaatcatccacagagacctc

SEQ ID NO: 35805 - DNA, 25 bp, Artificial
  Probe
taccttattcaaacatcaacaacag

SEQ ID NO: 35806 - DNA, 25 bp, Artificial
  Probe
ctaccttattcaaacatcaacaaca

SEQ ID NO: 35807 - DNA, 25 bp, Artificial
  Probe
caaacatcaacaacagggatcagat

SEQ ID NO: 35808 - DNA, 25 bp, Artificial
  Probe
accttattcaaacatcaacaacagg

SEQ ID NO: 35809 - DNA, 25 bp, Artificial
  Probe
acagagacctcaagagtaataatat

SEQ ID NO: 35810 - DNA, 25 bp, Artificial
  Probe
ccttattcaaacatcaacaacaggg

SEQ ID NO: 35811 - DNA, 25 bp, Artificial
  Probe
attacttacacgccaagtcaatcat

SEQ ID NO: 35812 - DNA, 25 bp, Artificial
  Probe
atgactggtcagctaccttattcaa

SEQ ID NO: 35813 - DNA, 25 bp, Artificial
  Probe
ttcaaacatcaacaacagggatcag

SEQ ID NO: 35814 - DNA, 25 bp, Artificial
  Probe
agtttgaacagttgtctggatctat

SEQ ID NO: 35815 - DNA, 25 bp, Artificial
  Probe
tccagcttatatcaccatctccaca

SEQ ID NO: 35816 - DNA, 25 bp, Artificial
  Probe
cagctaccttattcaaacatcaaca

SEQ ID NO: 35817 - DNA, 25 bp, Artificial
  Probe
agtcaatcatccacagagacctcaa

SEQ ID NO: 35818 - DNA, 25 bp, Artificial
  Probe
aagtcaatcatccacagagacctca

SEQ ID NO: 35819 - DNA, 25 bp, Artificial
  Probe
aaacccatatagctttcagtcagac

SEQ ID NO: 35820 - DNA, 25 bp, Artificial
  Probe
tcagctaccttattcaaacatcaac

SEQ ID NO: 35821 - DNA, 25 bp, Artificial
  Probe
gtcagctaccttattcaaacatcaa

SEQ ID NO: 35822 - DNA, 25 bp, Artificial
  Probe
gttaatatgaacgtccctctcggtg

SEQ ID NO: 35823 - DNA, 25 bp, Artificial
  Probe
ttaatatgaacgtccctctcggtgg

SEQ ID NO: 35824 - DNA, 25 bp, Artificial
  Probe
ggttaatatgaacgtccctctcggt

SEQ ID NO: 35825 - DNA, 25 bp, Artificial
  Probe
gagtctgacctgatgtagacgcaag

SEQ ID NO: 35826 - DNA, 25 bp, Artificial
  Probe
taatatgaacgtccctctcggtgga

SEQ ID NO: 35827 - DNA, 25 bp, Artificial
  Probe
gggttaatatgaacgtccctctcgg

SEQ ID NO: 35828 - DNA, 25 bp, Artificial
  Probe
atatgaacgtccctctcggtggaat

SEQ ID NO: 35829 - DNA, 25 bp, Artificial
  Probe
ggggttaatatgaacgtccctctcg

SEQ ID NO: 35830 - DNA, 25 bp, Artificial
  Probe
atataagaaccgacacaggaaccta

SEQ ID NO: 35831 - DNA, 25 bp, Artificial
  Probe
tatataagaaccgacacaggaacct

SEQ ID NO: 35832 - DNA, 25 bp, Artificial
  Probe
gtatataagaaccgacacaggaacc

SEQ ID NO: 35833 - DNA, 25 bp, Artificial
  Probe
tataagaaccgacacaggaacctac

SEQ ID NO: 35834 - DNA, 25 bp, Artificial
  Probe
cagtccaagagttgaatgttcatta

SEQ ID NO: 35835 - DNA, 25 bp, Artificial
  Probe
tgtatataagaaccgacacaggaac

SEQ ID NO: 35836 - DNA, 25 bp, Artificial
  Probe
ccagtccaagagttgaatgttcatt

SEQ ID NO: 35837 - DNA, 25 bp, Artificial
  Probe
agtccaagagttgaatgttcattat

SEQ ID NO: 35838 - DNA, 25 bp, Artificial
  Probe
tttgcttgcttatttgtttctgtgt

SEQ ID NO: 35839 - DNA, 25 bp, Artificial
  Probe
ttgcttatttgtttctgtgtcactt

SEQ ID NO: 35840 - DNA, 25 bp, Artificial
  Probe
cttgcttatttgtttctgtgtcact

SEQ ID NO: 35841 - DNA, 25 bp, Artificial
  Probe
ttgcttgcttatttgtttctgtgtc

SEQ ID NO: 35842 - DNA, 25 bp, Artificial
  Probe
tgcttatttgtttctgtgtcacttg

SEQ ID NO: 35843 - DNA, 25 bp, Artificial
  Probe
gtccaagagttgaatgttcattatt

SEQ ID NO: 35844 - DNA, 25 bp, Artificial
  Probe
cttatttgtttctgtgtcacttggc

SEQ ID NO: 35845 - DNA, 25 bp, Artificial
  Probe
gcttatttgtttctgtgtcacttgg

SEQ ID NO: 35846 - DNA, 25 bp, Artificial
  Probe
ataagaaccgacacaggaacctaca

SEQ ID NO: 35847 - DNA, 25 bp, Artificial
  Probe
tatttgtttctgtgtcacttggcat

SEQ ID NO: 35848 - DNA, 25 bp, Artificial
  Probe
agaaaggaatgtatatattgcggga

SEQ ID NO: 35849 - DNA, 25 bp, Artificial
  Probe
gagaaaggaatgtatatattgcggg

SEQ ID NO: 35850 - DNA, 25 bp, Artificial
  Probe
ttatttgtttctgtgtcacttggca

SEQ ID NO: 35851 - DNA, 25 bp, Artificial
  Probe
gcttgcttatttgtttctgtgtcac

SEQ ID NO: 35852 - DNA, 25 bp, Artificial
  Probe
tgcttgcttatttgtttctgtgtca

SEQ ID NO: 35853 - DNA, 25 bp, Artificial
  Probe
tgtaaatccgaagcacaaatgtaat

SEQ ID NO: 35854 - DNA, 25 bp, Artificial
  Probe
taagaaccgacacaggaacctacaa

SEQ ID NO: 35855 - DNA, 25 bp, Artificial
  Probe
gaaaggaatgtatatattgcgggat

SEQ ID NO: 35856 - DNA, 25 bp, Artificial
  Probe
aatccgaagcacaaatgtaatacag

SEQ ID NO: 35857 - DNA, 25 bp, Artificial
  Probe
ccgaagcacaaatgtaatacagttt

SEQ ID NO: 35858 - DNA, 25 bp, Artificial
  Probe
taaatccgaagcacaaatgtaatac

SEQ ID NO: 35859 - DNA, 25 bp, Artificial
  Probe
gtaaatccgaagcacaaatgtaata

SEQ ID NO: 35860 - DNA, 25 bp, Artificial
  Probe
agagaaaggaatgtatatattgcgg

SEQ ID NO: 35861 - DNA, 25 bp, Artificial
  Probe
aaatccgaagcacaaatgtaataca

SEQ ID NO: 35862 - DNA, 25 bp, Artificial
  Probe
atccgaagcacaaatgtaatacagt

SEQ ID NO: 35863 - DNA, 25 bp, Artificial
  Probe
gtcacttggcatgagatgtttattt

SEQ ID NO: 35864 - DNA, 25 bp, Artificial
  Probe
aaggaatgtatatattgcgggattt

SEQ ID NO: 35865 - DNA, 25 bp, Artificial
  Probe
aaaggaatgtatatattgcgggatt

SEQ ID NO: 35866 - DNA, 25 bp, Artificial
  Probe
tccgaagcacaaatgtaatacagtt

SEQ ID NO: 35867 - DNA, 25 bp, Artificial
  Probe
tgtcacttggcatgagatgtttatt

SEQ ID NO: 35868 - DNA, 25 bp, Artificial
  Probe
ataacgtattgtaaatccgaagcac

SEQ ID NO: 35869 - DNA, 25 bp, Artificial
  Probe
gtgtcacttggcatgagatgtttat

SEQ ID NO: 35870 - DNA, 25 bp, Artificial
  Probe
gagagaaaggaatgtatatattgcg

SEQ ID NO: 35871 - DNA, 25 bp, Artificial
  Probe
tccaagagttgaatgttcattatta

SEQ ID NO: 35872 - DNA, 25 bp, Artificial
  Probe
gactgcatctgtatgtagtgaaatg

SEQ ID NO: 35873 - DNA, 25 bp, Artificial
  Probe
tggactactgtatataacgtattgt

SEQ ID NO: 35874 - DNA, 25 bp, Artificial
  Probe
ggactgcatctgtatgtagtgaaat

SEQ ID NO: 35875 - DNA, 25 bp, Artificial
  Probe
cctaatgagactgacaatgactaca

SEQ ID NO: 35876 - DNA, 25 bp, Artificial
  Probe
gcctaatgagactgacaatgactac

SEQ ID NO: 35877 - DNA, 25 bp, Artificial
  Probe
agcctaatgagactgacaatgacta

SEQ ID NO: 35878 - DNA, 25 bp, Artificial
  Probe
aatgagactgacaatgactacatca

SEQ ID NO: 35879 - DNA, 25 bp, Artificial
  Probe
taatgagactgacaatgactacatc

SEQ ID NO: 35880 - DNA, 25 bp, Artificial
  Probe
ctaatgagactgacaatgactacat

SEQ ID NO: 35881 - DNA, 25 bp, Artificial
  Probe
accagttctacaatgccatcaagag

SEQ ID NO: 35882 - DNA, 25 bp, Artificial
  Probe
gaccagttctacaatgccatcaaga

SEQ ID NO: 35883 - DNA, 25 bp, Artificial
  Probe
cagcctaatgagactgacaatgact

SEQ ID NO: 35884 - DNA, 25 bp, Artificial
  Probe
tgagactgacaatgactacatcatc

SEQ ID NO: 35885 - DNA, 25 bp, Artificial
  Probe
atgagactgacaatgactacatcat

SEQ ID NO: 35886 - DNA, 25 bp, Artificial
  Probe
gagactgacaatgactacatcatcc

SEQ ID NO: 35887 - DNA, 25 bp, Artificial
  Probe
ccagttctacaatgccatcaagagg

SEQ ID NO: 35888 - DNA, 25 bp, Artificial
  Probe
cgaccagttctacaatgccatcaag

SEQ ID NO: 35889 - DNA, 25 bp, Artificial
  Probe
tcaacacttcttccaccatctcctg

SEQ ID NO: 35890 - DNA, 25 bp, Artificial
  Probe
gtcaacacttcttccaccatctcct

SEQ ID NO: 35891 - DNA, 25 bp, Artificial
  Probe
gcagcctaatgagactgacaatgac

SEQ ID NO: 35892 - DNA, 25 bp, Artificial
  Probe
tccaccttgaatgaagtcaacactt

SEQ ID NO: 35893 - DNA, 25 bp, Artificial
  Probe
agtcaacacttcttccaccatctcc

SEQ ID NO: 35894 - DNA, 25 bp, Artificial
  Probe
aagtcaacacttcttccaccatctc

SEQ ID NO: 35895 - DNA, 25 bp, Artificial
  Probe
acgaccagttctacaatgccatcaa

SEQ ID NO: 35896 - DNA, 25 bp, Artificial
  Probe
gaaatgctgggaagaaaagtttgag

SEQ ID NO: 35897 - DNA, 25 bp, Artificial
  Probe
cagttctacaatgccatcaagaggg

SEQ ID NO: 35898 - DNA, 25 bp, Artificial
  Probe
aaatgctgggaagaaaagtttgaga

SEQ ID NO: 35899 - DNA, 25 bp, Artificial
  Probe
agaaatgctgggaagaaaagtttga

SEQ ID NO: 35900 - DNA, 25 bp, Artificial
  Probe
aacgaccagttctacaatgccatca

SEQ ID NO: 35901 - DNA, 25 bp, Artificial
  Probe
ctccaccttgaatgaagtcaacact

SEQ ID NO: 35902 - DNA, 25 bp, Artificial
  Probe
gataccagctctgtcctctacactg

SEQ ID NO: 35903 - DNA, 25 bp, Artificial
  Probe
agactgacaatgactacatcatccc

SEQ ID NO: 35904 - DNA, 25 bp, Artificial
  Probe
aatgctgggaagaaaagtttgagac

SEQ ID NO: 35905 - DNA, 25 bp, Artificial
  Probe
tactctgggaaatcttcacactggg

SEQ ID NO: 35906 - DNA, 25 bp, Artificial
  Probe
gaggagtttctgaggagtgaccatc

SEQ ID NO: 35907 - DNA, 25 bp, Artificial
  Probe
gatgaggagtttctgaggagtgacc

SEQ ID NO: 35908 - DNA, 25 bp, Artificial
  Probe
ggatgaggagtttctgaggagtgac

SEQ ID NO: 35909 - DNA, 25 bp, Artificial
  Probe
cagaaatgctgggaagaaaagtttg

SEQ ID NO: 35910 - DNA, 25 bp, Artificial
  Probe
atctatgagatcatgcagaaatgct

SEQ ID NO: 35911 - DNA, 25 bp, Artificial
  Probe
gtgcagcctaatgagactgacaatg

SEQ ID NO: 35912 - DNA, 25 bp, Artificial
  Probe
tggatgaggagtttctgaggagtga

SEQ ID NO: 35913 - DNA, 25 bp, Artificial
  Probe
gtggatgaggagtttctgaggagtg

SEQ ID NO: 35914 - DNA, 25 bp, Artificial
  Probe
tctatgagatcatgcagaaatgctg

SEQ ID NO: 35915 - DNA, 25 bp, Artificial
  Probe
tgcagcctaatgagactgacaatga

SEQ ID NO: 35916 - DNA, 25 bp, Artificial
  Probe
atgctgggaagaaaagtttgagact

SEQ ID NO: 35917 - DNA, 25 bp, Artificial
  Probe
tgtgcagcctaatgagactgacaat

SEQ ID NO: 35918 - DNA, 25 bp, Artificial
  Probe
ctatgagatcatgcagaaatgctgg

SEQ ID NO: 35919 - DNA, 25 bp, Artificial
  Probe
tgaggagtttctgaggagtgaccat

SEQ ID NO: 35920 - DNA, 25 bp, Artificial
  Probe
tgagaacctggaaacaaagtaaact

SEQ ID NO: 35921 - DNA, 25 bp, Artificial
  Probe
gagaacctggaaacaaagtaaacta

SEQ ID NO: 35922 - DNA, 25 bp, Artificial
  Probe
ttgagaacctggaaacaaagtaaac

SEQ ID NO: 35923 - DNA, 25 bp, Artificial
  Probe
gctaacttggtctttgttgtagata

SEQ ID NO: 35924 - DNA, 25 bp, Artificial
  Probe
agaacctggaaacaaagtaaactat

SEQ ID NO: 35925 - DNA, 25 bp, Artificial
  Probe
agctaacttggtctttgttgtagat

SEQ ID NO: 35926 - DNA, 25 bp, Artificial
  Probe
ctaacttggtctttgttgtagatag

SEQ ID NO: 35927 - DNA, 25 bp, Artificial
  Probe
gaacctggaaacaaagtaaactata

SEQ ID NO: 35928 - DNA, 25 bp, Artificial
  Probe
gtttgagaacctggaaacaaagtaa

SEQ ID NO: 35929 - DNA, 25 bp, Artificial
  Probe
tttgagaacctggaaacaaagtaaa

SEQ ID NO: 35930 - DNA, 25 bp, Artificial
  Probe
cagacttgacatccacctcccttat

SEQ ID NO: 35931 - DNA, 25 bp, Artificial
  Probe
acctggaaacaaagtaaactataaa

SEQ ID NO: 35932 - DNA, 25 bp, Artificial
  Probe
aacctggaaacaaagtaaactataa

SEQ ID NO: 35933 - DNA, 25 bp, Artificial
  Probe
agacttgacatccacctcccttatg

SEQ ID NO: 35934 - DNA, 25 bp, Artificial
  Probe
cctggaaacaaagtaaactataaac

SEQ ID NO: 35935 - DNA, 25 bp, Artificial
  Probe
tagctaacttggtctttgttgtaga

SEQ ID NO: 35936 - DNA, 25 bp, Artificial
  Probe
cttgacatccacctcccttatgtag

SEQ ID NO: 35937 - DNA, 25 bp, Artificial
  Probe
acttgacatccacctcccttatgta

SEQ ID NO: 35938 - DNA, 25 bp, Artificial
  Probe
ctggaaacaaagtaaactataaact

SEQ ID NO: 35939 - DNA, 25 bp, Artificial
  Probe
ttgacatccacctcccttatgtagg

SEQ ID NO: 35940 - DNA, 25 bp, Artificial
  Probe
ggtttgagaacctggaaacaaagta

SEQ ID NO: 35941 - DNA, 25 bp, Artificial
  Probe
ccttatgtagggaaaagtatttagc

SEQ ID NO: 35942 - DNA, 25 bp, Artificial
  Probe
gacttgacatccacctcccttatgt

SEQ ID NO: 35943 - DNA, 25 bp, Artificial
  Probe
tcagatcctgaaaggtttgagaacc

SEQ ID NO: 35944 - DNA, 25 bp, Artificial
  Probe
cttatgtagggaaaagtatttagct

SEQ ID NO: 35945 - DNA, 25 bp, Artificial
  Probe
gactggaaatggcagaccatatgat

SEQ ID NO: 35946 - DNA, 25 bp, Artificial
  Probe
aaggactggaaatggcagaccatat

SEQ ID NO: 35947 - DNA, 25 bp, Artificial
  Probe
actggaaatggcagaccatatgatg

SEQ ID NO: 35948 - DNA, 25 bp, Artificial
  Probe
ctggaaatggcagaccatatgatgg

SEQ ID NO: 35949 - DNA, 25 bp, Artificial
  Probe
gaaggactggaaatggcagaccata

SEQ ID NO: 35950 - DNA, 25 bp, Artificial
  Probe
ggactggaaatggcagaccatatga

SEQ ID NO: 35951 - DNA, 25 bp, Artificial
  Probe
aggactggaaatggcagaccatatg

SEQ ID NO: 35952 - DNA, 25 bp, Artificial
  Probe
ttatgtagggaaaagtatttagcta

SEQ ID NO: 35953 - DNA, 25 bp, Artificial
  Probe
tacagtgacgaggagtctattctct

SEQ ID NO: 35954 - DNA, 25 bp, Artificial
  Probe
ctcacctatcgctcaataaattccc

SEQ ID NO: 35955 - DNA, 25 bp, Artificial
  Probe
cctcacctatcgctcaataaattcc

SEQ ID NO: 35956 - DNA, 25 bp, Artificial
  Probe
ccctcacctatcgctcaataaattc

SEQ ID NO: 35957 - DNA, 25 bp, Artificial
  Probe
cacctatcgctcaataaattccctg

SEQ ID NO: 35958 - DNA, 25 bp, Artificial
  Probe
tcacctatcgctcaataaattccct

SEQ ID NO: 35959 - DNA, 25 bp, Artificial
  Probe
acagtgacgaggagtctattctctc

SEQ ID NO: 35960 - DNA, 25 bp, Artificial
  Probe
ggaatctacagtgggtgaaggatac

SEQ ID NO: 35961 - DNA, 25 bp, Artificial
  Probe
aggaatctacagtgggtgaaggata

SEQ ID NO: 35962 - DNA, 25 bp, Artificial
  Probe
tctattctctcccgctttgatgaag

SEQ ID NO: 35963 - DNA, 25 bp, Artificial
  Probe
ctattctctcccgctttgatgaaga

SEQ ID NO: 35964 - DNA, 25 bp, Artificial
  Probe
gtctattctctcccgctttgatgaa

SEQ ID NO: 35965 - DNA, 25 bp, Artificial
  Probe
tcaataaattccctgcccttccttc

SEQ ID NO: 35966 - DNA, 25 bp, Artificial
  Probe
ctcaataaattccctgcccttcctt

SEQ ID NO: 35967 - DNA, 25 bp, Artificial
  Probe
agtctattctctcccgctttgatga

SEQ ID NO: 35968 - DNA, 25 bp, Artificial
  Probe
acctatcgctcaataaattccctgc

SEQ ID NO: 35969 - DNA, 25 bp, Artificial
  Probe
gagtctattctctcccgctttgatg

SEQ ID NO: 35970 - DNA, 25 bp, Artificial
  Probe
gaggaatctacagtgggtgaaggat

SEQ ID NO: 35971 - DNA, 25 bp, Artificial
  Probe
tctaaactcttacccctcacctatc

SEQ ID NO: 35972 - DNA, 25 bp, Artificial
  Probe
ctctaaactcttacccctcacctat

SEQ ID NO: 35973 - DNA, 25 bp, Artificial
  Probe
gaatctacagtgggtgaaggatacc

SEQ ID NO: 35974 - DNA, 25 bp, Artificial
  Probe
aatctacagtgggtgaaggatacct

SEQ ID NO: 35975 - DNA, 25 bp, Artificial
  Probe
caataaattccctgcccttccttcc

SEQ ID NO: 35976 - DNA, 25 bp, Artificial
  Probe
ctatcgctcaataaattccctgccc

SEQ ID NO: 35977 - DNA, 25 bp, Artificial
  Probe
cctatcgctcaataaattccctgcc

SEQ ID NO: 35978 - DNA, 25 bp, Artificial
  Probe
ctaaactcttacccctcacctatcg

SEQ ID NO: 35979 - DNA, 25 bp, Artificial
  Probe
tatcgctcaataaattccctgccct

SEQ ID NO: 35980 - DNA, 25 bp, Artificial
  Probe
cctctaaactcttacccctcaccta

SEQ ID NO: 35981 - DNA, 25 bp, Artificial
  Probe
cccctcacctatcgctcaataaatt

SEQ ID NO: 35982 - DNA, 25 bp, Artificial
  Probe
gtggaggaatctacagtgggtgaag

SEQ ID NO: 35983 - DNA, 25 bp, Artificial
  Probe
tacccctcacctatcgctcaataaa

SEQ ID NO: 35984 - DNA, 25 bp, Artificial
  Probe
ttacccctcacctatcgctcaataa

SEQ ID NO: 35985 - DNA, 25 bp, Artificial
  Probe
tattctctcccgctttgatgaagag

SEQ ID NO: 35986 - DNA, 25 bp, Artificial
  Probe
cttacccctcacctatcgctcaata

SEQ ID NO: 35987 - DNA, 25 bp, Artificial
  Probe
aataaattccctgcccttccttccc

SEQ ID NO: 35988 - DNA, 25 bp, Artificial
  Probe
atcgctcaataaattccctgccctt

SEQ ID NO: 35989 - DNA, 25 bp, Artificial
  Probe
gttgctggtggaggaatctacagtg

SEQ ID NO: 35990 - DNA, 25 bp, Artificial
  Probe
acccctcacctatcgctcaataaat

SEQ ID NO: 35991 - DNA, 25 bp, Artificial
  Probe
taaactcttacccctcacctatcgc

SEQ ID NO: 35992 - DNA, 25 bp, Artificial
  Probe
gtccatgccctctaaactcttaccc

SEQ ID NO: 35993 - DNA, 25 bp, Artificial
  Probe
gctcaataaattccctgcccttcct

SEQ ID NO: 35994 - DNA, 25 bp, Artificial
  Probe
ggaggaatctacagtgggtgaagga

SEQ ID NO: 35995 - DNA, 25 bp, Artificial
  Probe
atctacagtgggtgaaggatacctt

SEQ ID NO: 35996 - DNA, 25 bp, Artificial
  Probe
ccctctaaactcttacccctcacct

SEQ ID NO: 35997 - DNA, 25 bp, Artificial
  Probe
atgccctctaaactcttacccctca

SEQ ID NO: 35998 - DNA, 25 bp, Artificial
  Probe
cttcagtacagagcatagcagatat

SEQ ID NO: 35999 - DNA, 25 bp, Artificial
  Probe
ttcagtacagagcatagcagatatt

SEQ ID NO: 36000 - DNA, 25 bp, Artificial
  Probe
aatgacaggaactgatagtgattgc

SEQ ID NO: 36001 - DNA, 25 bp, Artificial
  Probe
cctggtgatggataatgctcttgaa

SEQ ID NO: 36002 - DNA, 25 bp, Artificial
  Probe
tccaagtgtttctaccattatccag

SEQ ID NO: 36003 - DNA, 25 bp, Artificial
  Probe
ttccaagtgtttctaccattatcca

SEQ ID NO: 36004 - DNA, 25 bp, Artificial
  Probe
accattatccagtctacaaacaagg

SEQ ID NO: 36005 - DNA, 25 bp, Artificial
  Probe
ccaagtgtttctaccattatccagt

SEQ ID NO: 36006 - DNA, 25 bp, Artificial
  Probe
attatccagtctacaaacaaggctc

SEQ ID NO: 36007 - DNA, 25 bp, Artificial
  Probe
aagtgtttctaccattatccagtct

SEQ ID NO: 36008 - DNA, 25 bp, Artificial
  Probe
caagtgtttctaccattatccagtc

SEQ ID NO: 36009 - DNA, 25 bp, Artificial
  Probe
ttcctaaagagactactgagagaga

SEQ ID NO: 36010 - DNA, 25 bp, Artificial
  Probe
cacattaaagacaaggacggtaaag

SEQ ID NO: 36011 - DNA, 25 bp, Artificial
  Probe
ataaagcaagcaactgggaaatcta

SEQ ID NO: 36012 - DNA, 25 bp, Artificial
  Probe
atagtgattgcccaaataatgaacc

SEQ ID NO: 36013 - DNA, 25 bp, Artificial
  Probe
tcacattaaagacaaggacggtaaa

SEQ ID NO: 36014 - DNA, 25 bp, Artificial
  Probe
cattatccagtctacaaacaaggct

SEQ ID NO: 36015 - DNA, 25 bp, Artificial
  Probe
aaataaagcaagcaactgggaaatc

SEQ ID NO: 36016 - DNA, 25 bp, Artificial
  Probe
tcctaaagagactactgagagagat

SEQ ID NO: 36017 - DNA, 25 bp, Artificial
  Probe
tgtttcctaaagagactactgagag

SEQ ID NO: 36018 - DNA, 25 bp, Artificial
  Probe
tagtgattgcccaaataatgaacca

SEQ ID NO: 36019 - DNA, 25 bp, Artificial
  Probe
ctgatagtgattgcccaaataatga

SEQ ID NO: 36020 - DNA, 25 bp, Artificial
  Probe
tttccaagtgtttctaccattatcc

SEQ ID NO: 36021 - DNA, 25 bp, Artificial
  Probe
caaataaagcaagcaactgggaaat

SEQ ID NO: 36022 - DNA, 25 bp, Artificial
  Probe
gtttcctaaagagactactgagaga

SEQ ID NO: 36023 - DNA, 25 bp, Artificial
  Probe
ctggtgatggataatgctcttgaaa

SEQ ID NO: 36024 - DNA, 25 bp, Artificial
  Probe
tctaccattatccagtctacaaaca

SEQ ID NO: 36025 - DNA, 25 bp, Artificial
  Probe
aagaaggttaaggcatcaacaaatg

SEQ ID NO: 36026 - DNA, 25 bp, Artificial
  Probe
aaagaaggttaaggcatcaacaaat

SEQ ID NO: 36027 - DNA, 25 bp, Artificial
  Probe
gtgtttctaccattatccagtctac

SEQ ID NO: 36028 - DNA, 25 bp, Artificial
  Probe
agtgtttctaccattatccagtcta

SEQ ID NO: 36029 - DNA, 25 bp, Artificial
  Probe
ggttaaggcatcaacaaatgtagtt

SEQ ID NO: 36030 - DNA, 25 bp, Artificial
  Probe
aaggttaaggcatcaacaaatgtag

SEQ ID NO: 36031 - DNA, 25 bp, Artificial
  Probe
gaaggttaaggcatcaacaaatgta

SEQ ID NO: 36032 - DNA, 25 bp, Artificial
  Probe
tttcctaaagagactactgagagag

SEQ ID NO: 36033 - DNA, 25 bp, Artificial
  Probe
attgcccaaataatgaaccaaactt

SEQ ID NO: 36034 - DNA, 25 bp, Artificial
  Probe
ttgcccaaataatgaaccaaacttt

SEQ ID NO: 36035 - DNA, 25 bp, Artificial
  Probe
tgatagtgattgcccaaataatgaa

SEQ ID NO: 36036 - DNA, 25 bp, Artificial
  Probe
tctacaaacaaggctctgaagattc

SEQ ID NO: 36037 - DNA, 25 bp, Artificial
  Probe
cctttccaagtgtttctaccattat

SEQ ID NO: 36038 - DNA, 25 bp, Artificial
  Probe
ttatccagtctacaaacaaggctct

SEQ ID NO: 36039 - DNA, 25 bp, Artificial
  Probe
aataaagcaagcaactgggaaatct

SEQ ID NO: 36040 - DNA, 25 bp, Artificial
  Probe
atgtttcctaaagagactactgaga

SEQ ID NO: 36041 - DNA, 25 bp, Artificial
  Probe
gattgcccaaataatgaaccaaact

SEQ ID NO: 36042 - DNA, 25 bp, Artificial
  Probe
aggttaaggcatcaacaaatgtagt

SEQ ID NO: 36043 - DNA, 25 bp, Artificial
  Probe
acattgatagattcctcttctccat

SEQ ID NO: 36044 - DNA, 25 bp, Artificial
  Probe
aagccagtgaatgttaatgaagtac

SEQ ID NO: 36045 - DNA, 25 bp, Artificial
  Probe
tggctgtgaactacattgatagatt

SEQ ID NO: 36046 - DNA, 25 bp, Artificial
  Probe
ttggctgtgaactacattgatagat

SEQ ID NO: 36047 - DNA, 25 bp, Artificial
  Probe
tacattgatagattcctcttctcca

SEQ ID NO: 36048 - DNA, 25 bp, Artificial
  Probe
gccagtgaatgttaatgaagtacct

SEQ ID NO: 36049 - DNA, 25 bp, Artificial
  Probe
agccagtgaatgttaatgaagtacc

SEQ ID NO: 36050 - DNA, 25 bp, Artificial
  Probe
gctgtgaactacattgatagattcc

SEQ ID NO: 36051 - DNA, 25 bp, Artificial
  Probe
ggctgtgaactacattgatagattc

SEQ ID NO: 36052 - DNA, 25 bp, Artificial
  Probe
agtgaatgttaatgaagtacctgac

SEQ ID NO: 36053 - DNA, 25 bp, Artificial
  Probe
gatagattcctcttctccatgtctg

SEQ ID NO: 36054 - DNA, 25 bp, Artificial
  Probe
tgatagattcctcttctccatgtct

SEQ ID NO: 36055 - DNA, 25 bp, Artificial
  Probe
ttgatagattcctcttctccatgtc

SEQ ID NO: 36056 - DNA, 25 bp, Artificial
  Probe
ctacattgatagattcctcttctcc

SEQ ID NO: 36057 - DNA, 25 bp, Artificial
  Probe
attgatagattcctcttctccatgt

SEQ ID NO: 36058 - DNA, 25 bp, Artificial
  Probe
gtgaactacattgatagattcctct

SEQ ID NO: 36059 - DNA, 25 bp, Artificial
  Probe
gtgaatgttaatgaagtacctgact

SEQ ID NO: 36060 - DNA, 25 bp, Artificial
  Probe
cattgatagattcctcttctccatg

SEQ ID NO: 36061 - DNA, 25 bp, Artificial
  Probe
ccagtgaatgttaatgaagtacctg

SEQ ID NO: 36062 - DNA, 25 bp, Artificial
  Probe
atagattcctcttctccatgtctgc

SEQ ID NO: 36063 - DNA, 25 bp, Artificial
  Probe
tgtgaactacattgatagattcctc

SEQ ID NO: 36064 - DNA, 25 bp, Artificial
  Probe
ctgtgaactacattgatagattcct

SEQ ID NO: 36065 - DNA, 25 bp, Artificial
  Probe
cagtgaatgttaatgaagtacctga

SEQ ID NO: 36066 - DNA, 25 bp, Artificial
  Probe
actacattgatagattcctcttctc

SEQ ID NO: 36067 - DNA, 25 bp, Artificial
  Probe
aaagtgagttatatgaagaggcagc

SEQ ID NO: 36068 - DNA, 25 bp, Artificial
  Probe
tgaactacattgatagattcctctt

SEQ ID NO: 36069 - DNA, 25 bp, Artificial
  Probe
aagtgagttatatgaagaggcagcc

SEQ ID NO: 36070 - DNA, 25 bp, Artificial
  Probe
gctagttgaagtgggagaagaatat

SEQ ID NO: 36071 - DNA, 25 bp, Artificial
  Probe
aaagccagtgaatgttaatgaagta

SEQ ID NO: 36072 - DNA, 25 bp, Artificial
  Probe
ttatatgaagaggcagccagacatc

SEQ ID NO: 36073 - DNA, 25 bp, Artificial
  Probe
cgtaaagaaactcagtgtgaagatg

SEQ ID NO: 36074 - DNA, 25 bp, Artificial
  Probe
gtaaagaaactcagtgtgaagatgc

SEQ ID NO: 36075 - DNA, 25 bp, Artificial
  Probe
aactacattgatagattcctcttct

SEQ ID NO: 36076 - DNA, 25 bp, Artificial
  Probe
gttatatgaagaggcagccagacat

SEQ ID NO: 36077 - DNA, 25 bp, Artificial
  Probe
tgaatgttaatgaagtacctgacta

SEQ ID NO: 36078 - DNA, 25 bp, Artificial
  Probe
gagttatatgaagaggcagccagac

SEQ ID NO: 36079 - DNA, 25 bp, Artificial
  Probe
tttggctgtgaactacattgataga

SEQ ID NO: 36080 - DNA, 25 bp, Artificial
  Probe
catttggctgtgaactacattgata

SEQ ID NO: 36081 - DNA, 25 bp, Artificial
  Probe
gaactacattgatagattcctcttc

SEQ ID NO: 36082 - DNA, 25 bp, Artificial
  Probe
taaagtgagttatatgaagaggcag

SEQ ID NO: 36083 - DNA, 25 bp, Artificial
  Probe
ctaaagtgagttatatgaagaggca

SEQ ID NO: 36084 - DNA, 25 bp, Artificial
  Probe
taaagaaactcagtgtgaagatgcc

SEQ ID NO: 36085 - DNA, 25 bp, Artificial
  Probe
atttggctgtgaactacattgatag

SEQ ID NO: 36086 - DNA, 25 bp, Artificial
  Probe
tataaactacagaatgagaccctgc

SEQ ID NO: 36087 - DNA, 25 bp, Artificial
  Probe
atgttaatgaagtacctgactatca

SEQ ID NO: 36088 - DNA, 25 bp, Artificial
  Probe
ttaagttcaatcatgtctgtggtcc

SEQ ID NO: 36089 - DNA, 25 bp, Artificial
  Probe
gtaacaaggtgctacagtagttgac

SEQ ID NO: 36090 - DNA, 25 bp, Artificial
  Probe
taagttcaatcatgtctgtggtcca

SEQ ID NO: 36091 - DNA, 25 bp, Artificial
  Probe
ggtaacaaggtgctacagtagttga

SEQ ID NO: 36092 - DNA, 25 bp, Artificial
  Probe
atatgatagaggcttaggactcgaa

SEQ ID NO: 36093 - DNA, 25 bp, Artificial
  Probe
aatatgatagaggcttaggactcga

SEQ ID NO: 36094 - DNA, 25 bp, Artificial
  Probe
tggtaacaaggtgctacagtagttg

SEQ ID NO: 36095 - DNA, 25 bp, Artificial
  Probe
taacaaggtgctacagtagttgacg

SEQ ID NO: 36096 - DNA, 25 bp, Artificial
  Probe
tgaaatatgatagaggcttaggact

SEQ ID NO: 36097 - DNA, 25 bp, Artificial
  Probe
ggatgaaatatgatagaggcttagg

SEQ ID NO: 36098 - DNA, 25 bp, Artificial
  Probe
aaatatgatagaggcttaggactcg

SEQ ID NO: 36099 - DNA, 25 bp, Artificial
  Probe
tttaagttcaatcatgtctgtggtc

SEQ ID NO: 36100 - DNA, 25 bp, Artificial
  Probe
caagaagggagatacagagacaagg

SEQ ID NO: 36101 - DNA, 25 bp, Artificial
  Probe
atgaaatatgatagaggcttaggac

SEQ ID NO: 36102 - DNA, 25 bp, Artificial
  Probe
tggatgaaatatgatagaggcttag

SEQ ID NO: 36103 - DNA, 25 bp, Artificial
  Probe
ctgtggtccagaggaagttatttaa

SEQ ID NO: 36104 - DNA, 25 bp, Artificial
  Probe
tgtggtccagaggaagttatttaat

SEQ ID NO: 36105 - DNA, 25 bp, Artificial
  Probe
gatgaaatatgatagaggcttagga

SEQ ID NO: 36106 - DNA, 25 bp, Artificial
  Probe
gaaatatgatagaggcttaggactc

SEQ ID NO: 36107 - DNA, 25 bp, Artificial
  Probe
gcaagaagggagatacagagacaag

SEQ ID NO: 36108 - DNA, 25 bp, Artificial
  Probe
aagttcaatcatgtctgtggtccag

SEQ ID NO: 36109 - DNA, 25 bp, Artificial
  Probe
aatatttaatggcgaggcatacgag

SEQ ID NO: 36110 - DNA, 25 bp, Artificial
  Probe
tttatgcaagaagggagatacagag

SEQ ID NO: 36111 - DNA, 25 bp, Artificial
  Probe
ttatgcaagaagggagatacagaga

SEQ ID NO: 36112 - DNA, 25 bp, Artificial
  Probe
tatgatagaggcttaggactcgaaa

SEQ ID NO: 36113 - DNA, 25 bp, Artificial
  Probe
atggatgaaatatgatagaggctta

SEQ ID NO: 36114 - DNA, 25 bp, Artificial
  Probe
tatggatgaaatatgatagaggctt

SEQ ID NO: 36115 - DNA, 25 bp, Artificial
  Probe
ggagatacagagacaaggctgactt

SEQ ID NO: 36116 - DNA, 25 bp, Artificial
  Probe
atatttaatggcgaggcatacgagg

SEQ ID NO: 36117 - DNA, 25 bp, Artificial
  Probe
tatgcaagaagggagatacagagac

SEQ ID NO: 36118 - DNA, 25 bp, Artificial
  Probe
gtggtccagaggaagttatttaata

SEQ ID NO: 36119 - DNA, 25 bp, Artificial
  Probe
atatggatgaaatatgatagaggct

SEQ ID NO: 36120 - DNA, 25 bp, Artificial
  Probe
actgtcaaagttaatgctcctcacc

SEQ ID NO: 36121 - DNA, 25 bp, Artificial
  Probe
gtccagaggaagttatttaatatgc

SEQ ID NO: 36122 - DNA, 25 bp, Artificial
  Probe
caccgaatcttttgaatgaactgtc

SEQ ID NO: 36123 - DNA, 25 bp, Artificial
  Probe
aagaagggagatacagagacaaggc

SEQ ID NO: 36124 - DNA, 25 bp, Artificial
  Probe
aatgaactgtcaaagttaatgctcc

SEQ ID NO: 36125 - DNA, 25 bp, Artificial
  Probe
gacttggcagtgtttatagggcttt

SEQ ID NO: 36126 - DNA, 25 bp, Artificial
  Probe
ctgtcaaagttaatgctcctcaccc

SEQ ID NO: 36127 - DNA, 25 bp, Artificial
  Probe
atgaactgtcaaagttaatgctcct

SEQ ID NO: 36128 - DNA, 25 bp, Artificial
  Probe
tgaatgaactgtcaaagttaatgct

SEQ ID NO: 36129 - DNA, 25 bp, Artificial
  Probe
atcaccgaatcttttgaatgaactg

SEQ ID NO: 36130 - DNA, 25 bp, Artificial
  Probe
aaggctgacttggcagtgtttatag

SEQ ID NO: 36131 - DNA, 25 bp, Artificial
  Probe
gaatgaactgtcaaagttaatgctc

SEQ ID NO: 36132 - DNA, 25 bp, Artificial
  Probe
gaactgtcaaagttaatgctcctca

SEQ ID NO: 36133 - DNA, 25 bp, Artificial
  Probe
atatgactaagcagacctgtgtaag

SEQ ID NO: 36134 - DNA, 25 bp, Artificial
  Probe
tatatgactaagcagacctgtgtaa

SEQ ID NO: 36135 - DNA, 25 bp, Artificial
  Probe
atatatgactaagcagacctgtgta

SEQ ID NO: 36136 - DNA, 25 bp, Artificial
  Probe
tatatatgactaagcagacctgtgt

SEQ ID NO: 36137 - DNA, 25 bp, Artificial
  Probe
tatgactaagcagacctgtgtaagg

SEQ ID NO: 36138 - DNA, 25 bp, Artificial
  Probe
cacccattgaaactaacacatacac

SEQ ID NO: 36139 - DNA, 25 bp, Artificial
  Probe
cacacccattgaaactaacacatac

SEQ ID NO: 36140 - DNA, 25 bp, Artificial
  Probe
acacccattgaaactaacacataca

SEQ ID NO: 36141 - DNA, 25 bp, Artificial
  Probe
acacacccattgaaactaacacata

SEQ ID NO: 36142 - DNA, 25 bp, Artificial
  Probe
ccacagagaaatcaaatgaacacaa

SEQ ID NO: 36143 - DNA, 25 bp, Artificial
  Probe
cacagagaaatcaaatgaacacaac

SEQ ID NO: 36144 - DNA, 25 bp, Artificial
  Probe
acagagaaatcaaatgaacacaact

SEQ ID NO: 36145 - DNA, 25 bp, Artificial
  Probe
acccattgaaactaacacatacacc

SEQ ID NO: 36146 - DNA, 25 bp, Artificial
  Probe
gaaatcaaatgaacacaacttgctg

SEQ ID NO: 36147 - DNA, 25 bp, Artificial
  Probe
agaaatcaaatgaacacaacttgct

SEQ ID NO: 36148 - DNA, 25 bp, Artificial
  Probe
gagaaatcaaatgaacacaacttgc

SEQ ID NO: 36149 - DNA, 25 bp, Artificial
  Probe
aaatcaaatgaacacaacttgctga

SEQ ID NO: 36150 - DNA, 25 bp, Artificial
  Probe
cagagaaatcaaatgaacacaactt

SEQ ID NO: 36151 - DNA, 25 bp, Artificial
  Probe
gacacacccattgaaactaacacat

SEQ ID NO: 36152 - DNA, 25 bp, Artificial
  Probe
aatcaaatgaacacaacttgctgac

SEQ ID NO: 36153 - DNA, 25 bp, Artificial
  Probe
cccattgaaactaacacatacaccc

SEQ ID NO: 36154 - DNA, 25 bp, Artificial
  Probe
gtgagagggaaagaaagagagagag

SEQ ID NO: 36155 - DNA, 25 bp, Artificial
  Probe
cccacagagaaatcaaatgaacaca

SEQ ID NO: 36156 - DNA, 25 bp, Artificial
  Probe
agagaaatcaaatgaacacaacttg

SEQ ID NO: 36157 - DNA, 25 bp, Artificial
  Probe
cagtgagagggaaagaaagagagag

SEQ ID NO: 36158 - DNA, 25 bp, Artificial
  Probe
ccattgaaactaacacatacacccg

SEQ ID NO: 36159 - DNA, 25 bp, Artificial
  Probe
agtgagagggaaagaaagagagaga

SEQ ID NO: 36160 - DNA, 25 bp, Artificial
  Probe
cagacacacccattgaaactaacac

SEQ ID NO: 36161 - DNA, 25 bp, Artificial
  Probe
ctcagacacacccattgaaactaac

SEQ ID NO: 36162 - DNA, 25 bp, Artificial
  Probe
tcagtgagagggaaagaaagagaga

SEQ ID NO: 36163 - DNA, 25 bp, Artificial
  Probe
agacacacccattgaaactaacaca

SEQ ID NO: 36164 - DNA, 25 bp, Artificial
  Probe
cattgaaactaacacatacacccgc

SEQ ID NO: 36165 - DNA, 25 bp, Artificial
  Probe
tgagagggaaagaaagagagagagg

SEQ ID NO: 36166 - DNA, 25 bp, Artificial
  Probe
atatatatgactaagcagacctgtg

SEQ ID NO: 36167 - DNA, 25 bp, Artificial
  Probe
tcagacacacccattgaaactaaca

SEQ ID NO: 36168 - DNA, 25 bp, Artificial
  Probe
aaatgaacacaacttgctgacgatg

SEQ ID NO: 36169 - DNA, 25 bp, Artificial
  Probe
ttgaaactaacacatacacccgcat

SEQ ID NO: 36170 - DNA, 25 bp, Artificial
  Probe
attgaaactaacacatacacccgca

SEQ ID NO: 36171 - DNA, 25 bp, Artificial
  Probe
caaatgaacacaacttgctgacgat

SEQ ID NO: 36172 - DNA, 25 bp, Artificial
  Probe
ctcagtgagagggaaagaaagagag

SEQ ID NO: 36173 - DNA, 25 bp, Artificial
  Probe
atcaaatgaacacaacttgctgacg

SEQ ID NO: 36174 - DNA, 25 bp, Artificial
  Probe
aatgaacacaacttgctgacgatgg

SEQ ID NO: 36175 - DNA, 25 bp, Artificial
  Probe
gaaagaaagagagagagggagggag

SEQ ID NO: 36176 - DNA, 25 bp, Artificial
  Probe
gagggaaagaaagagagagagggag

SEQ ID NO: 36177 - DNA, 25 bp, Artificial
  Probe
gagagggaaagaaagagagagaggg

SEQ ID NO: 36178 - DNA, 25 bp, Artificial
  Probe
ggctcttcggatctctctgtaataa

SEQ ID NO: 36179 - DNA, 25 bp, Artificial
  Probe
aggctcttcggatctctctgtaata

SEQ ID NO: 36180 - DNA, 25 bp, Artificial
  Probe
ctgctctgtgtcatctgttactgtt

SEQ ID NO: 36181 - DNA, 25 bp, Artificial
  Probe
gatactctttattgccatccttgct

SEQ ID NO: 36182 - DNA, 25 bp, Artificial
  Probe
tgctctgtgtcatctgttactgttg

SEQ ID NO: 36183 - DNA, 25 bp, Artificial
  Probe
atactctttattgccatccttgctg

SEQ ID NO: 36184 - DNA, 25 bp, Artificial
  Probe
gtctgctctgtgtcatctgttactg

SEQ ID NO: 36185 - DNA, 25 bp, Artificial
  Probe
ctgtctgctctgtgtcatctgttac

SEQ ID NO: 36186 - DNA, 25 bp, Artificial
  Probe
cctatgtgaaggtccagcttatatt

SEQ ID NO: 36187 - DNA, 25 bp, Artificial
  Probe
cttcttgcttagtgtggacacaata

SEQ ID NO: 36188 - DNA, 25 bp, Artificial
  Probe
gctcttcggatctctctgtaataaa

SEQ ID NO: 36189 - DNA, 25 bp, Artificial
  Probe
ttcttgcttagtgtggacacaatac

SEQ ID NO: 36190 - DNA, 25 bp, Artificial
  Probe
cttcggatctctctgtaataaatgc

SEQ ID NO: 36191 - DNA, 25 bp, Artificial
  Probe
tctgctctgtgtcatctgttactgt

SEQ ID NO: 36192 - DNA, 25 bp, Artificial
  Probe
tgtctgctctgtgtcatctgttact

SEQ ID NO: 36193 - DNA, 25 bp, Artificial
  Probe
ctatgtgaaggtccagcttatatta

SEQ ID NO: 36194 - DNA, 25 bp, Artificial
  Probe
ctctgtgtcatctgttactgttgcc

SEQ ID NO: 36195 - DNA, 25 bp, Artificial
  Probe
cttgcttagtgtggacacaatactg

SEQ ID NO: 36196 - DNA, 25 bp, Artificial
  Probe
tcttgcttagtgtggacacaatact

SEQ ID NO: 36197 - DNA, 25 bp, Artificial
  Probe
gcctatgtgaaggtccagcttatat

SEQ ID NO: 36198 - DNA, 25 bp, Artificial
  Probe
tatgtgaaggtccagcttatattaa

SEQ ID NO: 36199 - DNA, 25 bp, Artificial
  Probe
tcttcggatctctctgtaataaatg

SEQ ID NO: 36200 - DNA, 25 bp, Artificial
  Probe
taaaccagagaaagtggaagaagaa

SEQ ID NO: 36201 - DNA, 25 bp, Artificial
  Probe
ttaaaccagagaaagtggaagaaga

SEQ ID NO: 36202 - DNA, 25 bp, Artificial
  Probe
ttcggatctctctgtaataaatgca

SEQ ID NO: 36203 - DNA, 25 bp, Artificial
  Probe
ctcttcggatctctctgtaataaat

SEQ ID NO: 36204 - DNA, 25 bp, Artificial
  Probe
ccagagaaagtggaagaagaacaaa

SEQ ID NO: 36205 - DNA, 25 bp, Artificial
  Probe
aaaccagagaaagtggaagaagaac

SEQ ID NO: 36206 - DNA, 25 bp, Artificial
  Probe
attaaaccagagaaagtggaagaag

SEQ ID NO: 36207 - DNA, 25 bp, Artificial
  Probe
tgtgaaggtccagcttatattaaac

SEQ ID NO: 36208 - DNA, 25 bp, Artificial
  Probe
acttcttgcttagtgtggacacaat

SEQ ID NO: 36209 - DNA, 25 bp, Artificial
  Probe
gctctgtgtcatctgttactgttgc

SEQ ID NO: 36210 - DNA, 25 bp, Artificial
  Probe
cctgtctgctctgtgtcatctgtta

SEQ ID NO: 36211 - DNA, 25 bp, Artificial
  Probe
gtccagcttatattaaaccagagaa

SEQ ID NO: 36212 - DNA, 25 bp, Artificial
  Probe
tctgtgtcatctgttactgttgcca

SEQ ID NO: 36213 - DNA, 25 bp, Artificial
  Probe
caggctcttcggatctctctgtaat

SEQ ID NO: 36214 - DNA, 25 bp, Artificial
  Probe
ttgcttagtgtggacacaatactgg

SEQ ID NO: 36215 - DNA, 25 bp, Artificial
  Probe
atgtgaaggtccagcttatattaaa

SEQ ID NO: 36216 - DNA, 25 bp, Artificial
  Probe
accagagaaagtggaagaagaacaa

SEQ ID NO: 36217 - DNA, 25 bp, Artificial
  Probe
aaccagagaaagtggaagaagaaca

SEQ ID NO: 36218 - DNA, 25 bp, Artificial
  Probe
tactctttattgccatccttgctgc

SEQ ID NO: 36219 - DNA, 25 bp, Artificial
  Probe
gaagaacaaaacatcctccaagaag

SEQ ID NO: 36220 - DNA, 25 bp, Artificial
  Probe
gaagaagaacaaaacatcctccaag

SEQ ID NO: 36221 - DNA, 25 bp, Artificial
  Probe
gagaaagtggaagaagaacaaaaca

SEQ ID NO: 36222 - DNA, 25 bp, Artificial
  Probe
agagaaagtggaagaagaacaaaac

SEQ ID NO: 36223 - DNA, 25 bp, Artificial
  Probe
caatacacacacatacacacacacc

SEQ ID NO: 36224 - DNA, 25 bp, Artificial
  Probe
gagcaatacacacacatacacacac

SEQ ID NO: 36225 - DNA, 25 bp, Artificial
  Probe
tgagcaatacacacacatacacaca

SEQ ID NO: 36226 - DNA, 25 bp, Artificial
  Probe
ctccctatttctctttcctcttagc

SEQ ID NO: 36227 - DNA, 25 bp, Artificial
  Probe
tctctccctatttctctttcctctt

SEQ ID NO: 36228 - DNA, 25 bp, Artificial
  Probe
ttctctccctatttctctttcctct

SEQ ID NO: 36229 - DNA, 25 bp, Artificial
  Probe
gcaatacacacacatacacacacac

SEQ ID NO: 36230 - DNA, 25 bp, Artificial
  Probe
tttctctccctatttctctttcctc

SEQ ID NO: 36231 - DNA, 25 bp, Artificial
  Probe
agcaatacacacacatacacacaca

SEQ ID NO: 36232 - DNA, 25 bp, Artificial
  Probe
gatctccagaatccatgtgaacaga

SEQ ID NO: 36233 - DNA, 25 bp, Artificial
  Probe
tgatctccagaatccatgtgaacag

SEQ ID NO: 36234 - DNA, 25 bp, Artificial
  Probe
tctccctatttctctttcctcttag

SEQ ID NO: 36235 - DNA, 25 bp, Artificial
  Probe
ctctccctatttctctttcctctta

SEQ ID NO: 36236 - DNA, 25 bp, Artificial
  Probe
atctccagaatccatgtgaacagac

SEQ ID NO: 36237 - DNA, 25 bp, Artificial
  Probe
gagtctcagtgtgatctccagaatc

SEQ ID NO: 36238 - DNA, 25 bp, Artificial
  Probe
gtgatctccagaatccatgtgaaca

SEQ ID NO: 36239 - DNA, 25 bp, Artificial
  Probe
tgtgatctccagaatccatgtgaac

SEQ ID NO: 36240 - DNA, 25 bp, Artificial
  Probe
gtgtgatctccagaatccatgtgaa

SEQ ID NO: 36241 - DNA, 25 bp, Artificial
  Probe
cctttgcgttctctctttctacttc

SEQ ID NO: 36242 - DNA, 25 bp, Artificial
  Probe
agagtctcagtgtgatctccagaat

SEQ ID NO: 36243 - DNA, 25 bp, Artificial
  Probe
gtgagcaatacacacacatacacac

SEQ ID NO: 36244 - DNA, 25 bp, Artificial
  Probe
tctcagtgtgatctccagaatccat

SEQ ID NO: 36245 - DNA, 25 bp, Artificial
  Probe
ctttgcgttctctctttctacttcg

SEQ ID NO: 36246 - DNA, 25 bp, Artificial
  Probe
aatacacacacatacacacacaccg

SEQ ID NO: 36247 - DNA, 25 bp, Artificial
  Probe
ctcagtgtgatctccagaatccatg

SEQ ID NO: 36248 - DNA, 25 bp, Artificial
  Probe
gagagagagagagagagagcgagag

SEQ ID NO: 36249 - DNA, 25 bp, Artificial
  Probe
gagagagagagagagagagagcgag

SEQ ID NO: 36250 - DNA, 25 bp, Artificial
  Probe
ctattgccatcgttcgtttaccatc

SEQ ID NO: 36251 - DNA, 25 bp, Artificial
  Probe
cagtgtgatctccagaatccatgtg

SEQ ID NO: 36252 - DNA, 25 bp, Artificial
  Probe
cagaatccatgtgaacagacagaca

SEQ ID NO: 36253 - DNA, 25 bp, Artificial
  Probe
tttacctcctctattgccatcgttc

SEQ ID NO: 36254 - DNA, 25 bp, Artificial
  Probe
ccctatttctctttcctcttagctc

SEQ ID NO: 36255 - DNA, 25 bp, Artificial
  Probe
ccgagagagagagagagagagagag

SEQ ID NO: 36256 - DNA, 25 bp, Artificial
  Probe
tccctatttctctttcctcttagct

SEQ ID NO: 36257 - DNA, 25 bp, Artificial
  Probe
agtgtgatctccagaatccatgtga

SEQ ID NO: 36258 - DNA, 25 bp, Artificial
  Probe
tatttctctttcctcttagctctcc

SEQ ID NO: 36259 - DNA, 25 bp, Artificial
  Probe
cctatttctctttcctcttagctct

SEQ ID NO: 36260 - DNA, 25 bp, Artificial
  Probe
tattgccatcgttcgtttaccatct

SEQ ID NO: 36261 - DNA, 25 bp, Artificial
  Probe
tctattgccatcgttcgtttaccat

SEQ ID NO: 36262 - DNA, 25 bp, Artificial
  Probe
gaatccatgtgaacagacagacatt

SEQ ID NO: 36263 - DNA, 25 bp, Artificial
  Probe
ccctttgcgttctctctttctactt

SEQ ID NO: 36264 - DNA, 25 bp, Artificial
  Probe
ctcctctattgccatcgttcgttta

SEQ ID NO: 36265 - DNA, 25 bp, Artificial
  Probe
agtctcagtgtgatctccagaatcc

SEQ ID NO: 36266 - DNA, 25 bp, Artificial
  Probe
tcagtgtgatctccagaatccatgt

SEQ ID NO: 36267 - DNA, 25 bp, Artificial
  Probe
agagagagagagagagagagcgaga

SEQ ID NO: 36268 - DNA, 25 bp, Artificial
  Probe
gaaactcgggatgagaactttgtat

SEQ ID NO: 36269 - DNA, 25 bp, Artificial
  Probe
aaactcgggatgagaactttgtatg

SEQ ID NO: 36270 - DNA, 25 bp, Artificial
  Probe
aggttcctggaatcatttgatactc

SEQ ID NO: 36271 - DNA, 25 bp, Artificial
  Probe
gaggttcctggaatcatttgatact

SEQ ID NO: 36272 - DNA, 25 bp, Artificial
  Probe
agaggttcctggaatcatttgatac

SEQ ID NO: 36273 - DNA, 25 bp, Artificial
  Probe
tttaagcaaaggaaaggcaagacag

SEQ ID NO: 36274 - DNA, 25 bp, Artificial
  Probe
aagaggttcctggaatcatttgata

SEQ ID NO: 36275 - DNA, 25 bp, Artificial
  Probe
aaagaggttcctggaatcatttgat

SEQ ID NO: 36276 - DNA, 25 bp, Artificial
  Probe
gcatgacctgtccaaatgagatatt

SEQ ID NO: 36277 - DNA, 25 bp, Artificial
  Probe
agaaactcgggatgagaactttgta

SEQ ID NO: 36278 - DNA, 25 bp, Artificial
  Probe
gttcctggaatcatttgatactcac

SEQ ID NO: 36279 - DNA, 25 bp, Artificial
  Probe
ggttcctggaatcatttgatactca

SEQ ID NO: 36280 - DNA, 25 bp, Artificial
  Probe
ttcctggaatcatttgatactcacg

SEQ ID NO: 36281 - DNA, 25 bp, Artificial
  Probe
catgacctgtccaaatgagatattt

SEQ ID NO: 36282 - DNA, 25 bp, Artificial
  Probe
aaacacgacaacatttggaaggtac

SEQ ID NO: 36283 - DNA, 25 bp, Artificial
  Probe
aactcgggatgagaactttgtatgg

SEQ ID NO: 36284 - DNA, 25 bp, Artificial
  Probe
tgtaatgttgaacatcaatgagtgt

SEQ ID NO: 36285 - DNA, 25 bp, Artificial
  Probe
catttgatactcacgtcagaaactc

SEQ ID NO: 36286 - DNA, 25 bp, Artificial
  Probe
tcatttgatactcacgtcagaaact

SEQ ID NO: 36287 - DNA, 25 bp, Artificial
  Probe
ctctatgagactgtgtggtttctgg

SEQ ID NO: 36288 - DNA, 25 bp, Artificial
  Probe
atcatttgatactcacgtcagaaac

SEQ ID NO: 36289 - DNA, 25 bp, Artificial
  Probe
ggaatcatttgatactcacgtcaga

SEQ ID NO: 36290 - DNA, 25 bp, Artificial
  Probe
gaatcatttgatactcacgtcagaa

SEQ ID NO: 36291 - DNA, 25 bp, Artificial
  Probe
tcagaaactcgggatgagaactttg

SEQ ID NO: 36292 - DNA, 25 bp, Artificial
  Probe
gtcagaaactcgggatgagaacttt

SEQ ID NO: 36293 - DNA, 25 bp, Artificial
  Probe
tggaatcatttgatactcacgtcag

SEQ ID NO: 36294 - DNA, 25 bp, Artificial
  Probe
ctggaatcatttgatactcacgtca

SEQ ID NO: 36295 - DNA, 25 bp, Artificial
  Probe
aattctgttgaaatcatgggaacgt

SEQ ID NO: 36296 - DNA, 25 bp, Artificial
  Probe
atttgatactcacgtcagaaactcg

SEQ ID NO: 36297 - DNA, 25 bp, Artificial
  Probe
aatcatttgatactcacgtcagaaa

SEQ ID NO: 36298 - DNA, 25 bp, Artificial
  Probe
tctatgagactgtgtggtttctggt

SEQ ID NO: 36299 - DNA, 25 bp, Artificial
  Probe
atttatgacagaatcgagttgtgat

SEQ ID NO: 36300 - DNA, 25 bp, Artificial
  Probe
cagaaactcgggatgagaactttgt

SEQ ID NO: 36301 - DNA, 25 bp, Artificial
  Probe
cctggaatcatttgatactcacgtc

SEQ ID NO: 36302 - DNA, 25 bp, Artificial
  Probe
aacacgacaacatttggaaggtact

SEQ ID NO: 36303 - DNA, 25 bp, Artificial
  Probe
aatgttgaacatcaatgagtgttgc

SEQ ID NO: 36304 - DNA, 25 bp, Artificial
  Probe
tattttaagcaaaggaaaggcaaga

SEQ ID NO: 36305 - DNA, 25 bp, Artificial
  Probe
tctattttaagcaaaggaaaggcaa

SEQ ID NO: 36306 - DNA, 25 bp, Artificial
  Probe
attctgttgaaatcatgggaacgtc

SEQ ID NO: 36307 - DNA, 25 bp, Artificial
  Probe
attttaagcaaaggaaaggcaagac

SEQ ID NO: 36308 - DNA, 25 bp, Artificial
  Probe
ctattttaagcaaaggaaaggcaag

SEQ ID NO: 36309 - DNA, 25 bp, Artificial
  Probe
ctatgagactgtgtggtttctggtc

SEQ ID NO: 36310 - DNA, 25 bp, Artificial
  Probe
atgtaatgttgaacatcaatgagtg

SEQ ID NO: 36311 - DNA, 25 bp, Artificial
  Probe
tgcatgacctgtccaaatgagatat

SEQ ID NO: 36312 - DNA, 25 bp, Artificial
  Probe
ttctattttaagcaaaggaaaggca

SEQ ID NO: 36313 - DNA, 25 bp, Artificial
  Probe
tcaaactcagcgaggtgcaagtaaa

SEQ ID NO: 36314 - DNA, 25 bp, Artificial
  Probe
caaactcagcgaggtgcaagtaaaa

SEQ ID NO: 36315 - DNA, 25 bp, Artificial
  Probe
ctttcaaggcttcgtttgaggtctc

SEQ ID NO: 36316 - DNA, 25 bp, Artificial
  Probe
aagagctttcaaggcttcgtttgag

SEQ ID NO: 36317 - DNA, 25 bp, Artificial
  Probe
gaagagctttcaaggcttcgtttga

SEQ ID NO: 36318 - DNA, 25 bp, Artificial
  Probe
gagaacccactatccagacatttac

SEQ ID NO: 36319 - DNA, 25 bp, Artificial
  Probe
agagaacccactatccagacattta

SEQ ID NO: 36320 - DNA, 25 bp, Artificial
  Probe
gaacccactatccagacatttacac

SEQ ID NO: 36321 - DNA, 25 bp, Artificial
  Probe
agaacccactatccagacatttaca

SEQ ID NO: 36322 - DNA, 25 bp, Artificial
  Probe
gagagaacccactatccagacattt

SEQ ID NO: 36323 - DNA, 25 bp, Artificial
  Probe
aacccactatccagacatttacacc

SEQ ID NO: 36324 - DNA, 25 bp, Artificial
  Probe
cactatccagacatttacaccaggg

SEQ ID NO: 36325 - DNA, 25 bp, Artificial
  Probe
ccactatccagacatttacaccagg

SEQ ID NO: 36326 - DNA, 25 bp, Artificial
  Probe
cccactatccagacatttacaccag

SEQ ID NO: 36327 - DNA, 25 bp, Artificial
  Probe
acccactatccagacatttacacca

SEQ ID NO: 36328 - DNA, 25 bp, Artificial
  Probe
ctatccagacatttacaccagggag

SEQ ID NO: 36329 - DNA, 25 bp, Artificial
  Probe
actatccagacatttacaccaggga

SEQ ID NO: 36330 - DNA, 25 bp, Artificial
  Probe
cgagagaacccactatccagacatt

SEQ ID NO: 36331 - DNA, 25 bp, Artificial
  Probe
tatccagacatttacaccagggagg

SEQ ID NO: 36332 - DNA, 25 bp, Artificial
  Probe
ctttcgagagaacccactatccaga

SEQ ID NO: 36333 - DNA, 25 bp, Artificial
  Probe
tttcgagagaacccactatccagac

SEQ ID NO: 36334 - DNA, 25 bp, Artificial
  Probe
tcgagagaacccactatccagacat

SEQ ID NO: 36335 - DNA, 25 bp, Artificial
  Probe
ttcgagagaacccactatccagaca

SEQ ID NO: 36336 - DNA, 25 bp, Artificial
  Probe
atccagacatttacaccagggagga

SEQ ID NO: 36337 - DNA, 25 bp, Artificial
  Probe
gctttcgagagaacccactatccag

SEQ ID NO: 36338 - DNA, 25 bp, Artificial
  Probe
gccgagaagctggatctcaagaaaa

SEQ ID NO: 36339 - DNA, 25 bp, Artificial
  Probe
gcttgtgaatggataatcaggagaa

SEQ ID NO: 36340 - DNA, 25 bp, Artificial
  Probe
tatacgaagagttctcatctcaagg

SEQ ID NO: 36341 - DNA, 25 bp, Artificial
  Probe
tctgagactggatcttctatcattc

SEQ ID NO: 36342 - DNA, 25 bp, Artificial
  Probe
aagaggaagcaattcaggtacagaa

SEQ ID NO: 36343 - DNA, 25 bp, Artificial
  Probe
ctgagactggatcttctatcattcc

SEQ ID NO: 36344 - DNA, 25 bp, Artificial
  Probe
atacgaagagttctcatctcaaggc

SEQ ID NO: 36345 - DNA, 25 bp, Artificial
  Probe
gtctgagactggatcttctatcatt

SEQ ID NO: 36346 - DNA, 25 bp, Artificial
  Probe
tatcattccaataccaaatccgact

SEQ ID NO: 36347 - DNA, 25 bp, Artificial
  Probe
ggtctgagactggatcttctatcat

SEQ ID NO: 36348 - DNA, 25 bp, Artificial
  Probe
aagtcagcttgtgaatggataatca

SEQ ID NO: 36349 - DNA, 25 bp, Artificial
  Probe
ctatcattccaataccaaatccgac

SEQ ID NO: 36350 - DNA, 25 bp, Artificial
  Probe
tctatcattccaataccaaatccga

SEQ ID NO: 36351 - DNA, 25 bp, Artificial
  Probe
gaagaggaagcaattcaggtacaga

SEQ ID NO: 36352 - DNA, 25 bp, Artificial
  Probe
atcattccaataccaaatccgactt

SEQ ID NO: 36353 - DNA, 25 bp, Artificial
  Probe
gcttcaatgatgcaatatacatgga

SEQ ID NO: 36354 - DNA, 25 bp, Artificial
  Probe
agtcagcttgtgaatggataatcag

SEQ ID NO: 36355 - DNA, 25 bp, Artificial
  Probe
tttattcccaagtatgcctttaagc

SEQ ID NO: 36356 - DNA, 25 bp, Artificial
  Probe
ttctatcattccaataccaaatccg

SEQ ID NO: 36357 - DNA, 25 bp, Artificial
  Probe
ggtttattcccaagtatgcctttaa

SEQ ID NO: 36358 - DNA, 25 bp, Artificial
  Probe
agaggaagcaattcaggtacagaac

SEQ ID NO: 36359 - DNA, 25 bp, Artificial
  Probe
tgttctaatagcctaaacgatggtg

SEQ ID NO: 36360 - DNA, 25 bp, Artificial
  Probe
gtgttctaatagcctaaacgatggt

SEQ ID NO: 36361 - DNA, 25 bp, Artificial
  Probe
ccttgtatgctctttgccttctaaa

SEQ ID NO: 36362 - DNA, 25 bp, Artificial
  Probe
agaggaagaggaagcaattcaggta

SEQ ID NO: 36363 - DNA, 25 bp, Artificial
  Probe
agcttgtgaatggataatcaggaga

SEQ ID NO: 36364 - DNA, 25 bp, Artificial
  Probe
cagcttgtgaatggataatcaggag

SEQ ID NO: 36365 - DNA, 25 bp, Artificial
  Probe
attccaataccaaatccgacttgaa

SEQ ID NO: 36366 - DNA, 25 bp, Artificial
  Probe
gtgaatggataatcaggagaaagga

SEQ ID NO: 36367 - DNA, 25 bp, Artificial
  Probe
tgtgaatggataatcaggagaaagg

SEQ ID NO: 36368 - DNA, 25 bp, Artificial
  Probe
agcctggtttatttctgtaacattt

SEQ ID NO: 36369 - DNA, 25 bp, Artificial
  Probe
aagcctggtttatttctgtaacatt

SEQ ID NO: 36370 - DNA, 25 bp, Artificial
  Probe
tcagcttgtgaatggataatcagga

SEQ ID NO: 36371 - DNA, 25 bp, Artificial
  Probe
gtcagcttgtgaatggataatcagg

SEQ ID NO: 36372 - DNA, 25 bp, Artificial
  Probe
ggatcttctatcattccaataccaa

SEQ ID NO: 36373 - DNA, 25 bp, Artificial
  Probe
gaggaagaggaagcaattcaggtac

SEQ ID NO: 36374 - DNA, 25 bp, Artificial
  Probe
gtcagaggaagaggaagcaattcag

SEQ ID NO: 36375 - DNA, 25 bp, Artificial
  Probe
cattccaataccaaatccgacttga

SEQ ID NO: 36376 - DNA, 25 bp, Artificial
  Probe
tcattccaataccaaatccgacttg

SEQ ID NO: 36377 - DNA, 25 bp, Artificial
  Probe
ttgtgaatggataatcaggagaaag

SEQ ID NO: 36378 - DNA, 25 bp, Artificial
  Probe
cttgtgaatggataatcaggagaaa

SEQ ID NO: 36379 - DNA, 25 bp, Artificial
  Probe
ttccaataccaaatccgacttgaac

SEQ ID NO: 36380 - DNA, 25 bp, Artificial
  Probe
gtttattcccaagtatgcctttaag

SEQ ID NO: 36381 - DNA, 25 bp, Artificial
  Probe
taagcctggtttatttctgtaacat

SEQ ID NO: 36382 - DNA, 25 bp, Artificial
  Probe
ataagcctggtttatttctgtaaca

SEQ ID NO: 36383 - DNA, 25 bp, Artificial
  Probe
accttgtatgctctttgccttctaa

SEQ ID NO: 36384 - DNA, 25 bp, Artificial
  Probe
gtgcttacagtcatcatcattcctt

SEQ ID NO: 36385 - DNA, 25 bp, Artificial
  Probe
ttgtgcttacagtcatcatcattcc

SEQ ID NO: 36386 - DNA, 25 bp, Artificial
  Probe
tgtgcttacagtcatcatcattcct

SEQ ID NO: 36387 - DNA, 25 bp, Artificial
  Probe
tcatcatcattcctttctctcttcc

SEQ ID NO: 36388 - DNA, 25 bp, Artificial
  Probe
cagtcatcatcattcctttctctct

SEQ ID NO: 36389 - DNA, 25 bp, Artificial
  Probe
gcttacagtcatcatcattcctttc

SEQ ID NO: 36390 - DNA, 25 bp, Artificial
  Probe
actcctctctccctccttatttatt

SEQ ID NO: 36391 - DNA, 25 bp, Artificial
  Probe
aactcctctctccctccttatttat

SEQ ID NO: 36392 - DNA, 25 bp, Artificial
  Probe
acagtcatcatcattcctttctctc

SEQ ID NO: 36393 - DNA, 25 bp, Artificial
  Probe
tgcttacagtcatcatcattccttt

SEQ ID NO: 36394 - DNA, 25 bp, Artificial
  Probe
agtcatcatcattcctttctctctt

SEQ ID NO: 36395 - DNA, 25 bp, Artificial
  Probe
caactcctctctccctccttattta

SEQ ID NO: 36396 - DNA, 25 bp, Artificial
  Probe
gtcatcatcattcctttctctcttc

SEQ ID NO: 36397 - DNA, 25 bp, Artificial
  Probe
tacagtcatcatcattcctttctct

SEQ ID NO: 36398 - DNA, 25 bp, Artificial
  Probe
atcatcattcctttctctcttccct

SEQ ID NO: 36399 - DNA, 25 bp, Artificial
  Probe
catcatcattcctttctctcttccc

SEQ ID NO: 36400 - DNA, 25 bp, Artificial
  Probe
cagatgtaagtttcattgtcccaac

SEQ ID NO: 36401 - DNA, 25 bp, Artificial
  Probe
caccagagttatgccttacatttct

SEQ ID NO: 36402 - DNA, 25 bp, Artificial
  Probe
ttacagtcatcatcattcctttctc

SEQ ID NO: 36403 - DNA, 25 bp, Artificial
  Probe
cttacagtcatcatcattcctttct

SEQ ID NO: 36404 - DNA, 25 bp, Artificial
  Probe
tcatcattcctttctctcttccctc

SEQ ID NO: 36405 - DNA, 25 bp, Artificial
  Probe
tagttactactcctgttcctcctgc

SEQ ID NO: 36406 - DNA, 25 bp, Artificial
  Probe
ctcctctctccctccttatttatta

SEQ ID NO: 36407 - DNA, 25 bp, Artificial
  Probe
accagagttatgccttacatttctc

SEQ ID NO: 36408 - DNA, 25 bp, Artificial
  Probe
ccaccagagttatgccttacatttc

SEQ ID NO: 36409 - DNA, 25 bp, Artificial
  Probe
tttgtgcttacagtcatcatcattc

SEQ ID NO: 36410 - DNA, 25 bp, Artificial
  Probe
cagagttatgccttacatttctccc

SEQ ID NO: 36411 - DNA, 25 bp, Artificial
  Probe
ccagagttatgccttacatttctcc

SEQ ID NO: 36412 - DNA, 25 bp, Artificial
  Probe
gcagatgtaagtttcattgtcccaa

SEQ ID NO: 36413 - DNA, 25 bp, Artificial
  Probe
gttcatttctttccgacctttccag

SEQ ID NO: 36414 - DNA, 25 bp, Artificial
  Probe
catcattcctttctctcttccctcc

SEQ ID NO: 36415 - DNA, 25 bp, Artificial
  Probe
tcctctctccctccttatttattat

SEQ ID NO: 36416 - DNA, 25 bp, Artificial
  Probe
gaagtacacggaagaatcatttgtc

SEQ ID NO: 36417 - DNA, 25 bp, Artificial
  Probe
agtacacggaagaatcatttgtcat

SEQ ID NO: 36418 - DNA, 25 bp, Artificial
  Probe
atcattcctttctctcttccctcct

SEQ ID NO: 36419 - DNA, 25 bp, Artificial
  Probe
aagtacacggaagaatcatttgtca

SEQ ID NO: 36420 - DNA, 25 bp, Artificial
  Probe
gggaagtacacggaagaatcatttg

SEQ ID NO: 36421 - DNA, 25 bp, Artificial
  Probe
agggaagtacacggaagaatcattt

SEQ ID NO: 36422 - DNA, 25 bp, Artificial
  Probe
gtacacggaagaatcatttgtcatg

SEQ ID NO: 36423 - DNA, 25 bp, Artificial
  Probe
aatgtcgtagttactactcctgttc

SEQ ID NO: 36424 - DNA, 25 bp, Artificial
  Probe
gaatgtcgtagttactactcctgtt

SEQ ID NO: 36425 - DNA, 25 bp, Artificial
  Probe
gagaatgtcgtagttactactcctg

SEQ ID NO: 36426 - DNA, 25 bp, Artificial
  Probe
ggaagtacacggaagaatcatttgt

SEQ ID NO: 36427 - DNA, 25 bp, Artificial
  Probe
gtcgagaatgtcgtagttactactc

SEQ ID NO: 36428 - DNA, 25 bp, Artificial
  Probe
agaatgtcgtagttactactcctgt

SEQ ID NO: 36429 - DNA, 25 bp, Artificial
  Probe
ccaccttcctccattcttaactctg

SEQ ID NO: 36430 - DNA, 25 bp, Artificial
  Probe
ttcctccattcttaactctgcattc

SEQ ID NO: 36431 - DNA, 25 bp, Artificial
  Probe
cttcctccattcttaactctgcatt

SEQ ID NO: 36432 - DNA, 25 bp, Artificial
  Probe
atatggatctgcatgtcttcattga

SEQ ID NO: 36433 - DNA, 25 bp, Artificial
  Probe
tatggatctgcatgtcttcattgaa

SEQ ID NO: 36434 - DNA, 25 bp, Artificial
  Probe
tgagcaaacttgttactgatttctt

SEQ ID NO: 36435 - DNA, 25 bp, Artificial
  Probe
aatatggatctgcatgtcttcattg

SEQ ID NO: 36436 - DNA, 25 bp, Artificial
  Probe
taaaggttctgaagtaaaggcttgt

SEQ ID NO: 36437 - DNA, 25 bp, Artificial
  Probe
gcttgcttaaaggttctgaagtaaa

SEQ ID NO: 36438 - DNA, 25 bp, Artificial
  Probe
atgagcaaacttgttactgatttct

SEQ ID NO: 36439 - DNA, 25 bp, Artificial
  Probe
ttaaaggttctgaagtaaaggcttg

SEQ ID NO: 36440 - DNA, 25 bp, Artificial
  Probe
ttgcttaaaggttctgaagtaaagg

SEQ ID NO: 36441 - DNA, 25 bp, Artificial
  Probe
attcttaactctgcattctggcttc

SEQ ID NO: 36442 - DNA, 25 bp, Artificial
  Probe
cttaaaggttctgaagtaaaggctt

SEQ ID NO: 36443 - DNA, 25 bp, Artificial
  Probe
tgcttgcttaaaggttctgaagtaa

SEQ ID NO: 36444 - DNA, 25 bp, Artificial
  Probe
ttgcttgcttaaaggttctgaagta

SEQ ID NO: 36445 - DNA, 25 bp, Artificial
  Probe
atcccaaactaggctacatttcaaa

SEQ ID NO: 36446 - DNA, 25 bp, Artificial
  Probe
aatcccaaactaggctacatttcaa

SEQ ID NO: 36447 - DNA, 25 bp, Artificial
  Probe
cctccattcttaactctgcattctg

SEQ ID NO: 36448 - DNA, 25 bp, Artificial
  Probe
tcctccattcttaactctgcattct

SEQ ID NO: 36449 - DNA, 25 bp, Artificial
  Probe
cttgttactgatttcttgtatccca

SEQ ID NO: 36450 - DNA, 25 bp, Artificial
  Probe
acttgttactgatttcttgtatccc

SEQ ID NO: 36451 - DNA, 25 bp, Artificial
  Probe
agcaaacttgttactgatttcttgt

SEQ ID NO: 36452 - DNA, 25 bp, Artificial
  Probe
caccttcctccattcttaactctgc

SEQ ID NO: 36453 - DNA, 25 bp, Artificial
  Probe
cagaatcccaaactaggctacattt

SEQ ID NO: 36454 - DNA, 25 bp, Artificial
  Probe
cattgcttgcttaaaggttctgaag

SEQ ID NO: 36455 - DNA, 25 bp, Artificial
  Probe
cattcttaactctgcattctggctt

SEQ ID NO: 36456 - DNA, 25 bp, Artificial
  Probe
gagcaaacttgttactgatttcttg

SEQ ID NO: 36457 - DNA, 25 bp, Artificial
  Probe
atgctatggaagaagtcaagaaatt

SEQ ID NO: 36458 - DNA, 25 bp, Artificial
  Probe
gcttaaaggttctgaagtaaaggct

SEQ ID NO: 36459 - DNA, 25 bp, Artificial
  Probe
agaatcccaaactaggctacatttc

SEQ ID NO: 36460 - DNA, 25 bp, Artificial
  Probe
taactctgcattctggcttctgtat

SEQ ID NO: 36461 - DNA, 25 bp, Artificial
  Probe
gaatcccaaactaggctacatttca

SEQ ID NO: 36462 - DNA, 25 bp, Artificial
  Probe
aaaggttctgaagtaaaggcttgtc

SEQ ID NO: 36463 - DNA, 25 bp, Artificial
  Probe
tgcttaaaggttctgaagtaaaggc

SEQ ID NO: 36464 - DNA, 25 bp, Artificial
  Probe
attgcttgcttaaaggttctgaagt

SEQ ID NO: 36465 - DNA, 25 bp, Artificial
  Probe
ttaactctgcattctggcttctgta

SEQ ID NO: 36466 - DNA, 25 bp, Artificial
  Probe
cttgcttaaaggttctgaagtaaag

SEQ ID NO: 36467 - DNA, 25 bp, Artificial
  Probe
tgttactgatttcttgtatcccagg

SEQ ID NO: 36468 - DNA, 25 bp, Artificial
  Probe
catgctatggaagaagtcaagaaat

SEQ ID NO: 36469 - DNA, 25 bp, Artificial
  Probe
ttcttaactctgcattctggcttct

SEQ ID NO: 36470 - DNA, 25 bp, Artificial
  Probe
gttactgatttcttgtatcccagga

SEQ ID NO: 36471 - DNA, 25 bp, Artificial
  Probe
gcaaacttgttactgatttcttgta

SEQ ID NO: 36472 - DNA, 25 bp, Artificial
  Probe
catggcggttgaatcttaaggttaa

SEQ ID NO: 36473 - DNA, 25 bp, Artificial
  Probe
tatgagcaaacttgttactgatttc

SEQ ID NO: 36474 - DNA, 25 bp, Artificial
  Probe
tgacgcaggatttcttaatagtgat

SEQ ID NO: 36475 - DNA, 25 bp, Artificial
  Probe
ttgacgcaggatttcttaatagtga

SEQ ID NO: 36476 - DNA, 25 bp, Artificial
  Probe
tttgacgcaggatttcttaatagtg

SEQ ID NO: 36477 - DNA, 25 bp, Artificial
  Probe
tgattagtaaaggagcacaagagta

SEQ ID NO: 36478 - DNA, 25 bp, Artificial
  Probe
gacgcaggatttcttaatagtgatt

SEQ ID NO: 36479 - DNA, 25 bp, Artificial
  Probe
aacctttatcttgggaattggagac

SEQ ID NO: 36480 - DNA, 25 bp, Artificial
  Probe
gatcatccgaatcatggagaacatc

SEQ ID NO: 36481 - DNA, 25 bp, Artificial
  Probe
gagatatatgatgcagccattgacc

SEQ ID NO: 36482 - DNA, 25 bp, Artificial
  Probe
catgctaccttatggctgtctatcc

SEQ ID NO: 36483 - DNA, 25 bp, Artificial
  Probe
caacctttatcttgggaattggaga

SEQ ID NO: 36484 - DNA, 25 bp, Artificial
  Probe
ttagtaaaggagcacaagagtacac

SEQ ID NO: 36485 - DNA, 25 bp, Artificial
  Probe
atcatccgaatcatggagaacatct

SEQ ID NO: 36486 - DNA, 25 bp, Artificial
  Probe
agatcatccgaatcatggagaacat

SEQ ID NO: 36487 - DNA, 25 bp, Artificial
  Probe
ttcagatcatccgaatcatggagaa

SEQ ID NO: 36488 - DNA, 25 bp, Artificial
  Probe
attagtaaaggagcacaagagtaca

SEQ ID NO: 36489 - DNA, 25 bp, Artificial
  Probe
aagaacaagggcgagatatatgatg

SEQ ID NO: 36490 - DNA, 25 bp, Artificial
  Probe
caagaacaagggcgagatatatgat

SEQ ID NO: 36491 - DNA, 25 bp, Artificial
  Probe
taaaggagcacaagagtacacaaag

SEQ ID NO: 36492 - DNA, 25 bp, Artificial
  Probe
agatatatgatgcagccattgacct

SEQ ID NO: 36493 - DNA, 25 bp, Artificial
  Probe
cgagatatatgatgcagccattgac

SEQ ID NO: 36494 - DNA, 25 bp, Artificial
  Probe
gattagtaaaggagcacaagagtac

SEQ ID NO: 36495 - DNA, 25 bp, Artificial
  Probe
tagtaaaggagcacaagagtacaca

SEQ ID NO: 36496 - DNA, 25 bp, Artificial
  Probe
ttgagaggtttcaggagatgtgtta

SEQ ID NO: 36497 - DNA, 25 bp, Artificial
  Probe
gtaaaggagcacaagagtacacaaa

SEQ ID NO: 36498 - DNA, 25 bp, Artificial
  Probe
agagtacacaaagaccagagagttt

SEQ ID NO: 36499 - DNA, 25 bp, Artificial
  Probe
aagagtacacaaagaccagagagtt

SEQ ID NO: 36500 - DNA, 25 bp, Artificial
  Probe
cttcagatcatccgaatcatggaga

SEQ ID NO: 36501 - DNA, 25 bp, Artificial
  Probe
gacaagaacaagggcgagatatatg

SEQ ID NO: 36502 - DNA, 25 bp, Artificial
  Probe
taacccttcagatcatccgaatcat

SEQ ID NO: 36503 - DNA, 25 bp, Artificial
  Probe
acgcaggatttcttaatagtgatta

SEQ ID NO: 36504 - DNA, 25 bp, Artificial
  Probe
gagagtttgagaggtttcaggagat

SEQ ID NO: 36505 - DNA, 25 bp, Artificial
  Probe
agtgattagtaaaggagcacaagag

SEQ ID NO: 36506 - DNA, 25 bp, Artificial
  Probe
tcagatcatccgaatcatggagaac

SEQ ID NO: 36507 - DNA, 25 bp, Artificial
  Probe
gaggtttcaggagatgtgttacaag

SEQ ID NO: 36508 - DNA, 25 bp, Artificial
  Probe
gtgattagtaaaggagcacaagagt

SEQ ID NO: 36509 - DNA, 25 bp, Artificial
  Probe
acaagaacaagggcgagatatatga

SEQ ID NO: 36510 - DNA, 25 bp, Artificial
  Probe
ttaacccttcagatcatccgaatca

SEQ ID NO: 36511 - DNA, 25 bp, Artificial
  Probe
tagtgattagtaaaggagcacaaga

SEQ ID NO: 36512 - DNA, 25 bp, Artificial
  Probe
gatatatgatgcagccattgacctg

SEQ ID NO: 36513 - DNA, 25 bp, Artificial
  Probe
tgagaggtttcaggagatgtgttac

SEQ ID NO: 36514 - DNA, 25 bp, Artificial
  Probe
agagtttgagaggtttcaggagatg

SEQ ID NO: 36515 - DNA, 25 bp, Artificial
  Probe
agtaaaggagcacaagagtacacaa

SEQ ID NO: 36516 - DNA, 25 bp, Artificial
  Probe
gagatgtgttacaaggcgtacctag

SEQ ID NO: 36517 - DNA, 25 bp, Artificial
  Probe
tcatccgaatcatggagaacatctg

SEQ ID NO: 36518 - DNA, 25 bp, Artificial
  Probe
cagatcatccgaatcatggagaaca

SEQ ID NO: 36519 - DNA, 25 bp, Artificial
  Probe
ctaatgctacaagaatgctgtgaag

SEQ ID NO: 36520 - DNA, 25 bp, Artificial
  Probe
tctaatgctacaagaatgctgtgaa

SEQ ID NO: 36521 - DNA, 25 bp, Artificial
  Probe
taatgctacaagaatgctgtgaagt

SEQ ID NO: 36522 - DNA, 25 bp, Artificial
  Probe
ctacaagaatgctgtgaagtgtcat

SEQ ID NO: 36523 - DNA, 25 bp, Artificial
  Probe
tagcgttatctgtggcatgattatg

SEQ ID NO: 36524 - DNA, 25 bp, Artificial
  Probe
tagcaggcattacaagtaatctgtt

SEQ ID NO: 36525 - DNA, 25 bp, Artificial
  Probe
aatgctacaagaatgctgtgaagtg

SEQ ID NO: 36526 - DNA, 25 bp, Artificial
  Probe
gtagcaggcattacaagtaatctgt

SEQ ID NO: 36527 - DNA, 25 bp, Artificial
  Probe
aattctccttcagtgtaagtgcatt

SEQ ID NO: 36528 - DNA, 25 bp, Artificial
  Probe
attctccttcagtgtaagtgcattc

SEQ ID NO: 36529 - DNA, 25 bp, Artificial
  Probe
tttgaccattgtgaaattctccttc

SEQ ID NO: 36530 - DNA, 25 bp, Artificial
  Probe
tacaagaatgctgtgaagtgtcatt

SEQ ID NO: 36531 - DNA, 25 bp, Artificial
  Probe
taatggattgcacctctgtaagcta

SEQ ID NO: 36532 - DNA, 25 bp, Artificial
  Probe
ttctaatgctacaagaatgctgtga

SEQ ID NO: 36533 - DNA, 25 bp, Artificial
  Probe
tgatttgaccattgtgaaattctcc

SEQ ID NO: 36534 - DNA, 25 bp, Artificial
  Probe
gatttgaccattgtgaaattctcct

SEQ ID NO: 36535 - DNA, 25 bp, Artificial
  Probe
aatgatgtagcctgacaagaaattc

SEQ ID NO: 36536 - DNA, 25 bp, Artificial
  Probe
tgtagcaggcattacaagtaatctg

SEQ ID NO: 36537 - DNA, 25 bp, Artificial
  Probe
atagtgtttcagttctgtgtctaca

SEQ ID NO: 36538 - DNA, 25 bp, Artificial
  Probe
atggattgcacctctgtaagctatt

SEQ ID NO: 36539 - DNA, 25 bp, Artificial
  Probe
aatggattgcacctctgtaagctat

SEQ ID NO: 36540 - DNA, 25 bp, Artificial
  Probe
actgatttgaccattgtgaaattct

SEQ ID NO: 36541 - DNA, 25 bp, Artificial
  Probe
atttgaccattgtgaaattctcctt

SEQ ID NO: 36542 - DNA, 25 bp, Artificial
  Probe
atgctacaagaatgctgtgaagtgt

SEQ ID NO: 36543 - DNA, 25 bp, Artificial
  Probe
aagaagtacctatatcagaccaatt

SEQ ID NO: 36544 - DNA, 25 bp, Artificial
  Probe
ttgaaatgtagaacaaagtgcttgc

SEQ ID NO: 36545 - DNA, 25 bp, Artificial
  Probe
tatagtgtttcagttctgtgtctac

SEQ ID NO: 36546 - DNA, 25 bp, Artificial
  Probe
ttaatggattgcacctctgtaagct

SEQ ID NO: 36547 - DNA, 25 bp, Artificial
  Probe
ctgatttgaccattgtgaaattctc

SEQ ID NO: 36548 - DNA, 25 bp, Artificial
  Probe
atgatgtagcctgacaagaaattct

SEQ ID NO: 36549 - DNA, 25 bp, Artificial
  Probe
attatagtgtttcagttctgtgtct

SEQ ID NO: 36550 - DNA, 25 bp, Artificial
  Probe
cactgatttgaccattgtgaaattc

SEQ ID NO: 36551 - DNA, 25 bp, Artificial
  Probe
taatgatgtagcctgacaagaaatt

SEQ ID NO: 36552 - DNA, 25 bp, Artificial
  Probe
aataatgatgtagcctgacaagaaa

SEQ ID NO: 36553 - DNA, 25 bp, Artificial
  Probe
aaataatgatgtagcctgacaagaa

SEQ ID NO: 36554 - DNA, 25 bp, Artificial
  Probe
gatgtagcctgacaagaaattctgt

SEQ ID NO: 36555 - DNA, 25 bp, Artificial
  Probe
tgatgtagcctgacaagaaattctg

SEQ ID NO: 36556 - DNA, 25 bp, Artificial
  Probe
gcactgatttgaccattgtgaaatt

SEQ ID NO: 36557 - DNA, 25 bp, Artificial
  Probe
ataatgatgtagcctgacaagaaat

SEQ ID NO: 36558 - DNA, 25 bp, Artificial
  Probe
agaggccactagagaatgtattgtt

SEQ ID NO: 36559 - DNA, 25 bp, Artificial
  Probe
ttatagtgtttcagttctgtgtcta

SEQ ID NO: 36560 - DNA, 25 bp, Artificial
  Probe
tcagaggccactagagaatgtattg

SEQ ID NO: 36561 - DNA, 25 bp, Artificial
  Probe
gtcagaggccactagagaatgtatt

SEQ ID NO: 36562 - DNA, 25 bp, Artificial
  Probe
ttctccttcagtgtaagtgcattcc

SEQ ID NO: 36563 - DNA, 25 bp, Artificial
  Probe
agcaggcattacaagtaatctgttt

SEQ ID NO: 36564 - DNA, 25 bp, Artificial
  Probe
tagaagacattgagaaatccagagg

SEQ ID NO: 36565 - DNA, 25 bp, Artificial
  Probe
ggtagaagacattgagaaatccaga

SEQ ID NO: 36566 - DNA, 25 bp, Artificial
  Probe
aagacattgagaaatccagaggttt

SEQ ID NO: 36567 - DNA, 25 bp, Artificial
  Probe
gaagacattgagaaatccagaggtt

SEQ ID NO: 36568 - DNA, 25 bp, Artificial
  Probe
gggtagaagacattgagaaatccag

SEQ ID NO: 36569 - DNA, 25 bp, Artificial
  Probe
gtagaagacattgagaaatccagag

SEQ ID NO: 36570 - DNA, 25 bp, Artificial
  Probe
agaagacattgagaaatccagaggt

SEQ ID NO: 36571 - DNA, 25 bp, Artificial
  Probe
gttaatatctttccatcccgcctag

SEQ ID NO: 36572 - DNA, 25 bp, Artificial
  Probe
cttggatttggtgtatgtaaggcag

SEQ ID NO: 36573 - DNA, 25 bp, Artificial
  Probe
cgttaatatctttccatcccgccta

SEQ ID NO: 36574 - DNA, 25 bp, Artificial
  Probe
ttaatatctttccatcccgcctagc

SEQ ID NO: 36575 - DNA, 25 bp, Artificial
  Probe
ggagcttctggcaatcttctaagag

SEQ ID NO: 36576 - DNA, 25 bp, Artificial
  Probe
tctgtttacagtgttccaaggttta

SEQ ID NO: 36577 - DNA, 25 bp, Artificial
  Probe
tatctgtttacagtgttccaaggtt

SEQ ID NO: 36578 - DNA, 25 bp, Artificial
  Probe
tctatctgtttacagtgttccaagg

SEQ ID NO: 36579 - DNA, 25 bp, Artificial
  Probe
aaaggctctatctgtttacagtgtt

SEQ ID NO: 36580 - DNA, 25 bp, Artificial
  Probe
tgtttacagtgttccaaggtttaaa

SEQ ID NO: 36581 - DNA, 25 bp, Artificial
  Probe
ctgtttacagtgttccaaggtttaa

SEQ ID NO: 36582 - DNA, 25 bp, Artificial
  Probe
ctatctgtttacagtgttccaaggt

SEQ ID NO: 36583 - DNA, 25 bp, Artificial
  Probe
aaggctctatctgtttacagtgttc

SEQ ID NO: 36584 - DNA, 25 bp, Artificial
  Probe
taaaggctctatctgtttacagtgt

SEQ ID NO: 36585 - DNA, 25 bp, Artificial
  Probe
atctgtttacagtgttccaaggttt

SEQ ID NO: 36586 - DNA, 25 bp, Artificial
  Probe
gctctatctgtttacagtgttccaa

SEQ ID NO: 36587 - DNA, 25 bp, Artificial
  Probe
ctctatctgtttacagtgttccaag

SEQ ID NO: 36588 - DNA, 25 bp, Artificial
  Probe
atgacgttaatatctttccatcccg

SEQ ID NO: 36589 - DNA, 25 bp, Artificial
  Probe
atttggtgtatgtaaggcagcagag

SEQ ID NO: 36590 - DNA, 25 bp, Artificial
  Probe
gatttggtgtatgtaaggcagcaga

SEQ ID NO: 36591 - DNA, 25 bp, Artificial
  Probe
ttaaaggctctatctgtttacagtg

SEQ ID NO: 36592 - DNA, 25 bp, Artificial
  Probe
gtgtatgtaaggcagcagagcagta

SEQ ID NO: 36593 - DNA, 25 bp, Artificial
  Probe
ccatctcagaactgacaattcctgg

SEQ ID NO: 36594 - DNA, 25 bp, Artificial
  Probe
gacattgagaaatccagaggttttg

SEQ ID NO: 36595 - DNA, 25 bp, Artificial
  Probe
agacattgagaaatccagaggtttt

SEQ ID NO: 36596 - DNA, 25 bp, Artificial
  Probe
aggctctatctgtttacagtgttcc

SEQ ID NO: 36597 - DNA, 25 bp, Artificial
  Probe
aggaaccaaagcgaattttaagatg

SEQ ID NO: 36598 - DNA, 25 bp, Artificial
  Probe
aaggaaccaaagcgaattttaagat

SEQ ID NO: 36599 - DNA, 25 bp, Artificial
  Probe
gaaggaaccaaagcgaattttaaga

SEQ ID NO: 36600 - DNA, 25 bp, Artificial
  Probe
ctggggtagaagacattgagaaatc

SEQ ID NO: 36601 - DNA, 25 bp, Artificial
  Probe
ttggatttggtgtatgtaaggcagc

SEQ ID NO: 36602 - DNA, 25 bp, Artificial
  Probe
ttaaactcgctcactgctaaaatat

SEQ ID NO: 36603 - DNA, 25 bp, Artificial
  Probe
ggctctatctgtttacagtgttcca

SEQ ID NO: 36604 - DNA, 25 bp, Artificial
  Probe
ggatggtgttcaaaagacttgtaaa

SEQ ID NO: 36605 - DNA, 25 bp, Artificial
  Probe
gcttggatttggtgtatgtaaggca

SEQ ID NO: 36606 - DNA, 25 bp, Artificial
  Probe
tttaaaggctctatctgtttacagt

SEQ ID NO: 36607 - DNA, 25 bp, Artificial
  Probe
cgaaggaaccaaagcgaattttaag

SEQ ID NO: 36608 - DNA, 25 bp, Artificial
  Probe
cattgagaaatccagaggttttgct

SEQ ID NO: 36609 - DNA, 25 bp, Artificial
  Probe
cttgtagaggtactgttgattcagg

SEQ ID NO: 36610 - DNA, 25 bp, Artificial
  Probe
ttgtagaggtactgttgattcagga

SEQ ID NO: 36611 - DNA, 25 bp, Artificial
  Probe
ccttgtagaggtactgttgattcag

SEQ ID NO: 36612 - DNA, 25 bp, Artificial
  Probe
tagaggtactgttgattcaggactg

SEQ ID NO: 36613 - DNA, 25 bp, Artificial
  Probe
gtagaggtactgttgattcaggact

SEQ ID NO: 36614 - DNA, 25 bp, Artificial
  Probe
tgtagaggtactgttgattcaggac

SEQ ID NO: 36615 - DNA, 25 bp, Artificial
  Probe
gagtgaaaggactgttgaataaacc

SEQ ID NO: 36616 - DNA, 25 bp, Artificial
  Probe
tgtagagtgaaaggactgttgaata

SEQ ID NO: 36617 - DNA, 25 bp, Artificial
  Probe
gtgtagagtgaaaggactgttgaat

SEQ ID NO: 36618 - DNA, 25 bp, Artificial
  Probe
agagtgaaaggactgttgaataaac

SEQ ID NO: 36619 - DNA, 25 bp, Artificial
  Probe
tacttgtgtagagtgaaaggactgt

SEQ ID NO: 36620 - DNA, 25 bp, Artificial
  Probe
gccttgtagaggtactgttgattca

SEQ ID NO: 36621 - DNA, 25 bp, Artificial
  Probe
tgccttgtagaggtactgttgattc

SEQ ID NO: 36622 - DNA, 25 bp, Artificial
  Probe
ctgccttgtagaggtactgttgatt

SEQ ID NO: 36623 - DNA, 25 bp, Artificial
  Probe
tttgtacttgtgtagagtgaaagga

SEQ ID NO: 36624 - DNA, 25 bp, Artificial
  Probe
gtagagtgaaaggactgttgaataa

SEQ ID NO: 36625 - DNA, 25 bp, Artificial
  Probe
cttgtgtagagtgaaaggactgttg

SEQ ID NO: 36626 - DNA, 25 bp, Artificial
  Probe
ttgtacttgtgtagagtgaaaggac

SEQ ID NO: 36627 - DNA, 25 bp, Artificial
  Probe
gtacttgtgtagagtgaaaggactg

SEQ ID NO: 36628 - DNA, 25 bp, Artificial
  Probe
agtgaaaggactgttgaataaacct

SEQ ID NO: 36629 - DNA, 25 bp, Artificial
  Probe
tttgaagacagcagttgagatgttt

SEQ ID NO: 36630 - DNA, 25 bp, Artificial
  Probe
tgtgtagagtgaaaggactgttgaa

SEQ ID NO: 36631 - DNA, 25 bp, Artificial
  Probe
ttgtgtagagtgaaaggactgttga

SEQ ID NO: 36632 - DNA, 25 bp, Artificial
  Probe
acttgtgtagagtgaaaggactgtt

SEQ ID NO: 36633 - DNA, 25 bp, Artificial
  Probe
tgtacttgtgtagagtgaaaggact

SEQ ID NO: 36634 - DNA, 25 bp, Artificial
  Probe
gaggtactgttgattcaggactgtg

SEQ ID NO: 36635 - DNA, 25 bp, Artificial
  Probe
agaggtactgttgattcaggactgt

SEQ ID NO: 36636 - DNA, 25 bp, Artificial
  Probe
gtgaaaggactgttgaataaaccta

SEQ ID NO: 36637 - DNA, 25 bp, Artificial
  Probe
ttgaagacagcagttgagatgtttc

SEQ ID NO: 36638 - DNA, 25 bp, Artificial
  Probe
ctttgaagacagcagttgagatgtt

SEQ ID NO: 36639 - DNA, 25 bp, Artificial
  Probe
tagagtgaaaggactgttgaataaa

SEQ ID NO: 36640 - DNA, 25 bp, Artificial
  Probe
tctgccttgtagaggtactgttgat

SEQ ID NO: 36641 - DNA, 25 bp, Artificial
  Probe
tgaaaggactgttgaataaacctag

SEQ ID NO: 36642 - DNA, 25 bp, Artificial
  Probe
gttctgccttgtagaggtactgttg

SEQ ID NO: 36643 - DNA, 25 bp, Artificial
  Probe
ttctgccttgtagaggtactgttga

SEQ ID NO: 36644 - DNA, 25 bp, Artificial
  Probe
aagacagcagttgagatgtttcctc

SEQ ID NO: 36645 - DNA, 25 bp, Artificial
  Probe
gaagacagcagttgagatgtttcct

SEQ ID NO: 36646 - DNA, 25 bp, Artificial
  Probe
tgaagacagcagttgagatgtttcc

SEQ ID NO: 36647 - DNA, 25 bp, Artificial
  Probe
ggttctgccttgtagaggtactgtt

SEQ ID NO: 36648 - DNA, 25 bp, Artificial
  Probe
gacagcagttgagatgtttcctctg

SEQ ID NO: 36649 - DNA, 25 bp, Artificial
  Probe
agacagcagttgagatgtttcctct

SEQ ID NO: 36650 - DNA, 25 bp, Artificial
  Probe
aggtactgttgattcaggactgtgc

SEQ ID NO: 36651 - DNA, 25 bp, Artificial
  Probe
ttaccagggtaggctttgaagacag

SEQ ID NO: 36652 - DNA, 25 bp, Artificial
  Probe
cttaccagggtaggctttgaagaca

SEQ ID NO: 36653 - DNA, 25 bp, Artificial
  Probe
tttgtagcattttagataaggttgt

SEQ ID NO: 36654 - DNA, 25 bp, Artificial
  Probe
tggagtcagtcatctcattaaagag

SEQ ID NO: 36655 - DNA, 25 bp, Artificial
  Probe
ggagtcagtcatctcattaaagagg

SEQ ID NO: 36656 - DNA, 25 bp, Artificial
  Probe
gagtcagtcatctcattaaagaggc

SEQ ID NO: 36657 - DNA, 25 bp, Artificial
  Probe
ctggagtcagtcatctcattaaaga

SEQ ID NO: 36658 - DNA, 25 bp, Artificial
  Probe
cctggagtcagtcatctcattaaag

SEQ ID NO: 36659 - DNA, 25 bp, Artificial
  Probe
agcctggagtcagtcatctcattaa

SEQ ID NO: 36660 - DNA, 25 bp, Artificial
  Probe
aagcctggagtcagtcatctcatta

SEQ ID NO: 36661 - DNA, 25 bp, Artificial
  Probe
ttcttgtggtgtaacctagccattc

SEQ ID NO: 36662 - DNA, 25 bp, Artificial
  Probe
cttcttgtggtgtaacctagccatt

SEQ ID NO: 36663 - DNA, 25 bp, Artificial
  Probe
gcctggagtcagtcatctcattaaa

SEQ ID NO: 36664 - DNA, 25 bp, Artificial
  Probe
atcctgttttccactgaagtctaaa

SEQ ID NO: 36665 - DNA, 25 bp, Artificial
  Probe
gaatgagacccttcttgtggtgtaa

SEQ ID NO: 36666 - DNA, 25 bp, Artificial
  Probe
catcctgttttccactgaagtctaa

SEQ ID NO: 36667 - DNA, 25 bp, Artificial
  Probe
ccaagagacaagtacccaaagcaaa

SEQ ID NO: 36668 - DNA, 25 bp, Artificial
  Probe
aatgagacccttcttgtggtgtaac

SEQ ID NO: 36669 - DNA, 25 bp, Artificial
  Probe
cctgttttccactgaagtctaaaag

SEQ ID NO: 36670 - DNA, 25 bp, Artificial
  Probe
aagagacaagtacccaaagcaaaag

SEQ ID NO: 36671 - DNA, 25 bp, Artificial
  Probe
tcctgttttccactgaagtctaaaa

SEQ ID NO: 36672 - DNA, 25 bp, Artificial
  Probe
ctgttttccactgaagtctaaaagc

SEQ ID NO: 36673 - DNA, 25 bp, Artificial
  Probe
tcttgtggtgtaacctagccattcc

SEQ ID NO: 36674 - DNA, 25 bp, Artificial
  Probe
ccttcttgtggtgtaacctagccat

SEQ ID NO: 36675 - DNA, 25 bp, Artificial
  Probe
caagagacaagtacccaaagcaaaa

SEQ ID NO: 36676 - DNA, 25 bp, Artificial
  Probe
atctgccaagagacaagtacccaaa

SEQ ID NO: 36677 - DNA, 25 bp, Artificial
  Probe
aaagcctggagtcagtcatctcatt

SEQ ID NO: 36678 - DNA, 25 bp, Artificial
  Probe
ttttccactgaagtctaaaagcctg

SEQ ID NO: 36679 - DNA, 25 bp, Artificial
  Probe
gttttccactgaagtctaaaagcct

SEQ ID NO: 36680 - DNA, 25 bp, Artificial
  Probe
gagacccttcttgtggtgtaaccta

SEQ ID NO: 36681 - DNA, 25 bp, Artificial
  Probe
tgttttccactgaagtctaaaagcc

SEQ ID NO: 36682 - DNA, 25 bp, Artificial
  Probe
agacccttcttgtggtgtaacctag

SEQ ID NO: 36683 - DNA, 25 bp, Artificial
  Probe
gcatcctgttttccactgaagtcta

SEQ ID NO: 36684 - DNA, 25 bp, Artificial
  Probe
ctaaaagcctggagtcagtcatctc

SEQ ID NO: 36685 - DNA, 25 bp, Artificial
  Probe
ggaatgagacccttcttgtggtgta

SEQ ID NO: 36686 - DNA, 25 bp, Artificial
  Probe
cactgaagtctaaaagcctggagtc

SEQ ID NO: 36687 - DNA, 25 bp, Artificial
  Probe
tctgccaagagacaagtacccaaag

SEQ ID NO: 36688 - DNA, 25 bp, Artificial
  Probe
catctgccaagagacaagtacccaa

SEQ ID NO: 36689 - DNA, 25 bp, Artificial
  Probe
gtctaaaagcctggagtcagtcatc

SEQ ID NO: 36690 - DNA, 25 bp, Artificial
  Probe
gaagtctaaaagcctggagtcagtc

SEQ ID NO: 36691 - DNA, 25 bp, Artificial
  Probe
atgagacccttcttgtggtgtaacc

SEQ ID NO: 36692 - DNA, 25 bp, Artificial
  Probe
tctaaaagcctggagtcagtcatct

SEQ ID NO: 36693 - DNA, 25 bp, Artificial
  Probe
actgaagtctaaaagcctggagtca

SEQ ID NO: 36694 - DNA, 25 bp, Artificial
  Probe
taaaagcctggagtcagtcatctca

SEQ ID NO: 36695 - DNA, 25 bp, Artificial
  Probe
agtctaaaagcctggagtcagtcat

SEQ ID NO: 36696 - DNA, 25 bp, Artificial
  Probe
aagtctaaaagcctggagtcagtca

SEQ ID NO: 36697 - DNA, 25 bp, Artificial
  Probe
tgaagtctaaaagcctggagtcagt

SEQ ID NO: 36698 - DNA, 25 bp, Artificial
  Probe
tttccactgaagtctaaaagcctgg

SEQ ID NO: 36699 - DNA, 25 bp, Artificial
  Probe
taccattctctggaactggcattag

SEQ ID NO: 36700 - DNA, 25 bp, Artificial
  Probe
gatcggtactttgaggcatatcttc

SEQ ID NO: 36701 - DNA, 25 bp, Artificial
  Probe
gtaccattctctggaactggcatta

SEQ ID NO: 36702 - DNA, 25 bp, Artificial
  Probe
atcggtactttgaggcatatcttcc

SEQ ID NO: 36703 - DNA, 25 bp, Artificial
  Probe
tcggtactttgaggcatatcttcct

SEQ ID NO: 36704 - DNA, 25 bp, Artificial
  Probe
atccttgggtgttggctatgaactg

SEQ ID NO: 36705 - DNA, 25 bp, Artificial
  Probe
catccttgggtgttggctatgaact

SEQ ID NO: 36706 - DNA, 25 bp, Artificial
  Probe
cggtactttgaggcatatcttcctc

SEQ ID NO: 36707 - DNA, 25 bp, Artificial
  Probe
ggtaccattctctggaactggcatt

SEQ ID NO: 36708 - DNA, 25 bp, Artificial
  Probe
agtagctcttgggaagccaattctg

SEQ ID NO: 36709 - DNA, 25 bp, Artificial
  Probe
cagtagctcttgggaagccaattct

SEQ ID NO: 36710 - DNA, 25 bp, Artificial
  Probe
tagctcttgggaagccaattctgtg

SEQ ID NO: 36711 - DNA, 25 bp, Artificial
  Probe
gtagctcttgggaagccaattctgt

SEQ ID NO: 36712 - DNA, 25 bp, Artificial
  Probe
gaggagggtaccattctctggaact

SEQ ID NO: 36713 - DNA, 25 bp, Artificial
  Probe
aggagggtaccattctctggaactg

SEQ ID NO: 36714 - DNA, 25 bp, Artificial
  Probe
gaggtcagaggagggtaccattctc

SEQ ID NO: 36715 - DNA, 25 bp, Artificial
  Probe
agaggagggtaccattctctggaac

SEQ ID NO: 36716 - DNA, 25 bp, Artificial
  Probe
tagagtagcaatgggttagtgtctg

SEQ ID NO: 36717 - DNA, 25 bp, Artificial
  Probe
ctaggaaggacagaggttggctatc

SEQ ID NO: 36718 - DNA, 25 bp, Artificial
  Probe
attgtcacatcctactgccaatgtt

SEQ ID NO: 36719 - DNA, 25 bp, Artificial
  Probe
agagtagcaatgggttagtgtctgg

SEQ ID NO: 36720 - DNA, 25 bp, Artificial
  Probe
agtagcaatgggttagtgtctggtc

SEQ ID NO: 36721 - DNA, 25 bp, Artificial
  Probe
gagtagcaatgggttagtgtctggt

SEQ ID NO: 36722 - DNA, 25 bp, Artificial
  Probe
tagcaatgggttagtgtctggtcag

SEQ ID NO: 36723 - DNA, 25 bp, Artificial
  Probe
gtcacatcctactgccaatgttgtt

SEQ ID NO: 36724 - DNA, 25 bp, Artificial
  Probe
ttgtcacatcctactgccaatgttg

SEQ ID NO: 36725 - DNA, 25 bp, Artificial
  Probe
gtagcaatgggttagtgtctggtca

SEQ ID NO: 36726 - DNA, 25 bp, Artificial
  Probe
tctcctttcctcctctcctagcaaa

SEQ ID NO: 36727 - DNA, 25 bp, Artificial
  Probe
atgacggcttcaaggatgctatgac

SEQ ID NO: 36728 - DNA, 25 bp, Artificial
  Probe
tcacatcctactgccaatgttgttt

SEQ ID NO: 36729 - DNA, 25 bp, Artificial
  Probe
catgacggcttcaaggatgctatga

SEQ ID NO: 36730 - DNA, 25 bp, Artificial
  Probe
ctctcctttcctcctctcctagcaa

SEQ ID NO: 36731 - DNA, 25 bp, Artificial
  Probe
tgtcacatcctactgccaatgttgt

SEQ ID NO: 36732 - DNA, 25 bp, Artificial
  Probe
ctcctttcctcctctcctagcaaaa

SEQ ID NO: 36733 - DNA, 25 bp, Artificial
  Probe
cagctttgaggactttgtcaccatg

SEQ ID NO: 36734 - DNA, 25 bp, Artificial
  Probe
agctttgaggactttgtcaccatga

SEQ ID NO: 36735 - DNA, 25 bp, Artificial
  Probe
tcagctttgaggactttgtcaccat

SEQ ID NO: 36736 - DNA, 25 bp, Artificial
  Probe
ccatatctgatgaggctcatgacct

SEQ ID NO: 36737 - DNA, 25 bp, Artificial
  Probe
aacattaattttcctgaagctttgc

SEQ ID NO: 36738 - DNA, 25 bp, Artificial
  Probe
catatctgatgaggctcatgacctc

SEQ ID NO: 36739 - DNA, 25 bp, Artificial
  Probe
ctttgaggactttgtcaccatgacg

SEQ ID NO: 36740 - DNA, 25 bp, Artificial
  Probe
tacctgtcatctctcactgaccacc

SEQ ID NO: 36741 - DNA, 25 bp, Artificial
  Probe
gctttgaggactttgtcaccatgac

SEQ ID NO: 36742 - DNA, 25 bp, Artificial
  Probe
atatctgatgaggctcatgacctcc

SEQ ID NO: 36743 - DNA, 25 bp, Artificial
  Probe
taacattaattttcctgaagctttg

SEQ ID NO: 36744 - DNA, 25 bp, Artificial
  Probe
ctcagctttgaggactttgtcacca

SEQ ID NO: 36745 - DNA, 25 bp, Artificial
  Probe
ttaacattaattttcctgaagcttt

SEQ ID NO: 36746 - DNA, 25 bp, Artificial
  Probe
gccatatctgatgaggctcatgacc

SEQ ID NO: 36747 - DNA, 25 bp, Artificial
  Probe
ggccatatctgatgaggctcatgac

SEQ ID NO: 36748 - DNA, 25 bp, Artificial
  Probe
tatctgatgaggctcatgacctcca

SEQ ID NO: 36749 - DNA, 25 bp, Artificial
  Probe
aaaagtgtttcctggcctgagctag

SEQ ID NO: 36750 - DNA, 25 bp, Artificial
  Probe
ttttctttcccatttggggccaaaa

SEQ ID NO: 36751 - DNA, 25 bp, Artificial
  Probe
tttctttcccatttggggccaaaag

SEQ ID NO: 36752 - DNA, 25 bp, Artificial
  Probe
atctgatgaggctcatgacctccaa

SEQ ID NO: 36753 - DNA, 25 bp, Artificial
  Probe
atgaggctcatgacctccaaaactt

SEQ ID NO: 36754 - DNA, 25 bp, Artificial
  Probe
gatgaggctcatgacctccaaaact

SEQ ID NO: 36755 - DNA, 25 bp, Artificial
  Probe
ctgatgaggctcatgacctccaaaa

SEQ ID NO: 36756 - DNA, 25 bp, Artificial
  Probe
tgatgaggctcatgacctccaaaac

SEQ ID NO: 36757 - DNA, 25 bp, Artificial
  Probe
tgaggctcatgacctccaaaacttg

SEQ ID NO: 36758 - DNA, 25 bp, Artificial
  Probe
tcacctccttgtcattaccagtata

SEQ ID NO: 36759 - DNA, 25 bp, Artificial
  Probe
cacctccttgtcattaccagtatat

SEQ ID NO: 36760 - DNA, 25 bp, Artificial
  Probe
atcacctccttgtcattaccagtat

SEQ ID NO: 36761 - DNA, 25 bp, Artificial
  Probe
acctccttgtcattaccagtatatg

SEQ ID NO: 36762 - DNA, 25 bp, Artificial
  Probe
cctccttgtcattaccagtatatgc

SEQ ID NO: 36763 - DNA, 25 bp, Artificial
  Probe
catcacctccttgtcattaccagta

SEQ ID NO: 36764 - DNA, 25 bp, Artificial
  Probe
gcaccattatcatcagttgaatatc

SEQ ID NO: 36765 - DNA, 25 bp, Artificial
  Probe
tcaatgccagaactattatctactt

SEQ ID NO: 36766 - DNA, 25 bp, Artificial
  Probe
tgtcattaccagtatatgcaccatt

SEQ ID NO: 36767 - DNA, 25 bp, Artificial
  Probe
ttgtcattaccagtatatgcaccat

SEQ ID NO: 36768 - DNA, 25 bp, Artificial
  Probe
ctccttgtcattaccagtatatgca

SEQ ID NO: 36769 - DNA, 25 bp, Artificial
  Probe
accagtatatgcaccattatcatca

SEQ ID NO: 36770 - DNA, 25 bp, Artificial
  Probe
tccttgtcattaccagtatatgcac

SEQ ID NO: 36771 - DNA, 25 bp, Artificial
  Probe
atcaatgccagaactattatctact

SEQ ID NO: 36772 - DNA, 25 bp, Artificial
  Probe
cttgtcattaccagtatatgcacca

SEQ ID NO: 36773 - DNA, 25 bp, Artificial
  Probe
ccagtatatgcaccattatcatcag

SEQ ID NO: 36774 - DNA, 25 bp, Artificial
  Probe
ccttgtcattaccagtatatgcacc

SEQ ID NO: 36775 - DNA, 25 bp, Artificial
  Probe
cagtatatgcaccattatcatcagt

SEQ ID NO: 36776 - DNA, 25 bp, Artificial
  Probe
gtcattaccagtatatgcaccatta

SEQ ID NO: 36777 - DNA, 25 bp, Artificial
  Probe
caccattatcatcagttgaatatca

SEQ ID NO: 36778 - DNA, 25 bp, Artificial
  Probe
tgcaccattatcatcagttgaatat

SEQ ID NO: 36779 - DNA, 25 bp, Artificial
  Probe
atgcaccattatcatcagttgaata

SEQ ID NO: 36780 - DNA, 25 bp, Artificial
  Probe
tatgcaccattatcatcagttgaat

SEQ ID NO: 36781 - DNA, 25 bp, Artificial
  Probe
atatgcaccattatcatcagttgaa

SEQ ID NO: 36782 - DNA, 25 bp, Artificial
  Probe
taccagtatatgcaccattatcatc

SEQ ID NO: 36783 - DNA, 25 bp, Artificial
  Probe
gtatatgcaccattatcatcagttg

SEQ ID NO: 36784 - DNA, 25 bp, Artificial
  Probe
atcagttgaatatcaatgccagaac

SEQ ID NO: 36785 - DNA, 25 bp, Artificial
  Probe
catcagttgaatatcaatgccagaa

SEQ ID NO: 36786 - DNA, 25 bp, Artificial
  Probe
tcatcagttgaatatcaatgccaga

SEQ ID NO: 36787 - DNA, 25 bp, Artificial
  Probe
agtatatgcaccattatcatcagtt

SEQ ID NO: 36788 - DNA, 25 bp, Artificial
  Probe
tcagttgaatatcaatgccagaact

SEQ ID NO: 36789 - DNA, 25 bp, Artificial
  Probe
atcatcagttgaatatcaatgccag

SEQ ID NO: 36790 - DNA, 25 bp, Artificial
  Probe
cagttgaatatcaatgccagaacta

SEQ ID NO: 36791 - DNA, 25 bp, Artificial
  Probe
tatatgcaccattatcatcagttga

SEQ ID NO: 36792 - DNA, 25 bp, Artificial
  Probe
ttaccagtatatgcaccattatcat

SEQ ID NO: 36793 - DNA, 25 bp, Artificial
  Probe
attaccagtatatgcaccattatca

SEQ ID NO: 36794 - DNA, 25 bp, Artificial
  Probe
tcattaccagtatatgcaccattat

SEQ ID NO: 36795 - DNA, 25 bp, Artificial
  Probe
cattaccagtatatgcaccattatc

SEQ ID NO: 36796 - DNA, 25 bp, Artificial
  Probe
acatcacctccttgtcattaccagt

SEQ ID NO: 36797 - DNA, 25 bp, Artificial
  Probe
tatcatcagttgaatatcaatgcca

SEQ ID NO: 36798 - DNA, 25 bp, Artificial
  Probe
agttgaatatcaatgccagaactat

SEQ ID NO: 36799 - DNA, 25 bp, Artificial
  Probe
caatgccagaactattatctactta

SEQ ID NO: 36800 - DNA, 25 bp, Artificial
  Probe
atgcaaagattcaacagggaaattt

SEQ ID NO: 36801 - DNA, 25 bp, Artificial
  Probe
aatgcaaagattcaacagggaaatt

SEQ ID NO: 36802 - DNA, 25 bp, Artificial
  Probe
aaatgcaaagattcaacagggaaat

SEQ ID NO: 36803 - DNA, 25 bp, Artificial
  Probe
atagacttgaaggctaactaaggat

SEQ ID NO: 36804 - DNA, 25 bp, Artificial
  Probe
tagacttgaaggctaactaaggatc

SEQ ID NO: 36805 - DNA, 25 bp, Artificial
  Probe
tatagacttgaaggctaactaagga

SEQ ID NO: 36806 - DNA, 25 bp, Artificial
  Probe
gtatagacttgaaggctaactaagg

SEQ ID NO: 36807 - DNA, 25 bp, Artificial
  Probe
tgtatagacttgaaggctaactaag

SEQ ID NO: 36808 - DNA, 25 bp, Artificial
  Probe
gattggtcaagcataaagaaggaac

SEQ ID NO: 36809 - DNA, 25 bp, Artificial
  Probe
attggtcaagcataaagaaggaact

SEQ ID NO: 36810 - DNA, 25 bp, Artificial
  Probe
catgtatagacttgaaggctaacta

SEQ ID NO: 36811 - DNA, 25 bp, Artificial
  Probe
tgggaaattgtagggtagactttaa

SEQ ID NO: 36812 - DNA, 25 bp, Artificial
  Probe
aagcataaagaaggaacttggactt

SEQ ID NO: 36813 - DNA, 25 bp, Artificial
  Probe
atgtatagacttgaaggctaactaa

SEQ ID NO: 36814 - DNA, 25 bp, Artificial
  Probe
ttatgggaaattgtagggtagactt

SEQ ID NO: 36815 - DNA, 25 bp, Artificial
  Probe
atgggaaattgtagggtagacttta

SEQ ID NO: 36816 - DNA, 25 bp, Artificial
  Probe
tatgggaaattgtagggtagacttt

SEQ ID NO: 36817 - DNA, 25 bp, Artificial
  Probe
ttggtcaagcataaagaaggaactt

SEQ ID NO: 36818 - DNA, 25 bp, Artificial
  Probe
ggattggtcaagcataaagaaggaa

SEQ ID NO: 36819 - DNA, 25 bp, Artificial
  Probe
attatgggaaattgtagggtagact

SEQ ID NO: 36820 - DNA, 25 bp, Artificial
  Probe
ttcctgatagtagcctcctgaaatt

SEQ ID NO: 36821 - DNA, 25 bp, Artificial
  Probe
ctgaaattgctatggactcaacatt

SEQ ID NO: 36822 - DNA, 25 bp, Artificial
  Probe
gatttcctgatagtagcctcctgaa

SEQ ID NO: 36823 - DNA, 25 bp, Artificial
  Probe
ctccttacagaaagcatctagtctt

SEQ ID NO: 36824 - DNA, 25 bp, Artificial
  Probe
tcctgatagtagcctcctgaaattg

SEQ ID NO: 36825 - DNA, 25 bp, Artificial
  Probe
cttgatccttggatttcctgatagt

SEQ ID NO: 36826 - DNA, 25 bp, Artificial
  Probe
tgaaattgctatggactcaacattt

SEQ ID NO: 36827 - DNA, 25 bp, Artificial
  Probe
gatccttggatttcctgatagtagc

SEQ ID NO: 36828 - DNA, 25 bp, Artificial
  Probe
gggaaattgtagggtagactttaat

SEQ ID NO: 36829 - DNA, 25 bp, Artificial
  Probe
cctgaaattgctatggactcaacat

SEQ ID NO: 36830 - DNA, 25 bp, Artificial
  Probe
tgatccttggatttcctgatagtag

SEQ ID NO: 36831 - DNA, 25 bp, Artificial
  Probe
cctccttacagaaagcatctagtct

SEQ ID NO: 36832 - DNA, 25 bp, Artificial
  Probe
tcctccttacagaaagcatctagtc

SEQ ID NO: 36833 - DNA, 25 bp, Artificial
  Probe
atacaggaaacaaactgagcatctt

SEQ ID NO: 36834 - DNA, 25 bp, Artificial
  Probe
aatacaggaaacaaactgagcatct

SEQ ID NO: 36835 - DNA, 25 bp, Artificial
  Probe
caatacaggaaacaaactgagcatc

SEQ ID NO: 36836 - DNA, 25 bp, Artificial
  Probe
tacaggaaacaaactgagcatcttt

SEQ ID NO: 36837 - DNA, 25 bp, Artificial
  Probe
ttgatccttggatttcctgatagta

SEQ ID NO: 36838 - DNA, 25 bp, Artificial
  Probe
gtcctccttacagaaagcatctagt

SEQ ID NO: 36839 - DNA, 25 bp, Artificial
  Probe
acaatacaggaaacaaactgagcat

SEQ ID NO: 36840 - DNA, 25 bp, Artificial
  Probe
aacttggactttcattcctctgtat

SEQ ID NO: 36841 - DNA, 25 bp, Artificial
  Probe
ccttggatttcctgatagtagcctc

SEQ ID NO: 36842 - DNA, 25 bp, Artificial
  Probe
gaacttggactttcattcctctgta

SEQ ID NO: 36843 - DNA, 25 bp, Artificial
  Probe
atccttggatttcctgatagtagcc

SEQ ID NO: 36844 - DNA, 25 bp, Artificial
  Probe
acttggactttcattcctctgtatg

SEQ ID NO: 36845 - DNA, 25 bp, Artificial
  Probe
cacggattggtcaagcataaagaag

SEQ ID NO: 36846 - DNA, 25 bp, Artificial
  Probe
tattatgggaaattgtagggtagac

SEQ ID NO: 36847 - DNA, 25 bp, Artificial
  Probe
tccttggatttcctgatagtagcct

SEQ ID NO: 36848 - DNA, 25 bp, Artificial
  Probe
agtgacctctgacattcttagtgga

SEQ ID NO: 36849 - DNA, 25 bp, Artificial
  Probe
gtgacctctgacattcttagtggag

SEQ ID NO: 36850 - DNA, 25 bp, Artificial
  Probe
gagtgacctctgacattcttagtgg

SEQ ID NO: 36851 - DNA, 25 bp, Artificial
  Probe
tgacctctgacattcttagtggaga

SEQ ID NO: 36852 - DNA, 25 bp, Artificial
  Probe
cttccaagccttcattgacttcatg

SEQ ID NO: 36853 - DNA, 25 bp, Artificial
  Probe
cctctgacattcttagtggagaaga

SEQ ID NO: 36854 - DNA, 25 bp, Artificial
  Probe
ccttccaagccttcattgacttcat

SEQ ID NO: 36855 - DNA, 25 bp, Artificial
  Probe
acctctgacattcttagtggagaag

SEQ ID NO: 36856 - DNA, 25 bp, Artificial
  Probe
gacctctgacattcttagtggagaa

SEQ ID NO: 36857 - DNA, 25 bp, Artificial
  Probe
gaccttccaagccttcattgacttc

SEQ ID NO: 36858 - DNA, 25 bp, Artificial
  Probe
agagagtgacctctgacattcttag

SEQ ID NO: 36859 - DNA, 25 bp, Artificial
  Probe
gagagagtgacctctgacattctta

SEQ ID NO: 36860 - DNA, 25 bp, Artificial
  Probe
gagagtgacctctgacattcttagt

SEQ ID NO: 36861 - DNA, 25 bp, Artificial
  Probe
agagtgacctctgacattcttagtg

SEQ ID NO: 36862 - DNA, 25 bp, Artificial
  Probe
accttccaagccttcattgacttca

SEQ ID NO: 36863 - DNA, 25 bp, Artificial
  Probe
ctatgatctgggagaggtggagttt

SEQ ID NO: 36864 - DNA, 25 bp, Artificial
  Probe
tgaccttccaagccttcattgactt

SEQ ID NO: 36865 - DNA, 25 bp, Artificial
  Probe
tatgatctgggagaggtggagtttg

SEQ ID NO: 36866 - DNA, 25 bp, Artificial
  Probe
aaatcatccagcaccaaccacattt

SEQ ID NO: 36867 - DNA, 25 bp, Artificial
  Probe
caaatcatccagcaccaaccacatt

SEQ ID NO: 36868 - DNA, 25 bp, Artificial
  Probe
ggagagagtgacctctgacattctt

SEQ ID NO: 36869 - DNA, 25 bp, Artificial
  Probe
gtgaccttccaagccttcattgact

SEQ ID NO: 36870 - DNA, 25 bp, Artificial
  Probe
cttcaaatcatccagcaccaaccac

SEQ ID NO: 36871 - DNA, 25 bp, Artificial
  Probe
gtagcctccttcaaaatcctagcag

SEQ ID NO: 36872 - DNA, 25 bp, Artificial
  Probe
ttccaagccttcattgacttcatga

SEQ ID NO: 36873 - DNA, 25 bp, Artificial
  Probe
tcaaatcatccagcaccaaccacat

SEQ ID NO: 36874 - DNA, 25 bp, Artificial
  Probe
ttcaaatcatccagcaccaaccaca

SEQ ID NO: 36875 - DNA, 25 bp, Artificial
  Probe
tacggagagagtgacctctgacatt

SEQ ID NO: 36876 - DNA, 25 bp, Artificial
  Probe
tccaagccttcattgacttcatgac

SEQ ID NO: 36877 - DNA, 25 bp, Artificial
  Probe
ctacggagagagtgacctctgacat

SEQ ID NO: 36878 - DNA, 25 bp, Artificial
  Probe
gctatgatctgggagaggtggagtt

SEQ ID NO: 36879 - DNA, 25 bp, Artificial
  Probe
ctctacggagagagtgacctctgac

SEQ ID NO: 36880 - DNA, 25 bp, Artificial
  Probe
tagcctccttcaaaatcctagcagg

SEQ ID NO: 36881 - DNA, 25 bp, Artificial
  Probe
attgacttcatgacccgagagactg

SEQ ID NO: 36882 - DNA, 25 bp, Artificial
  Probe
cattgacttcatgacccgagagact

SEQ ID NO: 36883 - DNA, 25 bp, Artificial
  Probe
cggagagagtgacctctgacattct

SEQ ID NO: 36884 - DNA, 25 bp, Artificial
  Probe
ccaagccttcattgacttcatgacc

SEQ ID NO: 36885 - DNA, 25 bp, Artificial
  Probe
cttcattgacttcatgacccgagag

SEQ ID NO: 36886 - DNA, 25 bp, Artificial
  Probe
cttcaaaatcctagcaggagacaag

SEQ ID NO: 36887 - DNA, 25 bp, Artificial
  Probe
tcaaaatcctagcaggagacaagaa

SEQ ID NO: 36888 - DNA, 25 bp, Artificial
  Probe
ttcaaaatcctagcaggagacaaga

SEQ ID NO: 36889 - DNA, 25 bp, Artificial
  Probe
ttcattgacttcatgacccgagaga

SEQ ID NO: 36890 - DNA, 25 bp, Artificial
  Probe
ccttcaaaatcctagcaggagacaa

SEQ ID NO: 36891 - DNA, 25 bp, Artificial
  Probe
atgatttccgagcttgcctcatctc

SEQ ID NO: 36892 - DNA, 25 bp, Artificial
  Probe
tcattgacttcatgacccgagagac

SEQ ID NO: 36893 - DNA, 25 bp, Artificial
  Probe
cctaattgtagaatgacttgcttgg

SEQ ID NO: 36894 - DNA, 25 bp, Artificial
  Probe
aattgtagaatgacttgcttggaat

SEQ ID NO: 36895 - DNA, 25 bp, Artificial
  Probe
ctaattgtagaatgacttgcttgga

SEQ ID NO: 36896 - DNA, 25 bp, Artificial
  Probe
attgtagaatgacttgcttggaata

SEQ ID NO: 36897 - DNA, 25 bp, Artificial
  Probe
ttgtagaatgacttgcttggaatat

SEQ ID NO: 36898 - DNA, 25 bp, Artificial
  Probe
taattgtagaatgacttgcttggaa

SEQ ID NO: 36899 - DNA, 25 bp, Artificial
  Probe
gaagtagaaagaagacagcaagaac

SEQ ID NO: 36900 - DNA, 25 bp, Artificial
  Probe
ggaagtagaaagaagacagcaagaa

SEQ ID NO: 36901 - DNA, 25 bp, Artificial
  Probe
ccctaattgtagaatgacttgcttg

SEQ ID NO: 36902 - DNA, 25 bp, Artificial
  Probe
accctaattgtagaatgacttgctt

SEQ ID NO: 36903 - DNA, 25 bp, Artificial
  Probe
aaccctaattgtagaatgacttgct

SEQ ID NO: 36904 - DNA, 25 bp, Artificial
  Probe
aagtagaaagaagacagcaagaacc

SEQ ID NO: 36905 - DNA, 25 bp, Artificial
  Probe
aaaccctaattgtagaatgacttgc

SEQ ID NO: 36906 - DNA, 25 bp, Artificial
  Probe
gtgaaaccctaattgtagaatgact

SEQ ID NO: 36907 - DNA, 25 bp, Artificial
  Probe
agtgaaaccctaattgtagaatgac

SEQ ID NO: 36908 - DNA, 25 bp, Artificial
  Probe
cagtgaaaccctaattgtagaatga

SEQ ID NO: 36909 - DNA, 25 bp, Artificial
  Probe
ttagaattaagaggaaatgatgggc

SEQ ID NO: 36910 - DNA, 25 bp, Artificial
  Probe
tgaaaccctaattgtagaatgactt

SEQ ID NO: 36911 - DNA, 25 bp, Artificial
  Probe
acagtgaaaccctaattgtagaatg

SEQ ID NO: 36912 - DNA, 25 bp, Artificial
  Probe
gaaaccctaattgtagaatgacttg

SEQ ID NO: 36913 - DNA, 25 bp, Artificial
  Probe
aaacagtgaaaccctaattgtagaa

SEQ ID NO: 36914 - DNA, 25 bp, Artificial
  Probe
tccaacatacagtcaactttcgata

SEQ ID NO: 36915 - DNA, 25 bp, Artificial
  Probe
aacagtgaaaccctaattgtagaat

SEQ ID NO: 36916 - DNA, 25 bp, Artificial
  Probe
ccaacatacagtcaactttcgataa

SEQ ID NO: 36917 - DNA, 25 bp, Artificial
  Probe
ttccaacatacagtcaactttcgat

SEQ ID NO: 36918 - DNA, 25 bp, Artificial
  Probe
tttccaacatacagtcaactttcga

SEQ ID NO: 36919 - DNA, 25 bp, Artificial
  Probe
agtagaaagaagacagcaagaaccg

SEQ ID NO: 36920 - DNA, 25 bp, Artificial
  Probe
gcttgtcacagaactcattcaaaca

SEQ ID NO: 36921 - DNA, 25 bp, Artificial
  Probe
ggcttgtcacagaactcattcaaac

SEQ ID NO: 36922 - DNA, 25 bp, Artificial
  Probe
agtttgactactttgagcaccttcc

SEQ ID NO: 36923 - DNA, 25 bp, Artificial
  Probe
caacatacagtcaactttcgataaa

SEQ ID NO: 36924 - DNA, 25 bp, Artificial
  Probe
tttagaattaagaggaaatgatggg

SEQ ID NO: 36925 - DNA, 25 bp, Artificial
  Probe
tcaatcacggaggctgagaatgtag

SEQ ID NO: 36926 - DNA, 25 bp, Artificial
  Probe
ttaagtgccaaaataaagtctgtcg

SEQ ID NO: 36927 - DNA, 25 bp, Artificial
  Probe
ttttccaacatacagtcaactttcg

SEQ ID NO: 36928 - DNA, 25 bp, Artificial
  Probe
taagtgccaaaataaagtctgtcgt

SEQ ID NO: 36929 - DNA, 25 bp, Artificial
  Probe
gtcacagaactcattcaaacaaaac

SEQ ID NO: 36930 - DNA, 25 bp, Artificial
  Probe
tcacagaactcattcaaacaaaact

SEQ ID NO: 36931 - DNA, 25 bp, Artificial
  Probe
cttttccaacatacagtcaactttc

SEQ ID NO: 36932 - DNA, 25 bp, Artificial
  Probe
caatcacggaggctgagaatgtagt

SEQ ID NO: 36933 - DNA, 25 bp, Artificial
  Probe
tagaattaagaggaaatgatgggcc

SEQ ID NO: 36934 - DNA, 25 bp, Artificial
  Probe
caacttttccaacatacagtcaact

SEQ ID NO: 36935 - DNA, 25 bp, Artificial
  Probe
gtttgactactttgagcaccttccc

SEQ ID NO: 36936 - DNA, 25 bp, Artificial
  Probe
acttttccaacatacagtcaacttt

SEQ ID NO: 36937 - DNA, 25 bp, Artificial
  Probe
aacttttccaacatacagtcaactt

SEQ ID NO: 36938 - DNA, 25 bp, Artificial
  Probe
caacaacatatcttcagcatccttg

SEQ ID NO: 36939 - DNA, 25 bp, Artificial
  Probe
atcattggacgcaacaacatatctt

SEQ ID NO: 36940 - DNA, 25 bp, Artificial
  Probe
gcaacaacatatcttcagcatcctt

SEQ ID NO: 36941 - DNA, 25 bp, Artificial
  Probe
attggacgcaacaacatatcttcag

SEQ ID NO: 36942 - DNA, 25 bp, Artificial
  Probe
tcattggacgcaacaacatatcttc

SEQ ID NO: 36943 - DNA, 25 bp, Artificial
  Probe
cattggacgcaacaacatatcttca

SEQ ID NO: 36944 - DNA, 25 bp, Artificial
  Probe
gatcattggacgcaacaacatatct

SEQ ID NO: 36945 - DNA, 25 bp, Artificial
  Probe
gacgcaacaacatatcttcagcatc

SEQ ID NO: 36946 - DNA, 25 bp, Artificial
  Probe
ctatttacagaatggcaaaggcaag

SEQ ID NO: 36947 - DNA, 25 bp, Artificial
  Probe
caaaggcaagaagtatttccatagg

SEQ ID NO: 36948 - DNA, 25 bp, Artificial
  Probe
tatttacagaatggcaaaggcaaga

SEQ ID NO: 36949 - DNA, 25 bp, Artificial
  Probe
gcaaaggcaagaagtatttccatag

SEQ ID NO: 36950 - DNA, 25 bp, Artificial
  Probe
ggttacctatttacagaatggcaaa

SEQ ID NO: 36951 - DNA, 25 bp, Artificial
  Probe
agaatggcaaaggcaagaagtattt

SEQ ID NO: 36952 - DNA, 25 bp, Artificial
  Probe
ggatcattggacgcaacaacatatc

SEQ ID NO: 36953 - DNA, 25 bp, Artificial
  Probe
gaatggcaaaggcaagaagtatttc

SEQ ID NO: 36954 - DNA, 25 bp, Artificial
  Probe
atttacagaatggcaaaggcaagaa

SEQ ID NO: 36955 - DNA, 25 bp, Artificial
  Probe
ggcaaaggcaagaagtatttccata

SEQ ID NO: 36956 - DNA, 25 bp, Artificial
  Probe
gttacctatttacagaatggcaaag

SEQ ID NO: 36957 - DNA, 25 bp, Artificial
  Probe
cagaatggcaaaggcaagaagtatt

SEQ ID NO: 36958 - DNA, 25 bp, Artificial
  Probe
tttacagaatggcaaaggcaagaag

SEQ ID NO: 36959 - DNA, 25 bp, Artificial
  Probe
cgcaacaacatatcttcagcatcct

SEQ ID NO: 36960 - DNA, 25 bp, Artificial
  Probe
gaaacacgcctgtatttaaggttac

SEQ ID NO: 36961 - DNA, 25 bp, Artificial
  Probe
aatggcaaaggcaagaagtatttcc

SEQ ID NO: 36962 - DNA, 25 bp, Artificial
  Probe
aaaggcaagaagtatttccatagga

SEQ ID NO: 36963 - DNA, 25 bp, Artificial
  Probe
tacagaatggcaaaggcaagaagta

SEQ ID NO: 36964 - DNA, 25 bp, Artificial
  Probe
ttacctatttacagaatggcaaagg

SEQ ID NO: 36965 - DNA, 25 bp, Artificial
  Probe
tacctatttacagaatggcaaaggc

SEQ ID NO: 36966 - DNA, 25 bp, Artificial
  Probe
caatagacacagtgctgtatttctc

SEQ ID NO: 36967 - DNA, 25 bp, Artificial
  Probe
acgcaacaacatatcttcagcatcc

SEQ ID NO: 36968 - DNA, 25 bp, Artificial
  Probe
ggacgcaacaacatatcttcagcat

SEQ ID NO: 36969 - DNA, 25 bp, Artificial
  Probe
aaacacgcctgtatttaaggttacc

SEQ ID NO: 36970 - DNA, 25 bp, Artificial
  Probe
cgaaacacgcctgtatttaaggtta

SEQ ID NO: 36971 - DNA, 25 bp, Artificial
  Probe
aatagacacagtgctgtatttctcg

SEQ ID NO: 36972 - DNA, 25 bp, Artificial
  Probe
cctatttacagaatggcaaaggcaa

SEQ ID NO: 36973 - DNA, 25 bp, Artificial
  Probe
aacaacatatcttcagcatccttgc

SEQ ID NO: 36974 - DNA, 25 bp, Artificial
  Probe
acagaatggcaaaggcaagaagtat

SEQ ID NO: 36975 - DNA, 25 bp, Artificial
  Probe
aggttacctatttacagaatggcaa

SEQ ID NO: 36976 - DNA, 25 bp, Artificial
  Probe
aaggttacctatttacagaatggca

SEQ ID NO: 36977 - DNA, 25 bp, Artificial
  Probe
acgcctgtatttaaggttacctatt

SEQ ID NO: 36978 - DNA, 25 bp, Artificial
  Probe
cacgcctgtatttaaggttacctat

SEQ ID NO: 36979 - DNA, 25 bp, Artificial
  Probe
ttacagaatggcaaaggcaagaagt

SEQ ID NO: 36980 - DNA, 25 bp, Artificial
  Probe
ttggacgcaacaacatatcttcagc

SEQ ID NO: 36981 - DNA, 25 bp, Artificial
  Probe
cgcctgtatttaaggttacctattt

SEQ ID NO: 36982 - DNA, 25 bp, Artificial
  Probe
acacgcctgtatttaaggttaccta

SEQ ID NO: 36983 - DNA, 25 bp, Artificial
  Probe
atgatgacaagatcgttggaggata

SEQ ID NO: 36984 - DNA, 25 bp, Artificial
  Probe
gatgacaagatcgttggaggataca

SEQ ID NO: 36985 - DNA, 25 bp, Artificial
  Probe
tgatgacaagatcgttggaggatac

SEQ ID NO: 36986 - DNA, 25 bp, Artificial
  Probe
atgacaagatcgttggaggatacac

SEQ ID NO: 36987 - DNA, 25 bp, Artificial
  Probe
gatgatgacaagatcgttggaggat

SEQ ID NO: 36988 - DNA, 25 bp, Artificial
  Probe
cctgaacaatgacatcatgctgatc

SEQ ID NO: 36989 - DNA, 25 bp, Artificial
  Probe
tgacaagatcgttggaggatacacc

SEQ ID NO: 36990 - DNA, 25 bp, Artificial
  Probe
gacaagatcgttggaggatacacct

SEQ ID NO: 36991 - DNA, 25 bp, Artificial
  Probe
acaagatcgttggaggatacacctg

SEQ ID NO: 36992 - DNA, 25 bp, Artificial
  Probe
gaacaatgacatcatgctgatcaag

SEQ ID NO: 36993 - DNA, 25 bp, Artificial
  Probe
tgaacaatgacatcatgctgatcaa

SEQ ID NO: 36994 - DNA, 25 bp, Artificial
  Probe
ctgaacaatgacatcatgctgatca

SEQ ID NO: 36995 - DNA, 25 bp, Artificial
  Probe
ctgaactctggctaccacttctgtg

SEQ ID NO: 36996 - DNA, 25 bp, Artificial
  Probe
aacaatgacatcatgctgatcaagc

SEQ ID NO: 36997 - DNA, 25 bp, Artificial
  Probe
caatgacatcatgctgatcaagctc

SEQ ID NO: 36998 - DNA, 25 bp, Artificial
  Probe
aatgacatcatgctgatcaagctct

SEQ ID NO: 36999 - DNA, 25 bp, Artificial
  Probe
acatcatgctgatcaagctctcttc

SEQ ID NO: 37000 - DNA, 25 bp, Artificial
  Probe
gacatcatgctgatcaagctctctt

SEQ ID NO: 37001 - DNA, 25 bp, Artificial
  Probe
atgacatcatgctgatcaagctctc

SEQ ID NO: 37002 - DNA, 25 bp, Artificial
  Probe
acaatgacatcatgctgatcaagct

SEQ ID NO: 37003 - DNA, 25 bp, Artificial
  Probe
catcatgctgatcaagctctcttcc

SEQ ID NO: 37004 - DNA, 25 bp, Artificial
  Probe
tgacatcatgctgatcaagctctct

SEQ ID NO: 37005 - DNA, 25 bp, Artificial
  Probe
cttctgtggaggttccctcatcaat

SEQ ID NO: 37006 - DNA, 25 bp, Artificial
  Probe
atcatgctgatcaagctctcttccc

SEQ ID NO: 37007 - DNA, 25 bp, Artificial
  Probe
ttctgtggaggttccctcatcaatg

SEQ ID NO: 37008 - DNA, 25 bp, Artificial
  Probe
ctgtggaggttccctcatcaatgac

SEQ ID NO: 37009 - DNA, 25 bp, Artificial
  Probe
tctgtggaggttccctcatcaatga

SEQ ID NO: 37010 - DNA, 25 bp, Artificial
  Probe
acttctgtggaggttccctcatcaa

SEQ ID NO: 37011 - DNA, 25 bp, Artificial
  Probe
gcttggtcatattctgtttctgttt

SEQ ID NO: 37012 - DNA, 25 bp, Artificial
  Probe
aagatgaagagctggtctgttagaa

SEQ ID NO: 37013 - DNA, 25 bp, Artificial
  Probe
gtgccctataacatcaacctcattt

SEQ ID NO: 37014 - DNA, 25 bp, Artificial
  Probe
agatgaagagctggtctgttagaag

SEQ ID NO: 37015 - DNA, 25 bp, Artificial
  Probe
ggcttggtcatattctgtttctgtt

SEQ ID NO: 37016 - DNA, 25 bp, Artificial
  Probe
aggcttggtcatattctgtttctgt

SEQ ID NO: 37017 - DNA, 25 bp, Artificial
  Probe
gatgaagagctggtctgttagaagg

SEQ ID NO: 37018 - DNA, 25 bp, Artificial
  Probe
aatataagctgcctgactaaaccac

SEQ ID NO: 37019 - DNA, 25 bp, Artificial
  Probe
caatataagctgcctgactaaacca

SEQ ID NO: 37020 - DNA, 25 bp, Artificial
  Probe
atgaagagctggtctgttagaagga

SEQ ID NO: 37021 - DNA, 25 bp, Artificial
  Probe
tgtgccctataacatcaacctcatt

SEQ ID NO: 37022 - DNA, 25 bp, Artificial
  Probe
ttgtgccctataacatcaacctcat

SEQ ID NO: 37023 - DNA, 25 bp, Artificial
  Probe
tttgtgccctataacatcaacctca

SEQ ID NO: 37024 - DNA, 25 bp, Artificial
  Probe
atataagctgcctgactaaaccact

SEQ ID NO: 37025 - DNA, 25 bp, Artificial
  Probe
taatgaatctgcaatataagctgcc

SEQ ID NO: 37026 - DNA, 25 bp, Artificial
  Probe
aatgaatctgcaatataagctgcct

SEQ ID NO: 37027 - DNA, 25 bp, Artificial
  Probe
gaagagctggtctgttagaaggagt

SEQ ID NO: 37028 - DNA, 25 bp, Artificial
  Probe
tgaagagctggtctgttagaaggag

SEQ ID NO: 37029 - DNA, 25 bp, Artificial
  Probe
tataagctgcctgactaaaccactg

SEQ ID NO: 37030 - DNA, 25 bp, Artificial
  Probe
tgccctataacatcaacctcatttt

SEQ ID NO: 37031 - DNA, 25 bp, Artificial
  Probe
tcatattctgtttctgttttgtgcc

SEQ ID NO: 37032 - DNA, 25 bp, Artificial
  Probe
tctgtttctgttttgtgccctataa

SEQ ID NO: 37033 - DNA, 25 bp, Artificial
  Probe
ttctgtttctgttttgtgccctata

SEQ ID NO: 37034 - DNA, 25 bp, Artificial
  Probe
tattctgtttctgttttgtgcccta

SEQ ID NO: 37035 - DNA, 25 bp, Artificial
  Probe
gtcatattctgtttctgttttgtgc

SEQ ID NO: 37036 - DNA, 25 bp, Artificial
  Probe
tggtcatattctgtttctgttttgt

SEQ ID NO: 37037 - DNA, 25 bp, Artificial
  Probe
atgaatctgcaatataagctgcctg

SEQ ID NO: 37038 - DNA, 25 bp, Artificial
  Probe
attctgtttctgttttgtgccctat

SEQ ID NO: 37039 - DNA, 25 bp, Artificial
  Probe
atctgcaatataagctgcctgacta

SEQ ID NO: 37040 - DNA, 25 bp, Artificial
  Probe
atattctgtttctgttttgtgccct

SEQ ID NO: 37041 - DNA, 25 bp, Artificial
  Probe
catattctgtttctgttttgtgccc

SEQ ID NO: 37042 - DNA, 25 bp, Artificial
  Probe
ggtcatattctgtttctgttttgtg

SEQ ID NO: 37043 - DNA, 25 bp, Artificial
  Probe
caccgagaattttatccaacacaac

SEQ ID NO: 37044 - DNA, 25 bp, Artificial
  Probe
ctgtttctgttttgtgccctataac

SEQ ID NO: 37045 - DNA, 25 bp, Artificial
  Probe
aagagctggtctgttagaaggagtg

SEQ ID NO: 37046 - DNA, 25 bp, Artificial
  Probe
caacctcattttgtattctctcgtg

SEQ ID NO: 37047 - DNA, 25 bp, Artificial
  Probe
tcaacctcattttgtattctctcgt

SEQ ID NO: 37048 - DNA, 25 bp, Artificial
  Probe
gccctataacatcaacctcattttg

SEQ ID NO: 37049 - DNA, 25 bp, Artificial
  Probe
tgataatgaatctgcaatataagct

SEQ ID NO: 37050 - DNA, 25 bp, Artificial
  Probe
tctgcaatataagctgcctgactaa

SEQ ID NO: 37051 - DNA, 25 bp, Artificial
  Probe
aacctcattttgtattctctcgtga

SEQ ID NO: 37052 - DNA, 25 bp, Artificial
  Probe
atcaacctcattttgtattctctcg

SEQ ID NO: 37053 - DNA, 25 bp, Artificial
  Probe
gataatgaatctgcaatataagctg

SEQ ID NO: 37054 - DNA, 25 bp, Artificial
  Probe
ttggtcatattctgtttctgttttg

SEQ ID NO: 37055 - DNA, 25 bp, Artificial
  Probe
gaatctgcaatataagctgcctgac

SEQ ID NO: 37056 - DNA, 25 bp, Artificial
  Probe
tctaacgagtaatagtgcctacatt

SEQ ID NO: 37057 - DNA, 25 bp, Artificial
  Probe
ttctaacgagtaatagtgcctacat

SEQ ID NO: 37058 - DNA, 25 bp, Artificial
  Probe
ctaacgagtaatagtgcctacattc

SEQ ID NO: 37059 - DNA, 25 bp, Artificial
  Probe
tggtcaatatacatctgcacaacta

SEQ ID NO: 37060 - DNA, 25 bp, Artificial
  Probe
agtatgagagaagcaaatatgtccc

SEQ ID NO: 37061 - DNA, 25 bp, Artificial
  Probe
taaagagggagaaatatggatggtg

SEQ ID NO: 37062 - DNA, 25 bp, Artificial
  Probe
tatgagagaagcaaatatgtcccac

SEQ ID NO: 37063 - DNA, 25 bp, Artificial
  Probe
gtatgagagaagcaaatatgtccca

SEQ ID NO: 37064 - DNA, 25 bp, Artificial
  Probe
gaaatatggatggtgggaatatgga

SEQ ID NO: 37065 - DNA, 25 bp, Artificial
  Probe
agaaatatggatggtgggaatatgg

SEQ ID NO: 37066 - DNA, 25 bp, Artificial
  Probe
ggagaaatatggatggtgggaatat

SEQ ID NO: 37067 - DNA, 25 bp, Artificial
  Probe
tttctaacgagtaatagtgcctaca

SEQ ID NO: 37068 - DNA, 25 bp, Artificial
  Probe
atcagcagattaaagagggagaaat

SEQ ID NO: 37069 - DNA, 25 bp, Artificial
  Probe
atatggatggtgggaatatggatac

SEQ ID NO: 37070 - DNA, 25 bp, Artificial
  Probe
aaatatggatggtgggaatatggat

SEQ ID NO: 37071 - DNA, 25 bp, Artificial
  Probe
gcagattaaagagggagaaatatgg

SEQ ID NO: 37072 - DNA, 25 bp, Artificial
  Probe
tcagcagattaaagagggagaaata

SEQ ID NO: 37073 - DNA, 25 bp, Artificial
  Probe
catcagcagattaaagagggagaaa

SEQ ID NO: 37074 - DNA, 25 bp, Artificial
  Probe
aatagccatcagcagattaaagagg

SEQ ID NO: 37075 - DNA, 25 bp, Artificial
  Probe
ttaaagagggagaaatatggatggt

SEQ ID NO: 37076 - DNA, 25 bp, Artificial
  Probe
aaatagccatcagcagattaaagag

SEQ ID NO: 37077 - DNA, 25 bp, Artificial
  Probe
tatctgaacacacgcattccagtaa

SEQ ID NO: 37078 - DNA, 25 bp, Artificial
  Probe
ttatctgaacacacgcattccagta

SEQ ID NO: 37079 - DNA, 25 bp, Artificial
  Probe
ggtcaatatacatctgcacaactat

SEQ ID NO: 37080 - DNA, 25 bp, Artificial
  Probe
gagaaatatggatggtgggaatatg

SEQ ID NO: 37081 - DNA, 25 bp, Artificial
  Probe
aagtatgagagaagcaaatatgtcc

SEQ ID NO: 37082 - DNA, 25 bp, Artificial
  Probe
acaactattgctcccgtaataaatg

SEQ ID NO: 37083 - DNA, 25 bp, Artificial
  Probe
cacaactattgctcccgtaataaat

SEQ ID NO: 37084 - DNA, 25 bp, Artificial
  Probe
aatatggatggtgggaatatggata

SEQ ID NO: 37085 - DNA, 25 bp, Artificial
  Probe
taacgagtaatagtgcctacattcg

SEQ ID NO: 37086 - DNA, 25 bp, Artificial
  Probe
tatggatggtgggaatatggatacg

SEQ ID NO: 37087 - DNA, 25 bp, Artificial
  Probe
gggagaaatatggatggtgggaata

SEQ ID NO: 37088 - DNA, 25 bp, Artificial
  Probe
atgaaagtggtcaatatacatctgc

SEQ ID NO: 37089 - DNA, 25 bp, Artificial
  Probe
agcagattaaagagggagaaatatg

SEQ ID NO: 37090 - DNA, 25 bp, Artificial
  Probe
cagcagattaaagagggagaaatat

SEQ ID NO: 37091 - DNA, 25 bp, Artificial
  Probe
gaactctatttcccatctatcacag

SEQ ID NO: 37092 - DNA, 25 bp, Artificial
  Probe
actctatttcccatctatcacagtt

SEQ ID NO: 37093 - DNA, 25 bp, Artificial
  Probe
aactctatttcccatctatcacagt

SEQ ID NO: 37094 - DNA, 25 bp, Artificial
  Probe
ctctatttcccatctatcacagttt

SEQ ID NO: 37095 - DNA, 25 bp, Artificial
  Probe
attaaagagggagaaatatggatgg

SEQ ID NO: 37096 - DNA, 25 bp, Artificial
  Probe
aagtggtcaatatacatctgcacaa

SEQ ID NO: 37097 - DNA, 25 bp, Artificial
  Probe
tgaagtatgagagaagcaaatatgt

SEQ ID NO: 37098 - DNA, 25 bp, Artificial
  Probe
aaagagggagaaatatggatggtgg

SEQ ID NO: 37099 - DNA, 25 bp, Artificial
  Probe
atctgaacacacgcattccagtaat

SEQ ID NO: 37100 - DNA, 25 bp, Artificial
  Probe
taatgctggacctcagaaataagac

SEQ ID NO: 37101 - DNA, 25 bp, Artificial
  Probe
caacaagtctacaatgattaccgtc

SEQ ID NO: 37102 - DNA, 25 bp, Artificial
  Probe
ccaacaagtctacaatgattaccgt

SEQ ID NO: 37103 - DNA, 25 bp, Artificial
  Probe
aacaagtctacaatgattaccgtca

SEQ ID NO: 37104 - DNA, 25 bp, Artificial
  Probe
acaagtctacaatgattaccgtcag

SEQ ID NO: 37105 - DNA, 25 bp, Artificial
  Probe
caagtctacaatgattaccgtcagg

SEQ ID NO: 37106 - DNA, 25 bp, Artificial
  Probe
gtctacaatgattaccgtcaggttc

SEQ ID NO: 37107 - DNA, 25 bp, Artificial
  Probe
agtctacaatgattaccgtcaggtt

SEQ ID NO: 37108 - DNA, 25 bp, Artificial
  Probe
aagtctacaatgattaccgtcaggt

SEQ ID NO: 37109 - DNA, 25 bp, Artificial
  Probe
agagtgactattctttgcctgttat

SEQ ID NO: 37110 - DNA, 25 bp, Artificial
  Probe
cccaacaagtctacaatgattaccg

SEQ ID NO: 37111 - DNA, 25 bp, Artificial
  Probe
gagtgactattctttgcctgttata

SEQ ID NO: 37112 - DNA, 25 bp, Artificial
  Probe
attctttgcctgttatatttgtgac

SEQ ID NO: 37113 - DNA, 25 bp, Artificial
  Probe
ttctttgcctgttatatttgtgaca

SEQ ID NO: 37114 - DNA, 25 bp, Artificial
  Probe
tctacaatgattaccgtcaggttcg

SEQ ID NO: 37115 - DNA, 25 bp, Artificial
  Probe
agtgactattctttgcctgttatat

SEQ ID NO: 37116 - DNA, 25 bp, Artificial
  Probe
tctttgcctgttatatttgtgacaa

SEQ ID NO: 37117 - DNA, 25 bp, Artificial
  Probe
gtgactattctttgcctgttatatt

SEQ ID NO: 37118 - DNA, 25 bp, Artificial
  Probe
ctttgcctgttatatttgtgacaat

SEQ ID NO: 37119 - DNA, 25 bp, Artificial
  Probe
tgcctgttatatttgtgacaataga

SEQ ID NO: 37120 - DNA, 25 bp, Artificial
  Probe
ctacaatgattaccgtcaggttcga

SEQ ID NO: 37121 - DNA, 25 bp, Artificial
  Probe
aaacacaagagtgactattctttgc

SEQ ID NO: 37122 - DNA, 25 bp, Artificial
  Probe
aagagtgactattctttgcctgtta

SEQ ID NO: 37123 - DNA, 25 bp, Artificial
  Probe
tacaatgattaccgtcaggttcgac

SEQ ID NO: 37124 - DNA, 25 bp, Artificial
  Probe
tattctttgcctgttatatttgtga

SEQ ID NO: 37125 - DNA, 25 bp, Artificial
  Probe
actattctttgcctgttatatttgt

SEQ ID NO: 37126 - DNA, 25 bp, Artificial
  Probe
ttgcctgttatatttgtgacaatag

SEQ ID NO: 37127 - DNA, 25 bp, Artificial
  Probe
tccccaacaagtctacaatgattac

SEQ ID NO: 37128 - DNA, 25 bp, Artificial
  Probe
gtccccaacaagtctacaatgatta

SEQ ID NO: 37129 - DNA, 25 bp, Artificial
  Probe
caagagtgactattctttgcctgtt

SEQ ID NO: 37130 - DNA, 25 bp, Artificial
  Probe
ctattctttgcctgttatatttgtg

SEQ ID NO: 37131 - DNA, 25 bp, Artificial
  Probe
aacacaagagtgactattctttgcc

SEQ ID NO: 37132 - DNA, 25 bp, Artificial
  Probe
tgactattctttgcctgttatattt

SEQ ID NO: 37133 - DNA, 25 bp, Artificial
  Probe
gcctgttatatttgtgacaatagaa

SEQ ID NO: 37134 - DNA, 25 bp, Artificial
  Probe
ccccaacaagtctacaatgattacc

SEQ ID NO: 37135 - DNA, 25 bp, Artificial
  Probe
gactattctttgcctgttatatttg

SEQ ID NO: 37136 - DNA, 25 bp, Artificial
  Probe
cacaagagtgactattctttgcctg

SEQ ID NO: 37137 - DNA, 25 bp, Artificial
  Probe
tttgcctgttatatttgtgacaata

SEQ ID NO: 37138 - DNA, 25 bp, Artificial
  Probe
acaagagtgactattctttgcctgt

SEQ ID NO: 37139 - DNA, 25 bp, Artificial
  Probe
acacaagagtgactattctttgcct

SEQ ID NO: 37140 - DNA, 25 bp, Artificial
  Probe
acaataaaacaaaactgaatgcttg

SEQ ID NO: 37141 - DNA, 25 bp, Artificial
  Probe
caatgattaccgtcaggttcgactg

SEQ ID NO: 37142 - DNA, 25 bp, Artificial
  Probe
caataaaacaaaactgaatgcttga

SEQ ID NO: 37143 - DNA, 25 bp, Artificial
  Probe
acaatgattaccgtcaggttcgact

SEQ ID NO: 37144 - DNA, 25 bp, Artificial
  Probe
cgtccccaacaagtctacaatgatt

SEQ ID NO: 37145 - DNA, 25 bp, Artificial
  Probe
agggatttaaaacacaagagtgact

SEQ ID NO: 37146 - DNA, 25 bp, Artificial
  Probe
tgaactgtaccactgataatgaact

SEQ ID NO: 37147 - DNA, 25 bp, Artificial
  Probe
ggattgaactgtaccactgataatg

SEQ ID NO: 37148 - DNA, 25 bp, Artificial
  Probe
aactgtaccactgataatgaacttg

SEQ ID NO: 37149 - DNA, 25 bp, Artificial
  Probe
ttgaactgtaccactgataatgaac

SEQ ID NO: 37150 - DNA, 25 bp, Artificial
  Probe
gaactgtaccactgataatgaactt

SEQ ID NO: 37151 - DNA, 25 bp, Artificial
  Probe
gattgaactgtaccactgataatga

SEQ ID NO: 37152 - DNA, 25 bp, Artificial
  Probe
attgaactgtaccactgataatgaa

SEQ ID NO: 37153 - DNA, 25 bp, Artificial
  Probe
ccactgataatgaacttggtgagaa

SEQ ID NO: 37154 - DNA, 25 bp, Artificial
  Probe
actgtaccactgataatgaacttgg

SEQ ID NO: 37155 - DNA, 25 bp, Artificial
  Probe
ctcattcgctactcaaaccatagac

SEQ ID NO: 37156 - DNA, 25 bp, Artificial
  Probe
actgataatgaacttggtgagaaat

SEQ ID NO: 37157 - DNA, 25 bp, Artificial
  Probe
gggattgaactgtaccactgataat

SEQ ID NO: 37158 - DNA, 25 bp, Artificial
  Probe
cattcgctactcaaaccatagacac

SEQ ID NO: 37159 - DNA, 25 bp, Artificial
  Probe
tcattcgctactcaaaccatagaca

SEQ ID NO: 37160 - DNA, 25 bp, Artificial
  Probe
aaccatttagttgtaactgagaggg

SEQ ID NO: 37161 - DNA, 25 bp, Artificial
  Probe
cactgataatgaacttggtgagaaa

SEQ ID NO: 37162 - DNA, 25 bp, Artificial
  Probe
ctgataatgaacttggtgagaaatt

SEQ ID NO: 37163 - DNA, 25 bp, Artificial
  Probe
gctcattcgctactcaaaccataga

SEQ ID NO: 37164 - DNA, 25 bp, Artificial
  Probe
taaccatttagttgtaactgagagg

SEQ ID NO: 37165 - DNA, 25 bp, Artificial
  Probe
attcgctactcaaaccatagacacg

SEQ ID NO: 37166 - DNA, 25 bp, Artificial
  Probe
tgtaaccatttagttgtaactgaga

SEQ ID NO: 37167 - DNA, 25 bp, Artificial
  Probe
catagacacgtaggtgatggatgac

SEQ ID NO: 37168 - DNA, 25 bp, Artificial
  Probe
gtaaccatttagttgtaactgagag

SEQ ID NO: 37169 - DNA, 25 bp, Artificial
  Probe
ttgtaaccatttagttgtaactgag

SEQ ID NO: 37170 - DNA, 25 bp, Artificial
  Probe
tttgtaaccatttagttgtaactga

SEQ ID NO: 37171 - DNA, 25 bp, Artificial
  Probe
tactcaaaccatagacacgtaggtg

SEQ ID NO: 37172 - DNA, 25 bp, Artificial
  Probe
atagacacgtaggtgatggatgacc

SEQ ID NO: 37173 - DNA, 25 bp, Artificial
  Probe
ggggattgaactgtaccactgataa

SEQ ID NO: 37174 - DNA, 25 bp, Artificial
  Probe
ctcaaaccatagacacgtaggtgat

SEQ ID NO: 37175 - DNA, 25 bp, Artificial
  Probe
taggtgatggatgaccttcagtatt

SEQ ID NO: 37176 - DNA, 25 bp, Artificial
  Probe
ctactcaaaccatagacacgtaggt

SEQ ID NO: 37177 - DNA, 25 bp, Artificial
  Probe
tcaaaccatagacacgtaggtgatg

SEQ ID NO: 37178 - DNA, 25 bp, Artificial
  Probe
ggtgatggatgaccttcagtatttt

SEQ ID NO: 37179 - DNA, 25 bp, Artificial
  Probe
tcgctactcaaaccatagacacgta

SEQ ID NO: 37180 - DNA, 25 bp, Artificial
  Probe
accatttagttgtaactgagagggg

SEQ ID NO: 37181 - DNA, 25 bp, Artificial
  Probe
gcttttgtaaccatttagttgtaac

SEQ ID NO: 37182 - DNA, 25 bp, Artificial
  Probe
gtaggtgatggatgaccttcagtat

SEQ ID NO: 37183 - DNA, 25 bp, Artificial
  Probe
taccactgataatgaacttggtgag

SEQ ID NO: 37184 - DNA, 25 bp, Artificial
  Probe
gtaccactgataatgaacttggtga

SEQ ID NO: 37185 - DNA, 25 bp, Artificial
  Probe
ctgtaccactgataatgaacttggt

SEQ ID NO: 37186 - DNA, 25 bp, Artificial
  Probe
tgtaccactgataatgaacttggtg

SEQ ID NO: 37187 - DNA, 25 bp, Artificial
  Probe
agctcattcgctactcaaaccatag

SEQ ID NO: 37188 - DNA, 25 bp, Artificial
  Probe
accactgataatgaacttggtgaga

SEQ ID NO: 37189 - DNA, 25 bp, Artificial
  Probe
actcaaaccatagacacgtaggtga

SEQ ID NO: 37190 - DNA, 25 bp, Artificial
  Probe
gctactcaaaccatagacacgtagg

SEQ ID NO: 37191 - DNA, 25 bp, Artificial
  Probe
ttgttccgttcttgtgtatatgtgt

SEQ ID NO: 37192 - DNA, 25 bp, Artificial
  Probe
ttccgttcttgtgtatatgtgtgac

SEQ ID NO: 37193 - DNA, 25 bp, Artificial
  Probe
gttccgttcttgtgtatatgtgtga

SEQ ID NO: 37194 - DNA, 25 bp, Artificial
  Probe
tgttccgttcttgtgtatatgtgtg

SEQ ID NO: 37195 - DNA, 25 bp, Artificial
  Probe
tttgttccgttcttgtgtatatgtg

SEQ ID NO: 37196 - DNA, 25 bp, Artificial
  Probe
atggtgacagttaagtgacacaagt

SEQ ID NO: 37197 - DNA, 25 bp, Artificial
  Probe
gtgacagttaagtgacacaagtgtt

SEQ ID NO: 37198 - DNA, 25 bp, Artificial
  Probe
catggtgacagttaagtgacacaag

SEQ ID NO: 37199 - DNA, 25 bp, Artificial
  Probe
gttcatggtgacagttaagtgacac

SEQ ID NO: 37200 - DNA, 25 bp, Artificial
  Probe
tcatggtgacagttaagtgacacaa

SEQ ID NO: 37201 - DNA, 25 bp, Artificial
  Probe
ttcatggtgacagttaagtgacaca

SEQ ID NO: 37202 - DNA, 25 bp, Artificial
  Probe
cccacatcattcacacttctgtaaa

SEQ ID NO: 37203 - DNA, 25 bp, Artificial
  Probe
ctggttcatggtgacagttaagtga

SEQ ID NO: 37204 - DNA, 25 bp, Artificial
  Probe
ggttcatggtgacagttaagtgaca

SEQ ID NO: 37205 - DNA, 25 bp, Artificial
  Probe
tggttcatggtgacagttaagtgac

SEQ ID NO: 37206 - DNA, 25 bp, Artificial
  Probe
tggtgacagttaagtgacacaagtg

SEQ ID NO: 37207 - DNA, 25 bp, Artificial
  Probe
tgacagttaagtgacacaagtgttt

SEQ ID NO: 37208 - DNA, 25 bp, Artificial
  Probe
ggtgacagttaagtgacacaagtgt

SEQ ID NO: 37209 - DNA, 25 bp, Artificial
  Probe
ggtctgtactctttggattggcttt

SEQ ID NO: 37210 - DNA, 25 bp, Artificial
  Probe
gaggtttaatcagtgtgataggagg

SEQ ID NO: 37211 - DNA, 25 bp, Artificial
  Probe
gagaggtttaatcagtgtgatagga

SEQ ID NO: 37212 - DNA, 25 bp, Artificial
  Probe
ggagaggtttaatcagtgtgatagg

SEQ ID NO: 37213 - DNA, 25 bp, Artificial
  Probe
gggagaggtttaatcagtgtgatag

SEQ ID NO: 37214 - DNA, 25 bp, Artificial
  Probe
agaggtttaatcagtgtgataggag

SEQ ID NO: 37215 - DNA, 25 bp, Artificial
  Probe
ttttgttccgttcttgtgtatatgt

SEQ ID NO: 37216 - DNA, 25 bp, Artificial
  Probe
atggaaaacagtatcatttgccttt

SEQ ID NO: 37217 - DNA, 25 bp, Artificial
  Probe
tatggaaaacagtatcatttgcctt

SEQ ID NO: 37218 - DNA, 25 bp, Artificial
  Probe
ttatggaaaacagtatcatttgcct

SEQ ID NO: 37219 - DNA, 25 bp, Artificial
  Probe
tccgttcttgtgtatatgtgtgacg

SEQ ID NO: 37220 - DNA, 25 bp, Artificial
  Probe
aggtttaatcagtgtgataggaggg

SEQ ID NO: 37221 - DNA, 25 bp, Artificial
  Probe
cgggagaggtttaatcagtgtgata

SEQ ID NO: 37222 - DNA, 25 bp, Artificial
  Probe
ccacatcattcacacttctgtaaaa

SEQ ID NO: 37223 - DNA, 25 bp, Artificial
  Probe
tttatggaaaacagtatcatttgcc

SEQ ID NO: 37224 - DNA, 25 bp, Artificial
  Probe
gtctgtactctttggattggctttt

SEQ ID NO: 37225 - DNA, 25 bp, Artificial
  Probe
tggaaaacagtatcatttgcctttt

SEQ ID NO: 37226 - DNA, 25 bp, Artificial
  Probe
tggtctgtactctttggattggctt

SEQ ID NO: 37227 - DNA, 25 bp, Artificial
  Probe
cacatcattcacacttctgtaaaat

SEQ ID NO: 37228 - DNA, 25 bp, Artificial
  Probe
tgttgtttccgttgctgttgctatc

SEQ ID NO: 37229 - DNA, 25 bp, Artificial
  Probe
ctggtctgtactctttggattggct

SEQ ID NO: 37230 - DNA, 25 bp, Artificial
  Probe
ccccacatcattcacacttctgtaa

SEQ ID NO: 37231 - DNA, 25 bp, Artificial
  Probe
gtgttgtttccgttgctgttgctat

SEQ ID NO: 37232 - DNA, 25 bp, Artificial
  Probe
actggttcatggtgacagttaagtg

SEQ ID NO: 37233 - DNA, 25 bp, Artificial
  Probe
cttccccacatcattcacacttctg

SEQ ID NO: 37234 - DNA, 25 bp, Artificial
  Probe
tcttccccacatcattcacacttct

SEQ ID NO: 37235 - DNA, 25 bp, Artificial
  Probe
aactaacgtctcgctggacacaatt

SEQ ID NO: 37236 - DNA, 25 bp, Artificial
  Probe
aagaatgagagaatgagaacggtgt

SEQ ID NO: 37237 - DNA, 25 bp, Artificial
  Probe
agaatgagagaatgagaacggtgtt

SEQ ID NO: 37238 - DNA, 25 bp, Artificial
  Probe
aaagaatgagagaatgagaacggtg

SEQ ID NO: 37239 - DNA, 25 bp, Artificial
  Probe
cactcccactgctttcactttaatc

SEQ ID NO: 37240 - DNA, 25 bp, Artificial
  Probe
tcactcccactgctttcactttaat

SEQ ID NO: 37241 - DNA, 25 bp, Artificial
  Probe
ttcactcccactgctttcactttaa

SEQ ID NO: 37242 - DNA, 25 bp, Artificial
  Probe
actcccactgctttcactttaatcc

SEQ ID NO: 37243 - DNA, 25 bp, Artificial
  Probe
aaaagaatgagagaatgagaacggt

SEQ ID NO: 37244 - DNA, 25 bp, Artificial
  Probe
gaatgagagaatgagaacggtgttc

SEQ ID NO: 37245 - DNA, 25 bp, Artificial
  Probe
taaaagaatgagagaatgagaacgg

SEQ ID NO: 37246 - DNA, 25 bp, Artificial
  Probe
atgagagaatgagaacggtgttcat

SEQ ID NO: 37247 - DNA, 25 bp, Artificial
  Probe
aatgagagaatgagaacggtgttca

SEQ ID NO: 37248 - DNA, 25 bp, Artificial
  Probe
ctcccactgctttcactttaatccg

SEQ ID NO: 37249 - DNA, 25 bp, Artificial
  Probe
ttcattctcattaaaacatgccgtt

SEQ ID NO: 37250 - DNA, 25 bp, Artificial
  Probe
attctcattaaaacatgccgttctg

SEQ ID NO: 37251 - DNA, 25 bp, Artificial
  Probe
cattctcattaaaacatgccgttct

SEQ ID NO: 37252 - DNA, 25 bp, Artificial
  Probe
tcattctcattaaaacatgccgttc

SEQ ID NO: 37253 - DNA, 25 bp, Artificial
  Probe
gttcattctcattaaaacatgccgt

SEQ ID NO: 37254 - DNA, 25 bp, Artificial
  Probe
ttaaaagaatgagagaatgagaacg

SEQ ID NO: 37255 - DNA, 25 bp, Artificial
  Probe
cgttaaaagaatgagagaatgagaa

SEQ ID NO: 37256 - DNA, 25 bp, Artificial
  Probe
ttctcattaaaacatgccgttctgg

SEQ ID NO: 37257 - DNA, 25 bp, Artificial
  Probe
tatctttctgagcaatgagacctgc

SEQ ID NO: 37258 - DNA, 25 bp, Artificial
  Probe
ctttaaggaatgaagctcttcaggg

SEQ ID NO: 37259 - DNA, 25 bp, Artificial
  Probe
cctttaaggaatgaagctcttcagg

SEQ ID NO: 37260 - DNA, 25 bp, Artificial
  Probe
ccctttaaggaatgaagctcttcag

SEQ ID NO: 37261 - DNA, 25 bp, Artificial
  Probe
ctcattaaaacatgccgttctggtt

SEQ ID NO: 37262 - DNA, 25 bp, Artificial
  Probe
tccctttaaggaatgaagctcttca

SEQ ID NO: 37263 - DNA, 25 bp, Artificial
  Probe
taatgttagtctctttctttctgta

SEQ ID NO: 37264 - DNA, 25 bp, Artificial
  Probe
acgttaaaagaatgagagaatgaga

SEQ ID NO: 37265 - DNA, 25 bp, Artificial
  Probe
tttccctttaaggaatgaagctctt

SEQ ID NO: 37266 - DNA, 25 bp, Artificial
  Probe
ttccctttaaggaatgaagctcttc

SEQ ID NO: 37267 - DNA, 25 bp, Artificial
  Probe
tctcattaaaacatgccgttctggt

SEQ ID NO: 37268 - DNA, 25 bp, Artificial
  Probe
attaaaacatgccgttctggtttga

SEQ ID NO: 37269 - DNA, 25 bp, Artificial
  Probe
cattaaaacatgccgttctggtttg

SEQ ID NO: 37270 - DNA, 25 bp, Artificial
  Probe
tcattaaaacatgccgttctggttt

SEQ ID NO: 37271 - DNA, 25 bp, Artificial
  Probe
gttaaaagaatgagagaatgagaac

SEQ ID NO: 37272 - DNA, 25 bp, Artificial
  Probe
tgagagaatgagaacggtgttcatt

SEQ ID NO: 37273 - DNA, 25 bp, Artificial
  Probe
aacggtgttcattctcattaaaaca

SEQ ID NO: 37274 - DNA, 25 bp, Artificial
  Probe
acggtgttcattctcattaaaacat

SEQ ID NO: 37275 - DNA, 25 bp, Artificial
  Probe
taaaacatgccgttctggtttgaaa

SEQ ID NO: 37276 - DNA, 25 bp, Artificial
  Probe
ttaaaacatgccgttctggtttgaa

SEQ ID NO: 37277 - DNA, 25 bp, Artificial
  Probe
tgttcattctcattaaaacatgccg

SEQ ID NO: 37278 - DNA, 25 bp, Artificial
  Probe
gtgttcattctcattaaaacatgcc

SEQ ID NO: 37279 - DNA, 25 bp, Artificial
  Probe
ggtgttcattctcattaaaacatgc

SEQ ID NO: 37280 - DNA, 25 bp, Artificial
  Probe
cggtgttcattctcattaaaacatg

SEQ ID NO: 37281 - DNA, 25 bp, Artificial
  Probe
gaggagctcaagaacaggttggatg

SEQ ID NO: 37282 - DNA, 25 bp, Artificial
  Probe
ctcaagaacaggttggatgtcctgg

SEQ ID NO: 37283 - DNA, 25 bp, Artificial
  Probe
gatggttgactcttaacagccttga

SEQ ID NO: 37284 - DNA, 25 bp, Artificial
  Probe
agatggttgactcttaacagccttg

SEQ ID NO: 37285 - DNA, 25 bp, Artificial
  Probe
tgaagtgtctattctaagggctcta

SEQ ID NO: 37286 - DNA, 25 bp, Artificial
  Probe
gagatggttgactcttaacagcctt

SEQ ID NO: 37287 - DNA, 25 bp, Artificial
  Probe
atggttgactcttaacagccttgag

SEQ ID NO: 37288 - DNA, 25 bp, Artificial
  Probe
gaagtgtctattctaagggctctag

SEQ ID NO: 37289 - DNA, 25 bp, Artificial
  Probe
ctgaagtgtctattctaagggctct

SEQ ID NO: 37290 - DNA, 25 bp, Artificial
  Probe
gagagagatggttgactcttaacag

SEQ ID NO: 37291 - DNA, 25 bp, Artificial
  Probe
tgagagagatggttgactcttaaca

SEQ ID NO: 37292 - DNA, 25 bp, Artificial
  Probe
agagagatggttgactcttaacagc

SEQ ID NO: 37293 - DNA, 25 bp, Artificial
  Probe
tggttgactcttaacagccttgagg

SEQ ID NO: 37294 - DNA, 25 bp, Artificial
  Probe
gagagatggttgactcttaacagcc

SEQ ID NO: 37295 - DNA, 25 bp, Artificial
  Probe
aagtgtctattctaagggctctaga

SEQ ID NO: 37296 - DNA, 25 bp, Artificial
  Probe
agtgtctattctaagggctctagat

SEQ ID NO: 37297 - DNA, 25 bp, Artificial
  Probe
gtgtctattctaagggctctagatc

SEQ ID NO: 37298 - DNA, 25 bp, Artificial
  Probe
agagatggttgactcttaacagcct

SEQ ID NO: 37299 - DNA, 25 bp, Artificial
  Probe
tctattctaagggctctagatctcc

SEQ ID NO: 37300 - DNA, 25 bp, Artificial
  Probe
tgtctattctaagggctctagatct

SEQ ID NO: 37301 - DNA, 25 bp, Artificial
  Probe
gtctattctaagggctctagatctc

SEQ ID NO: 37302 - DNA, 25 bp, Artificial
  Probe
tccatctactcacttctgtgggttc

SEQ ID NO: 37303 - DNA, 25 bp, Artificial
  Probe
gtccatctactcacttctgtgggtt

SEQ ID NO: 37304 - DNA, 25 bp, Artificial
  Probe
ttgactcttaacagccttgagggtc

SEQ ID NO: 37305 - DNA, 25 bp, Artificial
  Probe
gttgactcttaacagccttgagggt

SEQ ID NO: 37306 - DNA, 25 bp, Artificial
  Probe
ctattctaagggctctagatctccc

SEQ ID NO: 37307 - DNA, 25 bp, Artificial
  Probe
catctactcacttctgtgggttccc

SEQ ID NO: 37308 - DNA, 25 bp, Artificial
  Probe
ccatctactcacttctgtgggttcc

SEQ ID NO: 37309 - DNA, 25 bp, Artificial
  Probe
gactcttaacagccttgagggtctg

SEQ ID NO: 37310 - DNA, 25 bp, Artificial
  Probe
ggttgactcttaacagccttgaggg

SEQ ID NO: 37311 - DNA, 25 bp, Artificial
  Probe
tgactcttaacagccttgagggtct

SEQ ID NO: 37312 - DNA, 25 bp, Artificial
  Probe
ctctttctgttcctagctcaggcag

SEQ ID NO: 37313 - DNA, 25 bp, Artificial
  Probe
gttcccctctttctgttcctagctc

SEQ ID NO: 37314 - DNA, 25 bp, Artificial
  Probe
ttaacagccttgagggtctgcaatc

SEQ ID NO: 37315 - DNA, 25 bp, Artificial
  Probe
cttaacagccttgagggtctgcaat

SEQ ID NO: 37316 - DNA, 25 bp, Artificial
  Probe
actctaacggatatttattttacac

SEQ ID NO: 37317 - DNA, 25 bp, Artificial
  Probe
cactctaacggatatttattttaca

SEQ ID NO: 37318 - DNA, 25 bp, Artificial
  Probe
tattctaagggctctagatctcccc

SEQ ID NO: 37319 - DNA, 25 bp, Artificial
  Probe
ttcccctctttctgttcctagctca

SEQ ID NO: 37320 - DNA, 25 bp, Artificial
  Probe
tcccctctttctgttcctagctcag

SEQ ID NO: 37321 - DNA, 25 bp, Artificial
  Probe
gtgcattaacttattggaccgtatt

SEQ ID NO: 37322 - DNA, 25 bp, Artificial
  Probe
ctgtacttccattccatcctcaagg

SEQ ID NO: 37323 - DNA, 25 bp, Artificial
  Probe
ccgtatttatattggttacctgctt

SEQ ID NO: 37324 - DNA, 25 bp, Artificial
  Probe
tttcatcccaaataaacagtgccaa

SEQ ID NO: 37325 - DNA, 25 bp, Artificial
  Probe
gtacttccattccatcctcaaggtg

SEQ ID NO: 37326 - DNA, 25 bp, Artificial
  Probe
atcccaaataaacagtgccaacttt

SEQ ID NO: 37327 - DNA, 25 bp, Artificial
  Probe
ttcatcccaaataaacagtgccaac

SEQ ID NO: 37328 - DNA, 25 bp, Artificial
  Probe
tgtacttccattccatcctcaaggt

SEQ ID NO: 37329 - DNA, 25 bp, Artificial
  Probe
gctgtacttccattccatcctcaag

SEQ ID NO: 37330 - DNA, 25 bp, Artificial
  Probe
gcattaacttattggaccgtattta

SEQ ID NO: 37331 - DNA, 25 bp, Artificial
  Probe
ggtgcattaacttattggaccgtat

SEQ ID NO: 37332 - DNA, 25 bp, Artificial
  Probe
accgtatttatattggttacctgct

SEQ ID NO: 37333 - DNA, 25 bp, Artificial
  Probe
gaccgtatttatattggttacctgc

SEQ ID NO: 37334 - DNA, 25 bp, Artificial
  Probe
catcccaaataaacagtgccaactt

SEQ ID NO: 37335 - DNA, 25 bp, Artificial
  Probe
tggaccgtatttatattggttacct

SEQ ID NO: 37336 - DNA, 25 bp, Artificial
  Probe
tttatattggttacctgctttcaac

SEQ ID NO: 37337 - DNA, 25 bp, Artificial
  Probe
ggaccgtatttatattggttacctg

SEQ ID NO: 37338 - DNA, 25 bp, Artificial
  Probe
cgtatttatattggttacctgcttt

SEQ ID NO: 37339 - DNA, 25 bp, Artificial
  Probe
tgcattaacttattggaccgtattt

SEQ ID NO: 37340 - DNA, 25 bp, Artificial
  Probe
ttggaccgtatttatattggttacc

SEQ ID NO: 37341 - DNA, 25 bp, Artificial
  Probe
aacccaccattccgtgttaatattt

SEQ ID NO: 37342 - DNA, 25 bp, Artificial
  Probe
agctgtacttccattccatcctcaa

SEQ ID NO: 37343 - DNA, 25 bp, Artificial
  Probe
tcaacccaccattccgtgttaatat

SEQ ID NO: 37344 - DNA, 25 bp, Artificial
  Probe
tcatcccaaataaacagtgccaact

SEQ ID NO: 37345 - DNA, 25 bp, Artificial
  Probe
ttcaacccaccattccgtgttaata

SEQ ID NO: 37346 - DNA, 25 bp, Artificial
  Probe
caacccaccattccgtgttaatatt

SEQ ID NO: 37347 - DNA, 25 bp, Artificial
  Probe
acttattggaccgtatttatattgg

SEQ ID NO: 37348 - DNA, 25 bp, Artificial
  Probe
tgtacttcaccatcgtcaccaactt

SEQ ID NO: 37349 - DNA, 25 bp, Artificial
  Probe
atttatattggttacctgctttcaa

SEQ ID NO: 37350 - DNA, 25 bp, Artificial
  Probe
caaggagctgtacttccattccatc

SEQ ID NO: 37351 - DNA, 25 bp, Artificial
  Probe
gtacttcaccatcgtcaccaacttt

SEQ ID NO: 37352 - DNA, 25 bp, Artificial
  Probe
tacttccattccatcctcaaggtgg

SEQ ID NO: 37353 - DNA, 25 bp, Artificial
  Probe
ttttcatcccaaataaacagtgcca

SEQ ID NO: 37354 - DNA, 25 bp, Artificial
  Probe
attttcatcccaaataaacagtgcc

SEQ ID NO: 37355 - DNA, 25 bp, Artificial
  Probe
tttcaacccaccattccgtgttaat

SEQ ID NO: 37356 - DNA, 25 bp, Artificial
  Probe
gagctgtacttccattccatcctca

SEQ ID NO: 37357 - DNA, 25 bp, Artificial
  Probe
tatttatattggttacctgctttca

SEQ ID NO: 37358 - DNA, 25 bp, Artificial
  Probe
attggaccgtatttatattggttac

SEQ ID NO: 37359 - DNA, 25 bp, Artificial
  Probe
tcccaaataaacagtgccaactttt

SEQ ID NO: 37360 - DNA, 25 bp, Artificial
  Probe
tcgtcaccaacttttacaaggagat

SEQ ID NO: 37361 - DNA, 25 bp, Artificial
  Probe
atcgtcaccaacttttacaaggaga

SEQ ID NO: 37362 - DNA, 25 bp, Artificial
  Probe
catcgtcaccaacttttacaaggag

SEQ ID NO: 37363 - DNA, 25 bp, Artificial
  Probe
cttcaccatcgtcaccaacttttac

SEQ ID NO: 37364 - DNA, 25 bp, Artificial
  Probe
gtatttatattggttacctgctttc

SEQ ID NO: 37365 - DNA, 25 bp, Artificial
  Probe
gtcaccaacttttacaaggagatcg

SEQ ID NO: 37366 - DNA, 25 bp, Artificial
  Probe
ttcaagagttgtagaagttgttcct

SEQ ID NO: 37367 - DNA, 25 bp, Artificial
  Probe
tcaagagttgtagaagttgttccta

SEQ ID NO: 37368 - DNA, 25 bp, Artificial
  Probe
acttgaggttgttcagattagactt

SEQ ID NO: 37369 - DNA, 25 bp, Artificial
  Probe
catcacttgaggttgttcagattag

SEQ ID NO: 37370 - DNA, 25 bp, Artificial
  Probe
atcacttgaggttgttcagattaga

SEQ ID NO: 37371 - DNA, 25 bp, Artificial
  Probe
cacttgaggttgttcagattagact

SEQ ID NO: 37372 - DNA, 25 bp, Artificial
  Probe
tcacttgaggttgttcagattagac

SEQ ID NO: 37373 - DNA, 25 bp, Artificial
  Probe
aagagttgtagaagttgttcctaac

SEQ ID NO: 37374 - DNA, 25 bp, Artificial
  Probe
caagagttgtagaagttgttcctaa

SEQ ID NO: 37375 - DNA, 25 bp, Artificial
  Probe
gcatcacttgaggttgttcagatta

SEQ ID NO: 37376 - DNA, 25 bp, Artificial
  Probe
gatgcttatctcaggagtgttaagt

SEQ ID NO: 37377 - DNA, 25 bp, Artificial
  Probe
atgcttatctcaggagtgttaagta

SEQ ID NO: 37378 - DNA, 25 bp, Artificial
  Probe
tgcttatctcaggagtgttaagtac

SEQ ID NO: 37379 - DNA, 25 bp, Artificial
  Probe
gcttatctcaggagtgttaagtacc

SEQ ID NO: 37380 - DNA, 25 bp, Artificial
  Probe
cttatctcaggagtgttaagtacct

SEQ ID NO: 37381 - DNA, 25 bp, Artificial
  Probe
gaggttgttcagattagactttcca

SEQ ID NO: 37382 - DNA, 25 bp, Artificial
  Probe
agatgcttatctcaggagtgttaag

SEQ ID NO: 37383 - DNA, 25 bp, Artificial
  Probe
cagatgcttatctcaggagtgttaa

SEQ ID NO: 37384 - DNA, 25 bp, Artificial
  Probe
aggttgttcagattagactttccaa

SEQ ID NO: 37385 - DNA, 25 bp, Artificial
  Probe
acagatgcttatctcaggagtgtta

SEQ ID NO: 37386 - DNA, 25 bp, Artificial
  Probe
tttcaagagttgtagaagttgttcc

SEQ ID NO: 37387 - DNA, 25 bp, Artificial
  Probe
gttcagattagactttccaatggct

SEQ ID NO: 37388 - DNA, 25 bp, Artificial
  Probe
ggttgttcagattagactttccaat

SEQ ID NO: 37389 - DNA, 25 bp, Artificial
  Probe
tgaggttgttcagattagactttcc

SEQ ID NO: 37390 - DNA, 25 bp, Artificial
  Probe
tgagtaaagactggtttgaagtagc

SEQ ID NO: 37391 - DNA, 25 bp, Artificial
  Probe
gctgagtaaagactggtttgaagta

SEQ ID NO: 37392 - DNA, 25 bp, Artificial
  Probe
agattagactttccaatggctgtac

SEQ ID NO: 37393 - DNA, 25 bp, Artificial
  Probe
tgttcagattagactttccaatggc

SEQ ID NO: 37394 - DNA, 25 bp, Artificial
  Probe
ctgagtaaagactggtttgaagtag

SEQ ID NO: 37395 - DNA, 25 bp, Artificial
  Probe
ttgaggttgttcagattagactttc

SEQ ID NO: 37396 - DNA, 25 bp, Artificial
  Probe
cttgaggttgttcagattagacttt

SEQ ID NO: 37397 - DNA, 25 bp, Artificial
  Probe
ttgttcagattagactttccaatgg

SEQ ID NO: 37398 - DNA, 25 bp, Artificial
  Probe
gttgttcagattagactttccaatg

SEQ ID NO: 37399 - DNA, 25 bp, Artificial
  Probe
gattagactttccaatggctgtacc

SEQ ID NO: 37400 - DNA, 25 bp, Artificial
  Probe
cagattagactttccaatggctgta

SEQ ID NO: 37401 - DNA, 25 bp, Artificial
  Probe
ctgctgagtaaagactggtttgaag

SEQ ID NO: 37402 - DNA, 25 bp, Artificial
  Probe
ttcagattagactttccaatggctg

SEQ ID NO: 37403 - DNA, 25 bp, Artificial
  Probe
ggcatcacttgaggttgttcagatt

SEQ ID NO: 37404 - DNA, 25 bp, Artificial
  Probe
cacagatgcttatctcaggagtgtt

SEQ ID NO: 37405 - DNA, 25 bp, Artificial
  Probe
atttcaagagttgtagaagttgttc

SEQ ID NO: 37406 - DNA, 25 bp, Artificial
  Probe
tgctgagtaaagactggtttgaagt

SEQ ID NO: 37407 - DNA, 25 bp, Artificial
  Probe
agagttgtagaagttgttcctaaca

SEQ ID NO: 37408 - DNA, 25 bp, Artificial
  Probe
gagtaaagactggtttgaagtagct

SEQ ID NO: 37409 - DNA, 25 bp, Artificial
  Probe
gttgtagaagttgttcctaacatgg

SEQ ID NO: 37410 - DNA, 25 bp, Artificial
  Probe
cttaacataggccagagagtgaaga

SEQ ID NO: 37411 - DNA, 25 bp, Artificial
  Probe
aatccaggtattaacgaattagtgt

SEQ ID NO: 37412 - DNA, 25 bp, Artificial
  Probe
atccaggtattaacgaattagtgtt

SEQ ID NO: 37413 - DNA, 25 bp, Artificial
  Probe
acgaattagtgtttaatccagtcct

SEQ ID NO: 37414 - DNA, 25 bp, Artificial
  Probe
aacgaattagtgtttaatccagtcc

SEQ ID NO: 37415 - DNA, 25 bp, Artificial
  Probe
cgaattagtgtttaatccagtcctt

SEQ ID NO: 37416 - DNA, 25 bp, Artificial
  Probe
aatagagccttctccactcctagtc

SEQ ID NO: 37417 - DNA, 25 bp, Artificial
  Probe
aaacttcttccaacgaaatctcagg

SEQ ID NO: 37418 - DNA, 25 bp, Artificial
  Probe
ttctccactcctagtcacatttatg

SEQ ID NO: 37419 - DNA, 25 bp, Artificial
  Probe
cttctccactcctagtcacatttat

SEQ ID NO: 37420 - DNA, 25 bp, Artificial
  Probe
ccttctccactcctagtcacattta

SEQ ID NO: 37421 - DNA, 25 bp, Artificial
  Probe
tccaggtattaacgaattagtgttt

SEQ ID NO: 37422 - DNA, 25 bp, Artificial
  Probe
tctccactcctagtcacatttatgt

SEQ ID NO: 37423 - DNA, 25 bp, Artificial
  Probe
atagagccttctccactcctagtca

SEQ ID NO: 37424 - DNA, 25 bp, Artificial
  Probe
aaatccaggtattaacgaattagtg

SEQ ID NO: 37425 - DNA, 25 bp, Artificial
  Probe
aaatagagccttctccactcctagt

SEQ ID NO: 37426 - DNA, 25 bp, Artificial
  Probe
caggaataattaaactctagtggga

SEQ ID NO: 37427 - DNA, 25 bp, Artificial
  Probe
tcaggaataattaaactctagtggg

SEQ ID NO: 37428 - DNA, 25 bp, Artificial
  Probe
gaattagtgtttaatccagtccttt

SEQ ID NO: 37429 - DNA, 25 bp, Artificial
  Probe
taacgaattagtgtttaatccagtc

SEQ ID NO: 37430 - DNA, 25 bp, Artificial
  Probe
cttacaaagaaatagagggacctat

SEQ ID NO: 37431 - DNA, 25 bp, Artificial
  Probe
aacttcttccaacgaaatctcagga

SEQ ID NO: 37432 - DNA, 25 bp, Artificial
  Probe
ccaacgaaatctcaggaataattaa

SEQ ID NO: 37433 - DNA, 25 bp, Artificial
  Probe
ccaggtattaacgaattagtgttta

SEQ ID NO: 37434 - DNA, 25 bp, Artificial
  Probe
aaaacttcttccaacgaaatctcag

SEQ ID NO: 37435 - DNA, 25 bp, Artificial
  Probe
ttaacgaattagtgtttaatccagt

SEQ ID NO: 37436 - DNA, 25 bp, Artificial
  Probe
ggaataattaaactctagtgggaga

SEQ ID NO: 37437 - DNA, 25 bp, Artificial
  Probe
aggaataattaaactctagtgggag

SEQ ID NO: 37438 - DNA, 25 bp, Artificial
  Probe
tccaacgaaatctcaggaataatta

SEQ ID NO: 37439 - DNA, 25 bp, Artificial
  Probe
cacttgataaaacttcttccaacga

SEQ ID NO: 37440 - DNA, 25 bp, Artificial
  Probe
agtgtttaatccagtccttttcaat

SEQ ID NO: 37441 - DNA, 25 bp, Artificial
  Probe
tcttacaaagaaatagagggaccta

SEQ ID NO: 37442 - DNA, 25 bp, Artificial
  Probe
attccacttgataaaacttcttcca

SEQ ID NO: 37443 - DNA, 25 bp, Artificial
  Probe
taaaacttcttccaacgaaatctca

SEQ ID NO: 37444 - DNA, 25 bp, Artificial
  Probe
ccacttgataaaacttcttccaacg

SEQ ID NO: 37445 - DNA, 25 bp, Artificial
  Probe
tccacttgataaaacttcttccaac

SEQ ID NO: 37446 - DNA, 25 bp, Artificial
  Probe
tatctttgttcttttccatctggtc

SEQ ID NO: 37447 - DNA, 25 bp, Artificial
  Probe
ctatctttgttcttttccatctggt

SEQ ID NO: 37448 - DNA, 25 bp, Artificial
  Probe
acttgataaaacttcttccaacgaa

SEQ ID NO: 37449 - DNA, 25 bp, Artificial
  Probe
tagtgggagagggttttcttacaaa

SEQ ID NO: 37450 - DNA, 25 bp, Artificial
  Probe
tagagccttctccactcctagtcac

SEQ ID NO: 37451 - DNA, 25 bp, Artificial
  Probe
atctttgttcttttccatctggtcc

SEQ ID NO: 37452 - DNA, 25 bp, Artificial
  Probe
tctatctttgttcttttccatctgg

SEQ ID NO: 37453 - DNA, 25 bp, Artificial
  Probe
ttccacttgataaaacttcttccaa

SEQ ID NO: 37454 - DNA, 25 bp, Artificial
  Probe
tagtgtttaatccagtccttttcaa

SEQ ID NO: 37455 - DNA, 25 bp, Artificial
  Probe
ttagtgtttaatccagtccttttca

SEQ ID NO: 37456 - DNA, 25 bp, Artificial
  Probe
ctcctcaaggttccagacattaagc

SEQ ID NO: 37457 - DNA, 25 bp, Artificial
  Probe
cctcctcaaggttccagacattaag

SEQ ID NO: 37458 - DNA, 25 bp, Artificial
  Probe
tactagggagaagtttcatccagaa

SEQ ID NO: 37459 - DNA, 25 bp, Artificial
  Probe
ctttctggaggagcttctgttaatc

SEQ ID NO: 37460 - DNA, 25 bp, Artificial
  Probe
tccctggtttattagtattgtatgt

SEQ ID NO: 37461 - DNA, 25 bp, Artificial
  Probe
gtactagggagaagtttcatccaga

SEQ ID NO: 37462 - DNA, 25 bp, Artificial
  Probe
ctagggagaagtttcatccagaaat

SEQ ID NO: 37463 - DNA, 25 bp, Artificial
  Probe
tagggagaagtttcatccagaaatt

SEQ ID NO: 37464 - DNA, 25 bp, Artificial
  Probe
actagggagaagtttcatccagaaa

SEQ ID NO: 37465 - DNA, 25 bp, Artificial
  Probe
ctccctggtttattagtattgtatg

SEQ ID NO: 37466 - DNA, 25 bp, Artificial
  Probe
aactccctggtttattagtattgta

SEQ ID NO: 37467 - DNA, 25 bp, Artificial
  Probe
ccctggtttattagtattgtatgtt

SEQ ID NO: 37468 - DNA, 25 bp, Artificial
  Probe
actccctggtttattagtattgtat

SEQ ID NO: 37469 - DNA, 25 bp, Artificial
  Probe
tcctcaaggttccagacattaagcg

SEQ ID NO: 37470 - DNA, 25 bp, Artificial
  Probe
attgtattgatatagttagcagagt

SEQ ID NO: 37471 - DNA, 25 bp, Artificial
  Probe
ttagtattgtatgtttcctctggat

SEQ ID NO: 37472 - DNA, 25 bp, Artificial
  Probe
attagtattgtatgtttcctctgga

SEQ ID NO: 37473 - DNA, 25 bp, Artificial
  Probe
tgtattgatatagttagcagagtac

SEQ ID NO: 37474 - DNA, 25 bp, Artificial
  Probe
agggagaagtttcatccagaaattt

SEQ ID NO: 37475 - DNA, 25 bp, Artificial
  Probe
cagagtactagggagaagtttcatc

SEQ ID NO: 37476 - DNA, 25 bp, Artificial
  Probe
ttagcagagtactagggagaagttt

SEQ ID NO: 37477 - DNA, 25 bp, Artificial
  Probe
aaactccctggtttattagtattgt

SEQ ID NO: 37478 - DNA, 25 bp, Artificial
  Probe
atagtattgtatgtttcctctggat

SEQ ID NO: 37479 - DNA, 25 bp, Artificial
  Probe
tagcagagtactagggagaagtttc

SEQ ID NO: 37480 - DNA, 25 bp, Artificial
  Probe
tttctggaggagcttctgttaatcc

SEQ ID NO: 37481 - DNA, 25 bp, Artificial
  Probe
gttagcagagtactagggagaagtt

SEQ ID NO: 37482 - DNA, 25 bp, Artificial
  Probe
tattttgttaaaggcttgacttgag

SEQ ID NO: 37483 - DNA, 25 bp, Artificial
  Probe
tattagtattgtatgtttcctctgg

SEQ ID NO: 37484 - DNA, 25 bp, Artificial
  Probe
gcagagtactagggagaagtttcat

SEQ ID NO: 37485 - DNA, 25 bp, Artificial
  Probe
agttagcagagtactagggagaagt

SEQ ID NO: 37486 - DNA, 25 bp, Artificial
  Probe
ttattttgttaaaggcttgacttga

SEQ ID NO: 37487 - DNA, 25 bp, Artificial
  Probe
catgaaactgatgaaactccatccc

SEQ ID NO: 37488 - DNA, 25 bp, Artificial
  Probe
agagtactagggagaagtttcatcc

SEQ ID NO: 37489 - DNA, 25 bp, Artificial
  Probe
tatagtattgtatgtttcctctgga

SEQ ID NO: 37490 - DNA, 25 bp, Artificial
  Probe
atgaaactgatgaaactccatccca

SEQ ID NO: 37491 - DNA, 25 bp, Artificial
  Probe
tagttagcagagtactagggagaag

SEQ ID NO: 37492 - DNA, 25 bp, Artificial
  Probe
agtactagggagaagtttcatccag

SEQ ID NO: 37493 - DNA, 25 bp, Artificial
  Probe
gagtactagggagaagtttcatcca

SEQ ID NO: 37494 - DNA, 25 bp, Artificial
  Probe
atagttagcagagtactagggagaa

SEQ ID NO: 37495 - DNA, 25 bp, Artificial
  Probe
atatagtattgtatgtttcctctgg

SEQ ID NO: 37496 - DNA, 25 bp, Artificial
  Probe
ccctcctcaaggttccagacattaa

SEQ ID NO: 37497 - DNA, 25 bp, Artificial
  Probe
gctcatatagtattgtatgtttcct

SEQ ID NO: 37498 - DNA, 25 bp, Artificial
  Probe
tgaaactgatgaaactccatcccaa

SEQ ID NO: 37499 - DNA, 25 bp, Artificial
  Probe
tatagttagcagagtactagggaga

SEQ ID NO: 37500 - DNA, 25 bp, Artificial
  Probe
ctcaggaaactgatgaaactccatc

SEQ ID NO: 37501 - DNA, 25 bp, Artificial
  Probe
gctggttctgatggaagtgtattaa

SEQ ID NO: 37502 - DNA, 25 bp, Artificial
  Probe
tctctgtctctgtctgtctctctct

SEQ ID NO: 37503 - DNA, 25 bp, Artificial
  Probe
gtctctgtctctgtctgtctctctc

SEQ ID NO: 37504 - DNA, 25 bp, Artificial
  Probe
ctctgtctctgtctgtctctctctt

SEQ ID NO: 37505 - DNA, 25 bp, Artificial
  Probe
tgaacagaatcaccttagcagagag

SEQ ID NO: 37506 - DNA, 25 bp, Artificial
  Probe
ctggttctgatggaagtgtattaat

SEQ ID NO: 37507 - DNA, 25 bp, Artificial
  Probe
gtgtctctgtctctgtctgtctctc

SEQ ID NO: 37508 - DNA, 25 bp, Artificial
  Probe
tctaaatcaccagcattcaaacaaa

SEQ ID NO: 37509 - DNA, 25 bp, Artificial
  Probe
atctaaatcaccagcattcaaacaa

SEQ ID NO: 37510 - DNA, 25 bp, Artificial
  Probe
ctgaacagaatcaccttagcagaga

SEQ ID NO: 37511 - DNA, 25 bp, Artificial
  Probe
tgtctctgtctctgtctgtctctct

SEQ ID NO: 37512 - DNA, 25 bp, Artificial
  Probe
agctggttctgatggaagtgtatta

SEQ ID NO: 37513 - DNA, 25 bp, Artificial
  Probe
tggttctgatggaagtgtattaatt

SEQ ID NO: 37514 - DNA, 25 bp, Artificial
  Probe
ctaaatcaccagcattcaaacaaat

SEQ ID NO: 37515 - DNA, 25 bp, Artificial
  Probe
gaacagaatcaccttagcagagagc

SEQ ID NO: 37516 - DNA, 25 bp, Artificial
  Probe
gatctaaatcaccagcattcaaaca

SEQ ID NO: 37517 - DNA, 25 bp, Artificial
  Probe
gcaataaagtttacaaagtctggaa

SEQ ID NO: 37518 - DNA, 25 bp, Artificial
  Probe
aaatcaccagcattcaaacaaatat

SEQ ID NO: 37519 - DNA, 25 bp, Artificial
  Probe
gtgtgtctctgtctctgtctgtctc

SEQ ID NO: 37520 - DNA, 25 bp, Artificial
  Probe
ctctgtgtgtctctgtctctgtctg

SEQ ID NO: 37521 - DNA, 25 bp, Artificial
  Probe
gtctctgtgtgtctctgtctctgtc

SEQ ID NO: 37522 - DNA, 25 bp, Artificial
  Probe
ctgtctctgtgtgtctctgtctctg

SEQ ID NO: 37523 - DNA, 25 bp, Artificial
  Probe
gtctgtctctgtgtgtctctgtctc

SEQ ID NO: 37524 - DNA, 25 bp, Artificial
  Probe
tgtgtctctgtctctgtctgtctct

SEQ ID NO: 37525 - DNA, 25 bp, Artificial
  Probe
tctctgtgtgtctctgtctctgtct

SEQ ID NO: 37526 - DNA, 25 bp, Artificial
  Probe
tctgtctctgtgtgtctctgtctct

SEQ ID NO: 37527 - DNA, 25 bp, Artificial
  Probe
tctgtctctgtctgtctctctcttt

SEQ ID NO: 37528 - DNA, 25 bp, Artificial
  Probe
caccagcattcaaacaaatattcct

SEQ ID NO: 37529 - DNA, 25 bp, Artificial
  Probe
tcaccagcattcaaacaaatattcc

SEQ ID NO: 37530 - DNA, 25 bp, Artificial
  Probe
gagctggttctgatggaagtgtatt

SEQ ID NO: 37531 - DNA, 25 bp, Artificial
  Probe
ctgtgtgtctctgtctctgtctgtc

SEQ ID NO: 37532 - DNA, 25 bp, Artificial
  Probe
ctgtctgtctctgtgtgtctctgtc

SEQ ID NO: 37533 - DNA, 25 bp, Artificial
  Probe
gtctgtctgtctctgtgtgtctctg

SEQ ID NO: 37534 - DNA, 25 bp, Artificial
  Probe
ctgtctgtctgtctctgtgtgtctc

SEQ ID NO: 37535 - DNA, 25 bp, Artificial
  Probe
taaatcaccagcattcaaacaaata

SEQ ID NO: 37536 - DNA, 25 bp, Artificial
  Probe
atcaccagcattcaaacaaatattc

SEQ ID NO: 37537 - DNA, 25 bp, Artificial
  Probe
ggttgagaccctgttctatatcttt

SEQ ID NO: 37538 - DNA, 25 bp, Artificial
  Probe
tggttgagaccctgttctatatctt

SEQ ID NO: 37539 - DNA, 25 bp, Artificial
  Probe
ttctggttgagaccctgttctatat

SEQ ID NO: 37540 - DNA, 25 bp, Artificial
  Probe
cacatgacaacaaagaagatcccag

SEQ ID NO: 37541 - DNA, 25 bp, Artificial
  Probe
tttctggttgagaccctgttctata

SEQ ID NO: 37542 - DNA, 25 bp, Artificial
  Probe
tgtgtgtctctgtctctgtctgtct

SEQ ID NO: 37543 - DNA, 25 bp, Artificial
  Probe
tctgtgtgtctctgtctctgtctgt

SEQ ID NO: 37544 - DNA, 25 bp, Artificial
  Probe
tgtctctgtgtgtctctgtctctgt

SEQ ID NO: 37545 - DNA, 25 bp, Artificial
  Probe
tgtctgtctctgtgtgtctctgtct

SEQ ID NO: 37546 - DNA, 25 bp, Artificial
  Probe
ttaatgttcaactactcagtgccaa

SEQ ID NO: 37547 - DNA, 25 bp, Artificial
  Probe
taatgttcaactactcagtgccaaa

SEQ ID NO: 37548 - DNA, 25 bp, Artificial
  Probe
tttaatgttcaactactcagtgcca

SEQ ID NO: 37549 - DNA, 25 bp, Artificial
  Probe
gttcaactactcagtgccaaactac

SEQ ID NO: 37550 - DNA, 25 bp, Artificial
  Probe
aatgttcaactactcagtgccaaac

SEQ ID NO: 37551 - DNA, 25 bp, Artificial
  Probe
tgttcaactactcagtgccaaacta

SEQ ID NO: 37552 - DNA, 25 bp, Artificial
  Probe
atgttcaactactcagtgccaaact

SEQ ID NO: 37553 - DNA, 25 bp, Artificial
  Probe
ttcaactactcagtgccaaactacc

SEQ ID NO: 37554 - DNA, 25 bp, Artificial
  Probe
aaactacctgaagttggattagagg

SEQ ID NO: 37555 - DNA, 25 bp, Artificial
  Probe
tcaactactcagtgccaaactacct

SEQ ID NO: 37556 - DNA, 25 bp, Artificial
  Probe
ttttaatgttcaactactcagtgcc

SEQ ID NO: 37557 - DNA, 25 bp, Artificial
  Probe
caaactacctgaagttggattagag

SEQ ID NO: 37558 - DNA, 25 bp, Artificial
  Probe
caactactcagtgccaaactacctg

SEQ ID NO: 37559 - DNA, 25 bp, Artificial
  Probe
aactacctgaagttggattagaggg

SEQ ID NO: 37560 - DNA, 25 bp, Artificial
  Probe
ctacctgaagttggattagagggct

SEQ ID NO: 37561 - DNA, 25 bp, Artificial
  Probe
tacctgaagttggattagagggctg

SEQ ID NO: 37562 - DNA, 25 bp, Artificial
  Probe
actacctgaagttggattagagggc

SEQ ID NO: 37563 - DNA, 25 bp, Artificial
  Probe
gctgtacgaagtctacaaactggac

SEQ ID NO: 37564 - DNA, 25 bp, Artificial
  Probe
ccaaactacctgaagttggattaga

SEQ ID NO: 37565 - DNA, 25 bp, Artificial
  Probe
ctgtacgaagtctacaaactggact

SEQ ID NO: 37566 - DNA, 25 bp, Artificial
  Probe
gccaaactacctgaagttggattag

SEQ ID NO: 37567 - DNA, 25 bp, Artificial
  Probe
agctgtacgaagtctacaaactgga

SEQ ID NO: 37568 - DNA, 25 bp, Artificial
  Probe
tgccaaactacctgaagttggatta

SEQ ID NO: 37569 - DNA, 25 bp, Artificial
  Probe
ctactcagtgccaaactacctgaag

SEQ ID NO: 37570 - DNA, 25 bp, Artificial
  Probe
tactcagtgccaaactacctgaagt

SEQ ID NO: 37571 - DNA, 25 bp, Artificial
  Probe
actactcagtgccaaactacctgaa

SEQ ID NO: 37572 - DNA, 25 bp, Artificial
  Probe
aactactcagtgccaaactacctga

SEQ ID NO: 37573 - DNA, 25 bp, Artificial
  Probe
ctcagtgccaaactacctgaagttg

SEQ ID NO: 37574 - DNA, 25 bp, Artificial
  Probe
gtgccaaactacctgaagttggatt

SEQ ID NO: 37575 - DNA, 25 bp, Artificial
  Probe
actcagtgccaaactacctgaagtt

SEQ ID NO: 37576 - DNA, 25 bp, Artificial
  Probe
agtgccaaactacctgaagttggat

SEQ ID NO: 37577 - DNA, 25 bp, Artificial
  Probe
tgaagttccccacctatgcaaagtc

SEQ ID NO: 37578 - DNA, 25 bp, Artificial
  Probe
ctgaagttccccacctatgcaaagt

SEQ ID NO: 37579 - DNA, 25 bp, Artificial
  Probe
cagtgccaaactacctgaagttgga

SEQ ID NO: 37580 - DNA, 25 bp, Artificial
  Probe
tcagtgccaaactacctgaagttgg

SEQ ID NO: 37581 - DNA, 25 bp, Artificial
  Probe
aatcacctgctatgagaacttcacc

SEQ ID NO: 37582 - DNA, 25 bp, Artificial
  Probe
atcttggtctttctgtatccgattg

SEQ ID NO: 37583 - DNA, 25 bp, Artificial
  Probe
cttcttaatttcctggtgtgctttg

SEQ ID NO: 37584 - DNA, 25 bp, Artificial
  Probe
cttggtctttctgtatccgattgag

SEQ ID NO: 37585 - DNA, 25 bp, Artificial
  Probe
tcttggtctttctgtatccgattga

SEQ ID NO: 37586 - DNA, 25 bp, Artificial
  Probe
atgacagtcaccatcttctgctatt

SEQ ID NO: 37587 - DNA, 25 bp, Artificial
  Probe
gatcttggtctttctgtatccgatt

SEQ ID NO: 37588 - DNA, 25 bp, Artificial
  Probe
aaatcacctgctatgagaacttcac

SEQ ID NO: 37589 - DNA, 25 bp, Artificial
  Probe
caaatcacctgctatgagaacttca

SEQ ID NO: 37590 - DNA, 25 bp, Artificial
  Probe
gatgttcgtatttcggtcttgtctc

SEQ ID NO: 37591 - DNA, 25 bp, Artificial
  Probe
ctggtgatcttggtctttctgtatc

SEQ ID NO: 37592 - DNA, 25 bp, Artificial
  Probe
tctggtgatcttggtctttctgtat

SEQ ID NO: 37593 - DNA, 25 bp, Artificial
  Probe
ctgatgttcgtatttcggtcttgtc

SEQ ID NO: 37594 - DNA, 25 bp, Artificial
  Probe
ttcttaatttcctggtgtgctttgg

SEQ ID NO: 37595 - DNA, 25 bp, Artificial
  Probe
tgatcttggtctttctgtatccgat

SEQ ID NO: 37596 - DNA, 25 bp, Artificial
  Probe
ccaaatcacctgctatgagaacttc

SEQ ID NO: 37597 - DNA, 25 bp, Artificial
  Probe
tgatgttcgtatttcggtcttgtct

SEQ ID NO: 37598 - DNA, 25 bp, Artificial
  Probe
ctctggtgatcttggtctttctgta

SEQ ID NO: 37599 - DNA, 25 bp, Artificial
  Probe
gcttcttaatttcctggtgtgcttt

SEQ ID NO: 37600 - DNA, 25 bp, Artificial
  Probe
catgacagtcaccatcttctgctat

SEQ ID NO: 37601 - DNA, 25 bp, Artificial
  Probe
gaaccaaatcacctgctatgagaac

SEQ ID NO: 37602 - DNA, 25 bp, Artificial
  Probe
agaaccaaatcacctgctatgagaa

SEQ ID NO: 37603 - DNA, 25 bp, Artificial
  Probe
tgacagtcaccatcttctgctattg

SEQ ID NO: 37604 - DNA, 25 bp, Artificial
  Probe
accaaatcacctgctatgagaactt

SEQ ID NO: 37605 - DNA, 25 bp, Artificial
  Probe
aaccaaatcacctgctatgagaact

SEQ ID NO: 37606 - DNA, 25 bp, Artificial
  Probe
tggtgatcttggtctttctgtatcc

SEQ ID NO: 37607 - DNA, 25 bp, Artificial
  Probe
atctctggtgatcttggtctttctg

SEQ ID NO: 37608 - DNA, 25 bp, Artificial
  Probe
catctctggtgatcttggtctttct

SEQ ID NO: 37609 - DNA, 25 bp, Artificial
  Probe
caccatcgtcatcatcgttcagtac

SEQ ID NO: 37610 - DNA, 25 bp, Artificial
  Probe
gtgatcttggtctttctgtatccga

SEQ ID NO: 37611 - DNA, 25 bp, Artificial
  Probe
gagaaccaaatcacctgctatgaga

SEQ ID NO: 37612 - DNA, 25 bp, Artificial
  Probe
atgttcgtatttcggtcttgtctcc

SEQ ID NO: 37613 - DNA, 25 bp, Artificial
  Probe
ttggtctttctgtatccgattgagc

SEQ ID NO: 37614 - DNA, 25 bp, Artificial
  Probe
gacagtcaccatcttctgctattgg

SEQ ID NO: 37615 - DNA, 25 bp, Artificial
  Probe
catcgtcatcatcgttcagtacctg

SEQ ID NO: 37616 - DNA, 25 bp, Artificial
  Probe
agagatggtgggaagaagaggaatt

SEQ ID NO: 37617 - DNA, 25 bp, Artificial
  Probe
ctttgtatggatcatgctcacacag

SEQ ID NO: 37618 - DNA, 25 bp, Artificial
  Probe
gagagatggtgggaagaagaggaat

SEQ ID NO: 37619 - DNA, 25 bp, Artificial
  Probe
ctgtggtgacgcttcttaatttcct

SEQ ID NO: 37620 - DNA, 25 bp, Artificial
  Probe
ggtgatcttggtctttctgtatccg

SEQ ID NO: 37621 - DNA, 25 bp, Artificial
  Probe
ccatcgtcatcatcgttcagtacct

SEQ ID NO: 37622 - DNA, 25 bp, Artificial
  Probe
cttaatttcctggtgtgctttggac

SEQ ID NO: 37623 - DNA, 25 bp, Artificial
  Probe
tctctggtgatcttggtctttctgt

SEQ ID NO: 37624 - DNA, 25 bp, Artificial
  Probe
tcttaatttcctggtgtgctttgga

SEQ ID NO: 37625 - DNA, 25 bp, Artificial
  Probe
tctttctgtatccgattgagctgtg

SEQ ID NO: 37626 - DNA, 25 bp, Artificial
  Probe
attattagtgtgtctcgttctccag

SEQ ID NO: 37627 - DNA, 25 bp, Artificial
  Probe
tcttggaacacattggtattcattg

SEQ ID NO: 37628 - DNA, 25 bp, Artificial
  Probe
tattattagtgtgtctcgttctcca

SEQ ID NO: 37629 - DNA, 25 bp, Artificial
  Probe
cttcttggaacacattggtattcat

SEQ ID NO: 37630 - DNA, 25 bp, Artificial
  Probe
ttattagtgtgtctcgttctccagt

SEQ ID NO: 37631 - DNA, 25 bp, Artificial
  Probe
ttcttggaacacattggtattcatt

SEQ ID NO: 37632 - DNA, 25 bp, Artificial
  Probe
ccttcttggaacacattggtattca

SEQ ID NO: 37633 - DNA, 25 bp, Artificial
  Probe
tattagtgtgtctcgttctccagtg

SEQ ID NO: 37634 - DNA, 25 bp, Artificial
  Probe
ttattattagtgtgtctcgttctcc

SEQ ID NO: 37635 - DNA, 25 bp, Artificial
  Probe
cttggaacacattggtattcattgt

SEQ ID NO: 37636 - DNA, 25 bp, Artificial
  Probe
gccttcttggaacacattggtattc

SEQ ID NO: 37637 - DNA, 25 bp, Artificial
  Probe
agccttcttggaacacattggtatt

SEQ ID NO: 37638 - DNA, 25 bp, Artificial
  Probe
cagccttcttggaacacattggtat

SEQ ID NO: 37639 - DNA, 25 bp, Artificial
  Probe
cgtctggtcatttattattagtgtg

SEQ ID NO: 37640 - DNA, 25 bp, Artificial
  Probe
ggtcatttattattagtgtgtctcg

SEQ ID NO: 37641 - DNA, 25 bp, Artificial
  Probe
gttgtagaatgatcgctgcctttac

SEQ ID NO: 37642 - DNA, 25 bp, Artificial
  Probe
tgttgtagaatgatcgctgccttta

SEQ ID NO: 37643 - DNA, 25 bp, Artificial
  Probe
gtcatttattattagtgtgtctcgt

SEQ ID NO: 37644 - DNA, 25 bp, Artificial
  Probe
gtctggtcatttattattagtgtgt

SEQ ID NO: 37645 - DNA, 25 bp, Artificial
  Probe
tttattattagtgtgtctcgttctc

SEQ ID NO: 37646 - DNA, 25 bp, Artificial
  Probe
tggtcatttattattagtgtgtctc

SEQ ID NO: 37647 - DNA, 25 bp, Artificial
  Probe
tctggtcatttattattagtgtgtc

SEQ ID NO: 37648 - DNA, 25 bp, Artificial
  Probe
acgtctggtcatttattattagtgt

SEQ ID NO: 37649 - DNA, 25 bp, Artificial
  Probe
ctggtcatttattattagtgtgtct

SEQ ID NO: 37650 - DNA, 25 bp, Artificial
  Probe
agacctcattactttggaaaactcg

SEQ ID NO: 37651 - DNA, 25 bp, Artificial
  Probe
ggagacctcattactttggaaaact

SEQ ID NO: 37652 - DNA, 25 bp, Artificial
  Probe
ttgtagaatgatcgctgcctttacc

SEQ ID NO: 37653 - DNA, 25 bp, Artificial
  Probe
attagtgtgtctcgttctccagtgc

SEQ ID NO: 37654 - DNA, 25 bp, Artificial
  Probe
cagtctggtcatcgttgttgttgtg

SEQ ID NO: 37655 - DNA, 25 bp, Artificial
  Probe
tcatttattattagtgtgtctcgtt

SEQ ID NO: 37656 - DNA, 25 bp, Artificial
  Probe
cattactttggaaaactcgctgttc

SEQ ID NO: 37657 - DNA, 25 bp, Artificial
  Probe
gagacctcattactttggaaaactc

SEQ ID NO: 37658 - DNA, 25 bp, Artificial
  Probe
tcattactttggaaaactcgctgtt

SEQ ID NO: 37659 - DNA, 25 bp, Artificial
  Probe
ctcattactttggaaaactcgctgt

SEQ ID NO: 37660 - DNA, 25 bp, Artificial
  Probe
catttattattagtgtgtctcgttc

SEQ ID NO: 37661 - DNA, 25 bp, Artificial
  Probe
cggagacctcattactttggaaaac

SEQ ID NO: 37662 - DNA, 25 bp, Artificial
  Probe
actgttgtagaatgatcgctgcctt

SEQ ID NO: 37663 - DNA, 25 bp, Artificial
  Probe
atttattattagtgtgtctcgttct

SEQ ID NO: 37664 - DNA, 25 bp, Artificial
  Probe
cacagtctggtcatcgttgttgttg

SEQ ID NO: 37665 - DNA, 25 bp, Artificial
  Probe
ctgttgtagaatgatcgctgccttt

SEQ ID NO: 37666 - DNA, 25 bp, Artificial
  Probe
cctcattactttggaaaactcgctg

SEQ ID NO: 37667 - DNA, 25 bp, Artificial
  Probe
gacctcattactttggaaaactcgc

SEQ ID NO: 37668 - DNA, 25 bp, Artificial
  Probe
aacacattggtattcattgtggatg

SEQ ID NO: 37669 - DNA, 25 bp, Artificial
  Probe
gaacacattggtattcattgtggat

SEQ ID NO: 37670 - DNA, 25 bp, Artificial
  Probe
ttggaacacattggtattcattgtg

SEQ ID NO: 37671 - DNA, 25 bp, Artificial
  Probe
gtggttcatgtagttctgtctgtaa

SEQ ID NO: 37672 - DNA, 25 bp, Artificial
  Probe
tgtggttcatgtagttctgtctgta

SEQ ID NO: 37673 - DNA, 25 bp, Artificial
  Probe
ttgtggttcatgtagttctgtctgt

SEQ ID NO: 37674 - DNA, 25 bp, Artificial
  Probe
tgacctgttctagctgtgatcttac

SEQ ID NO: 37675 - DNA, 25 bp, Artificial
  Probe
gtgacctgttctagctgtgatctta

SEQ ID NO: 37676 - DNA, 25 bp, Artificial
  Probe
gttctagctgtgatcttaccacttc

SEQ ID NO: 37677 - DNA, 25 bp, Artificial
  Probe
tggttcatgtagttctgtctgtaaa

SEQ ID NO: 37678 - DNA, 25 bp, Artificial
  Probe
tctagctgtgatcttaccacttcaa

SEQ ID NO: 37679 - DNA, 25 bp, Artificial
  Probe
ttctagctgtgatcttaccacttca

SEQ ID NO: 37680 - DNA, 25 bp, Artificial
  Probe
taaatagatttgttacagggtgacc

SEQ ID NO: 37681 - DNA, 25 bp, Artificial
  Probe
gacctgttctagctgtgatcttacc

SEQ ID NO: 37682 - DNA, 25 bp, Artificial
  Probe
tgttctagctgtgatcttaccactt

SEQ ID NO: 37683 - DNA, 25 bp, Artificial
  Probe
aaacgaagtaagaatccaagtgtgc

SEQ ID NO: 37684 - DNA, 25 bp, Artificial
  Probe
ggttcatgtagttctgtctgtaaat

SEQ ID NO: 37685 - DNA, 25 bp, Artificial
  Probe
tttgtggttcatgtagttctgtctg

SEQ ID NO: 37686 - DNA, 25 bp, Artificial
  Probe
ctgttctagctgtgatcttaccact

SEQ ID NO: 37687 - DNA, 25 bp, Artificial
  Probe
aaatagatttgttacagggtgacct

SEQ ID NO: 37688 - DNA, 25 bp, Artificial
  Probe
gctttgtgctgtatgctagtttaaa

SEQ ID NO: 37689 - DNA, 25 bp, Artificial
  Probe
acctgttctagctgtgatcttacca

SEQ ID NO: 37690 - DNA, 25 bp, Artificial
  Probe
aacgaagtaagaatccaagtgtgcg

SEQ ID NO: 37691 - DNA, 25 bp, Artificial
  Probe
tgatcttaccacttcaaatggatgt

SEQ ID NO: 37692 - DNA, 25 bp, Artificial
  Probe
gtgatcttaccacttcaaatggatg

SEQ ID NO: 37693 - DNA, 25 bp, Artificial
  Probe
tgtgatcttaccacttcaaatggat

SEQ ID NO: 37694 - DNA, 25 bp, Artificial
  Probe
ctgtgatcttaccacttcaaatgga

SEQ ID NO: 37695 - DNA, 25 bp, Artificial
  Probe
cctgttctagctgtgatcttaccac

SEQ ID NO: 37696 - DNA, 25 bp, Artificial
  Probe
gatcttaccacttcaaatggatgta

SEQ ID NO: 37697 - DNA, 25 bp, Artificial
  Probe
tagctgtgatcttaccacttcaaat

SEQ ID NO: 37698 - DNA, 25 bp, Artificial
  Probe
tcttaccacttcaaatggatgtaat

SEQ ID NO: 37699 - DNA, 25 bp, Artificial
  Probe
atcttaccacttcaaatggatgtaa

SEQ ID NO: 37700 - DNA, 25 bp, Artificial
  Probe
ctagctgtgatcttaccacttcaaa

SEQ ID NO: 37701 - DNA, 25 bp, Artificial
  Probe
aaaacgaagtaagaatccaagtgtg

SEQ ID NO: 37702 - DNA, 25 bp, Artificial
  Probe
gtaaatagatttgttacagggtgac

SEQ ID NO: 37703 - DNA, 25 bp, Artificial
  Probe
agctgtgatcttaccacttcaaatg

SEQ ID NO: 37704 - DNA, 25 bp, Artificial
  Probe
gctgtgatcttaccacttcaaatgg

SEQ ID NO: 37705 - DNA, 25 bp, Artificial
  Probe
cttaccacttcaaatggatgtaatt

SEQ ID NO: 37706 - DNA, 25 bp, Artificial
  Probe
tcatgtagttctgtctgtaaataga

SEQ ID NO: 37707 - DNA, 25 bp, Artificial
  Probe
aatcagtttagctttgtgctgtatg

SEQ ID NO: 37708 - DNA, 25 bp, Artificial
  Probe
ggtgacctgttctagctgtgatctt

SEQ ID NO: 37709 - DNA, 25 bp, Artificial
  Probe
ctaatcagtttagctttgtgctgta

SEQ ID NO: 37710 - DNA, 25 bp, Artificial
  Probe
ttttgtggttcatgtagttctgtct

SEQ ID NO: 37711 - DNA, 25 bp, Artificial
  Probe
agctttgtgctgtatgctagtttaa

SEQ ID NO: 37712 - DNA, 25 bp, Artificial
  Probe
aatagacaaacaaacaaacaaaagc

SEQ ID NO: 37713 - DNA, 25 bp, Artificial
  Probe
gttcatgtagttctgtctgtaaata

SEQ ID NO: 37714 - DNA, 25 bp, Artificial
  Probe
taatcagtttagctttgtgctgtat

SEQ ID NO: 37715 - DNA, 25 bp, Artificial
  Probe
agttctgtctgtaaatagaatcaca

SEQ ID NO: 37716 - DNA, 25 bp, Artificial
  Probe
ttaactcgtgggtcttcatttcctt

SEQ ID NO: 37717 - DNA, 25 bp, Artificial
  Probe
tttaactcgtgggtcttcatttcct

SEQ ID NO: 37718 - DNA, 25 bp, Artificial
  Probe
taactcgtgggtcttcatttccttc

SEQ ID NO: 37719 - DNA, 25 bp, Artificial
  Probe
ctcggagtcttgaaatccagtattc

SEQ ID NO: 37720 - DNA, 25 bp, Artificial
  Probe
tctcggagtcttgaaatccagtatt

SEQ ID NO: 37721 - DNA, 25 bp, Artificial
  Probe
aaatccagtattcaggaggaatttc

SEQ ID NO: 37722 - DNA, 25 bp, Artificial
  Probe
gaaatccagtattcaggaggaattt

SEQ ID NO: 37723 - DNA, 25 bp, Artificial
  Probe
ctctcggagtcttgaaatccagtat

SEQ ID NO: 37724 - DNA, 25 bp, Artificial
  Probe
gttctttccttcgacggtgaataaa

SEQ ID NO: 37725 - DNA, 25 bp, Artificial
  Probe
aatccagtattcaggaggaatttcc

SEQ ID NO: 37726 - DNA, 25 bp, Artificial
  Probe
aatttccttgcattcccatgagttt

SEQ ID NO: 37727 - DNA, 25 bp, Artificial
  Probe
ctaggaacagatatcacggtgatct

SEQ ID NO: 37728 - DNA, 25 bp, Artificial
  Probe
tctctcggagtcttgaaatccagta

SEQ ID NO: 37729 - DNA, 25 bp, Artificial
  Probe
atttccttgcattcccatgagtttc

SEQ ID NO: 37730 - DNA, 25 bp, Artificial
  Probe
gttggtctctcggagtcttgaaatc

SEQ ID NO: 37731 - DNA, 25 bp, Artificial
  Probe
agtcttgaaatccagtattcaggag

SEQ ID NO: 37732 - DNA, 25 bp, Artificial
  Probe
gagtcttgaaatccagtattcagga

SEQ ID NO: 37733 - DNA, 25 bp, Artificial
  Probe
cttgaaatccagtattcaggaggaa

SEQ ID NO: 37734 - DNA, 25 bp, Artificial
  Probe
tgttctttccttcgacggtgaataa

SEQ ID NO: 37735 - DNA, 25 bp, Artificial
  Probe
tgaaatccagtattcaggaggaatt

SEQ ID NO: 37736 - DNA, 25 bp, Artificial
  Probe
ttgaaatccagtattcaggaggaat

SEQ ID NO: 37737 - DNA, 25 bp, Artificial
  Probe
tcttgaaatccagtattcaggagga

SEQ ID NO: 37738 - DNA, 25 bp, Artificial
  Probe
gtcttgaaatccagtattcaggagg

SEQ ID NO: 37739 - DNA, 25 bp, Artificial
  Probe
ggagtcttgaaatccagtattcagg

SEQ ID NO: 37740 - DNA, 25 bp, Artificial
  Probe
ttttaactcgtgggtcttcatttcc

SEQ ID NO: 37741 - DNA, 25 bp, Artificial
  Probe
cggagtcttgaaatccagtattcag

SEQ ID NO: 37742 - DNA, 25 bp, Artificial
  Probe
agttggtctctcggagtcttgaaat

SEQ ID NO: 37743 - DNA, 25 bp, Artificial
  Probe
tcggagtcttgaaatccagtattca

SEQ ID NO: 37744 - DNA, 25 bp, Artificial
  Probe
ttctttccttcgacggtgaataaag

SEQ ID NO: 37745 - DNA, 25 bp, Artificial
  Probe
ggtgaaagggtttggagatgacatc

SEQ ID NO: 37746 - DNA, 25 bp, Artificial
  Probe
gtgttctttccttcgacggtgaata

SEQ ID NO: 37747 - DNA, 25 bp, Artificial
  Probe
gagtttccgtcgtgttctttccttc

SEQ ID NO: 37748 - DNA, 25 bp, Artificial
  Probe
gctaggaacagatatcacggtgatc

SEQ ID NO: 37749 - DNA, 25 bp, Artificial
  Probe
gaatttccttgcattcccatgagtt

SEQ ID NO: 37750 - DNA, 25 bp, Artificial
  Probe
gtgggtcttcatttccttccaactc

SEQ ID NO: 37751 - DNA, 25 bp, Artificial
  Probe
atgagtttccgtcgtgttctttcct

SEQ ID NO: 37752 - DNA, 25 bp, Artificial
  Probe
gtctctcggagtcttgaaatccagt

SEQ ID NO: 37753 - DNA, 25 bp, Artificial
  Probe
cagttggtctctcggagtcttgaaa

SEQ ID NO: 37754 - DNA, 25 bp, Artificial
  Probe
gtgaaagggtttggagatgacatcc

SEQ ID NO: 37755 - DNA, 25 bp, Artificial
  Probe
tgagtttccgtcgtgttctttcctt

SEQ ID NO: 37756 - DNA, 25 bp, Artificial
  Probe
aactcgtgggtcttcatttccttcc

SEQ ID NO: 37757 - DNA, 25 bp, Artificial
  Probe
gggtgaaagggtttggagatgacat

SEQ ID NO: 37758 - DNA, 25 bp, Artificial
  Probe
catgagtttccgtcgtgttctttcc

SEQ ID NO: 37759 - DNA, 25 bp, Artificial
  Probe
ccatgagtttccgtcgtgttctttc

SEQ ID NO: 37760 - DNA, 25 bp, Artificial
  Probe
tttccttgcattcccatgagtttcc

SEQ ID NO: 37761 - DNA, 25 bp, Artificial
  Probe
acctgttcactcatcacacttagaa

SEQ ID NO: 37762 - DNA, 25 bp, Artificial
  Probe
gacctgttcactcatcacacttaga

SEQ ID NO: 37763 - DNA, 25 bp, Artificial
  Probe
tcatcacacttagaaacagaatcca

SEQ ID NO: 37764 - DNA, 25 bp, Artificial
  Probe
tcactcatcacacttagaaacagaa

SEQ ID NO: 37765 - DNA, 25 bp, Artificial
  Probe
catcacacttagaaacagaatccag

SEQ ID NO: 37766 - DNA, 25 bp, Artificial
  Probe
ctcatcacacttagaaacagaatcc

SEQ ID NO: 37767 - DNA, 25 bp, Artificial
  Probe
tgacctgttcactcatcacacttag

SEQ ID NO: 37768 - DNA, 25 bp, Artificial
  Probe
cactcatcacacttagaaacagaat

SEQ ID NO: 37769 - DNA, 25 bp, Artificial
  Probe
ttcactcatcacacttagaaacaga

SEQ ID NO: 37770 - DNA, 25 bp, Artificial
  Probe
gttcactcatcacacttagaaacag

SEQ ID NO: 37771 - DNA, 25 bp, Artificial
  Probe
actcatcacacttagaaacagaatc

SEQ ID NO: 37772 - DNA, 25 bp, Artificial
  Probe
atcacacttagaaacagaatccagt

SEQ ID NO: 37773 - DNA, 25 bp, Artificial
  Probe
gagtctcctgtgggtatttcatttg

SEQ ID NO: 37774 - DNA, 25 bp, Artificial
  Probe
gtctcctgtgggtatttcatttgtc

SEQ ID NO: 37775 - DNA, 25 bp, Artificial
  Probe
tctgtgtgaagaagccaaataataa

SEQ ID NO: 37776 - DNA, 25 bp, Artificial
  Probe
agtctcctgtgggtatttcatttgt

SEQ ID NO: 37777 - DNA, 25 bp, Artificial
  Probe
ctgttcactcatcacacttagaaac

SEQ ID NO: 37778 - DNA, 25 bp, Artificial
  Probe
gacttccatgataggtttctctgta

SEQ ID NO: 37779 - DNA, 25 bp, Artificial
  Probe
ctgtgtgaagaagccaaataataaa

SEQ ID NO: 37780 - DNA, 25 bp, Artificial
  Probe
acttccatgataggtttctctgtag

SEQ ID NO: 37781 - DNA, 25 bp, Artificial
  Probe
cttccatgataggtttctctgtagc

SEQ ID NO: 37782 - DNA, 25 bp, Artificial
  Probe
cctgttcactcatcacacttagaaa

SEQ ID NO: 37783 - DNA, 25 bp, Artificial
  Probe
aagacttccatgataggtttctctg

SEQ ID NO: 37784 - DNA, 25 bp, Artificial
  Probe
aaagactcatttggaacagaactgc

SEQ ID NO: 37785 - DNA, 25 bp, Artificial
  Probe
aaagacttccatgataggtttctct

SEQ ID NO: 37786 - DNA, 25 bp, Artificial
  Probe
tgagtctcctgtgggtatttcattt

SEQ ID NO: 37787 - DNA, 25 bp, Artificial
  Probe
ttgagtctcctgtgggtatttcatt

SEQ ID NO: 37788 - DNA, 25 bp, Artificial
  Probe
actgctcttgtagggagtttctatc

SEQ ID NO: 37789 - DNA, 25 bp, Artificial
  Probe
agacttccatgataggtttctctgt

SEQ ID NO: 37790 - DNA, 25 bp, Artificial
  Probe
catgataggtttctctgtagcttgg

SEQ ID NO: 37791 - DNA, 25 bp, Artificial
  Probe
ccatgataggtttctctgtagcttg

SEQ ID NO: 37792 - DNA, 25 bp, Artificial
  Probe
accttggtgagtaacctttcttaaa

SEQ ID NO: 37793 - DNA, 25 bp, Artificial
  Probe
tccatgataggtttctctgtagctt

SEQ ID NO: 37794 - DNA, 25 bp, Artificial
  Probe
ttccatgataggtttctctgtagct

SEQ ID NO: 37795 - DNA, 25 bp, Artificial
  Probe
tcttgtagggagtttctatcgcaac

SEQ ID NO: 37796 - DNA, 25 bp, Artificial
  Probe
acttagaaacagaatccagtgtaaa

SEQ ID NO: 37797 - DNA, 25 bp, Artificial
  Probe
ctcttgtagggagtttctatcgcaa

SEQ ID NO: 37798 - DNA, 25 bp, Artificial
  Probe
tctcctgtgggtatttcatttgtcg

SEQ ID NO: 37799 - DNA, 25 bp, Artificial
  Probe
ctgctcttgtagggagtttctatcg

SEQ ID NO: 37800 - DNA, 25 bp, Artificial
  Probe
atgataggtttctctgtagcttggg

SEQ ID NO: 37801 - DNA, 25 bp, Artificial
  Probe
ttgtcgaaaggacggtgttatatat

SEQ ID NO: 37802 - DNA, 25 bp, Artificial
  Probe
tttgtcgaaaggacggtgttatata

SEQ ID NO: 37803 - DNA, 25 bp, Artificial
  Probe
cattctgtgtgaagaagccaaataa

SEQ ID NO: 37804 - DNA, 25 bp, Artificial
  Probe
atttgtcgaaaggacggtgttatat

SEQ ID NO: 37805 - DNA, 25 bp, Artificial
  Probe
attctgtgtgaagaagccaaataat

SEQ ID NO: 37806 - DNA, 25 bp, Artificial
  Probe
tgatactgaatagtgacaagtgaca

SEQ ID NO: 37807 - DNA, 25 bp, Artificial
  Probe
ttgatactgaatagtgacaagtgac

SEQ ID NO: 37808 - DNA, 25 bp, Artificial
  Probe
gatactgaatagtgacaagtgacat

SEQ ID NO: 37809 - DNA, 25 bp, Artificial
  Probe
atactgaatagtgacaagtgacatt

SEQ ID NO: 37810 - DNA, 25 bp, Artificial
  Probe
tttgaataaagaaccagtccctcca

SEQ ID NO: 37811 - DNA, 25 bp, Artificial
  Probe
tactgaatagtgacaagtgacattt

SEQ ID NO: 37812 - DNA, 25 bp, Artificial
  Probe
tttgatactgaatagtgacaagtga

SEQ ID NO: 37813 - DNA, 25 bp, Artificial
  Probe
acattttgaataaagaaccagtccc

SEQ ID NO: 37814 - DNA, 25 bp, Artificial
  Probe
cattttgaataaagaaccagtccct

SEQ ID NO: 37815 - DNA, 25 bp, Artificial
  Probe
attttgaataaagaaccagtccctc

SEQ ID NO: 37816 - DNA, 25 bp, Artificial
  Probe
ctagtggtgtgctgatctttcaagt

SEQ ID NO: 37817 - DNA, 25 bp, Artificial
  Probe
aattctttgcagtctatgggctagt

SEQ ID NO: 37818 - DNA, 25 bp, Artificial
  Probe
ttttgaataaagaaccagtccctcc

SEQ ID NO: 37819 - DNA, 25 bp, Artificial
  Probe
tagtggtgtgctgatctttcaagtg

SEQ ID NO: 37820 - DNA, 25 bp, Artificial
  Probe
gattcctggcttgtttgtactcctc

SEQ ID NO: 37821 - DNA, 25 bp, Artificial
  Probe
tgaatagtgacaagtgacattttga

SEQ ID NO: 37822 - DNA, 25 bp, Artificial
  Probe
gaattctttgcagtctatgggctag

SEQ ID NO: 37823 - DNA, 25 bp, Artificial
  Probe
gtgacattttgaataaagaaccagt

SEQ ID NO: 37824 - DNA, 25 bp, Artificial
  Probe
ctgaatagtgacaagtgacattttg

SEQ ID NO: 37825 - DNA, 25 bp, Artificial
  Probe
attctttgcagtctatgggctagtg

SEQ ID NO: 37826 - DNA, 25 bp, Artificial
  Probe
actgaatagtgacaagtgacatttt

SEQ ID NO: 37827 - DNA, 25 bp, Artificial
  Probe
gcaactgttttgatactgaatagtg

SEQ ID NO: 37828 - DNA, 25 bp, Artificial
  Probe
agtgacattttgaataaagaaccag

SEQ ID NO: 37829 - DNA, 25 bp, Artificial
  Probe
agattcctggcttgtttgtactcct

SEQ ID NO: 37830 - DNA, 25 bp, Artificial
  Probe
gaatagtgacaagtgacattttgaa

SEQ ID NO: 37831 - DNA, 25 bp, Artificial
  Probe
aagtgacattttgaataaagaacca

SEQ ID NO: 37832 - DNA, 25 bp, Artificial
  Probe
gacattttgaataaagaaccagtcc

SEQ ID NO: 37833 - DNA, 25 bp, Artificial
  Probe
actgttttgatactgaatagtgaca

SEQ ID NO: 37834 - DNA, 25 bp, Artificial
  Probe
cagattcctggcttgtttgtactcc

SEQ ID NO: 37835 - DNA, 25 bp, Artificial
  Probe
agtgacaagtgacattttgaataaa

SEQ ID NO: 37836 - DNA, 25 bp, Artificial
  Probe
gctagtggtgtgctgatctttcaag

SEQ ID NO: 37837 - DNA, 25 bp, Artificial
  Probe
gtgacaagtgacattttgaataaag

SEQ ID NO: 37838 - DNA, 25 bp, Artificial
  Probe
tgacattttgaataaagaaccagtc

SEQ ID NO: 37839 - DNA, 25 bp, Artificial
  Probe
caagtgacattttgaataaagaacc

SEQ ID NO: 37840 - DNA, 25 bp, Artificial
  Probe
tgacaagtgacattttgaataaaga

SEQ ID NO: 37841 - DNA, 25 bp, Artificial
  Probe
aatagtgacaagtgacattttgaat

SEQ ID NO: 37842 - DNA, 25 bp, Artificial
  Probe
catgttcaggtggtttcttctcagc

SEQ ID NO: 37843 - DNA, 25 bp, Artificial
  Probe
gtagtgcaactgttttgatactgaa

SEQ ID NO: 37844 - DNA, 25 bp, Artificial
  Probe
ttttgatactgaatagtgacaagtg

SEQ ID NO: 37845 - DNA, 25 bp, Artificial
  Probe
gttttgatactgaatagtgacaagt

SEQ ID NO: 37846 - DNA, 25 bp, Artificial
  Probe
aactgttttgatactgaatagtgac

SEQ ID NO: 37847 - DNA, 25 bp, Artificial
  Probe
caactgttttgatactgaatagtga

SEQ ID NO: 37848 - DNA, 25 bp, Artificial
  Probe
ctgtagtgcaactgttttgatactg

SEQ ID NO: 37849 - DNA, 25 bp, Artificial
  Probe
tgtagtgcaactgttttgatactga

SEQ ID NO: 37850 - DNA, 25 bp, Artificial
  Probe
ccatgttcaggtggtttcttctcag

SEQ ID NO: 37851 - DNA, 25 bp, Artificial
  Probe
aatgactatatggaatggctgaaca

SEQ ID NO: 37852 - DNA, 25 bp, Artificial
  Probe
gaatgactatatggaatggctgaac

SEQ ID NO: 37853 - DNA, 25 bp, Artificial
  Probe
ggaatgactatatggaatggctgaa

SEQ ID NO: 37854 - DNA, 25 bp, Artificial
  Probe
aaggaatgactatatggaatggctg

SEQ ID NO: 37855 - DNA, 25 bp, Artificial
  Probe
atgactatatggaatggctgaacac

SEQ ID NO: 37856 - DNA, 25 bp, Artificial
  Probe
aggaatgactatatggaatggctga

SEQ ID NO: 37857 - DNA, 25 bp, Artificial
  Probe
gactatatggaatggctgaacacat

SEQ ID NO: 37858 - DNA, 25 bp, Artificial
  Probe
caggcagtatcttgaatagtctagg

SEQ ID NO: 37859 - DNA, 25 bp, Artificial
  Probe
ccaggcagtatcttgaatagtctag

SEQ ID NO: 37860 - DNA, 25 bp, Artificial
  Probe
aggcagtatcttgaatagtctaggt

SEQ ID NO: 37861 - DNA, 25 bp, Artificial
  Probe
gcagtatcttgaatagtctaggtgg

SEQ ID NO: 37862 - DNA, 25 bp, Artificial
  Probe
ggcagtatcttgaatagtctaggtg

SEQ ID NO: 37863 - DNA, 25 bp, Artificial
  Probe
tgactatatggaatggctgaacaca

SEQ ID NO: 37864 - DNA, 25 bp, Artificial
  Probe
atatggaatggctgaacacatacat

SEQ ID NO: 37865 - DNA, 25 bp, Artificial
  Probe
tatatggaatggctgaacacataca

SEQ ID NO: 37866 - DNA, 25 bp, Artificial
  Probe
actatatggaatggctgaacacata

SEQ ID NO: 37867 - DNA, 25 bp, Artificial
  Probe
ctatatggaatggctgaacacatac

SEQ ID NO: 37868 - DNA, 25 bp, Artificial
  Probe
gtaaccatgaatgttctacacaagc

SEQ ID NO: 37869 - DNA, 25 bp, Artificial
  Probe
cctcttcttaacgcttgtcacattg

SEQ ID NO: 37870 - DNA, 25 bp, Artificial
  Probe
gctaagcctaataggaatgatgact

SEQ ID NO: 37871 - DNA, 25 bp, Artificial
  Probe
agtaaccatgaatgttctacacaag

SEQ ID NO: 37872 - DNA, 25 bp, Artificial
  Probe
cacatacattggttccctcttctta

SEQ ID NO: 37873 - DNA, 25 bp, Artificial
  Probe
aaaggaatgactatatggaatggct

SEQ ID NO: 37874 - DNA, 25 bp, Artificial
  Probe
acatacattggttccctcttcttaa

SEQ ID NO: 37875 - DNA, 25 bp, Artificial
  Probe
taaccatgaatgttctacacaagct

SEQ ID NO: 37876 - DNA, 25 bp, Artificial
  Probe
ctcttcttaacgcttgtcacattgc

SEQ ID NO: 37877 - DNA, 25 bp, Artificial
  Probe
tatggaatggctgaacacatacatt

SEQ ID NO: 37878 - DNA, 25 bp, Artificial
  Probe
agtatcttgaatagtctaggtggga

SEQ ID NO: 37879 - DNA, 25 bp, Artificial
  Probe
cagtatcttgaatagtctaggtggg

SEQ ID NO: 37880 - DNA, 25 bp, Artificial
  Probe
atacattggttccctcttcttaacg

SEQ ID NO: 37881 - DNA, 25 bp, Artificial
  Probe
catacattggttccctcttcttaac

SEQ ID NO: 37882 - DNA, 25 bp, Artificial
  Probe
gtatcttgaatagtctaggtgggag

SEQ ID NO: 37883 - DNA, 25 bp, Artificial
  Probe
agctaagcctaataggaatgatgac

SEQ ID NO: 37884 - DNA, 25 bp, Artificial
  Probe
atcttgaatagtctaggtgggagaa

SEQ ID NO: 37885 - DNA, 25 bp, Artificial
  Probe
tagtaaccatgaatgttctacacaa

SEQ ID NO: 37886 - DNA, 25 bp, Artificial
  Probe
taaaggaatgactatatggaatggc

SEQ ID NO: 37887 - DNA, 25 bp, Artificial
  Probe
ggaaagtgccataaaggaatgacta

SEQ ID NO: 37888 - DNA, 25 bp, Artificial
  Probe
tatcttgaatagtctaggtgggaga

SEQ ID NO: 37889 - DNA, 25 bp, Artificial
  Probe
gagaagactttgctcagtattgttt

SEQ ID NO: 37890 - DNA, 25 bp, Artificial
  Probe
cttgaatagtctaggtgggagaaga

SEQ ID NO: 37891 - DNA, 25 bp, Artificial
  Probe
tcttgaatagtctaggtgggagaag

SEQ ID NO: 37892 - DNA, 25 bp, Artificial
  Probe
aatgttctacacaagctgtccaatc

SEQ ID NO: 37893 - DNA, 25 bp, Artificial
  Probe
gaatgttctacacaagctgtccaat

SEQ ID NO: 37894 - DNA, 25 bp, Artificial
  Probe
gaaagtgccataaaggaatgactat

SEQ ID NO: 37895 - DNA, 25 bp, Artificial
  Probe
ctaagcctaataggaatgatgactt

SEQ ID NO: 37896 - DNA, 25 bp, Artificial
  Probe
gcttcctaaggttcagtgttatgac

SEQ ID NO: 37897 - DNA, 25 bp, Artificial
  Probe
cttcctaaggttcagtgttatgacc

SEQ ID NO: 37898 - DNA, 25 bp, Artificial
  Probe
ctaaggttcagtgttatgaccagtg

SEQ ID NO: 37899 - DNA, 25 bp, Artificial
  Probe
tgaagaaggcaagtttaatgaagag

SEQ ID NO: 37900 - DNA, 25 bp, Artificial
  Probe
ctgaagaaggcaagtttaatgaaga

SEQ ID NO: 37901 - DNA, 25 bp, Artificial
  Probe
tctgaagaaggcaagtttaatgaag

SEQ ID NO: 37902 - DNA, 25 bp, Artificial
  Probe
ctctgaagaaggcaagtttaatgaa

SEQ ID NO: 37903 - DNA, 25 bp, Artificial
  Probe
ttcctaaggttcagtgttatgacca

SEQ ID NO: 37904 - DNA, 25 bp, Artificial
  Probe
gaagaaggcaagtttaatgaagaga

SEQ ID NO: 37905 - DNA, 25 bp, Artificial
  Probe
taaggttcagtgttatgaccagtgt

SEQ ID NO: 37906 - DNA, 25 bp, Artificial
  Probe
agcttcctaaggttcagtgttatga

SEQ ID NO: 37907 - DNA, 25 bp, Artificial
  Probe
aggcaagtttaatgaagagaaagaa

SEQ ID NO: 37908 - DNA, 25 bp, Artificial
  Probe
aaggcaagtttaatgaagagaaaga

SEQ ID NO: 37909 - DNA, 25 bp, Artificial
  Probe
agaaggcaagtttaatgaagagaaa

SEQ ID NO: 37910 - DNA, 25 bp, Artificial
  Probe
aagaaggcaagtttaatgaagagaa

SEQ ID NO: 37911 - DNA, 25 bp, Artificial
  Probe
tcctaaggttcagtgttatgaccag

SEQ ID NO: 37912 - DNA, 25 bp, Artificial
  Probe
gaaggcaagtttaatgaagagaaag

SEQ ID NO: 37913 - DNA, 25 bp, Artificial
  Probe
gctctgaagaaggcaagtttaatga

SEQ ID NO: 37914 - DNA, 25 bp, Artificial
  Probe
cctaaggttcagtgttatgaccagt

SEQ ID NO: 37915 - DNA, 25 bp, Artificial
  Probe
ctttagatgtgtggaacagcataac

SEQ ID NO: 37916 - DNA, 25 bp, Artificial
  Probe
ggcaagtttaatgaagagaaagaaa

SEQ ID NO: 37917 - DNA, 25 bp, Artificial
  Probe
actttagatgtgtggaacagcataa

SEQ ID NO: 37918 - DNA, 25 bp, Artificial
  Probe
ttagatgtgtggaacagcataacca

SEQ ID NO: 37919 - DNA, 25 bp, Artificial
  Probe
gactgttacgatccgactttagatg

SEQ ID NO: 37920 - DNA, 25 bp, Artificial
  Probe
gactttagatgtgtggaacagcata

SEQ ID NO: 37921 - DNA, 25 bp, Artificial
  Probe
ctgttacgatccgactttagatgtg

SEQ ID NO: 37922 - DNA, 25 bp, Artificial
  Probe
gttacgatccgactttagatgtgtg

SEQ ID NO: 37923 - DNA, 25 bp, Artificial
  Probe
tttagatgtgtggaacagcataacc

SEQ ID NO: 37924 - DNA, 25 bp, Artificial
  Probe
actgttacgatccgactttagatgt

SEQ ID NO: 37925 - DNA, 25 bp, Artificial
  Probe
tgttacgatccgactttagatgtgt

SEQ ID NO: 37926 - DNA, 25 bp, Artificial
  Probe
ctctgcttacaagttcaacagtgaa

SEQ ID NO: 37927 - DNA, 25 bp, Artificial
  Probe
aaggttcagtgttatgaccagtgtg

SEQ ID NO: 37928 - DNA, 25 bp, Artificial
  Probe
gctctgcttacaagttcaacagtga

SEQ ID NO: 37929 - DNA, 25 bp, Artificial
  Probe
ctgctctgcttacaagttcaacagt

SEQ ID NO: 37930 - DNA, 25 bp, Artificial
  Probe
ttacgatccgactttagatgtgtgg

SEQ ID NO: 37931 - DNA, 25 bp, Artificial
  Probe
tgctctgcttacaagttcaacagtg

SEQ ID NO: 37932 - DNA, 25 bp, Artificial
  Probe
ggactgttacgatccgactttagat

SEQ ID NO: 37933 - DNA, 25 bp, Artificial
  Probe
tcaacagtgaaacttaccagtggac

SEQ ID NO: 37934 - DNA, 25 bp, Artificial
  Probe
aggttcagtgttatgaccagtgtga

SEQ ID NO: 37935 - DNA, 25 bp, Artificial
  Probe
aagcttcctaaggttcagtgttatg

SEQ ID NO: 37936 - DNA, 25 bp, Artificial
  Probe
caagcttcctaaggttcagtgttat

SEQ ID NO: 37937 - DNA, 25 bp, Artificial
  Probe
atccgactttagatgtgtggaacag

SEQ ID NO: 37938 - DNA, 25 bp, Artificial
  Probe
cctgctctgcttacaagttcaacag

SEQ ID NO: 37939 - DNA, 25 bp, Artificial
  Probe
ttggactgttacgatccgactttag

SEQ ID NO: 37940 - DNA, 25 bp, Artificial
  Probe
ggttcagtgttatgaccagtgtgaa

SEQ ID NO: 37941 - DNA, 25 bp, Artificial
  Probe
ctgatatgcttatggagaatgcttg

SEQ ID NO: 37942 - DNA, 25 bp, Artificial
  Probe
actgatatgcttatggagaatgctt

SEQ ID NO: 37943 - DNA, 25 bp, Artificial
  Probe
cactgatatgcttatggagaatgct

SEQ ID NO: 37944 - DNA, 25 bp, Artificial
  Probe
gatatgcttatggagaatgcttgct

SEQ ID NO: 37945 - DNA, 25 bp, Artificial
  Probe
atatgcttatggagaatgcttgctg

SEQ ID NO: 37946 - DNA, 25 bp, Artificial
  Probe
tgatatgcttatggagaatgcttgc

SEQ ID NO: 37947 - DNA, 25 bp, Artificial
  Probe
ccactgatatgcttatggagaatgc

SEQ ID NO: 37948 - DNA, 25 bp, Artificial
  Probe
tatgcttatggagaatgcttgctgg

SEQ ID NO: 37949 - DNA, 25 bp, Artificial
  Probe
cttatggagaatgcttgctggtgtt

SEQ ID NO: 37950 - DNA, 25 bp, Artificial
  Probe
ctagatgttcagagtgtgatggctg

SEQ ID NO: 37951 - DNA, 25 bp, Artificial
  Probe
ttatggagaatgcttgctggtgttg

SEQ ID NO: 37952 - DNA, 25 bp, Artificial
  Probe
tagatgttcagagtgtgatggctgt

SEQ ID NO: 37953 - DNA, 25 bp, Artificial
  Probe
ttctagatgttcagagtgtgatggc

SEQ ID NO: 37954 - DNA, 25 bp, Artificial
  Probe
tttctagatgttcagagtgtgatgg

SEQ ID NO: 37955 - DNA, 25 bp, Artificial
  Probe
ggaacagctatgcatgtattcttag

SEQ ID NO: 37956 - DNA, 25 bp, Artificial
  Probe
ggaaaacctaaaggaccaagagatc

SEQ ID NO: 37957 - DNA, 25 bp, Artificial
  Probe
tctagatgttcagagtgtgatggct

SEQ ID NO: 37958 - DNA, 25 bp, Artificial
  Probe
aaacctaaaggaccaagagatccct

SEQ ID NO: 37959 - DNA, 25 bp, Artificial
  Probe
gaacagctatgcatgtattcttaga

SEQ ID NO: 37960 - DNA, 25 bp, Artificial
  Probe
atgcttatggagaatgcttgctggt

SEQ ID NO: 37961 - DNA, 25 bp, Artificial
  Probe
tggatgttaatttgttattgtgttt

SEQ ID NO: 37962 - DNA, 25 bp, Artificial
  Probe
ttggatgttaatttgttattgtgtt

SEQ ID NO: 37963 - DNA, 25 bp, Artificial
  Probe
tttggatgttaatttgttattgtgt

SEQ ID NO: 37964 - DNA, 25 bp, Artificial
  Probe
gtaatcgctgtggaaaacctaaagg

SEQ ID NO: 37965 - DNA, 25 bp, Artificial
  Probe
taatcgctgtggaaaacctaaagga

SEQ ID NO: 37966 - DNA, 25 bp, Artificial
  Probe
aacagctatgcatgtattcttagat

SEQ ID NO: 37967 - DNA, 25 bp, Artificial
  Probe
aacctaaaggaccaagagatccctc

SEQ ID NO: 37968 - DNA, 25 bp, Artificial
  Probe
tccactgatatgcttatggagaatg

SEQ ID NO: 37969 - DNA, 25 bp, Artificial
  Probe
agatgttcagagtgtgatggctgtg

SEQ ID NO: 37970 - DNA, 25 bp, Artificial
  Probe
gaaaacctaaaggaccaagagatcc

SEQ ID NO: 37971 - DNA, 25 bp, Artificial
  Probe
tggaaaacctaaaggaccaagagat

SEQ ID NO: 37972 - DNA, 25 bp, Artificial
  Probe
gaagtccttttggatgttaatttgt

SEQ ID NO: 37973 - DNA, 25 bp, Artificial
  Probe
tgaagtccttttggatgttaatttg

SEQ ID NO: 37974 - DNA, 25 bp, Artificial
  Probe
gatgttcagagtgtgatggctgtgt

SEQ ID NO: 37975 - DNA, 25 bp, Artificial
  Probe
acagctatgcatgtattcttagata

SEQ ID NO: 37976 - DNA, 25 bp, Artificial
  Probe
ttttggcaacaggttttggtaatcg

SEQ ID NO: 37977 - DNA, 25 bp, Artificial
  Probe
aagtccttttggatgttaatttgtt

SEQ ID NO: 37978 - DNA, 25 bp, Artificial
  Probe
gggaacagctatgcatgtattctta

SEQ ID NO: 37979 - DNA, 25 bp, Artificial
  Probe
ggtaatcgctgtggaaaacctaaag

SEQ ID NO: 37980 - DNA, 25 bp, Artificial
  Probe
cagctatgcatgtattcttagatac

SEQ ID NO: 37981 - DNA, 25 bp, Artificial
  Probe
aaaacctaaaggaccaagagatccc

SEQ ID NO: 37982 - DNA, 25 bp, Artificial
  Probe
gtggaaaacctaaaggaccaagaga

SEQ ID NO: 37983 - DNA, 25 bp, Artificial
  Probe
ttgaagtccttttggatgttaattt

SEQ ID NO: 37984 - DNA, 25 bp, Artificial
  Probe
tttgaagtccttttggatgttaatt

SEQ ID NO: 37985 - DNA, 25 bp, Artificial
  Probe
ttttgaagtccttttggatgttaat

SEQ ID NO: 37986 - DNA, 25 bp, Artificial
  Probe
tgtgtcctaatatcaaaccctcatt

SEQ ID NO: 37987 - DNA, 25 bp, Artificial
  Probe
aacgacagaagagcatttagaagaa

SEQ ID NO: 37988 - DNA, 25 bp, Artificial
  Probe
gacagaagagcatttagaagaacaa

SEQ ID NO: 37989 - DNA, 25 bp, Artificial
  Probe
cgacagaagagcatttagaagaaca

SEQ ID NO: 37990 - DNA, 25 bp, Artificial
  Probe
acgacagaagagcatttagaagaac

SEQ ID NO: 37991 - DNA, 25 bp, Artificial
  Probe
caacgacagaagagcatttagaaga

SEQ ID NO: 37992 - DNA, 25 bp, Artificial
  Probe
acagaagagcatttagaagaacaaa

SEQ ID NO: 37993 - DNA, 25 bp, Artificial
  Probe
gtgtcctaatatcaaaccctcattt

SEQ ID NO: 37994 - DNA, 25 bp, Artificial
  Probe
acaacgacagaagagcatttagaag

SEQ ID NO: 37995 - DNA, 25 bp, Artificial
  Probe
gacaacgacagaagagcatttagaa

SEQ ID NO: 37996 - DNA, 25 bp, Artificial
  Probe
ttgtgtcctaatatcaaaccctcat

SEQ ID NO: 37997 - DNA, 25 bp, Artificial
  Probe
acttgttatattctctttgtgtcct

SEQ ID NO: 37998 - DNA, 25 bp, Artificial
  Probe
tgacaacgacagaagagcatttaga

SEQ ID NO: 37999 - DNA, 25 bp, Artificial
  Probe
ctcagggagatgaataagcgtctaa

SEQ ID NO: 38000 - DNA, 25 bp, Artificial
  Probe
tcagggagatgaataagcgtctaac

SEQ ID NO: 38001 - DNA, 25 bp, Artificial
  Probe
cggaaacttgttatattctctttgt

SEQ ID NO: 38002 - DNA, 25 bp, Artificial
  Probe
aacttgttatattctctttgtgtcc

SEQ ID NO: 38003 - DNA, 25 bp, Artificial
  Probe
tcggaaacttgttatattctctttg

SEQ ID NO: 38004 - DNA, 25 bp, Artificial
  Probe
ctgacaacgacagaagagcatttag

SEQ ID NO: 38005 - DNA, 25 bp, Artificial
  Probe
actatgcttccaacagggttcattt

SEQ ID NO: 38006 - DNA, 25 bp, Artificial
  Probe
aactatgcttccaacagggttcatt

SEQ ID NO: 38007 - DNA, 25 bp, Artificial
  Probe
aaactatgcttccaacagggttcat

SEQ ID NO: 38008 - DNA, 25 bp, Artificial
  Probe
tttgtgtcctaatatcaaaccctca

SEQ ID NO: 38009 - DNA, 25 bp, Artificial
  Probe
tctttgtgtcctaatatcaaaccct

SEQ ID NO: 38010 - DNA, 25 bp, Artificial
  Probe
ctttgtgtcctaatatcaaaccctc

SEQ ID NO: 38011 - DNA, 25 bp, Artificial
  Probe
ctctttgtgtcctaatatcaaaccc

SEQ ID NO: 38012 - DNA, 25 bp, Artificial
  Probe
ttcggaaacttgttatattctcttt

SEQ ID NO: 38013 - DNA, 25 bp, Artificial
  Probe
tatgcttccaacagggttcatttta

SEQ ID NO: 38014 - DNA, 25 bp, Artificial
  Probe
ggaaacttgttatattctctttgtg

SEQ ID NO: 38015 - DNA, 25 bp, Artificial
  Probe
tttcggaaacttgttatattctctt

SEQ ID NO: 38016 - DNA, 25 bp, Artificial
  Probe
tctctttgtgtcctaatatcaaacc

SEQ ID NO: 38017 - DNA, 25 bp, Artificial
  Probe
cttgttatattctctttgtgtccta

SEQ ID NO: 38018 - DNA, 25 bp, Artificial
  Probe
atgcttccaacagggttcattttaa

SEQ ID NO: 38019 - DNA, 25 bp, Artificial
  Probe
tgtcctaatatcaaaccctcatttt

SEQ ID NO: 38020 - DNA, 25 bp, Artificial
  Probe
atttcggaaacttgttatattctct

SEQ ID NO: 38021 - DNA, 25 bp, Artificial
  Probe
cagaagagcatttagaagaacaaaa

SEQ ID NO: 38022 - DNA, 25 bp, Artificial
  Probe
ctatgcttccaacagggttcatttt

SEQ ID NO: 38023 - DNA, 25 bp, Artificial
  Probe
gtcctaatatcaaaccctcattttc

SEQ ID NO: 38024 - DNA, 25 bp, Artificial
  Probe
tcctaatatcaaaccctcattttct

SEQ ID NO: 38025 - DNA, 25 bp, Artificial
  Probe
aatatcaaaccctcattttctcagg

SEQ ID NO: 38026 - DNA, 25 bp, Artificial
  Probe
ttgttatattctctttgtgtcctaa

SEQ ID NO: 38027 - DNA, 25 bp, Artificial
  Probe
cctaatatcaaaccctcattttctc

SEQ ID NO: 38028 - DNA, 25 bp, Artificial
  Probe
aaacttgttatattctctttgtgtc

SEQ ID NO: 38029 - DNA, 25 bp, Artificial
  Probe
aatttcggaaacttgttatattctc

SEQ ID NO: 38030 - DNA, 25 bp, Artificial
  Probe
tgttatattctctttgtgtcctaat

SEQ ID NO: 38031 - DNA, 25 bp, Artificial
  Probe
atactcgtacttctatgaggcattc

SEQ ID NO: 38032 - DNA, 25 bp, Artificial
  Probe
catactcgtacttctatgaggcatt

SEQ ID NO: 38033 - DNA, 25 bp, Artificial
  Probe
tactcgtacttctatgaggcattcg

SEQ ID NO: 38034 - DNA, 25 bp, Artificial
  Probe
aacttaccatgctctgagtaatctg

SEQ ID NO: 38035 - DNA, 25 bp, Artificial
  Probe
tattattcatgcagcagaggagaag

SEQ ID NO: 38036 - DNA, 25 bp, Artificial
  Probe
gtattattcatgcagcagaggagaa

SEQ ID NO: 38037 - DNA, 25 bp, Artificial
  Probe
gtcaggtattattcatgcagcagag

SEQ ID NO: 38038 - DNA, 25 bp, Artificial
  Probe
gcatactcgtacttctatgaggcat

SEQ ID NO: 38039 - DNA, 25 bp, Artificial
  Probe
agtcaggtattattcatgcagcaga

SEQ ID NO: 38040 - DNA, 25 bp, Artificial
  Probe
cagtcaggtattattcatgcagcag

SEQ ID NO: 38041 - DNA, 25 bp, Artificial
  Probe
ggacatgcagtcaggtattattcat

SEQ ID NO: 38042 - DNA, 25 bp, Artificial
  Probe
aactgcatactcgtacttctatgag

SEQ ID NO: 38043 - DNA, 25 bp, Artificial
  Probe
ggtattattcatgcagcagaggaga

SEQ ID NO: 38044 - DNA, 25 bp, Artificial
  Probe
aggtattattcatgcagcagaggag

SEQ ID NO: 38045 - DNA, 25 bp, Artificial
  Probe
ctggacatgcagtcaggtattattc

SEQ ID NO: 38046 - DNA, 25 bp, Artificial
  Probe
ggaagcattacatttgggttctcag

SEQ ID NO: 38047 - DNA, 25 bp, Artificial
  Probe
caggaagcattacatttgggttctc

SEQ ID NO: 38048 - DNA, 25 bp, Artificial
  Probe
tctggacatgcagtcaggtattatt

SEQ ID NO: 38049 - DNA, 25 bp, Artificial
  Probe
caggtattattcatgcagcagagga

SEQ ID NO: 38050 - DNA, 25 bp, Artificial
  Probe
tcaggtattattcatgcagcagagg

SEQ ID NO: 38051 - DNA, 25 bp, Artificial
  Probe
actgcatactcgtacttctatgagg

SEQ ID NO: 38052 - DNA, 25 bp, Artificial
  Probe
tggacatgcagtcaggtattattca

SEQ ID NO: 38053 - DNA, 25 bp, Artificial
  Probe
acttaccatgctctgagtaatctgc

SEQ ID NO: 38054 - DNA, 25 bp, Artificial
  Probe
aggaagcattacatttgggttctca

SEQ ID NO: 38055 - DNA, 25 bp, Artificial
  Probe
ctctggacatgcagtcaggtattat

SEQ ID NO: 38056 - DNA, 25 bp, Artificial
  Probe
attattcatgcagcagaggagaagg

SEQ ID NO: 38057 - DNA, 25 bp, Artificial
  Probe
gaagcattacatttgggttctcagc

SEQ ID NO: 38058 - DNA, 25 bp, Artificial
  Probe
aaacttaccatgctctgagtaatct

SEQ ID NO: 38059 - DNA, 25 bp, Artificial
  Probe
cttaccatgctctgagtaatctgcc

SEQ ID NO: 38060 - DNA, 25 bp, Artificial
  Probe
ctgcatactcgtacttctatgaggc

SEQ ID NO: 38061 - DNA, 25 bp, Artificial
  Probe
aggctggtgtctttgtattttgata

SEQ ID NO: 38062 - DNA, 25 bp, Artificial
  Probe
aaactgcatactcgtacttctatga

SEQ ID NO: 38063 - DNA, 25 bp, Artificial
  Probe
actctggacatgcagtcaggtatta

SEQ ID NO: 38064 - DNA, 25 bp, Artificial
  Probe
taccaggaagcattacatttgggtt

SEQ ID NO: 38065 - DNA, 25 bp, Artificial
  Probe
ttattcatgcagcagaggagaagga

SEQ ID NO: 38066 - DNA, 25 bp, Artificial
  Probe
aaggctggtgtctttgtattttgat

SEQ ID NO: 38067 - DNA, 25 bp, Artificial
  Probe
gacatgcagtcaggtattattcatg

SEQ ID NO: 38068 - DNA, 25 bp, Artificial
  Probe
acatgcagtcaggtattattcatgc

SEQ ID NO: 38069 - DNA, 25 bp, Artificial
  Probe
catctctgaagtacatgttgctgtg

SEQ ID NO: 38070 - DNA, 25 bp, Artificial
  Probe
ctggtcgagctatgtttagaatgca

SEQ ID NO: 38071 - DNA, 25 bp, Artificial
  Probe
actcgtacttctatgaggcattcga

SEQ ID NO: 38072 - DNA, 25 bp, Artificial
  Probe
ggctggtgtctttgtattttgatac

SEQ ID NO: 38073 - DNA, 25 bp, Artificial
  Probe
caaggctggtgtctttgtattttga

SEQ ID NO: 38074 - DNA, 25 bp, Artificial
  Probe
caaggccatcacatctctgaagtac

SEQ ID NO: 38075 - DNA, 25 bp, Artificial
  Probe
ggatgataaagctcttttggttgaa

SEQ ID NO: 38076 - DNA, 25 bp, Artificial
  Probe
cattgataacttgatgaagagcctg

SEQ ID NO: 38077 - DNA, 25 bp, Artificial
  Probe
cagcattgataacttgatgaagagc

SEQ ID NO: 38078 - DNA, 25 bp, Artificial
  Probe
gcagcattgataacttgatgaagag

SEQ ID NO: 38079 - DNA, 25 bp, Artificial
  Probe
gagcagcattgataacttgatgaag

SEQ ID NO: 38080 - DNA, 25 bp, Artificial
  Probe
cttcttcttagaggacaacaagtga

SEQ ID NO: 38081 - DNA, 25 bp, Artificial
  Probe
tgacttcttcttagaggacaacaag

SEQ ID NO: 38082 - DNA, 25 bp, Artificial
  Probe
ttcttcttagaggacaacaagtgac

SEQ ID NO: 38083 - DNA, 25 bp, Artificial
  Probe
atgacttcttcttagaggacaacaa

SEQ ID NO: 38084 - DNA, 25 bp, Artificial
  Probe
aatgacttcttcttagaggacaaca

SEQ ID NO: 38085 - DNA, 25 bp, Artificial
  Probe
acaatgacttcttcttagaggacaa

SEQ ID NO: 38086 - DNA, 25 bp, Artificial
  Probe
attgataacttgatgaagagcctgg

SEQ ID NO: 38087 - DNA, 25 bp, Artificial
  Probe
agcagcattgataacttgatgaaga

SEQ ID NO: 38088 - DNA, 25 bp, Artificial
  Probe
agagcagcattgataacttgatgaa

SEQ ID NO: 38089 - DNA, 25 bp, Artificial
  Probe
caatgacttcttcttagaggacaac

SEQ ID NO: 38090 - DNA, 25 bp, Artificial
  Probe
gagagcagcattgataacttgatga

SEQ ID NO: 38091 - DNA, 25 bp, Artificial
  Probe
tacaatgacttcttcttagaggaca

SEQ ID NO: 38092 - DNA, 25 bp, Artificial
  Probe
gcattgataacttgatgaagagcct

SEQ ID NO: 38093 - DNA, 25 bp, Artificial
  Probe
agcattgataacttgatgaagagcc

SEQ ID NO: 38094 - DNA, 25 bp, Artificial
  Probe
ttgataacttgatgaagagcctgga

SEQ ID NO: 38095 - DNA, 25 bp, Artificial
  Probe
ctacaatgacttcttcttagaggac

SEQ ID NO: 38096 - DNA, 25 bp, Artificial
  Probe
aggagagcagcattgataacttgat

SEQ ID NO: 38097 - DNA, 25 bp, Artificial
  Probe
gatgaaggagagcagcattgataac

SEQ ID NO: 38098 - DNA, 25 bp, Artificial
  Probe
agatgaaggagagcagcattgataa

SEQ ID NO: 38099 - DNA, 25 bp, Artificial
  Probe
aagatgaaggagagcagcattgata

SEQ ID NO: 38100 - DNA, 25 bp, Artificial
  Probe
ccttgagtacacatcattatggaga

SEQ ID NO: 38101 - DNA, 25 bp, Artificial
  Probe
acttcttccttgagtacacatcatt

SEQ ID NO: 38102 - DNA, 25 bp, Artificial
  Probe
gaaggagagcagcattgataacttg

SEQ ID NO: 38103 - DNA, 25 bp, Artificial
  Probe
cacttcttccttgagtacacatcat

SEQ ID NO: 38104 - DNA, 25 bp, Artificial
  Probe
tcttcttagaggacaacaagtgacc

SEQ ID NO: 38105 - DNA, 25 bp, Artificial
  Probe
ggagagcagcattgataacttgatg

SEQ ID NO: 38106 - DNA, 25 bp, Artificial
  Probe
atgaaggagagcagcattgataact

SEQ ID NO: 38107 - DNA, 25 bp, Artificial
  Probe
ttgagtacacatcattatggagact

SEQ ID NO: 38108 - DNA, 25 bp, Artificial
  Probe
cttccttgagtacacatcattatgg

SEQ ID NO: 38109 - DNA, 25 bp, Artificial
  Probe
cttgagtacacatcattatggagac

SEQ ID NO: 38110 - DNA, 25 bp, Artificial
  Probe
ttcttagaggacaacaagtgaccag

SEQ ID NO: 38111 - DNA, 25 bp, Artificial
  Probe
cttcttagaggacaacaagtgacca

SEQ ID NO: 38112 - DNA, 25 bp, Artificial
  Probe
ataacttgatgaagagcctggacaa

SEQ ID NO: 38113 - DNA, 25 bp, Artificial
  Probe
cctacaatgacttcttcttagagga

SEQ ID NO: 38114 - DNA, 25 bp, Artificial
  Probe
gcctacaatgacttcttcttagagg

SEQ ID NO: 38115 - DNA, 25 bp, Artificial
  Probe
aaggagagcagcattgataacttga

SEQ ID NO: 38116 - DNA, 25 bp, Artificial
  Probe
tgaaggagagcagcattgataactt

SEQ ID NO: 38117 - DNA, 25 bp, Artificial
  Probe
gataacttgatgaagagcctggaca

SEQ ID NO: 38118 - DNA, 25 bp, Artificial
  Probe
tgataacttgatgaagagcctggac

SEQ ID NO: 38119 - DNA, 25 bp, Artificial
  Probe
tcttccttgagtacacatcattatg

SEQ ID NO: 38120 - DNA, 25 bp, Artificial
  Probe
cttcttccttgagtacacatcatta

SEQ ID NO: 38121 - DNA, 25 bp, Artificial
  Probe
gccaatgaatctcagttcttaccta

SEQ ID NO: 38122 - DNA, 25 bp, Artificial
  Probe
tgaatctcagttcttacctagagga

SEQ ID NO: 38123 - DNA, 25 bp, Artificial
  Probe
atgaatctcagttcttacctagagg

SEQ ID NO: 38124 - DNA, 25 bp, Artificial
  Probe
gaatctcagttcttacctagaggaa

SEQ ID NO: 38125 - DNA, 25 bp, Artificial
  Probe
ccaatgaatctcagttcttacctag

SEQ ID NO: 38126 - DNA, 25 bp, Artificial
  Probe
tgccaatgaatctcagttcttacct

SEQ ID NO: 38127 - DNA, 25 bp, Artificial
  Probe
cttgaatgtccatgaaccactgtac

SEQ ID NO: 38128 - DNA, 25 bp, Artificial
  Probe
ctgccaatgaatctcagttcttacc

SEQ ID NO: 38129 - DNA, 25 bp, Artificial
  Probe
cctgccaatgaatctcagttcttac

SEQ ID NO: 38130 - DNA, 25 bp, Artificial
  Probe
tcttgaatgtccatgaaccactgta

SEQ ID NO: 38131 - DNA, 25 bp, Artificial
  Probe
caatgaatctcagttcttacctaga

SEQ ID NO: 38132 - DNA, 25 bp, Artificial
  Probe
tctattgtttcctcttgaatgtcca

SEQ ID NO: 38133 - DNA, 25 bp, Artificial
  Probe
ctctattgtttcctcttgaatgtcc

SEQ ID NO: 38134 - DNA, 25 bp, Artificial
  Probe
aatgaatctcagttcttacctagag

SEQ ID NO: 38135 - DNA, 25 bp, Artificial
  Probe
ctattgtttcctcttgaatgtccat

SEQ ID NO: 38136 - DNA, 25 bp, Artificial
  Probe
tgaattaactgcactccttgatatt

SEQ ID NO: 38137 - DNA, 25 bp, Artificial
  Probe
ttgaattaactgcactccttgatat

SEQ ID NO: 38138 - DNA, 25 bp, Artificial
  Probe
tctctattgtttcctcttgaatgtc

SEQ ID NO: 38139 - DNA, 25 bp, Artificial
  Probe
aattaactgcactccttgatattca

SEQ ID NO: 38140 - DNA, 25 bp, Artificial
  Probe
ctcttgaatgtccatgaaccactgt

SEQ ID NO: 38141 - DNA, 25 bp, Artificial
  Probe
tacagcatcagacccttaaatgagt

SEQ ID NO: 38142 - DNA, 25 bp, Artificial
  Probe
attgtttcctcttgaatgtccatga

SEQ ID NO: 38143 - DNA, 25 bp, Artificial
  Probe
tattgtttcctcttgaatgtccatg

SEQ ID NO: 38144 - DNA, 25 bp, Artificial
  Probe
ttcctcttgaatgtccatgaaccac

SEQ ID NO: 38145 - DNA, 25 bp, Artificial
  Probe
ttgtttcctcttgaatgtccatgaa

SEQ ID NO: 38146 - DNA, 25 bp, Artificial
  Probe
atctctattgtttcctcttgaatgt

SEQ ID NO: 38147 - DNA, 25 bp, Artificial
  Probe
aaacactccactcctgtagaagaaa

SEQ ID NO: 38148 - DNA, 25 bp, Artificial
  Probe
gtacagcatcagacccttaaatgag

SEQ ID NO: 38149 - DNA, 25 bp, Artificial
  Probe
tgtttcctcttgaatgtccatgaac

SEQ ID NO: 38150 - DNA, 25 bp, Artificial
  Probe
ccattcgttactttgaattaactgc

SEQ ID NO: 38151 - DNA, 25 bp, Artificial
  Probe
ctttgaattaactgcactccttgat

SEQ ID NO: 38152 - DNA, 25 bp, Artificial
  Probe
tactttgaattaactgcactccttg

SEQ ID NO: 38153 - DNA, 25 bp, Artificial
  Probe
cctcttgaatgtccatgaaccactg

SEQ ID NO: 38154 - DNA, 25 bp, Artificial
  Probe
tggtccattcgttactttgaattaa

SEQ ID NO: 38155 - DNA, 25 bp, Artificial
  Probe
actttgaattaactgcactccttga

SEQ ID NO: 38156 - DNA, 25 bp, Artificial
  Probe
gtttcctcttgaatgtccatgaacc

SEQ ID NO: 38157 - DNA, 25 bp, Artificial
  Probe
ggtccattcgttactttgaattaac

SEQ ID NO: 38158 - DNA, 25 bp, Artificial
  Probe
tcctcttgaatgtccatgaaccact

SEQ ID NO: 38159 - DNA, 25 bp, Artificial
  Probe
ttactttgaattaactgcactcctt

SEQ ID NO: 38160 - DNA, 25 bp, Artificial
  Probe
gaattaactgcactccttgatattc

SEQ ID NO: 38161 - DNA, 25 bp, Artificial
  Probe
atatcacaccctgccaatgaatctc

SEQ ID NO: 38162 - DNA, 25 bp, Artificial
  Probe
tttgaattaactgcactccttgata

SEQ ID NO: 38163 - DNA, 25 bp, Artificial
  Probe
tttcctcttgaatgtccatgaacca

SEQ ID NO: 38164 - DNA, 25 bp, Artificial
  Probe
gatctctattgtttcctcttgaatg

SEQ ID NO: 38165 - DNA, 25 bp, Artificial
  Probe
aatctcagttcttacctagaggaac

SEQ ID NO: 38166 - DNA, 25 bp, Artificial
  Probe
ttgtatattgcggatgtgttcattg

SEQ ID NO: 38167 - DNA, 25 bp, Artificial
  Probe
tgtatattgcggatgtgttcattga

SEQ ID NO: 38168 - DNA, 25 bp, Artificial
  Probe
gtatattgcggatgtgttcattgaa

SEQ ID NO: 38169 - DNA, 25 bp, Artificial
  Probe
tatattgcggatgtgttcattgaag

SEQ ID NO: 38170 - DNA, 25 bp, Artificial
  Probe
ctaacgtgtcagaatccttaatcct

SEQ ID NO: 38171 - DNA, 25 bp, Artificial
  Probe
taacgtgtcagaatccttaatcctt

SEQ ID NO: 38172 - DNA, 25 bp, Artificial
  Probe
atgctaacgtgtcagaatccttaat

SEQ ID NO: 38173 - DNA, 25 bp, Artificial
  Probe
cgtgtcagaatccttaatcctttac

SEQ ID NO: 38174 - DNA, 25 bp, Artificial
  Probe
tgctaacgtgtcagaatccttaatc

SEQ ID NO: 38175 - DNA, 25 bp, Artificial
  Probe
tgtttggcacttgtatttaattccc

SEQ ID NO: 38176 - DNA, 25 bp, Artificial
  Probe
gatgctaacgtgtcagaatccttaa

SEQ ID NO: 38177 - DNA, 25 bp, Artificial
  Probe
catttgtatattgcggatgtgttca

SEQ ID NO: 38178 - DNA, 25 bp, Artificial
  Probe
tttgtatattgcggatgtgttcatt

SEQ ID NO: 38179 - DNA, 25 bp, Artificial
  Probe
aatctctgtttggcacttgtattta

SEQ ID NO: 38180 - DNA, 25 bp, Artificial
  Probe
atttgtatattgcggatgtgttcat

SEQ ID NO: 38181 - DNA, 25 bp, Artificial
  Probe
ctgtttggcacttgtatttaattcc

SEQ ID NO: 38182 - DNA, 25 bp, Artificial
  Probe
tctctgtttggcacttgtatttaat

SEQ ID NO: 38183 - DNA, 25 bp, Artificial
  Probe
atctctgtttggcacttgtatttaa

SEQ ID NO: 38184 - DNA, 25 bp, Artificial
  Probe
atattgcggatgtgttcattgaagc

SEQ ID NO: 38185 - DNA, 25 bp, Artificial
  Probe
caatctctgtttggcacttgtattt

SEQ ID NO: 38186 - DNA, 25 bp, Artificial
  Probe
gctaacgtgtcagaatccttaatcc

SEQ ID NO: 38187 - DNA, 25 bp, Artificial
  Probe
tctgtttggcacttgtatttaattc

SEQ ID NO: 38188 - DNA, 25 bp, Artificial
  Probe
ctctgtttggcacttgtatttaatt

SEQ ID NO: 38189 - DNA, 25 bp, Artificial
  Probe
tccttaatcctttacattgaacctt

SEQ ID NO: 38190 - DNA, 25 bp, Artificial
  Probe
atccttaatcctttacattgaacct

SEQ ID NO: 38191 - DNA, 25 bp, Artificial
  Probe
gtgtcagaatccttaatcctttaca

SEQ ID NO: 38192 - DNA, 25 bp, Artificial
  Probe
tttcagtcttgtaatgtgtgcttac

SEQ ID NO: 38193 - DNA, 25 bp, Artificial
  Probe
ccttaatcctttacattgaaccttt

SEQ ID NO: 38194 - DNA, 25 bp, Artificial
  Probe
cggatgtgttcattgaagctattta

SEQ ID NO: 38195 - DNA, 25 bp, Artificial
  Probe
aatccttaatcctttacattgaacc

SEQ ID NO: 38196 - DNA, 25 bp, Artificial
  Probe
acgtgtcagaatccttaatccttta

SEQ ID NO: 38197 - DNA, 25 bp, Artificial
  Probe
aacgtgtcagaatccttaatccttt

SEQ ID NO: 38198 - DNA, 25 bp, Artificial
  Probe
tgtcagaatccttaatcctttacat

SEQ ID NO: 38199 - DNA, 25 bp, Artificial
  Probe
ttaggatctgcaaacatgatgaatt

SEQ ID NO: 38200 - DNA, 25 bp, Artificial
  Probe
aggatctgcaaacatgatgaattat

SEQ ID NO: 38201 - DNA, 25 bp, Artificial
  Probe
ggatctgcaaacatgatgaattatg

SEQ ID NO: 38202 - DNA, 25 bp, Artificial
  Probe
tgcggatgtgttcattgaagctatt

SEQ ID NO: 38203 - DNA, 25 bp, Artificial
  Probe
ttgcggatgtgttcattgaagctat

SEQ ID NO: 38204 - DNA, 25 bp, Artificial
  Probe
attgcggatgtgttcattgaagcta

SEQ ID NO: 38205 - DNA, 25 bp, Artificial
  Probe
tattgcggatgtgttcattgaagct

SEQ ID NO: 38206 - DNA, 25 bp, Artificial
  Probe
cagaatccttaatcctttacattga

SEQ ID NO: 38207 - DNA, 25 bp, Artificial
  Probe
tcagaatccttaatcctttacattg

SEQ ID NO: 38208 - DNA, 25 bp, Artificial
  Probe
gtcagaatccttaatcctttacatt

SEQ ID NO: 38209 - DNA, 25 bp, Artificial
  Probe
taggatctgcaaacatgatgaatta

SEQ ID NO: 38210 - DNA, 25 bp, Artificial
  Probe
ttgtggatgctaacgtgtcagaatc

SEQ ID NO: 38211 - DNA, 25 bp, Artificial
  Probe
gtctgagtgctgactagatgaatag

SEQ ID NO: 38212 - DNA, 25 bp, Artificial
  Probe
ggtctgagtgctgactagatgaata

SEQ ID NO: 38213 - DNA, 25 bp, Artificial
  Probe
gactagatgaatagttgaggcacat

SEQ ID NO: 38214 - DNA, 25 bp, Artificial
  Probe
agtgctgactagatgaatagttgag

SEQ ID NO: 38215 - DNA, 25 bp, Artificial
  Probe
gagtgctgactagatgaatagttga

SEQ ID NO: 38216 - DNA, 25 bp, Artificial
  Probe
tgagtgctgactagatgaatagttg

SEQ ID NO: 38217 - DNA, 25 bp, Artificial
  Probe
ctgagtgctgactagatgaatagtt

SEQ ID NO: 38218 - DNA, 25 bp, Artificial
  Probe
tctgagtgctgactagatgaatagt

SEQ ID NO: 38219 - DNA, 25 bp, Artificial
  Probe
ctgactagatgaatagttgaggcac

SEQ ID NO: 38220 - DNA, 25 bp, Artificial
  Probe
gtgctgactagatgaatagttgagg

SEQ ID NO: 38221 - DNA, 25 bp, Artificial
  Probe
agttaatgtgggttgtaaatgttcc

SEQ ID NO: 38222 - DNA, 25 bp, Artificial
  Probe
tgactagatgaatagttgaggcaca

SEQ ID NO: 38223 - DNA, 25 bp, Artificial
  Probe
gcaagttaatgtgggttgtaaatgt

SEQ ID NO: 38224 - DNA, 25 bp, Artificial
  Probe
gctgaagtacagataggatcttagt

SEQ ID NO: 38225 - DNA, 25 bp, Artificial
  Probe
aagttaatgtgggttgtaaatgttc

SEQ ID NO: 38226 - DNA, 25 bp, Artificial
  Probe
gctgactagatgaatagttgaggca

SEQ ID NO: 38227 - DNA, 25 bp, Artificial
  Probe
tgctgactagatgaatagttgaggc

SEQ ID NO: 38228 - DNA, 25 bp, Artificial
  Probe
caagttaatgtgggttgtaaatgtt

SEQ ID NO: 38229 - DNA, 25 bp, Artificial
  Probe
actagatgaatagttgaggcacatc

SEQ ID NO: 38230 - DNA, 25 bp, Artificial
  Probe
tggtctgagtgctgactagatgaat

SEQ ID NO: 38231 - DNA, 25 bp, Artificial
  Probe
agctgaagtacagataggatcttag

SEQ ID NO: 38232 - DNA, 25 bp, Artificial
  Probe
ctagatgaatagttgaggcacatcc

SEQ ID NO: 38233 - DNA, 25 bp, Artificial
  Probe
tagatgaatagttgaggcacatcct

SEQ ID NO: 38234 - DNA, 25 bp, Artificial
  Probe
aagctgaagtacagataggatctta

SEQ ID NO: 38235 - DNA, 25 bp, Artificial
  Probe
aagtacagataggatcttagtaggt

SEQ ID NO: 38236 - DNA, 25 bp, Artificial
  Probe
ctgcaagttaatgtgggttgtaaat

SEQ ID NO: 38237 - DNA, 25 bp, Artificial
  Probe
tgcaagttaatgtgggttgtaaatg

SEQ ID NO: 38238 - DNA, 25 bp, Artificial
  Probe
tgaaagctgaagtacagataggatc

SEQ ID NO: 38239 - DNA, 25 bp, Artificial
  Probe
gtgaaagctgaagtacagataggat

SEQ ID NO: 38240 - DNA, 25 bp, Artificial
  Probe
cagtcttcaagcatcgtccatgtac

SEQ ID NO: 38241 - DNA, 25 bp, Artificial
  Probe
gtggtctgagtgctgactagatgaa

SEQ ID NO: 38242 - DNA, 25 bp, Artificial
  Probe
gaagtacagataggatcttagtagg

SEQ ID NO: 38243 - DNA, 25 bp, Artificial
  Probe
actgcaagttaatgtgggttgtaaa

SEQ ID NO: 38244 - DNA, 25 bp, Artificial
  Probe
tttgtttactaggagcctgacttcc

SEQ ID NO: 38245 - DNA, 25 bp, Artificial
  Probe
tagagcacctaacattttaacacct

SEQ ID NO: 38246 - DNA, 25 bp, Artificial
  Probe
tcagcaaattctgtttgtcttacac

SEQ ID NO: 38247 - DNA, 25 bp, Artificial
  Probe
ctcagcaaattctgtttgtcttaca

SEQ ID NO: 38248 - DNA, 25 bp, Artificial
  Probe
tctcagcaaattctgtttgtcttac

SEQ ID NO: 38249 - DNA, 25 bp, Artificial
  Probe
ctctcagcaaattctgtttgtctta

SEQ ID NO: 38250 - DNA, 25 bp, Artificial
  Probe
atgtggtctgagtgctgactagatg

SEQ ID NO: 38251 - DNA, 25 bp, Artificial
  Probe
ttaggaccaactgcaagttaatgtg

SEQ ID NO: 38252 - DNA, 25 bp, Artificial
  Probe
gttaggaccaactgcaagttaatgt

SEQ ID NO: 38253 - DNA, 25 bp, Artificial
  Probe
taaatgttccccagtctgtttcttc

SEQ ID NO: 38254 - DNA, 25 bp, Artificial
  Probe
agagcacctaacattttaacacctg

SEQ ID NO: 38255 - DNA, 25 bp, Artificial
  Probe
agtacagataggatcttagtaggta

SEQ ID NO: 38256 - DNA, 25 bp, Artificial
  Probe
gtgactatgattcctaagacttcca

SEQ ID NO: 38257 - DNA, 25 bp, Artificial
  Probe
tgtgactatgattcctaagacttcc

SEQ ID NO: 38258 - DNA, 25 bp, Artificial
  Probe
tgactatgattcctaagacttccag

SEQ ID NO: 38259 - DNA, 25 bp, Artificial
  Probe
tgtgtgactatgattcctaagactt

SEQ ID NO: 38260 - DNA, 25 bp, Artificial
  Probe
aactcctattagcaccttactatgt

SEQ ID NO: 38261 - DNA, 25 bp, Artificial
  Probe
gtgtgactatgattcctaagacttc

SEQ ID NO: 38262 - DNA, 25 bp, Artificial
  Probe
actcctattagcaccttactatgta

SEQ ID NO: 38263 - DNA, 25 bp, Artificial
  Probe
gactatgattcctaagacttccagg

SEQ ID NO: 38264 - DNA, 25 bp, Artificial
  Probe
taactcctattagcaccttactatg

SEQ ID NO: 38265 - DNA, 25 bp, Artificial
  Probe
ttctaccaaagttcactctcacaat

SEQ ID NO: 38266 - DNA, 25 bp, Artificial
  Probe
tctaccaaagttcactctcacaatg

SEQ ID NO: 38267 - DNA, 25 bp, Artificial
  Probe
tttcttctaccaaagttcactctca

SEQ ID NO: 38268 - DNA, 25 bp, Artificial
  Probe
ttcttctaccaaagttcactctcac

SEQ ID NO: 38269 - DNA, 25 bp, Artificial
  Probe
cttctaccaaagttcactctcacaa

SEQ ID NO: 38270 - DNA, 25 bp, Artificial
  Probe
ctaccaaagttcactctcacaatga

SEQ ID NO: 38271 - DNA, 25 bp, Artificial
  Probe
tcttctaccaaagttcactctcaca

SEQ ID NO: 38272 - DNA, 25 bp, Artificial
  Probe
gcaaatgtgatgtgatattcttgtt

SEQ ID NO: 38273 - DNA, 25 bp, Artificial
  Probe
tactacctcaggtgtcctatagatt

SEQ ID NO: 38274 - DNA, 25 bp, Artificial
  Probe
ctcctattagcaccttactatgtaa

SEQ ID NO: 38275 - DNA, 25 bp, Artificial
  Probe
ctaactcctattagcaccttactat

SEQ ID NO: 38276 - DNA, 25 bp, Artificial
  Probe
actatgattcctaagacttccaggg

SEQ ID NO: 38277 - DNA, 25 bp, Artificial
  Probe
tcactctcacaatgaaattctatgt

SEQ ID NO: 38278 - DNA, 25 bp, Artificial
  Probe
cgatgcaaatgtgatgtgatattct

SEQ ID NO: 38279 - DNA, 25 bp, Artificial
  Probe
tcgatgcaaatgtgatgtgatattc

SEQ ID NO: 38280 - DNA, 25 bp, Artificial
  Probe
ttcgatgcaaatgtgatgtgatatt

SEQ ID NO: 38281 - DNA, 25 bp, Artificial
  Probe
tttcgatgcaaatgtgatgtgatat

SEQ ID NO: 38282 - DNA, 25 bp, Artificial
  Probe
ataacgtctactgctgtttattcca

SEQ ID NO: 38283 - DNA, 25 bp, Artificial
  Probe
tttggcttaaatgtatcctttgtta

SEQ ID NO: 38284 - DNA, 25 bp, Artificial
  Probe
atttggcttaaatgtatcctttgtt

SEQ ID NO: 38285 - DNA, 25 bp, Artificial
  Probe
aatttggcttaaatgtatcctttgt

SEQ ID NO: 38286 - DNA, 25 bp, Artificial
  Probe
gttgtaaataacgtctactgctgtt

SEQ ID NO: 38287 - DNA, 25 bp, Artificial
  Probe
tgcaaatgtgatgtgatattcttgt

SEQ ID NO: 38288 - DNA, 25 bp, Artificial
  Probe
agttgtaaataacgtctactgctgt

SEQ ID NO: 38289 - DNA, 25 bp, Artificial
  Probe
tggtactcaagttgtaaataacgtc

SEQ ID NO: 38290 - DNA, 25 bp, Artificial
  Probe
ttgtaaataacgtctactgctgttt

SEQ ID NO: 38291 - DNA, 25 bp, Artificial
  Probe
aagttgtaaataacgtctactgctg

SEQ ID NO: 38292 - DNA, 25 bp, Artificial
  Probe
caagttgtaaataacgtctactgct

SEQ ID NO: 38293 - DNA, 25 bp, Artificial
  Probe
tcaagttgtaaataacgtctactgc

SEQ ID NO: 38294 - DNA, 25 bp, Artificial
  Probe
ggtactcaagttgtaaataacgtct

SEQ ID NO: 38295 - DNA, 25 bp, Artificial
  Probe
tggcttaaatgtatcctttgttatt

SEQ ID NO: 38296 - DNA, 25 bp, Artificial
  Probe
ttggcttaaatgtatcctttgttat

SEQ ID NO: 38297 - DNA, 25 bp, Artificial
  Probe
gatgcaaatgtgatgtgatattctt

SEQ ID NO: 38298 - DNA, 25 bp, Artificial
  Probe
atgcaaatgtgatgtgatattcttg

SEQ ID NO: 38299 - DNA, 25 bp, Artificial
  Probe
taacgtctactgctgtttattccag

SEQ ID NO: 38300 - DNA, 25 bp, Artificial
  Probe
ctggtaattgtgctgttttgttttc

SEQ ID NO: 38301 - DNA, 25 bp, Artificial
  Probe
tttatatagctgaagaggtcaacag

SEQ ID NO: 38302 - DNA, 25 bp, Artificial
  Probe
ttttatatagctgaagaggtcaaca

SEQ ID NO: 38303 - DNA, 25 bp, Artificial
  Probe
ccagcctctcacgttacttcagaag

SEQ ID NO: 38304 - DNA, 25 bp, Artificial
  Probe
aaagccacctctctatccaaagcta

SEQ ID NO: 38305 - DNA, 25 bp, Artificial
  Probe
aagccacctctctatccaaagctag

SEQ ID NO: 38306 - DNA, 25 bp, Artificial
  Probe
cagcctctcacgttacttcagaagg

SEQ ID NO: 38307 - DNA, 25 bp, Artificial
  Probe
tttccagcctctcacgttacttcag

SEQ ID NO: 38308 - DNA, 25 bp, Artificial
  Probe
ctttccagcctctcacgttacttca

SEQ ID NO: 38309 - DNA, 25 bp, Artificial
  Probe
gatccaacttgtgcaagcctttgtc

SEQ ID NO: 38310 - DNA, 25 bp, Artificial
  Probe
caaagccacctctctatccaaagct

SEQ ID NO: 38311 - DNA, 25 bp, Artificial
  Probe
ctctcacgttacttcagaaggggag

SEQ ID NO: 38312 - DNA, 25 bp, Artificial
  Probe
tcccttagcaagccaaattagaatt

SEQ ID NO: 38313 - DNA, 25 bp, Artificial
  Probe
ttcccttagcaagccaaattagaat

SEQ ID NO: 38314 - DNA, 25 bp, Artificial
  Probe
attcccttagcaagccaaattagaa

SEQ ID NO: 38315 - DNA, 25 bp, Artificial
  Probe
cccttagcaagccaaattagaattg

SEQ ID NO: 38316 - DNA, 25 bp, Artificial
  Probe
aactcttacactttgaaactcactg

SEQ ID NO: 38317 - DNA, 25 bp, Artificial
  Probe
ttaacatttatactcgcctcggact

SEQ ID NO: 38318 - DNA, 25 bp, Artificial
  Probe
cattcccttagcaagccaaattaga

SEQ ID NO: 38319 - DNA, 25 bp, Artificial
  Probe
tcattcccttagcaagccaaattag

SEQ ID NO: 38320 - DNA, 25 bp, Artificial
  Probe
ctcattcccttagcaagccaaatta

SEQ ID NO: 38321 - DNA, 25 bp, Artificial
  Probe
actcttacactttgaaactcactgt

SEQ ID NO: 38322 - DNA, 25 bp, Artificial
  Probe
aaactcttacactttgaaactcact

SEQ ID NO: 38323 - DNA, 25 bp, Artificial
  Probe
tgaaactcttacactttgaaactca

SEQ ID NO: 38324 - DNA, 25 bp, Artificial
  Probe
ttatactcgcctcggactgtagaac

SEQ ID NO: 38325 - DNA, 25 bp, Artificial
  Probe
gaaactcttacactttgaaactcac

SEQ ID NO: 38326 - DNA, 25 bp, Artificial
  Probe
taacatttatactcgcctcggactg

SEQ ID NO: 38327 - DNA, 25 bp, Artificial
  Probe
ctcttacactttgaaactcactgtg

SEQ ID NO: 38328 - DNA, 25 bp, Artificial
  Probe
atgaaactcttacactttgaaactc

SEQ ID NO: 38329 - DNA, 25 bp, Artificial
  Probe
ataactcattcccttagcaagccaa

SEQ ID NO: 38330 - DNA, 25 bp, Artificial
  Probe
taactcattcccttagcaagccaaa

SEQ ID NO: 38331 - DNA, 25 bp, Artificial
  Probe
atttatactcgcctcggactgtaga

SEQ ID NO: 38332 - DNA, 25 bp, Artificial
  Probe
catttatactcgcctcggactgtag

SEQ ID NO: 38333 - DNA, 25 bp, Artificial
  Probe
agccataactcattcccttagcaag

SEQ ID NO: 38334 - DNA, 25 bp, Artificial
  Probe
cagccataactcattcccttagcaa

SEQ ID NO: 38335 - DNA, 25 bp, Artificial
  Probe
tttatactcgcctcggactgtagaa

SEQ ID NO: 38336 - DNA, 25 bp, Artificial
  Probe
cataactcattcccttagcaagcca

SEQ ID NO: 38337 - DNA, 25 bp, Artificial
  Probe
gaattgccttctgtaaacagtgttg

SEQ ID NO: 38338 - DNA, 25 bp, Artificial
  Probe
aactcattcccttagcaagccaaat

SEQ ID NO: 38339 - DNA, 25 bp, Artificial
  Probe
ctgttaagagttagcccagccataa

SEQ ID NO: 38340 - DNA, 25 bp, Artificial
  Probe
actcattcccttagcaagccaaatt

SEQ ID NO: 38341 - DNA, 25 bp, Artificial
  Probe
gccaaattagaattgccttctgtaa

SEQ ID NO: 38342 - DNA, 25 bp, Artificial
  Probe
agccaaattagaattgccttctgta

SEQ ID NO: 38343 - DNA, 25 bp, Artificial
  Probe
caagccaaattagaattgccttctg

SEQ ID NO: 38344 - DNA, 25 bp, Artificial
  Probe
tatgaaactcttacactttgaaact

SEQ ID NO: 38345 - DNA, 25 bp, Artificial
  Probe
aagccaaattagaattgccttctgt

SEQ ID NO: 38346 - DNA, 25 bp, Artificial
  Probe
aattgccttctgtaaacagtgttgg

SEQ ID NO: 38347 - DNA, 25 bp, Artificial
  Probe
tgttaagagttagcccagccataac

SEQ ID NO: 38348 - DNA, 25 bp, Artificial
  Probe
ccataactcattcccttagcaagcc

SEQ ID NO: 38349 - DNA, 25 bp, Artificial
  Probe
tagaattgccttctgtaaacagtgt

SEQ ID NO: 38350 - DNA, 25 bp, Artificial
  Probe
ttagaattgccttctgtaaacagtg

SEQ ID NO: 38351 - DNA, 25 bp, Artificial
  Probe
tctgttaagagttagcccagccata

SEQ ID NO: 38352 - DNA, 25 bp, Artificial
  Probe
acatttatactcgcctcggactgta

SEQ ID NO: 38353 - DNA, 25 bp, Artificial
  Probe
agaattgccttctgtaaacagtgtt

SEQ ID NO: 38354 - DNA, 25 bp, Artificial
  Probe
attagaattgccttctgtaaacagt

SEQ ID NO: 38355 - DNA, 25 bp, Artificial
  Probe
ccaaattagaattgccttctgtaaa

SEQ ID NO: 38356 - DNA, 25 bp, Artificial
  Probe
gttaacatttatactcgcctcggac

SEQ ID NO: 38357 - DNA, 25 bp, Artificial
  Probe
taaatgagtttgtgctttccttgag

SEQ ID NO: 38358 - DNA, 25 bp, Artificial
  Probe
ttcacggataggttaaatagagagc

SEQ ID NO: 38359 - DNA, 25 bp, Artificial
  Probe
ttaaatgagtttgtgctttccttga

SEQ ID NO: 38360 - DNA, 25 bp, Artificial
  Probe
gggttggtggaattactctttattg

SEQ ID NO: 38361 - DNA, 25 bp, Artificial
  Probe
tgggttggtggaattactctttatt

SEQ ID NO: 38362 - DNA, 25 bp, Artificial
  Probe
gtgggttggtggaattactctttat

SEQ ID NO: 38363 - DNA, 25 bp, Artificial
  Probe
ggttggtggaattactctttattga

SEQ ID NO: 38364 - DNA, 25 bp, Artificial
  Probe
aaatgagtttgtgctttccttgaga

SEQ ID NO: 38365 - DNA, 25 bp, Artificial
  Probe
attaaatgagtttgtgctttccttg

SEQ ID NO: 38366 - DNA, 25 bp, Artificial
  Probe
cagagtttcacggataggttaaata

SEQ ID NO: 38367 - DNA, 25 bp, Artificial
  Probe
gtttcacggataggttaaatagaga

SEQ ID NO: 38368 - DNA, 25 bp, Artificial
  Probe
agtttcacggataggttaaatagag

SEQ ID NO: 38369 - DNA, 25 bp, Artificial
  Probe
gagtttcacggataggttaaataga

SEQ ID NO: 38370 - DNA, 25 bp, Artificial
  Probe
agagtttcacggataggttaaatag

SEQ ID NO: 38371 - DNA, 25 bp, Artificial
  Probe
gttggtggaattactctttattgac

SEQ ID NO: 38372 - DNA, 25 bp, Artificial
  Probe
tgtgggttggtggaattactcttta

SEQ ID NO: 38373 - DNA, 25 bp, Artificial
  Probe
ttggtggaattactctttattgact

SEQ ID NO: 38374 - DNA, 25 bp, Artificial
  Probe
aattaaatgagtttgtgctttcctt

SEQ ID NO: 38375 - DNA, 25 bp, Artificial
  Probe
aaattaaatgagtttgtgctttcct

SEQ ID NO: 38376 - DNA, 25 bp, Artificial
  Probe
aaggctttaactggctctataaatt

SEQ ID NO: 38377 - DNA, 25 bp, Artificial
  Probe
tttcacggataggttaaatagagag

SEQ ID NO: 38378 - DNA, 25 bp, Artificial
  Probe
cacggataggttaaatagagagctt

SEQ ID NO: 38379 - DNA, 25 bp, Artificial
  Probe
ttaaggctttaactggctctataaa

SEQ ID NO: 38380 - DNA, 25 bp, Artificial
  Probe
tttaaggctttaactggctctataa

SEQ ID NO: 38381 - DNA, 25 bp, Artificial
  Probe
tcacggataggttaaatagagagct

SEQ ID NO: 38382 - DNA, 25 bp, Artificial
  Probe
acggataggttaaatagagagcttt

SEQ ID NO: 38383 - DNA, 25 bp, Artificial
  Probe
taaggctttaactggctctataaat

SEQ ID NO: 38384 - DNA, 25 bp, Artificial
  Probe
cggataggttaaatagagagctttc

SEQ ID NO: 38385 - DNA, 25 bp, Artificial
  Probe
aggctttaactggctctataaatta

SEQ ID NO: 38386 - DNA, 25 bp, Artificial
  Probe
tggtggaattactctttattgacta

SEQ ID NO: 38387 - DNA, 25 bp, Artificial
  Probe
ctgtgggttggtggaattactcttt

SEQ ID NO: 38388 - DNA, 25 bp, Artificial
  Probe
ggctttaactggctctataaattaa

SEQ ID NO: 38389 - DNA, 25 bp, Artificial
  Probe
ggtggaattactctttattgactag

SEQ ID NO: 38390 - DNA, 25 bp, Artificial
  Probe
taaattaaatgagtttgtgctttcc

SEQ ID NO: 38391 - DNA, 25 bp, Artificial
  Probe
ggaagcagtgtgtagaaagaaaatg

SEQ ID NO: 38392 - DNA, 25 bp, Artificial
  Probe
ggataggttaaatagagagctttct

SEQ ID NO: 38393 - DNA, 25 bp, Artificial
  Probe
ctgtagctttaggacactcaggaaa

SEQ ID NO: 38394 - DNA, 25 bp, Artificial
  Probe
gggaagcagtgtgtagaaagaaaat

SEQ ID NO: 38395 - DNA, 25 bp, Artificial
  Probe
tgtgtagaaagaaaatgcccttgag

SEQ ID NO: 38396 - DNA, 25 bp, Artificial
  Probe
gtgtgtagaaagaaaatgcccttga

SEQ ID NO: 38397 - DNA, 25 bp, Artificial
  Probe
agtgtgtagaaagaaaatgcccttg

SEQ ID NO: 38398 - DNA, 25 bp, Artificial
  Probe
cagtgtgtagaaagaaaatgccctt

SEQ ID NO: 38399 - DNA, 25 bp, Artificial
  Probe
tctgtagctttaggacactcaggaa

SEQ ID NO: 38400 - DNA, 25 bp, Artificial
  Probe
agggaagcagtgtgtagaaagaaaa

SEQ ID NO: 38401 - DNA, 25 bp, Artificial
  Probe
gtgtagaaagaaaatgcccttgagg

SEQ ID NO: 38402 - DNA, 25 bp, Artificial
  Probe
ctcttgtaatgtctctgctcttctc

SEQ ID NO: 38403 - DNA, 25 bp, Artificial
  Probe
cttgtaatgtctctgctcttctcac

SEQ ID NO: 38404 - DNA, 25 bp, Artificial
  Probe
tcttgtaatgtctctgctcttctca

SEQ ID NO: 38405 - DNA, 25 bp, Artificial
  Probe
cctcttgtaatgtctctgctcttct

SEQ ID NO: 38406 - DNA, 25 bp, Artificial
  Probe
taatgtctctgctcttctcaccatc

SEQ ID NO: 38407 - DNA, 25 bp, Artificial
  Probe
caatcacacattctaggacaccaac

SEQ ID NO: 38408 - DNA, 25 bp, Artificial
  Probe
aatcacacattctaggacaccaact

SEQ ID NO: 38409 - DNA, 25 bp, Artificial
  Probe
gtaatgtctctgctcttctcaccat

SEQ ID NO: 38410 - DNA, 25 bp, Artificial
  Probe
ttgtaatgtctctgctcttctcacc

SEQ ID NO: 38411 - DNA, 25 bp, Artificial
  Probe
atcacacattctaggacaccaactc

SEQ ID NO: 38412 - DNA, 25 bp, Artificial
  Probe
atgtctctgctcttctcaccatcta

SEQ ID NO: 38413 - DNA, 25 bp, Artificial
  Probe
cacacattctaggacaccaactctt

SEQ ID NO: 38414 - DNA, 25 bp, Artificial
  Probe
atccatagaagatgtaaactgctcc

SEQ ID NO: 38415 - DNA, 25 bp, Artificial
  Probe
cagtagacaattatgggctagatga

SEQ ID NO: 38416 - DNA, 25 bp, Artificial
  Probe
catctagtggctcaggatatttagg

SEQ ID NO: 38417 - DNA, 25 bp, Artificial
  Probe
tgtaatgtctctgctcttctcacca

SEQ ID NO: 38418 - DNA, 25 bp, Artificial
  Probe
gcagtagacaattatgggctagatg

SEQ ID NO: 38419 - DNA, 25 bp, Artificial
  Probe
gtctctgctcttctcaccatctagt

SEQ ID NO: 38420 - DNA, 25 bp, Artificial
  Probe
tgtctctgctcttctcaccatctag

SEQ ID NO: 38421 - DNA, 25 bp, Artificial
  Probe
agtagacaattatgggctagatgat

SEQ ID NO: 38422 - DNA, 25 bp, Artificial
  Probe
aatgtctctgctcttctcaccatct

SEQ ID NO: 38423 - DNA, 25 bp, Artificial
  Probe
tcacacattctaggacaccaactct

SEQ ID NO: 38424 - DNA, 25 bp, Artificial
  Probe
atctagtggctcaggatatttaggc

SEQ ID NO: 38425 - DNA, 25 bp, Artificial
  Probe
gcaatcacacattctaggacaccaa

SEQ ID NO: 38426 - DNA, 25 bp, Artificial
  Probe
tccatagaagatgtaaactgctccc

SEQ ID NO: 38427 - DNA, 25 bp, Artificial
  Probe
gtatccatagaagatgtaaactgct

SEQ ID NO: 38428 - DNA, 25 bp, Artificial
  Probe
atcagtctgtccctcttgtaatgtc

SEQ ID NO: 38429 - DNA, 25 bp, Artificial
  Probe
gccaattacttgaagtatccataga

SEQ ID NO: 38430 - DNA, 25 bp, Artificial
  Probe
ttcacgcaatcacacattctaggac

SEQ ID NO: 38431 - DNA, 25 bp, Artificial
  Probe
gtagacaattatgggctagatgatt

SEQ ID NO: 38432 - DNA, 25 bp, Artificial
  Probe
acacattctaggacaccaactcttt

SEQ ID NO: 38433 - DNA, 25 bp, Artificial
  Probe
aaataaggctaaccatttcagagag

SEQ ID NO: 38434 - DNA, 25 bp, Artificial
  Probe
tatccatagaagatgtaaactgctc

SEQ ID NO: 38435 - DNA, 25 bp, Artificial
  Probe
gactagtggttaacagagctaagaa

SEQ ID NO: 38436 - DNA, 25 bp, Artificial
  Probe
agactagtggttaacagagctaaga

SEQ ID NO: 38437 - DNA, 25 bp, Artificial
  Probe
gtctgtccctcttgtaatgtctctg

SEQ ID NO: 38438 - DNA, 25 bp, Artificial
  Probe
agtatccatagaagatgtaaactgc

SEQ ID NO: 38439 - DNA, 25 bp, Artificial
  Probe
tcaccatctagtggctcaggatatt

SEQ ID NO: 38440 - DNA, 25 bp, Artificial
  Probe
catcagtctgtccctcttgtaatgt

SEQ ID NO: 38441 - DNA, 25 bp, Artificial
  Probe
agtctgtccctcttgtaatgtctct

SEQ ID NO: 38442 - DNA, 25 bp, Artificial
  Probe
tagactagtggttaacagagctaag

SEQ ID NO: 38443 - DNA, 25 bp, Artificial
  Probe
cagtctgtccctcttgtaatgtctc

SEQ ID NO: 38444 - DNA, 25 bp, Artificial
  Probe
tctctgctcttctcaccatctagtg

SEQ ID NO: 38445 - DNA, 25 bp, Artificial
  Probe
ccctcttgtaatgtctctgctcttc

SEQ ID NO: 38446 - DNA, 25 bp, Artificial
  Probe
ccatctagtggctcaggatatttag

SEQ ID NO: 38447 - DNA, 25 bp, Artificial
  Probe
cagataaattgaagagggacttgga

SEQ ID NO: 38448 - DNA, 25 bp, Artificial
  Probe
agataaattgaagagggacttggaa

SEQ ID NO: 38449 - DNA, 25 bp, Artificial
  Probe
accagataaattgaagagggacttg

SEQ ID NO: 38450 - DNA, 25 bp, Artificial
  Probe
ggaatgagtagagaaattgggcttt

SEQ ID NO: 38451 - DNA, 25 bp, Artificial
  Probe
ataccagataaattgaagagggact

SEQ ID NO: 38452 - DNA, 25 bp, Artificial
  Probe
taccagataaattgaagagggactt

SEQ ID NO: 38453 - DNA, 25 bp, Artificial
  Probe
gataaattgaagagggacttggaaa

SEQ ID NO: 38454 - DNA, 25 bp, Artificial
  Probe
aataccagataaattgaagagggac

SEQ ID NO: 38455 - DNA, 25 bp, Artificial
  Probe
tttgaagagaaacatagaagagact

SEQ ID NO: 38456 - DNA, 25 bp, Artificial
  Probe
aaataccagataaattgaagaggga

SEQ ID NO: 38457 - DNA, 25 bp, Artificial
  Probe
ccagataaattgaagagggacttgg

SEQ ID NO: 38458 - DNA, 25 bp, Artificial
  Probe
cggaatgagtagagaaattgggctt

SEQ ID NO: 38459 - DNA, 25 bp, Artificial
  Probe
tataaattcagcattggctcagaga

SEQ ID NO: 38460 - DNA, 25 bp, Artificial
  Probe
ctataaattcagcattggctcagag

SEQ ID NO: 38461 - DNA, 25 bp, Artificial
  Probe
agttctacttcagtttgataaagct

SEQ ID NO: 38462 - DNA, 25 bp, Artificial
  Probe
ataaattcagcattggctcagagag

SEQ ID NO: 38463 - DNA, 25 bp, Artificial
  Probe
gaatgagtagagaaattgggctttt

SEQ ID NO: 38464 - DNA, 25 bp, Artificial
  Probe
gctataaattcagcattggctcaga

SEQ ID NO: 38465 - DNA, 25 bp, Artificial
  Probe
cccttcaagttctacttcagtttga

SEQ ID NO: 38466 - DNA, 25 bp, Artificial
  Probe
taaattgaagagggacttggaaaag

SEQ ID NO: 38467 - DNA, 25 bp, Artificial
  Probe
ccttcaagttctacttcagtttgat

SEQ ID NO: 38468 - DNA, 25 bp, Artificial
  Probe
cacggaatgagtagagaaattgggc

SEQ ID NO: 38469 - DNA, 25 bp, Artificial
  Probe
aaagctataaattcagcattggctc

SEQ ID NO: 38470 - DNA, 25 bp, Artificial
  Probe
acggaatgagtagagaaattgggct

SEQ ID NO: 38471 - DNA, 25 bp, Artificial
  Probe
ataaattgaagagggacttggaaaa

SEQ ID NO: 38472 - DNA, 25 bp, Artificial
  Probe
taaagctataaattcagcattggct

SEQ ID NO: 38473 - DNA, 25 bp, Artificial
  Probe
taaattcagcattggctcagagagt

SEQ ID NO: 38474 - DNA, 25 bp, Artificial
  Probe
aagctataaattcagcattggctca

SEQ ID NO: 38475 - DNA, 25 bp, Artificial
  Probe
tttattctcacggtgcagaaataac

SEQ ID NO: 38476 - DNA, 25 bp, Artificial
  Probe
agctataaattcagcattggctcag

SEQ ID NO: 38477 - DNA, 25 bp, Artificial
  Probe
tattctcacggtgcagaaataacaa

SEQ ID NO: 38478 - DNA, 25 bp, Artificial
  Probe
ttattctcacggtgcagaaataaca

SEQ ID NO: 38479 - DNA, 25 bp, Artificial
  Probe
atttattctcacggtgcagaaataa

SEQ ID NO: 38480 - DNA, 25 bp, Artificial
  Probe
ttatttattctcacggtgcagaaat

SEQ ID NO: 38481 - DNA, 25 bp, Artificial
  Probe
ccacggaatgagtagagaaattggg

SEQ ID NO: 38482 - DNA, 25 bp, Artificial
  Probe
gcccttcaagttctacttcagtttg

SEQ ID NO: 38483 - DNA, 25 bp, Artificial
  Probe
ataaagctataaattcagcattggc

SEQ ID NO: 38484 - DNA, 25 bp, Artificial
  Probe
gttctacttcagtttgataaagcta

SEQ ID NO: 38485 - DNA, 25 bp, Artificial
  Probe
agagagaagcatgtgactctgttct

SEQ ID NO: 38486 - DNA, 25 bp, Artificial
  Probe
tgcccttcaagttctacttcagttt

SEQ ID NO: 38487 - DNA, 25 bp, Artificial
  Probe
ttgcccttcaagttctacttcagtt

SEQ ID NO: 38488 - DNA, 25 bp, Artificial
  Probe
tatttattctcacggtgcagaaata

SEQ ID NO: 38489 - DNA, 25 bp, Artificial
  Probe
aagttctacttcagtttgataaagc

SEQ ID NO: 38490 - DNA, 25 bp, Artificial
  Probe
ccaccttctattattttcatcactt

SEQ ID NO: 38491 - DNA, 25 bp, Artificial
  Probe
aattcagcattggctcagagagtca

SEQ ID NO: 38492 - DNA, 25 bp, Artificial
  Probe
caggactgaataaagtgtatttgcc

SEQ ID NO: 38493 - DNA, 25 bp, Artificial
  Probe
ccaggactgaataaagtgtatttgc

SEQ ID NO: 38494 - DNA, 25 bp, Artificial
  Probe
gccaggactgaataaagtgtatttg

SEQ ID NO: 38495 - DNA, 25 bp, Artificial
  Probe
atgccaggactgaataaagtgtatt

SEQ ID NO: 38496 - DNA, 25 bp, Artificial
  Probe
tgccaggactgaataaagtgtattt

SEQ ID NO: 38497 - DNA, 25 bp, Artificial
  Probe
gatgccaggactgaataaagtgtat

SEQ ID NO: 38498 - DNA, 25 bp, Artificial
  Probe
aggactgaataaagtgtatttgccc

SEQ ID NO: 38499 - DNA, 25 bp, Artificial
  Probe
tgatgccaggactgaataaagtgta

SEQ ID NO: 38500 - DNA, 25 bp, Artificial
  Probe
ctgtctgtggtctttggagaactag

SEQ ID NO: 38501 - DNA, 25 bp, Artificial
  Probe
aacgtcatgtgagtgaagagatgtc

SEQ ID NO: 38502 - DNA, 25 bp, Artificial
  Probe
actgtctgtggtctttggagaacta

SEQ ID NO: 38503 - DNA, 25 bp, Artificial
  Probe
tctgatgccaggactgaataaagtg

SEQ ID NO: 38504 - DNA, 25 bp, Artificial
  Probe
gtctgatgccaggactgaataaagt

SEQ ID NO: 38505 - DNA, 25 bp, Artificial
  Probe
gaagagatgtcactgtctgtggtct

SEQ ID NO: 38506 - DNA, 25 bp, Artificial
  Probe
ctgatgccaggactgaataaagtgt

SEQ ID NO: 38507 - DNA, 25 bp, Artificial
  Probe
tgaagagatgtcactgtctgtggtc

SEQ ID NO: 38508 - DNA, 25 bp, Artificial
  Probe
aagagatgtcactgtctgtggtctt

SEQ ID NO: 38509 - DNA, 25 bp, Artificial
  Probe
tctttctctttctgttttcttcctt

SEQ ID NO: 38510 - DNA, 25 bp, Artificial
  Probe
aaacgtcatgtgagtgaagagatgt

SEQ ID NO: 38511 - DNA, 25 bp, Artificial
  Probe
gagatgtcactgtctgtggtctttg

SEQ ID NO: 38512 - DNA, 25 bp, Artificial
  Probe
acgtcatgtgagtgaagagatgtca

SEQ ID NO: 38513 - DNA, 25 bp, Artificial
  Probe
ctttctctttctgttttcttccttt

SEQ ID NO: 38514 - DNA, 25 bp, Artificial
  Probe
agagatgtcactgtctgtggtcttt

SEQ ID NO: 38515 - DNA, 25 bp, Artificial
  Probe
ggactgaataaagtgtatttgcccc

SEQ ID NO: 38516 - DNA, 25 bp, Artificial
  Probe
tttctctttctgttttcttcctttt

SEQ ID NO: 38517 - DNA, 25 bp, Artificial
  Probe
gactgaataaagtgtatttgccccg

SEQ ID NO: 38518 - DNA, 25 bp, Artificial
  Probe
actgaataaagtgtatttgccccga

SEQ ID NO: 38519 - DNA, 25 bp, Artificial
  Probe
gaaaacgtcatgtgagtgaagagat

SEQ ID NO: 38520 - DNA, 25 bp, Artificial
  Probe
tgtctgtggtctttggagaactagt

SEQ ID NO: 38521 - DNA, 25 bp, Artificial
  Probe
aaaacgtcatgtgagtgaagagatg

SEQ ID NO: 38522 - DNA, 25 bp, Artificial
  Probe
cactgtctgtggtctttggagaact

SEQ ID NO: 38523 - DNA, 25 bp, Artificial
  Probe
tcactgtctgtggtctttggagaac

SEQ ID NO: 38524 - DNA, 25 bp, Artificial
  Probe
gtcactgtctgtggtctttggagaa

SEQ ID NO: 38525 - DNA, 25 bp, Artificial
  Probe
agtctgatgccaggactgaataaag

SEQ ID NO: 38526 - DNA, 25 bp, Artificial
  Probe
atgtcactgtctgtggtctttggag

SEQ ID NO: 38527 - DNA, 25 bp, Artificial
  Probe
gatgtcactgtctgtggtctttgga

SEQ ID NO: 38528 - DNA, 25 bp, Artificial
  Probe
agatgtcactgtctgtggtctttgg

SEQ ID NO: 38529 - DNA, 25 bp, Artificial
  Probe
cgtcatgtgagtgaagagatgtcac

SEQ ID NO: 38530 - DNA, 25 bp, Artificial
  Probe
ggaaaacgtcatgtgagtgaagaga

SEQ ID NO: 38531 - DNA, 25 bp, Artificial
  Probe
gtgaagagatgtcactgtctgtggt

SEQ ID NO: 38532 - DNA, 25 bp, Artificial
  Probe
cggaaaacgtcatgtgagtgaagag

SEQ ID NO: 38533 - DNA, 25 bp, Artificial
  Probe
aaacggaaaacgtcatgtgagtgaa

SEQ ID NO: 38534 - DNA, 25 bp, Artificial
  Probe
aaaacggaaaacgtcatgtgagtga

SEQ ID NO: 38535 - DNA, 25 bp, Artificial
  Probe
aacggaaaacgtcatgtgagtgaag

SEQ ID NO: 38536 - DNA, 25 bp, Artificial
  Probe
acggaaaacgtcatgtgagtgaaga

SEQ ID NO: 38537 - DNA, 25 bp, Artificial
  Probe
tgcttacgaacacagatatgtagaa

SEQ ID NO: 38538 - DNA, 25 bp, Artificial
  Probe
gcttacgaacacagatatgtagaac

SEQ ID NO: 38539 - DNA, 25 bp, Artificial
  Probe
acgaacacagatatgtagaactctt

SEQ ID NO: 38540 - DNA, 25 bp, Artificial
  Probe
gcaacacagatatgtagaactcttc

SEQ ID NO: 38541 - DNA, 25 bp, Artificial
  Probe
cgaacacagatatgtagaactcttc

SEQ ID NO: 38542 - DNA, 25 bp, Artificial
  Probe
tacgaacacagatatgtagaactct

SEQ ID NO: 38543 - DNA, 25 bp, Artificial
  Probe
atgtctagcatgtctagtatgagtg

SEQ ID NO: 38544 - DNA, 25 bp, Artificial
  Probe
gtgcttacgaacacagatatgtaga

SEQ ID NO: 38545 - DNA, 25 bp, Artificial
  Probe
gatgtctagcatgtctagtatgagt

SEQ ID NO: 38546 - DNA, 25 bp, Artificial
  Probe
tacatacattgaacactgttgatgc

SEQ ID NO: 38547 - DNA, 25 bp, Artificial
  Probe
ggtgcttacgaacacagatatgtag

SEQ ID NO: 38548 - DNA, 25 bp, Artificial
  Probe
ttacgaacacagatatgtagaactc

SEQ ID NO: 38549 - DNA, 25 bp, Artificial
  Probe
cttacgaacacagatatgtagaact

SEQ ID NO: 38550 - DNA, 25 bp, Artificial
  Probe
acatacatacattgaacactgttga

SEQ ID NO: 38551 - DNA, 25 bp, Artificial
  Probe
tggtgcttacgaacacagatatgta

SEQ ID NO: 38552 - DNA, 25 bp, Artificial
  Probe
taggatgatagggcaaagttgagta

SEQ ID NO: 38553 - DNA, 25 bp, Artificial
  Probe
ggatgtctagcatgtctagtatgag

SEQ ID NO: 38554 - DNA, 25 bp, Artificial
  Probe
aggatgatagggcaaagttgagtaa

SEQ ID NO: 38555 - DNA, 25 bp, Artificial
  Probe
tgcaacacagatatgtagaactctt

SEQ ID NO: 38556 - DNA, 25 bp, Artificial
  Probe
atgcaacacagatatgtagaactct

SEQ ID NO: 38557 - DNA, 25 bp, Artificial
  Probe
atacatacattgaacactgttgatg

SEQ ID NO: 38558 - DNA, 25 bp, Artificial
  Probe
catacatacattgaacactgttgat

SEQ ID NO: 38559 - DNA, 25 bp, Artificial
  Probe
ggatgatagggcaaagttgagtaac

SEQ ID NO: 38560 - DNA, 25 bp, Artificial
  Probe
agtaactggtgaagcagatgttgag

SEQ ID NO: 38561 - DNA, 25 bp, Artificial
  Probe
gagtaactggtgaagcagatgttga

SEQ ID NO: 38562 - DNA, 25 bp, Artificial
  Probe
agagtaactggtgaagcagatgttg

SEQ ID NO: 38563 - DNA, 25 bp, Artificial
  Probe
cagagtaactggtgaagcagatgtt

SEQ ID NO: 38564 - DNA, 25 bp, Artificial
  Probe
agtgtatttaggttaaagcagttga

SEQ ID NO: 38565 - DNA, 25 bp, Artificial
  Probe
acatacattgaacactgttgatgca

SEQ ID NO: 38566 - DNA, 25 bp, Artificial
  Probe
aactcttcttgaattctacagcagg

SEQ ID NO: 38567 - DNA, 25 bp, Artificial
  Probe
aactcttcttgaattctacagcagg

SEQ ID NO: 38568 - DNA, 25 bp, Artificial
  Probe
gcagtaagtgtatttaggttaaagc

SEQ ID NO: 38569 - DNA, 25 bp, Artificial
  Probe
gaactcttcttgaattctacagcag

SEQ ID NO: 38570 - DNA, 25 bp, Artificial
  Probe
gaactcttcttgaattctacagcag

SEQ ID NO: 38571 - DNA, 25 bp, Artificial
  Probe
tacatacatacattgaacactgttg

SEQ ID NO: 38572 - DNA, 25 bp, Artificial
  Probe
ctaggatgatagggcaaagttgagt

SEQ ID NO: 38573 - DNA, 25 bp, Artificial
  Probe
tatgcaacacagatatgtagaactc

SEQ ID NO: 38574 - DNA, 25 bp, Artificial
  Probe
gtaactggtgaagcagatgttgagt

SEQ ID NO: 38575 - DNA, 25 bp, Artificial
  Probe
taatgcctgctctcttaagtgaact

SEQ ID NO: 38576 - DNA, 25 bp, Artificial
  Probe
actcttcttgaattctacagcagga

SEQ ID NO: 38577 - DNA, 25 bp, Artificial
  Probe
actcttcttgaattctacagcagga

SEQ ID NO: 38578 - DNA, 25 bp, Artificial
  Probe
acacagatatgtagaactcttcttg

SEQ ID NO: 38579 - DNA, 25 bp, Artificial
  Probe
acacagatatgtagaactcttcttg

SEQ ID NO: 38580 - DNA, 25 bp, Artificial
  Probe
caacacagatatgtagaactcttct

SEQ ID NO: 38581 - DNA, 25 bp, Artificial
  Probe
aagtgtatttaggttaaagcagttg

SEQ ID NO: 38582 - DNA, 25 bp, Artificial
  Probe
ctggaaggaactgtttagtaaagat

SEQ ID NO: 38583 - DNA, 25 bp, Artificial
  Probe
cctggaaggaactgtttagtaaaga

SEQ ID NO: 38584 - DNA, 25 bp, Artificial
  Probe
tggaaggaactgtttagtaaagatc

SEQ ID NO: 38585 - DNA, 25 bp, Artificial
  Probe
gaagatcgtcggtaacaaatgggaa

SEQ ID NO: 38586 - DNA, 25 bp, Artificial
  Probe
ggaaggaactgtttagtaaagatct

SEQ ID NO: 38587 - DNA, 25 bp, Artificial
  Probe
tcctggaaggaactgtttagtaaag

SEQ ID NO: 38588 - DNA, 25 bp, Artificial
  Probe
catcctggaaggaactgtttagtaa

SEQ ID NO: 38589 - DNA, 25 bp, Artificial
  Probe
atcctggaaggaactgtttagtaaa

SEQ ID NO: 38590 - DNA, 25 bp, Artificial
  Probe
tcatcctggaaggaactgtttagta

SEQ ID NO: 38591 - DNA, 25 bp, Artificial
  Probe
ggaagatcgtcggtaacaaatggga

SEQ ID NO: 38592 - DNA, 25 bp, Artificial
  Probe
ggcaatctgtcctgctgtattcaaa

SEQ ID NO: 38593 - DNA, 25 bp, Artificial
  Probe
taagtcctgtcatcctggaaggaac

SEQ ID NO: 38594 - DNA, 25 bp, Artificial
  Probe
gtcatcctggaaggaactgtttagt

SEQ ID NO: 38595 - DNA, 25 bp, Artificial
  Probe
tgtcatcctggaaggaactgtttag

SEQ ID NO: 38596 - DNA, 25 bp, Artificial
  Probe
ctgtcatcctggaaggaactgttta

SEQ ID NO: 38597 - DNA, 25 bp, Artificial
  Probe
aagggcaatctgtcctgctgtattc

SEQ ID NO: 38598 - DNA, 25 bp, Artificial
  Probe
aagtcctgtcatcctggaaggaact

SEQ ID NO: 38599 - DNA, 25 bp, Artificial
  Probe
gggcaatctgtcctgctgtattcaa

SEQ ID NO: 38600 - DNA, 25 bp, Artificial
  Probe
caagggcaatctgtcctgctgtatt

SEQ ID NO: 38601 - DNA, 25 bp, Artificial
  Probe
tcctgtcatcctggaaggaactgtt

SEQ ID NO: 38602 - DNA, 25 bp, Artificial
  Probe
cctgtcatcctggaaggaactgttt

SEQ ID NO: 38603 - DNA, 25 bp, Artificial
  Probe
ttacctcaggattgttgtgattgta

SEQ ID NO: 38604 - DNA, 25 bp, Artificial
  Probe
tacctcaggattgttgtgattgtag

SEQ ID NO: 38605 - DNA, 25 bp, Artificial
  Probe
cctcaggattgttgtgattgtagaa

SEQ ID NO: 38606 - DNA, 25 bp, Artificial
  Probe
cttcacggctcttcctataccttag

SEQ ID NO: 38607 - DNA, 25 bp, Artificial
  Probe
cttctcttcacggctcttcctatac

SEQ ID NO: 38608 - DNA, 25 bp, Artificial
  Probe
tcttcacggctcttcctatacctta

SEQ ID NO: 38609 - DNA, 25 bp, Artificial
  Probe
tcttctcttcacggctcttcctata

SEQ ID NO: 38610 - DNA, 25 bp, Artificial
  Probe
acctcaggattgttgtgattgtaga

SEQ ID NO: 38611 - DNA, 25 bp, Artificial
  Probe
ttgatttccctaagttccttgttct

SEQ ID NO: 38612 - DNA, 25 bp, Artificial
  Probe
ctaagttccttgttctccctctaaa

SEQ ID NO: 38613 - DNA, 25 bp, Artificial
  Probe
tgatttccctaagttccttgttctc

SEQ ID NO: 38614 - DNA, 25 bp, Artificial
  Probe
ttcttctcttcacggctcttcctat

SEQ ID NO: 38615 - DNA, 25 bp, Artificial
  Probe
ggattgttgtgattgtagaaacgaa

SEQ ID NO: 38616 - DNA, 25 bp, Artificial
  Probe
tttgatttccctaagttccttgttc

SEQ ID NO: 38617 - DNA, 25 bp, Artificial
  Probe
attgttgtgattgtagaaacgaagc

SEQ ID NO: 38618 - DNA, 25 bp, Artificial
  Probe
aggattgttgtgattgtagaaacga

SEQ ID NO: 38619 - DNA, 25 bp, Artificial
  Probe
caggattgttgtgattgtagaaacg

SEQ ID NO: 38620 - DNA, 25 bp, Artificial
  Probe
gatttccctaagttccttgttctcc

SEQ ID NO: 38621 - DNA, 25 bp, Artificial
  Probe
cctaagttccttgttctccctctaa

SEQ ID NO: 38622 - DNA, 25 bp, Artificial
  Probe
gattgttgtgattgtagaaacgaag

SEQ ID NO: 38623 - DNA, 25 bp, Artificial
  Probe
tcaggattgttgtgattgtagaaac

SEQ ID NO: 38624 - DNA, 25 bp, Artificial
  Probe
ctcaggattgttgtgattgtagaaa

SEQ ID NO: 38625 - DNA, 25 bp, Artificial
  Probe
ttgaagaaatcctgaggctttgtag

SEQ ID NO: 38626 - DNA, 25 bp, Artificial
  Probe
cttgaagaaatcctgaggctttgta

SEQ ID NO: 38627 - DNA, 25 bp, Artificial
  Probe
gtttacctcaggattgttgtgattg

SEQ ID NO: 38628 - DNA, 25 bp, Artificial
  Probe
gaagaaatcctgaggctttgtagag

SEQ ID NO: 38629 - DNA, 25 bp, Artificial
  Probe
tttacctcaggattgttgtgattgt

SEQ ID NO: 38630 - DNA, 25 bp, Artificial
  Probe
tgtttacctcaggattgttgtgatt

SEQ ID NO: 38631 - DNA, 25 bp, Artificial
  Probe
ctcttcacggctcttcctatacctt

SEQ ID NO: 38632 - DNA, 25 bp, Artificial
  Probe
ttctcttcacggctcttcctatacc

SEQ ID NO: 38633 - DNA, 25 bp, Artificial
  Probe
gtgctccttgaccatgtttaataat

SEQ ID NO: 38634 - DNA, 25 bp, Artificial
  Probe
agtgctccttgaccatgtttaataa

SEQ ID NO: 38635 - DNA, 25 bp, Artificial
  Probe
ccatgtttaataattcttccctccc

SEQ ID NO: 38636 - DNA, 25 bp, Artificial
  Probe
gagtgctccttgaccatgtttaata

SEQ ID NO: 38637 - DNA, 25 bp, Artificial
  Probe
aagaaatcctgaggctttgtagagt

SEQ ID NO: 38638 - DNA, 25 bp, Artificial
  Probe
tgaagaaatcctgaggctttgtaga

SEQ ID NO: 38639 - DNA, 25 bp, Artificial
  Probe
tgctccttgaccatgtttaataatt

SEQ ID NO: 38640 - DNA, 25 bp, Artificial
  Probe
accatgtttaataattcttccctcc

SEQ ID NO: 38641 - DNA, 25 bp, Artificial
  Probe
atttccctaagttccttgttctccc

SEQ ID NO: 38642 - DNA, 25 bp, Artificial
  Probe
ctgtttacctcaggattgttgtgat

SEQ ID NO: 38643 - DNA, 25 bp, Artificial
  Probe
gctccttgaccatgtttaataattc

SEQ ID NO: 38644 - DNA, 25 bp, Artificial
  Probe
agaaatcctgaggctttgtagagtg

SEQ ID NO: 38645 - DNA, 25 bp, Artificial
  Probe
tgattgtagaaacgaagctatgtga

SEQ ID NO: 38646 - DNA, 25 bp, Artificial
  Probe
gtgattgtagaaacgaagctatgtg

SEQ ID NO: 38647 - DNA, 25 bp, Artificial
  Probe
ttgtgattgtagaaacgaagctatg

SEQ ID NO: 38648 - DNA, 25 bp, Artificial
  Probe
gagaagtcaacatcactgtcataga

SEQ ID NO: 38649 - DNA, 25 bp, Artificial
  Probe
agagaagtcaacatcactgtcatag

SEQ ID NO: 38650 - DNA, 25 bp, Artificial
  Probe
gagagaagtcaacatcactgtcata

SEQ ID NO: 38651 - DNA, 25 bp, Artificial
  Probe
agaagtcaacatcactgtcatagac

SEQ ID NO: 38652 - DNA, 25 bp, Artificial
  Probe
atactctgagagaagtcaacatcac

SEQ ID NO: 38653 - DNA, 25 bp, Artificial
  Probe
gatactctgagagaagtcaacatca

SEQ ID NO: 38654 - DNA, 25 bp, Artificial
  Probe
tgatactctgagagaagtcaacatc

SEQ ID NO: 38655 - DNA, 25 bp, Artificial
  Probe
ctgatactctgagagaagtcaacat

SEQ ID NO: 38656 - DNA, 25 bp, Artificial
  Probe
tctgatactctgagagaagtcaaca

SEQ ID NO: 38657 - DNA, 25 bp, Artificial
  Probe
tactctgagagaagtcaacatcact

SEQ ID NO: 38658 - DNA, 25 bp, Artificial
  Probe
tgagagaagtcaacatcactgtcat

SEQ ID NO: 38659 - DNA, 25 bp, Artificial
  Probe
tctgagagaagtcaacatcactgtc

SEQ ID NO: 38660 - DNA, 25 bp, Artificial
  Probe
tactttactctcagacaaacacctc

SEQ ID NO: 38661 - DNA, 25 bp, Artificial
  Probe
ctgagagaagtcaacatcactgtca

SEQ ID NO: 38662 - DNA, 25 bp, Artificial
  Probe
atactttactctcagacaaacacct

SEQ ID NO: 38663 - DNA, 25 bp, Artificial
  Probe
actctgagagaagtcaacatcactg

SEQ ID NO: 38664 - DNA, 25 bp, Artificial
  Probe
ggcatctatactttactctcagaca

SEQ ID NO: 38665 - DNA, 25 bp, Artificial
  Probe
tggcatctatactttactctcagac

SEQ ID NO: 38666 - DNA, 25 bp, Artificial
  Probe
ctctgagagaagtcaacatcactgt

SEQ ID NO: 38667 - DNA, 25 bp, Artificial
  Probe
aataagtcacctccctctgatactc

SEQ ID NO: 38668 - DNA, 25 bp, Artificial
  Probe
cgtggctatccttcatctacctaaa

SEQ ID NO: 38669 - DNA, 25 bp, Artificial
  Probe
caataagtcacctccctctgatact

SEQ ID NO: 38670 - DNA, 25 bp, Artificial
  Probe
acaataagtcacctccctctgatac

SEQ ID NO: 38671 - DNA, 25 bp, Artificial
  Probe
cacaataagtcacctccctctgata

SEQ ID NO: 38672 - DNA, 25 bp, Artificial
  Probe
cctggcatctatactttactctcag

SEQ ID NO: 38673 - DNA, 25 bp, Artificial
  Probe
ataagtcacctccctctgatactct

SEQ ID NO: 38674 - DNA, 25 bp, Artificial
  Probe
tatactttactctcagacaaacacc

SEQ ID NO: 38675 - DNA, 25 bp, Artificial
  Probe
ctggcatctatactttactctcaga

SEQ ID NO: 38676 - DNA, 25 bp, Artificial
  Probe
tttcacaataagtcacctccctctg

SEQ ID NO: 38677 - DNA, 25 bp, Artificial
  Probe
gcatctatactttactctcagacaa

SEQ ID NO: 38678 - DNA, 25 bp, Artificial
  Probe
acgtggctatccttcatctacctaa

SEQ ID NO: 38679 - DNA, 25 bp, Artificial
  Probe
aacgtggctatccttcatctaccta

SEQ ID NO: 38680 - DNA, 25 bp, Artificial
  Probe
actttactctcagacaaacacctcg

SEQ ID NO: 38681 - DNA, 25 bp, Artificial
  Probe
gcctggcatctatactttactctca

SEQ ID NO: 38682 - DNA, 25 bp, Artificial
  Probe
gatgatgtgaaaccaggaaccagat

SEQ ID NO: 38683 - DNA, 25 bp, Artificial
  Probe
ctctgatactctgagagaagtcaac

SEQ ID NO: 38684 - DNA, 25 bp, Artificial
  Probe
taagtcacctccctctgatactctg

SEQ ID NO: 38685 - DNA, 25 bp, Artificial
  Probe
cctctgatactctgagagaagtcaa

SEQ ID NO: 38686 - DNA, 25 bp, Artificial
  Probe
tcacaataagtcacctccctctgat

SEQ ID NO: 38687 - DNA, 25 bp, Artificial
  Probe
atgatgtgaaaccaggaaccagatg

SEQ ID NO: 38688 - DNA, 25 bp, Artificial
  Probe
ttactctcagacaaacacctcgatt

SEQ ID NO: 38689 - DNA, 25 bp, Artificial
  Probe
tttactctcagacaaacacctcgat

SEQ ID NO: 38690 - DNA, 25 bp, Artificial
  Probe
ctatactttactctcagacaaacac

SEQ ID NO: 38691 - DNA, 25 bp, Artificial
  Probe
aaaccaggaaccagatgtcatgtag

SEQ ID NO: 38692 - DNA, 25 bp, Artificial
  Probe
gaaaccaggaaccagatgtcatgta

SEQ ID NO: 38693 - DNA, 25 bp, Artificial
  Probe
taagcagagactgagattcaaagac

SEQ ID NO: 38694 - DNA, 25 bp, Artificial
  Probe
aagcagagactgagattcaaagacc

SEQ ID NO: 38695 - DNA, 25 bp, Artificial
  Probe
gagactgagattcaaagacccacac

SEQ ID NO: 38696 - DNA, 25 bp, Artificial
  Probe
agagactgagattcaaagacccaca

SEQ ID NO: 38697 - DNA, 25 bp, Artificial
  Probe
cagagactgagattcaaagacccac

SEQ ID NO: 38698 - DNA, 25 bp, Artificial
  Probe
gactgagattcaaagacccacacac

SEQ ID NO: 38699 - DNA, 25 bp, Artificial
  Probe
agactgagattcaaagacccacaca

SEQ ID NO: 38700 - DNA, 25 bp, Artificial
  Probe
ctgaaggccaagttctacaatgacc

SEQ ID NO: 38701 - DNA, 25 bp, Artificial
  Probe
agcagagactgagattcaaagaccc

SEQ ID NO: 38702 - DNA, 25 bp, Artificial
  Probe
gctgaaggccaagttctacaatgac

SEQ ID NO: 38703 - DNA, 25 bp, Artificial
  Probe
ctgctgaaggccaagttctacaatg

SEQ ID NO: 38704 - DNA, 25 bp, Artificial
  Probe
gcagagactgagattcaaagaccca

SEQ ID NO: 38705 - DNA, 25 bp, Artificial
  Probe
tgctgaaggccaagttctacaatga

SEQ ID NO: 38706 - DNA, 25 bp, Artificial
  Probe
actgagattcaaagacccacacacg

SEQ ID NO: 38707 - DNA, 25 bp, Artificial
  Probe
cctgctgaaggccaagttctacaat

SEQ ID NO: 38708 - DNA, 25 bp, Artificial
  Probe
tgaaggccaagttctacaatgaccc

SEQ ID NO: 38709 - DNA, 25 bp, Artificial
  Probe
ggaattgatgttagtacacagatgc

SEQ ID NO: 38710 - DNA, 25 bp, Artificial
  Probe
cggaattgatgttagtacacagatg

SEQ ID NO: 38711 - DNA, 25 bp, Artificial
  Probe
gaattgatgttagtacacagatgct

SEQ ID NO: 38712 - DNA, 25 bp, Artificial
  Probe
atctgtctgagaagttagagcagtc

SEQ ID NO: 38713 - DNA, 25 bp, Artificial
  Probe
aattgatgttagtacacagatgctt

SEQ ID NO: 38714 - DNA, 25 bp, Artificial
  Probe
atgttagtacacagatgcttaacca

SEQ ID NO: 38715 - DNA, 25 bp, Artificial
  Probe
tgttagtacacagatgcttaaccag

SEQ ID NO: 38716 - DNA, 25 bp, Artificial
  Probe
gatgttagtacacagatgcttaacc

SEQ ID NO: 38717 - DNA, 25 bp, Artificial
  Probe
cttgtggaataaatactgggtgaac

SEQ ID NO: 38718 - DNA, 25 bp, Artificial
  Probe
tcttgtggaataaatactgggtgaa

SEQ ID NO: 38719 - DNA, 25 bp, Artificial
  Probe
ctcttgtggaataaatactgggtga

SEQ ID NO: 38720 - DNA, 25 bp, Artificial
  Probe
tgatgttagtacacagatgcttaac

SEQ ID NO: 38721 - DNA, 25 bp, Artificial
  Probe
ttgatgttagtacacagatgcttaa

SEQ ID NO: 38722 - DNA, 25 bp, Artificial
  Probe
attgatgttagtacacagatgctta

SEQ ID NO: 38723 - DNA, 25 bp, Artificial
  Probe
aaggaccttcagagtaccagactat

SEQ ID NO: 38724 - DNA, 25 bp, Artificial
  Probe
aggaccttcagagtaccagactatc

SEQ ID NO: 38725 - DNA, 25 bp, Artificial
  Probe
gctcttgtggaataaatactgggtg

SEQ ID NO: 38726 - DNA, 25 bp, Artificial
  Probe
cctctttggatcgtaaactacttga

SEQ ID NO: 38727 - DNA, 25 bp, Artificial
  Probe
gtaccagactatcccactcaataaa

SEQ ID NO: 38728 - DNA, 25 bp, Artificial
  Probe
acaatattatgccttagaagtctca

SEQ ID NO: 38729 - DNA, 25 bp, Artificial
  Probe
acgtcctgagtattagcactgtaat

SEQ ID NO: 38730 - DNA, 25 bp, Artificial
  Probe
tgatgtctcaggttattaaggataa

SEQ ID NO: 38731 - DNA, 25 bp, Artificial
  Probe
tctttggatcgtaaactacttgagc

SEQ ID NO: 38732 - DNA, 25 bp, Artificial
  Probe
ttgtggaataaatactgggtgaaca

SEQ ID NO: 38733 - DNA, 25 bp, Artificial
  Probe
tgccttagaagtctcatatttcaaa

SEQ ID NO: 38734 - DNA, 25 bp, Artificial
  Probe
agtaccagactatcccactcaataa

SEQ ID NO: 38735 - DNA, 25 bp, Artificial
  Probe
atgccttagaagtctcatatttcaa

SEQ ID NO: 38736 - DNA, 25 bp, Artificial
  Probe
ctctttggatcgtaaactacttgag

SEQ ID NO: 38737 - DNA, 25 bp, Artificial
  Probe
gttagtacacagatgcttaaccagc

SEQ ID NO: 38738 - DNA, 25 bp, Artificial
  Probe
tgtggaataaatactgggtgaacac

SEQ ID NO: 38739 - DNA, 25 bp, Artificial
  Probe
cagtttcaggaaccatttgtagcag

SEQ ID NO: 38740 - DNA, 25 bp, Artificial
  Probe
cagcagtttcaggaaccatttgtag

SEQ ID NO: 38741 - DNA, 25 bp, Artificial
  Probe
ctttggatcgtaaactacttgagct

SEQ ID NO: 38742 - DNA, 25 bp, Artificial
  Probe
taggacatatccaaagggctataag

SEQ ID NO: 38743 - DNA, 25 bp, Artificial
  Probe
tcctctttggatcgtaaactacttg

SEQ ID NO: 38744 - DNA, 25 bp, Artificial
  Probe
gtttcaggaaccatttgtagcagtg

SEQ ID NO: 38745 - DNA, 25 bp, Artificial
  Probe
ttaggacatatccaaagggctataa

SEQ ID NO: 38746 - DNA, 25 bp, Artificial
  Probe
tttaggacatatccaaagggctata

SEQ ID NO: 38747 - DNA, 25 bp, Artificial
  Probe
ccggaattgatgttagtacacagat

SEQ ID NO: 38748 - DNA, 25 bp, Artificial
  Probe
aacaatattatgccttagaagtctc

SEQ ID NO: 38749 - DNA, 25 bp, Artificial
  Probe
agtttcaggaaccatttgtagcagt

SEQ ID NO: 38750 - DNA, 25 bp, Artificial
  Probe
agaagtctcatatttcaaatcctct

SEQ ID NO: 38751 - DNA, 25 bp, Artificial
  Probe
tctgagaagttagagcagtcggaag

SEQ ID NO: 38752 - DNA, 25 bp, Artificial
  Probe
tctgtctgagaagttagagcagtcg

SEQ ID NO: 38753 - DNA, 25 bp, Artificial
  Probe
agctcttgtggaataaatactgggt

SEQ ID NO: 38754 - DNA, 25 bp, Artificial
  Probe
ctaagtgattgccaagattatgcca

SEQ ID NO: 38755 - DNA, 25 bp, Artificial
  Probe
tctaagtgattgccaagattatgcc

SEQ ID NO: 38756 - DNA, 25 bp, Artificial
  Probe
taagtgattgccaagattatgccaa

SEQ ID NO: 38757 - DNA, 25 bp, Artificial
  Probe
atctaagtgattgccaagattatgc

SEQ ID NO: 38758 - DNA, 25 bp, Artificial
  Probe
tgagtgattagcaatttgactttga

SEQ ID NO: 38759 - DNA, 25 bp, Artificial
  Probe
caggaagatggatggatggtcacta

SEQ ID NO: 38760 - DNA, 25 bp, Artificial
  Probe
atccttccaaatacagtgtttacat

SEQ ID NO: 38761 - DNA, 25 bp, Artificial
  Probe
aggaagatggatggatggtcactag

SEQ ID NO: 38762 - DNA, 25 bp, Artificial
  Probe
tccttccaaatacagtgtttacatg

SEQ ID NO: 38763 - DNA, 25 bp, Artificial
  Probe
ttgagtgattagcaatttgactttg

SEQ ID NO: 38764 - DNA, 25 bp, Artificial
  Probe
aagtgattgccaagattatgccaaa

SEQ ID NO: 38765 - DNA, 25 bp, Artificial
  Probe
ctgttcctggaaataaagtctgttt

SEQ ID NO: 38766 - DNA, 25 bp, Artificial
  Probe
tatccttccaaatacagtgtttaca

SEQ ID NO: 38767 - DNA, 25 bp, Artificial
  Probe
cataactgctgttcctggaaataaa

SEQ ID NO: 38768 - DNA, 25 bp, Artificial
  Probe
gagtgattagcaatttgactttgaa

SEQ ID NO: 38769 - DNA, 25 bp, Artificial
  Probe
ataactgctgttcctggaaataaag

SEQ ID NO: 38770 - DNA, 25 bp, Artificial
  Probe
taactgctgttcctggaaataaagt

SEQ ID NO: 38771 - DNA, 25 bp, Artificial
  Probe
agtgattgccaagattatgccaaag

SEQ ID NO: 38772 - DNA, 25 bp, Artificial
  Probe
gctgttcctggaaataaagtctgtt

SEQ ID NO: 38773 - DNA, 25 bp, Artificial
  Probe
acataactgctgttcctggaaataa

SEQ ID NO: 38774 - DNA, 25 bp, Artificial
  Probe
gacataactgctgttcctggaaata

SEQ ID NO: 38775 - DNA, 25 bp, Artificial
  Probe
aactgctgttcctggaaataaagtc

SEQ ID NO: 38776 - DNA, 25 bp, Artificial
  Probe
agtgattagcaatttgactttgaat

SEQ ID NO: 38777 - DNA, 25 bp, Artificial
  Probe
ctgctgttcctggaaataaagtctg

SEQ ID NO: 38778 - DNA, 25 bp, Artificial
  Probe
ccgatctatgtatccttccaaatac

SEQ ID NO: 38779 - DNA, 25 bp, Artificial
  Probe
ccttccaaatacagtgtttacatgg

SEQ ID NO: 38780 - DNA, 25 bp, Artificial
  Probe
aagatggatggatggtcactagctt

SEQ ID NO: 38781 - DNA, 25 bp, Artificial
  Probe
tagacataactgctgttcctggaaa

SEQ ID NO: 38782 - DNA, 25 bp, Artificial
  Probe
agcagggaaattgagtgattagcaa

SEQ ID NO: 38783 - DNA, 25 bp, Artificial
  Probe
agcagcagggaaattgagtgattag

SEQ ID NO: 38784 - DNA, 25 bp, Artificial
  Probe
tgctgttcctggaaataaagtctgt

SEQ ID NO: 38785 - DNA, 25 bp, Artificial
  Probe
actgctgttcctggaaataaagtct

SEQ ID NO: 38786 - DNA, 25 bp, Artificial
  Probe
gtatccttccaaatacagtgtttac

SEQ ID NO: 38787 - DNA, 25 bp, Artificial
  Probe
gaagatggatggatggtcactagct

SEQ ID NO: 38788 - DNA, 25 bp, Artificial
  Probe
agacataactgctgttcctggaaat

SEQ ID NO: 38789 - DNA, 25 bp, Artificial
  Probe
gttcctggaaataaagtctgtttca

SEQ ID NO: 38790 - DNA, 25 bp, Artificial
  Probe
tgttcctggaaataaagtctgtttc

SEQ ID NO: 38791 - DNA, 25 bp, Artificial
  Probe
cagcagggaaattgagtgattagca

SEQ ID NO: 38792 - DNA, 25 bp, Artificial
  Probe
cagcagcagggaaattgagtgatta

SEQ ID NO: 38793 - DNA, 25 bp, Artificial
  Probe
tatctaagtgattgccaagattatg

SEQ ID NO: 38794 - DNA, 25 bp, Artificial
  Probe
gtatctaagtgattgccaagattat

SEQ ID NO: 38795 - DNA, 25 bp, Artificial
  Probe
gcagggaaattgagtgattagcaat

SEQ ID NO: 38796 - DNA, 25 bp, Artificial
  Probe
gcagagcactaagagacttttattt

SEQ ID NO: 38797 - DNA, 25 bp, Artificial
  Probe
ggcagagcactaagagacttttatt

SEQ ID NO: 38798 - DNA, 25 bp, Artificial
  Probe
agatggatggatggtcactagcttg

SEQ ID NO: 38799 - DNA, 25 bp, Artificial
  Probe
ggactcctacaatatgttcgagaac

SEQ ID NO: 38800 - DNA, 25 bp, Artificial
  Probe
gactcctacaatatgttcgagaacg

SEQ ID NO: 38801 - DNA, 25 bp, Artificial
  Probe
cggactcctacaatatgttcgagaa

SEQ ID NO: 38802 - DNA, 25 bp, Artificial
  Probe
actcctacaatatgttcgagaacgg

SEQ ID NO: 38803 - DNA, 25 bp, Artificial
  Probe
ctcctacaatatgttcgagaacggc

SEQ ID NO: 38804 - DNA, 25 bp, Artificial
  Probe
cctacaatatgttcgagaacggcag

SEQ ID NO: 38805 - DNA, 25 bp, Artificial
  Probe
tcctacaatatgttcgagaacggca

SEQ ID NO: 38806 - DNA, 25 bp, Artificial
  Probe
ctacaatatgttcgagaacggcagc

SEQ ID NO: 38807 - DNA, 25 bp, Artificial
  Probe
ccggactcctacaatatgttcgaga

SEQ ID NO: 38808 - DNA, 25 bp, Artificial
  Probe
caatatgttcgagaacggcagcttc

SEQ ID NO: 38809 - DNA, 25 bp, Artificial
  Probe
tacaatatgttcgagaacggcagct

SEQ ID NO: 38810 - DNA, 25 bp, Artificial
  Probe
ccgagaagaaagtggtggtcaagag

SEQ ID NO: 38811 - DNA, 25 bp, Artificial
  Probe
acaatatgttcgagaacggcagctt

SEQ ID NO: 38812 - DNA, 25 bp, Artificial
  Probe
cccggactcctacaatatgttcgag

SEQ ID NO: 38813 - DNA, 25 bp, Artificial
  Probe
gacccggactcctacaatatgttcg

SEQ ID NO: 38814 - DNA, 25 bp, Artificial
  Probe
cgacccggactcctacaatatgttc

SEQ ID NO: 38815 - DNA, 25 bp, Artificial
  Probe
acccggactcctacaatatgttcga

SEQ ID NO: 38816 - DNA, 25 bp, Artificial
  Probe
tcgacccggactcctacaatatgtt

SEQ ID NO: 38817 - DNA, 25 bp, Artificial
  Probe
ctactagaacagcaagagcaatcac

SEQ ID NO: 38818 - DNA, 25 bp, Artificial
  Probe
cctactagaacagcaagagcaatca

SEQ ID NO: 38819 - DNA, 25 bp, Artificial
  Probe
agagtctggtacaactgtccttaac

SEQ ID NO: 38820 - DNA, 25 bp, Artificial
  Probe
actggcaaagaagaatgaaatgaaa

SEQ ID NO: 38821 - DNA, 25 bp, Artificial
  Probe
tactagaacagcaagagcaatcacc

SEQ ID NO: 38822 - DNA, 25 bp, Artificial
  Probe
gactggcaaagaagaatgaaatgaa

SEQ ID NO: 38823 - DNA, 25 bp, Artificial
  Probe
tggcaaagaagaatgaaatgaaatg

SEQ ID NO: 38824 - DNA, 25 bp, Artificial
  Probe
ctgactggcaaagaagaatgaaatg

SEQ ID NO: 38825 - DNA, 25 bp, Artificial
  Probe
tgactggcaaagaagaatgaaatga

SEQ ID NO: 38826 - DNA, 25 bp, Artificial
  Probe
ggcaaagaagaatgaaatgaaatga

SEQ ID NO: 38827 - DNA, 25 bp, Artificial
  Probe
ctggcaaagaagaatgaaatgaaat

SEQ ID NO: 38828 - DNA, 25 bp, Artificial
  Probe
cagagtctggtacaactgtccttaa

SEQ ID NO: 38829 - DNA, 25 bp, Artificial
  Probe
ttaacctgactggcaaagaagaatg

SEQ ID NO: 38830 - DNA, 25 bp, Artificial
  Probe
cttaacctgactggcaaagaagaat

SEQ ID NO: 38831 - DNA, 25 bp, Artificial
  Probe
cgataacactgcccaacattagaaa

SEQ ID NO: 38832 - DNA, 25 bp, Artificial
  Probe
cctgactggcaaagaagaatgaaat

SEQ ID NO: 38833 - DNA, 25 bp, Artificial
  Probe
taacctgactggcaaagaagaatga

SEQ ID NO: 38834 - DNA, 25 bp, Artificial
  Probe
gtacaactgtccttaacctgactgg

SEQ ID NO: 38835 - DNA, 25 bp, Artificial
  Probe
gcctactagaacagcaagagcaatc

SEQ ID NO: 38836 - DNA, 25 bp, Artificial
  Probe
aaacctgacggctatgattactacg

SEQ ID NO: 38837 - DNA, 25 bp, Artificial
  Probe
gagtctggtacaactgtccttaacc

SEQ ID NO: 38838 - DNA, 25 bp, Artificial
  Probe
gcaaagaagaatgaaatgaaatgaa

SEQ ID NO: 38839 - DNA, 25 bp, Artificial
  Probe
ggtacaactgtccttaacctgactg

SEQ ID NO: 38840 - DNA, 25 bp, Artificial
  Probe
ctggtacaactgtccttaacctgac

SEQ ID NO: 38841 - DNA, 25 bp, Artificial
  Probe
gtctggtacaactgtccttaacctg

SEQ ID NO: 38842 - DNA, 25 bp, Artificial
  Probe
acctgactggcaaagaagaatgaaa

SEQ ID NO: 38843 - DNA, 25 bp, Artificial
  Probe
aacctgactggcaaagaagaatgaa

SEQ ID NO: 38844 - DNA, 25 bp, Artificial
  Probe
tctggtacaactgtccttaacctga

SEQ ID NO: 38845 - DNA, 25 bp, Artificial
  Probe
agtctggtacaactgtccttaacct

SEQ ID NO: 38846 - DNA, 25 bp, Artificial
  Probe
ctagaacagcaagagcaatcaccac

SEQ ID NO: 38847 - DNA, 25 bp, Artificial
  Probe
tggtacaactgtccttaacctgact

SEQ ID NO: 38848 - DNA, 25 bp, Artificial
  Probe
ccttaacctgactggcaaagaagaa

SEQ ID NO: 38849 - DNA, 25 bp, Artificial
  Probe
catcaaagcctcttatcaagacaaa

SEQ ID NO: 38850 - DNA, 25 bp, Artificial
  Probe
atcaaagcctcttatcaagacaaag

SEQ ID NO: 38851 - DNA, 25 bp, Artificial
  Probe
actagaacagcaagagcaatcacca

SEQ ID NO: 38852 - DNA, 25 bp, Artificial
  Probe
ttagaaaacctgacggctatgatta

SEQ ID NO: 38853 - DNA, 25 bp, Artificial
  Probe
attagaaaacctgacggctatgatt

SEQ ID NO: 38854 - DNA, 25 bp, Artificial
  Probe
ataacactgcccaacattagaaaac

SEQ ID NO: 38855 - DNA, 25 bp, Artificial
  Probe
gataacactgcccaacattagaaaa

SEQ ID NO: 38856 - DNA, 25 bp, Artificial
  Probe
tcaaagcctcttatcaagacaaagg

SEQ ID NO: 38857 - DNA, 25 bp, Artificial
  Probe
ccatcaaagcctcttatcaagacaa

SEQ ID NO: 38858 - DNA, 25 bp, Artificial
  Probe
gaaaacctgacggctatgattacta

SEQ ID NO: 38859 - DNA, 25 bp, Artificial
  Probe
tagaaaacctgacggctatgattac

SEQ ID NO: 38860 - DNA, 25 bp, Artificial
  Probe
cttatcaagacaaaggcttcctcca

SEQ ID NO: 38861 - DNA, 25 bp, Artificial
  Probe
ctcttatcaagacaaaggcttcctc

SEQ ID NO: 38862 - DNA, 25 bp, Artificial
  Probe
cctggtattacttcaagactcctaa

SEQ ID NO: 38863 - DNA, 25 bp, Artificial
  Probe
ttacttcaagactcctaacagactg

SEQ ID NO: 38864 - DNA, 25 bp, Artificial
  Probe
attacttcaagactcctaacagact

SEQ ID NO: 38865 - DNA, 25 bp, Artificial
  Probe
tggtattacttcaagactcctaaca

SEQ ID NO: 38866 - DNA, 25 bp, Artificial
  Probe
gcttgttggttaagtgttaagagtt

SEQ ID NO: 38867 - DNA, 25 bp, Artificial
  Probe
gcctggtattacttcaagactccta

SEQ ID NO: 38868 - DNA, 25 bp, Artificial
  Probe
tacttcaagactcctaacagactga

SEQ ID NO: 38869 - DNA, 25 bp, Artificial
  Probe
ggtattacttcaagactcctaacag

SEQ ID NO: 38870 - DNA, 25 bp, Artificial
  Probe
ctggtattacttcaagactcctaac

SEQ ID NO: 38871 - DNA, 25 bp, Artificial
  Probe
ttactaacagtgagacagcagaaca

SEQ ID NO: 38872 - DNA, 25 bp, Artificial
  Probe
tattacttcaagactcctaacagac

SEQ ID NO: 38873 - DNA, 25 bp, Artificial
  Probe
gtattacttcaagactcctaacaga

SEQ ID NO: 38874 - DNA, 25 bp, Artificial
  Probe
cagcttgttggttaagtgttaagag

SEQ ID NO: 38875 - DNA, 25 bp, Artificial
  Probe
agcttgttggttaagtgttaagagt

SEQ ID NO: 38876 - DNA, 25 bp, Artificial
  Probe
aagactcctaacagactgaatttgg

SEQ ID NO: 38877 - DNA, 25 bp, Artificial
  Probe
acagcttgttggttaagtgttaaga

SEQ ID NO: 38878 - DNA, 25 bp, Artificial
  Probe
gttggttaagtgttaagagtttggg

SEQ ID NO: 38879 - DNA, 25 bp, Artificial
  Probe
tgttggttaagtgttaagagtttgg

SEQ ID NO: 38880 - DNA, 25 bp, Artificial
  Probe
tactaacagtgagacagcagaacac

SEQ ID NO: 38881 - DNA, 25 bp, Artificial
  Probe
atttactaacagtgagacagcagaa

SEQ ID NO: 38882 - DNA, 25 bp, Artificial
  Probe
gagggagatttactaacagtgagac

SEQ ID NO: 38883 - DNA, 25 bp, Artificial
  Probe
catttggcatcagacagggtatata

SEQ ID NO: 38884 - DNA, 25 bp, Artificial
  Probe
gatttactaacagtgagacagcaga

SEQ ID NO: 38885 - DNA, 25 bp, Artificial
  Probe
agatttactaacagtgagacagcag

SEQ ID NO: 38886 - DNA, 25 bp, Artificial
  Probe
gagatttactaacagtgagacagca

SEQ ID NO: 38887 - DNA, 25 bp, Artificial
  Probe
caagactcctaacagactgaatttg

SEQ ID NO: 38888 - DNA, 25 bp, Artificial
  Probe
tcatttggcatcagacagggtatat

SEQ ID NO: 38889 - DNA, 25 bp, Artificial
  Probe
gggagatttactaacagtgagacag

SEQ ID NO: 38890 - DNA, 25 bp, Artificial
  Probe
agggagatttactaacagtgagaca

SEQ ID NO: 38891 - DNA, 25 bp, Artificial
  Probe
tttactaacagtgagacagcagaac

SEQ ID NO: 38892 - DNA, 25 bp, Artificial
  Probe
tcaagactcctaacagactgaattt

SEQ ID NO: 38893 - DNA, 25 bp, Artificial
  Probe
taacagtgagacagcagaacacatt

SEQ ID NO: 38894 - DNA, 25 bp, Artificial
  Probe
ggagatttactaacagtgagacagc

SEQ ID NO: 38895 - DNA, 25 bp, Artificial
  Probe
cgagggagatttactaacagtgaga

SEQ ID NO: 38896 - DNA, 25 bp, Artificial
  Probe
taacagactgaatttgggatgggaa

SEQ ID NO: 38897 - DNA, 25 bp, Artificial
  Probe
actgaatttgggatgggaacatttc

SEQ ID NO: 38898 - DNA, 25 bp, Artificial
  Probe
gactgaatttgggatgggaacattt

SEQ ID NO: 38899 - DNA, 25 bp, Artificial
  Probe
ctcatttggcatcagacagggtata

SEQ ID NO: 38900 - DNA, 25 bp, Artificial
  Probe
agactcctaacagactgaatttggg

SEQ ID NO: 38901 - DNA, 25 bp, Artificial
  Probe
ctaacagtgagacagcagaacacat

SEQ ID NO: 38902 - DNA, 25 bp, Artificial
  Probe
cttcaagactcctaacagactgaat

SEQ ID NO: 38903 - DNA, 25 bp, Artificial
  Probe
acgagggagatttactaacagtgag

SEQ ID NO: 38904 - DNA, 25 bp, Artificial
  Probe
ttgttggttaagtgttaagagtttg

SEQ ID NO: 38905 - DNA, 25 bp, Artificial
  Probe
ttcaagactcctaacagactgaatt

SEQ ID NO: 38906 - DNA, 25 bp, Artificial
  Probe
taggaatgcctttcttctctaactc

SEQ ID NO: 38907 - DNA, 25 bp, Artificial
  Probe
ggcagaaggcaagtatgtcagatat

SEQ ID NO: 38908 - DNA, 25 bp, Artificial
  Probe
ttaatggcagaaggcaagtatgtca

SEQ ID NO: 38909 - DNA, 25 bp, Artificial
  Probe
taatggcagaaggcaagtatgtcag

SEQ ID NO: 38910 - DNA, 25 bp, Artificial
  Probe
gcagaaggcaagtatgtcagatatc

SEQ ID NO: 38911 - DNA, 25 bp, Artificial
  Probe
tttaatggcagaaggcaagtatgtc

SEQ ID NO: 38912 - DNA, 25 bp, Artificial
  Probe
tctttaatggcagaaggcaagtatg

SEQ ID NO: 38913 - DNA, 25 bp, Artificial
  Probe
ctttaatggcagaaggcaagtatgt

SEQ ID NO: 38914 - DNA, 25 bp, Artificial
  Probe
tggcagaaggcaagtatgtcagata

SEQ ID NO: 38915 - DNA, 25 bp, Artificial
  Probe
atggcagaaggcaagtatgtcagat

SEQ ID NO: 38916 - DNA, 25 bp, Artificial
  Probe
aatggcagaaggcaagtatgtcaga

SEQ ID NO: 38917 - DNA, 25 bp, Artificial
  Probe
ttctttaatggcagaaggcaagtat

SEQ ID NO: 38918 - DNA, 25 bp, Artificial
  Probe
tttctttaatggcagaaggcaagta

SEQ ID NO: 38919 - DNA, 25 bp, Artificial
  Probe
ctttctttaatggcagaaggcaagt

SEQ ID NO: 38920 - DNA, 25 bp, Artificial
  Probe
gctttctttaatggcagaaggcaag

SEQ ID NO: 38921 - DNA, 25 bp, Artificial
  Probe
ttcaattagctactgccagtaaatt

SEQ ID NO: 38922 - DNA, 25 bp, Artificial
  Probe
tttcaattagctactgccagtaaat

SEQ ID NO: 38923 - DNA, 25 bp, Artificial
  Probe
catggtgacaaaggtcccatttata

SEQ ID NO: 38924 - DNA, 25 bp, Artificial
  Probe
tcaattagctactgccagtaaatta

SEQ ID NO: 38925 - DNA, 25 bp, Artificial
  Probe
tacacccagtttacagcagctacag

SEQ ID NO: 38926 - DNA, 25 bp, Artificial
  Probe
tcatggtgacaaaggtcccatttat

SEQ ID NO: 38927 - DNA, 25 bp, Artificial
  Probe
atcatggtgacaaaggtcccattta

SEQ ID NO: 38928 - DNA, 25 bp, Artificial
  Probe
caattagctactgccagtaaattaa

SEQ ID NO: 38929 - DNA, 25 bp, Artificial
  Probe
tgctttctttaatggcagaaggcaa

SEQ ID NO: 38930 - DNA, 25 bp, Artificial
  Probe
atattttcaattagctactgccagt

SEQ ID NO: 38931 - DNA, 25 bp, Artificial
  Probe
aatcatggtgacaaaggtcccattt

SEQ ID NO: 38932 - DNA, 25 bp, Artificial
  Probe
aaatcatggtgacaaaggtcccatt

SEQ ID NO: 38933 - DNA, 25 bp, Artificial
  Probe
aattagctactgccagtaaattaaa

SEQ ID NO: 38934 - DNA, 25 bp, Artificial
  Probe
tcaaaatcatggtgacaaaggtccc

SEQ ID NO: 38935 - DNA, 25 bp, Artificial
  Probe
agctactgccagtaaattaaaattt

SEQ ID NO: 38936 - DNA, 25 bp, Artificial
  Probe
ttttcaattagctactgccagtaaa

SEQ ID NO: 38937 - DNA, 25 bp, Artificial
  Probe
attttcaattagctactgccagtaa

SEQ ID NO: 38938 - DNA, 25 bp, Artificial
  Probe
caaaatcatggtgacaaaggtccca

SEQ ID NO: 38939 - DNA, 25 bp, Artificial
  Probe
tatattttcaattagctactgccag

SEQ ID NO: 38940 - DNA, 25 bp, Artificial
  Probe
tattttcaattagctactgccagta

SEQ ID NO: 38941 - DNA, 25 bp, Artificial
  Probe
ttatattttcaattagctactgcca

SEQ ID NO: 38942 - DNA, 25 bp, Artificial
  Probe
tttgggtcaaaatcatggtgacaaa

SEQ ID NO: 38943 - DNA, 25 bp, Artificial
  Probe
ttgggtcaaaatcatggtgacaaag

SEQ ID NO: 38944 - DNA, 25 bp, Artificial
  Probe
gtttacagcagctacaggagcactt

SEQ ID NO: 38945 - DNA, 25 bp, Artificial
  Probe
aaaatcatggtgacaaaggtcccat

SEQ ID NO: 38946 - DNA, 25 bp, Artificial
  Probe
gtcaaaatcatggtgacaaaggtcc

SEQ ID NO: 38947 - DNA, 25 bp, Artificial
  Probe
ggtcaaaatcatggtgacaaaggtc

SEQ ID NO: 38948 - DNA, 25 bp, Artificial
  Probe
tagctactgccagtaaattaaaatt

SEQ ID NO: 38949 - DNA, 25 bp, Artificial
  Probe
ttagctactgccagtaaattaaaat

SEQ ID NO: 38950 - DNA, 25 bp, Artificial
  Probe
attagctactgccagtaaattaaaa

SEQ ID NO: 38951 - DNA, 25 bp, Artificial
  Probe
tttatattttcaattagctactgcc

SEQ ID NO: 38952 - DNA, 25 bp, Artificial
  Probe
cacgatagagtggagaactacaacc

SEQ ID NO: 38953 - DNA, 25 bp, Artificial
  Probe
gatagagtggagaactacaaccctc

SEQ ID NO: 38954 - DNA, 25 bp, Artificial
  Probe
cgatagagtggagaactacaaccct

SEQ ID NO: 38955 - DNA, 25 bp, Artificial
  Probe
atagagtggagaactacaaccctcg

SEQ ID NO: 38956 - DNA, 25 bp, Artificial
  Probe
acgatagagtggagaactacaaccc

SEQ ID NO: 38957 - DNA, 25 bp, Artificial
  Probe
cccttgaccaataaacatgtgactt

SEQ ID NO: 38958 - DNA, 25 bp, Artificial
  Probe
tagccagagactgtgttcagaggag

SEQ ID NO: 38959 - DNA, 25 bp, Artificial
  Probe
agagactgtgttcagaggagagctt

SEQ ID NO: 38960 - DNA, 25 bp, Artificial
  Probe
cagtgtccccttgaccaataaacat

SEQ ID NO: 38961 - DNA, 25 bp, Artificial
  Probe
gagactgtgttcagaggagagcttt

SEQ ID NO: 38962 - DNA, 25 bp, Artificial
  Probe
gcacatggagatccacgatagagtg

SEQ ID NO: 38963 - DNA, 25 bp, Artificial
  Probe
tagagtggagaactacaaccctcgg

SEQ ID NO: 38964 - DNA, 25 bp, Artificial
  Probe
agactgtgttcagaggagagctttg

SEQ ID NO: 38965 - DNA, 25 bp, Artificial
  Probe
agtgtccccttgaccaataaacatg

SEQ ID NO: 38966 - DNA, 25 bp, Artificial
  Probe
tgtgttcagaggagagctttgctag

SEQ ID NO: 38967 - DNA, 25 bp, Artificial
  Probe
ctgtgttcagaggagagctttgcta

SEQ ID NO: 38968 - DNA, 25 bp, Artificial
  Probe
tccagtgtccccttgaccaataaac

SEQ ID NO: 38969 - DNA, 25 bp, Artificial
  Probe
gtccagtgtccccttgaccaataaa

SEQ ID NO: 38970 - DNA, 25 bp, Artificial
  Probe
ccagtgtccccttgaccaataaaca

SEQ ID NO: 38971 - DNA, 25 bp, Artificial
  Probe
ccccttgaccaataaacatgtgact

SEQ ID NO: 38972 - DNA, 25 bp, Artificial
  Probe
tccccttgaccaataaacatgtgac

SEQ ID NO: 38973 - DNA, 25 bp, Artificial
  Probe
gtccccttgaccaataaacatgtga

SEQ ID NO: 38974 - DNA, 25 bp, Artificial
  Probe
tgtccccttgaccaataaacatgtg

SEQ ID NO: 38975 - DNA, 25 bp, Artificial
  Probe
gtgtccccttgaccaataaacatgt

SEQ ID NO: 38976 - DNA, 25 bp, Artificial
  Probe
gtatgtccgcctcatagattcaatg

SEQ ID NO: 38977 - DNA, 25 bp, Artificial
  Probe
tgtatgtccgcctcatagattcaat

SEQ ID NO: 38978 - DNA, 25 bp, Artificial
  Probe
atagattcaatgaccagacaggtga

SEQ ID NO: 38979 - DNA, 25 bp, Artificial
  Probe
catagattcaatgaccagacaggtg

SEQ ID NO: 38980 - DNA, 25 bp, Artificial
  Probe
ggagaaagagaaagagccgaataac

SEQ ID NO: 38981 - DNA, 25 bp, Artificial
  Probe
ctgtatgtccgcctcatagattcaa

SEQ ID NO: 38982 - DNA, 25 bp, Artificial
  Probe
tagattcaatgaccagacaggtgag

SEQ ID NO: 38983 - DNA, 25 bp, Artificial
  Probe
tggagaaagagaaagagccgaataa

SEQ ID NO: 38984 - DNA, 25 bp, Artificial
  Probe
gaaagagaaagagccgaataacgag

SEQ ID NO: 38985 - DNA, 25 bp, Artificial
  Probe
gagaaagagaaagagccgaataacg

SEQ ID NO: 38986 - DNA, 25 bp, Artificial
  Probe
ctcatagattcaatgaccagacagg

SEQ ID NO: 38987 - DNA, 25 bp, Artificial
  Probe
cctcatagattcaatgaccagacag

SEQ ID NO: 38988 - DNA, 25 bp, Artificial
  Probe
agagaaagagccgaataacgagaaa

SEQ ID NO: 38989 - DNA, 25 bp, Artificial
  Probe
aagagaaagagccgaataacgagaa

SEQ ID NO: 38990 - DNA, 25 bp, Artificial
  Probe
aaagagaaagagccgaataacgaga

SEQ ID NO: 38991 - DNA, 25 bp, Artificial
  Probe
agaaagagaaagagccgaataacga

SEQ ID NO: 38992 - DNA, 25 bp, Artificial
  Probe
atctgtatgtccgcctcatagattc

SEQ ID NO: 38993 - DNA, 25 bp, Artificial
  Probe
tcatagattcaatgaccagacaggt

SEQ ID NO: 38994 - DNA, 25 bp, Artificial
  Probe
gatctgtatgtccgcctcatagatt

SEQ ID NO: 38995 - DNA, 25 bp, Artificial
  Probe
gattcaatgaccagacaggtgagaa

SEQ ID NO: 38996 - DNA, 25 bp, Artificial
  Probe
gtggagaaagagaaagagccgaata

SEQ ID NO: 38997 - DNA, 25 bp, Artificial
  Probe
actgacaaatggatctcctgtattt

SEQ ID NO: 38998 - DNA, 25 bp, Artificial
  Probe
gactgacaaatggatctcctgtatt

SEQ ID NO: 38999 - DNA, 25 bp, Artificial
  Probe
tatgtccgcctcatagattcaatga

SEQ ID NO: 39000 - DNA, 25 bp, Artificial
  Probe
tctgtatgtccgcctcatagattca

SEQ ID NO: 39001 - DNA, 25 bp, Artificial
  Probe
agactgacaaatggatctcctgtat

SEQ ID NO: 39002 - DNA, 25 bp, Artificial
  Probe
agattcaatgaccagacaggtgaga

SEQ ID NO: 39003 - DNA, 25 bp, Artificial
  Probe
gcctcatagattcaatgaccagaca

SEQ ID NO: 39004 - DNA, 25 bp, Artificial
  Probe
ttcatgtttgggattcaggagaata

SEQ ID NO: 39005 - DNA, 25 bp, Artificial
  Probe
tcatgtttgggattcaggagaatat

SEQ ID NO: 39006 - DNA, 25 bp, Artificial
  Probe
aaccaacaacggcattcactacaag

SEQ ID NO: 39007 - DNA, 25 bp, Artificial
  Probe
cagactgacaaatggatctcctgta

SEQ ID NO: 39008 - DNA, 25 bp, Artificial
  Probe
ttccgcctctctactccttgtattt

SEQ ID NO: 39009 - DNA, 25 bp, Artificial
  Probe
tttccgcctctctactccttgtatt

SEQ ID NO: 39010 - DNA, 25 bp, Artificial
  Probe
tgttcatgtttgggattcaggagaa

SEQ ID NO: 39011 - DNA, 25 bp, Artificial
  Probe
ggactttgtggagaaagagaaagag

SEQ ID NO: 39012 - DNA, 25 bp, Artificial
  Probe
gttcatgtttgggattcaggagaat

SEQ ID NO: 39013 - DNA, 25 bp, Artificial
  Probe
atgtccgcctcatagattcaatgac

SEQ ID NO: 39014 - DNA, 25 bp, Artificial
  Probe
gagagagcagactgacaaatggatc

SEQ ID NO: 39015 - DNA, 25 bp, Artificial
  Probe
catgtttgggattcaggagaatatt

SEQ ID NO: 39016 - DNA, 25 bp, Artificial
  Probe
tactccttgtattttcctttctgct

SEQ ID NO: 39017 - DNA, 25 bp, Artificial
  Probe
ctactccttgtattttcctttctgc

SEQ ID NO: 39018 - DNA, 25 bp, Artificial
  Probe
attcaatgaccagacaggtgagaaa

SEQ ID NO: 39019 - DNA, 25 bp, Artificial
  Probe
cctctctactccttgtattttcctt

SEQ ID NO: 39020 - DNA, 25 bp, Artificial
  Probe
aaatccaatttcttccacttcgtgc

SEQ ID NO: 39021 - DNA, 25 bp, Artificial
  Probe
cacacacatctatctatacatgctg

SEQ ID NO: 39022 - DNA, 25 bp, Artificial
  Probe
acacacatctatctatacatgctgg

SEQ ID NO: 39023 - DNA, 25 bp, Artificial
  Probe
ccacacacatctatctatacatgct

SEQ ID NO: 39024 - DNA, 25 bp, Artificial
  Probe
atcactctcttagaccatgctaatg

SEQ ID NO: 39025 - DNA, 25 bp, Artificial
  Probe
cactctcttagaccatgctaatgtt

SEQ ID NO: 39026 - DNA, 25 bp, Artificial
  Probe
gatcactctcttagaccatgctaat

SEQ ID NO: 39027 - DNA, 25 bp, Artificial
  Probe
actctcttagaccatgctaatgtta

SEQ ID NO: 39028 - DNA, 25 bp, Artificial
  Probe
tcactctcttagaccatgctaatgt

SEQ ID NO: 39029 - DNA, 25 bp, Artificial
  Probe
cacccacacacatctatctatacat

SEQ ID NO: 39030 - DNA, 25 bp, Artificial
  Probe
cacacccacacacatctatctatac

SEQ ID NO: 39031 - DNA, 25 bp, Artificial
  Probe
acacccacacacatctatctataca

SEQ ID NO: 39032 - DNA, 25 bp, Artificial
  Probe
acacacccacacacatctatctata

SEQ ID NO: 39033 - DNA, 25 bp, Artificial
  Probe
tacacacccacacacatctatctat

SEQ ID NO: 39034 - DNA, 25 bp, Artificial
  Probe
accatgctaatgttaatagagaaga

SEQ ID NO: 39035 - DNA, 25 bp, Artificial
  Probe
agaccatgctaatgttaatagagaa

SEQ ID NO: 39036 - DNA, 25 bp, Artificial
  Probe
tctatgtgaaacttgaaatgaggaa

SEQ ID NO: 39037 - DNA, 25 bp, Artificial
  Probe
ctctcttagaccatgctaatgttaa

SEQ ID NO: 39038 - DNA, 25 bp, Artificial
  Probe
gaccatgctaatgttaatagagaag

SEQ ID NO: 39039 - DNA, 25 bp, Artificial
  Probe
ttctatgtgaaacttgaaatgagga

SEQ ID NO: 39040 - DNA, 25 bp, Artificial
  Probe
cttctatgtgaaacttgaaatgagg

SEQ ID NO: 39041 - DNA, 25 bp, Artificial
  Probe
acccacacacatctatctatacatg

SEQ ID NO: 39042 - DNA, 25 bp, Artificial
  Probe
attgttgctttgtttctctgataaa

SEQ ID NO: 39043 - DNA, 25 bp, Artificial
  Probe
tttcaacattgtatttggactatgc

SEQ ID NO: 39044 - DNA, 25 bp, Artificial
  Probe
cccacacacatctatctatacatgc

SEQ ID NO: 39045 - DNA, 25 bp, Artificial
  Probe
gtacacacccacacacatctatcta

SEQ ID NO: 39046 - DNA, 25 bp, Artificial
  Probe
ctatgtgaaacttgaaatgaggaaa

SEQ ID NO: 39047 - DNA, 25 bp, Artificial
  Probe
aattgttgctttgtttctctgataa

SEQ ID NO: 39048 - DNA, 25 bp, Artificial
  Probe
tctcttagaccatgctaatgttaat

SEQ ID NO: 39049 - DNA, 25 bp, Artificial
  Probe
aaattgttgctttgtttctctgata

SEQ ID NO: 39050 - DNA, 25 bp, Artificial
  Probe
tagaccatgctaatgttaatagaga

SEQ ID NO: 39051 - DNA, 25 bp, Artificial
  Probe
ccatgctaatgttaatagagaagaa

SEQ ID NO: 39052 - DNA, 25 bp, Artificial
  Probe
aattctagtgtaaatcatgcaagcg

SEQ ID NO: 39053 - DNA, 25 bp, Artificial
  Probe
tcttctatgtgaaacttgaaatgag

SEQ ID NO: 39054 - DNA, 25 bp, Artificial
  Probe
caattctagtgtaaatcatgcaagc

SEQ ID NO: 39055 - DNA, 25 bp, Artificial
  Probe
atgatcactctcttagaccatgcta

SEQ ID NO: 39056 - DNA, 25 bp, Artificial
  Probe
ttcaacattgtatttggactatgca

SEQ ID NO: 39057 - DNA, 25 bp, Artificial
  Probe
ttcttctatgtgaaacttgaaatga

SEQ ID NO: 39058 - DNA, 25 bp, Artificial
  Probe
gctaatgttaatagagaagaagcat

SEQ ID NO: 39059 - DNA, 25 bp, Artificial
  Probe
atgctaatgttaatagagaagaagc

SEQ ID NO: 39060 - DNA, 25 bp, Artificial
  Probe
tgatcactctcttagaccatgctaa

SEQ ID NO: 39061 - DNA, 25 bp, Artificial
  Probe
gatgatcactctcttagaccatgct

SEQ ID NO: 39062 - DNA, 25 bp, Artificial
  Probe
gtgaaacttgaaatgaggaaaagca

SEQ ID NO: 39063 - DNA, 25 bp, Artificial
  Probe
tgtgaaacttgaaatgaggaaaagc

SEQ ID NO: 39064 - DNA, 25 bp, Artificial
  Probe
tgaaacttgaaatgaggaaaagcaa

SEQ ID NO: 39065 - DNA, 25 bp, Artificial
  Probe
acttgaaatgaggaaaagcaattct

SEQ ID NO: 39066 - DNA, 25 bp, Artificial
  Probe
aataatctctctctctgtggctctt

SEQ ID NO: 39067 - DNA, 25 bp, Artificial
  Probe
gaataatctctctctctgtggctct

SEQ ID NO: 39068 - DNA, 25 bp, Artificial
  Probe
tacctcaggaataatctctctctct

SEQ ID NO: 39069 - DNA, 25 bp, Artificial
  Probe
accttatgtctatgtgtgctagttg

SEQ ID NO: 39070 - DNA, 25 bp, Artificial
  Probe
ataatctctctctctgtggctcttg

SEQ ID NO: 39071 - DNA, 25 bp, Artificial
  Probe
ctacctcaggaataatctctctctc

SEQ ID NO: 39072 - DNA, 25 bp, Artificial
  Probe
ttatgtctatgtgtgctagttgctc

SEQ ID NO: 39073 - DNA, 25 bp, Artificial
  Probe
cttatgtctatgtgtgctagttgct

SEQ ID NO: 39074 - DNA, 25 bp, Artificial
  Probe
ccttatgtctatgtgtgctagttgc

SEQ ID NO: 39075 - DNA, 25 bp, Artificial
  Probe
ggaataatctctctctctgtggctc

SEQ ID NO: 39076 - DNA, 25 bp, Artificial
  Probe
ctcaggaataatctctctctctgtg

SEQ ID NO: 39077 - DNA, 25 bp, Artificial
  Probe
cctcaggaataatctctctctctgt

SEQ ID NO: 39078 - DNA, 25 bp, Artificial
  Probe
acctcaggaataatctctctctctg

SEQ ID NO: 39079 - DNA, 25 bp, Artificial
  Probe
aggaataatctctctctctgtggct

SEQ ID NO: 39080 - DNA, 25 bp, Artificial
  Probe
tcaggaataatctctctctctgtgg

SEQ ID NO: 39081 - DNA, 25 bp, Artificial
  Probe
gaccttatgtctatgtgtgctagtt

SEQ ID NO: 39082 - DNA, 25 bp, Artificial
  Probe
aaggcacagttcctatatcttcatc

SEQ ID NO: 39083 - DNA, 25 bp, Artificial
  Probe
cctacctcaggaataatctctctct

SEQ ID NO: 39084 - DNA, 25 bp, Artificial
  Probe
caaggcacagttcctatatcttcat

SEQ ID NO: 39085 - DNA, 25 bp, Artificial
  Probe
aggcacagttcctatatcttcatcc

SEQ ID NO: 39086 - DNA, 25 bp, Artificial
  Probe
tatgtctatgtgtgctagttgctcg

SEQ ID NO: 39087 - DNA, 25 bp, Artificial
  Probe
gggttgaaagagaatagttgttgaa

SEQ ID NO: 39088 - DNA, 25 bp, Artificial
  Probe
cacagttcctatatcttcatcccac

SEQ ID NO: 39089 - DNA, 25 bp, Artificial
  Probe
gttcctatatcttcatcccactcat

SEQ ID NO: 39090 - DNA, 25 bp, Artificial
  Probe
ccaaggcacagttcctatatcttca

SEQ ID NO: 39091 - DNA, 25 bp, Artificial
  Probe
caggaataatctctctctctgtggc

SEQ ID NO: 39092 - DNA, 25 bp, Artificial
  Probe
cgggttgaaagagaatagttgttga

SEQ ID NO: 39093 - DNA, 25 bp, Artificial
  Probe
cagttcctatatcttcatcccactc

SEQ ID NO: 39094 - DNA, 25 bp, Artificial
  Probe
agttcctatatcttcatcccactca

SEQ ID NO: 39095 - DNA, 25 bp, Artificial
  Probe
acagttcctatatcttcatcccact

SEQ ID NO: 39096 - DNA, 25 bp, Artificial
  Probe
gcacagttcctatatcttcatccca

SEQ ID NO: 39097 - DNA, 25 bp, Artificial
  Probe
ggttgaaagagaatagttgttgaaa

SEQ ID NO: 39098 - DNA, 25 bp, Artificial
  Probe
tcctatatcttcatcccactcatgt

SEQ ID NO: 39099 - DNA, 25 bp, Artificial
  Probe
ttcctatatcttcatcccactcatg

SEQ ID NO: 39100 - DNA, 25 bp, Artificial
  Probe
taatctctctctctgtggctcttgc

SEQ ID NO: 39101 - DNA, 25 bp, Artificial
  Probe
cctatatcttcatcccactcatgta

SEQ ID NO: 39102 - DNA, 25 bp, Artificial
  Probe
agataccactgttcctctaaacgag

SEQ ID NO: 39103 - DNA, 25 bp, Artificial
  Probe
gagataccactgttcctctaaacga

SEQ ID NO: 39104 - DNA, 25 bp, Artificial
  Probe
tcatgtatgagacttaggaaggaaa

SEQ ID NO: 39105 - DNA, 25 bp, Artificial
  Probe
ggcacagttcctatatcttcatccc

SEQ ID NO: 39106 - DNA, 25 bp, Artificial
  Probe
ttggagataccactgttcctctaaa

SEQ ID NO: 39107 - DNA, 25 bp, Artificial
  Probe
tttggagataccactgttcctctaa

SEQ ID NO: 39108 - DNA, 25 bp, Artificial
  Probe
tggagataccactgttcctctaaac

SEQ ID NO: 39109 - DNA, 25 bp, Artificial
  Probe
gtttggagataccactgttcctcta

SEQ ID NO: 39110 - DNA, 25 bp, Artificial
  Probe
gttgaaagagaatagttgttgaaac

SEQ ID NO: 39111 - DNA, 25 bp, Artificial
  Probe
aatgaggaggtaacaacaacagaag

SEQ ID NO: 39112 - DNA, 25 bp, Artificial
  Probe
gaatgaggaggtaacaacaacagaa

SEQ ID NO: 39113 - DNA, 25 bp, Artificial
  Probe
ttatgtagaaggtgagagaaggctg

SEQ ID NO: 39114 - DNA, 25 bp, Artificial
  Probe
acagaatcaagtccagatcagaatg

SEQ ID NO: 39115 - DNA, 25 bp, Artificial
  Probe
cacagaatcaagtccagatcagaat

SEQ ID NO: 39116 - DNA, 25 bp, Artificial
  Probe
tgaatgaggaggtaacaacaacaga

SEQ ID NO: 39117 - DNA, 25 bp, Artificial
  Probe
tgctatgactcttcggactagaatt

SEQ ID NO: 39118 - DNA, 25 bp, Artificial
  Probe
cagaatcaagtccagatcagaatga

SEQ ID NO: 39119 - DNA, 25 bp, Artificial
  Probe
ctgctatgactcttcggactagaat

SEQ ID NO: 39120 - DNA, 25 bp, Artificial
  Probe
ccacagaatcaagtccagatcagaa

SEQ ID NO: 39121 - DNA, 25 bp, Artificial
  Probe
gtcctgtgtcctgtcttctgttatg

SEQ ID NO: 39122 - DNA, 25 bp, Artificial
  Probe
agtcctgtgtcctgtcttctgttat

SEQ ID NO: 39123 - DNA, 25 bp, Artificial
  Probe
atgaggaggtaacaacaacagaagc

SEQ ID NO: 39124 - DNA, 25 bp, Artificial
  Probe
tttatgtagaaggtgagagaaggct

SEQ ID NO: 39125 - DNA, 25 bp, Artificial
  Probe
tgagtcagaggataggttgaacagt

SEQ ID NO: 39126 - DNA, 25 bp, Artificial
  Probe
ctgtgtcctgtcttctgttatggat

SEQ ID NO: 39127 - DNA, 25 bp, Artificial
  Probe
tgactaccaaacaagtgactacaaa

SEQ ID NO: 39128 - DNA, 25 bp, Artificial
  Probe
gtgactaccaaacaagtgactacaa

SEQ ID NO: 39129 - DNA, 25 bp, Artificial
  Probe
tagaaggtgagagaaggctgctatg

SEQ ID NO: 39130 - DNA, 25 bp, Artificial
  Probe
gtagaaggtgagagaaggctgctat

SEQ ID NO: 39131 - DNA, 25 bp, Artificial
  Probe
tgtgtcctgtcttctgttatggatc

SEQ ID NO: 39132 - DNA, 25 bp, Artificial
  Probe
gagtcctgtgtcctgtcttctgtta

SEQ ID NO: 39133 - DNA, 25 bp, Artificial
  Probe
gaatcaagtccagatcagaatgatg

SEQ ID NO: 39134 - DNA, 25 bp, Artificial
  Probe
agaatcaagtccagatcagaatgat

SEQ ID NO: 39135 - DNA, 25 bp, Artificial
  Probe
cagtgactaccaaacaagtgactac

SEQ ID NO: 39136 - DNA, 25 bp, Artificial
  Probe
agtgactaccaaacaagtgactaca

SEQ ID NO: 39137 - DNA, 25 bp, Artificial
  Probe
accacagaatcaagtccagatcaga

SEQ ID NO: 39138 - DNA, 25 bp, Artificial
  Probe
gtccagatcagaatgatgccatatc

SEQ ID NO: 39139 - DNA, 25 bp, Artificial
  Probe
tatgtagaaggtgagagaaggctgc

SEQ ID NO: 39140 - DNA, 25 bp, Artificial
  Probe
aatcaagtccagatcagaatgatgc

SEQ ID NO: 39141 - DNA, 25 bp, Artificial
  Probe
gctatgactcttcggactagaattc

SEQ ID NO: 39142 - DNA, 25 bp, Artificial
  Probe
gaaaccagtgactatgaaaccagtg

SEQ ID NO: 39143 - DNA, 25 bp, Artificial
  Probe
agtccagatcagaatgatgccatat

SEQ ID NO: 39144 - DNA, 25 bp, Artificial
  Probe
tcctgtgtcctgtcttctgttatgg

SEQ ID NO: 39145 - DNA, 25 bp, Artificial
  Probe
gaccacagaatcaagtccagatcag

SEQ ID NO: 39146 - DNA, 25 bp, Artificial
  Probe
aagtccagatcagaatgatgccata

SEQ ID NO: 39147 - DNA, 25 bp, Artificial
  Probe
ctgtggaccatcagaatcctgtaac

SEQ ID NO: 39148 - DNA, 25 bp, Artificial
  Probe
aacaagtgaccacagaatcaagtcc

SEQ ID NO: 39149 - DNA, 25 bp, Artificial
  Probe
aaaccagtgactatgaaaccagtga

SEQ ID NO: 39150 - DNA, 25 bp, Artificial
  Probe
ccagtgactaccaaacaagtgacta

SEQ ID NO: 39151 - DNA, 25 bp, Artificial
  Probe
aaacaagtgaccacagaatcaagtc

SEQ ID NO: 39152 - DNA, 25 bp, Artificial
  Probe
gaaaccagtgactaccaaacaagtg

SEQ ID NO: 39153 - DNA, 25 bp, Artificial
  Probe
gctgctatgactcttcggactagaa

SEQ ID NO: 39154 - DNA, 25 bp, Artificial
  Probe
tccagatcagaatgatgccatatcc

SEQ ID NO: 39155 - DNA, 25 bp, Artificial
  Probe
gtgaccacagaatcaagtccagatc

SEQ ID NO: 39156 - DNA, 25 bp, Artificial
  Probe
cgaagttctgatgttgaatgttaat

SEQ ID NO: 39157 - DNA, 25 bp, Artificial
  Probe
ctgaagaggaggaagacgagtattc

SEQ ID NO: 39158 - DNA, 25 bp, Artificial
  Probe
atcagcaaagcaggaaataggtata

SEQ ID NO: 39159 - DNA, 25 bp, Artificial
  Probe
atatcatcagcaaagcaggaaatag

SEQ ID NO: 39160 - DNA, 25 bp, Artificial
  Probe
tatcatcagcaaagcaggaaatagg

SEQ ID NO: 39161 - DNA, 25 bp, Artificial
  Probe
ggcattctttcctttctcttgtaag

SEQ ID NO: 39162 - DNA, 25 bp, Artificial
  Probe
cattctttcctttctcttgtaagca

SEQ ID NO: 39163 - DNA, 25 bp, Artificial
  Probe
catcagcaaagcaggaaataggtat

SEQ ID NO: 39164 - DNA, 25 bp, Artificial
  Probe
ttctttcctttctcttgtaagcaga

SEQ ID NO: 39165 - DNA, 25 bp, Artificial
  Probe
attctttcctttctcttgtaagcag

SEQ ID NO: 39166 - DNA, 25 bp, Artificial
  Probe
gcattctttcctttctcttgtaagc

SEQ ID NO: 39167 - DNA, 25 bp, Artificial
  Probe
tcatcagcaaagcaggaaataggta

SEQ ID NO: 39168 - DNA, 25 bp, Artificial
  Probe
aggcattctttcctttctcttgtaa

SEQ ID NO: 39169 - DNA, 25 bp, Artificial
  Probe
gctgaagaggaggaagacgagtatt

SEQ ID NO: 39170 - DNA, 25 bp, Artificial
  Probe
gaggcattctttcctttctcttgta

SEQ ID NO: 39171 - DNA, 25 bp, Artificial
  Probe
tttaatgccatttctaaacatgctg

SEQ ID NO: 39172 - DNA, 25 bp, Artificial
  Probe
atcatcagcaaagcaggaaataggt

SEQ ID NO: 39173 - DNA, 25 bp, Artificial
  Probe
gaagttctgatgttgaatgttaatt

SEQ ID NO: 39174 - DNA, 25 bp, Artificial
  Probe
agcaaagcaggaaataggtatactc

SEQ ID NO: 39175 - DNA, 25 bp, Artificial
  Probe
atttaatgccatttctaaacatgct

SEQ ID NO: 39176 - DNA, 25 bp, Artificial
  Probe
gcaaagcaggaaataggtatactca

SEQ ID NO: 39177 - DNA, 25 bp, Artificial
  Probe
cagcaaagcaggaaataggtatact

SEQ ID NO: 39178 - DNA, 25 bp, Artificial
  Probe
tcagcaaagcaggaaataggtatac

SEQ ID NO: 39179 - DNA, 25 bp, Artificial
  Probe
ttaatgccatttctaaacatgctgg

SEQ ID NO: 39180 - DNA, 25 bp, Artificial
  Probe
gtgaggcattctttcctttctcttg

SEQ ID NO: 39181 - DNA, 25 bp, Artificial
  Probe
agccattgtatctactgcctgtgag

SEQ ID NO: 39182 - DNA, 25 bp, Artificial
  Probe
gatatcatcagcaaagcaggaaata

SEQ ID NO: 39183 - DNA, 25 bp, Artificial
  Probe
tctttcctttctcttgtaagcagaa

SEQ ID NO: 39184 - DNA, 25 bp, Artificial
  Probe
tgaggcattctttcctttctcttgt

SEQ ID NO: 39185 - DNA, 25 bp, Artificial
  Probe
tgtgaggcattctttcctttctctt

SEQ ID NO: 39186 - DNA, 25 bp, Artificial
  Probe
taatgccatttctaaacatgctggg

SEQ ID NO: 39187 - DNA, 25 bp, Artificial
  Probe
ctgtgaggcattctttcctttctct

SEQ ID NO: 39188 - DNA, 25 bp, Artificial
  Probe
tgctgaagaggaggaagacgagtat

SEQ ID NO: 39189 - DNA, 25 bp, Artificial
  Probe
tgaagaggaggaagacgagtattcg

SEQ ID NO: 39190 - DNA, 25 bp, Artificial
  Probe
cttgtaagcagaaaataaatcgtca

SEQ ID NO: 39191 - DNA, 25 bp, Artificial
  Probe
cagccattgtatctactgcctgtga

SEQ ID NO: 39192 - DNA, 25 bp, Artificial
  Probe
tatttaatgccatttctaaacatgc

SEQ ID NO: 39193 - DNA, 25 bp, Artificial
  Probe
tttcaaaactgatctggttctttcc

SEQ ID NO: 39194 - DNA, 25 bp, Artificial
  Probe
gctgggttttgggtgaaaataataa

SEQ ID NO: 39195 - DNA, 25 bp, Artificial
  Probe
tcttgtaagcagaaaataaatcgtc

SEQ ID NO: 39196 - DNA, 25 bp, Artificial
  Probe
ctcttgtaagcagaaaataaatcgt

SEQ ID NO: 39197 - DNA, 25 bp, Artificial
  Probe
ttgtaagcagaaaataaatcgtcat

SEQ ID NO: 39198 - DNA, 25 bp, Artificial
  Probe
ctgatgttgaatgttaattatctga

SEQ ID NO: 39199 - DNA, 25 bp, Artificial
  Probe
tctgatgttgaatgttaattatctg

SEQ ID NO: 39200 - DNA, 25 bp, Artificial
  Probe
tgctgggttttgggtgaaaataata

SEQ ID NO: 39201 - DNA, 25 bp, Artificial
  Probe
ttttctctccttttcttttcttcaa

SEQ ID NO: 39202 - DNA, 25 bp, Artificial
  Probe
tttctctccttttcttttcttcaat

SEQ ID NO: 39203 - DNA, 25 bp, Artificial
  Probe
ggactgagaccactctggaaagaag

SEQ ID NO: 39204 - DNA, 25 bp, Artificial
  Probe
gaaggactgagaccactctggaaag

SEQ ID NO: 39205 - DNA, 25 bp, Artificial
  Probe
tctctccttttcttttcttcaataa

SEQ ID NO: 39206 - DNA, 25 bp, Artificial
  Probe
ttctctccttttcttttcttcaata

SEQ ID NO: 39207 - DNA, 25 bp, Artificial
  Probe
aggactgagaccactctggaaagaa

SEQ ID NO: 39208 - DNA, 25 bp, Artificial
  Probe
aaggactgagaccactctggaaaga

SEQ ID NO: 39209 - DNA, 25 bp, Artificial
  Probe
ctgagaccactctggaaagaagcag

SEQ ID NO: 39210 - DNA, 25 bp, Artificial
  Probe
gactgagaccactctggaaagaagc

SEQ ID NO: 39211 - DNA, 25 bp, Artificial
  Probe
ctctccttttcttttcttcaataaa

SEQ ID NO: 39212 - DNA, 25 bp, Artificial
  Probe
tctccttttcttttcttcaataaaa

SEQ ID NO: 39213 - DNA, 25 bp, Artificial
  Probe
cagccaatactagataagccactaa

SEQ ID NO: 39214 - DNA, 25 bp, Artificial
  Probe
agccaatactagataagccactaag

SEQ ID NO: 39215 - DNA, 25 bp, Artificial
  Probe
tcagccaatactagataagccacta

SEQ ID NO: 39216 - DNA, 25 bp, Artificial
  Probe
taccttcagccaatactagataagc

SEQ ID NO: 39217 - DNA, 25 bp, Artificial
  Probe
ttcagccaatactagataagccact

SEQ ID NO: 39218 - DNA, 25 bp, Artificial
  Probe
cttcagccaatactagataagccac

SEQ ID NO: 39219 - DNA, 25 bp, Artificial
  Probe
cgaggcttattcttctggagtagtt

SEQ ID NO: 39220 - DNA, 25 bp, Artificial
  Probe
gccaatactagataagccactaagt

SEQ ID NO: 39221 - DNA, 25 bp, Artificial
  Probe
ataataatgatgaccacctcaactg

SEQ ID NO: 39222 - DNA, 25 bp, Artificial
  Probe
actgtatagctgtgacactgtatat

SEQ ID NO: 39223 - DNA, 25 bp, Artificial
  Probe
ccttcagccaatactagataagcca

SEQ ID NO: 39224 - DNA, 25 bp, Artificial
  Probe
accttcagccaatactagataagcc

SEQ ID NO: 39225 - DNA, 25 bp, Artificial
  Probe
aataataatgatgaccacctcaact

SEQ ID NO: 39226 - DNA, 25 bp, Artificial
  Probe
ctgtcttgattgacttcctgtgatg

SEQ ID NO: 39227 - DNA, 25 bp, Artificial
  Probe
taataatgatgaccacctcaactgg

SEQ ID NO: 39228 - DNA, 25 bp, Artificial
  Probe
ggcttattcttctggagtagtttct

SEQ ID NO: 39229 - DNA, 25 bp, Artificial
  Probe
aggcttattcttctggagtagtttc

SEQ ID NO: 39230 - DNA, 25 bp, Artificial
  Probe
gaggcttattcttctggagtagttt

SEQ ID NO: 39231 - DNA, 25 bp, Artificial
  Probe
actgtcttgattgacttcctgtgat

SEQ ID NO: 39232 - DNA, 25 bp, Artificial
  Probe
ttaccttcagccaatactagataag

SEQ ID NO: 39233 - DNA, 25 bp, Artificial
  Probe
atacgcagaaatgtaagtaaaccct

SEQ ID NO: 39234 - DNA, 25 bp, Artificial
  Probe
catacgcagaaatgtaagtaaaccc

SEQ ID NO: 39235 - DNA, 25 bp, Artificial
  Probe
aactgtatagctgtgacactgtata

SEQ ID NO: 39236 - DNA, 25 bp, Artificial
  Probe
agaaatgtaagtaaaccctgtctgc

SEQ ID NO: 39237 - DNA, 25 bp, Artificial
  Probe
attaccttcagccaatactagataa

SEQ ID NO: 39238 - DNA, 25 bp, Artificial
  Probe
aattaccttcagccaatactagata

SEQ ID NO: 39239 - DNA, 25 bp, Artificial
  Probe
ttcttctggagtagtttctcatctc

SEQ ID NO: 39240 - DNA, 25 bp, Artificial
  Probe
ccgaggcttattcttctggagtagt

SEQ ID NO: 39241 - DNA, 25 bp, Artificial
  Probe
gcttattcttctggagtagtttctc

SEQ ID NO: 39242 - DNA, 25 bp, Artificial
  Probe
attcttctggagtagtttctcatct

SEQ ID NO: 39243 - DNA, 25 bp, Artificial
  Probe
atagctgtgacactgtatattgtac

SEQ ID NO: 39244 - DNA, 25 bp, Artificial
  Probe
gtatagctgtgacactgtatattgt

SEQ ID NO: 39245 - DNA, 25 bp, Artificial
  Probe
tgtatagctgtgacactgtatattg

SEQ ID NO: 39246 - DNA, 25 bp, Artificial
  Probe
ttgactgtactgaggtttcacttta

SEQ ID NO: 39247 - DNA, 25 bp, Artificial
  Probe
cactgtcttgattgacttcctgtga

SEQ ID NO: 39248 - DNA, 25 bp, Artificial
  Probe
tgactgtactgaggtttcactttat

SEQ ID NO: 39249 - DNA, 25 bp, Artificial
  Probe
tttgactgtactgaggtttcacttt

SEQ ID NO: 39250 - DNA, 25 bp, Artificial
  Probe
cacactgtcttgattgacttcctgt

SEQ ID NO: 39251 - DNA, 25 bp, Artificial
  Probe
ctgtatagctgtgacactgtatatt

SEQ ID NO: 39252 - DNA, 25 bp, Artificial
  Probe
ctttgactgtactgaggtttcactt

SEQ ID NO: 39253 - DNA, 25 bp, Artificial
  Probe
gcagaaatgtaagtaaaccctgtct

SEQ ID NO: 39254 - DNA, 25 bp, Artificial
  Probe
tacgcagaaatgtaagtaaaccctg

SEQ ID NO: 39255 - DNA, 25 bp, Artificial
  Probe
acactgtcttgattgacttcctgtg

SEQ ID NO: 39256 - DNA, 25 bp, Artificial
  Probe
gcagcttcctagtttgtaaatagac

SEQ ID NO: 39257 - DNA, 25 bp, Artificial
  Probe
agcagcttcctagtttgtaaataga

SEQ ID NO: 39258 - DNA, 25 bp, Artificial
  Probe
ttaatcgcacataagcaggtacatt

SEQ ID NO: 39259 - DNA, 25 bp, Artificial
  Probe
taatcgcacataagcaggtacattt

SEQ ID NO: 39260 - DNA, 25 bp, Artificial
  Probe
tttaatcgcacataagcaggtacat

SEQ ID NO: 39261 - DNA, 25 bp, Artificial
  Probe
ctttaatcgcacataagcaggtaca

SEQ ID NO: 39262 - DNA, 25 bp, Artificial
  Probe
tttgtctagtaaactttgcttcttt

SEQ ID NO: 39263 - DNA, 25 bp, Artificial
  Probe
gccttttgtctagtaaactttgctt

SEQ ID NO: 39264 - DNA, 25 bp, Artificial
  Probe
ttgtgttctctctgaaaacggaaat

SEQ ID NO: 39265 - DNA, 25 bp, Artificial
  Probe
cacataagcaggtacattttgaaga

SEQ ID NO: 39266 - DNA, 25 bp, Artificial
  Probe
acataagcaggtacattttgaagag

SEQ ID NO: 39267 - DNA, 25 bp, Artificial
  Probe
caagtctttatccagaagtcacgcc

SEQ ID NO: 39268 - DNA, 25 bp, Artificial
  Probe
ccaagtctttatccagaagtcacgc

SEQ ID NO: 39269 - DNA, 25 bp, Artificial
  Probe
cataagcaggtacattttgaagaga

SEQ ID NO: 39270 - DNA, 25 bp, Artificial
  Probe
gcacataagcaggtacattttgaag

SEQ ID NO: 39271 - DNA, 25 bp, Artificial
  Probe
taagcaggtacattttgaagagaag

SEQ ID NO: 39272 - DNA, 25 bp, Artificial
  Probe
ttgtctagtaaactttgcttcttta

SEQ ID NO: 39273 - DNA, 25 bp, Artificial
  Probe
ccttttgtctagtaaactttgcttc

SEQ ID NO: 39274 - DNA, 25 bp, Artificial
  Probe
aagtctttatccagaagtcacgcct

SEQ ID NO: 39275 - DNA, 25 bp, Artificial
  Probe
tgtgttctctctgaaaacggaaatg

SEQ ID NO: 39276 - DNA, 25 bp, Artificial
  Probe
cttgtgttctctctgaaaacggaaa

SEQ ID NO: 39277 - DNA, 25 bp, Artificial
  Probe
tatccagaagtcacgcctcacctta

SEQ ID NO: 39278 - DNA, 25 bp, Artificial
  Probe
ataagcaggtacattttgaagagaa

SEQ ID NO: 39279 - DNA, 25 bp, Artificial
  Probe
aatcgcacataagcaggtacatttt

SEQ ID NO: 39280 - DNA, 25 bp, Artificial
  Probe
aagcaggtacattttgaagagaagc

SEQ ID NO: 39281 - DNA, 25 bp, Artificial
  Probe
ctctgaaaacggaaatggtggaaag

SEQ ID NO: 39282 - DNA, 25 bp, Artificial
  Probe
agtctttatccagaagtcacgcctc

SEQ ID NO: 39283 - DNA, 25 bp, Artificial
  Probe
gttctctctgaaaacggaaatggtg

SEQ ID NO: 39284 - DNA, 25 bp, Artificial
  Probe
gtgttctctctgaaaacggaaatgg

SEQ ID NO: 39285 - DNA, 25 bp, Artificial
  Probe
cttttgtctagtaaactttgcttct

SEQ ID NO: 39286 - DNA, 25 bp, Artificial
  Probe
atcgcacataagcaggtacattttg

SEQ ID NO: 39287 - DNA, 25 bp, Artificial
  Probe
attgctcagctttaatcgcacataa

SEQ ID NO: 39288 - DNA, 25 bp, Artificial
  Probe
aattgctcagctttaatcgcacata

SEQ ID NO: 39289 - DNA, 25 bp, Artificial
  Probe
tctctgaaaacggaaatggtggaaa

SEQ ID NO: 39290 - DNA, 25 bp, Artificial
  Probe
cgcacataagcaggtacattttgaa

SEQ ID NO: 39291 - DNA, 25 bp, Artificial
  Probe
tgttctctctgaaaacggaaatggt

SEQ ID NO: 39292 - DNA, 25 bp, Artificial
  Probe
ttttgtctagtaaactttgcttctt

SEQ ID NO: 39293 - DNA, 25 bp, Artificial
  Probe
tctttatccagaagtcacgcctcac

SEQ ID NO: 39294 - DNA, 25 bp, Artificial
  Probe
gtctttatccagaagtcacgcctca

SEQ ID NO: 39295 - DNA, 25 bp, Artificial
  Probe
ttgctcagctttaatcgcacataag

SEQ ID NO: 39296 - DNA, 25 bp, Artificial
  Probe
ctctctgaaaacggaaatggtggaa

SEQ ID NO: 39297 - DNA, 25 bp, Artificial
  Probe
ttgaagagaagcttagtgtgtgcag

SEQ ID NO: 39298 - DNA, 25 bp, Artificial
  Probe
ccttgtgttctctctgaaaacggaa

SEQ ID NO: 39299 - DNA, 25 bp, Artificial
  Probe
gaagagaagcttagtgtgtgcagag

SEQ ID NO: 39300 - DNA, 25 bp, Artificial
  Probe
ttctctctgaaaacggaaatggtgg

SEQ ID NO: 39301 - DNA, 25 bp, Artificial
  Probe
tcgcacataagcaggtacattttga

SEQ ID NO: 39302 - DNA, 25 bp, Artificial
  Probe
aaacggaaatggtggaaagcattca

SEQ ID NO: 39303 - DNA, 25 bp, Artificial
  Probe
gatggagaagagtatgatgtggaag

SEQ ID NO: 39304 - DNA, 25 bp, Artificial
  Probe
tatgatggagaagagtatgatgtgg

SEQ ID NO: 39305 - DNA, 25 bp, Artificial
  Probe
gatgaagactcggatgactatgatg

SEQ ID NO: 39306 - DNA, 25 bp, Artificial
  Probe
gatggttctggattaggattctcac

SEQ ID NO: 39307 - DNA, 25 bp, Artificial
  Probe
atgatggagaagagtatgatgtgga

SEQ ID NO: 39308 - DNA, 25 bp, Artificial
  Probe
atggttctggattaggattctcact

SEQ ID NO: 39309 - DNA, 25 bp, Artificial
  Probe
tgatggagaagagtatgatgtggaa

SEQ ID NO: 39310 - DNA, 25 bp, Artificial
  Probe
tccgaacagaagattcagtaagaac

SEQ ID NO: 39311 - DNA, 25 bp, Artificial
  Probe
gtccgaacagaagattcagtaagaa

SEQ ID NO: 39312 - DNA, 25 bp, Artificial
  Probe
aatgcttatcctcaagaacatctgt

SEQ ID NO: 39313 - DNA, 25 bp, Artificial
  Probe
agatggttctggattaggattctca

SEQ ID NO: 39314 - DNA, 25 bp, Artificial
  Probe
tgcttatcctcaagaacatctgtat

SEQ ID NO: 39315 - DNA, 25 bp, Artificial
  Probe
atgcttatcctcaagaacatctgta

SEQ ID NO: 39316 - DNA, 25 bp, Artificial
  Probe
tagatggttctggattaggattctc

SEQ ID NO: 39317 - DNA, 25 bp, Artificial
  Probe
gcttatcctcaagaacatctgtatg

SEQ ID NO: 39318 - DNA, 25 bp, Artificial
  Probe
ggatgaagactcggatgactatgat

SEQ ID NO: 39319 - DNA, 25 bp, Artificial
  Probe
gttctggattaggattctcactgga

SEQ ID NO: 39320 - DNA, 25 bp, Artificial
  Probe
ccgaacagaagattcagtaagaact

SEQ ID NO: 39321 - DNA, 25 bp, Artificial
  Probe
ctatgatggagaagagtatgatgtg

SEQ ID NO: 39322 - DNA, 25 bp, Artificial
  Probe
gaagatgaggacgacaatgatgatg

SEQ ID NO: 39323 - DNA, 25 bp, Artificial
  Probe
gatgaagatgaggacgacaatgatg

SEQ ID NO: 39324 - DNA, 25 bp, Artificial
  Probe
gctagatggttctggattaggattc

SEQ ID NO: 39325 - DNA, 25 bp, Artificial
  Probe
atgaagactcggatgactatgatgg

SEQ ID NO: 39326 - DNA, 25 bp, Artificial
  Probe
tggttctggattaggattctcactg

SEQ ID NO: 39327 - DNA, 25 bp, Artificial
  Probe
cgaacagaagattcagtaagaactt

SEQ ID NO: 39328 - DNA, 25 bp, Artificial
  Probe
cggatgactatgatggagaagagta

SEQ ID NO: 39329 - DNA, 25 bp, Artificial
  Probe
gtgacttacaattctgctcataact

SEQ ID NO: 39330 - DNA, 25 bp, Artificial
  Probe
tgaagatgaggacgacaatgatgat

SEQ ID NO: 39331 - DNA, 25 bp, Artificial
  Probe
atgaagatgaggacgacaatgatga

SEQ ID NO: 39332 - DNA, 25 bp, Artificial
  Probe
tgatgaagatgaggacgacaatgat

SEQ ID NO: 39333 - DNA, 25 bp, Artificial
  Probe
ctagatggttctggattaggattct

SEQ ID NO: 39334 - DNA, 25 bp, Artificial
  Probe
ggatgactatgatggagaagagtat

SEQ ID NO: 39335 - DNA, 25 bp, Artificial
  Probe
ctggattaggattctcactggagta

SEQ ID NO: 39336 - DNA, 25 bp, Artificial
  Probe
tgtgacttacaattctgctcataac

SEQ ID NO: 39337 - DNA, 25 bp, Artificial
  Probe
gtgtgacttacaattctgctcataa

SEQ ID NO: 39338 - DNA, 25 bp, Artificial
  Probe
gatgactcgtgtgacttacaattct

SEQ ID NO: 39339 - DNA, 25 bp, Artificial
  Probe
atggagaagagtatgatgtggaagc

SEQ ID NO: 39340 - DNA, 25 bp, Artificial
  Probe
actatgatggagaagagtatgatgt

SEQ ID NO: 39341 - DNA, 25 bp, Artificial
  Probe
ttctggattaggattctcactggag

SEQ ID NO: 39342 - DNA, 25 bp, Artificial
  Probe
atgactcgtgtgacttacaattctg

SEQ ID NO: 39343 - DNA, 25 bp, Artificial
  Probe
cgtgtgacttacaattctgctcata

SEQ ID NO: 39344 - DNA, 25 bp, Artificial
  Probe
tgactatgatggagaagagtatgat

SEQ ID NO: 39345 - DNA, 25 bp, Artificial
  Probe
atgactatgatggagaagagtatga

SEQ ID NO: 39346 - DNA, 25 bp, Artificial
  Probe
ggctagatggttctggattaggatt

SEQ ID NO: 39347 - DNA, 25 bp, Artificial
  Probe
aggatgaagactcggatgactatga

SEQ ID NO: 39348 - DNA, 25 bp, Artificial
  Probe
tatgtagaactgttcatttccaccc

SEQ ID NO: 39349 - DNA, 25 bp, Artificial
  Probe
ctatgtagaactgttcatttccacc

SEQ ID NO: 39350 - DNA, 25 bp, Artificial
  Probe
tctatgtagaactgttcatttccac

SEQ ID NO: 39351 - DNA, 25 bp, Artificial
  Probe
aatgtaagattcacagaaacctgat

SEQ ID NO: 39352 - DNA, 25 bp, Artificial
  Probe
atgtaagattcacagaaacctgatc

SEQ ID NO: 39353 - DNA, 25 bp, Artificial
  Probe
atgtagaactgttcatttccaccca

SEQ ID NO: 39354 - DNA, 25 bp, Artificial
  Probe
taatgtaagattcacagaaacctga

SEQ ID NO: 39355 - DNA, 25 bp, Artificial
  Probe
acttctgtgctgtttccatctagtg

SEQ ID NO: 39356 - DNA, 25 bp, Artificial
  Probe
ttaatgtaagattcacagaaacctg

SEQ ID NO: 39357 - DNA, 25 bp, Artificial
  Probe
cacttctgtgctgtttccatctagt

SEQ ID NO: 39358 - DNA, 25 bp, Artificial
  Probe
tgtagaactgttcatttccacccag

SEQ ID NO: 39359 - DNA, 25 bp, Artificial
  Probe
tttaatgtaagattcacagaaacct

SEQ ID NO: 39360 - DNA, 25 bp, Artificial
  Probe
ggtatctgctgcctctgaaaatatt

SEQ ID NO: 39361 - DNA, 25 bp, Artificial
  Probe
ttctatgtagaactgttcatttcca

SEQ ID NO: 39362 - DNA, 25 bp, Artificial
  Probe
gggtatctgctgcctctgaaaatat

SEQ ID NO: 39363 - DNA, 25 bp, Artificial
  Probe
gtagaactgttcatttccacccagg

SEQ ID NO: 39364 - DNA, 25 bp, Artificial
  Probe
cttctgtgctgtttccatctagtgg

SEQ ID NO: 39365 - DNA, 25 bp, Artificial
  Probe
agattcacagaaacctgatcattga

SEQ ID NO: 39366 - DNA, 25 bp, Artificial
  Probe
tgtaagattcacagaaacctgatca

SEQ ID NO: 39367 - DNA, 25 bp, Artificial
  Probe
aagattcacagaaacctgatcattg

SEQ ID NO: 39368 - DNA, 25 bp, Artificial
  Probe
gtaagattcacagaaacctgatcat

SEQ ID NO: 39369 - DNA, 25 bp, Artificial
  Probe
tttctatgtagaactgttcatttcc

SEQ ID NO: 39370 - DNA, 25 bp, Artificial
  Probe
taagattcacagaaacctgatcatt

SEQ ID NO: 39371 - DNA, 25 bp, Artificial
  Probe
tagaactgttcatttccacccaggg

SEQ ID NO: 39372 - DNA, 25 bp, Artificial
  Probe
gcatacttcctgaattttctatgta

SEQ ID NO: 39373 - DNA, 25 bp, Artificial
  Probe
agggtatctgctgcctctgaaaata

SEQ ID NO: 39374 - DNA, 25 bp, Artificial
  Probe
gtatctgctgcctctgaaaatattt

SEQ ID NO: 39375 - DNA, 25 bp, Artificial
  Probe
aactgttcatttccacccagggtat

SEQ ID NO: 39376 - DNA, 25 bp, Artificial
  Probe
ctgttcatttccacccagggtatct

SEQ ID NO: 39377 - DNA, 25 bp, Artificial
  Probe
tcctgaattttctatgtagaactgt

SEQ ID NO: 39378 - DNA, 25 bp, Artificial
  Probe
ttttaatgtaagattcacagaaacc

SEQ ID NO: 39379 - DNA, 25 bp, Artificial
  Probe
tgttcatttccacccagggtatctg

SEQ ID NO: 39380 - DNA, 25 bp, Artificial
  Probe
actgttcatttccacccagggtatc

SEQ ID NO: 39381 - DNA, 25 bp, Artificial
  Probe
cctgaattttctatgtagaactgtt

SEQ ID NO: 39382 - DNA, 25 bp, Artificial
  Probe
gaactgttcatttccacccagggta

SEQ ID NO: 39383 - DNA, 25 bp, Artificial
  Probe
ttcctgaattttctatgtagaactg

SEQ ID NO: 39384 - DNA, 25 bp, Artificial
  Probe
acttcctgaattttctatgtagaac

SEQ ID NO: 39385 - DNA, 25 bp, Artificial
  Probe
cttcctgaattttctatgtagaact

SEQ ID NO: 39386 - DNA, 25 bp, Artificial
  Probe
cagggtatctgctgcctctgaaaat

SEQ ID NO: 39387 - DNA, 25 bp, Artificial
  Probe
atacttcctgaattttctatgtaga

SEQ ID NO: 39388 - DNA, 25 bp, Artificial
  Probe
tgaattttctatgtagaactgttca

SEQ ID NO: 39389 - DNA, 25 bp, Artificial
  Probe
catacttcctgaattttctatgtag

SEQ ID NO: 39390 - DNA, 25 bp, Artificial
  Probe
ttctgtgctgtttccatctagtgga

SEQ ID NO: 39391 - DNA, 25 bp, Artificial
  Probe
ctgaattttctatgtagaactgttc

SEQ ID NO: 39392 - DNA, 25 bp, Artificial
  Probe
ttttctatgtagaactgttcatttc

SEQ ID NO: 39393 - DNA, 25 bp, Artificial
  Probe
tgctctgctaatgataattgtcaac

SEQ ID NO: 39394 - DNA, 25 bp, Artificial
  Probe
gctctgctaatgataattgtcaact

SEQ ID NO: 39395 - DNA, 25 bp, Artificial
  Probe
ctgctctgctaatgataattgtcaa

SEQ ID NO: 39396 - DNA, 25 bp, Artificial
  Probe
cctgctctgctaatgataattgtca

SEQ ID NO: 39397 - DNA, 25 bp, Artificial
  Probe
gcctgctctgctaatgataattgtc

SEQ ID NO: 39398 - DNA, 25 bp, Artificial
  Probe
tctgctaatgataattgtcaacttg

SEQ ID NO: 39399 - DNA, 25 bp, Artificial
  Probe
ctctgctaatgataattgtcaactt

SEQ ID NO: 39400 - DNA, 25 bp, Artificial
  Probe
ctgctaatgataattgtcaacttga

SEQ ID NO: 39401 - DNA, 25 bp, Artificial
  Probe
tgctaatgataattgtcaacttgaa

SEQ ID NO: 39402 - DNA, 25 bp, Artificial
  Probe
atggcctgctctgctaatgataatt

SEQ ID NO: 39403 - DNA, 25 bp, Artificial
  Probe
tcaaggtccccatattaagagtttt

SEQ ID NO: 39404 - DNA, 25 bp, Artificial
  Probe
ttcaaggtccccatattaagagttt

SEQ ID NO: 39405 - DNA, 25 bp, Artificial
  Probe
aggcccagaaatgaatgaattgtag

SEQ ID NO: 39406 - DNA, 25 bp, Artificial
  Probe
catggcctgctctgctaatgataat

SEQ ID NO: 39407 - DNA, 25 bp, Artificial
  Probe
ggcccagaaatgaatgaattgtagt

SEQ ID NO: 39408 - DNA, 25 bp, Artificial
  Probe
caggcccagaaatgaatgaattgta

SEQ ID NO: 39409 - DNA, 25 bp, Artificial
  Probe
ggcctgctctgctaatgataattgt

SEQ ID NO: 39410 - DNA, 25 bp, Artificial
  Probe
tggcctgctctgctaatgataattg

SEQ ID NO: 39411 - DNA, 25 bp, Artificial
  Probe
gctaatgataattgtcaacttgaaa

SEQ ID NO: 39412 - DNA, 25 bp, Artificial
  Probe
acatggcctgctctgctaatgataa

SEQ ID NO: 39413 - DNA, 25 bp, Artificial
  Probe
aagcaggcccagaaatgaatgaatt

SEQ ID NO: 39414 - DNA, 25 bp, Artificial
  Probe
agcaggcccagaaatgaatgaattg

SEQ ID NO: 39415 - DNA, 25 bp, Artificial
  Probe
caagcaggcccagaaatgaatgaat

SEQ ID NO: 39416 - DNA, 25 bp, Artificial
  Probe
gcaggcccagaaatgaatgaattgt

SEQ ID NO: 39417 - DNA, 25 bp, Artificial
  Probe
ctagggaaaagggcctttatgaatg

SEQ ID NO: 39418 - DNA, 25 bp, Artificial
  Probe
tagggaaaagggcctttatgaatgt

SEQ ID NO: 39419 - DNA, 25 bp, Artificial
  Probe
ggaaaagggcctttatgaatgtctg

SEQ ID NO: 39420 - DNA, 25 bp, Artificial
  Probe
aatccaagcaggcccagaaatgaat

SEQ ID NO: 39421 - DNA, 25 bp, Artificial
  Probe
gggaaaagggcctttatgaatgtct

SEQ ID NO: 39422 - DNA, 25 bp, Artificial
  Probe
agggaaaagggcctttatgaatgtc

SEQ ID NO: 39423 - DNA, 25 bp, Artificial
  Probe
tatccatagtgagaacagacacctt

SEQ ID NO: 39424 - DNA, 25 bp, Artificial
  Probe
ttatccatagtgagaacagacacct

SEQ ID NO: 39425 - DNA, 25 bp, Artificial
  Probe
cacatatacctatacccacacttca

SEQ ID NO: 39426 - DNA, 25 bp, Artificial
  Probe
tcacatatacctatacccacacttc

SEQ ID NO: 39427 - DNA, 25 bp, Artificial
  Probe
atccatagtgagaacagacaccttg

SEQ ID NO: 39428 - DNA, 25 bp, Artificial
  Probe
acctatacccacacttcaatgatat

SEQ ID NO: 39429 - DNA, 25 bp, Artificial
  Probe
atacctatacccacacttcaatgat

SEQ ID NO: 39430 - DNA, 25 bp, Artificial
  Probe
acatatacctatacccacacttcaa

SEQ ID NO: 39431 - DNA, 25 bp, Artificial
  Probe
atcacatatacctatacccacactt

SEQ ID NO: 39432 - DNA, 25 bp, Artificial
  Probe
tacctatacccacacttcaatgata

SEQ ID NO: 39433 - DNA, 25 bp, Artificial
  Probe
tatacctatacccacacttcaatga

SEQ ID NO: 39434 - DNA, 25 bp, Artificial
  Probe
actttatccatagtgagaacagaca

SEQ ID NO: 39435 - DNA, 25 bp, Artificial
  Probe
tttatccatagtgagaacagacacc

SEQ ID NO: 39436 - DNA, 25 bp, Artificial
  Probe
tatcacatatacctatacccacact

SEQ ID NO: 39437 - DNA, 25 bp, Artificial
  Probe
aactttatccatagtgagaacagac

SEQ ID NO: 39438 - DNA, 25 bp, Artificial
  Probe
atatacctatacccacacttcaatg

SEQ ID NO: 39439 - DNA, 25 bp, Artificial
  Probe
catatacctatacccacacttcaat

SEQ ID NO: 39440 - DNA, 25 bp, Artificial
  Probe
ctttatccatagtgagaacagacac

SEQ ID NO: 39441 - DNA, 25 bp, Artificial
  Probe
tccatagtgagaacagacaccttgt

SEQ ID NO: 39442 - DNA, 25 bp, Artificial
  Probe
aaactttatccatagtgagaacaga

SEQ ID NO: 39443 - DNA, 25 bp, Artificial
  Probe
tatacccacacttcaatgatatcgt

SEQ ID NO: 39444 - DNA, 25 bp, Artificial
  Probe
gggtatctgaagaagtatcacatat

SEQ ID NO: 39445 - DNA, 25 bp, Artificial
  Probe
gtatcacatatacctatacccacac

SEQ ID NO: 39446 - DNA, 25 bp, Artificial
  Probe
atctgaagaagtatcacatatacct

SEQ ID NO: 39447 - DNA, 25 bp, Artificial
  Probe
ctatacccacacttcaatgatatcg

SEQ ID NO: 39448 - DNA, 25 bp, Artificial
  Probe
agtatcacatatacctatacccaca

SEQ ID NO: 39449 - DNA, 25 bp, Artificial
  Probe
cctatacccacacttcaatgatatc

SEQ ID NO: 39450 - DNA, 25 bp, Artificial
  Probe
atacccacacttcaatgatatcgtg

SEQ ID NO: 39451 - DNA, 25 bp, Artificial
  Probe
tctgaagaagtatcacatataccta

SEQ ID NO: 39452 - DNA, 25 bp, Artificial
  Probe
ggggtatctgaagaagtatcacata

SEQ ID NO: 39453 - DNA, 25 bp, Artificial
  Probe
aagtatcacatatacctatacccac

SEQ ID NO: 39454 - DNA, 25 bp, Artificial
  Probe
gaagtatcacatatacctataccca

SEQ ID NO: 39455 - DNA, 25 bp, Artificial
  Probe
ggtatctgaagaagtatcacatata

SEQ ID NO: 39456 - DNA, 25 bp, Artificial
  Probe
cttcaatgatatcgtgggacagcat

SEQ ID NO: 39457 - DNA, 25 bp, Artificial
  Probe
atagtgagaacagacaccttgtcag

SEQ ID NO: 39458 - DNA, 25 bp, Artificial
  Probe
agaagtatcacatatacctataccc

SEQ ID NO: 39459 - DNA, 25 bp, Artificial
  Probe
tgggaaaactttatccatagtgaga

SEQ ID NO: 39460 - DNA, 25 bp, Artificial
  Probe
gctgggaaaactttatccatagtga

SEQ ID NO: 39461 - DNA, 25 bp, Artificial
  Probe
ctgggaaaactttatccatagtgag

SEQ ID NO: 39462 - DNA, 25 bp, Artificial
  Probe
catagtgagaacagacaccttgtca

SEQ ID NO: 39463 - DNA, 25 bp, Artificial
  Probe
gggaaaactttatccatagtgagaa

SEQ ID NO: 39464 - DNA, 25 bp, Artificial
  Probe
acacttcaatgatatcgtgggacag

SEQ ID NO: 39465 - DNA, 25 bp, Artificial
  Probe
ctgaagaagtatcacatatacctat

SEQ ID NO: 39466 - DNA, 25 bp, Artificial
  Probe
tatctgaagaagtatcacatatacc

SEQ ID NO: 39467 - DNA, 25 bp, Artificial
  Probe
cacacttcaatgatatcgtgggaca

SEQ ID NO: 39468 - DNA, 25 bp, Artificial
  Probe
aaacttgagtctctctgttctttgt

SEQ ID NO: 39469 - DNA, 25 bp, Artificial
  Probe
tatatgatacacagccttgcactcc

SEQ ID NO: 39470 - DNA, 25 bp, Artificial
  Probe
gtatatgatacacagccttgcactc

SEQ ID NO: 39471 - DNA, 25 bp, Artificial
  Probe
ttgtaccaatgattgtaatgaagat

SEQ ID NO: 39472 - DNA, 25 bp, Artificial
  Probe
ctgtgataattgtctgcttagcatt

SEQ ID NO: 39473 - DNA, 25 bp, Artificial
  Probe
ggtatatgatacacagccttgcact

SEQ ID NO: 39474 - DNA, 25 bp, Artificial
  Probe
tggtatatgatacacagccttgcac

SEQ ID NO: 39475 - DNA, 25 bp, Artificial
  Probe
gtggtatatgatacacagccttgca

SEQ ID NO: 39476 - DNA, 25 bp, Artificial
  Probe
atatgatacacagccttgcactcct

SEQ ID NO: 39477 - DNA, 25 bp, Artificial
  Probe
attgtaccaatgattgtaatgaaga

SEQ ID NO: 39478 - DNA, 25 bp, Artificial
  Probe
gatacacagccttgcactccttaac

SEQ ID NO: 39479 - DNA, 25 bp, Artificial
  Probe
agcatttccatatttattgtaccaa

SEQ ID NO: 39480 - DNA, 25 bp, Artificial
  Probe
atgatacacagccttgcactcctta

SEQ ID NO: 39481 - DNA, 25 bp, Artificial
  Probe
tatgatacacagccttgcactcctt

SEQ ID NO: 39482 - DNA, 25 bp, Artificial
  Probe
ctaacaggaaaacttgagtctctct

SEQ ID NO: 39483 - DNA, 25 bp, Artificial
  Probe
tctaacaggaaaacttgagtctctc

SEQ ID NO: 39484 - DNA, 25 bp, Artificial
  Probe
ctctaacaggaaaacttgagtctct

SEQ ID NO: 39485 - DNA, 25 bp, Artificial
  Probe
aaaacttgagtctctctgttctttg

SEQ ID NO: 39486 - DNA, 25 bp, Artificial
  Probe
ggaaaacttgagtctctctgttctt

SEQ ID NO: 39487 - DNA, 25 bp, Artificial
  Probe
tgcactgacagtcttaatatttcta

SEQ ID NO: 39488 - DNA, 25 bp, Artificial
  Probe
gaaaacttgagtctctctgttcttt

SEQ ID NO: 39489 - DNA, 25 bp, Artificial
  Probe
atacacagccttgcactccttaact

SEQ ID NO: 39490 - DNA, 25 bp, Artificial
  Probe
tgatacacagccttgcactccttaa

SEQ ID NO: 39491 - DNA, 25 bp, Artificial
  Probe
taacaggaaaacttgagtctctctg

SEQ ID NO: 39492 - DNA, 25 bp, Artificial
  Probe
aggaaaacttgagtctctctgttct

SEQ ID NO: 39493 - DNA, 25 bp, Artificial
  Probe
tagcatttccatatttattgtacca

SEQ ID NO: 39494 - DNA, 25 bp, Artificial
  Probe
cctctaacaggaaaacttgagtctc

SEQ ID NO: 39495 - DNA, 25 bp, Artificial
  Probe
gataattgtctgcttagcatttcca

SEQ ID NO: 39496 - DNA, 25 bp, Artificial
  Probe
tgataattgtctgcttagcatttcc

SEQ ID NO: 39497 - DNA, 25 bp, Artificial
  Probe
caggaaaacttgagtctctctgttc

SEQ ID NO: 39498 - DNA, 25 bp, Artificial
  Probe
ttgtctgcttagcatttccatattt

SEQ ID NO: 39499 - DNA, 25 bp, Artificial
  Probe
tgtgataattgtctgcttagcattt

SEQ ID NO: 39500 - DNA, 25 bp, Artificial
  Probe
gcactgacagtcttaatatttctat

SEQ ID NO: 39501 - DNA, 25 bp, Artificial
  Probe
attgtctgcttagcatttccatatt

SEQ ID NO: 39502 - DNA, 25 bp, Artificial
  Probe
aattgtctgcttagcatttccatat

SEQ ID NO: 39503 - DNA, 25 bp, Artificial
  Probe
ataattgtctgcttagcatttccat

SEQ ID NO: 39504 - DNA, 25 bp, Artificial
  Probe
gtgataattgtctgcttagcatttc

SEQ ID NO: 39505 - DNA, 25 bp, Artificial
  Probe
tgtctgcttagcatttccatattta

SEQ ID NO: 39506 - DNA, 25 bp, Artificial
  Probe
taattgtctgcttagcatttccata

SEQ ID NO: 39507 - DNA, 25 bp, Artificial
  Probe
gcttagcatttccatatttattgta

SEQ ID NO: 39508 - DNA, 25 bp, Artificial
  Probe
gcctctaacaggaaaacttgagtct

SEQ ID NO: 39509 - DNA, 25 bp, Artificial
  Probe
tctgcctctaacaggaaaacttgag

SEQ ID NO: 39510 - DNA, 25 bp, Artificial
  Probe
ctctgcctctaacaggaaaacttga

SEQ ID NO: 39511 - DNA, 25 bp, Artificial
  Probe
aaccagtgctgtggtatatgataca

SEQ ID NO: 39512 - DNA, 25 bp, Artificial
  Probe
ccagtgctgtggtatatgatacaca

SEQ ID NO: 39513 - DNA, 25 bp, Artificial
  Probe
tctacagcatagttaagatgaggtt

SEQ ID NO: 39514 - DNA, 25 bp, Artificial
  Probe
ttctacagcatagttaagatgaggt

SEQ ID NO: 39515 - DNA, 25 bp, Artificial
  Probe
cttctacagcatagttaagatgagg

SEQ ID NO: 39516 - DNA, 25 bp, Artificial
  Probe
ccttctacagcatagttaagatgag

SEQ ID NO: 39517 - DNA, 25 bp, Artificial
  Probe
ttgccaactggttctgtgttaatag

SEQ ID NO: 39518 - DNA, 25 bp, Artificial
  Probe
attctgttatagccagttagaggac

SEQ ID NO: 39519 - DNA, 25 bp, Artificial
  Probe
atgacgataaccaccataagcatct

SEQ ID NO: 39520 - DNA, 25 bp, Artificial
  Probe
tctgttatagccagttagaggacat

SEQ ID NO: 39521 - DNA, 25 bp, Artificial
  Probe
ttctgttatagccagttagaggaca

SEQ ID NO: 39522 - DNA, 25 bp, Artificial
  Probe
tgacgataaccaccataagcatctt

SEQ ID NO: 39523 - DNA, 25 bp, Artificial
  Probe
actggttctgtgttaatagttgtat

SEQ ID NO: 39524 - DNA, 25 bp, Artificial
  Probe
ctgttatagccagttagaggacatg

SEQ ID NO: 39525 - DNA, 25 bp, Artificial
  Probe
catgacgataaccaccataagcatc

SEQ ID NO: 39526 - DNA, 25 bp, Artificial
  Probe
tattctgttatagccagttagagga

SEQ ID NO: 39527 - DNA, 25 bp, Artificial
  Probe
tgccaactggttctgtgttaatagt

SEQ ID NO: 39528 - DNA, 25 bp, Artificial
  Probe
acgataaccaccataagcatcttta

SEQ ID NO: 39529 - DNA, 25 bp, Artificial
  Probe
accataagcatctttaaccctacat

SEQ ID NO: 39530 - DNA, 25 bp, Artificial
  Probe
tattctcaaatgtgtctcctaaacg

SEQ ID NO: 39531 - DNA, 25 bp, Artificial
  Probe
caccataagcatctttaaccctaca

SEQ ID NO: 39532 - DNA, 25 bp, Artificial
  Probe
ttatagccagttagaggacatggat

SEQ ID NO: 39533 - DNA, 25 bp, Artificial
  Probe
cccttctacagcatagttaagatga

SEQ ID NO: 39534 - DNA, 25 bp, Artificial
  Probe
tcccttctacagcatagttaagatg

SEQ ID NO: 39535 - DNA, 25 bp, Artificial
  Probe
gtcccttctacagcatagttaagat

SEQ ID NO: 39536 - DNA, 25 bp, Artificial
  Probe
taaccaccataagcatctttaaccc

SEQ ID NO: 39537 - DNA, 25 bp, Artificial
  Probe
cgataaccaccataagcatctttaa

SEQ ID NO: 39538 - DNA, 25 bp, Artificial
  Probe
agttgtattctcaaatgtgtctcct

SEQ ID NO: 39539 - DNA, 25 bp, Artificial
  Probe
ataaccaccataagcatctttaacc

SEQ ID NO: 39540 - DNA, 25 bp, Artificial
  Probe
tgtagaatgtgtttattgtcccttc

SEQ ID NO: 39541 - DNA, 25 bp, Artificial
  Probe
tggttctgtgttaatagttgtattc

SEQ ID NO: 39542 - DNA, 25 bp, Artificial
  Probe
ctggttctgtgttaatagttgtatt

SEQ ID NO: 39543 - DNA, 25 bp, Artificial
  Probe
ttattctgttatagccagttagagg

SEQ ID NO: 39544 - DNA, 25 bp, Artificial
  Probe
gacgataaccaccataagcatcttt

SEQ ID NO: 39545 - DNA, 25 bp, Artificial
  Probe
ccaccataagcatctttaaccctac

SEQ ID NO: 39546 - DNA, 25 bp, Artificial
  Probe
tatagccagttagaggacatggatg

SEQ ID NO: 39547 - DNA, 25 bp, Artificial
  Probe
atgtagaatgtgtttattgtccctt

SEQ ID NO: 39548 - DNA, 25 bp, Artificial
  Probe
gttatagccagttagaggacatgga

SEQ ID NO: 39549 - DNA, 25 bp, Artificial
  Probe
accaccataagcatctttaacccta

SEQ ID NO: 39550 - DNA, 25 bp, Artificial
  Probe
ttgtcccttctacagcatagttaag

SEQ ID NO: 39551 - DNA, 25 bp, Artificial
  Probe
tgtttattgtcccttctacagcata

SEQ ID NO: 39552 - DNA, 25 bp, Artificial
  Probe
tgttatagccagttagaggacatgg

SEQ ID NO: 39553 - DNA, 25 bp, Artificial
  Probe
ctacagcatagttaagatgaggttt

SEQ ID NO: 39554 - DNA, 25 bp, Artificial
  Probe
tttgccaactggttctgtgttaata

SEQ ID NO: 39555 - DNA, 25 bp, Artificial
  Probe
gttgtattctcaaatgtgtctccta

SEQ ID NO: 39556 - DNA, 25 bp, Artificial
  Probe
tagttgtattctcaaatgtgtctcc

SEQ ID NO: 39557 - DNA, 25 bp, Artificial
  Probe
ggttctgtgttaatagttgtattct

SEQ ID NO: 39558 - DNA, 25 bp, Artificial
  Probe
ttgcttcctgtgttgttgtcctatt

SEQ ID NO: 39559 - DNA, 25 bp, Artificial
  Probe
gttgcttcctgtgttgttgtcctat

SEQ ID NO: 39560 - DNA, 25 bp, Artificial
  Probe
cacacagcagcctaagcactattac

SEQ ID NO: 39561 - DNA, 25 bp, Artificial
  Probe
tctcttacggctagtaaagtttcag

SEQ ID NO: 39562 - DNA, 25 bp, Artificial
  Probe
ttctcttacggctagtaaagtttca

SEQ ID NO: 39563 - DNA, 25 bp, Artificial
  Probe
cttctcttacggctagtaaagtttc

SEQ ID NO: 39564 - DNA, 25 bp, Artificial
  Probe
ctcttacggctagtaaagtttcagg

SEQ ID NO: 39565 - DNA, 25 bp, Artificial
  Probe
gcttctcttacggctagtaaagttt

SEQ ID NO: 39566 - DNA, 25 bp, Artificial
  Probe
cagcctaagcactattacccatcag

SEQ ID NO: 39567 - DNA, 25 bp, Artificial
  Probe
ggcttctcttacggctagtaaagtt

SEQ ID NO: 39568 - DNA, 25 bp, Artificial
  Probe
tgttgcttcctgtgttgttgtccta

SEQ ID NO: 39569 - DNA, 25 bp, Artificial
  Probe
ttgtgttgcttcctgtgttgttgtc

SEQ ID NO: 39570 - DNA, 25 bp, Artificial
  Probe
acacagcagcctaagcactattacc

SEQ ID NO: 39571 - DNA, 25 bp, Artificial
  Probe
ccacacagcagcctaagcactatta

SEQ ID NO: 39572 - DNA, 25 bp, Artificial
  Probe
ctttgtgttgcttcctgtgttgttg

SEQ ID NO: 39573 - DNA, 25 bp, Artificial
  Probe
ctgtggcttctcttacggctagtaa

SEQ ID NO: 39574 - DNA, 25 bp, Artificial
  Probe
tcttacggctagtaaagtttcaggc

SEQ ID NO: 39575 - DNA, 25 bp, Artificial
  Probe
aaatctgctgttcctgctttgtgtt

SEQ ID NO: 39576 - DNA, 25 bp, Artificial
  Probe
gtggcttctcttacggctagtaaag

SEQ ID NO: 39577 - DNA, 25 bp, Artificial
  Probe
tggcttctcttacggctagtaaagt

SEQ ID NO: 39578 - DNA, 25 bp, Artificial
  Probe
tttgtgttgcttcctgtgttgttgt

SEQ ID NO: 39579 - DNA, 25 bp, Artificial
  Probe
agcctaagcactattacccatcagc

SEQ ID NO: 39580 - DNA, 25 bp, Artificial
  Probe
agcagcctaagcactattacccatc

SEQ ID NO: 39581 - DNA, 25 bp, Artificial
  Probe
tgtggcttctcttacggctagtaaa

SEQ ID NO: 39582 - DNA, 25 bp, Artificial
  Probe
aatctgctgttcctgctttgtgttg

SEQ ID NO: 39583 - DNA, 25 bp, Artificial
  Probe
gcagcctaagcactattacccatca

SEQ ID NO: 39584 - DNA, 25 bp, Artificial
  Probe
cagcagcctaagcactattacccat

SEQ ID NO: 39585 - DNA, 25 bp, Artificial
  Probe
gctttgtgttgcttcctgtgttgtt

SEQ ID NO: 39586 - DNA, 25 bp, Artificial
  Probe
aaaatctgctgttcctgctttgtgt

SEQ ID NO: 39587 - DNA, 25 bp, Artificial
  Probe
gcctaagcactattacccatcagct

SEQ ID NO: 39588 - DNA, 25 bp, Artificial
  Probe
cagtacttcctacggagccaatgtg

SEQ ID NO: 39589 - DNA, 25 bp, Artificial
  Probe
tttggaattgttgtccacacagcag

SEQ ID NO: 39590 - DNA, 25 bp, Artificial
  Probe
ctttggaattgttgtccacacagca

SEQ ID NO: 39591 - DNA, 25 bp, Artificial
  Probe
ggctttggaattgttgtccacacag

SEQ ID NO: 39592 - DNA, 25 bp, Artificial
  Probe
ttccccgtttacggataacgctaac

SEQ ID NO: 39593 - DNA, 25 bp, Artificial
  Probe
gttccccgtttacggataacgctaa

SEQ ID NO: 39594 - DNA, 25 bp, Artificial
  Probe
aaccaactaaccagtaagacaatgt

SEQ ID NO: 39595 - DNA, 25 bp, Artificial
  Probe
accaactaaccagtaagacaatgtg

SEQ ID NO: 39596 - DNA, 25 bp, Artificial
  Probe
caactaaccagtaagacaatgtgtg

SEQ ID NO: 39597 - DNA, 25 bp, Artificial
  Probe
aactaaccagtaagacaatgtgtgt

SEQ ID NO: 39598 - DNA, 25 bp, Artificial
  Probe
ctaaccagtaagacaatgtgtgtgt

SEQ ID NO: 39599 - DNA, 25 bp, Artificial
  Probe
actaaccagtaagacaatgtgtgtg

SEQ ID NO: 39600 - DNA, 25 bp, Artificial
  Probe
ccaactaaccagtaagacaatgtgt

SEQ ID NO: 39601 - DNA, 25 bp, Artificial
  Probe
taaccagtaagacaatgtgtgtgtg

SEQ ID NO: 39602 - DNA, 25 bp, Artificial
  Probe
cagtaagacaatgtgtgtgtgtgtg

SEQ ID NO: 39603 - DNA, 25 bp, Artificial
  Probe
aaaccaactaaccagtaagacaatg

SEQ ID NO: 39604 - DNA, 25 bp, Artificial
  Probe
gtaagacaatgtgtgtgtgtgtgtg

SEQ ID NO: 39605 - DNA, 25 bp, Artificial
  Probe
agtaagacaatgtgtgtgtgtgtgt

SEQ ID NO: 39606 - DNA, 25 bp, Artificial
  Probe
aaccagtaagacaatgtgtgtgtgt

SEQ ID NO: 39607 - DNA, 25 bp, Artificial
  Probe
ccagtaagacaatgtgtgtgtgtgt

SEQ ID NO: 39608 - DNA, 25 bp, Artificial
  Probe
accagtaagacaatgtgtgtgtgtg

SEQ ID NO: 39609 - DNA, 25 bp, Artificial
  Probe
ccactaatacactttccgttcaccc

SEQ ID NO: 39610 - DNA, 25 bp, Artificial
  Probe
cccactaatacactttccgttcacc

SEQ ID NO: 39611 - DNA, 25 bp, Artificial
  Probe
ggaaaaccttgtatttaccccattt

SEQ ID NO: 39612 - DNA, 25 bp, Artificial
  Probe
ttaccactaagagagcgttaaaaca

SEQ ID NO: 39613 - DNA, 25 bp, Artificial
  Probe
taccactaagagagcgttaaaacac

SEQ ID NO: 39614 - DNA, 25 bp, Artificial
  Probe
ccttttaccactaagagagcgttaa

SEQ ID NO: 39615 - DNA, 25 bp, Artificial
  Probe
tttaccactaagagagcgttaaaac

SEQ ID NO: 39616 - DNA, 25 bp, Artificial
  Probe
cggaaaaccttgtatttaccccatt

SEQ ID NO: 39617 - DNA, 25 bp, Artificial
  Probe
tcaaaaccaactaaccagtaagaca

SEQ ID NO: 39618 - DNA, 25 bp, Artificial
  Probe
caaaaccaactaaccagtaagacaa

SEQ ID NO: 39619 - DNA, 25 bp, Artificial
  Probe
cacttcaaaaccaactaaccagtaa

SEQ ID NO: 39620 - DNA, 25 bp, Artificial
  Probe
ttaccccactaatacactttccgtt

SEQ ID NO: 39621 - DNA, 25 bp, Artificial
  Probe
cttttaccactaagagagcgttaaa

SEQ ID NO: 39622 - DNA, 25 bp, Artificial
  Probe
ttcaaaaccaactaaccagtaagac

SEQ ID NO: 39623 - DNA, 25 bp, Artificial
  Probe
acttcaaaaccaactaaccagtaag

SEQ ID NO: 39624 - DNA, 25 bp, Artificial
  Probe
cttcaaaaccaactaaccagtaaga

SEQ ID NO: 39625 - DNA, 25 bp, Artificial
  Probe
tttacaatacgccccatctgaaaac

SEQ ID NO: 39626 - DNA, 25 bp, Artificial
  Probe
gtacagccttttaccactaagagag

SEQ ID NO: 39627 - DNA, 25 bp, Artificial
  Probe
aaaaccaactaaccagtaagacaat

SEQ ID NO: 39628 - DNA, 25 bp, Artificial
  Probe
taccccactaatacactttccgttc

SEQ ID NO: 39629 - DNA, 25 bp, Artificial
  Probe
ccactaagagagcgttaaaacactg

SEQ ID NO: 39630 - DNA, 25 bp, Artificial
  Probe
accactaagagagcgttaaaacact

SEQ ID NO: 39631 - DNA, 25 bp, Artificial
  Probe
ttcgcacgctttagcatttctctag

SEQ ID NO: 39632 - DNA, 25 bp, Artificial
  Probe
gcacttcaaaaccaactaaccagta

SEQ ID NO: 39633 - DNA, 25 bp, Artificial
  Probe
gttaccccactaatacactttccgt

SEQ ID NO: 39634 - DNA, 25 bp, Artificial
  Probe
tacagccttttaccactaagagagc

SEQ ID NO: 39635 - DNA, 25 bp, Artificial
  Probe
cactaagagagcgttaaaacactgc

SEQ ID NO: 39636 - DNA, 25 bp, Artificial
  Probe
gttcgcacgctttagcatttctcta

SEQ ID NO: 39637 - DNA, 25 bp, Artificial
  Probe
ttttacaatacgccccatctgaaaa

SEQ ID NO: 39638 - DNA, 25 bp, Artificial
  Probe
gccttttaccactaagagagcgtta

SEQ ID NO: 39639 - DNA, 25 bp, Artificial
  Probe
tgtcataatacgcatacttcactgt

SEQ ID NO: 39640 - DNA, 25 bp, Artificial
  Probe
gtcataatacgcatacttcactgtg

SEQ ID NO: 39641 - DNA, 25 bp, Artificial
  Probe
tcagtgtcataatacgcatacttca

SEQ ID NO: 39642 - DNA, 25 bp, Artificial
  Probe
ctcagtgtcataatacgcatacttc

SEQ ID NO: 39643 - DNA, 25 bp, Artificial
  Probe
gctcagtgtcataatacgcatactt

SEQ ID NO: 39644 - DNA, 25 bp, Artificial
  Probe
gtgtcataatacgcatacttcactg

SEQ ID NO: 39645 - DNA, 25 bp, Artificial
  Probe
cagtgtcataatacgcatacttcac

SEQ ID NO: 39646 - DNA, 25 bp, Artificial
  Probe
tcataatacgcatacttcactgtga

SEQ ID NO: 39647 - DNA, 25 bp, Artificial
  Probe
taatacgcatacttcactgtgagag

SEQ ID NO: 39648 - DNA, 25 bp, Artificial
  Probe
ataatacgcatacttcactgtgaga

SEQ ID NO: 39649 - DNA, 25 bp, Artificial
  Probe
cataatacgcatacttcactgtgag

SEQ ID NO: 39650 - DNA, 25 bp, Artificial
  Probe
cgctcagtgtcataatacgcatact

SEQ ID NO: 39651 - DNA, 25 bp, Artificial
  Probe
aatacgcatacttcactgtgagagg

SEQ ID NO: 39652 - DNA, 25 bp, Artificial
  Probe
aattccatgtcaacagccacttcat

SEQ ID NO: 39653 - DNA, 25 bp, Artificial
  Probe
attccatgtcaacagccacttcatc

SEQ ID NO: 39654 - DNA, 25 bp, Artificial
  Probe
caaattccatgtcaacagccacttc

SEQ ID NO: 39655 - DNA, 25 bp, Artificial
  Probe
gggagactttcttatgcaattcata

SEQ ID NO: 39656 - DNA, 25 bp, Artificial
  Probe
agtgtcataatacgcatacttcact

SEQ ID NO: 39657 - DNA, 25 bp, Artificial
  Probe
aaattccatgtcaacagccacttca

SEQ ID NO: 39658 - DNA, 25 bp, Artificial
  Probe
ggagactttcttatgcaattcatac

SEQ ID NO: 39659 - DNA, 25 bp, Artificial
  Probe
tccatgtcaacagccacttcatctt

SEQ ID NO: 39660 - DNA, 25 bp, Artificial
  Probe
ttccatgtcaacagccacttcatct

SEQ ID NO: 39661 - DNA, 25 bp, Artificial
  Probe
ctcatttggggagactttcttatgc

SEQ ID NO: 39662 - DNA, 25 bp, Artificial
  Probe
gctcatttggggagactttcttatg

SEQ ID NO: 39663 - DNA, 25 bp, Artificial
  Probe
gagactttcttatgcaattcataca

SEQ ID NO: 39664 - DNA, 25 bp, Artificial
  Probe
ctccaatgcgctcagtgtcataata

SEQ ID NO: 39665 - DNA, 25 bp, Artificial
  Probe
atttggggagactttcttatgcaat

SEQ ID NO: 39666 - DNA, 25 bp, Artificial
  Probe
tttggggagactttcttatgcaatt

SEQ ID NO: 39667 - DNA, 25 bp, Artificial
  Probe
ggggagactttcttatgcaattcat

SEQ ID NO: 39668 - DNA, 25 bp, Artificial
  Probe
tccaatgcgctcagtgtcataatac

SEQ ID NO: 39669 - DNA, 25 bp, Artificial
  Probe
ttggggagactttcttatgcaattc

SEQ ID NO: 39670 - DNA, 25 bp, Artificial
  Probe
atacgcatacttcactgtgagaggg

SEQ ID NO: 39671 - DNA, 25 bp, Artificial
  Probe
agctcatttggggagactttcttat

SEQ ID NO: 39672 - DNA, 25 bp, Artificial
  Probe
agactttcttatgcaattcatacat

SEQ ID NO: 39673 - DNA, 25 bp, Artificial
  Probe
catttggggagactttcttatgcaa

SEQ ID NO: 39674 - DNA, 25 bp, Artificial
  Probe
tggggagactttcttatgcaattca

SEQ ID NO: 39675 - DNA, 25 bp, Artificial
  Probe
tcatttggggagactttcttatgca

SEQ ID NO: 39676 - DNA, 25 bp, Artificial
  Probe
gtagtactcatggatcagcaccgag

SEQ ID NO: 39677 - DNA, 25 bp, Artificial
  Probe
gcaaattccatgtcaacagccactt

SEQ ID NO: 39678 - DNA, 25 bp, Artificial
  Probe
ctgtagtactcatggatcagcaccg

SEQ ID NO: 39679 - DNA, 25 bp, Artificial
  Probe
tgtagtactcatggatcagcaccga

SEQ ID NO: 39680 - DNA, 25 bp, Artificial
  Probe
ccaatgcgctcagtgtcataatacg

SEQ ID NO: 39681 - DNA, 25 bp, Artificial
  Probe
ctccctgctgtagtactcatggatc

SEQ ID NO: 39682 - DNA, 25 bp, Artificial
  Probe
ccctgctgtagtactcatggatcag

SEQ ID NO: 39683 - DNA, 25 bp, Artificial
  Probe
gactttcttatgcaattcatacata

SEQ ID NO: 39684 - DNA, 25 bp, Artificial
  Probe
ttgagatcatctgcttaatcctgaa

SEQ ID NO: 39685 - DNA, 25 bp, Artificial
  Probe
attgagatcatctgcttaatcctga

SEQ ID NO: 39686 - DNA, 25 bp, Artificial
  Probe
cgtggtctccctctattattactct

SEQ ID NO: 39687 - DNA, 25 bp, Artificial
  Probe
tcgtggtctccctctattattactc

SEQ ID NO: 39688 - DNA, 25 bp, Artificial
  Probe
gattgagatcatctgcttaatcctg

SEQ ID NO: 39689 - DNA, 25 bp, Artificial
  Probe
gtcgtggtctccctctattattact

SEQ ID NO: 39690 - DNA, 25 bp, Artificial
  Probe
agagaacttcctgtttatcacctac

SEQ ID NO: 39691 - DNA, 25 bp, Artificial
  Probe
cagttccttcagaatttcctcaaag

SEQ ID NO: 39692 - DNA, 25 bp, Artificial
  Probe
gagagaacttcctgtttatcaccta

SEQ ID NO: 39693 - DNA, 25 bp, Artificial
  Probe
acagttccttcagaatttcctcaaa

SEQ ID NO: 39694 - DNA, 25 bp, Artificial
  Probe
aacagttccttcagaatttcctcaa

SEQ ID NO: 39695 - DNA, 25 bp, Artificial
  Probe
gaacttcctgtttatcacctacgag

SEQ ID NO: 39696 - DNA, 25 bp, Artificial
  Probe
gagaacttcctgtttatcacctacg

SEQ ID NO: 39697 - DNA, 25 bp, Artificial
  Probe
agaacttcctgtttatcacctacga

SEQ ID NO: 39698 - DNA, 25 bp, Artificial
  Probe
gtggtctccctctattattactcta

SEQ ID NO: 39699 - DNA, 25 bp, Artificial
  Probe
tgattgagatcatctgcttaatcct

SEQ ID NO: 39700 - DNA, 25 bp, Artificial
  Probe
aatacttcaggtacaaaggcattcc

SEQ ID NO: 39701 - DNA, 25 bp, Artificial
  Probe
tgagatcatctgcttaatcctgaaa

SEQ ID NO: 39702 - DNA, 25 bp, Artificial
  Probe
cgtcgtggtctccctctattattac

SEQ ID NO: 39703 - DNA, 25 bp, Artificial
  Probe
agatcatctgcttaatcctgaaaga

SEQ ID NO: 39704 - DNA, 25 bp, Artificial
  Probe
gagatcatctgcttaatcctgaaag

SEQ ID NO: 39705 - DNA, 25 bp, Artificial
  Probe
gaacagttccttcagaatttcctca

SEQ ID NO: 39706 - DNA, 25 bp, Artificial
  Probe
cgagagaacttcctgtttatcacct

SEQ ID NO: 39707 - DNA, 25 bp, Artificial
  Probe
caataaacttgtcactccagccaaa

SEQ ID NO: 39708 - DNA, 25 bp, Artificial
  Probe
tacaattaaaggaccctggtacacc

SEQ ID NO: 39709 - DNA, 25 bp, Artificial
  Probe
tggtctccctctattattactctaa

SEQ ID NO: 39710 - DNA, 25 bp, Artificial
  Probe
gaatacttcaggtacaaaggcattc

SEQ ID NO: 39711 - DNA, 25 bp, Artificial
  Probe
ggtctccctctattattactctaag

SEQ ID NO: 39712 - DNA, 25 bp, Artificial
  Probe
ccgagagaacttcctgtttatcacc

SEQ ID NO: 39713 - DNA, 25 bp, Artificial
  Probe
atacttcaggtacaaaggcattccc

SEQ ID NO: 39714 - DNA, 25 bp, Artificial
  Probe
gatcatctgcttaatcctgaaagat

SEQ ID NO: 39715 - DNA, 25 bp, Artificial
  Probe
gccgagagaacttcctgtttatcac

SEQ ID NO: 39716 - DNA, 25 bp, Artificial
  Probe
acgtcgtggtctccctctattatta

SEQ ID NO: 39717 - DNA, 25 bp, Artificial
  Probe
gtacaattaaaggaccctggtacac

SEQ ID NO: 39718 - DNA, 25 bp, Artificial
  Probe
cctctattattactctaagattgct

SEQ ID NO: 39719 - DNA, 25 bp, Artificial
  Probe
tgaacagttccttcagaatttcctc

SEQ ID NO: 39720 - DNA, 25 bp, Artificial
  Probe
ccctctattattactctaagattgc

SEQ ID NO: 39721 - DNA, 25 bp, Artificial
  Probe
aataaacttgtcactccagccaaaa

SEQ ID NO: 39722 - DNA, 25 bp, Artificial
  Probe
gatcctcacaataaacttgtcactc

SEQ ID NO: 39723 - DNA, 25 bp, Artificial
  Probe
attaaaggaccctggtacacctgaa

SEQ ID NO: 39724 - DNA, 25 bp, Artificial
  Probe
aattaaaggaccctggtacacctga

SEQ ID NO: 39725 - DNA, 25 bp, Artificial
  Probe
caattaaaggaccctggtacacctg

SEQ ID NO: 39726 - DNA, 25 bp, Artificial
  Probe
attccctttccagtcggcatgtata

SEQ ID NO: 39727 - DNA, 25 bp, Artificial
  Probe
atcctcacaataaacttgtcactcc

SEQ ID NO: 39728 - DNA, 25 bp, Artificial
  Probe
aggcaccaactggatgattgagatc

SEQ ID NO: 39729 - DNA, 25 bp, Artificial
  Probe
tgagacagatacccaaagaaacttc

SEQ ID NO: 39730 - DNA, 25 bp, Artificial
  Probe
catccctgcctaattgaaatcttat

SEQ ID NO: 39731 - DNA, 25 bp, Artificial
  Probe
gagacagatacccaaagaaacttcc

SEQ ID NO: 39732 - DNA, 25 bp, Artificial
  Probe
atccctgcctaattgaaatcttatt

SEQ ID NO: 39733 - DNA, 25 bp, Artificial
  Probe
ctgagacagatacccaaagaaactt

SEQ ID NO: 39734 - DNA, 25 bp, Artificial
  Probe
tccctgcctaattgaaatcttattt

SEQ ID NO: 39735 - DNA, 25 bp, Artificial
  Probe
ttatttaaacttcaagcccacacct

SEQ ID NO: 39736 - DNA, 25 bp, Artificial
  Probe
tcttatttaaacttcaagcccacac

SEQ ID NO: 39737 - DNA, 25 bp, Artificial
  Probe
cttatttaaacttcaagcccacacc

SEQ ID NO: 39738 - DNA, 25 bp, Artificial
  Probe
acagatacccaaagaaacttccgag

SEQ ID NO: 39739 - DNA, 25 bp, Artificial
  Probe
gacagatacccaaagaaacttccga

SEQ ID NO: 39740 - DNA, 25 bp, Artificial
  Probe
agacagatacccaaagaaacttccg

SEQ ID NO: 39741 - DNA, 25 bp, Artificial
  Probe
tatttaaacttcaagcccacacctc

SEQ ID NO: 39742 - DNA, 25 bp, Artificial
  Probe
atcttatttaaacttcaagcccaca

SEQ ID NO: 39743 - DNA, 25 bp, Artificial
  Probe
cctgagacagatacccaaagaaact

SEQ ID NO: 39744 - DNA, 25 bp, Artificial
  Probe
tggcagtctccttcgtagttacaag

SEQ ID NO: 39745 - DNA, 25 bp, Artificial
  Probe
cagtctccttcgtagttacaagctg

SEQ ID NO: 39746 - DNA, 25 bp, Artificial
  Probe
gtggcagtctccttcgtagttacaa

SEQ ID NO: 39747 - DNA, 25 bp, Artificial
  Probe
aatcttatttaaacttcaagcccac

SEQ ID NO: 39748 - DNA, 25 bp, Artificial
  Probe
cagatacccaaagaaacttccgagg

SEQ ID NO: 39749 - DNA, 25 bp, Artificial
  Probe
ccctgcctaattgaaatcttattta

SEQ ID NO: 39750 - DNA, 25 bp, Artificial
  Probe
agtctccttcgtagttacaagctgg

SEQ ID NO: 39751 - DNA, 25 bp, Artificial
  Probe
cagtggcagtctccttcgtagttac

SEQ ID NO: 39752 - DNA, 25 bp, Artificial
  Probe
atttaaacttcaagcccacacctca

SEQ ID NO: 39753 - DNA, 25 bp, Artificial
  Probe
gcatccctgcctaattgaaatctta

SEQ ID NO: 39754 - DNA, 25 bp, Artificial
  Probe
gcctgagacagatacccaaagaaac

SEQ ID NO: 39755 - DNA, 25 bp, Artificial
  Probe
aaatcttatttaaacttcaagccca

SEQ ID NO: 39756 - DNA, 25 bp, Artificial
  Probe
agtggcagtctccttcgtagttaca

SEQ ID NO: 39757 - DNA, 25 bp, Artificial
  Probe
tttaaacttcaagcccacacctcag

SEQ ID NO: 39758 - DNA, 25 bp, Artificial
  Probe
gcagtctccttcgtagttacaagct

SEQ ID NO: 39759 - DNA, 25 bp, Artificial
  Probe
tacagcatccctgcctaattgaaat

SEQ ID NO: 39760 - DNA, 25 bp, Artificial
  Probe
gaaatcttatttaaacttcaagccc

SEQ ID NO: 39761 - DNA, 25 bp, Artificial
  Probe
agcatccctgcctaattgaaatctt

SEQ ID NO: 39762 - DNA, 25 bp, Artificial
  Probe
ttaaacttcaagcccacacctcagt

SEQ ID NO: 39763 - DNA, 25 bp, Artificial
  Probe
agaggtgaaagaagacagtgcctac

SEQ ID NO: 39764 - DNA, 25 bp, Artificial
  Probe
cagaggtgaaagaagacagtgccta

SEQ ID NO: 39765 - DNA, 25 bp, Artificial
  Probe
agatacccaaagaaacttccgaggc

SEQ ID NO: 39766 - DNA, 25 bp, Artificial
  Probe
gtacagcatccctgcctaattgaaa

SEQ ID NO: 39767 - DNA, 25 bp, Artificial
  Probe
tctattggaagccttgtccgacatg

SEQ ID NO: 39768 - DNA, 25 bp, Artificial
  Probe
gtctattggaagccttgtccgacat

SEQ ID NO: 39769 - DNA, 25 bp, Artificial
  Probe
cagcatccctgcctaattgaaatct

SEQ ID NO: 39770 - DNA, 25 bp, Artificial
  Probe
cctgcctaattgaaatcttatttaa

SEQ ID NO: 39771 - DNA, 25 bp, Artificial
  Probe
acagcatccctgcctaattgaaatc

SEQ ID NO: 39772 - DNA, 25 bp, Artificial
  Probe
agcacagaggtgaaagaagacagtg

SEQ ID NO: 39773 - DNA, 25 bp, Artificial
  Probe
cagcacagaggtgaaagaagacagt

SEQ ID NO: 39774 - DNA, 25 bp, Artificial
  Probe
gatgtagcttagtggcagaatactt

SEQ ID NO: 39775 - DNA, 25 bp, Artificial
  Probe
atgtagcttagtggcagaatacttg

SEQ ID NO: 39776 - DNA, 25 bp, Artificial
  Probe
gcttattccacatttgcctcttaaa

SEQ ID NO: 39777 - DNA, 25 bp, Artificial
  Probe
gtggatgtagcttagtggcagaata

SEQ ID NO: 39778 - DNA, 25 bp, Artificial
  Probe
tggatgtagcttagtggcagaatac

SEQ ID NO: 39779 - DNA, 25 bp, Artificial
  Probe
ggatgtagcttagtggcagaatact

SEQ ID NO: 39780 - DNA, 25 bp, Artificial
  Probe
cttagtggcagaatacttggtgttt

SEQ ID NO: 39781 - DNA, 25 bp, Artificial
  Probe
ttagtggcagaatacttggtgtttg

SEQ ID NO: 39782 - DNA, 25 bp, Artificial
  Probe
gaacatttcctggcttctcaaattc

SEQ ID NO: 39783 - DNA, 25 bp, Artificial
  Probe
ctagacggttgtggatgtagcttag

SEQ ID NO: 39784 - DNA, 25 bp, Artificial
  Probe
gcttagtggcagaatacttggtgtt

SEQ ID NO: 39785 - DNA, 25 bp, Artificial
  Probe
tagcttagtggcagaatacttggtg

SEQ ID NO: 39786 - DNA, 25 bp, Artificial
  Probe
gtagcttagtggcagaatacttggt

SEQ ID NO: 39787 - DNA, 25 bp, Artificial
  Probe
tgtagcttagtggcagaatacttgg

SEQ ID NO: 39788 - DNA, 25 bp, Artificial
  Probe
aacatttcctggcttctcaaattcc

SEQ ID NO: 39789 - DNA, 25 bp, Artificial
  Probe
tagacggttgtggatgtagcttagt

SEQ ID NO: 39790 - DNA, 25 bp, Artificial
  Probe
cttattccacatttgcctcttaaat

SEQ ID NO: 39791 - DNA, 25 bp, Artificial
  Probe
aagtgtgtctcagagatccgtacaa

SEQ ID NO: 39792 - DNA, 25 bp, Artificial
  Probe
ccatgttcaaggcttattccacatt

SEQ ID NO: 39793 - DNA, 25 bp, Artificial
  Probe
tgttcaaggcttattccacatttgc

SEQ ID NO: 39794 - DNA, 25 bp, Artificial
  Probe
attccacatttgcctcttaaataaa

SEQ ID NO: 39795 - DNA, 25 bp, Artificial
  Probe
cctagacggttgtggatgtagctta

SEQ ID NO: 39796 - DNA, 25 bp, Artificial
  Probe
gatcccatgttcaaggcttattcca

SEQ ID NO: 39797 - DNA, 25 bp, Artificial
  Probe
ttgcctcttaaataaaactccccta

SEQ ID NO: 39798 - DNA, 25 bp, Artificial
  Probe
tttgcctcttaaataaaactcccct

SEQ ID NO: 39799 - DNA, 25 bp, Artificial
  Probe
tgtgtctcagagatccgtacaaatg

SEQ ID NO: 39800 - DNA, 25 bp, Artificial
  Probe
gtgtgtctcagagatccgtacaaat

SEQ ID NO: 39801 - DNA, 25 bp, Artificial
  Probe
tgtggatgtagcttagtggcagaat

SEQ ID NO: 39802 - DNA, 25 bp, Artificial
  Probe
cttctaaagccacacatgacaaagc

SEQ ID NO: 39803 - DNA, 25 bp, Artificial
  Probe
atcccatgttcaaggcttattccac

SEQ ID NO: 39804 - DNA, 25 bp, Artificial
  Probe
cttaaataaaactcccctagacggt

SEQ ID NO: 39805 - DNA, 25 bp, Artificial
  Probe
tgcctcttaaataaaactcccctag

SEQ ID NO: 39806 - DNA, 25 bp, Artificial
  Probe
atgttcaaggcttattccacatttg

SEQ ID NO: 39807 - DNA, 25 bp, Artificial
  Probe
caaagtgtgtctcagagatccgtac

SEQ ID NO: 39808 - DNA, 25 bp, Artificial
  Probe
ttgtggatgtagcttagtggcagaa

SEQ ID NO: 39809 - DNA, 25 bp, Artificial
  Probe
catgttcaaggcttattccacattt

SEQ ID NO: 39810 - DNA, 25 bp, Artificial
  Probe
taaataaaactcccctagacggttg

SEQ ID NO: 39811 - DNA, 25 bp, Artificial
  Probe
tcttaaataaaactcccctagacgg

SEQ ID NO: 39812 - DNA, 25 bp, Artificial
  Probe
gcctcttaaataaaactcccctaga

SEQ ID NO: 39813 - DNA, 25 bp, Artificial
  Probe
ttaaataaaactcccctagacggtt

SEQ ID NO: 39814 - DNA, 25 bp, Artificial
  Probe
tattccacatttgcctcttaaataa

SEQ ID NO: 39815 - DNA, 25 bp, Artificial
  Probe
ttattccacatttgcctcttaaata

SEQ ID NO: 39816 - DNA, 25 bp, Artificial
  Probe
gtgtctcagagatccgtacaaatgg

SEQ ID NO: 39817 - DNA, 25 bp, Artificial
  Probe
atttgcctcttaaataaaactcccc

SEQ ID NO: 39818 - DNA, 25 bp, Artificial
  Probe
acatttcctggcttctcaaattccc

SEQ ID NO: 39819 - DNA, 25 bp, Artificial
  Probe
aaacttgagatttacaaacccgttc

SEQ ID NO: 39820 - DNA, 25 bp, Artificial
  Probe
gaaacttgagatttacaaacccgtt

SEQ ID NO: 39821 - DNA, 25 bp, Artificial
  Probe
agcgtgaaacttgagatttacaaac

SEQ ID NO: 39822 - DNA, 25 bp, Artificial
  Probe
gtgaaacttgagatttacaaacccg

SEQ ID NO: 39823 - DNA, 25 bp, Artificial
  Probe
cgtgaaacttgagatttacaaaccc

SEQ ID NO: 39824 - DNA, 25 bp, Artificial
  Probe
tttgatgggatgttgtgatgatgac

SEQ ID NO: 39825 - DNA, 25 bp, Artificial
  Probe
tgaaacttgagatttacaaacccgt

SEQ ID NO: 39826 - DNA, 25 bp, Artificial
  Probe
gcgtgaaacttgagatttacaaacc

SEQ ID NO: 39827 - DNA, 25 bp, Artificial
  Probe
caatcaaaccttctcttccctcttg

SEQ ID NO: 39828 - DNA, 25 bp, Artificial
  Probe
atcaaaccttctcttccctcttgtt

SEQ ID NO: 39829 - DNA, 25 bp, Artificial
  Probe
aatcaaaccttctcttccctcttgt

SEQ ID NO: 39830 - DNA, 25 bp, Artificial
  Probe
acaaataagtccctctttaggcatc

SEQ ID NO: 39831 - DNA, 25 bp, Artificial
  Probe
gacaaataagtccctctttaggcat

SEQ ID NO: 39832 - DNA, 25 bp, Artificial
  Probe
cggtgacaaataagtccctctttag

SEQ ID NO: 39833 - DNA, 25 bp, Artificial
  Probe
ggtgacaaataagtccctctttagg

SEQ ID NO: 39834 - DNA, 25 bp, Artificial
  Probe
ttgagatttacaaacccgttcgttc

SEQ ID NO: 39835 - DNA, 25 bp, Artificial
  Probe
cttgagatttacaaacccgttcgtt

SEQ ID NO: 39836 - DNA, 25 bp, Artificial
  Probe
aacttgagatttacaaacccgttcg

SEQ ID NO: 39837 - DNA, 25 bp, Artificial
  Probe
ccaatcaaaccttctcttccctctt

SEQ ID NO: 39838 - DNA, 25 bp, Artificial
  Probe
tcggtgacaaataagtccctcttta

SEQ ID NO: 39839 - DNA, 25 bp, Artificial
  Probe
caaataagtccctctttaggcatcc

SEQ ID NO: 39840 - DNA, 25 bp, Artificial
  Probe
aaataagtccctctttaggcatcct

SEQ ID NO: 39841 - DNA, 25 bp, Artificial
  Probe
aaaccttctcttccctcttgttctg

SEQ ID NO: 39842 - DNA, 25 bp, Artificial
  Probe
gtgacaaataagtccctctttaggc

SEQ ID NO: 39843 - DNA, 25 bp, Artificial
  Probe
caaaccttctcttccctcttgttct

SEQ ID NO: 39844 - DNA, 25 bp, Artificial
  Probe
tcaaaccttctcttccctcttgttc

SEQ ID NO: 39845 - DNA, 25 bp, Artificial
  Probe
gagatttacaaacccgttcgttctg

SEQ ID NO: 39846 - DNA, 25 bp, Artificial
  Probe
aaaccaatcccatatcatgttgctc

SEQ ID NO: 39847 - DNA, 25 bp, Artificial
  Probe
tcttgttctggctgatttctctgtc

SEQ ID NO: 39848 - DNA, 25 bp, Artificial
  Probe
ctcttgttctggctgatttctctgt

SEQ ID NO: 39849 - DNA, 25 bp, Artificial
  Probe
tgacaaataagtccctctttaggca

SEQ ID NO: 39850 - DNA, 25 bp, Artificial
  Probe
attcggtgacaaataagtccctctt

SEQ ID NO: 39851 - DNA, 25 bp, Artificial
  Probe
ctggtgattcggtgacaaataagtc

SEQ ID NO: 39852 - DNA, 25 bp, Artificial
  Probe
catatcatgttgctcctggtgattc

SEQ ID NO: 39853 - DNA, 25 bp, Artificial
  Probe
tcctggtgattcggtgacaaataag

SEQ ID NO: 39854 - DNA, 25 bp, Artificial
  Probe
ctcctggtgattcggtgacaaataa

SEQ ID NO: 39855 - DNA, 25 bp, Artificial
  Probe
aataagtccctctttaggcatcctg

SEQ ID NO: 39856 - DNA, 25 bp, Artificial
  Probe
tgagatttacaaacccgttcgttct

SEQ ID NO: 39857 - DNA, 25 bp, Artificial
  Probe
ttcggtgacaaataagtccctcttt

SEQ ID NO: 39858 - DNA, 25 bp, Artificial
  Probe
cctggtgattcggtgacaaataagt

SEQ ID NO: 39859 - DNA, 25 bp, Artificial
  Probe
gattcggtgacaaataagtccctct

SEQ ID NO: 39860 - DNA, 25 bp, Artificial
  Probe
tttactgctgccaatcaaaccttct

SEQ ID NO: 39861 - DNA, 25 bp, Artificial
  Probe
acttgagatttacaaacccgttcgt

SEQ ID NO: 39862 - DNA, 25 bp, Artificial
  Probe
tgattcggtgacaaataagtccctc

SEQ ID NO: 39863 - DNA, 25 bp, Artificial
  Probe
cttgttctggctgatttctctgtca

SEQ ID NO: 39864 - DNA, 25 bp, Artificial
  Probe
ctcatccagtcctaacatcatctat

SEQ ID NO: 39865 - DNA, 25 bp, Artificial
  Probe
cctcatccagtcctaacatcatcta

SEQ ID NO: 39866 - DNA, 25 bp, Artificial
  Probe
tcatccagtcctaacatcatctatg

SEQ ID NO: 39867 - DNA, 25 bp, Artificial
  Probe
ttcctcatccagtcctaacatcatc

SEQ ID NO: 39868 - DNA, 25 bp, Artificial
  Probe
tctattgttgttgaagataaccgtt

SEQ ID NO: 39869 - DNA, 25 bp, Artificial
  Probe
atattatccttgacttgccgatcat

SEQ ID NO: 39870 - DNA, 25 bp, Artificial
  Probe
tatattatccttgacttgccgatca

SEQ ID NO: 39871 - DNA, 25 bp, Artificial
  Probe
tcctcatccagtcctaacatcatct

SEQ ID NO: 39872 - DNA, 25 bp, Artificial
  Probe
tattatccttgacttgccgatcatg

SEQ ID NO: 39873 - DNA, 25 bp, Artificial
  Probe
aggcagcttgttatatacgatcttc

SEQ ID NO: 39874 - DNA, 25 bp, Artificial
  Probe
ggcagcttgttatatacgatcttca

SEQ ID NO: 39875 - DNA, 25 bp, Artificial
  Probe
caggcagcttgttatatacgatctt

SEQ ID NO: 39876 - DNA, 25 bp, Artificial
  Probe
catccagtcctaacatcatctatgg

SEQ ID NO: 39877 - DNA, 25 bp, Artificial
  Probe
catccgtgtgaagttctatatcgag

SEQ ID NO: 39878 - DNA, 25 bp, Artificial
  Probe
gcagcttgttatatacgatcttcaa

SEQ ID NO: 39879 - DNA, 25 bp, Artificial
  Probe
ttacaggcagcttgttatatacgat

SEQ ID NO: 39880 - DNA, 25 bp, Artificial
  Probe
attacaggcagcttgttatatacga

SEQ ID NO: 39881 - DNA, 25 bp, Artificial
  Probe
cattacaggcagcttgttatatacg

SEQ ID NO: 39882 - DNA, 25 bp, Artificial
  Probe
gcattacaggcagcttgttatatac

SEQ ID NO: 39883 - DNA, 25 bp, Artificial
  Probe
tacaggcagcttgttatatacgatc

SEQ ID NO: 39884 - DNA, 25 bp, Artificial
  Probe
aacatcatctatgggaaagccttag

SEQ ID NO: 39885 - DNA, 25 bp, Artificial
  Probe
ctaacatcatctatgggaaagcctt

SEQ ID NO: 39886 - DNA, 25 bp, Artificial
  Probe
gaagataaccgtttccaacaaagtt

SEQ ID NO: 39887 - DNA, 25 bp, Artificial
  Probe
attgttgttgaagataaccgtttcc

SEQ ID NO: 39888 - DNA, 25 bp, Artificial
  Probe
tttcctcatccagtcctaacatcat

SEQ ID NO: 39889 - DNA, 25 bp, Artificial
  Probe
taacatcatctatgggaaagcctta

SEQ ID NO: 39890 - DNA, 25 bp, Artificial
  Probe
atccgtgtgaagttctatatcgagg

SEQ ID NO: 39891 - DNA, 25 bp, Artificial
  Probe
ttgaagataaccgtttccaacaaag

SEQ ID NO: 39892 - DNA, 25 bp, Artificial
  Probe
tgaagataaccgtttccaacaaagt

SEQ ID NO: 39893 - DNA, 25 bp, Artificial
  Probe
atctatgggaaagccttagggaaat

SEQ ID NO: 39894 - DNA, 25 bp, Artificial
  Probe
ttgttgttgaagataaccgtttcca

SEQ ID NO: 39895 - DNA, 25 bp, Artificial
  Probe
tgttgttgaagataaccgtttccaa

SEQ ID NO: 39896 - DNA, 25 bp, Artificial
  Probe
atctattgttgttgaagataaccgt

SEQ ID NO: 39897 - DNA, 25 bp, Artificial
  Probe
acaggcagcttgttatatacgatct

SEQ ID NO: 39898 - DNA, 25 bp, Artificial
  Probe
cctaacatcatctatgggaaagcct

SEQ ID NO: 39899 - DNA, 25 bp, Artificial
  Probe
gcatccgtgtgaagttctatatcga

SEQ ID NO: 39900 - DNA, 25 bp, Artificial
  Probe
tattgttgttgaagataaccgtttc

SEQ ID NO: 39901 - DNA, 25 bp, Artificial
  Probe
ctattgttgttgaagataaccgttt

SEQ ID NO: 39902 - DNA, 25 bp, Artificial
  Probe
acatcatctatgggaaagccttagg

SEQ ID NO: 39903 - DNA, 25 bp, Artificial
  Probe
tctatgggaaagccttagggaaatg

SEQ ID NO: 39904 - DNA, 25 bp, Artificial
  Probe
catctatgggaaagccttagggaaa

SEQ ID NO: 39905 - DNA, 25 bp, Artificial
  Probe
cgcatccgtgtgaagttctatatcg

SEQ ID NO: 39906 - DNA, 25 bp, Artificial
  Probe
gatctattgttgttgaagataaccg

SEQ ID NO: 39907 - DNA, 25 bp, Artificial
  Probe
cagtcctaacatcatctatgggaaa

SEQ ID NO: 39908 - DNA, 25 bp, Artificial
  Probe
agtcctaacatcatctatgggaaag

SEQ ID NO: 39909 - DNA, 25 bp, Artificial
  Probe
tcattcacgccaaaaggacctacag

SEQ ID NO: 39910 - DNA, 25 bp, Artificial
  Probe
ccttgaagcaataactccaagcagg

SEQ ID NO: 39911 - DNA, 25 bp, Artificial
  Probe
ttgaagcaataactccaagcaggct

SEQ ID NO: 39912 - DNA, 25 bp, Artificial
  Probe
cttgaagcaataactccaagcaggc

SEQ ID NO: 39913 - DNA, 25 bp, Artificial
  Probe
gcagagcaataacactatatttatt

SEQ ID NO: 39914 - DNA, 25 bp, Artificial
  Probe
tgcagagcaataacactatatttat

SEQ ID NO: 39915 - DNA, 25 bp, Artificial
  Probe
cccttgaagcaataactccaagcag

SEQ ID NO: 39916 - DNA, 25 bp, Artificial
  Probe
aaccgcttttggttttgaaccttta

SEQ ID NO: 39917 - DNA, 25 bp, Artificial
  Probe
attcaatcaatgcttcataccactg

SEQ ID NO: 39918 - DNA, 25 bp, Artificial
  Probe
aattcaatcaatgcttcataccact

SEQ ID NO: 39919 - DNA, 25 bp, Artificial
  Probe
gatgtcgttcaccttccttatagac

SEQ ID NO: 39920 - DNA, 25 bp, Artificial
  Probe
ttcaatcaatgcttcataccactgc

SEQ ID NO: 39921 - DNA, 25 bp, Artificial
  Probe
gcacggttcagaatattacaacatc

SEQ ID NO: 39922 - DNA, 25 bp, Artificial
  Probe
cacggttcagaatattacaacatct

SEQ ID NO: 39923 - DNA, 25 bp, Artificial
  Probe
cggttcagaatattacaacatctca

SEQ ID NO: 39924 - DNA, 25 bp, Artificial
  Probe
acggttcagaatattacaacatctc

SEQ ID NO: 39925 - DNA, 25 bp, Artificial
  Probe
aaccactatcaagaccacatacaaa

SEQ ID NO: 39926 - DNA, 25 bp, Artificial
  Probe
aaaccactatcaagaccacatacaa

SEQ ID NO: 39927 - DNA, 25 bp, Artificial
  Probe
cactatcaagaccacatacaaacag

SEQ ID NO: 39928 - DNA, 25 bp, Artificial
  Probe
acttcacggtatttactttcttcac

SEQ ID NO: 39929 - DNA, 25 bp, Artificial
  Probe
cacttcacggtatttactttcttca

SEQ ID NO: 39930 - DNA, 25 bp, Artificial
  Probe
gtcacttcacggtatttactttctt

SEQ ID NO: 39931 - DNA, 25 bp, Artificial
  Probe
ccactatcaagaccacatacaaaca

SEQ ID NO: 39932 - DNA, 25 bp, Artificial
  Probe
accactatcaagaccacatacaaac

SEQ ID NO: 39933 - DNA, 25 bp, Artificial
  Probe
caaacagtcacttcacggtatttac

SEQ ID NO: 39934 - DNA, 25 bp, Artificial
  Probe
ggatgtcgttcaccttccttataga

SEQ ID NO: 39935 - DNA, 25 bp, Artificial
  Probe
tcacttcacggtatttactttcttc

SEQ ID NO: 39936 - DNA, 25 bp, Artificial
  Probe
acaaacagtcacttcacggtattta

SEQ ID NO: 39937 - DNA, 25 bp, Artificial
  Probe
tacaaacagtcacttcacggtattt

SEQ ID NO: 39938 - DNA, 25 bp, Artificial
  Probe
tgcacggttcagaatattacaacat

SEQ ID NO: 39939 - DNA, 25 bp, Artificial
  Probe
agtcacttcacggtatttactttct

SEQ ID NO: 39940 - DNA, 25 bp, Artificial
  Probe
cagtcacttcacggtatttactttc

SEQ ID NO: 39941 - DNA, 25 bp, Artificial
  Probe
actatcaagaccacatacaaacagt

SEQ ID NO: 39942 - DNA, 25 bp, Artificial
  Probe
acagtcacttcacggtatttacttt

SEQ ID NO: 39943 - DNA, 25 bp, Artificial
  Probe
aacagtcacttcacggtatttactt

SEQ ID NO: 39944 - DNA, 25 bp, Artificial
  Probe
aaacagtcacttcacggtatttact

SEQ ID NO: 39945 - DNA, 25 bp, Artificial
  Probe
gtcgttcaccttccttatagacagg

SEQ ID NO: 39946 - DNA, 25 bp, Artificial
  Probe
aaattcaatcaatgcttcataccac

SEQ ID NO: 39947 - DNA, 25 bp, Artificial
  Probe
cttgaatgaaatcccagaagagcaa

SEQ ID NO: 39948 - DNA, 25 bp, Artificial
  Probe
tatcaagaccacatacaaacagtca

SEQ ID NO: 39949 - DNA, 25 bp, Artificial
  Probe
ctatcaagaccacatacaaacagtc

SEQ ID NO: 39950 - DNA, 25 bp, Artificial
  Probe
ttgaatgaaatcccagaagagcaac

SEQ ID NO: 39951 - DNA, 25 bp, Artificial
  Probe
acatacaaacagtcacttcacggta

SEQ ID NO: 39952 - DNA, 25 bp, Artificial
  Probe
atacaaacagtcacttcacggtatt

SEQ ID NO: 39953 - DNA, 25 bp, Artificial
  Probe
aagaccacatacaaacagtcacttc

SEQ ID NO: 39954 - DNA, 25 bp, Artificial
  Probe
atcaagaccacatacaaacagtcac

SEQ ID NO: 39955 - DNA, 25 bp, Artificial
  Probe
ctgcacggttcagaatattacaaca

SEQ ID NO: 39956 - DNA, 25 bp, Artificial
  Probe
caagaccacatacaaacagtcactt

SEQ ID NO: 39957 - DNA, 25 bp, Artificial
  Probe
catacaaacagtcacttcacggtat

SEQ ID NO: 39958 - DNA, 25 bp, Artificial
  Probe
ggttcagaatattacaacatctcaa

SEQ ID NO: 39959 - DNA, 25 bp, Artificial
  Probe
cttcacggtatttactttcttcacc

SEQ ID NO: 39960 - DNA, 25 bp, Artificial
  Probe
tgaatgaaatcccagaagagcaaca

SEQ ID NO: 39961 - DNA, 25 bp, Artificial
  Probe
cacggtatttactttcttcaccaaa

SEQ ID NO: 39962 - DNA, 25 bp, Artificial
  Probe
atgatttgtcttcctttgtttcgtc

SEQ ID NO: 39963 - DNA, 25 bp, Artificial
  Probe
cactgtatgatttgtcttcctttgt

SEQ ID NO: 39964 - DNA, 25 bp, Artificial
  Probe
gcactgtatgatttgtcttcctttg

SEQ ID NO: 39965 - DNA, 25 bp, Artificial
  Probe
tatgatttgtcttcctttgtttcgt

SEQ ID NO: 39966 - DNA, 25 bp, Artificial
  Probe
gtatgatttgtcttcctttgtttcg

SEQ ID NO: 39967 - DNA, 25 bp, Artificial
  Probe
aatatcccaagcaaagaggtgaatt

SEQ ID NO: 39968 - DNA, 25 bp, Artificial
  Probe
gaatatcccaagcaaagaggtgaat

SEQ ID NO: 39969 - DNA, 25 bp, Artificial
  Probe
actgtatgatttgtcttcctttgtt

SEQ ID NO: 39970 - DNA, 25 bp, Artificial
  Probe
aaagaatatcccaagcaaagaggtg

SEQ ID NO: 39971 - DNA, 25 bp, Artificial
  Probe
gatttgtcttcctttgtttcgtcaa

SEQ ID NO: 39972 - DNA, 25 bp, Artificial
  Probe
agaatatcccaagcaaagaggtgaa

SEQ ID NO: 39973 - DNA, 25 bp, Artificial
  Probe
aagaatatcccaagcaaagaggtga

SEQ ID NO: 39974 - DNA, 25 bp, Artificial
  Probe
tgatttgtcttcctttgtttcgtca

SEQ ID NO: 39975 - DNA, 25 bp, Artificial
  Probe
tgtatgatttgtcttcctttgtttc

SEQ ID NO: 39976 - DNA, 25 bp, Artificial
  Probe
ctgtatgatttgtcttcctttgttt

SEQ ID NO: 39977 - DNA, 25 bp, Artificial
  Probe
gctacctaaagtctttgtctctaaa

SEQ ID NO: 39978 - DNA, 25 bp, Artificial
  Probe
cagctacctaaagtctttgtctcta

SEQ ID NO: 39979 - DNA, 25 bp, Artificial
  Probe
aatccagctacctaaagtctttgtc

SEQ ID NO: 39980 - DNA, 25 bp, Artificial
  Probe
gaatccagctacctaaagtctttgt

SEQ ID NO: 39981 - DNA, 25 bp, Artificial
  Probe
tgaatccagctacctaaagtctttg

SEQ ID NO: 39982 - DNA, 25 bp, Artificial
  Probe
aatttaaagcagaacgatcaaaggc

SEQ ID NO: 39983 - DNA, 25 bp, Artificial
  Probe
agctacctaaagtctttgtctctaa

SEQ ID NO: 39984 - DNA, 25 bp, Artificial
  Probe
atccagctacctaaagtctttgtct

SEQ ID NO: 39985 - DNA, 25 bp, Artificial
  Probe
ggttaatgcactgtatgatttgtct

SEQ ID NO: 39986 - DNA, 25 bp, Artificial
  Probe
aggttaatgcactgtatgatttgtc

SEQ ID NO: 39987 - DNA, 25 bp, Artificial
  Probe
taatgcactgtatgatttgtcttcc

SEQ ID NO: 39988 - DNA, 25 bp, Artificial
  Probe
atgcactgtatgatttgtcttcctt

SEQ ID NO: 39989 - DNA, 25 bp, Artificial
  Probe
aatgcactgtatgatttgtcttcct

SEQ ID NO: 39990 - DNA, 25 bp, Artificial
  Probe
aaggttaatgcactgtatgatttgt

SEQ ID NO: 39991 - DNA, 25 bp, Artificial
  Probe
tgcactgtatgatttgtcttccttt

SEQ ID NO: 39992 - DNA, 25 bp, Artificial
  Probe
aaatttaaagcagaacgatcaaagg

SEQ ID NO: 39993 - DNA, 25 bp, Artificial
  Probe
ccagctacctaaagtctttgtctct

SEQ ID NO: 39994 - DNA, 25 bp, Artificial
  Probe
tccagctacctaaagtctttgtctc

SEQ ID NO: 39995 - DNA, 25 bp, Artificial
  Probe
catttggaaactgctggtatccttt

SEQ ID NO: 39996 - DNA, 25 bp, Artificial
  Probe
acgttaaaggttaatgcactgtatg

SEQ ID NO: 39997 - DNA, 25 bp, Artificial
  Probe
cttacgttaaaggttaatgcactgt

SEQ ID NO: 39998 - DNA, 25 bp, Artificial
  Probe
cgttaaaggttaatgcactgtatga

SEQ ID NO: 39999 - DNA, 25 bp, Artificial
  Probe
ctgaatccagctacctaaagtcttt

SEQ ID NO: 40000 - DNA, 25 bp, Artificial
  Probe
gcttacgttaaaggttaatgcactg

SEQ ID NO: 40001 - DNA, 25 bp, Artificial
  Probe
aaaggttaatgcactgtatgatttg

SEQ ID NO: 40002 - DNA, 25 bp, Artificial
  Probe
ttacgttaaaggttaatgcactgta

SEQ ID NO: 40003 - DNA, 25 bp, Artificial
  Probe
gttaatgcactgtatgatttgtctt

SEQ ID NO: 40004 - DNA, 25 bp, Artificial
  Probe
tacgttaaaggttaatgcactgtat

SEQ ID NO: 40005 - DNA, 25 bp, Artificial
  Probe
gaaaagaatatcccaagcaaagagg

SEQ ID NO: 40006 - DNA, 25 bp, Artificial
  Probe
atttggaaactgctggtatcctttc

SEQ ID NO: 40007 - DNA, 25 bp, Artificial
  Probe
cgaaacatcattctagggaaatctc

SEQ ID NO: 40008 - DNA, 25 bp, Artificial
  Probe
aaatctcactatgtactgtatgggc

SEQ ID NO: 40009 - DNA, 25 bp, Artificial
  Probe
aacatcattctagggaaatctcact

SEQ ID NO: 40010 - DNA, 25 bp, Artificial
  Probe
aatctcactatgtactgtatgggct

SEQ ID NO: 40011 - DNA, 25 bp, Artificial
  Probe
ctagggaaatctcactatgtactgt

SEQ ID NO: 40012 - DNA, 25 bp, Artificial
  Probe
aaacatcattctagggaaatctcac

SEQ ID NO: 40013 - DNA, 25 bp, Artificial
  Probe
gcgaaacatcattctagggaaatct

SEQ ID NO: 40014 - DNA, 25 bp, Artificial
  Probe
tctagggaaatctcactatgtactg

SEQ ID NO: 40015 - DNA, 25 bp, Artificial
  Probe
tcattctagggaaatctcactatgt

SEQ ID NO: 40016 - DNA, 25 bp, Artificial
  Probe
acatcattctagggaaatctcacta

SEQ ID NO: 40017 - DNA, 25 bp, Artificial
  Probe
gaaacatcattctagggaaatctca

SEQ ID NO: 40018 - DNA, 25 bp, Artificial
  Probe
tgcgaaacatcattctagggaaatc

SEQ ID NO: 40019 - DNA, 25 bp, Artificial
  Probe
atctcactatgtactgtatgggctg

SEQ ID NO: 40020 - DNA, 25 bp, Artificial
  Probe
gaaatctcactatgtactgtatggg

SEQ ID NO: 40021 - DNA, 25 bp, Artificial
  Probe
ggaaatctcactatgtactgtatgg

SEQ ID NO: 40022 - DNA, 25 bp, Artificial
  Probe
gggaaatctcactatgtactgtatg

SEQ ID NO: 40023 - DNA, 25 bp, Artificial
  Probe
agggaaatctcactatgtactgtat

SEQ ID NO: 40024 - DNA, 25 bp, Artificial
  Probe
gtgcgaaacatcattctagggaaat

SEQ ID NO: 40025 - DNA, 25 bp, Artificial
  Probe
ttctagggaaatctcactatgtact

SEQ ID NO: 40026 - DNA, 25 bp, Artificial
  Probe
tagggaaatctcactatgtactgta

SEQ ID NO: 40027 - DNA, 25 bp, Artificial
  Probe
atcattctagggaaatctcactatg

SEQ ID NO: 40028 - DNA, 25 bp, Artificial
  Probe
catcattctagggaaatctcactat

SEQ ID NO: 40029 - DNA, 25 bp, Artificial
  Probe
cattctagggaaatctcactatgta

SEQ ID NO: 40030 - DNA, 25 bp, Artificial
  Probe
attctagggaaatctcactatgtac

SEQ ID NO: 40031 - DNA, 25 bp, Artificial
  Probe
tgtgcgaaacatcattctagggaaa

SEQ ID NO: 40032 - DNA, 25 bp, Artificial
  Probe
tctcactatgtactgtatgggctgg

SEQ ID NO: 40033 - DNA, 25 bp, Artificial
  Probe
gaaccccaactacaatctttgaaaa

SEQ ID NO: 40034 - DNA, 25 bp, Artificial
  Probe
agaaccccaactacaatctttgaaa

SEQ ID NO: 40035 - DNA, 25 bp, Artificial
  Probe
ctcactatgtactgtatgggctggt

SEQ ID NO: 40036 - DNA, 25 bp, Artificial
  Probe
cttgtttctttcctggatgtgcgaa

SEQ ID NO: 40037 - DNA, 25 bp, Artificial
  Probe
atgtgcgaaacatcattctagggaa

SEQ ID NO: 40038 - DNA, 25 bp, Artificial
  Probe
tcactatgtactgtatgggctggtg

SEQ ID NO: 40039 - DNA, 25 bp, Artificial
  Probe
aagaaccccaactacaatctttgaa

SEQ ID NO: 40040 - DNA, 25 bp, Artificial
  Probe
ttgtttctttcctggatgtgcgaaa

SEQ ID NO: 40041 - DNA, 25 bp, Artificial
  Probe
cgtgcttgtttctttcctggatgtg

SEQ ID NO: 40042 - DNA, 25 bp, Artificial
  Probe
tttctttcctggatgtgcgaaacat

SEQ ID NO: 40043 - DNA, 25 bp, Artificial
  Probe
gtgcttgtttctttcctggatgtgc

SEQ ID NO: 40044 - DNA, 25 bp, Artificial
  Probe
cactatgtactgtatgggctggtgg

SEQ ID NO: 40045 - DNA, 25 bp, Artificial
  Probe
tcgaaagaaccccaactacaatctt

SEQ ID NO: 40046 - DNA, 25 bp, Artificial
  Probe
aaaatggctgacactagagaccctg

SEQ ID NO: 40047 - DNA, 25 bp, Artificial
  Probe
ttcgaaagaaccccaactacaatct

SEQ ID NO: 40048 - DNA, 25 bp, Artificial
  Probe
gaaagaaccccaactacaatctttg

SEQ ID NO: 40049 - DNA, 25 bp, Artificial
  Probe
aaagaaccccaactacaatctttga

SEQ ID NO: 40050 - DNA, 25 bp, Artificial
  Probe
cgaaagaaccccaactacaatcttt

SEQ ID NO: 40051 - DNA, 25 bp, Artificial
  Probe
agcaccttaacaagcaagaatctaa

SEQ ID NO: 40052 - DNA, 25 bp, Artificial
  Probe
gagcaccttaacaagcaagaatcta

SEQ ID NO: 40053 - DNA, 25 bp, Artificial
  Probe
cgaagaggatgagtacgaacaattc

SEQ ID NO: 40054 - DNA, 25 bp, Artificial
  Probe
cctatagtgagtcgcataacaattc

SEQ ID NO: 40055 - DNA, 25 bp, Artificial
  Probe
gcaccttaacaagcaagaatctaaa

SEQ ID NO: 40056 - DNA, 25 bp, Artificial
  Probe
ctatagtgagtcgcataacaattca

SEQ ID NO: 40057 - DNA, 25 bp, Artificial
  Probe
ggagcaccttaacaagcaagaatct

SEQ ID NO: 40058 - DNA, 25 bp, Artificial
  Probe
ttggagcaccttaacaagcaagaat

SEQ ID NO: 40059 - DNA, 25 bp, Artificial
  Probe
catcgtacttggagcaccttaacaa

SEQ ID NO: 40060 - DNA, 25 bp, Artificial
  Probe
tggagcaccttaacaagcaagaatc

SEQ ID NO: 40061 - DNA, 25 bp, Artificial
  Probe
gacatcgtacttggagcaccttaac

SEQ ID NO: 40062 - DNA, 25 bp, Artificial
  Probe
aacaacacagaacgacacaaagaac

SEQ ID NO: 40063 - DNA, 25 bp, Artificial
  Probe
ccctatagtgagtcgcataacaatt

SEQ ID NO: 40064 - DNA, 25 bp, Artificial
  Probe
tcgaagaggatgagtacgaacaatt

SEQ ID NO: 40065 - DNA, 25 bp, Artificial
  Probe
acatcgtacttggagcaccttaaca

SEQ ID NO: 40066 - DNA, 25 bp, Artificial
  Probe
cagtggctttgaatgaaatccagat

SEQ ID NO: 40067 - DNA, 25 bp, Artificial
  Probe
atcagtggctttgaatgaaatccag

SEQ ID NO: 40068 - DNA, 25 bp, Artificial
  Probe
aacacagaacgacacaaagaacact

SEQ ID NO: 40069 - DNA, 25 bp, Artificial
  Probe
caacacagaacgacacaaagaacac

SEQ ID NO: 40070 - DNA, 25 bp, Artificial
  Probe
acataacgcctgtaggaatcacctt

SEQ ID NO: 40071 - DNA, 25 bp, Artificial
  Probe
ctcgaagaggatgagtacgaacaat

SEQ ID NO: 40072 - DNA, 25 bp, Artificial
  Probe
acaacacagaacgacacaaagaaca

SEQ ID NO: 40073 - DNA, 25 bp, Artificial
  Probe
caccatgtaaacaagacacacactg

SEQ ID NO: 40074 - DNA, 25 bp, Artificial
  Probe
ataacgcctgtaggaatcacctttg

SEQ ID NO: 40075 - DNA, 25 bp, Artificial
  Probe
cataacgcctgtaggaatcaccttt

SEQ ID NO: 40076 - DNA, 25 bp, Artificial
  Probe
acacagaacgacacaaagaacactc

SEQ ID NO: 40077 - DNA, 25 bp, Artificial
  Probe
ggacatcgtacttggagcaccttaa

SEQ ID NO: 40078 - DNA, 25 bp, Artificial
  Probe
gccctatagtgagtcgcataacaat

SEQ ID NO: 40079 - DNA, 25 bp, Artificial
  Probe
tcagtggctttgaatgaaatccaga

SEQ ID NO: 40080 - DNA, 25 bp, Artificial
  Probe
aagcaagaatctaaaatacctctgg

SEQ ID NO: 40081 - DNA, 25 bp, Artificial
  Probe
gaccacataacgcctgtaggaatca

SEQ ID NO: 40082 - DNA, 25 bp, Artificial
  Probe
tgaccacataacgcctgtaggaatc

SEQ ID NO: 40083 - DNA, 25 bp, Artificial
  Probe
tatagtgagtcgcataacaattcac

SEQ ID NO: 40084 - DNA, 25 bp, Artificial
  Probe
acaagcaagaatctaaaatacctct

SEQ ID NO: 40085 - DNA, 25 bp, Artificial
  Probe
cacataacgcctgtaggaatcacct

SEQ ID NO: 40086 - DNA, 25 bp, Artificial
  Probe
caccttaacaagcaagaatctaaaa

SEQ ID NO: 40087 - DNA, 25 bp, Artificial
  Probe
taaacaagacacacactggcacaac

SEQ ID NO: 40088 - DNA, 25 bp, Artificial
  Probe
gtaaacaagacacacactggcacaa

SEQ ID NO: 40089 - DNA, 25 bp, Artificial
  Probe
caagcaagaatctaaaatacctctg

SEQ ID NO: 40090 - DNA, 25 bp, Artificial
  Probe
accacataacgcctgtaggaatcac

SEQ ID NO: 40091 - DNA, 25 bp, Artificial
  Probe
gtgaccacataacgcctgtaggaat

SEQ ID NO: 40092 - DNA, 25 bp, Artificial
  Probe
atcgtacttggagcaccttaacaag

SEQ ID NO: 40093 - DNA, 25 bp, Artificial
  Probe
aacaagcaagaatctaaaatacctc

SEQ ID NO: 40094 - DNA, 25 bp, Artificial
  Probe
gaatctaaaatacctctggtggcta

SEQ ID NO: 40095 - DNA, 25 bp, Artificial
  Probe
gcaagaatctaaaatacctctggtg

SEQ ID NO: 40096 - DNA, 25 bp, Artificial
  Probe
aaggatgattaaggaattatgctca

SEQ ID NO: 40097 - DNA, 25 bp, Artificial
  Probe
cttgcttaccatcctttgttcatac

SEQ ID NO: 40098 - DNA, 25 bp, Artificial
  Probe
attatttctggtggtttcttaggct

SEQ ID NO: 40099 - DNA, 25 bp, Artificial
  Probe
cattatttctggtggtttcttaggc

SEQ ID NO: 40100 - DNA, 25 bp, Artificial
  Probe
ggtctactcattatttctggtggtt

SEQ ID NO: 40101 - DNA, 25 bp, Artificial
  Probe
ccaggatgatgtttgtatgtaaagc

SEQ ID NO: 40102 - DNA, 25 bp, Artificial
  Probe
ttatttctggtggtttcttaggctt

SEQ ID NO: 40103 - DNA, 25 bp, Artificial
  Probe
atgctcataaagaacccaagtaaac

SEQ ID NO: 40104 - DNA, 25 bp, Artificial
  Probe
gctcataaagaacccaagtaaactg

SEQ ID NO: 40105 - DNA, 25 bp, Artificial
  Probe
tgctcataaagaacccaagtaaact

SEQ ID NO: 40106 - DNA, 25 bp, Artificial
  Probe
tatttctggtggtttcttaggcttg

SEQ ID NO: 40107 - DNA, 25 bp, Artificial
  Probe
gtctactcattatttctggtggttt

SEQ ID NO: 40108 - DNA, 25 bp, Artificial
  Probe
ctcataaagaacccaagtaaactgt

SEQ ID NO: 40109 - DNA, 25 bp, Artificial
  Probe
ttgcttaccatcctttgttcatacc

SEQ ID NO: 40110 - DNA, 25 bp, Artificial
  Probe
tcattatttctggtggtttcttagg

SEQ ID NO: 40111 - DNA, 25 bp, Artificial
  Probe
taccatcctttgttcataccaagag

SEQ ID NO: 40112 - DNA, 25 bp, Artificial
  Probe
ttaccatcctttgttcataccaaga

SEQ ID NO: 40113 - DNA, 25 bp, Artificial
  Probe
cttaccatcctttgttcataccaag

SEQ ID NO: 40114 - DNA, 25 bp, Artificial
  Probe
ctactcattatttctggtggtttct

SEQ ID NO: 40115 - DNA, 25 bp, Artificial
  Probe
tctactcattatttctggtggtttc

SEQ ID NO: 40116 - DNA, 25 bp, Artificial
  Probe
gcttgcttaccatcctttgttcata

SEQ ID NO: 40117 - DNA, 25 bp, Artificial
  Probe
tccaggatgatgtttgtatgtaaag

SEQ ID NO: 40118 - DNA, 25 bp, Artificial
  Probe
gggtctactcattatttctggtggt

SEQ ID NO: 40119 - DNA, 25 bp, Artificial
  Probe
ccatcctttgttcataccaagagag

SEQ ID NO: 40120 - DNA, 25 bp, Artificial
  Probe
tttattcatggcaaagtgtcagttt

SEQ ID NO: 40121 - DNA, 25 bp, Artificial
  Probe
gcttaccatcctttgttcataccaa

SEQ ID NO: 40122 - DNA, 25 bp, Artificial
  Probe
ccaaaggatgattaaggaattatgc

SEQ ID NO: 40123 - DNA, 25 bp, Artificial
  Probe
actcattatttctggtggtttctta

SEQ ID NO: 40124 - DNA, 25 bp, Artificial
  Probe
tactcattatttctggtggtttctt

SEQ ID NO: 40125 - DNA, 25 bp, Artificial
  Probe
ttccaggatgatgtttgtatgtaaa

SEQ ID NO: 40126 - DNA, 25 bp, Artificial
  Probe
tatgctcataaagaacccaagtaaa

SEQ ID NO: 40127 - DNA, 25 bp, Artificial
  Probe
accatcctttgttcataccaagaga

SEQ ID NO: 40128 - DNA, 25 bp, Artificial
  Probe
tgcttaccatcctttgttcatacca

SEQ ID NO: 40129 - DNA, 25 bp, Artificial
  Probe
aggaattatgctcataaagaaccca

SEQ ID NO: 40130 - DNA, 25 bp, Artificial
  Probe
ggaattatgctcataaagaacccaa

SEQ ID NO: 40131 - DNA, 25 bp, Artificial
  Probe
ctcattatttctggtggtttcttag

SEQ ID NO: 40132 - DNA, 25 bp, Artificial
  Probe
aaggaattatgctcataaagaaccc

SEQ ID NO: 40133 - DNA, 25 bp, Artificial
  Probe
cctttgttcataccaagagaggaaa

SEQ ID NO: 40134 - DNA, 25 bp, Artificial
  Probe
catcctttgttcataccaagagagg

SEQ ID NO: 40135 - DNA, 25 bp, Artificial
  Probe
atttctggtggtttcttaggcttgt

SEQ ID NO: 40136 - DNA, 25 bp, Artificial
  Probe
aattatgctcataaagaacccaagt

SEQ ID NO: 40137 - DNA, 25 bp, Artificial
  Probe
caaaggatgattaaggaattatgct

SEQ ID NO: 40138 - DNA, 25 bp, Artificial
  Probe
gaattatgctcataaagaacccaag

SEQ ID NO: 40139 - DNA, 25 bp, Artificial
  Probe
ttatgctcataaagaacccaagtaa

SEQ ID NO: 40140 - DNA, 25 bp, Artificial
  Probe
aggatgattaaggaattatgctcat

SEQ ID NO: 40141 - DNA, 25 bp, Artificial
  Probe
taaatcattcacccataccctaacc

SEQ ID NO: 40142 - DNA, 25 bp, Artificial
  Probe
cctaaatcattcacccataccctaa

SEQ ID NO: 40143 - DNA, 25 bp, Artificial
  Probe
tcatccctaaatcattcacccatac

SEQ ID NO: 40144 - DNA, 25 bp, Artificial
  Probe
ataccctaacctttggaacacattt

SEQ ID NO: 40145 - DNA, 25 bp, Artificial
  Probe
catcatccctaaatcattcacccat

SEQ ID NO: 40146 - DNA, 25 bp, Artificial
  Probe
atcatccctaaatcattcacccata

SEQ ID NO: 40147 - DNA, 25 bp, Artificial
  Probe
cataccctaacctttggaacacatt

SEQ ID NO: 40148 - DNA, 25 bp, Artificial
  Probe
catccctaaatcattcacccatacc

SEQ ID NO: 40149 - DNA, 25 bp, Artificial
  Probe
ctaaatcattcacccataccctaac

SEQ ID NO: 40150 - DNA, 25 bp, Artificial
  Probe
ccctaaatcattcacccatacccta

SEQ ID NO: 40151 - DNA, 25 bp, Artificial
  Probe
atcattcacccataccctaaccttt

SEQ ID NO: 40152 - DNA, 25 bp, Artificial
  Probe
aatcattcacccataccctaacctt

SEQ ID NO: 40153 - DNA, 25 bp, Artificial
  Probe
aaatcattcacccataccctaacct

SEQ ID NO: 40154 - DNA, 25 bp, Artificial
  Probe
tttgagagagtcttaccctgtagtc

SEQ ID NO: 40155 - DNA, 25 bp, Artificial
  Probe
atccctaaatcattcacccataccc

SEQ ID NO: 40156 - DNA, 25 bp, Artificial
  Probe
gatcatcccacttcttcttctcaag

SEQ ID NO: 40157 - DNA, 25 bp, Artificial
  Probe
ttctacctaccattcaactgttgcc

SEQ ID NO: 40158 - DNA, 25 bp, Artificial
  Probe
tcattcacccataccctaacctttg

SEQ ID NO: 40159 - DNA, 25 bp, Artificial
  Probe
aactgttgccaaatcaataagaaat

SEQ ID NO: 40160 - DNA, 25 bp, Artificial
  Probe
tcaactgttgccaaatcaataagaa

SEQ ID NO: 40161 - DNA, 25 bp, Artificial
  Probe
ttcaactgttgccaaatcaataaga

SEQ ID NO: 40162 - DNA, 25 bp, Artificial
  Probe
ccattcaactgttgccaaatcaata

SEQ ID NO: 40163 - DNA, 25 bp, Artificial
  Probe
ctacctaccattcaactgttgccaa

SEQ ID NO: 40164 - DNA, 25 bp, Artificial
  Probe
cattcaactgttgccaaatcaataa

SEQ ID NO: 40165 - DNA, 25 bp, Artificial
  Probe
caactgttgccaaatcaataagaaa

SEQ ID NO: 40166 - DNA, 25 bp, Artificial
  Probe
attcaactgttgccaaatcaataag

SEQ ID NO: 40167 - DNA, 25 bp, Artificial
  Probe
tttctacctaccattcaactgttgc

SEQ ID NO: 40168 - DNA, 25 bp, Artificial
  Probe
ttgagagagtcttaccctgtagtcc

SEQ ID NO: 40169 - DNA, 25 bp, Artificial
  Probe
tccctaaatcattcacccataccct

SEQ ID NO: 40170 - DNA, 25 bp, Artificial
  Probe
taccattcaactgttgccaaatcaa

SEQ ID NO: 40171 - DNA, 25 bp, Artificial
  Probe
cgatcatcccacttcttcttctcaa

SEQ ID NO: 40172 - DNA, 25 bp, Artificial
  Probe
gcatcatccctaaatcattcaccca

SEQ ID NO: 40173 - DNA, 25 bp, Artificial
  Probe
actgttgccaaatcaataagaaata

SEQ ID NO: 40174 - DNA, 25 bp, Artificial
  Probe
ctaccattcaactgttgccaaatca

SEQ ID NO: 40175 - DNA, 25 bp, Artificial
  Probe
ctggacggaacaaatagtggatcat

SEQ ID NO: 40176 - DNA, 25 bp, Artificial
  Probe
accattcaactgttgccaaatcaat

SEQ ID NO: 40177 - DNA, 25 bp, Artificial
  Probe
tctacctaccattcaactgttgcca

SEQ ID NO: 40178 - DNA, 25 bp, Artificial
  Probe
taccctaacctttggaacacatttt

SEQ ID NO: 40179 - DNA, 25 bp, Artificial
  Probe
tggacggaacaaatagtggatcatg

SEQ ID NO: 40180 - DNA, 25 bp, Artificial
  Probe
cctaccattcaactgttgccaaatc

SEQ ID NO: 40181 - DNA, 25 bp, Artificial
  Probe
tacctaccattcaactgttgccaaa

SEQ ID NO: 40182 - DNA, 25 bp, Artificial
  Probe
atgtaactgcttttccattccatac

SEQ ID NO: 40183 - DNA, 25 bp, Artificial
  Probe
ttttgagagagtcttaccctgtagt

SEQ ID NO: 40184 - DNA, 25 bp, Artificial
  Probe
attccatacgccctacttgagaatg

SEQ ID NO: 40185 - DNA, 25 bp, Artificial
  Probe
cattccatacgccctacttgagaat

SEQ ID NO: 40186 - DNA, 25 bp, Artificial
  Probe
gtgttggcatcttgtgtctttaata

SEQ ID NO: 40187 - DNA, 25 bp, Artificial
  Probe
tgttggcatcttgtgtctttaatat

SEQ ID NO: 40188 - DNA, 25 bp, Artificial
  Probe
agtgttggcatcttgtgtctttaat

SEQ ID NO: 40189 - DNA, 25 bp, Artificial
  Probe
gttggcatcttgtgtctttaatatg

SEQ ID NO: 40190 - DNA, 25 bp, Artificial
  Probe
ttggcatcttgtgtctttaatatga

SEQ ID NO: 40191 - DNA, 25 bp, Artificial
  Probe
aagtgttggcatcttgtgtctttaa

SEQ ID NO: 40192 - DNA, 25 bp, Artificial
  Probe
tggcatcttgtgtctttaatatgat

SEQ ID NO: 40193 - DNA, 25 bp, Artificial
  Probe
tatggcttgactctaagtagctgaa

SEQ ID NO: 40194 - DNA, 25 bp, Artificial
  Probe
ctatggcttgactctaagtagctga

SEQ ID NO: 40195 - DNA, 25 bp, Artificial
  Probe
actctaagtagctgaacacttgtac

SEQ ID NO: 40196 - DNA, 25 bp, Artificial
  Probe
gactctaagtagctgaacacttgta

SEQ ID NO: 40197 - DNA, 25 bp, Artificial
  Probe
cttgactctaagtagctgaacactt

SEQ ID NO: 40198 - DNA, 25 bp, Artificial
  Probe
ttgactctaagtagctgaacacttg

SEQ ID NO: 40199 - DNA, 25 bp, Artificial
  Probe
ctctaagtagctgaacacttgtacc

SEQ ID NO: 40200 - DNA, 25 bp, Artificial
  Probe
ggcatcttgtgtctttaatatgata

SEQ ID NO: 40201 - DNA, 25 bp, Artificial
  Probe
tgactctaagtagctgaacacttgt

SEQ ID NO: 40202 - DNA, 25 bp, Artificial
  Probe
ttaaagtgaaacagtatcttccaaa

SEQ ID NO: 40203 - DNA, 25 bp, Artificial
  Probe
gcttgactctaagtagctgaacact

SEQ ID NO: 40204 - DNA, 25 bp, Artificial
  Probe
atggcttgactctaagtagctgaac

SEQ ID NO: 40205 - DNA, 25 bp, Artificial
  Probe
aaccagagaaagttgagcaaagacc

SEQ ID NO: 40206 - DNA, 25 bp, Artificial
  Probe
attaaagtgaaacagtatcttccaa

SEQ ID NO: 40207 - DNA, 25 bp, Artificial
  Probe
aattaaagtgaaacagtatcttcca

SEQ ID NO: 40208 - DNA, 25 bp, Artificial
  Probe
ggcttgactctaagtagctgaacac

SEQ ID NO: 40209 - DNA, 25 bp, Artificial
  Probe
tggcttgactctaagtagctgaaca

SEQ ID NO: 40210 - DNA, 25 bp, Artificial
  Probe
gagaaagttgagcaaagaccgtgac

SEQ ID NO: 40211 - DNA, 25 bp, Artificial
  Probe
cagagaaagttgagcaaagaccgtg

SEQ ID NO: 40212 - DNA, 25 bp, Artificial
  Probe
tctaagtagctgaacacttgtaccc

SEQ ID NO: 40213 - DNA, 25 bp, Artificial
  Probe
agagaaagttgagcaaagaccgtga

SEQ ID NO: 40214 - DNA, 25 bp, Artificial
  Probe
gttgagcaaagaccgtgacagaaag

SEQ ID NO: 40215 - DNA, 25 bp, Artificial
  Probe
gaaagttgagcaaagaccgtgacag

SEQ ID NO: 40216 - DNA, 25 bp, Artificial
  Probe
taagtagctgaacacttgtacccag

SEQ ID NO: 40217 - DNA, 25 bp, Artificial
  Probe
ctaagtagctgaacacttgtaccca

SEQ ID NO: 40218 - DNA, 25 bp, Artificial
  Probe
cgggctatggcttgactctaagtag

SEQ ID NO: 40219 - DNA, 25 bp, Artificial
  Probe
caagtgttggcatcttgtgtcttta

SEQ ID NO: 40220 - DNA, 25 bp, Artificial
  Probe
ttgagcaaagaccgtgacagaaaga

SEQ ID NO: 40221 - DNA, 25 bp, Artificial
  Probe
gcatcttgtgtctttaatatgataa

SEQ ID NO: 40222 - DNA, 25 bp, Artificial
  Probe
gctatggcttgactctaagtagctg

SEQ ID NO: 40223 - DNA, 25 bp, Artificial
  Probe
gaagccactgaagagtcatggagag

SEQ ID NO: 40224 - DNA, 25 bp, Artificial
  Probe
taaagtgaaacagtatcttccaaaa

SEQ ID NO: 40225 - DNA, 25 bp, Artificial
  Probe
agttgagcaaagaccgtgacagaaa

SEQ ID NO: 40226 - DNA, 25 bp, Artificial
  Probe
aagttgagcaaagaccgtgacagaa

SEQ ID NO: 40227 - DNA, 25 bp, Artificial
  Probe
aaagttgagcaaagaccgtgacaga

SEQ ID NO: 40228 - DNA, 25 bp, Artificial
  Probe
agaaagttgagcaaagaccgtgaca

SEQ ID NO: 40229 - DNA, 25 bp, Artificial
  Probe
caaccagagaaagttgagcaaagac

SEQ ID NO: 40230 - DNA, 25 bp, Artificial
  Probe
ggctatggcttgactctaagtagct

SEQ ID NO: 40231 - DNA, 25 bp, Artificial
  Probe
aaggcgatgttaagatagaagagtc

SEQ ID NO: 40232 - DNA, 25 bp, Artificial
  Probe
aggcgatgttaagatagaagagtct

SEQ ID NO: 40233 - DNA, 25 bp, Artificial
  Probe
atatctgactgctcaactacgattg

SEQ ID NO: 40234 - DNA, 25 bp, Artificial
  Probe
ccaattctgtactatcatctgtcga

SEQ ID NO: 40235 - DNA, 25 bp, Artificial
  Probe
aaaggcgatgttaagatagaagagt

SEQ ID NO: 40236 - DNA, 25 bp, Artificial
  Probe
tttcaaagcagtcgtttacaagtaa

SEQ ID NO: 40237 - DNA, 25 bp, Artificial
  Probe
caattctgtactatcatctgtcgaa

SEQ ID NO: 40238 - DNA, 25 bp, Artificial
  Probe
tatctgactgctcaactacgattgc

SEQ ID NO: 40239 - DNA, 25 bp, Artificial
  Probe
ctggtgacagcgagttacatcatat

SEQ ID NO: 40240 - DNA, 25 bp, Artificial
  Probe
ggcgatgttaagatagaagagtctt

SEQ ID NO: 40241 - DNA, 25 bp, Artificial
  Probe
ctttcaaagcagtcgtttacaagta

SEQ ID NO: 40242 - DNA, 25 bp, Artificial
  Probe
attacctttcaaagcagtcgtttac

SEQ ID NO: 40243 - DNA, 25 bp, Artificial
  Probe
acccaattctgtactatcatctgtc

SEQ ID NO: 40244 - DNA, 25 bp, Artificial
  Probe
gacccaattctgtactatcatctgt

SEQ ID NO: 40245 - DNA, 25 bp, Artificial
  Probe
gatatctgactgctcaactacgatt

SEQ ID NO: 40246 - DNA, 25 bp, Artificial
  Probe
ttattacctttcaaagcagtcgttt

SEQ ID NO: 40247 - DNA, 25 bp, Artificial
  Probe
tttattacctttcaaagcagtcgtt

SEQ ID NO: 40248 - DNA, 25 bp, Artificial
  Probe
agcatttattacctttcaaagcagt

SEQ ID NO: 40249 - DNA, 25 bp, Artificial
  Probe
tcaactacgattgctctcttcaaag

SEQ ID NO: 40250 - DNA, 25 bp, Artificial
  Probe
ctcaactacgattgctctcttcaaa

SEQ ID NO: 40251 - DNA, 25 bp, Artificial
  Probe
cccaattctgtactatcatctgtcg

SEQ ID NO: 40252 - DNA, 25 bp, Artificial
  Probe
atttattacctttcaaagcagtcgt

SEQ ID NO: 40253 - DNA, 25 bp, Artificial
  Probe
gcatttattacctttcaaagcagtc

SEQ ID NO: 40254 - DNA, 25 bp, Artificial
  Probe
agagcatttattacctttcaaagca

SEQ ID NO: 40255 - DNA, 25 bp, Artificial
  Probe
catttattacctttcaaagcagtcg

SEQ ID NO: 40256 - DNA, 25 bp, Artificial
  Probe
gagcatttattacctttcaaagcag

SEQ ID NO: 40257 - DNA, 25 bp, Artificial
  Probe
tcttaggactaaaggctgctgatag

SEQ ID NO: 40258 - DNA, 25 bp, Artificial
  Probe
gctcaactacgattgctctcttcaa

SEQ ID NO: 40259 - DNA, 25 bp, Artificial
  Probe
tgatatctgactgctcaactacgat

SEQ ID NO: 40260 - DNA, 25 bp, Artificial
  Probe
tacctttcaaagcagtcgtttacaa

SEQ ID NO: 40261 - DNA, 25 bp, Artificial
  Probe
ttacctttcaaagcagtcgtttaca

SEQ ID NO: 40262 - DNA, 25 bp, Artificial
  Probe
gagagcatttattacctttcaaagc

SEQ ID NO: 40263 - DNA, 25 bp, Artificial
  Probe
tattacctttcaaagcagtcgttta

SEQ ID NO: 40264 - DNA, 25 bp, Artificial
  Probe
tgacccaattctgtactatcatctg

SEQ ID NO: 40265 - DNA, 25 bp, Artificial
  Probe
tgctttgacccaattctgtactatc

SEQ ID NO: 40266 - DNA, 25 bp, Artificial
  Probe
ttgacccaattctgtactatcatct

SEQ ID NO: 40267 - DNA, 25 bp, Artificial
  Probe
gctttgacccaattctgtactatca

SEQ ID NO: 40268 - DNA, 25 bp, Artificial
  Probe
gtgctttgacccaattctgtactat

SEQ ID NO: 40269 - DNA, 25 bp, Artificial
  Probe
gaggtgatatctgactgctcaacta

SEQ ID NO: 40270 - DNA, 25 bp, Artificial
  Probe
aggtgatatctgactgctcaactac

SEQ ID NO: 40271 - DNA, 25 bp, Artificial
  Probe
ctgctcaactacgattgctctcttc

SEQ ID NO: 40272 - DNA, 25 bp, Artificial
  Probe
ttcaaagcagtcgtttacaagtaaa

SEQ ID NO: 40273 - DNA, 25 bp, Artificial
  Probe
gtgatatctgactgctcaactacga

SEQ ID NO: 40274 - DNA, 25 bp, Artificial
  Probe
tgtactatcatctgtcgaaagcatt

SEQ ID NO: 40275 - DNA, 25 bp, Artificial
  Probe
tttgacccaattctgtactatcatc

SEQ ID NO: 40276 - DNA, 25 bp, Artificial
  Probe
tagtggctaggttaatgctatgatg

SEQ ID NO: 40277 - DNA, 25 bp, Artificial
  Probe
caagaatagtggctaggttaatgct

SEQ ID NO: 40278 - DNA, 25 bp, Artificial
  Probe
gtggctaggttaatgctatgatgaa

SEQ ID NO: 40279 - DNA, 25 bp, Artificial
  Probe
aagaatagtggctaggttaatgcta

SEQ ID NO: 40280 - DNA, 25 bp, Artificial
  Probe
aggtgagttatgtattgctgtcatt

SEQ ID NO: 40281 - DNA, 25 bp, Artificial
  Probe
aaggtgagttatgtattgctgtcat

SEQ ID NO: 40282 - DNA, 25 bp, Artificial
  Probe
gtgagttatgtattgctgtcattgg

SEQ ID NO: 40283 - DNA, 25 bp, Artificial
  Probe
ggtgagttatgtattgctgtcattg

SEQ ID NO: 40284 - DNA, 25 bp, Artificial
  Probe
agtctatcacctgaagccaagaata

SEQ ID NO: 40285 - DNA, 25 bp, Artificial
  Probe
ctctcttgtgttagcaacttatgaa

SEQ ID NO: 40286 - DNA, 25 bp, Artificial
  Probe
agtggctaggttaatgctatgatga

SEQ ID NO: 40287 - DNA, 25 bp, Artificial
  Probe
gtctatcacctgaagccaagaatag

SEQ ID NO: 40288 - DNA, 25 bp, Artificial
  Probe
aagtctatcacctgaagccaagaat

SEQ ID NO: 40289 - DNA, 25 bp, Artificial
  Probe
tctatcacctgaagccaagaatagt

SEQ ID NO: 40290 - DNA, 25 bp, Artificial
  Probe
aatagtggctaggttaatgctatga

SEQ ID NO: 40291 - DNA, 25 bp, Artificial
  Probe
atagtggctaggttaatgctatgat

SEQ ID NO: 40292 - DNA, 25 bp, Artificial
  Probe
gaatagtggctaggttaatgctatg

SEQ ID NO: 40293 - DNA, 25 bp, Artificial
  Probe
agaatagtggctaggttaatgctat

SEQ ID NO: 40294 - DNA, 25 bp, Artificial
  Probe
ctatcacctgaagccaagaatagtg

SEQ ID NO: 40295 - DNA, 25 bp, Artificial
  Probe
gaagtctatcacctgaagccaagaa

SEQ ID NO: 40296 - DNA, 25 bp, Artificial
  Probe
ttcttgctttcttagtggtagtcat

SEQ ID NO: 40297 - DNA, 25 bp, Artificial
  Probe
tttcttgctttcttagtggtagtca

SEQ ID NO: 40298 - DNA, 25 bp, Artificial
  Probe
gaaaggtgagttatgtattgctgtc

SEQ ID NO: 40299 - DNA, 25 bp, Artificial
  Probe
ctgaaaggtgagttatgtattgctg

SEQ ID NO: 40300 - DNA, 25 bp, Artificial
  Probe
tctgaaaggtgagttatgtattgct

SEQ ID NO: 40301 - DNA, 25 bp, Artificial
  Probe
tgaaaggtgagttatgtattgctgt

SEQ ID NO: 40302 - DNA, 25 bp, Artificial
  Probe
ttgaagtctatcacctgaagccaag

SEQ ID NO: 40303 - DNA, 25 bp, Artificial
  Probe
ttctgaaaggtgagttatgtattgc

SEQ ID NO: 40304 - DNA, 25 bp, Artificial
  Probe
ccaagaatagtggctaggttaatgc

SEQ ID NO: 40305 - DNA, 25 bp, Artificial
  Probe
tggctaggttaatgctatgatgaaa

SEQ ID NO: 40306 - DNA, 25 bp, Artificial
  Probe
ggctaggttaatgctatgatgaaag

SEQ ID NO: 40307 - DNA, 25 bp, Artificial
  Probe
tctgtttctgaaaggtgagttatgt

SEQ ID NO: 40308 - DNA, 25 bp, Artificial
  Probe
aaaggtgagttatgtattgctgtca

SEQ ID NO: 40309 - DNA, 25 bp, Artificial
  Probe
gtttgattctgtttctgaaaggtga

SEQ ID NO: 40310 - DNA, 25 bp, Artificial
  Probe
agtttgattctgtttctgaaaggtg

SEQ ID NO: 40311 - DNA, 25 bp, Artificial
  Probe
tttgattctgtttctgaaaggtgag

SEQ ID NO: 40312 - DNA, 25 bp, Artificial
  Probe
gagtttgattctgtttctgaaaggt

SEQ ID NO: 40313 - DNA, 25 bp, Artificial
  Probe
ggagtttgattctgtttctgaaagg

SEQ ID NO: 40314 - DNA, 25 bp, Artificial
  Probe
tgattctgtttctgaaaggtgagtt

SEQ ID NO: 40315 - DNA, 25 bp, Artificial
  Probe
ttgattctgtttctgaaaggtgagt

SEQ ID NO: 40316 - DNA, 25 bp, Artificial
  Probe
aggagtttgattctgtttctgaaag

SEQ ID NO: 40317 - DNA, 25 bp, Artificial
  Probe
tatcacctgaagccaagaatagtgg

SEQ ID NO: 40318 - DNA, 25 bp, Artificial
  Probe
ttctgtttctgaaaggtgagttatg

SEQ ID NO: 40319 - DNA, 25 bp, Artificial
  Probe
gctaggttaatgctatgatgaaaga

SEQ ID NO: 40320 - DNA, 25 bp, Artificial
  Probe
tctcttgtgttagcaacttatgaaa

SEQ ID NO: 40321 - DNA, 25 bp, Artificial
  Probe
ctggcttgctttatgatagtttctg

SEQ ID NO: 40322 - DNA, 25 bp, Artificial
  Probe
taatgaatggctcctttgcttagta

SEQ ID NO: 40323 - DNA, 25 bp, Artificial
  Probe
tggcttgctttatgatagtttctga

SEQ ID NO: 40324 - DNA, 25 bp, Artificial
  Probe
ggcttgctttatgatagtttctgat

SEQ ID NO: 40325 - DNA, 25 bp, Artificial
  Probe
ttgtaatgaatggctcctttgctta

SEQ ID NO: 40326 - DNA, 25 bp, Artificial
  Probe
catcttgtaatgaatggctcctttg

SEQ ID NO: 40327 - DNA, 25 bp, Artificial
  Probe
gtaatgaatggctcctttgcttagt

SEQ ID NO: 40328 - DNA, 25 bp, Artificial
  Probe
tgtaatgaatggctcctttgcttag

SEQ ID NO: 40329 - DNA, 25 bp, Artificial
  Probe
gacatatttctgctggagcctaata

SEQ ID NO: 40330 - DNA, 25 bp, Artificial
  Probe
atatttctgctggagcctaatacac

SEQ ID NO: 40331 - DNA, 25 bp, Artificial
  Probe
catatttctgctggagcctaataca

SEQ ID NO: 40332 - DNA, 25 bp, Artificial
  Probe
acatatttctgctggagcctaatac

SEQ ID NO: 40333 - DNA, 25 bp, Artificial
  Probe
atcttgtaatgaatggctcctttgc

SEQ ID NO: 40334 - DNA, 25 bp, Artificial
  Probe
gatgtcatcttgtaatgaatggctc

SEQ ID NO: 40335 - DNA, 25 bp, Artificial
  Probe
ttgatgtcatcttgtaatgaatggc

SEQ ID NO: 40336 - DNA, 25 bp, Artificial
  Probe
gcttgctttatgatagtttctgatt

SEQ ID NO: 40337 - DNA, 25 bp, Artificial
  Probe
cttgtaatgaatggctcctttgctt

SEQ ID NO: 40338 - DNA, 25 bp, Artificial
  Probe
aatgaatggctcctttgcttagtac

SEQ ID NO: 40339 - DNA, 25 bp, Artificial
  Probe
tgatgtcatcttgtaatgaatggct

SEQ ID NO: 40340 - DNA, 25 bp, Artificial
  Probe
ctattgacatatttctgctggagcc

SEQ ID NO: 40341 - DNA, 25 bp, Artificial
  Probe
catggattctttgtactaggacttc

SEQ ID NO: 40342 - DNA, 25 bp, Artificial
  Probe
gtcatcttgtaatgaatggctcctt

SEQ ID NO: 40343 - DNA, 25 bp, Artificial
  Probe
atgtcatcttgtaatgaatggctcc

SEQ ID NO: 40344 - DNA, 25 bp, Artificial
  Probe
tatttctgctggagcctaatacaca

SEQ ID NO: 40345 - DNA, 25 bp, Artificial
  Probe
tgacatatttctgctggagcctaat

SEQ ID NO: 40346 - DNA, 25 bp, Artificial
  Probe
attgacatatttctgctggagccta

SEQ ID NO: 40347 - DNA, 25 bp, Artificial
  Probe
tattgacatatttctgctggagcct

SEQ ID NO: 40348 - DNA, 25 bp, Artificial
  Probe
tgatagtttctgatttctagctgct

SEQ ID NO: 40349 - DNA, 25 bp, Artificial
  Probe
ctgtttgtttgatgtcatcttgtaa

SEQ ID NO: 40350 - DNA, 25 bp, Artificial
  Probe
atttctgctggagcctaatacacat

SEQ ID NO: 40351 - DNA, 25 bp, Artificial
  Probe
ttgacatatttctgctggagcctaa

SEQ ID NO: 40352 - DNA, 25 bp, Artificial
  Probe
cacatggattctttgtactaggact

SEQ ID NO: 40353 - DNA, 25 bp, Artificial
  Probe
tcacatggattctttgtactaggac

SEQ ID NO: 40354 - DNA, 25 bp, Artificial
  Probe
tttctgatttctagctgcttatgtg

SEQ ID NO: 40355 - DNA, 25 bp, Artificial
  Probe
gtttctgatttctagctgcttatgt

SEQ ID NO: 40356 - DNA, 25 bp, Artificial
  Probe
agtttctgatttctagctgcttatg

SEQ ID NO: 40357 - DNA, 25 bp, Artificial
  Probe
acatggattctttgtactaggactt

SEQ ID NO: 40358 - DNA, 25 bp, Artificial
  Probe
ttctgatttctagctgcttatgtgg

SEQ ID NO: 40359 - DNA, 25 bp, Artificial
  Probe
atcacatggattctttgtactagga

SEQ ID NO: 40360 - DNA, 25 bp, Artificial
  Probe
atgatagtttctgatttctagctgc

SEQ ID NO: 40361 - DNA, 25 bp, Artificial
  Probe
gatagtttctgatttctagctgctt

SEQ ID NO: 40362 - DNA, 25 bp, Artificial
  Probe
atggattctttgtactaggacttcc

SEQ ID NO: 40363 - DNA, 25 bp, Artificial
  Probe
tcttgtaatgaatggctcctttgct

SEQ ID NO: 40364 - DNA, 25 bp, Artificial
  Probe
tgtcatcttgtaatgaatggctcct

SEQ ID NO: 40365 - DNA, 25 bp, Artificial
  Probe
acttccttgagtaaagctattgaca

SEQ ID NO: 40366 - DNA, 25 bp, Artificial
  Probe
atatggtgcaatgtgtgtatatgga

SEQ ID NO: 40367 - DNA, 25 bp, Artificial
  Probe
tatggtgcaatgtgtgtatatggag

SEQ ID NO: 40368 - DNA, 25 bp, Artificial
  Probe
tatatggtgcaatgtgtgtatatgg

SEQ ID NO: 40369 - DNA, 25 bp, Artificial
  Probe
gcactttggcttgtaattctttcaa

SEQ ID NO: 40370 - DNA, 25 bp, Artificial
  Probe
gcaatgtgtgtatatggagaaacaa

SEQ ID NO: 40371 - DNA, 25 bp, Artificial
  Probe
cactttggcttgtaattctttcaat

SEQ ID NO: 40372 - DNA, 25 bp, Artificial
  Probe
atggtgcaatgtgtgtatatggaga

SEQ ID NO: 40373 - DNA, 25 bp, Artificial
  Probe
tggtgcaatgtgtgtatatggagaa

SEQ ID NO: 40374 - DNA, 25 bp, Artificial
  Probe
tgtgtgtatatggagaaacaagaaa

SEQ ID NO: 40375 - DNA, 25 bp, Artificial
  Probe
caatgtgtgtatatggagaaacaag

SEQ ID NO: 40376 - DNA, 25 bp, Artificial
  Probe
aacgcactttggcttgtaattcttt

SEQ ID NO: 40377 - DNA, 25 bp, Artificial
  Probe
aaacgcactttggcttgtaattctt

SEQ ID NO: 40378 - DNA, 25 bp, Artificial
  Probe
atgtgtgtatatggagaaacaagaa

SEQ ID NO: 40379 - DNA, 25 bp, Artificial
  Probe
aatgtgtgtatatggagaaacaaga

SEQ ID NO: 40380 - DNA, 25 bp, Artificial
  Probe
gtgcaatgtgtgtatatggagaaac

SEQ ID NO: 40381 - DNA, 25 bp, Artificial
  Probe
cgcactttggcttgtaattctttca

SEQ ID NO: 40382 - DNA, 25 bp, Artificial
  Probe
acgcactttggcttgtaattctttc

SEQ ID NO: 40383 - DNA, 25 bp, Artificial
  Probe
actttggcttgtaattctttcaata

SEQ ID NO: 40384 - DNA, 25 bp, Artificial
  Probe
ggtgcaatgtgtgtatatggagaaa

SEQ ID NO: 40385 - DNA, 25 bp, Artificial
  Probe
ctttggcttgtaattctttcaatac

SEQ ID NO: 40386 - DNA, 25 bp, Artificial
  Probe
tggcttgtaattctttcaatacaga

SEQ ID NO: 40387 - DNA, 25 bp, Artificial
  Probe
tgcaatgtgtgtatatggagaaaca

SEQ ID NO: 40388 - DNA, 25 bp, Artificial
  Probe
atatatggtgcaatgtgtgtatatg

SEQ ID NO: 40389 - DNA, 25 bp, Artificial
  Probe
ttggcttgtaattctttcaatacag

SEQ ID NO: 40390 - DNA, 25 bp, Artificial
  Probe
ttaattaaggattcctagcatagcg

SEQ ID NO: 40391 - DNA, 25 bp, Artificial
  Probe
tttggcttgtaattctttcaataca

SEQ ID NO: 40392 - DNA, 25 bp, Artificial
  Probe
ggcttgtaattctttcaatacagat

SEQ ID NO: 40393 - DNA, 25 bp, Artificial
  Probe
taattaaggattcctagcatagcgc

SEQ ID NO: 40394 - DNA, 25 bp, Artificial
  Probe
ttatatatggtgcaatgtgtgtata

SEQ ID NO: 40395 - DNA, 25 bp, Artificial
  Probe
aaaacgcactttggcttgtaattct

SEQ ID NO: 40396 - DNA, 25 bp, Artificial
  Probe
tttatatatggtgcaatgtgtgtat

SEQ ID NO: 40397 - DNA, 25 bp, Artificial
  Probe
atttatatatggtgcaatgtgtgta

SEQ ID NO: 40398 - DNA, 25 bp, Artificial
  Probe
tatttatatatggtgcaatgtgtgt

SEQ ID NO: 40399 - DNA, 25 bp, Artificial
  Probe
gtgtgtatatggagaaacaagaaaa

SEQ ID NO: 40400 - DNA, 25 bp, Artificial
  Probe
tatatatggtgcaatgtgtgtatat

SEQ ID NO: 40401 - DNA, 25 bp, Artificial
  Probe
ttatttatatatggtgcaatgtgtg

SEQ ID NO: 40402 - DNA, 25 bp, Artificial
  Probe
cccagatatcatctacctagattta

SEQ ID NO: 40403 - DNA, 25 bp, Artificial
  Probe
ccccagatatcatctacctagattt

SEQ ID NO: 40404 - DNA, 25 bp, Artificial
  Probe
gcttgtaattctttcaatacagata

SEQ ID NO: 40405 - DNA, 25 bp, Artificial
  Probe
tttaattaaggattcctagcatagc

SEQ ID NO: 40406 - DNA, 25 bp, Artificial
  Probe
gacctactgtaagccctacacatag

SEQ ID NO: 40407 - DNA, 25 bp, Artificial
  Probe
taagccctacacatagcactccaag

SEQ ID NO: 40408 - DNA, 25 bp, Artificial
  Probe
ctactgtaagccctacacatagcac

SEQ ID NO: 40409 - DNA, 25 bp, Artificial
  Probe
cataccactgtaagtcccagcaatg

SEQ ID NO: 40410 - DNA, 25 bp, Artificial
  Probe
gtaagccctacacatagcactccaa

SEQ ID NO: 40411 - DNA, 25 bp, Artificial
  Probe
tactgtaagccctacacatagcact

SEQ ID NO: 40412 - DNA, 25 bp, Artificial
  Probe
cgacctactgtaagccctacacata

SEQ ID NO: 40413 - DNA, 25 bp, Artificial
  Probe
cctactgtaagccctacacatagca

SEQ ID NO: 40414 - DNA, 25 bp, Artificial
  Probe
acctactgtaagccctacacatagc

SEQ ID NO: 40415 - DNA, 25 bp, Artificial
  Probe
ccataccactgtaagtcccagcaat

SEQ ID NO: 40416 - DNA, 25 bp, Artificial
  Probe
caagtcccacccataccactgtaag

SEQ ID NO: 40417 - DNA, 25 bp, Artificial
  Probe
ctacacatagcactccaagtcccac

SEQ ID NO: 40418 - DNA, 25 bp, Artificial
  Probe
actgtaagccctacacatagcactc

SEQ ID NO: 40419 - DNA, 25 bp, Artificial
  Probe
aagtcccacccataccactgtaagt

SEQ ID NO: 40420 - DNA, 25 bp, Artificial
  Probe
ctgtaagccctacacatagcactcc

SEQ ID NO: 40421 - DNA, 25 bp, Artificial
  Probe
ataccactgtaagtcccagcaatgc

SEQ ID NO: 40422 - DNA, 25 bp, Artificial
  Probe
tgtaagccctacacatagcactcca

SEQ ID NO: 40423 - DNA, 25 bp, Artificial
  Probe
ggccttcgctactattacgacaaaa

SEQ ID NO: 40424 - DNA, 25 bp, Artificial
  Probe
cggccttcgctactattacgacaaa

SEQ ID NO: 40425 - DNA, 25 bp, Artificial
  Probe
aaactgtgatgatgaagtgtacgag

SEQ ID NO: 40426 - DNA, 25 bp, Artificial
  Probe
gaaactgtgatgatgaagtgtacga

SEQ ID NO: 40427 - DNA, 25 bp, Artificial
  Probe
aactgtgatgatgaagtgtacgagc

SEQ ID NO: 40428 - DNA, 25 bp, Artificial
  Probe
ctcgaaactgtgatgatgaagtgta

SEQ ID NO: 40429 - DNA, 25 bp, Artificial
  Probe
cgaaactgtgatgatgaagtgtacg

SEQ ID NO: 40430 - DNA, 25 bp, Artificial
  Probe
tcgaaactgtgatgatgaagtgtac

SEQ ID NO: 40431 - DNA, 25 bp, Artificial
  Probe
ctgtgatgatgaagtgtacgagctg

SEQ ID NO: 40432 - DNA, 25 bp, Artificial
  Probe
caactacagggtctacactaccaag

SEQ ID NO: 40433 - DNA, 25 bp, Artificial
  Probe
ccccttcatattcttccttctacaa

SEQ ID NO: 40434 - DNA, 25 bp, Artificial
  Probe
aactacagggtctacactaccaaga

SEQ ID NO: 40435 - DNA, 25 bp, Artificial
  Probe
accccttcatattcttccttctaca

SEQ ID NO: 40436 - DNA, 25 bp, Artificial
  Probe
taccccttcatattcttccttctac

SEQ ID NO: 40437 - DNA, 25 bp, Artificial
  Probe
tcaactacagggtctacactaccaa

SEQ ID NO: 40438 - DNA, 25 bp, Artificial
  Probe
ctaccccttcatattcttccttcta

SEQ ID NO: 40439 - DNA, 25 bp, Artificial
  Probe
ctacagggtctacactaccaagagt

SEQ ID NO: 40440 - DNA, 25 bp, Artificial
  Probe
actacagggtctacactaccaagag

SEQ ID NO: 40441 - DNA, 25 bp, Artificial
  Probe
actgtgatgatgaagtgtacgagct

SEQ ID NO: 40442 - DNA, 25 bp, Artificial
  Probe
gctaccccttcatattcttccttct

SEQ ID NO: 40443 - DNA, 25 bp, Artificial
  Probe
aatttaaaggagaaaggaaaggatc

SEQ ID NO: 40444 - DNA, 25 bp, Artificial
  Probe
ctcaactacagggtctacactacca

SEQ ID NO: 40445 - DNA, 25 bp, Artificial
  Probe
cctcgaaactgtgatgatgaagtgt

SEQ ID NO: 40446 - DNA, 25 bp, Artificial
  Probe
cctcaactacagggtctacactacc

SEQ ID NO: 40447 - DNA, 25 bp, Artificial
  Probe
tgtgatgatgaagtgtacgagctgg

SEQ ID NO: 40448 - DNA, 25 bp, Artificial
  Probe
agctaccccttcatattcttccttc

SEQ ID NO: 40449 - DNA, 25 bp, Artificial
  Probe
gactttgaacccttccaacctctga

SEQ ID NO: 40450 - DNA, 25 bp, Artificial
  Probe
ttaatttaaaggagaaaggaaagga

SEQ ID NO: 40451 - DNA, 25 bp, Artificial
  Probe
taatttaaaggagaaaggaaaggat

SEQ ID NO: 40452 - DNA, 25 bp, Artificial
  Probe
actttgaacccttccaacctctgac

SEQ ID NO: 40453 - DNA, 25 bp, Artificial
  Probe
tgactttgaacccttccaacctctg

SEQ ID NO: 40454 - DNA, 25 bp, Artificial
  Probe
gtgactttgaacccttccaacctct

SEQ ID NO: 40455 - DNA, 25 bp, Artificial
  Probe
aaactgcttccacctgtgactttga

SEQ ID NO: 40456 - DNA, 25 bp, Artificial
  Probe
cccaagctgtctcaagaaagtcttt

SEQ ID NO: 40457 - DNA, 25 bp, Artificial
  Probe
atagctaccccttcatattcttcct

SEQ ID NO: 40458 - DNA, 25 bp, Artificial
  Probe
aactgcttccacctgtgactttgaa

SEQ ID NO: 40459 - DNA, 25 bp, Artificial
  Probe
tagctaccccttcatattcttcctt

SEQ ID NO: 40460 - DNA, 25 bp, Artificial
  Probe
tcctatagctaccccttcatattct

SEQ ID NO: 40461 - DNA, 25 bp, Artificial
  Probe
ctcctatagctaccccttcatattc

SEQ ID NO: 40462 - DNA, 25 bp, Artificial
  Probe
tgtgactttgaacccttccaacctc

SEQ ID NO: 40463 - DNA, 25 bp, Artificial
  Probe
ctgtgactttgaacccttccaacct

SEQ ID NO: 40464 - DNA, 25 bp, Artificial
  Probe
ttccacctgtgactttgaacccttc

SEQ ID NO: 40465 - DNA, 25 bp, Artificial
  Probe
cttccacctgtgactttgaaccctt

SEQ ID NO: 40466 - DNA, 25 bp, Artificial
  Probe
gcctcgaaactgtgatgatgaagtg

SEQ ID NO: 40467 - DNA, 25 bp, Artificial
  Probe
cagcctcgaaactgtgatgatgaag

SEQ ID NO: 40468 - DNA, 25 bp, Artificial
  Probe
tatagctaccccttcatattcttcc

SEQ ID NO: 40469 - DNA, 25 bp, Artificial
  Probe
cctatagctaccccttcatattctt

SEQ ID NO: 40470 - DNA, 25 bp, Artificial
  Probe
ataatggtgatggtgatgatgatgt

SEQ ID NO: 40471 - DNA, 25 bp, Artificial
  Probe
taatggtgatggtgatgatgatgtt

SEQ ID NO: 40472 - DNA, 25 bp, Artificial
  Probe
aataatggtgatggtgatgatgatg

SEQ ID NO: 40473 - DNA, 25 bp, Artificial
  Probe
aatggtgatggtgatgatgatgttg

SEQ ID NO: 40474 - DNA, 25 bp, Artificial
  Probe
taataatggtgatggtgatgatgat

SEQ ID NO: 40475 - DNA, 25 bp, Artificial
  Probe
ataataatggtgatggtgatgatga

SEQ ID NO: 40476 - DNA, 25 bp, Artificial
  Probe
atggtgatggtgatgatgatgttga

SEQ ID NO: 40477 - DNA, 25 bp, Artificial
  Probe
tggtgatggtgatgatgatgttgaa

SEQ ID NO: 40478 - DNA, 25 bp, Artificial
  Probe
ttaaagagacattcccttcccaaat

SEQ ID NO: 40479 - DNA, 25 bp, Artificial
  Probe
tgtctggacagtacctgattgtatt

SEQ ID NO: 40480 - DNA, 25 bp, Artificial
  Probe
ggtgatggtgatgatgatgttgaaa

SEQ ID NO: 40481 - DNA, 25 bp, Artificial
  Probe
gtgtctggacagtacctgattgtat

SEQ ID NO: 40482 - DNA, 25 bp, Artificial
  Probe
tataataatggtgatggtgatgatg

SEQ ID NO: 40483 - DNA, 25 bp, Artificial
  Probe
gtctggacagtacctgattgtattt

SEQ ID NO: 40484 - DNA, 25 bp, Artificial
  Probe
aatgtgtctggacagtacctgattg

SEQ ID NO: 40485 - DNA, 25 bp, Artificial
  Probe
tttaaagagacattcccttcccaaa

SEQ ID NO: 40486 - DNA, 25 bp, Artificial
  Probe
tacatttcctacaactgaagccaga

SEQ ID NO: 40487 - DNA, 25 bp, Artificial
  Probe
tgtgtctggacagtacctgattgta

SEQ ID NO: 40488 - DNA, 25 bp, Artificial
  Probe
gtacatttcctacaactgaagccag

SEQ ID NO: 40489 - DNA, 25 bp, Artificial
  Probe
taaagagacattcccttcccaaatg

SEQ ID NO: 40490 - DNA, 25 bp, Artificial
  Probe
acatttcctacaactgaagccagaa

SEQ ID NO: 40491 - DNA, 25 bp, Artificial
  Probe
aatataataatggtgatggtgatga

SEQ ID NO: 40492 - DNA, 25 bp, Artificial
  Probe
catttcctacaactgaagccagaaa

SEQ ID NO: 40493 - DNA, 25 bp, Artificial
  Probe
gtgatggtgatgatgatgttgaaaa

SEQ ID NO: 40494 - DNA, 25 bp, Artificial
  Probe
aaatgtgtctggacagtacctgatt

SEQ ID NO: 40495 - DNA, 25 bp, Artificial
  Probe
atgtgtctggacagtacctgattgt

SEQ ID NO: 40496 - DNA, 25 bp, Artificial
  Probe
atataataatggtgatggtgatgat

SEQ ID NO: 40497 - DNA, 25 bp, Artificial
  Probe
gatgatgatgttgaaaactgaggac

SEQ ID NO: 40498 - DNA, 25 bp, Artificial
  Probe
atggtgatgatgatgttgaaaactg

SEQ ID NO: 40499 - DNA, 25 bp, Artificial
  Probe
gatggtgatgatgatgttgaaaact

SEQ ID NO: 40500 - DNA, 25 bp, Artificial
  Probe
tgatggtgatgatgatgttgaaaac

SEQ ID NO: 40501 - DNA, 25 bp, Artificial
  Probe
tgtttgattgagcaaagtctcctag

SEQ ID NO: 40502 - DNA, 25 bp, Artificial
  Probe
gatgatgttgaaaactgaggacttt

SEQ ID NO: 40503 - DNA, 25 bp, Artificial
  Probe
atgatgatgttgaaaactgaggact

SEQ ID NO: 40504 - DNA, 25 bp, Artificial
  Probe
tgatgatgatgttgaaaactgagga

SEQ ID NO: 40505 - DNA, 25 bp, Artificial
  Probe
gtgatgatgatgttgaaaactgagg

SEQ ID NO: 40506 - DNA, 25 bp, Artificial
  Probe
ggtgatgatgatgttgaaaactgag

SEQ ID NO: 40507 - DNA, 25 bp, Artificial
  Probe
tgatgatgttgaaaactgaggactt

SEQ ID NO: 40508 - DNA, 25 bp, Artificial
  Probe
tggtgatgatgatgttgaaaactga

SEQ ID NO: 40509 - DNA, 25 bp, Artificial
  Probe
caaatgtgtctggacagtacctgat

SEQ ID NO: 40510 - DNA, 25 bp, Artificial
  Probe
gtttgattgagcaaagtctcctagc

SEQ ID NO: 40511 - DNA, 25 bp, Artificial
  Probe
atgatgttgaaaactgaggactttt

SEQ ID NO: 40512 - DNA, 25 bp, Artificial
  Probe
tctggacagtacctgattgtatttt

SEQ ID NO: 40513 - DNA, 25 bp, Artificial
  Probe
tgatgttgaaaactgaggactttta

SEQ ID NO: 40514 - DNA, 25 bp, Artificial
  Probe
ttttaaagagacattcccttcccaa

SEQ ID NO: 40515 - DNA, 25 bp, Artificial
  Probe
aagagagatcctattaatgtccaca

SEQ ID NO: 40516 - DNA, 25 bp, Artificial
  Probe
agatcctattaatgtccacatcaga

SEQ ID NO: 40517 - DNA, 25 bp, Artificial
  Probe
agagatcctattaatgtccacatca

SEQ ID NO: 40518 - DNA, 25 bp, Artificial
  Probe
tgaagagagatcctattaatgtcca

SEQ ID NO: 40519 - DNA, 25 bp, Artificial
  Probe
gagatcctattaatgtccacatcag

SEQ ID NO: 40520 - DNA, 25 bp, Artificial
  Probe
agagagatcctattaatgtccacat

SEQ ID NO: 40521 - DNA, 25 bp, Artificial
  Probe
gaagagagatcctattaatgtccac

SEQ ID NO: 40522 - DNA, 25 bp, Artificial
  Probe
cctgcatgaagagagatcctattaa

SEQ ID NO: 40523 - DNA, 25 bp, Artificial
  Probe
acctgcatgaagagagatcctatta

SEQ ID NO: 40524 - DNA, 25 bp, Artificial
  Probe
gagagatcctattaatgtccacatc

SEQ ID NO: 40525 - DNA, 25 bp, Artificial
  Probe
gatcctattaatgtccacatcagaa

SEQ ID NO: 40526 - DNA, 25 bp, Artificial
  Probe
gcatgaagagagatcctattaatgt

SEQ ID NO: 40527 - DNA, 25 bp, Artificial
  Probe
aacctgcatgaagagagatcctatt

SEQ ID NO: 40528 - DNA, 25 bp, Artificial
  Probe
tcaggttacgttgtgacagtattaa

SEQ ID NO: 40529 - DNA, 25 bp, Artificial
  Probe
ctcaggttacgttgtgacagtatta

SEQ ID NO: 40530 - DNA, 25 bp, Artificial
  Probe
tcctattaatgtccacatcagaatt

SEQ ID NO: 40531 - DNA, 25 bp, Artificial
  Probe
caacctgcatgaagagagatcctat

SEQ ID NO: 40532 - DNA, 25 bp, Artificial
  Probe
atgaagagagatcctattaatgtcc

SEQ ID NO: 40533 - DNA, 25 bp, Artificial
  Probe
tgcatgaagagagatcctattaatg

SEQ ID NO: 40534 - DNA, 25 bp, Artificial
  Probe
ctgcatgaagagagatcctattaat

SEQ ID NO: 40535 - DNA, 25 bp, Artificial
  Probe
atcctattaatgtccacatcagaat

SEQ ID NO: 40536 - DNA, 25 bp, Artificial
  Probe
actcaggttacgttgtgacagtatt

SEQ ID NO: 40537 - DNA, 25 bp, Artificial
  Probe
aactcaggttacgttgtgacagtat

SEQ ID NO: 40538 - DNA, 25 bp, Artificial
  Probe
ttgctgacaagttaggtcgttacag

SEQ ID NO: 40539 - DNA, 25 bp, Artificial
  Probe
taactcaggttacgttgtgacagta

SEQ ID NO: 40540 - DNA, 25 bp, Artificial
  Probe
ctacaacctgcatgaagagagatcc

SEQ ID NO: 40541 - DNA, 25 bp, Artificial
  Probe
cctacaacctgcatgaagagagatc

SEQ ID NO: 40542 - DNA, 25 bp, Artificial
  Probe
cttaactcaggttacgttgtgacag

SEQ ID NO: 40543 - DNA, 25 bp, Artificial
  Probe
gctgacaagttaggtcgttacagac

SEQ ID NO: 40544 - DNA, 25 bp, Artificial
  Probe
cacttaactcaggttacgttgtgac

SEQ ID NO: 40545 - DNA, 25 bp, Artificial
  Probe
gtcacttaactcaggttacgttgtg

SEQ ID NO: 40546 - DNA, 25 bp, Artificial
  Probe
agtcacttaactcaggttacgttgt

SEQ ID NO: 40547 - DNA, 25 bp, Artificial
  Probe
caggttacgttgtgacagtattaaa

SEQ ID NO: 40548 - DNA, 25 bp, Artificial
  Probe
ctttgctgacaagttaggtcgttac

SEQ ID NO: 40549 - DNA, 25 bp, Artificial
  Probe
gttacgttgtgacagtattaaaccc

SEQ ID NO: 40550 - DNA, 25 bp, Artificial
  Probe
acaacctgcatgaagagagatccta

SEQ ID NO: 40551 - DNA, 25 bp, Artificial
  Probe
tacaacctgcatgaagagagatcct

SEQ ID NO: 40552 - DNA, 25 bp, Artificial
  Probe
ttaactcaggttacgttgtgacagt

SEQ ID NO: 40553 - DNA, 25 bp, Artificial
  Probe
acttaactcaggttacgttgtgaca

SEQ ID NO: 40554 - DNA, 25 bp, Artificial
  Probe
aggttacgttgtgacagtattaaac

SEQ ID NO: 40555 - DNA, 25 bp, Artificial
  Probe
catgaagagagatcctattaatgtc

SEQ ID NO: 40556 - DNA, 25 bp, Artificial
  Probe
tgctgacaagttaggtcgttacaga

SEQ ID NO: 40557 - DNA, 25 bp, Artificial
  Probe
tttgctgacaagttaggtcgttaca

SEQ ID NO: 40558 - DNA, 25 bp, Artificial
  Probe
caaggagtcacttaactcaggttac

SEQ ID NO: 40559 - DNA, 25 bp, Artificial
  Probe
taaggtgtgctttgctgacaagtta

SEQ ID NO: 40560 - DNA, 25 bp, Artificial
  Probe
actgtgtagtgttcctagattcagc

SEQ ID NO: 40561 - DNA, 25 bp, Artificial
  Probe
gtcctgatcttgtagattcgttagt

SEQ ID NO: 40562 - DNA, 25 bp, Artificial
  Probe
cagtcctgatcttgtagattcgtta

SEQ ID NO: 40563 - DNA, 25 bp, Artificial
  Probe
agtcctgatcttgtagattcgttag

SEQ ID NO: 40564 - DNA, 25 bp, Artificial
  Probe
ctttcttgtgtctcaactctttgta

SEQ ID NO: 40565 - DNA, 25 bp, Artificial
  Probe
atgctttcttgtgtctcaactcttt

SEQ ID NO: 40566 - DNA, 25 bp, Artificial
  Probe
aatgctttcttgtgtctcaactctt

SEQ ID NO: 40567 - DNA, 25 bp, Artificial
  Probe
tttcttgtgtctcaactctttgtat

SEQ ID NO: 40568 - DNA, 25 bp, Artificial
  Probe
caatgctttcttgtgtctcaactct

SEQ ID NO: 40569 - DNA, 25 bp, Artificial
  Probe
ctgtgtagtgttcctagattcagct

SEQ ID NO: 40570 - DNA, 25 bp, Artificial
  Probe
gctttcttgtgtctcaactctttgt

SEQ ID NO: 40571 - DNA, 25 bp, Artificial
  Probe
tgctttcttgtgtctcaactctttg

SEQ ID NO: 40572 - DNA, 25 bp, Artificial
  Probe
ttcttgtgtctcaactctttgtata

SEQ ID NO: 40573 - DNA, 25 bp, Artificial
  Probe
ccagtcctgatcttgtagattcgtt

SEQ ID NO: 40574 - DNA, 25 bp, Artificial
  Probe
cttgtgtctcaactctttgtatatg

SEQ ID NO: 40575 - DNA, 25 bp, Artificial
  Probe
gaaccaatgctttcttgtgtctcaa

SEQ ID NO: 40576 - DNA, 25 bp, Artificial
  Probe
tgtgtctcaactctttgtatatgaa

SEQ ID NO: 40577 - DNA, 25 bp, Artificial
  Probe
ttgtgtctcaactctttgtatatga

SEQ ID NO: 40578 - DNA, 25 bp, Artificial
  Probe
tcttgtgtctcaactctttgtatat

SEQ ID NO: 40579 - DNA, 25 bp, Artificial
  Probe
aaccaatgctttcttgtgtctcaac

SEQ ID NO: 40580 - DNA, 25 bp, Artificial
  Probe
ccaatgctttcttgtgtctcaactc

SEQ ID NO: 40581 - DNA, 25 bp, Artificial
  Probe
accaatgctttcttgtgtctcaact

SEQ ID NO: 40582 - DNA, 25 bp, Artificial
  Probe
gtgtctcaactctttgtatatgaat

SEQ ID NO: 40583 - DNA, 25 bp, Artificial
  Probe
ctcactgtgtagtgttcctagattc

SEQ ID NO: 40584 - DNA, 25 bp, Artificial
  Probe
cactgtgtagtgttcctagattcag

SEQ ID NO: 40585 - DNA, 25 bp, Artificial
  Probe
tcactgtgtagtgttcctagattca

SEQ ID NO: 40586 - DNA, 25 bp, Artificial
  Probe
actcactgtgtagtgttcctagatt

SEQ ID NO: 40587 - DNA, 25 bp, Artificial
  Probe
aactcactgtgtagtgttcctagat

SEQ ID NO: 40588 - DNA, 25 bp, Artificial
  Probe
aaatgtttaggtaatctccttcccc

SEQ ID NO: 40589 - DNA, 25 bp, Artificial
  Probe
ccaaatggattgagttcctaattaa

SEQ ID NO: 40590 - DNA, 25 bp, Artificial
  Probe
caactcactgtgtagtgttcctaga

SEQ ID NO: 40591 - DNA, 25 bp, Artificial
  Probe
tgtctcaactctttgtatatgaatt

SEQ ID NO: 40592 - DNA, 25 bp, Artificial
  Probe
cgaaccaatgctttcttgtgtctca

SEQ ID NO: 40593 - DNA, 25 bp, Artificial
  Probe
aatgtttaggtaatctccttcccca

SEQ ID NO: 40594 - DNA, 25 bp, Artificial
  Probe
aaaatgtttaggtaatctccttccc

SEQ ID NO: 40595 - DNA, 25 bp, Artificial
  Probe
atgtttaggtaatctccttccccag

SEQ ID NO: 40596 - DNA, 25 bp, Artificial
  Probe
gtttaggtaatctccttccccagtc

SEQ ID NO: 40597 - DNA, 25 bp, Artificial
  Probe
cagatgtattaaacaaacaaaaccc

SEQ ID NO: 40598 - DNA, 25 bp, Artificial
  Probe
agatgtattaaacaaacaaaaccct

SEQ ID NO: 40599 - DNA, 25 bp, Artificial
  Probe
ccgaaccaatgctttcttgtgtctc

SEQ ID NO: 40600 - DNA, 25 bp, Artificial
  Probe
cccagtcctgatcttgtagattcgt

SEQ ID NO: 40601 - DNA, 25 bp, Artificial
  Probe
tgtttaggtaatctccttccccagt

SEQ ID NO: 40602 - DNA, 25 bp, Artificial
  Probe
tttaggtaatctccttccccagtcc

SEQ ID NO: 40603 - DNA, 25 bp, Artificial
  Probe
gatgtattaaacaaacaaaaccctt

SEQ ID NO: 40604 - DNA, 25 bp, Artificial
  Probe
caaatggattgagttcctaattaaa

SEQ ID NO: 40605 - DNA, 25 bp, Artificial
  Probe
cgtctgagaagaatgttccaagttg

SEQ ID NO: 40606 - DNA, 25 bp, Artificial
  Probe
caactcctgtgatttatgccaataa

SEQ ID NO: 40607 - DNA, 25 bp, Artificial
  Probe
gaagaatgttccaagttggtatgag

SEQ ID NO: 40608 - DNA, 25 bp, Artificial
  Probe
agaagaatgttccaagttggtatga

SEQ ID NO: 40609 - DNA, 25 bp, Artificial
  Probe
gagaagaatgttccaagttggtatg

SEQ ID NO: 40610 - DNA, 25 bp, Artificial
  Probe
tgagaagaatgttccaagttggtat

SEQ ID NO: 40611 - DNA, 25 bp, Artificial
  Probe
cccatttcaactcctgtgatttatg

SEQ ID NO: 40612 - DNA, 25 bp, Artificial
  Probe
tcccatttcaactcctgtgatttat

SEQ ID NO: 40613 - DNA, 25 bp, Artificial
  Probe
tcaactcctgtgatttatgccaata

SEQ ID NO: 40614 - DNA, 25 bp, Artificial
  Probe
ttcccatttcaactcctgtgattta

SEQ ID NO: 40615 - DNA, 25 bp, Artificial
  Probe
ctgagaagaatgttccaagttggta

SEQ ID NO: 40616 - DNA, 25 bp, Artificial
  Probe
catttcaactcctgtgatttatgcc

SEQ ID NO: 40617 - DNA, 25 bp, Artificial
  Probe
ccatttcaactcctgtgatttatgc

SEQ ID NO: 40618 - DNA, 25 bp, Artificial
  Probe
aagaatgttccaagttggtatgagg

SEQ ID NO: 40619 - DNA, 25 bp, Artificial
  Probe
ttcaactcctgtgatttatgccaat

SEQ ID NO: 40620 - DNA, 25 bp, Artificial
  Probe
atttcaactcctgtgatttatgcca

SEQ ID NO: 40621 - DNA, 25 bp, Artificial
  Probe
tttcccatttcaactcctgtgattt

SEQ ID NO: 40622 - DNA, 25 bp, Artificial
  Probe
tttcaactcctgtgatttatgccaa

SEQ ID NO: 40623 - DNA, 25 bp, Artificial
  Probe
tatgccaataaagtttgccatgatt

SEQ ID NO: 40624 - DNA, 25 bp, Artificial
  Probe
ttatgccaataaagtttgccatgat

SEQ ID NO: 40625 - DNA, 25 bp, Artificial
  Probe
atgccaataaagtttgccatgattt

SEQ ID NO: 40626 - DNA, 25 bp, Artificial
  Probe
gtctgagaagaatgttccaagttgg

SEQ ID NO: 40627 - DNA, 25 bp, Artificial
  Probe
gcgtctgagaagaatgttccaagtt

SEQ ID NO: 40628 - DNA, 25 bp, Artificial
  Probe
tctgagaagaatgttccaagttggt

SEQ ID NO: 40629 - DNA, 25 bp, Artificial
  Probe
tgatttatgccaataaagtttgcca

SEQ ID NO: 40630 - DNA, 25 bp, Artificial
  Probe
gtgatttatgccaataaagtttgcc

SEQ ID NO: 40631 - DNA, 25 bp, Artificial
  Probe
ctcctgtgatttatgccaataaagt

SEQ ID NO: 40632 - DNA, 25 bp, Artificial
  Probe
actcctgtgatttatgccaataaag

SEQ ID NO: 40633 - DNA, 25 bp, Artificial
  Probe
tgtgatttatgccaataaagtttgc

SEQ ID NO: 40634 - DNA, 25 bp, Artificial
  Probe
gatttatgccaataaagtttgccat

SEQ ID NO: 40635 - DNA, 25 bp, Artificial
  Probe
tcctgtgatttatgccaataaagtt

SEQ ID NO: 40636 - DNA, 25 bp, Artificial
  Probe
aactcctgtgatttatgccaataaa

SEQ ID NO: 40637 - DNA, 25 bp, Artificial
  Probe
tttatgccaataaagtttgccatga

SEQ ID NO: 40638 - DNA, 25 bp, Artificial
  Probe
atttatgccaataaagtttgccatg

SEQ ID NO: 40639 - DNA, 25 bp, Artificial
  Probe
cattctctgggtcatggatatatga

SEQ ID NO: 40640 - DNA, 25 bp, Artificial
  Probe
cctgtgatttatgccaataaagttt

SEQ ID NO: 40641 - DNA, 25 bp, Artificial
  Probe
ttctctgggtcatggatatatgatc

SEQ ID NO: 40642 - DNA, 25 bp, Artificial
  Probe
ttttcccatttcaactcctgtgatt

SEQ ID NO: 40643 - DNA, 25 bp, Artificial
  Probe
attctctgggtcatggatatatgat

SEQ ID NO: 40644 - DNA, 25 bp, Artificial
  Probe
cttttcccatttcaactcctgtgat

SEQ ID NO: 40645 - DNA, 25 bp, Artificial
  Probe
gaatgttccaagttggtatgaggga

SEQ ID NO: 40646 - DNA, 25 bp, Artificial
  Probe
agaatgttccaagttggtatgaggg

SEQ ID NO: 40647 - DNA, 25 bp, Artificial
  Probe
gccaataaagtttgccatgattttc

SEQ ID NO: 40648 - DNA, 25 bp, Artificial
  Probe
tgccaataaagtttgccatgatttt

SEQ ID NO: 40649 - DNA, 25 bp, Artificial
  Probe
ctgtgatttatgccaataaagtttg

SEQ ID NO: 40650 - DNA, 25 bp, Artificial
  Probe
aagaatgcttatccttgaagacata

SEQ ID NO: 40651 - DNA, 25 bp, Artificial
  Probe
agaatgcttatccttgaagacataa

SEQ ID NO: 40652 - DNA, 25 bp, Artificial
  Probe
actgaaggtgcttattaatggttct

SEQ ID NO: 40653 - DNA, 25 bp, Artificial
  Probe
ctgaaggtgcttattaatggttctc

SEQ ID NO: 40654 - DNA, 25 bp, Artificial
  Probe
acaactattggatgattccttgagt

SEQ ID NO: 40655 - DNA, 25 bp, Artificial
  Probe
tgaaggtgcttattaatggttctcc

SEQ ID NO: 40656 - DNA, 25 bp, Artificial
  Probe
cttacattggactgggaacctaaat

SEQ ID NO: 40657 - DNA, 25 bp, Artificial
  Probe
ttacattggactgggaacctaaatt

SEQ ID NO: 40658 - DNA, 25 bp, Artificial
  Probe
tacaactattggatgattccttgag

SEQ ID NO: 40659 - DNA, 25 bp, Artificial
  Probe
cactgaaggtgcttattaatggttc

SEQ ID NO: 40660 - DNA, 25 bp, Artificial
  Probe
tacattggactgggaacctaaattg

SEQ ID NO: 40661 - DNA, 25 bp, Artificial
  Probe
tgcttattaatggttctccagatgt

SEQ ID NO: 40662 - DNA, 25 bp, Artificial
  Probe
gtgcttattaatggttctccagatg

SEQ ID NO: 40663 - DNA, 25 bp, Artificial
  Probe
aaagaatgcttatccttgaagacat

SEQ ID NO: 40664 - DNA, 25 bp, Artificial
  Probe
ggtgcttattaatggttctccagat

SEQ ID NO: 40665 - DNA, 25 bp, Artificial
  Probe
attggaagggagtctttacttacat

SEQ ID NO: 40666 - DNA, 25 bp, Artificial
  Probe
aattggaagggagtctttacttaca

SEQ ID NO: 40667 - DNA, 25 bp, Artificial
  Probe
aaggtgcttattaatggttctccag

SEQ ID NO: 40668 - DNA, 25 bp, Artificial
  Probe
gaaggtgcttattaatggttctcca

SEQ ID NO: 40669 - DNA, 25 bp, Artificial
  Probe
atacaactattggatgattccttga

SEQ ID NO: 40670 - DNA, 25 bp, Artificial
  Probe
tggaagggagtctttacttacataa

SEQ ID NO: 40671 - DNA, 25 bp, Artificial
  Probe
ttggaagggagtctttacttacata

SEQ ID NO: 40672 - DNA, 25 bp, Artificial
  Probe
ccactgaaggtgcttattaatggtt

SEQ ID NO: 40673 - DNA, 25 bp, Artificial
  Probe
aaccactgaaggtgcttattaatgg

SEQ ID NO: 40674 - DNA, 25 bp, Artificial
  Probe
aaattggaagggagtctttacttac

SEQ ID NO: 40675 - DNA, 25 bp, Artificial
  Probe
aggtgcttattaatggttctccaga

SEQ ID NO: 40676 - DNA, 25 bp, Artificial
  Probe
attggactgggaacctaaattggaa

SEQ ID NO: 40677 - DNA, 25 bp, Artificial
  Probe
gcttattaatggttctccagatgta

SEQ ID NO: 40678 - DNA, 25 bp, Artificial
  Probe
cctaaattggaagggagtctttact

SEQ ID NO: 40679 - DNA, 25 bp, Artificial
  Probe
ctaaattggaagggagtctttactt

SEQ ID NO: 40680 - DNA, 25 bp, Artificial
  Probe
acctaaattggaagggagtctttac

SEQ ID NO: 40681 - DNA, 25 bp, Artificial
  Probe
aacctaaattggaagggagtcttta

SEQ ID NO: 40682 - DNA, 25 bp, Artificial
  Probe
gaacctaaattggaagggagtcttt

SEQ ID NO: 40683 - DNA, 25 bp, Artificial
  Probe
caactattggatgattccttgagtt

SEQ ID NO: 40684 - DNA, 25 bp, Artificial
  Probe
aacctcataaagtagcctcgaattt

SEQ ID NO: 40685 - DNA, 25 bp, Artificial
  Probe
gggagtctttacttacataattgga

SEQ ID NO: 40686 - DNA, 25 bp, Artificial
  Probe
agggagtctttacttacataattgg

SEQ ID NO: 40687 - DNA, 25 bp, Artificial
  Probe
attggatgattccttgagtttacag

SEQ ID NO: 40688 - DNA, 25 bp, Artificial
  Probe
caacctcataaagtagcctcgaatt

SEQ ID NO: 40689 - DNA, 25 bp, Artificial
  Probe
ggaagggagtctttacttacataat

SEQ ID NO: 40690 - DNA, 25 bp, Artificial
  Probe
gcttacattggactgggaacctaaa

SEQ ID NO: 40691 - DNA, 25 bp, Artificial
  Probe
ttggactgggaacctaaattggaag

SEQ ID NO: 40692 - DNA, 25 bp, Artificial
  Probe
ttggatgattccttgagtttacagc

SEQ ID NO: 40693 - DNA, 25 bp, Artificial
  Probe
cattggactgggaacctaaattgga

SEQ ID NO: 40694 - DNA, 25 bp, Artificial
  Probe
gaatgcttatccttgaagacataaa

SEQ ID NO: 40695 - DNA, 25 bp, Artificial
  Probe
aaccaggtgtatatcaacatcagtg

SEQ ID NO: 40696 - DNA, 25 bp, Artificial
  Probe
aaaccaggtgtatatcaacatcagt

SEQ ID NO: 40697 - DNA, 25 bp, Artificial
  Probe
caaaccaggtgtatatcaacatcag

SEQ ID NO: 40698 - DNA, 25 bp, Artificial
  Probe
ccaaaccaggtgtatatcaacatca

SEQ ID NO: 40699 - DNA, 25 bp, Artificial
  Probe
cccaaaccaggtgtatatcaacatc

SEQ ID NO: 40700 - DNA, 25 bp, Artificial
  Probe
taacaacccaaaccaggtgtatatc

SEQ ID NO: 40701 - DNA, 25 bp, Artificial
  Probe
caacccaaaccaggtgtatatcaac

SEQ ID NO: 40702 - DNA, 25 bp, Artificial
  Probe
acccaaaccaggtgtatatcaacat

SEQ ID NO: 40703 - DNA, 25 bp, Artificial
  Probe
aacccaaaccaggtgtatatcaaca

SEQ ID NO: 40704 - DNA, 25 bp, Artificial
  Probe
acaacccaaaccaggtgtatatcaa

SEQ ID NO: 40705 - DNA, 25 bp, Artificial
  Probe
aacaacccaaaccaggtgtatatca

SEQ ID NO: 40706 - DNA, 25 bp, Artificial
  Probe
ctgaatacctgtggaccaaggagaa

SEQ ID NO: 40707 - DNA, 25 bp, Artificial
  Probe
gataagtcaacccttcaagatcccg

SEQ ID NO: 40708 - DNA, 25 bp, Artificial
  Probe
tgaatacctgtggaccaaggagaac

SEQ ID NO: 40709 - DNA, 25 bp, Artificial
  Probe
ataagtcaacccttcaagatcccgt

SEQ ID NO: 40710 - DNA, 25 bp, Artificial
  Probe
cagatgaactggccctttaatacag

SEQ ID NO: 40711 - DNA, 25 bp, Artificial
  Probe
taagtcaacccttcaagatcccgtc

SEQ ID NO: 40712 - DNA, 25 bp, Artificial
  Probe
gaatacctgtggaccaaggagaacg

SEQ ID NO: 40713 - DNA, 25 bp, Artificial
  Probe
atgaactggccctttaatacaggtt

SEQ ID NO: 40714 - DNA, 25 bp, Artificial
  Probe
tgaactggccctttaatacaggttt

SEQ ID NO: 40715 - DNA, 25 bp, Artificial
  Probe
agatgaactggccctttaatacagg

SEQ ID NO: 40716 - DNA, 25 bp, Artificial
  Probe
gatgaactggccctttaatacaggt

SEQ ID NO: 40717 - DNA, 25 bp, Artificial
  Probe
ggataagtcaacccttcaagatccc

SEQ ID NO: 40718 - DNA, 25 bp, Artificial
  Probe
gggataagtcaacccttcaagatcc

SEQ ID NO: 40719 - DNA, 25 bp, Artificial
  Probe
tatagtggggataagtcaacccttc

SEQ ID NO: 40720 - DNA, 25 bp, Artificial
  Probe
cagatgggagtgaatgaatccaggg

SEQ ID NO: 40721 - DNA, 25 bp, Artificial
  Probe
ccagatgggagtgaatgaatccagg

SEQ ID NO: 40722 - DNA, 25 bp, Artificial
  Probe
tgcgacacattaatgactatgtatc

SEQ ID NO: 40723 - DNA, 25 bp, Artificial
  Probe
gatgcgacacattaatgactatgta

SEQ ID NO: 40724 - DNA, 25 bp, Artificial
  Probe
ggatgcgacacattaatgactatgt

SEQ ID NO: 40725 - DNA, 25 bp, Artificial
  Probe
gggatgcgacacattaatgactatg

SEQ ID NO: 40726 - DNA, 25 bp, Artificial
  Probe
atgcgacacattaatgactatgtat

SEQ ID NO: 40727 - DNA, 25 bp, Artificial
  Probe
gaactggccctttaatacaggtttt

SEQ ID NO: 40728 - DNA, 25 bp, Artificial
  Probe
ggggataagtcaacccttcaagatc

SEQ ID NO: 40729 - DNA, 25 bp, Artificial
  Probe
atagtggggataagtcaacccttca

SEQ ID NO: 40730 - DNA, 25 bp, Artificial
  Probe
tagtggggataagtcaacccttcaa

SEQ ID NO: 40731 - DNA, 25 bp, Artificial
  Probe
tggggataagtcaacccttcaagat

SEQ ID NO: 40732 - DNA, 25 bp, Artificial
  Probe
cccagatgggagtgaatgaatccag

SEQ ID NO: 40733 - DNA, 25 bp, Artificial
  Probe
gtggggataagtcaacccttcaaga

SEQ ID NO: 40734 - DNA, 25 bp, Artificial
  Probe
agtggggataagtcaacccttcaag

SEQ ID NO: 40735 - DNA, 25 bp, Artificial
  Probe
tccagatgaactggccctttaatac

SEQ ID NO: 40736 - DNA, 25 bp, Artificial
  Probe
gtccagatgaactggccctttaata

SEQ ID NO: 40737 - DNA, 25 bp, Artificial
  Probe
gagcccagatgggagtgaatgaatc

SEQ ID NO: 40738 - DNA, 25 bp, Artificial
  Probe
ccagatgaactggccctttaataca

SEQ ID NO: 40739 - DNA, 25 bp, Artificial
  Probe
ggggatgcgacacattaatgactat

SEQ ID NO: 40740 - DNA, 25 bp, Artificial
  Probe
atctgcacagtctttattacttcct

SEQ ID NO: 40741 - DNA, 25 bp, Artificial
  Probe
catctgcacagtctttattacttcc

SEQ ID NO: 40742 - DNA, 25 bp, Artificial
  Probe
ggtaaatatacatctgcacagtctt

SEQ ID NO: 40743 - DNA, 25 bp, Artificial
  Probe
acatctgcacagtctttattacttc

SEQ ID NO: 40744 - DNA, 25 bp, Artificial
  Probe
tctgcacagtctttattacttcctg

SEQ ID NO: 40745 - DNA, 25 bp, Artificial
  Probe
gttggtcttccacaatcctgttgag

SEQ ID NO: 40746 - DNA, 25 bp, Artificial
  Probe
tacatctgcacagtctttattactt

SEQ ID NO: 40747 - DNA, 25 bp, Artificial
  Probe
atacatctgcacagtctttattact

SEQ ID NO: 40748 - DNA, 25 bp, Artificial
  Probe
gtaaatatacatctgcacagtcttt

SEQ ID NO: 40749 - DNA, 25 bp, Artificial
  Probe
gtatctctgagtaatacattcagct

SEQ ID NO: 40750 - DNA, 25 bp, Artificial
  Probe
tgtatctctgagtaatacattcagc

SEQ ID NO: 40751 - DNA, 25 bp, Artificial
  Probe
tatacatctgcacagtctttattac

SEQ ID NO: 40752 - DNA, 25 bp, Artificial
  Probe
ttggtcttccacaatcctgttgagg

SEQ ID NO: 40753 - DNA, 25 bp, Artificial
  Probe
aaatatacatctgcacagtctttat

SEQ ID NO: 40754 - DNA, 25 bp, Artificial
  Probe
caacttaatcgccttgcagaaaatc

SEQ ID NO: 40755 - DNA, 25 bp, Artificial
  Probe
aatatacatctgcacagtctttatt

SEQ ID NO: 40756 - DNA, 25 bp, Artificial
  Probe
cctgtatctctgagtaatacattca

SEQ ID NO: 40757 - DNA, 25 bp, Artificial
  Probe
tcctgtatctctgagtaatacattc

SEQ ID NO: 40758 - DNA, 25 bp, Artificial
  Probe
gcacagtctttattacttcctgtat

SEQ ID NO: 40759 - DNA, 25 bp, Artificial
  Probe
aacttaatcgccttgcagaaaatcc

SEQ ID NO: 40760 - DNA, 25 bp, Artificial
  Probe
tttaaaacgtcgtgactgggaaaac

SEQ ID NO: 40761 - DNA, 25 bp, Artificial
  Probe
tgcacagtctttattacttcctgta

SEQ ID NO: 40762 - DNA, 25 bp, Artificial
  Probe
ctgcacagtctttattacttcctgt

SEQ ID NO: 40763 - DNA, 25 bp, Artificial
  Probe
ccaacttaatcgccttgcagaaaat

SEQ ID NO: 40764 - DNA, 25 bp, Artificial
  Probe
ttcctgtatctctgagtaatacatt

SEQ ID NO: 40765 - DNA, 25 bp, Artificial
  Probe
taaatatacatctgcacagtcttta

SEQ ID NO: 40766 - DNA, 25 bp, Artificial
  Probe
atatacatctgcacagtctttatta

SEQ ID NO: 40767 - DNA, 25 bp, Artificial
  Probe
tacccaacttaatcgccttgcagaa

SEQ ID NO: 40768 - DNA, 25 bp, Artificial
  Probe
ttacccaacttaatcgccttgcaga

SEQ ID NO: 40769 - DNA, 25 bp, Artificial
  Probe
ctgtatctctgagtaatacattcag

SEQ ID NO: 40770 - DNA, 25 bp, Artificial
  Probe
cacagtctttattacttcctgtatc

SEQ ID NO: 40771 - DNA, 25 bp, Artificial
  Probe
acagtctttattacttcctgtatct

SEQ ID NO: 40772 - DNA, 25 bp, Artificial
  Probe
gcatcaagctcttgatagcagatac

SEQ ID NO: 40773 - DNA, 25 bp, Artificial
  Probe
tgcatcaagctcttgatagcagata

SEQ ID NO: 40774 - DNA, 25 bp, Artificial
  Probe
acttaatcgccttgcagaaaatccc

SEQ ID NO: 40775 - DNA, 25 bp, Artificial
  Probe
ttaaaacgtcgtgactgggaaaacc

SEQ ID NO: 40776 - DNA, 25 bp, Artificial
  Probe
gattgcatcaagctcttgatagcag

SEQ ID NO: 40777 - DNA, 25 bp, Artificial
  Probe
ttgcatcaagctcttgatagcagat

SEQ ID NO: 40778 - DNA, 25 bp, Artificial
  Probe
attgcatcaagctcttgatagcaga

SEQ ID NO: 40779 - DNA, 25 bp, Artificial
  Probe
ttttaaaacgtcgtgactgggaaaa

SEQ ID NO: 40780 - DNA, 25 bp, Artificial
  Probe
cccaacttaatcgccttgcagaaaa

SEQ ID NO: 40781 - DNA, 25 bp, Artificial
  Probe
cttaatcgccttgcagaaaatcccc

SEQ ID NO: 40782 - DNA, 25 bp, Artificial
  Probe
cgattgcatcaagctcttgatagca

SEQ ID NO: 40783 - DNA, 25 bp, Artificial
  Probe
ggcgattgcatcaagctcttgatag

SEQ ID NO: 40784 - DNA, 25 bp, Artificial
  Probe
gcgattgcatcaagctcttgatagc

SEQ ID NO: 40785 - DNA, 25 bp, Artificial
  Probe
ctcaaactcccaattctcctgtaat

SEQ ID NO: 40786 - DNA, 25 bp, Artificial
  Probe
tcaaactcccaattctcctgtaata

SEQ ID NO: 40787 - DNA, 25 bp, Artificial
  Probe
caaactcccaattctcctgtaataa

SEQ ID NO: 40788 - DNA, 25 bp, Artificial
  Probe
tcccaattctcctgtaataagttga

SEQ ID NO: 40789 - DNA, 25 bp, Artificial
  Probe
ctcccaattctcctgtaataagttg

SEQ ID NO: 40790 - DNA, 25 bp, Artificial
  Probe
actcccaattctcctgtaataagtt

SEQ ID NO: 40791 - DNA, 25 bp, Artificial
  Probe
aactcccaattctcctgtaataagt

SEQ ID NO: 40792 - DNA, 25 bp, Artificial
  Probe
aaactcccaattctcctgtaataag

SEQ ID NO: 40793 - DNA, 25 bp, Artificial
  Probe
tacagaagacactggattgcttgac

SEQ ID NO: 40794 - DNA, 25 bp, Artificial
  Probe
cccaattctcctgtaataagttgaa

SEQ ID NO: 40795 - DNA, 25 bp, Artificial
  Probe
cctcaaactcccaattctcctgtaa

SEQ ID NO: 40796 - DNA, 25 bp, Artificial
  Probe
gtacagaagacactggattgcttga

SEQ ID NO: 40797 - DNA, 25 bp, Artificial
  Probe
atattaaagttcaccactccagaaa

SEQ ID NO: 40798 - DNA, 25 bp, Artificial
  Probe
cacaatattaaagttcaccactcca

SEQ ID NO: 40799 - DNA, 25 bp, Artificial
  Probe
acacaatattaaagttcaccactcc

SEQ ID NO: 40800 - DNA, 25 bp, Artificial
  Probe
ccaattctcctgtaataagttgaat

SEQ ID NO: 40801 - DNA, 25 bp, Artificial
  Probe
acaatattaaagttcaccactccag

SEQ ID NO: 40802 - DNA, 25 bp, Artificial
  Probe
caatattaaagttcaccactccaga

SEQ ID NO: 40803 - DNA, 25 bp, Artificial
  Probe
ttgtactgcaatttaccttgatgtg

SEQ ID NO: 40804 - DNA, 25 bp, Artificial
  Probe
tttgtactgcaatttaccttgatgt

SEQ ID NO: 40805 - DNA, 25 bp, Artificial
  Probe
gtactgcaatttaccttgatgtgta

SEQ ID NO: 40806 - DNA, 25 bp, Artificial
  Probe
ttgttactcagactgcctcaaactc

SEQ ID NO: 40807 - DNA, 25 bp, Artificial
  Probe
tgtactgcaatttaccttgatgtgt

SEQ ID NO: 40808 - DNA, 25 bp, Artificial
  Probe
aatattaaagttcaccactccagaa

SEQ ID NO: 40809 - DNA, 25 bp, Artificial
  Probe
ttggttgttactcagactgcctcaa

SEQ ID NO: 40810 - DNA, 25 bp, Artificial
  Probe
gttgttactcagactgcctcaaact

SEQ ID NO: 40811 - DNA, 25 bp, Artificial
  Probe
ttgttggttgttactcagactgcct

SEQ ID NO: 40812 - DNA, 25 bp, Artificial
  Probe
cagaagacactggattgcttgactg

SEQ ID NO: 40813 - DNA, 25 bp, Artificial
  Probe
actgcaatttaccttgatgtgtata

SEQ ID NO: 40814 - DNA, 25 bp, Artificial
  Probe
tactgcaatttaccttgatgtgtat

SEQ ID NO: 40815 - DNA, 25 bp, Artificial
  Probe
ctgcaatttaccttgatgtgtatac

SEQ ID NO: 40816 - DNA, 25 bp, Artificial
  Probe
tctacacaatattaaagttcaccac

SEQ ID NO: 40817 - DNA, 25 bp, Artificial
  Probe
acagaagacactggattgcttgact

SEQ ID NO: 40818 - DNA, 25 bp, Artificial
  Probe
gtatacagacatgtgcataagtcac

SEQ ID NO: 40819 - DNA, 25 bp, Artificial
  Probe
gttggttgttactcagactgcctca

SEQ ID NO: 40820 - DNA, 25 bp, Artificial
  Probe
tgttggttgttactcagactgcctc

SEQ ID NO: 40821 - DNA, 25 bp, Artificial
  Probe
tacacaatattaaagttcaccactc

SEQ ID NO: 40822 - DNA, 25 bp, Artificial
  Probe
ctacacaatattaaagttcaccact

SEQ ID NO: 40823 - DNA, 25 bp, Artificial
  Probe
ggttgttactcagactgcctcaaac

SEQ ID NO: 40824 - DNA, 25 bp, Artificial
  Probe
tattaaagttcaccactccagaaaa

SEQ ID NO: 40825 - DNA, 25 bp, Artificial
  Probe
ttctcctgtaataagttgaatttct

SEQ ID NO: 40826 - DNA, 25 bp, Artificial
  Probe
ttctacacaatattaaagttcacca

SEQ ID NO: 40827 - DNA, 25 bp, Artificial
  Probe
tggttgttactcagactgcctcaaa

SEQ ID NO: 40828 - DNA, 25 bp, Artificial
  Probe
gcctcaaactcccaattctcctgta

SEQ ID NO: 40829 - DNA, 25 bp, Artificial
  Probe
tgttactcagactgcctcaaactcc

SEQ ID NO: 40830 - DNA, 25 bp, Artificial
  Probe
atataggttcattatggtgccaagt

SEQ ID NO: 40831 - DNA, 25 bp, Artificial
  Probe
attaacgctagatcatgttgctcaa

SEQ ID NO: 40832 - DNA, 25 bp, Artificial
  Probe
tatataggttcattatggtgccaag

SEQ ID NO: 40833 - DNA, 25 bp, Artificial
  Probe
ttacctgttgccacatggaatatat

SEQ ID NO: 40834 - DNA, 25 bp, Artificial
  Probe
cttacctgttgccacatggaatata

SEQ ID NO: 40835 - DNA, 25 bp, Artificial
  Probe
cattaacgctagatcatgttgctca

SEQ ID NO: 40836 - DNA, 25 bp, Artificial
  Probe
tacctgttgccacatggaatatata

SEQ ID NO: 40837 - DNA, 25 bp, Artificial
  Probe
tacagtatgattctagcgttgataa

SEQ ID NO: 40838 - DNA, 25 bp, Artificial
  Probe
atatataggttcattatggtgccaa

SEQ ID NO: 40839 - DNA, 25 bp, Artificial
  Probe
ttgtagatttctgatttctcaaccc

SEQ ID NO: 40840 - DNA, 25 bp, Artificial
  Probe
acttacctgttgccacatggaatat

SEQ ID NO: 40841 - DNA, 25 bp, Artificial
  Probe
tttgatccaacagaaatacacaacc

SEQ ID NO: 40842 - DNA, 25 bp, Artificial
  Probe
acctgttgccacatggaatatatat

SEQ ID NO: 40843 - DNA, 25 bp, Artificial
  Probe
aacttacctgttgccacatggaata

SEQ ID NO: 40844 - DNA, 25 bp, Artificial
  Probe
gttgccacatggaatatatataggt

SEQ ID NO: 40845 - DNA, 25 bp, Artificial
  Probe
acagtatgattctagcgttgataaa

SEQ ID NO: 40846 - DNA, 25 bp, Artificial
  Probe
agttaaagtcacacatgaaagaagc

SEQ ID NO: 40847 - DNA, 25 bp, Artificial
  Probe
ttaacgctagatcatgttgctcaaa

SEQ ID NO: 40848 - DNA, 25 bp, Artificial
  Probe
ttacattaacgctagatcatgttgc

SEQ ID NO: 40849 - DNA, 25 bp, Artificial
  Probe
gttaaagtcacacatgaaagaagcc

SEQ ID NO: 40850 - DNA, 25 bp, Artificial
  Probe
tacattaacgctagatcatgttgct

SEQ ID NO: 40851 - DNA, 25 bp, Artificial
  Probe
gccacatggaatatatataggttca

SEQ ID NO: 40852 - DNA, 25 bp, Artificial
  Probe
tgccacatggaatatatataggttc

SEQ ID NO: 40853 - DNA, 25 bp, Artificial
  Probe
taaagtcacacatgaaagaagccat

SEQ ID NO: 40854 - DNA, 25 bp, Artificial
  Probe
acagttaaagtcacacatgaaagaa

SEQ ID NO: 40855 - DNA, 25 bp, Artificial
  Probe
ttaaagtcacacatgaaagaagcca

SEQ ID NO: 40856 - DNA, 25 bp, Artificial
  Probe
ggacagttaaagtcacacatgaaag

SEQ ID NO: 40857 - DNA, 25 bp, Artificial
  Probe
aattaaacaagtgggtgataccaga

SEQ ID NO: 40858 - DNA, 25 bp, Artificial
  Probe
tgttgccacatggaatatatatagg

SEQ ID NO: 40859 - DNA, 25 bp, Artificial
  Probe
cctgttgccacatggaatatatata

SEQ ID NO: 40860 - DNA, 25 bp, Artificial
  Probe
gacagttaaagtcacacatgaaaga

SEQ ID NO: 40861 - DNA, 25 bp, Artificial
  Probe
ttgccacatggaatatatataggtt

SEQ ID NO: 40862 - DNA, 25 bp, Artificial
  Probe
tgtgattacattaacgctagatcat

SEQ ID NO: 40863 - DNA, 25 bp, Artificial
  Probe
attaaacaagtgggtgataccagag

SEQ ID NO: 40864 - DNA, 25 bp, Artificial
  Probe
aaattaaacaagtgggtgataccag

SEQ ID NO: 40865 - DNA, 25 bp, Artificial
  Probe
cagttaaagtcacacatgaaagaag

SEQ ID NO: 40866 - DNA, 25 bp, Artificial
  Probe
ttgatccaacagaaatacacaaccg

SEQ ID NO: 40867 - DNA, 25 bp, Artificial
  Probe
acactgtctgatttagaatgtgatt

SEQ ID NO: 40868 - DNA, 25 bp, Artificial
  Probe
acattaacgctagatcatgttgctc

SEQ ID NO: 40869 - DNA, 25 bp, Artificial
  Probe
atgtgattacattaacgctagatca

SEQ ID NO: 40870 - DNA, 25 bp, Artificial
  Probe
atttgatccaacagaaatacacaac

SEQ ID NO: 40871 - DNA, 25 bp, Artificial
  Probe
tttgtagatttctgatttctcaacc

SEQ ID NO: 40872 - DNA, 25 bp, Artificial
  Probe
gtgattacattaacgctagatcatg

SEQ ID NO: 40873 - DNA, 25 bp, Artificial
  Probe
gggacagttaaagtcacacatgaaa

SEQ ID NO: 40874 - DNA, 25 bp, Artificial
  Probe
tacttcatcattacactgtctgatt

SEQ ID NO: 40875 - DNA, 25 bp, Artificial
  Probe
caagtcattcagaggattgtcagaa

SEQ ID NO: 40876 - DNA, 25 bp, Artificial
  Probe
taactgtcaagtatgctatccacac

SEQ ID NO: 40877 - DNA, 25 bp, Artificial
  Probe
gtaactgtcaagtatgctatccaca

SEQ ID NO: 40878 - DNA, 25 bp, Artificial
  Probe
cgtaactgtcaagtatgctatccac

SEQ ID NO: 40879 - DNA, 25 bp, Artificial
  Probe
ttacagattcctacagtgaaccgag

SEQ ID NO: 40880 - DNA, 25 bp, Artificial
  Probe
ctgtgttcataactagatggaatgt

SEQ ID NO: 40881 - DNA, 25 bp, Artificial
  Probe
ctatccacacttaggagactgttaa

SEQ ID NO: 40882 - DNA, 25 bp, Artificial
  Probe
aactgtcaagtatgctatccacact

SEQ ID NO: 40883 - DNA, 25 bp, Artificial
  Probe
tatgctatccacacttaggagactg

SEQ ID NO: 40884 - DNA, 25 bp, Artificial
  Probe
gtatgctatccacacttaggagact

SEQ ID NO: 40885 - DNA, 25 bp, Artificial
  Probe
agtatgctatccacacttaggagac

SEQ ID NO: 40886 - DNA, 25 bp, Artificial
  Probe
tatccacacttaggagactgttaat

SEQ ID NO: 40887 - DNA, 25 bp, Artificial
  Probe
gctatccacacttaggagactgtta

SEQ ID NO: 40888 - DNA, 25 bp, Artificial
  Probe
atgaacatgatcgaagaggaacttg

SEQ ID NO: 40889 - DNA, 25 bp, Artificial
  Probe
catgaacatgatcgaagaggaactt

SEQ ID NO: 40890 - DNA, 25 bp, Artificial
  Probe
tacagattcctacagtgaaccgagt

SEQ ID NO: 40891 - DNA, 25 bp, Artificial
  Probe
aagtcattcagaggattgtcagaaa

SEQ ID NO: 40892 - DNA, 25 bp, Artificial
  Probe
tgtgttcataactagatggaatgta

SEQ ID NO: 40893 - DNA, 25 bp, Artificial
  Probe
gtcattcagaggattgtcagaaaga

SEQ ID NO: 40894 - DNA, 25 bp, Artificial
  Probe
agtcattcagaggattgtcagaaag

SEQ ID NO: 40895 - DNA, 25 bp, Artificial
  Probe
acatgatcgaagaggaacttgttaa

SEQ ID NO: 40896 - DNA, 25 bp, Artificial
  Probe
gcgtaactgtcaagtatgctatcca

SEQ ID NO: 40897 - DNA, 25 bp, Artificial
  Probe
tttacagattcctacagtgaaccga

SEQ ID NO: 40898 - DNA, 25 bp, Artificial
  Probe
gtgttcataactagatggaatgtag

SEQ ID NO: 40899 - DNA, 25 bp, Artificial
  Probe
aagcgtaactgtcaagtatgctatc

SEQ ID NO: 40900 - DNA, 25 bp, Artificial
  Probe
gtttacagattcctacagtgaaccg

SEQ ID NO: 40901 - DNA, 25 bp, Artificial
  Probe
cgaagaggaacttgttaaagcgtaa

SEQ ID NO: 40902 - DNA, 25 bp, Artificial
  Probe
tgtttacagattcctacagtgaacc

SEQ ID NO: 40903 - DNA, 25 bp, Artificial
  Probe
tgttcataactagatggaatgtaga

SEQ ID NO: 40904 - DNA, 25 bp, Artificial
  Probe
ccaaagaggtacttgttgttattgt

SEQ ID NO: 40905 - DNA, 25 bp, Artificial
  Probe
aggtacttgttgttattgttattgt

SEQ ID NO: 40906 - DNA, 25 bp, Artificial
  Probe
attcagaggattgtcagaaagactg

SEQ ID NO: 40907 - DNA, 25 bp, Artificial
  Probe
cattcagaggattgtcagaaagact

SEQ ID NO: 40908 - DNA, 25 bp, Artificial
  Probe
tcattcagaggattgtcagaaagac

SEQ ID NO: 40909 - DNA, 25 bp, Artificial
  Probe
tgtcaagtatgctatccacacttag

SEQ ID NO: 40910 - DNA, 25 bp, Artificial
  Probe
ctgtcaagtatgctatccacactta

SEQ ID NO: 40911 - DNA, 25 bp, Artificial
  Probe
aagtatgctatccacacttaggaga

SEQ ID NO: 40912 - DNA, 25 bp, Artificial
  Probe
caagtatgctatccacacttaggag

SEQ ID NO: 40913 - DNA, 25 bp, Artificial
  Probe
tcaagtatgctatccacacttagga

SEQ ID NO: 40914 - DNA, 25 bp, Artificial
  Probe
gtcaagtatgctatccacacttagg

SEQ ID NO: 40915 - DNA, 25 bp, Artificial
  Probe
atgctatccacacttaggagactgt

SEQ ID NO: 40916 - DNA, 25 bp, Artificial
  Probe
gaacttgttaaagcgtaactgtcaa

SEQ ID NO: 40917 - DNA, 25 bp, Artificial
  Probe
tgttaaagcgtaactgtcaagtatg

SEQ ID NO: 40918 - DNA, 25 bp, Artificial
  Probe
gaagaggaacttgttaaagcgtaac

SEQ ID NO: 40919 - DNA, 25 bp, Artificial
  Probe
tgaacatgatcgaagaggaacttgt

SEQ ID NO: 40920 - DNA, 25 bp, Artificial
  Probe
caagaatctcgcagagtgtcattac

SEQ ID NO: 40921 - DNA, 25 bp, Artificial
  Probe
acaagaatctcgcagagtgtcatta

SEQ ID NO: 40922 - DNA, 25 bp, Artificial
  Probe
agagtgtcattaccgttgaagactt

SEQ ID NO: 40923 - DNA, 25 bp, Artificial
  Probe
gttgaagactttgagaccattgatg

SEQ ID NO: 40924 - DNA, 25 bp, Artificial
  Probe
accattgatgcaggctattacatat

SEQ ID NO: 40925 - DNA, 25 bp, Artificial
  Probe
gaccattgatgcaggctattacata

SEQ ID NO: 40926 - DNA, 25 bp, Artificial
  Probe
aagaatctcgcagagtgtcattacc

SEQ ID NO: 40927 - DNA, 25 bp, Artificial
  Probe
tcagacagacatccaaattcaaagg

SEQ ID NO: 40928 - DNA, 25 bp, Artificial
  Probe
cgttgaagactttgagaccattgat

SEQ ID NO: 40929 - DNA, 25 bp, Artificial
  Probe
cagagtgtcattaccgttgaagact

SEQ ID NO: 40930 - DNA, 25 bp, Artificial
  Probe
ccattgatgcaggctattacatatg

SEQ ID NO: 40931 - DNA, 25 bp, Artificial
  Probe
ttgaagactttgagaccattgatgc

SEQ ID NO: 40932 - DNA, 25 bp, Artificial
  Probe
tcattaccgttgaagactttgagac

SEQ ID NO: 40933 - DNA, 25 bp, Artificial
  Probe
cattaccgttgaagactttgagacc

SEQ ID NO: 40934 - DNA, 25 bp, Artificial
  Probe
ttgagaccattgatgcaggctatta

SEQ ID NO: 40935 - DNA, 25 bp, Artificial
  Probe
ccaaattcaaaggaagtcattagtc

SEQ ID NO: 40936 - DNA, 25 bp, Artificial
  Probe
gtcagacagacatccaaattcaaag

SEQ ID NO: 40937 - DNA, 25 bp, Artificial
  Probe
taccgttgaagactttgagaccatt

SEQ ID NO: 40938 - DNA, 25 bp, Artificial
  Probe
ttaccgttgaagactttgagaccat

SEQ ID NO: 40939 - DNA, 25 bp, Artificial
  Probe
attaccgttgaagactttgagacca

SEQ ID NO: 40940 - DNA, 25 bp, Artificial
  Probe
agaccattgatgcaggctattacat

SEQ ID NO: 40941 - DNA, 25 bp, Artificial
  Probe
gtcattaccgttgaagactttgaga

SEQ ID NO: 40942 - DNA, 25 bp, Artificial
  Probe
tttgactaagccatgtttctacttt

SEQ ID NO: 40943 - DNA, 25 bp, Artificial
  Probe
gacatccaaattcaaaggaagtcat

SEQ ID NO: 40944 - DNA, 25 bp, Artificial
  Probe
tgtcattaccgttgaagactttgag

SEQ ID NO: 40945 - DNA, 25 bp, Artificial
  Probe
gagtgtcattaccgttgaagacttt

SEQ ID NO: 40946 - DNA, 25 bp, Artificial
  Probe
cagacatccaaattcaaaggaagtc

SEQ ID NO: 40947 - DNA, 25 bp, Artificial
  Probe
gacagacatccaaattcaaaggaag

SEQ ID NO: 40948 - DNA, 25 bp, Artificial
  Probe
catgtcaacaactttgtatcagtca

SEQ ID NO: 40949 - DNA, 25 bp, Artificial
  Probe
ggtcagacagacatccaaattcaaa

SEQ ID NO: 40950 - DNA, 25 bp, Artificial
  Probe
agacatccaaattcaaaggaagtca

SEQ ID NO: 40951 - DNA, 25 bp, Artificial
  Probe
agacagacatccaaattcaaaggaa

SEQ ID NO: 40952 - DNA, 25 bp, Artificial
  Probe
acatccaaattcaaaggaagtcatt

SEQ ID NO: 40953 - DNA, 25 bp, Artificial
  Probe
gtgtcattaccgttgaagactttga

SEQ ID NO: 40954 - DNA, 25 bp, Artificial
  Probe
agtgtcattaccgttgaagactttg

SEQ ID NO: 40955 - DNA, 25 bp, Artificial
  Probe
acagacatccaaattcaaaggaagt

SEQ ID NO: 40956 - DNA, 25 bp, Artificial
  Probe
gagaccattgatgcaggctattaca

SEQ ID NO: 40957 - DNA, 25 bp, Artificial
  Probe
tgagaccattgatgcaggctattac

SEQ ID NO: 40958 - DNA, 25 bp, Artificial
  Probe
tgtcaacaactttgtatcagtcatt

SEQ ID NO: 40959 - DNA, 25 bp, Artificial
  Probe
atgtcaacaactttgtatcagtcat

SEQ ID NO: 40960 - DNA, 25 bp, Artificial
  Probe
cagacagacatccaaattcaaagga

SEQ ID NO: 40961 - DNA, 25 bp, Artificial
  Probe
caaattcaaaggaagtcattagtct

SEQ ID NO: 40962 - DNA, 25 bp, Artificial
  Probe
tccaaattcaaaggaagtcattagt

SEQ ID NO: 40963 - DNA, 25 bp, Artificial
  Probe
cacaagaatctcgcagagtgtcatt

SEQ ID NO: 40964 - DNA, 25 bp, Artificial
  Probe
gtcaacaactttgtatcagtcattt

SEQ ID NO: 40965 - DNA, 25 bp, Artificial
  Probe
taagttactaatgtgctctgctgta

SEQ ID NO: 40966 - DNA, 25 bp, Artificial
  Probe
ctaagttactaatgtgctctgctgt

SEQ ID NO: 40967 - DNA, 25 bp, Artificial
  Probe
aagttactaatgtgctctgctgtag

SEQ ID NO: 40968 - DNA, 25 bp, Artificial
  Probe
taatcagagagtgccacattaactt

SEQ ID NO: 40969 - DNA, 25 bp, Artificial
  Probe
gtaatcagagagtgccacattaact

SEQ ID NO: 40970 - DNA, 25 bp, Artificial
  Probe
gctaagttactaatgtgctctgctg

SEQ ID NO: 40971 - DNA, 25 bp, Artificial
  Probe
ctgtaggacactaatagagttgctt

SEQ ID NO: 40972 - DNA, 25 bp, Artificial
  Probe
ctgctgtaggacactaatagagttg

SEQ ID NO: 40973 - DNA, 25 bp, Artificial
  Probe
tctgctgtaggacactaatagagtt

SEQ ID NO: 40974 - DNA, 25 bp, Artificial
  Probe
aatcagagagtgccacattaacttc

SEQ ID NO: 40975 - DNA, 25 bp, Artificial
  Probe
tgtaatcagagagtgccacattaac

SEQ ID NO: 40976 - DNA, 25 bp, Artificial
  Probe
ttactaatgtgctctgctgtaggac

SEQ ID NO: 40977 - DNA, 25 bp, Artificial
  Probe
gttactaatgtgctctgctgtagga

SEQ ID NO: 40978 - DNA, 25 bp, Artificial
  Probe
ctgtaatcagagagtgccacattaa

SEQ ID NO: 40979 - DNA, 25 bp, Artificial
  Probe
agttactaatgtgctctgctgtagg

SEQ ID NO: 40980 - DNA, 25 bp, Artificial
  Probe
atcagagagtgccacattaacttct

SEQ ID NO: 40981 - DNA, 25 bp, Artificial
  Probe
cagagagtgccacattaacttcttg

SEQ ID NO: 40982 - DNA, 25 bp, Artificial
  Probe
tcagagagtgccacattaacttctt

SEQ ID NO: 40983 - DNA, 25 bp, Artificial
  Probe
gctgtaggacactaatagagttgct

SEQ ID NO: 40984 - DNA, 25 bp, Artificial
  Probe
ggctaagttactaatgtgctctgct

SEQ ID NO: 40985 - DNA, 25 bp, Artificial
  Probe
acggctaagttactaatgtgctctg

SEQ ID NO: 40986 - DNA, 25 bp, Artificial
  Probe
tgctgtaggacactaatagagttgc

SEQ ID NO: 40987 - DNA, 25 bp, Artificial
  Probe
cttaaactgtgtgagaaagaaggtc

SEQ ID NO: 40988 - DNA, 25 bp, Artificial
  Probe
ttaaactgtgtgagaaagaaggtcc

SEQ ID NO: 40989 - DNA, 25 bp, Artificial
  Probe
acattaacttcttggtccatttctg

SEQ ID NO: 40990 - DNA, 25 bp, Artificial
  Probe
cacattaacttcttggtccatttct

SEQ ID NO: 40991 - DNA, 25 bp, Artificial
  Probe
tgctctgctgtaggacactaataga

SEQ ID NO: 40992 - DNA, 25 bp, Artificial
  Probe
cattaacttcttggtccatttctga

SEQ ID NO: 40993 - DNA, 25 bp, Artificial
  Probe
taacttcttggtccatttctgaaca

SEQ ID NO: 40994 - DNA, 25 bp, Artificial
  Probe
ttaacttcttggtccatttctgaac

SEQ ID NO: 40995 - DNA, 25 bp, Artificial
  Probe
taaactgtgtgagaaagaaggtcca

SEQ ID NO: 40996 - DNA, 25 bp, Artificial
  Probe
gtgctctgctgtaggacactaatag

SEQ ID NO: 40997 - DNA, 25 bp, Artificial
  Probe
tgtaggacactaatagagttgcttt

SEQ ID NO: 40998 - DNA, 25 bp, Artificial
  Probe
aacttcttggtccatttctgaacag

SEQ ID NO: 40999 - DNA, 25 bp, Artificial
  Probe
attaacttcttggtccatttctgaa

SEQ ID NO: 41000 - DNA, 25 bp, Artificial
  Probe
tactaatgtgctctgctgtaggaca

SEQ ID NO: 41001 - DNA, 25 bp, Artificial
  Probe
caccttaaactgtgtgagaaagaag

SEQ ID NO: 41002 - DNA, 25 bp, Artificial
  Probe
catgtttgtgttaaagctggttaga

SEQ ID NO: 41003 - DNA, 25 bp, Artificial
  Probe
tgtttgtgttaaagctggttagaaa

SEQ ID NO: 41004 - DNA, 25 bp, Artificial
  Probe
tgtgctctgctgtaggacactaata

SEQ ID NO: 41005 - DNA, 25 bp, Artificial
  Probe
taatgtgctctgctgtaggacacta

SEQ ID NO: 41006 - DNA, 25 bp, Artificial
  Probe
cggctaagttactaatgtgctctgc

SEQ ID NO: 41007 - DNA, 25 bp, Artificial
  Probe
agagagtgccacattaacttcttgg

SEQ ID NO: 41008 - DNA, 25 bp, Artificial
  Probe
atgtttgtgttaaagctggttagaa

SEQ ID NO: 41009 - DNA, 25 bp, Artificial
  Probe
ccacattaacttcttggtccatttc

SEQ ID NO: 41010 - DNA, 25 bp, Artificial
  Probe
cacctggctttatgtaaatattccc

SEQ ID NO: 41011 - DNA, 25 bp, Artificial
  Probe
gcacctggctttatgtaaatattcc

SEQ ID NO: 41012 - DNA, 25 bp, Artificial
  Probe
tttatgtaaatattcccaagcagct

SEQ ID NO: 41013 - DNA, 25 bp, Artificial
  Probe
ctttatgtaaatattcccaagcagc

SEQ ID NO: 41014 - DNA, 25 bp, Artificial
  Probe
acctggctttatgtaaatattccca

SEQ ID NO: 41015 - DNA, 25 bp, Artificial
  Probe
gttctatgctcactgctgtgtcttc

SEQ ID NO: 41016 - DNA, 25 bp, Artificial
  Probe
acagcacctggctttatgtaaatat

SEQ ID NO: 41017 - DNA, 25 bp, Artificial
  Probe
ttctatgctcactgctgtgtcttct

SEQ ID NO: 41018 - DNA, 25 bp, Artificial
  Probe
cctggctttatgtaaatattcccaa

SEQ ID NO: 41019 - DNA, 25 bp, Artificial
  Probe
gacagcacctggctttatgtaaata

SEQ ID NO: 41020 - DNA, 25 bp, Artificial
  Probe
attgcttttaataacactgaacccc

SEQ ID NO: 41021 - DNA, 25 bp, Artificial
  Probe
gcttttaataacactgaaccccatc

SEQ ID NO: 41022 - DNA, 25 bp, Artificial
  Probe
cattgcttttaataacactgaaccc

SEQ ID NO: 41023 - DNA, 25 bp, Artificial
  Probe
tgcttttaataacactgaaccccat

SEQ ID NO: 41024 - DNA, 25 bp, Artificial
  Probe
ttgcttttaataacactgaacccca

SEQ ID NO: 41025 - DNA, 25 bp, Artificial
  Probe
cagcacctggctttatgtaaatatt

SEQ ID NO: 41026 - DNA, 25 bp, Artificial
  Probe
agcacctggctttatgtaaatattc

SEQ ID NO: 41027 - DNA, 25 bp, Artificial
  Probe
cgcattgcttttaataacactgaac

SEQ ID NO: 41028 - DNA, 25 bp, Artificial
  Probe
gcattgcttttaataacactgaacc

SEQ ID NO: 41029 - DNA, 25 bp, Artificial
  Probe
cttttaataacactgaaccccatca

SEQ ID NO: 41030 - DNA, 25 bp, Artificial
  Probe
ctggctttatgtaaatattcccaag

SEQ ID NO: 41031 - DNA, 25 bp, Artificial
  Probe
ccgcattgcttttaataacactgaa

SEQ ID NO: 41032 - DNA, 25 bp, Artificial
  Probe
ctccgcattgcttttaataacactg

SEQ ID NO: 41033 - DNA, 25 bp, Artificial
  Probe
tctatgctcactgctgtgtcttctg

SEQ ID NO: 41034 - DNA, 25 bp, Artificial
  Probe
tccgcattgcttttaataacactga

SEQ ID NO: 41035 - DNA, 25 bp, Artificial
  Probe
agacagcacctggctttatgtaaat

SEQ ID NO: 41036 - DNA, 25 bp, Artificial
  Probe
gagacagcacctggctttatgtaaa

SEQ ID NO: 41037 - DNA, 25 bp, Artificial
  Probe
ggttctatgctcactgctgtgtctt

SEQ ID NO: 41038 - DNA, 25 bp, Artificial
  Probe
gctccgcattgcttttaataacact

SEQ ID NO: 41039 - DNA, 25 bp, Artificial
  Probe
cttcgtctgggttctatgctcactg

SEQ ID NO: 41040 - DNA, 25 bp, Artificial
  Probe
tttgacacatgccactttccctaca

SEQ ID NO: 41041 - DNA, 25 bp, Artificial
  Probe
cactgaatgtacggagacttggtgg

SEQ ID NO: 41042 - DNA, 25 bp, Artificial
  Probe
ttttgacacatgccactttccctac

SEQ ID NO: 41043 - DNA, 25 bp, Artificial
  Probe
ggctttatgtaaatattcccaagca

SEQ ID NO: 41044 - DNA, 25 bp, Artificial
  Probe
tggctttatgtaaatattcccaagc

SEQ ID NO: 41045 - DNA, 25 bp, Artificial
  Probe
ttgacacatgccactttccctacag

SEQ ID NO: 41046 - DNA, 25 bp, Artificial
  Probe
gctttatgtaaatattcccaagcag

SEQ ID NO: 41047 - DNA, 25 bp, Artificial
  Probe
ttaataacactgaaccccatcagag

SEQ ID NO: 41048 - DNA, 25 bp, Artificial
  Probe
tttaataacactgaaccccatcaga

SEQ ID NO: 41049 - DNA, 25 bp, Artificial
  Probe
ctcagctccgcattgcttttaataa

SEQ ID NO: 41050 - DNA, 25 bp, Artificial
  Probe
ttttaataacactgaaccccatcag

SEQ ID NO: 41051 - DNA, 25 bp, Artificial
  Probe
ggagacagcacctggctttatgtaa

SEQ ID NO: 41052 - DNA, 25 bp, Artificial
  Probe
tcagctccgcattgcttttaataac

SEQ ID NO: 41053 - DNA, 25 bp, Artificial
  Probe
agctccgcattgcttttaataacac

SEQ ID NO: 41054 - DNA, 25 bp, Artificial
  Probe
cagctccgcattgcttttaataaca

SEQ ID NO: 41055 - DNA, 25 bp, Artificial
  Probe
aagaggtcatagccatattcaacag

SEQ ID NO: 41056 - DNA, 25 bp, Artificial
  Probe
agaagaggtcatagccatattcaac

SEQ ID NO: 41057 - DNA, 25 bp, Artificial
  Probe
cagaagaggtcatagccatattcaa

SEQ ID NO: 41058 - DNA, 25 bp, Artificial
  Probe
gaagaggtcatagccatattcaaca

SEQ ID NO: 41059 - DNA, 25 bp, Artificial
  Probe
gtggtgtcaatacttctgttcttat

SEQ ID NO: 41060 - DNA, 25 bp, Artificial
  Probe
gtagtggtgtcaatacttctgttct

SEQ ID NO: 41061 - DNA, 25 bp, Artificial
  Probe
ttgtagtggtgtcaatacttctgtt

SEQ ID NO: 41062 - DNA, 25 bp, Artificial
  Probe
agtggtgtcaatacttctgttctta

SEQ ID NO: 41063 - DNA, 25 bp, Artificial
  Probe
tagtggtgtcaatacttctgttctt

SEQ ID NO: 41064 - DNA, 25 bp, Artificial
  Probe
tgtagtggtgtcaatacttctgttc

SEQ ID NO: 41065 - DNA, 25 bp, Artificial
  Probe
gtcatcatcattgtagtggtgtcaa

SEQ ID NO: 41066 - DNA, 25 bp, Artificial
  Probe
ccagaagaggtcatagccatattca

SEQ ID NO: 41067 - DNA, 25 bp, Artificial
  Probe
acttctgttcttattcgtgacatcc

SEQ ID NO: 41068 - DNA, 25 bp, Artificial
  Probe
tgtcaatacttctgttcttattcgt

SEQ ID NO: 41069 - DNA, 25 bp, Artificial
  Probe
gtcatagccatattcaacagcacag

SEQ ID NO: 41070 - DNA, 25 bp, Artificial
  Probe
caatacttctgttcttattcgtgac

SEQ ID NO: 41071 - DNA, 25 bp, Artificial
  Probe
gtcaatacttctgttcttattcgtg

SEQ ID NO: 41072 - DNA, 25 bp, Artificial
  Probe
gtgtcaatacttctgttcttattcg

SEQ ID NO: 41073 - DNA, 25 bp, Artificial
  Probe
tggtgtcaatacttctgttcttatt

SEQ ID NO: 41074 - DNA, 25 bp, Artificial
  Probe
atggtcatcatcattgtagtggtgt

SEQ ID NO: 41075 - DNA, 25 bp, Artificial
  Probe
tacttctgttcttattcgtgacatc

SEQ ID NO: 41076 - DNA, 25 bp, Artificial
  Probe
agaggtcatagccatattcaacagc

SEQ ID NO: 41077 - DNA, 25 bp, Artificial
  Probe
tcaatacttctgttcttattcgtga

SEQ ID NO: 41078 - DNA, 25 bp, Artificial
  Probe
ggtcatcatcattgtagtggtgtca

SEQ ID NO: 41079 - DNA, 25 bp, Artificial
  Probe
tggtcatcatcattgtagtggtgtc

SEQ ID NO: 41080 - DNA, 25 bp, Artificial
  Probe
aatacttctgttcttattcgtgaca

SEQ ID NO: 41081 - DNA, 25 bp, Artificial
  Probe
ggtgtcaatacttctgttcttattc

SEQ ID NO: 41082 - DNA, 25 bp, Artificial
  Probe
cttctgttcttattcgtgacatccg

SEQ ID NO: 41083 - DNA, 25 bp, Artificial
  Probe
gaggtcatagccatattcaacagca

SEQ ID NO: 41084 - DNA, 25 bp, Artificial
  Probe
atacttctgttcttattcgtgacat

SEQ ID NO: 41085 - DNA, 25 bp, Artificial
  Probe
tttagcctcaatacaaatacctgga

SEQ ID NO: 41086 - DNA, 25 bp, Artificial
  Probe
tagcctcaatacaaatacctggatt

SEQ ID NO: 41087 - DNA, 25 bp, Artificial
  Probe
ttagcctcaatacaaatacctggat

SEQ ID NO: 41088 - DNA, 25 bp, Artificial
  Probe
aggtcatagccatattcaacagcac

SEQ ID NO: 41089 - DNA, 25 bp, Artificial
  Probe
ttctgttcttattcgtgacatccgt

SEQ ID NO: 41090 - DNA, 25 bp, Artificial
  Probe
attgtagtggtgtcaatacttctgt

SEQ ID NO: 41091 - DNA, 25 bp, Artificial
  Probe
tcatcatcattgtagtggtgtcaat

SEQ ID NO: 41092 - DNA, 25 bp, Artificial
  Probe
cattgtagtggtgtcaatacttctg

SEQ ID NO: 41093 - DNA, 25 bp, Artificial
  Probe
tcattgtagtggtgtcaatacttct

SEQ ID NO: 41094 - DNA, 25 bp, Artificial
  Probe
tcatcattgtagtggtgtcaatact

SEQ ID NO: 41095 - DNA, 25 bp, Artificial
  Probe
catcattgtagtggtgtcaatactt

SEQ ID NO: 41096 - DNA, 25 bp, Artificial
  Probe
ggtcatagccatattcaacagcaca

SEQ ID NO: 41097 - DNA, 25 bp, Artificial
  Probe
atcattgtagtggtgtcaatacttc

SEQ ID NO: 41098 - DNA, 25 bp, Artificial
  Probe
atcatcattgtagtggtgtcaatac

SEQ ID NO: 41099 - DNA, 25 bp, Artificial
  Probe
catcatcattgtagtggtgtcaata

SEQ ID NO: 41100 - DNA, 25 bp, Artificial
  Probe
ctggatcttcactactgtgatcttg

SEQ ID NO: 41101 - DNA, 25 bp, Artificial
  Probe
actggatcttcactactgtgatctt

SEQ ID NO: 41102 - DNA, 25 bp, Artificial
  Probe
aactggatcttcactactgtgatct

SEQ ID NO: 41103 - DNA, 25 bp, Artificial
  Probe
tggatcttcactactgtgatcttgg

SEQ ID NO: 41104 - DNA, 25 bp, Artificial
  Probe
atcttcactactgtgatcttggcag

SEQ ID NO: 41105 - DNA, 25 bp, Artificial
  Probe
gatcttcactactgtgatcttggca

SEQ ID NO: 41106 - DNA, 25 bp, Artificial
  Probe
ggatcttcactactgtgatcttggc

SEQ ID NO: 41107 - DNA, 25 bp, Artificial
  Probe
tctctggattactggacctactttg

SEQ ID NO: 41108 - DNA, 25 bp, Artificial
  Probe
cttcgtctctggattactggaccta

SEQ ID NO: 41109 - DNA, 25 bp, Artificial
  Probe
ctctggattactggacctactttgg

SEQ ID NO: 41110 - DNA, 25 bp, Artificial
  Probe
cgtctctggattactggacctactt

SEQ ID NO: 41111 - DNA, 25 bp, Artificial
  Probe
ttcgtctctggattactggacctac

SEQ ID NO: 41112 - DNA, 25 bp, Artificial
  Probe
gtctctggattactggacctacttt

SEQ ID NO: 41113 - DNA, 25 bp, Artificial
  Probe
gattactggacctactttggctctc

SEQ ID NO: 41114 - DNA, 25 bp, Artificial
  Probe
attactggacctactttggctctct

SEQ ID NO: 41115 - DNA, 25 bp, Artificial
  Probe
ctccttccttcgtctctggattact

SEQ ID NO: 41116 - DNA, 25 bp, Artificial
  Probe
tctccttccttcgtctctggattac

SEQ ID NO: 41117 - DNA, 25 bp, Artificial
  Probe
gtctccttccttcgtctctggatta

SEQ ID NO: 41118 - DNA, 25 bp, Artificial
  Probe
tagcaaagagtgagtcctcagttag

SEQ ID NO: 41119 - DNA, 25 bp, Artificial
  Probe
ctagcaaagagtgagtcctcagtta

SEQ ID NO: 41120 - DNA, 25 bp, Artificial
  Probe
cttccttcgtctctggattactgga

SEQ ID NO: 41121 - DNA, 25 bp, Artificial
  Probe
tccttccttcgtctctggattactg

SEQ ID NO: 41122 - DNA, 25 bp, Artificial
  Probe
tcgtctctggattactggacctact

SEQ ID NO: 41123 - DNA, 25 bp, Artificial
  Probe
ttccttcgtctctggattactggac

SEQ ID NO: 41124 - DNA, 25 bp, Artificial
  Probe
ttactggacctactttggctctctg

SEQ ID NO: 41125 - DNA, 25 bp, Artificial
  Probe
ggattactggacctactttggctct

SEQ ID NO: 41126 - DNA, 25 bp, Artificial
  Probe
tggattactggacctactttggctc

SEQ ID NO: 41127 - DNA, 25 bp, Artificial
  Probe
ctggattactggacctactttggct

SEQ ID NO: 41128 - DNA, 25 bp, Artificial
  Probe
tctggattactggacctactttggc

SEQ ID NO: 41129 - DNA, 25 bp, Artificial
  Probe
ataatctttaagcatgtgtttgtgc

SEQ ID NO: 41130 - DNA, 25 bp, Artificial
  Probe
ccttccttcgtctctggattactgg

SEQ ID NO: 41131 - DNA, 25 bp, Artificial
  Probe
tttgagtcctagcaaagagtgagtc

SEQ ID NO: 41132 - DNA, 25 bp, Artificial
  Probe
cttccagtctccttccttcgtctct

SEQ ID NO: 41133 - DNA, 25 bp, Artificial
  Probe
ttgagtcctagcaaagagtgagtcc

SEQ ID NO: 41134 - DNA, 25 bp, Artificial
  Probe
aatgttccataattgcaactaagtg

SEQ ID NO: 41135 - DNA, 25 bp, Artificial
  Probe
tactggacctactttggctctctga

SEQ ID NO: 41136 - DNA, 25 bp, Artificial
  Probe
agtctccttccttcgtctctggatt

SEQ ID NO: 41137 - DNA, 25 bp, Artificial
  Probe
gaatgttccataattgcaactaagt

SEQ ID NO: 41138 - DNA, 25 bp, Artificial
  Probe
ttgaggaatgttccataattgcaac

SEQ ID NO: 41139 - DNA, 25 bp, Artificial
  Probe
gaggaatgttccataattgcaacta

SEQ ID NO: 41140 - DNA, 25 bp, Artificial
  Probe
gagtcctagcaaagagtgagtcctc

SEQ ID NO: 41141 - DNA, 25 bp, Artificial
  Probe
gttccataattgcaactaagtggtt

SEQ ID NO: 41142 - DNA, 25 bp, Artificial
  Probe
atgttccataattgcaactaagtgg

SEQ ID NO: 41143 - DNA, 25 bp, Artificial
  Probe
tgaggaatgttccataattgcaact

SEQ ID NO: 41144 - DNA, 25 bp, Artificial
  Probe
aggaatgttccataattgcaactaa

SEQ ID NO: 41145 - DNA, 25 bp, Artificial
  Probe
tgttccataattgcaactaagtggt

SEQ ID NO: 41146 - DNA, 25 bp, Artificial
  Probe
ggaatgttccataattgcaactaag

SEQ ID NO: 41147 - DNA, 25 bp, Artificial
  Probe
cctagcaaagagtgagtcctcagtt

SEQ ID NO: 41148 - DNA, 25 bp, Artificial
  Probe
cattcaccaattttgacccttccag

SEQ ID NO: 41149 - DNA, 25 bp, Artificial
  Probe
atctgcaaggagagcatcagtctaa

SEQ ID NO: 41150 - DNA, 25 bp, Artificial
  Probe
tgagtcctagcaaagagtgagtcct

SEQ ID NO: 41151 - DNA, 25 bp, Artificial
  Probe
attcaccaattttgacccttccagt

SEQ ID NO: 41152 - DNA, 25 bp, Artificial
  Probe
tttggagaggtttgataaggttagg

SEQ ID NO: 41153 - DNA, 25 bp, Artificial
  Probe
aagaaagacaaggatgaccaagaat

SEQ ID NO: 41154 - DNA, 25 bp, Artificial
  Probe
gaggtttgataaggttaggagaaga

SEQ ID NO: 41155 - DNA, 25 bp, Artificial
  Probe
agaggtttgataaggttaggagaag

SEQ ID NO: 41156 - DNA, 25 bp, Artificial
  Probe
gagaggtttgataaggttaggagaa

SEQ ID NO: 41157 - DNA, 25 bp, Artificial
  Probe
aatcaactcaaacaccttctacaga

SEQ ID NO: 41158 - DNA, 25 bp, Artificial
  Probe
aaagaaagacaaggatgaccaagaa

SEQ ID NO: 41159 - DNA, 25 bp, Artificial
  Probe
aaatcaactcaaacaccttctacag

SEQ ID NO: 41160 - DNA, 25 bp, Artificial
  Probe
tttatgagcaatccagtatcccaac

SEQ ID NO: 41161 - DNA, 25 bp, Artificial
  Probe
ttggagaggtttgataaggttagga

SEQ ID NO: 41162 - DNA, 25 bp, Artificial
  Probe
aggtttgataaggttaggagaagaa

SEQ ID NO: 41163 - DNA, 25 bp, Artificial
  Probe
ggagaggtttgataaggttaggaga

SEQ ID NO: 41164 - DNA, 25 bp, Artificial
  Probe
agaaagacaaggatgaccaagaatg

SEQ ID NO: 41165 - DNA, 25 bp, Artificial
  Probe
actttggagaggtttgataaggtta

SEQ ID NO: 41166 - DNA, 25 bp, Artificial
  Probe
tggagaggtttgataaggttaggag

SEQ ID NO: 41167 - DNA, 25 bp, Artificial
  Probe
ctttggagaggtttgataaggttag

SEQ ID NO: 41168 - DNA, 25 bp, Artificial
  Probe
cactttggagaggtttgataaggtt

SEQ ID NO: 41169 - DNA, 25 bp, Artificial
  Probe
ggtttgataaggttaggagaagaaa

SEQ ID NO: 41170 - DNA, 25 bp, Artificial
  Probe
ttatgagcaatccagtatcccaaca

SEQ ID NO: 41171 - DNA, 25 bp, Artificial
  Probe
ctagaagaggctcaaacaccaaatt

SEQ ID NO: 41172 - DNA, 25 bp, Artificial
  Probe
atcaactcaaacaccttctacagag

SEQ ID NO: 41173 - DNA, 25 bp, Artificial
  Probe
tatgagcaatccagtatcccaacag

SEQ ID NO: 41174 - DNA, 25 bp, Artificial
  Probe
ctagaagtgccaattagcagaacat

SEQ ID NO: 41175 - DNA, 25 bp, Artificial
  Probe
actagaagaggctcaaacaccaaat

SEQ ID NO: 41176 - DNA, 25 bp, Artificial
  Probe
aaacactatggtatggtccgaacag

SEQ ID NO: 41177 - DNA, 25 bp, Artificial
  Probe
aactagaagaggctcaaacaccaaa

SEQ ID NO: 41178 - DNA, 25 bp, Artificial
  Probe
aaactagaagaggctcaaacaccaa

SEQ ID NO: 41179 - DNA, 25 bp, Artificial
  Probe
tagaagtgccaattagcagaacatg

SEQ ID NO: 41180 - DNA, 25 bp, Artificial
  Probe
acaccttctacagagtttactaaat

SEQ ID NO: 41181 - DNA, 25 bp, Artificial
  Probe
aacaccttctacagagtttactaaa

SEQ ID NO: 41182 - DNA, 25 bp, Artificial
  Probe
gaagtccttcgcactatagcagtag

SEQ ID NO: 41183 - DNA, 25 bp, Artificial
  Probe
caattagcagaacatggcaagtcct

SEQ ID NO: 41184 - DNA, 25 bp, Artificial
  Probe
tagaagaggctcaaacaccaaattt

SEQ ID NO: 41185 - DNA, 25 bp, Artificial
  Probe
tagcagtagtttaaagtccttacgt

SEQ ID NO: 41186 - DNA, 25 bp, Artificial
  Probe
agtagtttaaagtccttacgtcgtg

SEQ ID NO: 41187 - DNA, 25 bp, Artificial
  Probe
cagtagtttaaagtccttacgtcgt

SEQ ID NO: 41188 - DNA, 25 bp, Artificial
  Probe
agcagtagtttaaagtccttacgtc

SEQ ID NO: 41189 - DNA, 25 bp, Artificial
  Probe
atagcagtagtttaaagtccttacg

SEQ ID NO: 41190 - DNA, 25 bp, Artificial
  Probe
gtagtttaaagtccttacgtcgtgg

SEQ ID NO: 41191 - DNA, 25 bp, Artificial
  Probe
gaaagacaaggatgaccaagaatgg

SEQ ID NO: 41192 - DNA, 25 bp, Artificial
  Probe
tcaaacaccttctacagagtttact

SEQ ID NO: 41193 - DNA, 25 bp, Artificial
  Probe
tagtttaaagtccttacgtcgtggt

SEQ ID NO: 41194 - DNA, 25 bp, Artificial
  Probe
ctcaaacaccttctacagagtttac

SEQ ID NO: 41195 - DNA, 25 bp, Artificial
  Probe
gcagtagtttaaagtccttacgtcg

SEQ ID NO: 41196 - DNA, 25 bp, Artificial
  Probe
ttttatgagcaatccagtatcccaa

SEQ ID NO: 41197 - DNA, 25 bp, Artificial
  Probe
taggcttgtcacttcctgttcttat

SEQ ID NO: 41198 - DNA, 25 bp, Artificial
  Probe
ttgctgaaatgactgtgtggataat

SEQ ID NO: 41199 - DNA, 25 bp, Artificial
  Probe
ctaggcttgtcacttcctgttctta

SEQ ID NO: 41200 - DNA, 25 bp, Artificial
  Probe
aggcttgtcacttcctgttcttatt

SEQ ID NO: 41201 - DNA, 25 bp, Artificial
  Probe
gctgaaatgactgtgtggataattc

SEQ ID NO: 41202 - DNA, 25 bp, Artificial
  Probe
tgctgaaatgactgtgtggataatt

SEQ ID NO: 41203 - DNA, 25 bp, Artificial
  Probe
ggcttgtcacttcctgttcttattt

SEQ ID NO: 41204 - DNA, 25 bp, Artificial
  Probe
tatctcctacccttcctgtgtatga

SEQ ID NO: 41205 - DNA, 25 bp, Artificial
  Probe
gttgctgaaatgactgtgtggataa

SEQ ID NO: 41206 - DNA, 25 bp, Artificial
  Probe
gtgtatgaaggctctgaggaaagta

SEQ ID NO: 41207 - DNA, 25 bp, Artificial
  Probe
actattggagaacatctgtatctaa

SEQ ID NO: 41208 - DNA, 25 bp, Artificial
  Probe
ttactattggagaacatctgtatct

SEQ ID NO: 41209 - DNA, 25 bp, Artificial
  Probe
atctcctacccttcctgtgtatgaa

SEQ ID NO: 41210 - DNA, 25 bp, Artificial
  Probe
tgtatgaaggctctgaggaaagtac

SEQ ID NO: 41211 - DNA, 25 bp, Artificial
  Probe
gactgtagttgctgaaatgactgtg

SEQ ID NO: 41212 - DNA, 25 bp, Artificial
  Probe
ctgtagttgctgaaatgactgtgtg

SEQ ID NO: 41213 - DNA, 25 bp, Artificial
  Probe
agttgctgaaatgactgtgtggata

SEQ ID NO: 41214 - DNA, 25 bp, Artificial
  Probe
tagttgctgaaatgactgtgtggat

SEQ ID NO: 41215 - DNA, 25 bp, Artificial
  Probe
gtatgaaggctctgaggaaagtacc

SEQ ID NO: 41216 - DNA, 25 bp, Artificial
  Probe
ctgtgtatgaaggctctgaggaaag

SEQ ID NO: 41217 - DNA, 25 bp, Artificial
  Probe
actgtagttgctgaaatgactgtgt

SEQ ID NO: 41218 - DNA, 25 bp, Artificial
  Probe
tactattggagaacatctgtatcta

SEQ ID NO: 41219 - DNA, 25 bp, Artificial
  Probe
gcttgtcacttcctgttcttatttt

SEQ ID NO: 41220 - DNA, 25 bp, Artificial
  Probe
tgtgtatgaaggctctgaggaaagt

SEQ ID NO: 41221 - DNA, 25 bp, Artificial
  Probe
tatgaaggctctgaggaaagtacct

SEQ ID NO: 41222 - DNA, 25 bp, Artificial
  Probe
gtagttgctgaaatgactgtgtgga

SEQ ID NO: 41223 - DNA, 25 bp, Artificial
  Probe
ctgaaatgactgtgtggataattca

SEQ ID NO: 41224 - DNA, 25 bp, Artificial
  Probe
tgtagttgctgaaatgactgtgtgg

SEQ ID NO: 41225 - DNA, 25 bp, Artificial
  Probe
tgtcacttcctgttcttattttaga

SEQ ID NO: 41226 - DNA, 25 bp, Artificial
  Probe
ctattggagaacatctgtatctaaa

SEQ ID NO: 41227 - DNA, 25 bp, Artificial
  Probe
ttgtcacttcctgttcttattttag

SEQ ID NO: 41228 - DNA, 25 bp, Artificial
  Probe
cttgtcacttcctgttcttatttta

SEQ ID NO: 41229 - DNA, 25 bp, Artificial
  Probe
aggctctgaggaaagtacctttagg

SEQ ID NO: 41230 - DNA, 25 bp, Artificial
  Probe
cctgtgtatgaaggctctgaggaaa

SEQ ID NO: 41231 - DNA, 25 bp, Artificial
  Probe
tctcctacccttcctgtgtatgaag

SEQ ID NO: 41232 - DNA, 25 bp, Artificial
  Probe
tggagaacatctgtatctaaataaa

SEQ ID NO: 41233 - DNA, 25 bp, Artificial
  Probe
ttggagaacatctgtatctaaataa

SEQ ID NO: 41234 - DNA, 25 bp, Artificial
  Probe
aaggctctgaggaaagtacctttag

SEQ ID NO: 41235 - DNA, 25 bp, Artificial
  Probe
gaaggctctgaggaaagtaccttta

SEQ ID NO: 41236 - DNA, 25 bp, Artificial
  Probe
taatcagactgccccacagaactat

SEQ ID NO: 41237 - DNA, 25 bp, Artificial
  Probe
ataatcagactgccccacagaacta

SEQ ID NO: 41238 - DNA, 25 bp, Artificial
  Probe
tataatcagactgccccacagaact

SEQ ID NO: 41239 - DNA, 25 bp, Artificial
  Probe
ggctctgaggaaagtacctttaggt

SEQ ID NO: 41240 - DNA, 25 bp, Artificial
  Probe
attggagaacatctgtatctaaata

SEQ ID NO: 41241 - DNA, 25 bp, Artificial
  Probe
tattggagaacatctgtatctaaat

SEQ ID NO: 41242 - DNA, 25 bp, Artificial
  Probe
cacagtttgagatggacatttaagg

SEQ ID NO: 41243 - DNA, 25 bp, Artificial
  Probe
agtttgagatggacatttaagggac

SEQ ID NO: 41244 - DNA, 25 bp, Artificial
  Probe
cagtttgagatggacatttaaggga

SEQ ID NO: 41245 - DNA, 25 bp, Artificial
  Probe
ggaggaaccagaatcatctatgacc

SEQ ID NO: 41246 - DNA, 25 bp, Artificial
  Probe
acagtttgagatggacatttaaggg

SEQ ID NO: 41247 - DNA, 25 bp, Artificial
  Probe
gaggaaccagaatcatctatgaccg

SEQ ID NO: 41248 - DNA, 25 bp, Artificial
  Probe
tcacagtttgagatggacatttaag

SEQ ID NO: 41249 - DNA, 25 bp, Artificial
  Probe
gtttgagatggacatttaagggacc

SEQ ID NO: 41250 - DNA, 25 bp, Artificial
  Probe
agtcacagtttgagatggacattta

SEQ ID NO: 41251 - DNA, 25 bp, Artificial
  Probe
gtcacagtttgagatggacatttaa

SEQ ID NO: 41252 - DNA, 25 bp, Artificial
  Probe
gagtcacagtttgagatggacattt

SEQ ID NO: 41253 - DNA, 25 bp, Artificial
  Probe
agagtcacagtttgagatggacatt

SEQ ID NO: 41254 - DNA, 25 bp, Artificial
  Probe
aagagtcacagtttgagatggacat

SEQ ID NO: 41255 - DNA, 25 bp, Artificial
  Probe
gggaggaaccagaatcatctatgac

SEQ ID NO: 41256 - DNA, 25 bp, Artificial
  Probe
gaagagtcacagtttgagatggaca

SEQ ID NO: 41257 - DNA, 25 bp, Artificial
  Probe
tttgagatggacatttaagggacca

SEQ ID NO: 41258 - DNA, 25 bp, Artificial
  Probe
gaaccagaatcatctatgaccggaa

SEQ ID NO: 41259 - DNA, 25 bp, Artificial
  Probe
ttgagatggacatttaagggaccag

SEQ ID NO: 41260 - DNA, 25 bp, Artificial
  Probe
agtctgtcggaatgatctggcaatt

SEQ ID NO: 41261 - DNA, 25 bp, Artificial
  Probe
ccagaatcatctatgaccggaaatt

SEQ ID NO: 41262 - DNA, 25 bp, Artificial
  Probe
agaggaaataaaagccacatttacc

SEQ ID NO: 41263 - DNA, 25 bp, Artificial
  Probe
cgggaggaaccagaatcatctatga

SEQ ID NO: 41264 - DNA, 25 bp, Artificial
  Probe
gagtctgtcggaatgatctggcaat

SEQ ID NO: 41265 - DNA, 25 bp, Artificial
  Probe
tgagaggaaataaaagccacattta

SEQ ID NO: 41266 - DNA, 25 bp, Artificial
  Probe
accagaatcatctatgaccggaaat

SEQ ID NO: 41267 - DNA, 25 bp, Artificial
  Probe
gagaggaaataaaagccacatttac

SEQ ID NO: 41268 - DNA, 25 bp, Artificial
  Probe
aaccagaatcatctatgaccggaaa

SEQ ID NO: 41269 - DNA, 25 bp, Artificial
  Probe
aatcatctatgaccggaaattcctg

SEQ ID NO: 41270 - DNA, 25 bp, Artificial
  Probe
gaatcatctatgaccggaaattcct

SEQ ID NO: 41271 - DNA, 25 bp, Artificial
  Probe
agaatcatctatgaccggaaattcc

SEQ ID NO: 41272 - DNA, 25 bp, Artificial
  Probe
cagaatcatctatgaccggaaattc

SEQ ID NO: 41273 - DNA, 25 bp, Artificial
  Probe
tcatctatgaccggaaattcctgat

SEQ ID NO: 41274 - DNA, 25 bp, Artificial
  Probe
atcatctatgaccggaaattcctga

SEQ ID NO: 41275 - DNA, 25 bp, Artificial
  Probe
ggaaccagaatcatctatgaccgga

SEQ ID NO: 41276 - DNA, 25 bp, Artificial
  Probe
aggaaccagaatcatctatgaccgg

SEQ ID NO: 41277 - DNA, 25 bp, Artificial
  Probe
atctatgaccggaaattcctgatgg

SEQ ID NO: 41278 - DNA, 25 bp, Artificial
  Probe
ctatgaccggaaattcctgatggag

SEQ ID NO: 41279 - DNA, 25 bp, Artificial
  Probe
tgagatggacatttaagggaccagc

SEQ ID NO: 41280 - DNA, 25 bp, Artificial
  Probe
catctatgaccggaaattcctgatg

SEQ ID NO: 41281 - DNA, 25 bp, Artificial
  Probe
tctatgaccggaaattcctgatgga

SEQ ID NO: 41282 - DNA, 25 bp, Artificial
  Probe
tatgaccggaaattcctgatggagt

SEQ ID NO: 41283 - DNA, 25 bp, Artificial
  Probe
cagaggagtctgtcggaatgatctg

SEQ ID NO: 41284 - DNA, 25 bp, Artificial
  Probe
gagatggacatttaagggaccagcc

SEQ ID NO: 41285 - DNA, 25 bp, Artificial
  Probe
aattcctgatggagtgtcggaactc

SEQ ID NO: 41286 - DNA, 25 bp, Artificial
  Probe
ccgggaggaaccagaatcatctatg

SEQ ID NO: 41287 - DNA, 25 bp, Artificial
  Probe
ctaattcggataagagctagtgact

SEQ ID NO: 41288 - DNA, 25 bp, Artificial
  Probe
taattcggataagagctagtgactt

SEQ ID NO: 41289 - DNA, 25 bp, Artificial
  Probe
cccaagaaggacattatcaagtttc

SEQ ID NO: 41290 - DNA, 25 bp, Artificial
  Probe
cctgtaactccctttaagtctcaaa

SEQ ID NO: 41291 - DNA, 25 bp, Artificial
  Probe
gcccaagaaggacattatcaagttt

SEQ ID NO: 41292 - DNA, 25 bp, Artificial
  Probe
aaaccaaacaactaaagcattcttg

SEQ ID NO: 41293 - DNA, 25 bp, Artificial
  Probe
tagtagatattgactgaaaccacca

SEQ ID NO: 41294 - DNA, 25 bp, Artificial
  Probe
agtagatattgactgaaaccaccag

SEQ ID NO: 41295 - DNA, 25 bp, Artificial
  Probe
gcagaacataaattactgggaaaca

SEQ ID NO: 41296 - DNA, 25 bp, Artificial
  Probe
aaattactgggaaacataaagaacg

SEQ ID NO: 41297 - DNA, 25 bp, Artificial
  Probe
ctgtaactccctttaagtctcaaat

SEQ ID NO: 41298 - DNA, 25 bp, Artificial
  Probe
aagtaaagtatctgaacaggtgaaa

SEQ ID NO: 41299 - DNA, 25 bp, Artificial
  Probe
ccctgtaactccctttaagtctcaa

SEQ ID NO: 41300 - DNA, 25 bp, Artificial
  Probe
tgcccaagaaggacattatcaagtt

SEQ ID NO: 41301 - DNA, 25 bp, Artificial
  Probe
atgtaaagtattcaagagagctgct

SEQ ID NO: 41302 - DNA, 25 bp, Artificial
  Probe
ttagtagatattgactgaaaccacc

SEQ ID NO: 41303 - DNA, 25 bp, Artificial
  Probe
aattcggataagagctagtgacttt

SEQ ID NO: 41304 - DNA, 25 bp, Artificial
  Probe
tgtaaagtattcaagagagctgctt

SEQ ID NO: 41305 - DNA, 25 bp, Artificial
  Probe
attcggataagagctagtgactttg

SEQ ID NO: 41306 - DNA, 25 bp, Artificial
  Probe
ctgcccaagaaggacattatcaagt

SEQ ID NO: 41307 - DNA, 25 bp, Artificial
  Probe
tatgtaaagtattcaagagagctgc

SEQ ID NO: 41308 - DNA, 25 bp, Artificial
  Probe
taagtaaagtatctgaacaggtgaa

SEQ ID NO: 41309 - DNA, 25 bp, Artificial
  Probe
agcttgtttacttgatctcaacttt

SEQ ID NO: 41310 - DNA, 25 bp, Artificial
  Probe
tactgggaaacataaagaacgtagc

SEQ ID NO: 41311 - DNA, 25 bp, Artificial
  Probe
ataagtaaagtatctgaacaggtga

SEQ ID NO: 41312 - DNA, 25 bp, Artificial
  Probe
aattactgggaaacataaagaacgt

SEQ ID NO: 41313 - DNA, 25 bp, Artificial
  Probe
ttactgggaaacataaagaacgtag

SEQ ID NO: 41314 - DNA, 25 bp, Artificial
  Probe
tgtaactccctttaagtctcaaata

SEQ ID NO: 41315 - DNA, 25 bp, Artificial
  Probe
cagaacataaattactgggaaacat

SEQ ID NO: 41316 - DNA, 25 bp, Artificial
  Probe
aagaaggacattatcaagtttctgc

SEQ ID NO: 41317 - DNA, 25 bp, Artificial
  Probe
tgctaataaggaccatttggttact

SEQ ID NO: 41318 - DNA, 25 bp, Artificial
  Probe
actgctaataaggaccatttggtta

SEQ ID NO: 41319 - DNA, 25 bp, Artificial
  Probe
attactgggaaacataaagaacgta

SEQ ID NO: 41320 - DNA, 25 bp, Artificial
  Probe
ataagagctagtgactttgcccaaa

SEQ ID NO: 41321 - DNA, 25 bp, Artificial
  Probe
ctaataaggaccatttggttactgc

SEQ ID NO: 41322 - DNA, 25 bp, Artificial
  Probe
gctaataaggaccatttggttactg

SEQ ID NO: 41323 - DNA, 25 bp, Artificial
  Probe
ctgctaataaggaccatttggttac

SEQ ID NO: 41324 - DNA, 25 bp, Artificial
  Probe
tgcagaacataaattactgggaaac

SEQ ID NO: 41325 - DNA, 25 bp, Artificial
  Probe
tcttgcagaacataaattactggga

SEQ ID NO: 41326 - DNA, 25 bp, Artificial
  Probe
ccaagaaggacattatcaagtttct

SEQ ID NO: 41327 - DNA, 25 bp, Artificial
  Probe
gaaacaaaaccaaacaactaaagca

SEQ ID NO: 41328 - DNA, 25 bp, Artificial
  Probe
tgaaacaaaaccaaacaactaaagc

SEQ ID NO: 41329 - DNA, 25 bp, Artificial
  Probe
cttgcagaacataaattactgggaa

SEQ ID NO: 41330 - DNA, 25 bp, Artificial
  Probe
acaaaaccaaacaactaaagcattc

SEQ ID NO: 41331 - DNA, 25 bp, Artificial
  Probe
aacttttgagaaacataatcccctg

SEQ ID NO: 41332 - DNA, 25 bp, Artificial
  Probe
ccaggatgatatacgaggattacat

SEQ ID NO: 41333 - DNA, 25 bp, Artificial
  Probe
gccaggatgatatacgaggattaca

SEQ ID NO: 41334 - DNA, 25 bp, Artificial
  Probe
caggatgatatacgaggattacatt

SEQ ID NO: 41335 - DNA, 25 bp, Artificial
  Probe
ttaaagaaggagcagaacaagaaag

SEQ ID NO: 41336 - DNA, 25 bp, Artificial
  Probe
acttaaagaaggagcagaacaagaa

SEQ ID NO: 41337 - DNA, 25 bp, Artificial
  Probe
aagacttaaagaaggagcagaacaa

SEQ ID NO: 41338 - DNA, 25 bp, Artificial
  Probe
gaagtcttgtcctggtctcagaatt

SEQ ID NO: 41339 - DNA, 25 bp, Artificial
  Probe
cttaaagaaggagcagaacaagaaa

SEQ ID NO: 41340 - DNA, 25 bp, Artificial
  Probe
gacttaaagaaggagcagaacaaga

SEQ ID NO: 41341 - DNA, 25 bp, Artificial
  Probe
agacttaaagaaggagcagaacaag

SEQ ID NO: 41342 - DNA, 25 bp, Artificial
  Probe
gaagacttaaagaaggagcagaaca

SEQ ID NO: 41343 - DNA, 25 bp, Artificial
  Probe
tgaagacttaaagaaggagcagaac

SEQ ID NO: 41344 - DNA, 25 bp, Artificial
  Probe
gtgaagacttaaagaaggagcagaa

SEQ ID NO: 41345 - DNA, 25 bp, Artificial
  Probe
ccagctccacttctgaatcttaatt

SEQ ID NO: 41346 - DNA, 25 bp, Artificial
  Probe
taaagaaggagcagaacaagaaagc

SEQ ID NO: 41347 - DNA, 25 bp, Artificial
  Probe
tgtgaagacttaaagaaggagcaga

SEQ ID NO: 41348 - DNA, 25 bp, Artificial
  Probe
ggattacatttctatactgtcaccg

SEQ ID NO: 41349 - DNA, 25 bp, Artificial
  Probe
ctcactgtcaggaatgaagaaagag

SEQ ID NO: 41350 - DNA, 25 bp, Artificial
  Probe
aatacagcgaggagaacctactctt

SEQ ID NO: 41351 - DNA, 25 bp, Artificial
  Probe
tcaggaatgaagaaagaggagactc

SEQ ID NO: 41352 - DNA, 25 bp, Artificial
  Probe
ctgtcaggaatgaagaaagaggaga

SEQ ID NO: 41353 - DNA, 25 bp, Artificial
  Probe
ctgtgaagacttaaagaaggagcag

SEQ ID NO: 41354 - DNA, 25 bp, Artificial
  Probe
tgaagtcttgtcctggtctcagaat

SEQ ID NO: 41355 - DNA, 25 bp, Artificial
  Probe
atgaagtcttgtcctggtctcagaa

SEQ ID NO: 41356 - DNA, 25 bp, Artificial
  Probe
aacagaatacagcgaggagaaccta

SEQ ID NO: 41357 - DNA, 25 bp, Artificial
  Probe
actgtcaggaatgaagaaagaggag

SEQ ID NO: 41358 - DNA, 25 bp, Artificial
  Probe
gattacatttctatactgtcaccga

SEQ ID NO: 41359 - DNA, 25 bp, Artificial
  Probe
atacagcgaggagaacctactcttc

SEQ ID NO: 41360 - DNA, 25 bp, Artificial
  Probe
gaatacagcgaggagaacctactct

SEQ ID NO: 41361 - DNA, 25 bp, Artificial
  Probe
agaatacagcgaggagaacctactc

SEQ ID NO: 41362 - DNA, 25 bp, Artificial
  Probe
gtcaggaatgaagaaagaggagact

SEQ ID NO: 41363 - DNA, 25 bp, Artificial
  Probe
gattcttgaactcgcagatctacaa

SEQ ID NO: 41364 - DNA, 25 bp, Artificial
  Probe
aagtcttgtcctggtctcagaattt

SEQ ID NO: 41365 - DNA, 25 bp, Artificial
  Probe
cactgtcaggaatgaagaaagagga

SEQ ID NO: 41366 - DNA, 25 bp, Artificial
  Probe
tcactgtcaggaatgaagaaagagg

SEQ ID NO: 41367 - DNA, 25 bp, Artificial
  Probe
cgaggattacatttctatactgtca

SEQ ID NO: 41368 - DNA, 25 bp, Artificial
  Probe
acgaggattacatttctatactgtc

SEQ ID NO: 41369 - DNA, 25 bp, Artificial
  Probe
tgtcaggaatgaagaaagaggagac

SEQ ID NO: 41370 - DNA, 25 bp, Artificial
  Probe
aggattacatttctatactgtcacc

SEQ ID NO: 41371 - DNA, 25 bp, Artificial
  Probe
gatgaagtcttgtcctggtctcaga

SEQ ID NO: 41372 - DNA, 25 bp, Artificial
  Probe
agatgaagtcttgtcctggtctcag

SEQ ID NO: 41373 - DNA, 25 bp, Artificial
  Probe
cagaatacagcgaggagaacctact

SEQ ID NO: 41374 - DNA, 25 bp, Artificial
  Probe
attacatttctatactgtcaccgaa

SEQ ID NO: 41375 - DNA, 25 bp, Artificial
  Probe
aggatgatatacgaggattacattt

SEQ ID NO: 41376 - DNA, 25 bp, Artificial
  Probe
atttctatactgtcaccgaaagagg

SEQ ID NO: 41377 - DNA, 25 bp, Artificial
  Probe
cttacgatatggcttggactctgat

SEQ ID NO: 41378 - DNA, 25 bp, Artificial
  Probe
agaacttgaccatgatagaggagag

SEQ ID NO: 41379 - DNA, 25 bp, Artificial
  Probe
atcttacgatatggcttggactctg

SEQ ID NO: 41380 - DNA, 25 bp, Artificial
  Probe
catcttacgatatggcttggactct

SEQ ID NO: 41381 - DNA, 25 bp, Artificial
  Probe
cagaacttgaccatgatagaggaga

SEQ ID NO: 41382 - DNA, 25 bp, Artificial
  Probe
ttacgatatggcttggactctgatc

SEQ ID NO: 41383 - DNA, 25 bp, Artificial
  Probe
gatatggcttggactctgatctcaa

SEQ ID NO: 41384 - DNA, 25 bp, Artificial
  Probe
ccagaacttgaccatgatagaggag

SEQ ID NO: 41385 - DNA, 25 bp, Artificial
  Probe
tcttacgatatggcttggactctga

SEQ ID NO: 41386 - DNA, 25 bp, Artificial
  Probe
atatggcttggactctgatctcaac

SEQ ID NO: 41387 - DNA, 25 bp, Artificial
  Probe
gaacttgaccatgatagaggagagc

SEQ ID NO: 41388 - DNA, 25 bp, Artificial
  Probe
tacgatatggcttggactctgatct

SEQ ID NO: 41389 - DNA, 25 bp, Artificial
  Probe
gagaactgaagactatccaagctgt

SEQ ID NO: 41390 - DNA, 25 bp, Artificial
  Probe
agaactgaagactatccaagctgtg

SEQ ID NO: 41391 - DNA, 25 bp, Artificial
  Probe
gactgattacacattccaggaaggt

SEQ ID NO: 41392 - DNA, 25 bp, Artificial
  Probe
aggactgattacacattccaggaag

SEQ ID NO: 41393 - DNA, 25 bp, Artificial
  Probe
gaggactgattacacattccaggaa

SEQ ID NO: 41394 - DNA, 25 bp, Artificial
  Probe
tatggcttggactctgatctcaact

SEQ ID NO: 41395 - DNA, 25 bp, Artificial
  Probe
actgattacacattccaggaaggtg

SEQ ID NO: 41396 - DNA, 25 bp, Artificial
  Probe
cgagaactgaagactatccaagctg

SEQ ID NO: 41397 - DNA, 25 bp, Artificial
  Probe
aacttgaccatgatagaggagagcc

SEQ ID NO: 41398 - DNA, 25 bp, Artificial
  Probe
cgatatggcttggactctgatctca

SEQ ID NO: 41399 - DNA, 25 bp, Artificial
  Probe
acgatatggcttggactctgatctc

SEQ ID NO: 41400 - DNA, 25 bp, Artificial
  Probe
ggactgattacacattccaggaagg

SEQ ID NO: 41401 - DNA, 25 bp, Artificial
  Probe
gacccagaacttgaccatgatagag

SEQ ID NO: 41402 - DNA, 25 bp, Artificial
  Probe
gactctgatctcaactgcaagattg

SEQ ID NO: 41403 - DNA, 25 bp, Artificial
  Probe
ggaggactgattacacattccagga

SEQ ID NO: 41404 - DNA, 25 bp, Artificial
  Probe
ctgattacacattccaggaaggtgg

SEQ ID NO: 41405 - DNA, 25 bp, Artificial
  Probe
tagcttcaatgtagcctctgcaata

SEQ ID NO: 41406 - DNA, 25 bp, Artificial
  Probe
gaactgaagactatccaagctgtgc

SEQ ID NO: 41407 - DNA, 25 bp, Artificial
  Probe
gtgacccagaacttgaccatgatag

SEQ ID NO: 41408 - DNA, 25 bp, Artificial
  Probe
tgacccagaacttgaccatgataga

SEQ ID NO: 41409 - DNA, 25 bp, Artificial
  Probe
ccgagaactgaagactatccaagct

SEQ ID NO: 41410 - DNA, 25 bp, Artificial
  Probe
atagcttcaatgtagcctctgcaat

SEQ ID NO: 41411 - DNA, 25 bp, Artificial
  Probe
ggactctgatctcaactgcaagatt

SEQ ID NO: 41412 - DNA, 25 bp, Artificial
  Probe
cccagaacttgaccatgatagagga

SEQ ID NO: 41413 - DNA, 25 bp, Artificial
  Probe
atggcttggactctgatctcaactg

SEQ ID NO: 41414 - DNA, 25 bp, Artificial
  Probe
agcttcaatgtagcctctgcaataa

SEQ ID NO: 41415 - DNA, 25 bp, Artificial
  Probe
ttggactctgatctcaactgcaaga

SEQ ID NO: 41416 - DNA, 25 bp, Artificial
  Probe
acccagaacttgaccatgatagagg

SEQ ID NO: 41417 - DNA, 25 bp, Artificial
  Probe
gatagcttcaatgtagcctctgcaa

SEQ ID NO: 41418 - DNA, 25 bp, Artificial
  Probe
gggagggaggactgattacacattc

SEQ ID NO: 41419 - DNA, 25 bp, Artificial
  Probe
acttgaccatgatagaggagagcct

SEQ ID NO: 41420 - DNA, 25 bp, Artificial
  Probe
agggaggactgattacacattccag

SEQ ID NO: 41421 - DNA, 25 bp, Artificial
  Probe
gagggaggactgattacacattcca

SEQ ID NO: 41422 - DNA, 25 bp, Artificial
  Probe
gaatgaggctcctggattgtctatc

SEQ ID NO: 41423 - DNA, 25 bp, Artificial
  Probe
ggtattaccaacagaggtgaatgaa

SEQ ID NO: 41424 - DNA, 25 bp, Artificial
  Probe
aggtattaccaacagaggtgaatga

SEQ ID NO: 41425 - DNA, 25 bp, Artificial
  Probe
caggtattaccaacagaggtgaatg

SEQ ID NO: 41426 - DNA, 25 bp, Artificial
  Probe
tttatcacttcctcgttctttgact

SEQ ID NO: 41427 - DNA, 25 bp, Artificial
  Probe
ttatcacttcctcgttctttgactc

SEQ ID NO: 41428 - DNA, 25 bp, Artificial
  Probe
aagcacaagtgagtctttaacagag

SEQ ID NO: 41429 - DNA, 25 bp, Artificial
  Probe
aaacctagacccaagagtgaaattg

SEQ ID NO: 41430 - DNA, 25 bp, Artificial
  Probe
caagcacaagtgagtctttaacaga

SEQ ID NO: 41431 - DNA, 25 bp, Artificial
  Probe
ccaggtattaccaacagaggtgaat

SEQ ID NO: 41432 - DNA, 25 bp, Artificial
  Probe
cctagacccaagagtgaaattgttg

SEQ ID NO: 41433 - DNA, 25 bp, Artificial
  Probe
acctagacccaagagtgaaattgtt

SEQ ID NO: 41434 - DNA, 25 bp, Artificial
  Probe
aacctagacccaagagtgaaattgt

SEQ ID NO: 41435 - DNA, 25 bp, Artificial
  Probe
tgaggccgaatctgaataatagaat

SEQ ID NO: 41436 - DNA, 25 bp, Artificial
  Probe
atgaggccgaatctgaataatagaa

SEQ ID NO: 41437 - DNA, 25 bp, Artificial
  Probe
aatgaggccgaatctgaataataga

SEQ ID NO: 41438 - DNA, 25 bp, Artificial
  Probe
tatcacttcctcgttctttgactcc

SEQ ID NO: 41439 - DNA, 25 bp, Artificial
  Probe
agcacaagtgagtctttaacagagt

SEQ ID NO: 41440 - DNA, 25 bp, Artificial
  Probe
ccaagcacaagtgagtctttaacag

SEQ ID NO: 41441 - DNA, 25 bp, Artificial
  Probe
aacaaccaggtattaccaacagagg

SEQ ID NO: 41442 - DNA, 25 bp, Artificial
  Probe
ctagacccaagagtgaaattgttgc

SEQ ID NO: 41443 - DNA, 25 bp, Artificial
  Probe
gaggccgaatctgaataatagaatt

SEQ ID NO: 41444 - DNA, 25 bp, Artificial
  Probe
gtattaccaacagaggtgaatgaaa

SEQ ID NO: 41445 - DNA, 25 bp, Artificial
  Probe
taatgaggccgaatctgaataatag

SEQ ID NO: 41446 - DNA, 25 bp, Artificial
  Probe
caaggtacaaacaaccaggtattac

SEQ ID NO: 41447 - DNA, 25 bp, Artificial
  Probe
cacttcctcgttctttgactccttt

SEQ ID NO: 41448 - DNA, 25 bp, Artificial
  Probe
attaatgaggccgaatctgaataat

SEQ ID NO: 41449 - DNA, 25 bp, Artificial
  Probe
gtacaaacaaccaggtattaccaac

SEQ ID NO: 41450 - DNA, 25 bp, Artificial
  Probe
tacaaacaaccaggtattaccaaca

SEQ ID NO: 41451 - DNA, 25 bp, Artificial
  Probe
cagcatccagttcatgttgaagatt

SEQ ID NO: 41452 - DNA, 25 bp, Artificial
  Probe
gcacaagtgagtctttaacagagtg

SEQ ID NO: 41453 - DNA, 25 bp, Artificial
  Probe
aaacaaccaggtattaccaacagag

SEQ ID NO: 41454 - DNA, 25 bp, Artificial
  Probe
ttaatgaggccgaatctgaataata

SEQ ID NO: 41455 - DNA, 25 bp, Artificial
  Probe
gcaaggtacaaacaaccaggtatta

SEQ ID NO: 41456 - DNA, 25 bp, Artificial
  Probe
caaccaggtattaccaacagaggtg

SEQ ID NO: 41457 - DNA, 25 bp, Artificial
  Probe
caaacaaccaggtattaccaacaga

SEQ ID NO: 41458 - DNA, 25 bp, Artificial
  Probe
accaggtattaccaacagaggtgaa

SEQ ID NO: 41459 - DNA, 25 bp, Artificial
  Probe
aaccaggtattaccaacagaggtga

SEQ ID NO: 41460 - DNA, 25 bp, Artificial
  Probe
tattaatgaggccgaatctgaataa

SEQ ID NO: 41461 - DNA, 25 bp, Artificial
  Probe
ttattaatgaggccgaatctgaata

SEQ ID NO: 41462 - DNA, 25 bp, Artificial
  Probe
acaaacaaccaggtattaccaacag

SEQ ID NO: 41463 - DNA, 25 bp, Artificial
  Probe
ggaatgaggctcctggattgtctat

SEQ ID NO: 41464 - DNA, 25 bp, Artificial
  Probe
acaaccaggtattaccaacagaggt

SEQ ID NO: 41465 - DNA, 25 bp, Artificial
  Probe
aaaacctagacccaagagtgaaatt

SEQ ID NO: 41466 - DNA, 25 bp, Artificial
  Probe
catccagttcatgttgaagatttca

SEQ ID NO: 41467 - DNA, 25 bp, Artificial
  Probe
tacattagcatcttctactcaagcg

SEQ ID NO: 41468 - DNA, 25 bp, Artificial
  Probe
ctacattagcatcttctactcaagc

SEQ ID NO: 41469 - DNA, 25 bp, Artificial
  Probe
cattagcatcttctactcaagcgtt

SEQ ID NO: 41470 - DNA, 25 bp, Artificial
  Probe
attagcatcttctactcaagcgttg

SEQ ID NO: 41471 - DNA, 25 bp, Artificial
  Probe
ctggacattatctacattagcatct

SEQ ID NO: 41472 - DNA, 25 bp, Artificial
  Probe
acattagcatcttctactcaagcgt

SEQ ID NO: 41473 - DNA, 25 bp, Artificial
  Probe
tggacattatctacattagcatctt

SEQ ID NO: 41474 - DNA, 25 bp, Artificial
  Probe
tctacattagcatcttctactcaag

SEQ ID NO: 41475 - DNA, 25 bp, Artificial
  Probe
ggaacatagtgcctaccagacaatt

SEQ ID NO: 41476 - DNA, 25 bp, Artificial
  Probe
ggacattatctacattagcatcttc

SEQ ID NO: 41477 - DNA, 25 bp, Artificial
  Probe
atctacattagcatcttctactcaa

SEQ ID NO: 41478 - DNA, 25 bp, Artificial
  Probe
caccttctttactggacctacaatg

SEQ ID NO: 41479 - DNA, 25 bp, Artificial
  Probe
tcaccttctttactggacctacaat

SEQ ID NO: 41480 - DNA, 25 bp, Artificial
  Probe
accttctttactggacctacaatgg

SEQ ID NO: 41481 - DNA, 25 bp, Artificial
  Probe
tatctacattagcatcttctactca

SEQ ID NO: 41482 - DNA, 25 bp, Artificial
  Probe
ttcttcggaccttctcaggaacata

SEQ ID NO: 41483 - DNA, 25 bp, Artificial
  Probe
gacattatctacattagcatcttct

SEQ ID NO: 41484 - DNA, 25 bp, Artificial
  Probe
ccttctttactggacctacaatggg

SEQ ID NO: 41485 - DNA, 25 bp, Artificial
  Probe
cttgtcaccttctttactggaccta

SEQ ID NO: 41486 - DNA, 25 bp, Artificial
  Probe
gatgcttgtcaccttctttactgga

SEQ ID NO: 41487 - DNA, 25 bp, Artificial
  Probe
aggaacatagtgcctaccagacaat

SEQ ID NO: 41488 - DNA, 25 bp, Artificial
  Probe
gtcaccttctttactggacctacaa

SEQ ID NO: 41489 - DNA, 25 bp, Artificial
  Probe
ttgtcaccttctttactggacctac

SEQ ID NO: 41490 - DNA, 25 bp, Artificial
  Probe
gaccttctcaggaacatagtgccta

SEQ ID NO: 41491 - DNA, 25 bp, Artificial
  Probe
tcttcggaccttctcaggaacatag

SEQ ID NO: 41492 - DNA, 25 bp, Artificial
  Probe
gaacatagtgcctaccagacaattg

SEQ ID NO: 41493 - DNA, 25 bp, Artificial
  Probe
aacatagtgcctaccagacaattga

SEQ ID NO: 41494 - DNA, 25 bp, Artificial
  Probe
ttctcaggaacatagtgcctaccag

SEQ ID NO: 41495 - DNA, 25 bp, Artificial
  Probe
cttctcaggaacatagtgcctacca

SEQ ID NO: 41496 - DNA, 25 bp, Artificial
  Probe
accttctcaggaacatagtgcctac

SEQ ID NO: 41497 - DNA, 25 bp, Artificial
  Probe
cttcggaccttctcaggaacatagt

SEQ ID NO: 41498 - DNA, 25 bp, Artificial
  Probe
ttcggaccttctcaggaacatagtg

SEQ ID NO: 41499 - DNA, 25 bp, Artificial
  Probe
acatagtgcctaccagacaattgac

SEQ ID NO: 41500 - DNA, 25 bp, Artificial
  Probe
tgtcaccttctttactggacctaca

SEQ ID NO: 41501 - DNA, 25 bp, Artificial
  Probe
ggatgcttgtcaccttctttactgg

SEQ ID NO: 41502 - DNA, 25 bp, Artificial
  Probe
aggatgcttgtcaccttctttactg

SEQ ID NO: 41503 - DNA, 25 bp, Artificial
  Probe
caggatgcttgtcaccttctttact

SEQ ID NO: 41504 - DNA, 25 bp, Artificial
  Probe
ttatctacattagcatcttctactc

SEQ ID NO: 41505 - DNA, 25 bp, Artificial
  Probe
atgcttgtcaccttctttactggac

SEQ ID NO: 41506 - DNA, 25 bp, Artificial
  Probe
catagtgcctaccagacaattgact

SEQ ID NO: 41507 - DNA, 25 bp, Artificial
  Probe
caggaacatagtgcctaccagacaa

SEQ ID NO: 41508 - DNA, 25 bp, Artificial
  Probe
ctcaggaacatagtgcctaccagac

SEQ ID NO: 41509 - DNA, 25 bp, Artificial
  Probe
ccttctcaggaacatagtgcctacc

SEQ ID NO: 41510 - DNA, 25 bp, Artificial
  Probe
cctccattcaagacacctgttaacc

SEQ ID NO: 41511 - DNA, 25 bp, Artificial
  Probe
gatttcttcggaccttctcaggaac

SEQ ID NO: 41512 - DNA, 25 bp, Artificial
  Probe
gctaaagagagagagacagagaaat

SEQ ID NO: 41513 - DNA, 25 bp, Artificial
  Probe
tcacccgagactttattctttgaag

SEQ ID NO: 41514 - DNA, 25 bp, Artificial
  Probe
gagttagttgagttatttcctcgtg

SEQ ID NO: 41515 - DNA, 25 bp, Artificial
  Probe
gagagacagagaaatatatagcggt

SEQ ID NO: 41516 - DNA, 25 bp, Artificial
  Probe
cagagaaaggatgaaggaactcaaa

SEQ ID NO: 41517 - DNA, 25 bp, Artificial
  Probe
ctcacccgagactttattctttgaa

SEQ ID NO: 41518 - DNA, 25 bp, Artificial
  Probe
gacagagaaatatatagcggtatgc

SEQ ID NO: 41519 - DNA, 25 bp, Artificial
  Probe
agagagacagagaaatatatagcgg

SEQ ID NO: 41520 - DNA, 25 bp, Artificial
  Probe
gaacagagaaaggatgaaggaactc

SEQ ID NO: 41521 - DNA, 25 bp, Artificial
  Probe
ggaacagagaaaggatgaaggaact

SEQ ID NO: 41522 - DNA, 25 bp, Artificial
  Probe
acagagaaaggatgaaggaactcaa

SEQ ID NO: 41523 - DNA, 25 bp, Artificial
  Probe
aacagagaaaggatgaaggaactca

SEQ ID NO: 41524 - DNA, 25 bp, Artificial
  Probe
ggagttagttgagttatttcctcgt

SEQ ID NO: 41525 - DNA, 25 bp, Artificial
  Probe
tggagttagttgagttatttcctcg

SEQ ID NO: 41526 - DNA, 25 bp, Artificial
  Probe
agctaaagagagagagacagagaaa

SEQ ID NO: 41527 - DNA, 25 bp, Artificial
  Probe
caagatttccctccaagtgactttc

SEQ ID NO: 41528 - DNA, 25 bp, Artificial
  Probe
agagacagagaaatatatagcggta

SEQ ID NO: 41529 - DNA, 25 bp, Artificial
  Probe
gagctaaagagagagagacagagaa

SEQ ID NO: 41530 - DNA, 25 bp, Artificial
  Probe
gagagagacagagaaatatatagcg

SEQ ID NO: 41531 - DNA, 25 bp, Artificial
  Probe
cctcacccgagactttattctttga

SEQ ID NO: 41532 - DNA, 25 bp, Artificial
  Probe
gacctcacccgagactttattcttt

SEQ ID NO: 41533 - DNA, 25 bp, Artificial
  Probe
acagagaaatatatagcggtatgca

SEQ ID NO: 41534 - DNA, 25 bp, Artificial
  Probe
ttggagttagttgagttatttcctc

SEQ ID NO: 41535 - DNA, 25 bp, Artificial
  Probe
acaagatttccctccaagtgacttt

SEQ ID NO: 41536 - DNA, 25 bp, Artificial
  Probe
agacagagaaatatatagcggtatg

SEQ ID NO: 41537 - DNA, 25 bp, Artificial
  Probe
acctcacccgagactttattctttg

SEQ ID NO: 41538 - DNA, 25 bp, Artificial
  Probe
gggaacagagaaaggatgaaggaac

SEQ ID NO: 41539 - DNA, 25 bp, Artificial
  Probe
cagagaaatatatagcggtatgcaa

SEQ ID NO: 41540 - DNA, 25 bp, Artificial
  Probe
gagacagagaaatatatagcggtat

SEQ ID NO: 41541 - DNA, 25 bp, Artificial
  Probe
ctcaaagttcctttctgtaccaatg

SEQ ID NO: 41542 - DNA, 25 bp, Artificial
  Probe
aaagaatttcgggtaaagaggacgg

SEQ ID NO: 41543 - DNA, 25 bp, Artificial
  Probe
gacaagatttccctccaagtgactt

SEQ ID NO: 41544 - DNA, 25 bp, Artificial
  Probe
ttgacaagatttccctccaagtgac

SEQ ID NO: 41545 - DNA, 25 bp, Artificial
  Probe
ctaaagagagagagacagagaaata

SEQ ID NO: 41546 - DNA, 25 bp, Artificial
  Probe
attggagttagttgagttatttcct

SEQ ID NO: 41547 - DNA, 25 bp, Artificial
  Probe
aaagttcctttctgtaccaatggac

SEQ ID NO: 41548 - DNA, 25 bp, Artificial
  Probe
caaagttcctttctgtaccaatgga

SEQ ID NO: 41549 - DNA, 25 bp, Artificial
  Probe
tcaaagttcctttctgtaccaatgg

SEQ ID NO: 41550 - DNA, 25 bp, Artificial
  Probe
ggagctaaagagagagagacagaga

SEQ ID NO: 41551 - DNA, 25 bp, Artificial
  Probe
gctcaaagttcctttctgtaccaat

SEQ ID NO: 41552 - DNA, 25 bp, Artificial
  Probe
aagatttccctccaagtgactttcg

SEQ ID NO: 41553 - DNA, 25 bp, Artificial
  Probe
agagaaatatatagcggtatgcaaa

SEQ ID NO: 41554 - DNA, 25 bp, Artificial
  Probe
aagaaaacaaaattactcactgcgt

SEQ ID NO: 41555 - DNA, 25 bp, Artificial
  Probe
caaaagaatttcgggtaaagaggac

SEQ ID NO: 41556 - DNA, 25 bp, Artificial
  Probe
tcaaaagaatttcgggtaaagagga

SEQ ID NO: 41557 - DNA, 25 bp, Artificial
  Probe
aacaggaccaggctaactctaattc

SEQ ID NO: 41558 - DNA, 25 bp, Artificial
  Probe
gaccaggctaactctaattccacaa

SEQ ID NO: 41559 - DNA, 25 bp, Artificial
  Probe
caacaggaccaggctaactctaatt

SEQ ID NO: 41560 - DNA, 25 bp, Artificial
  Probe
accaggctaactctaattccacaac

SEQ ID NO: 41561 - DNA, 25 bp, Artificial
  Probe
ctaactctaattccacaacccaaga

SEQ ID NO: 41562 - DNA, 25 bp, Artificial
  Probe
taactctaattccacaacccaagac

SEQ ID NO: 41563 - DNA, 25 bp, Artificial
  Probe
ccaggctaactctaattccacaacc

SEQ ID NO: 41564 - DNA, 25 bp, Artificial
  Probe
gctaactctaattccacaacccaag

SEQ ID NO: 41565 - DNA, 25 bp, Artificial
  Probe
aatacagtcacaaggacatggtagc

SEQ ID NO: 41566 - DNA, 25 bp, Artificial
  Probe
ccaacaggaccaggctaactctaat

SEQ ID NO: 41567 - DNA, 25 bp, Artificial
  Probe
aaatacagtcacaaggacatggtag

SEQ ID NO: 41568 - DNA, 25 bp, Artificial
  Probe
caaatacagtcacaaggacatggta

SEQ ID NO: 41569 - DNA, 25 bp, Artificial
  Probe
ggctaactctaattccacaacccaa

SEQ ID NO: 41570 - DNA, 25 bp, Artificial
  Probe
aactctaattccacaacccaagacc

SEQ ID NO: 41571 - DNA, 25 bp, Artificial
  Probe
ctaattccacaacccaagaccctac

SEQ ID NO: 41572 - DNA, 25 bp, Artificial
  Probe
tctaattccacaacccaagacccta

SEQ ID NO: 41573 - DNA, 25 bp, Artificial
  Probe
caggctaactctaattccacaaccc

SEQ ID NO: 41574 - DNA, 25 bp, Artificial
  Probe
aggaccaggctaactctaattccac

SEQ ID NO: 41575 - DNA, 25 bp, Artificial
  Probe
caggaccaggctaactctaattcca

SEQ ID NO: 41576 - DNA, 25 bp, Artificial
  Probe
acaggaccaggctaactctaattcc

SEQ ID NO: 41577 - DNA, 25 bp, Artificial
  Probe
aggctaactctaattccacaaccca

SEQ ID NO: 41578 - DNA, 25 bp, Artificial
  Probe
atacagtcacaaggacatggtagct

SEQ ID NO: 41579 - DNA, 25 bp, Artificial
  Probe
ggaccaggctaactctaattccaca

SEQ ID NO: 41580 - DNA, 25 bp, Artificial
  Probe
taattccacaacccaagaccctacc

SEQ ID NO: 41581 - DNA, 25 bp, Artificial
  Probe
ctgcaaatacagtcacaaggacatg

SEQ ID NO: 41582 - DNA, 25 bp, Artificial
  Probe
ctctaattccacaacccaagaccct

SEQ ID NO: 41583 - DNA, 25 bp, Artificial
  Probe
tacagtcacaaggacatggtagctg

SEQ ID NO: 41584 - DNA, 25 bp, Artificial
  Probe
actctaattccacaacccaagaccc

SEQ ID NO: 41585 - DNA, 25 bp, Artificial
  Probe
gcaaatacagtcacaaggacatggt

SEQ ID NO: 41586 - DNA, 25 bp, Artificial
  Probe
tttgcactttggctccctgttattt

SEQ ID NO: 41587 - DNA, 25 bp, Artificial
  Probe
tgcaaatacagtcacaaggacatgg

SEQ ID NO: 41588 - DNA, 25 bp, Artificial
  Probe
gtttgcactttggctccctgttatt

SEQ ID NO: 41589 - DNA, 25 bp, Artificial
  Probe
cagtcacaaggacatggtagctgag

SEQ ID NO: 41590 - DNA, 25 bp, Artificial
  Probe
gctgcaaatacagtcacaaggacat

SEQ ID NO: 41591 - DNA, 25 bp, Artificial
  Probe
cttcctactctgtgtgggaggttct

SEQ ID NO: 41592 - DNA, 25 bp, Artificial
  Probe
ttgcactttggctccctgttatttt

SEQ ID NO: 41593 - DNA, 25 bp, Artificial
  Probe
agtttgcactttggctccctgttat

SEQ ID NO: 41594 - DNA, 25 bp, Artificial
  Probe
gactcttcttcctctgtaacatacg

SEQ ID NO: 41595 - DNA, 25 bp, Artificial
  Probe
ttgccttgtcattatggttccttac

SEQ ID NO: 41596 - DNA, 25 bp, Artificial
  Probe
ggactcttcttcctctgtaacatac

SEQ ID NO: 41597 - DNA, 25 bp, Artificial
  Probe
ctcttcttcctctgtaacatacgtg

SEQ ID NO: 41598 - DNA, 25 bp, Artificial
  Probe
tgtattccgtatttctgtcctgttc

SEQ ID NO: 41599 - DNA, 25 bp, Artificial
  Probe
ctgtattccgtatttctgtcctgtt

SEQ ID NO: 41600 - DNA, 25 bp, Artificial
  Probe
cttcgtggtgactggtttaactata

SEQ ID NO: 41601 - DNA, 25 bp, Artificial
  Probe
tttgccttgtcattatggttcctta

SEQ ID NO: 41602 - DNA, 25 bp, Artificial
  Probe
cgtggtgactggtttaactatacat

SEQ ID NO: 41603 - DNA, 25 bp, Artificial
  Probe
ttcgtggtgactggtttaactatac

SEQ ID NO: 41604 - DNA, 25 bp, Artificial
  Probe
actcttcttcctctgtaacatacgt

SEQ ID NO: 41605 - DNA, 25 bp, Artificial
  Probe
gtattccgtatttctgtcctgttcg

SEQ ID NO: 41606 - DNA, 25 bp, Artificial
  Probe
tcgtggtgactggtttaactataca

SEQ ID NO: 41607 - DNA, 25 bp, Artificial
  Probe
cctaacaattaacgaagtaatgtga

SEQ ID NO: 41608 - DNA, 25 bp, Artificial
  Probe
tcctctgtaacatacgtgtgaatag

SEQ ID NO: 41609 - DNA, 25 bp, Artificial
  Probe
acgaagtaatgtgaaatgtttctcc

SEQ ID NO: 41610 - DNA, 25 bp, Artificial
  Probe
gaagtaatgtgaaatgtttctcccg

SEQ ID NO: 41611 - DNA, 25 bp, Artificial
  Probe
cgaagtaatgtgaaatgtttctccc

SEQ ID NO: 41612 - DNA, 25 bp, Artificial
  Probe
ttcctctgtaacatacgtgtgaata

SEQ ID NO: 41613 - DNA, 25 bp, Artificial
  Probe
cttcctctgtaacatacgtgtgaat

SEQ ID NO: 41614 - DNA, 25 bp, Artificial
  Probe
aagtaatgtgaaatgtttctcccga

SEQ ID NO: 41615 - DNA, 25 bp, Artificial
  Probe
ctttgccttgtcattatggttcctt

SEQ ID NO: 41616 - DNA, 25 bp, Artificial
  Probe
gtttgttctctgatgcttgtcaatg

SEQ ID NO: 41617 - DNA, 25 bp, Artificial
  Probe
ctgtaacatacgtgtgaatagccaa

SEQ ID NO: 41618 - DNA, 25 bp, Artificial
  Probe
cttcttcctctgtaacatacgtgtg

SEQ ID NO: 41619 - DNA, 25 bp, Artificial
  Probe
tcttcttcctctgtaacatacgtgt

SEQ ID NO: 41620 - DNA, 25 bp, Artificial
  Probe
gtggtgactggtttaactatacata

SEQ ID NO: 41621 - DNA, 25 bp, Artificial
  Probe
agtaatgtgaaatgtttctcccgac

SEQ ID NO: 41622 - DNA, 25 bp, Artificial
  Probe
ctctgtaacatacgtgtgaatagcc

SEQ ID NO: 41623 - DNA, 25 bp, Artificial
  Probe
cctctgtaacatacgtgtgaatagc

SEQ ID NO: 41624 - DNA, 25 bp, Artificial
  Probe
tgtttgttctctgatgcttgtcaat

SEQ ID NO: 41625 - DNA, 25 bp, Artificial
  Probe
gaagagactttgccttgtcattatg

SEQ ID NO: 41626 - DNA, 25 bp, Artificial
  Probe
tcttcctctgtaacatacgtgtgaa

SEQ ID NO: 41627 - DNA, 25 bp, Artificial
  Probe
ttcttcctctgtaacatacgtgtga

SEQ ID NO: 41628 - DNA, 25 bp, Artificial
  Probe
ggaagagactttgccttgtcattat

SEQ ID NO: 41629 - DNA, 25 bp, Artificial
  Probe
aacgaagtaatgtgaaatgtttctc

SEQ ID NO: 41630 - DNA, 25 bp, Artificial
  Probe
gttcggagtgatcgtgaaatctaag

SEQ ID NO: 41631 - DNA, 25 bp, Artificial
  Probe
gtccctaacaattaacgaagtaatg

SEQ ID NO: 41632 - DNA, 25 bp, Artificial
  Probe
tctgtaacatacgtgtgaatagcca

SEQ ID NO: 41633 - DNA, 25 bp, Artificial
  Probe
aagagactttgccttgtcattatgg

SEQ ID NO: 41634 - DNA, 25 bp, Artificial
  Probe
ccctaacaattaacgaagtaatgtg

SEQ ID NO: 41635 - DNA, 25 bp, Artificial
  Probe
tgccttgtcattatggttccttacc

SEQ ID NO: 41636 - DNA, 25 bp, Artificial
  Probe
agactttgccttgtcattatggttc

SEQ ID NO: 41637 - DNA, 25 bp, Artificial
  Probe
gagactttgccttgtcattatggtt

SEQ ID NO: 41638 - DNA, 25 bp, Artificial
  Probe
ccttcgtggtgactggtttaactat

SEQ ID NO: 41639 - DNA, 25 bp, Artificial
  Probe
gagatcatgtgcaagatccgtgaag

SEQ ID NO: 41640 - DNA, 25 bp, Artificial
  Probe
gtacgacgagtcctgtgatctttgg

SEQ ID NO: 41641 - DNA, 25 bp, Artificial
  Probe
ggtacgacgagtcctgtgatctttg

SEQ ID NO: 41642 - DNA, 25 bp, Artificial
  Probe
tttcatggcgtttaaccgaggaaag

SEQ ID NO: 41643 - DNA, 25 bp, Artificial
  Probe
ctttcatggcgtttaaccgaggaaa

SEQ ID NO: 41644 - DNA, 25 bp, Artificial
  Probe
actttcatggcgtttaaccgaggaa

SEQ ID NO: 41645 - DNA, 25 bp, Artificial
  Probe
tgagatcatgtgcaagatccgtgaa

SEQ ID NO: 41646 - DNA, 25 bp, Artificial
  Probe
ctgagatcatgtgcaagatccgtga

SEQ ID NO: 41647 - DNA, 25 bp, Artificial
  Probe
tacgacgagtcctgtgatctttgga

SEQ ID NO: 41648 - DNA, 25 bp, Artificial
  Probe
agatcatgtgcaagatccgtgaagg

SEQ ID NO: 41649 - DNA, 25 bp, Artificial
  Probe
cctgggtgtcattctgtacatgatg

SEQ ID NO: 41650 - DNA, 25 bp, Artificial
  Probe
gggtgtcattctgtacatgatgctg

SEQ ID NO: 41651 - DNA, 25 bp, Artificial
  Probe
ctgggtgtcattctgtacatgatgc

SEQ ID NO: 41652 - DNA, 25 bp, Artificial
  Probe
tgggtgtcattctgtacatgatgct

SEQ ID NO: 41653 - DNA, 25 bp, Artificial
  Probe
gcctgggtgtcattctgtacatgat

SEQ ID NO: 41654 - DNA, 25 bp, Artificial
  Probe
ctattctctccctcaccaaactaac

SEQ ID NO: 41655 - DNA, 25 bp, Artificial
  Probe
tattctctccctcaccaaactaaca

SEQ ID NO: 41656 - DNA, 25 bp, Artificial
  Probe
cctattctctccctcaccaaactaa

SEQ ID NO: 41657 - DNA, 25 bp, Artificial
  Probe
attctctccctcaccaaactaacaa

SEQ ID NO: 41658 - DNA, 25 bp, Artificial
  Probe
ttctctccctcaccaaactaacaaa

SEQ ID NO: 41659 - DNA, 25 bp, Artificial
  Probe
ctctccctcaccaaactaacaaact

SEQ ID NO: 41660 - DNA, 25 bp, Artificial
  Probe
tctctccctcaccaaactaacaaac

SEQ ID NO: 41661 - DNA, 25 bp, Artificial
  Probe
tctccctcaccaaactaacaaactg

SEQ ID NO: 41662 - DNA, 25 bp, Artificial
  Probe
ccctattctctccctcaccaaacta

SEQ ID NO: 41663 - DNA, 25 bp, Artificial
  Probe
ctccctcaccaaactaacaaactgg

SEQ ID NO: 41664 - DNA, 25 bp, Artificial
  Probe
tccctcaccaaactaacaaactggg

SEQ ID NO: 41665 - DNA, 25 bp, Artificial
  Probe
cccctattctctccctcaccaaact

SEQ ID NO: 41666 - DNA, 25 bp, Artificial
  Probe
atctctgtcattattttacccctcc

SEQ ID NO: 41667 - DNA, 25 bp, Artificial
  Probe
ccatctctgtcattattttacccct

SEQ ID NO: 41668 - DNA, 25 bp, Artificial
  Probe
accatctctgtcattattttacccc

SEQ ID NO: 41669 - DNA, 25 bp, Artificial
  Probe
gcaccatctctgtcattattttacc

SEQ ID NO: 41670 - DNA, 25 bp, Artificial
  Probe
ggcaccatctctgtcattattttac

SEQ ID NO: 41671 - DNA, 25 bp, Artificial
  Probe
ctgttcccacatccctttgagtatc

SEQ ID NO: 41672 - DNA, 25 bp, Artificial
  Probe
caccatctctgtcattattttaccc

SEQ ID NO: 41673 - DNA, 25 bp, Artificial
  Probe
gggcaccatctctgtcattatttta

SEQ ID NO: 41674 - DNA, 25 bp, Artificial
  Probe
ctctgtcattattttacccctccac

SEQ ID NO: 41675 - DNA, 25 bp, Artificial
  Probe
tctctgtcattattttacccctcca

SEQ ID NO: 41676 - DNA, 25 bp, Artificial
  Probe
catctctgtcattattttacccctc

SEQ ID NO: 41677 - DNA, 25 bp, Artificial
  Probe
acatccctttgagtatcccaggaaa

SEQ ID NO: 41678 - DNA, 25 bp, Artificial
  Probe
tctgtcattattttacccctccacg

SEQ ID NO: 41679 - DNA, 25 bp, Artificial
  Probe
tgttcccacatccctttgagtatcc

SEQ ID NO: 41680 - DNA, 25 bp, Artificial
  Probe
cacatccctttgagtatcccaggaa

SEQ ID NO: 41681 - DNA, 25 bp, Artificial
  Probe
gttcccacatccctttgagtatccc

SEQ ID NO: 41682 - DNA, 25 bp, Artificial
  Probe
ctgtcattattttacccctccacgg

SEQ ID NO: 41683 - DNA, 25 bp, Artificial
  Probe
catccctttgagtatcccaggaaaa

SEQ ID NO: 41684 - DNA, 25 bp, Artificial
  Probe
tgggcaccatctctgtcattatttt

SEQ ID NO: 41685 - DNA, 25 bp, Artificial
  Probe
gctgttcccacatccctttgagtat

SEQ ID NO: 41686 - DNA, 25 bp, Artificial
  Probe
ttcccacatccctttgagtatccca

SEQ ID NO: 41687 - DNA, 25 bp, Artificial
  Probe
atgggcaccatctctgtcattattt

SEQ ID NO: 41688 - DNA, 25 bp, Artificial
  Probe
catgggcaccatctctgtcattatt

SEQ ID NO: 41689 - DNA, 25 bp, Artificial
  Probe
ctcacttggaactcccatcttcctg

SEQ ID NO: 41690 - DNA, 25 bp, Artificial
  Probe
tgtcattattttacccctccacggg

SEQ ID NO: 41691 - DNA, 25 bp, Artificial
  Probe
ccatgggcaccatctctgtcattat

SEQ ID NO: 41692 - DNA, 25 bp, Artificial
  Probe
cctcattacagatgtcacaagagtt

SEQ ID NO: 41693 - DNA, 25 bp, Artificial
  Probe
cttgtataagaggtggtgctgtcta

SEQ ID NO: 41694 - DNA, 25 bp, Artificial
  Probe
ttgtataagaggtggtgctgtctag

SEQ ID NO: 41695 - DNA, 25 bp, Artificial
  Probe
gaattatgtcataagcaagccatcc

SEQ ID NO: 41696 - DNA, 25 bp, Artificial
  Probe
gtgaattatgtcataagcaagccat

SEQ ID NO: 41697 - DNA, 25 bp, Artificial
  Probe
ttgtgaattatgtcataagcaagcc

SEQ ID NO: 41698 - DNA, 25 bp, Artificial
  Probe
tgaattatgtcataagcaagccatc

SEQ ID NO: 41699 - DNA, 25 bp, Artificial
  Probe
tgtgaattatgtcataagcaagcca

SEQ ID NO: 41700 - DNA, 25 bp, Artificial
  Probe
tataagaggtggtgctgtctagtga

SEQ ID NO: 41701 - DNA, 25 bp, Artificial
  Probe
gtataagaggtggtgctgtctagtg

SEQ ID NO: 41702 - DNA, 25 bp, Artificial
  Probe
ctttctgtctttctgtttcccttac

SEQ ID NO: 41703 - DNA, 25 bp, Artificial
  Probe
gttagcctttctgtctttctgtttc

SEQ ID NO: 41704 - DNA, 25 bp, Artificial
  Probe
aggttcttctgatagttctaccatt

SEQ ID NO: 41705 - DNA, 25 bp, Artificial
  Probe
aaggttcttctgatagttctaccat

SEQ ID NO: 41706 - DNA, 25 bp, Artificial
  Probe
gtttgttagcctttctgtctttctg

SEQ ID NO: 41707 - DNA, 25 bp, Artificial
  Probe
ctgtttgttagcctttctgtctttc

SEQ ID NO: 41708 - DNA, 25 bp, Artificial
  Probe
cctttctgtctttctgtttccctta

SEQ ID NO: 41709 - DNA, 25 bp, Artificial
  Probe
tgtataagaggtggtgctgtctagt

SEQ ID NO: 41710 - DNA, 25 bp, Artificial
  Probe
tgttagcctttctgtctttctgttt

SEQ ID NO: 41711 - DNA, 25 bp, Artificial
  Probe
ttgttagcctttctgtctttctgtt

SEQ ID NO: 41712 - DNA, 25 bp, Artificial
  Probe
tttgttagcctttctgtctttctgt

SEQ ID NO: 41713 - DNA, 25 bp, Artificial
  Probe
tgtttgttagcctttctgtctttct

SEQ ID NO: 41714 - DNA, 25 bp, Artificial
  Probe
cacactctaaagaccctcattacag

SEQ ID NO: 41715 - DNA, 25 bp, Artificial
  Probe
tgtcacaagagtttaagaagaggaa

SEQ ID NO: 41716 - DNA, 25 bp, Artificial
  Probe
tcacaagagtttaagaagaggaagc

SEQ ID NO: 41717 - DNA, 25 bp, Artificial
  Probe
gtcacaagagtttaagaagaggaag

SEQ ID NO: 41718 - DNA, 25 bp, Artificial
  Probe
atgtcacaagagtttaagaagagga

SEQ ID NO: 41719 - DNA, 25 bp, Artificial
  Probe
gatgtcacaagagtttaagaagagg

SEQ ID NO: 41720 - DNA, 25 bp, Artificial
  Probe
ttagcctttctgtctttctgtttcc

SEQ ID NO: 41721 - DNA, 25 bp, Artificial
  Probe
actctaaagaccctcattacagatg

SEQ ID NO: 41722 - DNA, 25 bp, Artificial
  Probe
cactctaaagaccctcattacagat

SEQ ID NO: 41723 - DNA, 25 bp, Artificial
  Probe
agttctatacatacttgcagtccag

SEQ ID NO: 41724 - DNA, 25 bp, Artificial
  Probe
cagttctatacatacttgcagtcca

SEQ ID NO: 41725 - DNA, 25 bp, Artificial
  Probe
acactctaaagaccctcattacaga

SEQ ID NO: 41726 - DNA, 25 bp, Artificial
  Probe
acagatgtcacaagagtttaagaag

SEQ ID NO: 41727 - DNA, 25 bp, Artificial
  Probe
ttctaccatttcacttactcaggct

SEQ ID NO: 41728 - DNA, 25 bp, Artificial
  Probe
gttctaccatttcacttactcaggc

SEQ ID NO: 41729 - DNA, 25 bp, Artificial
  Probe
ctctaaagaccctcattacagatgt

SEQ ID NO: 41730 - DNA, 25 bp, Artificial
  Probe
cagatgtcacaagagtttaagaaga

SEQ ID NO: 41731 - DNA, 25 bp, Artificial
  Probe
agttctaccatttcacttactcagg

SEQ ID NO: 41732 - DNA, 25 bp, Artificial
  Probe
cacaagagtttaagaagaggaagcc

SEQ ID NO: 41733 - DNA, 25 bp, Artificial
  Probe
agatgtcacaagagtttaagaagag

SEQ ID NO: 41734 - DNA, 25 bp, Artificial
  Probe
ccacactctaaagaccctcattaca

SEQ ID NO: 41735 - DNA, 25 bp, Artificial
  Probe
ttctatacatacttgcagtccagct

SEQ ID NO: 41736 - DNA, 25 bp, Artificial
  Probe
gttctatacatacttgcagtccagc

SEQ ID NO: 41737 - DNA, 25 bp, Artificial
  Probe
atatgatgtctgatgtaagtgagcc

SEQ ID NO: 41738 - DNA, 25 bp, Artificial
  Probe
aatatgatgtctgatgtaagtgagc

SEQ ID NO: 41739 - DNA, 25 bp, Artificial
  Probe
tatgatgtctgatgtaagtgagcca

SEQ ID NO: 41740 - DNA, 25 bp, Artificial
  Probe
gaccatagagtaaggacttcagtgt

SEQ ID NO: 41741 - DNA, 25 bp, Artificial
  Probe
gagaagtggaccatagagtaaggac

SEQ ID NO: 41742 - DNA, 25 bp, Artificial
  Probe
atgatgtctgatgtaagtgagccat

SEQ ID NO: 41743 - DNA, 25 bp, Artificial
  Probe
tagagtaaggacttcagtgtcagat

SEQ ID NO: 41744 - DNA, 25 bp, Artificial
  Probe
atagagtaaggacttcagtgtcaga

SEQ ID NO: 41745 - DNA, 25 bp, Artificial
  Probe
catagagtaaggacttcagtgtcag

SEQ ID NO: 41746 - DNA, 25 bp, Artificial
  Probe
actaactctaatggagaagtggacc

SEQ ID NO: 41747 - DNA, 25 bp, Artificial
  Probe
ctgatgtaagtgagccatgtagtac

SEQ ID NO: 41748 - DNA, 25 bp, Artificial
  Probe
tctgatgtaagtgagccatgtagta

SEQ ID NO: 41749 - DNA, 25 bp, Artificial
  Probe
agagtaaggacttcagtgtcagatt

SEQ ID NO: 41750 - DNA, 25 bp, Artificial
  Probe
ggaccatagagtaaggacttcagtg

SEQ ID NO: 41751 - DNA, 25 bp, Artificial
  Probe
ccatagagtaaggacttcagtgtca

SEQ ID NO: 41752 - DNA, 25 bp, Artificial
  Probe
accatagagtaaggacttcagtgtc

SEQ ID NO: 41753 - DNA, 25 bp, Artificial
  Probe
atgtctgatgtaagtgagccatgta

SEQ ID NO: 41754 - DNA, 25 bp, Artificial
  Probe
gtggaccatagagtaaggacttcag

SEQ ID NO: 41755 - DNA, 25 bp, Artificial
  Probe
gtaagtgagccatgtagtacaagag

SEQ ID NO: 41756 - DNA, 25 bp, Artificial
  Probe
agaagtggaccatagagtaaggact

SEQ ID NO: 41757 - DNA, 25 bp, Artificial
  Probe
agtgagccatgtagtacaagagtaa

SEQ ID NO: 41758 - DNA, 25 bp, Artificial
  Probe
aagtgagccatgtagtacaagagta

SEQ ID NO: 41759 - DNA, 25 bp, Artificial
  Probe
taagtgagccatgtagtacaagagt

SEQ ID NO: 41760 - DNA, 25 bp, Artificial
  Probe
tggaccatagagtaaggacttcagt

SEQ ID NO: 41761 - DNA, 25 bp, Artificial
  Probe
agtggaccatagagtaaggacttca

SEQ ID NO: 41762 - DNA, 25 bp, Artificial
  Probe
ggagaagtggaccatagagtaagga

SEQ ID NO: 41763 - DNA, 25 bp, Artificial
  Probe
tcagtgtcagatttctcagggtata

SEQ ID NO: 41764 - DNA, 25 bp, Artificial
  Probe
ctaactctaatggagaagtggacca

SEQ ID NO: 41765 - DNA, 25 bp, Artificial
  Probe
gtctgatgtaagtgagccatgtagt

SEQ ID NO: 41766 - DNA, 25 bp, Artificial
  Probe
tgtctgatgtaagtgagccatgtag

SEQ ID NO: 41767 - DNA, 25 bp, Artificial
  Probe
aagacatagagcctagaacaacgta

SEQ ID NO: 41768 - DNA, 25 bp, Artificial
  Probe
ctagaacaacgtaccagattgagaa

SEQ ID NO: 41769 - DNA, 25 bp, Artificial
  Probe
gaataatgtaatgccctttcaatgc

SEQ ID NO: 41770 - DNA, 25 bp, Artificial
  Probe
ttcagtgtcagatttctcagggtat

SEQ ID NO: 41771 - DNA, 25 bp, Artificial
  Probe
tagaacaacgtaccagattgagaac

SEQ ID NO: 41772 - DNA, 25 bp, Artificial
  Probe
agaaagacatagagcctagaacaac

SEQ ID NO: 41773 - DNA, 25 bp, Artificial
  Probe
cagaaagacatagagcctagaacaa

SEQ ID NO: 41774 - DNA, 25 bp, Artificial
  Probe
agacatagagcctagaacaacgtac

SEQ ID NO: 41775 - DNA, 25 bp, Artificial
  Probe
tcaaagtgacaatgtttagcaatca

SEQ ID NO: 41776 - DNA, 25 bp, Artificial
  Probe
gccaatgacctttatcactaactct

SEQ ID NO: 41777 - DNA, 25 bp, Artificial
  Probe
aagcattcggttctcagtttaagtc

SEQ ID NO: 41778 - DNA, 25 bp, Artificial
  Probe
atgtaagtgagccatgtagtacaag

SEQ ID NO: 41779 - DNA, 25 bp, Artificial
  Probe
gatgtaagtgagccatgtagtacaa

SEQ ID NO: 41780 - DNA, 25 bp, Artificial
  Probe
gaacaacgtaccagattgagaactt

SEQ ID NO: 41781 - DNA, 25 bp, Artificial
  Probe
tgccaatgacctttatcactaactc

SEQ ID NO: 41782 - DNA, 25 bp, Artificial
  Probe
ttgccatcttcctgtctcttatcat

SEQ ID NO: 41783 - DNA, 25 bp, Artificial
  Probe
catcttcctgtctcttatcatgctc

SEQ ID NO: 41784 - DNA, 25 bp, Artificial
  Probe
atcttcctgtctcttatcatgctcg

SEQ ID NO: 41785 - DNA, 25 bp, Artificial
  Probe
ccatcttcctgtctcttatcatgct

SEQ ID NO: 41786 - DNA, 25 bp, Artificial
  Probe
atttgccatcttcctgtctcttatc

SEQ ID NO: 41787 - DNA, 25 bp, Artificial
  Probe
caggtgaagtcagagtttagtaaga

SEQ ID NO: 41788 - DNA, 25 bp, Artificial
  Probe
tgccatcttcctgtctcttatcatg

SEQ ID NO: 41789 - DNA, 25 bp, Artificial
  Probe
catttgccatcttcctgtctcttat

SEQ ID NO: 41790 - DNA, 25 bp, Artificial
  Probe
aggtgaagtcagagtttagtaagag

SEQ ID NO: 41791 - DNA, 25 bp, Artificial
  Probe
ccaggtgaagtcagagtttagtaag

SEQ ID NO: 41792 - DNA, 25 bp, Artificial
  Probe
ggtgaagtcagagtttagtaagagc

SEQ ID NO: 41793 - DNA, 25 bp, Artificial
  Probe
accaggtgaagtcagagtttagtaa

SEQ ID NO: 41794 - DNA, 25 bp, Artificial
  Probe
tttgccatcttcctgtctcttatca

SEQ ID NO: 41795 - DNA, 25 bp, Artificial
  Probe
cttcctgtctcttatcatgctcgtg

SEQ ID NO: 41796 - DNA, 25 bp, Artificial
  Probe
tcttcctgtctcttatcatgctcgt

SEQ ID NO: 41797 - DNA, 25 bp, Artificial
  Probe
ctatgtgtttacagaccaggtgaag

SEQ ID NO: 41798 - DNA, 25 bp, Artificial
  Probe
cagagtttagtaagagcttccagaa

SEQ ID NO: 41799 - DNA, 25 bp, Artificial
  Probe
gtgaagtcagagtttagtaagagct

SEQ ID NO: 41800 - DNA, 25 bp, Artificial
  Probe
ttacagaccaggtgaagtcagagtt

SEQ ID NO: 41801 - DNA, 25 bp, Artificial
  Probe
tcagagtttagtaagagcttccaga

SEQ ID NO: 41802 - DNA, 25 bp, Artificial
  Probe
gtcagagtttagtaagagcttccag

SEQ ID NO: 41803 - DNA, 25 bp, Artificial
  Probe
ctgtctcttatcatgctcgtgaagg

SEQ ID NO: 41804 - DNA, 25 bp, Artificial
  Probe
cctgtctcttatcatgctcgtgaag

SEQ ID NO: 41805 - DNA, 25 bp, Artificial
  Probe
aagtcagagtttagtaagagcttcc

SEQ ID NO: 41806 - DNA, 25 bp, Artificial
  Probe
gccatcttcctgtctcttatcatgc

SEQ ID NO: 41807 - DNA, 25 bp, Artificial
  Probe
agagtttagtaagagcttccagaag

SEQ ID NO: 41808 - DNA, 25 bp, Artificial
  Probe
agtcagagtttagtaagagcttcca

SEQ ID NO: 41809 - DNA, 25 bp, Artificial
  Probe
gaccaggtgaagtcagagtttagta

SEQ ID NO: 41810 - DNA, 25 bp, Artificial
  Probe
tatgtgtttacagaccaggtgaagt

SEQ ID NO: 41811 - DNA, 25 bp, Artificial
  Probe
tgaagtcagagtttagtaagagctt

SEQ ID NO: 41812 - DNA, 25 bp, Artificial
  Probe
acatttgccatcttcctgtctctta

SEQ ID NO: 41813 - DNA, 25 bp, Artificial
  Probe
gtctcttatcatgctcgtgaaggtg

SEQ ID NO: 41814 - DNA, 25 bp, Artificial
  Probe
tcctgtctcttatcatgctcgtgaa

SEQ ID NO: 41815 - DNA, 25 bp, Artificial
  Probe
ttcctgtctcttatcatgctcgtga

SEQ ID NO: 41816 - DNA, 25 bp, Artificial
  Probe
tgtctcttatcatgctcgtgaaggt

SEQ ID NO: 41817 - DNA, 25 bp, Artificial
  Probe
cattgctggctatgtgtttacagac

SEQ ID NO: 41818 - DNA, 25 bp, Artificial
  Probe
cagaccaggtgaagtcagagtttag

SEQ ID NO: 41819 - DNA, 25 bp, Artificial
  Probe
gctatgtgtttacagaccaggtgaa

SEQ ID NO: 41820 - DNA, 25 bp, Artificial
  Probe
atgtgtttacagaccaggtgaagtc

SEQ ID NO: 41821 - DNA, 25 bp, Artificial
  Probe
ataaatgctgtggagcctctaacta

SEQ ID NO: 41822 - DNA, 25 bp, Artificial
  Probe
aaataaatgctgtggagcctctaac

SEQ ID NO: 41823 - DNA, 25 bp, Artificial
  Probe
gtttacagaccaggtgaagtcagag

SEQ ID NO: 41824 - DNA, 25 bp, Artificial
  Probe
agaccaggtgaagtcagagtttagt

SEQ ID NO: 41825 - DNA, 25 bp, Artificial
  Probe
gtggagcctctaactacacagactg

SEQ ID NO: 41826 - DNA, 25 bp, Artificial
  Probe
acagaccaggtgaagtcagagttta

SEQ ID NO: 41827 - DNA, 25 bp, Artificial
  Probe
acacgattgcctataattccaacaa

SEQ ID NO: 41828 - DNA, 25 bp, Artificial
  Probe
aacacgattgcctataattccaaca

SEQ ID NO: 41829 - DNA, 25 bp, Artificial
  Probe
agttggtatgcttaataagtgatgt

SEQ ID NO: 41830 - DNA, 25 bp, Artificial
  Probe
cgaaagaacagagacataatcagtg

SEQ ID NO: 41831 - DNA, 25 bp, Artificial
  Probe
gagcatttcaaagataaccaagact

SEQ ID NO: 41832 - DNA, 25 bp, Artificial
  Probe
caaagataaccaagactaacatcgc

SEQ ID NO: 41833 - DNA, 25 bp, Artificial
  Probe
aagttggtatgcttaataagtgatg

SEQ ID NO: 41834 - DNA, 25 bp, Artificial
  Probe
gtgcccaaaggtatttcttaaagtt

SEQ ID NO: 41835 - DNA, 25 bp, Artificial
  Probe
caagtgcccaaaggtatttcttaaa

SEQ ID NO: 41836 - DNA, 25 bp, Artificial
  Probe
aagtgcccaaaggtatttcttaaag

SEQ ID NO: 41837 - DNA, 25 bp, Artificial
  Probe
agtgcccaaaggtatttcttaaagt

SEQ ID NO: 41838 - DNA, 25 bp, Artificial
  Probe
tcaaagataaccaagactaacatcg

SEQ ID NO: 41839 - DNA, 25 bp, Artificial
  Probe
tgcccaaaggtatttcttaaagttg

SEQ ID NO: 41840 - DNA, 25 bp, Artificial
  Probe
agaacagagacataatcagtgataa

SEQ ID NO: 41841 - DNA, 25 bp, Artificial
  Probe
aagaacagagacataatcagtgata

SEQ ID NO: 41842 - DNA, 25 bp, Artificial
  Probe
cacgattgcctataattccaacaaa

SEQ ID NO: 41843 - DNA, 25 bp, Artificial
  Probe
aaacacgattgcctataattccaac

SEQ ID NO: 41844 - DNA, 25 bp, Artificial
  Probe
ttaaacacgattgcctataattcca

SEQ ID NO: 41845 - DNA, 25 bp, Artificial
  Probe
cactgagcatttcaaagataaccaa

SEQ ID NO: 41846 - DNA, 25 bp, Artificial
  Probe
tgagcatttcaaagataaccaagac

SEQ ID NO: 41847 - DNA, 25 bp, Artificial
  Probe
actgagcatttcaaagataaccaag

SEQ ID NO: 41848 - DNA, 25 bp, Artificial
  Probe
ctgagcatttcaaagataaccaaga

SEQ ID NO: 41849 - DNA, 25 bp, Artificial
  Probe
gaaagaacagagacataatcagtga

SEQ ID NO: 41850 - DNA, 25 bp, Artificial
  Probe
agcatttcaaagataaccaagacta

SEQ ID NO: 41851 - DNA, 25 bp, Artificial
  Probe
gttggtatgcttaataagtgatgta

SEQ ID NO: 41852 - DNA, 25 bp, Artificial
  Probe
cacactgagcatttcaaagataacc

SEQ ID NO: 41853 - DNA, 25 bp, Artificial
  Probe
ccacactgagcatttcaaagataac

SEQ ID NO: 41854 - DNA, 25 bp, Artificial
  Probe
tccacactgagcatttcaaagataa

SEQ ID NO: 41855 - DNA, 25 bp, Artificial
  Probe
ccaagtgcccaaaggtatttcttaa

SEQ ID NO: 41856 - DNA, 25 bp, Artificial
  Probe
acactgagcatttcaaagataacca

SEQ ID NO: 41857 - DNA, 25 bp, Artificial
  Probe
cttaaacacgattgcctataattcc

SEQ ID NO: 41858 - DNA, 25 bp, Artificial
  Probe
taaacacgattgcctataattccaa

SEQ ID NO: 41859 - DNA, 25 bp, Artificial
  Probe
aggtatttcttaaagttggtatgct

SEQ ID NO: 41860 - DNA, 25 bp, Artificial
  Probe
ctccacactgagcatttcaaagata

SEQ ID NO: 41861 - DNA, 25 bp, Artificial
  Probe
gcatttcaaagataaccaagactaa

SEQ ID NO: 41862 - DNA, 25 bp, Artificial
  Probe
attgtaatcccgtctgtcacatttc

SEQ ID NO: 41863 - DNA, 25 bp, Artificial
  Probe
cattgtaatcccgtctgtcacattt

SEQ ID NO: 41864 - DNA, 25 bp, Artificial
  Probe
tcgaaagaacagagacataatcagt

SEQ ID NO: 41865 - DNA, 25 bp, Artificial
  Probe
aaagaacagagacataatcagtgat

SEQ ID NO: 41866 - DNA, 25 bp, Artificial
  Probe
ggtatttcttaaagttggtatgctt

SEQ ID NO: 41867 - DNA, 25 bp, Artificial
  Probe
aaggtatttcttaaagttggtatgc

SEQ ID NO: 41868 - DNA, 25 bp, Artificial
  Probe
tcttaaacacgattgcctataattc

SEQ ID NO: 41869 - DNA, 25 bp, Artificial
  Probe
aaactccacactgagcatttcaaag

SEQ ID NO: 41870 - DNA, 25 bp, Artificial
  Probe
ttggtatgcttaataagtgatgtaa

SEQ ID NO: 41871 - DNA, 25 bp, Artificial
  Probe
atattccagttctctttggtagcct

SEQ ID NO: 41872 - DNA, 25 bp, Artificial
  Probe
aggcacatattaggactacctagat

SEQ ID NO: 41873 - DNA, 25 bp, Artificial
  Probe
aaggcacatattaggactacctaga

SEQ ID NO: 41874 - DNA, 25 bp, Artificial
  Probe
caaggcacatattaggactacctag

SEQ ID NO: 41875 - DNA, 25 bp, Artificial
  Probe
attaggactacctagataggatgcg

SEQ ID NO: 41876 - DNA, 25 bp, Artificial
  Probe
ccaaggcacatattaggactaccta

SEQ ID NO: 41877 - DNA, 25 bp, Artificial
  Probe
actacctagataggatgcgtgtgtt

SEQ ID NO: 41878 - DNA, 25 bp, Artificial
  Probe
ggcacatattaggactacctagata

SEQ ID NO: 41879 - DNA, 25 bp, Artificial
  Probe
ttaggactacctagataggatgcgt

SEQ ID NO: 41880 - DNA, 25 bp, Artificial
  Probe
tagataggatgcgtgtgtttgacaa

SEQ ID NO: 41881 - DNA, 25 bp, Artificial
  Probe
tattaggactacctagataggatgc

SEQ ID NO: 41882 - DNA, 25 bp, Artificial
  Probe
gactacctagataggatgcgtgtgt

SEQ ID NO: 41883 - DNA, 25 bp, Artificial
  Probe
taggactacctagataggatgcgtg

SEQ ID NO: 41884 - DNA, 25 bp, Artificial
  Probe
ctacctagataggatgcgtgtgttt

SEQ ID NO: 41885 - DNA, 25 bp, Artificial
  Probe
tacctagataggatgcgtgtgtttg

SEQ ID NO: 41886 - DNA, 25 bp, Artificial
  Probe
ctagataggatgcgtgtgtttgaca

SEQ ID NO: 41887 - DNA, 25 bp, Artificial
  Probe
gcacatattaggactacctagatag

SEQ ID NO: 41888 - DNA, 25 bp, Artificial
  Probe
gataggatgcgtgtgtttgacaaag

SEQ ID NO: 41889 - DNA, 25 bp, Artificial
  Probe
ggactacctagataggatgcgtgtg

SEQ ID NO: 41890 - DNA, 25 bp, Artificial
  Probe
aggactacctagataggatgcgtgt

SEQ ID NO: 41891 - DNA, 25 bp, Artificial
  Probe
ataggatgcgtgtgtttgacaaaga

SEQ ID NO: 41892 - DNA, 25 bp, Artificial
  Probe
agataggatgcgtgtgtttgacaaa

SEQ ID NO: 41893 - DNA, 25 bp, Artificial
  Probe
cacatattaggactacctagatagg

SEQ ID NO: 41894 - DNA, 25 bp, Artificial
  Probe
acatattaggactacctagatagga

SEQ ID NO: 41895 - DNA, 25 bp, Artificial
  Probe
ggggcacttacggttttgaaataaa

SEQ ID NO: 41896 - DNA, 25 bp, Artificial
  Probe
gggcacttacggttttgaaataaaa

SEQ ID NO: 41897 - DNA, 25 bp, Artificial
  Probe
cctagataggatgcgtgtgtttgac

SEQ ID NO: 41898 - DNA, 25 bp, Artificial
  Probe
taggatgcgtgtgtttgacaaagag

SEQ ID NO: 41899 - DNA, 25 bp, Artificial
  Probe
acctagataggatgcgtgtgtttga

SEQ ID NO: 41900 - DNA, 25 bp, Artificial
  Probe
atattaggactacctagataggatg

SEQ ID NO: 41901 - DNA, 25 bp, Artificial
  Probe
catattaggactacctagataggat

SEQ ID NO: 41902 - DNA, 25 bp, Artificial
  Probe
aagaggtagagactgttttggcagg

SEQ ID NO: 41903 - DNA, 25 bp, Artificial
  Probe
cgcagtcttctccagtgttgtattt

SEQ ID NO: 41904 - DNA, 25 bp, Artificial
  Probe
ctttgacctggaggaattcttaaac

SEQ ID NO: 41905 - DNA, 25 bp, Artificial
  Probe
ctcagccttctacatcagagtcacc

SEQ ID NO: 41906 - DNA, 25 bp, Artificial
  Probe
cctcagccttctacatcagagtcac

SEQ ID NO: 41907 - DNA, 25 bp, Artificial
  Probe
tttgacctggaggaattcttaaacc

SEQ ID NO: 41908 - DNA, 25 bp, Artificial
  Probe
tcagccttctacatcagagtcacct

SEQ ID NO: 41909 - DNA, 25 bp, Artificial
  Probe
gcagtcttctccagtgttgtatttt

SEQ ID NO: 41910 - DNA, 25 bp, Artificial
  Probe
gctttgacctggaggaattcttaaa

SEQ ID NO: 41911 - DNA, 25 bp, Artificial
  Probe
cagccttctacatcagagtcacctg

SEQ ID NO: 41912 - DNA, 25 bp, Artificial
  Probe
cataacaggatgggaggctctactc

SEQ ID NO: 41913 - DNA, 25 bp, Artificial
  Probe
cctggaggaattcttaaaccaatct

SEQ ID NO: 41914 - DNA, 25 bp, Artificial
  Probe
acctggaggaattcttaaaccaatc

SEQ ID NO: 41915 - DNA, 25 bp, Artificial
  Probe
gacctggaggaattcttaaaccaat

SEQ ID NO: 41916 - DNA, 25 bp, Artificial
  Probe
ctggaggaattcttaaaccaatctt

SEQ ID NO: 41917 - DNA, 25 bp, Artificial
  Probe
ggctttgacctggaggaattcttaa

SEQ ID NO: 41918 - DNA, 25 bp, Artificial
  Probe
tggaggaattcttaaaccaatcttt

SEQ ID NO: 41919 - DNA, 25 bp, Artificial
  Probe
ttaaaccaatcttttgacatgggtg

SEQ ID NO: 41920 - DNA, 25 bp, Artificial
  Probe
cttaaaccaatcttttgacatgggt

SEQ ID NO: 41921 - DNA, 25 bp, Artificial
  Probe
tcttaaaccaatcttttgacatggg

SEQ ID NO: 41922 - DNA, 25 bp, Artificial
  Probe
tgacctggaggaattcttaaaccaa

SEQ ID NO: 41923 - DNA, 25 bp, Artificial
  Probe
ttgacctggaggaattcttaaacca

SEQ ID NO: 41924 - DNA, 25 bp, Artificial
  Probe
taaaccaatcttttgacatgggtgt

SEQ ID NO: 41925 - DNA, 25 bp, Artificial
  Probe
ttcttaaaccaatcttttgacatgg

SEQ ID NO: 41926 - DNA, 25 bp, Artificial
  Probe
gcctgtgaaatacaaggtttccttt

SEQ ID NO: 41927 - DNA, 25 bp, Artificial
  Probe
tggctttgacctggaggaattctta

SEQ ID NO: 41928 - DNA, 25 bp, Artificial
  Probe
aaaccaatcttttgacatgggtgtg

SEQ ID NO: 41929 - DNA, 25 bp, Artificial
  Probe
attcttaaaccaatcttttgacatg

SEQ ID NO: 41930 - DNA, 25 bp, Artificial
  Probe
ccctcagccttctacatcagagtca

SEQ ID NO: 41931 - DNA, 25 bp, Artificial
  Probe
ggaggaattcttaaaccaatctttt

SEQ ID NO: 41932 - DNA, 25 bp, Artificial
  Probe
aattcttaaaccaatcttttgacat

SEQ ID NO: 41933 - DNA, 25 bp, Artificial
  Probe
agccttctacatcagagtcacctga

SEQ ID NO: 41934 - DNA, 25 bp, Artificial
  Probe
ttggctttgacctggaggaattctt

SEQ ID NO: 41935 - DNA, 25 bp, Artificial
  Probe
ggaattcttaaaccaatcttttgac

SEQ ID NO: 41936 - DNA, 25 bp, Artificial
  Probe
aggaattcttaaaccaatcttttga

SEQ ID NO: 41937 - DNA, 25 bp, Artificial
  Probe
gaggaattcttaaaccaatcttttg

SEQ ID NO: 41938 - DNA, 25 bp, Artificial
  Probe
aaccaatcttttgacatgggtgtgg

SEQ ID NO: 41939 - DNA, 25 bp, Artificial
  Probe
gtgaggctcagcttgagttactctg

SEQ ID NO: 41940 - DNA, 25 bp, Artificial
  Probe
gttggctttgacctggaggaattct

SEQ ID NO: 41941 - DNA, 25 bp, Artificial
  Probe
gaattcttaaaccaatcttttgaca

SEQ ID NO: 41942 - DNA, 25 bp, Artificial
  Probe
actgttgtaatatgcatttgttttg

SEQ ID NO: 41943 - DNA, 25 bp, Artificial
  Probe
atcttttgacatgggtgtggctgat

SEQ ID NO: 41944 - DNA, 25 bp, Artificial
  Probe
caatcttttgacatgggtgtggctg

SEQ ID NO: 41945 - DNA, 25 bp, Artificial
  Probe
ttactgttgtaatatgcatttgttt

SEQ ID NO: 41946 - DNA, 25 bp, Artificial
  Probe
taatatgcatttgttttgccatcga

SEQ ID NO: 41947 - DNA, 25 bp, Artificial
  Probe
gtaatatgcatttgttttgccatcg

SEQ ID NO: 41948 - DNA, 25 bp, Artificial
  Probe
aagatgagattccttctgatgttga

SEQ ID NO: 41949 - DNA, 25 bp, Artificial
  Probe
agatgagattccttctgatgttgat

SEQ ID NO: 41950 - DNA, 25 bp, Artificial
  Probe
gaagaagccagtgaagatgagattc

SEQ ID NO: 41951 - DNA, 25 bp, Artificial
  Probe
tgaagaagccagtgaagatgagatt

SEQ ID NO: 41952 - DNA, 25 bp, Artificial
  Probe
gatgagattccttctgatgttgatc

SEQ ID NO: 41953 - DNA, 25 bp, Artificial
  Probe
gaagccagtgaagatgagattcctt

SEQ ID NO: 41954 - DNA, 25 bp, Artificial
  Probe
aagaagccagtgaagatgagattcc

SEQ ID NO: 41955 - DNA, 25 bp, Artificial
  Probe
atatggaaatggaaatcaagtgggt

SEQ ID NO: 41956 - DNA, 25 bp, Artificial
  Probe
tatggaaatggaaatcaagtgggtt

SEQ ID NO: 41957 - DNA, 25 bp, Artificial
  Probe
gatatggaaatggaaatcaagtggg

SEQ ID NO: 41958 - DNA, 25 bp, Artificial
  Probe
aaacaagttggagggaaaggataaa

SEQ ID NO: 41959 - DNA, 25 bp, Artificial
  Probe
ctgaagaagccagtgaagatgagat

SEQ ID NO: 41960 - DNA, 25 bp, Artificial
  Probe
atgagattccttctgatgttgatct

SEQ ID NO: 41961 - DNA, 25 bp, Artificial
  Probe
aacaagttggagggaaaggataaac

SEQ ID NO: 41962 - DNA, 25 bp, Artificial
  Probe
tctaaatgatccctactttgctgaa

SEQ ID NO: 41963 - DNA, 25 bp, Artificial
  Probe
tgagattccttctgatgttgatcta

SEQ ID NO: 41964 - DNA, 25 bp, Artificial
  Probe
atctaaatgatccctactttgctga

SEQ ID NO: 41965 - DNA, 25 bp, Artificial
  Probe
taaatgatccctactttgctgaaga

SEQ ID NO: 41966 - DNA, 25 bp, Artificial
  Probe
agaagccagtgaagatgagattcct

SEQ ID NO: 41967 - DNA, 25 bp, Artificial
  Probe
aaatgatccctactttgctgaagaa

SEQ ID NO: 41968 - DNA, 25 bp, Artificial
  Probe
ctaaatgatccctactttgctgaag

SEQ ID NO: 41969 - DNA, 25 bp, Artificial
  Probe
atggaaatggaaatcaagtgggttc

SEQ ID NO: 41970 - DNA, 25 bp, Artificial
  Probe
aatgatccctactttgctgaagaag

SEQ ID NO: 41971 - DNA, 25 bp, Artificial
  Probe
gagattccttctgatgttgatctaa

SEQ ID NO: 41972 - DNA, 25 bp, Artificial
  Probe
agtgaagatgagattccttctgatg

SEQ ID NO: 41973 - DNA, 25 bp, Artificial
  Probe
cagtgaagatgagattccttctgat

SEQ ID NO: 41974 - DNA, 25 bp, Artificial
  Probe
tgaagatgagattccttctgatgtt

SEQ ID NO: 41975 - DNA, 25 bp, Artificial
  Probe
gtgaagatgagattccttctgatgt

SEQ ID NO: 41976 - DNA, 25 bp, Artificial
  Probe
gacttaaggagagtgcagaagagat

SEQ ID NO: 41977 - DNA, 25 bp, Artificial
  Probe
gaagatgagattccttctgatgttg

SEQ ID NO: 41978 - DNA, 25 bp, Artificial
  Probe
ttccttctgatgttgatctaaatga

SEQ ID NO: 41979 - DNA, 25 bp, Artificial
  Probe
acttaaggagagtgcagaagagatg

SEQ ID NO: 41980 - DNA, 25 bp, Artificial
  Probe
tccttctgatgttgatctaaatgat

SEQ ID NO: 41981 - DNA, 25 bp, Artificial
  Probe
ttaaggagagtgcagaagagatggt

SEQ ID NO: 41982 - DNA, 25 bp, Artificial
  Probe
cttaaggagagtgcagaagagatgg

SEQ ID NO: 41983 - DNA, 25 bp, Artificial
  Probe
ccagtgaagatgagattccttctga

SEQ ID NO: 41984 - DNA, 25 bp, Artificial
  Probe
ccttgggaacaattcttagagaaga

SEQ ID NO: 41985 - DNA, 25 bp, Artificial
  Probe
gttggagggaaaggataaactgacc

SEQ ID NO: 41986 - DNA, 25 bp, Artificial
  Probe
taaggagagtgcagaagagatggtc

SEQ ID NO: 41987 - DNA, 25 bp, Artificial
  Probe
tgggaaaacaaagaaaagtcagaag

SEQ ID NO: 41988 - DNA, 25 bp, Artificial
  Probe
attccttctgatgttgatctaaatg

SEQ ID NO: 41989 - DNA, 25 bp, Artificial
  Probe
gggaaaacaaagaaaagtcagaagg

SEQ ID NO: 41990 - DNA, 25 bp, Artificial
  Probe
cccttgggaacaattcttagagaag

SEQ ID NO: 41991 - DNA, 25 bp, Artificial
  Probe
aaaacaagttggagggaaaggataa

SEQ ID NO: 41992 - DNA, 25 bp, Artificial
  Probe
tgatatggaaatggaaatcaagtgg

SEQ ID NO: 41993 - DNA, 25 bp, Artificial
  Probe
tactgtactaattgtggctgattca

SEQ ID NO: 41994 - DNA, 25 bp, Artificial
  Probe
tgtactgtactaattgtggctgatt

SEQ ID NO: 41995 - DNA, 25 bp, Artificial
  Probe
ttgtactgtactaattgtggctgat

SEQ ID NO: 41996 - DNA, 25 bp, Artificial
  Probe
gtactgtactaattgtggctgattc

SEQ ID NO: 41997 - DNA, 25 bp, Artificial
  Probe
cttgtactgtactaattgtggctga

SEQ ID NO: 41998 - DNA, 25 bp, Artificial
  Probe
gcattgttgtattggatgacttaat

SEQ ID NO: 41999 - DNA, 25 bp, Artificial
  Probe
ccttgtactgtactaattgtggctg

SEQ ID NO: 42000 - DNA, 25 bp, Artificial
  Probe
ctgccttgtactgtactaattgtgg

SEQ ID NO: 42001 - DNA, 25 bp, Artificial
  Probe
cctgccttgtactgtactaattgtg

SEQ ID NO: 42002 - DNA, 25 bp, Artificial
  Probe
cacctgccttgtactgtactaattg

SEQ ID NO: 42003 - DNA, 25 bp, Artificial
  Probe
acctgccttgtactgtactaattgt

SEQ ID NO: 42004 - DNA, 25 bp, Artificial
  Probe
actgtactaattgtggctgattcac

SEQ ID NO: 42005 - DNA, 25 bp, Artificial
  Probe
tagtacctgcattgttgtattggat

SEQ ID NO: 42006 - DNA, 25 bp, Artificial
  Probe
atagtacctgcattgttgtattgga

SEQ ID NO: 42007 - DNA, 25 bp, Artificial
  Probe
acacctgccttgtactgtactaatt

SEQ ID NO: 42008 - DNA, 25 bp, Artificial
  Probe
ctgcattgttgtattggatgactta

SEQ ID NO: 42009 - DNA, 25 bp, Artificial
  Probe
tgcattgttgtattggatgacttaa

SEQ ID NO: 42010 - DNA, 25 bp, Artificial
  Probe
tatagtacctgcattgttgtattgg

SEQ ID NO: 42011 - DNA, 25 bp, Artificial
  Probe
ttgttgtattggatgacttaatgaa

SEQ ID NO: 42012 - DNA, 25 bp, Artificial
  Probe
tacctgcattgttgtattggatgac

SEQ ID NO: 42013 - DNA, 25 bp, Artificial
  Probe
gtacctgcattgttgtattggatga

SEQ ID NO: 42014 - DNA, 25 bp, Artificial
  Probe
agtacctgcattgttgtattggatg

SEQ ID NO: 42015 - DNA, 25 bp, Artificial
  Probe
tgaagttatgtggaccctcaaatat

SEQ ID NO: 42016 - DNA, 25 bp, Artificial
  Probe
gtgaagttatgtggaccctcaaata

SEQ ID NO: 42017 - DNA, 25 bp, Artificial
  Probe
tacacctgccttgtactgtactaat

SEQ ID NO: 42018 - DNA, 25 bp, Artificial
  Probe
attgttgtattggatgacttaatga

SEQ ID NO: 42019 - DNA, 25 bp, Artificial
  Probe
cctgcattgttgtattggatgactt

SEQ ID NO: 42020 - DNA, 25 bp, Artificial
  Probe
gaagttatgtggaccctcaaatata

SEQ ID NO: 42021 - DNA, 25 bp, Artificial
  Probe
ctacacctgccttgtactgtactaa

SEQ ID NO: 42022 - DNA, 25 bp, Artificial
  Probe
atgaaacatttctacacctgccttg

SEQ ID NO: 42023 - DNA, 25 bp, Artificial
  Probe
ctcagtgtcctgtgaagttatgtgg

SEQ ID NO: 42024 - DNA, 25 bp, Artificial
  Probe
cctcagtgtcctgtgaagttatgtg

SEQ ID NO: 42025 - DNA, 25 bp, Artificial
  Probe
tctcgaatagtttacctcatccatg

SEQ ID NO: 42026 - DNA, 25 bp, Artificial
  Probe
tctacacctgccttgtactgtacta

SEQ ID NO: 42027 - DNA, 25 bp, Artificial
  Probe
ctctcgaatagtttacctcatccat

SEQ ID NO: 42028 - DNA, 25 bp, Artificial
  Probe
tgtgaagttatgtggaccctcaaat

SEQ ID NO: 42029 - DNA, 25 bp, Artificial
  Probe
agttatgtggaccctcaaatataaa

SEQ ID NO: 42030 - DNA, 25 bp, Artificial
  Probe
aagttatgtggaccctcaaatataa

SEQ ID NO: 42031 - DNA, 25 bp, Artificial
  Probe
ttacctcatccatgcactttaattg

SEQ ID NO: 42032 - DNA, 25 bp, Artificial
  Probe
gtttacctcatccatgcactttaat

SEQ ID NO: 42033 - DNA, 25 bp, Artificial
  Probe
acctgcattgttgtattggatgact

SEQ ID NO: 42034 - DNA, 25 bp, Artificial
  Probe
ctcgaatagtttacctcatccatgc

SEQ ID NO: 42035 - DNA, 25 bp, Artificial
  Probe
tccatgcactttaattgaagaactg

SEQ ID NO: 42036 - DNA, 25 bp, Artificial
  Probe
actctcgaatagtttacctcatcca

SEQ ID NO: 42037 - DNA, 25 bp, Artificial
  Probe
tttacctcatccatgcactttaatt

SEQ ID NO: 42038 - DNA, 25 bp, Artificial
  Probe
gcgatacagaccatcaagcaatata

SEQ ID NO: 42039 - DNA, 25 bp, Artificial
  Probe
cgatacagaccatcaagcaatataa

SEQ ID NO: 42040 - DNA, 25 bp, Artificial
  Probe
acagaccatcaagcaatataactat

SEQ ID NO: 42041 - DNA, 25 bp, Artificial
  Probe
atacagaccatcaagcaatataact

SEQ ID NO: 42042 - DNA, 25 bp, Artificial
  Probe
gatacagaccatcaagcaatataac

SEQ ID NO: 42043 - DNA, 25 bp, Artificial
  Probe
cagaccatcaagcaatataactatc

SEQ ID NO: 42044 - DNA, 25 bp, Artificial
  Probe
ggacctctaccaacaatatggaatt

SEQ ID NO: 42045 - DNA, 25 bp, Artificial
  Probe
tacagaccatcaagcaatataacta

SEQ ID NO: 42046 - DNA, 25 bp, Artificial
  Probe
tggacctctaccaacaatatggaat

SEQ ID NO: 42047 - DNA, 25 bp, Artificial
  Probe
agaccatcaagcaatataactatct

SEQ ID NO: 42048 - DNA, 25 bp, Artificial
  Probe
gacctctaccaacaatatggaattg

SEQ ID NO: 42049 - DNA, 25 bp, Artificial
  Probe
ggcgatacagaccatcaagcaatat

SEQ ID NO: 42050 - DNA, 25 bp, Artificial
  Probe
ctggacctctaccaacaatatggaa

SEQ ID NO: 42051 - DNA, 25 bp, Artificial
  Probe
ttctggacctctaccaacaatatgg

SEQ ID NO: 42052 - DNA, 25 bp, Artificial
  Probe
atacttgtctgactcaatttcacca

SEQ ID NO: 42053 - DNA, 25 bp, Artificial
  Probe
tacttgtctgactcaatttcaccac

SEQ ID NO: 42054 - DNA, 25 bp, Artificial
  Probe
ccatcaagcaatataactatcttca

SEQ ID NO: 42055 - DNA, 25 bp, Artificial
  Probe
accatcaagcaatataactatcttc

SEQ ID NO: 42056 - DNA, 25 bp, Artificial
  Probe
gaccatcaagcaatataactatctt

SEQ ID NO: 42057 - DNA, 25 bp, Artificial
  Probe
tatacttgtctgactcaatttcacc

SEQ ID NO: 42058 - DNA, 25 bp, Artificial
  Probe
tctggacctctaccaacaatatgga

SEQ ID NO: 42059 - DNA, 25 bp, Artificial
  Probe
cttgtctgactcaatttcaccacag

SEQ ID NO: 42060 - DNA, 25 bp, Artificial
  Probe
gaattgtcacccatcatcatccgat

SEQ ID NO: 42061 - DNA, 25 bp, Artificial
  Probe
acttgtctgactcaatttcaccaca

SEQ ID NO: 42062 - DNA, 25 bp, Artificial
  Probe
aattgtcacccatcatcatccgatc

SEQ ID NO: 42063 - DNA, 25 bp, Artificial
  Probe
agaggggaactgtcaaaatatagag

SEQ ID NO: 42064 - DNA, 25 bp, Artificial
  Probe
aggggaactgtcaaaatatagagtc

SEQ ID NO: 42065 - DNA, 25 bp, Artificial
  Probe
gaggggaactgtcaaaatatagagt

SEQ ID NO: 42066 - DNA, 25 bp, Artificial
  Probe
aatttcaccacagcaagccatagac

SEQ ID NO: 42067 - DNA, 25 bp, Artificial
  Probe
caatttcaccacagcaagccataga

SEQ ID NO: 42068 - DNA, 25 bp, Artificial
  Probe
tcaatttcaccacagcaagccatag

SEQ ID NO: 42069 - DNA, 25 bp, Artificial
  Probe
ctcaatttcaccacagcaagccata

SEQ ID NO: 42070 - DNA, 25 bp, Artificial
  Probe
actgtcaaaatatagagtcccaaac

SEQ ID NO: 42071 - DNA, 25 bp, Artificial
  Probe
cagaggggaactgtcaaaatataga

SEQ ID NO: 42072 - DNA, 25 bp, Artificial
  Probe
gaactgtcaaaatatagagtcccaa

SEQ ID NO: 42073 - DNA, 25 bp, Artificial
  Probe
ccagaggggaactgtcaaaatatag

SEQ ID NO: 42074 - DNA, 25 bp, Artificial
  Probe
tctgactcaatttcaccacagcaag

SEQ ID NO: 42075 - DNA, 25 bp, Artificial
  Probe
accagaggggaactgtcaaaatata

SEQ ID NO: 42076 - DNA, 25 bp, Artificial
  Probe
aactgtcaaaatatagagtcccaaa

SEQ ID NO: 42077 - DNA, 25 bp, Artificial
  Probe
ggaactgtcaaaatatagagtccca

SEQ ID NO: 42078 - DNA, 25 bp, Artificial
  Probe
catcaagcaatataactatcttcat

SEQ ID NO: 42079 - DNA, 25 bp, Artificial
  Probe
gtctgactcaatttcaccacagcaa

SEQ ID NO: 42080 - DNA, 25 bp, Artificial
  Probe
ttgtctgactcaatttcaccacagc

SEQ ID NO: 42081 - DNA, 25 bp, Artificial
  Probe
ggggaactgtcaaaatatagagtcc

SEQ ID NO: 42082 - DNA, 25 bp, Artificial
  Probe
actgccatcctgaacataaatgtta

SEQ ID NO: 42083 - DNA, 25 bp, Artificial
  Probe
ctgtagatggagagtgatgacaatc

SEQ ID NO: 42084 - DNA, 25 bp, Artificial
  Probe
gtagatggagagtgatgacaatcgt

SEQ ID NO: 42085 - DNA, 25 bp, Artificial
  Probe
tgtagatggagagtgatgacaatcg

SEQ ID NO: 42086 - DNA, 25 bp, Artificial
  Probe
gctgtagatggagagtgatgacaat

SEQ ID NO: 42087 - DNA, 25 bp, Artificial
  Probe
atgtgactctgacttcaacactgat

SEQ ID NO: 42088 - DNA, 25 bp, Artificial
  Probe
acttgaatggctctctctttagaaa

SEQ ID NO: 42089 - DNA, 25 bp, Artificial
  Probe
cacttgaatggctctctctttagaa

SEQ ID NO: 42090 - DNA, 25 bp, Artificial
  Probe
gatgtgactctgacttcaacactga

SEQ ID NO: 42091 - DNA, 25 bp, Artificial
  Probe
atgtgtgctgtagatggagagtgat

SEQ ID NO: 42092 - DNA, 25 bp, Artificial
  Probe
cttgaatggctctctctttagaaag

SEQ ID NO: 42093 - DNA, 25 bp, Artificial
  Probe
tgtgactctgacttcaacactgatc

SEQ ID NO: 42094 - DNA, 25 bp, Artificial
  Probe
tgctgtagatggagagtgatgacaa

SEQ ID NO: 42095 - DNA, 25 bp, Artificial
  Probe
gaggatgtgactctgacttcaacac

SEQ ID NO: 42096 - DNA, 25 bp, Artificial
  Probe
tgtgctgtagatggagagtgatgac

SEQ ID NO: 42097 - DNA, 25 bp, Artificial
  Probe
gtgtgctgtagatggagagtgatga

SEQ ID NO: 42098 - DNA, 25 bp, Artificial
  Probe
gatgtgtgctgtagatggagagtga

SEQ ID NO: 42099 - DNA, 25 bp, Artificial
  Probe
ggatgtgactctgacttcaacactg

SEQ ID NO: 42100 - DNA, 25 bp, Artificial
  Probe
gtgactctgacttcaacactgatcc

SEQ ID NO: 42101 - DNA, 25 bp, Artificial
  Probe
aggatgtgactctgacttcaacact

SEQ ID NO: 42102 - DNA, 25 bp, Artificial
  Probe
tgtgtgctgtagatggagagtgatg

SEQ ID NO: 42103 - DNA, 25 bp, Artificial
  Probe
tgatgtgtgctgtagatggagagtg

SEQ ID NO: 42104 - DNA, 25 bp, Artificial
  Probe
ctttcaaatgggaggatgtgactct

SEQ ID NO: 42105 - DNA, 25 bp, Artificial
  Probe
gtgctgtagatggagagtgatgaca

SEQ ID NO: 42106 - DNA, 25 bp, Artificial
  Probe
tttcaaatgggaggatgtgactctg

SEQ ID NO: 42107 - DNA, 25 bp, Artificial
  Probe
ccacttgaatggctctctctttaga

SEQ ID NO: 42108 - DNA, 25 bp, Artificial
  Probe
ggaggatgtgactctgacttcaaca

SEQ ID NO: 42109 - DNA, 25 bp, Artificial
  Probe
tcagaatggactgtctagaggtctc

SEQ ID NO: 42110 - DNA, 25 bp, Artificial
  Probe
ctcagaatggactgtctagaggtct

SEQ ID NO: 42111 - DNA, 25 bp, Artificial
  Probe
ttgaatggctctctctttagaaaga

SEQ ID NO: 42112 - DNA, 25 bp, Artificial
  Probe
aaatgggaggatgtgactctgactt

SEQ ID NO: 42113 - DNA, 25 bp, Artificial
  Probe
ttcaaatgggaggatgtgactctga

SEQ ID NO: 42114 - DNA, 25 bp, Artificial
  Probe
tagactgtgagcctttcaaatggga

SEQ ID NO: 42115 - DNA, 25 bp, Artificial
  Probe
cctttcaaatgggaggatgtgactc

SEQ ID NO: 42116 - DNA, 25 bp, Artificial
  Probe
aatgggaggatgtgactctgacttc

SEQ ID NO: 42117 - DNA, 25 bp, Artificial
  Probe
ctcacattgggagggataaatgctt

SEQ ID NO: 42118 - DNA, 25 bp, Artificial
  Probe
caaatgggaggatgtgactctgact

SEQ ID NO: 42119 - DNA, 25 bp, Artificial
  Probe
tcaaatgggaggatgtgactctgac

SEQ ID NO: 42120 - DNA, 25 bp, Artificial
  Probe
cagaatggactgtctagaggtctcc

SEQ ID NO: 42121 - DNA, 25 bp, Artificial
  Probe
tgactctgacttcaacactgatccc

SEQ ID NO: 42122 - DNA, 25 bp, Artificial
  Probe
gggaggatgtgactctgacttcaac

SEQ ID NO: 42123 - DNA, 25 bp, Artificial
  Probe
agactgtgagcctttcaaatgggag

SEQ ID NO: 42124 - DNA, 25 bp, Artificial
  Probe
atgggaggatgtgactctgacttca

SEQ ID NO: 42125 - DNA, 25 bp, Artificial
  Probe
tgggaggatgtgactctgacttcaa

SEQ ID NO: 42126 - DNA, 25 bp, Artificial
  Probe
gagcctttcaaatgggaggatgtga

SEQ ID NO: 42127 - DNA, 25 bp, Artificial
  Probe
ctgtgagcctttcaaatgggaggat

SEQ ID NO: 42128 - DNA, 25 bp, Artificial
  Probe
gacagaggactgaataccatcattg

SEQ ID NO: 42129 - DNA, 25 bp, Artificial
  Probe
ttgcttcctgtgttgttgtcctatt

SEQ ID NO: 42130 - DNA, 25 bp, Artificial
  Probe
cgacagaggactgaataccatcatt

SEQ ID NO: 42131 - DNA, 25 bp, Artificial
  Probe
gctttagtaatggacccagttctat

SEQ ID NO: 42132 - DNA, 25 bp, Artificial
  Probe
agttctattgttggctttagtggtg

SEQ ID NO: 42133 - DNA, 25 bp, Artificial
  Probe
cagttctattgttggctttagtggt

SEQ ID NO: 42134 - DNA, 25 bp, Artificial
  Probe
agtaatggacccagttctattgttg

SEQ ID NO: 42135 - DNA, 25 bp, Artificial
  Probe
tagtaatggacccagttctattgtt

SEQ ID NO: 42136 - DNA, 25 bp, Artificial
  Probe
ttagtaatggacccagttctattgt

SEQ ID NO: 42137 - DNA, 25 bp, Artificial
  Probe
acagaggactgaataccatcattgg

SEQ ID NO: 42138 - DNA, 25 bp, Artificial
  Probe
gttgcttcctgtgttgttgtcctat

SEQ ID NO: 42139 - DNA, 25 bp, Artificial
  Probe
gttctattgttggctttagtggtgg

SEQ ID NO: 42140 - DNA, 25 bp, Artificial
  Probe
tttagtaatggacccagttctattg

SEQ ID NO: 42141 - DNA, 25 bp, Artificial
  Probe
ttctattgttggctttagtggtgga

SEQ ID NO: 42142 - DNA, 25 bp, Artificial
  Probe
ctagtaaagtttcaggcttgttccc

SEQ ID NO: 42143 - DNA, 25 bp, Artificial
  Probe
ctttagtaatggacccagttctatt

SEQ ID NO: 42144 - DNA, 25 bp, Artificial
  Probe
gaggactgaataccatcattggctt

SEQ ID NO: 42145 - DNA, 25 bp, Artificial
  Probe
tctcttacggctagtaaagtttcag

SEQ ID NO: 42146 - DNA, 25 bp, Artificial
  Probe
ttctcttacggctagtaaagtttca

SEQ ID NO: 42147 - DNA, 25 bp, Artificial
  Probe
gctagtaaagtttcaggcttgttcc

SEQ ID NO: 42148 - DNA, 25 bp, Artificial
  Probe
ggctagtaaagtttcaggcttgttc

SEQ ID NO: 42149 - DNA, 25 bp, Artificial
  Probe
agctttagtaatggacccagttcta

SEQ ID NO: 42150 - DNA, 25 bp, Artificial
  Probe
cttctcttacggctagtaaagtttc

SEQ ID NO: 42151 - DNA, 25 bp, Artificial
  Probe
ctcttacggctagtaaagtttcagg

SEQ ID NO: 42152 - DNA, 25 bp, Artificial
  Probe
gcttctcttacggctagtaaagttt

SEQ ID NO: 42153 - DNA, 25 bp, Artificial
  Probe
tctattgttggctttagtggtggac

SEQ ID NO: 42154 - DNA, 25 bp, Artificial
  Probe
cttcgacagaggactgaataccatc

SEQ ID NO: 42155 - DNA, 25 bp, Artificial
  Probe
gtaatggacccagttctattgttgg

SEQ ID NO: 42156 - DNA, 25 bp, Artificial
  Probe
agaggactgaataccatcattggct

SEQ ID NO: 42157 - DNA, 25 bp, Artificial
  Probe
cagaggactgaataccatcattggc

SEQ ID NO: 42158 - DNA, 25 bp, Artificial
  Probe
gacccagttctattgttggctttag

SEQ ID NO: 42159 - DNA, 25 bp, Artificial
  Probe
tcgacagaggactgaataccatcat

SEQ ID NO: 42160 - DNA, 25 bp, Artificial
  Probe
tacggctagtaaagtttcaggcttg

SEQ ID NO: 42161 - DNA, 25 bp, Artificial
  Probe
ccagttctattgttggctttagtgg

SEQ ID NO: 42162 - DNA, 25 bp, Artificial
  Probe
cccagttctattgttggctttagtg

SEQ ID NO: 42163 - DNA, 25 bp, Artificial
  Probe
cagctttagtaatggacccagttct

SEQ ID NO: 42164 - DNA, 25 bp, Artificial
  Probe
ttcgacagaggactgaataccatca

SEQ ID NO: 42165 - DNA, 25 bp, Artificial
  Probe
ttacggctagtaaagtttcaggctt

SEQ ID NO: 42166 - DNA, 25 bp, Artificial
  Probe
acccagttctattgttggctttagt

SEQ ID NO: 42167 - DNA, 25 bp, Artificial
  Probe
gactgaataccatcattggctttgg

SEQ ID NO: 42168 - DNA, 25 bp, Artificial
  Probe
ggactgaataccatcattggctttg

SEQ ID NO: 42169 - DNA, 25 bp, Artificial
  Probe
ggcttctcttacggctagtaaagtt

SEQ ID NO: 42170 - DNA, 25 bp, Artificial
  Probe
aggactgaataccatcattggcttt

SEQ ID NO: 42171 - DNA, 25 bp, Artificial
  Probe
tgttgcttcctgtgttgttgtccta

SEQ ID NO: 42172 - DNA, 25 bp, Artificial
  Probe
ttgtgttgcttcctgtgttgttgtc

SEQ ID NO: 42173 - DNA, 25 bp, Artificial
  Probe
tttcttatccttcccattccttctg

SEQ ID NO: 42174 - DNA, 25 bp, Artificial
  Probe
atttcttatccttcccattccttct

SEQ ID NO: 42175 - DNA, 25 bp, Artificial
  Probe
ggctgaggaaccacttatttatttc

SEQ ID NO: 42176 - DNA, 25 bp, Artificial
  Probe
gggctgaggaaccacttatttattt

SEQ ID NO: 42177 - DNA, 25 bp, Artificial
  Probe
ttcttatccttcccattccttctgt

SEQ ID NO: 42178 - DNA, 25 bp, Artificial
  Probe
gctgaggaaccacttatttatttct

SEQ ID NO: 42179 - DNA, 25 bp, Artificial
  Probe
tcttatccttcccattccttctgtg

SEQ ID NO: 42180 - DNA, 25 bp, Artificial
  Probe
ctattcatgggacaacagatacaca

SEQ ID NO: 42181 - DNA, 25 bp, Artificial
  Probe
tatttcttatccttcccattccttc

SEQ ID NO: 42182 - DNA, 25 bp, Artificial
  Probe
tattcatgggacaacagatacacat

SEQ ID NO: 42183 - DNA, 25 bp, Artificial
  Probe
tctattcatgggacaacagatacac

SEQ ID NO: 42184 - DNA, 25 bp, Artificial
  Probe
ttatttcttatccttcccattcctt

SEQ ID NO: 42185 - DNA, 25 bp, Artificial
  Probe
tttatttcttatccttcccattcct

SEQ ID NO: 42186 - DNA, 25 bp, Artificial
  Probe
ttccttctgtggatgaagtattcaa

SEQ ID NO: 42187 - DNA, 25 bp, Artificial
  Probe
tccttctgtggatgaagtattcaag

SEQ ID NO: 42188 - DNA, 25 bp, Artificial
  Probe
attccttctgtggatgaagtattca

SEQ ID NO: 42189 - DNA, 25 bp, Artificial
  Probe
cattccttctgtggatgaagtattc

SEQ ID NO: 42190 - DNA, 25 bp, Artificial
  Probe
ccattccttctgtggatgaagtatt

SEQ ID NO: 42191 - DNA, 25 bp, Artificial
  Probe
ggacaacagatacacatgggtataa

SEQ ID NO: 42192 - DNA, 25 bp, Artificial
  Probe
cttctgtggatgaagtattcaaggc

SEQ ID NO: 42193 - DNA, 25 bp, Artificial
  Probe
ttctccaaatctattcatgggacaa

SEQ ID NO: 42194 - DNA, 25 bp, Artificial
  Probe
tttctccaaatctattcatgggaca

SEQ ID NO: 42195 - DNA, 25 bp, Artificial
  Probe
tctccaaatctattcatgggacaac

SEQ ID NO: 42196 - DNA, 25 bp, Artificial
  Probe
gacaacagatacacatgggtataaa

SEQ ID NO: 42197 - DNA, 25 bp, Artificial
  Probe
ccaaatctattcatgggacaacaga

SEQ ID NO: 42198 - DNA, 25 bp, Artificial
  Probe
tccaaatctattcatgggacaacag

SEQ ID NO: 42199 - DNA, 25 bp, Artificial
  Probe
ctccaaatctattcatgggacaaca

SEQ ID NO: 42200 - DNA, 25 bp, Artificial
  Probe
gggacaacagatacacatgggtata

SEQ ID NO: 42201 - DNA, 25 bp, Artificial
  Probe
ctgaggaaccacttatttatttctt

SEQ ID NO: 42202 - DNA, 25 bp, Artificial
  Probe
atttatttcttatccttcccattcc

SEQ ID NO: 42203 - DNA, 25 bp, Artificial
  Probe
atttctccaaatctattcatgggac

SEQ ID NO: 42204 - DNA, 25 bp, Artificial
  Probe
atctattcatgggacaacagataca

SEQ ID NO: 42205 - DNA, 25 bp, Artificial
  Probe
caaatctattcatgggacaacagat

SEQ ID NO: 42206 - DNA, 25 bp, Artificial
  Probe
acaacagatacacatgggtataaat

SEQ ID NO: 42207 - DNA, 25 bp, Artificial
  Probe
gataagttttcttccattctctgcc

SEQ ID NO: 42208 - DNA, 25 bp, Artificial
  Probe
aatttctccaaatctattcatggga

SEQ ID NO: 42209 - DNA, 25 bp, Artificial
  Probe
tattcaaggccagtaaatttctcca

SEQ ID NO: 42210 - DNA, 25 bp, Artificial
  Probe
gtattcaaggccagtaaatttctcc

SEQ ID NO: 42211 - DNA, 25 bp, Artificial
  Probe
aggatgtccaggataagttttcttc

SEQ ID NO: 42212 - DNA, 25 bp, Artificial
  Probe
aatctattcatgggacaacagatac

SEQ ID NO: 42213 - DNA, 25 bp, Artificial
  Probe
caggatgtccaggataagttttctt

SEQ ID NO: 42214 - DNA, 25 bp, Artificial
  Probe
ccttctgtggatgaagtattcaagg

SEQ ID NO: 42215 - DNA, 25 bp, Artificial
  Probe
attcaaggccagtaaatttctccaa

SEQ ID NO: 42216 - DNA, 25 bp, Artificial
  Probe
ataagttttcttccattctctgccg

SEQ ID NO: 42217 - DNA, 25 bp, Artificial
  Probe
cttatccttcccattccttctgtgg

SEQ ID NO: 42218 - DNA, 25 bp, Artificial
  Probe
ttgctacatgaagtccaatcagaag

SEQ ID NO: 42219 - DNA, 25 bp, Artificial
  Probe
gttgtctcatcctctttcatactca

SEQ ID NO: 42220 - DNA, 25 bp, Artificial
  Probe
tgttgtctcatcctctttcatactc

SEQ ID NO: 42221 - DNA, 25 bp, Artificial
  Probe
gtgttgtctcatcctctttcatact

SEQ ID NO: 42222 - DNA, 25 bp, Artificial
  Probe
tgtctcatcctctttcatactcaaa

SEQ ID NO: 42223 - DNA, 25 bp, Artificial
  Probe
ccattcctttagaaatatgccacag

SEQ ID NO: 42224 - DNA, 25 bp, Artificial
  Probe
cattcctttagaaatatgccacagc

SEQ ID NO: 42225 - DNA, 25 bp, Artificial
  Probe
ggtgttgtctcatcctctttcatac

SEQ ID NO: 42226 - DNA, 25 bp, Artificial
  Probe
agtaatctgcccattcctttagaaa

SEQ ID NO: 42227 - DNA, 25 bp, Artificial
  Probe
cccattcctttagaaatatgccaca

SEQ ID NO: 42228 - DNA, 25 bp, Artificial
  Probe
tagtaatctgcccattcctttagaa

SEQ ID NO: 42229 - DNA, 25 bp, Artificial
  Probe
ttgtctcatcctctttcatactcaa

SEQ ID NO: 42230 - DNA, 25 bp, Artificial
  Probe
gaatcaggtgttgtctcatcctctt

SEQ ID NO: 42231 - DNA, 25 bp, Artificial
  Probe
gtaatctgcccattcctttagaaat

SEQ ID NO: 42232 - DNA, 25 bp, Artificial
  Probe
atagtaatctgcccattcctttaga

SEQ ID NO: 42233 - DNA, 25 bp, Artificial
  Probe
tctgcccattcctttagaaatatgc

SEQ ID NO: 42234 - DNA, 25 bp, Artificial
  Probe
atctgcccattcctttagaaatatg

SEQ ID NO: 42235 - DNA, 25 bp, Artificial
  Probe
aatagtaatctgcccattcctttag

SEQ ID NO: 42236 - DNA, 25 bp, Artificial
  Probe
attcctttagaaatatgccacagcc

SEQ ID NO: 42237 - DNA, 25 bp, Artificial
  Probe
aatctgcccattcctttagaaatat

SEQ ID NO: 42238 - DNA, 25 bp, Artificial
  Probe
agtgtgaaagttccttctgtttata

SEQ ID NO: 42239 - DNA, 25 bp, Artificial
  Probe
cagtgtgaaagttccttctgtttat

SEQ ID NO: 42240 - DNA, 25 bp, Artificial
  Probe
ctgcccattcctttagaaatatgcc

SEQ ID NO: 42241 - DNA, 25 bp, Artificial
  Probe
ataatagtaatctgcccattccttt

SEQ ID NO: 42242 - DNA, 25 bp, Artificial
  Probe
cttcacagactcctcaaatgacaac

SEQ ID NO: 42243 - DNA, 25 bp, Artificial
  Probe
tttgctacatgaagtccaatcagaa

SEQ ID NO: 42244 - DNA, 25 bp, Artificial
  Probe
agaatcaggtgttgtctcatcctct

SEQ ID NO: 42245 - DNA, 25 bp, Artificial
  Probe
gcccattcctttagaaatatgccac

SEQ ID NO: 42246 - DNA, 25 bp, Artificial
  Probe
aatgtccaattgtatctgtgaacca

SEQ ID NO: 42247 - DNA, 25 bp, Artificial
  Probe
aggtgttgtctcatcctctttcata

SEQ ID NO: 42248 - DNA, 25 bp, Artificial
  Probe
gagtgtttggcagtttgaagtcatt

SEQ ID NO: 42249 - DNA, 25 bp, Artificial
  Probe
taatctgcccattcctttagaaata

SEQ ID NO: 42250 - DNA, 25 bp, Artificial
  Probe
gtttgctacatgaagtccaatcaga

SEQ ID NO: 42251 - DNA, 25 bp, Artificial
  Probe
agtttgaagtcattcccacagagag

SEQ ID NO: 42252 - DNA, 25 bp, Artificial
  Probe
agtgtttggcagtttgaagtcattc

SEQ ID NO: 42253 - DNA, 25 bp, Artificial
  Probe
tgcccattcctttagaaatatgcca

SEQ ID NO: 42254 - DNA, 25 bp, Artificial
  Probe
ttcacagactcctcaaatgacaaca

SEQ ID NO: 42255 - DNA, 25 bp, Artificial
  Probe
cagtttgaagtcattcccacagaga

SEQ ID NO: 42256 - DNA, 25 bp, Artificial
  Probe
taatagtaatctgcccattccttta

SEQ ID NO: 42257 - DNA, 25 bp, Artificial
  Probe
aatcaggtgttgtctcatcctcttt

SEQ ID NO: 42258 - DNA, 25 bp, Artificial
  Probe
ctacatgaagtccaatcagaagccg

SEQ ID NO: 42259 - DNA, 25 bp, Artificial
  Probe
tataatagtaatctgcccattcctt

SEQ ID NO: 42260 - DNA, 25 bp, Artificial
  Probe
ctttagaaatatgccacagcccagt

SEQ ID NO: 42261 - DNA, 25 bp, Artificial
  Probe
ggtttgctacatgaagtccaatcag

SEQ ID NO: 42262 - DNA, 25 bp, Artificial
  Probe
atcaggtgttgtctcatcctctttc

SEQ ID NO: 42263 - DNA, 25 bp, Artificial
  Probe
tcacagactttctccactgaccttt

SEQ ID NO: 42264 - DNA, 25 bp, Artificial
  Probe
ctcacagactttctccactgacctt

SEQ ID NO: 42265 - DNA, 25 bp, Artificial
  Probe
cacagactttctccactgacctttt

SEQ ID NO: 42266 - DNA, 25 bp, Artificial
  Probe
tcaactcaaatacacagccctgttg

SEQ ID NO: 42267 - DNA, 25 bp, Artificial
  Probe
tttaaagtcctgcttgcccattggt

SEQ ID NO: 42268 - DNA, 25 bp, Artificial
  Probe
ttttaaagtcctgcttgcccattgg

SEQ ID NO: 42269 - DNA, 25 bp, Artificial
  Probe
ctgcttgcccattggtgttacaaaa

SEQ ID NO: 42270 - DNA, 25 bp, Artificial
  Probe
caactcaaatacacagccctgttgc

SEQ ID NO: 42271 - DNA, 25 bp, Artificial
  Probe
aagtgctcacagactttctccactg

SEQ ID NO: 42272 - DNA, 25 bp, Artificial
  Probe
aaagtgctcacagactttctccact

SEQ ID NO: 42273 - DNA, 25 bp, Artificial
  Probe
ataagcaagcgaaggtagcacatag

SEQ ID NO: 42274 - DNA, 25 bp, Artificial
  Probe
cataagcaagcgaaggtagcacata

SEQ ID NO: 42275 - DNA, 25 bp, Artificial
  Probe
cttccaaagaacactctatgaatct

SEQ ID NO: 42276 - DNA, 25 bp, Artificial
  Probe
tacactaaagtcatcatgggcattt

SEQ ID NO: 42277 - DNA, 25 bp, Artificial
  Probe
attctacactaaagtcatcatgggc

SEQ ID NO: 42278 - DNA, 25 bp, Artificial
  Probe
ctacactaaagtcatcatgggcatt

SEQ ID NO: 42279 - DNA, 25 bp, Artificial
  Probe
aattctacactaaagtcatcatggg

SEQ ID NO: 42280 - DNA, 25 bp, Artificial
  Probe
tctacactaaagtcatcatgggcat

SEQ ID NO: 42281 - DNA, 25 bp, Artificial
  Probe
ttctacactaaagtcatcatgggca

SEQ ID NO: 42282 - DNA, 25 bp, Artificial
  Probe
ccaaagaacactctatgaatctagt

SEQ ID NO: 42283 - DNA, 25 bp, Artificial
  Probe
tccaaagaacactctatgaatctag

SEQ ID NO: 42284 - DNA, 25 bp, Artificial
  Probe
ttatgtttgtgatggttggatattt

SEQ ID NO: 42285 - DNA, 25 bp, Artificial
  Probe
tttatgtttgtgatggttggatatt

SEQ ID NO: 42286 - DNA, 25 bp, Artificial
  Probe
ttccaaagaacactctatgaatcta

SEQ ID NO: 42287 - DNA, 25 bp, Artificial
  Probe
taagcaagcgaaggtagcacatagt

SEQ ID NO: 42288 - DNA, 25 bp, Artificial
  Probe
atgattactcgctgctcctttcttc

SEQ ID NO: 42289 - DNA, 25 bp, Artificial
  Probe
gatgattactcgctgctcctttctt

SEQ ID NO: 42290 - DNA, 25 bp, Artificial
  Probe
ctcatcttttgctttgtatgctttg

SEQ ID NO: 42291 - DNA, 25 bp, Artificial
  Probe
tcttccaaagaacactctatgaatc

SEQ ID NO: 42292 - DNA, 25 bp, Artificial
  Probe
cctcatcttttgctttgtatgcttt

SEQ ID NO: 42293 - DNA, 25 bp, Artificial
  Probe
catcttttgctttgtatgctttgaa

SEQ ID NO: 42294 - DNA, 25 bp, Artificial
  Probe
tcgtgtttattggtgtaaatttcaa

SEQ ID NO: 42295 - DNA, 25 bp, Artificial
  Probe
ttcgtgtttattggtgtaaatttca

SEQ ID NO: 42296 - DNA, 25 bp, Artificial
  Probe
tttatgggaacaagcacattttgaa

SEQ ID NO: 42297 - DNA, 25 bp, Artificial
  Probe
ttttatgggaacaagcacattttga

SEQ ID NO: 42298 - DNA, 25 bp, Artificial
  Probe
atcttttgctttgtatgctttgaaa

SEQ ID NO: 42299 - DNA, 25 bp, Artificial
  Probe
ttatgggaacaagcacattttgaag

SEQ ID NO: 42300 - DNA, 25 bp, Artificial
  Probe
gggaacaagcacattttgaagtaaa

SEQ ID NO: 42301 - DNA, 25 bp, Artificial
  Probe
tcatcttttgctttgtatgctttga

SEQ ID NO: 42302 - DNA, 25 bp, Artificial
  Probe
atgtttgtgatggttggatattttc

SEQ ID NO: 42303 - DNA, 25 bp, Artificial
  Probe
agatgattactcgctgctcctttct

SEQ ID NO: 42304 - DNA, 25 bp, Artificial
  Probe
atgggaacaagcacattttgaagta

SEQ ID NO: 42305 - DNA, 25 bp, Artificial
  Probe
tatgggaacaagcacattttgaagt

SEQ ID NO: 42306 - DNA, 25 bp, Artificial
  Probe
cactaaagtcatcatgggcattttc

SEQ ID NO: 42307 - DNA, 25 bp, Artificial
  Probe
tgggaacaagcacattttgaagtaa

SEQ ID NO: 42308 - DNA, 25 bp, Artificial
  Probe
gaggtggaattctacactaaagtca

SEQ ID NO: 42309 - DNA, 25 bp, Artificial
  Probe
acactaaagtcatcatgggcatttt

SEQ ID NO: 42310 - DNA, 25 bp, Artificial
  Probe
aattttatgtttgtgatggttggat

SEQ ID NO: 42311 - DNA, 25 bp, Artificial
  Probe
aggtggaattctacactaaagtcat

SEQ ID NO: 42312 - DNA, 25 bp, Artificial
  Probe
ggtggaattctacactaaagtcatc

SEQ ID NO: 42313 - DNA, 25 bp, Artificial
  Probe
cagatgattactcgctgctcctttc

SEQ ID NO: 42314 - DNA, 25 bp, Artificial
  Probe
cgaggtggaattctacactaaagtc

SEQ ID NO: 42315 - DNA, 25 bp, Artificial
  Probe
ggaacaagcacattttgaagtaaaa

SEQ ID NO: 42316 - DNA, 25 bp, Artificial
  Probe
actaaagtcatcatgggcattttcc

SEQ ID NO: 42317 - DNA, 25 bp, Artificial
  Probe
tgtttgtgatggttggatattttcc

SEQ ID NO: 42318 - DNA, 25 bp, Artificial
  Probe
tggctattctgtctctcatttctac

SEQ ID NO: 42319 - DNA, 25 bp, Artificial
  Probe
ctggctattctgtctctcatttcta

SEQ ID NO: 42320 - DNA, 25 bp, Artificial
  Probe
ctctggctattctgtctctcatttc

SEQ ID NO: 42321 - DNA, 25 bp, Artificial
  Probe
tctggctattctgtctctcatttct

SEQ ID NO: 42322 - DNA, 25 bp, Artificial
  Probe
ggctattctgtctctcatttctaca

SEQ ID NO: 42323 - DNA, 25 bp, Artificial
  Probe
tgtctatatttgatcttcagcaggg

SEQ ID NO: 42324 - DNA, 25 bp, Artificial
  Probe
gctctggctattctgtctctcattt

SEQ ID NO: 42325 - DNA, 25 bp, Artificial
  Probe
gctattctgtctctcatttctacaa

SEQ ID NO: 42326 - DNA, 25 bp, Artificial
  Probe
ggctctggctattctgtctctcatt

SEQ ID NO: 42327 - DNA, 25 bp, Artificial
  Probe
ctgtctatatttgatcttcagcagg

SEQ ID NO: 42328 - DNA, 25 bp, Artificial
  Probe
tttcctactcctgctcttctctctg

SEQ ID NO: 42329 - DNA, 25 bp, Artificial
  Probe
aggctctggctattctgtctctcat

SEQ ID NO: 42330 - DNA, 25 bp, Artificial
  Probe
aaagccacttccctatctctccttc

SEQ ID NO: 42331 - DNA, 25 bp, Artificial
  Probe
gaaagccacttccctatctctcctt

SEQ ID NO: 42332 - DNA, 25 bp, Artificial
  Probe
actactgttttcctgtatgacccat

SEQ ID NO: 42333 - DNA, 25 bp, Artificial
  Probe
caactactgttttcctgtatgaccc

SEQ ID NO: 42334 - DNA, 25 bp, Artificial
  Probe
aaggctctggctattctgtctctca

SEQ ID NO: 42335 - DNA, 25 bp, Artificial
  Probe
aaaggctctggctattctgtctctc

SEQ ID NO: 42336 - DNA, 25 bp, Artificial
  Probe
aactactgttttcctgtatgaccca

SEQ ID NO: 42337 - DNA, 25 bp, Artificial
  Probe
acaactactgttttcctgtatgacc

SEQ ID NO: 42338 - DNA, 25 bp, Artificial
  Probe
gtctatatttgatcttcagcagggg

SEQ ID NO: 42339 - DNA, 25 bp, Artificial
  Probe
ctactgttttcctgtatgacccata

SEQ ID NO: 42340 - DNA, 25 bp, Artificial
  Probe
actgttttcctgtatgacccataag

SEQ ID NO: 42341 - DNA, 25 bp, Artificial
  Probe
gttttcctactcctgctcttctctc

SEQ ID NO: 42342 - DNA, 25 bp, Artificial
  Probe
tactgttttcctgtatgacccataa

SEQ ID NO: 42343 - DNA, 25 bp, Artificial
  Probe
ctattctgtctctcatttctacaaa

SEQ ID NO: 42344 - DNA, 25 bp, Artificial
  Probe
ttttcctactcctgctcttctctct

SEQ ID NO: 42345 - DNA, 25 bp, Artificial
  Probe
ttcctactcctgctcttctctctgc

SEQ ID NO: 42346 - DNA, 25 bp, Artificial
  Probe
ataaggttttcctactcctgctctt

SEQ ID NO: 42347 - DNA, 25 bp, Artificial
  Probe
ctgttttcctgtatgacccataagg

SEQ ID NO: 42348 - DNA, 25 bp, Artificial
  Probe
tgtatgacccataaggttttcctac

SEQ ID NO: 42349 - DNA, 25 bp, Artificial
  Probe
tttcctgtatgacccataaggtttt

SEQ ID NO: 42350 - DNA, 25 bp, Artificial
  Probe
ttttcctgtatgacccataaggttt

SEQ ID NO: 42351 - DNA, 25 bp, Artificial
  Probe
gtatgacccataaggttttcctact

SEQ ID NO: 42352 - DNA, 25 bp, Artificial
  Probe
ctgtatgacccataaggttttccta

SEQ ID NO: 42353 - DNA, 25 bp, Artificial
  Probe
tatgacccataaggttttcctactc

SEQ ID NO: 42354 - DNA, 25 bp, Artificial
  Probe
ttcctgtatgacccataaggttttc

SEQ ID NO: 42355 - DNA, 25 bp, Artificial
  Probe
gtagccattttgaacatcttggaag

SEQ ID NO: 42356 - DNA, 25 bp, Artificial
  Probe
gttttcctgtatgacccataaggtt

SEQ ID NO: 42357 - DNA, 25 bp, Artificial
  Probe
tagccattttgaacatcttggaagt

SEQ ID NO: 42358 - DNA, 25 bp, Artificial
  Probe
taaggttttcctactcctgctcttc

SEQ ID NO: 42359 - DNA, 25 bp, Artificial
  Probe
cataaggttttcctactcctgctct

SEQ ID NO: 42360 - DNA, 25 bp, Artificial
  Probe
tgtagccattttgaacatcttggaa

SEQ ID NO: 42361 - DNA, 25 bp, Artificial
  Probe
tctatatttgatcttcagcaggggc

SEQ ID NO: 42362 - DNA, 25 bp, Artificial
  Probe
agccattttgaacatcttggaagtt

SEQ ID NO: 42363 - DNA, 25 bp, Artificial
  Probe
taataaataaaggtgtggcagaagc

SEQ ID NO: 42364 - DNA, 25 bp, Artificial
  Probe
ctatgacctaaggatggtacaagtc

SEQ ID NO: 42365 - DNA, 25 bp, Artificial
  Probe
ttattctcaagatgctgctgaccaa

SEQ ID NO: 42366 - DNA, 25 bp, Artificial
  Probe
gcaaataataaataaaggtgtggca

SEQ ID NO: 42367 - DNA, 25 bp, Artificial
  Probe
tattctcaagatgctgctgaccaag

SEQ ID NO: 42368 - DNA, 25 bp, Artificial
  Probe
catttattctcaagatgctgctgac

SEQ ID NO: 42369 - DNA, 25 bp, Artificial
  Probe
gctatgacctaaggatggtacaagt

SEQ ID NO: 42370 - DNA, 25 bp, Artificial
  Probe
atttattctcaagatgctgctgacc

SEQ ID NO: 42371 - DNA, 25 bp, Artificial
  Probe
ccatttattctcaagatgctgctga

SEQ ID NO: 42372 - DNA, 25 bp, Artificial
  Probe
cagaccaattcagaaacccaacaaa

SEQ ID NO: 42373 - DNA, 25 bp, Artificial
  Probe
cgctatgacctaaggatggtacaag

SEQ ID NO: 42374 - DNA, 25 bp, Artificial
  Probe
ataataaataaaggtgtggcagaag

SEQ ID NO: 42375 - DNA, 25 bp, Artificial
  Probe
tttattctcaagatgctgctgacca

SEQ ID NO: 42376 - DNA, 25 bp, Artificial
  Probe
caaataataaataaaggtgtggcag

SEQ ID NO: 42377 - DNA, 25 bp, Artificial
  Probe
tgcaaataataaataaaggtgtggc

SEQ ID NO: 42378 - DNA, 25 bp, Artificial
  Probe
aataataaataaaggtgtggcagaa

SEQ ID NO: 42379 - DNA, 25 bp, Artificial
  Probe
aaataataaataaaggtgtggcaga

SEQ ID NO: 42380 - DNA, 25 bp, Artificial
  Probe
acctaaggatggtacaagtcacctc

SEQ ID NO: 42381 - DNA, 25 bp, Artificial
  Probe
gacctaaggatggtacaagtcacct

SEQ ID NO: 42382 - DNA, 25 bp, Artificial
  Probe
gggctggtatgcaaataataaataa

SEQ ID NO: 42383 - DNA, 25 bp, Artificial
  Probe
agaccaattcagaaacccaacaaaa

SEQ ID NO: 42384 - DNA, 25 bp, Artificial
  Probe
ccagaccaattcagaaacccaacaa

SEQ ID NO: 42385 - DNA, 25 bp, Artificial
  Probe
tatgacctaaggatggtacaagtca

SEQ ID NO: 42386 - DNA, 25 bp, Artificial
  Probe
caaggacccagaccaattcagaaac

SEQ ID NO: 42387 - DNA, 25 bp, Artificial
  Probe
tgtgggttctaatgtggtacagtca

SEQ ID NO: 42388 - DNA, 25 bp, Artificial
  Probe
ctaaggatggtacaagtcacctcgg

SEQ ID NO: 42389 - DNA, 25 bp, Artificial
  Probe
cctaaggatggtacaagtcacctcg

SEQ ID NO: 42390 - DNA, 25 bp, Artificial
  Probe
atgacctaaggatggtacaagtcac

SEQ ID NO: 42391 - DNA, 25 bp, Artificial
  Probe
aggggctggtatgcaaataataaat

SEQ ID NO: 42392 - DNA, 25 bp, Artificial
  Probe
caaagtgttcttctgggacctggta

SEQ ID NO: 42393 - DNA, 25 bp, Artificial
  Probe
ggggctggtatgcaaataataaata

SEQ ID NO: 42394 - DNA, 25 bp, Artificial
  Probe
attctcaagatgctgctgaccaagg

SEQ ID NO: 42395 - DNA, 25 bp, Artificial
  Probe
taaggatggtacaagtcacctcgga

SEQ ID NO: 42396 - DNA, 25 bp, Artificial
  Probe
gaggggctggtatgcaaataataaa

SEQ ID NO: 42397 - DNA, 25 bp, Artificial
  Probe
atgcaaataataaataaaggtgtgg

SEQ ID NO: 42398 - DNA, 25 bp, Artificial
  Probe
aaggacccagaccaattcagaaacc

SEQ ID NO: 42399 - DNA, 25 bp, Artificial
  Probe
ccaaggacccagaccaattcagaaa

SEQ ID NO: 42400 - DNA, 25 bp, Artificial
  Probe
ggctggtatgcaaataataaataaa

SEQ ID NO: 42401 - DNA, 25 bp, Artificial
  Probe
tacctgtgggttctaatgtggtaca

SEQ ID NO: 42402 - DNA, 25 bp, Artificial
  Probe
aataaataaaggtgtggcagaagcc

SEQ ID NO: 42403 - DNA, 25 bp, Artificial
  Probe
gacccagaccaattcagaaacccaa

SEQ ID NO: 42404 - DNA, 25 bp, Artificial
  Probe
ggaggggctggtatgcaaataataa

SEQ ID NO: 42405 - DNA, 25 bp, Artificial
  Probe
tgacctaaggatggtacaagtcacc

SEQ ID NO: 42406 - DNA, 25 bp, Artificial
  Probe
ataaataaaggtgtggcagaagcct

SEQ ID NO: 42407 - DNA, 25 bp, Artificial
  Probe
cccagaccaattcagaaacccaaca

SEQ ID NO: 42408 - DNA, 25 bp, Artificial
  Probe
tatcacaaggtcatattacagaggt

SEQ ID NO: 42409 - DNA, 25 bp, Artificial
  Probe
gtatgatattacaaggagagacacg

SEQ ID NO: 42410 - DNA, 25 bp, Artificial
  Probe
cgttctatcacaaggtcatattaca

SEQ ID NO: 42411 - DNA, 25 bp, Artificial
  Probe
atctcttcaagtacatcatcatcgg

SEQ ID NO: 42412 - DNA, 25 bp, Artificial
  Probe
gcctatctcttcaagtacatcatca

SEQ ID NO: 42413 - DNA, 25 bp, Artificial
  Probe
ctatcacaaggtcatattacagagg

SEQ ID NO: 42414 - DNA, 25 bp, Artificial
  Probe
tcgttctatcacaaggtcatattac

SEQ ID NO: 42415 - DNA, 25 bp, Artificial
  Probe
tacgcctatctcttcaagtacatca

SEQ ID NO: 42416 - DNA, 25 bp, Artificial
  Probe
cgcctatctcttcaagtacatcatc

SEQ ID NO: 42417 - DNA, 25 bp, Artificial
  Probe
acgcctatctcttcaagtacatcat

SEQ ID NO: 42418 - DNA, 25 bp, Artificial
  Probe
atcacaaggtcatattacagaggtg

SEQ ID NO: 42419 - DNA, 25 bp, Artificial
  Probe
ttcgttctatcacaaggtcatatta

SEQ ID NO: 42420 - DNA, 25 bp, Artificial
  Probe
caagactgcttctaatgtagaggag

SEQ ID NO: 42421 - DNA, 25 bp, Artificial
  Probe
tatctcttcaagtacatcatcatcg

SEQ ID NO: 42422 - DNA, 25 bp, Artificial
  Probe
aagactgcttctaatgtagaggagg

SEQ ID NO: 42423 - DNA, 25 bp, Artificial
  Probe
atattacaaggagagacacgttcaa

SEQ ID NO: 42424 - DNA, 25 bp, Artificial
  Probe
gatattacaaggagagacacgttca

SEQ ID NO: 42425 - DNA, 25 bp, Artificial
  Probe
tgatattacaaggagagacacgttc

SEQ ID NO: 42426 - DNA, 25 bp, Artificial
  Probe
atgatattacaaggagagacacgtt

SEQ ID NO: 42427 - DNA, 25 bp, Artificial
  Probe
cctatctcttcaagtacatcatcat

SEQ ID NO: 42428 - DNA, 25 bp, Artificial
  Probe
tgaaactattgaaatggctttgtgt

SEQ ID NO: 42429 - DNA, 25 bp, Artificial
  Probe
tattacaaggagagacacgttcaac

SEQ ID NO: 42430 - DNA, 25 bp, Artificial
  Probe
tctatcacaaggtcatattacagag

SEQ ID NO: 42431 - DNA, 25 bp, Artificial
  Probe
ccaagactgcttctaatgtagagga

SEQ ID NO: 42432 - DNA, 25 bp, Artificial
  Probe
gaaactattgaaatggctttgtgtc

SEQ ID NO: 42433 - DNA, 25 bp, Artificial
  Probe
tctcttcaagtacatcatcatcggc

SEQ ID NO: 42434 - DNA, 25 bp, Artificial
  Probe
tagaggaggcatttattaacacagc

SEQ ID NO: 42435 - DNA, 25 bp, Artificial
  Probe
gttctatcacaaggtcatattacag

SEQ ID NO: 42436 - DNA, 25 bp, Artificial
  Probe
gtagaggaggcatttattaacacag

SEQ ID NO: 42437 - DNA, 25 bp, Artificial
  Probe
tatgatattacaaggagagacacgt

SEQ ID NO: 42438 - DNA, 25 bp, Artificial
  Probe
tgttggtaaatcgtgcttattgcta

SEQ ID NO: 42439 - DNA, 25 bp, Artificial
  Probe
atgaaactattgaaatggctttgtg

SEQ ID NO: 42440 - DNA, 25 bp, Artificial
  Probe
aaactattgaaatggctttgtgtca

SEQ ID NO: 42441 - DNA, 25 bp, Artificial
  Probe
tcacaaggtcatattacagaggtgc

SEQ ID NO: 42442 - DNA, 25 bp, Artificial
  Probe
ttctatcacaaggtcatattacaga

SEQ ID NO: 42443 - DNA, 25 bp, Artificial
  Probe
ctttcgttctatcacaaggtcatat

SEQ ID NO: 42444 - DNA, 25 bp, Artificial
  Probe
aactattgaaatggctttgtgtcac

SEQ ID NO: 42445 - DNA, 25 bp, Artificial
  Probe
tttcgttctatcacaaggtcatatt

SEQ ID NO: 42446 - DNA, 25 bp, Artificial
  Probe
aggtgttggtaaatcgtgcttattg

SEQ ID NO: 42447 - DNA, 25 bp, Artificial
  Probe
caggtgttggtaaatcgtgcttatt

SEQ ID NO: 42448 - DNA, 25 bp, Artificial
  Probe
tgtagaggaggcatttattaacaca

SEQ ID NO: 42449 - DNA, 25 bp, Artificial
  Probe
tgagacatgaaactattgaaatggc

SEQ ID NO: 42450 - DNA, 25 bp, Artificial
  Probe
gagacatgaaactattgaaatggct

SEQ ID NO: 42451 - DNA, 25 bp, Artificial
  Probe
tggacttatcttcatggaaacttct

SEQ ID NO: 42452 - DNA, 25 bp, Artificial
  Probe
agacatgaaactattgaaatggctt

SEQ ID NO: 42453 - DNA, 25 bp, Artificial
  Probe
gagagcaggtggaagattatgtaag

SEQ ID NO: 42454 - DNA, 25 bp, Artificial
  Probe
ttacagtgacagaacaagaataggc

SEQ ID NO: 42455 - DNA, 25 bp, Artificial
  Probe
tgaattgagaatggatactgcttga

SEQ ID NO: 42456 - DNA, 25 bp, Artificial
  Probe
gaattgagaatggatactgcttgaa

SEQ ID NO: 42457 - DNA, 25 bp, Artificial
  Probe
atgaattgagaatggatactgcttg

SEQ ID NO: 42458 - DNA, 25 bp, Artificial
  Probe
ggtggaagattatgtaaggtctgaa

SEQ ID NO: 42459 - DNA, 25 bp, Artificial
  Probe
aggtggaagattatgtaaggtctga

SEQ ID NO: 42460 - DNA, 25 bp, Artificial
  Probe
tacagtgacagaacaagaataggct

SEQ ID NO: 42461 - DNA, 25 bp, Artificial
  Probe
attacagtgacagaacaagaatagg

SEQ ID NO: 42462 - DNA, 25 bp, Artificial
  Probe
ggatattacagtgacagaacaagaa

SEQ ID NO: 42463 - DNA, 25 bp, Artificial
  Probe
aatgaattgagaatggatactgctt

SEQ ID NO: 42464 - DNA, 25 bp, Artificial
  Probe
aagtagagactggattattctgtgc

SEQ ID NO: 42465 - DNA, 25 bp, Artificial
  Probe
agagcaggtggaagattatgtaagg

SEQ ID NO: 42466 - DNA, 25 bp, Artificial
  Probe
agcaggtggaagattatgtaaggtc

SEQ ID NO: 42467 - DNA, 25 bp, Artificial
  Probe
gagcaggtggaagattatgtaaggt

SEQ ID NO: 42468 - DNA, 25 bp, Artificial
  Probe
taatgaattgagaatggatactgct

SEQ ID NO: 42469 - DNA, 25 bp, Artificial
  Probe
cgagagcaggtggaagattatgtaa

SEQ ID NO: 42470 - DNA, 25 bp, Artificial
  Probe
caggtggaagattatgtaaggtctg

SEQ ID NO: 42471 - DNA, 25 bp, Artificial
  Probe
gcaggtggaagattatgtaaggtct

SEQ ID NO: 42472 - DNA, 25 bp, Artificial
  Probe
tgagaatggatactgcttgaaatga

SEQ ID NO: 42473 - DNA, 25 bp, Artificial
  Probe
gggatattacagtgacagaacaaga

SEQ ID NO: 42474 - DNA, 25 bp, Artificial
  Probe
ttgagaatggatactgcttgaaatg

SEQ ID NO: 42475 - DNA, 25 bp, Artificial
  Probe
ataatgaattgagaatggatactgc

SEQ ID NO: 42476 - DNA, 25 bp, Artificial
  Probe
gagaatggatactgcttgaaatgaa

SEQ ID NO: 42477 - DNA, 25 bp, Artificial
  Probe
aatcggtaaattgagaactccattg

SEQ ID NO: 42478 - DNA, 25 bp, Artificial
  Probe
aaatccacttgctataaaggtctca

SEQ ID NO: 42479 - DNA, 25 bp, Artificial
  Probe
atcggtaaattgagaactccattgt

SEQ ID NO: 42480 - DNA, 25 bp, Artificial
  Probe
aatccacttgctataaaggtctcag

SEQ ID NO: 42481 - DNA, 25 bp, Artificial
  Probe
agaatggatactgcttgaaatgaaa

SEQ ID NO: 42482 - DNA, 25 bp, Artificial
  Probe
acgagagcaggtggaagattatgta

SEQ ID NO: 42483 - DNA, 25 bp, Artificial
  Probe
attgagaatggatactgcttgaaat

SEQ ID NO: 42484 - DNA, 25 bp, Artificial
  Probe
aattgagaatggatactgcttgaaa

SEQ ID NO: 42485 - DNA, 25 bp, Artificial
  Probe
aaatcggtaaattgagaactccatt

SEQ ID NO: 42486 - DNA, 25 bp, Artificial
  Probe
ggtaaattgagaactccattgtgtt

SEQ ID NO: 42487 - DNA, 25 bp, Artificial
  Probe
gatattacagtgacagaacaagaat

SEQ ID NO: 42488 - DNA, 25 bp, Artificial
  Probe
tcggtaaattgagaactccattgtg

SEQ ID NO: 42489 - DNA, 25 bp, Artificial
  Probe
agtagagactggattattctgtgca

SEQ ID NO: 42490 - DNA, 25 bp, Artificial
  Probe
cggtaaattgagaactccattgtgt

SEQ ID NO: 42491 - DNA, 25 bp, Artificial
  Probe
tggaagattatgtaaggtctgaaac

SEQ ID NO: 42492 - DNA, 25 bp, Artificial
  Probe
gtggaagattatgtaaggtctgaaa

SEQ ID NO: 42493 - DNA, 25 bp, Artificial
  Probe
acagtgacagaacaagaataggctg

SEQ ID NO: 42494 - DNA, 25 bp, Artificial
  Probe
gtaaggtctgaaacatggaaacttt

SEQ ID NO: 42495 - DNA, 25 bp, Artificial
  Probe
actttctgtttctcatcttcagtga

SEQ ID NO: 42496 - DNA, 25 bp, Artificial
  Probe
aactttctgtttctcatcttcagtg

SEQ ID NO: 42497 - DNA, 25 bp, Artificial
  Probe
gagacgagagcaggtggaagattat

SEQ ID NO: 42498 - DNA, 25 bp, Artificial
  Probe
ttgatgtttatgaaataaggtggca

SEQ ID NO: 42499 - DNA, 25 bp, Artificial
  Probe
tgatgtttatgaaataaggtggcat

SEQ ID NO: 42500 - DNA, 25 bp, Artificial
  Probe
atgtttatgaaataaggtggcatct

SEQ ID NO: 42501 - DNA, 25 bp, Artificial
  Probe
taatattgcacagctagacctcgtt

SEQ ID NO: 42502 - DNA, 25 bp, Artificial
  Probe
atctcctctcttgagcctctaattt

SEQ ID NO: 42503 - DNA, 25 bp, Artificial
  Probe
ttctaatattgcacagctagacctc

SEQ ID NO: 42504 - DNA, 25 bp, Artificial
  Probe
ctaatattgcacagctagacctcgt

SEQ ID NO: 42505 - DNA, 25 bp, Artificial
  Probe
tcctctcttgagcctctaatttctc

SEQ ID NO: 42506 - DNA, 25 bp, Artificial
  Probe
ctcctctcttgagcctctaatttct

SEQ ID NO: 42507 - DNA, 25 bp, Artificial
  Probe
tctcctctcttgagcctctaatttc

SEQ ID NO: 42508 - DNA, 25 bp, Artificial
  Probe
attgatgtttatgaaataaggtggc

SEQ ID NO: 42509 - DNA, 25 bp, Artificial
  Probe
cagagggacagttcagaaagaagaa

SEQ ID NO: 42510 - DNA, 25 bp, Artificial
  Probe
atctaataaataagtggctgactcc

SEQ ID NO: 42511 - DNA, 25 bp, Artificial
  Probe
gaacttctggcctcgtgattaatac

SEQ ID NO: 42512 - DNA, 25 bp, Artificial
  Probe
ctctcttgagcctctaatttctccc

SEQ ID NO: 42513 - DNA, 25 bp, Artificial
  Probe
cctctcttgagcctctaatttctcc

SEQ ID NO: 42514 - DNA, 25 bp, Artificial
  Probe
tctaatattgcacagctagacctcg

SEQ ID NO: 42515 - DNA, 25 bp, Artificial
  Probe
agaaagaagaacatctggtgctgag

SEQ ID NO: 42516 - DNA, 25 bp, Artificial
  Probe
tcgtgattaatacagtgagggtatc

SEQ ID NO: 42517 - DNA, 25 bp, Artificial
  Probe
ctcgtgattaatacagtgagggtat

SEQ ID NO: 42518 - DNA, 25 bp, Artificial
  Probe
aacttctggcctcgtgattaataca

SEQ ID NO: 42519 - DNA, 25 bp, Artificial
  Probe
aatattgcacagctagacctcgttg

SEQ ID NO: 42520 - DNA, 25 bp, Artificial
  Probe
agtcaatctaataaataagtggctg

SEQ ID NO: 42521 - DNA, 25 bp, Artificial
  Probe
acagagggacagttcagaaagaaga

SEQ ID NO: 42522 - DNA, 25 bp, Artificial
  Probe
cacagagggacagttcagaaagaag

SEQ ID NO: 42523 - DNA, 25 bp, Artificial
  Probe
ggaacttctggcctcgtgattaata

SEQ ID NO: 42524 - DNA, 25 bp, Artificial
  Probe
cattgatgtttatgaaataaggtgg

SEQ ID NO: 42525 - DNA, 25 bp, Artificial
  Probe
caatctaataaataagtggctgact

SEQ ID NO: 42526 - DNA, 25 bp, Artificial
  Probe
tcaatctaataaataagtggctgac

SEQ ID NO: 42527 - DNA, 25 bp, Artificial
  Probe
gtcaatctaataaataagtggctga

SEQ ID NO: 42528 - DNA, 25 bp, Artificial
  Probe
tttctaatattgcacagctagacct

SEQ ID NO: 42529 - DNA, 25 bp, Artificial
  Probe
gtttctaatattgcacagctagacc

SEQ ID NO: 42530 - DNA, 25 bp, Artificial
  Probe
tatgggcaagacagaaaatacattg

SEQ ID NO: 42531 - DNA, 25 bp, Artificial
  Probe
aatctaataaataagtggctgactc

SEQ ID NO: 42532 - DNA, 25 bp, Artificial
  Probe
tggcacatgctaaataaatgttcat

SEQ ID NO: 42533 - DNA, 25 bp, Artificial
  Probe
atatgggcaagacagaaaatacatt

SEQ ID NO: 42534 - DNA, 25 bp, Artificial
  Probe
gaaagaagaacatctggtgctgagg

SEQ ID NO: 42535 - DNA, 25 bp, Artificial
  Probe
cgtgattaatacagtgagggtatca

SEQ ID NO: 42536 - DNA, 25 bp, Artificial
  Probe
gtggcacatgctaaataaatgttca

SEQ ID NO: 42537 - DNA, 25 bp, Artificial
  Probe
cttctggcctcgtgattaatacagt

SEQ ID NO: 42538 - DNA, 25 bp, Artificial
  Probe
acttctggcctcgtgattaatacag

SEQ ID NO: 42539 - DNA, 25 bp, Artificial
  Probe
aagtcaatctaataaataagtggct

SEQ ID NO: 42540 - DNA, 25 bp, Artificial
  Probe
gggcaagacagaaaatacattgtta

SEQ ID NO: 42541 - DNA, 25 bp, Artificial
  Probe
ggcacatgctaaataaatgttcatt

SEQ ID NO: 42542 - DNA, 25 bp, Artificial
  Probe
gcaagacagaaaatacattgttagc

SEQ ID NO: 42543 - DNA, 25 bp, Artificial
  Probe
caccgatcagaagaacaatatcaat

SEQ ID NO: 42544 - DNA, 25 bp, Artificial
  Probe
accgatcagaagaacaatatcaatt

SEQ ID NO: 42545 - DNA, 25 bp, Artificial
  Probe
gcaccgatcagaagaacaatatcaa

SEQ ID NO: 42546 - DNA, 25 bp, Artificial
  Probe
caaggatgtctaacccaaatgaatg

SEQ ID NO: 42547 - DNA, 25 bp, Artificial
  Probe
aaggatgtctaacccaaatgaatgt

SEQ ID NO: 42548 - DNA, 25 bp, Artificial
  Probe
aattactgtactcatgttgcattcc

SEQ ID NO: 42549 - DNA, 25 bp, Artificial
  Probe
attactgtatcacgttatctgctgc

SEQ ID NO: 42550 - DNA, 25 bp, Artificial
  Probe
aattactgtatcacgttatctgctg

SEQ ID NO: 42551 - DNA, 25 bp, Artificial
  Probe
caattactgtatcacgttatctgct

SEQ ID NO: 42552 - DNA, 25 bp, Artificial
  Probe
aggatgtctaacccaaatgaatgtg

SEQ ID NO: 42553 - DNA, 25 bp, Artificial
  Probe
acaattactgtatcacgttatctgc

SEQ ID NO: 42554 - DNA, 25 bp, Artificial
  Probe
acaaggatgtctaacccaaatgaat

SEQ ID NO: 42555 - DNA, 25 bp, Artificial
  Probe
cacccatatctgctctgttgaaatg

SEQ ID NO: 42556 - DNA, 25 bp, Artificial
  Probe
tgcaccgatcagaagaacaatatca

SEQ ID NO: 42557 - DNA, 25 bp, Artificial
  Probe
ggatgtctaacccaaatgaatgtgc

SEQ ID NO: 42558 - DNA, 25 bp, Artificial
  Probe
tcacccatatctgctctgttgaaat

SEQ ID NO: 42559 - DNA, 25 bp, Artificial
  Probe
ctgcaccgatcagaagaacaatatc

SEQ ID NO: 42560 - DNA, 25 bp, Artificial
  Probe
aattcacccatatctgctctgttga

SEQ ID NO: 42561 - DNA, 25 bp, Artificial
  Probe
atgggtaaagaagacctgaaagatt

SEQ ID NO: 42562 - DNA, 25 bp, Artificial
  Probe
gatgggtaaagaagacctgaaagat

SEQ ID NO: 42563 - DNA, 25 bp, Artificial
  Probe
ttactgtatcacgttatctgctgcc

SEQ ID NO: 42564 - DNA, 25 bp, Artificial
  Probe
gacaattactgtatcacgttatctg

SEQ ID NO: 42565 - DNA, 25 bp, Artificial
  Probe
agacaattactgtatcacgttatct

SEQ ID NO: 42566 - DNA, 25 bp, Artificial
  Probe
cagacaattactgtatcacgttatc

SEQ ID NO: 42567 - DNA, 25 bp, Artificial
  Probe
attactgtactcatgttgcattccc

SEQ ID NO: 42568 - DNA, 25 bp, Artificial
  Probe
ggatgggtaaagaagacctgaaaga

SEQ ID NO: 42569 - DNA, 25 bp, Artificial
  Probe
gatgtctaacccaaatgaatgtgca

SEQ ID NO: 42570 - DNA, 25 bp, Artificial
  Probe
cctgcaccgatcagaagaacaatat

SEQ ID NO: 42571 - DNA, 25 bp, Artificial
  Probe
ttactgtactcatgttgcattccct

SEQ ID NO: 42572 - DNA, 25 bp, Artificial
  Probe
caaccttggctacaccctgaataag

SEQ ID NO: 42573 - DNA, 25 bp, Artificial
  Probe
tatcatgctccagcacagacaatta

SEQ ID NO: 42574 - DNA, 25 bp, Artificial
  Probe
cgatcagaagaacaatatcaattgc

SEQ ID NO: 42575 - DNA, 25 bp, Artificial
  Probe
gggatgggtaaagaagacctgaaag

SEQ ID NO: 42576 - DNA, 25 bp, Artificial
  Probe
atcagaagaacaatatcaattgcct

SEQ ID NO: 42577 - DNA, 25 bp, Artificial
  Probe
tactgtactcatgttgcattccctg

SEQ ID NO: 42578 - DNA, 25 bp, Artificial
  Probe
gatcagaagaacaatatcaattgcc

SEQ ID NO: 42579 - DNA, 25 bp, Artificial
  Probe
tcaaccttggctacaccctgaataa

SEQ ID NO: 42580 - DNA, 25 bp, Artificial
  Probe
ccgatcagaagaacaatatcaattg

SEQ ID NO: 42581 - DNA, 25 bp, Artificial
  Probe
ctccagcacagacaattactgtatc

SEQ ID NO: 42582 - DNA, 25 bp, Artificial
  Probe
gaagaacaatatcaattgcctatgg

SEQ ID NO: 42583 - DNA, 25 bp, Artificial
  Probe
tcagaagaacaatatcaattgccta

SEQ ID NO: 42584 - DNA, 25 bp, Artificial
  Probe
attcacccatatctgctctgttgaa

SEQ ID NO: 42585 - DNA, 25 bp, Artificial
  Probe
gattctgggatgggtaaagaagacc

SEQ ID NO: 42586 - DNA, 25 bp, Artificial
  Probe
ggattctgggatgggtaaagaagac

SEQ ID NO: 42587 - DNA, 25 bp, Artificial
  Probe
ccagcacagacaattactgtatcac

SEQ ID NO: 42588 - DNA, 25 bp, Artificial
  Probe
aatatgggtagggttggagtaatga

SEQ ID NO: 42589 - DNA, 25 bp, Artificial
  Probe
atatgggtagggttggagtaatgac

SEQ ID NO: 42590 - DNA, 25 bp, Artificial
  Probe
caatatgggtagggttggagtaatg

SEQ ID NO: 42591 - DNA, 25 bp, Artificial
  Probe
ggttggagtaatgacaagggttatg

SEQ ID NO: 42592 - DNA, 25 bp, Artificial
  Probe
gttggagtaatgacaagggttatgc

SEQ ID NO: 42593 - DNA, 25 bp, Artificial
  Probe
tatgggtagggttggagtaatgaca

SEQ ID NO: 42594 - DNA, 25 bp, Artificial
  Probe
gggttggagtaatgacaagggttat

SEQ ID NO: 42595 - DNA, 25 bp, Artificial
  Probe
agggttggagtaatgacaagggtta

SEQ ID NO: 42596 - DNA, 25 bp, Artificial
  Probe
tagggttggagtaatgacaagggtt

SEQ ID NO: 42597 - DNA, 25 bp, Artificial
  Probe
atgggtagggttggagtaatgacaa

SEQ ID NO: 42598 - DNA, 25 bp, Artificial
  Probe
ctggagaccatctgtactgtcactt

SEQ ID NO: 42599 - DNA, 25 bp, Artificial
  Probe
gaactggagaccatctgtactgtca

SEQ ID NO: 42600 - DNA, 25 bp, Artificial
  Probe
tgaactggagaccatctgtactgtc

SEQ ID NO: 42601 - DNA, 25 bp, Artificial
  Probe
ctgaactggagaccatctgtactgt

SEQ ID NO: 42602 - DNA, 25 bp, Artificial
  Probe
gagtaatgacaagggttatgcagga

SEQ ID NO: 42603 - DNA, 25 bp, Artificial
  Probe
ttggagtaatgacaagggttatgca

SEQ ID NO: 42604 - DNA, 25 bp, Artificial
  Probe
ggagaccatctgtactgtcactttg

SEQ ID NO: 42605 - DNA, 25 bp, Artificial
  Probe
agtaatgacaagggttatgcaggac

SEQ ID NO: 42606 - DNA, 25 bp, Artificial
  Probe
tggagtaatgacaagggttatgcag

SEQ ID NO: 42607 - DNA, 25 bp, Artificial
  Probe
aactggagaccatctgtactgtcac

SEQ ID NO: 42608 - DNA, 25 bp, Artificial
  Probe
ccctccaagagtctctttgaataaa

SEQ ID NO: 42609 - DNA, 25 bp, Artificial
  Probe
gtagggttggagtaatgacaagggt

SEQ ID NO: 42610 - DNA, 25 bp, Artificial
  Probe
tgggtagggttggagtaatgacaag

SEQ ID NO: 42611 - DNA, 25 bp, Artificial
  Probe
gagaccatctgtactgtcactttgg

SEQ ID NO: 42612 - DNA, 25 bp, Artificial
  Probe
cctgaactggagaccatctgtactg

SEQ ID NO: 42613 - DNA, 25 bp, Artificial
  Probe
accctccaagagtctctttgaataa

SEQ ID NO: 42614 - DNA, 25 bp, Artificial
  Probe
ggagtaatgacaagggttatgcagg

SEQ ID NO: 42615 - DNA, 25 bp, Artificial
  Probe
cctccaagagtctctttgaataaat

SEQ ID NO: 42616 - DNA, 25 bp, Artificial
  Probe
gaccctccaagagtctctttgaata

SEQ ID NO: 42617 - DNA, 25 bp, Artificial
  Probe
tcacctgaactggagaccatctgta

SEQ ID NO: 42618 - DNA, 25 bp, Artificial
  Probe
tggagaccatctgtactgtcacttt

SEQ ID NO: 42619 - DNA, 25 bp, Artificial
  Probe
acctgaactggagaccatctgtact

SEQ ID NO: 42620 - DNA, 25 bp, Artificial
  Probe
cacctgaactggagaccatctgtac

SEQ ID NO: 42621 - DNA, 25 bp, Artificial
  Probe
ggtagggttggagtaatgacaaggg

SEQ ID NO: 42622 - DNA, 25 bp, Artificial
  Probe
gggtagggttggagtaatgacaagg

SEQ ID NO: 42623 - DNA, 25 bp, Artificial
  Probe
actggagaccatctgtactgtcact

SEQ ID NO: 42624 - DNA, 25 bp, Artificial
  Probe
gtccaagttcgttgtaacccattcg

SEQ ID NO: 42625 - DNA, 25 bp, Artificial
  Probe
cgttgtaacccattcgggatctatg

SEQ ID NO: 42626 - DNA, 25 bp, Artificial
  Probe
agaccatctgtactgtcactttggg

SEQ ID NO: 42627 - DNA, 25 bp, Artificial
  Probe
tcgttgtaacccattcgggatctat

SEQ ID NO: 42628 - DNA, 25 bp, Artificial
  Probe
gtaatgacaagggttatgcaggacc

SEQ ID NO: 42629 - DNA, 25 bp, Artificial
  Probe
ccaatatgggtagggttggagtaat

SEQ ID NO: 42630 - DNA, 25 bp, Artificial
  Probe
ttcgttgtaacccattcgggatcta

SEQ ID NO: 42631 - DNA, 25 bp, Artificial
  Probe
tcactttggggcaatgaagaaacaa

SEQ ID NO: 42632 - DNA, 25 bp, Artificial
  Probe
ctgtcactttggggcaatgaagaaa

SEQ ID NO: 42633 - DNA, 25 bp, Artificial
  Probe
atacaggagaacattcaggtctttg

SEQ ID NO: 42634 - DNA, 25 bp, Artificial
  Probe
gtatacaggagaacattcaggtctt

SEQ ID NO: 42635 - DNA, 25 bp, Artificial
  Probe
tatacaggagaacattcaggtcttt

SEQ ID NO: 42636 - DNA, 25 bp, Artificial
  Probe
tacaggagaacattcaggtctttga

SEQ ID NO: 42637 - DNA, 25 bp, Artificial
  Probe
cgtatacaggagaacattcaggtct

SEQ ID NO: 42638 - DNA, 25 bp, Artificial
  Probe
acgtatacaggagaacattcaggtc

SEQ ID NO: 42639 - DNA, 25 bp, Artificial
  Probe
cacgtatacaggagaacattcaggt

SEQ ID NO: 42640 - DNA, 25 bp, Artificial
  Probe
gagaacattcaggtctttgacttcc

SEQ ID NO: 42641 - DNA, 25 bp, Artificial
  Probe
ggagaacattcaggtctttgacttc

SEQ ID NO: 42642 - DNA, 25 bp, Artificial
  Probe
agcacgtatacaggagaacattcag

SEQ ID NO: 42643 - DNA, 25 bp, Artificial
  Probe
gagacagtcaacatggaagagtttc

SEQ ID NO: 42644 - DNA, 25 bp, Artificial
  Probe
cagatgtgacttggagaagtgaatg

SEQ ID NO: 42645 - DNA, 25 bp, Artificial
  Probe
gaacattcaggtctttgacttccag

SEQ ID NO: 42646 - DNA, 25 bp, Artificial
  Probe
aggagaacattcaggtctttgactt

SEQ ID NO: 42647 - DNA, 25 bp, Artificial
  Probe
cagcacgtatacaggagaacattca

SEQ ID NO: 42648 - DNA, 25 bp, Artificial
  Probe
attcaggtctttgacttccagttga

SEQ ID NO: 42649 - DNA, 25 bp, Artificial
  Probe
cattcaggtctttgacttccagttg

SEQ ID NO: 42650 - DNA, 25 bp, Artificial
  Probe
agaacattcaggtctttgacttcca

SEQ ID NO: 42651 - DNA, 25 bp, Artificial
  Probe
ggtaacatttgagggtatgcagata

SEQ ID NO: 42652 - DNA, 25 bp, Artificial
  Probe
aagagtttccctatgacgcagagta

SEQ ID NO: 42653 - DNA, 25 bp, Artificial
  Probe
caagattaaagagattgccgccaag

SEQ ID NO: 42654 - DNA, 25 bp, Artificial
  Probe
tgagacagtcaacatggaagagttt

SEQ ID NO: 42655 - DNA, 25 bp, Artificial
  Probe
gtaacatttgagggtatgcagataa

SEQ ID NO: 42656 - DNA, 25 bp, Artificial
  Probe
acattcaggtctttgacttccagtt

SEQ ID NO: 42657 - DNA, 25 bp, Artificial
  Probe
aacattcaggtctttgacttccagt

SEQ ID NO: 42658 - DNA, 25 bp, Artificial
  Probe
caggagaacattcaggtctttgact

SEQ ID NO: 42659 - DNA, 25 bp, Artificial
  Probe
gcacgtatacaggagaacattcagg

SEQ ID NO: 42660 - DNA, 25 bp, Artificial
  Probe
ccagcacgtatacaggagaacattc

SEQ ID NO: 42661 - DNA, 25 bp, Artificial
  Probe
gatgtgacttggagaagtgaatgga

SEQ ID NO: 42662 - DNA, 25 bp, Artificial
  Probe
agatgtgacttggagaagtgaatgg

SEQ ID NO: 42663 - DNA, 25 bp, Artificial
  Probe
ttcaggtctttgacttccagttgag

SEQ ID NO: 42664 - DNA, 25 bp, Artificial
  Probe
acaggagaacattcaggtctttgac

SEQ ID NO: 42665 - DNA, 25 bp, Artificial
  Probe
tcactattacaggaccccaagatta

SEQ ID NO: 42666 - DNA, 25 bp, Artificial
  Probe
ctatcctgagcttcaacagaaactg

SEQ ID NO: 42667 - DNA, 25 bp, Artificial
  Probe
attacaggaccccaagattaaagag

SEQ ID NO: 42668 - DNA, 25 bp, Artificial
  Probe
cactattacaggaccccaagattaa

SEQ ID NO: 42669 - DNA, 25 bp, Artificial
  Probe
taacatttgagggtatgcagataaa

SEQ ID NO: 42670 - DNA, 25 bp, Artificial
  Probe
tacaggaccccaagattaaagagat

SEQ ID NO: 42671 - DNA, 25 bp, Artificial
  Probe
actatcctgagcttcaacagaaact

SEQ ID NO: 42672 - DNA, 25 bp, Artificial
  Probe
cactatcctgagcttcaacagaaac

SEQ ID NO: 42673 - DNA, 25 bp, Artificial
  Probe
ttacaggaccccaagattaaagaga

SEQ ID NO: 42674 - DNA, 25 bp, Artificial
  Probe
atgtgacttggagaagtgaatggac

SEQ ID NO: 42675 - DNA, 25 bp, Artificial
  Probe
actattacaggaccccaagattaaa

SEQ ID NO: 42676 - DNA, 25 bp, Artificial
  Probe
ttcactattacaggaccccaagatt

SEQ ID NO: 42677 - DNA, 25 bp, Artificial
  Probe
tggtaacatttgagggtatgcagat

SEQ ID NO: 42678 - DNA, 25 bp, Artificial
  Probe
cccatattacacaccagcactttat

SEQ ID NO: 42679 - DNA, 25 bp, Artificial
  Probe
tttctctcttcatttccaagttgct

SEQ ID NO: 42680 - DNA, 25 bp, Artificial
  Probe
ccatattacacaccagcactttata

SEQ ID NO: 42681 - DNA, 25 bp, Artificial
  Probe
ttctctcttcatttccaagttgctg

SEQ ID NO: 42682 - DNA, 25 bp, Artificial
  Probe
catattacacaccagcactttatat

SEQ ID NO: 42683 - DNA, 25 bp, Artificial
  Probe
taggatttcatgctgccagtttctt

SEQ ID NO: 42684 - DNA, 25 bp, Artificial
  Probe
ttttctctcttcatttccaagttgc

SEQ ID NO: 42685 - DNA, 25 bp, Artificial
  Probe
ttgtaggatttcatgctgccagttt

SEQ ID NO: 42686 - DNA, 25 bp, Artificial
  Probe
gtaggatttcatgctgccagtttct

SEQ ID NO: 42687 - DNA, 25 bp, Artificial
  Probe
aggatttcatgctgccagtttcttt

SEQ ID NO: 42688 - DNA, 25 bp, Artificial
  Probe
ttacacaccagcactttatatattt

SEQ ID NO: 42689 - DNA, 25 bp, Artificial
  Probe
tctctcttcatttccaagttgctgg

SEQ ID NO: 42690 - DNA, 25 bp, Artificial
  Probe
tgtaggatttcatgctgccagtttc

SEQ ID NO: 42691 - DNA, 25 bp, Artificial
  Probe
cttgtaggatttcatgctgccagtt

SEQ ID NO: 42692 - DNA, 25 bp, Artificial
  Probe
attacacaccagcactttatatatt

SEQ ID NO: 42693 - DNA, 25 bp, Artificial
  Probe
ctcttcatttccaagttgctggcta

SEQ ID NO: 42694 - DNA, 25 bp, Artificial
  Probe
tcttcatttccaagttgctggctag

SEQ ID NO: 42695 - DNA, 25 bp, Artificial
  Probe
ccccatattacacaccagcacttta

SEQ ID NO: 42696 - DNA, 25 bp, Artificial
  Probe
agggcaggacatgaataaaggtcaa

SEQ ID NO: 42697 - DNA, 25 bp, Artificial
  Probe
atattacacaccagcactttatata

SEQ ID NO: 42698 - DNA, 25 bp, Artificial
  Probe
tattacacaccagcactttatatat

SEQ ID NO: 42699 - DNA, 25 bp, Artificial
  Probe
cttcatttccaagttgctggctagg

SEQ ID NO: 42700 - DNA, 25 bp, Artificial
  Probe
gtttctgctttgggtagtagccttg

SEQ ID NO: 42701 - DNA, 25 bp, Artificial
  Probe
atttgactttacttggtgggagggc

SEQ ID NO: 42702 - DNA, 25 bp, Artificial
  Probe
gagggcaggacatgaataaaggtca

SEQ ID NO: 42703 - DNA, 25 bp, Artificial
  Probe
ctctcttcatttccaagttgctggc

SEQ ID NO: 42704 - DNA, 25 bp, Artificial
  Probe
ggacagggtggagtctagagtaaag

SEQ ID NO: 42705 - DNA, 25 bp, Artificial
  Probe
tacacaccagcactttatatatttt

SEQ ID NO: 42706 - DNA, 25 bp, Artificial
  Probe
tccccatattacacaccagcacttt

SEQ ID NO: 42707 - DNA, 25 bp, Artificial
  Probe
ttccccatattacacaccagcactt

SEQ ID NO: 42708 - DNA, 25 bp, Artificial
  Probe
tctcttcatttccaagttgctggct

SEQ ID NO: 42709 - DNA, 25 bp, Artificial
  Probe
cttccccatattacacaccagcact

SEQ ID NO: 42710 - DNA, 25 bp, Artificial
  Probe
gacagggtggagtctagagtaaagc

SEQ ID NO: 42711 - DNA, 25 bp, Artificial
  Probe
ggagggcaggacatgaataaaggtc

SEQ ID NO: 42712 - DNA, 25 bp, Artificial
  Probe
gtggagtctagagtaaagcctcgtg

SEQ ID NO: 42713 - DNA, 25 bp, Artificial
  Probe
ggtttctgctttgggtagtagcctt

SEQ ID NO: 42714 - DNA, 25 bp, Artificial
  Probe
ccttgtaggatttcatgctgccagt

SEQ ID NO: 42715 - DNA, 25 bp, Artificial
  Probe
ctggggtttctgctttgggtagtag

SEQ ID NO: 42716 - DNA, 25 bp, Artificial
  Probe
gggacagggtggagtctagagtaaa

SEQ ID NO: 42717 - DNA, 25 bp, Artificial
  Probe
ctgaattccccaaagcctccttaac

SEQ ID NO: 42718 - DNA, 25 bp, Artificial
  Probe
acagggtggagtctagagtaaagcc

SEQ ID NO: 42719 - DNA, 25 bp, Artificial
  Probe
agggtggagtctagagtaaagcctc

SEQ ID NO: 42720 - DNA, 25 bp, Artificial
  Probe
tctgaattccccaaagcctccttaa

SEQ ID NO: 42721 - DNA, 25 bp, Artificial
  Probe
cagggtggagtctagagtaaagcct

SEQ ID NO: 42722 - DNA, 25 bp, Artificial
  Probe
ctctgaattccccaaagcctcctta

SEQ ID NO: 42723 - DNA, 25 bp, Artificial
  Probe
atgcttgtctggtaatatcacttct

SEQ ID NO: 42724 - DNA, 25 bp, Artificial
  Probe
ttcactgatgcttgtctggtaatat

SEQ ID NO: 42725 - DNA, 25 bp, Artificial
  Probe
gcttgtctggtaatatcacttctgt

SEQ ID NO: 42726 - DNA, 25 bp, Artificial
  Probe
tgcttgtctggtaatatcacttctg

SEQ ID NO: 42727 - DNA, 25 bp, Artificial
  Probe
gatgcttgtctggtaatatcacttc

SEQ ID NO: 42728 - DNA, 25 bp, Artificial
  Probe
cttcactgatgcttgtctggtaata

SEQ ID NO: 42729 - DNA, 25 bp, Artificial
  Probe
tcactgatgcttgtctggtaatatc

SEQ ID NO: 42730 - DNA, 25 bp, Artificial
  Probe
ttagattagtgttgtggtaatgcct

SEQ ID NO: 42731 - DNA, 25 bp, Artificial
  Probe
gttagattagtgttgtggtaatgcc

SEQ ID NO: 42732 - DNA, 25 bp, Artificial
  Probe
tagattagtgttgtggtaatgcctg

SEQ ID NO: 42733 - DNA, 25 bp, Artificial
  Probe
agttagattagtgttgtggtaatgc

SEQ ID NO: 42734 - DNA, 25 bp, Artificial
  Probe
tatacttcactgatgcttgtctggt

SEQ ID NO: 42735 - DNA, 25 bp, Artificial
  Probe
atacttcactgatgcttgtctggta

SEQ ID NO: 42736 - DNA, 25 bp, Artificial
  Probe
tacttcactgatgcttgtctggtaa

SEQ ID NO: 42737 - DNA, 25 bp, Artificial
  Probe
gattagtgttgtggtaatgcctgtt

SEQ ID NO: 42738 - DNA, 25 bp, Artificial
  Probe
tgtctggtaatatcacttctgtgtt

SEQ ID NO: 42739 - DNA, 25 bp, Artificial
  Probe
ttgtctggtaatatcacttctgtgt

SEQ ID NO: 42740 - DNA, 25 bp, Artificial
  Probe
acttcactgatgcttgtctggtaat

SEQ ID NO: 42741 - DNA, 25 bp, Artificial
  Probe
cttgtctggtaatatcacttctgtg

SEQ ID NO: 42742 - DNA, 25 bp, Artificial
  Probe
agattagtgttgtggtaatgcctgt

SEQ ID NO: 42743 - DNA, 25 bp, Artificial
  Probe
gtctggtaatatcacttctgtgtta

SEQ ID NO: 42744 - DNA, 25 bp, Artificial
  Probe
agtatagttagattagtgttgtggt

SEQ ID NO: 42745 - DNA, 25 bp, Artificial
  Probe
tatttgggtgtaggactctagtgtt

SEQ ID NO: 42746 - DNA, 25 bp, Artificial
  Probe
gtatacttcactgatgcttgtctgg

SEQ ID NO: 42747 - DNA, 25 bp, Artificial
  Probe
gactctagtgttcttgggtgtattg

SEQ ID NO: 42748 - DNA, 25 bp, Artificial
  Probe
gcagtagacttctttagtggtatcc

SEQ ID NO: 42749 - DNA, 25 bp, Artificial
  Probe
attagtgttgtggtaatgcctgttt

SEQ ID NO: 42750 - DNA, 25 bp, Artificial
  Probe
gtatttgggtgtaggactctagtgt

SEQ ID NO: 42751 - DNA, 25 bp, Artificial
  Probe
tgtatttgggtgtaggactctagtg

SEQ ID NO: 42752 - DNA, 25 bp, Artificial
  Probe
tgatgcttgtctggtaatatcactt

SEQ ID NO: 42753 - DNA, 25 bp, Artificial
  Probe
ctgatgcttgtctggtaatatcact

SEQ ID NO: 42754 - DNA, 25 bp, Artificial
  Probe
gagtatagttagattagtgttgtgg

SEQ ID NO: 42755 - DNA, 25 bp, Artificial
  Probe
actgatgcttgtctggtaatatcac

SEQ ID NO: 42756 - DNA, 25 bp, Artificial
  Probe
cactgatgcttgtctggtaatatca

SEQ ID NO: 42757 - DNA, 25 bp, Artificial
  Probe
ggactctagtgttcttgggtgtatt

SEQ ID NO: 42758 - DNA, 25 bp, Artificial
  Probe
atttgggtgtaggactctagtgttc

SEQ ID NO: 42759 - DNA, 25 bp, Artificial
  Probe
taggactctagtgttcttgggtgta

SEQ ID NO: 42760 - DNA, 25 bp, Artificial
  Probe
tctggtaatatcacttctgtgttat

SEQ ID NO: 42761 - DNA, 25 bp, Artificial
  Probe
tagttagattagtgttgtggtaatg

SEQ ID NO: 42762 - DNA, 25 bp, Artificial
  Probe
gtagacttctttagtggtatccagc

SEQ ID NO: 42763 - DNA, 25 bp, Artificial
  Probe
aggactctagtgttcttgggtgtat

SEQ ID NO: 42764 - DNA, 25 bp, Artificial
  Probe
tagacttctttagtggtatccagca

SEQ ID NO: 42765 - DNA, 25 bp, Artificial
  Probe
cagtagacttctttagtggtatcca

SEQ ID NO: 42766 - DNA, 25 bp, Artificial
  Probe
tcacttctgtgttataatggaaggt

SEQ ID NO: 42767 - DNA, 25 bp, Artificial
  Probe
actctagtgttcttgggtgtattgc

SEQ ID NO: 42768 - DNA, 25 bp, Artificial
  Probe
atgttggaataaggtgtgttggtta

SEQ ID NO: 42769 - DNA, 25 bp, Artificial
  Probe
gttggaataaggtgtgttggttatg

SEQ ID NO: 42770 - DNA, 25 bp, Artificial
  Probe
tgttggaataaggtgtgttggttat

SEQ ID NO: 42771 - DNA, 25 bp, Artificial
  Probe
aagatgttggaataaggtgtgttgg

SEQ ID NO: 42772 - DNA, 25 bp, Artificial
  Probe
ttggaataaggtgtgttggttatgg

SEQ ID NO: 42773 - DNA, 25 bp, Artificial
  Probe
gatgttggaataaggtgtgttggtt

SEQ ID NO: 42774 - DNA, 25 bp, Artificial
  Probe
ggaataaggtgtgttggttatggac

SEQ ID NO: 42775 - DNA, 25 bp, Artificial
  Probe
taggtcctgagtatgaagatgtatt

SEQ ID NO: 42776 - DNA, 25 bp, Artificial
  Probe
ttaggtcctgagtatgaagatgtat

SEQ ID NO: 42777 - DNA, 25 bp, Artificial
  Probe
tggaataaggtgtgttggttatgga

SEQ ID NO: 42778 - DNA, 25 bp, Artificial
  Probe
agatgttggaataaggtgtgttggt

SEQ ID NO: 42779 - DNA, 25 bp, Artificial
  Probe
aaagatgttggaataaggtgtgttg

SEQ ID NO: 42780 - DNA, 25 bp, Artificial
  Probe
gaaagatgttggaataaggtgtgtt

SEQ ID NO: 42781 - DNA, 25 bp, Artificial
  Probe
aatgggaaagatgttggaataaggt

SEQ ID NO: 42782 - DNA, 25 bp, Artificial
  Probe
aaatgggaaagatgttggaataagg

SEQ ID NO: 42783 - DNA, 25 bp, Artificial
  Probe
atgggaaagatgttggaataaggtg

SEQ ID NO: 42784 - DNA, 25 bp, Artificial
  Probe
ggaaagatgttggaataaggtgtgt

SEQ ID NO: 42785 - DNA, 25 bp, Artificial
  Probe
gaataaggtgtgttggttatggacc

SEQ ID NO: 42786 - DNA, 25 bp, Artificial
  Probe
aggtcctgagtatgaagatgtattt

SEQ ID NO: 42787 - DNA, 25 bp, Artificial
  Probe
atttaggtcctgagtatgaagatgt

SEQ ID NO: 42788 - DNA, 25 bp, Artificial
  Probe
aagatttaggtcctgagtatgaaga

SEQ ID NO: 42789 - DNA, 25 bp, Artificial
  Probe
gggaaagatgttggaataaggtgtg

SEQ ID NO: 42790 - DNA, 25 bp, Artificial
  Probe
gatttaggtcctgagtatgaagatg

SEQ ID NO: 42791 - DNA, 25 bp, Artificial
  Probe
agatttaggtcctgagtatgaagat

SEQ ID NO: 42792 - DNA, 25 bp, Artificial
  Probe
tttaggtcctgagtatgaagatgta

SEQ ID NO: 42793 - DNA, 25 bp, Artificial
  Probe
gatgtatttaacacttcactgctgt

SEQ ID NO: 42794 - DNA, 25 bp, Artificial
  Probe
tgatgagcacattatacaaacttca

SEQ ID NO: 42795 - DNA, 25 bp, Artificial
  Probe
agatgtatttaacacttcactgctg

SEQ ID NO: 42796 - DNA, 25 bp, Artificial
  Probe
tgggaaagatgttggaataaggtgt

SEQ ID NO: 42797 - DNA, 25 bp, Artificial
  Probe
gaagacctgacaaacataaccgatg

SEQ ID NO: 42798 - DNA, 25 bp, Artificial
  Probe
aaagatttaggtcctgagtatgaag

SEQ ID NO: 42799 - DNA, 25 bp, Artificial
  Probe
atgtatttaacacttcactgctgtg

SEQ ID NO: 42800 - DNA, 25 bp, Artificial
  Probe
tatttaacacttcactgctgtggat

SEQ ID NO: 42801 - DNA, 25 bp, Artificial
  Probe
aagatgtatttaacacttcactgct

SEQ ID NO: 42802 - DNA, 25 bp, Artificial
  Probe
ggtcctgagtatgaagatgtattta

SEQ ID NO: 42803 - DNA, 25 bp, Artificial
  Probe
atgatgagcacattatacaaacttc

SEQ ID NO: 42804 - DNA, 25 bp, Artificial
  Probe
cctaatattgggactgacttaccta

SEQ ID NO: 42805 - DNA, 25 bp, Artificial
  Probe
atttaacacttcactgctgtggatt

SEQ ID NO: 42806 - DNA, 25 bp, Artificial
  Probe
gtatttaacacttcactgctgtgga

SEQ ID NO: 42807 - DNA, 25 bp, Artificial
  Probe
ctgaggaagacctgacaaacataac

SEQ ID NO: 42808 - DNA, 25 bp, Artificial
  Probe
tttaacacttcactgctgtggattt

SEQ ID NO: 42809 - DNA, 25 bp, Artificial
  Probe
tgtatttaacacttcactgctgtgg

SEQ ID NO: 42810 - DNA, 25 bp, Artificial
  Probe
atcttatgatgagcacattatacaa

SEQ ID NO: 42811 - DNA, 25 bp, Artificial
  Probe
aatcttatgatgagcacattataca

SEQ ID NO: 42812 - DNA, 25 bp, Artificial
  Probe
ggaagacctgacaaacataaccgat

SEQ ID NO: 42813 - DNA, 25 bp, Artificial
  Probe
accaagtgtattagggatcaatgtt

SEQ ID NO: 42814 - DNA, 25 bp, Artificial
  Probe
taccaagtgtattagggatcaatgt

SEQ ID NO: 42815 - DNA, 25 bp, Artificial
  Probe
ccaagtgtattagggatcaatgttt

SEQ ID NO: 42816 - DNA, 25 bp, Artificial
  Probe
tagggataccaagtgtattagggat

SEQ ID NO: 42817 - DNA, 25 bp, Artificial
  Probe
ctagggataccaagtgtattaggga

SEQ ID NO: 42818 - DNA, 25 bp, Artificial
  Probe
ggataccaagtgtattagggatcaa

SEQ ID NO: 42819 - DNA, 25 bp, Artificial
  Probe
agggataccaagtgtattagggatc

SEQ ID NO: 42820 - DNA, 25 bp, Artificial
  Probe
gctctaggaagttcaaacaccattg

SEQ ID NO: 42821 - DNA, 25 bp, Artificial
  Probe
gggataccaagtgtattagggatca

SEQ ID NO: 42822 - DNA, 25 bp, Artificial
  Probe
agggatcaatgtttacttcctctta

SEQ ID NO: 42823 - DNA, 25 bp, Artificial
  Probe
tagggatcaatgtttacttcctctt

SEQ ID NO: 42824 - DNA, 25 bp, Artificial
  Probe
ttagggatcaatgtttacttcctct

SEQ ID NO: 42825 - DNA, 25 bp, Artificial
  Probe
tcaatgtttacttcctcttagacaa

SEQ ID NO: 42826 - DNA, 25 bp, Artificial
  Probe
gggatcaatgtttacttcctcttag

SEQ ID NO: 42827 - DNA, 25 bp, Artificial
  Probe
aaaggcatcccagaagacaagaatc

SEQ ID NO: 42828 - DNA, 25 bp, Artificial
  Probe
gaaaggcatcccagaagacaagaat

SEQ ID NO: 42829 - DNA, 25 bp, Artificial
  Probe
atcaatgtttacttcctcttagaca

SEQ ID NO: 42830 - DNA, 25 bp, Artificial
  Probe
gatcaatgtttacttcctcttagac

SEQ ID NO: 42831 - DNA, 25 bp, Artificial
  Probe
attagggatcaatgtttacttcctc

SEQ ID NO: 42832 - DNA, 25 bp, Artificial
  Probe
ataccaagtgtattagggatcaatg

SEQ ID NO: 42833 - DNA, 25 bp, Artificial
  Probe
aaggagaaaggcacttgtgtgataa

SEQ ID NO: 42834 - DNA, 25 bp, Artificial
  Probe
agctctaggaagttcaaacaccatt

SEQ ID NO: 42835 - DNA, 25 bp, Artificial
  Probe
aagctctaggaagttcaaacaccat

SEQ ID NO: 42836 - DNA, 25 bp, Artificial
  Probe
gacaagaatcccttcaaggagaaag

SEQ ID NO: 42837 - DNA, 25 bp, Artificial
  Probe
gataccaagtgtattagggatcaat

SEQ ID NO: 42838 - DNA, 25 bp, Artificial
  Probe
agacaagaatcccttcaaggagaaa

SEQ ID NO: 42839 - DNA, 25 bp, Artificial
  Probe
aagacaagaatcccttcaaggagaa

SEQ ID NO: 42840 - DNA, 25 bp, Artificial
  Probe
agtgtattagggatcaatgtttact

SEQ ID NO: 42841 - DNA, 25 bp, Artificial
  Probe
ggatcaatgtttacttcctcttaga

SEQ ID NO: 42842 - DNA, 25 bp, Artificial
  Probe
caatgtttacttcctcttagacaaa

SEQ ID NO: 42843 - DNA, 25 bp, Artificial
  Probe
aggagaaaggcacttgtgtgataag

SEQ ID NO: 42844 - DNA, 25 bp, Artificial
  Probe
caagtgtattagggatcaatgttta

SEQ ID NO: 42845 - DNA, 25 bp, Artificial
  Probe
gtgtattagggatcaatgtttactt

SEQ ID NO: 42846 - DNA, 25 bp, Artificial
  Probe
aagtgtattagggatcaatgtttac

SEQ ID NO: 42847 - DNA, 25 bp, Artificial
  Probe
gaagctctaggaagttcaaacacca

SEQ ID NO: 42848 - DNA, 25 bp, Artificial
  Probe
tgtattagggatcaatgtttacttc

SEQ ID NO: 42849 - DNA, 25 bp, Artificial
  Probe
aaggcacttgtgtgataagctgatg

SEQ ID NO: 42850 - DNA, 25 bp, Artificial
  Probe
gtattagggatcaatgtttacttcc

SEQ ID NO: 42851 - DNA, 25 bp, Artificial
  Probe
tattagggatcaatgtttacttcct

SEQ ID NO: 42852 - DNA, 25 bp, Artificial
  Probe
gaggtggagcagttgaagaaggaag

SEQ ID NO: 42853 - DNA, 25 bp, Artificial
  Probe
gatgaagctctaggaagttcaaaca

SEQ ID NO: 42854 - DNA, 25 bp, Artificial
  Probe
tgaaaggcatcccagaagacaagaa

SEQ ID NO: 42855 - DNA, 25 bp, Artificial
  Probe
atgaagctctaggaagttcaaacac

SEQ ID NO: 42856 - DNA, 25 bp, Artificial
  Probe
gatggaggtggagcagttgaagaag

SEQ ID NO: 42857 - DNA, 25 bp, Artificial
  Probe
cttgtgtgataagctgatggcctac

SEQ ID NO: 42858 - DNA, 25 bp, Artificial
  Probe
tatggcagagcaatatcagtcctaa

SEQ ID NO: 42859 - DNA, 25 bp, Artificial
  Probe
ttatggcagagcaatatcagtccta

SEQ ID NO: 42860 - DNA, 25 bp, Artificial
  Probe
atggcagagcaatatcagtcctaat

SEQ ID NO: 42861 - DNA, 25 bp, Artificial
  Probe
gcagagcaatatcagtcctaatgac

SEQ ID NO: 42862 - DNA, 25 bp, Artificial
  Probe
tggcagagcaatatcagtcctaatg

SEQ ID NO: 42863 - DNA, 25 bp, Artificial
  Probe
ggttcctctgatgtagtgtgtcatt

SEQ ID NO: 42864 - DNA, 25 bp, Artificial
  Probe
ggcagagcaatatcagtcctaatga

SEQ ID NO: 42865 - DNA, 25 bp, Artificial
  Probe
catttatggcagagcaatatcagtc

SEQ ID NO: 42866 - DNA, 25 bp, Artificial
  Probe
tcatttatggcagagcaatatcagt

SEQ ID NO: 42867 - DNA, 25 bp, Artificial
  Probe
ttcatttatggcagagcaatatcag

SEQ ID NO: 42868 - DNA, 25 bp, Artificial
  Probe
ttcaattcatttatggcagagcaat

SEQ ID NO: 42869 - DNA, 25 bp, Artificial
  Probe
attcaattcatttatggcagagcaa

SEQ ID NO: 42870 - DNA, 25 bp, Artificial
  Probe
cacagaaacactcagactaatcatt

SEQ ID NO: 42871 - DNA, 25 bp, Artificial
  Probe
atttatggcagagcaatatcagtcc

SEQ ID NO: 42872 - DNA, 25 bp, Artificial
  Probe
gcacagaaacactcagactaatcat

SEQ ID NO: 42873 - DNA, 25 bp, Artificial
  Probe
attcatttatggcagagcaatatca

SEQ ID NO: 42874 - DNA, 25 bp, Artificial
  Probe
tcaattcatttatggcagagcaata

SEQ ID NO: 42875 - DNA, 25 bp, Artificial
  Probe
tattcaattcatttatggcagagca

SEQ ID NO: 42876 - DNA, 25 bp, Artificial
  Probe
cctctgatgtagtgtgtcatttctt

SEQ ID NO: 42877 - DNA, 25 bp, Artificial
  Probe
ttcctctgatgtagtgtgtcatttc

SEQ ID NO: 42878 - DNA, 25 bp, Artificial
  Probe
acagaaacactcagactaatcattt

SEQ ID NO: 42879 - DNA, 25 bp, Artificial
  Probe
gttcctctgatgtagtgtgtcattt

SEQ ID NO: 42880 - DNA, 25 bp, Artificial
  Probe
gtggttattcaattcatttatggca

SEQ ID NO: 42881 - DNA, 25 bp, Artificial
  Probe
tttatggcagagcaatatcagtcct

SEQ ID NO: 42882 - DNA, 25 bp, Artificial
  Probe
caattcatttatggcagagcaatat

SEQ ID NO: 42883 - DNA, 25 bp, Artificial
  Probe
tcctctgatgtagtgtgtcatttct

SEQ ID NO: 42884 - DNA, 25 bp, Artificial
  Probe
ttattcaattcatttatggcagagc

SEQ ID NO: 42885 - DNA, 25 bp, Artificial
  Probe
tggttcctctgatgtagtgtgtcat

SEQ ID NO: 42886 - DNA, 25 bp, Artificial
  Probe
tggttattcaattcatttatggcag

SEQ ID NO: 42887 - DNA, 25 bp, Artificial
  Probe
agtggttattcaattcatttatggc

SEQ ID NO: 42888 - DNA, 25 bp, Artificial
  Probe
aattcatttatggcagagcaatatc

SEQ ID NO: 42889 - DNA, 25 bp, Artificial
  Probe
ctctgatgtagtgtgtcatttctta

SEQ ID NO: 42890 - DNA, 25 bp, Artificial
  Probe
ggttattcaattcatttatggcaga

SEQ ID NO: 42891 - DNA, 25 bp, Artificial
  Probe
acatttgattaacttacagacatcg

SEQ ID NO: 42892 - DNA, 25 bp, Artificial
  Probe
tgatgtagtgtgtcatttcttaaca

SEQ ID NO: 42893 - DNA, 25 bp, Artificial
  Probe
aggcacagaaacactcagactaatc

SEQ ID NO: 42894 - DNA, 25 bp, Artificial
  Probe
ctgatgtagtgtgtcatttcttaac

SEQ ID NO: 42895 - DNA, 25 bp, Artificial
  Probe
tctgatgtagtgtgtcatttcttaa

SEQ ID NO: 42896 - DNA, 25 bp, Artificial
  Probe
ggcacagaaacactcagactaatca

SEQ ID NO: 42897 - DNA, 25 bp, Artificial
  Probe
caggcacagaaacactcagactaat

SEQ ID NO: 42898 - DNA, 25 bp, Artificial
  Probe
cacaatgtatgtaagagagttatga

SEQ ID NO: 42899 - DNA, 25 bp, Artificial
  Probe
tcacaatgtatgtaagagagttatg

SEQ ID NO: 42900 - DNA, 25 bp, Artificial
  Probe
gtattcacaatgtatgtaagagagt

SEQ ID NO: 42901 - DNA, 25 bp, Artificial
  Probe
gagacatttgattaacttacagaca

SEQ ID NO: 42902 - DNA, 25 bp, Artificial
  Probe
ttgattaacttacagacatcgaatt

SEQ ID NO: 42903 - DNA, 25 bp, Artificial
  Probe
atcttcatcattctctggttctctg

SEQ ID NO: 42904 - DNA, 25 bp, Artificial
  Probe
gtccaagtctcttctgatgctaata

SEQ ID NO: 42905 - DNA, 25 bp, Artificial
  Probe
cttcatcattctctggttctctgtg

SEQ ID NO: 42906 - DNA, 25 bp, Artificial
  Probe
tcttcatcattctctggttctctgt

SEQ ID NO: 42907 - DNA, 25 bp, Artificial
  Probe
tccaagtctcttctgatgctaatat

SEQ ID NO: 42908 - DNA, 25 bp, Artificial
  Probe
gatcttcatcattctctggttctct

SEQ ID NO: 42909 - DNA, 25 bp, Artificial
  Probe
gtgactactccagagagagaatcag

SEQ ID NO: 42910 - DNA, 25 bp, Artificial
  Probe
ccaagtctcttctgatgctaatata

SEQ ID NO: 42911 - DNA, 25 bp, Artificial
  Probe
ctgtgactactccagagagagaatc

SEQ ID NO: 42912 - DNA, 25 bp, Artificial
  Probe
tgtgactactccagagagagaatca

SEQ ID NO: 42913 - DNA, 25 bp, Artificial
  Probe
cgtccaagtctcttctgatgctaat

SEQ ID NO: 42914 - DNA, 25 bp, Artificial
  Probe
ttcatcattctctggttctctgtgc

SEQ ID NO: 42915 - DNA, 25 bp, Artificial
  Probe
tgactactccagagagagaatcagg

SEQ ID NO: 42916 - DNA, 25 bp, Artificial
  Probe
gactactccagagagagaatcagga

SEQ ID NO: 42917 - DNA, 25 bp, Artificial
  Probe
ttaagaatgggaccaaggagaaaga

SEQ ID NO: 42918 - DNA, 25 bp, Artificial
  Probe
tgatcttcatcattctctggttctc

SEQ ID NO: 42919 - DNA, 25 bp, Artificial
  Probe
ctgatcttcatcattctctggttct

SEQ ID NO: 42920 - DNA, 25 bp, Artificial
  Probe
ctgttcctgatcttcatcattctct

SEQ ID NO: 42921 - DNA, 25 bp, Artificial
  Probe
tgttcctgatcttcatcattctctg

SEQ ID NO: 42922 - DNA, 25 bp, Artificial
  Probe
cctgatcttcatcattctctggttc

SEQ ID NO: 42923 - DNA, 25 bp, Artificial
  Probe
gttcctgatcttcatcattctctgg

SEQ ID NO: 42924 - DNA, 25 bp, Artificial
  Probe
cctgttcctgatcttcatcattctc

SEQ ID NO: 42925 - DNA, 25 bp, Artificial
  Probe
ctcctgttcctgatcttcatcattc

SEQ ID NO: 42926 - DNA, 25 bp, Artificial
  Probe
taagaatgggaccaaggagaaagac

SEQ ID NO: 42927 - DNA, 25 bp, Artificial
  Probe
tcctgatcttcatcattctctggtt

SEQ ID NO: 42928 - DNA, 25 bp, Artificial
  Probe
ttcctgatcttcatcattctctggt

SEQ ID NO: 42929 - DNA, 25 bp, Artificial
  Probe
tcctgttcctgatcttcatcattct

SEQ ID NO: 42930 - DNA, 25 bp, Artificial
  Probe
gctgtgactactccagagagagaat

SEQ ID NO: 42931 - DNA, 25 bp, Artificial
  Probe
catttaagaaggcggttagaactgc

SEQ ID NO: 42932 - DNA, 25 bp, Artificial
  Probe
atttaagaaggcggttagaactgct

SEQ ID NO: 42933 - DNA, 25 bp, Artificial
  Probe
taagaaggcggttagaactgctcaa

SEQ ID NO: 42934 - DNA, 25 bp, Artificial
  Probe
ttaagaaggcggttagaactgctca

SEQ ID NO: 42935 - DNA, 25 bp, Artificial
  Probe
ccgtccaagtctcttctgatgctaa

SEQ ID NO: 42936 - DNA, 25 bp, Artificial
  Probe
tttaagaaggcggttagaactgctc

SEQ ID NO: 42937 - DNA, 25 bp, Artificial
  Probe
gctcctgttcctgatcttcatcatt

SEQ ID NO: 42938 - DNA, 25 bp, Artificial
  Probe
ctagtgctgtgactactccagagag

SEQ ID NO: 42939 - DNA, 25 bp, Artificial
  Probe
caagtctcttctgatgctaatatat

SEQ ID NO: 42940 - DNA, 25 bp, Artificial
  Probe
cttaagaatgggaccaaggagaaag

SEQ ID NO: 42941 - DNA, 25 bp, Artificial
  Probe
tagtgctgtgactactccagagaga

SEQ ID NO: 42942 - DNA, 25 bp, Artificial
  Probe
tgctgtgactactccagagagagaa

SEQ ID NO: 42943 - DNA, 25 bp, Artificial
  Probe
ccctgttcttaaaaccatcctagat

SEQ ID NO: 42944 - DNA, 25 bp, Artificial
  Probe
tgctcctgttcctgatcttcatcat

SEQ ID NO: 42945 - DNA, 25 bp, Artificial
  Probe
cccctgttcttaaaaccatcctaga

SEQ ID NO: 42946 - DNA, 25 bp, Artificial
  Probe
gcttaagaatgggaccaaggagaaa

SEQ ID NO: 42947 - DNA, 25 bp, Artificial
  Probe
gtgctgtgactactccagagagaga

SEQ ID NO: 42948 - DNA, 25 bp, Artificial
  Probe
gccataagcagagaactctatgaat

SEQ ID NO: 42949 - DNA, 25 bp, Artificial
  Probe
agccataagcagagaactctatgaa

SEQ ID NO: 42950 - DNA, 25 bp, Artificial
  Probe
aagccataagcagagaactctatga

SEQ ID NO: 42951 - DNA, 25 bp, Artificial
  Probe
tttacaagaggaaagccataagcag

SEQ ID NO: 42952 - DNA, 25 bp, Artificial
  Probe
ttacaagaggaaagccataagcaga

SEQ ID NO: 42953 - DNA, 25 bp, Artificial
  Probe
taagcagagaactctatgaatactg

SEQ ID NO: 42954 - DNA, 25 bp, Artificial
  Probe
gaaagccataagcagagaactctat

SEQ ID NO: 42955 - DNA, 25 bp, Artificial
  Probe
ccataagcagagaactctatgaata

SEQ ID NO: 42956 - DNA, 25 bp, Artificial
  Probe
tacaagaggaaagccataagcagag

SEQ ID NO: 42957 - DNA, 25 bp, Artificial
  Probe
cagagaactctatgaatactgcatt

SEQ ID NO: 42958 - DNA, 25 bp, Artificial
  Probe
aaagatgagagaagctgaaactgaa

SEQ ID NO: 42959 - DNA, 25 bp, Artificial
  Probe
ataagcagagaactctatgaatact

SEQ ID NO: 42960 - DNA, 25 bp, Artificial
  Probe
aagatgagagaagctgaaactgaac

SEQ ID NO: 42961 - DNA, 25 bp, Artificial
  Probe
aaagccataagcagagaactctatg

SEQ ID NO: 42962 - DNA, 25 bp, Artificial
  Probe
aagaggaaagccataagcagagaac

SEQ ID NO: 42963 - DNA, 25 bp, Artificial
  Probe
caagaggaaagccataagcagagaa

SEQ ID NO: 42964 - DNA, 25 bp, Artificial
  Probe
cattaaagaaggctatgcagacaaa

SEQ ID NO: 42965 - DNA, 25 bp, Artificial
  Probe
ggaaagccataagcagagaactcta

SEQ ID NO: 42966 - DNA, 25 bp, Artificial
  Probe
cataagcagagaactctatgaatac

SEQ ID NO: 42967 - DNA, 25 bp, Artificial
  Probe
agagaactctatgaatactgcatta

SEQ ID NO: 42968 - DNA, 25 bp, Artificial
  Probe
tgaatactgcattaaagaaggctat

SEQ ID NO: 42969 - DNA, 25 bp, Artificial
  Probe
atgaatactgcattaaagaaggcta

SEQ ID NO: 42970 - DNA, 25 bp, Artificial
  Probe
tatgaatactgcattaaagaaggct

SEQ ID NO: 42971 - DNA, 25 bp, Artificial
  Probe
agaggaaagccataagcagagaact

SEQ ID NO: 42972 - DNA, 25 bp, Artificial
  Probe
ttttacaagaggaaagccataagca

SEQ ID NO: 42973 - DNA, 25 bp, Artificial
  Probe
gaatactgcattaaagaaggctatg

SEQ ID NO: 42974 - DNA, 25 bp, Artificial
  Probe
ctatgaatactgcattaaagaaggc

SEQ ID NO: 42975 - DNA, 25 bp, Artificial
  Probe
agatgagagaagctgaaactgaacc

SEQ ID NO: 42976 - DNA, 25 bp, Artificial
  Probe
gaggaaagccataagcagagaactc

SEQ ID NO: 42977 - DNA, 25 bp, Artificial
  Probe
gagaactctatgaatactgcattaa

SEQ ID NO: 42978 - DNA, 25 bp, Artificial
  Probe
acaagaggaaagccataagcagaga

SEQ ID NO: 42979 - DNA, 25 bp, Artificial
  Probe
aggaaagccataagcagagaactct

SEQ ID NO: 42980 - DNA, 25 bp, Artificial
  Probe
gatgagagaagctgaaactgaaccc

SEQ ID NO: 42981 - DNA, 25 bp, Artificial
  Probe
aaaagatgagagaagctgaaactga

SEQ ID NO: 42982 - DNA, 25 bp, Artificial
  Probe
caaaagatgagagaagctgaaactg

SEQ ID NO: 42983 - DNA, 25 bp, Artificial
  Probe
gctacatcttcgacctcttttacaa

SEQ ID NO: 42984 - DNA, 25 bp, Artificial
  Probe
ctacatcttcgacctcttttacaag

SEQ ID NO: 42985 - DNA, 25 bp, Artificial
  Probe
agatcaaaagatgagagaagctgaa

SEQ ID NO: 42986 - DNA, 25 bp, Artificial
  Probe
tcaaaagatgagagaagctgaaact

SEQ ID NO: 42987 - DNA, 25 bp, Artificial
  Probe
atcaaaagatgagagaagctgaaac

SEQ ID NO: 42988 - DNA, 25 bp, Artificial
  Probe
gatcaaaagatgagagaagctgaaa

SEQ ID NO: 42989 - DNA, 25 bp, Artificial
  Probe
attaaagaaggctatgcagacaaaa

SEQ ID NO: 42990 - DNA, 25 bp, Artificial
  Probe
tagatcaaaagatgagagaagctga

SEQ ID NO: 42991 - DNA, 25 bp, Artificial
  Probe
tctatgaatactgcattaaagaagg

SEQ ID NO: 42992 - DNA, 25 bp, Artificial
  Probe
cttttacaagaggaaagccataagc

SEQ ID NO: 42993 - DNA, 25 bp, Artificial
  Probe
ctgaagtcctacaagagagtatctg

SEQ ID NO: 42994 - DNA, 25 bp, Artificial
  Probe
actgaagtcctacaagagagtatct

SEQ ID NO: 42995 - DNA, 25 bp, Artificial
  Probe
cactgaagtcctacaagagagtatc

SEQ ID NO: 42996 - DNA, 25 bp, Artificial
  Probe
gaagtcctacaagagagtatctgtg

SEQ ID NO: 42997 - DNA, 25 bp, Artificial
  Probe
tgaagtcctacaagagagtatctgt

SEQ ID NO: 42998 - DNA, 25 bp, Artificial
  Probe
aagtcctacaagagagtatctgtgt

SEQ ID NO: 42999 - DNA, 25 bp, Artificial
  Probe
tcctacaagagagtatctgtgtgag

SEQ ID NO: 43000 - DNA, 25 bp, Artificial
  Probe
gtcctacaagagagtatctgtgtga

SEQ ID NO: 43001 - DNA, 25 bp, Artificial
  Probe
agtcctacaagagagtatctgtgtg

SEQ ID NO: 43002 - DNA, 25 bp, Artificial
  Probe
gcactgaagtcctacaagagagtat

SEQ ID NO: 43003 - DNA, 25 bp, Artificial
  Probe
caagagagtatctgtgtgagcttaa

SEQ ID NO: 43004 - DNA, 25 bp, Artificial
  Probe
cctacaagagagtatctgtgtgagc

SEQ ID NO: 43005 - DNA, 25 bp, Artificial
  Probe
aatcaagacctacaccatcaaggag

SEQ ID NO: 43006 - DNA, 25 bp, Artificial
  Probe
tgccattcatattcatttcagatgt

SEQ ID NO: 43007 - DNA, 25 bp, Artificial
  Probe
acaagagagtatctgtgtgagctta

SEQ ID NO: 43008 - DNA, 25 bp, Artificial
  Probe
tacaagagagtatctgtgtgagctt

SEQ ID NO: 43009 - DNA, 25 bp, Artificial
  Probe
ctacaagagagtatctgtgtgagct

SEQ ID NO: 43010 - DNA, 25 bp, Artificial
  Probe
agagtatctgtgtgagcttaagaac

SEQ ID NO: 43011 - DNA, 25 bp, Artificial
  Probe
gagagtatctgtgtgagcttaagaa

SEQ ID NO: 43012 - DNA, 25 bp, Artificial
  Probe
aagagagtatctgtgtgagcttaag

SEQ ID NO: 43013 - DNA, 25 bp, Artificial
  Probe
gctcatggactatttacgctatact

SEQ ID NO: 43014 - DNA, 25 bp, Artificial
  Probe
agagagtatctgtgtgagcttaaga

SEQ ID NO: 43015 - DNA, 25 bp, Artificial
  Probe
tgatgccattcatattcatttcaga

SEQ ID NO: 43016 - DNA, 25 bp, Artificial
  Probe
aaacgaggactaagaatttgtgctg

SEQ ID NO: 43017 - DNA, 25 bp, Artificial
  Probe
gagtatctgtgtgagcttaagaacc

SEQ ID NO: 43018 - DNA, 25 bp, Artificial
  Probe
gccattcatattcatttcagatgtt

SEQ ID NO: 43019 - DNA, 25 bp, Artificial
  Probe
ggcactgaagtcctacaagagagta

SEQ ID NO: 43020 - DNA, 25 bp, Artificial
  Probe
atgccattcatattcatttcagatg

SEQ ID NO: 43021 - DNA, 25 bp, Artificial
  Probe
ttgatgccattcatattcatttcag

SEQ ID NO: 43022 - DNA, 25 bp, Artificial
  Probe
cgaggactaagaatttgtgctgatc

SEQ ID NO: 43023 - DNA, 25 bp, Artificial
  Probe
acgaggactaagaatttgtgctgat

SEQ ID NO: 43024 - DNA, 25 bp, Artificial
  Probe
gtcaccaaacgaggactaagaattt

SEQ ID NO: 43025 - DNA, 25 bp, Artificial
  Probe
gatgccattcatattcatttcagat

SEQ ID NO: 43026 - DNA, 25 bp, Artificial
  Probe
aacgaggactaagaatttgtgctga

SEQ ID NO: 43027 - DNA, 25 bp, Artificial
  Probe
ctcatggactatttacgctatactt

SEQ ID NO: 43028 - DNA, 25 bp, Artificial
  Probe
tttgatgccattcatattcatttca

SEQ ID NO: 43029 - DNA, 25 bp, Artificial
  Probe
aaatcaagacctacaccatcaagga

SEQ ID NO: 43030 - DNA, 25 bp, Artificial
  Probe
tggactatttacgctatacttactt

SEQ ID NO: 43031 - DNA, 25 bp, Artificial
  Probe
tgtcaccaaacgaggactaagaatt

SEQ ID NO: 43032 - DNA, 25 bp, Artificial
  Probe
ttgtcaccaaacgaggactaagaat

SEQ ID NO: 43033 - DNA, 25 bp, Artificial
  Probe
gaggactaagaatttgtgctgatcc

SEQ ID NO: 43034 - DNA, 25 bp, Artificial
  Probe
atcaagacctacaccatcaaggagg

SEQ ID NO: 43035 - DNA, 25 bp, Artificial
  Probe
atggactatttacgctatacttact

SEQ ID NO: 43036 - DNA, 25 bp, Artificial
  Probe
ggactaagaatttgtgctgatccac

SEQ ID NO: 43037 - DNA, 25 bp, Artificial
  Probe
aggactaagaatttgtgctgatcca

SEQ ID NO: 43038 - DNA, 25 bp, Artificial
  Probe
taactactctatactccaagggcag

SEQ ID NO: 43039 - DNA, 25 bp, Artificial
  Probe
ctaactactctatactccaagggca

SEQ ID NO: 43040 - DNA, 25 bp, Artificial
  Probe
cttgtagcacagtttcttatgttgg

SEQ ID NO: 43041 - DNA, 25 bp, Artificial
  Probe
tgtcttgtagcacagtttcttatgt

SEQ ID NO: 43042 - DNA, 25 bp, Artificial
  Probe
tcttgtagcacagtttcttatgttg

SEQ ID NO: 43043 - DNA, 25 bp, Artificial
  Probe
gtcttgtagcacagtttcttatgtt

SEQ ID NO: 43044 - DNA, 25 bp, Artificial
  Probe
ctactctatactccaagggcagttc

SEQ ID NO: 43045 - DNA, 25 bp, Artificial
  Probe
ttgtagcacagtttcttatgttggg

SEQ ID NO: 43046 - DNA, 25 bp, Artificial
  Probe
caattgagctgtattctgtgttctt

SEQ ID NO: 43047 - DNA, 25 bp, Artificial
  Probe
tactctatactccaagggcagttct

SEQ ID NO: 43048 - DNA, 25 bp, Artificial
  Probe
aattgagctgtattctgtgttcttt

SEQ ID NO: 43049 - DNA, 25 bp, Artificial
  Probe
actactctatactccaagggcagtt

SEQ ID NO: 43050 - DNA, 25 bp, Artificial
  Probe
aactactctatactccaagggcagt

SEQ ID NO: 43051 - DNA, 25 bp, Artificial
  Probe
ctaggcaagctaacaatgataaggg

SEQ ID NO: 43052 - DNA, 25 bp, Artificial
  Probe
ggcaagctaacaatgataagggaaa

SEQ ID NO: 43053 - DNA, 25 bp, Artificial
  Probe
taggcaagctaacaatgataaggga

SEQ ID NO: 43054 - DNA, 25 bp, Artificial
  Probe
ggctctgtgtatgtgcgtatgtcta

SEQ ID NO: 43055 - DNA, 25 bp, Artificial
  Probe
gctaggcaagctaacaatgataagg

SEQ ID NO: 43056 - DNA, 25 bp, Artificial
  Probe
aggcaagctaacaatgataagggaa

SEQ ID NO: 43057 - DNA, 25 bp, Artificial
  Probe
ctctatactccaagggcagttctgt

SEQ ID NO: 43058 - DNA, 25 bp, Artificial
  Probe
actctatactccaagggcagttctg

SEQ ID NO: 43059 - DNA, 25 bp, Artificial
  Probe
tctatactccaagggcagttctgtg

SEQ ID NO: 43060 - DNA, 25 bp, Artificial
  Probe
ctttgaataaaggtgttctttgcag

SEQ ID NO: 43061 - DNA, 25 bp, Artificial
  Probe
tttgaataaaggtgttctttgcagc

SEQ ID NO: 43062 - DNA, 25 bp, Artificial
  Probe
gcaagctaacaatgataagggaaaa

SEQ ID NO: 43063 - DNA, 25 bp, Artificial
  Probe
agttctgtgggatctgtgtttggat

SEQ ID NO: 43064 - DNA, 25 bp, Artificial
  Probe
attgagctgtattctgtgttctttt

SEQ ID NO: 43065 - DNA, 25 bp, Artificial
  Probe
taacaatgataagggaaaagctctc

SEQ ID NO: 43066 - DNA, 25 bp, Artificial
  Probe
ctaacaatgataagggaaaagctct

SEQ ID NO: 43067 - DNA, 25 bp, Artificial
  Probe
aacaatgataagggaaaagctctca

SEQ ID NO: 43068 - DNA, 25 bp, Artificial
  Probe
acaatgataagggaaaagctctcag

SEQ ID NO: 43069 - DNA, 25 bp, Artificial
  Probe
caagctaacaatgataagggaaaag

SEQ ID NO: 43070 - DNA, 25 bp, Artificial
  Probe
agtttcttatgttggggtgctagtg

SEQ ID NO: 43071 - DNA, 25 bp, Artificial
  Probe
cagtttcttatgttggggtgctagt

SEQ ID NO: 43072 - DNA, 25 bp, Artificial
  Probe
caatgataagggaaaagctctcagg

SEQ ID NO: 43073 - DNA, 25 bp, Artificial
  Probe
ctgtcttgtagcacagtttcttatg

SEQ ID NO: 43074 - DNA, 25 bp, Artificial
  Probe
agctaggcaagctaacaatgataag

SEQ ID NO: 43075 - DNA, 25 bp, Artificial
  Probe
acagtttcttatgttggggtgctag

SEQ ID NO: 43076 - DNA, 25 bp, Artificial
  Probe
gtagcacagtttcttatgttggggt

SEQ ID NO: 43077 - DNA, 25 bp, Artificial
  Probe
tgtagcacagtttcttatgttgggg

SEQ ID NO: 43078 - DNA, 25 bp, Artificial
  Probe
aatgataagggaaaagctctcaggg

SEQ ID NO: 43079 - DNA, 25 bp, Artificial
  Probe
cctactggaaccttccctgtcaatt

SEQ ID NO: 43080 - DNA, 25 bp, Artificial
  Probe
cacagtttcttatgttggggtgcta

SEQ ID NO: 43081 - DNA, 25 bp, Artificial
  Probe
tagcacagtttcttatgttggggtg

SEQ ID NO: 43082 - DNA, 25 bp, Artificial
  Probe
gataagggaaaagctctcagggaac

SEQ ID NO: 43083 - DNA, 25 bp, Artificial
  Probe
atcacttgaataccacttgagatca

SEQ ID NO: 43084 - DNA, 25 bp, Artificial
  Probe
gaataccacttgagatcaccaacat

SEQ ID NO: 43085 - DNA, 25 bp, Artificial
  Probe
tcacttgaataccacttgagatcac

SEQ ID NO: 43086 - DNA, 25 bp, Artificial
  Probe
cttgaataccacttgagatcaccaa

SEQ ID NO: 43087 - DNA, 25 bp, Artificial
  Probe
ttgaataccacttgagatcaccaac

SEQ ID NO: 43088 - DNA, 25 bp, Artificial
  Probe
aataccacttgagatcaccaacatg

SEQ ID NO: 43089 - DNA, 25 bp, Artificial
  Probe
cacttgaataccacttgagatcacc

SEQ ID NO: 43090 - DNA, 25 bp, Artificial
  Probe
acttgaataccacttgagatcacca

SEQ ID NO: 43091 - DNA, 25 bp, Artificial
  Probe
ttatcacttgaataccacttgagat

SEQ ID NO: 43092 - DNA, 25 bp, Artificial
  Probe
attatcacttgaataccacttgaga

SEQ ID NO: 43093 - DNA, 25 bp, Artificial
  Probe
tgaataccacttgagatcaccaaca

SEQ ID NO: 43094 - DNA, 25 bp, Artificial
  Probe
tatcacttgaataccacttgagatc

SEQ ID NO: 43095 - DNA, 25 bp, Artificial
  Probe
cattggtggtttagtcttgtgaatt

SEQ ID NO: 43096 - DNA, 25 bp, Artificial
  Probe
tgatggtccaatgtaatctcattca

SEQ ID NO: 43097 - DNA, 25 bp, Artificial
  Probe
attggtggtttagtcttgtgaattt

SEQ ID NO: 43098 - DNA, 25 bp, Artificial
  Probe
gatggtccaatgtaatctcattcag

SEQ ID NO: 43099 - DNA, 25 bp, Artificial
  Probe
atggtccaatgtaatctcattcagg

SEQ ID NO: 43100 - DNA, 25 bp, Artificial
  Probe
gtccaatgtaatctcattcaggagg

SEQ ID NO: 43101 - DNA, 25 bp, Artificial
  Probe
ggtccaatgtaatctcattcaggag

SEQ ID NO: 43102 - DNA, 25 bp, Artificial
  Probe
ttgatggtccaatgtaatctcattc

SEQ ID NO: 43103 - DNA, 25 bp, Artificial
  Probe
tggtccaatgtaatctcattcagga

SEQ ID NO: 43104 - DNA, 25 bp, Artificial
  Probe
atactggaatccctaaagtttgagc

SEQ ID NO: 43105 - DNA, 25 bp, Artificial
  Probe
caatgtaatctcattcaggaggctg

SEQ ID NO: 43106 - DNA, 25 bp, Artificial
  Probe
gagactgatatactggaatccctaa

SEQ ID NO: 43107 - DNA, 25 bp, Artificial
  Probe
tgagcctttacaacttatgtgaaga

SEQ ID NO: 43108 - DNA, 25 bp, Artificial
  Probe
gtttgagcctttacaacttatgtga

SEQ ID NO: 43109 - DNA, 25 bp, Artificial
  Probe
ttgagcctttacaacttatgtgaag

SEQ ID NO: 43110 - DNA, 25 bp, Artificial
  Probe
gagcctttacaacttatgtgaagaa

SEQ ID NO: 43111 - DNA, 25 bp, Artificial
  Probe
gctagttcataccgcatgtttattt

SEQ ID NO: 43112 - DNA, 25 bp, Artificial
  Probe
acattggtggtttagtcttgtgaat

SEQ ID NO: 43113 - DNA, 25 bp, Artificial
  Probe
aaccaacaactggcactacttctta

SEQ ID NO: 43114 - DNA, 25 bp, Artificial
  Probe
tttgagcctttacaacttatgtgaa

SEQ ID NO: 43115 - DNA, 25 bp, Artificial
  Probe
aacattggtggtttagtcttgtgaa

SEQ ID NO: 43116 - DNA, 25 bp, Artificial
  Probe
agactgatatactggaatccctaaa

SEQ ID NO: 43117 - DNA, 25 bp, Artificial
  Probe
agcctttacaacttatgtgaagaaa

SEQ ID NO: 43118 - DNA, 25 bp, Artificial
  Probe
tactcctgtgaggttaaacacttac

SEQ ID NO: 43119 - DNA, 25 bp, Artificial
  Probe
gaacattggtggtttagtcttgtga

SEQ ID NO: 43120 - DNA, 25 bp, Artificial
  Probe
gactgatatactggaatccctaaag

SEQ ID NO: 43121 - DNA, 25 bp, Artificial
  Probe
actgatatactggaatccctaaagt

SEQ ID NO: 43122 - DNA, 25 bp, Artificial
  Probe
gtttcagtctctgctagttcatacc

SEQ ID NO: 43123 - DNA, 25 bp, Artificial
  Probe
ggtttcagtctctgctagttcatac

SEQ ID NO: 43124 - DNA, 25 bp, Artificial
  Probe
accaacaactggcactacttcttag

SEQ ID NO: 43125 - DNA, 25 bp, Artificial
  Probe
ataccacttgagatcaccaacatgc

SEQ ID NO: 43126 - DNA, 25 bp, Artificial
  Probe
ggagactgatatactggaatcccta

SEQ ID NO: 43127 - DNA, 25 bp, Artificial
  Probe
catggtgcttgtactggtttaaata

SEQ ID NO: 43128 - DNA, 25 bp, Artificial
  Probe
acacaggtgagaagccttatcattg

SEQ ID NO: 43129 - DNA, 25 bp, Artificial
  Probe
cacacaggtgagaagccttatcatt

SEQ ID NO: 43130 - DNA, 25 bp, Artificial
  Probe
cacaggtgagaagccttatcattgc

SEQ ID NO: 43131 - DNA, 25 bp, Artificial
  Probe
gcacacaggtgagaagccttatcat

SEQ ID NO: 43132 - DNA, 25 bp, Artificial
  Probe
acaggtgagaagccttatcattgca

SEQ ID NO: 43133 - DNA, 25 bp, Artificial
  Probe
ggtgagaagccttatcattgcaact

SEQ ID NO: 43134 - DNA, 25 bp, Artificial
  Probe
aggtgagaagccttatcattgcaac

SEQ ID NO: 43135 - DNA, 25 bp, Artificial
  Probe
caggtgagaagccttatcattgcaa

SEQ ID NO: 43136 - DNA, 25 bp, Artificial
  Probe
gagaagccttatcattgcaactggg

SEQ ID NO: 43137 - DNA, 25 bp, Artificial
  Probe
gaagccttatcattgcaactgggac

SEQ ID NO: 43138 - DNA, 25 bp, Artificial
  Probe
agaagccttatcattgcaactggga

SEQ ID NO: 43139 - DNA, 25 bp, Artificial
  Probe
cgtcatgcttgttataattactccg

SEQ ID NO: 43140 - DNA, 25 bp, Artificial
  Probe
tgcgtcatgcttgttataattactc

SEQ ID NO: 43141 - DNA, 25 bp, Artificial
  Probe
ctgcgtcatgcttgttataattact

SEQ ID NO: 43142 - DNA, 25 bp, Artificial
  Probe
tctgcgtcatgcttgttataattac

SEQ ID NO: 43143 - DNA, 25 bp, Artificial
  Probe
attctgcgtcatgcttgttataatt

SEQ ID NO: 43144 - DNA, 25 bp, Artificial
  Probe
gcgtcatgcttgttataattactcc

SEQ ID NO: 43145 - DNA, 25 bp, Artificial
  Probe
ttctgcgtcatgcttgttataatta

SEQ ID NO: 43146 - DNA, 25 bp, Artificial
  Probe
cattctgcgtcatgcttgttataat

SEQ ID NO: 43147 - DNA, 25 bp, Artificial
  Probe
gtcactaactaaactctctttggga

SEQ ID NO: 43148 - DNA, 25 bp, Artificial
  Probe
tgtcactaactaaactctctttggg

SEQ ID NO: 43149 - DNA, 25 bp, Artificial
  Probe
tcactaactaaactctctttgggaa

SEQ ID NO: 43150 - DNA, 25 bp, Artificial
  Probe
acattctgcgtcatgcttgttataa

SEQ ID NO: 43151 - DNA, 25 bp, Artificial
  Probe
ttgtcactaactaaactctctttgg

SEQ ID NO: 43152 - DNA, 25 bp, Artificial
  Probe
cacattctgcgtcatgcttgttata

SEQ ID NO: 43153 - DNA, 25 bp, Artificial
  Probe
ctaactaaactctctttgggaatgt

SEQ ID NO: 43154 - DNA, 25 bp, Artificial
  Probe
actaactaaactctctttgggaatg

SEQ ID NO: 43155 - DNA, 25 bp, Artificial
  Probe
cactaactaaactctctttgggaat

SEQ ID NO: 43156 - DNA, 25 bp, Artificial
  Probe
gcaagtgaaggtttacaatttacaa

SEQ ID NO: 43157 - DNA, 25 bp, Artificial
  Probe
aactctctttgggaatgtttgactc

SEQ ID NO: 43158 - DNA, 25 bp, Artificial
  Probe
gtcatgcttgttataattactccgg

SEQ ID NO: 43159 - DNA, 25 bp, Artificial
  Probe
taactaaactctctttgggaatgtt

SEQ ID NO: 43160 - DNA, 25 bp, Artificial
  Probe
gttgtcactaactaaactctctttg

SEQ ID NO: 43161 - DNA, 25 bp, Artificial
  Probe
cagacacggatttgagaatctttat

SEQ ID NO: 43162 - DNA, 25 bp, Artificial
  Probe
gtgaaggtttacaatttacaaagtg

SEQ ID NO: 43163 - DNA, 25 bp, Artificial
  Probe
tgcaagtgaaggtttacaatttaca

SEQ ID NO: 43164 - DNA, 25 bp, Artificial
  Probe
agtgaaggtttacaatttacaaagt

SEQ ID NO: 43165 - DNA, 25 bp, Artificial
  Probe
acacggatttgagaatctttattga

SEQ ID NO: 43166 - DNA, 25 bp, Artificial
  Probe
aaggtttacaatttacaaagtgtgt

SEQ ID NO: 43167 - DNA, 25 bp, Artificial
  Probe
gacacggatttgagaatctttattg

SEQ ID NO: 43168 - DNA, 25 bp, Artificial
  Probe
gcagacacggatttgagaatcttta

SEQ ID NO: 43169 - DNA, 25 bp, Artificial
  Probe
agacacggatttgagaatctttatt

SEQ ID NO: 43170 - DNA, 25 bp, Artificial
  Probe
tgaaggtttacaatttacaaagtgt

SEQ ID NO: 43171 - DNA, 25 bp, Artificial
  Probe
acggatttgagaatctttattgaga

SEQ ID NO: 43172 - DNA, 25 bp, Artificial
  Probe
cacggatttgagaatctttattgag

SEQ ID NO: 43173 - DNA, 25 bp, Artificial
  Probe
gaaggtttacaatttacaaagtgtg

SEQ ID NO: 43174 - DNA, 25 bp, Artificial
  Probe
taaactctctttgggaatgtttgac

SEQ ID NO: 43175 - DNA, 25 bp, Artificial
  Probe
actaaactctctttgggaatgtttg

SEQ ID NO: 43176 - DNA, 25 bp, Artificial
  Probe
aaactctctttgggaatgtttgact

SEQ ID NO: 43177 - DNA, 25 bp, Artificial
  Probe
ctaaactctctttgggaatgtttga

SEQ ID NO: 43178 - DNA, 25 bp, Artificial
  Probe
attgagaaagagcacttaagagact

SEQ ID NO: 43179 - DNA, 25 bp, Artificial
  Probe
acttttgttctggttttcactttgt

SEQ ID NO: 43180 - DNA, 25 bp, Artificial
  Probe
aactaaactctctttgggaatgttt

SEQ ID NO: 43181 - DNA, 25 bp, Artificial
  Probe
ttgagaaagagcacttaagagacta

SEQ ID NO: 43182 - DNA, 25 bp, Artificial
  Probe
tctctttgggaatgtttgactcctc

SEQ ID NO: 43183 - DNA, 25 bp, Artificial
  Probe
ctctctttgggaatgtttgactcct

SEQ ID NO: 43184 - DNA, 25 bp, Artificial
  Probe
tctgctctgtgaataccatgttaat

SEQ ID NO: 43185 - DNA, 25 bp, Artificial
  Probe
tgtctatacagaagaacaagtgtgt

SEQ ID NO: 43186 - DNA, 25 bp, Artificial
  Probe
ctgctctgtgaataccatgttaatt

SEQ ID NO: 43187 - DNA, 25 bp, Artificial
  Probe
ttctgctctgtgaataccatgttaa

SEQ ID NO: 43188 - DNA, 25 bp, Artificial
  Probe
ttcagaggagagaatcaggctatct

SEQ ID NO: 43189 - DNA, 25 bp, Artificial
  Probe
atgtctatacagaagaacaagtgtg

SEQ ID NO: 43190 - DNA, 25 bp, Artificial
  Probe
catgtctatacagaagaacaagtgt

SEQ ID NO: 43191 - DNA, 25 bp, Artificial
  Probe
ggcaggattgtagcgaattatttaa

SEQ ID NO: 43192 - DNA, 25 bp, Artificial
  Probe
tgtggcaggattgtagcgaattatt

SEQ ID NO: 43193 - DNA, 25 bp, Artificial
  Probe
ttgtggcaggattgtagcgaattat

SEQ ID NO: 43194 - DNA, 25 bp, Artificial
  Probe
tcatgtctatacagaagaacaagtg

SEQ ID NO: 43195 - DNA, 25 bp, Artificial
  Probe
tctcaggattcctaacttgattcaa

SEQ ID NO: 43196 - DNA, 25 bp, Artificial
  Probe
ttctcaggattcctaacttgattca

SEQ ID NO: 43197 - DNA, 25 bp, Artificial
  Probe
tttcatttcagaggagagaatcagg

SEQ ID NO: 43198 - DNA, 25 bp, Artificial
  Probe
tggcaggattgtagcgaattattta

SEQ ID NO: 43199 - DNA, 25 bp, Artificial
  Probe
attctgctctgtgaataccatgtta

SEQ ID NO: 43200 - DNA, 25 bp, Artificial
  Probe
ccatttcatttcagaggagagaatc

SEQ ID NO: 43201 - DNA, 25 bp, Artificial
  Probe
aattctgctctgtgaataccatgtt

SEQ ID NO: 43202 - DNA, 25 bp, Artificial
  Probe
atttcagaggagagaatcaggctat

SEQ ID NO: 43203 - DNA, 25 bp, Artificial
  Probe
catttcatttcagaggagagaatca

SEQ ID NO: 43204 - DNA, 25 bp, Artificial
  Probe
gcaggattgtagcgaattatttaag

SEQ ID NO: 43205 - DNA, 25 bp, Artificial
  Probe
tttcagaggagagaatcaggctatc

SEQ ID NO: 43206 - DNA, 25 bp, Artificial
  Probe
atttcatttcagaggagagaatcag

SEQ ID NO: 43207 - DNA, 25 bp, Artificial
  Probe
catttcagaggagagaatcaggcta

SEQ ID NO: 43208 - DNA, 25 bp, Artificial
  Probe
ttcatgtctatacagaagaacaagt

SEQ ID NO: 43209 - DNA, 25 bp, Artificial
  Probe
ttagacccttctgagaaatgacctt

SEQ ID NO: 43210 - DNA, 25 bp, Artificial
  Probe
tttagacccttctgagaaatgacct

SEQ ID NO: 43211 - DNA, 25 bp, Artificial
  Probe
aggattgtagcgaattatttaagga

SEQ ID NO: 43212 - DNA, 25 bp, Artificial
  Probe
caggattgtagcgaattatttaagg

SEQ ID NO: 43213 - DNA, 25 bp, Artificial
  Probe
gtggcaggattgtagcgaattattt

SEQ ID NO: 43214 - DNA, 25 bp, Artificial
  Probe
tgctctgtgaataccatgttaattt

SEQ ID NO: 43215 - DNA, 25 bp, Artificial
  Probe
tagacccttctgagaaatgaccttc

SEQ ID NO: 43216 - DNA, 25 bp, Artificial
  Probe
tccatttcatttcagaggagagaat

SEQ ID NO: 43217 - DNA, 25 bp, Artificial
  Probe
ttcatttcagaggagagaatcaggc

SEQ ID NO: 43218 - DNA, 25 bp, Artificial
  Probe
ggattgtagcgaattatttaaggaa

SEQ ID NO: 43219 - DNA, 25 bp, Artificial
  Probe
gtgtctgtctgtgtgtgtctttgta

SEQ ID NO: 43220 - DNA, 25 bp, Artificial
  Probe
gactttctcaggattcctaacttga

SEQ ID NO: 43221 - DNA, 25 bp, Artificial
  Probe
tgactttctcaggattcctaacttg

SEQ ID NO: 43222 - DNA, 25 bp, Artificial
  Probe
gtgactttctcaggattcctaactt

SEQ ID NO: 43223 - DNA, 25 bp, Artificial
  Probe
actttctcaggattcctaacttgat

SEQ ID NO: 43224 - DNA, 25 bp, Artificial
  Probe
gtctatacagaagaacaagtgtgtt

SEQ ID NO: 43225 - DNA, 25 bp, Artificial
  Probe
attcatgtctatacagaagaacaag

SEQ ID NO: 43226 - DNA, 25 bp, Artificial
  Probe
tcatttcagaggagagaatcaggct

SEQ ID NO: 43227 - DNA, 25 bp, Artificial
  Probe
tttgtggcaggattgtagcgaatta

SEQ ID NO: 43228 - DNA, 25 bp, Artificial
  Probe
ctcaggattcctaacttgattcaaa

SEQ ID NO: 43229 - DNA, 25 bp, Artificial
  Probe
ctaactgctacctgaacgatgattc

SEQ ID NO: 43230 - DNA, 25 bp, Artificial
  Probe
actcagaatgtattaaccaggatga

SEQ ID NO: 43231 - DNA, 25 bp, Artificial
  Probe
aagtcattgtagcaacactcctaac

SEQ ID NO: 43232 - DNA, 25 bp, Artificial
  Probe
tactcagaatgtattaaccaggatg

SEQ ID NO: 43233 - DNA, 25 bp, Artificial
  Probe
ctcagaatgtattaaccaggatgaa

SEQ ID NO: 43234 - DNA, 25 bp, Artificial
  Probe
cctaactgctacctgaacgatgatt

SEQ ID NO: 43235 - DNA, 25 bp, Artificial
  Probe
gtcattgtagcaacactcctaactg

SEQ ID NO: 43236 - DNA, 25 bp, Artificial
  Probe
agtcattgtagcaacactcctaact

SEQ ID NO: 43237 - DNA, 25 bp, Artificial
  Probe
taactgctacctgaacgatgattcc

SEQ ID NO: 43238 - DNA, 25 bp, Artificial
  Probe
gggtttctgtttctgtaaagtcatt

SEQ ID NO: 43239 - DNA, 25 bp, Artificial
  Probe
ctgtttctgtaaagtcattgtagca

SEQ ID NO: 43240 - DNA, 25 bp, Artificial
  Probe
tgggtttctgtttctgtaaagtcat

SEQ ID NO: 43241 - DNA, 25 bp, Artificial
  Probe
atgggtttctgtttctgtaaagtca

SEQ ID NO: 43242 - DNA, 25 bp, Artificial
  Probe
caggatgaaactttaagaacggaaa

SEQ ID NO: 43243 - DNA, 25 bp, Artificial
  Probe
ggatgaaactttaagaacggaaact

SEQ ID NO: 43244 - DNA, 25 bp, Artificial
  Probe
aggatgaaactttaagaacggaaac

SEQ ID NO: 43245 - DNA, 25 bp, Artificial
  Probe
tctgtttctgtaaagtcattgtagc

SEQ ID NO: 43246 - DNA, 25 bp, Artificial
  Probe
taaccaggatgaaactttaagaacg

SEQ ID NO: 43247 - DNA, 25 bp, Artificial
  Probe
tatgggtttctgtttctgtaaagtc

SEQ ID NO: 43248 - DNA, 25 bp, Artificial
  Probe
tcctaactgctacctgaacgatgat

SEQ ID NO: 43249 - DNA, 25 bp, Artificial
  Probe
caacactcctaactgctacctgaac

SEQ ID NO: 43250 - DNA, 25 bp, Artificial
  Probe
aactttaagaacggaaactctcaac

SEQ ID NO: 43251 - DNA, 25 bp, Artificial
  Probe
ggtttctgtttctgtaaagtcattg

SEQ ID NO: 43252 - DNA, 25 bp, Artificial
  Probe
tcattagactctttgctgcttcatc

SEQ ID NO: 43253 - DNA, 25 bp, Artificial
  Probe
ctttaagaacggaaactctcaacat

SEQ ID NO: 43254 - DNA, 25 bp, Artificial
  Probe
gaaactttaagaacggaaactctca

SEQ ID NO: 43255 - DNA, 25 bp, Artificial
  Probe
tgaaactttaagaacggaaactctc

SEQ ID NO: 43256 - DNA, 25 bp, Artificial
  Probe
actttaagaacggaaactctcaaca

SEQ ID NO: 43257 - DNA, 25 bp, Artificial
  Probe
ccaggatgaaactttaagaacggaa

SEQ ID NO: 43258 - DNA, 25 bp, Artificial
  Probe
gatgaaactttaagaacggaaactc

SEQ ID NO: 43259 - DNA, 25 bp, Artificial
  Probe
aaactttaagaacggaaactctcaa

SEQ ID NO: 43260 - DNA, 25 bp, Artificial
  Probe
aaccaggatgaaactttaagaacgg

SEQ ID NO: 43261 - DNA, 25 bp, Artificial
  Probe
atgaaactttaagaacggaaactct

SEQ ID NO: 43262 - DNA, 25 bp, Artificial
  Probe
tgtttctgtaaagtcattgtagcaa

SEQ ID NO: 43263 - DNA, 25 bp, Artificial
  Probe
ctacctgaacgatgattccactcac

SEQ ID NO: 43264 - DNA, 25 bp, Artificial
  Probe
agaacggaaactctcaacataattt

SEQ ID NO: 43265 - DNA, 25 bp, Artificial
  Probe
aagaacggaaactctcaacataatt

SEQ ID NO: 43266 - DNA, 25 bp, Artificial
  Probe
gtttctgtaaagtcattgtagcaac

SEQ ID NO: 43267 - DNA, 25 bp, Artificial
  Probe
gaacggaaactctcaacataatttg

SEQ ID NO: 43268 - DNA, 25 bp, Artificial
  Probe
atatgggtttctgtttctgtaaagt

SEQ ID NO: 43269 - DNA, 25 bp, Artificial
  Probe
gtttctgtttctgtaaagtcattgt

SEQ ID NO: 43270 - DNA, 25 bp, Artificial
  Probe
taaagtcattgtagcaacactccta

SEQ ID NO: 43271 - DNA, 25 bp, Artificial
  Probe
ctgtaaagtcattgtagcaacactc

SEQ ID NO: 43272 - DNA, 25 bp, Artificial
  Probe
ttctgtaaagtcattgtagcaacac

SEQ ID NO: 43273 - DNA, 25 bp, Artificial
  Probe
ttgtatacctaatgttcaactgtgg

SEQ ID NO: 43274 - DNA, 25 bp, Artificial
  Probe
gaagacagacactcagaaggacatc

SEQ ID NO: 43275 - DNA, 25 bp, Artificial
  Probe
agacagacactcagaaggacatcaa

SEQ ID NO: 43276 - DNA, 25 bp, Artificial
  Probe
aagacagacactcagaaggacatca

SEQ ID NO: 43277 - DNA, 25 bp, Artificial
  Probe
cagaagaccctcactaagttcaaac

SEQ ID NO: 43278 - DNA, 25 bp, Artificial
  Probe
tcagaagaccctcactaagttcaaa

SEQ ID NO: 43279 - DNA, 25 bp, Artificial
  Probe
gaagaccctcactaagttcaaacac

SEQ ID NO: 43280 - DNA, 25 bp, Artificial
  Probe
agaagaccctcactaagttcaaaca

SEQ ID NO: 43281 - DNA, 25 bp, Artificial
  Probe
aagaccctcactaagttcaaacaca

SEQ ID NO: 43282 - DNA, 25 bp, Artificial
  Probe
gacagacactcagaaggacatcaaa

SEQ ID NO: 43283 - DNA, 25 bp, Artificial
  Probe
agaccctcactaagttcaaacacag

SEQ ID NO: 43284 - DNA, 25 bp, Artificial
  Probe
acagacactcagaaggacatcaaac

SEQ ID NO: 43285 - DNA, 25 bp, Artificial
  Probe
gtcagaagaccctcactaagttcaa

SEQ ID NO: 43286 - DNA, 25 bp, Artificial
  Probe
ttgtcagaagaccctcactaagttc

SEQ ID NO: 43287 - DNA, 25 bp, Artificial
  Probe
cttgtcagaagaccctcactaagtt

SEQ ID NO: 43288 - DNA, 25 bp, Artificial
  Probe
cagacactcagaaggacatcaaacc

SEQ ID NO: 43289 - DNA, 25 bp, Artificial
  Probe
gacatcaaacctcacctgaaacact

SEQ ID NO: 43290 - DNA, 25 bp, Artificial
  Probe
tgtcagaagaccctcactaagttca

SEQ ID NO: 43291 - DNA, 25 bp, Artificial
  Probe
atcaaacctcacctgaaacactgtc

SEQ ID NO: 43292 - DNA, 25 bp, Artificial
  Probe
acatcaaacctcacctgaaacactg

SEQ ID NO: 43293 - DNA, 25 bp, Artificial
  Probe
catcaaacctcacctgaaacactgt

SEQ ID NO: 43294 - DNA, 25 bp, Artificial
  Probe
gaaggacatcaaacctcacctgaaa

SEQ ID NO: 43295 - DNA, 25 bp, Artificial
  Probe
gacactcagaaggacatcaaacctc

SEQ ID NO: 43296 - DNA, 25 bp, Artificial
  Probe
gaccctcactaagttcaaacacagc

SEQ ID NO: 43297 - DNA, 25 bp, Artificial
  Probe
aaggacatcaaacctcacctgaaac

SEQ ID NO: 43298 - DNA, 25 bp, Artificial
  Probe
cactcagaaggacatcaaacctcac

SEQ ID NO: 43299 - DNA, 25 bp, Artificial
  Probe
ccttgtcagaagaccctcactaagt

SEQ ID NO: 43300 - DNA, 25 bp, Artificial
  Probe
agacactcagaaggacatcaaacct

SEQ ID NO: 43301 - DNA, 25 bp, Artificial
  Probe
agaaggacatcaaacctcacctgaa

SEQ ID NO: 43302 - DNA, 25 bp, Artificial
  Probe
acactcagaaggacatcaaacctca

SEQ ID NO: 43303 - DNA, 25 bp, Artificial
  Probe
ggacatcaaacctcacctgaaacac

SEQ ID NO: 43304 - DNA, 25 bp, Artificial
  Probe
caaacctcacctgaaacactgtcac

SEQ ID NO: 43305 - DNA, 25 bp, Artificial
  Probe
tcaaacctcacctgaaacactgtca

SEQ ID NO: 43306 - DNA, 25 bp, Artificial
  Probe
ctcagaaggacatcaaacctcacct

SEQ ID NO: 43307 - DNA, 25 bp, Artificial
  Probe
cccttgtcagaagaccctcactaag

SEQ ID NO: 43308 - DNA, 25 bp, Artificial
  Probe
aggacatcaaacctcacctgaaaca

SEQ ID NO: 43309 - DNA, 25 bp, Artificial
  Probe
cagaaggacatcaaacctcacctga

SEQ ID NO: 43310 - DNA, 25 bp, Artificial
  Probe
tcagaaggacatcaaacctcacctg

SEQ ID NO: 43311 - DNA, 25 bp, Artificial
  Probe
actcagaaggacatcaaacctcacc

SEQ ID NO: 43312 - DNA, 25 bp, Artificial
  Probe
accctcactaagttcaaacacagcc

SEQ ID NO: 43313 - DNA, 25 bp, Artificial
  Probe
aaacctcacctgaaacactgtcacc

SEQ ID NO: 43314 - DNA, 25 bp, Artificial
  Probe
ctctatccacaacctggagccatat

SEQ ID NO: 43315 - DNA, 25 bp, Artificial
  Probe
ctcactaagttcaaacacagcccct

SEQ ID NO: 43316 - DNA, 25 bp, Artificial
  Probe
gccatatgtgtttgcaactccaatg

SEQ ID NO: 43317 - DNA, 25 bp, Artificial
  Probe
agccatatgtgtttgcaactccaat

SEQ ID NO: 43318 - DNA, 25 bp, Artificial
  Probe
tctctatccacaacctggagccata

SEQ ID NO: 43319 - DNA, 25 bp, Artificial
  Probe
gatcattattgctctgccattattg

SEQ ID NO: 43320 - DNA, 25 bp, Artificial
  Probe
agatcattattgctctgccattatt

SEQ ID NO: 43321 - DNA, 25 bp, Artificial
  Probe
cgtgtaacatgattgtgctatctta

SEQ ID NO: 43322 - DNA, 25 bp, Artificial
  Probe
attattgctctgccattattggatg

SEQ ID NO: 43323 - DNA, 25 bp, Artificial
  Probe
cattattgctctgccattattggat

SEQ ID NO: 43324 - DNA, 25 bp, Artificial
  Probe
atcattattgctctgccattattgg

SEQ ID NO: 43325 - DNA, 25 bp, Artificial
  Probe
tcattattgctctgccattattgga

SEQ ID NO: 43326 - DNA, 25 bp, Artificial
  Probe
agtaaatgttctttctcagtaggca

SEQ ID NO: 43327 - DNA, 25 bp, Artificial
  Probe
tgtccagtaaatgttctttctcagt

SEQ ID NO: 43328 - DNA, 25 bp, Artificial
  Probe
cagtaaatgttctttctcagtaggc

SEQ ID NO: 43329 - DNA, 25 bp, Artificial
  Probe
ccgtgtaacatgattgtgctatctt

SEQ ID NO: 43330 - DNA, 25 bp, Artificial
  Probe
cgagtttaagtttcatttgtccagt

SEQ ID NO: 43331 - DNA, 25 bp, Artificial
  Probe
aatgttaagagttcgtttagatgcc

SEQ ID NO: 43332 - DNA, 25 bp, Artificial
  Probe
atccgagtttaagtttcatttgtcc

SEQ ID NO: 43333 - DNA, 25 bp, Artificial
  Probe
atgttaagagttcgtttagatgcca

SEQ ID NO: 43334 - DNA, 25 bp, Artificial
  Probe
gtaaatgttctttctcagtaggcaa

SEQ ID NO: 43335 - DNA, 25 bp, Artificial
  Probe
ttgtccagtaaatgttctttctcag

SEQ ID NO: 43336 - DNA, 25 bp, Artificial
  Probe
ccgagtttaagtttcatttgtccag

SEQ ID NO: 43337 - DNA, 25 bp, Artificial
  Probe
ccagtaaatgttctttctcagtagg

SEQ ID NO: 43338 - DNA, 25 bp, Artificial
  Probe
ccataccaatgtctgttctgtttag

SEQ ID NO: 43339 - DNA, 25 bp, Artificial
  Probe
cagtgaatctcttccctatgtgtat

SEQ ID NO: 43340 - DNA, 25 bp, Artificial
  Probe
aatcagtgaatctcttccctatgtg

SEQ ID NO: 43341 - DNA, 25 bp, Artificial
  Probe
tccgagtttaagtttcatttgtcca

SEQ ID NO: 43342 - DNA, 25 bp, Artificial
  Probe
aaatgttctttctcagtaggcaaac

SEQ ID NO: 43343 - DNA, 25 bp, Artificial
  Probe
cccataccaatgtctgttctgttta

SEQ ID NO: 43344 - DNA, 25 bp, Artificial
  Probe
tcagtgaatctcttccctatgtgta

SEQ ID NO: 43345 - DNA, 25 bp, Artificial
  Probe
aaatcagtgaatctcttccctatgt

SEQ ID NO: 43346 - DNA, 25 bp, Artificial
  Probe
tttgtccagtaaatgttctttctca

SEQ ID NO: 43347 - DNA, 25 bp, Artificial
  Probe
taaatgttctttctcagtaggcaaa

SEQ ID NO: 43348 - DNA, 25 bp, Artificial
  Probe
tgttaagagttcgtttagatgccac

SEQ ID NO: 43349 - DNA, 25 bp, Artificial
  Probe
caatgtctgttctgtttagatgcta

SEQ ID NO: 43350 - DNA, 25 bp, Artificial
  Probe
atcagtgaatctcttccctatgtgt

SEQ ID NO: 43351 - DNA, 25 bp, Artificial
  Probe
gtccagtaaatgttctttctcagta

SEQ ID NO: 43352 - DNA, 25 bp, Artificial
  Probe
taagagttcgtttagatgccacttt

SEQ ID NO: 43353 - DNA, 25 bp, Artificial
  Probe
ttaagagttcgtttagatgccactt

SEQ ID NO: 43354 - DNA, 25 bp, Artificial
  Probe
taccaatgtctgttctgtttagatg

SEQ ID NO: 43355 - DNA, 25 bp, Artificial
  Probe
cataccaatgtctgttctgtttaga

SEQ ID NO: 43356 - DNA, 25 bp, Artificial
  Probe
ccaatgtctgttctgtttagatgct

SEQ ID NO: 43357 - DNA, 25 bp, Artificial
  Probe
tccagtaaatgttctttctcagtag

SEQ ID NO: 43358 - DNA, 25 bp, Artificial
  Probe
aatgttctttctcagtaggcaaacc

SEQ ID NO: 43359 - DNA, 25 bp, Artificial
  Probe
aatccgagtttaagtttcatttgtc

SEQ ID NO: 43360 - DNA, 25 bp, Artificial
  Probe
gttaagagttcgtttagatgccact

SEQ ID NO: 43361 - DNA, 25 bp, Artificial
  Probe
accaatgtctgttctgtttagatgc

SEQ ID NO: 43362 - DNA, 25 bp, Artificial
  Probe
aaatgttaagagttcgtttagatgc

SEQ ID NO: 43363 - DNA, 25 bp, Artificial
  Probe
agtgaatctcttccctatgtgtata

SEQ ID NO: 43364 - DNA, 25 bp, Artificial
  Probe
ggaacaacaacaacaacaacaacaa

SEQ ID NO: 43365 - DNA, 25 bp, Artificial
  Probe
gagcaacatctccacatcattagag

SEQ ID NO: 43366 - DNA, 25 bp, Artificial
  Probe
agagcaacatctccacatcattaga

SEQ ID NO: 43367 - DNA, 25 bp, Artificial
  Probe
cagagcaacatctccacatcattag

SEQ ID NO: 43368 - DNA, 25 bp, Artificial
  Probe
acagagcaacatctccacatcatta

SEQ ID NO: 43369 - DNA, 25 bp, Artificial
  Probe
tatatcagccagaaccataacgtac

SEQ ID NO: 43370 - DNA, 25 bp, Artificial
  Probe
aatatatcagccagaaccataacgt

SEQ ID NO: 43371 - DNA, 25 bp, Artificial
  Probe
ctttcttcgttgtctgtttacttca

SEQ ID NO: 43372 - DNA, 25 bp, Artificial
  Probe
gaacaacaacaacaacaacaacaaa

SEQ ID NO: 43373 - DNA, 25 bp, Artificial
  Probe
actttcttcgttgtctgtttacttc

SEQ ID NO: 43374 - DNA, 25 bp, Artificial
  Probe
gcccataatagaaagacttaccaga

SEQ ID NO: 43375 - DNA, 25 bp, Artificial
  Probe
agcccataatagaaagacttaccag

SEQ ID NO: 43376 - DNA, 25 bp, Artificial
  Probe
cagcccataatagaaagacttacca

SEQ ID NO: 43377 - DNA, 25 bp, Artificial
  Probe
atatatcagccagaaccataacgta

SEQ ID NO: 43378 - DNA, 25 bp, Artificial
  Probe
tttcttcgttgtctgtttacttcat

SEQ ID NO: 43379 - DNA, 25 bp, Artificial
  Probe
ccagcccataatagaaagacttacc

SEQ ID NO: 43380 - DNA, 25 bp, Artificial
  Probe
cccagcccataatagaaagacttac

SEQ ID NO: 43381 - DNA, 25 bp, Artificial
  Probe
gccagaaccataacgtacagtaatt

SEQ ID NO: 43382 - DNA, 25 bp, Artificial
  Probe
acccagcccataatagaaagactta

SEQ ID NO: 43383 - DNA, 25 bp, Artificial
  Probe
gaactttcttcgttgtctgtttact

SEQ ID NO: 43384 - DNA, 25 bp, Artificial
  Probe
ccacagtgtttgagagggtaataaa

SEQ ID NO: 43385 - DNA, 25 bp, Artificial
  Probe
ggaactttcttcgttgtctgtttac

SEQ ID NO: 43386 - DNA, 25 bp, Artificial
  Probe
ctccacatcattagagactgtccac

SEQ ID NO: 43387 - DNA, 25 bp, Artificial
  Probe
aactttcttcgttgtctgtttactt

SEQ ID NO: 43388 - DNA, 25 bp, Artificial
  Probe
atccacagtgtttgagagggtaata

SEQ ID NO: 43389 - DNA, 25 bp, Artificial
  Probe
atatcagccagaaccataacgtaca

SEQ ID NO: 43390 - DNA, 25 bp, Artificial
  Probe
aacagagcaacatctccacatcatt

SEQ ID NO: 43391 - DNA, 25 bp, Artificial
  Probe
tccacagtgtttgagagggtaataa

SEQ ID NO: 43392 - DNA, 25 bp, Artificial
  Probe
agccagaaccataacgtacagtaat

SEQ ID NO: 43393 - DNA, 25 bp, Artificial
  Probe
gggaactttcttcgttgtctgttta

SEQ ID NO: 43394 - DNA, 25 bp, Artificial
  Probe
cttcgttgtctgtttacttcatgtt

SEQ ID NO: 43395 - DNA, 25 bp, Artificial
  Probe
ttcttcgttgtctgtttacttcatg

SEQ ID NO: 43396 - DNA, 25 bp, Artificial
  Probe
ttcgttgtctgtttacttcatgttt

SEQ ID NO: 43397 - DNA, 25 bp, Artificial
  Probe
aaatatatcagccagaaccataacg

SEQ ID NO: 43398 - DNA, 25 bp, Artificial
  Probe
tcttcgttgtctgtttacttcatgt

SEQ ID NO: 43399 - DNA, 25 bp, Artificial
  Probe
tatcagccagaaccataacgtacag

SEQ ID NO: 43400 - DNA, 25 bp, Artificial
  Probe
tccacatcattagagactgtccaca

SEQ ID NO: 43401 - DNA, 25 bp, Artificial
  Probe
cgttgtctgtttacttcatgtttac

SEQ ID NO: 43402 - DNA, 25 bp, Artificial
  Probe
cggaacaacaacaacaacaacaaca

SEQ ID NO: 43403 - DNA, 25 bp, Artificial
  Probe
ctatgtgggaactttcttcgttgtc

SEQ ID NO: 43404 - DNA, 25 bp, Artificial
  Probe
tcgttgtctgtttacttcatgttta

SEQ ID NO: 43405 - DNA, 25 bp, Artificial
  Probe
gaacagagcaacatctccacatcat

SEQ ID NO: 43406 - DNA, 25 bp, Artificial
  Probe
cacccagcccataatagaaagactt

SEQ ID NO: 43407 - DNA, 25 bp, Artificial
  Probe
tatgtgggaactttcttcgttgtct

SEQ ID NO: 43408 - DNA, 25 bp, Artificial
  Probe
cccataatagaaagacttaccagat

SEQ ID NO: 43409 - DNA, 25 bp, Artificial
  Probe
gtaggtattcgctccactgtaagtc

SEQ ID NO: 43410 - DNA, 25 bp, Artificial
  Probe
acctaacttgtgggaatcttactaa

SEQ ID NO: 43411 - DNA, 25 bp, Artificial
  Probe
ttacctaacttgtgggaatcttact

SEQ ID NO: 43412 - DNA, 25 bp, Artificial
  Probe
cctaacttgtgggaatcttactaac

SEQ ID NO: 43413 - DNA, 25 bp, Artificial
  Probe
taggtattcgctccactgtaagtca

SEQ ID NO: 43414 - DNA, 25 bp, Artificial
  Probe
tttacctaacttgtgggaatcttac

SEQ ID NO: 43415 - DNA, 25 bp, Artificial
  Probe
aagaatgtagtgatattgaaaggca

SEQ ID NO: 43416 - DNA, 25 bp, Artificial
  Probe
tcttaagtacagtcagtctacagga

SEQ ID NO: 43417 - DNA, 25 bp, Artificial
  Probe
ctcttaagtacagtcagtctacagg

SEQ ID NO: 43418 - DNA, 25 bp, Artificial
  Probe
tgtagtgatattgaaaggcaaatgt

SEQ ID NO: 43419 - DNA, 25 bp, Artificial
  Probe
tggtaaatcaaacactaaggaagaa

SEQ ID NO: 43420 - DNA, 25 bp, Artificial
  Probe
tacctaacttgtgggaatcttacta

SEQ ID NO: 43421 - DNA, 25 bp, Artificial
  Probe
taagtacagtcagtctacaggaaac

SEQ ID NO: 43422 - DNA, 25 bp, Artificial
  Probe
cttaagtacagtcagtctacaggaa

SEQ ID NO: 43423 - DNA, 25 bp, Artificial
  Probe
aggtaggtattcgctccactgtaag

SEQ ID NO: 43424 - DNA, 25 bp, Artificial
  Probe
gtctcttaagtacagtcagtctaca

SEQ ID NO: 43425 - DNA, 25 bp, Artificial
  Probe
agtcagataagccttaagtctcaga

SEQ ID NO: 43426 - DNA, 25 bp, Artificial
  Probe
cagtcagataagccttaagtctcag

SEQ ID NO: 43427 - DNA, 25 bp, Artificial
  Probe
atggtaaatcaaacactaaggaaga

SEQ ID NO: 43428 - DNA, 25 bp, Artificial
  Probe
gaagaatgtagtgatattgaaaggc

SEQ ID NO: 43429 - DNA, 25 bp, Artificial
  Probe
tttgttcaggttgagaagataacgg

SEQ ID NO: 43430 - DNA, 25 bp, Artificial
  Probe
tctcttaagtacagtcagtctacag

SEQ ID NO: 43431 - DNA, 25 bp, Artificial
  Probe
agaatgtagtgatattgaaaggcaa

SEQ ID NO: 43432 - DNA, 25 bp, Artificial
  Probe
ctaacttgtgggaatcttactaact

SEQ ID NO: 43433 - DNA, 25 bp, Artificial
  Probe
ttaagtacagtcagtctacaggaaa

SEQ ID NO: 43434 - DNA, 25 bp, Artificial
  Probe
acagccatacatttcttattaaacg

SEQ ID NO: 43435 - DNA, 25 bp, Artificial
  Probe
ctggtgaagcatgtctcttaagtac

SEQ ID NO: 43436 - DNA, 25 bp, Artificial
  Probe
ttgttcaggttgagaagataacggc

SEQ ID NO: 43437 - DNA, 25 bp, Artificial
  Probe
gatggtaaatcaaacactaaggaag

SEQ ID NO: 43438 - DNA, 25 bp, Artificial
  Probe
aagcatgtctcttaagtacagtcag

SEQ ID NO: 43439 - DNA, 25 bp, Artificial
  Probe
gaagcatgtctcttaagtacagtca

SEQ ID NO: 43440 - DNA, 25 bp, Artificial
  Probe
tgaagcatgtctcttaagtacagtc

SEQ ID NO: 43441 - DNA, 25 bp, Artificial
  Probe
catgtctcttaagtacagtcagtct

SEQ ID NO: 43442 - DNA, 25 bp, Artificial
  Probe
aggtattcgctccactgtaagtcat

SEQ ID NO: 43443 - DNA, 25 bp, Artificial
  Probe
gtgaagcatgtctcttaagtacagt

SEQ ID NO: 43444 - DNA, 25 bp, Artificial
  Probe
aagtacagtcagtctacaggaaacc

SEQ ID NO: 43445 - DNA, 25 bp, Artificial
  Probe
acttgtgggaatcttactaactaaa

SEQ ID NO: 43446 - DNA, 25 bp, Artificial
  Probe
aacttgtgggaatcttactaactaa

SEQ ID NO: 43447 - DNA, 25 bp, Artificial
  Probe
gcatgtctcttaagtacagtcagtc

SEQ ID NO: 43448 - DNA, 25 bp, Artificial
  Probe
gtcagataagccttaagtctcagac

SEQ ID NO: 43449 - DNA, 25 bp, Artificial
  Probe
tgtctcttaagtacagtcagtctac

SEQ ID NO: 43450 - DNA, 25 bp, Artificial
  Probe
atgtagtgatattgaaaggcaaatg

SEQ ID NO: 43451 - DNA, 25 bp, Artificial
  Probe
gaatgtagtgatattgaaaggcaaa

SEQ ID NO: 43452 - DNA, 25 bp, Artificial
  Probe
ggaagaatgtagtgatattgaaagg

SEQ ID NO: 43453 - DNA, 25 bp, Artificial
  Probe
agcatgtctcttaagtacagtcagt

SEQ ID NO: 43454 - DNA, 25 bp, Artificial
  Probe
ttgtaggttaggattaaagtgggtt

SEQ ID NO: 43455 - DNA, 25 bp, Artificial
  Probe
tgtaggttaggattaaagtgggttt

SEQ ID NO: 43456 - DNA, 25 bp, Artificial
  Probe
tttgtaggttaggattaaagtgggt

SEQ ID NO: 43457 - DNA, 25 bp, Artificial
  Probe
atttgtaggttaggattaaagtggg

SEQ ID NO: 43458 - DNA, 25 bp, Artificial
  Probe
ccttaccactcagactttgaagtat

SEQ ID NO: 43459 - DNA, 25 bp, Artificial
  Probe
ttaccactcagactttgaagtatga

SEQ ID NO: 43460 - DNA, 25 bp, Artificial
  Probe
cttaccactcagactttgaagtatg

SEQ ID NO: 43461 - DNA, 25 bp, Artificial
  Probe
tcccattagcataatttcatgttgt

SEQ ID NO: 43462 - DNA, 25 bp, Artificial
  Probe
gtaggttaggattaaagtgggttta

SEQ ID NO: 43463 - DNA, 25 bp, Artificial
  Probe
taggttaggattaaagtgggtttag

SEQ ID NO: 43464 - DNA, 25 bp, Artificial
  Probe
ttcccattagcataatttcatgttg

SEQ ID NO: 43465 - DNA, 25 bp, Artificial
  Probe
cccattagcataatttcatgttgta

SEQ ID NO: 43466 - DNA, 25 bp, Artificial
  Probe
tttcccattagcataatttcatgtt

SEQ ID NO: 43467 - DNA, 25 bp, Artificial
  Probe
atttcccattagcataatttcatgt

SEQ ID NO: 43468 - DNA, 25 bp, Artificial
  Probe
cagactttgaagtatgagtgttcac

SEQ ID NO: 43469 - DNA, 25 bp, Artificial
  Probe
tcagactttgaagtatgagtgttca

SEQ ID NO: 43470 - DNA, 25 bp, Artificial
  Probe
gtatttggtaatttcccattagcat

SEQ ID NO: 43471 - DNA, 25 bp, Artificial
  Probe
ccattagcataatttcatgttgtac

SEQ ID NO: 43472 - DNA, 25 bp, Artificial
  Probe
tatttgtaggttaggattaaagtgg

SEQ ID NO: 43473 - DNA, 25 bp, Artificial
  Probe
agactttgaagtatgagtgttcact

SEQ ID NO: 43474 - DNA, 25 bp, Artificial
  Probe
tgtaggacaaaagacaactggttaa

SEQ ID NO: 43475 - DNA, 25 bp, Artificial
  Probe
ctgtaggacaaaagacaactggtta

SEQ ID NO: 43476 - DNA, 25 bp, Artificial
  Probe
ggtaatttcccattagcataatttc

SEQ ID NO: 43477 - DNA, 25 bp, Artificial
  Probe
gactttgaagtatgagtgttcactt

SEQ ID NO: 43478 - DNA, 25 bp, Artificial
  Probe
tatttgcattgtgtacattatcgct

SEQ ID NO: 43479 - DNA, 25 bp, Artificial
  Probe
tggtaatttcccattagcataattt

SEQ ID NO: 43480 - DNA, 25 bp, Artificial
  Probe
ttggtaatttcccattagcataatt

SEQ ID NO: 43481 - DNA, 25 bp, Artificial
  Probe
tttggtaatttcccattagcataat

SEQ ID NO: 43482 - DNA, 25 bp, Artificial
  Probe
atttggtaatttcccattagcataa

SEQ ID NO: 43483 - DNA, 25 bp, Artificial
  Probe
ctatttgcattgtgtacattatcgc

SEQ ID NO: 43484 - DNA, 25 bp, Artificial
  Probe
actttgaagtatgagtgttcacttt

SEQ ID NO: 43485 - DNA, 25 bp, Artificial
  Probe
atttgcattgtgtacattatcgctg

SEQ ID NO: 43486 - DNA, 25 bp, Artificial
  Probe
gactctgtaggacaaaagacaactg

SEQ ID NO: 43487 - DNA, 25 bp, Artificial
  Probe
ttggactctgtaggacaaaagacaa

SEQ ID NO: 43488 - DNA, 25 bp, Artificial
  Probe
aaaaggattaatttgggcaaacatt

SEQ ID NO: 43489 - DNA, 25 bp, Artificial
  Probe
taccactcagactttgaagtatgag

SEQ ID NO: 43490 - DNA, 25 bp, Artificial
  Probe
tctgtaggacaaaagacaactggtt

SEQ ID NO: 43491 - DNA, 25 bp, Artificial
  Probe
ctcagactttgaagtatgagtgttc

SEQ ID NO: 43492 - DNA, 25 bp, Artificial
  Probe
gcaaaatgggttttcatagtgatcg

SEQ ID NO: 43493 - DNA, 25 bp, Artificial
  Probe
ggactctgtaggacaaaagacaact

SEQ ID NO: 43494 - DNA, 25 bp, Artificial
  Probe
aatttcccattagcataatttcatg

SEQ ID NO: 43495 - DNA, 25 bp, Artificial
  Probe
aatgggttttcatagtgatcgaatc

SEQ ID NO: 43496 - DNA, 25 bp, Artificial
  Probe
tctatttgcattgtgtacattatcg

SEQ ID NO: 43497 - DNA, 25 bp, Artificial
  Probe
aaatgggttttcatagtgatcgaat

SEQ ID NO: 43498 - DNA, 25 bp, Artificial
  Probe
ctctgtaggacaaaagacaactggt

SEQ ID NO: 43499 - DNA, 25 bp, Artificial
  Probe
gctgtgaagggctaaataaacaata

SEQ ID NO: 43500 - DNA, 25 bp, Artificial
  Probe
caatagctcctccatcagaaacttc

SEQ ID NO: 43501 - DNA, 25 bp, Artificial
  Probe
ctacctgtcaatagctcctccatca

SEQ ID NO: 43502 - DNA, 25 bp, Artificial
  Probe
tcaatagctcctccatcagaaactt

SEQ ID NO: 43503 - DNA, 25 bp, Artificial
  Probe
catgagttctgcttgaaccatattc

SEQ ID NO: 43504 - DNA, 25 bp, Artificial
  Probe
ctgtgaagggctaaataaacaataa

SEQ ID NO: 43505 - DNA, 25 bp, Artificial
  Probe
acatgagttctgcttgaaccatatt

SEQ ID NO: 43506 - DNA, 25 bp, Artificial
  Probe
aatagctcctccatcagaaacttcc

SEQ ID NO: 43507 - DNA, 25 bp, Artificial
  Probe
caaataagaacctttctctgtgtgg

SEQ ID NO: 43508 - DNA, 25 bp, Artificial
  Probe
atgagttctgcttgaaccatattcc

SEQ ID NO: 43509 - DNA, 25 bp, Artificial
  Probe
gacatgagttctgcttgaaccatat

SEQ ID NO: 43510 - DNA, 25 bp, Artificial
  Probe
gtcaatagctcctccatcagaaact

SEQ ID NO: 43511 - DNA, 25 bp, Artificial
  Probe
acaaataagaacctttctctgtgtg

SEQ ID NO: 43512 - DNA, 25 bp, Artificial
  Probe
aaataagaacctttctctgtgtggg

SEQ ID NO: 43513 - DNA, 25 bp, Artificial
  Probe
tacctgtcaatagctcctccatcag

SEQ ID NO: 43514 - DNA, 25 bp, Artificial
  Probe
tgtcaatagctcctccatcagaaac

SEQ ID NO: 43515 - DNA, 25 bp, Artificial
  Probe
ggctgtctctgctacctgtcaatag

SEQ ID NO: 43516 - DNA, 25 bp, Artificial
  Probe
tgtgaagggctaaataaacaataaa

SEQ ID NO: 43517 - DNA, 25 bp, Artificial
  Probe
agacatgagttctgcttgaaccata

SEQ ID NO: 43518 - DNA, 25 bp, Artificial
  Probe
atagctcctccatcagaaacttcct

SEQ ID NO: 43519 - DNA, 25 bp, Artificial
  Probe
tacaaataagaacctttctctgtgt

SEQ ID NO: 43520 - DNA, 25 bp, Artificial
  Probe
ctgtcaatagctcctccatcagaaa

SEQ ID NO: 43521 - DNA, 25 bp, Artificial
  Probe
cctgtcaatagctcctccatcagaa

SEQ ID NO: 43522 - DNA, 25 bp, Artificial
  Probe
agctgtgaagggctaaataaacaat

SEQ ID NO: 43523 - DNA, 25 bp, Artificial
  Probe
cttgaaccatattccccacataagc

SEQ ID NO: 43524 - DNA, 25 bp, Artificial
  Probe
gcttgaaccatattccccacataag

SEQ ID NO: 43525 - DNA, 25 bp, Artificial
  Probe
gagctgtgaagggctaaataaacaa

SEQ ID NO: 43526 - DNA, 25 bp, Artificial
  Probe
tgcttgaaccatattccccacataa

SEQ ID NO: 43527 - DNA, 25 bp, Artificial
  Probe
tagctcctccatcagaaacttcctc

SEQ ID NO: 43528 - DNA, 25 bp, Artificial
  Probe
ccatattccccacataagctacaaa

SEQ ID NO: 43529 - DNA, 25 bp, Artificial
  Probe
tccatcagaaacttcctcctgtcag

SEQ ID NO: 43530 - DNA, 25 bp, Artificial
  Probe
ctccatcagaaacttcctcctgtca

SEQ ID NO: 43531 - DNA, 25 bp, Artificial
  Probe
gtgagctgtgaagggctaaataaac

SEQ ID NO: 43532 - DNA, 25 bp, Artificial
  Probe
gaaccatattccccacataagctac

SEQ ID NO: 43533 - DNA, 25 bp, Artificial
  Probe
ctgcttgaaccatattccccacata

SEQ ID NO: 43534 - DNA, 25 bp, Artificial
  Probe
tgaaccatattccccacataagcta

SEQ ID NO: 43535 - DNA, 25 bp, Artificial
  Probe
accatattccccacataagctacaa

SEQ ID NO: 43536 - DNA, 25 bp, Artificial
  Probe
aaccatattccccacataagctaca

SEQ ID NO: 43537 - DNA, 25 bp, Artificial
  Probe
gctacatccctgttaaagtgccttt

SEQ ID NO: 43538 - DNA, 25 bp, Artificial
  Probe
tgagctgtgaagggctaaataaaca

SEQ ID NO: 43539 - DNA, 25 bp, Artificial
  Probe
ctcctccatcagaaacttcctcctg

SEQ ID NO: 43540 - DNA, 25 bp, Artificial
  Probe
tgaggtcctgtctccaaaacaatac

SEQ ID NO: 43541 - DNA, 25 bp, Artificial
  Probe
gtgaggtcctgtctccaaaacaata

SEQ ID NO: 43542 - DNA, 25 bp, Artificial
  Probe
cagacatgagttctgcttgaaccat

SEQ ID NO: 43543 - DNA, 25 bp, Artificial
  Probe
ttgaaccatattccccacataagct

SEQ ID NO: 43544 - DNA, 25 bp, Artificial
  Probe
atctcagaactggtttatttggtgt

SEQ ID NO: 43545 - DNA, 25 bp, Artificial
  Probe
aatctcagaactggtttatttggtg

SEQ ID NO: 43546 - DNA, 25 bp, Artificial
  Probe
tctcagaactggtttatttggtgtc

SEQ ID NO: 43547 - DNA, 25 bp, Artificial
  Probe
tctggtactcctatgcaatattact

SEQ ID NO: 43548 - DNA, 25 bp, Artificial
  Probe
tatgcaatattacttagcttcctcc

SEQ ID NO: 43549 - DNA, 25 bp, Artificial
  Probe
cctatgcaatattacttagcttcct

SEQ ID NO: 43550 - DNA, 25 bp, Artificial
  Probe
tcctatgcaatattacttagcttcc

SEQ ID NO: 43551 - DNA, 25 bp, Artificial
  Probe
taaatagtttctgtttccactgagg

SEQ ID NO: 43552 - DNA, 25 bp, Artificial
  Probe
aaatagtttctgtttccactgaggc

SEQ ID NO: 43553 - DNA, 25 bp, Artificial
  Probe
gggaaatctcagaactggtttattt

SEQ ID NO: 43554 - DNA, 25 bp, Artificial
  Probe
ctggtactcctatgcaatattactt

SEQ ID NO: 43555 - DNA, 25 bp, Artificial
  Probe
ttctggtactcctatgcaatattac

SEQ ID NO: 43556 - DNA, 25 bp, Artificial
  Probe
aaatctcagaactggtttatttggt

SEQ ID NO: 43557 - DNA, 25 bp, Artificial
  Probe
tgtaaatagtttctgtttccactga

SEQ ID NO: 43558 - DNA, 25 bp, Artificial
  Probe
ctcagaactggtttatttggtgtcg

SEQ ID NO: 43559 - DNA, 25 bp, Artificial
  Probe
actcctatgcaatattacttagctt

SEQ ID NO: 43560 - DNA, 25 bp, Artificial
  Probe
caatattacttagcttcctccctca

SEQ ID NO: 43561 - DNA, 25 bp, Artificial
  Probe
gaaatctcagaactggtttatttgg

SEQ ID NO: 43562 - DNA, 25 bp, Artificial
  Probe
ggaaatctcagaactggtttatttg

SEQ ID NO: 43563 - DNA, 25 bp, Artificial
  Probe
tttgataaacactgaagaagctgga

SEQ ID NO: 43564 - DNA, 25 bp, Artificial
  Probe
aatattacttagcttcctccctcag

SEQ ID NO: 43565 - DNA, 25 bp, Artificial
  Probe
gcaatattacttagcttcctccctc

SEQ ID NO: 43566 - DNA, 25 bp, Artificial
  Probe
gtaaatagtttctgtttccactgag

SEQ ID NO: 43567 - DNA, 25 bp, Artificial
  Probe
ttgataaacactgaagaagctggag

SEQ ID NO: 43568 - DNA, 25 bp, Artificial
  Probe
cagaactggtttatttggtgtcgtg

SEQ ID NO: 43569 - DNA, 25 bp, Artificial
  Probe
aatagtttctgtttccactgaggca

SEQ ID NO: 43570 - DNA, 25 bp, Artificial
  Probe
tcagaactggtttatttggtgtcgt

SEQ ID NO: 43571 - DNA, 25 bp, Artificial
  Probe
ctatgcaatattacttagcttcctc

SEQ ID NO: 43572 - DNA, 25 bp, Artificial
  Probe
ctcctatgcaatattacttagcttc

SEQ ID NO: 43573 - DNA, 25 bp, Artificial
  Probe
atgcaatattacttagcttcctccc

SEQ ID NO: 43574 - DNA, 25 bp, Artificial
  Probe
atgtaaatagtttctgtttccactg

SEQ ID NO: 43575 - DNA, 25 bp, Artificial
  Probe
gtactcctatgcaatattacttagc

SEQ ID NO: 43576 - DNA, 25 bp, Artificial
  Probe
tgcaatattacttagcttcctccct

SEQ ID NO: 43577 - DNA, 25 bp, Artificial
  Probe
atttcgacaagcctgtaattatagc

SEQ ID NO: 43578 - DNA, 25 bp, Artificial
  Probe
tactcctatgcaatattacttagct

SEQ ID NO: 43579 - DNA, 25 bp, Artificial
  Probe
tttcatttcgacaagcctgtaatta

SEQ ID NO: 43580 - DNA, 25 bp, Artificial
  Probe
gtttctggtactcctatgcaatatt

SEQ ID NO: 43581 - DNA, 25 bp, Artificial
  Probe
ttcatttcgacaagcctgtaattat

SEQ ID NO: 43582 - DNA, 25 bp, Artificial
  Probe
agtttctggtactcctatgcaatat

SEQ ID NO: 43583 - DNA, 25 bp, Artificial
  Probe
tggtactcctatgcaatattactta

SEQ ID NO: 43584 - DNA, 25 bp, Artificial
  Probe
cagtttctggtactcctatgcaata

SEQ ID NO: 43585 - DNA, 25 bp, Artificial
  Probe
atagtttctgtttccactgaggcag

SEQ ID NO: 43586 - DNA, 25 bp, Artificial
  Probe
tcatttcgacaagcctgtaattata

SEQ ID NO: 43587 - DNA, 25 bp, Artificial
  Probe
gaactggtttatttggtgtcgtgga

SEQ ID NO: 43588 - DNA, 25 bp, Artificial
  Probe
agaactggtttatttggtgtcgtgg

SEQ ID NO: 43589 - DNA, 25 bp, Artificial
  Probe
atggattactacactcttctgatgc

SEQ ID NO: 43590 - DNA, 25 bp, Artificial
  Probe
tgatggattactacactcttctgat

SEQ ID NO: 43591 - DNA, 25 bp, Artificial
  Probe
gatggattactacactcttctgatg

SEQ ID NO: 43592 - DNA, 25 bp, Artificial
  Probe
attatgccagtttatgttccttcac

SEQ ID NO: 43593 - DNA, 25 bp, Artificial
  Probe
cattatgccagtttatgttccttca

SEQ ID NO: 43594 - DNA, 25 bp, Artificial
  Probe
tggattactacactcttctgatgca

SEQ ID NO: 43595 - DNA, 25 bp, Artificial
  Probe
atgttccaaacccatctttagtgtc

SEQ ID NO: 43596 - DNA, 25 bp, Artificial
  Probe
tttaatgaaacacactgtaagcctc

SEQ ID NO: 43597 - DNA, 25 bp, Artificial
  Probe
taatgaaacacactgtaagcctctt

SEQ ID NO: 43598 - DNA, 25 bp, Artificial
  Probe
ttaatgaaacacactgtaagcctct

SEQ ID NO: 43599 - DNA, 25 bp, Artificial
  Probe
ttatgccagtttatgttccttcaca

SEQ ID NO: 43600 - DNA, 25 bp, Artificial
  Probe
aatgaaacacactgtaagcctcttt

SEQ ID NO: 43601 - DNA, 25 bp, Artificial
  Probe
tgttccaaacccatctttagtgtct

SEQ ID NO: 43602 - DNA, 25 bp, Artificial
  Probe
atatgtaaatgctgccatgttccaa

SEQ ID NO: 43603 - DNA, 25 bp, Artificial
  Probe
catgttccaaacccatctttagtgt

SEQ ID NO: 43604 - DNA, 25 bp, Artificial
  Probe
tatgtaaatgctgccatgttccaaa

SEQ ID NO: 43605 - DNA, 25 bp, Artificial
  Probe
ctcaagcacctgtaaaccatcttct

SEQ ID NO: 43606 - DNA, 25 bp, Artificial
  Probe
ccatgttccaaacccatctttagtg

SEQ ID NO: 43607 - DNA, 25 bp, Artificial
  Probe
gtttaatgaaacacactgtaagcct

SEQ ID NO: 43608 - DNA, 25 bp, Artificial
  Probe
ggattactacactcttctgatgcat

SEQ ID NO: 43609 - DNA, 25 bp, Artificial
  Probe
actacactcttctgatgcatactac

SEQ ID NO: 43610 - DNA, 25 bp, Artificial
  Probe
ctacactcttctgatgcatactact

SEQ ID NO: 43611 - DNA, 25 bp, Artificial
  Probe
ttactacactcttctgatgcatact

SEQ ID NO: 43612 - DNA, 25 bp, Artificial
  Probe
atgtaaatgctgccatgttccaaac

SEQ ID NO: 43613 - DNA, 25 bp, Artificial
  Probe
acactcttctgatgcatactactat

SEQ ID NO: 43614 - DNA, 25 bp, Artificial
  Probe
acattatgccagtttatgttccttc

SEQ ID NO: 43615 - DNA, 25 bp, Artificial
  Probe
tacactcttctgatgcatactacta

SEQ ID NO: 43616 - DNA, 25 bp, Artificial
  Probe
tactacactcttctgatgcatacta

SEQ ID NO: 43617 - DNA, 25 bp, Artificial
  Probe
attactacactcttctgatgcatac

SEQ ID NO: 43618 - DNA, 25 bp, Artificial
  Probe
actcttctgatgcatactactattg

SEQ ID NO: 43619 - DNA, 25 bp, Artificial
  Probe
cactcttctgatgcatactactatt

SEQ ID NO: 43620 - DNA, 25 bp, Artificial
  Probe
gattactacactcttctgatgcata

SEQ ID NO: 43621 - DNA, 25 bp, Artificial
  Probe
tgaaatggtagagaatccagtggga

SEQ ID NO: 43622 - DNA, 25 bp, Artificial
  Probe
atgaaacacactgtaagcctctttt

SEQ ID NO: 43623 - DNA, 25 bp, Artificial
  Probe
ctcttctgatgcatactactattga

SEQ ID NO: 43624 - DNA, 25 bp, Artificial
  Probe
gccatgttccaaacccatctttagt

SEQ ID NO: 43625 - DNA, 25 bp, Artificial
  Probe
tgccatgttccaaacccatctttag

SEQ ID NO: 43626 - DNA, 25 bp, Artificial
  Probe
ctgccatgttccaaacccatcttta

SEQ ID NO: 43627 - DNA, 25 bp, Artificial
  Probe
ttctgatgcatactactattgatgt

SEQ ID NO: 43628 - DNA, 25 bp, Artificial
  Probe
tgaaacacactgtaagcctcttttg

SEQ ID NO: 43629 - DNA, 25 bp, Artificial
  Probe
gctcaagcacctgtaaaccatcttc

SEQ ID NO: 43630 - DNA, 25 bp, Artificial
  Probe
tcttctgatgcatactactattgat

SEQ ID NO: 43631 - DNA, 25 bp, Artificial
  Probe
cttctgatgcatactactattgatg

SEQ ID NO: 43632 - DNA, 25 bp, Artificial
  Probe
gaaatggtagagaatccagtgggat

SEQ ID NO: 43633 - DNA, 25 bp, Artificial
  Probe
aaatggtagagaatccagtgggatg

SEQ ID NO: 43634 - DNA, 25 bp, Artificial
  Probe
gtacatcattacctggtatggactt

SEQ ID NO: 43635 - DNA, 25 bp, Artificial
  Probe
aataatgaacctgttcctaaccact

SEQ ID NO: 43636 - DNA, 25 bp, Artificial
  Probe
agtacatcattacctggtatggact

SEQ ID NO: 43637 - DNA, 25 bp, Artificial
  Probe
atgaacctgttcctaaccactataa

SEQ ID NO: 43638 - DNA, 25 bp, Artificial
  Probe
aatgaacctgttcctaaccactata

SEQ ID NO: 43639 - DNA, 25 bp, Artificial
  Probe
taatgaacctgttcctaaccactat

SEQ ID NO: 43640 - DNA, 25 bp, Artificial
  Probe
ataatgaacctgttcctaaccacta

SEQ ID NO: 43641 - DNA, 25 bp, Artificial
  Probe
cagtacatcattacctggtatggac

SEQ ID NO: 43642 - DNA, 25 bp, Artificial
  Probe
gcagtacatcattacctggtatgga

SEQ ID NO: 43643 - DNA, 25 bp, Artificial
  Probe
atgcagtacatcattacctggtatg

SEQ ID NO: 43644 - DNA, 25 bp, Artificial
  Probe
catgcagtacatcattacctggtat

SEQ ID NO: 43645 - DNA, 25 bp, Artificial
  Probe
atcattacctggtatggactttgtg

SEQ ID NO: 43646 - DNA, 25 bp, Artificial
  Probe
catcattacctggtatggactttgt

SEQ ID NO: 43647 - DNA, 25 bp, Artificial
  Probe
acatcattacctggtatggactttg

SEQ ID NO: 43648 - DNA, 25 bp, Artificial
  Probe
tacatcattacctggtatggacttt

SEQ ID NO: 43649 - DNA, 25 bp, Artificial
  Probe
tgaacctgttcctaaccactataaa

SEQ ID NO: 43650 - DNA, 25 bp, Artificial
  Probe
aaataatgaacctgttcctaaccac

SEQ ID NO: 43651 - DNA, 25 bp, Artificial
  Probe
acatgcagtacatcattacctggta

SEQ ID NO: 43652 - DNA, 25 bp, Artificial
  Probe
tgcagtacatcattacctggtatgg

SEQ ID NO: 43653 - DNA, 25 bp, Artificial
  Probe
atcctggtcaatagagggtttgttc

SEQ ID NO: 43654 - DNA, 25 bp, Artificial
  Probe
gtgatgctggcagattatcctcaac

SEQ ID NO: 43655 - DNA, 25 bp, Artificial
  Probe
catcctggtcaatagagggtttgtt

SEQ ID NO: 43656 - DNA, 25 bp, Artificial
  Probe
tgatgctggcagattatcctcaact

SEQ ID NO: 43657 - DNA, 25 bp, Artificial
  Probe
cacatgcagtacatcattacctggt

SEQ ID NO: 43658 - DNA, 25 bp, Artificial
  Probe
catcatacttgtggttccgaaaatt

SEQ ID NO: 43659 - DNA, 25 bp, Artificial
  Probe
tcattacctggtatggactttgtgc

SEQ ID NO: 43660 - DNA, 25 bp, Artificial
  Probe
agcacatgcagtacatcattacctg

SEQ ID NO: 43661 - DNA, 25 bp, Artificial
  Probe
tcaaaccagagtaacccttcggaat

SEQ ID NO: 43662 - DNA, 25 bp, Artificial
  Probe
ccatcttcattgatgcagacttcaa

SEQ ID NO: 43663 - DNA, 25 bp, Artificial
  Probe
ttgatgcagacttcaatagcacaac

SEQ ID NO: 43664 - DNA, 25 bp, Artificial
  Probe
tacatcatacttgtggttccgaaaa

SEQ ID NO: 43665 - DNA, 25 bp, Artificial
  Probe
tgtgtgaaaataatgaacctgttcc

SEQ ID NO: 43666 - DNA, 25 bp, Artificial
  Probe
gtgtgaaaataatgaacctgttcct

SEQ ID NO: 43667 - DNA, 25 bp, Artificial
  Probe
acatcatacttgtggttccgaaaat

SEQ ID NO: 43668 - DNA, 25 bp, Artificial
  Probe
gtgtgtgaaaataatgaacctgttc

SEQ ID NO: 43669 - DNA, 25 bp, Artificial
  Probe
aacctgttcctaaccactataaaat

SEQ ID NO: 43670 - DNA, 25 bp, Artificial
  Probe
cattggaggtcaaaccagagtaacc

SEQ ID NO: 43671 - DNA, 25 bp, Artificial
  Probe
ccattggaggtcaaaccagagtaac

SEQ ID NO: 43672 - DNA, 25 bp, Artificial
  Probe
gatgcagacttcaatagcacaacac

SEQ ID NO: 43673 - DNA, 25 bp, Artificial
  Probe
aaaataatgaacctgttcctaacca

SEQ ID NO: 43674 - DNA, 25 bp, Artificial
  Probe
cattacctggtatggactttgtgca

SEQ ID NO: 43675 - DNA, 25 bp, Artificial
  Probe
gaacctgttcctaaccactataaaa

SEQ ID NO: 43676 - DNA, 25 bp, Artificial
  Probe
tgtgaaaataatgaacctgttccta

SEQ ID NO: 43677 - DNA, 25 bp, Artificial
  Probe
ggtgtgtgaaaataatgaacctgtt

SEQ ID NO: 43678 - DNA, 25 bp, Artificial
  Probe
tcatacttgtggttccgaaaatttg

SEQ ID NO: 43679 - DNA, 25 bp, Artificial
  Probe
gatcgaacacatatctagcctcatc

SEQ ID NO: 43680 - DNA, 25 bp, Artificial
  Probe
atcgaacacatatctagcctcatca

SEQ ID NO: 43681 - DNA, 25 bp, Artificial
  Probe
tcgaacacatatctagcctcatcaa

SEQ ID NO: 43682 - DNA, 25 bp, Artificial
  Probe
cacatatctagcctcatcaaactct

SEQ ID NO: 43683 - DNA, 25 bp, Artificial
  Probe
acacatatctagcctcatcaaactc

SEQ ID NO: 43684 - DNA, 25 bp, Artificial
  Probe
aacacatatctagcctcatcaaact

SEQ ID NO: 43685 - DNA, 25 bp, Artificial
  Probe
catatctagcctcatcaaactctcc

SEQ ID NO: 43686 - DNA, 25 bp, Artificial
  Probe
acatatctagcctcatcaaactctc

SEQ ID NO: 43687 - DNA, 25 bp, Artificial
  Probe
gaacacatatctagcctcatcaaac

SEQ ID NO: 43688 - DNA, 25 bp, Artificial
  Probe
atatctagcctcatcaaactctcca

SEQ ID NO: 43689 - DNA, 25 bp, Artificial
  Probe
tatctagcctcatcaaactctccaa

SEQ ID NO: 43690 - DNA, 25 bp, Artificial
  Probe
cgaacacatatctagcctcatcaaa

SEQ ID NO: 43691 - DNA, 25 bp, Artificial
  Probe
atctagcctcatcaaactctccaag

SEQ ID NO: 43692 - DNA, 25 bp, Artificial
  Probe
cttgacaagaagtttcatgggattt

SEQ ID NO: 43693 - DNA, 25 bp, Artificial
  Probe
tacagatcgaacacatatctagcct

SEQ ID NO: 43694 - DNA, 25 bp, Artificial
  Probe
tggaaacaattcagaacatgagtaa

SEQ ID NO: 43695 - DNA, 25 bp, Artificial
  Probe
agatcgaacacatatctagcctcat

SEQ ID NO: 43696 - DNA, 25 bp, Artificial
  Probe
ctggaaacaattcagaacatgagta

SEQ ID NO: 43697 - DNA, 25 bp, Artificial
  Probe
ttatgaagctgctctggaaacaatt

SEQ ID NO: 43698 - DNA, 25 bp, Artificial
  Probe
cagatcgaacacatatctagcctca

SEQ ID NO: 43699 - DNA, 25 bp, Artificial
  Probe
acagatcgaacacatatctagcctc

SEQ ID NO: 43700 - DNA, 25 bp, Artificial
  Probe
ggaaacaattcagaacatgagtaaa

SEQ ID NO: 43701 - DNA, 25 bp, Artificial
  Probe
tatgaagctgctctggaaacaattc

SEQ ID NO: 43702 - DNA, 25 bp, Artificial
  Probe
cttatgaagctgctctggaaacaat

SEQ ID NO: 43703 - DNA, 25 bp, Artificial
  Probe
aaacttatgaagctgctctggaaac

SEQ ID NO: 43704 - DNA, 25 bp, Artificial
  Probe
cagaacatgagtaaagtagtagact

SEQ ID NO: 43705 - DNA, 25 bp, Artificial
  Probe
tcagaacatgagtaaagtagtagac

SEQ ID NO: 43706 - DNA, 25 bp, Artificial
  Probe
ctccctctacaacaaagccaagaag

SEQ ID NO: 43707 - DNA, 25 bp, Artificial
  Probe
aaacaattcagaacatgagtaaagt

SEQ ID NO: 43708 - DNA, 25 bp, Artificial
  Probe
attatcacagatgattcttgacaag

SEQ ID NO: 43709 - DNA, 25 bp, Artificial
  Probe
ttatcacagatgattcttgacaaga

SEQ ID NO: 43710 - DNA, 25 bp, Artificial
  Probe
acttatgaagctgctctggaaacaa

SEQ ID NO: 43711 - DNA, 25 bp, Artificial
  Probe
aacttatgaagctgctctggaaaca

SEQ ID NO: 43712 - DNA, 25 bp, Artificial
  Probe
caattcagaacatgagtaaagtagt

SEQ ID NO: 43713 - DNA, 25 bp, Artificial
  Probe
acaattcagaacatgagtaaagtag

SEQ ID NO: 43714 - DNA, 25 bp, Artificial
  Probe
aattatcacagatgattcttgacaa

SEQ ID NO: 43715 - DNA, 25 bp, Artificial
  Probe
ccccagtagataaaacttatgaagc

SEQ ID NO: 43716 - DNA, 25 bp, Artificial
  Probe
gaaacaattcagaacatgagtaaag

SEQ ID NO: 43717 - DNA, 25 bp, Artificial
  Probe
ttcagaacatgagtaaagtagtaga

SEQ ID NO: 43718 - DNA, 25 bp, Artificial
  Probe
atgctaggagattcttttctttctg

SEQ ID NO: 43719 - DNA, 25 bp, Artificial
  Probe
tagactccctctacaacaaagccaa

SEQ ID NO: 43720 - DNA, 25 bp, Artificial
  Probe
actccctctacaacaaagccaagaa

SEQ ID NO: 43721 - DNA, 25 bp, Artificial
  Probe
aacaattcagaacatgagtaaagta

SEQ ID NO: 43722 - DNA, 25 bp, Artificial
  Probe
tgacaagaagtttcatgggattttg

SEQ ID NO: 43723 - DNA, 25 bp, Artificial
  Probe
caagaagtttcatgggattttggac

SEQ ID NO: 43724 - DNA, 25 bp, Artificial
  Probe
ttattggaactgtcttacctcatca

SEQ ID NO: 43725 - DNA, 25 bp, Artificial
  Probe
tattggaactgtcttacctcatcaa

SEQ ID NO: 43726 - DNA, 25 bp, Artificial
  Probe
ttcactgactactagcctatgataa

SEQ ID NO: 43727 - DNA, 25 bp, Artificial
  Probe
tcactgactactagcctatgataat

SEQ ID NO: 43728 - DNA, 25 bp, Artificial
  Probe
cactgactactagcctatgataatt

SEQ ID NO: 43729 - DNA, 25 bp, Artificial
  Probe
cctgactcttcacagtaatgaggtt

SEQ ID NO: 43730 - DNA, 25 bp, Artificial
  Probe
aacctgactcttcacagtaatgagg

SEQ ID NO: 43731 - DNA, 25 bp, Artificial
  Probe
attggaactgtcttacctcatcaaa

SEQ ID NO: 43732 - DNA, 25 bp, Artificial
  Probe
gtggataatggaaacctgactcttc

SEQ ID NO: 43733 - DNA, 25 bp, Artificial
  Probe
ttggaactgtcttacctcatcaaag

SEQ ID NO: 43734 - DNA, 25 bp, Artificial
  Probe
tttattggaactgtcttacctcatc

SEQ ID NO: 43735 - DNA, 25 bp, Artificial
  Probe
aatgtatttcactgactactagcct

SEQ ID NO: 43736 - DNA, 25 bp, Artificial
  Probe
gataatggaaacctgactcttcaca

SEQ ID NO: 43737 - DNA, 25 bp, Artificial
  Probe
tgactcttcacagtaatgaggttta

SEQ ID NO: 43738 - DNA, 25 bp, Artificial
  Probe
actcttcacagtaatgaggtttagt

SEQ ID NO: 43739 - DNA, 25 bp, Artificial
  Probe
ggataatggaaacctgactcttcac

SEQ ID NO: 43740 - DNA, 25 bp, Artificial
  Probe
aaatgtatttcactgactactagcc

SEQ ID NO: 43741 - DNA, 25 bp, Artificial
  Probe
tgtatttcactgactactagcctat

SEQ ID NO: 43742 - DNA, 25 bp, Artificial
  Probe
atgtatttcactgactactagccta

SEQ ID NO: 43743 - DNA, 25 bp, Artificial
  Probe
cttcacagtaatgaggtttagttga

SEQ ID NO: 43744 - DNA, 25 bp, Artificial
  Probe
tcttcacagtaatgaggtttagttg

SEQ ID NO: 43745 - DNA, 25 bp, Artificial
  Probe
gactcttcacagtaatgaggtttag

SEQ ID NO: 43746 - DNA, 25 bp, Artificial
  Probe
tggataatggaaacctgactcttca

SEQ ID NO: 43747 - DNA, 25 bp, Artificial
  Probe
ctgactcttcacagtaatgaggttt

SEQ ID NO: 43748 - DNA, 25 bp, Artificial
  Probe
aaacctgactcttcacagtaatgag

SEQ ID NO: 43749 - DNA, 25 bp, Artificial
  Probe
gaaacctgactcttcacagtaatga

SEQ ID NO: 43750 - DNA, 25 bp, Artificial
  Probe
ataatggaaacctgactcttcacag

SEQ ID NO: 43751 - DNA, 25 bp, Artificial
  Probe
gtatttcactgactactagcctatg

SEQ ID NO: 43752 - DNA, 25 bp, Artificial
  Probe
atttcactgactactagcctatgat

SEQ ID NO: 43753 - DNA, 25 bp, Artificial
  Probe
ctcttcacagtaatgaggtttagtt

SEQ ID NO: 43754 - DNA, 25 bp, Artificial
  Probe
tcacagtaatgaggtttagttgaat

SEQ ID NO: 43755 - DNA, 25 bp, Artificial
  Probe
ggaaacctgactcttcacagtaatg

SEQ ID NO: 43756 - DNA, 25 bp, Artificial
  Probe
tttcactgactactagcctatgata

SEQ ID NO: 43757 - DNA, 25 bp, Artificial
  Probe
tatttcactgactactagcctatga

SEQ ID NO: 43758 - DNA, 25 bp, Artificial
  Probe
gaactgtcttacctcatcaaagcag

SEQ ID NO: 43759 - DNA, 25 bp, Artificial
  Probe
tggaaacctgactcttcacagtaat

SEQ ID NO: 43760 - DNA, 25 bp, Artificial
  Probe
atggaaacctgactcttcacagtaa

SEQ ID NO: 43761 - DNA, 25 bp, Artificial
  Probe
aatggaaacctgactcttcacagta

SEQ ID NO: 43762 - DNA, 25 bp, Artificial
  Probe
taatggaaacctgactcttcacagt

SEQ ID NO: 43763 - DNA, 25 bp, Artificial
  Probe
actgtcttacctcatcaaagcagat

SEQ ID NO: 43764 - DNA, 25 bp, Artificial
  Probe
aactgtcttacctcatcaaagcaga

SEQ ID NO: 43765 - DNA, 25 bp, Artificial
  Probe
ggaactgtcttacctcatcaaagca

SEQ ID NO: 43766 - DNA, 25 bp, Artificial
  Probe
tggaactgtcttacctcatcaaagc

SEQ ID NO: 43767 - DNA, 25 bp, Artificial
  Probe
cacagtaatgaggtttagttgaata

SEQ ID NO: 43768 - DNA, 25 bp, Artificial
  Probe
actgactactagcctatgataatta

SEQ ID NO: 43769 - DNA, 25 bp, Artificial
  Probe
aaaccctttgtatctcatttcatgc

SEQ ID NO: 43770 - DNA, 25 bp, Artificial
  Probe
aaccctttgtatctcatttcatgcc

SEQ ID NO: 43771 - DNA, 25 bp, Artificial
  Probe
ctttgtatctcatttcatgcccgtc

SEQ ID NO: 43772 - DNA, 25 bp, Artificial
  Probe
ttgtatctcatttcatgcccgtcat

SEQ ID NO: 43773 - DNA, 25 bp, Artificial
  Probe
tttgtatctcatttcatgcccgtca

SEQ ID NO: 43774 - DNA, 25 bp, Artificial
  Probe
ggacttgaagcttagcctaatcttg

SEQ ID NO: 43775 - DNA, 25 bp, Artificial
  Probe
accctttgtatctcatttcatgccc

SEQ ID NO: 43776 - DNA, 25 bp, Artificial
  Probe
caaaccctttgtatctcatttcatg

SEQ ID NO: 43777 - DNA, 25 bp, Artificial
  Probe
gacttgaagcttagcctaatcttgc

SEQ ID NO: 43778 - DNA, 25 bp, Artificial
  Probe
cctttgtatctcatttcatgcccgt

SEQ ID NO: 43779 - DNA, 25 bp, Artificial
  Probe
aggacttgaagcttagcctaatctt

SEQ ID NO: 43780 - DNA, 25 bp, Artificial
  Probe
gaggacttgaagcttagcctaatct

SEQ ID NO: 43781 - DNA, 25 bp, Artificial
  Probe
agaggacttgaagcttagcctaatc

SEQ ID NO: 43782 - DNA, 25 bp, Artificial
  Probe
ccctttgtatctcatttcatgcccg

SEQ ID NO: 43783 - DNA, 25 bp, Artificial
  Probe
acttgaagcttagcctaatcttgcg

SEQ ID NO: 43784 - DNA, 25 bp, Artificial
  Probe
tatctcatttcatgcccgtcatgtt

SEQ ID NO: 43785 - DNA, 25 bp, Artificial
  Probe
cttgaagcttagcctaatcttgcgg

SEQ ID NO: 43786 - DNA, 25 bp, Artificial
  Probe
gtatctcatttcatgcccgtcatgt

SEQ ID NO: 43787 - DNA, 25 bp, Artificial
  Probe
tgtatctcatttcatgcccgtcatg

SEQ ID NO: 43788 - DNA, 25 bp, Artificial
  Probe
atctcatttcatgcccgtcatgttc

SEQ ID NO: 43789 - DNA, 25 bp, Artificial
  Probe
ctcatttcatgcccgtcatgttctc

SEQ ID NO: 43790 - DNA, 25 bp, Artificial
  Probe
tctcatttcatgcccgtcatgttct

SEQ ID NO: 43791 - DNA, 25 bp, Artificial
  Probe
cctaatgtatgaagtatggctgagt

SEQ ID NO: 43792 - DNA, 25 bp, Artificial
  Probe
acctaatgtatgaagtatggctgag

SEQ ID NO: 43793 - DNA, 25 bp, Artificial
  Probe
accagtaaccattgcttgattctta

SEQ ID NO: 43794 - DNA, 25 bp, Artificial
  Probe
atgtatgaagtatggctgagtgtaa

SEQ ID NO: 43795 - DNA, 25 bp, Artificial
  Probe
aatgtatgaagtatggctgagtgta

SEQ ID NO: 43796 - DNA, 25 bp, Artificial
  Probe
taatgtatgaagtatggctgagtgt

SEQ ID NO: 43797 - DNA, 25 bp, Artificial
  Probe
ctaatgtatgaagtatggctgagtg

SEQ ID NO: 43798 - DNA, 25 bp, Artificial
  Probe
tacctaatgtatgaagtatggctga

SEQ ID NO: 43799 - DNA, 25 bp, Artificial
  Probe
gaccagtaaccattgcttgattctt

SEQ ID NO: 43800 - DNA, 25 bp, Artificial
  Probe
aattattgatgaccacactgccatt

SEQ ID NO: 43801 - DNA, 25 bp, Artificial
  Probe
ttgaccagtaaccattgcttgattc

SEQ ID NO: 43802 - DNA, 25 bp, Artificial
  Probe
attattgatgaccacactgccattc

SEQ ID NO: 43803 - DNA, 25 bp, Artificial
  Probe
catctagcatagcaacattcagagg

SEQ ID NO: 43804 - DNA, 25 bp, Artificial
  Probe
taattattgatgaccacactgccat

SEQ ID NO: 43805 - DNA, 25 bp, Artificial
  Probe
tgaccagtaaccattgcttgattct

SEQ ID NO: 43806 - DNA, 25 bp, Artificial
  Probe
gcatctagcatagcaacattcagag

SEQ ID NO: 43807 - DNA, 25 bp, Artificial
  Probe
ccagtaaccattgcttgattcttac

SEQ ID NO: 43808 - DNA, 25 bp, Artificial
  Probe
cagtaaccattgcttgattcttaca

SEQ ID NO: 43809 - DNA, 25 bp, Artificial
  Probe
ttattgatgaccacactgccattct

SEQ ID NO: 43810 - DNA, 25 bp, Artificial
  Probe
attctcatacagtaagtcatagcat

SEQ ID NO: 43811 - DNA, 25 bp, Artificial
  Probe
agtaaccattgcttgattcttacaa

SEQ ID NO: 43812 - DNA, 25 bp, Artificial
  Probe
ttctcatacagtaagtcatagcatg

SEQ ID NO: 43813 - DNA, 25 bp, Artificial
  Probe
tgtatgaagtatggctgagtgtaaa

SEQ ID NO: 43814 - DNA, 25 bp, Artificial
  Probe
tttgtgtagaccctgaagtgttatg

SEQ ID NO: 43815 - DNA, 25 bp, Artificial
  Probe
gtttgtgtagaccctgaagtgttat

SEQ ID NO: 43816 - DNA, 25 bp, Artificial
  Probe
tacggtttgctttgagttcattcta

SEQ ID NO: 43817 - DNA, 25 bp, Artificial
  Probe
atacctaatgtatgaagtatggctg

SEQ ID NO: 43818 - DNA, 25 bp, Artificial
  Probe
caagtcatgtattgaagaagatgca

SEQ ID NO: 43819 - DNA, 25 bp, Artificial
  Probe
tttgaccagtaaccattgcttgatt

SEQ ID NO: 43820 - DNA, 25 bp, Artificial
  Probe
tgtgtagaccctgaagtgttatgaa

SEQ ID NO: 43821 - DNA, 25 bp, Artificial
  Probe
ttgtgtagaccctgaagtgttatga

SEQ ID NO: 43822 - DNA, 25 bp, Artificial
  Probe
tattctcatacagtaagtcatagca

SEQ ID NO: 43823 - DNA, 25 bp, Artificial
  Probe
agtttgtgtagaccctgaagtgtta

SEQ ID NO: 43824 - DNA, 25 bp, Artificial
  Probe
gatacctaatgtatgaagtatggct

SEQ ID NO: 43825 - DNA, 25 bp, Artificial
  Probe
agatacctaatgtatgaagtatggc

SEQ ID NO: 43826 - DNA, 25 bp, Artificial
  Probe
ccctgaagtgttatgaactggtatt

SEQ ID NO: 43827 - DNA, 25 bp, Artificial
  Probe
gtgtagaccctgaagtgttatgaac

SEQ ID NO: 43828 - DNA, 25 bp, Artificial
  Probe
gtagaccctgaagtgttatgaactg

SEQ ID NO: 43829 - DNA, 25 bp, Artificial
  Probe
aatcaagtttgtgtagaccctgaag

SEQ ID NO: 43830 - DNA, 25 bp, Artificial
  Probe
gaatcaagtttgtgtagaccctgaa

SEQ ID NO: 43831 - DNA, 25 bp, Artificial
  Probe
cctgaagtgttatgaactggtattt

SEQ ID NO: 43832 - DNA, 25 bp, Artificial
  Probe
tgtagaccctgaagtgttatgaact

SEQ ID NO: 43833 - DNA, 25 bp, Artificial
  Probe
taaagcagggtgtatcatgtgaatt

SEQ ID NO: 43834 - DNA, 25 bp, Artificial
  Probe
ctaaagcagggtgtatcatgtgaat

SEQ ID NO: 43835 - DNA, 25 bp, Artificial
  Probe
acttgtcttagtcgtttgaacttaa

SEQ ID NO: 43836 - DNA, 25 bp, Artificial
  Probe
cagtctgtaagaagtgctacgagaa

SEQ ID NO: 43837 - DNA, 25 bp, Artificial
  Probe
gcaataccaaactaacactcaagaa

SEQ ID NO: 43838 - DNA, 25 bp, Artificial
  Probe
gaaaccagtctgtaagaagtgctac

SEQ ID NO: 43839 - DNA, 25 bp, Artificial
  Probe
tgaaaccagtctgtaagaagtgcta

SEQ ID NO: 43840 - DNA, 25 bp, Artificial
  Probe
aaccagtctgtaagaagtgctacga

SEQ ID NO: 43841 - DNA, 25 bp, Artificial
  Probe
atgaaaccagtctgtaagaagtgct

SEQ ID NO: 43842 - DNA, 25 bp, Artificial
  Probe
caataccaaactaacactcaagaat

SEQ ID NO: 43843 - DNA, 25 bp, Artificial
  Probe
ccagtctgtaagaagtgctacgaga

SEQ ID NO: 43844 - DNA, 25 bp, Artificial
  Probe
ttgacatgaaaccagtctgtaagaa

SEQ ID NO: 43845 - DNA, 25 bp, Artificial
  Probe
tttgacatgaaaccagtctgtaaga

SEQ ID NO: 43846 - DNA, 25 bp, Artificial
  Probe
acatgaaaccagtctgtaagaagtg

SEQ ID NO: 43847 - DNA, 25 bp, Artificial
  Probe
gacatgaaaccagtctgtaagaagt

SEQ ID NO: 43848 - DNA, 25 bp, Artificial
  Probe
tgacatgaaaccagtctgtaagaag

SEQ ID NO: 43849 - DNA, 25 bp, Artificial
  Probe
accagtctgtaagaagtgctacgag

SEQ ID NO: 43850 - DNA, 25 bp, Artificial
  Probe
tgcaataccaaactaacactcaaga

SEQ ID NO: 43851 - DNA, 25 bp, Artificial
  Probe
catgaaaccagtctgtaagaagtgc

SEQ ID NO: 43852 - DNA, 25 bp, Artificial
  Probe
aaaccagtctgtaagaagtgctacg

SEQ ID NO: 43853 - DNA, 25 bp, Artificial
  Probe
accaaactaacactcaagaataaat

SEQ ID NO: 43854 - DNA, 25 bp, Artificial
  Probe
gtttgacatgaaaccagtctgtaag

SEQ ID NO: 43855 - DNA, 25 bp, Artificial
  Probe
agtttgacatgaaaccagtctgtaa

SEQ ID NO: 43856 - DNA, 25 bp, Artificial
  Probe
aggaaggaaataacttttggtgtct

SEQ ID NO: 43857 - DNA, 25 bp, Artificial
  Probe
aatttgtggagtttgacatgaaacc

SEQ ID NO: 43858 - DNA, 25 bp, Artificial
  Probe
ggaaggaaataacttttggtgtctt

SEQ ID NO: 43859 - DNA, 25 bp, Artificial
  Probe
aactatctgagaccttaggaaggaa

SEQ ID NO: 43860 - DNA, 25 bp, Artificial
  Probe
gagtttgacatgaaaccagtctgta

SEQ ID NO: 43861 - DNA, 25 bp, Artificial
  Probe
taggaaggaaataacttttggtgtc

SEQ ID NO: 43862 - DNA, 25 bp, Artificial
  Probe
atttgtggagtttgacatgaaacca

SEQ ID NO: 43863 - DNA, 25 bp, Artificial
  Probe
taccaaactaacactcaagaataaa

SEQ ID NO: 43864 - DNA, 25 bp, Artificial
  Probe
ttaggaaggaaataacttttggtgt

SEQ ID NO: 43865 - DNA, 25 bp, Artificial
  Probe
taaatttgtggagtttgacatgaaa

SEQ ID NO: 43866 - DNA, 25 bp, Artificial
  Probe
gaaggaaataacttttggtgtcttt

SEQ ID NO: 43867 - DNA, 25 bp, Artificial
  Probe
aacactcaagaataaatttgtggag

SEQ ID NO: 43868 - DNA, 25 bp, Artificial
  Probe
ataccaaactaacactcaagaataa

SEQ ID NO: 43869 - DNA, 25 bp, Artificial
  Probe
aataccaaactaacactcaagaata

SEQ ID NO: 43870 - DNA, 25 bp, Artificial
  Probe
caagaataaatttgtggagtttgac

SEQ ID NO: 43871 - DNA, 25 bp, Artificial
  Probe
cttaggaaggaaataacttttggtg

SEQ ID NO: 43872 - DNA, 25 bp, Artificial
  Probe
ataaatttgtggagtttgacatgaa

SEQ ID NO: 43873 - DNA, 25 bp, Artificial
  Probe
aataaatttgtggagtttgacatga

SEQ ID NO: 43874 - DNA, 25 bp, Artificial
  Probe
aagaataaatttgtggagtttgaca

SEQ ID NO: 43875 - DNA, 25 bp, Artificial
  Probe
tttgtggagtttgacatgaaaccag

SEQ ID NO: 43876 - DNA, 25 bp, Artificial
  Probe
aaatttgtggagtttgacatgaaac

SEQ ID NO: 43877 - DNA, 25 bp, Artificial
  Probe
gaataaatttgtggagtttgacatg

SEQ ID NO: 43878 - DNA, 25 bp, Artificial
  Probe
ccctcatctacttttgcttaaaact

SEQ ID NO: 43879 - DNA, 25 bp, Artificial
  Probe
agaataaatttgtggagtttgacat

SEQ ID NO: 43880 - DNA, 25 bp, Artificial
  Probe
ccaaactaacactcaagaataaatt

SEQ ID NO: 43881 - DNA, 25 bp, Artificial
  Probe
cttaacgaataactgaagggaagtg

SEQ ID NO: 43882 - DNA, 25 bp, Artificial
  Probe
gcttaatttgactcaacacaggaat

SEQ ID NO: 43883 - DNA, 25 bp, Artificial
  Probe
ggcttaatttgactcaacacaggaa

SEQ ID NO: 43884 - DNA, 25 bp, Artificial
  Probe
acacaggaatattaatactgcttca

SEQ ID NO: 43885 - DNA, 25 bp, Artificial
  Probe
tcaacacaggaatattaatactgct

SEQ ID NO: 43886 - DNA, 25 bp, Artificial
  Probe
cttaatttgactcaacacaggaata

SEQ ID NO: 43887 - DNA, 25 bp, Artificial
  Probe
ctcaacacaggaatattaatactgc

SEQ ID NO: 43888 - DNA, 25 bp, Artificial
  Probe
caacacaggaatattaatactgctt

SEQ ID NO: 43889 - DNA, 25 bp, Artificial
  Probe
ggaaccccttaacgaataactgaag

SEQ ID NO: 43890 - DNA, 25 bp, Artificial
  Probe
tgactcaacacaggaatattaatac

SEQ ID NO: 43891 - DNA, 25 bp, Artificial
  Probe
aacacaggaatattaatactgcttc

SEQ ID NO: 43892 - DNA, 25 bp, Artificial
  Probe
ttaatttgactcaacacaggaatat

SEQ ID NO: 43893 - DNA, 25 bp, Artificial
  Probe
cggcttaatttgactcaacacagga

SEQ ID NO: 43894 - DNA, 25 bp, Artificial
  Probe
gactcaacacaggaatattaatact

SEQ ID NO: 43895 - DNA, 25 bp, Artificial
  Probe
tagaggaaccccttaacgaataact

SEQ ID NO: 43896 - DNA, 25 bp, Artificial
  Probe
gtagaggaaccccttaacgaataac

SEQ ID NO: 43897 - DNA, 25 bp, Artificial
  Probe
tgtagaggaaccccttaacgaataa

SEQ ID NO: 43898 - DNA, 25 bp, Artificial
  Probe
tttgactcaacacaggaatattaat

SEQ ID NO: 43899 - DNA, 25 bp, Artificial
  Probe
atttgactcaacacaggaatattaa

SEQ ID NO: 43900 - DNA, 25 bp, Artificial
  Probe
aatttgactcaacacaggaatatta

SEQ ID NO: 43901 - DNA, 25 bp, Artificial
  Probe
taatttgactcaacacaggaatatt

SEQ ID NO: 43902 - DNA, 25 bp, Artificial
  Probe
ctgtagaggaaccccttaacgaata

SEQ ID NO: 43903 - DNA, 25 bp, Artificial
  Probe
actcaacacaggaatattaatactg

SEQ ID NO: 43904 - DNA, 25 bp, Artificial
  Probe
ccttttgatttcaggtttgggaatc

SEQ ID NO: 43905 - DNA, 25 bp, Artificial
  Probe
aggaaccccttaacgaataactgaa

SEQ ID NO: 43906 - DNA, 25 bp, Artificial
  Probe
gaggaaccccttaacgaataactga

SEQ ID NO: 43907 - DNA, 25 bp, Artificial
  Probe
agaggaaccccttaacgaataactg

SEQ ID NO: 43908 - DNA, 25 bp, Artificial
  Probe
ccttaacgaataactgaagggaagt

SEQ ID NO: 43909 - DNA, 25 bp, Artificial
  Probe
ttgactcaacacaggaatattaata

SEQ ID NO: 43910 - DNA, 25 bp, Artificial
  Probe
tgcggcttaatttgactcaacacag

SEQ ID NO: 43911 - DNA, 25 bp, Artificial
  Probe
ctgcggcttaatttgactcaacaca

SEQ ID NO: 43912 - DNA, 25 bp, Artificial
  Probe
gcggcttaatttgactcaacacagg

SEQ ID NO: 43913 - DNA, 25 bp, Artificial
  Probe
cccttttgatttcaggtttgggaat

SEQ ID NO: 43914 - DNA, 25 bp, Artificial
  Probe
gaaagctgtagaggaaccccttaac

SEQ ID NO: 43915 - DNA, 25 bp, Artificial
  Probe
gctgtagaggaaccccttaacgaat

SEQ ID NO: 43916 - DNA, 25 bp, Artificial
  Probe
gaaccccttaacgaataactgaagg

SEQ ID NO: 43917 - DNA, 25 bp, Artificial
  Probe
ggaaagctgtagaggaaccccttaa

SEQ ID NO: 43918 - DNA, 25 bp, Artificial
  Probe
ccccttttgatttcaggtttgggaa

SEQ ID NO: 43919 - DNA, 25 bp, Artificial
  Probe
aaagctgtagaggaaccccttaacg

SEQ ID NO: 43920 - DNA, 25 bp, Artificial
  Probe
aggaaagctgtagaggaacccctta

SEQ ID NO: 43921 - DNA, 25 bp, Artificial
  Probe
taggaaagctgtagaggaacccctt

SEQ ID NO: 43922 - DNA, 25 bp, Artificial
  Probe
ctaggaaagctgtagaggaacccct

SEQ ID NO: 43923 - DNA, 25 bp, Artificial
  Probe
agctgtagaggaaccccttaacgaa

SEQ ID NO: 43924 - DNA, 25 bp, Artificial
  Probe
aagctgtagaggaaccccttaacga

SEQ ID NO: 43925 - DNA, 25 bp, Artificial
  Probe
ctatttcagtgacttggtcctgtgg

SEQ ID NO: 43926 - DNA, 25 bp, Artificial
  Probe
gatgagggttcctgtactgcctata

SEQ ID NO: 43927 - DNA, 25 bp, Artificial
  Probe
atgagggttcctgtactgcctatac

SEQ ID NO: 43928 - DNA, 25 bp, Artificial
  Probe
aaggggaatgctaatcgttttggaa

SEQ ID NO: 43929 - DNA, 25 bp, Artificial
  Probe
tatttcagtgacttggtcctgtggg

SEQ ID NO: 43930 - DNA, 25 bp, Artificial
  Probe
aggggaatgctaatcgttttggaac

SEQ ID NO: 43931 - DNA, 25 bp, Artificial
  Probe
caaggggaatgctaatcgttttgga

SEQ ID NO: 43932 - DNA, 25 bp, Artificial
  Probe
tcctgctatcctccatttggtgcta

SEQ ID NO: 43933 - DNA, 25 bp, Artificial
  Probe
gaatgctaatcgttttggaacccgt

SEQ ID NO: 43934 - DNA, 25 bp, Artificial
  Probe
aatgctaatcgttttggaacccgtg

SEQ ID NO: 43935 - DNA, 25 bp, Artificial
  Probe
ggggaatgctaatcgttttggaacc

SEQ ID NO: 43936 - DNA, 25 bp, Artificial
  Probe
tgagggttcctgtactgcctatacc

SEQ ID NO: 43937 - DNA, 25 bp, Artificial
  Probe
ggatgagggttcctgtactgcctat

SEQ ID NO: 43938 - DNA, 25 bp, Artificial
  Probe
ggaatgctaatcgttttggaacccg

SEQ ID NO: 43939 - DNA, 25 bp, Artificial
  Probe
ggggcattaaagctgctgttttaaa

SEQ ID NO: 43940 - DNA, 25 bp, Artificial
  Probe
atgctaatcgttttggaacccgtga

SEQ ID NO: 43941 - DNA, 25 bp, Artificial
  Probe
gggcattaaagctgctgttttaaaa

SEQ ID NO: 43942 - DNA, 25 bp, Artificial
  Probe
accatagaggctcagatctctgctc

SEQ ID NO: 43943 - DNA, 25 bp, Artificial
  Probe
gaccatagaggctcagatctctgct

SEQ ID NO: 43944 - DNA, 25 bp, Artificial
  Probe
tgaatggatgtgactggtgtccaac

SEQ ID NO: 43945 - DNA, 25 bp, Artificial
  Probe
gtgaatggatgtgactggtgtccaa

SEQ ID NO: 43946 - DNA, 25 bp, Artificial
  Probe
gggaatgctaatcgttttggaaccc

SEQ ID NO: 43947 - DNA, 25 bp, Artificial
  Probe
ctgcaaggggaatgctaatcgtttt

SEQ ID NO: 43948 - DNA, 25 bp, Artificial
  Probe
gcaaggggaatgctaatcgttttgg

SEQ ID NO: 43949 - DNA, 25 bp, Artificial
  Probe
tgcaaggggaatgctaatcgttttg

SEQ ID NO: 43950 - DNA, 25 bp, Artificial
  Probe
ccctacttctaatttgctgaatgaa

SEQ ID NO: 43951 - DNA, 25 bp, Artificial
  Probe
agtgttgtaatgagatgtgtttcaa

SEQ ID NO: 43952 - DNA, 25 bp, Artificial
  Probe
aagtgttgtaatgagatgtgtttca

SEQ ID NO: 43953 - DNA, 25 bp, Artificial
  Probe
gagacatttgctctagtatggtgta

SEQ ID NO: 43954 - DNA, 25 bp, Artificial
  Probe
agacatttgctctagtatggtgtat

SEQ ID NO: 43955 - DNA, 25 bp, Artificial
  Probe
gtgttgtaatgagatgtgtttcaat

SEQ ID NO: 43956 - DNA, 25 bp, Artificial
  Probe
taagtgttgtaatgagatgtgtttc

SEQ ID NO: 43957 - DNA, 25 bp, Artificial
  Probe
gttgtaatgagatgtgtttcaatca

SEQ ID NO: 43958 - DNA, 25 bp, Artificial
  Probe
tgttgtaatgagatgtgtttcaatc

SEQ ID NO: 43959 - DNA, 25 bp, Artificial
  Probe
gacatttgctctagtatggtgtatt

SEQ ID NO: 43960 - DNA, 25 bp, Artificial
  Probe
acatttgctctagtatggtgtattt

SEQ ID NO: 43961 - DNA, 25 bp, Artificial
  Probe
ttaagtgttgtaatgagatgtgttt

SEQ ID NO: 43962 - DNA, 25 bp, Artificial
  Probe
tttaagtgttgtaatgagatgtgtt

SEQ ID NO: 43963 - DNA, 25 bp, Artificial
  Probe
tgtaatgagatgtgtttcaatcaaa

SEQ ID NO: 43964 - DNA, 25 bp, Artificial
  Probe
ttgtaatgagatgtgtttcaatcaa

SEQ ID NO: 43965 - DNA, 25 bp, Artificial
  Probe
atttaagtgttgtaatgagatgtgt

SEQ ID NO: 43966 - DNA, 25 bp, Artificial
  Probe
atgagatgtgtttcaatcaaacctg

SEQ ID NO: 43967 - DNA, 25 bp, Artificial
  Probe
tgctctttgtatatttaagtgttgt

SEQ ID NO: 43968 - DNA, 25 bp, Artificial
  Probe
aatgagatgtgtttcaatcaaacct

SEQ ID NO: 43969 - DNA, 25 bp, Artificial
  Probe
tgagatgtgtttcaatcaaacctga

SEQ ID NO: 43970 - DNA, 25 bp, Artificial
  Probe
gagatgtgtttcaatcaaacctgaa

SEQ ID NO: 43971 - DNA, 25 bp, Artificial
  Probe
cccctacttctaatttgctgaatga

SEQ ID NO: 43972 - DNA, 25 bp, Artificial
  Probe
agatgtgtttcaatcaaacctgaac

SEQ ID NO: 43973 - DNA, 25 bp, Artificial
  Probe
catttgctctagtatggtgtattta

SEQ ID NO: 43974 - DNA, 25 bp, Artificial
  Probe
gtttcaatcaaacctgaacatgagt

SEQ ID NO: 43975 - DNA, 25 bp, Artificial
  Probe
tttcaatcaaacctgaacatgagtt

SEQ ID NO: 43976 - DNA, 25 bp, Artificial
  Probe
taatgagatgtgtttcaatcaaacc

SEQ ID NO: 43977 - DNA, 25 bp, Artificial
  Probe
tgagccctgttttactcttaactac

SEQ ID NO: 43978 - DNA, 25 bp, Artificial
  Probe
gtgagccctgttttactcttaacta

SEQ ID NO: 43979 - DNA, 25 bp, Artificial
  Probe
gagccctgttttactcttaactaca

SEQ ID NO: 43980 - DNA, 25 bp, Artificial
  Probe
ttcaatcaaacctgaacatgagtta

SEQ ID NO: 43981 - DNA, 25 bp, Artificial
  Probe
agccctgttttactcttaactacat

SEQ ID NO: 43982 - DNA, 25 bp, Artificial
  Probe
tcacagccgctactatgtagaaatc

SEQ ID NO: 43983 - DNA, 25 bp, Artificial
  Probe
ctcacagccgctactatgtagaaat

SEQ ID NO: 43984 - DNA, 25 bp, Artificial
  Probe
ttcagagacatttgctctagtatgg

SEQ ID NO: 43985 - DNA, 25 bp, Artificial
  Probe
tgtgatattttcagagacatttgct

SEQ ID NO: 43986 - DNA, 25 bp, Artificial
  Probe
atgtgtttcaatcaaacctgaacat

SEQ ID NO: 43987 - DNA, 25 bp, Artificial
  Probe
gccctgttttactcttaactacatt

SEQ ID NO: 43988 - DNA, 25 bp, Artificial
  Probe
gatgtgtttcaatcaaacctgaaca

SEQ ID NO: 43989 - DNA, 25 bp, Artificial
  Probe
gtgatattttcagagacatttgctc

SEQ ID NO: 43990 - DNA, 25 bp, Artificial
  Probe
tgtttcaatcaaacctgaacatgag

SEQ ID NO: 43991 - DNA, 25 bp, Artificial
  Probe
gtgtttcaatcaaacctgaacatga

SEQ ID NO: 43992 - DNA, 25 bp, Artificial
  Probe
tgtgtttcaatcaaacctgaacatg

SEQ ID NO: 43993 - DNA, 25 bp, Artificial
  Probe
cagagacatttgctctagtatggtg

SEQ ID NO: 43994 - DNA, 25 bp, Artificial
  Probe
tcagagacatttgctctagtatggt

SEQ ID NO: 43995 - DNA, 25 bp, Artificial
  Probe
ttcagaatcctcaatcctaacaagg

SEQ ID NO: 43996 - DNA, 25 bp, Artificial
  Probe
ttggtgtctcgttcaagaaatagaa

SEQ ID NO: 43997 - DNA, 25 bp, Artificial
  Probe
tcagaatcctcaatcctaacaaggc

SEQ ID NO: 43998 - DNA, 25 bp, Artificial
  Probe
ccttaattaatctcctcgaccttcc

SEQ ID NO: 43999 - DNA, 25 bp, Artificial
  Probe
gccttaattaatctcctcgaccttc

SEQ ID NO: 44000 - DNA, 25 bp, Artificial
  Probe
gaagccttaattaatctcctcgacc

SEQ ID NO: 44001 - DNA, 25 bp, Artificial
  Probe
taattaatctcctcgaccttccctg

SEQ ID NO: 44002 - DNA, 25 bp, Artificial
  Probe
agccttaattaatctcctcgacctt

SEQ ID NO: 44003 - DNA, 25 bp, Artificial
  Probe
aagccttaattaatctcctcgacct

SEQ ID NO: 44004 - DNA, 25 bp, Artificial
  Probe
ggaagccttaattaatctcctcgac

SEQ ID NO: 44005 - DNA, 25 bp, Artificial
  Probe
aattaatctcctcgaccttccctgt

SEQ ID NO: 44006 - DNA, 25 bp, Artificial
  Probe
cttaattaatctcctcgaccttccc

SEQ ID NO: 44007 - DNA, 25 bp, Artificial
  Probe
ttaattaatctcctcgaccttccct

SEQ ID NO: 44008 - DNA, 25 bp, Artificial
  Probe
cttggtgtctcgttcaagaaataga

SEQ ID NO: 44009 - DNA, 25 bp, Artificial
  Probe
agtaacttactgtggtcagtgtctg

SEQ ID NO: 44010 - DNA, 25 bp, Artificial
  Probe
attaatctcctcgaccttccctgtg

SEQ ID NO: 44011 - DNA, 25 bp, Artificial
  Probe
cagaatcctcaatcctaacaaggcc

SEQ ID NO: 44012 - DNA, 25 bp, Artificial
  Probe
gtaacttactgtggtcagtgtctgg

SEQ ID NO: 44013 - DNA, 25 bp, Artificial
  Probe
gggaagccttaattaatctcctcga

SEQ ID NO: 44014 - DNA, 25 bp, Artificial
  Probe
ggagatcttcgaggtggacaacttg

SEQ ID NO: 44015 - DNA, 25 bp, Artificial
  Probe
ctgtggagacgtggcagtaacttac

SEQ ID NO: 44016 - DNA, 25 bp, Artificial
  Probe
aggagatcttcgaggtggacaactt

SEQ ID NO: 44017 - DNA, 25 bp, Artificial
  Probe
taacttactgtggtcagtgtctggc

SEQ ID NO: 44018 - DNA, 25 bp, Artificial
  Probe
aggggaagccttaattaatctcctc

SEQ ID NO: 44019 - DNA, 25 bp, Artificial
  Probe
agaatcctcaatcctaacaaggccc

SEQ ID NO: 44020 - DNA, 25 bp, Artificial
  Probe
caggggaagccttaattaatctcct

SEQ ID NO: 44021 - DNA, 25 bp, Artificial
  Probe
ggggaagccttaattaatctcctcg

SEQ ID NO: 44022 - DNA, 25 bp, Artificial
  Probe
gactaaagcttcgcctcacctacaa

SEQ ID NO: 44023 - DNA, 25 bp, Artificial
  Probe
actaaagcttcgcctcacctacaac

SEQ ID NO: 44024 - DNA, 25 bp, Artificial
  Probe
gaatcctcaatcctaacaaggcccc

SEQ ID NO: 44025 - DNA, 25 bp, Artificial
  Probe
atagcattggagcaagtcttatcag

SEQ ID NO: 44026 - DNA, 25 bp, Artificial
  Probe
tatatgtcttgtgtgcgtgtcctta

SEQ ID NO: 44027 - DNA, 25 bp, Artificial
  Probe
gatagcattggagcaagtcttatca

SEQ ID NO: 44028 - DNA, 25 bp, Artificial
  Probe
tatatatgtcttgtgtgcgtgtcct

SEQ ID NO: 44029 - DNA, 25 bp, Artificial
  Probe
cgatagcattggagcaagtcttatc

SEQ ID NO: 44030 - DNA, 25 bp, Artificial
  Probe
cattggagcaagtcttatcagcaag

SEQ ID NO: 44031 - DNA, 25 bp, Artificial
  Probe
atatgtcttgtgtgcgtgtccttaa

SEQ ID NO: 44032 - DNA, 25 bp, Artificial
  Probe
gcaagtcttatcagcaagcaatgtt

SEQ ID NO: 44033 - DNA, 25 bp, Artificial
  Probe
atatatgtcttgtgtgcgtgtcctt

SEQ ID NO: 44034 - DNA, 25 bp, Artificial
  Probe
gagcaagtcttatcagcaagcaatg

SEQ ID NO: 44035 - DNA, 25 bp, Artificial
  Probe
cgtgtccttaaacttccaatcttat

SEQ ID NO: 44036 - DNA, 25 bp, Artificial
  Probe
caagtcttatcagcaagcaatgttt

SEQ ID NO: 44037 - DNA, 25 bp, Artificial
  Probe
atatatatgtcttgtgtgcgtgtcc

SEQ ID NO: 44038 - DNA, 25 bp, Artificial
  Probe
gcgtgtccttaaacttccaatctta

SEQ ID NO: 44039 - DNA, 25 bp, Artificial
  Probe
tagcattggagcaagtcttatcagc

SEQ ID NO: 44040 - DNA, 25 bp, Artificial
  Probe
gaaagggatgggactagattctaaa

SEQ ID NO: 44041 - DNA, 25 bp, Artificial
  Probe
tatatatatgtcttgtgtgcgtgtc

SEQ ID NO: 44042 - DNA, 25 bp, Artificial
  Probe
agcaagtcttatcagcaagcaatgt

SEQ ID NO: 44043 - DNA, 25 bp, Artificial
  Probe
ggaaagggatgggactagattctaa

SEQ ID NO: 44044 - DNA, 25 bp, Artificial
  Probe
gcgatagcattggagcaagtcttat

SEQ ID NO: 44045 - DNA, 25 bp, Artificial
  Probe
ttatatatatgtcttgtgtgcgtgt

SEQ ID NO: 44046 - DNA, 25 bp, Artificial
  Probe
catgggaatgatagttgggaagaaa

SEQ ID NO: 44047 - DNA, 25 bp, Artificial
  Probe
aggaaagggatgggactagattcta

SEQ ID NO: 44048 - DNA, 25 bp, Artificial
  Probe
taggaaagggatgggactagattct

SEQ ID NO: 44049 - DNA, 25 bp, Artificial
  Probe
atgtttcaaagttaagaatgggttt

SEQ ID NO: 44050 - DNA, 25 bp, Artificial
  Probe
ggagcaagtcttatcagcaagcaat

SEQ ID NO: 44051 - DNA, 25 bp, Artificial
  Probe
attggagcaagtcttatcagcaagc

SEQ ID NO: 44052 - DNA, 25 bp, Artificial
  Probe
gtgtccttaaacttccaatcttatt

SEQ ID NO: 44053 - DNA, 25 bp, Artificial
  Probe
tatgtcttgtgtgcgtgtccttaaa

SEQ ID NO: 44054 - DNA, 25 bp, Artificial
  Probe
gatttcaattagtctaggtttaggc

SEQ ID NO: 44055 - DNA, 25 bp, Artificial
  Probe
tgtttcaaagttaagaatgggttta

SEQ ID NO: 44056 - DNA, 25 bp, Artificial
  Probe
gcattggagcaagtcttatcagcaa

SEQ ID NO: 44057 - DNA, 25 bp, Artificial
  Probe
tgcgtgtccttaaacttccaatctt

SEQ ID NO: 44058 - DNA, 25 bp, Artificial
  Probe
tatgtttcaaagttaagaatgggtt

SEQ ID NO: 44059 - DNA, 25 bp, Artificial
  Probe
aaactttgcacacgacagatttcta

SEQ ID NO: 44060 - DNA, 25 bp, Artificial
  Probe
ctaggaaagggatgggactagattc

SEQ ID NO: 44061 - DNA, 25 bp, Artificial
  Probe
agcgatagcattggagcaagtctta

SEQ ID NO: 44062 - DNA, 25 bp, Artificial
  Probe
aactttgcacacgacagatttctag

SEQ ID NO: 44063 - DNA, 25 bp, Artificial
  Probe
atgggaatgatagttgggaagaaaa

SEQ ID NO: 44064 - DNA, 25 bp, Artificial
  Probe
agattgttgaacgcagcttgtctag

SEQ ID NO: 44065 - DNA, 25 bp, Artificial
  Probe
gagattgttgaacgcagcttgtcta

SEQ ID NO: 44066 - DNA, 25 bp, Artificial
  Probe
aagtcttatcagcaagcaatgtttt

SEQ ID NO: 44067 - DNA, 25 bp, Artificial
  Probe
tttgcacacgacagatttctagata

SEQ ID NO: 44068 - DNA, 25 bp, Artificial
  Probe
tcttatcagcaagcaatgttttcag

SEQ ID NO: 44069 - DNA, 25 bp, Artificial
  Probe
agtcttatcagcaagcaatgttttc

SEQ ID NO: 44070 - DNA, 25 bp, Artificial
  Probe
gaaacataatcaaatgggagaaggc

SEQ ID NO: 44071 - DNA, 25 bp, Artificial
  Probe
gtcacagaaacataatcaaatggga

SEQ ID NO: 44072 - DNA, 25 bp, Artificial
  Probe
agtcacagaaacataatcaaatggg

SEQ ID NO: 44073 - DNA, 25 bp, Artificial
  Probe
gctgtgcttcttaaatgataaagga

SEQ ID NO: 44074 - DNA, 25 bp, Artificial
  Probe
cacagaaacataatcaaatgggaga

SEQ ID NO: 44075 - DNA, 25 bp, Artificial
  Probe
tcacagaaacataatcaaatgggag

SEQ ID NO: 44076 - DNA, 25 bp, Artificial
  Probe
aaacataatcaaatgggagaaggca

SEQ ID NO: 44077 - DNA, 25 bp, Artificial
  Probe
agaaacataatcaaatgggagaagg

SEQ ID NO: 44078 - DNA, 25 bp, Artificial
  Probe
aacataatcaaatgggagaaggcag

SEQ ID NO: 44079 - DNA, 25 bp, Artificial
  Probe
tgcttcttaaatgataaaggacaca

SEQ ID NO: 44080 - DNA, 25 bp, Artificial
  Probe
acagaaacataatcaaatgggagaa

SEQ ID NO: 44081 - DNA, 25 bp, Artificial
  Probe
tagtgtttactttctccagtcctag

SEQ ID NO: 44082 - DNA, 25 bp, Artificial
  Probe
ctagtgtttactttctccagtccta

SEQ ID NO: 44083 - DNA, 25 bp, Artificial
  Probe
cagaaacataatcaaatgggagaag

SEQ ID NO: 44084 - DNA, 25 bp, Artificial
  Probe
gcttcttaaatgataaaggacacag

SEQ ID NO: 44085 - DNA, 25 bp, Artificial
  Probe
ctgtgcttcttaaatgataaaggac

SEQ ID NO: 44086 - DNA, 25 bp, Artificial
  Probe
aagtcacagaaacataatcaaatgg

SEQ ID NO: 44087 - DNA, 25 bp, Artificial
  Probe
ttaaatgataaaggacacagtgact

SEQ ID NO: 44088 - DNA, 25 bp, Artificial
  Probe
tgtgcttcttaaatgataaaggaca

SEQ ID NO: 44089 - DNA, 25 bp, Artificial
  Probe
ataatcaaatgggagaaggcaggag

SEQ ID NO: 44090 - DNA, 25 bp, Artificial
  Probe
taaatgataaaggacacagtgactt

SEQ ID NO: 44091 - DNA, 25 bp, Artificial
  Probe
cctagtgtttactttctccagtcct

SEQ ID NO: 44092 - DNA, 25 bp, Artificial
  Probe
agaccctagtgtttactttctccag

SEQ ID NO: 44093 - DNA, 25 bp, Artificial
  Probe
cttaaatgataaaggacacagtgac

SEQ ID NO: 44094 - DNA, 25 bp, Artificial
  Probe
gaaggagaccctagtgtttactttc

SEQ ID NO: 44095 - DNA, 25 bp, Artificial
  Probe
accctagtgtttactttctccagtc

SEQ ID NO: 44096 - DNA, 25 bp, Artificial
  Probe
gaccctagtgtttactttctccagt

SEQ ID NO: 44097 - DNA, 25 bp, Artificial
  Probe
tcttaaatgataaaggacacagtga

SEQ ID NO: 44098 - DNA, 25 bp, Artificial
  Probe
aaggagaccctagtgtttactttct

SEQ ID NO: 44099 - DNA, 25 bp, Artificial
  Probe
tgaaggagaccctagtgtttacttt

SEQ ID NO: 44100 - DNA, 25 bp, Artificial
  Probe
agtgtttactttctccagtcctagc

SEQ ID NO: 44101 - DNA, 25 bp, Artificial
  Probe
gtgcttcttaaatgataaaggacac

SEQ ID NO: 44102 - DNA, 25 bp, Artificial
  Probe
ctagctctgccatataaacactgtt

SEQ ID NO: 44103 - DNA, 25 bp, Artificial
  Probe
acatcaaggtgccattcaggtattt

SEQ ID NO: 44104 - DNA, 25 bp, Artificial
  Probe
catcaaggtgccattcaggtatttg

SEQ ID NO: 44105 - DNA, 25 bp, Artificial
  Probe
ctgaaggagaccctagtgtttactt

SEQ ID NO: 44106 - DNA, 25 bp, Artificial
  Probe
caagacctttctcctactcaaccag

SEQ ID NO: 44107 - DNA, 25 bp, Artificial
  Probe
cataatcaaatgggagaaggcagga

SEQ ID NO: 44108 - DNA, 25 bp, Artificial
  Probe
cacatcaaggtgccattcaggtatt

SEQ ID NO: 44109 - DNA, 25 bp, Artificial
  Probe
ccctagtgtttactttctccagtcc

SEQ ID NO: 44110 - DNA, 25 bp, Artificial
  Probe
acataatcaaatgggagaaggcagg

SEQ ID NO: 44111 - DNA, 25 bp, Artificial
  Probe
ttcttaaatgataaaggacacagtg

SEQ ID NO: 44112 - DNA, 25 bp, Artificial
  Probe
tcctagctctgccatataaacactg

SEQ ID NO: 44113 - DNA, 25 bp, Artificial
  Probe
gtcctagctctgccatataaacact

SEQ ID NO: 44114 - DNA, 25 bp, Artificial
  Probe
agtcctagctctgccatataaacac

SEQ ID NO: 44115 - DNA, 25 bp, Artificial
  Probe
gcaataataagtggttcacagacac

SEQ ID NO: 44116 - DNA, 25 bp, Artificial
  Probe
atcatcaagaacaacctgaaggact

SEQ ID NO: 44117 - DNA, 25 bp, Artificial
  Probe
catcatcaagaacaacctgaaggac

SEQ ID NO: 44118 - DNA, 25 bp, Artificial
  Probe
gtcatcatcaagaacaacctgaagg

SEQ ID NO: 44119 - DNA, 25 bp, Artificial
  Probe
tcatcatcaagaacaacctgaagga

SEQ ID NO: 44120 - DNA, 25 bp, Artificial
  Probe
cgtcatcatcaagaacaacctgaag

SEQ ID NO: 44121 - DNA, 25 bp, Artificial
  Probe
aataataagtggttcacagacacct

SEQ ID NO: 44122 - DNA, 25 bp, Artificial
  Probe
caataataagtggttcacagacacc

SEQ ID NO: 44123 - DNA, 25 bp, Artificial
  Probe
agcatctgcaataataagtggttca

SEQ ID NO: 44124 - DNA, 25 bp, Artificial
  Probe
tagcatctgcaataataagtggttc

SEQ ID NO: 44125 - DNA, 25 bp, Artificial
  Probe
gatagcatctgcaataataagtggt

SEQ ID NO: 44126 - DNA, 25 bp, Artificial
  Probe
tgatagcatctgcaataataagtgg

SEQ ID NO: 44127 - DNA, 25 bp, Artificial
  Probe
tcatcaagaacaacctgaaggactg

SEQ ID NO: 44128 - DNA, 25 bp, Artificial
  Probe
atagcatctgcaataataagtggtt

SEQ ID NO: 44129 - DNA, 25 bp, Artificial
  Probe
gagcaagtttgaggacctgaataaa

SEQ ID NO: 44130 - DNA, 25 bp, Artificial
  Probe
ctgcaataataagtggttcacagac

SEQ ID NO: 44131 - DNA, 25 bp, Artificial
  Probe
catctgcaataataagtggttcaca

SEQ ID NO: 44132 - DNA, 25 bp, Artificial
  Probe
atctgcaataataagtggttcacag

SEQ ID NO: 44133 - DNA, 25 bp, Artificial
  Probe
tgcaataataagtggttcacagaca

SEQ ID NO: 44134 - DNA, 25 bp, Artificial
  Probe
atcaagaacaacctgaaggactgtg

SEQ ID NO: 44135 - DNA, 25 bp, Artificial
  Probe
catcaagaacaacctgaaggactgt

SEQ ID NO: 44136 - DNA, 25 bp, Artificial
  Probe
gcatctgcaataataagtggttcac

SEQ ID NO: 44137 - DNA, 25 bp, Artificial
  Probe
agagcaagtttgaggacctgaataa

SEQ ID NO: 44138 - DNA, 25 bp, Artificial
  Probe
gaataaacgcaaagacaccaaggag

SEQ ID NO: 44139 - DNA, 25 bp, Artificial
  Probe
ttgatagcatctgcaataataagtg

SEQ ID NO: 44140 - DNA, 25 bp, Artificial
  Probe
ataaacgcaaagacaccaaggagat

SEQ ID NO: 44141 - DNA, 25 bp, Artificial
  Probe
ctgaataaacgcaaagacaccaagg

SEQ ID NO: 44142 - DNA, 25 bp, Artificial
  Probe
cctgaataaacgcaaagacaccaag

SEQ ID NO: 44143 - DNA, 25 bp, Artificial
  Probe
ctgacccaagtccaaatgtttacag

SEQ ID NO: 44144 - DNA, 25 bp, Artificial
  Probe
acgtcatcatcaagaacaacctgaa

SEQ ID NO: 44145 - DNA, 25 bp, Artificial
  Probe
aataaacgcaaagacaccaaggaga

SEQ ID NO: 44146 - DNA, 25 bp, Artificial
  Probe
ttgaggacctgaataaacgcaaaga

SEQ ID NO: 44147 - DNA, 25 bp, Artificial
  Probe
tgaataaacgcaaagacaccaagga

SEQ ID NO: 44148 - DNA, 25 bp, Artificial
  Probe
ctggctgaggatgaggagatgaatc

SEQ ID NO: 44149 - DNA, 25 bp, Artificial
  Probe
cagagcaagtttgaggacctgaata

SEQ ID NO: 44150 - DNA, 25 bp, Artificial
  Probe
acctgaataaacgcaaagacaccaa

SEQ ID NO: 44151 - DNA, 25 bp, Artificial
  Probe
gaggacctgaataaacgcaaagaca

SEQ ID NO: 44152 - DNA, 25 bp, Artificial
  Probe
tgaggacctgaataaacgcaaagac

SEQ ID NO: 44153 - DNA, 25 bp, Artificial
  Probe
agcaagtttgaggacctgaataaac

SEQ ID NO: 44154 - DNA, 25 bp, Artificial
  Probe
taaacgcaaagacaccaaggagatc

SEQ ID NO: 44155 - DNA, 25 bp, Artificial
  Probe
aggacctgaataaacgcaaagacac

SEQ ID NO: 44156 - DNA, 25 bp, Artificial
  Probe
gacctgaataaacgcaaagacacca

SEQ ID NO: 44157 - DNA, 25 bp, Artificial
  Probe
tgacccaagtccaaatgtttacagg

SEQ ID NO: 44158 - DNA, 25 bp, Artificial
  Probe
cctgacccaagtccaaatgtttaca

SEQ ID NO: 44159 - DNA, 25 bp, Artificial
  Probe
tctgcaataataagtggttcacaga

SEQ ID NO: 44160 - DNA, 25 bp, Artificial
  Probe
ttcttcggtgggtaaagtattgttt

SEQ ID NO: 44161 - DNA, 25 bp, Artificial
  Probe
tcttcggtgggtaaagtattgtttc

SEQ ID NO: 44162 - DNA, 25 bp, Artificial
  Probe
cttcttcggtgggtaaagtattgtt

SEQ ID NO: 44163 - DNA, 25 bp, Artificial
  Probe
ataagacctaataaggcttcttcgg

SEQ ID NO: 44164 - DNA, 25 bp, Artificial
  Probe
taagacctaataaggcttcttcggt

SEQ ID NO: 44165 - DNA, 25 bp, Artificial
  Probe
taataaggcttcttcggtgggtaaa

SEQ ID NO: 44166 - DNA, 25 bp, Artificial
  Probe
cttcggtgggtaaagtattgtttcc

SEQ ID NO: 44167 - DNA, 25 bp, Artificial
  Probe
ttcggtgggtaaagtattgtttcct

SEQ ID NO: 44168 - DNA, 25 bp, Artificial
  Probe
ctaataaggcttcttcggtgggtaa

SEQ ID NO: 44169 - DNA, 25 bp, Artificial
  Probe
taaagtattgtttcctggcagctaa

SEQ ID NO: 44170 - DNA, 25 bp, Artificial
  Probe
tattgtttcctggcagctaaagatt

SEQ ID NO: 44171 - DNA, 25 bp, Artificial
  Probe
ccctataagacctaataaggcttct

SEQ ID NO: 44172 - DNA, 25 bp, Artificial
  Probe
gtaaagtattgtttcctggcagcta

SEQ ID NO: 44173 - DNA, 25 bp, Artificial
  Probe
aaagtattgtttcctggcagctaaa

SEQ ID NO: 44174 - DNA, 25 bp, Artificial
  Probe
tcggtgggtaaagtattgtttcctg

SEQ ID NO: 44175 - DNA, 25 bp, Artificial
  Probe
aagacctaataaggcttcttcggtg

SEQ ID NO: 44176 - DNA, 25 bp, Artificial
  Probe
tataagacctaataaggcttcttcg

SEQ ID NO: 44177 - DNA, 25 bp, Artificial
  Probe
gtattgtttcctggcagctaaagat

SEQ ID NO: 44178 - DNA, 25 bp, Artificial
  Probe
aagtattgtttcctggcagctaaag

SEQ ID NO: 44179 - DNA, 25 bp, Artificial
  Probe
aataaggcttcttcggtgggtaaag

SEQ ID NO: 44180 - DNA, 25 bp, Artificial
  Probe
tgggtaaagtattgtttcctggcag

SEQ ID NO: 44181 - DNA, 25 bp, Artificial
  Probe
cctataagacctaataaggcttctt

SEQ ID NO: 44182 - DNA, 25 bp, Artificial
  Probe
attgtttcctggcagctaaagattg

SEQ ID NO: 44183 - DNA, 25 bp, Artificial
  Probe
gcttcttcggtgggtaaagtattgt

SEQ ID NO: 44184 - DNA, 25 bp, Artificial
  Probe
agtattgtttcctggcagctaaaga

SEQ ID NO: 44185 - DNA, 25 bp, Artificial
  Probe
gtgggtaaagtattgtttcctggca

SEQ ID NO: 44186 - DNA, 25 bp, Artificial
  Probe
taaggcttcttcggtgggtaaagta

SEQ ID NO: 44187 - DNA, 25 bp, Artificial
  Probe
aaagaaacaaaagcaaaatcgtcct

SEQ ID NO: 44188 - DNA, 25 bp, Artificial
  Probe
caaagaaacaaaagcaaaatcgtcc

SEQ ID NO: 44189 - DNA, 25 bp, Artificial
  Probe
gcaaagaaacaaaagcaaaatcgtc

SEQ ID NO: 44190 - DNA, 25 bp, Artificial
  Probe
cggtgggtaaagtattgtttcctgg

SEQ ID NO: 44191 - DNA, 25 bp, Artificial
  Probe
agacctaataaggcttcttcggtgg

SEQ ID NO: 44192 - DNA, 25 bp, Artificial
  Probe
actgaatttcccctataagacctaa

SEQ ID NO: 44193 - DNA, 25 bp, Artificial
  Probe
ggtgggtaaagtattgtttcctggc

SEQ ID NO: 44194 - DNA, 25 bp, Artificial
  Probe
ggcttcttcggtgggtaaagtattg

SEQ ID NO: 44195 - DNA, 25 bp, Artificial
  Probe
gtactgaatttcccctataagacct

SEQ ID NO: 44196 - DNA, 25 bp, Artificial
  Probe
aggcttcttcggtgggtaaagtatt

SEQ ID NO: 44197 - DNA, 25 bp, Artificial
  Probe
aaggcttcttcggtgggtaaagtat

SEQ ID NO: 44198 - DNA, 25 bp, Artificial
  Probe
ataaggcttcttcggtgggtaaagt

SEQ ID NO: 44199 - DNA, 25 bp, Artificial
  Probe
ggcaaagaaacaaaagcaaaatcgt

SEQ ID NO: 44200 - DNA, 25 bp, Artificial
  Probe
tggcaaagaaacaaaagcaaaatcg

SEQ ID NO: 44201 - DNA, 25 bp, Artificial
  Probe
ctataagacctaataaggcttcttc

SEQ ID NO: 44202 - DNA, 25 bp, Artificial
  Probe
tcccctataagacctaataaggctt

SEQ ID NO: 44203 - DNA, 25 bp, Artificial
  Probe
ttcccctataagacctaataaggct

SEQ ID NO: 44204 - DNA, 25 bp, Artificial
  Probe
gcagctaaagattgctcaacaatta

SEQ ID NO: 44205 - DNA, 25 bp, Artificial
  Probe
cttgtcaagatcacttcagatgctt

SEQ ID NO: 44206 - DNA, 25 bp, Artificial
  Probe
cttgtctgtctcaatatttcctgtg

SEQ ID NO: 44207 - DNA, 25 bp, Artificial
  Probe
atgtgtgtttgtgctttggatgttt

SEQ ID NO: 44208 - DNA, 25 bp, Artificial
  Probe
ccttgtctgtctcaatatttcctgt

SEQ ID NO: 44209 - DNA, 25 bp, Artificial
  Probe
tacagtaacaagcgagaagacctga

SEQ ID NO: 44210 - DNA, 25 bp, Artificial
  Probe
cccttgtctgtctcaatatttcctg

SEQ ID NO: 44211 - DNA, 25 bp, Artificial
  Probe
gtacagtaacaagcgagaagacctg

SEQ ID NO: 44212 - DNA, 25 bp, Artificial
  Probe
ttgtctgtctcaatatttcctgtgc

SEQ ID NO: 44213 - DNA, 25 bp, Artificial
  Probe
gtaacaagcgagaagacctgatgtc

SEQ ID NO: 44214 - DNA, 25 bp, Artificial
  Probe
cagtaacaagcgagaagacctgatg

SEQ ID NO: 44215 - DNA, 25 bp, Artificial
  Probe
aagatcacttcagatgcttgtacag

SEQ ID NO: 44216 - DNA, 25 bp, Artificial
  Probe
agtaacaagcgagaagacctgatgt

SEQ ID NO: 44217 - DNA, 25 bp, Artificial
  Probe
atcacttcagatgcttgtacagtaa

SEQ ID NO: 44218 - DNA, 25 bp, Artificial
  Probe
cctcttgtcaagatcacttcagatg

SEQ ID NO: 44219 - DNA, 25 bp, Artificial
  Probe
gatcacttcagatgcttgtacagta

SEQ ID NO: 44220 - DNA, 25 bp, Artificial
  Probe
tcaagatcacttcagatgcttgtac

SEQ ID NO: 44221 - DNA, 25 bp, Artificial
  Probe
gtcaagatcacttcagatgcttgta

SEQ ID NO: 44222 - DNA, 25 bp, Artificial
  Probe
tcacttcagatgcttgtacagtaac

SEQ ID NO: 44223 - DNA, 25 bp, Artificial
  Probe
acagtaacaagcgagaagacctgat

SEQ ID NO: 44224 - DNA, 25 bp, Artificial
  Probe
ttcattgcatgttacttggacataa

SEQ ID NO: 44225 - DNA, 25 bp, Artificial
  Probe
tcattgcatgttacttggacataat

SEQ ID NO: 44226 - DNA, 25 bp, Artificial
  Probe
ctcttgtcaagatcacttcagatgc

SEQ ID NO: 44227 - DNA, 25 bp, Artificial
  Probe
cacttcagatgcttgtacagtaaca

SEQ ID NO: 44228 - DNA, 25 bp, Artificial
  Probe
ttgtcaagatcacttcagatgcttg

SEQ ID NO: 44229 - DNA, 25 bp, Artificial
  Probe
tcttgtcaagatcacttcagatgct

SEQ ID NO: 44230 - DNA, 25 bp, Artificial
  Probe
agatcacttcagatgcttgtacagt

SEQ ID NO: 44231 - DNA, 25 bp, Artificial
  Probe
gcccttgtctgtctcaatatttcct

SEQ ID NO: 44232 - DNA, 25 bp, Artificial
  Probe
cattgcatgttacttggacataatt

SEQ ID NO: 44233 - DNA, 25 bp, Artificial
  Probe
tgtctgtctcaatatttcctgtgcc

SEQ ID NO: 44234 - DNA, 25 bp, Artificial
  Probe
tcaggaatgactgataactggtata

SEQ ID NO: 44235 - DNA, 25 bp, Artificial
  Probe
taatgattctcctatagatgtcagg

SEQ ID NO: 44236 - DNA, 25 bp, Artificial
  Probe
tcagagtaggtagaatctaatgatt

SEQ ID NO: 44237 - DNA, 25 bp, Artificial
  Probe
catgtgtgtttgtgctttggatgtt

SEQ ID NO: 44238 - DNA, 25 bp, Artificial
  Probe
agatgtcaggaatgactgataactg

SEQ ID NO: 44239 - DNA, 25 bp, Artificial
  Probe
gtcaggaatgactgataactggtat

SEQ ID NO: 44240 - DNA, 25 bp, Artificial
  Probe
tgtcaagatcacttcagatgcttgt

SEQ ID NO: 44241 - DNA, 25 bp, Artificial
  Probe
tgtcaggaatgactgataactggta

SEQ ID NO: 44242 - DNA, 25 bp, Artificial
  Probe
gatgtcaggaatgactgataactgg

SEQ ID NO: 44243 - DNA, 25 bp, Artificial
  Probe
acactctgttctttaattaggtaga

SEQ ID NO: 44244 - DNA, 25 bp, Artificial
  Probe
gtctgtctcaatatttcctgtgccc

SEQ ID NO: 44245 - DNA, 25 bp, Artificial
  Probe
tagatgtcaggaatgactgataact

SEQ ID NO: 44246 - DNA, 25 bp, Artificial
  Probe
gaattacaacacatgggaactgttt

SEQ ID NO: 44247 - DNA, 25 bp, Artificial
  Probe
aattacaacacatgggaactgtttg

SEQ ID NO: 44248 - DNA, 25 bp, Artificial
  Probe
tcgaattacaacacatgggaactgt

SEQ ID NO: 44249 - DNA, 25 bp, Artificial
  Probe
atgtcaggaatgactgataactggt

SEQ ID NO: 44250 - DNA, 25 bp, Artificial
  Probe
gacatacattttcacggtacttcat

SEQ ID NO: 44251 - DNA, 25 bp, Artificial
  Probe
acatacattttcacggtacttcatt

SEQ ID NO: 44252 - DNA, 25 bp, Artificial
  Probe
catacattttcacggtacttcattg

SEQ ID NO: 44253 - DNA, 25 bp, Artificial
  Probe
ttgacatacattttcacggtacttc

SEQ ID NO: 44254 - DNA, 25 bp, Artificial
  Probe
tgacatacattttcacggtacttca

SEQ ID NO: 44255 - DNA, 25 bp, Artificial
  Probe
attgacatacattttcacggtactt

SEQ ID NO: 44256 - DNA, 25 bp, Artificial
  Probe
cattttcacggtacttcattgtaat

SEQ ID NO: 44257 - DNA, 25 bp, Artificial
  Probe
acattttcacggtacttcattgtaa

SEQ ID NO: 44258 - DNA, 25 bp, Artificial
  Probe
atacattttcacggtacttcattgt

SEQ ID NO: 44259 - DNA, 25 bp, Artificial
  Probe
tattgacatacattttcacggtact

SEQ ID NO: 44260 - DNA, 25 bp, Artificial
  Probe
tttcacggtacttcattgtaatttt

SEQ ID NO: 44261 - DNA, 25 bp, Artificial
  Probe
ttttcacggtacttcattgtaattt

SEQ ID NO: 44262 - DNA, 25 bp, Artificial
  Probe
attttcacggtacttcattgtaatt

SEQ ID NO: 44263 - DNA, 25 bp, Artificial
  Probe
tacattttcacggtacttcattgta

SEQ ID NO: 44264 - DNA, 25 bp, Artificial
  Probe
cagatactggaaagcttgttcagtg

SEQ ID NO: 44265 - DNA, 25 bp, Artificial
  Probe
ccagatactggaaagcttgttcagt

SEQ ID NO: 44266 - DNA, 25 bp, Artificial
  Probe
accagatactggaaagcttgttcag

SEQ ID NO: 44267 - DNA, 25 bp, Artificial
  Probe
caccagatactggaaagcttgttca

SEQ ID NO: 44268 - DNA, 25 bp, Artificial
  Probe
acaccagatactggaaagcttgttc

SEQ ID NO: 44269 - DNA, 25 bp, Artificial
  Probe
cacaccagatactggaaagcttgtt

SEQ ID NO: 44270 - DNA, 25 bp, Artificial
  Probe
ccacaccagatactggaaagcttgt

SEQ ID NO: 44271 - DNA, 25 bp, Artificial
  Probe
tcacagtagcagtattctctctcat

SEQ ID NO: 44272 - DNA, 25 bp, Artificial
  Probe
gtcacagtagcagtattctctctca

SEQ ID NO: 44273 - DNA, 25 bp, Artificial
  Probe
tgtcacagtagcagtattctctctc

SEQ ID NO: 44274 - DNA, 25 bp, Artificial
  Probe
cacagtagcagtattctctctcatg

SEQ ID NO: 44275 - DNA, 25 bp, Artificial
  Probe
cagtagcagtattctctctcatgta

SEQ ID NO: 44276 - DNA, 25 bp, Artificial
  Probe
agtagcagtattctctctcatgtag

SEQ ID NO: 44277 - DNA, 25 bp, Artificial
  Probe
gtagcagtattctctctcatgtaga

SEQ ID NO: 44278 - DNA, 25 bp, Artificial
  Probe
acagtagcagtattctctctcatgt

SEQ ID NO: 44279 - DNA, 25 bp, Artificial
  Probe
tcggacatttcagaataaagacatc

SEQ ID NO: 44280 - DNA, 25 bp, Artificial
  Probe
ctgtcacagtagcagtattctctct

SEQ ID NO: 44281 - DNA, 25 bp, Artificial
  Probe
aatcggacatttcagaataaagaca

SEQ ID NO: 44282 - DNA, 25 bp, Artificial
  Probe
cggacatttcagaataaagacatct

SEQ ID NO: 44283 - DNA, 25 bp, Artificial
  Probe
atcggacatttcagaataaagacat

SEQ ID NO: 44284 - DNA, 25 bp, Artificial
  Probe
gaatttaacttcccttcatcagccc

SEQ ID NO: 44285 - DNA, 25 bp, Artificial
  Probe
tctctctcatgtagaatgactctct

SEQ ID NO: 44286 - DNA, 25 bp, Artificial
  Probe
cctgtcacagtagcagtattctctc

SEQ ID NO: 44287 - DNA, 25 bp, Artificial
  Probe
atttaacttcccttcatcagcccat

SEQ ID NO: 44288 - DNA, 25 bp, Artificial
  Probe
ctctctcatgtagaatgactctctt

SEQ ID NO: 44289 - DNA, 25 bp, Artificial
  Probe
ttctctctcatgtagaatgactctc

SEQ ID NO: 44290 - DNA, 25 bp, Artificial
  Probe
aatttaacttcccttcatcagccca

SEQ ID NO: 44291 - DNA, 25 bp, Artificial
  Probe
tagcagtattctctctcatgtagaa

SEQ ID NO: 44292 - DNA, 25 bp, Artificial
  Probe
aaatcggacatttcagaataaagac

SEQ ID NO: 44293 - DNA, 25 bp, Artificial
  Probe
gattggttacagctcttcttgcaga

SEQ ID NO: 44294 - DNA, 25 bp, Artificial
  Probe
agattggttacagctcttcttgcag

SEQ ID NO: 44295 - DNA, 25 bp, Artificial
  Probe
tagagattggttacagctcttcttg

SEQ ID NO: 44296 - DNA, 25 bp, Artificial
  Probe
ttagagattggttacagctcttctt

SEQ ID NO: 44297 - DNA, 25 bp, Artificial
  Probe
gagattggttacagctcttcttgca

SEQ ID NO: 44298 - DNA, 25 bp, Artificial
  Probe
tttaacttcccttcatcagcccatg

SEQ ID NO: 44299 - DNA, 25 bp, Artificial
  Probe
tgaatttaacttcccttcatcagcc

SEQ ID NO: 44300 - DNA, 25 bp, Artificial
  Probe
tctctcatgtagaatgactctcttt

SEQ ID NO: 44301 - DNA, 25 bp, Artificial
  Probe
attggttacagctcttcttgcagaa

SEQ ID NO: 44302 - DNA, 25 bp, Artificial
  Probe
ctctcatgtagaatgactctctttc

SEQ ID NO: 44303 - DNA, 25 bp, Artificial
  Probe
atgtccctgtcacagtagcagtatt

SEQ ID NO: 44304 - DNA, 25 bp, Artificial
  Probe
agagattggttacagctcttcttgc

SEQ ID NO: 44305 - DNA, 25 bp, Artificial
  Probe
ccctgtcacagtagcagtattctct

SEQ ID NO: 44306 - DNA, 25 bp, Artificial
  Probe
tccctgtcacagtagcagtattctc

SEQ ID NO: 44307 - DNA, 25 bp, Artificial
  Probe
gcagtattctctctcatgtagaatg

SEQ ID NO: 44308 - DNA, 25 bp, Artificial
  Probe
agcagtattctctctcatgtagaat

SEQ ID NO: 44309 - DNA, 25 bp, Artificial
  Probe
attctctctcatgtagaatgactct

SEQ ID NO: 44310 - DNA, 25 bp, Artificial
  Probe
gtccctgtcacagtagcagtattct

SEQ ID NO: 44311 - DNA, 25 bp, Artificial
  Probe
cagtcctgattcatacctcccagtg

SEQ ID NO: 44312 - DNA, 25 bp, Artificial
  Probe
ggttacagctcttcttgcagaaatg

SEQ ID NO: 44313 - DNA, 25 bp, Artificial
  Probe
tgtccctgtcacagtagcagtattc

SEQ ID NO: 44314 - DNA, 25 bp, Artificial
  Probe
aaaatcggacatttcagaataaaga

SEQ ID NO: 44315 - DNA, 25 bp, Artificial
  Probe
catgtccctgtcacagtagcagtat

SEQ ID NO: 44316 - DNA, 25 bp, Artificial
  Probe
ttaagagaaggctgataactcgtta

SEQ ID NO: 44317 - DNA, 25 bp, Artificial
  Probe
cagtcggtatggattcattctgatg

SEQ ID NO: 44318 - DNA, 25 bp, Artificial
  Probe
tcagacagtcggtatggattcattc

SEQ ID NO: 44319 - DNA, 25 bp, Artificial
  Probe
ctcagacagtcggtatggattcatt

SEQ ID NO: 44320 - DNA, 25 bp, Artificial
  Probe
cagacagtcggtatggattcattct

SEQ ID NO: 44321 - DNA, 25 bp, Artificial
  Probe
aagagaaggctgataactcgttata

SEQ ID NO: 44322 - DNA, 25 bp, Artificial
  Probe
taagagaaggctgataactcgttat

SEQ ID NO: 44323 - DNA, 25 bp, Artificial
  Probe
acagtcggtatggattcattctgat

SEQ ID NO: 44324 - DNA, 25 bp, Artificial
  Probe
agagaaggctgataactcgttataa

SEQ ID NO: 44325 - DNA, 25 bp, Artificial
  Probe
agtcggtatggattcattctgatgg

SEQ ID NO: 44326 - DNA, 25 bp, Artificial
  Probe
gacagtcggtatggattcattctga

SEQ ID NO: 44327 - DNA, 25 bp, Artificial
  Probe
agacagtcggtatggattcattctg

SEQ ID NO: 44328 - DNA, 25 bp, Artificial
  Probe
gagaaggctgataactcgttataat

SEQ ID NO: 44329 - DNA, 25 bp, Artificial
  Probe
agaaggctgataactcgttataatt

SEQ ID NO: 44330 - DNA, 25 bp, Artificial
  Probe
gtatggattcattctgatgggaaga

SEQ ID NO: 44331 - DNA, 25 bp, Artificial
  Probe
tttaagagaaggctgataactcgtt

SEQ ID NO: 44332 - DNA, 25 bp, Artificial
  Probe
atgtaaatatatccagttcgcttgc

SEQ ID NO: 44333 - DNA, 25 bp, Artificial
  Probe
ggtatggattcattctgatgggaag

SEQ ID NO: 44334 - DNA, 25 bp, Artificial
  Probe
aatatatccagttcgcttgcagaga

SEQ ID NO: 44335 - DNA, 25 bp, Artificial
  Probe
ctgtgaactggatggacaaataaag

SEQ ID NO: 44336 - DNA, 25 bp, Artificial
  Probe
tgtgaactggatggacaaataaagt

SEQ ID NO: 44337 - DNA, 25 bp, Artificial
  Probe
actgtgaactggatggacaaataaa

SEQ ID NO: 44338 - DNA, 25 bp, Artificial
  Probe
aactgtgaactggatggacaaataa

SEQ ID NO: 44339 - DNA, 25 bp, Artificial
  Probe
aaactgtgaactggatggacaaata

SEQ ID NO: 44340 - DNA, 25 bp, Artificial
  Probe
taaactgtgaactggatggacaaat

SEQ ID NO: 44341 - DNA, 25 bp, Artificial
  Probe
ataaactgtgaactggatggacaaa

SEQ ID NO: 44342 - DNA, 25 bp, Artificial
  Probe
tatacccatctcctgaatagccctt

SEQ ID NO: 44343 - DNA, 25 bp, Artificial
  Probe
cataaactgtgaactggatggacaa

SEQ ID NO: 44344 - DNA, 25 bp, Artificial
  Probe
catctcctgaatagcccttcttgaa

SEQ ID NO: 44345 - DNA, 25 bp, Artificial
  Probe
atatatccagttcgcttgcagagag

SEQ ID NO: 44346 - DNA, 25 bp, Artificial
  Probe
cgtggcattcagatgaaagtcttaa

SEQ ID NO: 44347 - DNA, 25 bp, Artificial
  Probe
gaaagctatacccatctcctgaata

SEQ ID NO: 44348 - DNA, 25 bp, Artificial
  Probe
tggcctacatcatctctaacactag

SEQ ID NO: 44349 - DNA, 25 bp, Artificial
  Probe
ctggcctacatcatctctaacacta

SEQ ID NO: 44350 - DNA, 25 bp, Artificial
  Probe
atctcctgaatagcccttcttgaag

SEQ ID NO: 44351 - DNA, 25 bp, Artificial
  Probe
cctcagacagtcggtatggattcat

SEQ ID NO: 44352 - DNA, 25 bp, Artificial
  Probe
cttacagagaaagctatacccatct

SEQ ID NO: 44353 - DNA, 25 bp, Artificial
  Probe
tcttacagagaaagctatacccatc

SEQ ID NO: 44354 - DNA, 25 bp, Artificial
  Probe
agaaagctatacccatctcctgaat

SEQ ID NO: 44355 - DNA, 25 bp, Artificial
  Probe
taaatatatccagttcgcttgcaga

SEQ ID NO: 44356 - DNA, 25 bp, Artificial
  Probe
gtaaatatatccagttcgcttgcag

SEQ ID NO: 44357 - DNA, 25 bp, Artificial
  Probe
tgtaaatatatccagttcgcttgca

SEQ ID NO: 44358 - DNA, 25 bp, Artificial
  Probe
cggtatggattcattctgatgggaa

SEQ ID NO: 44359 - DNA, 25 bp, Artificial
  Probe
aatgtaaatatatccagttcgcttg

SEQ ID NO: 44360 - DNA, 25 bp, Artificial
  Probe
aaagctatacccatctcctgaatag

SEQ ID NO: 44361 - DNA, 25 bp, Artificial
  Probe
actctgttatggactcaatatggac

SEQ ID NO: 44362 - DNA, 25 bp, Artificial
  Probe
ctctgttatggactcaatatggact

SEQ ID NO: 44363 - DNA, 25 bp, Artificial
  Probe
tctgttatggactcaatatggactt

SEQ ID NO: 44364 - DNA, 25 bp, Artificial
  Probe
aactctgttatggactcaatatgga

SEQ ID NO: 44365 - DNA, 25 bp, Artificial
  Probe
catagcagaccatgtgacatagata

SEQ ID NO: 44366 - DNA, 25 bp, Artificial
  Probe
gaccatgtgacatagataggcatag

SEQ ID NO: 44367 - DNA, 25 bp, Artificial
  Probe
atagcagaccatgtgacatagatag

SEQ ID NO: 44368 - DNA, 25 bp, Artificial
  Probe
catgtgacatagataggcatagtgg

SEQ ID NO: 44369 - DNA, 25 bp, Artificial
  Probe
ccatgtgacatagataggcatagtg

SEQ ID NO: 44370 - DNA, 25 bp, Artificial
  Probe
agaccatgtgacatagataggcata

SEQ ID NO: 44371 - DNA, 25 bp, Artificial
  Probe
accatgtgacatagataggcatagt

SEQ ID NO: 44372 - DNA, 25 bp, Artificial
  Probe
tagcagaccatgtgacatagatagg

SEQ ID NO: 44373 - DNA, 25 bp, Artificial
  Probe
cagaccatgtgacatagataggcat

SEQ ID NO: 44374 - DNA, 25 bp, Artificial
  Probe
ccatagcagaccatgtgacatagat

SEQ ID NO: 44375 - DNA, 25 bp, Artificial
  Probe
gacatagataggcatagtgggtttg

SEQ ID NO: 44376 - DNA, 25 bp, Artificial
  Probe
tagtgatgttgtttaggaagtctct

SEQ ID NO: 44377 - DNA, 25 bp, Artificial
  Probe
agtgatgttgtttaggaagtctctt

SEQ ID NO: 44378 - DNA, 25 bp, Artificial
  Probe
aaattacatcccgaatccagaaact

SEQ ID NO: 44379 - DNA, 25 bp, Artificial
  Probe
tgacatagataggcatagtgggttt

SEQ ID NO: 44380 - DNA, 25 bp, Artificial
  Probe
ctggaaatagtgatgttgtttagga

SEQ ID NO: 44381 - DNA, 25 bp, Artificial
  Probe
aattacatcccgaatccagaaactc

SEQ ID NO: 44382 - DNA, 25 bp, Artificial
  Probe
tatggactcaatatggactttgtgg

SEQ ID NO: 44383 - DNA, 25 bp, Artificial
  Probe
ctgttatggactcaatatggacttt

SEQ ID NO: 44384 - DNA, 25 bp, Artificial
  Probe
gtgacatagataggcatagtgggtt

SEQ ID NO: 44385 - DNA, 25 bp, Artificial
  Probe
tggaaatagtgatgttgtttaggaa

SEQ ID NO: 44386 - DNA, 25 bp, Artificial
  Probe
tcctggaaatagtgatgttgtttag

SEQ ID NO: 44387 - DNA, 25 bp, Artificial
  Probe
atagtgatgttgtttaggaagtctc

SEQ ID NO: 44388 - DNA, 25 bp, Artificial
  Probe
ttatggactcaatatggactttgtg

SEQ ID NO: 44389 - DNA, 25 bp, Artificial
  Probe
gttatggactcaatatggactttgt

SEQ ID NO: 44390 - DNA, 25 bp, Artificial
  Probe
tgttatggactcaatatggactttg

SEQ ID NO: 44391 - DNA, 25 bp, Artificial
  Probe
aaactctgttatggactcaatatgg

SEQ ID NO: 44392 - DNA, 25 bp, Artificial
  Probe
attacatcccgaatccagaaactct

SEQ ID NO: 44393 - DNA, 25 bp, Artificial
  Probe
catagtgggtttgcttgattaaggg

SEQ ID NO: 44394 - DNA, 25 bp, Artificial
  Probe
aatagtgatgttgtttaggaagtct

SEQ ID NO: 44395 - DNA, 25 bp, Artificial
  Probe
ggaaatagtgatgttgtttaggaag

SEQ ID NO: 44396 - DNA, 25 bp, Artificial
  Probe
tggactcaatatggactttgtggat

SEQ ID NO: 44397 - DNA, 25 bp, Artificial
  Probe
atggactcaatatggactttgtgga

SEQ ID NO: 44398 - DNA, 25 bp, Artificial
  Probe
atagtgggtttgcttgattaaggga

SEQ ID NO: 44399 - DNA, 25 bp, Artificial
  Probe
cttcctggaaatagtgatgttgttt

SEQ ID NO: 44400 - DNA, 25 bp, Artificial
  Probe
cctggaaatagtgatgttgtttagg

SEQ ID NO: 44401 - DNA, 25 bp, Artificial
  Probe
tcagatcaccatgaaagtaatccaa

SEQ ID NO: 44402 - DNA, 25 bp, Artificial
  Probe
cagatcaccatgaaagtaatccaag

SEQ ID NO: 44403 - DNA, 25 bp, Artificial
  Probe
ctcagatcaccatgaaagtaatcca

SEQ ID NO: 44404 - DNA, 25 bp, Artificial
  Probe
ggactcaatatggactttgtggatc

SEQ ID NO: 44405 - DNA, 25 bp, Artificial
  Probe
tagtgggtttgcttgattaagggaa

SEQ ID NO: 44406 - DNA, 25 bp, Artificial
  Probe
aggagatgttatgtaagaatgttgt

SEQ ID NO: 44407 - DNA, 25 bp, Artificial
  Probe
aaggagatgttatgtaagaatgttg

SEQ ID NO: 44408 - DNA, 25 bp, Artificial
  Probe
tgctttgatgtagtttctgcttatt

SEQ ID NO: 44409 - DNA, 25 bp, Artificial
  Probe
ttatgctttgatgtagtttctgctt

SEQ ID NO: 44410 - DNA, 25 bp, Artificial
  Probe
agcacaagttcaaagtaaggcatat

SEQ ID NO: 44411 - DNA, 25 bp, Artificial
  Probe
atgctttgatgtagtttctgcttat

SEQ ID NO: 44412 - DNA, 25 bp, Artificial
  Probe
attatgctttgatgtagtttctgct

SEQ ID NO: 44413 - DNA, 25 bp, Artificial
  Probe
aagcacaagttcaaagtaaggcata

SEQ ID NO: 44414 - DNA, 25 bp, Artificial
  Probe
gattatgctttgatgtagtttctgc

SEQ ID NO: 44415 - DNA, 25 bp, Artificial
  Probe
cagaaagcacaagttcaaagtaagg

SEQ ID NO: 44416 - DNA, 25 bp, Artificial
  Probe
ccagaaagcacaagttcaaagtaag

SEQ ID NO: 44417 - DNA, 25 bp, Artificial
  Probe
attaaacaccagaaagcacaagttc

SEQ ID NO: 44418 - DNA, 25 bp, Artificial
  Probe
aattaaacaccagaaagcacaagtt

SEQ ID NO: 44419 - DNA, 25 bp, Artificial
  Probe
cataagtagtcaaaggatattgggc

SEQ ID NO: 44420 - DNA, 25 bp, Artificial
  Probe
tatgctttgatgtagtttctgctta

SEQ ID NO: 44421 - DNA, 25 bp, Artificial
  Probe
accagaaagcacaagttcaaagtaa

SEQ ID NO: 44422 - DNA, 25 bp, Artificial
  Probe
ggagatgttatgtaagaatgttgta

SEQ ID NO: 44423 - DNA, 25 bp, Artificial
  Probe
aaagcacaagttcaaagtaaggcat

SEQ ID NO: 44424 - DNA, 25 bp, Artificial
  Probe
taaacaccagaaagcacaagttcaa

SEQ ID NO: 44425 - DNA, 25 bp, Artificial
  Probe
ttaaacaccagaaagcacaagttca

SEQ ID NO: 44426 - DNA, 25 bp, Artificial
  Probe
tggtgtttattacagtatttcgctt

SEQ ID NO: 44427 - DNA, 25 bp, Artificial
  Probe
ttggtgtttattacagtatttcgct

SEQ ID NO: 44428 - DNA, 25 bp, Artificial
  Probe
caccagaaagcacaagttcaaagta

SEQ ID NO: 44429 - DNA, 25 bp, Artificial
  Probe
taattaaacaccagaaagcacaagt

SEQ ID NO: 44430 - DNA, 25 bp, Artificial
  Probe
gtaattaaacaccagaaagcacaag

SEQ ID NO: 44431 - DNA, 25 bp, Artificial
  Probe
cttggtgtttattacagtatttcgc

SEQ ID NO: 44432 - DNA, 25 bp, Artificial
  Probe
gctttgatgtagtttctgcttatta

SEQ ID NO: 44433 - DNA, 25 bp, Artificial
  Probe
acataagtagtcaaaggatattggg

SEQ ID NO: 44434 - DNA, 25 bp, Artificial
  Probe
tttgatgtagtttctgcttattacg

SEQ ID NO: 44435 - DNA, 25 bp, Artificial
  Probe
agaaagcacaagttcaaagtaaggc

SEQ ID NO: 44436 - DNA, 25 bp, Artificial
  Probe
aaacaccagaaagcacaagttcaaa

SEQ ID NO: 44437 - DNA, 25 bp, Artificial
  Probe
ccttggtgtttattacagtatttcg

SEQ ID NO: 44438 - DNA, 25 bp, Artificial
  Probe
gaaagcacaagttcaaagtaaggca

SEQ ID NO: 44439 - DNA, 25 bp, Artificial
  Probe
tgtaattaaacaccagaaagcacaa

SEQ ID NO: 44440 - DNA, 25 bp, Artificial
  Probe
ctgtaattaaacaccagaaagcaca

SEQ ID NO: 44441 - DNA, 25 bp, Artificial
  Probe
actgtaattaaacaccagaaagcac

SEQ ID NO: 44442 - DNA, 25 bp, Artificial
  Probe
cacggaagagtctacatggagagaa

SEQ ID NO: 44443 - DNA, 25 bp, Artificial
  Probe
cgtcaactgtaattaaacaccagaa

SEQ ID NO: 44444 - DNA, 25 bp, Artificial
  Probe
gaagagtctacatggagagaaagca

SEQ ID NO: 44445 - DNA, 25 bp, Artificial
  Probe
acttaatttacgtgtactctagccc

SEQ ID NO: 44446 - DNA, 25 bp, Artificial
  Probe
catcgctaaccttcaacaaatgtta

SEQ ID NO: 44447 - DNA, 25 bp, Artificial
  Probe
aactgtaattaaacaccagaaagca

SEQ ID NO: 44448 - DNA, 25 bp, Artificial
  Probe
tcgctaaccttcaacaaatgttatt

SEQ ID NO: 44449 - DNA, 25 bp, Artificial
  Probe
aacaccagaaagcacaagttcaaag

SEQ ID NO: 44450 - DNA, 25 bp, Artificial
  Probe
agattatgctttgatgtagtttctg

SEQ ID NO: 44451 - DNA, 25 bp, Artificial
  Probe
gaattagagcagcatcaagtaggac

SEQ ID NO: 44452 - DNA, 25 bp, Artificial
  Probe
agaattagagcagcatcaagtagga

SEQ ID NO: 44453 - DNA, 25 bp, Artificial
  Probe
cagaattagagcagcatcaagtagg

SEQ ID NO: 44454 - DNA, 25 bp, Artificial
  Probe
gcagaattagagcagcatcaagtag

SEQ ID NO: 44455 - DNA, 25 bp, Artificial
  Probe
aattagagcagcatcaagtaggact

SEQ ID NO: 44456 - DNA, 25 bp, Artificial
  Probe
catcaagtaggactggtgaactctc

SEQ ID NO: 44457 - DNA, 25 bp, Artificial
  Probe
taggcagaattagagcagcatcaag

SEQ ID NO: 44458 - DNA, 25 bp, Artificial
  Probe
attagagcagcatcaagtaggactg

SEQ ID NO: 44459 - DNA, 25 bp, Artificial
  Probe
agagagaatccaaagttcaagtctt

SEQ ID NO: 44460 - DNA, 25 bp, Artificial
  Probe
ggcagaattagagcagcatcaagta

SEQ ID NO: 44461 - DNA, 25 bp, Artificial
  Probe
gtaggcagaattagagcagcatcaa

SEQ ID NO: 44462 - DNA, 25 bp, Artificial
  Probe
aaattgggaatggctagagagaatc

SEQ ID NO: 44463 - DNA, 25 bp, Artificial
  Probe
tagagagaatccaaagttcaagtct

SEQ ID NO: 44464 - DNA, 25 bp, Artificial
  Probe
caaattgggaatggctagagagaat

SEQ ID NO: 44465 - DNA, 25 bp, Artificial
  Probe
gctagagagaatccaaagttcaagt

SEQ ID NO: 44466 - DNA, 25 bp, Artificial
  Probe
ctagagagaatccaaagttcaagtc

SEQ ID NO: 44467 - DNA, 25 bp, Artificial
  Probe
ggctagagagaatccaaagttcaag

SEQ ID NO: 44468 - DNA, 25 bp, Artificial
  Probe
acaaattgggaatggctagagagaa

SEQ ID NO: 44469 - DNA, 25 bp, Artificial
  Probe
gtgtaggcagaattagagcagcatc

SEQ ID NO: 44470 - DNA, 25 bp, Artificial
  Probe
aatggctagagagaatccaaagttc

SEQ ID NO: 44471 - DNA, 25 bp, Artificial
  Probe
gaatggctagagagaatccaaagtt

SEQ ID NO: 44472 - DNA, 25 bp, Artificial
  Probe
tgtaggcagaattagagcagcatca

SEQ ID NO: 44473 - DNA, 25 bp, Artificial
  Probe
cacaaattgggaatggctagagaga

SEQ ID NO: 44474 - DNA, 25 bp, Artificial
  Probe
atcaagtaggactggtgaactctcc

SEQ ID NO: 44475 - DNA, 25 bp, Artificial
  Probe
atggctagagagaatccaaagttca

SEQ ID NO: 44476 - DNA, 25 bp, Artificial
  Probe
tctgtgtctcacctcaccatgtatt

SEQ ID NO: 44477 - DNA, 25 bp, Artificial
  Probe
aagtaggactggtgaactctccatc

SEQ ID NO: 44478 - DNA, 25 bp, Artificial
  Probe
gagagaatccaaagttcaagtcttt

SEQ ID NO: 44479 - DNA, 25 bp, Artificial
  Probe
tggctagagagaatccaaagttcaa

SEQ ID NO: 44480 - DNA, 25 bp, Artificial
  Probe
gcatcaagtaggactggtgaactct

SEQ ID NO: 44481 - DNA, 25 bp, Artificial
  Probe
agcatcaagtaggactggtgaactc

SEQ ID NO: 44482 - DNA, 25 bp, Artificial
  Probe
aggcagaattagagcagcatcaagt

SEQ ID NO: 44483 - DNA, 25 bp, Artificial
  Probe
caagtaggactggtgaactctccat

SEQ ID NO: 44484 - DNA, 25 bp, Artificial
  Probe
aattgggaatggctagagagaatcc

SEQ ID NO: 44485 - DNA, 25 bp, Artificial
  Probe
ttagagcagcatcaagtaggactgg

SEQ ID NO: 44486 - DNA, 25 bp, Artificial
  Probe
ggaatggctagagagaatccaaagt

SEQ ID NO: 44487 - DNA, 25 bp, Artificial
  Probe
ctctgtgtctcacctcaccatgtat

SEQ ID NO: 44488 - DNA, 25 bp, Artificial
  Probe
gggaatggctagagagaatccaaag

SEQ ID NO: 44489 - DNA, 25 bp, Artificial
  Probe
cagcatcaagtaggactggtgaact

SEQ ID NO: 44490 - DNA, 25 bp, Artificial
  Probe
ggtgtaggcagaattagagcagcat

SEQ ID NO: 44491 - DNA, 25 bp, Artificial
  Probe
attgggaatggctagagagaatcca

SEQ ID NO: 44492 - DNA, 25 bp, Artificial
  Probe
atgcaaccacattgagctactgttc

SEQ ID NO: 44493 - DNA, 25 bp, Artificial
  Probe
ctgttcccagtagacccacaaattg

SEQ ID NO: 44494 - DNA, 25 bp, Artificial
  Probe
tgggaatggctagagagaatccaaa

SEQ ID NO: 44495 - DNA, 25 bp, Artificial
  Probe
tcaagtaggactggtgaactctcca

SEQ ID NO: 44496 - DNA, 25 bp, Artificial
  Probe
gaatggagactgtagagtatggact

SEQ ID NO: 44497 - DNA, 25 bp, Artificial
  Probe
aatggagactgtagagtatggactg

SEQ ID NO: 44498 - DNA, 25 bp, Artificial
  Probe
tgaatggagactgtagagtatggac

SEQ ID NO: 44499 - DNA, 25 bp, Artificial
  Probe
atggagactgtagagtatggactgt

SEQ ID NO: 44500 - DNA, 25 bp, Artificial
  Probe
tggagactgtagagtatggactgtg

SEQ ID NO: 44501 - DNA, 25 bp, Artificial
  Probe
cttcctgtcttcacctgtttcattc

SEQ ID NO: 44502 - DNA, 25 bp, Artificial
  Probe
aaatggaaatgggtaacagcaagtg

SEQ ID NO: 44503 - DNA, 25 bp, Artificial
  Probe
gaaatgggtaacagcaagtgaagac

SEQ ID NO: 44504 - DNA, 25 bp, Artificial
  Probe
ggtaacagcaagtgaagacctattt

SEQ ID NO: 44505 - DNA, 25 bp, Artificial
  Probe
atggaaatgggtaacagcaagtgaa

SEQ ID NO: 44506 - DNA, 25 bp, Artificial
  Probe
aatggaaatgggtaacagcaagtga

SEQ ID NO: 44507 - DNA, 25 bp, Artificial
  Probe
ttcctgtcttcacctgtttcattcc

SEQ ID NO: 44508 - DNA, 25 bp, Artificial
  Probe
gagactgtagagtatggactgtgcc

SEQ ID NO: 44509 - DNA, 25 bp, Artificial
  Probe
ggagactgtagagtatggactgtgc

SEQ ID NO: 44510 - DNA, 25 bp, Artificial
  Probe
ggaaatgggtaacagcaagtgaaga

SEQ ID NO: 44511 - DNA, 25 bp, Artificial
  Probe
taagaaaatggaaatgggtaacagc

SEQ ID NO: 44512 - DNA, 25 bp, Artificial
  Probe
gtaacagcaagtgaagacctatttt

SEQ ID NO: 44513 - DNA, 25 bp, Artificial
  Probe
aacagcaagtgaagacctattttag

SEQ ID NO: 44514 - DNA, 25 bp, Artificial
  Probe
tggaaatgggtaacagcaagtgaag

SEQ ID NO: 44515 - DNA, 25 bp, Artificial
  Probe
gcttcctgtcttcacctgtttcatt

SEQ ID NO: 44516 - DNA, 25 bp, Artificial
  Probe
gaaaatggaaatgggtaacagcaag

SEQ ID NO: 44517 - DNA, 25 bp, Artificial
  Probe
acagcaagtgaagacctattttagc

SEQ ID NO: 44518 - DNA, 25 bp, Artificial
  Probe
agaaaatggaaatgggtaacagcaa

SEQ ID NO: 44519 - DNA, 25 bp, Artificial
  Probe
aagaaaatggaaatgggtaacagca

SEQ ID NO: 44520 - DNA, 25 bp, Artificial
  Probe
gggtaacagcaagtgaagacctatt

SEQ ID NO: 44521 - DNA, 25 bp, Artificial
  Probe
aaaatggaaatgggtaacagcaagt

SEQ ID NO: 44522 - DNA, 25 bp, Artificial
  Probe
taacagcaagtgaagacctatttta

SEQ ID NO: 44523 - DNA, 25 bp, Artificial
  Probe
tcttcacctgtttcattccagcatc

SEQ ID NO: 44524 - DNA, 25 bp, Artificial
  Probe
tcctgtcttcacctgtttcattcca

SEQ ID NO: 44525 - DNA, 25 bp, Artificial
  Probe
gaagtttaagaaaatggaaatgggt

SEQ ID NO: 44526 - DNA, 25 bp, Artificial
  Probe
agaagtttaagaaaatggaaatggg

SEQ ID NO: 44527 - DNA, 25 bp, Artificial
  Probe
gtcttcacctgtttcattccagcat

SEQ ID NO: 44528 - DNA, 25 bp, Artificial
  Probe
cctgtcttcacctgtttcattccag

SEQ ID NO: 44529 - DNA, 25 bp, Artificial
  Probe
ttaagaaaatggaaatgggtaacag

SEQ ID NO: 44530 - DNA, 25 bp, Artificial
  Probe
tgggtaacagcaagtgaagacctat

SEQ ID NO: 44531 - DNA, 25 bp, Artificial
  Probe
atgggtaacagcaagtgaagaccta

SEQ ID NO: 44532 - DNA, 25 bp, Artificial
  Probe
aaatgggtaacagcaagtgaagacc

SEQ ID NO: 44533 - DNA, 25 bp, Artificial
  Probe
tttaagaaaatggaaatgggtaaca

SEQ ID NO: 44534 - DNA, 25 bp, Artificial
  Probe
ccagtactctttcagctcagacttt

SEQ ID NO: 44535 - DNA, 25 bp, Artificial
  Probe
cttcacctgtttcattccagcatcc

SEQ ID NO: 44536 - DNA, 25 bp, Artificial
  Probe
ctgtcttcacctgtttcattccagc

SEQ ID NO: 44537 - DNA, 25 bp, Artificial
  Probe
agtttaagaaaatggaaatgggtaa

SEQ ID NO: 44538 - DNA, 25 bp, Artificial
  Probe
aagtttaagaaaatggaaatgggta

SEQ ID NO: 44539 - DNA, 25 bp, Artificial
  Probe
gtttaagaaaatggaaatgggtaac

SEQ ID NO: 44540 - DNA, 25 bp, Artificial
  Probe
gagaagtttaagaaaatggaaatgg

SEQ ID NO: 44541 - DNA, 25 bp, Artificial
  Probe
cgataacacagtagataggacaaca

SEQ ID NO: 44542 - DNA, 25 bp, Artificial
  Probe
acgataacacagtagataggacaac

SEQ ID NO: 44543 - DNA, 25 bp, Artificial
  Probe
cacgataacacagtagataggacaa

SEQ ID NO: 44544 - DNA, 25 bp, Artificial
  Probe
taacacagtagataggacaacagac

SEQ ID NO: 44545 - DNA, 25 bp, Artificial
  Probe
ataacacagtagataggacaacaga

SEQ ID NO: 44546 - DNA, 25 bp, Artificial
  Probe
gataacacagtagataggacaacag

SEQ ID NO: 44547 - DNA, 25 bp, Artificial
  Probe
atcttgccatacttcagtaattcac

SEQ ID NO: 44548 - DNA, 25 bp, Artificial
  Probe
ttgttagttggactgtcaatacctt

SEQ ID NO: 44549 - DNA, 25 bp, Artificial
  Probe
tcttgccatacttcagtaattcact

SEQ ID NO: 44550 - DNA, 25 bp, Artificial
  Probe
gttgttagttggactgtcaatacct

SEQ ID NO: 44551 - DNA, 25 bp, Artificial
  Probe
aggttgttagttggactgtcaatac

SEQ ID NO: 44552 - DNA, 25 bp, Artificial
  Probe
cttgccatacttcagtaattcactt

SEQ ID NO: 44553 - DNA, 25 bp, Artificial
  Probe
gcacgataacacagtagataggaca

SEQ ID NO: 44554 - DNA, 25 bp, Artificial
  Probe
aatcttgccatacttcagtaattca

SEQ ID NO: 44555 - DNA, 25 bp, Artificial
  Probe
aacacagtagataggacaacagacg

SEQ ID NO: 44556 - DNA, 25 bp, Artificial
  Probe
ttacttctgatggagttcctgtctt

SEQ ID NO: 44557 - DNA, 25 bp, Artificial
  Probe
caggttgttagttggactgtcaata

SEQ ID NO: 44558 - DNA, 25 bp, Artificial
  Probe
cttctgatggagttcctgtcttgat

SEQ ID NO: 44559 - DNA, 25 bp, Artificial
  Probe
tacttctgatggagttcctgtcttg

SEQ ID NO: 44560 - DNA, 25 bp, Artificial
  Probe
ttctgatggagttcctgtcttgatg

SEQ ID NO: 44561 - DNA, 25 bp, Artificial
  Probe
ttgccatacttcagtaattcactta

SEQ ID NO: 44562 - DNA, 25 bp, Artificial
  Probe
tgccatacttcagtaattcacttat

SEQ ID NO: 44563 - DNA, 25 bp, Artificial
  Probe
ttgatgcacgataacacagtagata

SEQ ID NO: 44564 - DNA, 25 bp, Artificial
  Probe
tgatgcacgataacacagtagatag

SEQ ID NO: 44565 - DNA, 25 bp, Artificial
  Probe
gatgcacgataacacagtagatagg

SEQ ID NO: 44566 - DNA, 25 bp, Artificial
  Probe
cttgatgcacgataacacagtagat

SEQ ID NO: 44567 - DNA, 25 bp, Artificial
  Probe
atgcacgataacacagtagatagga

SEQ ID NO: 44568 - DNA, 25 bp, Artificial
  Probe
ggttgttagttggactgtcaatacc

SEQ ID NO: 44569 - DNA, 25 bp, Artificial
  Probe
ctgccataacctcaccatcttcttc

SEQ ID NO: 44570 - DNA, 25 bp, Artificial
  Probe
tctgacatttgaacaagttaggaaa

SEQ ID NO: 44571 - DNA, 25 bp, Artificial
  Probe
atctgacatttgaacaagttaggaa

SEQ ID NO: 44572 - DNA, 25 bp, Artificial
  Probe
gttagttggactgtcaatacctttg

SEQ ID NO: 44573 - DNA, 25 bp, Artificial
  Probe
tgttagttggactgtcaataccttt

SEQ ID NO: 44574 - DNA, 25 bp, Artificial
  Probe
ctgacatttgaacaagttaggaaac

SEQ ID NO: 44575 - DNA, 25 bp, Artificial
  Probe
tgatctgacatttgaacaagttagg

SEQ ID NO: 44576 - DNA, 25 bp, Artificial
  Probe
gtcttgatgcacgataacacagtag

SEQ ID NO: 44577 - DNA, 25 bp, Artificial
  Probe
ccataacctcaccatcttcttcgat

SEQ ID NO: 44578 - DNA, 25 bp, Artificial
  Probe
gccatacttcagtaattcacttatt

SEQ ID NO: 44579 - DNA, 25 bp, Artificial
  Probe
tgcacgataacacagtagataggac

SEQ ID NO: 44580 - DNA, 25 bp, Artificial
  Probe
gatctgacatttgaacaagttagga

SEQ ID NO: 44581 - DNA, 25 bp, Artificial
  Probe
gagtttacttctgatggagttcctg

SEQ ID NO: 44582 - DNA, 25 bp, Artificial
  Probe
tctgccataacctcaccatcttctt

SEQ ID NO: 44583 - DNA, 25 bp, Artificial
  Probe
tcttgatgcacgataacacagtaga

SEQ ID NO: 44584 - DNA, 25 bp, Artificial
  Probe
tttacttctgatggagttcctgtct

SEQ ID NO: 44585 - DNA, 25 bp, Artificial
  Probe
gtttacttctgatggagttcctgtc

SEQ ID NO: 44586 - DNA, 25 bp, Artificial
  Probe
agaattgttgctctggatagaagtt

SEQ ID NO: 44587 - DNA, 25 bp, Artificial
  Probe
gagaattgttgctctggatagaagt

SEQ ID NO: 44588 - DNA, 25 bp, Artificial
  Probe
tgagaattgttgctctggatagaag

SEQ ID NO: 44589 - DNA, 25 bp, Artificial
  Probe
gtgagaattgttgctctggatagaa

SEQ ID NO: 44590 - DNA, 25 bp, Artificial
  Probe
agtgagaattgttgctctggataga

SEQ ID NO: 44591 - DNA, 25 bp, Artificial
  Probe
cagtgagaattgttgctctggatag

SEQ ID NO: 44592 - DNA, 25 bp, Artificial
  Probe
acagtgagaattgttgctctggata

SEQ ID NO: 44593 - DNA, 25 bp, Artificial
  Probe
catgcaataataatcagtggagtgt

SEQ ID NO: 44594 - DNA, 25 bp, Artificial
  Probe
gactgttgactgctctaagaaggac

SEQ ID NO: 44595 - DNA, 25 bp, Artificial
  Probe
tcatgcaataataatcagtggagtg

SEQ ID NO: 44596 - DNA, 25 bp, Artificial
  Probe
ccttcatgcaataataatcagtgga

SEQ ID NO: 44597 - DNA, 25 bp, Artificial
  Probe
atgcaataataatcagtggagtgtt

SEQ ID NO: 44598 - DNA, 25 bp, Artificial
  Probe
aattgttgctctggatagaagtttc

SEQ ID NO: 44599 - DNA, 25 bp, Artificial
  Probe
gaattgttgctctggatagaagttt

SEQ ID NO: 44600 - DNA, 25 bp, Artificial
  Probe
ttcatgcaataataatcagtggagt

SEQ ID NO: 44601 - DNA, 25 bp, Artificial
  Probe
cttcatgcaataataatcagtggag

SEQ ID NO: 44602 - DNA, 25 bp, Artificial
  Probe
caggaggagacagtgagaattgttg

SEQ ID NO: 44603 - DNA, 25 bp, Artificial
  Probe
tcaggaggagacagtgagaattgtt

SEQ ID NO: 44604 - DNA, 25 bp, Artificial
  Probe
gacagtgagaattgttgctctggat

SEQ ID NO: 44605 - DNA, 25 bp, Artificial
  Probe
catatcttgtgcaaggcttgtagtg

SEQ ID NO: 44606 - DNA, 25 bp, Artificial
  Probe
gaggagacagtgagaattgttgctc

SEQ ID NO: 44607 - DNA, 25 bp, Artificial
  Probe
ctgttgactgctctaagaaggacct

SEQ ID NO: 44608 - DNA, 25 bp, Artificial
  Probe
attgttgctctggatagaagtttcc

SEQ ID NO: 44609 - DNA, 25 bp, Artificial
  Probe
cccttcatgcaataataatcagtgg

SEQ ID NO: 44610 - DNA, 25 bp, Artificial
  Probe
tcctcccttcatgcaataataatca

SEQ ID NO: 44611 - DNA, 25 bp, Artificial
  Probe
actgttgactgctctaagaaggacc

SEQ ID NO: 44612 - DNA, 25 bp, Artificial
  Probe
tcttcctcccttcatgcaataataa

SEQ ID NO: 44613 - DNA, 25 bp, Artificial
  Probe
ttcttcctcccttcatgcaataata

SEQ ID NO: 44614 - DNA, 25 bp, Artificial
  Probe
cctcccttcatgcaataataatcag

SEQ ID NO: 44615 - DNA, 25 bp, Artificial
  Probe
tcccttcatgcaataataatcagtg

SEQ ID NO: 44616 - DNA, 25 bp, Artificial
  Probe
cttcttcctcccttcatgcaataat

SEQ ID NO: 44617 - DNA, 25 bp, Artificial
  Probe
tgttgactgctctaagaaggacctg

SEQ ID NO: 44618 - DNA, 25 bp, Artificial
  Probe
cgactgttgactgctctaagaagga

SEQ ID NO: 44619 - DNA, 25 bp, Artificial
  Probe
tgcaataataatcagtggagtgttt

SEQ ID NO: 44620 - DNA, 25 bp, Artificial
  Probe
gagacagtgagaattgttgctctgg

SEQ ID NO: 44621 - DNA, 25 bp, Artificial
  Probe
ggagacagtgagaattgttgctctg

SEQ ID NO: 44622 - DNA, 25 bp, Artificial
  Probe
aggagacagtgagaattgttgctct

SEQ ID NO: 44623 - DNA, 25 bp, Artificial
  Probe
ctcccttcatgcaataataatcagt

SEQ ID NO: 44624 - DNA, 25 bp, Artificial
  Probe
ttcctcccttcatgcaataataatc

SEQ ID NO: 44625 - DNA, 25 bp, Artificial
  Probe
cttcctcccttcatgcaataataat

SEQ ID NO: 44626 - DNA, 25 bp, Artificial
  Probe
ccctgacatctacccttagtgtttg

SEQ ID NO: 44627 - DNA, 25 bp, Artificial
  Probe
accgactgttgactgctctaagaag

SEQ ID NO: 44628 - DNA, 25 bp, Artificial
  Probe
gtcaggaggagacagtgagaattgt

SEQ ID NO: 44629 - DNA, 25 bp, Artificial
  Probe
tcttcttcctcccttcatgcaataa

SEQ ID NO: 44630 - DNA, 25 bp, Artificial
  Probe
agacagtgagaattgttgctctgga

SEQ ID NO: 44631 - DNA, 25 bp, Artificial
  Probe
ggaacaggaagttgatattgccatg

SEQ ID NO: 44632 - DNA, 25 bp, Artificial
  Probe
cttgttagtgaagaggtggtccatg

SEQ ID NO: 44633 - DNA, 25 bp, Artificial
  Probe
tagggaacaggaagttgatattgcc

SEQ ID NO: 44634 - DNA, 25 bp, Artificial
  Probe
gggaacaggaagttgatattgccat

SEQ ID NO: 44635 - DNA, 25 bp, Artificial
  Probe
tttgtcttgttctccccttactgta

SEQ ID NO: 44636 - DNA, 25 bp, Artificial
  Probe
gatttgtcttgttctccccttactg

SEQ ID NO: 44637 - DNA, 25 bp, Artificial
  Probe
ccttgttagtgaagaggtggtccat

SEQ ID NO: 44638 - DNA, 25 bp, Artificial
  Probe
ctgtaccccgatataatctctgttg

SEQ ID NO: 44639 - DNA, 25 bp, Artificial
  Probe
tactgtaccccgatataatctctgt

SEQ ID NO: 44640 - DNA, 25 bp, Artificial
  Probe
ccttactgtaccccgatataatctc

SEQ ID NO: 44641 - DNA, 25 bp, Artificial
  Probe
gtaccccgatataatctctgttgat

SEQ ID NO: 44642 - DNA, 25 bp, Artificial
  Probe
tgtaccccgatataatctctgttga

SEQ ID NO: 44643 - DNA, 25 bp, Artificial
  Probe
actgtaccccgatataatctctgtt

SEQ ID NO: 44644 - DNA, 25 bp, Artificial
  Probe
cccttactgtaccccgatataatct

SEQ ID NO: 44645 - DNA, 25 bp, Artificial
  Probe
atttgtcttgttctccccttactgt

SEQ ID NO: 44646 - DNA, 25 bp, Artificial
  Probe
ttactgtaccccgatataatctctg

SEQ ID NO: 44647 - DNA, 25 bp, Artificial
  Probe
cttactgtaccccgatataatctct

SEQ ID NO: 44648 - DNA, 25 bp, Artificial
  Probe
ccccttactgtaccccgatataatc

SEQ ID NO: 44649 - DNA, 25 bp, Artificial
  Probe
agggaacaggaagttgatattgcca

SEQ ID NO: 44650 - DNA, 25 bp, Artificial
  Probe
tccccttactgtaccccgatataat

SEQ ID NO: 44651 - DNA, 25 bp, Artificial
  Probe
ctcccagctcagttttattagatca

SEQ ID NO: 44652 - DNA, 25 bp, Artificial
  Probe
gtatcctcccagctcagttttatta

SEQ ID NO: 44653 - DNA, 25 bp, Artificial
  Probe
tcccagctcagttttattagatcaa

SEQ ID NO: 44654 - DNA, 25 bp, Artificial
  Probe
tatcctcccagctcagttttattag

SEQ ID NO: 44655 - DNA, 25 bp, Artificial
  Probe
ttgtcttgttctccccttactgtac

SEQ ID NO: 44656 - DNA, 25 bp, Artificial
  Probe
cgatttgtcttgttctccccttact

SEQ ID NO: 44657 - DNA, 25 bp, Artificial
  Probe
cctcccagctcagttttattagatc

SEQ ID NO: 44658 - DNA, 25 bp, Artificial
  Probe
tcctcccagctcagttttattagat

SEQ ID NO: 44659 - DNA, 25 bp, Artificial
  Probe
atcctcccagctcagttttattaga

SEQ ID NO: 44660 - DNA, 25 bp, Artificial
  Probe
agtatcctcccagctcagttttatt

SEQ ID NO: 44661 - DNA, 25 bp, Artificial
  Probe
ctccccttactgtaccccgatataa

SEQ ID NO: 44662 - DNA, 25 bp, Artificial
  Probe
cttcagtatcctcccagctcagttt

SEQ ID NO: 44663 - DNA, 25 bp, Artificial
  Probe
cagtatcctcccagctcagttttat

SEQ ID NO: 44664 - DNA, 25 bp, Artificial
  Probe
ccgatttgtcttgttctccccttac

SEQ ID NO: 44665 - DNA, 25 bp, Artificial
  Probe
gttcatgccttcttcccttcaaacc

SEQ ID NO: 44666 - DNA, 25 bp, Artificial
  Probe
ggttcatgccttcttcccttcaaac

SEQ ID NO: 44667 - DNA, 25 bp, Artificial
  Probe
tctccccttactgtaccccgatata

SEQ ID NO: 44668 - DNA, 25 bp, Artificial
  Probe
gaacaggaagttgatattgccatgg

SEQ ID NO: 44669 - DNA, 25 bp, Artificial
  Probe
actgtaaaagggaaatttgaacaag

SEQ ID NO: 44670 - DNA, 25 bp, Artificial
  Probe
tggttcatgccttcttcccttcaaa

SEQ ID NO: 44671 - DNA, 25 bp, Artificial
  Probe
gtaaaagggaaatttgaacaagaac

SEQ ID NO: 44672 - DNA, 25 bp, Artificial
  Probe
ctgtaaaagggaaatttgaacaaga

SEQ ID NO: 44673 - DNA, 25 bp, Artificial
  Probe
tcagtatcctcccagctcagtttta

SEQ ID NO: 44674 - DNA, 25 bp, Artificial
  Probe
tgtcttgttctccccttactgtacc

SEQ ID NO: 44675 - DNA, 25 bp, Artificial
  Probe
tgtaaaagggaaatttgaacaagaa

SEQ ID NO: 44676 - DNA, 25 bp, Artificial
  Probe
acattgtaataaattccttgccctt

SEQ ID NO: 44677 - DNA, 25 bp, Artificial
  Probe
atggaatacagagaatctaagggtt

SEQ ID NO: 44678 - DNA, 25 bp, Artificial
  Probe
tggaatacagagaatctaagggtta

SEQ ID NO: 44679 - DNA, 25 bp, Artificial
  Probe
tatggaatacagagaatctaagggt

SEQ ID NO: 44680 - DNA, 25 bp, Artificial
  Probe
tacattgtaataaattccttgccct

SEQ ID NO: 44681 - DNA, 25 bp, Artificial
  Probe
aatacagagaatctaagggttaggg

SEQ ID NO: 44682 - DNA, 25 bp, Artificial
  Probe
cattgtaataaattccttgccctta

SEQ ID NO: 44683 - DNA, 25 bp, Artificial
  Probe
gtcagaattgctttgattccatttg

SEQ ID NO: 44684 - DNA, 25 bp, Artificial
  Probe
agtcagaattgctttgattccattt

SEQ ID NO: 44685 - DNA, 25 bp, Artificial
  Probe
cagtcagaattgctttgattccatt

SEQ ID NO: 44686 - DNA, 25 bp, Artificial
  Probe
ctggacagtcagaattgctttgatt

SEQ ID NO: 44687 - DNA, 25 bp, Artificial
  Probe
atacattgtaataaattccttgccc

SEQ ID NO: 44688 - DNA, 25 bp, Artificial
  Probe
tcagaattgctttgattccatttgc

SEQ ID NO: 44689 - DNA, 25 bp, Artificial
  Probe
gaatacagagaatctaagggttagg

SEQ ID NO: 44690 - DNA, 25 bp, Artificial
  Probe
ggaatacagagaatctaagggttag

SEQ ID NO: 44691 - DNA, 25 bp, Artificial
  Probe
acagtcagaattgctttgattccat

SEQ ID NO: 44692 - DNA, 25 bp, Artificial
  Probe
ttatggaatacagagaatctaaggg

SEQ ID NO: 44693 - DNA, 25 bp, Artificial
  Probe
cccttatggaatacagagaatctaa

SEQ ID NO: 44694 - DNA, 25 bp, Artificial
  Probe
gatagctcctggacagtcagaattg

SEQ ID NO: 44695 - DNA, 25 bp, Artificial
  Probe
agatagctcctggacagtcagaatt

SEQ ID NO: 44696 - DNA, 25 bp, Artificial
  Probe
gacagtcagaattgctttgattcca

SEQ ID NO: 44697 - DNA, 25 bp, Artificial
  Probe
tggacagtcagaattgctttgattc

SEQ ID NO: 44698 - DNA, 25 bp, Artificial
  Probe
cttatggaatacagagaatctaagg

SEQ ID NO: 44699 - DNA, 25 bp, Artificial
  Probe
ccttatggaatacagagaatctaag

SEQ ID NO: 44700 - DNA, 25 bp, Artificial
  Probe
attgtaataaattccttgcccttaa

SEQ ID NO: 44701 - DNA, 25 bp, Artificial
  Probe
gagatagctcctggacagtcagaat

SEQ ID NO: 44702 - DNA, 25 bp, Artificial
  Probe
gcaagtggatgaagagataaatcat

SEQ ID NO: 44703 - DNA, 25 bp, Artificial
  Probe
ggacagtcagaattgctttgattcc

SEQ ID NO: 44704 - DNA, 25 bp, Artificial
  Probe
tgtaataaattccttgcccttaagt

SEQ ID NO: 44705 - DNA, 25 bp, Artificial
  Probe
gatacattgtaataaattccttgcc

SEQ ID NO: 44706 - DNA, 25 bp, Artificial
  Probe
ccccttatggaatacagagaatcta

SEQ ID NO: 44707 - DNA, 25 bp, Artificial
  Probe
ttccttgcccttaagtttatagttt

SEQ ID NO: 44708 - DNA, 25 bp, Artificial
  Probe
attccttgcccttaagtttatagtt

SEQ ID NO: 44709 - DNA, 25 bp, Artificial
  Probe
aattccttgcccttaagtttatagt

SEQ ID NO: 44710 - DNA, 25 bp, Artificial
  Probe
cctggacagtcagaattgctttgat

SEQ ID NO: 44711 - DNA, 25 bp, Artificial
  Probe
atacagagaatctaagggttagggg

SEQ ID NO: 44712 - DNA, 25 bp, Artificial
  Probe
agcagttatgttactgagctacatt

SEQ ID NO: 44713 - DNA, 25 bp, Artificial
  Probe
aagcagttatgttactgagctacat

SEQ ID NO: 44714 - DNA, 25 bp, Artificial
  Probe
aagaagcagttatgttactgagcta

SEQ ID NO: 44715 - DNA, 25 bp, Artificial
  Probe
agaagcagttatgttactgagctac

SEQ ID NO: 44716 - DNA, 25 bp, Artificial
  Probe
gaagcagttatgttactgagctaca

SEQ ID NO: 44717 - DNA, 25 bp, Artificial
  Probe
agcttcaggaagacatcccataatg

SEQ ID NO: 44718 - DNA, 25 bp, Artificial
  Probe
cagcttcaggaagacatcccataat

SEQ ID NO: 44719 - DNA, 25 bp, Artificial
  Probe
tccttgcccttaagtttatagttta

SEQ ID NO: 44720 - DNA, 25 bp, Artificial
  Probe
caagaagcagttatgttactgagct

SEQ ID NO: 44721 - DNA, 25 bp, Artificial
  Probe
ctccctatttccaaacatcctcata

SEQ ID NO: 44722 - DNA, 25 bp, Artificial
  Probe
tatttccaaacatcctcatagccac

SEQ ID NO: 44723 - DNA, 25 bp, Artificial
  Probe
tccctatttccaaacatcctcatag

SEQ ID NO: 44724 - DNA, 25 bp, Artificial
  Probe
ctatttccaaacatcctcatagcca

SEQ ID NO: 44725 - DNA, 25 bp, Artificial
  Probe
cctatttccaaacatcctcatagcc

SEQ ID NO: 44726 - DNA, 25 bp, Artificial
  Probe
ccctatttccaaacatcctcatagc

SEQ ID NO: 44727 - DNA, 25 bp, Artificial
  Probe
atttccaaacatcctcatagccaca

SEQ ID NO: 44728 - DNA, 25 bp, Artificial
  Probe
gctccctatttccaaacatcctcat

SEQ ID NO: 44729 - DNA, 25 bp, Artificial
  Probe
gatctatacccaggacttcacagtg

SEQ ID NO: 44730 - DNA, 25 bp, Artificial
  Probe
aggatctatacccaggacttcacag

SEQ ID NO: 44731 - DNA, 25 bp, Artificial
  Probe
gaggatctatacccaggacttcaca

SEQ ID NO: 44732 - DNA, 25 bp, Artificial
  Probe
tttccaaacatcctcatagccacag

SEQ ID NO: 44733 - DNA, 25 bp, Artificial
  Probe
ctgctccctatttccaaacatcctc

SEQ ID NO: 44734 - DNA, 25 bp, Artificial
  Probe
ggatctatacccaggacttcacagt

SEQ ID NO: 44735 - DNA, 25 bp, Artificial
  Probe
tgctccctatttccaaacatcctca

SEQ ID NO: 44736 - DNA, 25 bp, Artificial
  Probe
cgaggatctatacccaggacttcac

SEQ ID NO: 44737 - DNA, 25 bp, Artificial
  Probe
atctatacccaggacttcacagtgc

SEQ ID NO: 44738 - DNA, 25 bp, Artificial
  Probe
acgaggatctatacccaggacttca

SEQ ID NO: 44739 - DNA, 25 bp, Artificial
  Probe
cctgctccctatttccaaacatcct

SEQ ID NO: 44740 - DNA, 25 bp, Artificial
  Probe
gctcaaatcctcctgttttatttaa

SEQ ID NO: 44741 - DNA, 25 bp, Artificial
  Probe
cagctcaaatcctcctgttttattt

SEQ ID NO: 44742 - DNA, 25 bp, Artificial
  Probe
agctcaaatcctcctgttttattta

SEQ ID NO: 44743 - DNA, 25 bp, Artificial
  Probe
gaagaggaagtgggtcagaatggac

SEQ ID NO: 44744 - DNA, 25 bp, Artificial
  Probe
ttccaaacatcctcatagccacagc

SEQ ID NO: 44745 - DNA, 25 bp, Artificial
  Probe
catcctcatagccacagctcaaatc

SEQ ID NO: 44746 - DNA, 25 bp, Artificial
  Probe
aagaggaagtgggtcagaatggaca

SEQ ID NO: 44747 - DNA, 25 bp, Artificial
  Probe
acatcctcatagccacagctcaaat

SEQ ID NO: 44748 - DNA, 25 bp, Artificial
  Probe
aacatcctcatagccacagctcaaa

SEQ ID NO: 44749 - DNA, 25 bp, Artificial
  Probe
aaacatcctcatagccacagctcaa

SEQ ID NO: 44750 - DNA, 25 bp, Artificial
  Probe
atcctcatagccacagctcaaatcc

SEQ ID NO: 44751 - DNA, 25 bp, Artificial
  Probe
acagctcaaatcctcctgttttatt

SEQ ID NO: 44752 - DNA, 25 bp, Artificial
  Probe
cacagctcaaatcctcctgttttat

SEQ ID NO: 44753 - DNA, 25 bp, Artificial
  Probe
caaacatcctcatagccacagctca

SEQ ID NO: 44754 - DNA, 25 bp, Artificial
  Probe
ctcatagccacagctcaaatcctcc

SEQ ID NO: 44755 - DNA, 25 bp, Artificial
  Probe
cctcatagccacagctcaaatcctc

SEQ ID NO: 44756 - DNA, 25 bp, Artificial
  Probe
ccacagctcaaatcctcctgtttta

SEQ ID NO: 44757 - DNA, 25 bp, Artificial
  Probe
gacaagcacttctacttcaaccaga

SEQ ID NO: 44758 - DNA, 25 bp, Artificial
  Probe
cacttctacttcaaccagaccaagg

SEQ ID NO: 44759 - DNA, 25 bp, Artificial
  Probe
acaagcacttctacttcaaccagac

SEQ ID NO: 44760 - DNA, 25 bp, Artificial
  Probe
ctgggatggatagcagaaataattt

SEQ ID NO: 44761 - DNA, 25 bp, Artificial
  Probe
tgggatggatagcagaaataattta

SEQ ID NO: 44762 - DNA, 25 bp, Artificial
  Probe
gcacttctacttcaaccagaccaag

SEQ ID NO: 44763 - DNA, 25 bp, Artificial
  Probe
caagcacttctacttcaaccagacc

SEQ ID NO: 44764 - DNA, 25 bp, Artificial
  Probe
catcaccgacaagcacttctacttc

SEQ ID NO: 44765 - DNA, 25 bp, Artificial
  Probe
atcatcaccgacaagcacttctact

SEQ ID NO: 44766 - DNA, 25 bp, Artificial
  Probe
catcatcaccgacaagcacttctac

SEQ ID NO: 44767 - DNA, 25 bp, Artificial
  Probe
cgacaagcacttctacttcaaccag

SEQ ID NO: 44768 - DNA, 25 bp, Artificial
  Probe
agcacttctacttcaaccagaccaa

SEQ ID NO: 44769 - DNA, 25 bp, Artificial
  Probe
aagcacttctacttcaaccagacca

SEQ ID NO: 44770 - DNA, 25 bp, Artificial
  Probe
atcaccgacaagcacttctacttca

SEQ ID NO: 44771 - DNA, 25 bp, Artificial
  Probe
tcatcaccgacaagcacttctactt

SEQ ID NO: 44772 - DNA, 25 bp, Artificial
  Probe
caccgacaagcacttctacttcaac

SEQ ID NO: 44773 - DNA, 25 bp, Artificial
  Probe
tcaccgacaagcacttctacttcaa

SEQ ID NO: 44774 - DNA, 25 bp, Artificial
  Probe
gggatggatagcagaaataatttaa

SEQ ID NO: 44775 - DNA, 25 bp, Artificial
  Probe
gctgggatggatagcagaaataatt

SEQ ID NO: 44776 - DNA, 25 bp, Artificial
  Probe
acttctacttcaaccagaccaaggg

SEQ ID NO: 44777 - DNA, 25 bp, Artificial
  Probe
ggctgggatggatagcagaaataat

SEQ ID NO: 44778 - DNA, 25 bp, Artificial
  Probe
ccgacaagcacttctacttcaacca

SEQ ID NO: 44779 - DNA, 25 bp, Artificial
  Probe
accgacaagcacttctacttcaacc

SEQ ID NO: 44780 - DNA, 25 bp, Artificial
  Probe
cttcaaccgcaaattttaccagatg

SEQ ID NO: 44781 - DNA, 25 bp, Artificial
  Probe
ttcaaccgcaaattttaccagatga

SEQ ID NO: 44782 - DNA, 25 bp, Artificial
  Probe
ccttcaaccgcaaattttaccagat

SEQ ID NO: 44783 - DNA, 25 bp, Artificial
  Probe
ctacttcaaccagaccaagggcttc

SEQ ID NO: 44784 - DNA, 25 bp, Artificial
  Probe
tcaaccgcaaattttaccagatgac

SEQ ID NO: 44785 - DNA, 25 bp, Artificial
  Probe
cttctacttcaaccagaccaagggc

SEQ ID NO: 44786 - DNA, 25 bp, Artificial
  Probe
ggatggatagcagaaataatttaaa

SEQ ID NO: 44787 - DNA, 25 bp, Artificial
  Probe
caaccgcaaattttaccagatgacc

SEQ ID NO: 44788 - DNA, 25 bp, Artificial
  Probe
cggctgggatggatagcagaaataa

SEQ ID NO: 44789 - DNA, 25 bp, Artificial
  Probe
cccttcaaccgcaaattttaccaga

SEQ ID NO: 44790 - DNA, 25 bp, Artificial
  Probe
aaccgcaaattttaccagatgaccg

SEQ ID NO: 44791 - DNA, 25 bp, Artificial
  Probe
tctcacctccattaacattcttacc

SEQ ID NO: 44792 - DNA, 25 bp, Artificial
  Probe
tgatctcacctccattaacattctt

SEQ ID NO: 44793 - DNA, 25 bp, Artificial
  Probe
atctcacctccattaacattcttac

SEQ ID NO: 44794 - DNA, 25 bp, Artificial
  Probe
gatctcacctccattaacattctta

SEQ ID NO: 44795 - DNA, 25 bp, Artificial
  Probe
ccattaacattcttacccagcattc

SEQ ID NO: 44796 - DNA, 25 bp, Artificial
  Probe
tccattaacattcttacccagcatt

SEQ ID NO: 44797 - DNA, 25 bp, Artificial
  Probe
gtgatctcacctccattaacattct

SEQ ID NO: 44798 - DNA, 25 bp, Artificial
  Probe
cattaacattcttacccagcattct

SEQ ID NO: 44799 - DNA, 25 bp, Artificial
  Probe
ctccattaacattcttacccagcat

SEQ ID NO: 44800 - DNA, 25 bp, Artificial
  Probe
ctcacctccattaacattcttaccc

SEQ ID NO: 44801 - DNA, 25 bp, Artificial
  Probe
cacctccattaacattcttacccag

SEQ ID NO: 44802 - DNA, 25 bp, Artificial
  Probe
ctgtcagaatacttgtgttcaataa

SEQ ID NO: 44803 - DNA, 25 bp, Artificial
  Probe
tctgtcagaatacttgtgttcaata

SEQ ID NO: 44804 - DNA, 25 bp, Artificial
  Probe
tcacctccattaacattcttaccca

SEQ ID NO: 44805 - DNA, 25 bp, Artificial
  Probe
taacattcttacccagcattctgta

SEQ ID NO: 44806 - DNA, 25 bp, Artificial
  Probe
ttaacattcttacccagcattctgt

SEQ ID NO: 44807 - DNA, 25 bp, Artificial
  Probe
attaacattcttacccagcattctg

SEQ ID NO: 44808 - DNA, 25 bp, Artificial
  Probe
tttactgagtgaaacatcaacacca

SEQ ID NO: 44809 - DNA, 25 bp, Artificial
  Probe
attcttacccagcattctgtacttc

SEQ ID NO: 44810 - DNA, 25 bp, Artificial
  Probe
cattcttacccagcattctgtactt

SEQ ID NO: 44811 - DNA, 25 bp, Artificial
  Probe
cctccattaacattcttacccagca

SEQ ID NO: 44812 - DNA, 25 bp, Artificial
  Probe
acctccattaacattcttacccagc

SEQ ID NO: 44813 - DNA, 25 bp, Artificial
  Probe
aacattcttacccagcattctgtac

SEQ ID NO: 44814 - DNA, 25 bp, Artificial
  Probe
ttactgagtgaaacatcaacaccac

SEQ ID NO: 44815 - DNA, 25 bp, Artificial
  Probe
acattcttacccagcattctgtact

SEQ ID NO: 44816 - DNA, 25 bp, Artificial
  Probe
ttctgtcagaatacttgtgttcaat

SEQ ID NO: 44817 - DNA, 25 bp, Artificial
  Probe
tgtcagaatacttgtgttcaataaa

SEQ ID NO: 44818 - DNA, 25 bp, Artificial
  Probe
ttcttacccagcattctgtacttcg

SEQ ID NO: 44819 - DNA, 25 bp, Artificial
  Probe
gagtgaaacatcaacaccacctttg

SEQ ID NO: 44820 - DNA, 25 bp, Artificial
  Probe
tactgagtgaaacatcaacaccacc

SEQ ID NO: 44821 - DNA, 25 bp, Artificial
  Probe
tgagtgaaacatcaacaccaccttt

SEQ ID NO: 44822 - DNA, 25 bp, Artificial
  Probe
agtgaaacatcaacaccacctttgt

SEQ ID NO: 44823 - DNA, 25 bp, Artificial
  Probe
ctgagtgaaacatcaacaccacctt

SEQ ID NO: 44824 - DNA, 25 bp, Artificial
  Probe
ttttactgagtgaaacatcaacacc

SEQ ID NO: 44825 - DNA, 25 bp, Artificial
  Probe
tactaactgagaattttgactttgc

SEQ ID NO: 44826 - DNA, 25 bp, Artificial
  Probe
actaactgagaattttgactttgca

SEQ ID NO: 44827 - DNA, 25 bp, Artificial
  Probe
atcaacaccacctttgtttccattc

SEQ ID NO: 44828 - DNA, 25 bp, Artificial
  Probe
catcaacaccacctttgtttccatt

SEQ ID NO: 44829 - DNA, 25 bp, Artificial
  Probe
ctaactgagaattttgactttgcat

SEQ ID NO: 44830 - DNA, 25 bp, Artificial
  Probe
gtgaaacatcaacaccacctttgtt

SEQ ID NO: 44831 - DNA, 25 bp, Artificial
  Probe
tcttacccagcattctgtacttcgg

SEQ ID NO: 44832 - DNA, 25 bp, Artificial
  Probe
actgagtgaaacatcaacaccacct

SEQ ID NO: 44833 - DNA, 25 bp, Artificial
  Probe
taactgagaattttgactttgcatt

SEQ ID NO: 44834 - DNA, 25 bp, Artificial
  Probe
aactgagaattttgactttgcattc

SEQ ID NO: 44835 - DNA, 25 bp, Artificial
  Probe
gtactaactgagaattttgactttg

SEQ ID NO: 44836 - DNA, 25 bp, Artificial
  Probe
cagcattgaagtctacagtaccagg

SEQ ID NO: 44837 - DNA, 25 bp, Artificial
  Probe
ccagcattgaagtctacagtaccag

SEQ ID NO: 44838 - DNA, 25 bp, Artificial
  Probe
agcattgaagtctacagtaccagga

SEQ ID NO: 44839 - DNA, 25 bp, Artificial
  Probe
cattgaagtctacagtaccaggacc

SEQ ID NO: 44840 - DNA, 25 bp, Artificial
  Probe
attgaagtctacagtaccaggacca

SEQ ID NO: 44841 - DNA, 25 bp, Artificial
  Probe
tattaaacttggtgcttctcactga

SEQ ID NO: 44842 - DNA, 25 bp, Artificial
  Probe
atattaaacttggtgcttctcactg

SEQ ID NO: 44843 - DNA, 25 bp, Artificial
  Probe
attaaacttggtgcttctcactgaa

SEQ ID NO: 44844 - DNA, 25 bp, Artificial
  Probe
gcattgaagtctacagtaccaggac

SEQ ID NO: 44845 - DNA, 25 bp, Artificial
  Probe
ttaaacttggtgcttctcactgaaa

SEQ ID NO: 44846 - DNA, 25 bp, Artificial
  Probe
taggactctcgataacccacattta

SEQ ID NO: 44847 - DNA, 25 bp, Artificial
  Probe
agtacttgtaggactctcgataacc

SEQ ID NO: 44848 - DNA, 25 bp, Artificial
  Probe
ttgaagtctacagtaccaggaccag

SEQ ID NO: 44849 - DNA, 25 bp, Artificial
  Probe
gactctcgataacccacatttagac

SEQ ID NO: 44850 - DNA, 25 bp, Artificial
  Probe
ctctcgataacccacatttagacac

SEQ ID NO: 44851 - DNA, 25 bp, Artificial
  Probe
actctcgataacccacatttagaca

SEQ ID NO: 44852 - DNA, 25 bp, Artificial
  Probe
aggactctcgataacccacatttag

SEQ ID NO: 44853 - DNA, 25 bp, Artificial
  Probe
gtacttgtaggactctcgataaccc

SEQ ID NO: 44854 - DNA, 25 bp, Artificial
  Probe
gtaggactctcgataacccacattt

SEQ ID NO: 44855 - DNA, 25 bp, Artificial
  Probe
ggactctcgataacccacatttaga

SEQ ID NO: 44856 - DNA, 25 bp, Artificial
  Probe
tacttgtaggactctcgataaccca

SEQ ID NO: 44857 - DNA, 25 bp, Artificial
  Probe
aatattaaacttggtgcttctcact

SEQ ID NO: 44858 - DNA, 25 bp, Artificial
  Probe
ggaagtgctattttgtatgctgtta

SEQ ID NO: 44859 - DNA, 25 bp, Artificial
  Probe
tctcgataacccacatttagacacc

SEQ ID NO: 44860 - DNA, 25 bp, Artificial
  Probe
agtgctattttgtatgctgttaagt

SEQ ID NO: 44861 - DNA, 25 bp, Artificial
  Probe
gtgctattttgtatgctgttaagtt

SEQ ID NO: 44862 - DNA, 25 bp, Artificial
  Probe
aagtgctattttgtatgctgttaag

SEQ ID NO: 44863 - DNA, 25 bp, Artificial
  Probe
gaagtgctattttgtatgctgttaa

SEQ ID NO: 44864 - DNA, 25 bp, Artificial
  Probe
tgctgttaagttttcctatctgtac

SEQ ID NO: 44865 - DNA, 25 bp, Artificial
  Probe
gccagcattgaagtctacagtacca

SEQ ID NO: 44866 - DNA, 25 bp, Artificial
  Probe
atgctgttaagttttcctatctgta

SEQ ID NO: 44867 - DNA, 25 bp, Artificial
  Probe
tatgctgttaagttttcctatctgt

SEQ ID NO: 44868 - DNA, 25 bp, Artificial
  Probe
tgtatgctgttaagttttcctatct

SEQ ID NO: 44869 - DNA, 25 bp, Artificial
  Probe
cggaagtgctattttgtatgctgtt

SEQ ID NO: 44870 - DNA, 25 bp, Artificial
  Probe
tgtctgatccctttctccaagaatg

SEQ ID NO: 44871 - DNA, 25 bp, Artificial
  Probe
gtgtctgatccctttctccaagaat

SEQ ID NO: 44872 - DNA, 25 bp, Artificial
  Probe
gtatgctgttaagttttcctatctg

SEQ ID NO: 44873 - DNA, 25 bp, Artificial
  Probe
tgtaggactctcgataacccacatt

SEQ ID NO: 44874 - DNA, 25 bp, Artificial
  Probe
ttgtaggactctcgataacccacat

SEQ ID NO: 44875 - DNA, 25 bp, Artificial
  Probe
gagtgtctgatccctttctccaaga

SEQ ID NO: 44876 - DNA, 25 bp, Artificial
  Probe
ctcgataacccacatttagacaccg

SEQ ID NO: 44877 - DNA, 25 bp, Artificial
  Probe
tgctattttgtatgctgttaagttt

SEQ ID NO: 44878 - DNA, 25 bp, Artificial
  Probe
taaacttggtgcttctcactgaaaa

SEQ ID NO: 44879 - DNA, 25 bp, Artificial
  Probe
attttgtatgctgttaagttttcct

SEQ ID NO: 44880 - DNA, 25 bp, Artificial
  Probe
gctgttaagttttcctatctgtact

SEQ ID NO: 44881 - DNA, 25 bp, Artificial
  Probe
ctcttctctatgctgtcttctccac

SEQ ID NO: 44882 - DNA, 25 bp, Artificial
  Probe
cacctcttctctatgctgtcttctc

SEQ ID NO: 44883 - DNA, 25 bp, Artificial
  Probe
cttcccagatgatgttatccagttt

SEQ ID NO: 44884 - DNA, 25 bp, Artificial
  Probe
ttcccagatgatgttatccagtttg

SEQ ID NO: 44885 - DNA, 25 bp, Artificial
  Probe
cctcttctctatgctgtcttctcca

SEQ ID NO: 44886 - DNA, 25 bp, Artificial
  Probe
acctcttctctatgctgtcttctcc

SEQ ID NO: 44887 - DNA, 25 bp, Artificial
  Probe
caaggacttcccagatgatgttatc

SEQ ID NO: 44888 - DNA, 25 bp, Artificial
  Probe
acacctcttctctatgctgtcttct

SEQ ID NO: 44889 - DNA, 25 bp, Artificial
  Probe
ttctctatgctgtcttctccacctc

SEQ ID NO: 44890 - DNA, 25 bp, Artificial
  Probe
cttctctatgctgtcttctccacct

SEQ ID NO: 44891 - DNA, 25 bp, Artificial
  Probe
tcttctctatgctgtcttctccacc

SEQ ID NO: 44892 - DNA, 25 bp, Artificial
  Probe
ccagatgatgttatccagtttgctc

SEQ ID NO: 44893 - DNA, 25 bp, Artificial
  Probe
acttcccagatgatgttatccagtt

SEQ ID NO: 44894 - DNA, 25 bp, Artificial
  Probe
cagatgatgttatccagtttgctcg

SEQ ID NO: 44895 - DNA, 25 bp, Artificial
  Probe
ccaaggacttcccagatgatgttat

SEQ ID NO: 44896 - DNA, 25 bp, Artificial
  Probe
gacttcccagatgatgttatccagt

SEQ ID NO: 44897 - DNA, 25 bp, Artificial
  Probe
cactttgaccaacttcaggatgttt

SEQ ID NO: 44898 - DNA, 25 bp, Artificial
  Probe
cccagatgatgttatccagtttgct

SEQ ID NO: 44899 - DNA, 25 bp, Artificial
  Probe
tcccagatgatgttatccagtttgc

SEQ ID NO: 44900 - DNA, 25 bp, Artificial
  Probe
agatgatgttatccagtttgctcgg

SEQ ID NO: 44901 - DNA, 25 bp, Artificial
  Probe
aaggacttcccagatgatgttatcc

SEQ ID NO: 44902 - DNA, 25 bp, Artificial
  Probe
gaggagaaagctgtgaacagattag

SEQ ID NO: 44903 - DNA, 25 bp, Artificial
  Probe
accaaggacttcccagatgatgtta

SEQ ID NO: 44904 - DNA, 25 bp, Artificial
  Probe
gtaatacaataaacacattctcagc

SEQ ID NO: 44905 - DNA, 25 bp, Artificial
  Probe
ggacttcccagatgatgttatccag

SEQ ID NO: 44906 - DNA, 25 bp, Artificial
  Probe
atgatgttatccagtttgctcggaa

SEQ ID NO: 44907 - DNA, 25 bp, Artificial
  Probe
aggacttcccagatgatgttatcca

SEQ ID NO: 44908 - DNA, 25 bp, Artificial
  Probe
ccactttgaccaacttcaggatgtt

SEQ ID NO: 44909 - DNA, 25 bp, Artificial
  Probe
ctttgaccaacttcaggatgttttc

SEQ ID NO: 44910 - DNA, 25 bp, Artificial
  Probe
aggagaaagctgtgaacagattagg

SEQ ID NO: 44911 - DNA, 25 bp, Artificial
  Probe
gatgatgttatccagtttgctcgga

SEQ ID NO: 44912 - DNA, 25 bp, Artificial
  Probe
actttgaccaacttcaggatgtttt

SEQ ID NO: 44913 - DNA, 25 bp, Artificial
  Probe
tctctatgctgtcttctccacctcc

SEQ ID NO: 44914 - DNA, 25 bp, Artificial
  Probe
cgaggagaaagctgtgaacagatta

SEQ ID NO: 44915 - DNA, 25 bp, Artificial
  Probe
gcaggccaactgtactaaagtaata

SEQ ID NO: 44916 - DNA, 25 bp, Artificial
  Probe
caggccaactgtactaaagtaatac

SEQ ID NO: 44917 - DNA, 25 bp, Artificial
  Probe
tgatgttatccagtttgctcggaac

SEQ ID NO: 44918 - DNA, 25 bp, Artificial
  Probe
ctctatgctgtcttctccacctcca

SEQ ID NO: 44919 - DNA, 25 bp, Artificial
  Probe
taatacaataaacacattctcagct

SEQ ID NO: 44920 - DNA, 25 bp, Artificial
  Probe
gccaactgtactaaagtaatacaat

SEQ ID NO: 44921 - DNA, 25 bp, Artificial
  Probe
gacacctcttctctatgctgtcttc

SEQ ID NO: 44922 - DNA, 25 bp, Artificial
  Probe
tttgaccaacttcaggatgttttcc

SEQ ID NO: 44923 - DNA, 25 bp, Artificial
  Probe
aggccaactgtactaaagtaataca

SEQ ID NO: 44924 - DNA, 25 bp, Artificial
  Probe
caccaaggacttcccagatgatgtt

SEQ ID NO: 44925 - DNA, 25 bp, Artificial
  Probe
gatgttatccagtttgctcggaacc

SEQ ID NO: 44926 - DNA, 25 bp, Artificial
  Probe
gactatccgcattgtgtatgacatc

SEQ ID NO: 44927 - DNA, 25 bp, Artificial
  Probe
agactatccgcattgtgtatgacat

SEQ ID NO: 44928 - DNA, 25 bp, Artificial
  Probe
gtgggtggagaaataaatggtcttt

SEQ ID NO: 44929 - DNA, 25 bp, Artificial
  Probe
actatccgcattgtgtatgacatcc

SEQ ID NO: 44930 - DNA, 25 bp, Artificial
  Probe
cagactatccgcattgtgtatgaca

SEQ ID NO: 44931 - DNA, 25 bp, Artificial
  Probe
ccagactatccgcattgtgtatgac

SEQ ID NO: 44932 - DNA, 25 bp, Artificial
  Probe
tgtgggtggagaaataaatggtctt

SEQ ID NO: 44933 - DNA, 25 bp, Artificial
  Probe
ctgtgggtggagaaataaatggtct

SEQ ID NO: 44934 - DNA, 25 bp, Artificial
  Probe
actgtgggtggagaaataaatggtc

SEQ ID NO: 44935 - DNA, 25 bp, Artificial
  Probe
tgggtggagaaataaatggtctttc

SEQ ID NO: 44936 - DNA, 25 bp, Artificial
  Probe
cactgtgggtggagaaataaatggt

SEQ ID NO: 44937 - DNA, 25 bp, Artificial
  Probe
ctatccgcattgtgtatgacatccc

SEQ ID NO: 44938 - DNA, 25 bp, Artificial
  Probe
cccagactatccgcattgtgtatga

SEQ ID NO: 44939 - DNA, 25 bp, Artificial
  Probe
acccagactatccgcattgtgtatg

SEQ ID NO: 44940 - DNA, 25 bp, Artificial
  Probe
cacccagactatccgcattgtgtat

SEQ ID NO: 44941 - DNA, 25 bp, Artificial
  Probe
caaagacatcgtccttgcctctgta

SEQ ID NO: 44942 - DNA, 25 bp, Artificial
  Probe
aaagacatcgtccttgcctctgtac

SEQ ID NO: 44943 - DNA, 25 bp, Artificial
  Probe
gggtggagaaataaatggtctttct

SEQ ID NO: 44944 - DNA, 25 bp, Artificial
  Probe
atttgagacccacttctggcttcag

SEQ ID NO: 44945 - DNA, 25 bp, Artificial
  Probe
ggatggaagttagccaagctttaaa

SEQ ID NO: 44946 - DNA, 25 bp, Artificial
  Probe
gtactggcttctccccaactaaaac

SEQ ID NO: 44947 - DNA, 25 bp, Artificial
  Probe
catttgagacccacttctggcttca

SEQ ID NO: 44948 - DNA, 25 bp, Artificial
  Probe
acatttgagacccacttctggcttc

SEQ ID NO: 44949 - DNA, 25 bp, Artificial
  Probe
gacatttgagacccacttctggctt

SEQ ID NO: 44950 - DNA, 25 bp, Artificial
  Probe
tgtactggcttctccccaactaaaa

SEQ ID NO: 44951 - DNA, 25 bp, Artificial
  Probe
gatggaagttagccaagctttaaag

SEQ ID NO: 44952 - DNA, 25 bp, Artificial
  Probe
tatccgcattgtgtatgacatcccc

SEQ ID NO: 44953 - DNA, 25 bp, Artificial
  Probe
ctgtactggcttctccccaactaaa

SEQ ID NO: 44954 - DNA, 25 bp, Artificial
  Probe
gggatggaagttagccaagctttaa

SEQ ID NO: 44955 - DNA, 25 bp, Artificial
  Probe
atggaagttagccaagctttaaagg

SEQ ID NO: 44956 - DNA, 25 bp, Artificial
  Probe
gaagttagccaagctttaaagggac

SEQ ID NO: 44957 - DNA, 25 bp, Artificial
  Probe
tactggcttctccccaactaaaacg

SEQ ID NO: 44958 - DNA, 25 bp, Artificial
  Probe
tctgtactggcttctccccaactaa

SEQ ID NO: 44959 - DNA, 25 bp, Artificial
  Probe
tgggatggaagttagccaagcttta

SEQ ID NO: 44960 - DNA, 25 bp, Artificial
  Probe
ggaagttagccaagctttaaaggga

SEQ ID NO: 44961 - DNA, 25 bp, Artificial
  Probe
ttggttttgcagacacccagactat

SEQ ID NO: 44962 - DNA, 25 bp, Artificial
  Probe
tggaagttagccaagctttaaaggg

SEQ ID NO: 44963 - DNA, 25 bp, Artificial
  Probe
ctctgtactggcttctccccaacta

SEQ ID NO: 44964 - DNA, 25 bp, Artificial
  Probe
tggttttgcagacacccagactatc

SEQ ID NO: 44965 - DNA, 25 bp, Artificial
  Probe
aagttagccaagctttaaagggacg

SEQ ID NO: 44966 - DNA, 25 bp, Artificial
  Probe
cttggttttgcagacacccagacta

SEQ ID NO: 44967 - DNA, 25 bp, Artificial
  Probe
ttgggatggaagttagccaagcttt

SEQ ID NO: 44968 - DNA, 25 bp, Artificial
  Probe
ctagatagttattaccaacctgagg

SEQ ID NO: 44969 - DNA, 25 bp, Artificial
  Probe
atggtcttcgcatgtggtaatctag

SEQ ID NO: 44970 - DNA, 25 bp, Artificial
  Probe
gatggtcttcgcatgtggtaatcta

SEQ ID NO: 44971 - DNA, 25 bp, Artificial
  Probe
gatagttattaccaacctgaggtgg

SEQ ID NO: 44972 - DNA, 25 bp, Artificial
  Probe
agatagttattaccaacctgaggtg

SEQ ID NO: 44973 - DNA, 25 bp, Artificial
  Probe
tagatagttattaccaacctgaggt

SEQ ID NO: 44974 - DNA, 25 bp, Artificial
  Probe
cagatggtcttcgcatgtggtaatc

SEQ ID NO: 44975 - DNA, 25 bp, Artificial
  Probe
tcagatggtcttcgcatgtggtaat

SEQ ID NO: 44976 - DNA, 25 bp, Artificial
  Probe
atagttattaccaacctgaggtggg

SEQ ID NO: 44977 - DNA, 25 bp, Artificial
  Probe
tctagatagttattaccaacctgag

SEQ ID NO: 44978 - DNA, 25 bp, Artificial
  Probe
tggtcttcgcatgtggtaatctaga

SEQ ID NO: 44979 - DNA, 25 bp, Artificial
  Probe
tttgtcttgctttgggataataaaa

SEQ ID NO: 44980 - DNA, 25 bp, Artificial
  Probe
ttttgtcttgctttgggataataaa

SEQ ID NO: 44981 - DNA, 25 bp, Artificial
  Probe
ctcagatggtcttcgcatgtggtaa

SEQ ID NO: 44982 - DNA, 25 bp, Artificial
  Probe
cttcgcatgtggtaatctagatagt

SEQ ID NO: 44983 - DNA, 25 bp, Artificial
  Probe
agatggtcttcgcatgtggtaatct

SEQ ID NO: 44984 - DNA, 25 bp, Artificial
  Probe
tagttattaccaacctgaggtgggt

SEQ ID NO: 44985 - DNA, 25 bp, Artificial
  Probe
ttcgcatgtggtaatctagatagtt

SEQ ID NO: 44986 - DNA, 25 bp, Artificial
  Probe
gtcttcgcatgtggtaatctagata

SEQ ID NO: 44987 - DNA, 25 bp, Artificial
  Probe
tcttcgcatgtggtaatctagatag

SEQ ID NO: 44988 - DNA, 25 bp, Artificial
  Probe
tcgcatgtggtaatctagatagtta

SEQ ID NO: 44989 - DNA, 25 bp, Artificial
  Probe
cgcatgtggtaatctagatagttat

SEQ ID NO: 44990 - DNA, 25 bp, Artificial
  Probe
gacattgagctaagcgaccacttct

SEQ ID NO: 44991 - DNA, 25 bp, Artificial
  Probe
ggtcttcgcatgtggtaatctagat

SEQ ID NO: 44992 - DNA, 25 bp, Artificial
  Probe
acattgagctaagcgaccacttctc

SEQ ID NO: 44993 - DNA, 25 bp, Artificial
  Probe
agttattaccaacctgaggtgggtg

SEQ ID NO: 44994 - DNA, 25 bp, Artificial
  Probe
gcatgtggtaatctagatagttatt

SEQ ID NO: 44995 - DNA, 25 bp, Artificial
  Probe
caagtacgtcagcctgaccattaag

SEQ ID NO: 44996 - DNA, 25 bp, Artificial
  Probe
gttattaccaacctgaggtgggtgg

SEQ ID NO: 44997 - DNA, 25 bp, Artificial
  Probe
atctagatagttattaccaacctga

SEQ ID NO: 44998 - DNA, 25 bp, Artificial
  Probe
aatctagatagttattaccaacctg

SEQ ID NO: 44999 - DNA, 25 bp, Artificial
  Probe
aagtacgtcagcctgaccattaagg

SEQ ID NO: 45000 - DNA, 25 bp, Artificial
  Probe
ccaagtacgtcagcctgaccattaa

SEQ ID NO: 45001 - DNA, 25 bp, Artificial
  Probe
ttattaccaacctgaggtgggtggt

SEQ ID NO: 45002 - DNA, 25 bp, Artificial
  Probe
ttgtcagcatattgtcatagcaaca

SEQ ID NO: 45003 - DNA, 25 bp, Artificial
  Probe
cagcatattgtcatagcaacaggaa

SEQ ID NO: 45004 - DNA, 25 bp, Artificial
  Probe
tgtcagcatattgtcatagcaacag

SEQ ID NO: 45005 - DNA, 25 bp, Artificial
  Probe
tcagcatattgtcatagcaacagga

SEQ ID NO: 45006 - DNA, 25 bp, Artificial
  Probe
gtcagcatattgtcatagcaacagg

SEQ ID NO: 45007 - DNA, 25 bp, Artificial
  Probe
tttgtcagcatattgtcatagcaac

SEQ ID NO: 45008 - DNA, 25 bp, Artificial
  Probe
agcatattgtcatagcaacaggaaa

SEQ ID NO: 45009 - DNA, 25 bp, Artificial
  Probe
cctaccagccttaattttcactttt

SEQ ID NO: 45010 - DNA, 25 bp, Artificial
  Probe
accagccttaattttcacttttctt

SEQ ID NO: 45011 - DNA, 25 bp, Artificial
  Probe
ttttgtcagcatattgtcatagcaa

SEQ ID NO: 45012 - DNA, 25 bp, Artificial
  Probe
taccagccttaattttcacttttct

SEQ ID NO: 45013 - DNA, 25 bp, Artificial
  Probe
ccagccttaattttcacttttcttt

SEQ ID NO: 45014 - DNA, 25 bp, Artificial
  Probe
ctaccagccttaattttcacttttc

SEQ ID NO: 45015 - DNA, 25 bp, Artificial
  Probe
tattgtcatagcaacaggaaaagga

SEQ ID NO: 45016 - DNA, 25 bp, Artificial
  Probe
gcatattgtcatagcaacaggaaaa

SEQ ID NO: 45017 - DNA, 25 bp, Artificial
  Probe
gcctaccagccttaattttcacttt

SEQ ID NO: 45018 - DNA, 25 bp, Artificial
  Probe
aaggaacaggtgaagcctatcagtg

SEQ ID NO: 45019 - DNA, 25 bp, Artificial
  Probe
atattgtcatagcaacaggaaaagg

SEQ ID NO: 45020 - DNA, 25 bp, Artificial
  Probe
attgtcatagcaacaggaaaaggaa

SEQ ID NO: 45021 - DNA, 25 bp, Artificial
  Probe
gtcatagcaacaggaaaaggaacag

SEQ ID NO: 45022 - DNA, 25 bp, Artificial
  Probe
catattgtcatagcaacaggaaaag

SEQ ID NO: 45023 - DNA, 25 bp, Artificial
  Probe
ttttggtggagaagcataactaaaa

SEQ ID NO: 45024 - DNA, 25 bp, Artificial
  Probe
ttgtcatagcaacaggaaaaggaac

SEQ ID NO: 45025 - DNA, 25 bp, Artificial
  Probe
gaacaggtgaagcctatcagtgagg

SEQ ID NO: 45026 - DNA, 25 bp, Artificial
  Probe
ggaacaggtgaagcctatcagtgag

SEQ ID NO: 45027 - DNA, 25 bp, Artificial
  Probe
aaaggaacaggtgaagcctatcagt

SEQ ID NO: 45028 - DNA, 25 bp, Artificial
  Probe
tagtgagggttaattttaccttggc

SEQ ID NO: 45029 - DNA, 25 bp, Artificial
  Probe
tcatagcaacaggaaaaggaacagg

SEQ ID NO: 45030 - DNA, 25 bp, Artificial
  Probe
ttagtgagggttaattttaccttgg

SEQ ID NO: 45031 - DNA, 25 bp, Artificial
  Probe
cctttagtgagggttaattttacct

SEQ ID NO: 45032 - DNA, 25 bp, Artificial
  Probe
aacaggtgaagcctatcagtgagga

SEQ ID NO: 45033 - DNA, 25 bp, Artificial
  Probe
aggaacaggtgaagcctatcagtga

SEQ ID NO: 45034 - DNA, 25 bp, Artificial
  Probe
atagcaacaggaaaaggaacaggtg

SEQ ID NO: 45035 - DNA, 25 bp, Artificial
  Probe
catagcaacaggaaaaggaacaggt

SEQ ID NO: 45036 - DNA, 25 bp, Artificial
  Probe
tgtcatagcaacaggaaaaggaaca

SEQ ID NO: 45037 - DNA, 25 bp, Artificial
  Probe
gagggttaattttaccttggcactg

SEQ ID NO: 45038 - DNA, 25 bp, Artificial
  Probe
tgagggttaattttaccttggcact

SEQ ID NO: 45039 - DNA, 25 bp, Artificial
  Probe
gtgagggttaattttaccttggcac

SEQ ID NO: 45040 - DNA, 25 bp, Artificial
  Probe
agtgagggttaattttaccttggca

SEQ ID NO: 45041 - DNA, 25 bp, Artificial
  Probe
aaaaggaacaggtgaagcctatcag

SEQ ID NO: 45042 - DNA, 25 bp, Artificial
  Probe
gaaaaggaacaggtgaagcctatca

SEQ ID NO: 45043 - DNA, 25 bp, Artificial
  Probe
cagccttaattttcacttttcttta

SEQ ID NO: 45044 - DNA, 25 bp, Artificial
  Probe
agccttaattttcacttttctttag

SEQ ID NO: 45045 - DNA, 25 bp, Artificial
  Probe
tttagtgagggttaattttaccttg

SEQ ID NO: 45046 - DNA, 25 bp, Artificial
  Probe
gccttaattttcacttttctttagt

SEQ ID NO: 45047 - DNA, 25 bp, Artificial
  Probe
aggttggcaggtatattcataagtg

SEQ ID NO: 45048 - DNA, 25 bp, Artificial
  Probe
aagaatcattaggttggcaggtata

SEQ ID NO: 45049 - DNA, 25 bp, Artificial
  Probe
tcattaggttggcaggtatattcat

SEQ ID NO: 45050 - DNA, 25 bp, Artificial
  Probe
atcattaggttggcaggtatattca

SEQ ID NO: 45051 - DNA, 25 bp, Artificial
  Probe
agaatcattaggttggcaggtatat

SEQ ID NO: 45052 - DNA, 25 bp, Artificial
  Probe
taggttggcaggtatattcataagt

SEQ ID NO: 45053 - DNA, 25 bp, Artificial
  Probe
aatcattaggttggcaggtatattc

SEQ ID NO: 45054 - DNA, 25 bp, Artificial
  Probe
gaatcattaggttggcaggtatatt

SEQ ID NO: 45055 - DNA, 25 bp, Artificial
  Probe
caagaatcattaggttggcaggtat

SEQ ID NO: 45056 - DNA, 25 bp, Artificial
  Probe
ggttggcaggtatattcataagtga

SEQ ID NO: 45057 - DNA, 25 bp, Artificial
  Probe
cattaggttggcaggtatattcata

SEQ ID NO: 45058 - DNA, 25 bp, Artificial
  Probe
ttaggttggcaggtatattcataag

SEQ ID NO: 45059 - DNA, 25 bp, Artificial
  Probe
attaggttggcaggtatattcataa

SEQ ID NO: 45060 - DNA, 25 bp, Artificial
  Probe
cctggaagtgttatggtagagcata

SEQ ID NO: 45061 - DNA, 25 bp, Artificial
  Probe
attctgttctttcttcctggtagtg

SEQ ID NO: 45062 - DNA, 25 bp, Artificial
  Probe
cattctgttctttcttcctggtagt

SEQ ID NO: 45063 - DNA, 25 bp, Artificial
  Probe
tagacatagaaggctcaatggtgga

SEQ ID NO: 45064 - DNA, 25 bp, Artificial
  Probe
cccgtctcaaatgtttctttaatct

SEQ ID NO: 45065 - DNA, 25 bp, Artificial
  Probe
tcccgtctcaaatgtttctttaatc

SEQ ID NO: 45066 - DNA, 25 bp, Artificial
  Probe
gaaactaactcatcccgtctcaaat

SEQ ID NO: 45067 - DNA, 25 bp, Artificial
  Probe
cgtctcaaatgtttctttaatctgc

SEQ ID NO: 45068 - DNA, 25 bp, Artificial
  Probe
cagtatgtgaaggtttagaggcaaa

SEQ ID NO: 45069 - DNA, 25 bp, Artificial
  Probe
tcatcccgtctcaaatgtttcttta

SEQ ID NO: 45070 - DNA, 25 bp, Artificial
  Probe
catcccgtctcaaatgtttctttaa

SEQ ID NO: 45071 - DNA, 25 bp, Artificial
  Probe
atcccgtctcaaatgtttctttaat

SEQ ID NO: 45072 - DNA, 25 bp, Artificial
  Probe
gctgggagtgctggtatctaatata

SEQ ID NO: 45073 - DNA, 25 bp, Artificial
  Probe
ccgtctcaaatgtttctttaatctg

SEQ ID NO: 45074 - DNA, 25 bp, Artificial
  Probe
aaactaactcatcccgtctcaaatg

SEQ ID NO: 45075 - DNA, 25 bp, Artificial
  Probe
taactcatcccgtctcaaatgtttc

SEQ ID NO: 45076 - DNA, 25 bp, Artificial
  Probe
ctaactcatcccgtctcaaatgttt

SEQ ID NO: 45077 - DNA, 25 bp, Artificial
  Probe
gcattctgttctttcttcctggtag

SEQ ID NO: 45078 - DNA, 25 bp, Artificial
  Probe
gcaagaatcattaggttggcaggta

SEQ ID NO: 45079 - DNA, 25 bp, Artificial
  Probe
ctcatcccgtctcaaatgtttcttt

SEQ ID NO: 45080 - DNA, 25 bp, Artificial
  Probe
ttgacagtatgtgaaggtttagagg

SEQ ID NO: 45081 - DNA, 25 bp, Artificial
  Probe
gggattgacagtatgtgaaggttta

SEQ ID NO: 45082 - DNA, 25 bp, Artificial
  Probe
agaaactaactcatcccgtctcaaa

SEQ ID NO: 45083 - DNA, 25 bp, Artificial
  Probe
ggattgacagtatgtgaaggtttag

SEQ ID NO: 45084 - DNA, 25 bp, Artificial
  Probe
aactaactcatcccgtctcaaatgt

SEQ ID NO: 45085 - DNA, 25 bp, Artificial
  Probe
agacatagaaggctcaatggtggaa

SEQ ID NO: 45086 - DNA, 25 bp, Artificial
  Probe
actaactcatcccgtctcaaatgtt

SEQ ID NO: 45087 - DNA, 25 bp, Artificial
  Probe
ctgggagtgctggtatctaatatac

SEQ ID NO: 45088 - DNA, 25 bp, Artificial
  Probe
attgacagtatgtgaaggtttagag

SEQ ID NO: 45089 - DNA, 25 bp, Artificial
  Probe
gattgacagtatgtgaaggtttaga

SEQ ID NO: 45090 - DNA, 25 bp, Artificial
  Probe
gttggcaggtatattcataagtgaa

SEQ ID NO: 45091 - DNA, 25 bp, Artificial
  Probe
actcatcccgtctcaaatgtttctt

SEQ ID NO: 45092 - DNA, 25 bp, Artificial
  Probe
cccttaaagctaaatgcgttgtaaa

SEQ ID NO: 45093 - DNA, 25 bp, Artificial
  Probe
acccttaaagctaaatgcgttgtaa

SEQ ID NO: 45094 - DNA, 25 bp, Artificial
  Probe
aacccttaaagctaaatgcgttgta

SEQ ID NO: 45095 - DNA, 25 bp, Artificial
  Probe
aatggaaagtgttttgtaatactgc

SEQ ID NO: 45096 - DNA, 25 bp, Artificial
  Probe
gctaaatgcgttgtaaaatattgcc

SEQ ID NO: 45097 - DNA, 25 bp, Artificial
  Probe
ctaaatgcgttgtaaaatattgcca

SEQ ID NO: 45098 - DNA, 25 bp, Artificial
  Probe
tgcgttgtaaaatattgccaaaatg

SEQ ID NO: 45099 - DNA, 25 bp, Artificial
  Probe
agctaaatgcgttgtaaaatattgc

SEQ ID NO: 45100 - DNA, 25 bp, Artificial
  Probe
aatgcgttgtaaaatattgccaaaa

SEQ ID NO: 45101 - DNA, 25 bp, Artificial
  Probe
aaatgcgttgtaaaatattgccaaa

SEQ ID NO: 45102 - DNA, 25 bp, Artificial
  Probe
atgcgttgtaaaatattgccaaaat

SEQ ID NO: 45103 - DNA, 25 bp, Artificial
  Probe
ccttaaagctaaatgcgttgtaaaa

SEQ ID NO: 45104 - DNA, 25 bp, Artificial
  Probe
taaatgcgttgtaaaatattgccaa

SEQ ID NO: 45105 - DNA, 25 bp, Artificial
  Probe
ttcccaacccttaaagctaaatgcg

SEQ ID NO: 45106 - DNA, 25 bp, Artificial
  Probe
atattgccaaaatggaaagtgtttt

SEQ ID NO: 45107 - DNA, 25 bp, Artificial
  Probe
tggaaagtgttttgtaatactgcaa

SEQ ID NO: 45108 - DNA, 25 bp, Artificial
  Probe
atggaaagtgttttgtaatactgca

SEQ ID NO: 45109 - DNA, 25 bp, Artificial
  Probe
ctggggacagttttcctttagaaat

SEQ ID NO: 45110 - DNA, 25 bp, Artificial
  Probe
ggggacagttttcctttagaaatgt

SEQ ID NO: 45111 - DNA, 25 bp, Artificial
  Probe
tggggacagttttcctttagaaatg

SEQ ID NO: 45112 - DNA, 25 bp, Artificial
  Probe
gcgttgtaaaatattgccaaaatgg

SEQ ID NO: 45113 - DNA, 25 bp, Artificial
  Probe
acagttttcctttagaaatgtccat

SEQ ID NO: 45114 - DNA, 25 bp, Artificial
  Probe
cgttgtaaaatattgccaaaatgga

SEQ ID NO: 45115 - DNA, 25 bp, Artificial
  Probe
ggaaagtgttttgtaatactgcaat

SEQ ID NO: 45116 - DNA, 25 bp, Artificial
  Probe
cccaacccttaaagctaaatgcgtt

SEQ ID NO: 45117 - DNA, 25 bp, Artificial
  Probe
aatattgccaaaatggaaagtgttt

SEQ ID NO: 45118 - DNA, 25 bp, Artificial
  Probe
aaatattgccaaaatggaaagtgtt

SEQ ID NO: 45119 - DNA, 25 bp, Artificial
  Probe
aaaatattgccaaaatggaaagtgt

SEQ ID NO: 45120 - DNA, 25 bp, Artificial
  Probe
cagttttcctttagaaatgtccatt

SEQ ID NO: 45121 - DNA, 25 bp, Artificial
  Probe
tatggaggcaaaatgggaggaagaa

SEQ ID NO: 45122 - DNA, 25 bp, Artificial
  Probe
aagctaaatgcgttgtaaaatattg

SEQ ID NO: 45123 - DNA, 25 bp, Artificial
  Probe
cttaaagctaaatgcgttgtaaaat

SEQ ID NO: 45124 - DNA, 25 bp, Artificial
  Probe
aaatggaaagtgttttgtaatactg

SEQ ID NO: 45125 - DNA, 25 bp, Artificial
  Probe
caacccttaaagctaaatgcgttgt

SEQ ID NO: 45126 - DNA, 25 bp, Artificial
  Probe
tcccaacccttaaagctaaatgcgt

SEQ ID NO: 45127 - DNA, 25 bp, Artificial
  Probe
ggaggcaaaatgggaggaagaaatg

SEQ ID NO: 45128 - DNA, 25 bp, Artificial
  Probe
ctatggaggcaaaatgggaggaaga

SEQ ID NO: 45129 - DNA, 25 bp, Artificial
  Probe
gttgtaaaatattgccaaaatggaa

SEQ ID NO: 45130 - DNA, 25 bp, Artificial
  Probe
aaagctaaatgcgttgtaaaatatt

SEQ ID NO: 45131 - DNA, 25 bp, Artificial
  Probe
atactgcaataaaagctgcttgttt

SEQ ID NO: 45132 - DNA, 25 bp, Artificial
  Probe
aatactgcaataaaagctgcttgtt

SEQ ID NO: 45133 - DNA, 25 bp, Artificial
  Probe
tactgcaataaaagctgcttgtttt

SEQ ID NO: 45134 - DNA, 25 bp, Artificial
  Probe
taatactgcaataaaagctgcttgt

SEQ ID NO: 45135 - DNA, 25 bp, Artificial
  Probe
tgtaatactgcaataaaagctgctt

SEQ ID NO: 45136 - DNA, 25 bp, Artificial
  Probe
ttgtaatactgcaataaaagctgct

SEQ ID NO: 45137 - DNA, 25 bp, Artificial
  Probe
cagagatggttaggtaaatggatgc

SEQ ID NO: 45138 - DNA, 25 bp, Artificial
  Probe
agagatggttaggtaaatggatgcc

SEQ ID NO: 45139 - DNA, 25 bp, Artificial
  Probe
gtagtcctaagcccaagatttcctg

SEQ ID NO: 45140 - DNA, 25 bp, Artificial
  Probe
ccagagatggttaggtaaatggatg

SEQ ID NO: 45141 - DNA, 25 bp, Artificial
  Probe
agatttcctggttcaagaatggctt

SEQ ID NO: 45142 - DNA, 25 bp, Artificial
  Probe
aagatttcctggttcaagaatggct

SEQ ID NO: 45143 - DNA, 25 bp, Artificial
  Probe
caagatttcctggttcaagaatggc

SEQ ID NO: 45144 - DNA, 25 bp, Artificial
  Probe
cccagagatggttaggtaaatggat

SEQ ID NO: 45145 - DNA, 25 bp, Artificial
  Probe
ctcatggtggctcattgtgtaagag

SEQ ID NO: 45146 - DNA, 25 bp, Artificial
  Probe
ccaagatttcctggttcaagaatgg

SEQ ID NO: 45147 - DNA, 25 bp, Artificial
  Probe
cccaagatttcctggttcaagaatg

SEQ ID NO: 45148 - DNA, 25 bp, Artificial
  Probe
gagatggttaggtaaatggatgcca

SEQ ID NO: 45149 - DNA, 25 bp, Artificial
  Probe
ggtagtcctaagcccaagatttcct

SEQ ID NO: 45150 - DNA, 25 bp, Artificial
  Probe
gttaacattgggagcataaagtgtg

SEQ ID NO: 45151 - DNA, 25 bp, Artificial
  Probe
taagcccaagatttcctggttcaag

SEQ ID NO: 45152 - DNA, 25 bp, Artificial
  Probe
ctaagcccaagatttcctggttcaa

SEQ ID NO: 45153 - DNA, 25 bp, Artificial
  Probe
ataaagtgtgcgtgcctcagaaatg

SEQ ID NO: 45154 - DNA, 25 bp, Artificial
  Probe
cataaagtgtgcgtgcctcagaaat

SEQ ID NO: 45155 - DNA, 25 bp, Artificial
  Probe
cctcatggtggctcattgtgtaaga

SEQ ID NO: 45156 - DNA, 25 bp, Artificial
  Probe
ttaacattgggagcataaagtgtgc

SEQ ID NO: 45157 - DNA, 25 bp, Artificial
  Probe
gcccaagatttcctggttcaagaat

SEQ ID NO: 45158 - DNA, 25 bp, Artificial
  Probe
tagtcctaagcccaagatttcctgg

SEQ ID NO: 45159 - DNA, 25 bp, Artificial
  Probe
ctccccagagatggttaggtaaatg

SEQ ID NO: 45160 - DNA, 25 bp, Artificial
  Probe
tcctaagcccaagatttcctggttc

SEQ ID NO: 45161 - DNA, 25 bp, Artificial
  Probe
agcccaagatttcctggttcaagaa

SEQ ID NO: 45162 - DNA, 25 bp, Artificial
  Probe
aagcccaagatttcctggttcaaga

SEQ ID NO: 45163 - DNA, 25 bp, Artificial
  Probe
cctaagcccaagatttcctggttca

SEQ ID NO: 45164 - DNA, 25 bp, Artificial
  Probe
gtcctaagcccaagatttcctggtt

SEQ ID NO: 45165 - DNA, 25 bp, Artificial
  Probe
taacattgggagcataaagtgtgcg

SEQ ID NO: 45166 - DNA, 25 bp, Artificial
  Probe
ccccagagatggttaggtaaatgga

SEQ ID NO: 45167 - DNA, 25 bp, Artificial
  Probe
tccccagagatggttaggtaaatgg

SEQ ID NO: 45168 - DNA, 25 bp, Artificial
  Probe
catgttctgcaagcagggagtattg

SEQ ID NO: 45169 - DNA, 25 bp, Artificial
  Probe
atgttctgcaagcagggagtattga

SEQ ID NO: 45170 - DNA, 25 bp, Artificial
  Probe
gctccccagagatggttaggtaaat

SEQ ID NO: 45171 - DNA, 25 bp, Artificial
  Probe
gggtagtcctaagcccaagatttcc

SEQ ID NO: 45172 - DNA, 25 bp, Artificial
  Probe
agaaactgatgtcacagctcccaag

SEQ ID NO: 45173 - DNA, 25 bp, Artificial
  Probe
cagaaactgatgtcacagctcccaa

SEQ ID NO: 45174 - DNA, 25 bp, Artificial
  Probe
tgttctgcaagcagggagtattgac

SEQ ID NO: 45175 - DNA, 25 bp, Artificial
  Probe
agtattgaccctggagatcaggaag

SEQ ID NO: 45176 - DNA, 25 bp, Artificial
  Probe
gagtattgaccctggagatcaggaa

SEQ ID NO: 45177 - DNA, 25 bp, Artificial
  Probe
ggggtagtcctaagcccaagatttc

SEQ ID NO: 45178 - DNA, 25 bp, Artificial
  Probe
gtattgaccctggagatcaggaagc

SEQ ID NO: 45179 - DNA, 25 bp, Artificial
  Probe
ggagtattgaccctggagatcagga

SEQ ID NO: 45180 - DNA, 25 bp, Artificial
  Probe
ctactgaagaagacacctaacactg

SEQ ID NO: 45181 - DNA, 25 bp, Artificial
  Probe
tactgaagaagacacctaacactga

SEQ ID NO: 45182 - DNA, 25 bp, Artificial
  Probe
attgcgactcataggtagagaacta

SEQ ID NO: 45183 - DNA, 25 bp, Artificial
  Probe
tgcgactcataggtagagaactata

SEQ ID NO: 45184 - DNA, 25 bp, Artificial
  Probe
ttgcgactcataggtagagaactat

SEQ ID NO: 45185 - DNA, 25 bp, Artificial
  Probe
gctactgaagaagacacctaacact

SEQ ID NO: 45186 - DNA, 25 bp, Artificial
  Probe
gaattgcgactcataggtagagaac

SEQ ID NO: 45187 - DNA, 25 bp, Artificial
  Probe
actgaagaagacacctaacactgac

SEQ ID NO: 45188 - DNA, 25 bp, Artificial
  Probe
gcgactcataggtagagaactataa

SEQ ID NO: 45189 - DNA, 25 bp, Artificial
  Probe
aagacacctaacactgaccttctag

SEQ ID NO: 45190 - DNA, 25 bp, Artificial
  Probe
aattgcgactcataggtagagaact

SEQ ID NO: 45191 - DNA, 25 bp, Artificial
  Probe
taacactgaccttctagtctcctta

SEQ ID NO: 45192 - DNA, 25 bp, Artificial
  Probe
gaagaagacacctaacactgacctt

SEQ ID NO: 45193 - DNA, 25 bp, Artificial
  Probe
aacactgaccttctagtctccttag

SEQ ID NO: 45194 - DNA, 25 bp, Artificial
  Probe
ctaacactgaccttctagtctcctt

SEQ ID NO: 45195 - DNA, 25 bp, Artificial
  Probe
ggaattgcgactcataggtagagaa

SEQ ID NO: 45196 - DNA, 25 bp, Artificial
  Probe
aaggaattgcgactcataggtagag

SEQ ID NO: 45197 - DNA, 25 bp, Artificial
  Probe
ctgaagaagacacctaacactgacc

SEQ ID NO: 45198 - DNA, 25 bp, Artificial
  Probe
cactgaccttctagtctccttagag

SEQ ID NO: 45199 - DNA, 25 bp, Artificial
  Probe
gagagctactgaagaagacacctaa

SEQ ID NO: 45200 - DNA, 25 bp, Artificial
  Probe
agagctactgaagaagacacctaac

SEQ ID NO: 45201 - DNA, 25 bp, Artificial
  Probe
cacctaacactgaccttctagtctc

SEQ ID NO: 45202 - DNA, 25 bp, Artificial
  Probe
agacacctaacactgaccttctagt

SEQ ID NO: 45203 - DNA, 25 bp, Artificial
  Probe
gagctactgaagaagacacctaaca

SEQ ID NO: 45204 - DNA, 25 bp, Artificial
  Probe
acactgaccttctagtctccttaga

SEQ ID NO: 45205 - DNA, 25 bp, Artificial
  Probe
gacacctaacactgaccttctagtc

SEQ ID NO: 45206 - DNA, 25 bp, Artificial
  Probe
tgcttctcaaccttcctaatgcttc

SEQ ID NO: 45207 - DNA, 25 bp, Artificial
  Probe
tgaagaagacacctaacactgacct

SEQ ID NO: 45208 - DNA, 25 bp, Artificial
  Probe
aggaattgcgactcataggtagaga

SEQ ID NO: 45209 - DNA, 25 bp, Artificial
  Probe
agctactgaagaagacacctaacac

SEQ ID NO: 45210 - DNA, 25 bp, Artificial
  Probe
cgactctttaacacagttcttcatt

SEQ ID NO: 45211 - DNA, 25 bp, Artificial
  Probe
acacctaacactgaccttctagtct

SEQ ID NO: 45212 - DNA, 25 bp, Artificial
  Probe
gtgcttctcaaccttcctaatgctt

SEQ ID NO: 45213 - DNA, 25 bp, Artificial
  Probe
cctaacactgaccttctagtctcct

SEQ ID NO: 45214 - DNA, 25 bp, Artificial
  Probe
aaaggaattgcgactcataggtaga

SEQ ID NO: 45215 - DNA, 25 bp, Artificial
  Probe
ccagtgcttctcaaccttcctaatg

SEQ ID NO: 45216 - DNA, 25 bp, Artificial
  Probe
caaaggaattgcgactcataggtag

SEQ ID NO: 45217 - DNA, 25 bp, Artificial
  Probe
acctaacactgaccttctagtctcc

SEQ ID NO: 45218 - DNA, 25 bp, Artificial
  Probe
cttctcaaccttcctaatgcttcga

SEQ ID NO: 45219 - DNA, 25 bp, Artificial
  Probe
accagtgcttctcaaccttcctaat

SEQ ID NO: 45220 - DNA, 25 bp, Artificial
  Probe
ggagagctactgaagaagacaccta

SEQ ID NO: 45221 - DNA, 25 bp, Artificial
  Probe
cgactcataggtagagaactataat

SEQ ID NO: 45222 - DNA, 25 bp, Artificial
  Probe
actctttaacacagttcttcatttg

SEQ ID NO: 45223 - DNA, 25 bp, Artificial
  Probe
ctaatgcttcgactctttaacacag

SEQ ID NO: 45224 - DNA, 25 bp, Artificial
  Probe
ttcctaatgcttcgactctttaaca

SEQ ID NO: 45225 - DNA, 25 bp, Artificial
  Probe
aggacgagatgatgaagagaaacat

SEQ ID NO: 45226 - DNA, 25 bp, Artificial
  Probe
ctgaggacgagatgatgaagagaaa

SEQ ID NO: 45227 - DNA, 25 bp, Artificial
  Probe
cctgaggacgagatgatgaagagaa

SEQ ID NO: 45228 - DNA, 25 bp, Artificial
  Probe
gaggacgagatgatgaagagaaaca

SEQ ID NO: 45229 - DNA, 25 bp, Artificial
  Probe
tgaggacgagatgatgaagagaaac

SEQ ID NO: 45230 - DNA, 25 bp, Artificial
  Probe
gacgagatgatgaagagaaacatgg

SEQ ID NO: 45231 - DNA, 25 bp, Artificial
  Probe
ggacgagatgatgaagagaaacatg

SEQ ID NO: 45232 - DNA, 25 bp, Artificial
  Probe
cacctaccttctgaaacatcctgag

SEQ ID NO: 45233 - DNA, 25 bp, Artificial
  Probe
cacacctaccttctgaaacatcctg

SEQ ID NO: 45234 - DNA, 25 bp, Artificial
  Probe
acacctaccttctgaaacatcctga

SEQ ID NO: 45235 - DNA, 25 bp, Artificial
  Probe
ctcacacctaccttctgaaacatcc

SEQ ID NO: 45236 - DNA, 25 bp, Artificial
  Probe
acgagatgatgaagagaaacatggg

SEQ ID NO: 45237 - DNA, 25 bp, Artificial
  Probe
atcctgaggacgagatgatgaagag

SEQ ID NO: 45238 - DNA, 25 bp, Artificial
  Probe
tcacacctaccttctgaaacatcct

SEQ ID NO: 45239 - DNA, 25 bp, Artificial
  Probe
gctcacacctaccttctgaaacatc

SEQ ID NO: 45240 - DNA, 25 bp, Artificial
  Probe
ctaccttctgaaacatcctgaggac

SEQ ID NO: 45241 - DNA, 25 bp, Artificial
  Probe
acctaccttctgaaacatcctgagg

SEQ ID NO: 45242 - DNA, 25 bp, Artificial
  Probe
tcctgaggacgagatgatgaagaga

SEQ ID NO: 45243 - DNA, 25 bp, Artificial
  Probe
aacatcctgaggacgagatgatgaa

SEQ ID NO: 45244 - DNA, 25 bp, Artificial
  Probe
catcctgaggacgagatgatgaaga

SEQ ID NO: 45245 - DNA, 25 bp, Artificial
  Probe
ttctgaaacatcctgaggacgagat

SEQ ID NO: 45246 - DNA, 25 bp, Artificial
  Probe
cctaccttctgaaacatcctgagga

SEQ ID NO: 45247 - DNA, 25 bp, Artificial
  Probe
gagatgatgaagagaaacatggggt

SEQ ID NO: 45248 - DNA, 25 bp, Artificial
  Probe
acatcctgaggacgagatgatgaag

SEQ ID NO: 45249 - DNA, 25 bp, Artificial
  Probe
cttctgaaacatcctgaggacgaga

SEQ ID NO: 45250 - DNA, 25 bp, Artificial
  Probe
taccttctgaaacatcctgaggacg

SEQ ID NO: 45251 - DNA, 25 bp, Artificial
  Probe
cgctcacacctaccttctgaaacat

SEQ ID NO: 45252 - DNA, 25 bp, Artificial
  Probe
gaaacatcctgaggacgagatgatg

SEQ ID NO: 45253 - DNA, 25 bp, Artificial
  Probe
cgagatgatgaagagaaacatgggg

SEQ ID NO: 45254 - DNA, 25 bp, Artificial
  Probe
aaacatcctgaggacgagatgatga

SEQ ID NO: 45255 - DNA, 25 bp, Artificial
  Probe
tgaaacatcctgaggacgagatgat

SEQ ID NO: 45256 - DNA, 25 bp, Artificial
  Probe
ccttctgaaacatcctgaggacgag

SEQ ID NO: 45257 - DNA, 25 bp, Artificial
  Probe
ctgaaacatcctgaggacgagatga

SEQ ID NO: 45258 - DNA, 25 bp, Artificial
  Probe
tctgaaacatcctgaggacgagatg

SEQ ID NO: 45259 - DNA, 25 bp, Artificial
  Probe
ccagtctgtttccttcaccttattt

SEQ ID NO: 45260 - DNA, 25 bp, Artificial
  Probe
cagtctgtttccttcaccttattta

SEQ ID NO: 45261 - DNA, 25 bp, Artificial
  Probe
tgtttccttcaccttatttatttgc

SEQ ID NO: 45262 - DNA, 25 bp, Artificial
  Probe
tccagtctgtttccttcaccttatt

SEQ ID NO: 45263 - DNA, 25 bp, Artificial
  Probe
agattctttgatccaggaaatgtga

SEQ ID NO: 45264 - DNA, 25 bp, Artificial
  Probe
gattctttgatccaggaaatgtgac

SEQ ID NO: 45265 - DNA, 25 bp, Artificial
  Probe
cagattctttgatccaggaaatgtg

SEQ ID NO: 45266 - DNA, 25 bp, Artificial
  Probe
ctccagtctgtttccttcaccttat

SEQ ID NO: 45267 - DNA, 25 bp, Artificial
  Probe
attctttgatccaggaaatgtgacc

SEQ ID NO: 45268 - DNA, 25 bp, Artificial
  Probe
agtctgtttccttcaccttatttat

SEQ ID NO: 45269 - DNA, 25 bp, Artificial
  Probe
gcagattctttgatccaggaaatgt

SEQ ID NO: 45270 - DNA, 25 bp, Artificial
  Probe
gtctgtttccttcaccttatttatt

SEQ ID NO: 45271 - DNA, 25 bp, Artificial
  Probe
ggcagattctttgatccaggaaatg

SEQ ID NO: 45272 - DNA, 25 bp, Artificial
  Probe
ccttcaccttatttatttgcatgga

SEQ ID NO: 45273 - DNA, 25 bp, Artificial
  Probe
tccttcaccttatttatttgcatgg

SEQ ID NO: 45274 - DNA, 25 bp, Artificial
  Probe
cacctcagttgatgctgctagattc

SEQ ID NO: 45275 - DNA, 25 bp, Artificial
  Probe
ttcggactgcttactctagtgtttc

SEQ ID NO: 45276 - DNA, 25 bp, Artificial
  Probe
cttcggactgcttactctagtgttt

SEQ ID NO: 45277 - DNA, 25 bp, Artificial
  Probe
ccttcggactgcttactctagtgtt

SEQ ID NO: 45278 - DNA, 25 bp, Artificial
  Probe
cttcaccttatttatttgcatggag

SEQ ID NO: 45279 - DNA, 25 bp, Artificial
  Probe
gactgcttactctagtgtttctcgg

SEQ ID NO: 45280 - DNA, 25 bp, Artificial
  Probe
ggactgcttactctagtgtttctcg

SEQ ID NO: 45281 - DNA, 25 bp, Artificial
  Probe
cggactgcttactctagtgtttctc

SEQ ID NO: 45282 - DNA, 25 bp, Artificial
  Probe
tttgtgactttactgttggcaactg

SEQ ID NO: 45283 - DNA, 25 bp, Artificial
  Probe
gtttgtgactttactgttggcaact

SEQ ID NO: 45284 - DNA, 25 bp, Artificial
  Probe
gacctgggtttgtgactttactgtt

SEQ ID NO: 45285 - DNA, 25 bp, Artificial
  Probe
gtttccttcaccttatttatttgca

SEQ ID NO: 45286 - DNA, 25 bp, Artificial
  Probe
cttactctagtgtttctcgggacct

SEQ ID NO: 45287 - DNA, 25 bp, Artificial
  Probe
ctgtttccttcaccttatttatttg

SEQ ID NO: 45288 - DNA, 25 bp, Artificial
  Probe
ttccttcaccttatttatttgcatg

SEQ ID NO: 45289 - DNA, 25 bp, Artificial
  Probe
ctttgatccaggaaatgtgacccta

SEQ ID NO: 45290 - DNA, 25 bp, Artificial
  Probe
tctgtttccttcaccttatttattt

SEQ ID NO: 45291 - DNA, 25 bp, Artificial
  Probe
ttctttgatccaggaaatgtgaccc

SEQ ID NO: 45292 - DNA, 25 bp, Artificial
  Probe
ttcaccttatttatttgcatggagg

SEQ ID NO: 45293 - DNA, 25 bp, Artificial
  Probe
ttgggaatgttttggtctttctttt

SEQ ID NO: 45294 - DNA, 25 bp, Artificial
  Probe
tttgggaatgttttggtctttcttt

SEQ ID NO: 45295 - DNA, 25 bp, Artificial
  Probe
ttttgggaatgttttggtctttctt

SEQ ID NO: 45296 - DNA, 25 bp, Artificial
  Probe
atgggagaattttgggaatgttttg

SEQ ID NO: 45297 - DNA, 25 bp, Artificial
  Probe
ttactctagtgtttctcgggacctg

SEQ ID NO: 45298 - DNA, 25 bp, Artificial
  Probe
tcggactgcttactctagtgtttct

SEQ ID NO: 45299 - DNA, 25 bp, Artificial
  Probe
attttgggaatgttttggtctttct

SEQ ID NO: 45300 - DNA, 25 bp, Artificial
  Probe
gggaatgttttggtctttcttttgt

SEQ ID NO: 45301 - DNA, 25 bp, Artificial
  Probe
tgggaatgttttggtctttcttttg

SEQ ID NO: 45302 - DNA, 25 bp, Artificial
  Probe
gggcagattctttgatccaggaaat

SEQ ID NO: 45303 - DNA, 25 bp, Artificial
  Probe
acctgggtttgtgactttactgttg

SEQ ID NO: 45304 - DNA, 25 bp, Artificial
  Probe
tctgttcttaactaccatgattgct

SEQ ID NO: 45305 - DNA, 25 bp, Artificial
  Probe
ctctgttcttaactaccatgattgc

SEQ ID NO: 45306 - DNA, 25 bp, Artificial
  Probe
ctgttcttaactaccatgattgctt

SEQ ID NO: 45307 - DNA, 25 bp, Artificial
  Probe
gtgtctgaatctcatctcactagag

SEQ ID NO: 45308 - DNA, 25 bp, Artificial
  Probe
actctgttcttaactaccatgattg

SEQ ID NO: 45309 - DNA, 25 bp, Artificial
  Probe
aactctgttcttaactaccatgatt

SEQ ID NO: 45310 - DNA, 25 bp, Artificial
  Probe
cagaacctaccatgtgtcaaacttt

SEQ ID NO: 45311 - DNA, 25 bp, Artificial
  Probe
tgttcttaactaccatgattgcttt

SEQ ID NO: 45312 - DNA, 25 bp, Artificial
  Probe
taatttaaactcgttctcatgccac

SEQ ID NO: 45313 - DNA, 25 bp, Artificial
  Probe
ttaatttaaactcgttctcatgcca

SEQ ID NO: 45314 - DNA, 25 bp, Artificial
  Probe
cacaacctctttacggaaacagaac

SEQ ID NO: 45315 - DNA, 25 bp, Artificial
  Probe
atttaaactcgttctcatgccacaa

SEQ ID NO: 45316 - DNA, 25 bp, Artificial
  Probe
aatttaaactcgttctcatgccaca

SEQ ID NO: 45317 - DNA, 25 bp, Artificial
  Probe
aaacagaacctaccatgtgtcaaac

SEQ ID NO: 45318 - DNA, 25 bp, Artificial
  Probe
aaactctgttcttaactaccatgat

SEQ ID NO: 45319 - DNA, 25 bp, Artificial
  Probe
tgtctgaatctcatctcactagaga

SEQ ID NO: 45320 - DNA, 25 bp, Artificial
  Probe
attaatttaaactcgttctcatgcc

SEQ ID NO: 45321 - DNA, 25 bp, Artificial
  Probe
aattggcctcttaccataatgactc

SEQ ID NO: 45322 - DNA, 25 bp, Artificial
  Probe
ccacaacctctttacggaaacagaa

SEQ ID NO: 45323 - DNA, 25 bp, Artificial
  Probe
acagaacctaccatgtgtcaaactt

SEQ ID NO: 45324 - DNA, 25 bp, Artificial
  Probe
aacagaacctaccatgtgtcaaact

SEQ ID NO: 45325 - DNA, 25 bp, Artificial
  Probe
gcctcttaccataatgactcaaaac

SEQ ID NO: 45326 - DNA, 25 bp, Artificial
  Probe
tttaaactcgttctcatgccacaac

SEQ ID NO: 45327 - DNA, 25 bp, Artificial
  Probe
attggcctcttaccataatgactca

SEQ ID NO: 45328 - DNA, 25 bp, Artificial
  Probe
acaacctctttacggaaacagaacg

SEQ ID NO: 45329 - DNA, 25 bp, Artificial
  Probe
accataatgactcaaaactctgttc

SEQ ID NO: 45330 - DNA, 25 bp, Artificial
  Probe
ccataatgactcaaaactctgttct

SEQ ID NO: 45331 - DNA, 25 bp, Artificial
  Probe
ttggcctcttaccataatgactcaa

SEQ ID NO: 45332 - DNA, 25 bp, Artificial
  Probe
gattaatttaaactcgttctcatgc

SEQ ID NO: 45333 - DNA, 25 bp, Artificial
  Probe
cctcttaccataatgactcaaaact

SEQ ID NO: 45334 - DNA, 25 bp, Artificial
  Probe
ctcaaaactctgttcttaactacca

SEQ ID NO: 45335 - DNA, 25 bp, Artificial
  Probe
actcaaaactctgttcttaactacc

SEQ ID NO: 45336 - DNA, 25 bp, Artificial
  Probe
agtgtctgaatctcatctcactaga

SEQ ID NO: 45337 - DNA, 25 bp, Artificial
  Probe
cagtgtctgaatctcatctcactag

SEQ ID NO: 45338 - DNA, 25 bp, Artificial
  Probe
ttaactaccatgattgcttttgagg

SEQ ID NO: 45339 - DNA, 25 bp, Artificial
  Probe
agaacctaccatgtgtcaaactttt

SEQ ID NO: 45340 - DNA, 25 bp, Artificial
  Probe
ttaccataatgactcaaaactctgt

SEQ ID NO: 45341 - DNA, 25 bp, Artificial
  Probe
taactaccatgattgcttttgaggg

SEQ ID NO: 45342 - DNA, 25 bp, Artificial
  Probe
atgactcaaaactctgttcttaact

SEQ ID NO: 45343 - DNA, 25 bp, Artificial
  Probe
tcaaaactctgttcttaactaccat

SEQ ID NO: 45344 - DNA, 25 bp, Artificial
  Probe
tcttaactaccatgattgcttttga

SEQ ID NO: 45345 - DNA, 25 bp, Artificial
  Probe
taccataatgactcaaaactctgtt

SEQ ID NO: 45346 - DNA, 25 bp, Artificial
  Probe
cttaactaccatgattgcttttgag

SEQ ID NO: 45347 - DNA, 25 bp, Artificial
  Probe
cttaccataatgactcaaaactctg

SEQ ID NO: 45348 - DNA, 25 bp, Artificial
  Probe
tcttaccataatgactcaaaactct

SEQ ID NO: 45349 - DNA, 25 bp, Artificial
  Probe
agaagtcaagactctttatggatgc

SEQ ID NO: 45350 - DNA, 25 bp, Artificial
  Probe
tgagaagtcaagactctttatggat

SEQ ID NO: 45351 - DNA, 25 bp, Artificial
  Probe
atgagaagtcaagactctttatgga

SEQ ID NO: 45352 - DNA, 25 bp, Artificial
  Probe
gagaagtcaagactctttatggatg

SEQ ID NO: 45353 - DNA, 25 bp, Artificial
  Probe
gaagtcaagactctttatggatgca

SEQ ID NO: 45354 - DNA, 25 bp, Artificial
  Probe
aagtcaagactctttatggatgcac

SEQ ID NO: 45355 - DNA, 25 bp, Artificial
  Probe
gtcaagactctttatggatgcacag

SEQ ID NO: 45356 - DNA, 25 bp, Artificial
  Probe
agtcaagactctttatggatgcaca

SEQ ID NO: 45357 - DNA, 25 bp, Artificial
  Probe
tcaagactctttatggatgcacagc

SEQ ID NO: 45358 - DNA, 25 bp, Artificial
  Probe
aagactctttatggatgcacagcac

SEQ ID NO: 45359 - DNA, 25 bp, Artificial
  Probe
caagactctttatggatgcacagca

SEQ ID NO: 45360 - DNA, 25 bp, Artificial
  Probe
actctttatggatgcacagcacaag

SEQ ID NO: 45361 - DNA, 25 bp, Artificial
  Probe
gactctttatggatgcacagcacaa

SEQ ID NO: 45362 - DNA, 25 bp, Artificial
  Probe
agactctttatggatgcacagcaca

SEQ ID NO: 45363 - DNA, 25 bp, Artificial
  Probe
ctctttatggatgcacagcacaagc

SEQ ID NO: 45364 - DNA, 25 bp, Artificial
  Probe
gtaagataagtgagagaagtgtggt

SEQ ID NO: 45365 - DNA, 25 bp, Artificial
  Probe
tgtaagataagtgagagaagtgtgg

SEQ ID NO: 45366 - DNA, 25 bp, Artificial
  Probe
aagataagtgagagaagtgtggtta

SEQ ID NO: 45367 - DNA, 25 bp, Artificial
  Probe
taagataagtgagagaagtgtggtt

SEQ ID NO: 45368 - DNA, 25 bp, Artificial
  Probe
gagaagtgtggttatatcagagaga

SEQ ID NO: 45369 - DNA, 25 bp, Artificial
  Probe
agagaagtgtggttatatcagagag

SEQ ID NO: 45370 - DNA, 25 bp, Artificial
  Probe
gagagaagtgtggttatatcagaga

SEQ ID NO: 45371 - DNA, 25 bp, Artificial
  Probe
gtgtggttatatcagagagaattgg

SEQ ID NO: 45372 - DNA, 25 bp, Artificial
  Probe
agaagtgtggttatatcagagagaa

SEQ ID NO: 45373 - DNA, 25 bp, Artificial
  Probe
gtgagagaagtgtggttatatcaga

SEQ ID NO: 45374 - DNA, 25 bp, Artificial
  Probe
agtgagagaagtgtggttatatcag

SEQ ID NO: 45375 - DNA, 25 bp, Artificial
  Probe
agataagtgagagaagtgtggttat

SEQ ID NO: 45376 - DNA, 25 bp, Artificial
  Probe
tgagagaagtgtggttatatcagag

SEQ ID NO: 45377 - DNA, 25 bp, Artificial
  Probe
aagtgagagaagtgtggttatatca

SEQ ID NO: 45378 - DNA, 25 bp, Artificial
  Probe
ttgtaagataagtgagagaagtgtg

SEQ ID NO: 45379 - DNA, 25 bp, Artificial
  Probe
gttgtaagataagtgagagaagtgt

SEQ ID NO: 45380 - DNA, 25 bp, Artificial
  Probe
agttgtaagataagtgagagaagtg

SEQ ID NO: 45381 - DNA, 25 bp, Artificial
  Probe
agtgtggttatatcagagagaattg

SEQ ID NO: 45382 - DNA, 25 bp, Artificial
  Probe
gaagtgtggttatatcagagagaat

SEQ ID NO: 45383 - DNA, 25 bp, Artificial
  Probe
attaagtaacaccgtcactgaggaa

SEQ ID NO: 45384 - DNA, 25 bp, Artificial
  Probe
taagtgagagaagtgtggttatatc

SEQ ID NO: 45385 - DNA, 25 bp, Artificial
  Probe
attcggaataagagctagagtgtag

SEQ ID NO: 45386 - DNA, 25 bp, Artificial
  Probe
aagttgtaagataagtgagagaagt

SEQ ID NO: 45387 - DNA, 25 bp, Artificial
  Probe
gtattcggaataagagctagagtgt

SEQ ID NO: 45388 - DNA, 25 bp, Artificial
  Probe
ggtattcggaataagagctagagtg

SEQ ID NO: 45389 - DNA, 25 bp, Artificial
  Probe
aagtgtggttatatcagagagaatt

SEQ ID NO: 45390 - DNA, 25 bp, Artificial
  Probe
gataagtgagagaagtgtggttata

SEQ ID NO: 45391 - DNA, 25 bp, Artificial
  Probe
caagttgtaagataagtgagagaag

SEQ ID NO: 45392 - DNA, 25 bp, Artificial
  Probe
tgtggttatatcagagagaattggg

SEQ ID NO: 45393 - DNA, 25 bp, Artificial
  Probe
aaatcatttgtccagaagtgtgttt

SEQ ID NO: 45394 - DNA, 25 bp, Artificial
  Probe
aatcatttgtccagaagtgtgtttc

SEQ ID NO: 45395 - DNA, 25 bp, Artificial
  Probe
tcaagttgtaagataagtgagagaa

SEQ ID NO: 45396 - DNA, 25 bp, Artificial
  Probe
ttcaagttgtaagataagtgagaga

SEQ ID NO: 45397 - DNA, 25 bp, Artificial
  Probe
tattcggaataagagctagagtgta

SEQ ID NO: 45398 - DNA, 25 bp, Artificial
  Probe
gcttctctgttacatcatttcaagt

SEQ ID NO: 45399 - DNA, 25 bp, Artificial
  Probe
atcatttgtccagaagtgtgtttca

SEQ ID NO: 45400 - DNA, 25 bp, Artificial
  Probe
aatgacttcctaccaatttcaatgc

SEQ ID NO: 45401 - DNA, 25 bp, Artificial
  Probe
ataagtgagagaagtgtggttatat

SEQ ID NO: 45402 - DNA, 25 bp, Artificial
  Probe
tctaacccgatctttccaattcata

SEQ ID NO: 45403 - DNA, 25 bp, Artificial
  Probe
ctaacccgatctttccaattcatag

SEQ ID NO: 45404 - DNA, 25 bp, Artificial
  Probe
gtctaacccgatctttccaattcat

SEQ ID NO: 45405 - DNA, 25 bp, Artificial
  Probe
tcatttgtccagaagtgtgtttcag

SEQ ID NO: 45406 - DNA, 25 bp, Artificial
  Probe
taacccgatctttccaattcataga

SEQ ID NO: 45407 - DNA, 25 bp, Artificial
  Probe
gtgtctaacccgatctttccaattc

SEQ ID NO: 45408 - DNA, 25 bp, Artificial
  Probe
ttaagtaacaccgtcactgaggaaa

SEQ ID NO: 45409 - DNA, 25 bp, Artificial
  Probe
atttatttggttaccttcctgttcc

SEQ ID NO: 45410 - DNA, 25 bp, Artificial
  Probe
tttatttggttaccttcctgttcca

SEQ ID NO: 45411 - DNA, 25 bp, Artificial
  Probe
tatttatttggttaccttcctgttc

SEQ ID NO: 45412 - DNA, 25 bp, Artificial
  Probe
tgtacctaagacagaaaggcagttc

SEQ ID NO: 45413 - DNA, 25 bp, Artificial
  Probe
gtgtacctaagacagaaaggcagtt

SEQ ID NO: 45414 - DNA, 25 bp, Artificial
  Probe
ctggaagtccgatgttttaatgtat

SEQ ID NO: 45415 - DNA, 25 bp, Artificial
  Probe
cctggaagtccgatgttttaatgta

SEQ ID NO: 45416 - DNA, 25 bp, Artificial
  Probe
ttatttatttggttaccttcctgtt

SEQ ID NO: 45417 - DNA, 25 bp, Artificial
  Probe
tttatttatttggttaccttcctgt

SEQ ID NO: 45418 - DNA, 25 bp, Artificial
  Probe
tggaagtccgatgttttaatgtatt

SEQ ID NO: 45419 - DNA, 25 bp, Artificial
  Probe
gtacctaagacagaaaggcagttcc

SEQ ID NO: 45420 - DNA, 25 bp, Artificial
  Probe
ccccagggttttattatcatgttct

SEQ ID NO: 45421 - DNA, 25 bp, Artificial
  Probe
ggaagtccgatgttttaatgtattt

SEQ ID NO: 45422 - DNA, 25 bp, Artificial
  Probe
tgtgtacctaagacagaaaggcagt

SEQ ID NO: 45423 - DNA, 25 bp, Artificial
  Probe
cccagggttttattatcatgttctg

SEQ ID NO: 45424 - DNA, 25 bp, Artificial
  Probe
ccagggttttattatcatgttctgt

SEQ ID NO: 45425 - DNA, 25 bp, Artificial
  Probe
agggttttattatcatgttctgtct

SEQ ID NO: 45426 - DNA, 25 bp, Artificial
  Probe
tacctaagacagaaaggcagttccg

SEQ ID NO: 45427 - DNA, 25 bp, Artificial
  Probe
gagcctggaagtccgatgttttaat

SEQ ID NO: 45428 - DNA, 25 bp, Artificial
  Probe
gggttttattatcatgttctgtctt

SEQ ID NO: 45429 - DNA, 25 bp, Artificial
  Probe
cagggttttattatcatgttctgtc

SEQ ID NO: 45430 - DNA, 25 bp, Artificial
  Probe
atttatttatttggttaccttcctg

SEQ ID NO: 45431 - DNA, 25 bp, Artificial
  Probe
ttatttggttaccttcctgttccaa

SEQ ID NO: 45432 - DNA, 25 bp, Artificial
  Probe
tatttggttaccttcctgttccaag

SEQ ID NO: 45433 - DNA, 25 bp, Artificial
  Probe
agcctggaagtccgatgttttaatg

SEQ ID NO: 45434 - DNA, 25 bp, Artificial
  Probe
ttttctcttccctcctcctgacttg

SEQ ID NO: 45435 - DNA, 25 bp, Artificial
  Probe
gcctggaagtccgatgttttaatgt

SEQ ID NO: 45436 - DNA, 25 bp, Artificial
  Probe
tgtacaggggaataaaagagatctt

SEQ ID NO: 45437 - DNA, 25 bp, Artificial
  Probe
gaagtccgatgttttaatgtattta

SEQ ID NO: 45438 - DNA, 25 bp, Artificial
  Probe
gtacaggggaataaaagagatctta

SEQ ID NO: 45439 - DNA, 25 bp, Artificial
  Probe
ggttttattatcatgttctgtcttt

SEQ ID NO: 45440 - DNA, 25 bp, Artificial
  Probe
ttaccttcctgttccaagcttccac

SEQ ID NO: 45441 - DNA, 25 bp, Artificial
  Probe
gttaccttcctgttccaagcttcca

SEQ ID NO: 45442 - DNA, 25 bp, Artificial
  Probe
atttggttaccttcctgttccaagc

SEQ ID NO: 45443 - DNA, 25 bp, Artificial
  Probe
agtccgatgttttaatgtatttatt

SEQ ID NO: 45444 - DNA, 25 bp, Artificial
  Probe
aagtccgatgttttaatgtatttat

SEQ ID NO: 45445 - DNA, 25 bp, Artificial
  Probe
tacaggggaataaaagagatcttat

SEQ ID NO: 45446 - DNA, 25 bp, Artificial
  Probe
tggttaccttcctgttccaagcttc

SEQ ID NO: 45447 - DNA, 25 bp, Artificial
  Probe
cgagcctggaagtccgatgttttaa

SEQ ID NO: 45448 - DNA, 25 bp, Artificial
  Probe
acaggggaataaaagagatcttatt

SEQ ID NO: 45449 - DNA, 25 bp, Artificial
  Probe
tttggttaccttcctgttccaagct

SEQ ID NO: 45450 - DNA, 25 bp, Artificial
  Probe
caggggaataaaagagatcttattt

SEQ ID NO: 45451 - DNA, 25 bp, Artificial
  Probe
ttggttaccttcctgttccaagctt

SEQ ID NO: 45452 - DNA, 25 bp, Artificial
  Probe
aggggaataaaagagatcttatttt

SEQ ID NO: 45453 - DNA, 25 bp, Artificial
  Probe
gtaggattactgacacagatgtacc

SEQ ID NO: 45454 - DNA, 25 bp, Artificial
  Probe
agtaggattactgacacagatgtac

SEQ ID NO: 45455 - DNA, 25 bp, Artificial
  Probe
aagtaggattactgacacagatgta

SEQ ID NO: 45456 - DNA, 25 bp, Artificial
  Probe
tagaaatgtctctcataaagcctgc

SEQ ID NO: 45457 - DNA, 25 bp, Artificial
  Probe
ctaagtgctgagatgaatggctgag

SEQ ID NO: 45458 - DNA, 25 bp, Artificial
  Probe
atagaaatgtctctcataaagcctg

SEQ ID NO: 45459 - DNA, 25 bp, Artificial
  Probe
catagaaatgtctctcataaagcct

SEQ ID NO: 45460 - DNA, 25 bp, Artificial
  Probe
ctctaagtgctgagatgaatggctg

SEQ ID NO: 45461 - DNA, 25 bp, Artificial
  Probe
ctgcctctaagtgctgagatgaatg

SEQ ID NO: 45462 - DNA, 25 bp, Artificial
  Probe
tctaagtgctgagatgaatggctga

SEQ ID NO: 45463 - DNA, 25 bp, Artificial
  Probe
gattactgacacagatgtacccaag

SEQ ID NO: 45464 - DNA, 25 bp, Artificial
  Probe
taggattactgacacagatgtaccc

SEQ ID NO: 45465 - DNA, 25 bp, Artificial
  Probe
actgcctctaagtgctgagatgaat

SEQ ID NO: 45466 - DNA, 25 bp, Artificial
  Probe
atgtaacattggctggtctagaact

SEQ ID NO: 45467 - DNA, 25 bp, Artificial
  Probe
catgtaacattggctggtctagaac

SEQ ID NO: 45468 - DNA, 25 bp, Artificial
  Probe
gggatcactgccaatcaaatagttg

SEQ ID NO: 45469 - DNA, 25 bp, Artificial
  Probe
gaaatgtctctcataaagcctgcct

SEQ ID NO: 45470 - DNA, 25 bp, Artificial
  Probe
agaaatgtctctcataaagcctgcc

SEQ ID NO: 45471 - DNA, 25 bp, Artificial
  Probe
ggattactgacacagatgtacccaa

SEQ ID NO: 45472 - DNA, 25 bp, Artificial
  Probe
aaatgtctctcataaagcctgcctg

SEQ ID NO: 45473 - DNA, 25 bp, Artificial
  Probe
tgtaacattggctggtctagaactg

SEQ ID NO: 45474 - DNA, 25 bp, Artificial
  Probe
gactgcctctaagtgctgagatgaa

SEQ ID NO: 45475 - DNA, 25 bp, Artificial
  Probe
cctctaagtgctgagatgaatggct

SEQ ID NO: 45476 - DNA, 25 bp, Artificial
  Probe
cttcccctcttcctaaaagtttaca

SEQ ID NO: 45477 - DNA, 25 bp, Artificial
  Probe
attactgacacagatgtacccaagc

SEQ ID NO: 45478 - DNA, 25 bp, Artificial
  Probe
tcccctcttcctaaaagtttacatt

SEQ ID NO: 45479 - DNA, 25 bp, Artificial
  Probe
ttcccctcttcctaaaagtttacat

SEQ ID NO: 45480 - DNA, 25 bp, Artificial
  Probe
atgggatcactgccaatcaaatagt

SEQ ID NO: 45481 - DNA, 25 bp, Artificial
  Probe
catgggatcactgccaatcaaatag

SEQ ID NO: 45482 - DNA, 25 bp, Artificial
  Probe
cccctcttcctaaaagtttacattt

SEQ ID NO: 45483 - DNA, 25 bp, Artificial
  Probe
aggattactgacacagatgtaccca

SEQ ID NO: 45484 - DNA, 25 bp, Artificial
  Probe
tgcctctaagtgctgagatgaatgg

SEQ ID NO: 45485 - DNA, 25 bp, Artificial
  Probe
gtaacattggctggtctagaactgg

SEQ ID NO: 45486 - DNA, 25 bp, Artificial
  Probe
tgggatcactgccaatcaaatagtt

SEQ ID NO: 45487 - DNA, 25 bp, Artificial
  Probe
attgtgaacttcccctcttcctaaa

SEQ ID NO: 45488 - DNA, 25 bp, Artificial
  Probe
acatagaaatgtctctcataaagcc

SEQ ID NO: 45489 - DNA, 25 bp, Artificial
  Probe
aattgtgaacttcccctcttcctaa

SEQ ID NO: 45490 - DNA, 25 bp, Artificial
  Probe
aaattgtgaacttcccctcttccta

SEQ ID NO: 45491 - DNA, 25 bp, Artificial
  Probe
ttgtgaacttcccctcttcctaaaa

SEQ ID NO: 45492 - DNA, 25 bp, Artificial
  Probe
ctttggattcatggagacctgactg

SEQ ID NO: 45493 - DNA, 25 bp, Artificial
  Probe
ccatgtaacattggctggtctagaa

SEQ ID NO: 45494 - DNA, 25 bp, Artificial
  Probe
ctgactgcctctaagtgctgagatg

SEQ ID NO: 45495 - DNA, 25 bp, Artificial
  Probe
tgtgaacttcccctcttcctaaaag

SEQ ID NO: 45496 - DNA, 25 bp, Artificial
  Probe
aaaattgtgaacttcccctcttcct

SEQ ID NO: 45497 - DNA, 25 bp, Artificial
  Probe
attcatggagacctgactgcctcta

SEQ ID NO: 45498 - DNA, 25 bp, Artificial
  Probe
taagcctggagaatctgaagaataa

SEQ ID NO: 45499 - DNA, 25 bp, Artificial
  Probe
aagcctggagaatctgaagaataaa

SEQ ID NO: 45500 - DNA, 25 bp, Artificial
  Probe
gcctggagaatctgaagaataaact

SEQ ID NO: 45501 - DNA, 25 bp, Artificial
  Probe
agcctggagaatctgaagaataaac

SEQ ID NO: 45502 - DNA, 25 bp, Artificial
  Probe
cctggagaatctgaagaataaactg

SEQ ID NO: 45503 - DNA, 25 bp, Artificial
  Probe
gataaccgtgttgtgtatggaggag

SEQ ID NO: 45504 - DNA, 25 bp, Artificial
  Probe
ctggagaatctgaagaataaactgt

SEQ ID NO: 45505 - DNA, 25 bp, Artificial
  Probe
atccgtgataaccgtgttgtgtatg

SEQ ID NO: 45506 - DNA, 25 bp, Artificial
  Probe
catccgtgataaccgtgttgtgtat

SEQ ID NO: 45507 - DNA, 25 bp, Artificial
  Probe
gtatcagcatgtcatagaaaccttg

SEQ ID NO: 45508 - DNA, 25 bp, Artificial
  Probe
agtatcagcatgtcatagaaacctt

SEQ ID NO: 45509 - DNA, 25 bp, Artificial
  Probe
cagtatcagcatgtcatagaaacct

SEQ ID NO: 45510 - DNA, 25 bp, Artificial
  Probe
tgtgattaaataaagggtgtgtagt

SEQ ID NO: 45511 - DNA, 25 bp, Artificial
  Probe
actgtgattaaataaagggtgtgta

SEQ ID NO: 45512 - DNA, 25 bp, Artificial
  Probe
ccactgtgattaaataaagggtgtg

SEQ ID NO: 45513 - DNA, 25 bp, Artificial
  Probe
tgataaccgtgttgtgtatggagga

SEQ ID NO: 45514 - DNA, 25 bp, Artificial
  Probe
gtgataaccgtgttgtgtatggagg

SEQ ID NO: 45515 - DNA, 25 bp, Artificial
  Probe
tatcagcatgtcatagaaaccttga

SEQ ID NO: 45516 - DNA, 25 bp, Artificial
  Probe
cactgtgattaaataaagggtgtgt

SEQ ID NO: 45517 - DNA, 25 bp, Artificial
  Probe
cagcatgtcatagaaaccttgattg

SEQ ID NO: 45518 - DNA, 25 bp, Artificial
  Probe
tcagcatgtcatagaaaccttgatt

SEQ ID NO: 45519 - DNA, 25 bp, Artificial
  Probe
ctgtgattaaataaagggtgtgtag

SEQ ID NO: 45520 - DNA, 25 bp, Artificial
  Probe
gcagtatcagcatgtcatagaaacc

SEQ ID NO: 45521 - DNA, 25 bp, Artificial
  Probe
accactgtgattaaataaagggtgt

SEQ ID NO: 45522 - DNA, 25 bp, Artificial
  Probe
agcatgtcatagaaaccttgattgg

SEQ ID NO: 45523 - DNA, 25 bp, Artificial
  Probe
cgtgataaccgtgttgtgtatggag

SEQ ID NO: 45524 - DNA, 25 bp, Artificial
  Probe
taccactgtgattaaataaagggtg

SEQ ID NO: 45525 - DNA, 25 bp, Artificial
  Probe
tgtcatagaaaccttgattggtaaa

SEQ ID NO: 45526 - DNA, 25 bp, Artificial
  Probe
ataaccgtgttgtgtatggaggagg

SEQ ID NO: 45527 - DNA, 25 bp, Artificial
  Probe
attaccactgtgattaaataaaggg

SEQ ID NO: 45528 - DNA, 25 bp, Artificial
  Probe
atgtcatagaaaccttgattggtaa

SEQ ID NO: 45529 - DNA, 25 bp, Artificial
  Probe
catgtcatagaaaccttgattggta

SEQ ID NO: 45530 - DNA, 25 bp, Artificial
  Probe
ttaccactgtgattaaataaagggt

SEQ ID NO: 45531 - DNA, 25 bp, Artificial
  Probe
tcatccgtgataaccgtgttgtgta

SEQ ID NO: 45532 - DNA, 25 bp, Artificial
  Probe
gcatgtcatagaaaccttgattggt

SEQ ID NO: 45533 - DNA, 25 bp, Artificial
  Probe
gtgattaaataaagggtgtgtagta

SEQ ID NO: 45534 - DNA, 25 bp, Artificial
  Probe
atcagcatgtcatagaaaccttgat

SEQ ID NO: 45535 - DNA, 25 bp, Artificial
  Probe
tgattaaataaagggtgtgtagtac

SEQ ID NO: 45536 - DNA, 25 bp, Artificial
  Probe
cattaccactgtgattaaataaagg

SEQ ID NO: 45537 - DNA, 25 bp, Artificial
  Probe
ccattaccactgtgattaaataaag

SEQ ID NO: 45538 - DNA, 25 bp, Artificial
  Probe
ccgtgataaccgtgttgtgtatgga

SEQ ID NO: 45539 - DNA, 25 bp, Artificial
  Probe
tccgtgataaccgtgttgtgtatgg

SEQ ID NO: 45540 - DNA, 25 bp, Artificial
  Probe
tgatatgcagtatcagcatgtcata

SEQ ID NO: 45541 - DNA, 25 bp, Artificial
  Probe
atgatatgcagtatcagcatgtcat

SEQ ID NO: 45542 - DNA, 25 bp, Artificial
  Probe
atatgcagtatcagcatgtcataga

SEQ ID NO: 45543 - DNA, 25 bp, Artificial
  Probe
atagagtatgaacagcaatggcaag

SEQ ID NO: 45544 - DNA, 25 bp, Artificial
  Probe
tagagtatgaacagcaatggcaaga

SEQ ID NO: 45545 - DNA, 25 bp, Artificial
  Probe
ctctagtcacggttatgtctgagaa

SEQ ID NO: 45546 - DNA, 25 bp, Artificial
  Probe
tctagtcacggttatgtctgagaac

SEQ ID NO: 45547 - DNA, 25 bp, Artificial
  Probe
ctctctagtcacggttatgtctgag

SEQ ID NO: 45548 - DNA, 25 bp, Artificial
  Probe
catagagtatgaacagcaatggcaa

SEQ ID NO: 45549 - DNA, 25 bp, Artificial
  Probe
tgagaatccctaaactgaaaccaaa

SEQ ID NO: 45550 - DNA, 25 bp, Artificial
  Probe
tttgagaatccctaaactgaaacca

SEQ ID NO: 45551 - DNA, 25 bp, Artificial
  Probe
ggaaggaatcagaactaggcaactt

SEQ ID NO: 45552 - DNA, 25 bp, Artificial
  Probe
ttgagaatccctaaactgaaaccaa

SEQ ID NO: 45553 - DNA, 25 bp, Artificial
  Probe
agagtatgaacagcaatggcaagag

SEQ ID NO: 45554 - DNA, 25 bp, Artificial
  Probe
aaggaatcagaactaggcaacttcg

SEQ ID NO: 45555 - DNA, 25 bp, Artificial
  Probe
ctgctctctagtcacggttatgtct

SEQ ID NO: 45556 - DNA, 25 bp, Artificial
  Probe
gtggaaggaatcagaactaggcaac

SEQ ID NO: 45557 - DNA, 25 bp, Artificial
  Probe
tggaaggaatcagaactaggcaact

SEQ ID NO: 45558 - DNA, 25 bp, Artificial
  Probe
ttgtgtagatgatgaaagctaacca

SEQ ID NO: 45559 - DNA, 25 bp, Artificial
  Probe
tgtagatgatgaaagctaaccagtg

SEQ ID NO: 45560 - DNA, 25 bp, Artificial
  Probe
gtgtagatgatgaaagctaaccagt

SEQ ID NO: 45561 - DNA, 25 bp, Artificial
  Probe
tgtgtagatgatgaaagctaaccag

SEQ ID NO: 45562 - DNA, 25 bp, Artificial
  Probe
gtgttgtgtagatgatgaaagctaa

SEQ ID NO: 45563 - DNA, 25 bp, Artificial
  Probe
gctctctagtcacggttatgtctga

SEQ ID NO: 45564 - DNA, 25 bp, Artificial
  Probe
tgctctctagtcacggttatgtctg

SEQ ID NO: 45565 - DNA, 25 bp, Artificial
  Probe
gttgtgtagatgatgaaagctaacc

SEQ ID NO: 45566 - DNA, 25 bp, Artificial
  Probe
tgttgtgtagatgatgaaagctaac

SEQ ID NO: 45567 - DNA, 25 bp, Artificial
  Probe
gtagatgatgaaagctaaccagtgg

SEQ ID NO: 45568 - DNA, 25 bp, Artificial
  Probe
gagtatgaacagcaatggcaagagg

SEQ ID NO: 45569 - DNA, 25 bp, Artificial
  Probe
gaatcagaactaggcaacttcgtgg

SEQ ID NO: 45570 - DNA, 25 bp, Artificial
  Probe
ggaatcagaactaggcaacttcgtg

SEQ ID NO: 45571 - DNA, 25 bp, Artificial
  Probe
caaggaaactggtacaggaatgaag

SEQ ID NO: 45572 - DNA, 25 bp, Artificial
  Probe
gaaggaatcagaactaggcaacttc

SEQ ID NO: 45573 - DNA, 25 bp, Artificial
  Probe
aggaatcagaactaggcaacttcgt

SEQ ID NO: 45574 - DNA, 25 bp, Artificial
  Probe
atcagaactaggcaacttcgtggaa

SEQ ID NO: 45575 - DNA, 25 bp, Artificial
  Probe
aatcagaactaggcaacttcgtgga

SEQ ID NO: 45576 - DNA, 25 bp, Artificial
  Probe
acaaggaaactggtacaggaatgaa

SEQ ID NO: 45577 - DNA, 25 bp, Artificial
  Probe
cttaaactcgggtggaaggaatcag

SEQ ID NO: 45578 - DNA, 25 bp, Artificial
  Probe
ggctagagtatcacaggatgactgg

SEQ ID NO: 45579 - DNA, 25 bp, Artificial
  Probe
tgagaaccccgaacttatgaataat

SEQ ID NO: 45580 - DNA, 25 bp, Artificial
  Probe
ctgagaaccccgaacttatgaataa

SEQ ID NO: 45581 - DNA, 25 bp, Artificial
  Probe
gagaatccctaaactgaaaccaaaa

SEQ ID NO: 45582 - DNA, 25 bp, Artificial
  Probe
ttttgagaatccctaaactgaaacc

SEQ ID NO: 45583 - DNA, 25 bp, Artificial
  Probe
cctgctctctagtcacggttatgtc

SEQ ID NO: 45584 - DNA, 25 bp, Artificial
  Probe
ggtggaaggaatcagaactaggcaa

SEQ ID NO: 45585 - DNA, 25 bp, Artificial
  Probe
taaactcgggtggaaggaatcagaa

SEQ ID NO: 45586 - DNA, 25 bp, Artificial
  Probe
gcaaattgggtgtaaaatgtttctt

SEQ ID NO: 45587 - DNA, 25 bp, Artificial
  Probe
ttaaactcgggtggaaggaatcaga

SEQ ID NO: 45588 - DNA, 25 bp, Artificial
  Probe
atatatggacagacttggaggacag

SEQ ID NO: 45589 - DNA, 25 bp, Artificial
  Probe
ttgtattacacacggaatatcgctg

SEQ ID NO: 45590 - DNA, 25 bp, Artificial
  Probe
tatatggacagacttggaggacagg

SEQ ID NO: 45591 - DNA, 25 bp, Artificial
  Probe
tacacacggaatatcgctgcatata

SEQ ID NO: 45592 - DNA, 25 bp, Artificial
  Probe
ctttgtattacacacggaatatcgc

SEQ ID NO: 45593 - DNA, 25 bp, Artificial
  Probe
tttgtattacacacggaatatcgct

SEQ ID NO: 45594 - DNA, 25 bp, Artificial
  Probe
tctttgtattacacacggaatatcg

SEQ ID NO: 45595 - DNA, 25 bp, Artificial
  Probe
acacacggaatatcgctgcatatat

SEQ ID NO: 45596 - DNA, 25 bp, Artificial
  Probe
ccacatatgcaatgacttctcactt

SEQ ID NO: 45597 - DNA, 25 bp, Artificial
  Probe
attacacacggaatatcgctgcata

SEQ ID NO: 45598 - DNA, 25 bp, Artificial
  Probe
tcgtaacaggtcttactcacaaata

SEQ ID NO: 45599 - DNA, 25 bp, Artificial
  Probe
gtctaatctttgtattacacacgga

SEQ ID NO: 45600 - DNA, 25 bp, Artificial
  Probe
agtctaatctttgtattacacacgg

SEQ ID NO: 45601 - DNA, 25 bp, Artificial
  Probe
ttacacacggaatatcgctgcatat

SEQ ID NO: 45602 - DNA, 25 bp, Artificial
  Probe
gtcgtaacaggtcttactcacaaat

SEQ ID NO: 45603 - DNA, 25 bp, Artificial
  Probe
atagggatggtaactcatggttgaa

SEQ ID NO: 45604 - DNA, 25 bp, Artificial
  Probe
ttgatagggatggtaactcatggtt

SEQ ID NO: 45605 - DNA, 25 bp, Artificial
  Probe
tttgatagggatggtaactcatggt

SEQ ID NO: 45606 - DNA, 25 bp, Artificial
  Probe
ctaatgtcttgcatcattcatggag

SEQ ID NO: 45607 - DNA, 25 bp, Artificial
  Probe
tattacacacggaatatcgctgcat

SEQ ID NO: 45608 - DNA, 25 bp, Artificial
  Probe
tctaatgtcttgcatcattcatgga

SEQ ID NO: 45609 - DNA, 25 bp, Artificial
  Probe
cgtaacaggtcttactcacaaataa

SEQ ID NO: 45610 - DNA, 25 bp, Artificial
  Probe
tttgtaggaacagggaccataactc

SEQ ID NO: 45611 - DNA, 25 bp, Artificial
  Probe
atctaatgtcttgcatcattcatgg

SEQ ID NO: 45612 - DNA, 25 bp, Artificial
  Probe
ccatctaatgtcttgcatcattcat

SEQ ID NO: 45613 - DNA, 25 bp, Artificial
  Probe
tgtattacacacggaatatcgctgc

SEQ ID NO: 45614 - DNA, 25 bp, Artificial
  Probe
ggaccataactcagtctgaacgatg

SEQ ID NO: 45615 - DNA, 25 bp, Artificial
  Probe
gatagggatggtaactcatggttga

SEQ ID NO: 45616 - DNA, 25 bp, Artificial
  Probe
tagggatggtaactcatggttgaag

SEQ ID NO: 45617 - DNA, 25 bp, Artificial
  Probe
tgatagggatggtaactcatggttg

SEQ ID NO: 45618 - DNA, 25 bp, Artificial
  Probe
tctaatctttgtattacacacggaa

SEQ ID NO: 45619 - DNA, 25 bp, Artificial
  Probe
catctaatgtcttgcatcattcatg

SEQ ID NO: 45620 - DNA, 25 bp, Artificial
  Probe
tcgtcgtaacaggtcttactcacaa

SEQ ID NO: 45621 - DNA, 25 bp, Artificial
  Probe
taatgtcttgcatcattcatggagc

SEQ ID NO: 45622 - DNA, 25 bp, Artificial
  Probe
gccatctaatgtcttgcatcattca

SEQ ID NO: 45623 - DNA, 25 bp, Artificial
  Probe
ttcctcgtcgtaacaggtcttactc

SEQ ID NO: 45624 - DNA, 25 bp, Artificial
  Probe
ttatcccacatatgcaatgacttct

SEQ ID NO: 45625 - DNA, 25 bp, Artificial
  Probe
cttcctttatcccacatatgcaatg

SEQ ID NO: 45626 - DNA, 25 bp, Artificial
  Probe
gtaggaacagggaccataactcagt

SEQ ID NO: 45627 - DNA, 25 bp, Artificial
  Probe
ttcctttatcccacatatgcaatga

SEQ ID NO: 45628 - DNA, 25 bp, Artificial
  Probe
gaccataactcagtctgaacgatgc

SEQ ID NO: 45629 - DNA, 25 bp, Artificial
  Probe
tatcccacatatgcaatgacttctc

SEQ ID NO: 45630 - DNA, 25 bp, Artificial
  Probe
ccttcctttatcccacatatgcaat

SEQ ID NO: 45631 - DNA, 25 bp, Artificial
  Probe
tttatcccacatatgcaatgacttc

SEQ ID NO: 45632 - DNA, 25 bp, Artificial
  Probe
ctttatcccacatatgcaatgactt

SEQ ID NO: 45633 - DNA, 25 bp, Artificial
  Probe
aattacacgcataatggatgagagg

SEQ ID NO: 45634 - DNA, 25 bp, Artificial
  Probe
gatagcactcatcatcttcaacagc

SEQ ID NO: 45635 - DNA, 25 bp, Artificial
  Probe
attacacgcataatggatgagagga

SEQ ID NO: 45636 - DNA, 25 bp, Artificial
  Probe
ttacacgcataatggatgagaggaa

SEQ ID NO: 45637 - DNA, 25 bp, Artificial
  Probe
tcatcatcttcaacagctctaacaa

SEQ ID NO: 45638 - DNA, 25 bp, Artificial
  Probe
ctcatcatcttcaacagctctaaca

SEQ ID NO: 45639 - DNA, 25 bp, Artificial
  Probe
actcatcatcttcaacagctctaac

SEQ ID NO: 45640 - DNA, 25 bp, Artificial
  Probe
cactcatcatcttcaacagctctaa

SEQ ID NO: 45641 - DNA, 25 bp, Artificial
  Probe
catcatcttcaacagctctaacaag

SEQ ID NO: 45642 - DNA, 25 bp, Artificial
  Probe
atcatcttcaacagctctaacaagt

SEQ ID NO: 45643 - DNA, 25 bp, Artificial
  Probe
tacacgcataatggatgagaggaac

SEQ ID NO: 45644 - DNA, 25 bp, Artificial
  Probe
tcatcttcaacagctctaacaagtt

SEQ ID NO: 45645 - DNA, 25 bp, Artificial
  Probe
aataataggaactgtgtacgatgca

SEQ ID NO: 45646 - DNA, 25 bp, Artificial
  Probe
ggattgatgaagaaagcctatgaac

SEQ ID NO: 45647 - DNA, 25 bp, Artificial
  Probe
cataatggatgagaggaaccgacag

SEQ ID NO: 45648 - DNA, 25 bp, Artificial
  Probe
attgatgaagaaagcctatgaactc

SEQ ID NO: 45649 - DNA, 25 bp, Artificial
  Probe
gattgatgaagaaagcctatgaact

SEQ ID NO: 45650 - DNA, 25 bp, Artificial
  Probe
agatagcactcatcatcttcaacag

SEQ ID NO: 45651 - DNA, 25 bp, Artificial
  Probe
gagatagcactcatcatcttcaaca

SEQ ID NO: 45652 - DNA, 25 bp, Artificial
  Probe
cggattgatgaagaaagcctatgaa

SEQ ID NO: 45653 - DNA, 25 bp, Artificial
  Probe
caaattacacgcataatggatgaga

SEQ ID NO: 45654 - DNA, 25 bp, Artificial
  Probe
gaaagttcggattgatgaagaaagc

SEQ ID NO: 45655 - DNA, 25 bp, Artificial
  Probe
aaattacacgcataatggatgagag

SEQ ID NO: 45656 - DNA, 25 bp, Artificial
  Probe
ttgatgaagaaagcctatgaactca

SEQ ID NO: 45657 - DNA, 25 bp, Artificial
  Probe
ttcggattgatgaagaaagcctatg

SEQ ID NO: 45658 - DNA, 25 bp, Artificial
  Probe
gttcggattgatgaagaaagcctat

SEQ ID NO: 45659 - DNA, 25 bp, Artificial
  Probe
gatgaagaaagcctatgaactcagt

SEQ ID NO: 45660 - DNA, 25 bp, Artificial
  Probe
tgatgaagaaagcctatgaactcag

SEQ ID NO: 45661 - DNA, 25 bp, Artificial
  Probe
atgaagaaagcctatgaactcagtg

SEQ ID NO: 45662 - DNA, 25 bp, Artificial
  Probe
gaagaaagcctatgaactcagtgtg

SEQ ID NO: 45663 - DNA, 25 bp, Artificial
  Probe
aaataataggaactgtgtacgatgc

SEQ ID NO: 45664 - DNA, 25 bp, Artificial
  Probe
tcggattgatgaagaaagcctatga

SEQ ID NO: 45665 - DNA, 25 bp, Artificial
  Probe
aagtccttctcaagtacaccgagta

SEQ ID NO: 45666 - DNA, 25 bp, Artificial
  Probe
agtgtgctctgtgactgtgagatag

SEQ ID NO: 45667 - DNA, 25 bp, Artificial
  Probe
tgatacttcatatgtgctaactcca

SEQ ID NO: 45668 - DNA, 25 bp, Artificial
  Probe
gcactcatcatcttcaacagctcta

SEQ ID NO: 45669 - DNA, 25 bp, Artificial
  Probe
agttcggattgatgaagaaagccta

SEQ ID NO: 45670 - DNA, 25 bp, Artificial
  Probe
aaagttcggattgatgaagaaagcc

SEQ ID NO: 45671 - DNA, 25 bp, Artificial
  Probe
ctgatacttcatatgtgctaactcc

SEQ ID NO: 45672 - DNA, 25 bp, Artificial
  Probe
cctgatacttcatatgtgctaactc

SEQ ID NO: 45673 - DNA, 25 bp, Artificial
  Probe
ataatggatgagaggaaccgacagg

SEQ ID NO: 45674 - DNA, 25 bp, Artificial
  Probe
tgaagaaagcctatgaactcagtgt

SEQ ID NO: 45675 - DNA, 25 bp, Artificial
  Probe
ctatgaactcagtgtgctctgtgac

SEQ ID NO: 45676 - DNA, 25 bp, Artificial
  Probe
gatacttcatatgtgctaactccac

SEQ ID NO: 45677 - DNA, 25 bp, Artificial
  Probe
tatgaactcagtgtgctctgtgact

SEQ ID NO: 45678 - DNA, 25 bp, Artificial
  Probe
acagcacagaatgggtatttattta

SEQ ID NO: 45679 - DNA, 25 bp, Artificial
  Probe
tacagcacagaatgggtatttattt

SEQ ID NO: 45680 - DNA, 25 bp, Artificial
  Probe
gtacagcacagaatgggtatttatt

SEQ ID NO: 45681 - DNA, 25 bp, Artificial
  Probe
cagcacagaatgggtatttatttaa

SEQ ID NO: 45682 - DNA, 25 bp, Artificial
  Probe
agcacagaatgggtatttatttaaa

SEQ ID NO: 45683 - DNA, 25 bp, Artificial
  Probe
tgtacagcacagaatgggtatttat

SEQ ID NO: 45684 - DNA, 25 bp, Artificial
  Probe
ttctctatcacggagcccatttctg

SEQ ID NO: 45685 - DNA, 25 bp, Artificial
  Probe
gttctctatcacggagcccatttct

SEQ ID NO: 45686 - DNA, 25 bp, Artificial
  Probe
gtgtacagcacagaatgggtattta

SEQ ID NO: 45687 - DNA, 25 bp, Artificial
  Probe
ggttctctatcacggagcccatttc

SEQ ID NO: 45688 - DNA, 25 bp, Artificial
  Probe
cgtgtacagcacagaatgggtattt

SEQ ID NO: 45689 - DNA, 25 bp, Artificial
  Probe
gcacagaatgggtatttatttaaat

SEQ ID NO: 45690 - DNA, 25 bp, Artificial
  Probe
acgtgtacagcacagaatgggtatt

SEQ ID NO: 45691 - DNA, 25 bp, Artificial
  Probe
gacgtgtacagcacagaatgggtat

SEQ ID NO: 45692 - DNA, 25 bp, Artificial
  Probe
atggctgattgtatgatgttacctt

SEQ ID NO: 45693 - DNA, 25 bp, Artificial
  Probe
aatggctgattgtatgatgttacct

SEQ ID NO: 45694 - DNA, 25 bp, Artificial
  Probe
gagacacattgtatgagttgttgtt

SEQ ID NO: 45695 - DNA, 25 bp, Artificial
  Probe
cagagacacattgtatgagttgttg

SEQ ID NO: 45696 - DNA, 25 bp, Artificial
  Probe
gaacagagacacattgtatgagttg

SEQ ID NO: 45697 - DNA, 25 bp, Artificial
  Probe
tgaacagagacacattgtatgagtt

SEQ ID NO: 45698 - DNA, 25 bp, Artificial
  Probe
agagacacattgtatgagttgttgt

SEQ ID NO: 45699 - DNA, 25 bp, Artificial
  Probe
acagagacacattgtatgagttgtt

SEQ ID NO: 45700 - DNA, 25 bp, Artificial
  Probe
aacagagacacattgtatgagttgt

SEQ ID NO: 45701 - DNA, 25 bp, Artificial
  Probe
agcggatttatatgggttctaagag

SEQ ID NO: 45702 - DNA, 25 bp, Artificial
  Probe
aaatggctgattgtatgatgttacc

SEQ ID NO: 45703 - DNA, 25 bp, Artificial
  Probe
tggctgattgtatgatgttaccttt

SEQ ID NO: 45704 - DNA, 25 bp, Artificial
  Probe
aagaaatggctgattgtatgatgtt

SEQ ID NO: 45705 - DNA, 25 bp, Artificial
  Probe
gcggatttatatgggttctaagaga

SEQ ID NO: 45706 - DNA, 25 bp, Artificial
  Probe
tagcggatttatatgggttctaaga

SEQ ID NO: 45707 - DNA, 25 bp, Artificial
  Probe
tgtttctagcggatttatatgggtt

SEQ ID NO: 45708 - DNA, 25 bp, Artificial
  Probe
ttgtttctagcggatttatatgggt

SEQ ID NO: 45709 - DNA, 25 bp, Artificial
  Probe
gttgtttctagcggatttatatggg

SEQ ID NO: 45710 - DNA, 25 bp, Artificial
  Probe
attgtatgagttgttgtttctagcg

SEQ ID NO: 45711 - DNA, 25 bp, Artificial
  Probe
gagttgttgtttctagcggatttat

SEQ ID NO: 45712 - DNA, 25 bp, Artificial
  Probe
caagaaatggctgattgtatgatgt

SEQ ID NO: 45713 - DNA, 25 bp, Artificial
  Probe
tttctagcggatttatatgggttct

SEQ ID NO: 45714 - DNA, 25 bp, Artificial
  Probe
gtttctagcggatttatatgggttc

SEQ ID NO: 45715 - DNA, 25 bp, Artificial
  Probe
tatgagttgttgtttctagcggatt

SEQ ID NO: 45716 - DNA, 25 bp, Artificial
  Probe
tgagttgttgtttctagcggattta

SEQ ID NO: 45717 - DNA, 25 bp, Artificial
  Probe
gaaatggctgattgtatgatgttac

SEQ ID NO: 45718 - DNA, 25 bp, Artificial
  Probe
agaaatggctgattgtatgatgtta

SEQ ID NO: 45719 - DNA, 25 bp, Artificial
  Probe
tgttgtttctagcggatttatatgg

SEQ ID NO: 45720 - DNA, 25 bp, Artificial
  Probe
tctagcggatttatatgggttctaa

SEQ ID NO: 45721 - DNA, 25 bp, Artificial
  Probe
ttctagcggatttatatgggttcta

SEQ ID NO: 45722 - DNA, 25 bp, Artificial
  Probe
gtatgagttgttgtttctagcggat

SEQ ID NO: 45723 - DNA, 25 bp, Artificial
  Probe
aatgtaacctggtcagtcacagatc

SEQ ID NO: 45724 - DNA, 25 bp, Artificial
  Probe
atgagttgttgtttctagcggattt

SEQ ID NO: 45725 - DNA, 25 bp, Artificial
  Probe
ctagcggatttatatgggttctaag

SEQ ID NO: 45726 - DNA, 25 bp, Artificial
  Probe
cattgtatgagttgttgtttctagc

SEQ ID NO: 45727 - DNA, 25 bp, Artificial
  Probe
tctcaactcaatacattatgatcct

SEQ ID NO: 45728 - DNA, 25 bp, Artificial
  Probe
agttgttgtttctagcggatttata

SEQ ID NO: 45729 - DNA, 25 bp, Artificial
  Probe
ttgtatgagttgttgtttctagcgg

SEQ ID NO: 45730 - DNA, 25 bp, Artificial
  Probe
acacattgtatgagttgttgtttct

SEQ ID NO: 45731 - DNA, 25 bp, Artificial
  Probe
agacacattgtatgagttgttgttt

SEQ ID NO: 45732 - DNA, 25 bp, Artificial
  Probe
gacacattgtatgagttgttgtttc

SEQ ID NO: 45733 - DNA, 25 bp, Artificial
  Probe
tcaactcaatacattatgatccttg

SEQ ID NO: 45734 - DNA, 25 bp, Artificial
  Probe
ttgttgtttctagcggatttatatg

SEQ ID NO: 45735 - DNA, 25 bp, Artificial
  Probe
gttgttgtttctagcggatttatat

SEQ ID NO: 45736 - DNA, 25 bp, Artificial
  Probe
tgtatgagttgttgtttctagcgga

SEQ ID NO: 45737 - DNA, 25 bp, Artificial
  Probe
taggtctatgaatggaacgttgtaa

SEQ ID NO: 45738 - DNA, 25 bp, Artificial
  Probe
ttaggtctatgaatggaacgttgta

SEQ ID NO: 45739 - DNA, 25 bp, Artificial
  Probe
ttgagcttgatcttttgaaagtttt

SEQ ID NO: 45740 - DNA, 25 bp, Artificial
  Probe
tttgagcttgatcttttgaaagttt

SEQ ID NO: 45741 - DNA, 25 bp, Artificial
  Probe
ttttgctatatcttctggttttctt

SEQ ID NO: 45742 - DNA, 25 bp, Artificial
  Probe
ctatgaatggaacgttgtaaatgct

SEQ ID NO: 45743 - DNA, 25 bp, Artificial
  Probe
tctatgaatggaacgttgtaaatgc

SEQ ID NO: 45744 - DNA, 25 bp, Artificial
  Probe
aggtctatgaatggaacgttgtaaa

SEQ ID NO: 45745 - DNA, 25 bp, Artificial
  Probe
tttaggtctatgaatggaacgttgt

SEQ ID NO: 45746 - DNA, 25 bp, Artificial
  Probe
tatgaatggaacgttgtaaatgctt

SEQ ID NO: 45747 - DNA, 25 bp, Artificial
  Probe
ggtctatgaatggaacgttgtaaat

SEQ ID NO: 45748 - DNA, 25 bp, Artificial
  Probe
atgaatggaacgttgtaaatgcttg

SEQ ID NO: 45749 - DNA, 25 bp, Artificial
  Probe
gaatggaacgttgtaaatgcttgtc

SEQ ID NO: 45750 - DNA, 25 bp, Artificial
  Probe
gtctatgaatggaacgttgtaaatg

SEQ ID NO: 45751 - DNA, 25 bp, Artificial
  Probe
tgagcttgatcttttgaaagtttta

SEQ ID NO: 45752 - DNA, 25 bp, Artificial
  Probe
tgaatggaacgttgtaaatgcttgt

SEQ ID NO: 45753 - DNA, 25 bp, Artificial
  Probe
gctttgagcttgatcttttgaaagt

SEQ ID NO: 45754 - DNA, 25 bp, Artificial
  Probe
tttgctatatcttctggttttctta

SEQ ID NO: 45755 - DNA, 25 bp, Artificial
  Probe
ctttgagcttgatcttttgaaagtt

SEQ ID NO: 45756 - DNA, 25 bp, Artificial
  Probe
ttgctatatcttctggttttcttaa

SEQ ID NO: 45757 - DNA, 25 bp, Artificial
  Probe
ggctttgagcttgatcttttgaaag

SEQ ID NO: 45758 - DNA, 25 bp, Artificial
  Probe
gggctttgagcttgatcttttgaaa

SEQ ID NO: 45759 - DNA, 25 bp, Artificial
  Probe
aatggaacgttgtaaatgcttgtcc

SEQ ID NO: 45760 - DNA, 25 bp, Artificial
  Probe
ttttaggtctatgaatggaacgttg

SEQ ID NO: 45761 - DNA, 25 bp, Artificial
  Probe
tgctatatcttctggttttcttaag

SEQ ID NO: 45762 - DNA, 25 bp, Artificial
  Probe
agggctttgagcttgatcttttgaa

SEQ ID NO: 45763 - DNA, 25 bp, Artificial
  Probe
tgttcatatcatctcggggtcgatt

SEQ ID NO: 45764 - DNA, 25 bp, Artificial
  Probe
cagggctttgagcttgatcttttga

SEQ ID NO: 45765 - DNA, 25 bp, Artificial
  Probe
ctgttcatatcatctcggggtcgat

SEQ ID NO: 45766 - DNA, 25 bp, Artificial
  Probe
tagaccgaattaatgagagaatgcc

SEQ ID NO: 45767 - DNA, 25 bp, Artificial
  Probe
ctagaccgaattaatgagagaatgc

SEQ ID NO: 45768 - DNA, 25 bp, Artificial
  Probe
ggaagagagtgagaatgtgctgatt

SEQ ID NO: 45769 - DNA, 25 bp, Artificial
  Probe
gaccgaattaatgagagaatgccac

SEQ ID NO: 45770 - DNA, 25 bp, Artificial
  Probe
agaccgaattaatgagagaatgcca

SEQ ID NO: 45771 - DNA, 25 bp, Artificial
  Probe
gaagagagtgagaatgtgctgattc

SEQ ID NO: 45772 - DNA, 25 bp, Artificial
  Probe
gcatttgtaattcagtcgcatttat

SEQ ID NO: 45773 - DNA, 25 bp, Artificial
  Probe
tgtaattcagtcgcatttattctgt

SEQ ID NO: 45774 - DNA, 25 bp, Artificial
  Probe
attcagtcgcatttattctgtaaga

SEQ ID NO: 45775 - DNA, 25 bp, Artificial
  Probe
tggaatttaaacaggaacaactcaa

SEQ ID NO: 45776 - DNA, 25 bp, Artificial
  Probe
tttgtaattcagtcgcatttattct

SEQ ID NO: 45777 - DNA, 25 bp, Artificial
  Probe
accgaattaatgagagaatgccacc

SEQ ID NO: 45778 - DNA, 25 bp, Artificial
  Probe
gaaagaaagccctgtaatgactcag

SEQ ID NO: 45779 - DNA, 25 bp, Artificial
  Probe
ttgtaattcagtcgcatttattctg

SEQ ID NO: 45780 - DNA, 25 bp, Artificial
  Probe
tggaaagaaagccctgtaatgactc

SEQ ID NO: 45781 - DNA, 25 bp, Artificial
  Probe
ggaaagaaagccctgtaatgactca

SEQ ID NO: 45782 - DNA, 25 bp, Artificial
  Probe
aattcagtcgcatttattctgtaag

SEQ ID NO: 45783 - DNA, 25 bp, Artificial
  Probe
ggaatttaaacaggaacaactcaaa

SEQ ID NO: 45784 - DNA, 25 bp, Artificial
  Probe
tctagaccgaattaatgagagaatg

SEQ ID NO: 45785 - DNA, 25 bp, Artificial
  Probe
catttgtaattcagtcgcatttatt

SEQ ID NO: 45786 - DNA, 25 bp, Artificial
  Probe
ctggaatttaaacaggaacaactca

SEQ ID NO: 45787 - DNA, 25 bp, Artificial
  Probe
actggaatttaaacaggaacaactc

SEQ ID NO: 45788 - DNA, 25 bp, Artificial
  Probe
atttaaacaggaacaactcaaacaa

SEQ ID NO: 45789 - DNA, 25 bp, Artificial
  Probe
aatttaaacaggaacaactcaaaca

SEQ ID NO: 45790 - DNA, 25 bp, Artificial
  Probe
gtaattcagtcgcatttattctgta

SEQ ID NO: 45791 - DNA, 25 bp, Artificial
  Probe
atttgtaattcagtcgcatttattc

SEQ ID NO: 45792 - DNA, 25 bp, Artificial
  Probe
agtcgcatttattctgtaagaaagt

SEQ ID NO: 45793 - DNA, 25 bp, Artificial
  Probe
tcagtcgcatttattctgtaagaaa

SEQ ID NO: 45794 - DNA, 25 bp, Artificial
  Probe
ttcagtcgcatttattctgtaagaa

SEQ ID NO: 45795 - DNA, 25 bp, Artificial
  Probe
tactggaatttaaacaggaacaact

SEQ ID NO: 45796 - DNA, 25 bp, Artificial
  Probe
gaatttaaacaggaacaactcaaac

SEQ ID NO: 45797 - DNA, 25 bp, Artificial
  Probe
cagtcgcatttattctgtaagaaag

SEQ ID NO: 45798 - DNA, 25 bp, Artificial
  Probe
aagaggcttcttatcaccatgatgc

SEQ ID NO: 45799 - DNA, 25 bp, Artificial
  Probe
aaagaggcttcttatcaccatgatg

SEQ ID NO: 45800 - DNA, 25 bp, Artificial
  Probe
cgcatttattctgtaagaaagttga

SEQ ID NO: 45801 - DNA, 25 bp, Artificial
  Probe
tcgcatttattctgtaagaaagttg

SEQ ID NO: 45802 - DNA, 25 bp, Artificial
  Probe
gtcgcatttattctgtaagaaagtt

SEQ ID NO: 45803 - DNA, 25 bp, Artificial
  Probe
taattcagtcgcatttattctgtaa

SEQ ID NO: 45804 - DNA, 25 bp, Artificial
  Probe
ggaagccatcagaggttttacaatt

SEQ ID NO: 45805 - DNA, 25 bp, Artificial
  Probe
atactggaatttaaacaggaacaac

SEQ ID NO: 45806 - DNA, 25 bp, Artificial
  Probe
cgaaaagaagtcatcaggaataaaa

SEQ ID NO: 45807 - DNA, 25 bp, Artificial
  Probe
gggaagagagtgagaatgtgctgat

SEQ ID NO: 45808 - DNA, 25 bp, Artificial
  Probe
agaagtcatcaggaataaaatccga

SEQ ID NO: 45809 - DNA, 25 bp, Artificial
  Probe
gaagtcatcaggaataaaatccgag

SEQ ID NO: 45810 - DNA, 25 bp, Artificial
  Probe
aagaagtcatcaggaataaaatccg

SEQ ID NO: 45811 - DNA, 25 bp, Artificial
  Probe
ctgaatggcgagaatgttctagtaa

SEQ ID NO: 45812 - DNA, 25 bp, Artificial
  Probe
gtactgaatggcgagaatgttctag

SEQ ID NO: 45813 - DNA, 25 bp, Artificial
  Probe
actgaatggcgagaatgttctagta

SEQ ID NO: 45814 - DNA, 25 bp, Artificial
  Probe
tactgaatggcgagaatgttctagt

SEQ ID NO: 45815 - DNA, 25 bp, Artificial
  Probe
tgtactgaatggcgagaatgttcta

SEQ ID NO: 45816 - DNA, 25 bp, Artificial
  Probe
ttgtactgaatggcgagaatgttct

SEQ ID NO: 45817 - DNA, 25 bp, Artificial
  Probe
atggcgagaatgttctagtaaatgt

SEQ ID NO: 45818 - DNA, 25 bp, Artificial
  Probe
tgaatggcgagaatgttctagtaaa

SEQ ID NO: 45819 - DNA, 25 bp, Artificial
  Probe
aatggcgagaatgttctagtaaatg

SEQ ID NO: 45820 - DNA, 25 bp, Artificial
  Probe
gaatggcgagaatgttctagtaaat

SEQ ID NO: 45821 - DNA, 25 bp, Artificial
  Probe
cagaactgtttggtaacctttcgta

SEQ ID NO: 45822 - DNA, 25 bp, Artificial
  Probe
acaaccacacaatgtatataattcc

SEQ ID NO: 45823 - DNA, 25 bp, Artificial
  Probe
atgtcctgtcaagaattcgtatagt

SEQ ID NO: 45824 - DNA, 25 bp, Artificial
  Probe
tcatgtcctgtcaagaattcgtata

SEQ ID NO: 45825 - DNA, 25 bp, Artificial
  Probe
catgtcctgtcaagaattcgtatag

SEQ ID NO: 45826 - DNA, 25 bp, Artificial
  Probe
ggcgagaatgttctagtaaatgtgt

SEQ ID NO: 45827 - DNA, 25 bp, Artificial
  Probe
tggcgagaatgttctagtaaatgtg

SEQ ID NO: 45828 - DNA, 25 bp, Artificial
  Probe
aacatttcgtcccaaagtctgagta

SEQ ID NO: 45829 - DNA, 25 bp, Artificial
  Probe
ttcatgtcctgtcaagaattcgtat

SEQ ID NO: 45830 - DNA, 25 bp, Artificial
  Probe
gttgtttcatgtcctgtcaagaatt

SEQ ID NO: 45831 - DNA, 25 bp, Artificial
  Probe
tgtcctgtcaagaattcgtatagta

SEQ ID NO: 45832 - DNA, 25 bp, Artificial
  Probe
aaatgttgtttcatgtcctgtcaag

SEQ ID NO: 45833 - DNA, 25 bp, Artificial
  Probe
agaactgtttggtaacctttcgtac

SEQ ID NO: 45834 - DNA, 25 bp, Artificial
  Probe
gaaagccaactgtttgtactgaatg

SEQ ID NO: 45835 - DNA, 25 bp, Artificial
  Probe
gtcctgtcaagaattcgtatagtac

SEQ ID NO: 45836 - DNA, 25 bp, Artificial
  Probe
caaccacacaatgtatataattcct

SEQ ID NO: 45837 - DNA, 25 bp, Artificial
  Probe
tgttgtttcatgtcctgtcaagaat

SEQ ID NO: 45838 - DNA, 25 bp, Artificial
  Probe
atgttgtttcatgtcctgtcaagaa

SEQ ID NO: 45839 - DNA, 25 bp, Artificial
  Probe
aatgttgtttcatgtcctgtcaaga

SEQ ID NO: 45840 - DNA, 25 bp, Artificial
  Probe
caaacatttcgtcccaaagtctgag

SEQ ID NO: 45841 - DNA, 25 bp, Artificial
  Probe
tttgtactgaatggcgagaatgttc

SEQ ID NO: 45842 - DNA, 25 bp, Artificial
  Probe
gtttgtactgaatggcgagaatgtt

SEQ ID NO: 45843 - DNA, 25 bp, Artificial
  Probe
ggtttatccatgttacagctattca

SEQ ID NO: 45844 - DNA, 25 bp, Artificial
  Probe
tttccagaactgtttggtaaccttt

SEQ ID NO: 45845 - DNA, 25 bp, Artificial
  Probe
tgttccatttgtttatgtaaagtga

SEQ ID NO: 45846 - DNA, 25 bp, Artificial
  Probe
aaacatttcgtcccaaagtctgagt

SEQ ID NO: 45847 - DNA, 25 bp, Artificial
  Probe
ctgtttgtactgaatggcgagaatg

SEQ ID NO: 45848 - DNA, 25 bp, Artificial
  Probe
atctacgtgtcaaactgttccattt

SEQ ID NO: 45849 - DNA, 25 bp, Artificial
  Probe
ttccagaactgtttggtaacctttc

SEQ ID NO: 45850 - DNA, 25 bp, Artificial
  Probe
gtataaagtgcaaacatttcgtccc

SEQ ID NO: 45851 - DNA, 25 bp, Artificial
  Probe
cgaaagccaactgtttgtactgaat

SEQ ID NO: 45852 - DNA, 25 bp, Artificial
  Probe
ctgttccatttgtttatgtaaagtg

SEQ ID NO: 45853 - DNA, 25 bp, Artificial
  Probe
gtttccagaactgtttggtaacctt

SEQ ID NO: 45854 - DNA, 25 bp, Artificial
  Probe
atgtaaagggtctggtttatccatg

SEQ ID NO: 45855 - DNA, 25 bp, Artificial
  Probe
catgtaaagggtctggtttatccat

SEQ ID NO: 45856 - DNA, 25 bp, Artificial
  Probe
ctgtcctctgagatgtatgtgaaga

SEQ ID NO: 45857 - DNA, 25 bp, Artificial
  Probe
tctgtcctctgagatgtatgtgaag

SEQ ID NO: 45858 - DNA, 25 bp, Artificial
  Probe
ctctgtcctctgagatgtatgtgaa

SEQ ID NO: 45859 - DNA, 25 bp, Artificial
  Probe
tttcaacccacctattatttccaga

SEQ ID NO: 45860 - DNA, 25 bp, Artificial
  Probe
tcaacccacctattatttccagatt

SEQ ID NO: 45861 - DNA, 25 bp, Artificial
  Probe
ttcaacccacctattatttccagat

SEQ ID NO: 45862 - DNA, 25 bp, Artificial
  Probe
aactcttcggctgtgacatttatta

SEQ ID NO: 45863 - DNA, 25 bp, Artificial
  Probe
ggaatagcaataccaaagggcatat

SEQ ID NO: 45864 - DNA, 25 bp, Artificial
  Probe
caacccacctattatttccagattt

SEQ ID NO: 45865 - DNA, 25 bp, Artificial
  Probe
actcttcggctgtgacatttattag

SEQ ID NO: 45866 - DNA, 25 bp, Artificial
  Probe
cttcggctgtgacatttattagaat

SEQ ID NO: 45867 - DNA, 25 bp, Artificial
  Probe
tcttcggctgtgacatttattagaa

SEQ ID NO: 45868 - DNA, 25 bp, Artificial
  Probe
ttcggctgtgacatttattagaatt

SEQ ID NO: 45869 - DNA, 25 bp, Artificial
  Probe
ctcttcggctgtgacatttattaga

SEQ ID NO: 45870 - DNA, 25 bp, Artificial
  Probe
caacaagcagtggttacaaattgat

SEQ ID NO: 45871 - DNA, 25 bp, Artificial
  Probe
ttgaagggaatagcaataccaaagg

SEQ ID NO: 45872 - DNA, 25 bp, Artificial
  Probe
caacaacaagcagtggttacaaatt

SEQ ID NO: 45873 - DNA, 25 bp, Artificial
  Probe
tcggctgtgacatttattagaatta

SEQ ID NO: 45874 - DNA, 25 bp, Artificial
  Probe
aacaacaagcagtggttacaaattg

SEQ ID NO: 45875 - DNA, 25 bp, Artificial
  Probe
gaactcttcggctgtgacatttatt

SEQ ID NO: 45876 - DNA, 25 bp, Artificial
  Probe
aacaagcagtggttacaaattgatc

SEQ ID NO: 45877 - DNA, 25 bp, Artificial
  Probe
acaagcagtggttacaaattgatct

SEQ ID NO: 45878 - DNA, 25 bp, Artificial
  Probe
acaacaacaagcagtggttacaaat

SEQ ID NO: 45879 - DNA, 25 bp, Artificial
  Probe
acaacaagcagtggttacaaattga

SEQ ID NO: 45880 - DNA, 25 bp, Artificial
  Probe
ctgagatgtatgtgaagagctacag

SEQ ID NO: 45881 - DNA, 25 bp, Artificial
  Probe
cggctgtgacatttattagaattaa

SEQ ID NO: 45882 - DNA, 25 bp, Artificial
  Probe
aacccacctattatttccagattta

SEQ ID NO: 45883 - DNA, 25 bp, Artificial
  Probe
tctgagatgtatgtgaagagctaca

SEQ ID NO: 45884 - DNA, 25 bp, Artificial
  Probe
aacaacaacaagcagtggttacaaa

SEQ ID NO: 45885 - DNA, 25 bp, Artificial
  Probe
aaacaacaacaagcagtggttacaa

SEQ ID NO: 45886 - DNA, 25 bp, Artificial
  Probe
tgaagggaatagcaataccaaaggg

SEQ ID NO: 45887 - DNA, 25 bp, Artificial
  Probe
caagcagtggttacaaattgatctg

SEQ ID NO: 45888 - DNA, 25 bp, Artificial
  Probe
acccacctattatttccagatttat

SEQ ID NO: 45889 - DNA, 25 bp, Artificial
  Probe
gggaatagcaataccaaagggcata

SEQ ID NO: 45890 - DNA, 25 bp, Artificial
  Probe
ttccagatttatccgaatcattcct

SEQ ID NO: 45891 - DNA, 25 bp, Artificial
  Probe
cacctattatttccagatttatccg

SEQ ID NO: 45892 - DNA, 25 bp, Artificial
  Probe
acctattatttccagatttatccga

SEQ ID NO: 45893 - DNA, 25 bp, Artificial
  Probe
tttccagatttatccgaatcattcc

SEQ ID NO: 45894 - DNA, 25 bp, Artificial
  Probe
tccagatttatccgaatcattccta

SEQ ID NO: 45895 - DNA, 25 bp, Artificial
  Probe
agatgtatgtgaagagctacagcat

SEQ ID NO: 45896 - DNA, 25 bp, Artificial
  Probe
cagtggttacaaattgatctgctca

SEQ ID NO: 45897 - DNA, 25 bp, Artificial
  Probe
ccagatttatccgaatcattcctaa

SEQ ID NO: 45898 - DNA, 25 bp, Artificial
  Probe
ccacctattatttccagatttatcc

SEQ ID NO: 45899 - DNA, 25 bp, Artificial
  Probe
cccacctattatttccagatttatc

SEQ ID NO: 45900 - DNA, 25 bp, Artificial
  Probe
caaacaacaacaagcagtggttaca

SEQ ID NO: 45901 - DNA, 25 bp, Artificial
  Probe
ttagtgatgataagctgagggacaa

SEQ ID NO: 45902 - DNA, 25 bp, Artificial
  Probe
tagtgatgataagctgagggacaag

SEQ ID NO: 45903 - DNA, 25 bp, Artificial
  Probe
atcttagtgatgataagctgaggga

SEQ ID NO: 45904 - DNA, 25 bp, Artificial
  Probe
tcttagtgatgataagctgagggac

SEQ ID NO: 45905 - DNA, 25 bp, Artificial
  Probe
cttagtgatgataagctgagggaca

SEQ ID NO: 45906 - DNA, 25 bp, Artificial
  Probe
catcttagtgatgataagctgaggg

SEQ ID NO: 45907 - DNA, 25 bp, Artificial
  Probe
agtgatgataagctgagggacaagg

SEQ ID NO: 45908 - DNA, 25 bp, Artificial
  Probe
agctgaaacgtcagaaatacgatat

SEQ ID NO: 45909 - DNA, 25 bp, Artificial
  Probe
aagctgaaacgtcagaaatacgata

SEQ ID NO: 45910 - DNA, 25 bp, Artificial
  Probe
tatcaagaacaacagacacgcctat

SEQ ID NO: 45911 - DNA, 25 bp, Artificial
  Probe
atcaagaacaacagacacgcctatt

SEQ ID NO: 45912 - DNA, 25 bp, Artificial
  Probe
gtatcaagaacaacagacacgccta

SEQ ID NO: 45913 - DNA, 25 bp, Artificial
  Probe
ctctgtaaatgatagtgtctcggtg

SEQ ID NO: 45914 - DNA, 25 bp, Artificial
  Probe
gcaaaggacaacagtttacatttca

SEQ ID NO: 45915 - DNA, 25 bp, Artificial
  Probe
ggcaaaggacaacagtttacatttc

SEQ ID NO: 45916 - DNA, 25 bp, Artificial
  Probe
ttcatacttccgagaacttcgtatt

SEQ ID NO: 45917 - DNA, 25 bp, Artificial
  Probe
tactctgtaaatgatagtgtctcgg

SEQ ID NO: 45918 - DNA, 25 bp, Artificial
  Probe
tacatttcatacttccgagaacttc

SEQ ID NO: 45919 - DNA, 25 bp, Artificial
  Probe
caaaggacaacagtttacatttcat

SEQ ID NO: 45920 - DNA, 25 bp, Artificial
  Probe
taataacttggtttgctaaggagac

SEQ ID NO: 45921 - DNA, 25 bp, Artificial
  Probe
aataacttggtttgctaaggagacg

SEQ ID NO: 45922 - DNA, 25 bp, Artificial
  Probe
acagtttacatttcatacttccgag

SEQ ID NO: 45923 - DNA, 25 bp, Artificial
  Probe
atgatagtgtctcggtggcagaata

SEQ ID NO: 45924 - DNA, 25 bp, Artificial
  Probe
actctgtaaatgatagtgtctcggt

SEQ ID NO: 45925 - DNA, 25 bp, Artificial
  Probe
taaacaagccaataaactcttcagt

SEQ ID NO: 45926 - DNA, 25 bp, Artificial
  Probe
cagtttacatttcatacttccgaga

SEQ ID NO: 45927 - DNA, 25 bp, Artificial
  Probe
tctgtaaatgatagtgtctcggtgg

SEQ ID NO: 45928 - DNA, 25 bp, Artificial
  Probe
caacagtttacatttcatacttccg

SEQ ID NO: 45929 - DNA, 25 bp, Artificial
  Probe
aacagtttacatttcatacttccga

SEQ ID NO: 45930 - DNA, 25 bp, Artificial
  Probe
ttacatttcatacttccgagaactt

SEQ ID NO: 45931 - DNA, 25 bp, Artificial
  Probe
tttacatttcatacttccgagaact

SEQ ID NO: 45932 - DNA, 25 bp, Artificial
  Probe
gtttacatttcatacttccgagaac

SEQ ID NO: 45933 - DNA, 25 bp, Artificial
  Probe
aggacaacagtttacatttcatact

SEQ ID NO: 45934 - DNA, 25 bp, Artificial
  Probe
ttaaacaagccaataaactcttcag

SEQ ID NO: 45935 - DNA, 25 bp, Artificial
  Probe
aaggacaacagtttacatttcatac

SEQ ID NO: 45936 - DNA, 25 bp, Artificial
  Probe
agtttacatttcatacttccgagaa

SEQ ID NO: 45937 - DNA, 25 bp, Artificial
  Probe
ataataacttggtttgctaaggaga

SEQ ID NO: 45938 - DNA, 25 bp, Artificial
  Probe
agataataacttggtttgctaagga

SEQ ID NO: 45939 - DNA, 25 bp, Artificial
  Probe
gggcaaaggacaacagtttacattt

SEQ ID NO: 45940 - DNA, 25 bp, Artificial
  Probe
gtactctgtaaatgatagtgtctcg

SEQ ID NO: 45941 - DNA, 25 bp, Artificial
  Probe
tgatagtgtctcggtggcagaatag

SEQ ID NO: 45942 - DNA, 25 bp, Artificial
  Probe
gataataacttggtttgctaaggag

SEQ ID NO: 45943 - DNA, 25 bp, Artificial
  Probe
acaacagtttacatttcatacttcc

SEQ ID NO: 45944 - DNA, 25 bp, Artificial
  Probe
ggacaacagtttacatttcatactt

SEQ ID NO: 45945 - DNA, 25 bp, Artificial
  Probe
aatgatagtgtctcggtggcagaat

SEQ ID NO: 45946 - DNA, 25 bp, Artificial
  Probe
tcaagaacaacagacacgcctattt

SEQ ID NO: 45947 - DNA, 25 bp, Artificial
  Probe
aaaggacaacagtttacatttcata

SEQ ID NO: 45948 - DNA, 25 bp, Artificial
  Probe
taggtcctcggatttgaactaggta

SEQ ID NO: 45949 - DNA, 25 bp, Artificial
  Probe
tcatacttccgagaacttcgtattt

SEQ ID NO: 45950 - DNA, 25 bp, Artificial
  Probe
tttcatacttccgagaacttcgtat

SEQ ID NO: 45951 - DNA, 25 bp, Artificial
  Probe
atttcatacttccgagaacttcgta

SEQ ID NO: 45952 - DNA, 25 bp, Artificial
  Probe
gtaaatgatagtgtctcggtggcag

SEQ ID NO: 45953 - DNA, 25 bp, Artificial
  Probe
ctgtaaatgatagtgtctcggtggc

SEQ ID NO: 45954 - DNA, 25 bp, Artificial
  Probe
tggttgtctagataataacttggtt

SEQ ID NO: 45955 - DNA, 25 bp, Artificial
  Probe
tagttcctgttcagtgaagaagtac

SEQ ID NO: 45956 - DNA, 25 bp, Artificial
  Probe
ctagttcctgttcagtgaagaagta

SEQ ID NO: 45957 - DNA, 25 bp, Artificial
  Probe
tctagttcctgttcagtgaagaagt

SEQ ID NO: 45958 - DNA, 25 bp, Artificial
  Probe
ctgaatcttacacaagccttgaatg

SEQ ID NO: 45959 - DNA, 25 bp, Artificial
  Probe
tctgaatcttacacaagccttgaat

SEQ ID NO: 45960 - DNA, 25 bp, Artificial
  Probe
ctctgaatcttacacaagccttgaa

SEQ ID NO: 45961 - DNA, 25 bp, Artificial
  Probe
ccaattaacagctctgaatcttaca

SEQ ID NO: 45962 - DNA, 25 bp, Artificial
  Probe
tgaatcttacacaagccttgaatgg

SEQ ID NO: 45963 - DNA, 25 bp, Artificial
  Probe
ttaacagctctgaatcttacacaag

SEQ ID NO: 45964 - DNA, 25 bp, Artificial
  Probe
attaacagctctgaatcttacacaa

SEQ ID NO: 45965 - DNA, 25 bp, Artificial
  Probe
aattaacagctctgaatcttacaca

SEQ ID NO: 45966 - DNA, 25 bp, Artificial
  Probe
cgtcttctagttcctgttcagtgaa

SEQ ID NO: 45967 - DNA, 25 bp, Artificial
  Probe
attaaatgactgccctttctttgtg

SEQ ID NO: 45968 - DNA, 25 bp, Artificial
  Probe
aattaaatgactgccctttctttgt

SEQ ID NO: 45969 - DNA, 25 bp, Artificial
  Probe
caattaacagctctgaatcttacac

SEQ ID NO: 45970 - DNA, 25 bp, Artificial
  Probe
tatcccttaatagatgtcacaccga

SEQ ID NO: 45971 - DNA, 25 bp, Artificial
  Probe
ttaaatgactgccctttctttgtga

SEQ ID NO: 45972 - DNA, 25 bp, Artificial
  Probe
taaatgactgccctttctttgtgag

SEQ ID NO: 45973 - DNA, 25 bp, Artificial
  Probe
aaattaaatgactgccctttctttg

SEQ ID NO: 45974 - DNA, 25 bp, Artificial
  Probe
ttctagttcctgttcagtgaagaag

SEQ ID NO: 45975 - DNA, 25 bp, Artificial
  Probe
ctatcccttaatagatgtcacaccg

SEQ ID NO: 45976 - DNA, 25 bp, Artificial
  Probe
actatcccttaatagatgtcacacc

SEQ ID NO: 45977 - DNA, 25 bp, Artificial
  Probe
ggctactatcccttaatagatgtca

SEQ ID NO: 45978 - DNA, 25 bp, Artificial
  Probe
gcaggctactatcccttaatagatg

SEQ ID NO: 45979 - DNA, 25 bp, Artificial
  Probe
cccaattaacagctctgaatcttac

SEQ ID NO: 45980 - DNA, 25 bp, Artificial
  Probe
tcccaattaacagctctgaatctta

SEQ ID NO: 45981 - DNA, 25 bp, Artificial
  Probe
atgattaccctgcgtcttctagttc

SEQ ID NO: 45982 - DNA, 25 bp, Artificial
  Probe
cttctagttcctgttcagtgaagaa

SEQ ID NO: 45983 - DNA, 25 bp, Artificial
  Probe
caggctactatcccttaatagatgt

SEQ ID NO: 45984 - DNA, 25 bp, Artificial
  Probe
ctcccaattaacagctctgaatctt

SEQ ID NO: 45985 - DNA, 25 bp, Artificial
  Probe
aggctactatcccttaatagatgtc

SEQ ID NO: 45986 - DNA, 25 bp, Artificial
  Probe
gtcttctagttcctgttcagtgaag

SEQ ID NO: 45987 - DNA, 25 bp, Artificial
  Probe
gctactatcccttaatagatgtcac

SEQ ID NO: 45988 - DNA, 25 bp, Artificial
  Probe
taacagctctgaatcttacacaagc

SEQ ID NO: 45989 - DNA, 25 bp, Artificial
  Probe
atcccttaatagatgtcacaccgac

SEQ ID NO: 45990 - DNA, 25 bp, Artificial
  Probe
agttcctgttcagtgaagaagtact

SEQ ID NO: 45991 - DNA, 25 bp, Artificial
  Probe
gaatcttacacaagccttgaatggg

SEQ ID NO: 45992 - DNA, 25 bp, Artificial
  Probe
catgattaccctgcgtcttctagtt

SEQ ID NO: 45993 - DNA, 25 bp, Artificial
  Probe
cctcccaattaacagctctgaatct

SEQ ID NO: 45994 - DNA, 25 bp, Artificial
  Probe
tactatcccttaatagatgtcacac

SEQ ID NO: 45995 - DNA, 25 bp, Artificial
  Probe
gcgtcttctagttcctgttcagtga

SEQ ID NO: 45996 - DNA, 25 bp, Artificial
  Probe
tttgcaggctactatcccttaatag

SEQ ID NO: 45997 - DNA, 25 bp, Artificial
  Probe
tgcaggctactatcccttaatagat

SEQ ID NO: 45998 - DNA, 25 bp, Artificial
  Probe
ttgcaggctactatcccttaataga

SEQ ID NO: 45999 - DNA, 25 bp, Artificial
  Probe
catttgcaggctactatcccttaat

SEQ ID NO: 46000 - DNA, 25 bp, Artificial
  Probe
accacgagaacattgtgaagtataa

SEQ ID NO: 46001 - DNA, 25 bp, Artificial
  Probe
taccacgagaacattgtgaagtata

SEQ ID NO: 46002 - DNA, 25 bp, Artificial
  Probe
ctaccacgagaacattgtgaagtat

SEQ ID NO: 46003 - DNA, 25 bp, Artificial
  Probe
taaccacatagctgatctgaagaag

SEQ ID NO: 46004 - DNA, 25 bp, Artificial
  Probe
gtaaccacatagctgatctgaagaa

SEQ ID NO: 46005 - DNA, 25 bp, Artificial
  Probe
tctaccacgagaacattgtgaagta

SEQ ID NO: 46006 - DNA, 25 bp, Artificial
  Probe
aatatgccatccagatttgtaaggg

SEQ ID NO: 46007 - DNA, 25 bp, Artificial
  Probe
ggtaaccacatagctgatctgaaga

SEQ ID NO: 46008 - DNA, 25 bp, Artificial
  Probe
aggtaaccacatagctgatctgaag

SEQ ID NO: 46009 - DNA, 25 bp, Artificial
  Probe
gaggtaaccacatagctgatctgaa

SEQ ID NO: 46010 - DNA, 25 bp, Artificial
  Probe
acgagaacattgtgaagtataaagg

SEQ ID NO: 46011 - DNA, 25 bp, Artificial
  Probe
cacatagctgatctgaagaaggaga

SEQ ID NO: 46012 - DNA, 25 bp, Artificial
  Probe
cgagaacattgtgaagtataaagga

SEQ ID NO: 46013 - DNA, 25 bp, Artificial
  Probe
gaatggtatcaagctcatcatggag

SEQ ID NO: 46014 - DNA, 25 bp, Artificial
  Probe
aagcctaaaggaatatctgccaaag

SEQ ID NO: 46015 - DNA, 25 bp, Artificial
  Probe
gaagcctaaaggaatatctgccaaa

SEQ ID NO: 46016 - DNA, 25 bp, Artificial
  Probe
cagaatccagacattgtttcagaaa

SEQ ID NO: 46017 - DNA, 25 bp, Artificial
  Probe
gctgatctgaagaaggagatagaga

SEQ ID NO: 46018 - DNA, 25 bp, Artificial
  Probe
cattgtgaagtataaaggaatctgc

SEQ ID NO: 46019 - DNA, 25 bp, Artificial
  Probe
gcctaaaggaatatctgccaaagaa

SEQ ID NO: 46020 - DNA, 25 bp, Artificial
  Probe
aaccacatagctgatctgaagaagg

SEQ ID NO: 46021 - DNA, 25 bp, Artificial
  Probe
cctaaaggaatatctgccaaagaat

SEQ ID NO: 46022 - DNA, 25 bp, Artificial
  Probe
ctctaccacgagaacattgtgaagt

SEQ ID NO: 46023 - DNA, 25 bp, Artificial
  Probe
atggtatcaagctcatcatggagtt

SEQ ID NO: 46024 - DNA, 25 bp, Artificial
  Probe
aatggtatcaagctcatcatggagt

SEQ ID NO: 46025 - DNA, 25 bp, Artificial
  Probe
ctgatctgaagaaggagatagagat

SEQ ID NO: 46026 - DNA, 25 bp, Artificial
  Probe
ccacatagctgatctgaagaaggag

SEQ ID NO: 46027 - DNA, 25 bp, Artificial
  Probe
aaatatgccatccagatttgtaagg

SEQ ID NO: 46028 - DNA, 25 bp, Artificial
  Probe
gcagaatccagacattgtttcagaa

SEQ ID NO: 46029 - DNA, 25 bp, Artificial
  Probe
ggaatggtatcaagctcatcatgga

SEQ ID NO: 46030 - DNA, 25 bp, Artificial
  Probe
agcctaaaggaatatctgccaaaga

SEQ ID NO: 46031 - DNA, 25 bp, Artificial
  Probe
tagctgatctgaagaaggagataga

SEQ ID NO: 46032 - DNA, 25 bp, Artificial
  Probe
ggaatatctgccaaagaataagaac

SEQ ID NO: 46033 - DNA, 25 bp, Artificial
  Probe
aggaatatctgccaaagaataagaa

SEQ ID NO: 46034 - DNA, 25 bp, Artificial
  Probe
aaggaatatctgccaaagaataaga

SEQ ID NO: 46035 - DNA, 25 bp, Artificial
  Probe
ccacgagaacattgtgaagtataaa

SEQ ID NO: 46036 - DNA, 25 bp, Artificial
  Probe
catagctgatctgaagaaggagata

SEQ ID NO: 46037 - DNA, 25 bp, Artificial
  Probe
acatagctgatctgaagaaggagat

SEQ ID NO: 46038 - DNA, 25 bp, Artificial
  Probe
gagcagaatccagacattgtttcag

SEQ ID NO: 46039 - DNA, 25 bp, Artificial
  Probe
atgaactatgatcccaaccagagac

SEQ ID NO: 46040 - DNA, 25 bp, Artificial
  Probe
agctgatctgaagaaggagatagag

SEQ ID NO: 46041 - DNA, 25 bp, Artificial
  Probe
ttcgggaagcctaaaggaatatctg

SEQ ID NO: 46042 - DNA, 25 bp, Artificial
  Probe
atagctgatctgaagaaggagatag

SEQ ID NO: 46043 - DNA, 25 bp, Artificial
  Probe
cctctaccacgagaacattgtgaag

SEQ ID NO: 46044 - DNA, 25 bp, Artificial
  Probe
cttcgggaagcctaaaggaatatct

SEQ ID NO: 46045 - DNA, 25 bp, Artificial
  Probe
taacagtcagtcctaatggtcctac

SEQ ID NO: 46046 - DNA, 25 bp, Artificial
  Probe
gtaacagtcagtcctaatggtccta

SEQ ID NO: 46047 - DNA, 25 bp, Artificial
  Probe
ttgtaacagtcagtcctaatggtcc

SEQ ID NO: 46048 - DNA, 25 bp, Artificial
  Probe
tgtaacagtcagtcctaatggtcct

SEQ ID NO: 46049 - DNA, 25 bp, Artificial
  Probe
tgctgtatttgatttgagattccac

SEQ ID NO: 46050 - DNA, 25 bp, Artificial
  Probe
agcgatttcagatttattccaagtc

SEQ ID NO: 46051 - DNA, 25 bp, Artificial
  Probe
gctgtatttgatttgagattccact

SEQ ID NO: 46052 - DNA, 25 bp, Artificial
  Probe
ctgctgtatttgatttgagattcca

SEQ ID NO: 46053 - DNA, 25 bp, Artificial
  Probe
aagcgatttcagatttattccaagt

SEQ ID NO: 46054 - DNA, 25 bp, Artificial
  Probe
gctgctgtatttgatttgagattcc

SEQ ID NO: 46055 - DNA, 25 bp, Artificial
  Probe
ggctgctgtatttgatttgagattc

SEQ ID NO: 46056 - DNA, 25 bp, Artificial
  Probe
tttgtaacagtcagtcctaatggtc

SEQ ID NO: 46057 - DNA, 25 bp, Artificial
  Probe
gcgatttcagatttattccaagtct

SEQ ID NO: 46058 - DNA, 25 bp, Artificial
  Probe
tggctgctgtatttgatttgagatt

SEQ ID NO: 46059 - DNA, 25 bp, Artificial
  Probe
ttggctgctgtatttgatttgagat

SEQ ID NO: 46060 - DNA, 25 bp, Artificial
  Probe
gtttgtaacagtcagtcctaatggt

SEQ ID NO: 46061 - DNA, 25 bp, Artificial
  Probe
aaagcgatttcagatttattccaag

SEQ ID NO: 46062 - DNA, 25 bp, Artificial
  Probe
cttggctgctgtatttgatttgaga

SEQ ID NO: 46063 - DNA, 25 bp, Artificial
  Probe
cctaatggtcctaccttgtcttcag

SEQ ID NO: 46064 - DNA, 25 bp, Artificial
  Probe
gtcctaatggtcctaccttgtcttc

SEQ ID NO: 46065 - DNA, 25 bp, Artificial
  Probe
tcctaatggtcctaccttgtcttca

SEQ ID NO: 46066 - DNA, 25 bp, Artificial
  Probe
agtcctaatggtcctaccttgtctt

SEQ ID NO: 46067 - DNA, 25 bp, Artificial
  Probe
ttgagattccactaaacaaagccac

SEQ ID NO: 46068 - DNA, 25 bp, Artificial
  Probe
tgagtttatggtctaaatggacaga

SEQ ID NO: 46069 - DNA, 25 bp, Artificial
  Probe
tcagatttattccaagtctccattt

SEQ ID NO: 46070 - DNA, 25 bp, Artificial
  Probe
ttcagatttattccaagtctccatt

SEQ ID NO: 46071 - DNA, 25 bp, Artificial
  Probe
tttcagatttattccaagtctccat

SEQ ID NO: 46072 - DNA, 25 bp, Artificial
  Probe
atttcagatttattccaagtctcca

SEQ ID NO: 46073 - DNA, 25 bp, Artificial
  Probe
cgatttcagatttattccaagtctc

SEQ ID NO: 46074 - DNA, 25 bp, Artificial
  Probe
ctcttctggtcaccttgtttgtaac

SEQ ID NO: 46075 - DNA, 25 bp, Artificial
  Probe
ctaatggtcctaccttgtcttcagc

SEQ ID NO: 46076 - DNA, 25 bp, Artificial
  Probe
atgagtttatggtctaaatggacag

SEQ ID NO: 46077 - DNA, 25 bp, Artificial
  Probe
gagtttatggtctaaatggacagaa

SEQ ID NO: 46078 - DNA, 25 bp, Artificial
  Probe
gatttcagatttattccaagtctcc

SEQ ID NO: 46079 - DNA, 25 bp, Artificial
  Probe
ccttggctgctgtatttgatttgag

SEQ ID NO: 46080 - DNA, 25 bp, Artificial
  Probe
gcaactaccactgtttggaaataat

SEQ ID NO: 46081 - DNA, 25 bp, Artificial
  Probe
accactgtttggaaataatgagttt

SEQ ID NO: 46082 - DNA, 25 bp, Artificial
  Probe
ttatggtctaaatggacagaaatgt

SEQ ID NO: 46083 - DNA, 25 bp, Artificial
  Probe
aatgagtttatggtctaaatggaca

SEQ ID NO: 46084 - DNA, 25 bp, Artificial
  Probe
agcaactaccactgtttggaaataa

SEQ ID NO: 46085 - DNA, 25 bp, Artificial
  Probe
agtttatggtctaaatggacagaaa

SEQ ID NO: 46086 - DNA, 25 bp, Artificial
  Probe
ctaccactgtttggaaataatgagt

SEQ ID NO: 46087 - DNA, 25 bp, Artificial
  Probe
actaccactgtttggaaataatgag

SEQ ID NO: 46088 - DNA, 25 bp, Artificial
  Probe
atttgatttgagattccactaaaca

SEQ ID NO: 46089 - DNA, 25 bp, Artificial
  Probe
cagtcctaatggtcctaccttgtct

SEQ ID NO: 46090 - DNA, 25 bp, Artificial
  Probe
cttgatagcagatacactctaaggt

SEQ ID NO: 46091 - DNA, 25 bp, Artificial
  Probe
tcttgatagcagatacactctaagg

SEQ ID NO: 46092 - DNA, 25 bp, Artificial
  Probe
ttgatagcagatacactctaaggtt

SEQ ID NO: 46093 - DNA, 25 bp, Artificial
  Probe
agatcctcaactctccattgttaag

SEQ ID NO: 46094 - DNA, 25 bp, Artificial
  Probe
cagatcctcaactctccattgttaa

SEQ ID NO: 46095 - DNA, 25 bp, Artificial
  Probe
aaggagaccagagataattaatgcc

SEQ ID NO: 46096 - DNA, 25 bp, Artificial
  Probe
gaccagagataattaatgccaccaa

SEQ ID NO: 46097 - DNA, 25 bp, Artificial
  Probe
gagaccagagataattaatgccacc

SEQ ID NO: 46098 - DNA, 25 bp, Artificial
  Probe
ggagaccagagataattaatgccac

SEQ ID NO: 46099 - DNA, 25 bp, Artificial
  Probe
aggagaccagagataattaatgcca

SEQ ID NO: 46100 - DNA, 25 bp, Artificial
  Probe
accagagataattaatgccaccaac

SEQ ID NO: 46101 - DNA, 25 bp, Artificial
  Probe
ttcttgatagcagatacactctaag

SEQ ID NO: 46102 - DNA, 25 bp, Artificial
  Probe
cttcttgatagcagatacactctaa

SEQ ID NO: 46103 - DNA, 25 bp, Artificial
  Probe
ccagatcctcaactctccattgtta

SEQ ID NO: 46104 - DNA, 25 bp, Artificial
  Probe
agaccagagataattaatgccacca

SEQ ID NO: 46105 - DNA, 25 bp, Artificial
  Probe
gtgatggtcatatctgaacctagac

SEQ ID NO: 46106 - DNA, 25 bp, Artificial
  Probe
gatcctcaactctccattgttaagg

SEQ ID NO: 46107 - DNA, 25 bp, Artificial
  Probe
ccagagataattaatgccaccaacc

SEQ ID NO: 46108 - DNA, 25 bp, Artificial
  Probe
atctctgagtaatacatcaagctgg

SEQ ID NO: 46109 - DNA, 25 bp, Artificial
  Probe
ggtgatggtcatatctgaacctaga

SEQ ID NO: 46110 - DNA, 25 bp, Artificial
  Probe
ctctgagtaatacatcaagctggtg

SEQ ID NO: 46111 - DNA, 25 bp, Artificial
  Probe
tctctgagtaatacatcaagctggt

SEQ ID NO: 46112 - DNA, 25 bp, Artificial
  Probe
taaggagaccagagataattaatgc

SEQ ID NO: 46113 - DNA, 25 bp, Artificial
  Probe
gggtttctggttgaatttgagtatt

SEQ ID NO: 46114 - DNA, 25 bp, Artificial
  Probe
tgggtttctggttgaatttgagtat

SEQ ID NO: 46115 - DNA, 25 bp, Artificial
  Probe
ttgtattccaagtctttaaccctca

SEQ ID NO: 46116 - DNA, 25 bp, Artificial
  Probe
ttgggtttctggttgaatttgagta

SEQ ID NO: 46117 - DNA, 25 bp, Artificial
  Probe
tgatagcagatacactctaaggttt

SEQ ID NO: 46118 - DNA, 25 bp, Artificial
  Probe
gcttcttgatagcagatacactcta

SEQ ID NO: 46119 - DNA, 25 bp, Artificial
  Probe
ttatcatctccctttctctctgaca

SEQ ID NO: 46120 - DNA, 25 bp, Artificial
  Probe
tttatcatctccctttctctctgac

SEQ ID NO: 46121 - DNA, 25 bp, Artificial
  Probe
gtttgggtttctggttgaatttgag

SEQ ID NO: 46122 - DNA, 25 bp, Artificial
  Probe
tttgggtttctggttgaatttgagt

SEQ ID NO: 46123 - DNA, 25 bp, Artificial
  Probe
attgtattccaagtctttaaccctc

SEQ ID NO: 46124 - DNA, 25 bp, Artificial
  Probe
tatcatctccctttctctctgacac

SEQ ID NO: 46125 - DNA, 25 bp, Artificial
  Probe
tgggactcaagaataacgaatttgg

SEQ ID NO: 46126 - DNA, 25 bp, Artificial
  Probe
ggtttctggttgaatttgagtattt

SEQ ID NO: 46127 - DNA, 25 bp, Artificial
  Probe
tatctctgagtaatacatcaagctg

SEQ ID NO: 46128 - DNA, 25 bp, Artificial
  Probe
ctggttgaatttgagtatttgttct

SEQ ID NO: 46129 - DNA, 25 bp, Artificial
  Probe
tctggttgaatttgagtatttgttc

SEQ ID NO: 46130 - DNA, 25 bp, Artificial
  Probe
gggactcaagaataacgaatttggg

SEQ ID NO: 46131 - DNA, 25 bp, Artificial
  Probe
cttcctgtcattaacctgtcacacc

SEQ ID NO: 46132 - DNA, 25 bp, Artificial
  Probe
ccttcctgtcattaacctgtcacac

SEQ ID NO: 46133 - DNA, 25 bp, Artificial
  Probe
tctgagtaatacatcaagctggtgc

SEQ ID NO: 46134 - DNA, 25 bp, Artificial
  Probe
ggtttgggtttctggttgaatttga

SEQ ID NO: 46135 - DNA, 25 bp, Artificial
  Probe
aactgcgttattaacaaggtcacta

SEQ ID NO: 46136 - DNA, 25 bp, Artificial
  Probe
taagaactgcgttattaacaaggtc

SEQ ID NO: 46137 - DNA, 25 bp, Artificial
  Probe
aagaactgcgttattaacaaggtca

SEQ ID NO: 46138 - DNA, 25 bp, Artificial
  Probe
gcgttattaacaaggtcactaggaa

SEQ ID NO: 46139 - DNA, 25 bp, Artificial
  Probe
actgcgttattaacaaggtcactag

SEQ ID NO: 46140 - DNA, 25 bp, Artificial
  Probe
ataagaactgcgttattaacaaggt

SEQ ID NO: 46141 - DNA, 25 bp, Artificial
  Probe
ttattaacaaggtcactaggaatcg

SEQ ID NO: 46142 - DNA, 25 bp, Artificial
  Probe
gaactgcgttattaacaaggtcact

SEQ ID NO: 46143 - DNA, 25 bp, Artificial
  Probe
agaactgcgttattaacaaggtcac

SEQ ID NO: 46144 - DNA, 25 bp, Artificial
  Probe
cgttattaacaaggtcactaggaat

SEQ ID NO: 46145 - DNA, 25 bp, Artificial
  Probe
ctgcgttattaacaaggtcactagg

SEQ ID NO: 46146 - DNA, 25 bp, Artificial
  Probe
gataagaactgcgttattaacaagg

SEQ ID NO: 46147 - DNA, 25 bp, Artificial
  Probe
ggataagaactgcgttattaacaag

SEQ ID NO: 46148 - DNA, 25 bp, Artificial
  Probe
gcattcagaagaacatgatctacac

SEQ ID NO: 46149 - DNA, 25 bp, Artificial
  Probe
agcattcagaagaacatgatctaca

SEQ ID NO: 46150 - DNA, 25 bp, Artificial
  Probe
tgcgttattaacaaggtcactagga

SEQ ID NO: 46151 - DNA, 25 bp, Artificial
  Probe
tcagaagaacatgatctacacttgc

SEQ ID NO: 46152 - DNA, 25 bp, Artificial
  Probe
aagcattcagaagaacatgatctac

SEQ ID NO: 46153 - DNA, 25 bp, Artificial
  Probe
cattattaagatcgtggagttcgcc

SEQ ID NO: 46154 - DNA, 25 bp, Artificial
  Probe
gaagcattcagaagaacatgatcta

SEQ ID NO: 46155 - DNA, 25 bp, Artificial
  Probe
ttcagaagaacatgatctacacttg

SEQ ID NO: 46156 - DNA, 25 bp, Artificial
  Probe
cattcagaagaacatgatctacact

SEQ ID NO: 46157 - DNA, 25 bp, Artificial
  Probe
cgaagcattcagaagaacatgatct

SEQ ID NO: 46158 - DNA, 25 bp, Artificial
  Probe
tattaacaaggtcactaggaatcga

SEQ ID NO: 46159 - DNA, 25 bp, Artificial
  Probe
cagaagaacatgatctacacttgcc

SEQ ID NO: 46160 - DNA, 25 bp, Artificial
  Probe
gtgcattattaagatcgtggagttc

SEQ ID NO: 46161 - DNA, 25 bp, Artificial
  Probe
caagtgcattattaagatcgtggag

SEQ ID NO: 46162 - DNA, 25 bp, Artificial
  Probe
agtgcattattaagatcgtggagtt

SEQ ID NO: 46163 - DNA, 25 bp, Artificial
  Probe
aagtgcattattaagatcgtggagt

SEQ ID NO: 46164 - DNA, 25 bp, Artificial
  Probe
gaagaacatgatctacacttgccac

SEQ ID NO: 46165 - DNA, 25 bp, Artificial
  Probe
agaagaacatgatctacacttgcca

SEQ ID NO: 46166 - DNA, 25 bp, Artificial
  Probe
acgaagcattcagaagaacatgatc

SEQ ID NO: 46167 - DNA, 25 bp, Artificial
  Probe
gacgaagcattcagaagaacatgat

SEQ ID NO: 46168 - DNA, 25 bp, Artificial
  Probe
gcattattaagatcgtggagttcgc

SEQ ID NO: 46169 - DNA, 25 bp, Artificial
  Probe
attcagaagaacatgatctacactt

SEQ ID NO: 46170 - DNA, 25 bp, Artificial
  Probe
tgcattattaagatcgtggagttcg

SEQ ID NO: 46171 - DNA, 25 bp, Artificial
  Probe
gggataagaactgcgttattaacaa

SEQ ID NO: 46172 - DNA, 25 bp, Artificial
  Probe
gttattaacaaggtcactaggaatc

SEQ ID NO: 46173 - DNA, 25 bp, Artificial
  Probe
cgggataagaactgcgttattaaca

SEQ ID NO: 46174 - DNA, 25 bp, Artificial
  Probe
caccaagtgcattattaagatcgtg

SEQ ID NO: 46175 - DNA, 25 bp, Artificial
  Probe
attattaagatcgtggagttcgcca

SEQ ID NO: 46176 - DNA, 25 bp, Artificial
  Probe
ttattaagatcgtggagttcgccaa

SEQ ID NO: 46177 - DNA, 25 bp, Artificial
  Probe
aagaacatgatctacacttgccacc

SEQ ID NO: 46178 - DNA, 25 bp, Artificial
  Probe
ccaccaagtgcattattaagatcgt

SEQ ID NO: 46179 - DNA, 25 bp, Artificial
  Probe
ccaagtgcattattaagatcgtgga

SEQ ID NO: 46180 - DNA, 25 bp, Artificial
  Probe
ttagacggcacaactgttactctag

SEQ ID NO: 46181 - DNA, 25 bp, Artificial
  Probe
ctttatcgtgtctcaaggtagttgc

SEQ ID NO: 46182 - DNA, 25 bp, Artificial
  Probe
gagaagatgctcatggtcagagatg

SEQ ID NO: 46183 - DNA, 25 bp, Artificial
  Probe
gaagatgctcatggtcagagatgtg

SEQ ID NO: 46184 - DNA, 25 bp, Artificial
  Probe
agaagatgctcatggtcagagatgt

SEQ ID NO: 46185 - DNA, 25 bp, Artificial
  Probe
tttagacggcacaactgttactcta

SEQ ID NO: 46186 - DNA, 25 bp, Artificial
  Probe
ctttagacggcacaactgttactct

SEQ ID NO: 46187 - DNA, 25 bp, Artificial
  Probe
gtagttgcacacctagtctggattg

SEQ ID NO: 46188 - DNA, 25 bp, Artificial
  Probe
tagacggcacaactgttactctagg

SEQ ID NO: 46189 - DNA, 25 bp, Artificial
  Probe
ggagaagatgctcatggtcagagat

SEQ ID NO: 46190 - DNA, 25 bp, Artificial
  Probe
acacctagtctggattgtgatttcc

SEQ ID NO: 46191 - DNA, 25 bp, Artificial
  Probe
ttatcgtgtctcaaggtagttgcac

SEQ ID NO: 46192 - DNA, 25 bp, Artificial
  Probe
cctttagacggcacaactgttactc

SEQ ID NO: 46193 - DNA, 25 bp, Artificial
  Probe
tttatcgtgtctcaaggtagttgca

SEQ ID NO: 46194 - DNA, 25 bp, Artificial
  Probe
cacctagtctggattgtgatttccc

SEQ ID NO: 46195 - DNA, 25 bp, Artificial
  Probe
tagttgcacacctagtctggattgt

SEQ ID NO: 46196 - DNA, 25 bp, Artificial
  Probe
aagatgctcatggtcagagatgtgg

SEQ ID NO: 46197 - DNA, 25 bp, Artificial
  Probe
tatcgtgtctcaaggtagttgcaca

SEQ ID NO: 46198 - DNA, 25 bp, Artificial
  Probe
cttcctttatcgtgtctcaaggtag

SEQ ID NO: 46199 - DNA, 25 bp, Artificial
  Probe
actgttactctagggagttgatatt

SEQ ID NO: 46200 - DNA, 25 bp, Artificial
  Probe
aactgttactctagggagttgatat

SEQ ID NO: 46201 - DNA, 25 bp, Artificial
  Probe
ggtagttgcacacctagtctggatt

SEQ ID NO: 46202 - DNA, 25 bp, Artificial
  Probe
cctttatcgtgtctcaaggtagttg

SEQ ID NO: 46203 - DNA, 25 bp, Artificial
  Probe
tcctttatcgtgtctcaaggtagtt

SEQ ID NO: 46204 - DNA, 25 bp, Artificial
  Probe
ttcctttatcgtgtctcaaggtagt

SEQ ID NO: 46205 - DNA, 25 bp, Artificial
  Probe
ccctttagacggcacaactgttact

SEQ ID NO: 46206 - DNA, 25 bp, Artificial
  Probe
gaccctttagacggcacaactgtta

SEQ ID NO: 46207 - DNA, 25 bp, Artificial
  Probe
ccttcctttatcgtgtctcaaggta

SEQ ID NO: 46208 - DNA, 25 bp, Artificial
  Probe
ctcgtggctctttgaagtctgaaag

SEQ ID NO: 46209 - DNA, 25 bp, Artificial
  Probe
ctgttactctagggagttgatattt

SEQ ID NO: 46210 - DNA, 25 bp, Artificial
  Probe
accctttagacggcacaactgttac

SEQ ID NO: 46211 - DNA, 25 bp, Artificial
  Probe
tttcctgaaattcgtgattgcaaca

SEQ ID NO: 46212 - DNA, 25 bp, Artificial
  Probe
ctgaaattcgtgattgcaacaaagg

SEQ ID NO: 46213 - DNA, 25 bp, Artificial
  Probe
cctgaaattcgtgattgcaacaaag

SEQ ID NO: 46214 - DNA, 25 bp, Artificial
  Probe
tcctgaaattcgtgattgcaacaaa

SEQ ID NO: 46215 - DNA, 25 bp, Artificial
  Probe
ttcctgaaattcgtgattgcaacaa

SEQ ID NO: 46216 - DNA, 25 bp, Artificial
  Probe
cacacctagtctggattgtgatttc

SEQ ID NO: 46217 - DNA, 25 bp, Artificial
  Probe
tcgtgttttgtaatttctatttctt

SEQ ID NO: 46218 - DNA, 25 bp, Artificial
  Probe
acctagtctggattgtgatttcccc

SEQ ID NO: 46219 - DNA, 25 bp, Artificial
  Probe
atcgtgttttgtaatttctatttct

SEQ ID NO: 46220 - DNA, 25 bp, Artificial
  Probe
ggcacaactgttactctagggagtt

SEQ ID NO: 46221 - DNA, 25 bp, Artificial
  Probe
ttttcctgaaattcgtgattgcaac

SEQ ID NO: 46222 - DNA, 25 bp, Artificial
  Probe
ctcaaggtagttgcacacctagtct

SEQ ID NO: 46223 - DNA, 25 bp, Artificial
  Probe
tctcaaggtagttgcacacctagtc

SEQ ID NO: 46224 - DNA, 25 bp, Artificial
  Probe
gcacacctagtctggattgtgattt

SEQ ID NO: 46225 - DNA, 25 bp, Artificial
  Probe
ttgctcaagacaatcaattcctctc

SEQ ID NO: 46226 - DNA, 25 bp, Artificial
  Probe
tgctcaagacaatcaattcctctct

SEQ ID NO: 46227 - DNA, 25 bp, Artificial
  Probe
ttaacataccttggagtagcaataa

SEQ ID NO: 46228 - DNA, 25 bp, Artificial
  Probe
tacctaatctttcattgccttcagt

SEQ ID NO: 46229 - DNA, 25 bp, Artificial
  Probe
tctacctaatctttcattgccttca

SEQ ID NO: 46230 - DNA, 25 bp, Artificial
  Probe
ctaatctttcattgccttcagtgtg

SEQ ID NO: 46231 - DNA, 25 bp, Artificial
  Probe
ctacctaatctttcattgccttcag

SEQ ID NO: 46232 - DNA, 25 bp, Artificial
  Probe
ttcaacatctgaccaacctagtagc

SEQ ID NO: 46233 - DNA, 25 bp, Artificial
  Probe
tctctacctaatctttcattgcctt

SEQ ID NO: 46234 - DNA, 25 bp, Artificial
  Probe
ttctctacctaatctttcattgcct

SEQ ID NO: 46235 - DNA, 25 bp, Artificial
  Probe
aaatctgatacaagtggcatagtcc

SEQ ID NO: 46236 - DNA, 25 bp, Artificial
  Probe
ttctttaacataccttggagtagca

SEQ ID NO: 46237 - DNA, 25 bp, Artificial
  Probe
attgccttcagtgtgcttcagtaat

SEQ ID NO: 46238 - DNA, 25 bp, Artificial
  Probe
ctctacctaatctttcattgccttc

SEQ ID NO: 46239 - DNA, 25 bp, Artificial
  Probe
tgcccaatgaatacagttcctttat

SEQ ID NO: 46240 - DNA, 25 bp, Artificial
  Probe
atctgatacaagtggcatagtccaa

SEQ ID NO: 46241 - DNA, 25 bp, Artificial
  Probe
aatctgatacaagtggcatagtcca

SEQ ID NO: 46242 - DNA, 25 bp, Artificial
  Probe
taccactggaacatttatcaactga

SEQ ID NO: 46243 - DNA, 25 bp, Artificial
  Probe
gcccaatgaatacagttcctttatt

SEQ ID NO: 46244 - DNA, 25 bp, Artificial
  Probe
ttgcccaatgaatacagttccttta

SEQ ID NO: 46245 - DNA, 25 bp, Artificial
  Probe
tttctctacctaatctttcattgcc

SEQ ID NO: 46246 - DNA, 25 bp, Artificial
  Probe
tagtcataaccatgtaaggtagtgg

SEQ ID NO: 46247 - DNA, 25 bp, Artificial
  Probe
ggtagtcataaccatgtaaggtagt

SEQ ID NO: 46248 - DNA, 25 bp, Artificial
  Probe
cctaatctttcattgccttcagtgt

SEQ ID NO: 46249 - DNA, 25 bp, Artificial
  Probe
acctaatctttcattgccttcagtg

SEQ ID NO: 46250 - DNA, 25 bp, Artificial
  Probe
tctttaacataccttggagtagcaa

SEQ ID NO: 46251 - DNA, 25 bp, Artificial
  Probe
tttctttaacataccttggagtagc

SEQ ID NO: 46252 - DNA, 25 bp, Artificial
  Probe
actctaattgcctttctttgattga

SEQ ID NO: 46253 - DNA, 25 bp, Artificial
  Probe
atttgctcaagacaatcaattcctc

SEQ ID NO: 46254 - DNA, 25 bp, Artificial
  Probe
ataccactggaacatttatcaactg

SEQ ID NO: 46255 - DNA, 25 bp, Artificial
  Probe
atcatccctgttctgctaagagtaa

SEQ ID NO: 46256 - DNA, 25 bp, Artificial
  Probe
tttacttgcccaatgaatacagttc

SEQ ID NO: 46257 - DNA, 25 bp, Artificial
  Probe
cccagacttcaccaaatacttgtat

SEQ ID NO: 46258 - DNA, 25 bp, Artificial
  Probe
atccctgttctgctaagagtaactt

SEQ ID NO: 46259 - DNA, 25 bp, Artificial
  Probe
accactggaacatttatcaactgat

SEQ ID NO: 46260 - DNA, 25 bp, Artificial
  Probe
tttgctcaagacaatcaattcctct

SEQ ID NO: 46261 - DNA, 25 bp, Artificial
  Probe
tatttgctcaagacaatcaattcct

SEQ ID NO: 46262 - DNA, 25 bp, Artificial
  Probe
ctttaacataccttggagtagcaat

SEQ ID NO: 46263 - DNA, 25 bp, Artificial
  Probe
tccctgttctgctaagagtaacttt

SEQ ID NO: 46264 - DNA, 25 bp, Artificial
  Probe
gctcaagacaatcaattcctctctt

SEQ ID NO: 46265 - DNA, 25 bp, Artificial
  Probe
caaggaaagaagttctggtagtcat

SEQ ID NO: 46266 - DNA, 25 bp, Artificial
  Probe
gtagtcataaccatgtaaggtagtg

SEQ ID NO: 46267 - DNA, 25 bp, Artificial
  Probe
tttcaacatctgaccaacctagtag

SEQ ID NO: 46268 - DNA, 25 bp, Artificial
  Probe
aatacatagggtggactgtttcaaa

SEQ ID NO: 46269 - DNA, 25 bp, Artificial
  Probe
aaatacatagggtggactgtttcaa

SEQ ID NO: 46270 - DNA, 25 bp, Artificial
  Probe
ctacactaactggatcaagaagacc

SEQ ID NO: 46271 - DNA, 25 bp, Artificial
  Probe
gctacactaactggatcaagaagac

SEQ ID NO: 46272 - DNA, 25 bp, Artificial
  Probe
cgctacactaactggatcaagaaga

SEQ ID NO: 46273 - DNA, 25 bp, Artificial
  Probe
tcgctacactaactggatcaagaag

SEQ ID NO: 46274 - DNA, 25 bp, Artificial
  Probe
gtcgctacactaactggatcaagaa

SEQ ID NO: 46275 - DNA, 25 bp, Artificial
  Probe
tacactaactggatcaagaagacca

SEQ ID NO: 46276 - DNA, 25 bp, Artificial
  Probe
acactaactggatcaagaagaccat

SEQ ID NO: 46277 - DNA, 25 bp, Artificial
  Probe
cactaactggatcaagaagaccatg

SEQ ID NO: 46278 - DNA, 25 bp, Artificial
  Probe
aatctgtcgctacactaactggatc

SEQ ID NO: 46279 - DNA, 25 bp, Artificial
  Probe
agaggatcacagccatgacataatg

SEQ ID NO: 46280 - DNA, 25 bp, Artificial
  Probe
cagaggatcacagccatgacataat

SEQ ID NO: 46281 - DNA, 25 bp, Artificial
  Probe
aaatctactcccagaacaagtgtga

SEQ ID NO: 46282 - DNA, 25 bp, Artificial
  Probe
ctgtcgctacactaactggatcaag

SEQ ID NO: 46283 - DNA, 25 bp, Artificial
  Probe
atctgtcgctacactaactggatca

SEQ ID NO: 46284 - DNA, 25 bp, Artificial
  Probe
aatctactcccagaacaagtgtgag

SEQ ID NO: 46285 - DNA, 25 bp, Artificial
  Probe
aaatctgtcgctacactaactggat

SEQ ID NO: 46286 - DNA, 25 bp, Artificial
  Probe
tgtcgctacactaactggatcaaga

SEQ ID NO: 46287 - DNA, 25 bp, Artificial
  Probe
tctgtcgctacactaactggatcaa

SEQ ID NO: 46288 - DNA, 25 bp, Artificial
  Probe
aagagaactttccaaacaccctcaa

SEQ ID NO: 46289 - DNA, 25 bp, Artificial
  Probe
ctcaagagaactttccaaacaccct

SEQ ID NO: 46290 - DNA, 25 bp, Artificial
  Probe
atctactcccagaacaagtgtgaga

SEQ ID NO: 46291 - DNA, 25 bp, Artificial
  Probe
tcaagagaactttccaaacaccctc

SEQ ID NO: 46292 - DNA, 25 bp, Artificial
  Probe
cacagccatgacataatgctcattc

SEQ ID NO: 46293 - DNA, 25 bp, Artificial
  Probe
agaactttccaaacaccctcaactg

SEQ ID NO: 46294 - DNA, 25 bp, Artificial
  Probe
atccttctgtttctgctaatgggag

SEQ ID NO: 46295 - DNA, 25 bp, Artificial
  Probe
atcacagccatgacataatgctcat

SEQ ID NO: 46296 - DNA, 25 bp, Artificial
  Probe
gagaactttccaaacaccctcaact

SEQ ID NO: 46297 - DNA, 25 bp, Artificial
  Probe
agagaactttccaaacaccctcaac

SEQ ID NO: 46298 - DNA, 25 bp, Artificial
  Probe
caagagaactttccaaacaccctca

SEQ ID NO: 46299 - DNA, 25 bp, Artificial
  Probe
gaggatcacagccatgacataatgc

SEQ ID NO: 46300 - DNA, 25 bp, Artificial
  Probe
ccatgacataatgctcattcgactg

SEQ ID NO: 46301 - DNA, 25 bp, Artificial
  Probe
tcacagccatgacataatgctcatt

SEQ ID NO: 46302 - DNA, 25 bp, Artificial
  Probe
gatccttctgtttctgctaatggga

SEQ ID NO: 46303 - DNA, 25 bp, Artificial
  Probe
cagaacaagtgtgagagagcctacc

SEQ ID NO: 46304 - DNA, 25 bp, Artificial
  Probe
ccagaacaagtgtgagagagcctac

SEQ ID NO: 46305 - DNA, 25 bp, Artificial
  Probe
tactcccagaacaagtgtgagagag

SEQ ID NO: 46306 - DNA, 25 bp, Artificial
  Probe
ctactcccagaacaagtgtgagaga

SEQ ID NO: 46307 - DNA, 25 bp, Artificial
  Probe
tctactcccagaacaagtgtgagag

SEQ ID NO: 46308 - DNA, 25 bp, Artificial
  Probe
aagtgaaaatctactcccagaacaa

SEQ ID NO: 46309 - DNA, 25 bp, Artificial
  Probe
agtgaaaatctactcccagaacaag

SEQ ID NO: 46310 - DNA, 25 bp, Artificial
  Probe
gaagtgaaaatctactcccagaaca

SEQ ID NO: 46311 - DNA, 25 bp, Artificial
  Probe
tgaaaatctactcccagaacaagtg

SEQ ID NO: 46312 - DNA, 25 bp, Artificial
  Probe
gtgaaaatctactcccagaacaagt

SEQ ID NO: 46313 - DNA, 25 bp, Artificial
  Probe
gatcacagccatgacataatgctca

SEQ ID NO: 46314 - DNA, 25 bp, Artificial
  Probe
gaaaatctactcccagaacaagtgt

SEQ ID NO: 46315 - DNA, 25 bp, Artificial
  Probe
acctgtagtgccatatacttattga

SEQ ID NO: 46316 - DNA, 25 bp, Artificial
  Probe
ccacctgtagtgccatatacttatt

SEQ ID NO: 46317 - DNA, 25 bp, Artificial
  Probe
tgtagtgccatatacttattgaagg

SEQ ID NO: 46318 - DNA, 25 bp, Artificial
  Probe
cctgtagtgccatatacttattgaa

SEQ ID NO: 46319 - DNA, 25 bp, Artificial
  Probe
cacctgtagtgccatatacttattg

SEQ ID NO: 46320 - DNA, 25 bp, Artificial
  Probe
aggaatatggaccaagagagaggaa

SEQ ID NO: 46321 - DNA, 25 bp, Artificial
  Probe
aaggaatatggaccaagagagagga

SEQ ID NO: 46322 - DNA, 25 bp, Artificial
  Probe
gaatatggaccaagagagaggaaat

SEQ ID NO: 46323 - DNA, 25 bp, Artificial
  Probe
aatatggaccaagagagaggaaatt

SEQ ID NO: 46324 - DNA, 25 bp, Artificial
  Probe
caaaggaatatggaccaagagagag

SEQ ID NO: 46325 - DNA, 25 bp, Artificial
  Probe
ttattgaaggcaaaggaatatggac

SEQ ID NO: 46326 - DNA, 25 bp, Artificial
  Probe
acttattgaaggcaaaggaatatgg

SEQ ID NO: 46327 - DNA, 25 bp, Artificial
  Probe
tattgaaggcaaaggaatatggacc

SEQ ID NO: 46328 - DNA, 25 bp, Artificial
  Probe
cttattgaaggcaaaggaatatgga

SEQ ID NO: 46329 - DNA, 25 bp, Artificial
  Probe
atatggaccaagagagaggaaattg

SEQ ID NO: 46330 - DNA, 25 bp, Artificial
  Probe
ctgtagtgccatatacttattgaag

SEQ ID NO: 46331 - DNA, 25 bp, Artificial
  Probe
ggaatatggaccaagagagaggaaa

SEQ ID NO: 46332 - DNA, 25 bp, Artificial
  Probe
aaaggaatatggaccaagagagagg

SEQ ID NO: 46333 - DNA, 25 bp, Artificial
  Probe
ccatatacttattgaaggcaaagga

SEQ ID NO: 46334 - DNA, 25 bp, Artificial
  Probe
gcaaaggaatatggaccaagagaga

SEQ ID NO: 46335 - DNA, 25 bp, Artificial
  Probe
cccacctgtagtgccatatacttat

SEQ ID NO: 46336 - DNA, 25 bp, Artificial
  Probe
tgaacaagacagacactcaggagag

SEQ ID NO: 46337 - DNA, 25 bp, Artificial
  Probe
tccctctgcctttcctaacatacat

SEQ ID NO: 46338 - DNA, 25 bp, Artificial
  Probe
attgaaggcaaaggaatatggacca

SEQ ID NO: 46339 - DNA, 25 bp, Artificial
  Probe
aaggcaaaggaatatggaccaagag

SEQ ID NO: 46340 - DNA, 25 bp, Artificial
  Probe
gaaggcaaaggaatatggaccaaga

SEQ ID NO: 46341 - DNA, 25 bp, Artificial
  Probe
ttgaaggcaaaggaatatggaccaa

SEQ ID NO: 46342 - DNA, 25 bp, Artificial
  Probe
tcccacctgtagtgccatatactta

SEQ ID NO: 46343 - DNA, 25 bp, Artificial
  Probe
tacttattgaaggcaaaggaatatg

SEQ ID NO: 46344 - DNA, 25 bp, Artificial
  Probe
catatacttattgaaggcaaaggaa

SEQ ID NO: 46345 - DNA, 25 bp, Artificial
  Probe
tctccctctgcctttcctaacatac

SEQ ID NO: 46346 - DNA, 25 bp, Artificial
  Probe
gtctccctctgcctttcctaacata

SEQ ID NO: 46347 - DNA, 25 bp, Artificial
  Probe
tgaaggcaaaggaatatggaccaag

SEQ ID NO: 46348 - DNA, 25 bp, Artificial
  Probe
ggcaaaggaatatggaccaagagag

SEQ ID NO: 46349 - DNA, 25 bp, Artificial
  Probe
ccctctgcctttcctaacatacatg

SEQ ID NO: 46350 - DNA, 25 bp, Artificial
  Probe
ggaggctgaagtaaaggagtcaatg

SEQ ID NO: 46351 - DNA, 25 bp, Artificial
  Probe
ctccctctgcctttcctaacataca

SEQ ID NO: 46352 - DNA, 25 bp, Artificial
  Probe
gtgaacaagacagacactcaggaga

SEQ ID NO: 46353 - DNA, 25 bp, Artificial
  Probe
gtagtgccatatacttattgaaggc

SEQ ID NO: 46354 - DNA, 25 bp, Artificial
  Probe
aggcaaaggaatatggaccaagaga

SEQ ID NO: 46355 - DNA, 25 bp, Artificial
  Probe
ttgtgaacaagacagacactcagga

SEQ ID NO: 46356 - DNA, 25 bp, Artificial
  Probe
tggaggctgaagtaaaggagtcaat

SEQ ID NO: 46357 - DNA, 25 bp, Artificial
  Probe
tgtgaacaagacagacactcaggag

SEQ ID NO: 46358 - DNA, 25 bp, Artificial
  Probe
cctctgcctttcctaacatacatgc

SEQ ID NO: 46359 - DNA, 25 bp, Artificial
  Probe
catctcactccgacattttagcaag

SEQ ID NO: 46360 - DNA, 25 bp, Artificial
  Probe
aagaccgattacacgacattgagat

SEQ ID NO: 46361 - DNA, 25 bp, Artificial
  Probe
agaccgattacacgacattgagatc

SEQ ID NO: 46362 - DNA, 25 bp, Artificial
  Probe
accgattacacgacattgagatcaa

SEQ ID NO: 46363 - DNA, 25 bp, Artificial
  Probe
gaccgattacacgacattgagatca

SEQ ID NO: 46364 - DNA, 25 bp, Artificial
  Probe
caagaccgattacacgacattgaga

SEQ ID NO: 46365 - DNA, 25 bp, Artificial
  Probe
gattacacgacattgagatcaaagg

SEQ ID NO: 46366 - DNA, 25 bp, Artificial
  Probe
attacacgacattgagatcaaagga

SEQ ID NO: 46367 - DNA, 25 bp, Artificial
  Probe
cgattacacgacattgagatcaaag

SEQ ID NO: 46368 - DNA, 25 bp, Artificial
  Probe
ttacacgacattgagatcaaaggac

SEQ ID NO: 46369 - DNA, 25 bp, Artificial
  Probe
ccgattacacgacattgagatcaaa

SEQ ID NO: 46370 - DNA, 25 bp, Artificial
  Probe
tacacgacattgagatcaaaggact

SEQ ID NO: 46371 - DNA, 25 bp, Artificial
  Probe
gcaagaccgattacacgacattgag

SEQ ID NO: 46372 - DNA, 25 bp, Artificial
  Probe
acacgacattgagatcaaaggactg

SEQ ID NO: 46373 - DNA, 25 bp, Artificial
  Probe
gattctggcaagaccgattacacga

SEQ ID NO: 46374 - DNA, 25 bp, Artificial
  Probe
cacgacattgagatcaaaggactgc

SEQ ID NO: 46375 - DNA, 25 bp, Artificial
  Probe
gtttgtctgcggtgatgtcactatg

SEQ ID NO: 46376 - DNA, 25 bp, Artificial
  Probe
tgtttgtctgcggtgatgtcactat

SEQ ID NO: 46377 - DNA, 25 bp, Artificial
  Probe
atgtttgtctgcggtgatgtcacta

SEQ ID NO: 46378 - DNA, 25 bp, Artificial
  Probe
acgacattgagatcaaaggactgca

SEQ ID NO: 46379 - DNA, 25 bp, Artificial
  Probe
ctgatcctaacttgccttgcatcct

SEQ ID NO: 46380 - DNA, 25 bp, Artificial
  Probe
cagccctaagacctatgtgcaagac

SEQ ID NO: 46381 - DNA, 25 bp, Artificial
  Probe
gaggacattttcggactcacattgc

SEQ ID NO: 46382 - DNA, 25 bp, Artificial
  Probe
tgatcctaacttgccttgcatcctg

SEQ ID NO: 46383 - DNA, 25 bp, Artificial
  Probe
acctgatcctaacttgccttgcatc

SEQ ID NO: 46384 - DNA, 25 bp, Artificial
  Probe
tttgtctgcggtgatgtcactatgg

SEQ ID NO: 46385 - DNA, 25 bp, Artificial
  Probe
cacctgatcctaacttgccttgcat

SEQ ID NO: 46386 - DNA, 25 bp, Artificial
  Probe
cgaggacattttcggactcacattg

SEQ ID NO: 46387 - DNA, 25 bp, Artificial
  Probe
acgaggacattttcggactcacatt

SEQ ID NO: 46388 - DNA, 25 bp, Artificial
  Probe
ctaccacgaggacattttcggactc

SEQ ID NO: 46389 - DNA, 25 bp, Artificial
  Probe
cacgaggacattttcggactcacat

SEQ ID NO: 46390 - DNA, 25 bp, Artificial
  Probe
tactgtgtagcctcttatgtccttg

SEQ ID NO: 46391 - DNA, 25 bp, Artificial
  Probe
cttcattcatgtcattcaacaagga

SEQ ID NO: 46392 - DNA, 25 bp, Artificial
  Probe
acttcattcatgtcattcaacaagg

SEQ ID NO: 46393 - DNA, 25 bp, Artificial
  Probe
ttcattcatgtcattcaacaaggaa

SEQ ID NO: 46394 - DNA, 25 bp, Artificial
  Probe
gacttcattcatgtcattcaacaag

SEQ ID NO: 46395 - DNA, 25 bp, Artificial
  Probe
acagtttaagcagaagtttgatgag

SEQ ID NO: 46396 - DNA, 25 bp, Artificial
  Probe
cagtttaagcagaagtttgatgagg

SEQ ID NO: 46397 - DNA, 25 bp, Artificial
  Probe
gctcacatcagtcaaagatatacag

SEQ ID NO: 46398 - DNA, 25 bp, Artificial
  Probe
cttaggaaagagtgaagaagaagca

SEQ ID NO: 46399 - DNA, 25 bp, Artificial
  Probe
tagactttgggcatattcttggaaa

SEQ ID NO: 46400 - DNA, 25 bp, Artificial
  Probe
atagactttgggcatattcttggaa

SEQ ID NO: 46401 - DNA, 25 bp, Artificial
  Probe
cacatagactttgggcatattcttg

SEQ ID NO: 46402 - DNA, 25 bp, Artificial
  Probe
gactttgggcatattcttggaaatt

SEQ ID NO: 46403 - DNA, 25 bp, Artificial
  Probe
catagactttgggcatattcttgga

SEQ ID NO: 46404 - DNA, 25 bp, Artificial
  Probe
ctaaggtgaactggatggctcatac

SEQ ID NO: 46405 - DNA, 25 bp, Artificial
  Probe
aacagtttaagcagaagtttgatga

SEQ ID NO: 46406 - DNA, 25 bp, Artificial
  Probe
agactttgggcatattcttggaaat

SEQ ID NO: 46407 - DNA, 25 bp, Artificial
  Probe
acatagactttgggcatattcttgg

SEQ ID NO: 46408 - DNA, 25 bp, Artificial
  Probe
ctcatacagttcggaaagactacag

SEQ ID NO: 46409 - DNA, 25 bp, Artificial
  Probe
actaaggtgaactggatggctcata

SEQ ID NO: 46410 - DNA, 25 bp, Artificial
  Probe
cattcagtttggtgtcatcctagag

SEQ ID NO: 46411 - DNA, 25 bp, Artificial
  Probe
ccttaggaaagagtgaagaagaagc

SEQ ID NO: 46412 - DNA, 25 bp, Artificial
  Probe
gccttaggaaagagtgaagaagaag

SEQ ID NO: 46413 - DNA, 25 bp, Artificial
  Probe
agtttaagcagaagtttgatgaggc

SEQ ID NO: 46414 - DNA, 25 bp, Artificial
  Probe
gaactggctcaaggagtacaattct

SEQ ID NO: 46415 - DNA, 25 bp, Artificial
  Probe
cagatacatggactccaagatgaag

SEQ ID NO: 46416 - DNA, 25 bp, Artificial
  Probe
cttgccttaggaaagagtgaagaag

SEQ ID NO: 46417 - DNA, 25 bp, Artificial
  Probe
ctcacatcagtcaaagatatacagt

SEQ ID NO: 46418 - DNA, 25 bp, Artificial
  Probe
cactcaaacagtttaagcagaagtt

SEQ ID NO: 46419 - DNA, 25 bp, Artificial
  Probe
agaagaagcactcaaacagtttaag

SEQ ID NO: 46420 - DNA, 25 bp, Artificial
  Probe
gaagaagaagcactcaaacagttta

SEQ ID NO: 46421 - DNA, 25 bp, Artificial
  Probe
ctactgtgtagcctcttatgtcctt

SEQ ID NO: 46422 - DNA, 25 bp, Artificial
  Probe
acagtgacaacatcatggtgaagaa

SEQ ID NO: 46423 - DNA, 25 bp, Artificial
  Probe
aactggctcaaggagtacaattctg

SEQ ID NO: 46424 - DNA, 25 bp, Artificial
  Probe
tgaactggctcaaggagtacaattc

SEQ ID NO: 46425 - DNA, 25 bp, Artificial
  Probe
ctgaactggctcaaggagtacaatt

SEQ ID NO: 46426 - DNA, 25 bp, Artificial
  Probe
aagaagaagcactcaaacagtttaa

SEQ ID NO: 46427 - DNA, 25 bp, Artificial
  Probe
tgccttaggaaagagtgaagaagaa

SEQ ID NO: 46428 - DNA, 25 bp, Artificial
  Probe
ttgccttaggaaagagtgaagaaga

SEQ ID NO: 46429 - DNA, 25 bp, Artificial
  Probe
tttaagcagaagtttgatgaggcac

SEQ ID NO: 46430 - DNA, 25 bp, Artificial
  Probe
gtttaagcagaagtttgatgaggca

SEQ ID NO: 46431 - DNA, 25 bp, Artificial
  Probe
tacagtatcttaaggactctcttgc

SEQ ID NO: 46432 - DNA, 25 bp, Artificial
  Probe
ggaatctcttcattaccctgtttgc

SEQ ID NO: 46433 - DNA, 25 bp, Artificial
  Probe
taaggtgaactggatggctcataca

SEQ ID NO: 46434 - DNA, 25 bp, Artificial
  Probe
aattgaatgcgatgaagctgaacag

SEQ ID NO: 46435 - DNA, 25 bp, Artificial
  Probe
tcatccaagcatacaaggtgttcaa

SEQ ID NO: 46436 - DNA, 25 bp, Artificial
  Probe
tgaaggaagcagaatgaaactgtat

SEQ ID NO: 46437 - DNA, 25 bp, Artificial
  Probe
ttgaaggaagcagaatgaaactgta

SEQ ID NO: 46438 - DNA, 25 bp, Artificial
  Probe
ctcatccaagcatacaaggtgttca

SEQ ID NO: 46439 - DNA, 25 bp, Artificial
  Probe
gaaggaagcagaatgaaactgtata

SEQ ID NO: 46440 - DNA, 25 bp, Artificial
  Probe
tttgaaggaagcagaatgaaactgt

SEQ ID NO: 46441 - DNA, 25 bp, Artificial
  Probe
aagggatggctggaacgatatattt

SEQ ID NO: 46442 - DNA, 25 bp, Artificial
  Probe
atccaagcatacaaggtgttcaaag

SEQ ID NO: 46443 - DNA, 25 bp, Artificial
  Probe
catccaagcatacaaggtgttcaaa

SEQ ID NO: 46444 - DNA, 25 bp, Artificial
  Probe
gaagggatggctggaacgatatatt

SEQ ID NO: 46445 - DNA, 25 bp, Artificial
  Probe
agggatggctggaacgatatatttc

SEQ ID NO: 46446 - DNA, 25 bp, Artificial
  Probe
caagcatacaaggtgttcaaagagg

SEQ ID NO: 46447 - DNA, 25 bp, Artificial
  Probe
ccaagcatacaaggtgttcaaagag

SEQ ID NO: 46448 - DNA, 25 bp, Artificial
  Probe
tccaagcatacaaggtgttcaaaga

SEQ ID NO: 46449 - DNA, 25 bp, Artificial
  Probe
ttgaagggatggctggaacgatata

SEQ ID NO: 46450 - DNA, 25 bp, Artificial
  Probe
cttttgaaggaagcagaatgaaact

SEQ ID NO: 46451 - DNA, 25 bp, Artificial
  Probe
aggaagcagaatgaaactgtatact

SEQ ID NO: 46452 - DNA, 25 bp, Artificial
  Probe
tgaagggatggctggaacgatatat

SEQ ID NO: 46453 - DNA, 25 bp, Artificial
  Probe
tttggtgaaacccagtgtagacttt

SEQ ID NO: 46454 - DNA, 25 bp, Artificial
  Probe
ggaagcagaatgaaactgtatactt

SEQ ID NO: 46455 - DNA, 25 bp, Artificial
  Probe
aaggaagcagaatgaaactgtatac

SEQ ID NO: 46456 - DNA, 25 bp, Artificial
  Probe
agcagaatgaaactgtatactttga

SEQ ID NO: 46457 - DNA, 25 bp, Artificial
  Probe
cttctggcaactacccttcatgttt

SEQ ID NO: 46458 - DNA, 25 bp, Artificial
  Probe
ttttgaaggaagcagaatgaaactg

SEQ ID NO: 46459 - DNA, 25 bp, Artificial
  Probe
caactacccttcatgtttggatgac

SEQ ID NO: 46460 - DNA, 25 bp, Artificial
  Probe
ttggtgaaacccagtgtagactttg

SEQ ID NO: 46461 - DNA, 25 bp, Artificial
  Probe
tttgaagggatggctggaacgatat

SEQ ID NO: 46462 - DNA, 25 bp, Artificial
  Probe
gcagaatgaaactgtatactttgaa

SEQ ID NO: 46463 - DNA, 25 bp, Artificial
  Probe
aagcagaatgaaactgtatactttg

SEQ ID NO: 46464 - DNA, 25 bp, Artificial
  Probe
ttctggcaactacccttcatgtttg

SEQ ID NO: 46465 - DNA, 25 bp, Artificial
  Probe
aactacccttcatgtttggatgaca

SEQ ID NO: 46466 - DNA, 25 bp, Artificial
  Probe
gaagcagaatgaaactgtatacttt

SEQ ID NO: 46467 - DNA, 25 bp, Artificial
  Probe
ggtgaaacccagtgtagactttgtc

SEQ ID NO: 46468 - DNA, 25 bp, Artificial
  Probe
gctcatccaagcatacaaggtgttc

SEQ ID NO: 46469 - DNA, 25 bp, Artificial
  Probe
gtttggtgaaacccagtgtagactt

SEQ ID NO: 46470 - DNA, 25 bp, Artificial
  Probe
cttcatgtttggatgacaccagaga

SEQ ID NO: 46471 - DNA, 25 bp, Artificial
  Probe
actacccttcatgtttggatgacac

SEQ ID NO: 46472 - DNA, 25 bp, Artificial
  Probe
ctttgaagggatggctggaacgata

SEQ ID NO: 46473 - DNA, 25 bp, Artificial
  Probe
ggcaactacccttcatgtttggatg

SEQ ID NO: 46474 - DNA, 25 bp, Artificial
  Probe
ttcatgtttggatgacaccagagac

SEQ ID NO: 46475 - DNA, 25 bp, Artificial
  Probe
tggtgaaacccagtgtagactttgt

SEQ ID NO: 46476 - DNA, 25 bp, Artificial
  Probe
gcaactacccttcatgtttggatga

SEQ ID NO: 46477 - DNA, 25 bp, Artificial
  Probe
ctacccttcatgtttggatgacacc

SEQ ID NO: 46478 - DNA, 25 bp, Artificial
  Probe
tggcaactacccttcatgtttggat

SEQ ID NO: 46479 - DNA, 25 bp, Artificial
  Probe
agtttggtgaaacccagtgtagact

SEQ ID NO: 46480 - DNA, 25 bp, Artificial
  Probe
gtttggtttgatttggtttgttctg

SEQ ID NO: 46481 - DNA, 25 bp, Artificial
  Probe
ttagttatctgctttgctcaatcct

SEQ ID NO: 46482 - DNA, 25 bp, Artificial
  Probe
gttagttatctgctttgctcaatcc

SEQ ID NO: 46483 - DNA, 25 bp, Artificial
  Probe
agttagttatctgctttgctcaatc

SEQ ID NO: 46484 - DNA, 25 bp, Artificial
  Probe
ggtttgatttggtttgttctggttt

SEQ ID NO: 46485 - DNA, 25 bp, Artificial
  Probe
tttggtttgatttggtttgttctgg

SEQ ID NO: 46486 - DNA, 25 bp, Artificial
  Probe
tagttatctgctttgctcaatcctg

SEQ ID NO: 46487 - DNA, 25 bp, Artificial
  Probe
cgtttggtttgatttggtttgttct

SEQ ID NO: 46488 - DNA, 25 bp, Artificial
  Probe
gagttagttatctgctttgctcaat

SEQ ID NO: 46489 - DNA, 25 bp, Artificial
  Probe
tggtttgatttggtttgttctggtt

SEQ ID NO: 46490 - DNA, 25 bp, Artificial
  Probe
ttggtttgatttggtttgttctggt

SEQ ID NO: 46491 - DNA, 25 bp, Artificial
  Probe
ggagttagttatctgctttgctcaa

SEQ ID NO: 46492 - DNA, 25 bp, Artificial
  Probe
aggagttagttatctgctttgctca

SEQ ID NO: 46493 - DNA, 25 bp, Artificial
  Probe
caggagttagttatctgctttgctc

SEQ ID NO: 46494 - DNA, 25 bp, Artificial
  Probe
tgtcatttcaagactctctcacctt

SEQ ID NO: 46495 - DNA, 25 bp, Artificial
  Probe
cagcagacagtagactccactctaa

SEQ ID NO: 46496 - DNA, 25 bp, Artificial
  Probe
tttacgtttggtttgatttggtttg

SEQ ID NO: 46497 - DNA, 25 bp, Artificial
  Probe
tacgtttggtttgatttggtttgtt

SEQ ID NO: 46498 - DNA, 25 bp, Artificial
  Probe
ttacgtttggtttgatttggtttgt

SEQ ID NO: 46499 - DNA, 25 bp, Artificial
  Probe
ctttacgtttggtttgatttggttt

SEQ ID NO: 46500 - DNA, 25 bp, Artificial
  Probe
aactgagccaggagttagttatctg

SEQ ID NO: 46501 - DNA, 25 bp, Artificial
  Probe
gaacctggcactcagtatttagact

SEQ ID NO: 46502 - DNA, 25 bp, Artificial
  Probe
tctgctttacgtttggtttgatttg

SEQ ID NO: 46503 - DNA, 25 bp, Artificial
  Probe
gtctgctttacgtttggtttgattt

SEQ ID NO: 46504 - DNA, 25 bp, Artificial
  Probe
cagacagtagactccactctaaacc

SEQ ID NO: 46505 - DNA, 25 bp, Artificial
  Probe
agttatctgctttgctcaatcctgg

SEQ ID NO: 46506 - DNA, 25 bp, Artificial
  Probe
gctttacgtttggtttgatttggtt

SEQ ID NO: 46507 - DNA, 25 bp, Artificial
  Probe
gtgtcatttcaagactctctcacct

SEQ ID NO: 46508 - DNA, 25 bp, Artificial
  Probe
ttgggtgtcatttcaagactctctc

SEQ ID NO: 46509 - DNA, 25 bp, Artificial
  Probe
acgtttggtttgatttggtttgttc

SEQ ID NO: 46510 - DNA, 25 bp, Artificial
  Probe
ccaggagttagttatctgctttgct

SEQ ID NO: 46511 - DNA, 25 bp, Artificial
  Probe
ctgctttacgtttggtttgatttgg

SEQ ID NO: 46512 - DNA, 25 bp, Artificial
  Probe
actgagccaggagttagttatctgc

SEQ ID NO: 46513 - DNA, 25 bp, Artificial
  Probe
gtttgatttggtttgttctggtttt

SEQ ID NO: 46514 - DNA, 25 bp, Artificial
  Probe
gcagacagtagactccactctaaac

SEQ ID NO: 46515 - DNA, 25 bp, Artificial
  Probe
aagtttatttgtcccagttatttgg

SEQ ID NO: 46516 - DNA, 25 bp, Artificial
  Probe
taaggttattagccaaaagccagtt

SEQ ID NO: 46517 - DNA, 25 bp, Artificial
  Probe
gttgctgtccttcagtgtgtgtaag

SEQ ID NO: 46518 - DNA, 25 bp, Artificial
  Probe
agcagacagtagactccactctaaa

SEQ ID NO: 46519 - DNA, 25 bp, Artificial
  Probe
ttaaggttattagccaaaagccagt

SEQ ID NO: 46520 - DNA, 25 bp, Artificial
  Probe
ggaacctggcactcagtatttagac

SEQ ID NO: 46521 - DNA, 25 bp, Artificial
  Probe
ctggaacctggcactcagtatttag

SEQ ID NO: 46522 - DNA, 25 bp, Artificial
  Probe
tgagccaggagttagttatctgctt

SEQ ID NO: 46523 - DNA, 25 bp, Artificial
  Probe
tgctttacgtttggtttgatttggt

SEQ ID NO: 46524 - DNA, 25 bp, Artificial
  Probe
tatttgggtcttaaggttattagcc

SEQ ID NO: 46525 - DNA, 25 bp, Artificial
  Probe
ggaaattagaagagcagagaccaaa

SEQ ID NO: 46526 - DNA, 25 bp, Artificial
  Probe
gaaattagaagagcagagaccaaat

SEQ ID NO: 46527 - DNA, 25 bp, Artificial
  Probe
attctgatagaagtctgaacactcg

SEQ ID NO: 46528 - DNA, 25 bp, Artificial
  Probe
gcattctgatagaagtctgaacact

SEQ ID NO: 46529 - DNA, 25 bp, Artificial
  Probe
cattctgatagaagtctgaacactc

SEQ ID NO: 46530 - DNA, 25 bp, Artificial
  Probe
aaattagaagagcagagaccaaatt

SEQ ID NO: 46531 - DNA, 25 bp, Artificial
  Probe
ctctgcattctgatagaagtctgaa

SEQ ID NO: 46532 - DNA, 25 bp, Artificial
  Probe
ttagaagagcagagaccaaatttca

SEQ ID NO: 46533 - DNA, 25 bp, Artificial
  Probe
gagaccaaatttcacaagaatcagg

SEQ ID NO: 46534 - DNA, 25 bp, Artificial
  Probe
cagagaccaaatttcacaagaatca

SEQ ID NO: 46535 - DNA, 25 bp, Artificial
  Probe
tctgcattctgatagaagtctgaac

SEQ ID NO: 46536 - DNA, 25 bp, Artificial
  Probe
agagaccaaatttcacaagaatcag

SEQ ID NO: 46537 - DNA, 25 bp, Artificial
  Probe
ctgcattctgatagaagtctgaaca

SEQ ID NO: 46538 - DNA, 25 bp, Artificial
  Probe
tgcattctgatagaagtctgaacac

SEQ ID NO: 46539 - DNA, 25 bp, Artificial
  Probe
tagaagagcagagaccaaatttcac

SEQ ID NO: 46540 - DNA, 25 bp, Artificial
  Probe
gcagagaccaaatttcacaagaatc

SEQ ID NO: 46541 - DNA, 25 bp, Artificial
  Probe
attagaagagcagagaccaaatttc

SEQ ID NO: 46542 - DNA, 25 bp, Artificial
  Probe
agcagagaccaaatttcacaagaat

SEQ ID NO: 46543 - DNA, 25 bp, Artificial
  Probe
agaccaaatttcacaagaatcaggg

SEQ ID NO: 46544 - DNA, 25 bp, Artificial
  Probe
aagagcagagaccaaatttcacaag

SEQ ID NO: 46545 - DNA, 25 bp, Artificial
  Probe
cctctgcattctgatagaagtctga

SEQ ID NO: 46546 - DNA, 25 bp, Artificial
  Probe
gagcagagaccaaatttcacaagaa

SEQ ID NO: 46547 - DNA, 25 bp, Artificial
  Probe
gaagagcagagaccaaatttcacaa

SEQ ID NO: 46548 - DNA, 25 bp, Artificial
  Probe
acctctgcattctgatagaagtctg

SEQ ID NO: 46549 - DNA, 25 bp, Artificial
  Probe
cacctctgcattctgatagaagtct

SEQ ID NO: 46550 - DNA, 25 bp, Artificial
  Probe
aattagaagagcagagaccaaattt

SEQ ID NO: 46551 - DNA, 25 bp, Artificial
  Probe
ccccttttgacgaagaatgttttat

SEQ ID NO: 46552 - DNA, 25 bp, Artificial
  Probe
acaatcagaggaattttaacaacgc

SEQ ID NO: 46553 - DNA, 25 bp, Artificial
  Probe
acacctctgcattctgatagaagtc

SEQ ID NO: 46554 - DNA, 25 bp, Artificial
  Probe
tcacacctctgcattctgatagaag

SEQ ID NO: 46555 - DNA, 25 bp, Artificial
  Probe
ctcacacctctgcattctgatagaa

SEQ ID NO: 46556 - DNA, 25 bp, Artificial
  Probe
agagcagagaccaaatttcacaaga

SEQ ID NO: 46557 - DNA, 25 bp, Artificial
  Probe
caatcagaggaattttaacaacgcc

SEQ ID NO: 46558 - DNA, 25 bp, Artificial
  Probe
cacacctctgcattctgatagaagt

SEQ ID NO: 46559 - DNA, 25 bp, Artificial
  Probe
ggaattttaacaacgcctttagaaa

SEQ ID NO: 46560 - DNA, 25 bp, Artificial
  Probe
agaagagcagagaccaaatttcaca

SEQ ID NO: 46561 - DNA, 25 bp, Artificial
  Probe
aacaatcagaggaattttaacaacg

SEQ ID NO: 46562 - DNA, 25 bp, Artificial
  Probe
cccttttgacgaagaatgttttatt

SEQ ID NO: 46563 - DNA, 25 bp, Artificial
  Probe
cctcacacctctgcattctgataga

SEQ ID NO: 46564 - DNA, 25 bp, Artificial
  Probe
aaagacatccttgtggactttctcc

SEQ ID NO: 46565 - DNA, 25 bp, Artificial
  Probe
gaccaaatttcacaagaatcagggc

SEQ ID NO: 46566 - DNA, 25 bp, Artificial
  Probe
cagaggaattttaacaacgccttta

SEQ ID NO: 46567 - DNA, 25 bp, Artificial
  Probe
gaggaattttaacaacgcctttaga

SEQ ID NO: 46568 - DNA, 25 bp, Artificial
  Probe
agaggaattttaacaacgcctttag

SEQ ID NO: 46569 - DNA, 25 bp, Artificial
  Probe
aggaattttaacaacgcctttagaa

SEQ ID NO: 46570 - DNA, 25 bp, Artificial
  Probe
ggcttatacgacatcagaatagaca

SEQ ID NO: 46571 - DNA, 25 bp, Artificial
  Probe
gcttatacgacatcagaatagacac

SEQ ID NO: 46572 - DNA, 25 bp, Artificial
  Probe
ctcttatgtcagcaacgcagtatta

SEQ ID NO: 46573 - DNA, 25 bp, Artificial
  Probe
tcttatgtcagcaacgcagtattac

SEQ ID NO: 46574 - DNA, 25 bp, Artificial
  Probe
tatgtcagcaacgcagtattactat

SEQ ID NO: 46575 - DNA, 25 bp, Artificial
  Probe
ttatgtcagcaacgcagtattacta

SEQ ID NO: 46576 - DNA, 25 bp, Artificial
  Probe
agcaacgcagtattactatggtata

SEQ ID NO: 46577 - DNA, 25 bp, Artificial
  Probe
cagcaacgcagtattactatggtat

SEQ ID NO: 46578 - DNA, 25 bp, Artificial
  Probe
tatacgacatcagaatagacactct

SEQ ID NO: 46579 - DNA, 25 bp, Artificial
  Probe
gcaacgcagtattactatggtataa

SEQ ID NO: 46580 - DNA, 25 bp, Artificial
  Probe
cttatgtcagcaacgcagtattact

SEQ ID NO: 46581 - DNA, 25 bp, Artificial
  Probe
ttatacgacatcagaatagacactc

SEQ ID NO: 46582 - DNA, 25 bp, Artificial
  Probe
cttatacgacatcagaatagacact

SEQ ID NO: 46583 - DNA, 25 bp, Artificial
  Probe
atgtcagcaacgcagtattactatg

SEQ ID NO: 46584 - DNA, 25 bp, Artificial
  Probe
tcagcaacgcagtattactatggta

SEQ ID NO: 46585 - DNA, 25 bp, Artificial
  Probe
gggcttatacgacatcagaatagac

SEQ ID NO: 46586 - DNA, 25 bp, Artificial
  Probe
actcttatgtcagcaacgcagtatt

SEQ ID NO: 46587 - DNA, 25 bp, Artificial
  Probe
tgggcttatacgacatcagaataga

SEQ ID NO: 46588 - DNA, 25 bp, Artificial
  Probe
atgggcttatacgacatcagaatag

SEQ ID NO: 46589 - DNA, 25 bp, Artificial
  Probe
aatgggcttatacgacatcagaata

SEQ ID NO: 46590 - DNA, 25 bp, Artificial
  Probe
taatgggcttatacgacatcagaat

SEQ ID NO: 46591 - DNA, 25 bp, Artificial
  Probe
ttaatgggcttatacgacatcagaa

SEQ ID NO: 46592 - DNA, 25 bp, Artificial
  Probe
tttaatgggcttatacgacatcaga

SEQ ID NO: 46593 - DNA, 25 bp, Artificial
  Probe
acttactcttatgtcagcaacgcag

SEQ ID NO: 46594 - DNA, 25 bp, Artificial
  Probe
atgacactgtccaccttaggatatt

SEQ ID NO: 46595 - DNA, 25 bp, Artificial
  Probe
aatgacactgtccaccttaggatat

SEQ ID NO: 46596 - DNA, 25 bp, Artificial
  Probe
tactcttatgtcagcaacgcagtat

SEQ ID NO: 46597 - DNA, 25 bp, Artificial
  Probe
ttactcttatgtcagcaacgcagta

SEQ ID NO: 46598 - DNA, 25 bp, Artificial
  Probe
gtcagcaacgcagtattactatggt

SEQ ID NO: 46599 - DNA, 25 bp, Artificial
  Probe
tgtcagcaacgcagtattactatgg

SEQ ID NO: 46600 - DNA, 25 bp, Artificial
  Probe
ctcctgtaagagtgagcagcaatag

SEQ ID NO: 46601 - DNA, 25 bp, Artificial
  Probe
cttactcttatgtcagcaacgcagt

SEQ ID NO: 46602 - DNA, 25 bp, Artificial
  Probe
tttgaagtgctcctaagaaactaaa

SEQ ID NO: 46603 - DNA, 25 bp, Artificial
  Probe
tgtaagatcccaggcatatactatt

SEQ ID NO: 46604 - DNA, 25 bp, Artificial
  Probe
tgtccaccttaggatatttctgatg

SEQ ID NO: 46605 - DNA, 25 bp, Artificial
  Probe
gacttactcttatgtcagcaacgca

SEQ ID NO: 46606 - DNA, 25 bp, Artificial
  Probe
ctgtaagagtgagcagcaatagtgg

SEQ ID NO: 46607 - DNA, 25 bp, Artificial
  Probe
cctgtaagagtgagcagcaatagtg

SEQ ID NO: 46608 - DNA, 25 bp, Artificial
  Probe
ctgtccaccttaggatatttctgat

SEQ ID NO: 46609 - DNA, 25 bp, Artificial
  Probe
actgtccaccttaggatatttctga

SEQ ID NO: 46610 - DNA, 25 bp, Artificial
  Probe
cactgtccaccttaggatatttctg

SEQ ID NO: 46611 - DNA, 25 bp, Artificial
  Probe
tcctgtaagagtgagcagcaatagt

SEQ ID NO: 46612 - DNA, 25 bp, Artificial
  Probe
acactgtccaccttaggatatttct

SEQ ID NO: 46613 - DNA, 25 bp, Artificial
  Probe
caacgcagtattactatggtataat

SEQ ID NO: 46614 - DNA, 25 bp, Artificial
  Probe
tttcaattacaaggtgctttaccac

SEQ ID NO: 46615 - DNA, 25 bp, Artificial
  Probe
aatccttcaatctcttgtatggcaa

SEQ ID NO: 46616 - DNA, 25 bp, Artificial
  Probe
atccttcaatctcttgtatggcaac

SEQ ID NO: 46617 - DNA, 25 bp, Artificial
  Probe
tagaaggagagagagaaagagagag

SEQ ID NO: 46618 - DNA, 25 bp, Artificial
  Probe
ttagaaggagagagagaaagagaga

SEQ ID NO: 46619 - DNA, 25 bp, Artificial
  Probe
tccttcaatctcttgtatggcaacc

SEQ ID NO: 46620 - DNA, 25 bp, Artificial
  Probe
cttcaatctcttgtatggcaaccaa

SEQ ID NO: 46621 - DNA, 25 bp, Artificial
  Probe
caaatccttcaatctcttgtatggc

SEQ ID NO: 46622 - DNA, 25 bp, Artificial
  Probe
tttagaaggagagagagaaagagag

SEQ ID NO: 46623 - DNA, 25 bp, Artificial
  Probe
tattgaacaagcaaacattacccag

SEQ ID NO: 46624 - DNA, 25 bp, Artificial
  Probe
ttcctgagttattgaacaagcaaac

SEQ ID NO: 46625 - DNA, 25 bp, Artificial
  Probe
cccaaatccttcaatctcttgtatg

SEQ ID NO: 46626 - DNA, 25 bp, Artificial
  Probe
cctgagttattgaacaagcaaacat

SEQ ID NO: 46627 - DNA, 25 bp, Artificial
  Probe
aaatccttcaatctcttgtatggca

SEQ ID NO: 46628 - DNA, 25 bp, Artificial
  Probe
ttattgaacaagcaaacattaccca

SEQ ID NO: 46629 - DNA, 25 bp, Artificial
  Probe
tttcctgagttattgaacaagcaaa

SEQ ID NO: 46630 - DNA, 25 bp, Artificial
  Probe
gttattgaacaagcaaacattaccc

SEQ ID NO: 46631 - DNA, 25 bp, Artificial
  Probe
tcctgagttattgaacaagcaaaca

SEQ ID NO: 46632 - DNA, 25 bp, Artificial
  Probe
ctgagttattgaacaagcaaacatt

SEQ ID NO: 46633 - DNA, 25 bp, Artificial
  Probe
atttagaaggagagagagaaagaga

SEQ ID NO: 46634 - DNA, 25 bp, Artificial
  Probe
agttattgaacaagcaaacattacc

SEQ ID NO: 46635 - DNA, 25 bp, Artificial
  Probe
cgtgctgaaactttacataagaatt

SEQ ID NO: 46636 - DNA, 25 bp, Artificial
  Probe
agaaggagagagagaaagagagagg

SEQ ID NO: 46637 - DNA, 25 bp, Artificial
  Probe
tgtcacattatctttgttgctgtta

SEQ ID NO: 46638 - DNA, 25 bp, Artificial
  Probe
gagaaagagagagggagagagagag

SEQ ID NO: 46639 - DNA, 25 bp, Artificial
  Probe
gagagaaagagagagggagagagag

SEQ ID NO: 46640 - DNA, 25 bp, Artificial
  Probe
gagagagaaagagagagggagagag

SEQ ID NO: 46641 - DNA, 25 bp, Artificial
  Probe
gagagagagaaagagagagggagag

SEQ ID NO: 46642 - DNA, 25 bp, Artificial
  Probe
atgtcacattatctttgttgctgtt

SEQ ID NO: 46643 - DNA, 25 bp, Artificial
  Probe
gtcacattatctttgttgctgttaa

SEQ ID NO: 46644 - DNA, 25 bp, Artificial
  Probe
catgtcacattatctttgttgctgt

SEQ ID NO: 46645 - DNA, 25 bp, Artificial
  Probe
agagaaagagagagggagagagaga

SEQ ID NO: 46646 - DNA, 25 bp, Artificial
  Probe
agagagaaagagagagggagagaga

SEQ ID NO: 46647 - DNA, 25 bp, Artificial
  Probe
agagagagaaagagagagggagaga

SEQ ID NO: 46648 - DNA, 25 bp, Artificial
  Probe
ccaaatccttcaatctcttgtatgg

SEQ ID NO: 46649 - DNA, 25 bp, Artificial
  Probe
tgagttattgaacaagcaaacatta

SEQ ID NO: 46650 - DNA, 25 bp, Artificial
  Probe
gaaggagagagagaaagagagaggg

SEQ ID NO: 46651 - DNA, 25 bp, Artificial
  Probe
aaatctctcaagctgtaaattgtgt

SEQ ID NO: 46652 - DNA, 25 bp, Artificial
  Probe
ttcaatctcttgtatggcaaccaaa

SEQ ID NO: 46653 - DNA, 25 bp, Artificial
  Probe
ccttcaatctcttgtatggcaacca

SEQ ID NO: 46654 - DNA, 25 bp, Artificial
  Probe
gagttattgaacaagcaaacattac

SEQ ID NO: 46655 - DNA, 25 bp, Artificial
  Probe
gacgtgctgaaactttacataagaa

SEQ ID NO: 46656 - DNA, 25 bp, Artificial
  Probe
ctgacgtgctgaaactttacataag

SEQ ID NO: 46657 - DNA, 25 bp, Artificial
  Probe
acgtgctgaaactttacataagaat

SEQ ID NO: 46658 - DNA, 25 bp, Artificial
  Probe
tgacgtgctgaaactttacataaga

SEQ ID NO: 46659 - DNA, 25 bp, Artificial
  Probe
tgcctagatttctgtaatattgtgt

SEQ ID NO: 46660 - DNA, 25 bp, Artificial
  Probe
ccaacttgagtgttatagccttatt

SEQ ID NO: 46661 - DNA, 25 bp, Artificial
  Probe
tcacaggatacacttactccactat

SEQ ID NO: 46662 - DNA, 25 bp, Artificial
  Probe
atcacaggatacacttactccacta

SEQ ID NO: 46663 - DNA, 25 bp, Artificial
  Probe
gaactccaatcacaggatacactta

SEQ ID NO: 46664 - DNA, 25 bp, Artificial
  Probe
aactccaatcacaggatacacttac

SEQ ID NO: 46665 - DNA, 25 bp, Artificial
  Probe
cacaggatacacttactccactatt

SEQ ID NO: 46666 - DNA, 25 bp, Artificial
  Probe
ctccaatcacaggatacacttactc

SEQ ID NO: 46667 - DNA, 25 bp, Artificial
  Probe
aatcacaggatacacttactccact

SEQ ID NO: 46668 - DNA, 25 bp, Artificial
  Probe
caatcacaggatacacttactccac

SEQ ID NO: 46669 - DNA, 25 bp, Artificial
  Probe
actccaatcacaggatacacttact

SEQ ID NO: 46670 - DNA, 25 bp, Artificial
  Probe
gtcttgaactccaatcacaggatac

SEQ ID NO: 46671 - DNA, 25 bp, Artificial
  Probe
cttgaactccaatcacaggatacac

SEQ ID NO: 46672 - DNA, 25 bp, Artificial
  Probe
tcttgaactccaatcacaggataca

SEQ ID NO: 46673 - DNA, 25 bp, Artificial
  Probe
tccaatcacaggatacacttactcc

SEQ ID NO: 46674 - DNA, 25 bp, Artificial
  Probe
tgaactccaatcacaggatacactt

SEQ ID NO: 46675 - DNA, 25 bp, Artificial
  Probe
ttgaactccaatcacaggatacact

SEQ ID NO: 46676 - DNA, 25 bp, Artificial
  Probe
cttgttatgggtagttctgggtaag

SEQ ID NO: 46677 - DNA, 25 bp, Artificial
  Probe
ccaatcacaggatacacttactcca

SEQ ID NO: 46678 - DNA, 25 bp, Artificial
  Probe
gttatgggtagttctgggtaagatt

SEQ ID NO: 46679 - DNA, 25 bp, Artificial
  Probe
tgttatgggtagttctgggtaagat

SEQ ID NO: 46680 - DNA, 25 bp, Artificial
  Probe
cccaacttgagtgttatagccttat

SEQ ID NO: 46681 - DNA, 25 bp, Artificial
  Probe
ttgttatgggtagttctgggtaaga

SEQ ID NO: 46682 - DNA, 25 bp, Artificial
  Probe
ggtcttgaactccaatcacaggata

SEQ ID NO: 46683 - DNA, 25 bp, Artificial
  Probe
ttatgggtagttctgggtaagattt

SEQ ID NO: 46684 - DNA, 25 bp, Artificial
  Probe
tacacttactccactatttgaaagc

SEQ ID NO: 46685 - DNA, 25 bp, Artificial
  Probe
ccttgttatgggtagttctgggtaa

SEQ ID NO: 46686 - DNA, 25 bp, Artificial
  Probe
ctccacagtttacttcagcacttaa

SEQ ID NO: 46687 - DNA, 25 bp, Artificial
  Probe
cctctctctccacagtttacttcag

SEQ ID NO: 46688 - DNA, 25 bp, Artificial
  Probe
tctccacagtttacttcagcactta

SEQ ID NO: 46689 - DNA, 25 bp, Artificial
  Probe
ctgatacactgctgtctttctcttc

SEQ ID NO: 46690 - DNA, 25 bp, Artificial
  Probe
tactccactatttgaaagctatcgt

SEQ ID NO: 46691 - DNA, 25 bp, Artificial
  Probe
atacactgctgtctttctcttcctt

SEQ ID NO: 46692 - DNA, 25 bp, Artificial
  Probe
actccactatttgaaagctatcgtc

SEQ ID NO: 46693 - DNA, 25 bp, Artificial
  Probe
acacttactccactatttgaaagct

SEQ ID NO: 46694 - DNA, 25 bp, Artificial
  Probe
acaggatacacttactccactattt

SEQ ID NO: 46695 - DNA, 25 bp, Artificial
  Probe
ctctctctccacagtttacttcagc

SEQ ID NO: 46696 - DNA, 25 bp, Artificial
  Probe
gatacactgctgtctttctcttcct

SEQ ID NO: 46697 - DNA, 25 bp, Artificial
  Probe
ttactccactatttgaaagctatcg

SEQ ID NO: 46698 - DNA, 25 bp, Artificial
  Probe
aggatacacttactccactatttga

SEQ ID NO: 46699 - DNA, 25 bp, Artificial
  Probe
caggatacacttactccactatttg

SEQ ID NO: 46700 - DNA, 25 bp, Artificial
  Probe
actatttgaaagctatcgtcacatg

SEQ ID NO: 46701 - DNA, 25 bp, Artificial
  Probe
cactatttgaaagctatcgtcacat

SEQ ID NO: 46702 - DNA, 25 bp, Artificial
  Probe
ctatttgaaagctatcgtcacatgc

SEQ ID NO: 46703 - DNA, 25 bp, Artificial
  Probe
ctccactatttgaaagctatcgtca

SEQ ID NO: 46704 - DNA, 25 bp, Artificial
  Probe
caacttgagtgttatagccttattt

SEQ ID NO: 46705 - DNA, 25 bp, Artificial
  Probe
tcatcctgagactcttgaagtaatg

SEQ ID NO: 46706 - DNA, 25 bp, Artificial
  Probe
catcctgagactcttgaagtaatgg

SEQ ID NO: 46707 - DNA, 25 bp, Artificial
  Probe
ttgaagttcatcctgagactcttga

SEQ ID NO: 46708 - DNA, 25 bp, Artificial
  Probe
atcctgagactcttgaagtaatggc

SEQ ID NO: 46709 - DNA, 25 bp, Artificial
  Probe
ctgagactcttgaagtaatggctgg

SEQ ID NO: 46710 - DNA, 25 bp, Artificial
  Probe
cctgagactcttgaagtaatggctg

SEQ ID NO: 46711 - DNA, 25 bp, Artificial
  Probe
tcctgagactcttgaagtaatggct

SEQ ID NO: 46712 - DNA, 25 bp, Artificial
  Probe
gagactcttgaagtaatggctggtc

SEQ ID NO: 46713 - DNA, 25 bp, Artificial
  Probe
gttcatcctgagactcttgaagtaa

SEQ ID NO: 46714 - DNA, 25 bp, Artificial
  Probe
caacgacaatgaccacctttacaaa

SEQ ID NO: 46715 - DNA, 25 bp, Artificial
  Probe
aaacaacgacaatgaccacctttac

SEQ ID NO: 46716 - DNA, 25 bp, Artificial
  Probe
agttcatcctgagactcttgaagta

SEQ ID NO: 46717 - DNA, 25 bp, Artificial
  Probe
ttcatcctgagactcttgaagtaat

SEQ ID NO: 46718 - DNA, 25 bp, Artificial
  Probe
gaagttcatcctgagactcttgaag

SEQ ID NO: 46719 - DNA, 25 bp, Artificial
  Probe
tacatatgatctgaagtgcctgacc

SEQ ID NO: 46720 - DNA, 25 bp, Artificial
  Probe
tgagactcttgaagtaatggctggt

SEQ ID NO: 46721 - DNA, 25 bp, Artificial
  Probe
aagttcatcctgagactcttgaagt

SEQ ID NO: 46722 - DNA, 25 bp, Artificial
  Probe
tgaagttcatcctgagactcttgaa

SEQ ID NO: 46723 - DNA, 25 bp, Artificial
  Probe
acaacgacaatgaccacctttacaa

SEQ ID NO: 46724 - DNA, 25 bp, Artificial
  Probe
aacaacgacaatgaccacctttaca

SEQ ID NO: 46725 - DNA, 25 bp, Artificial
  Probe
agattaaaacaacgacaatgaccac

SEQ ID NO: 46726 - DNA, 25 bp, Artificial
  Probe
actcttgaagtaatggctggtcctg

SEQ ID NO: 46727 - DNA, 25 bp, Artificial
  Probe
tagattaaaacaacgacaatgacca

SEQ ID NO: 46728 - DNA, 25 bp, Artificial
  Probe
gactcttgaagtaatggctggtcct

SEQ ID NO: 46729 - DNA, 25 bp, Artificial
  Probe
agactcttgaagtaatggctggtcc

SEQ ID NO: 46730 - DNA, 25 bp, Artificial
  Probe
gattaaaacaacgacaatgaccacc

SEQ ID NO: 46731 - DNA, 25 bp, Artificial
  Probe
atctgaagtgcctgaccaccttatc

SEQ ID NO: 46732 - DNA, 25 bp, Artificial
  Probe
attaaaacaacgacaatgaccacct

SEQ ID NO: 46733 - DNA, 25 bp, Artificial
  Probe
aacgacaatgaccacctttacaaaa

SEQ ID NO: 46734 - DNA, 25 bp, Artificial
  Probe
aaaacaacgacaatgaccaccttta

SEQ ID NO: 46735 - DNA, 25 bp, Artificial
  Probe
taaaacaacgacaatgaccaccttt

SEQ ID NO: 46736 - DNA, 25 bp, Artificial
  Probe
ttaaaacaacgacaatgaccacctt

SEQ ID NO: 46737 - DNA, 25 bp, Artificial
  Probe
acatatgatctgaagtgcctgacca

SEQ ID NO: 46738 - DNA, 25 bp, Artificial
  Probe
gatctgaagtgcctgaccaccttat

SEQ ID NO: 46739 - DNA, 25 bp, Artificial
  Probe
ttagattaaaacaacgacaatgacc

SEQ ID NO: 46740 - DNA, 25 bp, Artificial
  Probe
atatgatctgaagtgcctgaccacc

SEQ ID NO: 46741 - DNA, 25 bp, Artificial
  Probe
gtttgtttcatgtaacagaagtcca

SEQ ID NO: 46742 - DNA, 25 bp, Artificial
  Probe
ccagtttgtttcatgtaacagaagt

SEQ ID NO: 46743 - DNA, 25 bp, Artificial
  Probe
ttgtttcatgtaacagaagtccaga

SEQ ID NO: 46744 - DNA, 25 bp, Artificial
  Probe
tttgtttcatgtaacagaagtccag

SEQ ID NO: 46745 - DNA, 25 bp, Artificial
  Probe
agtttgtttcatgtaacagaagtcc

SEQ ID NO: 46746 - DNA, 25 bp, Artificial
  Probe
aattgggccagtttgtttcatgtaa

SEQ ID NO: 46747 - DNA, 25 bp, Artificial
  Probe
aaattgggccagtttgtttcatgta

SEQ ID NO: 46748 - DNA, 25 bp, Artificial
  Probe
catatgatctgaagtgcctgaccac

SEQ ID NO: 46749 - DNA, 25 bp, Artificial
  Probe
cagtttgtttcatgtaacagaagtc

SEQ ID NO: 46750 - DNA, 25 bp, Artificial
  Probe
agaaggtgtagtagaagttagtgga

SEQ ID NO: 46751 - DNA, 25 bp, Artificial
  Probe
gagaaggtgtagtagaagttagtgg

SEQ ID NO: 46752 - DNA, 25 bp, Artificial
  Probe
gtagtagaagttagtggatggaagc

SEQ ID NO: 46753 - DNA, 25 bp, Artificial
  Probe
gctatgagaaggtgtagtagaagtt

SEQ ID NO: 46754 - DNA, 25 bp, Artificial
  Probe
gtgtagtagaagttagtggatggaa

SEQ ID NO: 46755 - DNA, 25 bp, Artificial
  Probe
aaggtgtagtagaagttagtggatg

SEQ ID NO: 46756 - DNA, 25 bp, Artificial
  Probe
tgtagtagaagttagtggatggaag

SEQ ID NO: 46757 - DNA, 25 bp, Artificial
  Probe
gaaggtgtagtagaagttagtggat

SEQ ID NO: 46758 - DNA, 25 bp, Artificial
  Probe
tgagaaggtgtagtagaagttagtg

SEQ ID NO: 46759 - DNA, 25 bp, Artificial
  Probe
ggtgtagtagaagttagtggatgga

SEQ ID NO: 46760 - DNA, 25 bp, Artificial
  Probe
aggtgtagtagaagttagtggatgg

SEQ ID NO: 46761 - DNA, 25 bp, Artificial
  Probe
acttatagacaatcgcttggttact

SEQ ID NO: 46762 - DNA, 25 bp, Artificial
  Probe
gttgaacttatagacaatcgcttgg

SEQ ID NO: 46763 - DNA, 25 bp, Artificial
  Probe
cttatagacaatcgcttggttactg

SEQ ID NO: 46764 - DNA, 25 bp, Artificial
  Probe
tgaacttatagacaatcgcttggtt

SEQ ID NO: 46765 - DNA, 25 bp, Artificial
  Probe
ttgaacttatagacaatcgcttggt

SEQ ID NO: 46766 - DNA, 25 bp, Artificial
  Probe
aacttatagacaatcgcttggttac

SEQ ID NO: 46767 - DNA, 25 bp, Artificial
  Probe
atgagaaggtgtagtagaagttagt

SEQ ID NO: 46768 - DNA, 25 bp, Artificial
  Probe
gaacttatagacaatcgcttggtta

SEQ ID NO: 46769 - DNA, 25 bp, Artificial
  Probe
ttatagacaatcgcttggttactgc

SEQ ID NO: 46770 - DNA, 25 bp, Artificial
  Probe
tgttgaacttatagacaatcgcttg

SEQ ID NO: 46771 - DNA, 25 bp, Artificial
  Probe
atgatattctgtccatctctccaca

SEQ ID NO: 46772 - DNA, 25 bp, Artificial
  Probe
catgatattctgtccatctctccac

SEQ ID NO: 46773 - DNA, 25 bp, Artificial
  Probe
caccatgatattctgtccatctctc

SEQ ID NO: 46774 - DNA, 25 bp, Artificial
  Probe
ctcaccatgatattctgtccatctc

SEQ ID NO: 46775 - DNA, 25 bp, Artificial
  Probe
tcaccatgatattctgtccatctct

SEQ ID NO: 46776 - DNA, 25 bp, Artificial
  Probe
agagctatgagaaggtgtagtagaa

SEQ ID NO: 46777 - DNA, 25 bp, Artificial
  Probe
aagagctatgagaaggtgtagtaga

SEQ ID NO: 46778 - DNA, 25 bp, Artificial
  Probe
caagagctatgagaaggtgtagtag

SEQ ID NO: 46779 - DNA, 25 bp, Artificial
  Probe
agctatgagaaggtgtagtagaagt

SEQ ID NO: 46780 - DNA, 25 bp, Artificial
  Probe
gagctatgagaaggtgtagtagaag

SEQ ID NO: 46781 - DNA, 25 bp, Artificial
  Probe
ccatgatattctgtccatctctcca

SEQ ID NO: 46782 - DNA, 25 bp, Artificial
  Probe
accatgatattctgtccatctctcc

SEQ ID NO: 46783 - DNA, 25 bp, Artificial
  Probe
agtagaagttagtggatggaagcta

SEQ ID NO: 46784 - DNA, 25 bp, Artificial
  Probe
tagtagaagttagtggatggaagct

SEQ ID NO: 46785 - DNA, 25 bp, Artificial
  Probe
cctcaccatgatattctgtccatct

SEQ ID NO: 46786 - DNA, 25 bp, Artificial
  Probe
gcaagagctatgagaaggtgtagta

SEQ ID NO: 46787 - DNA, 25 bp, Artificial
  Probe
tatagacaatcgcttggttactgcc

SEQ ID NO: 46788 - DNA, 25 bp, Artificial
  Probe
gtagaagttagtggatggaagctaa

SEQ ID NO: 46789 - DNA, 25 bp, Artificial
  Probe
gaagttagtggatggaagctaagaa

SEQ ID NO: 46790 - DNA, 25 bp, Artificial
  Probe
tagaagttagtggatggaagctaag

SEQ ID NO: 46791 - DNA, 25 bp, Artificial
  Probe
agaagttagtggatggaagctaaga

SEQ ID NO: 46792 - DNA, 25 bp, Artificial
  Probe
tatgagaaggtgtagtagaagttag

SEQ ID NO: 46793 - DNA, 25 bp, Artificial
  Probe
ctatgagaaggtgtagtagaagtta

SEQ ID NO: 46794 - DNA, 25 bp, Artificial
  Probe
atgacatttgctttctatcactcaa

SEQ ID NO: 46795 - DNA, 25 bp, Artificial
  Probe
ttgcttcgagaaggacaagtatatt

SEQ ID NO: 46796 - DNA, 25 bp, Artificial
  Probe
gaaagggagatgaggaatgactaat

SEQ ID NO: 46797 - DNA, 25 bp, Artificial
  Probe
aataagcctggtgtctatgttcgtg

SEQ ID NO: 46798 - DNA, 25 bp, Artificial
  Probe
caataagcctggtgtctatgttcgt

SEQ ID NO: 46799 - DNA, 25 bp, Artificial
  Probe
tcagatgttcagcaaatagcagtaa

SEQ ID NO: 46800 - DNA, 25 bp, Artificial
  Probe
aagggagatgaggaatgactaattg

SEQ ID NO: 46801 - DNA, 25 bp, Artificial
  Probe
cgttaattggattgaaagggagatg

SEQ ID NO: 46802 - DNA, 25 bp, Artificial
  Probe
atgtatgggaatggcaaagaatatc

SEQ ID NO: 46803 - DNA, 25 bp, Artificial
  Probe
tgaaagggagatgaggaatgactaa

SEQ ID NO: 46804 - DNA, 25 bp, Artificial
  Probe
ttgaaagggagatgaggaatgacta

SEQ ID NO: 46805 - DNA, 25 bp, Artificial
  Probe
taattggattgaaagggagatgagg

SEQ ID NO: 46806 - DNA, 25 bp, Artificial
  Probe
aaagggagatgaggaatgactaatt

SEQ ID NO: 46807 - DNA, 25 bp, Artificial
  Probe
gtcagatgttcagcaaatagcagta

SEQ ID NO: 46808 - DNA, 25 bp, Artificial
  Probe
gattgaaagggagatgaggaatgac

SEQ ID NO: 46809 - DNA, 25 bp, Artificial
  Probe
gagatgaggaatgactaattgggtg

SEQ ID NO: 46810 - DNA, 25 bp, Artificial
  Probe
cagatgttcagcaaatagcagtaac

SEQ ID NO: 46811 - DNA, 25 bp, Artificial
  Probe
tgtatgggaatggcaaagaatatcg

SEQ ID NO: 46812 - DNA, 25 bp, Artificial
  Probe
gttaattggattgaaagggagatga

SEQ ID NO: 46813 - DNA, 25 bp, Artificial
  Probe
atctaaacaacagagtcaaatccac

SEQ ID NO: 46814 - DNA, 25 bp, Artificial
  Probe
attgaaagggagatgaggaatgact

SEQ ID NO: 46815 - DNA, 25 bp, Artificial
  Probe
tctaaacaacagagtcaaatccacc

SEQ ID NO: 46816 - DNA, 25 bp, Artificial
  Probe
ttaattggattgaaagggagatgag

SEQ ID NO: 46817 - DNA, 25 bp, Artificial
  Probe
agccaccatcacagataatgtcatc

SEQ ID NO: 46818 - DNA, 25 bp, Artificial
  Probe
gttcagcaaatagcagtaaccaaac

SEQ ID NO: 46819 - DNA, 25 bp, Artificial
  Probe
ttggattgaaagggagatgaggaat

SEQ ID NO: 46820 - DNA, 25 bp, Artificial
  Probe
attggattgaaagggagatgaggaa

SEQ ID NO: 46821 - DNA, 25 bp, Artificial
  Probe
atgttcagcaaatagcagtaaccaa

SEQ ID NO: 46822 - DNA, 25 bp, Artificial
  Probe
agggagatgaggaatgactaattgg

SEQ ID NO: 46823 - DNA, 25 bp, Artificial
  Probe
agatgttcagcaaatagcagtaacc

SEQ ID NO: 46824 - DNA, 25 bp, Artificial
  Probe
acttctgtggcggtactttaatatc

SEQ ID NO: 46825 - DNA, 25 bp, Artificial
  Probe
tgttcagcaaatagcagtaaccaaa

SEQ ID NO: 46826 - DNA, 25 bp, Artificial
  Probe
aattggattgaaagggagatgagga

SEQ ID NO: 46827 - DNA, 25 bp, Artificial
  Probe
gtatgggaatggcaaagaatatcgg

SEQ ID NO: 46828 - DNA, 25 bp, Artificial
  Probe
ttcagcaaatagcagtaaccaaact

SEQ ID NO: 46829 - DNA, 25 bp, Artificial
  Probe
cttgtctgccatctccaaattatgt

SEQ ID NO: 46830 - DNA, 25 bp, Artificial
  Probe
gatgttcagcaaatagcagtaacca

SEQ ID NO: 46831 - DNA, 25 bp, Artificial
  Probe
ggagatgaggaatgactaattgggt

SEQ ID NO: 46832 - DNA, 25 bp, Artificial
  Probe
ggattgaaagggagatgaggaatga

SEQ ID NO: 46833 - DNA, 25 bp, Artificial
  Probe
cagccaccatcacagataatgtcat

SEQ ID NO: 46834 - DNA, 25 bp, Artificial
  Probe
cttctgtggcggtactttaatatcc

SEQ ID NO: 46835 - DNA, 25 bp, Artificial
  Probe
gctgagtatctaaacaacagagtca

SEQ ID NO: 46836 - DNA, 25 bp, Artificial
  Probe
ctaaacaacagagtcaaatccaccg

SEQ ID NO: 46837 - DNA, 25 bp, Artificial
  Probe
catgtatgggaatggcaaagaatat

SEQ ID NO: 46838 - DNA, 25 bp, Artificial
  Probe
ttgtctgccatctccaaattatgtg

SEQ ID NO: 46839 - DNA, 25 bp, Artificial
  Probe
agatgaggaatgactaattgggtgg

SEQ ID NO: 46840 - DNA, 25 bp, Artificial
  Probe
agcacagaggaatcacagaattatt

SEQ ID NO: 46841 - DNA, 25 bp, Artificial
  Probe
aagcacagaggaatcacagaattat

SEQ ID NO: 46842 - DNA, 25 bp, Artificial
  Probe
gaagcacagaggaatcacagaatta

SEQ ID NO: 46843 - DNA, 25 bp, Artificial
  Probe
tagaagcacagaggaatcacagaat

SEQ ID NO: 46844 - DNA, 25 bp, Artificial
  Probe
gtagaagcacagaggaatcacagaa

SEQ ID NO: 46845 - DNA, 25 bp, Artificial
  Probe
agaagcacagaggaatcacagaatt

SEQ ID NO: 46846 - DNA, 25 bp, Artificial
  Probe
tccactataacactatgctttgctc

SEQ ID NO: 46847 - DNA, 25 bp, Artificial
  Probe
ctccactataacactatgctttgct

SEQ ID NO: 46848 - DNA, 25 bp, Artificial
  Probe
ccactataacactatgctttgctca

SEQ ID NO: 46849 - DNA, 25 bp, Artificial
  Probe
ccctccactataacactatgctttg

SEQ ID NO: 46850 - DNA, 25 bp, Artificial
  Probe
gcacagaggaatcacagaattattt

SEQ ID NO: 46851 - DNA, 25 bp, Artificial
  Probe
cactataacactatgctttgctcat

SEQ ID NO: 46852 - DNA, 25 bp, Artificial
  Probe
ttgtagaagcacagaggaatcacag

SEQ ID NO: 46853 - DNA, 25 bp, Artificial
  Probe
cctccactataacactatgctttgc

SEQ ID NO: 46854 - DNA, 25 bp, Artificial
  Probe
actataacactatgctttgctcatt

SEQ ID NO: 46855 - DNA, 25 bp, Artificial
  Probe
gttgtagaagcacagaggaatcaca

SEQ ID NO: 46856 - DNA, 25 bp, Artificial
  Probe
ctataacactatgctttgctcattc

SEQ ID NO: 46857 - DNA, 25 bp, Artificial
  Probe
tgtagaagcacagaggaatcacaga

SEQ ID NO: 46858 - DNA, 25 bp, Artificial
  Probe
gccctccactataacactatgcttt

SEQ ID NO: 46859 - DNA, 25 bp, Artificial
  Probe
ggttgtagaagcacagaggaatcac

SEQ ID NO: 46860 - DNA, 25 bp, Artificial
  Probe
ggtatcactccctgtctcaaattgg

SEQ ID NO: 46861 - DNA, 25 bp, Artificial
  Probe
agcgagataacactgtttgtttatg

SEQ ID NO: 46862 - DNA, 25 bp, Artificial
  Probe
cgagataacactgtttgtttatggc

SEQ ID NO: 46863 - DNA, 25 bp, Artificial
  Probe
gcgagataacactgtttgtttatgg

SEQ ID NO: 46864 - DNA, 25 bp, Artificial
  Probe
aagcgagataacactgtttgtttat

SEQ ID NO: 46865 - DNA, 25 bp, Artificial
  Probe
atatctccctgtccccacctatttt

SEQ ID NO: 46866 - DNA, 25 bp, Artificial
  Probe
taagcgagataacactgtttgttta

SEQ ID NO: 46867 - DNA, 25 bp, Artificial
  Probe
aataaagttttatgggaacacaacc

SEQ ID NO: 46868 - DNA, 25 bp, Artificial
  Probe
cacagaggaatcacagaattatttt

SEQ ID NO: 46869 - DNA, 25 bp, Artificial
  Probe
taaagttttatgggaacacaaccac

SEQ ID NO: 46870 - DNA, 25 bp, Artificial
  Probe
ataaagttttatgggaacacaacca

SEQ ID NO: 46871 - DNA, 25 bp, Artificial
  Probe
agggttgtagaagcacagaggaatc

SEQ ID NO: 46872 - DNA, 25 bp, Artificial
  Probe
gagggttgtagaagcacagaggaat

SEQ ID NO: 46873 - DNA, 25 bp, Artificial
  Probe
aaagttttatgggaacacaaccaca

SEQ ID NO: 46874 - DNA, 25 bp, Artificial
  Probe
catatctccctgtccccacctattt

SEQ ID NO: 46875 - DNA, 25 bp, Artificial
  Probe
gtatcactccctgtctcaaattggg

SEQ ID NO: 46876 - DNA, 25 bp, Artificial
  Probe
gggtatcactccctgtctcaaattg

SEQ ID NO: 46877 - DNA, 25 bp, Artificial
  Probe
acaaagataactgccctgtagcatc

SEQ ID NO: 46878 - DNA, 25 bp, Artificial
  Probe
gggttgtagaagcacagaggaatca

SEQ ID NO: 46879 - DNA, 25 bp, Artificial
  Probe
tgggtatcactccctgtctcaaatt

SEQ ID NO: 46880 - DNA, 25 bp, Artificial
  Probe
agaggccctccactataacactatg

SEQ ID NO: 46881 - DNA, 25 bp, Artificial
  Probe
cagaggccctccactataacactat

SEQ ID NO: 46882 - DNA, 25 bp, Artificial
  Probe
atttcagaggccctccactataaca

SEQ ID NO: 46883 - DNA, 25 bp, Artificial
  Probe
atcatatctccctgtccccacctat

SEQ ID NO: 46884 - DNA, 25 bp, Artificial
  Probe
caaagataactgccctgtagcatcc

SEQ ID NO: 46885 - DNA, 25 bp, Artificial
  Probe
ccataatcatgttacaggagaaggc

SEQ ID NO: 46886 - DNA, 25 bp, Artificial
  Probe
aactctctctgaagatcaagcctag

SEQ ID NO: 46887 - DNA, 25 bp, Artificial
  Probe
gaactctctctgaagatcaagccta

SEQ ID NO: 46888 - DNA, 25 bp, Artificial
  Probe
cgacgacatcataaacttcttcaat

SEQ ID NO: 46889 - DNA, 25 bp, Artificial
  Probe
aaacgacgacatcataaacttcttc

SEQ ID NO: 46890 - DNA, 25 bp, Artificial
  Probe
gctcctgaagttcatcaagatcatg

SEQ ID NO: 46891 - DNA, 25 bp, Artificial
  Probe
tccataatcatgttacaggagaagg

SEQ ID NO: 46892 - DNA, 25 bp, Artificial
  Probe
ggtccataatcatgttacaggagaa

SEQ ID NO: 46893 - DNA, 25 bp, Artificial
  Probe
ataaacttcttcaatgacttcagcg

SEQ ID NO: 46894 - DNA, 25 bp, Artificial
  Probe
tgctcctgaagttcatcaagatcat

SEQ ID NO: 46895 - DNA, 25 bp, Artificial
  Probe
acgacgacatcataaacttcttcaa

SEQ ID NO: 46896 - DNA, 25 bp, Artificial
  Probe
aacgacgacatcataaacttcttca

SEQ ID NO: 46897 - DNA, 25 bp, Artificial
  Probe
gaaacgacgacatcataaacttctt

SEQ ID NO: 46898 - DNA, 25 bp, Artificial
  Probe
taaacttcttcaatgacttcagcga

SEQ ID NO: 46899 - DNA, 25 bp, Artificial
  Probe
gagaaacgacgacatcataaacttc

SEQ ID NO: 46900 - DNA, 25 bp, Artificial
  Probe
gtccataatcatgttacaggagaag

SEQ ID NO: 46901 - DNA, 25 bp, Artificial
  Probe
ggagaaacgacgacatcataaactt

SEQ ID NO: 46902 - DNA, 25 bp, Artificial
  Probe
ctgctcctgaagttcatcaagatca

SEQ ID NO: 46903 - DNA, 25 bp, Artificial
  Probe
cataaacttcttcaatgacttcagc

SEQ ID NO: 46904 - DNA, 25 bp, Artificial
  Probe
gacgacatcataaacttcttcaatg

SEQ ID NO: 46905 - DNA, 25 bp, Artificial
  Probe
ctcaacaatttcaactcctacctgg

SEQ ID NO: 46906 - DNA, 25 bp, Artificial
  Probe
cggtccataatcatgttacaggaga

SEQ ID NO: 46907 - DNA, 25 bp, Artificial
  Probe
tatgggaactctctctgaagatcaa

SEQ ID NO: 46908 - DNA, 25 bp, Artificial
  Probe
aaacttcttcaatgacttcagcgac

SEQ ID NO: 46909 - DNA, 25 bp, Artificial
  Probe
ctatgggaactctctctgaagatca

SEQ ID NO: 46910 - DNA, 25 bp, Artificial
  Probe
aacttcttcaatgacttcagcgacc

SEQ ID NO: 46911 - DNA, 25 bp, Artificial
  Probe
gctcaacaatttcaactcctacctg

SEQ ID NO: 46912 - DNA, 25 bp, Artificial
  Probe
cctatgggaactctctctgaagatc

SEQ ID NO: 46913 - DNA, 25 bp, Artificial
  Probe
aacagaccgtgaagagaagacctag

SEQ ID NO: 46914 - DNA, 25 bp, Artificial
  Probe
caagctcaacaatttcaactcctac

SEQ ID NO: 46915 - DNA, 25 bp, Artificial
  Probe
atgggaactctctctgaagatcaag

SEQ ID NO: 46916 - DNA, 25 bp, Artificial
  Probe
cataatcatgttacaggagaaggcc

SEQ ID NO: 46917 - DNA, 25 bp, Artificial
  Probe
aagctcaacaatttcaactcctacc

SEQ ID NO: 46918 - DNA, 25 bp, Artificial
  Probe
cttcttcaatgacttcagcgaccac

SEQ ID NO: 46919 - DNA, 25 bp, Artificial
  Probe
ggaactctctctgaagatcaagcct

SEQ ID NO: 46920 - DNA, 25 bp, Artificial
  Probe
gctgctcctgaagttcatcaagatc

SEQ ID NO: 46921 - DNA, 25 bp, Artificial
  Probe
aaacagaccgtgaagagaagaccta

SEQ ID NO: 46922 - DNA, 25 bp, Artificial
  Probe
gaacctccatgtatcccatacctag

SEQ ID NO: 46923 - DNA, 25 bp, Artificial
  Probe
gcaagctcaacaatttcaactccta

SEQ ID NO: 46924 - DNA, 25 bp, Artificial
  Probe
cggagaaacgacgacatcataaact

SEQ ID NO: 46925 - DNA, 25 bp, Artificial
  Probe
agctcaacaatttcaactcctacct

SEQ ID NO: 46926 - DNA, 25 bp, Artificial
  Probe
agaaacgacgacatcataaacttct

SEQ ID NO: 46927 - DNA, 25 bp, Artificial
  Probe
tcaacaatttcaactcctacctggc

SEQ ID NO: 46928 - DNA, 25 bp, Artificial
  Probe
gttgattgacagctcatcctccttc

SEQ ID NO: 46929 - DNA, 25 bp, Artificial
  Probe
aagatcaagcctaggaacataacaa

SEQ ID NO: 46930 - DNA, 25 bp, Artificial
  Probe
tcttctgctgtagcttaatcctctt

SEQ ID NO: 46931 - DNA, 25 bp, Artificial
  Probe
ttcttctgctgtagcttaatcctct

SEQ ID NO: 46932 - DNA, 25 bp, Artificial
  Probe
gttcttctgctgtagcttaatcctc

SEQ ID NO: 46933 - DNA, 25 bp, Artificial
  Probe
agttcttctgctgtagcttaatcct

SEQ ID NO: 46934 - DNA, 25 bp, Artificial
  Probe
ttcagttcttctgctgtagcttaat

SEQ ID NO: 46935 - DNA, 25 bp, Artificial
  Probe
catagagagccacaggaaattacag

SEQ ID NO: 46936 - DNA, 25 bp, Artificial
  Probe
atagagagccacaggaaattacaga

SEQ ID NO: 46937 - DNA, 25 bp, Artificial
  Probe
tcagttcttctgctgtagcttaatc

SEQ ID NO: 46938 - DNA, 25 bp, Artificial
  Probe
taaagacctttgagacctatgacac

SEQ ID NO: 46939 - DNA, 25 bp, Artificial
  Probe
ctaaagacctttgagacctatgaca

SEQ ID NO: 46940 - DNA, 25 bp, Artificial
  Probe
actaaagacctttgagacctatgac

SEQ ID NO: 46941 - DNA, 25 bp, Artificial
  Probe
gactaaagacctttgagacctatga

SEQ ID NO: 46942 - DNA, 25 bp, Artificial
  Probe
cgactaaagacctttgagacctatg

SEQ ID NO: 46943 - DNA, 25 bp, Artificial
  Probe
gttcagttcttctgctgtagcttaa

SEQ ID NO: 46944 - DNA, 25 bp, Artificial
  Probe
acgactaaagacctttgagacctat

SEQ ID NO: 46945 - DNA, 25 bp, Artificial
  Probe
cttaatcctctttgtactagcctca

SEQ ID NO: 46946 - DNA, 25 bp, Artificial
  Probe
aacgactaaagacctttgagaccta

SEQ ID NO: 46947 - DNA, 25 bp, Artificial
  Probe
cagttcttctgctgtagcttaatcc

SEQ ID NO: 46948 - DNA, 25 bp, Artificial
  Probe
tagagagccacaggaaattacagac

SEQ ID NO: 46949 - DNA, 25 bp, Artificial
  Probe
ggaaacattggcaagtaggacatac

SEQ ID NO: 46950 - DNA, 25 bp, Artificial
  Probe
taatcctctttgtactagcctcaag

SEQ ID NO: 46951 - DNA, 25 bp, Artificial
  Probe
ttaatcctctttgtactagcctcaa

SEQ ID NO: 46952 - DNA, 25 bp, Artificial
  Probe
tggaaacattggcaagtaggacata

SEQ ID NO: 46953 - DNA, 25 bp, Artificial
  Probe
ccatagagagccacaggaaattaca

SEQ ID NO: 46954 - DNA, 25 bp, Artificial
  Probe
tttgtactagcctcaaggaaagttc

SEQ ID NO: 46955 - DNA, 25 bp, Artificial
  Probe
aaacgactaaagacctttgagacct

SEQ ID NO: 46956 - DNA, 25 bp, Artificial
  Probe
gaaacattggcaagtaggacatacg

SEQ ID NO: 46957 - DNA, 25 bp, Artificial
  Probe
ctgctgtagcttaatcctctttgta

SEQ ID NO: 46958 - DNA, 25 bp, Artificial
  Probe
ttgagacctatgacacgttcagatc

SEQ ID NO: 46959 - DNA, 25 bp, Artificial
  Probe
gctgtagcttaatcctctttgtact

SEQ ID NO: 46960 - DNA, 25 bp, Artificial
  Probe
cttctgctgtagcttaatcctcttt

SEQ ID NO: 46961 - DNA, 25 bp, Artificial
  Probe
tgctgtagcttaatcctctttgtac

SEQ ID NO: 46962 - DNA, 25 bp, Artificial
  Probe
ttctgctgtagcttaatcctctttg

SEQ ID NO: 46963 - DNA, 25 bp, Artificial
  Probe
cccatagagagccacaggaaattac

SEQ ID NO: 46964 - DNA, 25 bp, Artificial
  Probe
ggttcagttcttctgctgtagctta

SEQ ID NO: 46965 - DNA, 25 bp, Artificial
  Probe
aaagacctttgagacctatgacacg

SEQ ID NO: 46966 - DNA, 25 bp, Artificial
  Probe
tctgctgtagcttaatcctctttgt

SEQ ID NO: 46967 - DNA, 25 bp, Artificial
  Probe
aatcctctttgtactagcctcaagg

SEQ ID NO: 46968 - DNA, 25 bp, Artificial
  Probe
ttggaaacattggcaagtaggacat

SEQ ID NO: 46969 - DNA, 25 bp, Artificial
  Probe
ctttgtactagcctcaaggaaagtt

SEQ ID NO: 46970 - DNA, 25 bp, Artificial
  Probe
cctctttgtactagcctcaaggaaa

SEQ ID NO: 46971 - DNA, 25 bp, Artificial
  Probe
ctctttgtactagcctcaaggaaag

SEQ ID NO: 46972 - DNA, 25 bp, Artificial
  Probe
tgaagccaaacgactaaagaccttt

SEQ ID NO: 46973 - DNA, 25 bp, Artificial
  Probe
tgagacctatgacacgttcagatca

SEQ ID NO: 46974 - DNA, 25 bp, Artificial
  Probe
gcttaatcctctttgtactagcctc

SEQ ID NO: 46975 - DNA, 25 bp, Artificial
  Probe
gaactgatctctggcatatctgatg

SEQ ID NO: 46976 - DNA, 25 bp, Artificial
  Probe
tgaactgatctctggcatatctgat

SEQ ID NO: 46977 - DNA, 25 bp, Artificial
  Probe
aactgatctctggcatatctgatga

SEQ ID NO: 46978 - DNA, 25 bp, Artificial
  Probe
gtgaactgatctctggcatatctga

SEQ ID NO: 46979 - DNA, 25 bp, Artificial
  Probe
tgtgaactgatctctggcatatctg

SEQ ID NO: 46980 - DNA, 25 bp, Artificial
  Probe
gtgtgaactgatctctggcatatct

SEQ ID NO: 46981 - DNA, 25 bp, Artificial
  Probe
cacataaagcatcagtcacagtttg

SEQ ID NO: 46982 - DNA, 25 bp, Artificial
  Probe
aaacacataaagcatcagtcacagt

SEQ ID NO: 46983 - DNA, 25 bp, Artificial
  Probe
acacataaagcatcagtcacagttt

SEQ ID NO: 46984 - DNA, 25 bp, Artificial
  Probe
aacacataaagcatcagtcacagtt

SEQ ID NO: 46985 - DNA, 25 bp, Artificial
  Probe
gagtgtatcttgccttcaggtcttg

SEQ ID NO: 46986 - DNA, 25 bp, Artificial
  Probe
agagtgtatcttgccttcaggtctt

SEQ ID NO: 46987 - DNA, 25 bp, Artificial
  Probe
gttggtgacagaagagtgtatcttg

SEQ ID NO: 46988 - DNA, 25 bp, Artificial
  Probe
ggtgtgaactgatctctggcatatc

SEQ ID NO: 46989 - DNA, 25 bp, Artificial
  Probe
tgttggtgacagaagagtgtatctt

SEQ ID NO: 46990 - DNA, 25 bp, Artificial
  Probe
tggtgtgaactgatctctggcatat

SEQ ID NO: 46991 - DNA, 25 bp, Artificial
  Probe
ttggtgtgaactgatctctggcata

SEQ ID NO: 46992 - DNA, 25 bp, Artificial
  Probe
gtgacagaagagtgtatcttgcctt

SEQ ID NO: 46993 - DNA, 25 bp, Artificial
  Probe
ttggtgacagaagagtgtatcttgc

SEQ ID NO: 46994 - DNA, 25 bp, Artificial
  Probe
ccacatttatagagccaagccagag

SEQ ID NO: 46995 - DNA, 25 bp, Artificial
  Probe
acagaagagtgtatcttgccttcag

SEQ ID NO: 46996 - DNA, 25 bp, Artificial
  Probe
ttcagccacatttatagagccaagc

SEQ ID NO: 46997 - DNA, 25 bp, Artificial
  Probe
aaaacacataaagcatcagtcacag

SEQ ID NO: 46998 - DNA, 25 bp, Artificial
  Probe
caaaacacataaagcatcagtcaca

SEQ ID NO: 46999 - DNA, 25 bp, Artificial
  Probe
gacagaagagtgtatcttgccttca

SEQ ID NO: 47000 - DNA, 25 bp, Artificial
  Probe
tgacagaagagtgtatcttgccttc

SEQ ID NO: 47001 - DNA, 25 bp, Artificial
  Probe
aagagtgtatcttgccttcaggtct

SEQ ID NO: 47002 - DNA, 25 bp, Artificial
  Probe
cacatttatagagccaagccagagc

SEQ ID NO: 47003 - DNA, 25 bp, Artificial
  Probe
gaagagtgtatcttgccttcaggtc

SEQ ID NO: 47004 - DNA, 25 bp, Artificial
  Probe
cagaagagtgtatcttgccttcagg

SEQ ID NO: 47005 - DNA, 25 bp, Artificial
  Probe
gcaaaacacataaagcatcagtcac

SEQ ID NO: 47006 - DNA, 25 bp, Artificial
  Probe
agtgtatcttgccttcaggtcttgc

SEQ ID NO: 47007 - DNA, 25 bp, Artificial
  Probe
agaagagtgtatcttgccttcaggt

SEQ ID NO: 47008 - DNA, 25 bp, Artificial
  Probe
cttggtgtgaactgatctctggcat

SEQ ID NO: 47009 - DNA, 25 bp, Artificial
  Probe
acataaagcatcagtcacagtttgc

SEQ ID NO: 47010 - DNA, 25 bp, Artificial
  Probe
ctgttggtgacagaagagtgtatct

SEQ ID NO: 47011 - DNA, 25 bp, Artificial
  Probe
ggtgacagaagagtgtatcttgcct

SEQ ID NO: 47012 - DNA, 25 bp, Artificial
  Probe
catttatagagccaagccagagcct

SEQ ID NO: 47013 - DNA, 25 bp, Artificial
  Probe
atttatagagccaagccagagcctc

SEQ ID NO: 47014 - DNA, 25 bp, Artificial
  Probe
tggtgacagaagagtgtatcttgcc

SEQ ID NO: 47015 - DNA, 25 bp, Artificial
  Probe
ctcgaagaagcctgaagacagatgt

SEQ ID NO: 47016 - DNA, 25 bp, Artificial
  Probe
gatctgacctcgaagaagcctgaag

SEQ ID NO: 47017 - DNA, 25 bp, Artificial
  Probe
cataaagcatcagtcacagtttgcc

SEQ ID NO: 47018 - DNA, 25 bp, Artificial
  Probe
acatttatagagccaagccagagcc

SEQ ID NO: 47019 - DNA, 25 bp, Artificial
  Probe
cctgttggtgacagaagagtgtatc

SEQ ID NO: 47020 - DNA, 25 bp, Artificial
  Probe
actctcagacacttattcaatgcag

SEQ ID NO: 47021 - DNA, 25 bp, Artificial
  Probe
acacttattcaatgcagcactctag

SEQ ID NO: 47022 - DNA, 25 bp, Artificial
  Probe
gacacttattcaatgcagcactcta

SEQ ID NO: 47023 - DNA, 25 bp, Artificial
  Probe
cactctcagacacttattcaatgca

SEQ ID NO: 47024 - DNA, 25 bp, Artificial
  Probe
cacttattcaatgcagcactctagg

SEQ ID NO: 47025 - DNA, 25 bp, Artificial
  Probe
ctctcagacacttattcaatgcagc

SEQ ID NO: 47026 - DNA, 25 bp, Artificial
  Probe
ctaaagccaaagcccaagaaagtag

SEQ ID NO: 47027 - DNA, 25 bp, Artificial
  Probe
cagacacttattcaatgcagcactc

SEQ ID NO: 47028 - DNA, 25 bp, Artificial
  Probe
ctcagacacttattcaatgcagcac

SEQ ID NO: 47029 - DNA, 25 bp, Artificial
  Probe
aaactaaagccaaagcccaagaaag

SEQ ID NO: 47030 - DNA, 25 bp, Artificial
  Probe
gaaactaaagccaaagcccaagaaa

SEQ ID NO: 47031 - DNA, 25 bp, Artificial
  Probe
tctcagacacttattcaatgcagca

SEQ ID NO: 47032 - DNA, 25 bp, Artificial
  Probe
taaagccaaagcccaagaaagtagt

SEQ ID NO: 47033 - DNA, 25 bp, Artificial
  Probe
agacacttattcaatgcagcactct

SEQ ID NO: 47034 - DNA, 25 bp, Artificial
  Probe
tcagacacttattcaatgcagcact

SEQ ID NO: 47035 - DNA, 25 bp, Artificial
  Probe
actaaagccaaagcccaagaaagta

SEQ ID NO: 47036 - DNA, 25 bp, Artificial
  Probe
acttattcaatgcagcactctaggc

SEQ ID NO: 47037 - DNA, 25 bp, Artificial
  Probe
gcactctcagacacttattcaatgc

SEQ ID NO: 47038 - DNA, 25 bp, Artificial
  Probe
tgaaactaaagccaaagcccaagaa

SEQ ID NO: 47039 - DNA, 25 bp, Artificial
  Probe
ctgaaactaaagccaaagcccaaga

SEQ ID NO: 47040 - DNA, 25 bp, Artificial
  Probe
aactaaagccaaagcccaagaaagt

SEQ ID NO: 47041 - DNA, 25 bp, Artificial
  Probe
agaggcaatggaagcagatttgaag

SEQ ID NO: 47042 - DNA, 25 bp, Artificial
  Probe
gagaggcaatggaagcagatttgaa

SEQ ID NO: 47043 - DNA, 25 bp, Artificial
  Probe
aaagccaaagcccaagaaagtagtg

SEQ ID NO: 47044 - DNA, 25 bp, Artificial
  Probe
ttattcaatgcagcactctaggcaa

SEQ ID NO: 47045 - DNA, 25 bp, Artificial
  Probe
cttattcaatgcagcactctaggca

SEQ ID NO: 47046 - DNA, 25 bp, Artificial
  Probe
gaggcaatggaagcagatttgaagg

SEQ ID NO: 47047 - DNA, 25 bp, Artificial
  Probe
tattcaatgcagcactctaggcaac

SEQ ID NO: 47048 - DNA, 25 bp, Artificial
  Probe
gctgaaactaaagccaaagcccaag

SEQ ID NO: 47049 - DNA, 25 bp, Artificial
  Probe
gagattagagctcagatgggcattg

SEQ ID NO: 47050 - DNA, 25 bp, Artificial
  Probe
agattagagctcagatgggcattgg

SEQ ID NO: 47051 - DNA, 25 bp, Artificial
  Probe
gattagagctcagatgggcattggg

SEQ ID NO: 47052 - DNA, 25 bp, Artificial
  Probe
tgagattagagctcagatgggcatt

SEQ ID NO: 47053 - DNA, 25 bp, Artificial
  Probe
ggaaggacagttcatctagttgtat

SEQ ID NO: 47054 - DNA, 25 bp, Artificial
  Probe
tacggagtgtgtgtaatacttgtgt

SEQ ID NO: 47055 - DNA, 25 bp, Artificial
  Probe
ctgagtattaagtagcaatctgtca

SEQ ID NO: 47056 - DNA, 25 bp, Artificial
  Probe
actgagtattaagtagcaatctgtc

SEQ ID NO: 47057 - DNA, 25 bp, Artificial
  Probe
tgagtattaagtagcaatctgtcag

SEQ ID NO: 47058 - DNA, 25 bp, Artificial
  Probe
ttaatcactaccttgtcagctcatg

SEQ ID NO: 47059 - DNA, 25 bp, Artificial
  Probe
cttacggagtgtgtgtaatacttgt

SEQ ID NO: 47060 - DNA, 25 bp, Artificial
  Probe
ttacggagtgtgtgtaatacttgtg

SEQ ID NO: 47061 - DNA, 25 bp, Artificial
  Probe
gaaggacagttcatctagttgtatt

SEQ ID NO: 47062 - DNA, 25 bp, Artificial
  Probe
ccttacggagtgtgtgtaatacttg

SEQ ID NO: 47063 - DNA, 25 bp, Artificial
  Probe
tatgggcatttcacaaacacagtaa

SEQ ID NO: 47064 - DNA, 25 bp, Artificial
  Probe
ttatgggcatttcacaaacacagta

SEQ ID NO: 47065 - DNA, 25 bp, Artificial
  Probe
cttggaagtttctttggctgtctat

SEQ ID NO: 47066 - DNA, 25 bp, Artificial
  Probe
aggacagttcatctagttgtattag

SEQ ID NO: 47067 - DNA, 25 bp, Artificial
  Probe
ttggaagtttctttggctgtctatg

SEQ ID NO: 47068 - DNA, 25 bp, Artificial
  Probe
gatagagccttacggagtgtgtgta

SEQ ID NO: 47069 - DNA, 25 bp, Artificial
  Probe
acggagtgtgtgtaatacttgtgtg

SEQ ID NO: 47070 - DNA, 25 bp, Artificial
  Probe
atgggcatttcacaaacacagtaaa

SEQ ID NO: 47071 - DNA, 25 bp, Artificial
  Probe
tttatgggcatttcacaaacacagt

SEQ ID NO: 47072 - DNA, 25 bp, Artificial
  Probe
cagttcatctagttgtattagaggt

SEQ ID NO: 47073 - DNA, 25 bp, Artificial
  Probe
acagttcatctagttgtattagagg

SEQ ID NO: 47074 - DNA, 25 bp, Artificial
  Probe
ggacagttcatctagttgtattaga

SEQ ID NO: 47075 - DNA, 25 bp, Artificial
  Probe
aaggacagttcatctagttgtatta

SEQ ID NO: 47076 - DNA, 25 bp, Artificial
  Probe
gccttacggagtgtgtgtaatactt

SEQ ID NO: 47077 - DNA, 25 bp, Artificial
  Probe
taatcactaccttgtcagctcatgc

SEQ ID NO: 47078 - DNA, 25 bp, Artificial
  Probe
tagttgtattagaggtttccctgac

SEQ ID NO: 47079 - DNA, 25 bp, Artificial
  Probe
tttaatcactaccttgtcagctcat

SEQ ID NO: 47080 - DNA, 25 bp, Artificial
  Probe
agttgtattagaggtttccctgaca

SEQ ID NO: 47081 - DNA, 25 bp, Artificial
  Probe
ctagttgtattagaggtttccctga

SEQ ID NO: 47082 - DNA, 25 bp, Artificial
  Probe
gagccttacggagtgtgtgtaatac

SEQ ID NO: 47083 - DNA, 25 bp, Artificial
  Probe
gggaaggacagttcatctagttgta

SEQ ID NO: 47084 - DNA, 25 bp, Artificial
  Probe
tctagttgtattagaggtttccctg

SEQ ID NO: 47085 - DNA, 25 bp, Artificial
  Probe
agagccttacggagtgtgtgtaata

SEQ ID NO: 47086 - DNA, 25 bp, Artificial
  Probe
tagagccttacggagtgtgtgtaat

SEQ ID NO: 47087 - DNA, 25 bp, Artificial
  Probe
atagagccttacggagtgtgtgtaa

SEQ ID NO: 47088 - DNA, 25 bp, Artificial
  Probe
acttcaagcactgtgataggacttt

SEQ ID NO: 47089 - DNA, 25 bp, Artificial
  Probe
gaagtttctttggctgtctatggac

SEQ ID NO: 47090 - DNA, 25 bp, Artificial
  Probe
gagggaaggacagttcatctagttg

SEQ ID NO: 47091 - DNA, 25 bp, Artificial
  Probe
gacatttatgctgctgctatggtac

SEQ ID NO: 47092 - DNA, 25 bp, Artificial
  Probe
gaccaaacacccatagagcgataaa

SEQ ID NO: 47093 - DNA, 25 bp, Artificial
  Probe
tactgagtattaagtagcaatctgt

SEQ ID NO: 47094 - DNA, 25 bp, Artificial
  Probe
agttcatctagttgtattagaggtt

SEQ ID NO: 47095 - DNA, 25 bp, Artificial
  Probe
ggaagtttctttggctgtctatgga

SEQ ID NO: 47096 - DNA, 25 bp, Artificial
  Probe
acaacgactgaggtgagagaatgag

SEQ ID NO: 47097 - DNA, 25 bp, Artificial
  Probe
gacaacgactgaggtgagagaatga

SEQ ID NO: 47098 - DNA, 25 bp, Artificial
  Probe
tgtgaagacctaagcatagagagtt

SEQ ID NO: 47099 - DNA, 25 bp, Artificial
  Probe
ctgtgaagacctaagcatagagagt

SEQ ID NO: 47100 - DNA, 25 bp, Artificial
  Probe
tgaagacctaagcatagagagtttg

SEQ ID NO: 47101 - DNA, 25 bp, Artificial
  Probe
gtgaagacctaagcatagagagttt

SEQ ID NO: 47102 - DNA, 25 bp, Artificial
  Probe
gaagacctaagcatagagagtttgg

SEQ ID NO: 47103 - DNA, 25 bp, Artificial
  Probe
aagacctaagcatagagagtttggg

SEQ ID NO: 47104 - DNA, 25 bp, Artificial
  Probe
caccaagtagacagtggaatcaact

SEQ ID NO: 47105 - DNA, 25 bp, Artificial
  Probe
gacaccaagtagacagtggaatcaa

SEQ ID NO: 47106 - DNA, 25 bp, Artificial
  Probe
acaccaagtagacagtggaatcaac

SEQ ID NO: 47107 - DNA, 25 bp, Artificial
  Probe
ttagctgtgaagacctaagcataga

SEQ ID NO: 47108 - DNA, 25 bp, Artificial
  Probe
gttagctgtgaagacctaagcatag

SEQ ID NO: 47109 - DNA, 25 bp, Artificial
  Probe
atgacagtgacctagtccagaactc

SEQ ID NO: 47110 - DNA, 25 bp, Artificial
  Probe
gatgacagtgacctagtccagaact

SEQ ID NO: 47111 - DNA, 25 bp, Artificial
  Probe
gctgtgaagacctaagcatagagag

SEQ ID NO: 47112 - DNA, 25 bp, Artificial
  Probe
tagctgtgaagacctaagcatagag

SEQ ID NO: 47113 - DNA, 25 bp, Artificial
  Probe
acgggttatttgaaacaggagtctc

SEQ ID NO: 47114 - DNA, 25 bp, Artificial
  Probe
gacagtgacctagtccagaactctc

SEQ ID NO: 47115 - DNA, 25 bp, Artificial
  Probe
acctaagcatagagagtttgggttt

SEQ ID NO: 47116 - DNA, 25 bp, Artificial
  Probe
cgggttatttgaaacaggagtctca

SEQ ID NO: 47117 - DNA, 25 bp, Artificial
  Probe
cacgggttatttgaaacaggagtct

SEQ ID NO: 47118 - DNA, 25 bp, Artificial
  Probe
ggttagctgtgaagacctaagcata

SEQ ID NO: 47119 - DNA, 25 bp, Artificial
  Probe
gacctaagcatagagagtttgggtt

SEQ ID NO: 47120 - DNA, 25 bp, Artificial
  Probe
ctaagcatagagagtttgggttttg

SEQ ID NO: 47121 - DNA, 25 bp, Artificial
  Probe
agatagaagagtgacaggggataag

SEQ ID NO: 47122 - DNA, 25 bp, Artificial
  Probe
cctaagcatagagagtttgggtttt

SEQ ID NO: 47123 - DNA, 25 bp, Artificial
  Probe
cagatagaagagtgacaggggataa

SEQ ID NO: 47124 - DNA, 25 bp, Artificial
  Probe
tctagccacgggttatttgaaacag

SEQ ID NO: 47125 - DNA, 25 bp, Artificial
  Probe
ctctagccacgggttatttgaaaca

SEQ ID NO: 47126 - DNA, 25 bp, Artificial
  Probe
gtgtggttagctgtgaagacctaag

SEQ ID NO: 47127 - DNA, 25 bp, Artificial
  Probe
gttatttgaaacaggagtctcaagg

SEQ ID NO: 47128 - DNA, 25 bp, Artificial
  Probe
ggttatttgaaacaggagtctcaag

SEQ ID NO: 47129 - DNA, 25 bp, Artificial
  Probe
gatagaagagtgacaggggataagg

SEQ ID NO: 47130 - DNA, 25 bp, Artificial
  Probe
caggggataaggtttctttgtattt

SEQ ID NO: 47131 - DNA, 25 bp, Artificial
  Probe
ttatttgaaacaggagtctcaaggg

SEQ ID NO: 47132 - DNA, 25 bp, Artificial
  Probe
gatagccttggcactaatctggtca

SEQ ID NO: 47133 - DNA, 25 bp, Artificial
  Probe
agctgtgaagacctaagcatagaga

SEQ ID NO: 47134 - DNA, 25 bp, Artificial
  Probe
gggttatttgaaacaggagtctcaa

SEQ ID NO: 47135 - DNA, 25 bp, Artificial
  Probe
agacctaagcatagagagtttgggt

SEQ ID NO: 47136 - DNA, 25 bp, Artificial
  Probe
tgacagtgacctagtccagaactct

SEQ ID NO: 47137 - DNA, 25 bp, Artificial
  Probe
ggacaccaagtagacagtggaatca

SEQ ID NO: 47138 - DNA, 25 bp, Artificial
  Probe
tatttgaaacaggagtctcaaggga

SEQ ID NO: 47139 - DNA, 25 bp, Artificial
  Probe
tttctttgtattttagccatgcctg

SEQ ID NO: 47140 - DNA, 25 bp, Artificial
  Probe
gtttctttgtattttagccatgcct

SEQ ID NO: 47141 - DNA, 25 bp, Artificial
  Probe
aggtttctttgtattttagccatgc

SEQ ID NO: 47142 - DNA, 25 bp, Artificial
  Probe
acaggggataaggtttctttgtatt

SEQ ID NO: 47143 - DNA, 25 bp, Artificial
  Probe
tctgtctactgtgaggaagattatc

SEQ ID NO: 47144 - DNA, 25 bp, Artificial
  Probe
gtctactgtgaggaagattatctgt

SEQ ID NO: 47145 - DNA, 25 bp, Artificial
  Probe
tgtctactgtgaggaagattatctg

SEQ ID NO: 47146 - DNA, 25 bp, Artificial
  Probe
ctgtctactgtgaggaagattatct

SEQ ID NO: 47147 - DNA, 25 bp, Artificial
  Probe
ctctgtctactgtgaggaagattat

SEQ ID NO: 47148 - DNA, 25 bp, Artificial
  Probe
tctactgtgaggaagattatctgtt

SEQ ID NO: 47149 - DNA, 25 bp, Artificial
  Probe
gctctgtctactgtgaggaagatta

SEQ ID NO: 47150 - DNA, 25 bp, Artificial
  Probe
acttgattctagagaagatcctcca

SEQ ID NO: 47151 - DNA, 25 bp, Artificial
  Probe
cacttgattctagagaagatcctcc

SEQ ID NO: 47152 - DNA, 25 bp, Artificial
  Probe
ccacttgattctagagaagatcctc

SEQ ID NO: 47153 - DNA, 25 bp, Artificial
  Probe
cttgattctagagaagatcctccag

SEQ ID NO: 47154 - DNA, 25 bp, Artificial
  Probe
ctactgtgaggaagattatctgttt

SEQ ID NO: 47155 - DNA, 25 bp, Artificial
  Probe
ttgattctagagaagatcctccagg

SEQ ID NO: 47156 - DNA, 25 bp, Artificial
  Probe
ggctctgtctactgtgaggaagatt

SEQ ID NO: 47157 - DNA, 25 bp, Artificial
  Probe
gccacttgattctagagaagatcct

SEQ ID NO: 47158 - DNA, 25 bp, Artificial
  Probe
aaaggtatctatgggcagagcaatg

SEQ ID NO: 47159 - DNA, 25 bp, Artificial
  Probe
caaaggtatctatgggcagagcaat

SEQ ID NO: 47160 - DNA, 25 bp, Artificial
  Probe
ggccacttgattctagagaagatcc

SEQ ID NO: 47161 - DNA, 25 bp, Artificial
  Probe
caacaaaggtatctatgggcagagc

SEQ ID NO: 47162 - DNA, 25 bp, Artificial
  Probe
gcaacaaaggtatctatgggcagag

SEQ ID NO: 47163 - DNA, 25 bp, Artificial
  Probe
tgtgaggacattgtgagggtgatat

SEQ ID NO: 47164 - DNA, 25 bp, Artificial
  Probe
tgattctagagaagatcctccaggc

SEQ ID NO: 47165 - DNA, 25 bp, Artificial
  Probe
acaaaggtatctatgggcagagcaa

SEQ ID NO: 47166 - DNA, 25 bp, Artificial
  Probe
aacaaaggtatctatgggcagagca

SEQ ID NO: 47167 - DNA, 25 bp, Artificial
  Probe
attatctgttttcagggtttcagga

SEQ ID NO: 47168 - DNA, 25 bp, Artificial
  Probe
gattatctgttttcagggtttcagg

SEQ ID NO: 47169 - DNA, 25 bp, Artificial
  Probe
actgtgaggaagattatctgttttc

SEQ ID NO: 47170 - DNA, 25 bp, Artificial
  Probe
ttatctgttttcagggtttcaggag

SEQ ID NO: 47171 - DNA, 25 bp, Artificial
  Probe
ccaggtgtactgtgtgactgactac

SEQ ID NO: 47172 - DNA, 25 bp, Artificial
  Probe
gtgaggacattgtgagggtgatatc

SEQ ID NO: 47173 - DNA, 25 bp, Artificial
  Probe
ctgtgaggaagattatctgttttca

SEQ ID NO: 47174 - DNA, 25 bp, Artificial
  Probe
aggaagattatctgttttcagggtt

SEQ ID NO: 47175 - DNA, 25 bp, Artificial
  Probe
gaggaagattatctgttttcagggt

SEQ ID NO: 47176 - DNA, 25 bp, Artificial
  Probe
tgaggaagattatctgttttcaggg

SEQ ID NO: 47177 - DNA, 25 bp, Artificial
  Probe
gtgaggaagattatctgttttcagg

SEQ ID NO: 47178 - DNA, 25 bp, Artificial
  Probe
ggaagattatctgttttcagggttt

SEQ ID NO: 47179 - DNA, 25 bp, Artificial
  Probe
agattatctgttttcagggtttcag

SEQ ID NO: 47180 - DNA, 25 bp, Artificial
  Probe
ctgtgaggacattgtgagggtgata

SEQ ID NO: 47181 - DNA, 25 bp, Artificial
  Probe
tgtgaggaagattatctgttttcag

SEQ ID NO: 47182 - DNA, 25 bp, Artificial
  Probe
caggtgtactgtgtgactgactacc

SEQ ID NO: 47183 - DNA, 25 bp, Artificial
  Probe
aagattatctgttttcagggtttca

SEQ ID NO: 47184 - DNA, 25 bp, Artificial
  Probe
accaggtgtactgtgtgactgacta

SEQ ID NO: 47185 - DNA, 25 bp, Artificial
  Probe
aagtgcaacaaaggtatctatgggc

SEQ ID NO: 47186 - DNA, 25 bp, Artificial
  Probe
gattctagagaagatcctccaggcc

SEQ ID NO: 47187 - DNA, 25 bp, Artificial
  Probe
gaagattatctgttttcagggtttc

SEQ ID NO: 47188 - DNA, 25 bp, Artificial
  Probe
tgtacttccaagtctgatctgagat

SEQ ID NO: 47189 - DNA, 25 bp, Artificial
  Probe
ttgtacttccaagtctgatctgaga

SEQ ID NO: 47190 - DNA, 25 bp, Artificial
  Probe
cattatttcccttctgcttcttgtt

SEQ ID NO: 47191 - DNA, 25 bp, Artificial
  Probe
tatttcccttctgcttcttgttctt

SEQ ID NO: 47192 - DNA, 25 bp, Artificial
  Probe
ttatttcccttctgcttcttgttct

SEQ ID NO: 47193 - DNA, 25 bp, Artificial
  Probe
attatttcccttctgcttcttgttc

SEQ ID NO: 47194 - DNA, 25 bp, Artificial
  Probe
atttcccttctgcttcttgttcttc

SEQ ID NO: 47195 - DNA, 25 bp, Artificial
  Probe
tttgtacttccaagtctgatctgag

SEQ ID NO: 47196 - DNA, 25 bp, Artificial
  Probe
gtttgtacttccaagtctgatctga

SEQ ID NO: 47197 - DNA, 25 bp, Artificial
  Probe
agtttgtacttccaagtctgatctg

SEQ ID NO: 47198 - DNA, 25 bp, Artificial
  Probe
tttcccttctgcttcttgttcttca

SEQ ID NO: 47199 - DNA, 25 bp, Artificial
  Probe
atccaattatgactgctatgggaaa

SEQ ID NO: 47200 - DNA, 25 bp, Artificial
  Probe
tatccaattatgactgctatgggaa

SEQ ID NO: 47201 - DNA, 25 bp, Artificial
  Probe
ttatccaattatgactgctatggga

SEQ ID NO: 47202 - DNA, 25 bp, Artificial
  Probe
tccaattatgactgctatgggaaac

SEQ ID NO: 47203 - DNA, 25 bp, Artificial
  Probe
ttcccttctgcttcttgttcttcaa

SEQ ID NO: 47204 - DNA, 25 bp, Artificial
  Probe
aattatccaattatgactgctatgg

SEQ ID NO: 47205 - DNA, 25 bp, Artificial
  Probe
gaaaccacaggcaaagaacaagaag

SEQ ID NO: 47206 - DNA, 25 bp, Artificial
  Probe
gtacttccaagtctgatctgagatc

SEQ ID NO: 47207 - DNA, 25 bp, Artificial
  Probe
attatccaattatgactgctatggg

SEQ ID NO: 47208 - DNA, 25 bp, Artificial
  Probe
ttgaattatccaattatgactgcta

SEQ ID NO: 47209 - DNA, 25 bp, Artificial
  Probe
gtctgatctgagatccaatgacttc

SEQ ID NO: 47210 - DNA, 25 bp, Artificial
  Probe
ccaattatgactgctatgggaaacc

SEQ ID NO: 47211 - DNA, 25 bp, Artificial
  Probe
tctgatctgagatccaatgacttca

SEQ ID NO: 47212 - DNA, 25 bp, Artificial
  Probe
caagtctgatctgagatccaatgac

SEQ ID NO: 47213 - DNA, 25 bp, Artificial
  Probe
tacttccaagtctgatctgagatcc

SEQ ID NO: 47214 - DNA, 25 bp, Artificial
  Probe
ttccaagtctgatctgagatccaat

SEQ ID NO: 47215 - DNA, 25 bp, Artificial
  Probe
tgaattatccaattatgactgctat

SEQ ID NO: 47216 - DNA, 25 bp, Artificial
  Probe
tcccttctgcttcttgttcttcaac

SEQ ID NO: 47217 - DNA, 25 bp, Artificial
  Probe
gaattatccaattatgactgctatg

SEQ ID NO: 47218 - DNA, 25 bp, Artificial
  Probe
ccaagtctgatctgagatccaatga

SEQ ID NO: 47219 - DNA, 25 bp, Artificial
  Probe
tccaagtctgatctgagatccaatg

SEQ ID NO: 47220 - DNA, 25 bp, Artificial
  Probe
cttccaagtctgatctgagatccaa

SEQ ID NO: 47221 - DNA, 25 bp, Artificial
  Probe
gtatgctgttgtccaggtgatgttg

SEQ ID NO: 47222 - DNA, 25 bp, Artificial
  Probe
tttgaattatccaattatgactgct

SEQ ID NO: 47223 - DNA, 25 bp, Artificial
  Probe
aagtttgtacttccaagtctgatct

SEQ ID NO: 47224 - DNA, 25 bp, Artificial
  Probe
aaagtttgtacttccaagtctgatc

SEQ ID NO: 47225 - DNA, 25 bp, Artificial
  Probe
ctaagaagaacactgtgaacggcac

SEQ ID NO: 47226 - DNA, 25 bp, Artificial
  Probe
tatgctgttgtccaggtgatgttga

SEQ ID NO: 47227 - DNA, 25 bp, Artificial
  Probe
agtatgctgttgtccaggtgatgtt

SEQ ID NO: 47228 - DNA, 25 bp, Artificial
  Probe
atctgagatccaatgacttcagcat

SEQ ID NO: 47229 - DNA, 25 bp, Artificial
  Probe
gttgtccaggtgatgttgaacaatc

SEQ ID NO: 47230 - DNA, 25 bp, Artificial
  Probe
ccttctgcttcttgttcttcaacgt

SEQ ID NO: 47231 - DNA, 25 bp, Artificial
  Probe
ctgatctgagatccaatgacttcag

SEQ ID NO: 47232 - DNA, 25 bp, Artificial
  Probe
tctgagatccaatgacttcagcatt

SEQ ID NO: 47233 - DNA, 25 bp, Artificial
  Probe
tttgatgctggctctattagtgttt

SEQ ID NO: 47234 - DNA, 25 bp, Artificial
  Probe
ccctaattgtgtggattctttaagc

SEQ ID NO: 47235 - DNA, 25 bp, Artificial
  Probe
cctaattgtgtggattctttaagcg

SEQ ID NO: 47236 - DNA, 25 bp, Artificial
  Probe
gtctgataaagagaggcttacttcc

SEQ ID NO: 47237 - DNA, 25 bp, Artificial
  Probe
gataaagagaggcttacttccgatg

SEQ ID NO: 47238 - DNA, 25 bp, Artificial
  Probe
tgataaagagaggcttacttccgat

SEQ ID NO: 47239 - DNA, 25 bp, Artificial
  Probe
cgtctgataaagagaggcttacttc

SEQ ID NO: 47240 - DNA, 25 bp, Artificial
  Probe
ttgatctacttccctaattgtgtgg

SEQ ID NO: 47241 - DNA, 25 bp, Artificial
  Probe
ctgataaagagaggcttacttccga

SEQ ID NO: 47242 - DNA, 25 bp, Artificial
  Probe
ataagaaagatcattacgatgccac

SEQ ID NO: 47243 - DNA, 25 bp, Artificial
  Probe
tctgataaagagaggcttacttccg

SEQ ID NO: 47244 - DNA, 25 bp, Artificial
  Probe
taagaaagatcattacgatgccacc

SEQ ID NO: 47245 - DNA, 25 bp, Artificial
  Probe
caaactgaactacttggacatcctc

SEQ ID NO: 47246 - DNA, 25 bp, Artificial
  Probe
attgatctacttccctaattgtgtg

SEQ ID NO: 47247 - DNA, 25 bp, Artificial
  Probe
ccgtctgataaagagaggcttactt

SEQ ID NO: 47248 - DNA, 25 bp, Artificial
  Probe
aactgaactacttggacatcctcgt

SEQ ID NO: 47249 - DNA, 25 bp, Artificial
  Probe
aataagaaagatcattacgatgcca

SEQ ID NO: 47250 - DNA, 25 bp, Artificial
  Probe
caacgacgagaaacacactgataac

SEQ ID NO: 47251 - DNA, 25 bp, Artificial
  Probe
gaaagatcattacgatgccacctac

SEQ ID NO: 47252 - DNA, 25 bp, Artificial
  Probe
agaaagatcattacgatgccaccta

SEQ ID NO: 47253 - DNA, 25 bp, Artificial
  Probe
ctacttccctaattgtgtggattct

SEQ ID NO: 47254 - DNA, 25 bp, Artificial
  Probe
tctacttccctaattgtgtggattc

SEQ ID NO: 47255 - DNA, 25 bp, Artificial
  Probe
acttccctaattgtgtggattcttt

SEQ ID NO: 47256 - DNA, 25 bp, Artificial
  Probe
tacttccctaattgtgtggattctt

SEQ ID NO: 47257 - DNA, 25 bp, Artificial
  Probe
atctacttccctaattgtgtggatt

SEQ ID NO: 47258 - DNA, 25 bp, Artificial
  Probe
ataaagagaggcttacttccgatgc

SEQ ID NO: 47259 - DNA, 25 bp, Artificial
  Probe
tgaactacttggacatcctcgtgag

SEQ ID NO: 47260 - DNA, 25 bp, Artificial
  Probe
ctgaactacttggacatcctcgtga

SEQ ID NO: 47261 - DNA, 25 bp, Artificial
  Probe
gatctacttccctaattgtgtggat

SEQ ID NO: 47262 - DNA, 25 bp, Artificial
  Probe
aaactgaactacttggacatcctcg

SEQ ID NO: 47263 - DNA, 25 bp, Artificial
  Probe
tccctaattgtgtggattctttaag

SEQ ID NO: 47264 - DNA, 25 bp, Artificial
  Probe
cttccctaattgtgtggattcttta

SEQ ID NO: 47265 - DNA, 25 bp, Artificial
  Probe
aagatcattacgatgccacctacca

SEQ ID NO: 47266 - DNA, 25 bp, Artificial
  Probe
tgatctacttccctaattgtgtgga

SEQ ID NO: 47267 - DNA, 25 bp, Artificial
  Probe
aaataagaaagatcattacgatgcc

SEQ ID NO: 47268 - DNA, 25 bp, Artificial
  Probe
tcaacgacgagaaacacactgataa

SEQ ID NO: 47269 - DNA, 25 bp, Artificial
  Probe
aagaaagatcattacgatgccacct

SEQ ID NO: 47270 - DNA, 25 bp, Artificial
  Probe
ttccctaattgtgtggattctttaa

SEQ ID NO: 47271 - DNA, 25 bp, Artificial
  Probe
atcattacgatgccacctaccacaa

SEQ ID NO: 47272 - DNA, 25 bp, Artificial
  Probe
actgaactacttggacatcctcgtg

SEQ ID NO: 47273 - DNA, 25 bp, Artificial
  Probe
aaagatcattacgatgccacctacc

SEQ ID NO: 47274 - DNA, 25 bp, Artificial
  Probe
tcaaagacggtagctcagtattcag

SEQ ID NO: 47275 - DNA, 25 bp, Artificial
  Probe
ctcaaagacggtagctcagtattca

SEQ ID NO: 47276 - DNA, 25 bp, Artificial
  Probe
tattgatctacttccctaattgtgt

SEQ ID NO: 47277 - DNA, 25 bp, Artificial
  Probe
aacgacgagaaacacactgataacc

SEQ ID NO: 47278 - DNA, 25 bp, Artificial
  Probe
gaacagacaacctgatagatcgtta

SEQ ID NO: 47279 - DNA, 25 bp, Artificial
  Probe
aacagacaacctgatagatcgttac

SEQ ID NO: 47280 - DNA, 25 bp, Artificial
  Probe
agaacagacaacctgatagatcgtt

SEQ ID NO: 47281 - DNA, 25 bp, Artificial
  Probe
gagaacagacaacctgatagatcgt

SEQ ID NO: 47282 - DNA, 25 bp, Artificial
  Probe
acagacaacctgatagatcgttacg

SEQ ID NO: 47283 - DNA, 25 bp, Artificial
  Probe
agacaacctgatagatcgttacgac

SEQ ID NO: 47284 - DNA, 25 bp, Artificial
  Probe
cagacaacctgatagatcgttacga

SEQ ID NO: 47285 - DNA, 25 bp, Artificial
  Probe
cgagaacagacaacctgatagatcg

SEQ ID NO: 47286 - DNA, 25 bp, Artificial
  Probe
aacctgatagatcgttacgaccaga

SEQ ID NO: 47287 - DNA, 25 bp, Artificial
  Probe
caacctgatagatcgttacgaccag

SEQ ID NO: 47288 - DNA, 25 bp, Artificial
  Probe
gacaacctgatagatcgttacgacc

SEQ ID NO: 47289 - DNA, 25 bp, Artificial
  Probe
tgatagatcgttacgaccagaggag

SEQ ID NO: 47290 - DNA, 25 bp, Artificial
  Probe
ctgatagatcgttacgaccagagga

SEQ ID NO: 47291 - DNA, 25 bp, Artificial
  Probe
acctgatagatcgttacgaccagag

SEQ ID NO: 47292 - DNA, 25 bp, Artificial
  Probe
acaacctgatagatcgttacgacca

SEQ ID NO: 47293 - DNA, 25 bp, Artificial
  Probe
cctgatagatcgttacgaccagagg

SEQ ID NO: 47294 - DNA, 25 bp, Artificial
  Probe
ataccctcttctccctccattaaat

SEQ ID NO: 47295 - DNA, 25 bp, Artificial
  Probe
cataccctcttctccctccattaaa

SEQ ID NO: 47296 - DNA, 25 bp, Artificial
  Probe
ctcttctccctccattaaatgactc

SEQ ID NO: 47297 - DNA, 25 bp, Artificial
  Probe
tccattaaatgactcagggttgttt

SEQ ID NO: 47298 - DNA, 25 bp, Artificial
  Probe
cttctccctccattaaatgactcag

SEQ ID NO: 47299 - DNA, 25 bp, Artificial
  Probe
ctccattaaatgactcagggttgtt

SEQ ID NO: 47300 - DNA, 25 bp, Artificial
  Probe
tcttctccctccattaaatgactca

SEQ ID NO: 47301 - DNA, 25 bp, Artificial
  Probe
taccctcttctccctccattaaatg

SEQ ID NO: 47302 - DNA, 25 bp, Artificial
  Probe
tcataccctcttctccctccattaa

SEQ ID NO: 47303 - DNA, 25 bp, Artificial
  Probe
cctcttctccctccattaaatgact

SEQ ID NO: 47304 - DNA, 25 bp, Artificial
  Probe
ctcataccctcttctccctccatta

SEQ ID NO: 47305 - DNA, 25 bp, Artificial
  Probe
ccctcttctccctccattaaatgac

SEQ ID NO: 47306 - DNA, 25 bp, Artificial
  Probe
ttctccctccattaaatgactcagg

SEQ ID NO: 47307 - DNA, 25 bp, Artificial
  Probe
accctcttctccctccattaaatga

SEQ ID NO: 47308 - DNA, 25 bp, Artificial
  Probe
cctacctgaccattcctaaaatctt

SEQ ID NO: 47309 - DNA, 25 bp, Artificial
  Probe
cctccattaaatgactcagggttgt

SEQ ID NO: 47310 - DNA, 25 bp, Artificial
  Probe
acctgaccattcctaaaatcttaaa

SEQ ID NO: 47311 - DNA, 25 bp, Artificial
  Probe
gcctacctgaccattcctaaaatct

SEQ ID NO: 47312 - DNA, 25 bp, Artificial
  Probe
aaagacgaaaagaagtcagagtgaa

SEQ ID NO: 47313 - DNA, 25 bp, Artificial
  Probe
ctacctgaccattcctaaaatctta

SEQ ID NO: 47314 - DNA, 25 bp, Artificial
  Probe
cttcctgtctgcttttctccttttg

SEQ ID NO: 47315 - DNA, 25 bp, Artificial
  Probe
aagacgaaaagaagtcagagtgaag

SEQ ID NO: 47316 - DNA, 25 bp, Artificial
  Probe
tgcctacctgaccattcctaaaatc

SEQ ID NO: 47317 - DNA, 25 bp, Artificial
  Probe
ctgcctacctgaccattcctaaaat

SEQ ID NO: 47318 - DNA, 25 bp, Artificial
  Probe
tcttcctgtctgcttttctcctttt

SEQ ID NO: 47319 - DNA, 25 bp, Artificial
  Probe
caaagacgaaaagaagtcagagtga

SEQ ID NO: 47320 - DNA, 25 bp, Artificial
  Probe
cctgaccattcctaaaatcttaaag

SEQ ID NO: 47321 - DNA, 25 bp, Artificial
  Probe
gtcactgacaagcaacatggagttc

SEQ ID NO: 47322 - DNA, 25 bp, Artificial
  Probe
gacgaaaagaagtcagagtgaagac

SEQ ID NO: 47323 - DNA, 25 bp, Artificial
  Probe
agacgaaaagaagtcagagtgaaga

SEQ ID NO: 47324 - DNA, 25 bp, Artificial
  Probe
ctcttcctgtctgcttttctccttt

SEQ ID NO: 47325 - DNA, 25 bp, Artificial
  Probe
tacctgaccattcctaaaatcttaa

SEQ ID NO: 47326 - DNA, 25 bp, Artificial
  Probe
cgaaaagaagtcagagtgaagacac

SEQ ID NO: 47327 - DNA, 25 bp, Artificial
  Probe
ccaaagacgaaaagaagtcagagtg

SEQ ID NO: 47328 - DNA, 25 bp, Artificial
  Probe
acgaaaagaagtcagagtgaagaca

SEQ ID NO: 47329 - DNA, 25 bp, Artificial
  Probe
gttcccaaagacgaaaagaagtcag

SEQ ID NO: 47330 - DNA, 25 bp, Artificial
  Probe
agtcactgacaagcaacatggagtt

SEQ ID NO: 47331 - DNA, 25 bp, Artificial
  Probe
cctcataccctcttctccctccatt

SEQ ID NO: 47332 - DNA, 25 bp, Artificial
  Probe
ttcccaaagacgaaaagaagtcaga

SEQ ID NO: 47333 - DNA, 25 bp, Artificial
  Probe
ctgaccattcctaaaatcttaaagg

SEQ ID NO: 47334 - DNA, 25 bp, Artificial
  Probe
ttcctgtctgcttttctccttttgg

SEQ ID NO: 47335 - DNA, 25 bp, Artificial
  Probe
tcccaaagacgaaaagaagtcagag

SEQ ID NO: 47336 - DNA, 25 bp, Artificial
  Probe
ctctgtcttgtgtcccacttctacc

SEQ ID NO: 47337 - DNA, 25 bp, Artificial
  Probe
gacaagcaacatggagttcgctatg

SEQ ID NO: 47338 - DNA, 25 bp, Artificial
  Probe
cccaaagacgaaaagaagtcagagt

SEQ ID NO: 47339 - DNA, 25 bp, Artificial
  Probe
tttgacctgatggagaaattgaagc

SEQ ID NO: 47340 - DNA, 25 bp, Artificial
  Probe
atttgacctgatggagaaattgaag

SEQ ID NO: 47341 - DNA, 25 bp, Artificial
  Probe
tttacaagttaaattacacagcagc

SEQ ID NO: 47342 - DNA, 25 bp, Artificial
  Probe
acaagttaaattacacagcagcttt

SEQ ID NO: 47343 - DNA, 25 bp, Artificial
  Probe
ttacaagttaaattacacagcagct

SEQ ID NO: 47344 - DNA, 25 bp, Artificial
  Probe
tacaagttaaattacacagcagctt

SEQ ID NO: 47345 - DNA, 25 bp, Artificial
  Probe
taaattacacagcagctttacacag

SEQ ID NO: 47346 - DNA, 25 bp, Artificial
  Probe
gacctgatggagaaattgaagcaac

SEQ ID NO: 47347 - DNA, 25 bp, Artificial
  Probe
ttgacctgatggagaaattgaagca

SEQ ID NO: 47348 - DNA, 25 bp, Artificial
  Probe
ttaaattacacagcagctttacaca

SEQ ID NO: 47349 - DNA, 25 bp, Artificial
  Probe
ctttacacagcatgatgggaagaag

SEQ ID NO: 47350 - DNA, 25 bp, Artificial
  Probe
gttaaattacacagcagctttacac

SEQ ID NO: 47351 - DNA, 25 bp, Artificial
  Probe
agttaaattacacagcagctttaca

SEQ ID NO: 47352 - DNA, 25 bp, Artificial
  Probe
ggagaaatttgacctgatggagaaa

SEQ ID NO: 47353 - DNA, 25 bp, Artificial
  Probe
tgacctgatggagaaattgaagcaa

SEQ ID NO: 47354 - DNA, 25 bp, Artificial
  Probe
caagttaaattacacagcagcttta

SEQ ID NO: 47355 - DNA, 25 bp, Artificial
  Probe
acctgatggagaaattgaagcaaca

SEQ ID NO: 47356 - DNA, 25 bp, Artificial
  Probe
aagttaaattacacagcagctttac

SEQ ID NO: 47357 - DNA, 25 bp, Artificial
  Probe
gagaaatttgacctgatggagaaat

SEQ ID NO: 47358 - DNA, 25 bp, Artificial
  Probe
tgtgtcccatctgtaactcaaaata

SEQ ID NO: 47359 - DNA, 25 bp, Artificial
  Probe
atatgagatcaatgtgctgtacaac

SEQ ID NO: 47360 - DNA, 25 bp, Artificial
  Probe
gaatcggagaaatttgacctgatgg

SEQ ID NO: 47361 - DNA, 25 bp, Artificial
  Probe
ggaatcggagaaatttgacctgatg

SEQ ID NO: 47362 - DNA, 25 bp, Artificial
  Probe
tatgagatcaatgtgctgtacaacc

SEQ ID NO: 47363 - DNA, 25 bp, Artificial
  Probe
ccatctgtaactcaaaataaagggt

SEQ ID NO: 47364 - DNA, 25 bp, Artificial
  Probe
gtgtcccatctgtaactcaaaataa

SEQ ID NO: 47365 - DNA, 25 bp, Artificial
  Probe
aatcggagaaatttgacctgatgga

SEQ ID NO: 47366 - DNA, 25 bp, Artificial
  Probe
tggaatcggagaaatttgacctgat

SEQ ID NO: 47367 - DNA, 25 bp, Artificial
  Probe
aatatgagatcaatgtgctgtacaa

SEQ ID NO: 47368 - DNA, 25 bp, Artificial
  Probe
gtgtgtcccatctgtaactcaaaat

SEQ ID NO: 47369 - DNA, 25 bp, Artificial
  Probe
tttacacagcatgatgggaagaagg

SEQ ID NO: 47370 - DNA, 25 bp, Artificial
  Probe
atctgtaactcaaaataaagggtcc

SEQ ID NO: 47371 - DNA, 25 bp, Artificial
  Probe
tcccatctgtaactcaaaataaagg

SEQ ID NO: 47372 - DNA, 25 bp, Artificial
  Probe
tgtcccatctgtaactcaaaataaa

SEQ ID NO: 47373 - DNA, 25 bp, Artificial
  Probe
tctgtaactcaaaataaagggtccc

SEQ ID NO: 47374 - DNA, 25 bp, Artificial
  Probe
atcggagaaatttgacctgatggag

SEQ ID NO: 47375 - DNA, 25 bp, Artificial
  Probe
cggagaaatttgacctgatggagaa

SEQ ID NO: 47376 - DNA, 25 bp, Artificial
  Probe
ctggaatcggagaaatttgacctga

SEQ ID NO: 47377 - DNA, 25 bp, Artificial
  Probe
ctgtaactcaaaataaagggtcccc

SEQ ID NO: 47378 - DNA, 25 bp, Artificial
  Probe
catctgtaactcaaaataaagggtc

SEQ ID NO: 47379 - DNA, 25 bp, Artificial
  Probe
gtcccatctgtaactcaaaataaag

SEQ ID NO: 47380 - DNA, 25 bp, Artificial
  Probe
aatttgacctgatggagaaattgaa

SEQ ID NO: 47381 - DNA, 25 bp, Artificial
  Probe
tacacagcatgatgggaagaaggaa

SEQ ID NO: 47382 - DNA, 25 bp, Artificial
  Probe
ttacacagcatgatgggaagaagga

SEQ ID NO: 47383 - DNA, 25 bp, Artificial
  Probe
agtgtgtcccatctgtaactcaaaa

SEQ ID NO: 47384 - DNA, 25 bp, Artificial
  Probe
cctaaccagacagatggagaaggac

SEQ ID NO: 47385 - DNA, 25 bp, Artificial
  Probe
cgctgaatgagatctactttggaaa

SEQ ID NO: 47386 - DNA, 25 bp, Artificial
  Probe
gaagcacgctgaatgagatctactt

SEQ ID NO: 47387 - DNA, 25 bp, Artificial
  Probe
gatctcctgtcttctgttgacctcc

SEQ ID NO: 47388 - DNA, 25 bp, Artificial
  Probe
aggacatggaaaacaaaatcagaag

SEQ ID NO: 47389 - DNA, 25 bp, Artificial
  Probe
gaggacatggaaaacaaaatcagaa

SEQ ID NO: 47390 - DNA, 25 bp, Artificial
  Probe
acaaatcaaagcaggaagcccttaa

SEQ ID NO: 47391 - DNA, 25 bp, Artificial
  Probe
gacatggaaaacaaaatcagaagca

SEQ ID NO: 47392 - DNA, 25 bp, Artificial
  Probe
acatggaaaacaaaatcagaagcac

SEQ ID NO: 47393 - DNA, 25 bp, Artificial
  Probe
ctaaccagacagatggagaaggacg

SEQ ID NO: 47394 - DNA, 25 bp, Artificial
  Probe
ggacatggaaaacaaaatcagaagc

SEQ ID NO: 47395 - DNA, 25 bp, Artificial
  Probe
agatggagaaggacgaaactgtgag

SEQ ID NO: 47396 - DNA, 25 bp, Artificial
  Probe
cagacagatggagaaggacgaaact

SEQ ID NO: 47397 - DNA, 25 bp, Artificial
  Probe
ggaggacatggaaaacaaaatcaga

SEQ ID NO: 47398 - DNA, 25 bp, Artificial
  Probe
tgttgacctccacagtgatgctatg

SEQ ID NO: 47399 - DNA, 25 bp, Artificial
  Probe
gacaaatcaaagcaggaagccctta

SEQ ID NO: 47400 - DNA, 25 bp, Artificial
  Probe
acgctgaatgagatctactttggaa

SEQ ID NO: 47401 - DNA, 25 bp, Artificial
  Probe
tggaggacatggaaaacaaaatcag

SEQ ID NO: 47402 - DNA, 25 bp, Artificial
  Probe
cagcctaaccagacagatggagaag

SEQ ID NO: 47403 - DNA, 25 bp, Artificial
  Probe
atctcctgtcttctgttgacctcca

SEQ ID NO: 47404 - DNA, 25 bp, Artificial
  Probe
catggaaaacaaaatcagaagcacg

SEQ ID NO: 47405 - DNA, 25 bp, Artificial
  Probe
gtggaggacatggaaaacaaaatca

SEQ ID NO: 47406 - DNA, 25 bp, Artificial
  Probe
taaccagacagatggagaaggacga

SEQ ID NO: 47407 - DNA, 25 bp, Artificial
  Probe
agatctcctgtcttctgttgacctc

SEQ ID NO: 47408 - DNA, 25 bp, Artificial
  Probe
agaagcacgctgaatgagatctact

SEQ ID NO: 47409 - DNA, 25 bp, Artificial
  Probe
gagaaggacgaaactgtgagtgact

SEQ ID NO: 47410 - DNA, 25 bp, Artificial
  Probe
cacgctgaatgagatctactttgga

SEQ ID NO: 47411 - DNA, 25 bp, Artificial
  Probe
atcaaagcaggaagcccttaagaat

SEQ ID NO: 47412 - DNA, 25 bp, Artificial
  Probe
aagcacgctgaatgagatctacttt

SEQ ID NO: 47413 - DNA, 25 bp, Artificial
  Probe
gatggagaaggacgaaactgtgagt

SEQ ID NO: 47414 - DNA, 25 bp, Artificial
  Probe
cagtctgtgtgaagatctcctgtct

SEQ ID NO: 47415 - DNA, 25 bp, Artificial
  Probe
agacagatggagaaggacgaaactg

SEQ ID NO: 47416 - DNA, 25 bp, Artificial
  Probe
cagaagcacgctgaatgagatctac

SEQ ID NO: 47417 - DNA, 25 bp, Artificial
  Probe
ggtggaggacatggaaaacaaaatc

SEQ ID NO: 47418 - DNA, 25 bp, Artificial
  Probe
aaggacgaaactgtgagtgactgtt

SEQ ID NO: 47419 - DNA, 25 bp, Artificial
  Probe
aatcaaagcaggaagcccttaagaa

SEQ ID NO: 47420 - DNA, 25 bp, Artificial
  Probe
aaatcaaagcaggaagcccttaaga

SEQ ID NO: 47421 - DNA, 25 bp, Artificial
  Probe
caaatcaaagcaggaagcccttaag

SEQ ID NO: 47422 - DNA, 25 bp, Artificial
  Probe
aagatctcctgtcttctgttgacct

SEQ ID NO: 47423 - DNA, 25 bp, Artificial
  Probe
agtctgtgtgaagatctcctgtctt

SEQ ID NO: 47424 - DNA, 25 bp, Artificial
  Probe
agaaggacgaaactgtgagtgactg

SEQ ID NO: 47425 - DNA, 25 bp, Artificial
  Probe
atggagaaggacgaaactgtgagtg

SEQ ID NO: 47426 - DNA, 25 bp, Artificial
  Probe
atggaaaacaaaatcagaagcacgc

SEQ ID NO: 47427 - DNA, 25 bp, Artificial
  Probe
cagatggagaaggacgaaactgtga

SEQ ID NO: 47428 - DNA, 25 bp, Artificial
  Probe
aatcagaagcacgctgaatgagatc

SEQ ID NO: 47429 - DNA, 25 bp, Artificial
  Probe
tattcaactagcaatatccgagacg

SEQ ID NO: 47430 - DNA, 25 bp, Artificial
  Probe
ctattcaactagcaatatccgagac

SEQ ID NO: 47431 - DNA, 25 bp, Artificial
  Probe
tctattcaactagcaatatccgaga

SEQ ID NO: 47432 - DNA, 25 bp, Artificial
  Probe
ctctattcaactagcaatatccgag

SEQ ID NO: 47433 - DNA, 25 bp, Artificial
  Probe
gctctattcaactagcaatatccga

SEQ ID NO: 47434 - DNA, 25 bp, Artificial
  Probe
attcaactagcaatatccgagacgc

SEQ ID NO: 47435 - DNA, 25 bp, Artificial
  Probe
ggctctattcaactagcaatatccg

SEQ ID NO: 47436 - DNA, 25 bp, Artificial
  Probe
cttcagactctcaggaggcatagac

SEQ ID NO: 47437 - DNA, 25 bp, Artificial
  Probe
tgggctctattcaactagcaatatc

SEQ ID NO: 47438 - DNA, 25 bp, Artificial
  Probe
ttgggctctattcaactagcaatat

SEQ ID NO: 47439 - DNA, 25 bp, Artificial
  Probe
attgggctctattcaactagcaata

SEQ ID NO: 47440 - DNA, 25 bp, Artificial
  Probe
aattgggctctattcaactagcaat

SEQ ID NO: 47441 - DNA, 25 bp, Artificial
  Probe
gggctctattcaactagcaatatcc

SEQ ID NO: 47442 - DNA, 25 bp, Artificial
  Probe
attgatgacaaaagacaggtagtga

SEQ ID NO: 47443 - DNA, 25 bp, Artificial
  Probe
cattgatgacaaaagacaggtagtg

SEQ ID NO: 47444 - DNA, 25 bp, Artificial
  Probe
acattgatgacaaaagacaggtagt

SEQ ID NO: 47445 - DNA, 25 bp, Artificial
  Probe
caaacattgatgacaaaagacaggt

SEQ ID NO: 47446 - DNA, 25 bp, Artificial
  Probe
aacattgatgacaaaagacaggtag

SEQ ID NO: 47447 - DNA, 25 bp, Artificial
  Probe
ttgatgacaaaagacaggtagtgag

SEQ ID NO: 47448 - DNA, 25 bp, Artificial
  Probe
agcaaacattgatgacaaaagacag

SEQ ID NO: 47449 - DNA, 25 bp, Artificial
  Probe
aaacattgatgacaaaagacaggta

SEQ ID NO: 47450 - DNA, 25 bp, Artificial
  Probe
cagcaaacattgatgacaaaagaca

SEQ ID NO: 47451 - DNA, 25 bp, Artificial
  Probe
gcaaacattgatgacaaaagacagg

SEQ ID NO: 47452 - DNA, 25 bp, Artificial
  Probe
tagcagcagcaaacattgatgacaa

SEQ ID NO: 47453 - DNA, 25 bp, Artificial
  Probe
gcagcaaacattgatgacaaaagac

SEQ ID NO: 47454 - DNA, 25 bp, Artificial
  Probe
agcagcaaacattgatgacaaaaga

SEQ ID NO: 47455 - DNA, 25 bp, Artificial
  Probe
cagcagcaaacattgatgacaaaag

SEQ ID NO: 47456 - DNA, 25 bp, Artificial
  Probe
tttcgtagcagcagcaaacattgat

SEQ ID NO: 47457 - DNA, 25 bp, Artificial
  Probe
tgatgacaaaagacaggtagtgagc

SEQ ID NO: 47458 - DNA, 25 bp, Artificial
  Probe
gtagcagcagcaaacattgatgaca

SEQ ID NO: 47459 - DNA, 25 bp, Artificial
  Probe
agcagcagcaaacattgatgacaaa

SEQ ID NO: 47460 - DNA, 25 bp, Artificial
  Probe
ctttcgtagcagcagcaaacattga

SEQ ID NO: 47461 - DNA, 25 bp, Artificial
  Probe
ttcgtagcagcagcaaacattgatg

SEQ ID NO: 47462 - DNA, 25 bp, Artificial
  Probe
caattgggctctattcaactagcaa

SEQ ID NO: 47463 - DNA, 25 bp, Artificial
  Probe
gatgacaaaagacaggtagtgagcg

SEQ ID NO: 47464 - DNA, 25 bp, Artificial
  Probe
gcagcagcaaacattgatgacaaaa

SEQ ID NO: 47465 - DNA, 25 bp, Artificial
  Probe
ttcaactagcaatatccgagacgcg

SEQ ID NO: 47466 - DNA, 25 bp, Artificial
  Probe
cgcaggaattcaaacccattggtac

SEQ ID NO: 47467 - DNA, 25 bp, Artificial
  Probe
gaaccgcaggaattcaaacccattg

SEQ ID NO: 47468 - DNA, 25 bp, Artificial
  Probe
caaaatgaacccacagcttcagttc

SEQ ID NO: 47469 - DNA, 25 bp, Artificial
  Probe
caggaattcaaacccattggtaccg

SEQ ID NO: 47470 - DNA, 25 bp, Artificial
  Probe
aaaatgaacccacagcttcagttcc

SEQ ID NO: 47471 - DNA, 25 bp, Artificial
  Probe
gcaggaattcaaacccattggtacc

SEQ ID NO: 47472 - DNA, 25 bp, Artificial
  Probe
gcaaaatgaacccacagcttcagtt

SEQ ID NO: 47473 - DNA, 25 bp, Artificial
  Probe
ccacagacaatgctcatcaatagaa

SEQ ID NO: 47474 - DNA, 25 bp, Artificial
  Probe
tatctctctctctacagactgcttc

SEQ ID NO: 47475 - DNA, 25 bp, Artificial
  Probe
ctatctctctctctacagactgctt

SEQ ID NO: 47476 - DNA, 25 bp, Artificial
  Probe
cacctatctctctctctacagactg

SEQ ID NO: 47477 - DNA, 25 bp, Artificial
  Probe
cctatctctctctctacagactgct

SEQ ID NO: 47478 - DNA, 25 bp, Artificial
  Probe
gcacctatctctctctctacagact

SEQ ID NO: 47479 - DNA, 25 bp, Artificial
  Probe
tctctctctctacagactgcttcat

SEQ ID NO: 47480 - DNA, 25 bp, Artificial
  Probe
atctctctctctacagactgcttca

SEQ ID NO: 47481 - DNA, 25 bp, Artificial
  Probe
acctatctctctctctacagactgc

SEQ ID NO: 47482 - DNA, 25 bp, Artificial
  Probe
ctctctctctacagactgcttcatg

SEQ ID NO: 47483 - DNA, 25 bp, Artificial
  Probe
cagacaatgctcatcaatagaaacc

SEQ ID NO: 47484 - DNA, 25 bp, Artificial
  Probe
acagacaatgctcatcaatagaaac

SEQ ID NO: 47485 - DNA, 25 bp, Artificial
  Probe
cacagacaatgctcatcaatagaaa

SEQ ID NO: 47486 - DNA, 25 bp, Artificial
  Probe
gactggcacctatctctctctctac

SEQ ID NO: 47487 - DNA, 25 bp, Artificial
  Probe
agacaatgctcatcaatagaaaccc

SEQ ID NO: 47488 - DNA, 25 bp, Artificial
  Probe
ggcacctatctctctctctacagac

SEQ ID NO: 47489 - DNA, 25 bp, Artificial
  Probe
gccacagacaatgctcatcaataga

SEQ ID NO: 47490 - DNA, 25 bp, Artificial
  Probe
agactggcacctatctctctctcta

SEQ ID NO: 47491 - DNA, 25 bp, Artificial
  Probe
tgccacagacaatgctcatcaatag

SEQ ID NO: 47492 - DNA, 25 bp, Artificial
  Probe
tggcacctatctctctctctacaga

SEQ ID NO: 47493 - DNA, 25 bp, Artificial
  Probe
ttggttggttggtttgtaaagtcaa

SEQ ID NO: 47494 - DNA, 25 bp, Artificial
  Probe
actggcacctatctctctctctaca

SEQ ID NO: 47495 - DNA, 25 bp, Artificial
  Probe
ctggcacctatctctctctctacag

SEQ ID NO: 47496 - DNA, 25 bp, Artificial
  Probe
tctacagactgcttcatggactctt

SEQ ID NO: 47497 - DNA, 25 bp, Artificial
  Probe
gacaatgctcatcaatagaaacccg

SEQ ID NO: 47498 - DNA, 25 bp, Artificial
  Probe
gttggttggttggtttgtaaagtca

SEQ ID NO: 47499 - DNA, 25 bp, Artificial
  Probe
tgttggttggttggtttgtaaagtc

SEQ ID NO: 47500 - DNA, 25 bp, Artificial
  Probe
ctctctctacagactgcttcatgga

SEQ ID NO: 47501 - DNA, 25 bp, Artificial
  Probe
tctctctctacagactgcttcatgg

SEQ ID NO: 47502 - DNA, 25 bp, Artificial
  Probe
ctgccacagacaatgctcatcaata

SEQ ID NO: 47503 - DNA, 25 bp, Artificial
  Probe
ctctacagactgcttcatggactct

SEQ ID NO: 47504 - DNA, 25 bp, Artificial
  Probe
tctctacagactgcttcatggactc

SEQ ID NO: 47505 - DNA, 25 bp, Artificial
  Probe
ctctctacagactgcttcatggact

SEQ ID NO: 47506 - DNA, 25 bp, Artificial
  Probe
tctctctacagactgcttcatggac

SEQ ID NO: 47507 - DNA, 25 bp, Artificial
  Probe
ctacagactgcttcatggactcttt

SEQ ID NO: 47508 - DNA, 25 bp, Artificial
  Probe
tacagactgcttcatggactctttg

SEQ ID NO: 47509 - DNA, 25 bp, Artificial
  Probe
tggttggtttgtaaagtcaaagaaa

SEQ ID NO: 47510 - DNA, 25 bp, Artificial
  Probe
ttggttggtttgtaaagtcaaagaa

SEQ ID NO: 47511 - DNA, 25 bp, Artificial
  Probe
gttggttggtttgtaaagtcaaaga

SEQ ID NO: 47512 - DNA, 25 bp, Artificial
  Probe
tgtaaagtcaaagaaaatggtcaga

SEQ ID NO: 47513 - DNA, 25 bp, Artificial
  Probe
ggttggttggtttgtaaagtcaaag

SEQ ID NO: 47514 - DNA, 25 bp, Artificial
  Probe
cagactggcacctatctctctctct

SEQ ID NO: 47515 - DNA, 25 bp, Artificial
  Probe
tcagactggcacctatctctctctc

SEQ ID NO: 47516 - DNA, 25 bp, Artificial
  Probe
tggttggttggtttgtaaagtcaaa

SEQ ID NO: 47517 - DNA, 25 bp, Artificial
  Probe
ctccgaacacactcactcaaagttt

SEQ ID NO: 47518 - DNA, 25 bp, Artificial
  Probe
atacaggagtctaccacttgtcata

SEQ ID NO: 47519 - DNA, 25 bp, Artificial
  Probe
tacaggagtctaccacttgtcatag

SEQ ID NO: 47520 - DNA, 25 bp, Artificial
  Probe
aagatacaggagtctaccacttgtc

SEQ ID NO: 47521 - DNA, 25 bp, Artificial
  Probe
gaagatacaggagtctaccacttgt

SEQ ID NO: 47522 - DNA, 25 bp, Artificial
  Probe
gatacaggagtctaccacttgtcat

SEQ ID NO: 47523 - DNA, 25 bp, Artificial
  Probe
ggaagatacaggagtctaccacttg

SEQ ID NO: 47524 - DNA, 25 bp, Artificial
  Probe
ggatgctacttaccacaatctgtaa

SEQ ID NO: 47525 - DNA, 25 bp, Artificial
  Probe
gatgctacttaccacaatctgtaac

SEQ ID NO: 47526 - DNA, 25 bp, Artificial
  Probe
atgctacttaccacaatctgtaacc

SEQ ID NO: 47527 - DNA, 25 bp, Artificial
  Probe
aggagtctaccacttgtcatagaag

SEQ ID NO: 47528 - DNA, 25 bp, Artificial
  Probe
caggagtctaccacttgtcatagaa

SEQ ID NO: 47529 - DNA, 25 bp, Artificial
  Probe
tactgccaacttgatgttctacctg

SEQ ID NO: 47530 - DNA, 25 bp, Artificial
  Probe
ttgtagcagctatagattcctcctt

SEQ ID NO: 47531 - DNA, 25 bp, Artificial
  Probe
agatacaggagtctaccacttgtca

SEQ ID NO: 47532 - DNA, 25 bp, Artificial
  Probe
gttggagaggtatatttgagcagaa

SEQ ID NO: 47533 - DNA, 25 bp, Artificial
  Probe
ttggagaggtatatttgagcagaat

SEQ ID NO: 47534 - DNA, 25 bp, Artificial
  Probe
cttgtagcagctatagattcctcct

SEQ ID NO: 47535 - DNA, 25 bp, Artificial
  Probe
tgtagcagctatagattcctccttg

SEQ ID NO: 47536 - DNA, 25 bp, Artificial
  Probe
aggcagtctgttggagaggtatatt

SEQ ID NO: 47537 - DNA, 25 bp, Artificial
  Probe
ggagtctaccacttgtcatagaagg

SEQ ID NO: 47538 - DNA, 25 bp, Artificial
  Probe
agtctgttggagaggtatatttgag

SEQ ID NO: 47539 - DNA, 25 bp, Artificial
  Probe
tgttggagaggtatatttgagcaga

SEQ ID NO: 47540 - DNA, 25 bp, Artificial
  Probe
cagtctgttggagaggtatatttga

SEQ ID NO: 47541 - DNA, 25 bp, Artificial
  Probe
gtactgccaacttgatgttctacct

SEQ ID NO: 47542 - DNA, 25 bp, Artificial
  Probe
gtctgttggagaggtatatttgagc

SEQ ID NO: 47543 - DNA, 25 bp, Artificial
  Probe
acaggagtctaccacttgtcataga

SEQ ID NO: 47544 - DNA, 25 bp, Artificial
  Probe
tggagaggtatatttgagcagaata

SEQ ID NO: 47545 - DNA, 25 bp, Artificial
  Probe
tctgttggagaggtatatttgagca

SEQ ID NO: 47546 - DNA, 25 bp, Artificial
  Probe
aatgtgccttgatgaagatttcctc

SEQ ID NO: 47547 - DNA, 25 bp, Artificial
  Probe
gcagtctgttggagaggtatatttg

SEQ ID NO: 47548 - DNA, 25 bp, Artificial
  Probe
gtagcagctatagattcctccttgg

SEQ ID NO: 47549 - DNA, 25 bp, Artificial
  Probe
gaggcagtctgttggagaggtatat

SEQ ID NO: 47550 - DNA, 25 bp, Artificial
  Probe
agcaaacaccaaatcacaactcttt

SEQ ID NO: 47551 - DNA, 25 bp, Artificial
  Probe
taactcactaacagggagaattagc

SEQ ID NO: 47552 - DNA, 25 bp, Artificial
  Probe
taccacaatctgtaaccctgaatct

SEQ ID NO: 47553 - DNA, 25 bp, Artificial
  Probe
caatgtgccttgatgaagatttcct

SEQ ID NO: 47554 - DNA, 25 bp, Artificial
  Probe
ctgttggagaggtatatttgagcag

SEQ ID NO: 47555 - DNA, 25 bp, Artificial
  Probe
cctaactcactaacagggagaatta

SEQ ID NO: 47556 - DNA, 25 bp, Artificial
  Probe
ggagaggtatatttgagcagaataa

SEQ ID NO: 47557 - DNA, 25 bp, Artificial
  Probe
caggaatgaacgaaggaaacagtac

SEQ ID NO: 47558 - DNA, 25 bp, Artificial
  Probe
ggcagtctgttggagaggtatattt

SEQ ID NO: 47559 - DNA, 25 bp, Artificial
  Probe
atcctaactcactaacagggagaat

SEQ ID NO: 47560 - DNA, 25 bp, Artificial
  Probe
ttaccacaatctgtaaccctgaatc

SEQ ID NO: 47561 - DNA, 25 bp, Artificial
  Probe
cttaccacaatctgtaaccctgaat

SEQ ID NO: 47562 - DNA, 25 bp, Artificial
  Probe
ctacttaccacaatctgtaaccctg

SEQ ID NO: 47563 - DNA, 25 bp, Artificial
  Probe
cacagtagacatagttaagggaaca

SEQ ID NO: 47564 - DNA, 25 bp, Artificial
  Probe
acagtagacatagttaagggaacag

SEQ ID NO: 47565 - DNA, 25 bp, Artificial
  Probe
tcacagtagacatagttaagggaac

SEQ ID NO: 47566 - DNA, 25 bp, Artificial
  Probe
cagtagacatagttaagggaacagc

SEQ ID NO: 47567 - DNA, 25 bp, Artificial
  Probe
attcacagtagacatagttaaggga

SEQ ID NO: 47568 - DNA, 25 bp, Artificial
  Probe
ttcacagtagacatagttaagggaa

SEQ ID NO: 47569 - DNA, 25 bp, Artificial
  Probe
aattcacagtagacatagttaaggg

SEQ ID NO: 47570 - DNA, 25 bp, Artificial
  Probe
agtagacatagttaagggaacagcg

SEQ ID NO: 47571 - DNA, 25 bp, Artificial
  Probe
catagttaagggaacagcggtctag

SEQ ID NO: 47572 - DNA, 25 bp, Artificial
  Probe
gtagacatagttaagggaacagcgg

SEQ ID NO: 47573 - DNA, 25 bp, Artificial
  Probe
atagttaagggaacagcggtctagt

SEQ ID NO: 47574 - DNA, 25 bp, Artificial
  Probe
acatagttaagggaacagcggtcta

SEQ ID NO: 47575 - DNA, 25 bp, Artificial
  Probe
tagacatagttaagggaacagcggt

SEQ ID NO: 47576 - DNA, 25 bp, Artificial
  Probe
tagttaagggaacagcggtctagtt

SEQ ID NO: 47577 - DNA, 25 bp, Artificial
  Probe
tctagttttgagtctttccccattt

SEQ ID NO: 47578 - DNA, 25 bp, Artificial
  Probe
ctagttttgagtctttccccatttt

SEQ ID NO: 47579 - DNA, 25 bp, Artificial
  Probe
gaattcacagtagacatagttaagg

SEQ ID NO: 47580 - DNA, 25 bp, Artificial
  Probe
gtctagttttgagtctttccccatt

SEQ ID NO: 47581 - DNA, 25 bp, Artificial
  Probe
agttaagggaacagcggtctagttt

SEQ ID NO: 47582 - DNA, 25 bp, Artificial
  Probe
cttcaatgcaggaccagaatctgtc

SEQ ID NO: 47583 - DNA, 25 bp, Artificial
  Probe
ggtctagttttgagtctttccccat

SEQ ID NO: 47584 - DNA, 25 bp, Artificial
  Probe
atatctatcctccttcaatgcagga

SEQ ID NO: 47585 - DNA, 25 bp, Artificial
  Probe
tatctatcctccttcaatgcaggac

SEQ ID NO: 47586 - DNA, 25 bp, Artificial
  Probe
aacagcggtctagttttgagtcttt

SEQ ID NO: 47587 - DNA, 25 bp, Artificial
  Probe
gacatagttaagggaacagcggtct

SEQ ID NO: 47588 - DNA, 25 bp, Artificial
  Probe
agacatagttaagggaacagcggtc

SEQ ID NO: 47589 - DNA, 25 bp, Artificial
  Probe
acagcggtctagttttgagtctttc

SEQ ID NO: 47590 - DNA, 25 bp, Artificial
  Probe
ttaagggaacagcggtctagttttg

SEQ ID NO: 47591 - DNA, 25 bp, Artificial
  Probe
gttaagggaacagcggtctagtttt

SEQ ID NO: 47592 - DNA, 25 bp, Artificial
  Probe
gaacagcggtctagttttgagtctt

SEQ ID NO: 47593 - DNA, 25 bp, Artificial
  Probe
cagcggtctagttttgagtctttcc

SEQ ID NO: 47594 - DNA, 25 bp, Artificial
  Probe
ccttcaatgcaggaccagaatctgt

SEQ ID NO: 47595 - DNA, 25 bp, Artificial
  Probe
taagggaacagcggtctagttttga

SEQ ID NO: 47596 - DNA, 25 bp, Artificial
  Probe
acatgatttctgatactttgaattc

SEQ ID NO: 47597 - DNA, 25 bp, Artificial
  Probe
cggtctagttttgagtctttcccca

SEQ ID NO: 47598 - DNA, 25 bp, Artificial
  Probe
atctatcctccttcaatgcaggacc

SEQ ID NO: 47599 - DNA, 25 bp, Artificial
  Probe
agcggtctagttttgagtctttccc

SEQ ID NO: 47600 - DNA, 25 bp, Artificial
  Probe
ggaacagcggtctagttttgagtct

SEQ ID NO: 47601 - DNA, 25 bp, Artificial
  Probe
ctccttcaatgcaggaccagaatct

SEQ ID NO: 47602 - DNA, 25 bp, Artificial
  Probe
aagggaacagcggtctagttttgag

SEQ ID NO: 47603 - DNA, 25 bp, Artificial
  Probe
ctatcctccttcaatgcaggaccag

SEQ ID NO: 47604 - DNA, 25 bp, Artificial
  Probe
tccttcaatgcaggaccagaatctg

SEQ ID NO: 47605 - DNA, 25 bp, Artificial
  Probe
tatcctccttcaatgcaggaccaga

SEQ ID NO: 47606 - DNA, 25 bp, Artificial
  Probe
tctatcctccttcaatgcaggacca

SEQ ID NO: 47607 - DNA, 25 bp, Artificial
  Probe
aatgcaggaccagaatctgtccatc

SEQ ID NO: 47608 - DNA, 25 bp, Artificial
  Probe
ttctcctcattgctcgcttcttatt

SEQ ID NO: 47609 - DNA, 25 bp, Artificial
  Probe
tctcctcattgctcgcttcttattt

SEQ ID NO: 47610 - DNA, 25 bp, Artificial
  Probe
catggaggagagcttgtttcaaatc

SEQ ID NO: 47611 - DNA, 25 bp, Artificial
  Probe
gagagcttgtttcaaatcctccttg

SEQ ID NO: 47612 - DNA, 25 bp, Artificial
  Probe
ctcctcattgctcgcttcttatttt

SEQ ID NO: 47613 - DNA, 25 bp, Artificial
  Probe
gaacttctgatccctagagcctctg

SEQ ID NO: 47614 - DNA, 25 bp, Artificial
  Probe
cttgtttcaaatcctccttgaccac

SEQ ID NO: 47615 - DNA, 25 bp, Artificial
  Probe
agaacttctgatccctagagcctct

SEQ ID NO: 47616 - DNA, 25 bp, Artificial
  Probe
ttgtttcaaatcctccttgaccact

SEQ ID NO: 47617 - DNA, 25 bp, Artificial
  Probe
atggaggagagcttgtttcaaatcc

SEQ ID NO: 47618 - DNA, 25 bp, Artificial
  Probe
aaaccctgcttctcttagagtgagg

SEQ ID NO: 47619 - DNA, 25 bp, Artificial
  Probe
gcatggaggagagcttgtttcaaat

SEQ ID NO: 47620 - DNA, 25 bp, Artificial
  Probe
aaaaccctgcttctcttagagtgag

SEQ ID NO: 47621 - DNA, 25 bp, Artificial
  Probe
aaaggacaaaaccctgcttctctta

SEQ ID NO: 47622 - DNA, 25 bp, Artificial
  Probe
gagcttgtttcaaatcctccttgac

SEQ ID NO: 47623 - DNA, 25 bp, Artificial
  Probe
agagcttgtttcaaatcctccttga

SEQ ID NO: 47624 - DNA, 25 bp, Artificial
  Probe
aacttctgatccctagagcctctgt

SEQ ID NO: 47625 - DNA, 25 bp, Artificial
  Probe
caaaaccctgcttctcttagagtga

SEQ ID NO: 47626 - DNA, 25 bp, Artificial
  Probe
gacaaaaccctgcttctcttagagt

SEQ ID NO: 47627 - DNA, 25 bp, Artificial
  Probe
tgtttcaaatcctccttgaccactg

SEQ ID NO: 47628 - DNA, 25 bp, Artificial
  Probe
aaggacaaaaccctgcttctcttag

SEQ ID NO: 47629 - DNA, 25 bp, Artificial
  Probe
acaaaaccctgcttctcttagagtg

SEQ ID NO: 47630 - DNA, 25 bp, Artificial
  Probe
ggacaaaaccctgcttctcttagag

SEQ ID NO: 47631 - DNA, 25 bp, Artificial
  Probe
gcttgtttcaaatcctccttgacca

SEQ ID NO: 47632 - DNA, 25 bp, Artificial
  Probe
tttaccaaaggacaaaaccctgctt

SEQ ID NO: 47633 - DNA, 25 bp, Artificial
  Probe
aggacaaaaccctgcttctcttaga

SEQ ID NO: 47634 - DNA, 25 bp, Artificial
  Probe
cttctgatccctagagcctctgtgt

SEQ ID NO: 47635 - DNA, 25 bp, Artificial
  Probe
acttctgatccctagagcctctgtg

SEQ ID NO: 47636 - DNA, 25 bp, Artificial
  Probe
agcttgtttcaaatcctccttgacc

SEQ ID NO: 47637 - DNA, 25 bp, Artificial
  Probe
caaaggacaaaaccctgcttctctt

SEQ ID NO: 47638 - DNA, 25 bp, Artificial
  Probe
ttaccaaaggacaaaaccctgcttc

SEQ ID NO: 47639 - DNA, 25 bp, Artificial
  Probe
ttctgatccctagagcctctgtgtg

SEQ ID NO: 47640 - DNA, 25 bp, Artificial
  Probe
gtttcaaatcctccttgaccactgc

SEQ ID NO: 47641 - DNA, 25 bp, Artificial
  Probe
tttcaaatcctccttgaccactgct

SEQ ID NO: 47642 - DNA, 25 bp, Artificial
  Probe
ctttaccaaaggacaaaaccctgct

SEQ ID NO: 47643 - DNA, 25 bp, Artificial
  Probe
taccaaaggacaaaaccctgcttct

SEQ ID NO: 47644 - DNA, 25 bp, Artificial
  Probe
agcatggaggagagcttgtttcaaa

SEQ ID NO: 47645 - DNA, 25 bp, Artificial
  Probe
ggagagcttgtttcaaatcctcctt

SEQ ID NO: 47646 - DNA, 25 bp, Artificial
  Probe
ttcaaatcctccttgaccactgctg

SEQ ID NO: 47647 - DNA, 25 bp, Artificial
  Probe
ttctcttagagtgaggctgggagag

SEQ ID NO: 47648 - DNA, 25 bp, Artificial
  Probe
cttctcttagagtgaggctgggaga

SEQ ID NO: 47649 - DNA, 25 bp, Artificial
  Probe
tggaggagagcttgtttcaaatcct

SEQ ID NO: 47650 - DNA, 25 bp, Artificial
  Probe
gagcatggaggagagcttgtttcaa

SEQ ID NO: 47651 - DNA, 25 bp, Artificial
  Probe
ccaaaggacaaaaccctgcttctct

SEQ ID NO: 47652 - DNA, 25 bp, Artificial
  Probe
atttctggctttaggatcccctttc

SEQ ID NO: 47653 - DNA, 25 bp, Artificial
  Probe
gttgtaccagaagatccattgctaa

SEQ ID NO: 47654 - DNA, 25 bp, Artificial
  Probe
tctctgcattgttgtagttctgtta

SEQ ID NO: 47655 - DNA, 25 bp, Artificial
  Probe
ctctgcattgttgtagttctgttaa

SEQ ID NO: 47656 - DNA, 25 bp, Artificial
  Probe
ttctctgcattgttgtagttctgtt

SEQ ID NO: 47657 - DNA, 25 bp, Artificial
  Probe
tctgcattgttgtagttctgttaat

SEQ ID NO: 47658 - DNA, 25 bp, Artificial
  Probe
atgttctctgcattgttgtagttct

SEQ ID NO: 47659 - DNA, 25 bp, Artificial
  Probe
atccattgctaaactctgctgatac

SEQ ID NO: 47660 - DNA, 25 bp, Artificial
  Probe
gttctctgcattgttgtagttctgt

SEQ ID NO: 47661 - DNA, 25 bp, Artificial
  Probe
tgttctctgcattgttgtagttctg

SEQ ID NO: 47662 - DNA, 25 bp, Artificial
  Probe
ttgtaccagaagatccattgctaaa

SEQ ID NO: 47663 - DNA, 25 bp, Artificial
  Probe
taccagaagatccattgctaaactc

SEQ ID NO: 47664 - DNA, 25 bp, Artificial
  Probe
gtaccagaagatccattgctaaact

SEQ ID NO: 47665 - DNA, 25 bp, Artificial
  Probe
tctgagaaaccataattcacacttg

SEQ ID NO: 47666 - DNA, 25 bp, Artificial
  Probe
tgtaccagaagatccattgctaaac

SEQ ID NO: 47667 - DNA, 25 bp, Artificial
  Probe
gatccattgctaaactctgctgata

SEQ ID NO: 47668 - DNA, 25 bp, Artificial
  Probe
ggatctgagaaaccataattcacac

SEQ ID NO: 47669 - DNA, 25 bp, Artificial
  Probe
aggatctgagaaaccataattcaca

SEQ ID NO: 47670 - DNA, 25 bp, Artificial
  Probe
tgtcctttgataagagagaaatgtt

SEQ ID NO: 47671 - DNA, 25 bp, Artificial
  Probe
ttgtcctttgataagagagaaatgt

SEQ ID NO: 47672 - DNA, 25 bp, Artificial
  Probe
atctgagaaaccataattcacactt

SEQ ID NO: 47673 - DNA, 25 bp, Artificial
  Probe
ggttgtaccagaagatccattgcta

SEQ ID NO: 47674 - DNA, 25 bp, Artificial
  Probe
ctgcattgttgtagttctgttaata

SEQ ID NO: 47675 - DNA, 25 bp, Artificial
  Probe
gatctgagaaaccataattcacact

SEQ ID NO: 47676 - DNA, 25 bp, Artificial
  Probe
cacacttggatttgtcctttgataa

SEQ ID NO: 47677 - DNA, 25 bp, Artificial
  Probe
tcacacttggatttgtcctttgata

SEQ ID NO: 47678 - DNA, 25 bp, Artificial
  Probe
aattcacacttggatttgtcctttg

SEQ ID NO: 47679 - DNA, 25 bp, Artificial
  Probe
gtcctttgataagagagaaatgttc

SEQ ID NO: 47680 - DNA, 25 bp, Artificial
  Probe
acacttggatttgtcctttgataag

SEQ ID NO: 47681 - DNA, 25 bp, Artificial
  Probe
cataattcacacttggatttgtcct

SEQ ID NO: 47682 - DNA, 25 bp, Artificial
  Probe
tggatttgtcctttgataagagaga

SEQ ID NO: 47683 - DNA, 25 bp, Artificial
  Probe
accagaagatccattgctaaactct

SEQ ID NO: 47684 - DNA, 25 bp, Artificial
  Probe
cacttggatttgtcctttgataaga

SEQ ID NO: 47685 - DNA, 25 bp, Artificial
  Probe
taattcacacttggatttgtccttt

SEQ ID NO: 47686 - DNA, 25 bp, Artificial
  Probe
cgttgttagcttggaaggatttaag

SEQ ID NO: 47687 - DNA, 25 bp, Artificial
  Probe
ctgagaaaccataattcacacttgg

SEQ ID NO: 47688 - DNA, 25 bp, Artificial
  Probe
aatgttctctgcattgttgtagttc

SEQ ID NO: 47689 - DNA, 25 bp, Artificial
  Probe
acttggatttgtcctttgataagag

SEQ ID NO: 47690 - DNA, 25 bp, Artificial
  Probe
ttcacacttggatttgtcctttgat

SEQ ID NO: 47691 - DNA, 25 bp, Artificial
  Probe
attcacacttggatttgtcctttga

SEQ ID NO: 47692 - DNA, 25 bp, Artificial
  Probe
accataattcacacttggatttgtc

SEQ ID NO: 47693 - DNA, 25 bp, Artificial
  Probe
tgagaaaccataattcacacttgga

SEQ ID NO: 47694 - DNA, 25 bp, Artificial
  Probe
atcggttgtaccagaagatccattg

SEQ ID NO: 47695 - DNA, 25 bp, Artificial
  Probe
catcggttgtaccagaagatccatt

SEQ ID NO: 47696 - DNA, 25 bp, Artificial
  Probe
gcattgttgtagttctgttaataat

SEQ ID NO: 47697 - DNA, 25 bp, Artificial
  Probe
ccataattcacacttggatttgtcc

SEQ ID NO: 47698 - DNA, 25 bp, Artificial
  Probe
ggacctcattaaccagaagaagatg

SEQ ID NO: 47699 - DNA, 25 bp, Artificial
  Probe
tggacctcattaaccagaagaagat

SEQ ID NO: 47700 - DNA, 25 bp, Artificial
  Probe
tacacacgagaacacactaaggaga

SEQ ID NO: 47701 - DNA, 25 bp, Artificial
  Probe
tgctttggagataatggagtcttta

SEQ ID NO: 47702 - DNA, 25 bp, Artificial
  Probe
gctttggagataatggagtctttac

SEQ ID NO: 47703 - DNA, 25 bp, Artificial
  Probe
ctttggagataatggagtctttacg

SEQ ID NO: 47704 - DNA, 25 bp, Artificial
  Probe
ctgacctctacctggacctcattaa

SEQ ID NO: 47705 - DNA, 25 bp, Artificial
  Probe
cattaaccagaagaagatgagtccc

SEQ ID NO: 47706 - DNA, 25 bp, Artificial
  Probe
ctgctttggagataatggagtcttt

SEQ ID NO: 47707 - DNA, 25 bp, Artificial
  Probe
tttggagataatggagtctttacgc

SEQ ID NO: 47708 - DNA, 25 bp, Artificial
  Probe
ggacagacagatggacatttgaatt

SEQ ID NO: 47709 - DNA, 25 bp, Artificial
  Probe
gtacacacgagaacacactaaggag

SEQ ID NO: 47710 - DNA, 25 bp, Artificial
  Probe
ttgtgaggatttcaagaaggtcaaa

SEQ ID NO: 47711 - DNA, 25 bp, Artificial
  Probe
taacttacaagtgcaatgtcttacc

SEQ ID NO: 47712 - DNA, 25 bp, Artificial
  Probe
cacacgagaacacactaaggagaac

SEQ ID NO: 47713 - DNA, 25 bp, Artificial
  Probe
tcattaaccagaagaagatgagtcc

SEQ ID NO: 47714 - DNA, 25 bp, Artificial
  Probe
gacctcattaaccagaagaagatga

SEQ ID NO: 47715 - DNA, 25 bp, Artificial
  Probe
tgacctctacctggacctcattaac

SEQ ID NO: 47716 - DNA, 25 bp, Artificial
  Probe
ttggagataatggagtctttacgct

SEQ ID NO: 47717 - DNA, 25 bp, Artificial
  Probe
tcttaacttacaagtgcaatgtctt

SEQ ID NO: 47718 - DNA, 25 bp, Artificial
  Probe
ttcttaacttacaagtgcaatgtct

SEQ ID NO: 47719 - DNA, 25 bp, Artificial
  Probe
tgtgaggatttcaagaaggtcaaat

SEQ ID NO: 47720 - DNA, 25 bp, Artificial
  Probe
ggagataatggagtctttacgctga

SEQ ID NO: 47721 - DNA, 25 bp, Artificial
  Probe
acacacgagaacacactaaggagaa

SEQ ID NO: 47722 - DNA, 25 bp, Artificial
  Probe
gagataatggagtctttacgctgac

SEQ ID NO: 47723 - DNA, 25 bp, Artificial
  Probe
gacctctacctggacctcattaacc

SEQ ID NO: 47724 - DNA, 25 bp, Artificial
  Probe
tggagataatggagtctttacgctg

SEQ ID NO: 47725 - DNA, 25 bp, Artificial
  Probe
tctgacctctacctggacctcatta

SEQ ID NO: 47726 - DNA, 25 bp, Artificial
  Probe
cctgctttggagataatggagtctt

SEQ ID NO: 47727 - DNA, 25 bp, Artificial
  Probe
atttaaacagtagttggatgcttgg

SEQ ID NO: 47728 - DNA, 25 bp, Artificial
  Probe
cttggcacatgaacggtaataggag

SEQ ID NO: 47729 - DNA, 25 bp, Artificial
  Probe
ttaacttacaagtgcaatgtcttac

SEQ ID NO: 47730 - DNA, 25 bp, Artificial
  Probe
atttcaagaaggtcaaatcgcagtc

SEQ ID NO: 47731 - DNA, 25 bp, Artificial
  Probe
cttctagactgacatgaccttggag

SEQ ID NO: 47732 - DNA, 25 bp, Artificial
  Probe
cttaacttacaagtgcaatgtctta

SEQ ID NO: 47733 - DNA, 25 bp, Artificial
  Probe
agataatggagtctttacgctgacc

SEQ ID NO: 47734 - DNA, 25 bp, Artificial
  Probe
acacgagaacacactaaggagaacc

SEQ ID NO: 47735 - DNA, 25 bp, Artificial
  Probe
ttggcacatgaacggtaataggaga

SEQ ID NO: 47736 - DNA, 25 bp, Artificial
  Probe
cggacagacagatggacatttgaat

SEQ ID NO: 47737 - DNA, 25 bp, Artificial
  Probe
ataatggagtctttacgctgaccaa

SEQ ID NO: 47738 - DNA, 25 bp, Artificial
  Probe
tttaaacagtagttggatgcttggc

SEQ ID NO: 47739 - DNA, 25 bp, Artificial
  Probe
gacagacagatggacatttgaattc

SEQ ID NO: 47740 - DNA, 25 bp, Artificial
  Probe
ttacaagtgcaatgtcttacccaag

SEQ ID NO: 47741 - DNA, 25 bp, Artificial
  Probe
cttacaagtgcaatgtcttacccaa

SEQ ID NO: 47742 - DNA, 25 bp, Artificial
  Probe
aacttacaagtgcaatgtcttaccc

SEQ ID NO: 47743 - DNA, 25 bp, Artificial
  Probe
cacttgtgtttattgaatgagcata

SEQ ID NO: 47744 - DNA, 25 bp, Artificial
  Probe
gcctttagcatttcgattactgtac

SEQ ID NO: 47745 - DNA, 25 bp, Artificial
  Probe
acttgtgtttattgaatgagcatat

SEQ ID NO: 47746 - DNA, 25 bp, Artificial
  Probe
acacttgtgtttattgaatgagcat

SEQ ID NO: 47747 - DNA, 25 bp, Artificial
  Probe
caggattcaaggaacagtgagtgtg

SEQ ID NO: 47748 - DNA, 25 bp, Artificial
  Probe
ttgtgtttattgaatgagcatatct

SEQ ID NO: 47749 - DNA, 25 bp, Artificial
  Probe
tgtgtttattgaatgagcatatctc

SEQ ID NO: 47750 - DNA, 25 bp, Artificial
  Probe
gattcaaggaacagtgagtgtggtg

SEQ ID NO: 47751 - DNA, 25 bp, Artificial
  Probe
cacacttgtgtttattgaatgagca

SEQ ID NO: 47752 - DNA, 25 bp, Artificial
  Probe
cttgtgtttattgaatgagcatatc

SEQ ID NO: 47753 - DNA, 25 bp, Artificial
  Probe
cgcacacttgtgtttattgaatgag

SEQ ID NO: 47754 - DNA, 25 bp, Artificial
  Probe
tgtggtgtgaagtccctattttatg

SEQ ID NO: 47755 - DNA, 25 bp, Artificial
  Probe
gtgtggtgtgaagtccctattttat

SEQ ID NO: 47756 - DNA, 25 bp, Artificial
  Probe
gtacaagtgttgtgctaacggtaag

SEQ ID NO: 47757 - DNA, 25 bp, Artificial
  Probe
gcacacttgtgtttattgaatgagc

SEQ ID NO: 47758 - DNA, 25 bp, Artificial
  Probe
tgagtgtggtgtgaagtccctattt

SEQ ID NO: 47759 - DNA, 25 bp, Artificial
  Probe
gtggtgtgaagtccctattttatgg

SEQ ID NO: 47760 - DNA, 25 bp, Artificial
  Probe
gtgctaacggtaagccatttcttaa

SEQ ID NO: 47761 - DNA, 25 bp, Artificial
  Probe
agtcaaggggtttattgctaaatgt

SEQ ID NO: 47762 - DNA, 25 bp, Artificial
  Probe
agtgtggtgtgaagtccctatttta

SEQ ID NO: 47763 - DNA, 25 bp, Artificial
  Probe
attcaaggaacagtgagtgtggtgt

SEQ ID NO: 47764 - DNA, 25 bp, Artificial
  Probe
caggttctgaagcatttcatacatg

SEQ ID NO: 47765 - DNA, 25 bp, Artificial
  Probe
tagtcaaggggtttattgctaaatg

SEQ ID NO: 47766 - DNA, 25 bp, Artificial
  Probe
ctaacggtaagccatttcttaagtt

SEQ ID NO: 47767 - DNA, 25 bp, Artificial
  Probe
tattgaatgagcatatctcagtgtt

SEQ ID NO: 47768 - DNA, 25 bp, Artificial
  Probe
ttattgaatgagcatatctcagtgt

SEQ ID NO: 47769 - DNA, 25 bp, Artificial
  Probe
taacggtaagccatttcttaagttt

SEQ ID NO: 47770 - DNA, 25 bp, Artificial
  Probe
aggattcaaggaacagtgagtgtgg

SEQ ID NO: 47771 - DNA, 25 bp, Artificial
  Probe
gttagtcaaggggtttattgctaaa

SEQ ID NO: 47772 - DNA, 25 bp, Artificial
  Probe
cctttagcatttcgattactgtaca

SEQ ID NO: 47773 - DNA, 25 bp, Artificial
  Probe
tgtgctaacggtaagccatttctta

SEQ ID NO: 47774 - DNA, 25 bp, Artificial
  Probe
agcaggattcaaggaacagtgagtg

SEQ ID NO: 47775 - DNA, 25 bp, Artificial
  Probe
cagcaggattcaaggaacagtgagt

SEQ ID NO: 47776 - DNA, 25 bp, Artificial
  Probe
tgcctttagcatttcgattactgta

SEQ ID NO: 47777 - DNA, 25 bp, Artificial
  Probe
gtgtgaagtccctattttatggaga

SEQ ID NO: 47778 - DNA, 25 bp, Artificial
  Probe
gtgagtgtggtgtgaagtccctatt

SEQ ID NO: 47779 - DNA, 25 bp, Artificial
  Probe
ggattcaaggaacagtgagtgtggt

SEQ ID NO: 47780 - DNA, 25 bp, Artificial
  Probe
tgtgaagtccctattttatggagat

SEQ ID NO: 47781 - DNA, 25 bp, Artificial
  Probe
ggtgtgaagtccctattttatggag

SEQ ID NO: 47782 - DNA, 25 bp, Artificial
  Probe
gagtgtggtgtgaagtccctatttt

SEQ ID NO: 47783 - DNA, 25 bp, Artificial
  Probe
ttagtcaaggggtttattgctaaat

SEQ ID NO: 47784 - DNA, 25 bp, Artificial
  Probe
ttgaatgagcatatctcagtgtttg

SEQ ID NO: 47785 - DNA, 25 bp, Artificial
  Probe
tcaggttctgaagcatttcatacat

SEQ ID NO: 47786 - DNA, 25 bp, Artificial
  Probe
tggtgtgaagtccctattttatgga

SEQ ID NO: 47787 - DNA, 25 bp, Artificial
  Probe
aaggaacagtgagtgtggtgtgaag

SEQ ID NO: 47788 - DNA, 25 bp, Artificial
  Probe
ttctaaccacagatacaacatcgag

SEQ ID NO: 47789 - DNA, 25 bp, Artificial
  Probe
agtgtatcccttgtataaccgattg

SEQ ID NO: 47790 - DNA, 25 bp, Artificial
  Probe
gtatcccttgtataaccgattgtgt

SEQ ID NO: 47791 - DNA, 25 bp, Artificial
  Probe
tgtatcccttgtataaccgattgtg

SEQ ID NO: 47792 - DNA, 25 bp, Artificial
  Probe
gtgtatcccttgtataaccgattgt

SEQ ID NO: 47793 - DNA, 25 bp, Artificial
  Probe
tatcccttgtataaccgattgtgta

SEQ ID NO: 47794 - DNA, 25 bp, Artificial
  Probe
aagtgtatcccttgtataaccgatt

SEQ ID NO: 47795 - DNA, 25 bp, Artificial
  Probe
tgagaaattaggacagaagtatcgt

SEQ ID NO: 47796 - DNA, 25 bp, Artificial
  Probe
ctttctaaccacagatacaacatcg

SEQ ID NO: 47797 - DNA, 25 bp, Artificial
  Probe
gagaaattaggacagaagtatcgtg

SEQ ID NO: 47798 - DNA, 25 bp, Artificial
  Probe
cctttctaaccacagatacaacatc

SEQ ID NO: 47799 - DNA, 25 bp, Artificial
  Probe
ttgagaaattaggacagaagtatcg

SEQ ID NO: 47800 - DNA, 25 bp, Artificial
  Probe
agaaattaggacagaagtatcgtgt

SEQ ID NO: 47801 - DNA, 25 bp, Artificial
  Probe
tggctgaaattgagaaattaggaca

SEQ ID NO: 47802 - DNA, 25 bp, Artificial
  Probe
ggctgaaattgagaaattaggacag

SEQ ID NO: 47803 - DNA, 25 bp, Artificial
  Probe
gctgaaattgagaaattaggacaga

SEQ ID NO: 47804 - DNA, 25 bp, Artificial
  Probe
tctaaccacagatacaacatcgagc

SEQ ID NO: 47805 - DNA, 25 bp, Artificial
  Probe
ggaccagctttctctcatcaattaa

SEQ ID NO: 47806 - DNA, 25 bp, Artificial
  Probe
gaccagctttctctcatcaattaat

SEQ ID NO: 47807 - DNA, 25 bp, Artificial
  Probe
cattaaagccaaactggacttagtg

SEQ ID NO: 47808 - DNA, 25 bp, Artificial
  Probe
tttctaaccacagatacaacatcga

SEQ ID NO: 47809 - DNA, 25 bp, Artificial
  Probe
ccattaaagccaaactggacttagt

SEQ ID NO: 47810 - DNA, 25 bp, Artificial
  Probe
tggaccagctttctctcatcaatta

SEQ ID NO: 47811 - DNA, 25 bp, Artificial
  Probe
attaaagccaaactggacttagtgc

SEQ ID NO: 47812 - DNA, 25 bp, Artificial
  Probe
gaaattgagaaattaggacagaagt

SEQ ID NO: 47813 - DNA, 25 bp, Artificial
  Probe
tgaaattgagaaattaggacagaag

SEQ ID NO: 47814 - DNA, 25 bp, Artificial
  Probe
ctaaccacagatacaacatcgagcg

SEQ ID NO: 47815 - DNA, 25 bp, Artificial
  Probe
ctgaaattgagaaattaggacagaa

SEQ ID NO: 47816 - DNA, 25 bp, Artificial
  Probe
ttggaccagctttctctcatcaatt

SEQ ID NO: 47817 - DNA, 25 bp, Artificial
  Probe
attgagaaattaggacagaagtatc

SEQ ID NO: 47818 - DNA, 25 bp, Artificial
  Probe
cttggaccagctttctctcatcaat

SEQ ID NO: 47819 - DNA, 25 bp, Artificial
  Probe
gttcttggaccagctttctctcatc

SEQ ID NO: 47820 - DNA, 25 bp, Artificial
  Probe
caagtgtatcccttgtataaccgat

SEQ ID NO: 47821 - DNA, 25 bp, Artificial
  Probe
accagctttctctcatcaattaatt

SEQ ID NO: 47822 - DNA, 25 bp, Artificial
  Probe
tacgccaagtgtatcccttgtataa

SEQ ID NO: 47823 - DNA, 25 bp, Artificial
  Probe
aaattgagaaattaggacagaagta

SEQ ID NO: 47824 - DNA, 25 bp, Artificial
  Probe
ttcttggaccagctttctctcatca

SEQ ID NO: 47825 - DNA, 25 bp, Artificial
  Probe
taaccacagatacaacatcgagcgg

SEQ ID NO: 47826 - DNA, 25 bp, Artificial
  Probe
caacttttccattaaagccaaactg

SEQ ID NO: 47827 - DNA, 25 bp, Artificial
  Probe
tcaacttttccattaaagccaaact

SEQ ID NO: 47828 - DNA, 25 bp, Artificial
  Probe
ccaagtgtatcccttgtataaccga

SEQ ID NO: 47829 - DNA, 25 bp, Artificial
  Probe
tcatcaacttttccattaaagccaa

SEQ ID NO: 47830 - DNA, 25 bp, Artificial
  Probe
ttcatcaacttttccattaaagcca

SEQ ID NO: 47831 - DNA, 25 bp, Artificial
  Probe
tcttggaccagctttctctcatcaa

SEQ ID NO: 47832 - DNA, 25 bp, Artificial
  Probe
tgttcttggaccagctttctctcat

SEQ ID NO: 47833 - DNA, 25 bp, Artificial
  Probe
acatcacactacagttgagttcata

SEQ ID NO: 47834 - DNA, 25 bp, Artificial
  Probe
tacacatcacactacagttgagttc

SEQ ID NO: 47835 - DNA, 25 bp, Artificial
  Probe
tcacactacagttgagttcataagc

SEQ ID NO: 47836 - DNA, 25 bp, Artificial
  Probe
cacatcacactacagttgagttcat

SEQ ID NO: 47837 - DNA, 25 bp, Artificial
  Probe
catcacactacagttgagttcataa

SEQ ID NO: 47838 - DNA, 25 bp, Artificial
  Probe
atcacactacagttgagttcataag

SEQ ID NO: 47839 - DNA, 25 bp, Artificial
  Probe
gtacacatcacactacagttgagtt

SEQ ID NO: 47840 - DNA, 25 bp, Artificial
  Probe
acacatcacactacagttgagttca

SEQ ID NO: 47841 - DNA, 25 bp, Artificial
  Probe
aacaggtacacatcacactacagtt

SEQ ID NO: 47842 - DNA, 25 bp, Artificial
  Probe
ttaccacgttgtatagcatagtacc

SEQ ID NO: 47843 - DNA, 25 bp, Artificial
  Probe
gagttaccacgttgtatagcatagt

SEQ ID NO: 47844 - DNA, 25 bp, Artificial
  Probe
taatatcatttacacagcgggactt

SEQ ID NO: 47845 - DNA, 25 bp, Artificial
  Probe
acactacagttgagttcataagcta

SEQ ID NO: 47846 - DNA, 25 bp, Artificial
  Probe
taccacgttgtatagcatagtacct

SEQ ID NO: 47847 - DNA, 25 bp, Artificial
  Probe
ttaatatcatttacacagcgggact

SEQ ID NO: 47848 - DNA, 25 bp, Artificial
  Probe
actacagttgagttcataagctact

SEQ ID NO: 47849 - DNA, 25 bp, Artificial
  Probe
cactacagttgagttcataagctac

SEQ ID NO: 47850 - DNA, 25 bp, Artificial
  Probe
cacactacagttgagttcataagct

SEQ ID NO: 47851 - DNA, 25 bp, Artificial
  Probe
aggtacacatcacactacagttgag

SEQ ID NO: 47852 - DNA, 25 bp, Artificial
  Probe
gttaccacgttgtatagcatagtac

SEQ ID NO: 47853 - DNA, 25 bp, Artificial
  Probe
tttaatatcatttacacagcgggac

SEQ ID NO: 47854 - DNA, 25 bp, Artificial
  Probe
acaggtacacatcacactacagttg

SEQ ID NO: 47855 - DNA, 25 bp, Artificial
  Probe
agttaccacgttgtatagcatagta

SEQ ID NO: 47856 - DNA, 25 bp, Artificial
  Probe
aatatcatttacacagcgggacttt

SEQ ID NO: 47857 - DNA, 25 bp, Artificial
  Probe
tactgcttctaatttactgtgtggg

SEQ ID NO: 47858 - DNA, 25 bp, Artificial
  Probe
ggtacacatcacactacagttgagt

SEQ ID NO: 47859 - DNA, 25 bp, Artificial
  Probe
caggtacacatcacactacagttga

SEQ ID NO: 47860 - DNA, 25 bp, Artificial
  Probe
cgagttaccacgttgtatagcatag

SEQ ID NO: 47861 - DNA, 25 bp, Artificial
  Probe
accacgttgtatagcatagtacctt

SEQ ID NO: 47862 - DNA, 25 bp, Artificial
  Probe
ttactgcttctaatttactgtgtgg

SEQ ID NO: 47863 - DNA, 25 bp, Artificial
  Probe
ataagacagatagcacccgagttac

SEQ ID NO: 47864 - DNA, 25 bp, Artificial
  Probe
cataagacagatagcacccgagtta

SEQ ID NO: 47865 - DNA, 25 bp, Artificial
  Probe
acttactgcttctaatttactgtgt

SEQ ID NO: 47866 - DNA, 25 bp, Artificial
  Probe
atcagatcctttaagccatttcatg

SEQ ID NO: 47867 - DNA, 25 bp, Artificial
  Probe
cttactgcttctaatttactgtgtg

SEQ ID NO: 47868 - DNA, 25 bp, Artificial
  Probe
ccgagttaccacgttgtatagcata

SEQ ID NO: 47869 - DNA, 25 bp, Artificial
  Probe
tcacttactgcttctaatttactgt

SEQ ID NO: 47870 - DNA, 25 bp, Artificial
  Probe
tatcagatcctttaagccatttcat

SEQ ID NO: 47871 - DNA, 25 bp, Artificial
  Probe
atatcagatcctttaagccatttca

SEQ ID NO: 47872 - DNA, 25 bp, Artificial
  Probe
tcagatcctttaagccatttcatgc

SEQ ID NO: 47873 - DNA, 25 bp, Artificial
  Probe
tacataagacagatagcacccgagt

SEQ ID NO: 47874 - DNA, 25 bp, Artificial
  Probe
tttatgtgtagttggcattgtattt

SEQ ID NO: 47875 - DNA, 25 bp, Artificial
  Probe
tttatttatgtgtagttggcattgt

SEQ ID NO: 47876 - DNA, 25 bp, Artificial
  Probe
aaattctttcctgggactatagctc

SEQ ID NO: 47877 - DNA, 25 bp, Artificial
  Probe
ccacgttgtatagcatagtaccttt

SEQ ID NO: 47878 - DNA, 25 bp, Artificial
  Probe
gaggctgtatcaggagagtaagatg

SEQ ID NO: 47879 - DNA, 25 bp, Artificial
  Probe
agaggctgtatcaggagagtaagat

SEQ ID NO: 47880 - DNA, 25 bp, Artificial
  Probe
ttaagagtctaagctgtcattgacc

SEQ ID NO: 47881 - DNA, 25 bp, Artificial
  Probe
ctaagctgtcattgaccttctctag

SEQ ID NO: 47882 - DNA, 25 bp, Artificial
  Probe
tctaagctgtcattgaccttctcta

SEQ ID NO: 47883 - DNA, 25 bp, Artificial
  Probe
gagagacacagcaataaagacctag

SEQ ID NO: 47884 - DNA, 25 bp, Artificial
  Probe
taagagtctaagctgtcattgacct

SEQ ID NO: 47885 - DNA, 25 bp, Artificial
  Probe
gctgtatcaggagagtaagatgctg

SEQ ID NO: 47886 - DNA, 25 bp, Artificial
  Probe
cagaggctgtatcaggagagtaaga

SEQ ID NO: 47887 - DNA, 25 bp, Artificial
  Probe
tcagaggctgtatcaggagagtaag

SEQ ID NO: 47888 - DNA, 25 bp, Artificial
  Probe
ctcagaggctgtatcaggagagtaa

SEQ ID NO: 47889 - DNA, 25 bp, Artificial
  Probe
aagagtctaagctgtcattgacctt

SEQ ID NO: 47890 - DNA, 25 bp, Artificial
  Probe
tttctgctttactctttctggctct

SEQ ID NO: 47891 - DNA, 25 bp, Artificial
  Probe
gtttctgctttactctttctggctc

SEQ ID NO: 47892 - DNA, 25 bp, Artificial
  Probe
cgagagacacagcaataaagaccta

SEQ ID NO: 47893 - DNA, 25 bp, Artificial
  Probe
gtctaagctgtcattgaccttctct

SEQ ID NO: 47894 - DNA, 25 bp, Artificial
  Probe
agtctaagctgtcattgaccttctc

SEQ ID NO: 47895 - DNA, 25 bp, Artificial
  Probe
gagtctaagctgtcattgaccttct

SEQ ID NO: 47896 - DNA, 25 bp, Artificial
  Probe
agagtctaagctgtcattgaccttc

SEQ ID NO: 47897 - DNA, 25 bp, Artificial
  Probe
ctattctgtgcctctgaggatagtg

SEQ ID NO: 47898 - DNA, 25 bp, Artificial
  Probe
aacaacttaagagtctaagctgtca

SEQ ID NO: 47899 - DNA, 25 bp, Artificial
  Probe
acaacttaagagtctaagctgtcat

SEQ ID NO: 47900 - DNA, 25 bp, Artificial
  Probe
acttaagagtctaagctgtcattga

SEQ ID NO: 47901 - DNA, 25 bp, Artificial
  Probe
cttaagagtctaagctgtcattgac

SEQ ID NO: 47902 - DNA, 25 bp, Artificial
  Probe
tacaaatcgagagacacagcaataa

SEQ ID NO: 47903 - DNA, 25 bp, Artificial
  Probe
aaatcgagagacacagcaataaaga

SEQ ID NO: 47904 - DNA, 25 bp, Artificial
  Probe
caaatcgagagacacagcaataaag

SEQ ID NO: 47905 - DNA, 25 bp, Artificial
  Probe
ctacaaatcgagagacacagcaata

SEQ ID NO: 47906 - DNA, 25 bp, Artificial
  Probe
agagacacagcaataaagacctagc

SEQ ID NO: 47907 - DNA, 25 bp, Artificial
  Probe
aacttaagagtctaagctgtcattg

SEQ ID NO: 47908 - DNA, 25 bp, Artificial
  Probe
caacttaagagtctaagctgtcatt

SEQ ID NO: 47909 - DNA, 25 bp, Artificial
  Probe
acaaatcgagagacacagcaataaa

SEQ ID NO: 47910 - DNA, 25 bp, Artificial
  Probe
ttctgctttactctttctggctctg

SEQ ID NO: 47911 - DNA, 25 bp, Artificial
  Probe
agtggattctcagaggctgtatcag

SEQ ID NO: 47912 - DNA, 25 bp, Artificial
  Probe
gagtggattctcagaggctgtatca

SEQ ID NO: 47913 - DNA, 25 bp, Artificial
  Probe
taagctgtcattgaccttctctaga

SEQ ID NO: 47914 - DNA, 25 bp, Artificial
  Probe
aatcgagagacacagcaataaagac

SEQ ID NO: 47915 - DNA, 25 bp, Artificial
  Probe
tattctgtgcctctgaggatagtgt

SEQ ID NO: 47916 - DNA, 25 bp, Artificial
  Probe
ggctgtatcaggagagtaagatgct

SEQ ID NO: 47917 - DNA, 25 bp, Artificial
  Probe
aggctgtatcaggagagtaagatgc

SEQ ID NO: 47918 - DNA, 25 bp, Artificial
  Probe
taacaacttaagagtctaagctgtc

SEQ ID NO: 47919 - DNA, 25 bp, Artificial
  Probe
ttaacaacttaagagtctaagctgt

SEQ ID NO: 47920 - DNA, 25 bp, Artificial
  Probe
ggattctcagaggctgtatcaggag

SEQ ID NO: 47921 - DNA, 25 bp, Artificial
  Probe
ctttactctttctggctctgtcgtg

SEQ ID NO: 47922 - DNA, 25 bp, Artificial
  Probe
ctgctttactctttctggctctgtc

SEQ ID NO: 47923 - DNA, 25 bp, Artificial
  Probe
gccaagtaaatcaactcatatggat

SEQ ID NO: 47924 - DNA, 25 bp, Artificial
  Probe
cgccaagtaaatcaactcatatgga

SEQ ID NO: 47925 - DNA, 25 bp, Artificial
  Probe
gccgccaagtaaatcaactcatatg

SEQ ID NO: 47926 - DNA, 25 bp, Artificial
  Probe
ccgccaagtaaatcaactcatatgg

SEQ ID NO: 47927 - DNA, 25 bp, Artificial
  Probe
ccaagtaaatcaactcatatggatc

SEQ ID NO: 47928 - DNA, 25 bp, Artificial
  Probe
ggccgccaagtaaatcaactcatat

SEQ ID NO: 47929 - DNA, 25 bp, Artificial
  Probe
caagtaaatcaactcatatggatcc

SEQ ID NO: 47930 - DNA, 25 bp, Artificial
  Probe
gatacaggccgccaagtaaatcaac

SEQ ID NO: 47931 - DNA, 25 bp, Artificial
  Probe
agatacaggccgccaagtaaatcaa

SEQ ID NO: 47932 - DNA, 25 bp, Artificial
  Probe
aggccgccaagtaaatcaactcata

SEQ ID NO: 47933 - DNA, 25 bp, Artificial
  Probe
atacaggccgccaagtaaatcaact

SEQ ID NO: 47934 - DNA, 25 bp, Artificial
  Probe
gctggggatgaaatgagagtggatc

SEQ ID NO: 47935 - DNA, 25 bp, Artificial
  Probe
tacaggccgccaagtaaatcaactc

SEQ ID NO: 47936 - DNA, 25 bp, Artificial
  Probe
ctggggatgaaatgagagtggatcc

SEQ ID NO: 47937 - DNA, 25 bp, Artificial
  Probe
taggtcataggtcattctctctctc

SEQ ID NO: 47938 - DNA, 25 bp, Artificial
  Probe
ataggtcataggtcattctctctct

SEQ ID NO: 47939 - DNA, 25 bp, Artificial
  Probe
acaataggtcataggtcattctctc

SEQ ID NO: 47940 - DNA, 25 bp, Artificial
  Probe
caataggtcataggtcattctctct

SEQ ID NO: 47941 - DNA, 25 bp, Artificial
  Probe
aataggtcataggtcattctctctc

SEQ ID NO: 47942 - DNA, 25 bp, Artificial
  Probe
gataacttcgctacattacaaggag

SEQ ID NO: 47943 - DNA, 25 bp, Artificial
  Probe
gtcataggtcattctctctctctcc

SEQ ID NO: 47944 - DNA, 25 bp, Artificial
  Probe
ggtcataggtcattctctctctctc

SEQ ID NO: 47945 - DNA, 25 bp, Artificial
  Probe
aggtcataggtcattctctctctct

SEQ ID NO: 47946 - DNA, 25 bp, Artificial
  Probe
gacaataggtcataggtcattctct

SEQ ID NO: 47947 - DNA, 25 bp, Artificial
  Probe
gccttggagcattatctttagttac

SEQ ID NO: 47948 - DNA, 25 bp, Artificial
  Probe
tacaaataaggtctatgggagtagc

SEQ ID NO: 47949 - DNA, 25 bp, Artificial
  Probe
tgtatgttaatttggctgtaatggc

SEQ ID NO: 47950 - DNA, 25 bp, Artificial
  Probe
gccttaactactgtaaacatagcct

SEQ ID NO: 47951 - DNA, 25 bp, Artificial
  Probe
acaaataaggtctatgggagtagca

SEQ ID NO: 47952 - DNA, 25 bp, Artificial
  Probe
caaataaggtctatgggagtagcat

SEQ ID NO: 47953 - DNA, 25 bp, Artificial
  Probe
tcgccttaactactgtaaacatagc

SEQ ID NO: 47954 - DNA, 25 bp, Artificial
  Probe
gtctttgtttgcgttgtataacttt

SEQ ID NO: 47955 - DNA, 25 bp, Artificial
  Probe
tgatcgccttaactactgtaaacat

SEQ ID NO: 47956 - DNA, 25 bp, Artificial
  Probe
ttgatcgccttaactactgtaaaca

SEQ ID NO: 47957 - DNA, 25 bp, Artificial
  Probe
tttgatcgccttaactactgtaaac

SEQ ID NO: 47958 - DNA, 25 bp, Artificial
  Probe
cgataacttcgctacattacaagga

SEQ ID NO: 47959 - DNA, 25 bp, Artificial
  Probe
cgccttaactactgtaaacatagcc

SEQ ID NO: 47960 - DNA, 25 bp, Artificial
  Probe
atcgccttaactactgtaaacatag

SEQ ID NO: 47961 - DNA, 25 bp, Artificial
  Probe
aggagcatagaaatgtttacaaacg

SEQ ID NO: 47962 - DNA, 25 bp, Artificial
  Probe
ataacttcgctacattacaaggagc

SEQ ID NO: 47963 - DNA, 25 bp, Artificial
  Probe
ccttggagcattatctttagttact

SEQ ID NO: 47964 - DNA, 25 bp, Artificial
  Probe
ggagcatagaaatgtttacaaacgg

SEQ ID NO: 47965 - DNA, 25 bp, Artificial
  Probe
gcatagaaatgtttacaaacggctt

SEQ ID NO: 47966 - DNA, 25 bp, Artificial
  Probe
cttcgctacattacaaggagcatag

SEQ ID NO: 47967 - DNA, 25 bp, Artificial
  Probe
aaataaggtctatgggagtagcatg

SEQ ID NO: 47968 - DNA, 25 bp, Artificial
  Probe
gcacttacaaataaggtctatggga

SEQ ID NO: 47969 - DNA, 25 bp, Artificial
  Probe
tcataggtcattctctctctctccc

SEQ ID NO: 47970 - DNA, 25 bp, Artificial
  Probe
gatcgccttaactactgtaaacata

SEQ ID NO: 47971 - DNA, 25 bp, Artificial
  Probe
aatttgatcgccttaactactgtaa

SEQ ID NO: 47972 - DNA, 25 bp, Artificial
  Probe
gagcatagaaatgtttacaaacggc

SEQ ID NO: 47973 - DNA, 25 bp, Artificial
  Probe
acaaggagcatagaaatgtttacaa

SEQ ID NO: 47974 - DNA, 25 bp, Artificial
  Probe
atttgatcgccttaactactgtaaa

SEQ ID NO: 47975 - DNA, 25 bp, Artificial
  Probe
aaatgtttacaaacggcttacagaa

SEQ ID NO: 47976 - DNA, 25 bp, Artificial
  Probe
tcgctacattacaaggagcatagaa

SEQ ID NO: 47977 - DNA, 25 bp, Artificial
  Probe
ttcgctacattacaaggagcataga

SEQ ID NO: 47978 - DNA, 25 bp, Artificial
  Probe
atgtttacaaacggcttacagaatt

SEQ ID NO: 47979 - DNA, 25 bp, Artificial
  Probe
aatgtttacaaacggcttacagaat

SEQ ID NO: 47980 - DNA, 25 bp, Artificial
  Probe
gaaatgtttacaaacggcttacaga

SEQ ID NO: 47981 - DNA, 25 bp, Artificial
  Probe
agaaatgtttacaaacggcttacag

SEQ ID NO: 47982 - DNA, 25 bp, Artificial
  Probe
caagagagatggttctgatgtcatt

SEQ ID NO: 47983 - DNA, 25 bp, Artificial
  Probe
cttcaagagagatggttctgatgtc

SEQ ID NO: 47984 - DNA, 25 bp, Artificial
  Probe
aagccacacaatatcttcaagagag

SEQ ID NO: 47985 - DNA, 25 bp, Artificial
  Probe
tcaagagagatggttctgatgtcat

SEQ ID NO: 47986 - DNA, 25 bp, Artificial
  Probe
caagccacacaatatcttcaagaga

SEQ ID NO: 47987 - DNA, 25 bp, Artificial
  Probe
ttcaagagagatggttctgatgtca

SEQ ID NO: 47988 - DNA, 25 bp, Artificial
  Probe
acaagccacacaatatcttcaagag

SEQ ID NO: 47989 - DNA, 25 bp, Artificial
  Probe
gacaagccacacaatatcttcaaga

SEQ ID NO: 47990 - DNA, 25 bp, Artificial
  Probe
tcttcaagagagatggttctgatgt

SEQ ID NO: 47991 - DNA, 25 bp, Artificial
  Probe
agccacacaatatcttcaagagaga

SEQ ID NO: 47992 - DNA, 25 bp, Artificial
  Probe
ggacaagccacacaatatcttcaag

SEQ ID NO: 47993 - DNA, 25 bp, Artificial
  Probe
aggacaagccacacaatatcttcaa

SEQ ID NO: 47994 - DNA, 25 bp, Artificial
  Probe
aaggacaagccacacaatatcttca

SEQ ID NO: 47995 - DNA, 25 bp, Artificial
  Probe
ttaaaggacaagccacacaatatct

SEQ ID NO: 47996 - DNA, 25 bp, Artificial
  Probe
taaaggacaagccacacaatatctt

SEQ ID NO: 47997 - DNA, 25 bp, Artificial
  Probe
atcttcaagagagatggttctgatg

SEQ ID NO: 47998 - DNA, 25 bp, Artificial
  Probe
aagagagatggttctgatgtcattt

SEQ ID NO: 47999 - DNA, 25 bp, Artificial
  Probe
acacaatatcttcaagagagatggt

SEQ ID NO: 48000 - DNA, 25 bp, Artificial
  Probe
gccacacaatatcttcaagagagat

SEQ ID NO: 48001 - DNA, 25 bp, Artificial
  Probe
ccattcctgttgtattcaaagatgt

SEQ ID NO: 48002 - DNA, 25 bp, Artificial
  Probe
accattcctgttgtattcaaagatg

SEQ ID NO: 48003 - DNA, 25 bp, Artificial
  Probe
gagatggttctgatgtcatttatcc

SEQ ID NO: 48004 - DNA, 25 bp, Artificial
  Probe
cacacaatatcttcaagagagatgg

SEQ ID NO: 48005 - DNA, 25 bp, Artificial
  Probe
ccacacaatatcttcaagagagatg

SEQ ID NO: 48006 - DNA, 25 bp, Artificial
  Probe
agagagatggttctgatgtcattta

SEQ ID NO: 48007 - DNA, 25 bp, Artificial
  Probe
gaccattcctgttgtattcaaagat

SEQ ID NO: 48008 - DNA, 25 bp, Artificial
  Probe
tatcttcaagagagatggttctgat

SEQ ID NO: 48009 - DNA, 25 bp, Artificial
  Probe
atatcttcaagagagatggttctga

SEQ ID NO: 48010 - DNA, 25 bp, Artificial
  Probe
aaaggacaagccacacaatatcttc

SEQ ID NO: 48011 - DNA, 25 bp, Artificial
  Probe
cacaatatcttcaagagagatggtt

SEQ ID NO: 48012 - DNA, 25 bp, Artificial
  Probe
ttcctgttgtattcaaagatgtcat

SEQ ID NO: 48013 - DNA, 25 bp, Artificial
  Probe
attcctgttgtattcaaagatgtca

SEQ ID NO: 48014 - DNA, 25 bp, Artificial
  Probe
acaatatcttcaagagagatggttc

SEQ ID NO: 48015 - DNA, 25 bp, Artificial
  Probe
cattcctgttgtattcaaagatgtc

SEQ ID NO: 48016 - DNA, 25 bp, Artificial
  Probe
agagatggttctgatgtcatttatc

SEQ ID NO: 48017 - DNA, 25 bp, Artificial
  Probe
gagagatggttctgatgtcatttat

SEQ ID NO: 48018 - DNA, 25 bp, Artificial
  Probe
gttgtattcaaagatgtcatcaggc

SEQ ID NO: 48019 - DNA, 25 bp, Artificial
  Probe
tgttgtattcaaagatgtcatcagg

SEQ ID NO: 48020 - DNA, 25 bp, Artificial
  Probe
cctgttgtattcaaagatgtcatca

SEQ ID NO: 48021 - DNA, 25 bp, Artificial
  Probe
aatatcttcaagagagatggttctg

SEQ ID NO: 48022 - DNA, 25 bp, Artificial
  Probe
caatatcttcaagagagatggttct

SEQ ID NO: 48023 - DNA, 25 bp, Artificial
  Probe
tcctgttgtattcaaagatgtcatc

SEQ ID NO: 48024 - DNA, 25 bp, Artificial
  Probe
cactgtgaatgttcctactctggac

SEQ ID NO: 48025 - DNA, 25 bp, Artificial
  Probe
tttaaaggacaagccacacaatatc

SEQ ID NO: 48026 - DNA, 25 bp, Artificial
  Probe
tggagaccttgttatcgaatttgaa

SEQ ID NO: 48027 - DNA, 25 bp, Artificial
  Probe
ccatcgtgtgtgactattacaatct

SEQ ID NO: 48028 - DNA, 25 bp, Artificial
  Probe
tccatcgtgtgtgactattacaatc

SEQ ID NO: 48029 - DNA, 25 bp, Artificial
  Probe
ctccatcgtgtgtgactattacaat

SEQ ID NO: 48030 - DNA, 25 bp, Artificial
  Probe
catcgtgtgtgactattacaatctt

SEQ ID NO: 48031 - DNA, 25 bp, Artificial
  Probe
cacaagaacaccaagctaatatctg

SEQ ID NO: 48032 - DNA, 25 bp, Artificial
  Probe
ccacaagaacaccaagctaatatct

SEQ ID NO: 48033 - DNA, 25 bp, Artificial
  Probe
agaacaccaagctaatatctgtacc

SEQ ID NO: 48034 - DNA, 25 bp, Artificial
  Probe
aacaccaagctaatatctgtaccat

SEQ ID NO: 48035 - DNA, 25 bp, Artificial
  Probe
gaacaccaagctaatatctgtacca

SEQ ID NO: 48036 - DNA, 25 bp, Artificial
  Probe
acaagaacaccaagctaatatctgt

SEQ ID NO: 48037 - DNA, 25 bp, Artificial
  Probe
cctccatcgtgtgtgactattacaa

SEQ ID NO: 48038 - DNA, 25 bp, Artificial
  Probe
tgcttagttaattcagtgggttctc

SEQ ID NO: 48039 - DNA, 25 bp, Artificial
  Probe
gtgactattacaatctttcctctcc

SEQ ID NO: 48040 - DNA, 25 bp, Artificial
  Probe
acaccaagctaatatctgtaccata

SEQ ID NO: 48041 - DNA, 25 bp, Artificial
  Probe
tgactattacaatctttcctctcct

SEQ ID NO: 48042 - DNA, 25 bp, Artificial
  Probe
gcttagttaattcagtgggttctcc

SEQ ID NO: 48043 - DNA, 25 bp, Artificial
  Probe
caccaagctaatatctgtaccatat

SEQ ID NO: 48044 - DNA, 25 bp, Artificial
  Probe
aagaacaccaagctaatatctgtac

SEQ ID NO: 48045 - DNA, 25 bp, Artificial
  Probe
caagaacaccaagctaatatctgta

SEQ ID NO: 48046 - DNA, 25 bp, Artificial
  Probe
gtaataaatcatggcagtgttagca

SEQ ID NO: 48047 - DNA, 25 bp, Artificial
  Probe
tgtaataaatcatggcagtgttagc

SEQ ID NO: 48048 - DNA, 25 bp, Artificial
  Probe
cgtgtgtgactattacaatctttcc

SEQ ID NO: 48049 - DNA, 25 bp, Artificial
  Probe
tgttgtaataaatcatggcagtgtt

SEQ ID NO: 48050 - DNA, 25 bp, Artificial
  Probe
tcgtgtgtgactattacaatctttc

SEQ ID NO: 48051 - DNA, 25 bp, Artificial
  Probe
ctgcttagttaattcagtgggttct

SEQ ID NO: 48052 - DNA, 25 bp, Artificial
  Probe
gactattacaatctttcctctcctt

SEQ ID NO: 48053 - DNA, 25 bp, Artificial
  Probe
gtgtgtgactattacaatctttcct

SEQ ID NO: 48054 - DNA, 25 bp, Artificial
  Probe
tgtgtgactattacaatctttcctc

SEQ ID NO: 48055 - DNA, 25 bp, Artificial
  Probe
atcgtgtgtgactattacaatcttt

SEQ ID NO: 48056 - DNA, 25 bp, Artificial
  Probe
gtgtgactattacaatctttcctct

SEQ ID NO: 48057 - DNA, 25 bp, Artificial
  Probe
ctgttgtaataaatcatggcagtgt

SEQ ID NO: 48058 - DNA, 25 bp, Artificial
  Probe
actattacaatctttcctctccttt

SEQ ID NO: 48059 - DNA, 25 bp, Artificial
  Probe
cctgcttagttaattcagtgggttc

SEQ ID NO: 48060 - DNA, 25 bp, Artificial
  Probe
tgtgactattacaatctttcctctc

SEQ ID NO: 48061 - DNA, 25 bp, Artificial
  Probe
taataaatcatggcagtgttagcac

SEQ ID NO: 48062 - DNA, 25 bp, Artificial
  Probe
cattcaagaaccagacagcaggatg

SEQ ID NO: 48063 - DNA, 25 bp, Artificial
  Probe
gttgtaataaatcatggcagtgtta

SEQ ID NO: 48064 - DNA, 25 bp, Artificial
  Probe
cccacaagaacaccaagctaatatc

SEQ ID NO: 48065 - DNA, 25 bp, Artificial
  Probe
ttgtaataaatcatggcagtgttag

SEQ ID NO: 48066 - DNA, 25 bp, Artificial
  Probe
acattcaagaaccagacagcaggat

SEQ ID NO: 48067 - DNA, 25 bp, Artificial
  Probe
aaactgttgtaataaatcatggcag

SEQ ID NO: 48068 - DNA, 25 bp, Artificial
  Probe
tcccacaagaacaccaagctaatat

SEQ ID NO: 48069 - DNA, 25 bp, Artificial
  Probe
accaagctaatatctgtaccatata

SEQ ID NO: 48070 - DNA, 25 bp, Artificial
  Probe
taagagccctgcttagttaattcag

SEQ ID NO: 48071 - DNA, 25 bp, Artificial
  Probe
cagaggctcagtatgagaagaagaa

SEQ ID NO: 48072 - DNA, 25 bp, Artificial
  Probe
tcattgtcttccagataactctcag

SEQ ID NO: 48073 - DNA, 25 bp, Artificial
  Probe
atcattgtcttccagataactctca

SEQ ID NO: 48074 - DNA, 25 bp, Artificial
  Probe
tcagaagttagtggaattattcgga

SEQ ID NO: 48075 - DNA, 25 bp, Artificial
  Probe
cattgtcttccagataactctcagc

SEQ ID NO: 48076 - DNA, 25 bp, Artificial
  Probe
ttcagaagttagtggaattattcgg

SEQ ID NO: 48077 - DNA, 25 bp, Artificial
  Probe
cagaagttagtggaattattcggat

SEQ ID NO: 48078 - DNA, 25 bp, Artificial
  Probe
ctggattaggcacttctgttaatat

SEQ ID NO: 48079 - DNA, 25 bp, Artificial
  Probe
agataactctcagcctcacagaatg

SEQ ID NO: 48080 - DNA, 25 bp, Artificial
  Probe
cagataactctcagcctcacagaat

SEQ ID NO: 48081 - DNA, 25 bp, Artificial
  Probe
catacgctctgcttcagttcatata

SEQ ID NO: 48082 - DNA, 25 bp, Artificial
  Probe
cctggattaggcacttctgttaata

SEQ ID NO: 48083 - DNA, 25 bp, Artificial
  Probe
attgtcttccagataactctcagcc

SEQ ID NO: 48084 - DNA, 25 bp, Artificial
  Probe
gttcagaagttagtggaattattcg

SEQ ID NO: 48085 - DNA, 25 bp, Artificial
  Probe
agaagttagtggaattattcggatt

SEQ ID NO: 48086 - DNA, 25 bp, Artificial
  Probe
atacgctctgcttcagttcatatat

SEQ ID NO: 48087 - DNA, 25 bp, Artificial
  Probe
cgctctgcttcagttcatatataca

SEQ ID NO: 48088 - DNA, 25 bp, Artificial
  Probe
acgctctgcttcagttcatatatac

SEQ ID NO: 48089 - DNA, 25 bp, Artificial
  Probe
tacgctctgcttcagttcatatata

SEQ ID NO: 48090 - DNA, 25 bp, Artificial
  Probe
cagtatcattgtcttccagataact

SEQ ID NO: 48091 - DNA, 25 bp, Artificial
  Probe
tcagtatcattgtcttccagataac

SEQ ID NO: 48092 - DNA, 25 bp, Artificial
  Probe
ggttcagaagttagtggaattattc

SEQ ID NO: 48093 - DNA, 25 bp, Artificial
  Probe
tcatacgctctgcttcagttcatat

SEQ ID NO: 48094 - DNA, 25 bp, Artificial
  Probe
gtatcattgtcttccagataactct

SEQ ID NO: 48095 - DNA, 25 bp, Artificial
  Probe
agtatcattgtcttccagataactc

SEQ ID NO: 48096 - DNA, 25 bp, Artificial
  Probe
gccatctccctttattagttgttct

SEQ ID NO: 48097 - DNA, 25 bp, Artificial
  Probe
agccatctccctttattagttgttc

SEQ ID NO: 48098 - DNA, 25 bp, Artificial
  Probe
gctctgcttcagttcatatatacat

SEQ ID NO: 48099 - DNA, 25 bp, Artificial
  Probe
gataactctcagcctcacagaatgg

SEQ ID NO: 48100 - DNA, 25 bp, Artificial
  Probe
ttcatacgctctgcttcagttcata

SEQ ID NO: 48101 - DNA, 25 bp, Artificial
  Probe
aagccatctccctttattagttgtt

SEQ ID NO: 48102 - DNA, 25 bp, Artificial
  Probe
tatcattgtcttccagataactctc

SEQ ID NO: 48103 - DNA, 25 bp, Artificial
  Probe
ttcggatttcagtatcattgtcttc

SEQ ID NO: 48104 - DNA, 25 bp, Artificial
  Probe
tttcctataaatgttgtcctggcat

SEQ ID NO: 48105 - DNA, 25 bp, Artificial
  Probe
ctttcctataaatgttgtcctggca

SEQ ID NO: 48106 - DNA, 25 bp, Artificial
  Probe
atagtcttgggttcagaagttagtg

SEQ ID NO: 48107 - DNA, 25 bp, Artificial
  Probe
ttgggttcagaagttagtggaatta

SEQ ID NO: 48108 - DNA, 25 bp, Artificial
  Probe
ttcctataaatgttgtcctggcatc

SEQ ID NO: 48109 - DNA, 25 bp, Artificial
  Probe
tgggttcagaagttagtggaattat

SEQ ID NO: 48110 - DNA, 25 bp, Artificial
  Probe
tctgtagttccttcgtattaatgtt

SEQ ID NO: 48111 - DNA, 25 bp, Artificial
  Probe
ttctgtagttccttcgtattaatgt

SEQ ID NO: 48112 - DNA, 25 bp, Artificial
  Probe
aatagtcttgggttcagaagttagt

SEQ ID NO: 48113 - DNA, 25 bp, Artificial
  Probe
ttgtcttccagataactctcagcct

SEQ ID NO: 48114 - DNA, 25 bp, Artificial
  Probe
ttcagtatcattgtcttccagataa

SEQ ID NO: 48115 - DNA, 25 bp, Artificial
  Probe
ctcaatagtcttgggttcagaagtt

SEQ ID NO: 48116 - DNA, 25 bp, Artificial
  Probe
tggattaggcacttctgttaatatt

SEQ ID NO: 48117 - DNA, 25 bp, Artificial
  Probe
aagtgactatctccaataggcttgt

SEQ ID NO: 48118 - DNA, 25 bp, Artificial
  Probe
atctactatatcactggtgagagca

SEQ ID NO: 48119 - DNA, 25 bp, Artificial
  Probe
catctactatatcactggtgagagc

SEQ ID NO: 48120 - DNA, 25 bp, Artificial
  Probe
tctactatatcactggtgagagcaa

SEQ ID NO: 48121 - DNA, 25 bp, Artificial
  Probe
aagtccatctactatatcactggtg

SEQ ID NO: 48122 - DNA, 25 bp, Artificial
  Probe
agtccatctactatatcactggtga

SEQ ID NO: 48123 - DNA, 25 bp, Artificial
  Probe
tccatctactatatcactggtgaga

SEQ ID NO: 48124 - DNA, 25 bp, Artificial
  Probe
gtccatctactatatcactggtgag

SEQ ID NO: 48125 - DNA, 25 bp, Artificial
  Probe
ccatctactatatcactggtgagag

SEQ ID NO: 48126 - DNA, 25 bp, Artificial
  Probe
aaagtgactatctccaataggcttg

SEQ ID NO: 48127 - DNA, 25 bp, Artificial
  Probe
tatacatgactgagcccattgatga

SEQ ID NO: 48128 - DNA, 25 bp, Artificial
  Probe
aaacattgtgaagaagtgccttgag

SEQ ID NO: 48129 - DNA, 25 bp, Artificial
  Probe
tactatatcactggtgagagcaaag

SEQ ID NO: 48130 - DNA, 25 bp, Artificial
  Probe
ctactatatcactggtgagagcaaa

SEQ ID NO: 48131 - DNA, 25 bp, Artificial
  Probe
ctatatcactggtgagagcaaagag

SEQ ID NO: 48132 - DNA, 25 bp, Artificial
  Probe
actatatcactggtgagagcaaaga

SEQ ID NO: 48133 - DNA, 25 bp, Artificial
  Probe
gtcagagtatgtgtctcgcatgaag

SEQ ID NO: 48134 - DNA, 25 bp, Artificial
  Probe
cttcgctaccatacctctcagtctg

SEQ ID NO: 48135 - DNA, 25 bp, Artificial
  Probe
ctttgaggtggtatacatgactgag

SEQ ID NO: 48136 - DNA, 25 bp, Artificial
  Probe
atacatgactgagcccattgatgag

SEQ ID NO: 48137 - DNA, 25 bp, Artificial
  Probe
ctgtcagagtatgtgtctcgcatga

SEQ ID NO: 48138 - DNA, 25 bp, Artificial
  Probe
aacattgtgaagaagtgccttgagc

SEQ ID NO: 48139 - DNA, 25 bp, Artificial
  Probe
tatatcactggtgagagcaaagagc

SEQ ID NO: 48140 - DNA, 25 bp, Artificial
  Probe
gtatacatgactgagcccattgatg

SEQ ID NO: 48141 - DNA, 25 bp, Artificial
  Probe
tgtcagagtatgtgtctcgcatgaa

SEQ ID NO: 48142 - DNA, 25 bp, Artificial
  Probe
agagtatgtgtctcgcatgaaggag

SEQ ID NO: 48143 - DNA, 25 bp, Artificial
  Probe
acttccctgtcagagtatgtgtctc

SEQ ID NO: 48144 - DNA, 25 bp, Artificial
  Probe
ctaccatacctctcagtctggagat

SEQ ID NO: 48145 - DNA, 25 bp, Artificial
  Probe
tttgaggtggtatacatgactgagc

SEQ ID NO: 48146 - DNA, 25 bp, Artificial
  Probe
gctttgaggtggtatacatgactga

SEQ ID NO: 48147 - DNA, 25 bp, Artificial
  Probe
ggtatacatgactgagcccattgat

SEQ ID NO: 48148 - DNA, 25 bp, Artificial
  Probe
ctcagtctggagatgagatgacttc

SEQ ID NO: 48149 - DNA, 25 bp, Artificial
  Probe
catgaaggagatcttggacaagaag

SEQ ID NO: 48150 - DNA, 25 bp, Artificial
  Probe
taccatacctctcagtctggagatg

SEQ ID NO: 48151 - DNA, 25 bp, Artificial
  Probe
gacttccctgtcagagtatgtgtct

SEQ ID NO: 48152 - DNA, 25 bp, Artificial
  Probe
aaaagtgactatctccaataggctt

SEQ ID NO: 48153 - DNA, 25 bp, Artificial
  Probe
cagagtatgtgtctcgcatgaagga

SEQ ID NO: 48154 - DNA, 25 bp, Artificial
  Probe
tcagagtatgtgtctcgcatgaagg

SEQ ID NO: 48155 - DNA, 25 bp, Artificial
  Probe
ttgaggtggtatacatgactgagcc

SEQ ID NO: 48156 - DNA, 25 bp, Artificial
  Probe
ccttcgctaccatacctctcagtct

SEQ ID NO: 48157 - DNA, 25 bp, Artificial
  Probe
tccttcgctaccatacctctcagtc

SEQ ID NO: 48158 - DNA, 25 bp, Artificial
  Probe
ctccttcgctaccatacctctcagt

SEQ ID NO: 48159 - DNA, 25 bp, Artificial
  Probe
catgactgagcccattgatgagtac

SEQ ID NO: 48160 - DNA, 25 bp, Artificial
  Probe
cagagcaagatcctgaaagtcatcc

SEQ ID NO: 48161 - DNA, 25 bp, Artificial
  Probe
aaaacattgtgaagaagtgccttga

SEQ ID NO: 48162 - DNA, 25 bp, Artificial
  Probe
tatatgggctctcctctctttagtc

SEQ ID NO: 48163 - DNA, 25 bp, Artificial
  Probe
tcctctctttagtcctactcagttt

SEQ ID NO: 48164 - DNA, 25 bp, Artificial
  Probe
ctttagtcctactcagtttcacaga

SEQ ID NO: 48165 - DNA, 25 bp, Artificial
  Probe
tctttagtcctactcagtttcacag

SEQ ID NO: 48166 - DNA, 25 bp, Artificial
  Probe
ctctttagtcctactcagtttcaca

SEQ ID NO: 48167 - DNA, 25 bp, Artificial
  Probe
cctctctttagtcctactcagtttc

SEQ ID NO: 48168 - DNA, 25 bp, Artificial
  Probe
tctctttagtcctactcagtttcac

SEQ ID NO: 48169 - DNA, 25 bp, Artificial
  Probe
ctcctctctttagtcctactcagtt

SEQ ID NO: 48170 - DNA, 25 bp, Artificial
  Probe
ctctcctctctttagtcctactcag

SEQ ID NO: 48171 - DNA, 25 bp, Artificial
  Probe
atatatgggctctcctctctttagt

SEQ ID NO: 48172 - DNA, 25 bp, Artificial
  Probe
tagtcctactcagtttcacagagaa

SEQ ID NO: 48173 - DNA, 25 bp, Artificial
  Probe
ttagtcctactcagtttcacagaga

SEQ ID NO: 48174 - DNA, 25 bp, Artificial
  Probe
tttagtcctactcagtttcacagag

SEQ ID NO: 48175 - DNA, 25 bp, Artificial
  Probe
ctctctttagtcctactcagtttca

SEQ ID NO: 48176 - DNA, 25 bp, Artificial
  Probe
tctcctctctttagtcctactcagt

SEQ ID NO: 48177 - DNA, 25 bp, Artificial
  Probe
gtttaatatatgggctctcctctct

SEQ ID NO: 48178 - DNA, 25 bp, Artificial
  Probe
agtttaatatatgggctctcctctc

SEQ ID NO: 48179 - DNA, 25 bp, Artificial
  Probe
aatatatgggctctcctctctttag

SEQ ID NO: 48180 - DNA, 25 bp, Artificial
  Probe
agactacttcggtttcagagacttg

SEQ ID NO: 48181 - DNA, 25 bp, Artificial
  Probe
ttaatatatgggctctcctctcttt

SEQ ID NO: 48182 - DNA, 25 bp, Artificial
  Probe
tttaatatatgggctctcctctctt

SEQ ID NO: 48183 - DNA, 25 bp, Artificial
  Probe
gagtttaatatatgggctctcctct

SEQ ID NO: 48184 - DNA, 25 bp, Artificial
  Probe
atatgggctctcctctctttagtcc

SEQ ID NO: 48185 - DNA, 25 bp, Artificial
  Probe
gctctcctctctttagtcctactca

SEQ ID NO: 48186 - DNA, 25 bp, Artificial
  Probe
taatatatgggctctcctctcttta

SEQ ID NO: 48187 - DNA, 25 bp, Artificial
  Probe
gactacttcggtttcagagacttgg

SEQ ID NO: 48188 - DNA, 25 bp, Artificial
  Probe
agtcctactcagtttcacagagaaa

SEQ ID NO: 48189 - DNA, 25 bp, Artificial
  Probe
ggctctcctctctttagtcctactc

SEQ ID NO: 48190 - DNA, 25 bp, Artificial
  Probe
atgggctctcctctctttagtccta

SEQ ID NO: 48191 - DNA, 25 bp, Artificial
  Probe
tatgggctctcctctctttagtcct

SEQ ID NO: 48192 - DNA, 25 bp, Artificial
  Probe
agtcatacatctcggcagaagctag

SEQ ID NO: 48193 - DNA, 25 bp, Artificial
  Probe
cagtcatacatctcggcagaagcta

SEQ ID NO: 48194 - DNA, 25 bp, Artificial
  Probe
ctcatctcctgggataagacctgtg

SEQ ID NO: 48195 - DNA, 25 bp, Artificial
  Probe
gtgacctcatctcctgggataagac

SEQ ID NO: 48196 - DNA, 25 bp, Artificial
  Probe
actacttcggtttcagagacttggg

SEQ ID NO: 48197 - DNA, 25 bp, Artificial
  Probe
agagtttaatatatgggctctcctc

SEQ ID NO: 48198 - DNA, 25 bp, Artificial
  Probe
catctcctgggataagacctgtgac

SEQ ID NO: 48199 - DNA, 25 bp, Artificial
  Probe
aagagtttaatatatgggctctcct

SEQ ID NO: 48200 - DNA, 25 bp, Artificial
  Probe
tgggctctcctctctttagtcctac

SEQ ID NO: 48201 - DNA, 25 bp, Artificial
  Probe
tcatctcctgggataagacctgtga

SEQ ID NO: 48202 - DNA, 25 bp, Artificial
  Probe
gggctctcctctctttagtcctact

SEQ ID NO: 48203 - DNA, 25 bp, Artificial
  Probe
gagcagtcatacatctcggcagaag

SEQ ID NO: 48204 - DNA, 25 bp, Artificial
  Probe
cctactcagtttcacagagaaaaga

SEQ ID NO: 48205 - DNA, 25 bp, Artificial
  Probe
tcctactcagtttcacagagaaaag

SEQ ID NO: 48206 - DNA, 25 bp, Artificial
  Probe
gtcctactcagtttcacagagaaaa

SEQ ID NO: 48207 - DNA, 25 bp, Artificial
  Probe
cctggtagaactgaatcaatgtgta

SEQ ID NO: 48208 - DNA, 25 bp, Artificial
  Probe
atgtctaatgatgccatatagcctt

SEQ ID NO: 48209 - DNA, 25 bp, Artificial
  Probe
caataacttacagcctggtagaact

SEQ ID NO: 48210 - DNA, 25 bp, Artificial
  Probe
tggtagaactgaatcaatgtgtaag

SEQ ID NO: 48211 - DNA, 25 bp, Artificial
  Probe
ctggtagaactgaatcaatgtgtaa

SEQ ID NO: 48212 - DNA, 25 bp, Artificial
  Probe
ggtagaactgaatcaatgtgtaaga

SEQ ID NO: 48213 - DNA, 25 bp, Artificial
  Probe
atgccgctgatactcataacttata

SEQ ID NO: 48214 - DNA, 25 bp, Artificial
  Probe
tggagagaaggacagatactaggaa

SEQ ID NO: 48215 - DNA, 25 bp, Artificial
  Probe
aataacttacagcctggtagaactg

SEQ ID NO: 48216 - DNA, 25 bp, Artificial
  Probe
ataacttacagcctggtagaactga

SEQ ID NO: 48217 - DNA, 25 bp, Artificial
  Probe
ctatgccgctgatactcataactta

SEQ ID NO: 48218 - DNA, 25 bp, Artificial
  Probe
tatgccgctgatactcataacttat

SEQ ID NO: 48219 - DNA, 25 bp, Artificial
  Probe
taacttacagcctggtagaactgaa

SEQ ID NO: 48220 - DNA, 25 bp, Artificial
  Probe
gcatcctgtataagcatgtaacatc

SEQ ID NO: 48221 - DNA, 25 bp, Artificial
  Probe
agcatcctgtataagcatgtaacat

SEQ ID NO: 48222 - DNA, 25 bp, Artificial
  Probe
tacagcctggtagaactgaatcaat

SEQ ID NO: 48223 - DNA, 25 bp, Artificial
  Probe
agaactgaatcaatgtgtaagaatg

SEQ ID NO: 48224 - DNA, 25 bp, Artificial
  Probe
tatgtctaatgatgccatatagcct

SEQ ID NO: 48225 - DNA, 25 bp, Artificial
  Probe
tcctgtataagcatgtaacatcact

SEQ ID NO: 48226 - DNA, 25 bp, Artificial
  Probe
cctgtataagcatgtaacatcactc

SEQ ID NO: 48227 - DNA, 25 bp, Artificial
  Probe
ttacagcctggtagaactgaatcaa

SEQ ID NO: 48228 - DNA, 25 bp, Artificial
  Probe
aacttacagcctggtagaactgaat

SEQ ID NO: 48229 - DNA, 25 bp, Artificial
  Probe
caggttatgtctaatgatgccatat

SEQ ID NO: 48230 - DNA, 25 bp, Artificial
  Probe
cagcatcctgtataagcatgtaaca

SEQ ID NO: 48231 - DNA, 25 bp, Artificial
  Probe
ctgtataagcatgtaacatcactca

SEQ ID NO: 48232 - DNA, 25 bp, Artificial
  Probe
atcctgtataagcatgtaacatcac

SEQ ID NO: 48233 - DNA, 25 bp, Artificial
  Probe
catcctgtataagcatgtaacatca

SEQ ID NO: 48234 - DNA, 25 bp, Artificial
  Probe
ttatgtctaatgatgccatatagcc

SEQ ID NO: 48235 - DNA, 25 bp, Artificial
  Probe
ccaataacttacagcctggtagaac

SEQ ID NO: 48236 - DNA, 25 bp, Artificial
  Probe
cttacagcctggtagaactgaatca

SEQ ID NO: 48237 - DNA, 25 bp, Artificial
  Probe
acttacagcctggtagaactgaatc

SEQ ID NO: 48238 - DNA, 25 bp, Artificial
  Probe
agcctggtagaactgaatcaatgtg

SEQ ID NO: 48239 - DNA, 25 bp, Artificial
  Probe
tgtctaatgatgccatatagccttt

SEQ ID NO: 48240 - DNA, 25 bp, Artificial
  Probe
gtagaactgaatcaatgtgtaagaa

SEQ ID NO: 48241 - DNA, 25 bp, Artificial
  Probe
gtctaatgatgccatatagcctttg

SEQ ID NO: 48242 - DNA, 25 bp, Artificial
  Probe
tgtataagcatgtaacatcactcaa

SEQ ID NO: 48243 - DNA, 25 bp, Artificial
  Probe
ccagcatcctgtataagcatgtaac

SEQ ID NO: 48244 - DNA, 25 bp, Artificial
  Probe
ggttctcatctccataaagacacat

SEQ ID NO: 48245 - DNA, 25 bp, Artificial
  Probe
gcctggtagaactgaatcaatgtgt

SEQ ID NO: 48246 - DNA, 25 bp, Artificial
  Probe
ggagagaaggacagatactaggaaa

SEQ ID NO: 48247 - DNA, 25 bp, Artificial
  Probe
tctaatgatgccatatagcctttgc

SEQ ID NO: 48248 - DNA, 25 bp, Artificial
  Probe
caggttctcatctccataaagacac

SEQ ID NO: 48249 - DNA, 25 bp, Artificial
  Probe
accatgttccaagatgaggatactt

SEQ ID NO: 48250 - DNA, 25 bp, Artificial
  Probe
aaccatgttccaagatgaggatact

SEQ ID NO: 48251 - DNA, 25 bp, Artificial
  Probe
aggttctcatctccataaagacaca

SEQ ID NO: 48252 - DNA, 25 bp, Artificial
  Probe
tcctactattaagacgaccatctct

SEQ ID NO: 48253 - DNA, 25 bp, Artificial
  Probe
cgtattgaaggacttattgagagag

SEQ ID NO: 48254 - DNA, 25 bp, Artificial
  Probe
atagtgcggataatgaagtctagga

SEQ ID NO: 48255 - DNA, 25 bp, Artificial
  Probe
tatagtgcggataatgaagtctagg

SEQ ID NO: 48256 - DNA, 25 bp, Artificial
  Probe
cgattcttaccaagtccagttgtta

SEQ ID NO: 48257 - DNA, 25 bp, Artificial
  Probe
atgttatagaccactcagatcaagc

SEQ ID NO: 48258 - DNA, 25 bp, Artificial
  Probe
gattcttaccaagtccagttgttat

SEQ ID NO: 48259 - DNA, 25 bp, Artificial
  Probe
ttatagaccactcagatcaagcctc

SEQ ID NO: 48260 - DNA, 25 bp, Artificial
  Probe
attcttaccaagtccagttgttatt

SEQ ID NO: 48261 - DNA, 25 bp, Artificial
  Probe
tattcttggactgtactcttcgcat

SEQ ID NO: 48262 - DNA, 25 bp, Artificial
  Probe
catgttatagaccactcagatcaag

SEQ ID NO: 48263 - DNA, 25 bp, Artificial
  Probe
gttatagaccactcagatcaagcct

SEQ ID NO: 48264 - DNA, 25 bp, Artificial
  Probe
ttattcttggactgtactcttcgca

SEQ ID NO: 48265 - DNA, 25 bp, Artificial
  Probe
tgttatagaccactcagatcaagcc

SEQ ID NO: 48266 - DNA, 25 bp, Artificial
  Probe
gtattgaaggacttattgagagaga

SEQ ID NO: 48267 - DNA, 25 bp, Artificial
  Probe
taccaagtccagttgttattaagaa

SEQ ID NO: 48268 - DNA, 25 bp, Artificial
  Probe
ttaccaagtccagttgttattaaga

SEQ ID NO: 48269 - DNA, 25 bp, Artificial
  Probe
tcttaccaagtccagttgttattaa

SEQ ID NO: 48270 - DNA, 25 bp, Artificial
  Probe
ttcttaccaagtccagttgttatta

SEQ ID NO: 48271 - DNA, 25 bp, Artificial
  Probe
ttagtagcagaggtaactcagcaac

SEQ ID NO: 48272 - DNA, 25 bp, Artificial
  Probe
attgaaggacttattgagagagaat

SEQ ID NO: 48273 - DNA, 25 bp, Artificial
  Probe
tatagaccactcagatcaagcctct

SEQ ID NO: 48274 - DNA, 25 bp, Artificial
  Probe
acaagacagaaagtagatgatgaca

SEQ ID NO: 48275 - DNA, 25 bp, Artificial
  Probe
acgtattgaaggacttattgagaga

SEQ ID NO: 48276 - DNA, 25 bp, Artificial
  Probe
agacagaaagtagatgatgacagaa

SEQ ID NO: 48277 - DNA, 25 bp, Artificial
  Probe
aagacagaaagtagatgatgacaga

SEQ ID NO: 48278 - DNA, 25 bp, Artificial
  Probe
caagacagaaagtagatgatgacag

SEQ ID NO: 48279 - DNA, 25 bp, Artificial
  Probe
gacgaccatctcttctgttaaattg

SEQ ID NO: 48280 - DNA, 25 bp, Artificial
  Probe
ggaaagaaacaagacagaaagtaga

SEQ ID NO: 48281 - DNA, 25 bp, Artificial
  Probe
aggaaagaaacaagacagaaagtag

SEQ ID NO: 48282 - DNA, 25 bp, Artificial
  Probe
aacgtattgaaggacttattgagag

SEQ ID NO: 48283 - DNA, 25 bp, Artificial
  Probe
aacaagacagaaagtagatgatgac

SEQ ID NO: 48284 - DNA, 25 bp, Artificial
  Probe
agacgaccatctcttctgttaaatt

SEQ ID NO: 48285 - DNA, 25 bp, Artificial
  Probe
atatgtaaacagcatttgggacctt

SEQ ID NO: 48286 - DNA, 25 bp, Artificial
  Probe
aatatgtaaacagcatttgggacct

SEQ ID NO: 48287 - DNA, 25 bp, Artificial
  Probe
tattgaaggacttattgagagagaa

SEQ ID NO: 48288 - DNA, 25 bp, Artificial
  Probe
gacagaaagtagatgatgacagaaa

SEQ ID NO: 48289 - DNA, 25 bp, Artificial
  Probe
cttaccaagtccagttgttattaag

SEQ ID NO: 48290 - DNA, 25 bp, Artificial
  Probe
ctattaagacgaccatctcttctgt

SEQ ID NO: 48291 - DNA, 25 bp, Artificial
  Probe
actattaagacgaccatctcttctg

SEQ ID NO: 48292 - DNA, 25 bp, Artificial
  Probe
tagtagcagaggtaactcagcaact

SEQ ID NO: 48293 - DNA, 25 bp, Artificial
  Probe
ttaagacgaccatctcttctgttaa

SEQ ID NO: 48294 - DNA, 25 bp, Artificial
  Probe
attaagacgaccatctcttctgtta

SEQ ID NO: 48295 - DNA, 25 bp, Artificial
  Probe
tattaagacgaccatctcttctgtt

SEQ ID NO: 48296 - DNA, 25 bp, Artificial
  Probe
cctactattaagacgaccatctctt

SEQ ID NO: 48297 - DNA, 25 bp, Artificial
  Probe
aataagtcgtccttaactgacatca

SEQ ID NO: 48298 - DNA, 25 bp, Artificial
  Probe
gagaagccttatcaatgtcaggaat

SEQ ID NO: 48299 - DNA, 25 bp, Artificial
  Probe
agaagccttatcaatgtcaggaatg

SEQ ID NO: 48300 - DNA, 25 bp, Artificial
  Probe
ttaactgacatcagagaacacactt

SEQ ID NO: 48301 - DNA, 25 bp, Artificial
  Probe
ataagtcgtccttaactgacatcag

SEQ ID NO: 48302 - DNA, 25 bp, Artificial
  Probe
cttaactgacatcagagaacacact

SEQ ID NO: 48303 - DNA, 25 bp, Artificial
  Probe
taataagtcgtccttaactgacatc

SEQ ID NO: 48304 - DNA, 25 bp, Artificial
  Probe
taagtcgtccttaactgacatcaga

SEQ ID NO: 48305 - DNA, 25 bp, Artificial
  Probe
gtccttaactgacatcagagaacac

SEQ ID NO: 48306 - DNA, 25 bp, Artificial
  Probe
ccttaactgacatcagagaacacac

SEQ ID NO: 48307 - DNA, 25 bp, Artificial
  Probe
tccttaactgacatcagagaacaca

SEQ ID NO: 48308 - DNA, 25 bp, Artificial
  Probe
ttatcaatgtcaggaatgcaggaag

SEQ ID NO: 48309 - DNA, 25 bp, Artificial
  Probe
cttatcaatgtcaggaatgcaggaa

SEQ ID NO: 48310 - DNA, 25 bp, Artificial
  Probe
ttaataagtcgtccttaactgacat

SEQ ID NO: 48311 - DNA, 25 bp, Artificial
  Probe
cctgaagatataggagacagtagta

SEQ ID NO: 48312 - DNA, 25 bp, Artificial
  Probe
ggagaagccttatgagtgtaaagac

SEQ ID NO: 48313 - DNA, 25 bp, Artificial
  Probe
gaagccttatcaatgtcaggaatgc

SEQ ID NO: 48314 - DNA, 25 bp, Artificial
  Probe
gagaagccttatgagtgtaaagact

SEQ ID NO: 48315 - DNA, 25 bp, Artificial
  Probe
tatgagtgtaaagactgtgggaaag

SEQ ID NO: 48316 - DNA, 25 bp, Artificial
  Probe
ttatgagtgtaaagactgtgggaaa

SEQ ID NO: 48317 - DNA, 25 bp, Artificial
  Probe
cttatgagtgtaaagactgtgggaa

SEQ ID NO: 48318 - DNA, 25 bp, Artificial
  Probe
agaagccttatgagtgtaaagactg

SEQ ID NO: 48319 - DNA, 25 bp, Artificial
  Probe
gaagccttatgagtgtaaagactgt

SEQ ID NO: 48320 - DNA, 25 bp, Artificial
  Probe
ggagaagccttatcaatgtcaggaa

SEQ ID NO: 48321 - DNA, 25 bp, Artificial
  Probe
aatatgaactcactcggcatcacag

SEQ ID NO: 48322 - DNA, 25 bp, Artificial
  Probe
aagccttatgagtgtaaagactgtg

SEQ ID NO: 48323 - DNA, 25 bp, Artificial
  Probe
tcgtccttaactgacatcagagaac

SEQ ID NO: 48324 - DNA, 25 bp, Artificial
  Probe
gtcgtccttaactgacatcagagaa

SEQ ID NO: 48325 - DNA, 25 bp, Artificial
  Probe
aagtcgtccttaactgacatcagag

SEQ ID NO: 48326 - DNA, 25 bp, Artificial
  Probe
gggagaagccttatgagtgtaaaga

SEQ ID NO: 48327 - DNA, 25 bp, Artificial
  Probe
cgtccttaactgacatcagagaaca

SEQ ID NO: 48328 - DNA, 25 bp, Artificial
  Probe
catacagatgacaaaccctgaagat

SEQ ID NO: 48329 - DNA, 25 bp, Artificial
  Probe
acagatgacaaaccctgaagatata

SEQ ID NO: 48330 - DNA, 25 bp, Artificial
  Probe
tacagatgacaaaccctgaagatat

SEQ ID NO: 48331 - DNA, 25 bp, Artificial
  Probe
atacagatgacaaaccctgaagata

SEQ ID NO: 48332 - DNA, 25 bp, Artificial
  Probe
ccctgaagatataggagacagtagt

SEQ ID NO: 48333 - DNA, 25 bp, Artificial
  Probe
accctgaagatataggagacagtag

SEQ ID NO: 48334 - DNA, 25 bp, Artificial
  Probe
aaccctgaagatataggagacagta

SEQ ID NO: 48335 - DNA, 25 bp, Artificial
  Probe
caaaccctgaagatataggagacag

SEQ ID NO: 48336 - DNA, 25 bp, Artificial
  Probe
gacaaaccctgaagatataggagac

SEQ ID NO: 48337 - DNA, 25 bp, Artificial
  Probe
ccttatgagtgtaaagactgtggga

SEQ ID NO: 48338 - DNA, 25 bp, Artificial
  Probe
aaaccctgaagatataggagacagt

SEQ ID NO: 48339 - DNA, 25 bp, Artificial
  Probe
tgacaaaccctgaagatataggaga

SEQ ID NO: 48340 - DNA, 25 bp, Artificial
  Probe
atgacaaaccctgaagatataggag

SEQ ID NO: 48341 - DNA, 25 bp, Artificial
  Probe
gatgacaaaccctgaagatatagga

SEQ ID NO: 48342 - DNA, 25 bp, Artificial
  Probe
gtttgaattacatcttagcccagaa

SEQ ID NO: 48343 - DNA, 25 bp, Artificial
  Probe
tttgaattacatcttagcccagaag

SEQ ID NO: 48344 - DNA, 25 bp, Artificial
  Probe
ttgaattacatcttagcccagaagc

SEQ ID NO: 48345 - DNA, 25 bp, Artificial
  Probe
tgtttgaattacatcttagcccaga

SEQ ID NO: 48346 - DNA, 25 bp, Artificial
  Probe
ctgtttgaattacatcttagcccag

SEQ ID NO: 48347 - DNA, 25 bp, Artificial
  Probe
tgaattacatcttagcccagaagcc

SEQ ID NO: 48348 - DNA, 25 bp, Artificial
  Probe
gaattacatcttagcccagaagccc

SEQ ID NO: 48349 - DNA, 25 bp, Artificial
  Probe
gctgtttgaattacatcttagccca

SEQ ID NO: 48350 - DNA, 25 bp, Artificial
  Probe
cgctgtttgaattacatcttagccc

SEQ ID NO: 48351 - DNA, 25 bp, Artificial
  Probe
agctcactagtctagcagaagatct

SEQ ID NO: 48352 - DNA, 25 bp, Artificial
  Probe
aattacatcttagcccagaagcccg

SEQ ID NO: 48353 - DNA, 25 bp, Artificial
  Probe
gctcactagtctagcagaagatctg

SEQ ID NO: 48354 - DNA, 25 bp, Artificial
  Probe
gagctcactagtctagcagaagatc

SEQ ID NO: 48355 - DNA, 25 bp, Artificial
  Probe
gaggagaacgagctcactagtctag

SEQ ID NO: 48356 - DNA, 25 bp, Artificial
  Probe
gcgctgtttgaattacatcttagcc

SEQ ID NO: 48357 - DNA, 25 bp, Artificial
  Probe
cgagctcactagtctagcagaagat

SEQ ID NO: 48358 - DNA, 25 bp, Artificial
  Probe
ctggaggatgagttctgcaaactga

SEQ ID NO: 48359 - DNA, 25 bp, Artificial
  Probe
ggaggagaacgagctcactagtcta

SEQ ID NO: 48360 - DNA, 25 bp, Artificial
  Probe
gatgagttctgcaaactgacgtgtg

SEQ ID NO: 48361 - DNA, 25 bp, Artificial
  Probe
aacgagctcactagtctagcagaag

SEQ ID NO: 48362 - DNA, 25 bp, Artificial
  Probe
gaacgagctcactagtctagcagaa

SEQ ID NO: 48363 - DNA, 25 bp, Artificial
  Probe
tggaggatgagttctgcaaactgac

SEQ ID NO: 48364 - DNA, 25 bp, Artificial
  Probe
gagaacgagctcactagtctagcag

SEQ ID NO: 48365 - DNA, 25 bp, Artificial
  Probe
atgagttctgcaaactgacgtgtga

SEQ ID NO: 48366 - DNA, 25 bp, Artificial
  Probe
gaggatgagttctgcaaactgacgt

SEQ ID NO: 48367 - DNA, 25 bp, Artificial
  Probe
acgagctcactagtctagcagaaga

SEQ ID NO: 48368 - DNA, 25 bp, Artificial
  Probe
agaacgagctcactagtctagcaga

SEQ ID NO: 48369 - DNA, 25 bp, Artificial
  Probe
aggagaacgagctcactagtctagc

SEQ ID NO: 48370 - DNA, 25 bp, Artificial
  Probe
gcagtgtataatggagtatagttca

SEQ ID NO: 48371 - DNA, 25 bp, Artificial
  Probe
tatcaccatattcaccaaccagcat

SEQ ID NO: 48372 - DNA, 25 bp, Artificial
  Probe
ttatcaccatattcaccaaccagca

SEQ ID NO: 48373 - DNA, 25 bp, Artificial
  Probe
atgccttaataggtctgtgttgtaa

SEQ ID NO: 48374 - DNA, 25 bp, Artificial
  Probe
aatgccttaataggtctgtgttgta

SEQ ID NO: 48375 - DNA, 25 bp, Artificial
  Probe
gcattgctatagtcagtcatcttgt

SEQ ID NO: 48376 - DNA, 25 bp, Artificial
  Probe
cattgctatagtcagtcatcttgtt

SEQ ID NO: 48377 - DNA, 25 bp, Artificial
  Probe
gaaggcattgctatagtcagtcatc

SEQ ID NO: 48378 - DNA, 25 bp, Artificial
  Probe
gcaaagacattattaaggatggtgg

SEQ ID NO: 48379 - DNA, 25 bp, Artificial
  Probe
aaagacattattaaggatggtggga

SEQ ID NO: 48380 - DNA, 25 bp, Artificial
  Probe
caaagacattattaaggatggtggg

SEQ ID NO: 48381 - DNA, 25 bp, Artificial
  Probe
gcagcttgtaagacattctctctaa

SEQ ID NO: 48382 - DNA, 25 bp, Artificial
  Probe
gcattgtagggtcctgaaatagatt

SEQ ID NO: 48383 - DNA, 25 bp, Artificial
  Probe
aagacattattaaggatggtgggat

SEQ ID NO: 48384 - DNA, 25 bp, Artificial
  Probe
ggcattgctatagtcagtcatcttg

SEQ ID NO: 48385 - DNA, 25 bp, Artificial
  Probe
tttatcaccatattcaccaaccagc

SEQ ID NO: 48386 - DNA, 25 bp, Artificial
  Probe
aggcattgctatagtcagtcatctt

SEQ ID NO: 48387 - DNA, 25 bp, Artificial
  Probe
aaggcattgctatagtcagtcatct

SEQ ID NO: 48388 - DNA, 25 bp, Artificial
  Probe
agaaggcattgctatagtcagtcat

SEQ ID NO: 48389 - DNA, 25 bp, Artificial
  Probe
agcagcttgtaagacattctctcta

SEQ ID NO: 48390 - DNA, 25 bp, Artificial
  Probe
agaagttaatttatgctcaagtggt

SEQ ID NO: 48391 - DNA, 25 bp, Artificial
  Probe
gacattattaaggatggtgggatac

SEQ ID NO: 48392 - DNA, 25 bp, Artificial
  Probe
agacattattaaggatggtgggata

SEQ ID NO: 48393 - DNA, 25 bp, Artificial
  Probe
cattgtagggtcctgaaatagattt

SEQ ID NO: 48394 - DNA, 25 bp, Artificial
  Probe
gtagaatgtacttaggcattgtagg

SEQ ID NO: 48395 - DNA, 25 bp, Artificial
  Probe
cagcttgtaagacattctctctaat

SEQ ID NO: 48396 - DNA, 25 bp, Artificial
  Probe
tgcagtgtataatggagtatagttc

SEQ ID NO: 48397 - DNA, 25 bp, Artificial
  Probe
gcttgtaagacattctctctaatac

SEQ ID NO: 48398 - DNA, 25 bp, Artificial
  Probe
ggcttacatagatgactgtgtttca

SEQ ID NO: 48399 - DNA, 25 bp, Artificial
  Probe
aacaatgcttatatttgagttctgc

SEQ ID NO: 48400 - DNA, 25 bp, Artificial
  Probe
tcctggcagtagattgtgtggtatt

SEQ ID NO: 48401 - DNA, 25 bp, Artificial
  Probe
ttcctggcagtagattgtgtggtat

SEQ ID NO: 48402 - DNA, 25 bp, Artificial
  Probe
tgccttaataggtctgtgttgtaaa

SEQ ID NO: 48403 - DNA, 25 bp, Artificial
  Probe
cagaaggcattgctatagtcagtca

SEQ ID NO: 48404 - DNA, 25 bp, Artificial
  Probe
acagaaggcattgctatagtcagtc

SEQ ID NO: 48405 - DNA, 25 bp, Artificial
  Probe
taaggattgccctgtaaacataaca

SEQ ID NO: 48406 - DNA, 25 bp, Artificial
  Probe
ctaaggattgccctgtaaacataac

SEQ ID NO: 48407 - DNA, 25 bp, Artificial
  Probe
tctaaggattgccctgtaaacataa

SEQ ID NO: 48408 - DNA, 25 bp, Artificial
  Probe
atctaaggattgccctgtaaacata

SEQ ID NO: 48409 - DNA, 25 bp, Artificial
  Probe
aaatgccttaataggtctgtgttgt

SEQ ID NO: 48410 - DNA, 25 bp, Artificial
  Probe
gggcttacatagatgactgtgtttc

SEQ ID NO: 48411 - DNA, 25 bp, Artificial
  Probe
ggcattgtagggtcctgaaatagat

SEQ ID NO: 48412 - DNA, 25 bp, Artificial
  Probe
gccttaataggtctgtgttgtaaat

SEQ ID NO: 48413 - DNA, 25 bp, Artificial
  Probe
cacagaaggcattgctatagtcagt

SEQ ID NO: 48414 - DNA, 25 bp, Artificial
  Probe
gagcagcttgtaagacattctctct

SEQ ID NO: 48415 - DNA, 25 bp, Artificial
  Probe
ctttctgaaggagacaaggactgag

SEQ ID NO: 48416 - DNA, 25 bp, Artificial
  Probe
taagttgactgaaccactgcctgat

SEQ ID NO: 48417 - DNA, 25 bp, Artificial
  Probe
ttaagttgactgaaccactgcctga

SEQ ID NO: 48418 - DNA, 25 bp, Artificial
  Probe
ctatccgtgtcactttaaacagcat

SEQ ID NO: 48419 - DNA, 25 bp, Artificial
  Probe
tatccgtgtcactttaaacagcatg

SEQ ID NO: 48420 - DNA, 25 bp, Artificial
  Probe
tttaagttgactgaaccactgcctg

SEQ ID NO: 48421 - DNA, 25 bp, Artificial
  Probe
tttctgaaggagacaaggactgagg

SEQ ID NO: 48422 - DNA, 25 bp, Artificial
  Probe
gattccccaattcactgacaaatga

SEQ ID NO: 48423 - DNA, 25 bp, Artificial
  Probe
tgattccccaattcactgacaaatg

SEQ ID NO: 48424 - DNA, 25 bp, Artificial
  Probe
atgctgctttgttaagttgctgtca

SEQ ID NO: 48425 - DNA, 25 bp, Artificial
  Probe
catgctgctttgttaagttgctgtc

SEQ ID NO: 48426 - DNA, 25 bp, Artificial
  Probe
tgcttctttcttatgcagaatttca

SEQ ID NO: 48427 - DNA, 25 bp, Artificial
  Probe
gctttctgaaggagacaaggactga

SEQ ID NO: 48428 - DNA, 25 bp, Artificial
  Probe
gcttctttcttatgcagaatttcat

SEQ ID NO: 48429 - DNA, 25 bp, Artificial
  Probe
aactggtgctttctgaaggagacaa

SEQ ID NO: 48430 - DNA, 25 bp, Artificial
  Probe
aaagaactggtgctttctgaaggag

SEQ ID NO: 48431 - DNA, 25 bp, Artificial
  Probe
ttttaagttgactgaaccactgcct

SEQ ID NO: 48432 - DNA, 25 bp, Artificial
  Probe
tgctttctgaaggagacaaggactg

SEQ ID NO: 48433 - DNA, 25 bp, Artificial
  Probe
gtgctttctgaaggagacaaggact

SEQ ID NO: 48434 - DNA, 25 bp, Artificial
  Probe
gattgactcctcagactggcaaagt

SEQ ID NO: 48435 - DNA, 25 bp, Artificial
  Probe
actggtgctttctgaaggagacaag

SEQ ID NO: 48436 - DNA, 25 bp, Artificial
  Probe
gaactggtgctttctgaaggagaca

SEQ ID NO: 48437 - DNA, 25 bp, Artificial
  Probe
tgctgctttgttaagttgctgtcag

SEQ ID NO: 48438 - DNA, 25 bp, Artificial
  Probe
ttgactgaaccactgcctgatgttt

SEQ ID NO: 48439 - DNA, 25 bp, Artificial
  Probe
aagaactggtgctttctgaaggaga

SEQ ID NO: 48440 - DNA, 25 bp, Artificial
  Probe
ctttcttatgcagaatttcatttgt

SEQ ID NO: 48441 - DNA, 25 bp, Artificial
  Probe
gctatccgtgtcactttaaacagca

SEQ ID NO: 48442 - DNA, 25 bp, Artificial
  Probe
tctttcttatgcagaatttcatttg

SEQ ID NO: 48443 - DNA, 25 bp, Artificial
  Probe
cttctttcttatgcagaatttcatt

SEQ ID NO: 48444 - DNA, 25 bp, Artificial
  Probe
tagcaaggaagcctgtggaaagaac

SEQ ID NO: 48445 - DNA, 25 bp, Artificial
  Probe
gtagcaaggaagcctgtggaaagaa

SEQ ID NO: 48446 - DNA, 25 bp, Artificial
  Probe
agaactggtgctttctgaaggagac

SEQ ID NO: 48447 - DNA, 25 bp, Artificial
  Probe
ttctttcttatgcagaatttcattt

SEQ ID NO: 48448 - DNA, 25 bp, Artificial
  Probe
cgctatccgtgtcactttaaacagc

SEQ ID NO: 48449 - DNA, 25 bp, Artificial
  Probe
tgactgaaccactgcctgatgtttt

SEQ ID NO: 48450 - DNA, 25 bp, Artificial
  Probe
gtgattccccaattcactgacaaat

SEQ ID NO: 48451 - DNA, 25 bp, Artificial
  Probe
attgactcctcagactggcaaagtc

SEQ ID NO: 48452 - DNA, 25 bp, Artificial
  Probe
tgtatttaaaggaaataaacactgt

SEQ ID NO: 48453 - DNA, 25 bp, Artificial
  Probe
ggtgattccccaattcactgacaaa

SEQ ID NO: 48454 - DNA, 25 bp, Artificial
  Probe
gggtgattccccaattcactgacaa

SEQ ID NO: 48455 - DNA, 25 bp, Artificial
  Probe
tatctcctccaattcatcagtcttc

SEQ ID NO: 48456 - DNA, 25 bp, Artificial
  Probe
ctatctcctccaattcatcagtctt

SEQ ID NO: 48457 - DNA, 25 bp, Artificial
  Probe
tctactatctcctccaattcatcag

SEQ ID NO: 48458 - DNA, 25 bp, Artificial
  Probe
tgctgttatcattctactatctcct

SEQ ID NO: 48459 - DNA, 25 bp, Artificial
  Probe
atctcctccaattcatcagtcttca

SEQ ID NO: 48460 - DNA, 25 bp, Artificial
  Probe
actatctcctccaattcatcagtct

SEQ ID NO: 48461 - DNA, 25 bp, Artificial
  Probe
ttctactatctcctccaattcatca

SEQ ID NO: 48462 - DNA, 25 bp, Artificial
  Probe
tcattctactatctcctccaattca

SEQ ID NO: 48463 - DNA, 25 bp, Artificial
  Probe
tactatctcctccaattcatcagtc

SEQ ID NO: 48464 - DNA, 25 bp, Artificial
  Probe
ctactatctcctccaattcatcagt

SEQ ID NO: 48465 - DNA, 25 bp, Artificial
  Probe
gctgttatcattctactatctcctc

SEQ ID NO: 48466 - DNA, 25 bp, Artificial
  Probe
tgttatcattctactatctcctcca

SEQ ID NO: 48467 - DNA, 25 bp, Artificial
  Probe
tctcctccaattcatcagtcttcac

SEQ ID NO: 48468 - DNA, 25 bp, Artificial
  Probe
atgctgttatcattctactatctcc

SEQ ID NO: 48469 - DNA, 25 bp, Artificial
  Probe
ggatgctgttatcattctactatct

SEQ ID NO: 48470 - DNA, 25 bp, Artificial
  Probe
aggatgctgttatcattctactatc

SEQ ID NO: 48471 - DNA, 25 bp, Artificial
  Probe
ctgttatcattctactatctcctcc

SEQ ID NO: 48472 - DNA, 25 bp, Artificial
  Probe
cattctactatctcctccaattcat

SEQ ID NO: 48473 - DNA, 25 bp, Artificial
  Probe
gtaataacaccagcacaggtagata

SEQ ID NO: 48474 - DNA, 25 bp, Artificial
  Probe
taataacaccagcacaggtagatag

SEQ ID NO: 48475 - DNA, 25 bp, Artificial
  Probe
ggtattctgtaataacaccagcaca

SEQ ID NO: 48476 - DNA, 25 bp, Artificial
  Probe
attctactatctcctccaattcatc

SEQ ID NO: 48477 - DNA, 25 bp, Artificial
  Probe
atcattctactatctcctccaattc

SEQ ID NO: 48478 - DNA, 25 bp, Artificial
  Probe
aataacaccagcacaggtagatagt

SEQ ID NO: 48479 - DNA, 25 bp, Artificial
  Probe
caggatgctgttatcattctactat

SEQ ID NO: 48480 - DNA, 25 bp, Artificial
  Probe
ctaaactggctgtgaaactctactt

SEQ ID NO: 48481 - DNA, 25 bp, Artificial
  Probe
gttatcattctactatctcctccaa

SEQ ID NO: 48482 - DNA, 25 bp, Artificial
  Probe
tgtaataacaccagcacaggtagat

SEQ ID NO: 48483 - DNA, 25 bp, Artificial
  Probe
taaactggctgtgaaactctacttc

SEQ ID NO: 48484 - DNA, 25 bp, Artificial
  Probe
ataacaccagcacaggtagatagtg

SEQ ID NO: 48485 - DNA, 25 bp, Artificial
  Probe
ctcctccaattcatcagtcttcacg

SEQ ID NO: 48486 - DNA, 25 bp, Artificial
  Probe
tgtagggagatcagaagaattaggt

SEQ ID NO: 48487 - DNA, 25 bp, Artificial
  Probe
gtagggagatcagaagaattaggtc

SEQ ID NO: 48488 - DNA, 25 bp, Artificial
  Probe
ttgtagggagatcagaagaattagg

SEQ ID NO: 48489 - DNA, 25 bp, Artificial
  Probe
agggagatcagaagaattaggtcta

SEQ ID NO: 48490 - DNA, 25 bp, Artificial
  Probe
tagggagatcagaagaattaggtct

SEQ ID NO: 48491 - DNA, 25 bp, Artificial
  Probe
gggagatcagaagaattaggtctag

SEQ ID NO: 48492 - DNA, 25 bp, Artificial
  Probe
gatgctgttatcattctactatctc

SEQ ID NO: 48493 - DNA, 25 bp, Artificial
  Probe
cctaaactggctgtgaaactctact

SEQ ID NO: 48494 - DNA, 25 bp, Artificial
  Probe
tgaaagggagactaaagaaattaca

SEQ ID NO: 48495 - DNA, 25 bp, Artificial
  Probe
aaagctaaattaaggtcacaggatg

SEQ ID NO: 48496 - DNA, 25 bp, Artificial
  Probe
ttatcattctactatctcctccaat

SEQ ID NO: 48497 - DNA, 25 bp, Artificial
  Probe
ggagatcagaagaattaggtctaga

SEQ ID NO: 48498 - DNA, 25 bp, Artificial
  Probe
agggagactaaagaaattacatcct

SEQ ID NO: 48499 - DNA, 25 bp, Artificial
  Probe
tatcattctactatctcctccaatt

SEQ ID NO: 48500 - DNA, 25 bp, Artificial
  Probe
ctactaccctccagaagacaagaag

SEQ ID NO: 48501 - DNA, 25 bp, Artificial
  Probe
tactaccctccagaagacaagaaga

SEQ ID NO: 48502 - DNA, 25 bp, Artificial
  Probe
cagaagacaagaagacccagtagac

SEQ ID NO: 48503 - DNA, 25 bp, Artificial
  Probe
gcctaagtataaagttagcaggagc

SEQ ID NO: 48504 - DNA, 25 bp, Artificial
  Probe
cctactaccctccagaagacaagaa

SEQ ID NO: 48505 - DNA, 25 bp, Artificial
  Probe
agaagacaagaagacccagtagacc

SEQ ID NO: 48506 - DNA, 25 bp, Artificial
  Probe
ccagaagacaagaagacccagtaga

SEQ ID NO: 48507 - DNA, 25 bp, Artificial
  Probe
tccagaagacaagaagacccagtag

SEQ ID NO: 48508 - DNA, 25 bp, Artificial
  Probe
ctccagaagacaagaagacccagta

SEQ ID NO: 48509 - DNA, 25 bp, Artificial
  Probe
actaccctccagaagacaagaagac

SEQ ID NO: 48510 - DNA, 25 bp, Artificial
  Probe
ggtgaccatcgatcttcatctattg

SEQ ID NO: 48511 - DNA, 25 bp, Artificial
  Probe
ctaccctccagaagacaagaagacc

SEQ ID NO: 48512 - DNA, 25 bp, Artificial
  Probe
cctaagtataaagttagcaggagct

SEQ ID NO: 48513 - DNA, 25 bp, Artificial
  Probe
tagccctgatagaaaggtggaactc

SEQ ID NO: 48514 - DNA, 25 bp, Artificial
  Probe
gtgaccatcgatcttcatctattgg

SEQ ID NO: 48515 - DNA, 25 bp, Artificial
  Probe
ctagccctgatagaaaggtggaact

SEQ ID NO: 48516 - DNA, 25 bp, Artificial
  Probe
tggtgaccatcgatcttcatctatt

SEQ ID NO: 48517 - DNA, 25 bp, Artificial
  Probe
gaagacaagaagacccagtagaccc

SEQ ID NO: 48518 - DNA, 25 bp, Artificial
  Probe
ggcctaagtataaagttagcaggag

SEQ ID NO: 48519 - DNA, 25 bp, Artificial
  Probe
ctggtgaccatcgatcttcatctat

SEQ ID NO: 48520 - DNA, 25 bp, Artificial
  Probe
ccctactaccctccagaagacaaga

SEQ ID NO: 48521 - DNA, 25 bp, Artificial
  Probe
aagacaagaagacccagtagaccct

SEQ ID NO: 48522 - DNA, 25 bp, Artificial
  Probe
accctactaccctccagaagacaag

SEQ ID NO: 48523 - DNA, 25 bp, Artificial
  Probe
cctgatagaaaggtggaactcctgg

SEQ ID NO: 48524 - DNA, 25 bp, Artificial
  Probe
ccctgatagaaaggtggaactcctg

SEQ ID NO: 48525 - DNA, 25 bp, Artificial
  Probe
caccctactaccctccagaagacaa

SEQ ID NO: 48526 - DNA, 25 bp, Artificial
  Probe
taccctccagaagacaagaagaccc

SEQ ID NO: 48527 - DNA, 25 bp, Artificial
  Probe
ctgatagaaaggtggaactcctggc

SEQ ID NO: 48528 - DNA, 25 bp, Artificial
  Probe
tgaccatcgatcttcatctattggg

SEQ ID NO: 48529 - DNA, 25 bp, Artificial
  Probe
cctggtgaccatcgatcttcatcta

SEQ ID NO: 48530 - DNA, 25 bp, Artificial
  Probe
agacaagaagacccagtagaccctg

SEQ ID NO: 48531 - DNA, 25 bp, Artificial
  Probe
taagtataaagttagcaggagctag

SEQ ID NO: 48532 - DNA, 25 bp, Artificial
  Probe
ctaagtataaagttagcaggagcta

SEQ ID NO: 48533 - DNA, 25 bp, Artificial
  Probe
gaccatcgatcttcatctattgggc

SEQ ID NO: 48534 - DNA, 25 bp, Artificial
  Probe
accatcgatcttcatctattgggct

SEQ ID NO: 48535 - DNA, 25 bp, Artificial
  Probe
cttgttcctcatgatagtgggcaca

SEQ ID NO: 48536 - DNA, 25 bp, Artificial
  Probe
ctttaaccatctctggagctcacag

SEQ ID NO: 48537 - DNA, 25 bp, Artificial
  Probe
ttgttcctcatgatagtgggcacac

SEQ ID NO: 48538 - DNA, 25 bp, Artificial
  Probe
aaccccttgttcctcatgatagtgg

SEQ ID NO: 48539 - DNA, 25 bp, Artificial
  Probe
ttaaccatctctggagctcacagga

SEQ ID NO: 48540 - DNA, 25 bp, Artificial
  Probe
tttaaccatctctggagctcacagg

SEQ ID NO: 48541 - DNA, 25 bp, Artificial
  Probe
cctttaaccatctctggagctcaca

SEQ ID NO: 48542 - DNA, 25 bp, Artificial
  Probe
gaaccccttgttcctcatgatagtg

SEQ ID NO: 48543 - DNA, 25 bp, Artificial
  Probe
taaccatctctggagctcacaggag

SEQ ID NO: 48544 - DNA, 25 bp, Artificial
  Probe
ccctttaaccatctctggagctcac

SEQ ID NO: 48545 - DNA, 25 bp, Artificial
  Probe
atgtcagacagtctcgatgtaggat

SEQ ID NO: 48546 - DNA, 25 bp, Artificial
  Probe
gatgtcagacagtctcgatgtagga

SEQ ID NO: 48547 - DNA, 25 bp, Artificial
  Probe
aggatgtcagacagtctcgatgtag

SEQ ID NO: 48548 - DNA, 25 bp, Artificial
  Probe
tgtcagacagtctcgatgtaggatg

SEQ ID NO: 48549 - DNA, 25 bp, Artificial
  Probe
ggatgtcagacagtctcgatgtagg

SEQ ID NO: 48550 - DNA, 25 bp, Artificial
  Probe
aagctatacaggagccttgtctgag

SEQ ID NO: 48551 - DNA, 25 bp, Artificial
  Probe
gaagctatacaggagccttgtctga

SEQ ID NO: 48552 - DNA, 25 bp, Artificial
  Probe
agaaggcttcacctgtgattgtttc

SEQ ID NO: 48553 - DNA, 25 bp, Artificial
  Probe
cagaaggcttcacctgtgattgttt

SEQ ID NO: 48554 - DNA, 25 bp, Artificial
  Probe
ttccagaaggcttcacctgtgattg

SEQ ID NO: 48555 - DNA, 25 bp, Artificial
  Probe
gttccagaaggcttcacctgtgatt

SEQ ID NO: 48556 - DNA, 25 bp, Artificial
  Probe
ggaagctatacaggagccttgtctg

SEQ ID NO: 48557 - DNA, 25 bp, Artificial
  Probe
tggaagctatacaggagccttgtct

SEQ ID NO: 48558 - DNA, 25 bp, Artificial
  Probe
gaaggcttcacctgtgattgtttcg

SEQ ID NO: 48559 - DNA, 25 bp, Artificial
  Probe
aaggcttcacctgtgattgtttcga

SEQ ID NO: 48560 - DNA, 25 bp, Artificial
  Probe
gtgcgagattgccagattctataag

SEQ ID NO: 48561 - DNA, 25 bp, Artificial
  Probe
ctggaagtgaataagtgcgagattg

SEQ ID NO: 48562 - DNA, 25 bp, Artificial
  Probe
agtgcgagattgccagattctataa

SEQ ID NO: 48563 - DNA, 25 bp, Artificial
  Probe
aagtgcgagattgccagattctata

SEQ ID NO: 48564 - DNA, 25 bp, Artificial
  Probe
taagtgcgagattgccagattctat

SEQ ID NO: 48565 - DNA, 25 bp, Artificial
  Probe
ataagtgcgagattgccagattcta

SEQ ID NO: 48566 - DNA, 25 bp, Artificial
  Probe
tgaataagtgcgagattgccagatt

SEQ ID NO: 48567 - DNA, 25 bp, Artificial
  Probe
cctggaagtgaataagtgcgagatt

SEQ ID NO: 48568 - DNA, 25 bp, Artificial
  Probe
aataagtgcgagattgccagattct

SEQ ID NO: 48569 - DNA, 25 bp, Artificial
  Probe
tgcgagattgccagattctataagc

SEQ ID NO: 48570 - DNA, 25 bp, Artificial
  Probe
gtgaataagtgcgagattgccagat

SEQ ID NO: 48571 - DNA, 25 bp, Artificial
  Probe
gaataagtgcgagattgccagattc

SEQ ID NO: 48572 - DNA, 25 bp, Artificial
  Probe
aagtgaataagtgcgagattgccag

SEQ ID NO: 48573 - DNA, 25 bp, Artificial
  Probe
gaagtgaataagtgcgagattgcca

SEQ ID NO: 48574 - DNA, 25 bp, Artificial
  Probe
tggaagtgaataagtgcgagattgc

SEQ ID NO: 48575 - DNA, 25 bp, Artificial
  Probe
gcgagattgccagattctataagct

SEQ ID NO: 48576 - DNA, 25 bp, Artificial
  Probe
ggaagtgaataagtgcgagattgcc

SEQ ID NO: 48577 - DNA, 25 bp, Artificial
  Probe
ttgccagattctataagcttcatga

SEQ ID NO: 48578 - DNA, 25 bp, Artificial
  Probe
tgccagattctataagcttcatgag

SEQ ID NO: 48579 - DNA, 25 bp, Artificial
  Probe
agtgaataagtgcgagattgccaga

SEQ ID NO: 48580 - DNA, 25 bp, Artificial
  Probe
attgccagattctataagcttcatg

SEQ ID NO: 48581 - DNA, 25 bp, Artificial
  Probe
tattgccatgacagtgcctagaaag

SEQ ID NO: 48582 - DNA, 25 bp, Artificial
  Probe
ctattgccatgacagtgcctagaaa

SEQ ID NO: 48583 - DNA, 25 bp, Artificial
  Probe
gattgccagattctataagcttcat

SEQ ID NO: 48584 - DNA, 25 bp, Artificial
  Probe
agattgccagattctataagcttca

SEQ ID NO: 48585 - DNA, 25 bp, Artificial
  Probe
gagattgccagattctataagcttc

SEQ ID NO: 48586 - DNA, 25 bp, Artificial
  Probe
cgagattgccagattctataagctt

SEQ ID NO: 48587 - DNA, 25 bp, Artificial
  Probe
aagtagaagactccagagccttcat

SEQ ID NO: 48588 - DNA, 25 bp, Artificial
  Probe
cctattgccatgacagtgcctagaa

SEQ ID NO: 48589 - DNA, 25 bp, Artificial
  Probe
aagacgaaaataataaaacggcttt

SEQ ID NO: 48590 - DNA, 25 bp, Artificial
  Probe
gtagaagactccagagccttcatct

SEQ ID NO: 48591 - DNA, 25 bp, Artificial
  Probe
agtagaagactccagagccttcatc

SEQ ID NO: 48592 - DNA, 25 bp, Artificial
  Probe
gcctggaagtgaataagtgcgagat

SEQ ID NO: 48593 - DNA, 25 bp, Artificial
  Probe
taagacgaaaataataaaacggctt

SEQ ID NO: 48594 - DNA, 25 bp, Artificial
  Probe
caagtagaagactccagagccttca

SEQ ID NO: 48595 - DNA, 25 bp, Artificial
  Probe
ataagacgaaaataataaaacggct

SEQ ID NO: 48596 - DNA, 25 bp, Artificial
  Probe
gataagacgaaaataataaaacggc

SEQ ID NO: 48597 - DNA, 25 bp, Artificial
  Probe
agacgaaaataataaaacggcttta

SEQ ID NO: 48598 - DNA, 25 bp, Artificial
  Probe
aatgtgagcctattgccatgacagt

SEQ ID NO: 48599 - DNA, 25 bp, Artificial
  Probe
gattctataagcttcatgagcggaa

SEQ ID NO: 48600 - DNA, 25 bp, Artificial
  Probe
aaatgtgagcctattgccatgacag

SEQ ID NO: 48601 - DNA, 25 bp, Artificial
  Probe
gaaatgtgagcctattgccatgaca

SEQ ID NO: 48602 - DNA, 25 bp, Artificial
  Probe
tagaagactccagagccttcatctg

SEQ ID NO: 48603 - DNA, 25 bp, Artificial
  Probe
agattctataagcttcatgagcgga

SEQ ID NO: 48604 - DNA, 25 bp, Artificial
  Probe
cagattctataagcttcatgagcgg

SEQ ID NO: 48605 - DNA, 25 bp, Artificial
  Probe
ctaccacacaatagaggatgaagcc

SEQ ID NO: 48606 - DNA, 25 bp, Artificial
  Probe
ggctaccacacaatagaggatgaag

SEQ ID NO: 48607 - DNA, 25 bp, Artificial
  Probe
ctctacaacaggctactgaaagaaa

SEQ ID NO: 48608 - DNA, 25 bp, Artificial
  Probe
cttccttccttccttcaagaccttg

SEQ ID NO: 48609 - DNA, 25 bp, Artificial
  Probe
gtctgtcctctgattggatgtcttg

SEQ ID NO: 48610 - DNA, 25 bp, Artificial
  Probe
aaatacggtgttcaataaagcagct

SEQ ID NO: 48611 - DNA, 25 bp, Artificial
  Probe
cctctacaacaggctactgaaagaa

SEQ ID NO: 48612 - DNA, 25 bp, Artificial
  Probe
cggctaccacacaatagaggatgaa

SEQ ID NO: 48613 - DNA, 25 bp, Artificial
  Probe
tcctctgattggatgtcttggctag

SEQ ID NO: 48614 - DNA, 25 bp, Artificial
  Probe
aaaatacggtgttcaataaagcagc

SEQ ID NO: 48615 - DNA, 25 bp, Artificial
  Probe
tctgtcctctgattggatgtcttgg

SEQ ID NO: 48616 - DNA, 25 bp, Artificial
  Probe
gtcctctgattggatgtcttggcta

SEQ ID NO: 48617 - DNA, 25 bp, Artificial
  Probe
gctaccacacaatagaggatgaagc

SEQ ID NO: 48618 - DNA, 25 bp, Artificial
  Probe
taccacacaatagaggatgaagccc

SEQ ID NO: 48619 - DNA, 25 bp, Artificial
  Probe
gcagttgttcgcttcaaagatgatc

SEQ ID NO: 48620 - DNA, 25 bp, Artificial
  Probe
ctacaacaggctactgaaagaaaac

SEQ ID NO: 48621 - DNA, 25 bp, Artificial
  Probe
tctacaacaggctactgaaagaaaa

SEQ ID NO: 48622 - DNA, 25 bp, Artificial
  Probe
tacaacaggctactgaaagaaaaca

SEQ ID NO: 48623 - DNA, 25 bp, Artificial
  Probe
cacggctaccacacaatagaggatg

SEQ ID NO: 48624 - DNA, 25 bp, Artificial
  Probe
acaacaggctactgaaagaaaacat

SEQ ID NO: 48625 - DNA, 25 bp, Artificial
  Probe
ccctctacaacaggctactgaaaga

SEQ ID NO: 48626 - DNA, 25 bp, Artificial
  Probe
cctctgattggatgtcttggctagg

SEQ ID NO: 48627 - DNA, 25 bp, Artificial
  Probe
acggctaccacacaatagaggatga

SEQ ID NO: 48628 - DNA, 25 bp, Artificial
  Probe
ctctgattggatgtcttggctaggc

SEQ ID NO: 48629 - DNA, 25 bp, Artificial
  Probe
caacaggctactgaaagaaaacatg

SEQ ID NO: 48630 - DNA, 25 bp, Artificial
  Probe
gggcatgaatgtgaaaccttccttt

SEQ ID NO: 48631 - DNA, 25 bp, Artificial
  Probe
ttccttccttccttcaagaccttga

SEQ ID NO: 48632 - DNA, 25 bp, Artificial
  Probe
cagttgttcgcttcaaagatgatca

SEQ ID NO: 48633 - DNA, 25 bp, Artificial
  Probe
catgcagttgttcgcttcaaagatg

SEQ ID NO: 48634 - DNA, 25 bp, Artificial
  Probe
aacaggctactgaaagaaaacatgc

SEQ ID NO: 48635 - DNA, 25 bp, Artificial
  Probe
gacaatcatgggcatgaatgtgaaa

SEQ ID NO: 48636 - DNA, 25 bp, Artificial
  Probe
tgcagttgttcgcttcaaagatgat

SEQ ID NO: 48637 - DNA, 25 bp, Artificial
  Probe
atgcagttgttcgcttcaaagatga

SEQ ID NO: 48638 - DNA, 25 bp, Artificial
  Probe
acaatcatgggcatgaatgtgaaac

SEQ ID NO: 48639 - DNA, 25 bp, Artificial
  Probe
aagaaaacatgcactttgaggtctg

SEQ ID NO: 48640 - DNA, 25 bp, Artificial
  Probe
ggctactgaaagaaaacatgcactt

SEQ ID NO: 48641 - DNA, 25 bp, Artificial
  Probe
catgggcatgaatgtgaaaccttcc

SEQ ID NO: 48642 - DNA, 25 bp, Artificial
  Probe
atgggcatgaatgtgaaaccttcct

SEQ ID NO: 48643 - DNA, 25 bp, Artificial
  Probe
tactgaaagaaaacatgcactttga

SEQ ID NO: 48644 - DNA, 25 bp, Artificial
  Probe
cttgacaatcatgggcatgaatgtg

SEQ ID NO: 48645 - DNA, 25 bp, Artificial
  Probe
ctactgaaagaaaacatgcactttg

SEQ ID NO: 48646 - DNA, 25 bp, Artificial
  Probe
ggacactgactaccagatggtgaaa

SEQ ID NO: 48647 - DNA, 25 bp, Artificial
  Probe
actgaaagaaaacatgcactttgag

SEQ ID NO: 48648 - DNA, 25 bp, Artificial
  Probe
gctactgaaagaaaacatgcacttt

SEQ ID NO: 48649 - DNA, 25 bp, Artificial
  Probe
aggctactgaaagaaaacatgcact

SEQ ID NO: 48650 - DNA, 25 bp, Artificial
  Probe
tggacatacagagatacccgttata

SEQ ID NO: 48651 - DNA, 25 bp, Artificial
  Probe
ttggacatacagagatacccgttat

SEQ ID NO: 48652 - DNA, 25 bp, Artificial
  Probe
tgaaagactatgactacaactgctt

SEQ ID NO: 48653 - DNA, 25 bp, Artificial
  Probe
ggacatacagagatacccgttatat

SEQ ID NO: 48654 - DNA, 25 bp, Artificial
  Probe
aaacaacagttccttaccatcaatg

SEQ ID NO: 48655 - DNA, 25 bp, Artificial
  Probe
ttgaaagactatgactacaactgct

SEQ ID NO: 48656 - DNA, 25 bp, Artificial
  Probe
aacagttccttaccatcaatggatt

SEQ ID NO: 48657 - DNA, 25 bp, Artificial
  Probe
cttgaaagactatgactacaactgc

SEQ ID NO: 48658 - DNA, 25 bp, Artificial
  Probe
ctatggcatctacgtcatcaatcag

SEQ ID NO: 48659 - DNA, 25 bp, Artificial
  Probe
gccttgaaagactatgactacaact

SEQ ID NO: 48660 - DNA, 25 bp, Artificial
  Probe
caagagacaagtttaatgagcccaa

SEQ ID NO: 48661 - DNA, 25 bp, Artificial
  Probe
gttggacatacagagatacccgtta

SEQ ID NO: 48662 - DNA, 25 bp, Artificial
  Probe
ccttgaaagactatgactacaactg

SEQ ID NO: 48663 - DNA, 25 bp, Artificial
  Probe
caacagttccttaccatcaatggat

SEQ ID NO: 48664 - DNA, 25 bp, Artificial
  Probe
taaacaacagttccttaccatcaat

SEQ ID NO: 48665 - DNA, 25 bp, Artificial
  Probe
aagagacaagtttaatgagcccaac

SEQ ID NO: 48666 - DNA, 25 bp, Artificial
  Probe
actatggcatctacgtcatcaatca

SEQ ID NO: 48667 - DNA, 25 bp, Artificial
  Probe
aacaacagttccttaccatcaatgg

SEQ ID NO: 48668 - DNA, 25 bp, Artificial
  Probe
acagagatacccgttatataccaaa

SEQ ID NO: 48669 - DNA, 25 bp, Artificial
  Probe
taatattcctgtggatctggagctt

SEQ ID NO: 48670 - DNA, 25 bp, Artificial
  Probe
ttaatattcctgtggatctggagct

SEQ ID NO: 48671 - DNA, 25 bp, Artificial
  Probe
ggcactcaagagacaagtttaatga

SEQ ID NO: 48672 - DNA, 25 bp, Artificial
  Probe
gactatggcatctacgtcatcaatc

SEQ ID NO: 48673 - DNA, 25 bp, Artificial
  Probe
caggtgttggacatacagagatacc

SEQ ID NO: 48674 - DNA, 25 bp, Artificial
  Probe
ccaggtgttggacatacagagatac

SEQ ID NO: 48675 - DNA, 25 bp, Artificial
  Probe
tcataaaggcatgtctatatcacgc

SEQ ID NO: 48676 - DNA, 25 bp, Artificial
  Probe
ttcataaaggcatgtctatatcacg

SEQ ID NO: 48677 - DNA, 25 bp, Artificial
  Probe
cagattagttcataaaggcatgtct

SEQ ID NO: 48678 - DNA, 25 bp, Artificial
  Probe
tatggcatctacgtcatcaatcagg

SEQ ID NO: 48679 - DNA, 25 bp, Artificial
  Probe
tacagagatacccgttatataccaa

SEQ ID NO: 48680 - DNA, 25 bp, Artificial
  Probe
agtaaacaacagttccttaccatca

SEQ ID NO: 48681 - DNA, 25 bp, Artificial
  Probe
cagtaaacaacagttccttaccatc

SEQ ID NO: 48682 - DNA, 25 bp, Artificial
  Probe
tcagtaaacaacagttccttaccat

SEQ ID NO: 48683 - DNA, 25 bp, Artificial
  Probe
acaacagttccttaccatcaatgga

SEQ ID NO: 48684 - DNA, 25 bp, Artificial
  Probe
tctcagtaaacaacagttccttacc

SEQ ID NO: 48685 - DNA, 25 bp, Artificial
  Probe
gtaaacaacagttccttaccatcaa

SEQ ID NO: 48686 - DNA, 25 bp, Artificial
  Probe
ctcagtaaacaacagttccttacca

SEQ ID NO: 48687 - DNA, 25 bp, Artificial
  Probe
accaggtgttggacatacagagata

SEQ ID NO: 48688 - DNA, 25 bp, Artificial
  Probe
taccaggtgttggacatacagagat

SEQ ID NO: 48689 - DNA, 25 bp, Artificial
  Probe
tcaagagacaagtttaatgagccca

SEQ ID NO: 48690 - DNA, 25 bp, Artificial
  Probe
atacagagatacccgttatatacca

SEQ ID NO: 48691 - DNA, 25 bp, Artificial
  Probe
gtgttcagtgatgtggacctcattc

SEQ ID NO: 48692 - DNA, 25 bp, Artificial
  Probe
ttgatggtttgaactcacttaccta

SEQ ID NO: 48693 - DNA, 25 bp, Artificial
  Probe
acagattagttcataaaggcatgtc

SEQ ID NO: 48694 - DNA, 25 bp, Artificial
  Probe
tgatggtttgaactcacttacctac

SEQ ID NO: 48695 - DNA, 25 bp, Artificial
  Probe
gagaacaagtagaagagaatcctgg

SEQ ID NO: 48696 - DNA, 25 bp, Artificial
  Probe
agaggtagagaacaagtagaagaga

SEQ ID NO: 48697 - DNA, 25 bp, Artificial
  Probe
cagaggtagagaacaagtagaagag

SEQ ID NO: 48698 - DNA, 25 bp, Artificial
  Probe
agagaacaagtagaagagaatcctg

SEQ ID NO: 48699 - DNA, 25 bp, Artificial
  Probe
ccagaggtagagaacaagtagaaga

SEQ ID NO: 48700 - DNA, 25 bp, Artificial
  Probe
gaggtagagaacaagtagaagagaa

SEQ ID NO: 48701 - DNA, 25 bp, Artificial
  Probe
cactatataatcctgacttgcctgg

SEQ ID NO: 48702 - DNA, 25 bp, Artificial
  Probe
aggtagagaacaagtagaagagaat

SEQ ID NO: 48703 - DNA, 25 bp, Artificial
  Probe
tatatctactatggtcactagcacg

SEQ ID NO: 48704 - DNA, 25 bp, Artificial
  Probe
gtagagaacaagtagaagagaatcc

SEQ ID NO: 48705 - DNA, 25 bp, Artificial
  Probe
ggtagagaacaagtagaagagaatc

SEQ ID NO: 48706 - DNA, 25 bp, Artificial
  Probe
tagagaacaagtagaagagaatcct

SEQ ID NO: 48707 - DNA, 25 bp, Artificial
  Probe
tcactatataatcctgacttgcctg

SEQ ID NO: 48708 - DNA, 25 bp, Artificial
  Probe
cgaccatgtgccatatatctactat

SEQ ID NO: 48709 - DNA, 25 bp, Artificial
  Probe
gccagaggtagagaacaagtagaag

SEQ ID NO: 48710 - DNA, 25 bp, Artificial
  Probe
gaagccagaggtagagaacaagtag

SEQ ID NO: 48711 - DNA, 25 bp, Artificial
  Probe
tagagaagccagaggtagagaacaa

SEQ ID NO: 48712 - DNA, 25 bp, Artificial
  Probe
ttcactatataatcctgacttgcct

SEQ ID NO: 48713 - DNA, 25 bp, Artificial
  Probe
agccagaggtagagaacaagtagaa

SEQ ID NO: 48714 - DNA, 25 bp, Artificial
  Probe
aagccagaggtagagaacaagtaga

SEQ ID NO: 48715 - DNA, 25 bp, Artificial
  Probe
agaagccagaggtagagaacaagta

SEQ ID NO: 48716 - DNA, 25 bp, Artificial
  Probe
tataatcctgacttgcctggaacta

SEQ ID NO: 48717 - DNA, 25 bp, Artificial
  Probe
tatataatcctgacttgcctggaac

SEQ ID NO: 48718 - DNA, 25 bp, Artificial
  Probe
tatcgaccatgtgccatatatctac

SEQ ID NO: 48719 - DNA, 25 bp, Artificial
  Probe
gtatcgaccatgtgccatatatcta

SEQ ID NO: 48720 - DNA, 25 bp, Artificial
  Probe
atgtatcgaccatgtgccatatatc

SEQ ID NO: 48721 - DNA, 25 bp, Artificial
  Probe
ctatataatcctgacttgcctggaa

SEQ ID NO: 48722 - DNA, 25 bp, Artificial
  Probe
tcgaccatgtgccatatatctacta

SEQ ID NO: 48723 - DNA, 25 bp, Artificial
  Probe
actatataatcctgacttgcctgga

SEQ ID NO: 48724 - DNA, 25 bp, Artificial
  Probe
gtagagaagccagaggtagagaaca

SEQ ID NO: 48725 - DNA, 25 bp, Artificial
  Probe
gacttgcctggaactaactgtgtaa

SEQ ID NO: 48726 - DNA, 25 bp, Artificial
  Probe
atataatcctgacttgcctggaact

SEQ ID NO: 48727 - DNA, 25 bp, Artificial
  Probe
atatctactatggtcactagcacgt

SEQ ID NO: 48728 - DNA, 25 bp, Artificial
  Probe
ataatcctgacttgcctggaactaa

SEQ ID NO: 48729 - DNA, 25 bp, Artificial
  Probe
atcgaccatgtgccatatatctact

SEQ ID NO: 48730 - DNA, 25 bp, Artificial
  Probe
tgtatcgaccatgtgccatatatct

SEQ ID NO: 48731 - DNA, 25 bp, Artificial
  Probe
tatctactatggtcactagcacgtc

SEQ ID NO: 48732 - DNA, 25 bp, Artificial
  Probe
gaccatgtgccatatatctactatg

SEQ ID NO: 48733 - DNA, 25 bp, Artificial
  Probe
agaacaagtagaagagaatcctggg

SEQ ID NO: 48734 - DNA, 25 bp, Artificial
  Probe
cctggaactaactgtgtaaacttgg

SEQ ID NO: 48735 - DNA, 25 bp, Artificial
  Probe
agagaagccagaggtagagaacaag

SEQ ID NO: 48736 - DNA, 25 bp, Artificial
  Probe
aagtagaagagaatcctgggcttag

SEQ ID NO: 48737 - DNA, 25 bp, Artificial
  Probe
taatcctgacttgcctggaactaac

SEQ ID NO: 48738 - DNA, 25 bp, Artificial
  Probe
tatgtatcgaccatgtgccatatat

SEQ ID NO: 48739 - DNA, 25 bp, Artificial
  Probe
caagtagaagagaatcctgggctta

SEQ ID NO: 48740 - DNA, 25 bp, Artificial
  Probe
aggagaccacaaagcaaaagtattt

SEQ ID NO: 48741 - DNA, 25 bp, Artificial
  Probe
caggagaccacaaagcaaaagtatt

SEQ ID NO: 48742 - DNA, 25 bp, Artificial
  Probe
ggagaccacaaagcaaaagtatttt

SEQ ID NO: 48743 - DNA, 25 bp, Artificial
  Probe
tcaggagaccacaaagcaaaagtat

SEQ ID NO: 48744 - DNA, 25 bp, Artificial
  Probe
ctcaggagaccacaaagcaaaagta

SEQ ID NO: 48745 - DNA, 25 bp, Artificial
  Probe
tctttcactttgattcgctggtgtg

SEQ ID NO: 48746 - DNA, 25 bp, Artificial
  Probe
ctttcactttgattcgctggtgtga

SEQ ID NO: 48747 - DNA, 25 bp, Artificial
  Probe
gagaccacaaagcaaaagtattttg

SEQ ID NO: 48748 - DNA, 25 bp, Artificial
  Probe
gtattactgcttgaacgactctctg

SEQ ID NO: 48749 - DNA, 25 bp, Artificial
  Probe
ggtcaagtgaagaagaagtagtctc

SEQ ID NO: 48750 - DNA, 25 bp, Artificial
  Probe
tattactgcttgaacgactctctgt

SEQ ID NO: 48751 - DNA, 25 bp, Artificial
  Probe
gtcaagtgaagaagaagtagtctca

SEQ ID NO: 48752 - DNA, 25 bp, Artificial
  Probe
tcaagtgaagaagaagtagtctcag

SEQ ID NO: 48753 - DNA, 25 bp, Artificial
  Probe
attactgcttgaacgactctctgta

SEQ ID NO: 48754 - DNA, 25 bp, Artificial
  Probe
caagtgaagaagaagtagtctcagg

SEQ ID NO: 48755 - DNA, 25 bp, Artificial
  Probe
aagcattctcttcttagtctaggtt

SEQ ID NO: 48756 - DNA, 25 bp, Artificial
  Probe
agtattactgcttgaacgactctct

SEQ ID NO: 48757 - DNA, 25 bp, Artificial
  Probe
actcttcagtcatgtaggcttagtt

SEQ ID NO: 48758 - DNA, 25 bp, Artificial
  Probe
taagcattctcttcttagtctaggt

SEQ ID NO: 48759 - DNA, 25 bp, Artificial
  Probe
tggtgtgtgtagtgtagtttctaaa

SEQ ID NO: 48760 - DNA, 25 bp, Artificial
  Probe
ctggtgtgtgtagtgtagtttctaa

SEQ ID NO: 48761 - DNA, 25 bp, Artificial
  Probe
gtaagcattctcttcttagtctagg

SEQ ID NO: 48762 - DNA, 25 bp, Artificial
  Probe
ttactgcttgaacgactctctgtac

SEQ ID NO: 48763 - DNA, 25 bp, Artificial
  Probe
cactcttcagtcatgtaggcttagt

SEQ ID NO: 48764 - DNA, 25 bp, Artificial
  Probe
aaatactccgtgttcaaatctggtt

SEQ ID NO: 48765 - DNA, 25 bp, Artificial
  Probe
aatactccgtgttcaaatctggttt

SEQ ID NO: 48766 - DNA, 25 bp, Artificial
  Probe
acactcttcagtcatgtaggcttag

SEQ ID NO: 48767 - DNA, 25 bp, Artificial
  Probe
tttctctgactctcctttctggttt

SEQ ID NO: 48768 - DNA, 25 bp, Artificial
  Probe
agcattctcttcttagtctaggttt

SEQ ID NO: 48769 - DNA, 25 bp, Artificial
  Probe
gaaatactccgtgttcaaatctggt

SEQ ID NO: 48770 - DNA, 25 bp, Artificial
  Probe
gcattctcttcttagtctaggtttc

SEQ ID NO: 48771 - DNA, 25 bp, Artificial
  Probe
tgtaagcattctcttcttagtctag

SEQ ID NO: 48772 - DNA, 25 bp, Artificial
  Probe
tacactcttcagtcatgtaggctta

SEQ ID NO: 48773 - DNA, 25 bp, Artificial
  Probe
ctcttcttagtctaggtttctctga

SEQ ID NO: 48774 - DNA, 25 bp, Artificial
  Probe
tctcttcttagtctaggtttctctg

SEQ ID NO: 48775 - DNA, 25 bp, Artificial
  Probe
actggtgtgtgtagtgtagtttcta

SEQ ID NO: 48776 - DNA, 25 bp, Artificial
  Probe
cttcagtcatgtaggcttagtttct

SEQ ID NO: 48777 - DNA, 25 bp, Artificial
  Probe
tcttcagtcatgtaggcttagtttc

SEQ ID NO: 48778 - DNA, 25 bp, Artificial
  Probe
ctcttcagtcatgtaggcttagttt

SEQ ID NO: 48779 - DNA, 25 bp, Artificial
  Probe
ttctctgactctcctttctggtttc

SEQ ID NO: 48780 - DNA, 25 bp, Artificial
  Probe
ttcagtcatgtaggcttagtttcta

SEQ ID NO: 48781 - DNA, 25 bp, Artificial
  Probe
tgggtcaagtgaagaagaagtagtc

SEQ ID NO: 48782 - DNA, 25 bp, Artificial
  Probe
aagtgaagaagaagtagtctcaggg

SEQ ID NO: 48783 - DNA, 25 bp, Artificial
  Probe
gggtcaagtgaagaagaagtagtct

SEQ ID NO: 48784 - DNA, 25 bp, Artificial
  Probe
gtttctctgactctcctttctggtt

SEQ ID NO: 48785 - DNA, 25 bp, Artificial
  Probe
ttgtgggtcaagtgaagaagaagta

SEQ ID NO: 48786 - DNA, 25 bp, Artificial
  Probe
gtgggtcaagtgaagaagaagtagt

SEQ ID NO: 48787 - DNA, 25 bp, Artificial
  Probe
tgtgggtcaagtgaagaagaagtag

SEQ ID NO: 48788 - DNA, 25 bp, Artificial
  Probe
caagtgtatcacaagaatttcctgg

SEQ ID NO: 48789 - DNA, 25 bp, Artificial
  Probe
gtgctcaagtgtatcacaagaattt

SEQ ID NO: 48790 - DNA, 25 bp, Artificial
  Probe
tgctcaagtgtatcacaagaatttc

SEQ ID NO: 48791 - DNA, 25 bp, Artificial
  Probe
ttctcttcttagtctaggtttctct

SEQ ID NO: 48792 - DNA, 25 bp, Artificial
  Probe
aagtgtatcacaagaatttcctgga

SEQ ID NO: 48793 - DNA, 25 bp, Artificial
  Probe
tatactgaaggaatttgtgctgtgt

SEQ ID NO: 48794 - DNA, 25 bp, Artificial
  Probe
ttatactgaaggaatttgtgctgtg

SEQ ID NO: 48795 - DNA, 25 bp, Artificial
  Probe
tactgaaggaatttgtgctgtgtat

SEQ ID NO: 48796 - DNA, 25 bp, Artificial
  Probe
atactgaaggaatttgtgctgtgta

SEQ ID NO: 48797 - DNA, 25 bp, Artificial
  Probe
ctgaaggaatttgtgctgtgtattg

SEQ ID NO: 48798 - DNA, 25 bp, Artificial
  Probe
actgaaggaatttgtgctgtgtatt

SEQ ID NO: 48799 - DNA, 25 bp, Artificial
  Probe
tttatactgaaggaatttgtgctgt

SEQ ID NO: 48800 - DNA, 25 bp, Artificial
  Probe
tgaaggaatttgtgctgtgtattgg

SEQ ID NO: 48801 - DNA, 25 bp, Artificial
  Probe
atttatactgaaggaatttgtgctg

SEQ ID NO: 48802 - DNA, 25 bp, Artificial
  Probe
catttatactgaaggaatttgtgct

SEQ ID NO: 48803 - DNA, 25 bp, Artificial
  Probe
agcacatttatactgaaggaatttg

SEQ ID NO: 48804 - DNA, 25 bp, Artificial
  Probe
acatttatactgaaggaatttgtgc

SEQ ID NO: 48805 - DNA, 25 bp, Artificial
  Probe
gcacatttatactgaaggaatttgt

SEQ ID NO: 48806 - DNA, 25 bp, Artificial
  Probe
gaaggaatttgtgctgtgtattggg

SEQ ID NO: 48807 - DNA, 25 bp, Artificial
  Probe
aagcacatttatactgaaggaattt

SEQ ID NO: 48808 - DNA, 25 bp, Artificial
  Probe
tttaagcacatttatactgaaggaa

SEQ ID NO: 48809 - DNA, 25 bp, Artificial
  Probe
ttaagcacatttatactgaaggaat

SEQ ID NO: 48810 - DNA, 25 bp, Artificial
  Probe
taagcacatttatactgaaggaatt

SEQ ID NO: 48811 - DNA, 25 bp, Artificial
  Probe
cactgagatctactggagaaagaat

SEQ ID NO: 48812 - DNA, 25 bp, Artificial
  Probe
atctactggagaaagaataaagttc

SEQ ID NO: 48813 - DNA, 25 bp, Artificial
  Probe
actgagatctactggagaaagaata

SEQ ID NO: 48814 - DNA, 25 bp, Artificial
  Probe
gatctactggagaaagaataaagtt

SEQ ID NO: 48815 - DNA, 25 bp, Artificial
  Probe
tctactggagaaagaataaagttct

SEQ ID NO: 48816 - DNA, 25 bp, Artificial
  Probe
ccactgagatctactggagaaagaa

SEQ ID NO: 48817 - DNA, 25 bp, Artificial
  Probe
ctgagatctactggagaaagaataa

SEQ ID NO: 48818 - DNA, 25 bp, Artificial
  Probe
ttttaagcacatttatactgaagga

SEQ ID NO: 48819 - DNA, 25 bp, Artificial
  Probe
tgagatctactggagaaagaataaa

SEQ ID NO: 48820 - DNA, 25 bp, Artificial
  Probe
agatctactggagaaagaataaagt

SEQ ID NO: 48821 - DNA, 25 bp, Artificial
  Probe
aaggaatttgtgctgtgtattgggg

SEQ ID NO: 48822 - DNA, 25 bp, Artificial
  Probe
gagatctactggagaaagaataaag

SEQ ID NO: 48823 - DNA, 25 bp, Artificial
  Probe
actggagaaagaataaagttctatt

SEQ ID NO: 48824 - DNA, 25 bp, Artificial
  Probe
ctactggagaaagaataaagttcta

SEQ ID NO: 48825 - DNA, 25 bp, Artificial
  Probe
attttaagcacatttatactgaagg

SEQ ID NO: 48826 - DNA, 25 bp, Artificial
  Probe
gatgagtaggctgttactcctcact

SEQ ID NO: 48827 - DNA, 25 bp, Artificial
  Probe
tttccactgagatctactggagaaa

SEQ ID NO: 48828 - DNA, 25 bp, Artificial
  Probe
tactggagaaagaataaagttctat

SEQ ID NO: 48829 - DNA, 25 bp, Artificial
  Probe
ctgggtttccactgagatctactgg

SEQ ID NO: 48830 - DNA, 25 bp, Artificial
  Probe
atgagtaggctgttactcctcactg

SEQ ID NO: 48831 - DNA, 25 bp, Artificial
  Probe
cattttaagcacatttatactgaag

SEQ ID NO: 48832 - DNA, 25 bp, Artificial
  Probe
ttccactgagatctactggagaaag

SEQ ID NO: 48833 - DNA, 25 bp, Artificial
  Probe
aagaattttcattttaagcacattt

SEQ ID NO: 48834 - DNA, 25 bp, Artificial
  Probe
ctggagaaagaataaagttctattt

SEQ ID NO: 48835 - DNA, 25 bp, Artificial
  Probe
gtttccactgagatctactggagaa

SEQ ID NO: 48836 - DNA, 25 bp, Artificial
  Probe
tcattttaagcacatttatactgaa

SEQ ID NO: 48837 - DNA, 25 bp, Artificial
  Probe
ttcattttaagcacatttatactga

SEQ ID NO: 48838 - DNA, 25 bp, Artificial
  Probe
agaaagttcctgagataagtagaga

SEQ ID NO: 48839 - DNA, 25 bp, Artificial
  Probe
ggcaacgagtctattaatttctgta

SEQ ID NO: 48840 - DNA, 25 bp, Artificial
  Probe
cggcaacgagtctattaatttctgt

SEQ ID NO: 48841 - DNA, 25 bp, Artificial
  Probe
gaaagttcctgagataagtagagat

SEQ ID NO: 48842 - DNA, 25 bp, Artificial
  Probe
cagaaagttcctgagataagtagag

SEQ ID NO: 48843 - DNA, 25 bp, Artificial
  Probe
aaagttcctgagataagtagagatc

SEQ ID NO: 48844 - DNA, 25 bp, Artificial
  Probe
ctttgggaggacatttacagaaaac

SEQ ID NO: 48845 - DNA, 25 bp, Artificial
  Probe
gcaacgagtctattaatttctgtat

SEQ ID NO: 48846 - DNA, 25 bp, Artificial
  Probe
tttgggaggacatttacagaaaacc

SEQ ID NO: 48847 - DNA, 25 bp, Artificial
  Probe
tcggcaacgagtctattaatttctg

SEQ ID NO: 48848 - DNA, 25 bp, Artificial
  Probe
agttcctgagataagtagagatctt

SEQ ID NO: 48849 - DNA, 25 bp, Artificial
  Probe
aagttcctgagataagtagagatct

SEQ ID NO: 48850 - DNA, 25 bp, Artificial
  Probe
atttctgtattttagagaggcagtg

SEQ ID NO: 48851 - DNA, 25 bp, Artificial
  Probe
cctttgggaggacatttacagaaaa

SEQ ID NO: 48852 - DNA, 25 bp, Artificial
  Probe
tttctgtattttagagaggcagtgc

SEQ ID NO: 48853 - DNA, 25 bp, Artificial
  Probe
aatttctgtattttagagaggcagt

SEQ ID NO: 48854 - DNA, 25 bp, Artificial
  Probe
ctctgcacagatgttccaggatgta

SEQ ID NO: 48855 - DNA, 25 bp, Artificial
  Probe
ttctgtattttagagaggcagtgct

SEQ ID NO: 48856 - DNA, 25 bp, Artificial
  Probe
ttgggaggacatttacagaaaacct

SEQ ID NO: 48857 - DNA, 25 bp, Artificial
  Probe
ctgcacagatgttccaggatgtact

SEQ ID NO: 48858 - DNA, 25 bp, Artificial
  Probe
tcagaaagttcctgagataagtaga

SEQ ID NO: 48859 - DNA, 25 bp, Artificial
  Probe
tctgtattttagagaggcagtgctc

SEQ ID NO: 48860 - DNA, 25 bp, Artificial
  Probe
tctgcacagatgttccaggatgtac

SEQ ID NO: 48861 - DNA, 25 bp, Artificial
  Probe
tgggaggacatttacagaaaacctg

SEQ ID NO: 48862 - DNA, 25 bp, Artificial
  Probe
cacagatgttccaggatgtactgca

SEQ ID NO: 48863 - DNA, 25 bp, Artificial
  Probe
tgcacagatgttccaggatgtactg

SEQ ID NO: 48864 - DNA, 25 bp, Artificial
  Probe
tcctttgggaggacatttacagaaa

SEQ ID NO: 48865 - DNA, 25 bp, Artificial
  Probe
taatttctgtattttagagaggcag

SEQ ID NO: 48866 - DNA, 25 bp, Artificial
  Probe
caacgagtctattaatttctgtatt

SEQ ID NO: 48867 - DNA, 25 bp, Artificial
  Probe
ttaatttctgtattttagagaggca

SEQ ID NO: 48868 - DNA, 25 bp, Artificial
  Probe
ctgtattttagagaggcagtgctct

SEQ ID NO: 48869 - DNA, 25 bp, Artificial
  Probe
tgtattttagagaggcagtgctctg

SEQ ID NO: 48870 - DNA, 25 bp, Artificial
  Probe
gacatttacagaaaacctgtgagtc

SEQ ID NO: 48871 - DNA, 25 bp, Artificial
  Probe
aggacatttacagaaaacctgtgag

SEQ ID NO: 48872 - DNA, 25 bp, Artificial
  Probe
gaggacatttacagaaaacctgtga

SEQ ID NO: 48873 - DNA, 25 bp, Artificial
  Probe
acatttacagaaaacctgtgagtcc

SEQ ID NO: 48874 - DNA, 25 bp, Artificial
  Probe
ggacatttacagaaaacctgtgagt

SEQ ID NO: 48875 - DNA, 25 bp, Artificial
  Probe
gtattttagagaggcagtgctctgg

SEQ ID NO: 48876 - DNA, 25 bp, Artificial
  Probe
catttacagaaaacctgtgagtccc

SEQ ID NO: 48877 - DNA, 25 bp, Artificial
  Probe
ggaggacatttacagaaaacctgtg

SEQ ID NO: 48878 - DNA, 25 bp, Artificial
  Probe
atttacagaaaacctgtgagtcccc

SEQ ID NO: 48879 - DNA, 25 bp, Artificial
  Probe
gggaggacatttacagaaaacctgt

SEQ ID NO: 48880 - DNA, 25 bp, Artificial
  Probe
attaatttctgtattttagagaggc

SEQ ID NO: 48881 - DNA, 25 bp, Artificial
  Probe
tattttagagaggcagtgctctggc

SEQ ID NO: 48882 - DNA, 25 bp, Artificial
  Probe
tttacagaaaacctgtgagtcccct

SEQ ID NO: 48883 - DNA, 25 bp, Artificial
  Probe
ttacagaaaacctgtgagtcccctc

SEQ ID NO: 48884 - DNA, 25 bp, Artificial
  Probe
gcatacaaggttgaatgaacatact

SEQ ID NO: 48885 - DNA, 25 bp, Artificial
  Probe
ggcatacaaggttgaatgaacatac

SEQ ID NO: 48886 - DNA, 25 bp, Artificial
  Probe
tggcatacaaggttgaatgaacata

SEQ ID NO: 48887 - DNA, 25 bp, Artificial
  Probe
ttatggcatacaaggttgaatgaac

SEQ ID NO: 48888 - DNA, 25 bp, Artificial
  Probe
tatggcatacaaggttgaatgaaca

SEQ ID NO: 48889 - DNA, 25 bp, Artificial
  Probe
atggcatacaaggttgaatgaacat

SEQ ID NO: 48890 - DNA, 25 bp, Artificial
  Probe
catacaaggttgaatgaacatactt

SEQ ID NO: 48891 - DNA, 25 bp, Artificial
  Probe
gccagtttcagatagtttcatttca

SEQ ID NO: 48892 - DNA, 25 bp, Artificial
  Probe
taggtttatggcatacaaggttgaa

SEQ ID NO: 48893 - DNA, 25 bp, Artificial
  Probe
aggtttatggcatacaaggttgaat

SEQ ID NO: 48894 - DNA, 25 bp, Artificial
  Probe
gtttatggcatacaaggttgaatga

SEQ ID NO: 48895 - DNA, 25 bp, Artificial
  Probe
ctaggtttatggcatacaaggttga

SEQ ID NO: 48896 - DNA, 25 bp, Artificial
  Probe
ggtttatggcatacaaggttgaatg

SEQ ID NO: 48897 - DNA, 25 bp, Artificial
  Probe
taaagttctgccgtgtgtttaattg

SEQ ID NO: 48898 - DNA, 25 bp, Artificial
  Probe
tttatggcatacaaggttgaatgaa

SEQ ID NO: 48899 - DNA, 25 bp, Artificial
  Probe
agtttcagatagtttcatttcacct

SEQ ID NO: 48900 - DNA, 25 bp, Artificial
  Probe
cagtttcagatagtttcatttcacc

SEQ ID NO: 48901 - DNA, 25 bp, Artificial
  Probe
ccagtttcagatagtttcatttcac

SEQ ID NO: 48902 - DNA, 25 bp, Artificial
  Probe
tttcagatagtttcatttcacctgt

SEQ ID NO: 48903 - DNA, 25 bp, Artificial
  Probe
tacaaggttgaatgaacatacttaa

SEQ ID NO: 48904 - DNA, 25 bp, Artificial
  Probe
gtttcagatagtttcatttcacctg

SEQ ID NO: 48905 - DNA, 25 bp, Artificial
  Probe
atacaaggttgaatgaacatactta

SEQ ID NO: 48906 - DNA, 25 bp, Artificial
  Probe
ttaattgccttgtgtgaccacttgt

SEQ ID NO: 48907 - DNA, 25 bp, Artificial
  Probe
tcagatagtttcatttcacctgtaa

SEQ ID NO: 48908 - DNA, 25 bp, Artificial
  Probe
ttcagatagtttcatttcacctgta

SEQ ID NO: 48909 - DNA, 25 bp, Artificial
  Probe
tttaaagcactgagcaaactggaaa

SEQ ID NO: 48910 - DNA, 25 bp, Artificial
  Probe
acaaggttgaatgaacatacttaaa

SEQ ID NO: 48911 - DNA, 25 bp, Artificial
  Probe
taattgccttgtgtgaccacttgtc

SEQ ID NO: 48912 - DNA, 25 bp, Artificial
  Probe
tttaaagttggtctgttgcacaaat

SEQ ID NO: 48913 - DNA, 25 bp, Artificial
  Probe
ttaaagttggtctgttgcacaaatc

SEQ ID NO: 48914 - DNA, 25 bp, Artificial
  Probe
tttaattgccttgtgtgaccacttg

SEQ ID NO: 48915 - DNA, 25 bp, Artificial
  Probe
gtttaattgccttgtgtgaccactt

SEQ ID NO: 48916 - DNA, 25 bp, Artificial
  Probe
gtgtgtttaattgccttgtgtgacc

SEQ ID NO: 48917 - DNA, 25 bp, Artificial
  Probe
aaagttctgccgtgtgtttaattgc

SEQ ID NO: 48918 - DNA, 25 bp, Artificial
  Probe
ggctccagtttgttttataggtttt

SEQ ID NO: 48919 - DNA, 25 bp, Artificial
  Probe
ttaaagttctgccgtgtgtttaatt

SEQ ID NO: 48920 - DNA, 25 bp, Artificial
  Probe
aggctccagtttgttttataggttt

SEQ ID NO: 48921 - DNA, 25 bp, Artificial
  Probe
cagatagtttcatttcacctgtaaa

SEQ ID NO: 48922 - DNA, 25 bp, Artificial
  Probe
gctgaatccttaccccacttttatt

SEQ ID NO: 48923 - DNA, 25 bp, Artificial
  Probe
gaggctccagtttgttttataggtt

SEQ ID NO: 48924 - DNA, 25 bp, Artificial
  Probe
ttttattaagtgtccgttttgcttg

SEQ ID NO: 48925 - DNA, 25 bp, Artificial
  Probe
taggccagtttcagatagtttcatt

SEQ ID NO: 48926 - DNA, 25 bp, Artificial
  Probe
taaagttggtctgttgcacaaatca

SEQ ID NO: 48927 - DNA, 25 bp, Artificial
  Probe
tgtgtttaattgccttgtgtgacca

SEQ ID NO: 48928 - DNA, 25 bp, Artificial
  Probe
cgtgtgtttaattgccttgtgtgac

SEQ ID NO: 48929 - DNA, 25 bp, Artificial
  Probe
agttagaatcccacattgatacctt

SEQ ID NO: 48930 - DNA, 25 bp, Artificial
  Probe
tttactgtctctgatgttccctctt

SEQ ID NO: 48931 - DNA, 25 bp, Artificial
  Probe
gttagaatcccacattgataccttt

SEQ ID NO: 48932 - DNA, 25 bp, Artificial
  Probe
tagttagaatcccacattgatacct

SEQ ID NO: 48933 - DNA, 25 bp, Artificial
  Probe
ttactgtctctgatgttccctcttc

SEQ ID NO: 48934 - DNA, 25 bp, Artificial
  Probe
gaatcccacattgatacctttctca

SEQ ID NO: 48935 - DNA, 25 bp, Artificial
  Probe
cattgaaatgctaagtctgaatccc

SEQ ID NO: 48936 - DNA, 25 bp, Artificial
  Probe
ccacattgatacctttctcacttca

SEQ ID NO: 48937 - DNA, 25 bp, Artificial
  Probe
aatcccacattgatacctttctcac

SEQ ID NO: 48938 - DNA, 25 bp, Artificial
  Probe
ttagaatcccacattgatacctttc

SEQ ID NO: 48939 - DNA, 25 bp, Artificial
  Probe
cacattgatacctttctcacttcat

SEQ ID NO: 48940 - DNA, 25 bp, Artificial
  Probe
cccacattgatacctttctcacttc

SEQ ID NO: 48941 - DNA, 25 bp, Artificial
  Probe
tcattgaaatgctaagtctgaatcc

SEQ ID NO: 48942 - DNA, 25 bp, Artificial
  Probe
ctagttagaatcccacattgatacc

SEQ ID NO: 48943 - DNA, 25 bp, Artificial
  Probe
atcccacattgatacctttctcact

SEQ ID NO: 48944 - DNA, 25 bp, Artificial
  Probe
ggcttagtggacactatcattacaa

SEQ ID NO: 48945 - DNA, 25 bp, Artificial
  Probe
ttggcttagtggacactatcattac

SEQ ID NO: 48946 - DNA, 25 bp, Artificial
  Probe
gttggcttagtggacactatcatta

SEQ ID NO: 48947 - DNA, 25 bp, Artificial
  Probe
tcccacattgatacctttctcactt

SEQ ID NO: 48948 - DNA, 25 bp, Artificial
  Probe
tggcttagtggacactatcattaca

SEQ ID NO: 48949 - DNA, 25 bp, Artificial
  Probe
tccctcttcagtttaaatcaccaat

SEQ ID NO: 48950 - DNA, 25 bp, Artificial
  Probe
ttccctcttcagtttaaatcaccaa

SEQ ID NO: 48951 - DNA, 25 bp, Artificial
  Probe
actatcattacaaagctctcaggtg

SEQ ID NO: 48952 - DNA, 25 bp, Artificial
  Probe
cactatcattacaaagctctcaggt

SEQ ID NO: 48953 - DNA, 25 bp, Artificial
  Probe
acactatcattacaaagctctcagg

SEQ ID NO: 48954 - DNA, 25 bp, Artificial
  Probe
ggacactatcattacaaagctctca

SEQ ID NO: 48955 - DNA, 25 bp, Artificial
  Probe
tggacactatcattacaaagctctc

SEQ ID NO: 48956 - DNA, 25 bp, Artificial
  Probe
gtggacactatcattacaaagctct

SEQ ID NO: 48957 - DNA, 25 bp, Artificial
  Probe
gacactatcattacaaagctctcag

SEQ ID NO: 48958 - DNA, 25 bp, Artificial
  Probe
atgttccctcttcagtttaaatcac

SEQ ID NO: 48959 - DNA, 25 bp, Artificial
  Probe
gttccctcttcagtttaaatcacca

SEQ ID NO: 48960 - DNA, 25 bp, Artificial
  Probe
tgttccctcttcagtttaaatcacc

SEQ ID NO: 48961 - DNA, 25 bp, Artificial
  Probe
gatgttccctcttcagtttaaatca

SEQ ID NO: 48962 - DNA, 25 bp, Artificial
  Probe
acattgatacctttctcacttcata

SEQ ID NO: 48963 - DNA, 25 bp, Artificial
  Probe
ccctcttcagtttaaatcaccaata

SEQ ID NO: 48964 - DNA, 25 bp, Artificial
  Probe
ctatcattacaaagctctcaggtga

SEQ ID NO: 48965 - DNA, 25 bp, Artificial
  Probe
aaatctagttagaatcccacattga

SEQ ID NO: 48966 - DNA, 25 bp, Artificial
  Probe
tgttggcttagtggacactatcatt

SEQ ID NO: 48967 - DNA, 25 bp, Artificial
  Probe
ttgttggcttagtggacactatcat

SEQ ID NO: 48968 - DNA, 25 bp, Artificial
  Probe
tactgtctctgatgttccctcttca

SEQ ID NO: 48969 - DNA, 25 bp, Artificial
  Probe
agtggacactatcattacaaagctc

SEQ ID NO: 48970 - DNA, 25 bp, Artificial
  Probe
tatcattacaaagctctcaggtgag

SEQ ID NO: 48971 - DNA, 25 bp, Artificial
  Probe
tctagttagaatcccacattgatac

SEQ ID NO: 48972 - DNA, 25 bp, Artificial
  Probe
tgatgttccctcttcagtttaaatc

SEQ ID NO: 48973 - DNA, 25 bp, Artificial
  Probe
aatctagttagaatcccacattgat

SEQ ID NO: 48974 - DNA, 25 bp, Artificial
  Probe
tatgttgtcattgatagaagcctgt

SEQ ID NO: 48975 - DNA, 25 bp, Artificial
  Probe
atgttgtcattgatagaagcctgtt

SEQ ID NO: 48976 - DNA, 25 bp, Artificial
  Probe
atatgttgtcattgatagaagcctg

SEQ ID NO: 48977 - DNA, 25 bp, Artificial
  Probe
tgttgtcattgatagaagcctgttg

SEQ ID NO: 48978 - DNA, 25 bp, Artificial
  Probe
aatatgttgtcattgatagaagcct

SEQ ID NO: 48979 - DNA, 25 bp, Artificial
  Probe
gtcattgatagaagcctgttggttc

SEQ ID NO: 48980 - DNA, 25 bp, Artificial
  Probe
gttgtcattgatagaagcctgttgg

SEQ ID NO: 48981 - DNA, 25 bp, Artificial
  Probe
tgtcattgatagaagcctgttggtt

SEQ ID NO: 48982 - DNA, 25 bp, Artificial
  Probe
ttgtcattgatagaagcctgttggt

SEQ ID NO: 48983 - DNA, 25 bp, Artificial
  Probe
tcattgatagaagcctgttggttcc

SEQ ID NO: 48984 - DNA, 25 bp, Artificial
  Probe
caacctatgacttgactggtcctaa

SEQ ID NO: 48985 - DNA, 25 bp, Artificial
  Probe
taatatgttgtcattgatagaagcc

SEQ ID NO: 48986 - DNA, 25 bp, Artificial
  Probe
acatagtttctactgacaggtttca

SEQ ID NO: 48987 - DNA, 25 bp, Artificial
  Probe
ccacatagtttctactgacaggttt

SEQ ID NO: 48988 - DNA, 25 bp, Artificial
  Probe
cacatagtttctactgacaggtttc

SEQ ID NO: 48989 - DNA, 25 bp, Artificial
  Probe
gaaccacatagtttctactgacagg

SEQ ID NO: 48990 - DNA, 25 bp, Artificial
  Probe
tttcttgttggtgttgctgatttgt

SEQ ID NO: 48991 - DNA, 25 bp, Artificial
  Probe
ctgatttaagctgcctagtgtagtg

SEQ ID NO: 48992 - DNA, 25 bp, Artificial
  Probe
ttcttgttggtgttgctgatttgtg

SEQ ID NO: 48993 - DNA, 25 bp, Artificial
  Probe
aacctatgacttgactggtcctaaa

SEQ ID NO: 48994 - DNA, 25 bp, Artificial
  Probe
cattgatagaagcctgttggttccg

SEQ ID NO: 48995 - DNA, 25 bp, Artificial
  Probe
cactcttctgtcctgatttaagctg

SEQ ID NO: 48996 - DNA, 25 bp, Artificial
  Probe
accacatagtttctactgacaggtt

SEQ ID NO: 48997 - DNA, 25 bp, Artificial
  Probe
aaccacatagtttctactgacaggt

SEQ ID NO: 48998 - DNA, 25 bp, Artificial
  Probe
acctatgacttgactggtcctaaag

SEQ ID NO: 48999 - DNA, 25 bp, Artificial
  Probe
tcctgatttaagctgcctagtgtag

SEQ ID NO: 49000 - DNA, 25 bp, Artificial
  Probe
agaaccacatagtttctactgacag

SEQ ID NO: 49001 - DNA, 25 bp, Artificial
  Probe
cttgttggtgttgctgatttgtgag

SEQ ID NO: 49002 - DNA, 25 bp, Artificial
  Probe
aagaaccacatagtttctactgaca

SEQ ID NO: 49003 - DNA, 25 bp, Artificial
  Probe
cctgatttaagctgcctagtgtagt

SEQ ID NO: 49004 - DNA, 25 bp, Artificial
  Probe
gtcctgatttaagctgcctagtgta

SEQ ID NO: 49005 - DNA, 25 bp, Artificial
  Probe
tcaacctatgacttgactggtccta

SEQ ID NO: 49006 - DNA, 25 bp, Artificial
  Probe
ttggttccgcaaactgaaatgattg

SEQ ID NO: 49007 - DNA, 25 bp, Artificial
  Probe
gttggttccgcaaactgaaatgatt

SEQ ID NO: 49008 - DNA, 25 bp, Artificial
  Probe
cctatgacttgactggtcctaaagc

SEQ ID NO: 49009 - DNA, 25 bp, Artificial
  Probe
ttctgtcctgatttaagctgcctag

SEQ ID NO: 49010 - DNA, 25 bp, Artificial
  Probe
aaagaaccacatagtttctactgac

SEQ ID NO: 49011 - DNA, 25 bp, Artificial
  Probe
cttctgtcctgatttaagctgccta

SEQ ID NO: 49012 - DNA, 25 bp, Artificial
  Probe
tcttgttggtgttgctgatttgtga

SEQ ID NO: 49013 - DNA, 25 bp, Artificial
  Probe
ctatgacttgactggtcctaaagct

SEQ ID NO: 49014 - DNA, 25 bp, Artificial
  Probe
aagctataacatacaacgtactgta

SEQ ID NO: 49015 - DNA, 25 bp, Artificial
  Probe
ggttccgcaaactgaaatgattgtc

SEQ ID NO: 49016 - DNA, 25 bp, Artificial
  Probe
ttttcttgttggtgttgctgatttg

SEQ ID NO: 49017 - DNA, 25 bp, Artificial
  Probe
aaagctataacatacaacgtactgt

SEQ ID NO: 49018 - DNA, 25 bp, Artificial
  Probe
tatgacttgactggtcctaaagctg

SEQ ID NO: 49019 - DNA, 25 bp, Artificial
  Probe
cctggcactcctagattattacaat

SEQ ID NO: 49020 - DNA, 25 bp, Artificial
  Probe
tcctggcactcctagattattacaa

SEQ ID NO: 49021 - DNA, 25 bp, Artificial
  Probe
ctcctggcactcctagattattaca

SEQ ID NO: 49022 - DNA, 25 bp, Artificial
  Probe
ctctcctggcactcctagattatta

SEQ ID NO: 49023 - DNA, 25 bp, Artificial
  Probe
tctcctggcactcctagattattac

SEQ ID NO: 49024 - DNA, 25 bp, Artificial
  Probe
aggctaattcatcttctgtcgtctc

SEQ ID NO: 49025 - DNA, 25 bp, Artificial
  Probe
gaggctaattcatcttctgtcgtct

SEQ ID NO: 49026 - DNA, 25 bp, Artificial
  Probe
agaggctaattcatcttctgtcgtc

SEQ ID NO: 49027 - DNA, 25 bp, Artificial
  Probe
gagaggctaattcatcttctgtcgt

SEQ ID NO: 49028 - DNA, 25 bp, Artificial
  Probe
tctctcctggcactcctagattatt

SEQ ID NO: 49029 - DNA, 25 bp, Artificial
  Probe
ttctctcctggcactcctagattat

SEQ ID NO: 49030 - DNA, 25 bp, Artificial
  Probe
tggcactcctagattattacaatag

SEQ ID NO: 49031 - DNA, 25 bp, Artificial
  Probe
ctggcactcctagattattacaata

SEQ ID NO: 49032 - DNA, 25 bp, Artificial
  Probe
gccttggcttatctattaagaggta

SEQ ID NO: 49033 - DNA, 25 bp, Artificial
  Probe
atcagatagcatcaaaggagagaag

SEQ ID NO: 49034 - DNA, 25 bp, Artificial
  Probe
gaatcagatagcatcaaaggagaga

SEQ ID NO: 49035 - DNA, 25 bp, Artificial
  Probe
ttaagaggtatttcagacagggaga

SEQ ID NO: 49036 - DNA, 25 bp, Artificial
  Probe
taagaggtatttcagacagggagag

SEQ ID NO: 49037 - DNA, 25 bp, Artificial
  Probe
attaagaggtatttcagacagggag

SEQ ID NO: 49038 - DNA, 25 bp, Artificial
  Probe
aatcagatagcatcaaaggagagaa

SEQ ID NO: 49039 - DNA, 25 bp, Artificial
  Probe
ggcactcctagattattacaatagt

SEQ ID NO: 49040 - DNA, 25 bp, Artificial
  Probe
cagatagcatcaaaggagagaagtc

SEQ ID NO: 49041 - DNA, 25 bp, Artificial
  Probe
ggaatcagatagcatcaaaggagag

SEQ ID NO: 49042 - DNA, 25 bp, Artificial
  Probe
ggagaggctaattcatcttctgtcg

SEQ ID NO: 49043 - DNA, 25 bp, Artificial
  Probe
tcagatagcatcaaaggagagaagt

SEQ ID NO: 49044 - DNA, 25 bp, Artificial
  Probe
tatttcagacagggagaggctaatt

SEQ ID NO: 49045 - DNA, 25 bp, Artificial
  Probe
agatagcatcaaaggagagaagtct

SEQ ID NO: 49046 - DNA, 25 bp, Artificial
  Probe
ggctaattcatcttctgtcgtctcc

SEQ ID NO: 49047 - DNA, 25 bp, Artificial
  Probe
ttgttgggaatcagatagcatcaaa

SEQ ID NO: 49048 - DNA, 25 bp, Artificial
  Probe
tttgttgggaatcagatagcatcaa

SEQ ID NO: 49049 - DNA, 25 bp, Artificial
  Probe
gtatttcagacagggagaggctaat

SEQ ID NO: 49050 - DNA, 25 bp, Artificial
  Probe
tattaagaggtatttcagacaggga

SEQ ID NO: 49051 - DNA, 25 bp, Artificial
  Probe
tgttgggaatcagatagcatcaaag

SEQ ID NO: 49052 - DNA, 25 bp, Artificial
  Probe
ctctgctctcatatccctttctctc

SEQ ID NO: 49053 - DNA, 25 bp, Artificial
  Probe
aatccagtgcttaacttatgatagc

SEQ ID NO: 49054 - DNA, 25 bp, Artificial
  Probe
ctaattcatcttctgtcgtctccct

SEQ ID NO: 49055 - DNA, 25 bp, Artificial
  Probe
ctattaagaggtatttcagacaggg

SEQ ID NO: 49056 - DNA, 25 bp, Artificial
  Probe
ggaaatccagtgcttaacttatgat

SEQ ID NO: 49057 - DNA, 25 bp, Artificial
  Probe
taattcatcttctgtcgtctccctg

SEQ ID NO: 49058 - DNA, 25 bp, Artificial
  Probe
ccttggcttatctattaagaggtat

SEQ ID NO: 49059 - DNA, 25 bp, Artificial
  Probe
gggaatcagatagcatcaaaggaga

SEQ ID NO: 49060 - DNA, 25 bp, Artificial
  Probe
ttgggaatcagatagcatcaaagga

SEQ ID NO: 49061 - DNA, 25 bp, Artificial
  Probe
gttgggaatcagatagcatcaaagg

SEQ ID NO: 49062 - DNA, 25 bp, Artificial
  Probe
atttcagacagggagaggctaattc

SEQ ID NO: 49063 - DNA, 25 bp, Artificial
  Probe
tgggaatcagatagcatcaaaggag

SEQ ID NO: 49064 - DNA, 25 bp, Artificial
  Probe
tcttattcttgctgaggacattgta

SEQ ID NO: 49065 - DNA, 25 bp, Artificial
  Probe
cttattcttgctgaggacattgtag

SEQ ID NO: 49066 - DNA, 25 bp, Artificial
  Probe
cctcctccaactatctgcttatctt

SEQ ID NO: 49067 - DNA, 25 bp, Artificial
  Probe
ctcctccaactatctgcttatcttg

SEQ ID NO: 49068 - DNA, 25 bp, Artificial
  Probe
ctcctcctccaactatctgcttatc

SEQ ID NO: 49069 - DNA, 25 bp, Artificial
  Probe
atctcttattcttgctgaggacatt

SEQ ID NO: 49070 - DNA, 25 bp, Artificial
  Probe
catctcttattcttgctgaggacat

SEQ ID NO: 49071 - DNA, 25 bp, Artificial
  Probe
tctcttattcttgctgaggacattg

SEQ ID NO: 49072 - DNA, 25 bp, Artificial
  Probe
gtcctccatctcttattcttgctga

SEQ ID NO: 49073 - DNA, 25 bp, Artificial
  Probe
ctcttattcttgctgaggacattgt

SEQ ID NO: 49074 - DNA, 25 bp, Artificial
  Probe
tcctcctccaactatctgcttatct

SEQ ID NO: 49075 - DNA, 25 bp, Artificial
  Probe
aatctcatggaattgcctctgataa

SEQ ID NO: 49076 - DNA, 25 bp, Artificial
  Probe
atctcatggaattgcctctgataat

SEQ ID NO: 49077 - DNA, 25 bp, Artificial
  Probe
gaatctcatggaattgcctctgata

SEQ ID NO: 49078 - DNA, 25 bp, Artificial
  Probe
tcctccatctcttattcttgctgag

SEQ ID NO: 49079 - DNA, 25 bp, Artificial
  Probe
tctcatggaattgcctctgataatt

SEQ ID NO: 49080 - DNA, 25 bp, Artificial
  Probe
ggtcctccatctcttattcttgctg

SEQ ID NO: 49081 - DNA, 25 bp, Artificial
  Probe
ccatctcttattcttgctgaggaca

SEQ ID NO: 49082 - DNA, 25 bp, Artificial
  Probe
aggacattgtagcttcaactagaat

SEQ ID NO: 49083 - DNA, 25 bp, Artificial
  Probe
gaggacattgtagcttcaactagaa

SEQ ID NO: 49084 - DNA, 25 bp, Artificial
  Probe
tgagcaagataatagaatgtgggtt

SEQ ID NO: 49085 - DNA, 25 bp, Artificial
  Probe
cctcctcctccaactatctgcttat

SEQ ID NO: 49086 - DNA, 25 bp, Artificial
  Probe
gcctaattctacttcagatcactta

SEQ ID NO: 49087 - DNA, 25 bp, Artificial
  Probe
ctgagcaagataatagaatgtgggt

SEQ ID NO: 49088 - DNA, 25 bp, Artificial
  Probe
ggacattgtagcttcaactagaatt

SEQ ID NO: 49089 - DNA, 25 bp, Artificial
  Probe
gcttatcttggcatctgttaaactg

SEQ ID NO: 49090 - DNA, 25 bp, Artificial
  Probe
agaatctcatggaattgcctctgat

SEQ ID NO: 49091 - DNA, 25 bp, Artificial
  Probe
ctgaggacattgtagcttcaactag

SEQ ID NO: 49092 - DNA, 25 bp, Artificial
  Probe
ctccatctcttattcttgctgagga

SEQ ID NO: 49093 - DNA, 25 bp, Artificial
  Probe
gagcaagataatagaatgtgggttt

SEQ ID NO: 49094 - DNA, 25 bp, Artificial
  Probe
tgaggacattgtagcttcaactaga

SEQ ID NO: 49095 - DNA, 25 bp, Artificial
  Probe
aagaatctcatggaattgcctctga

SEQ ID NO: 49096 - DNA, 25 bp, Artificial
  Probe
tccatctcttattcttgctgaggac

SEQ ID NO: 49097 - DNA, 25 bp, Artificial
  Probe
ttaaacctcctcctccaactatctg

SEQ ID NO: 49098 - DNA, 25 bp, Artificial
  Probe
tggctggaataaagactttcatttg

SEQ ID NO: 49099 - DNA, 25 bp, Artificial
  Probe
tggaataaagactttcatttggctc

SEQ ID NO: 49100 - DNA, 25 bp, Artificial
  Probe
ctggaataaagactttcatttggct

SEQ ID NO: 49101 - DNA, 25 bp, Artificial
  Probe
agatggctggaataaagactttcat

SEQ ID NO: 49102 - DNA, 25 bp, Artificial
  Probe
gatggctggaataaagactttcatt

SEQ ID NO: 49103 - DNA, 25 bp, Artificial
  Probe
agagatggctggaataaagactttc

SEQ ID NO: 49104 - DNA, 25 bp, Artificial
  Probe
ggctggaataaagactttcatttgg

SEQ ID NO: 49105 - DNA, 25 bp, Artificial
  Probe
ggaataaagactttcatttggctct

SEQ ID NO: 49106 - DNA, 25 bp, Artificial
  Probe
atggctggaataaagactttcattt

SEQ ID NO: 49107 - DNA, 25 bp, Artificial
  Probe
gagatggctggaataaagactttca

SEQ ID NO: 49108 - DNA, 25 bp, Artificial
  Probe
ttattcttgctgaggacattgtagc

SEQ ID NO: 49109 - DNA, 25 bp, Artificial
  Probe
gtctgtgtaaaggacaagaagtctt

SEQ ID NO: 49110 - DNA, 25 bp, Artificial
  Probe
tctgtgtaaaggacaagaagtcttc

SEQ ID NO: 49111 - DNA, 25 bp, Artificial
  Probe
gaagtcttctgcactctaactgtgt

SEQ ID NO: 49112 - DNA, 25 bp, Artificial
  Probe
caagaagtcttctgcactctaactg

SEQ ID NO: 49113 - DNA, 25 bp, Artificial
  Probe
gacaagaagtcttctgcactctaac

SEQ ID NO: 49114 - DNA, 25 bp, Artificial
  Probe
aagaagtcttctgcactctaactgt

SEQ ID NO: 49115 - DNA, 25 bp, Artificial
  Probe
acaagaagtcttctgcactctaact

SEQ ID NO: 49116 - DNA, 25 bp, Artificial
  Probe
aagtcttctgcactctaactgtgtg

SEQ ID NO: 49117 - DNA, 25 bp, Artificial
  Probe
agaagtcttctgcactctaactgtg

SEQ ID NO: 49118 - DNA, 25 bp, Artificial
  Probe
ggacaagaagtcttctgcactctaa

SEQ ID NO: 49119 - DNA, 25 bp, Artificial
  Probe
catcctatgtgtacctgaaaggcag

SEQ ID NO: 49120 - DNA, 25 bp, Artificial
  Probe
ctgtgtaaaggacaagaagtcttct

SEQ ID NO: 49121 - DNA, 25 bp, Artificial
  Probe
tgtgtaaaggacaagaagtcttctg

SEQ ID NO: 49122 - DNA, 25 bp, Artificial
  Probe
aggacaagaagtcttctgcactcta

SEQ ID NO: 49123 - DNA, 25 bp, Artificial
  Probe
cttctgcactctaactgtgtgtgtc

SEQ ID NO: 49124 - DNA, 25 bp, Artificial
  Probe
gtcttctgcactctaactgtgtgtg

SEQ ID NO: 49125 - DNA, 25 bp, Artificial
  Probe
agtcttctgcactctaactgtgtgt

SEQ ID NO: 49126 - DNA, 25 bp, Artificial
  Probe
atcctatgtgtacctgaaaggcagt

SEQ ID NO: 49127 - DNA, 25 bp, Artificial
  Probe
ctggatgctcaatgtgtcaccttca

SEQ ID NO: 49128 - DNA, 25 bp, Artificial
  Probe
tcttctgcactctaactgtgtgtgt

SEQ ID NO: 49129 - DNA, 25 bp, Artificial
  Probe
gtgtaaaggacaagaagtcttctgc

SEQ ID NO: 49130 - DNA, 25 bp, Artificial
  Probe
caaggagaagctcagacagaagagg

SEQ ID NO: 49131 - DNA, 25 bp, Artificial
  Probe
taaaggacaagaagtcttctgcact

SEQ ID NO: 49132 - DNA, 25 bp, Artificial
  Probe
gtaaaggacaagaagtcttctgcac

SEQ ID NO: 49133 - DNA, 25 bp, Artificial
  Probe
ttctgcactctaactgtgtgtgtca

SEQ ID NO: 49134 - DNA, 25 bp, Artificial
  Probe
aaggacaagaagtcttctgcactct

SEQ ID NO: 49135 - DNA, 25 bp, Artificial
  Probe
tgtaaaggacaagaagtcttctgca

SEQ ID NO: 49136 - DNA, 25 bp, Artificial
  Probe
tcctatgtgtacctgaaaggcagtg

SEQ ID NO: 49137 - DNA, 25 bp, Artificial
  Probe
ccatcctatgtgtacctgaaaggca

SEQ ID NO: 49138 - DNA, 25 bp, Artificial
  Probe
gcaaggagaagctcagacagaagag

SEQ ID NO: 49139 - DNA, 25 bp, Artificial
  Probe
actctaactgtgtgtgtcacccttg

SEQ ID NO: 49140 - DNA, 25 bp, Artificial
  Probe
cactctaactgtgtgtgtcaccctt

SEQ ID NO: 49141 - DNA, 25 bp, Artificial
  Probe
aaaggacaagaagtcttctgcactc

SEQ ID NO: 49142 - DNA, 25 bp, Artificial
  Probe
tgtctgtgtaaaggacaagaagtct

SEQ ID NO: 49143 - DNA, 25 bp, Artificial
  Probe
gtgtctgtgtaaaggacaagaagtc

SEQ ID NO: 49144 - DNA, 25 bp, Artificial
  Probe
ctgtgtctgtgtaaaggacaagaag

SEQ ID NO: 49145 - DNA, 25 bp, Artificial
  Probe
tccccatcctatgtgtacctgaaag

SEQ ID NO: 49146 - DNA, 25 bp, Artificial
  Probe
tctgcactctaactgtgtgtgtcac

SEQ ID NO: 49147 - DNA, 25 bp, Artificial
  Probe
tgtgtctgtgtaaaggacaagaagt

SEQ ID NO: 49148 - DNA, 25 bp, Artificial
  Probe
gtccccatcctatgtgtacctgaaa

SEQ ID NO: 49149 - DNA, 25 bp, Artificial
  Probe
cccatcctatgtgtacctgaaaggc

SEQ ID NO: 49150 - DNA, 25 bp, Artificial
  Probe
cctgtgtctgtgtaaaggacaagaa

SEQ ID NO: 49151 - DNA, 25 bp, Artificial
  Probe
ctctaactgtgtgtgtcacccttgg

SEQ ID NO: 49152 - DNA, 25 bp, Artificial
  Probe
gtggacctgtgtctgtgtaaaggac

SEQ ID NO: 49153 - DNA, 25 bp, Artificial
  Probe
ctatgtgtacctgaaaggcagtggg

SEQ ID NO: 49154 - DNA, 25 bp, Artificial
  Probe
cacttcagattctcatcaggactat

SEQ ID NO: 49155 - DNA, 25 bp, Artificial
  Probe
ctatggagtattgtgagagcgaatt

SEQ ID NO: 49156 - DNA, 25 bp, Artificial
  Probe
tatggagtattgtgagagcgaattg

SEQ ID NO: 49157 - DNA, 25 bp, Artificial
  Probe
ttaagacagcacttcagattctcat

SEQ ID NO: 49158 - DNA, 25 bp, Artificial
  Probe
attaagacagcacttcagattctca

SEQ ID NO: 49159 - DNA, 25 bp, Artificial
  Probe
taagacagcacttcagattctcatc

SEQ ID NO: 49160 - DNA, 25 bp, Artificial
  Probe
aaccattaagacagcacttcagatt

SEQ ID NO: 49161 - DNA, 25 bp, Artificial
  Probe
cattaagacagcacttcagattctc

SEQ ID NO: 49162 - DNA, 25 bp, Artificial
  Probe
acttcagattctcatcaggactatt

SEQ ID NO: 49163 - DNA, 25 bp, Artificial
  Probe
ccattaagacagcacttcagattct

SEQ ID NO: 49164 - DNA, 25 bp, Artificial
  Probe
ttctagcataccgtgtagttcctat

SEQ ID NO: 49165 - DNA, 25 bp, Artificial
  Probe
accattaagacagcacttcagattc

SEQ ID NO: 49166 - DNA, 25 bp, Artificial
  Probe
aagagcatagtaggttctagcatac

SEQ ID NO: 49167 - DNA, 25 bp, Artificial
  Probe
gttctagcataccgtgtagttccta

SEQ ID NO: 49168 - DNA, 25 bp, Artificial
  Probe
aatggtcttggctaagttactcctt

SEQ ID NO: 49169 - DNA, 25 bp, Artificial
  Probe
gcacttcagattctcatcaggacta

SEQ ID NO: 49170 - DNA, 25 bp, Artificial
  Probe
cctatggagtattgtgagagcgaat

SEQ ID NO: 49171 - DNA, 25 bp, Artificial
  Probe
ttaagagcatagtaggttctagcat

SEQ ID NO: 49172 - DNA, 25 bp, Artificial
  Probe
taagttactccttagagccaacatc

SEQ ID NO: 49173 - DNA, 25 bp, Artificial
  Probe
cacaatggtcttggctaagttactc

SEQ ID NO: 49174 - DNA, 25 bp, Artificial
  Probe
aagttactccttagagccaacatca

SEQ ID NO: 49175 - DNA, 25 bp, Artificial
  Probe
aagacagcacttcagattctcatca

SEQ ID NO: 49176 - DNA, 25 bp, Artificial
  Probe
atggtcttggctaagttactcctta

SEQ ID NO: 49177 - DNA, 25 bp, Artificial
  Probe
cgtagtggacttaatctgtatatgt

SEQ ID NO: 49178 - DNA, 25 bp, Artificial
  Probe
tattgtgagagcgaattgttggaga

SEQ ID NO: 49179 - DNA, 25 bp, Artificial
  Probe
gtattgtgagagcgaattgttggag

SEQ ID NO: 49180 - DNA, 25 bp, Artificial
  Probe
gagtattgtgagagcgaattgttgg

SEQ ID NO: 49181 - DNA, 25 bp, Artificial
  Probe
ggagtattgtgagagcgaattgttg

SEQ ID NO: 49182 - DNA, 25 bp, Artificial
  Probe
ataccgtgtagttcctatggagtat

SEQ ID NO: 49183 - DNA, 25 bp, Artificial
  Probe
atggagtattgtgagagcgaattgt

SEQ ID NO: 49184 - DNA, 25 bp, Artificial
  Probe
taccgtgtagttcctatggagtatt

SEQ ID NO: 49185 - DNA, 25 bp, Artificial
  Probe
gtgtagttcctatggagtattgtga

SEQ ID NO: 49186 - DNA, 25 bp, Artificial
  Probe
agttactccttagagccaacatcag

SEQ ID NO: 49187 - DNA, 25 bp, Artificial
  Probe
taagagcatagtaggttctagcata

SEQ ID NO: 49188 - DNA, 25 bp, Artificial
  Probe
tgtagttcctatggagtattgtgag

SEQ ID NO: 49189 - DNA, 25 bp, Artificial
  Probe
cgtgtagttcctatggagtattgtg

SEQ ID NO: 49190 - DNA, 25 bp, Artificial
  Probe
agacagcacttcagattctcatcag

SEQ ID NO: 49191 - DNA, 25 bp, Artificial
  Probe
gtagttcctatggagtattgtgaga

SEQ ID NO: 49192 - DNA, 25 bp, Artificial
  Probe
cataccgtgtagttcctatggagta

SEQ ID NO: 49193 - DNA, 25 bp, Artificial
  Probe
caatggtcttggctaagttactcct

SEQ ID NO: 49194 - DNA, 25 bp, Artificial
  Probe
ttactccttagagccaacatcagtg

SEQ ID NO: 49195 - DNA, 25 bp, Artificial
  Probe
gttactccttagagccaacatcagt

SEQ ID NO: 49196 - DNA, 25 bp, Artificial
  Probe
agtattgtgagagcgaattgttgga

SEQ ID NO: 49197 - DNA, 25 bp, Artificial
  Probe
tggagtattgtgagagcgaattgtt

SEQ ID NO: 49198 - DNA, 25 bp, Artificial
  Probe
tctagcataccgtgtagttcctatg

SEQ ID NO: 49199 - DNA, 25 bp, Artificial
  Probe
tattatgttgtaggtgctccagttc

SEQ ID NO: 49200 - DNA, 25 bp, Artificial
  Probe
gtattatgttgtaggtgctccagtt

SEQ ID NO: 49201 - DNA, 25 bp, Artificial
  Probe
tgtattatgttgtaggtgctccagt

SEQ ID NO: 49202 - DNA, 25 bp, Artificial
  Probe
attatgttgtaggtgctccagttca

SEQ ID NO: 49203 - DNA, 25 bp, Artificial
  Probe
ctgtattatgttgtaggtgctccag

SEQ ID NO: 49204 - DNA, 25 bp, Artificial
  Probe
ttatgttgtaggtgctccagttcaa

SEQ ID NO: 49205 - DNA, 25 bp, Artificial
  Probe
ttgagtctgatgagtatccagtgtg

SEQ ID NO: 49206 - DNA, 25 bp, Artificial
  Probe
gttgagtctgatgagtatccagtgt

SEQ ID NO: 49207 - DNA, 25 bp, Artificial
  Probe
gttatgggttgagtctgatgagtat

SEQ ID NO: 49208 - DNA, 25 bp, Artificial
  Probe
ttatgggttgagtctgatgagtatc

SEQ ID NO: 49209 - DNA, 25 bp, Artificial
  Probe
gagtctgatgagtatccagtgtgtc

SEQ ID NO: 49210 - DNA, 25 bp, Artificial
  Probe
gtctgtgccctgtattatgttgtag

SEQ ID NO: 49211 - DNA, 25 bp, Artificial
  Probe
tatgggttgagtctgatgagtatcc

SEQ ID NO: 49212 - DNA, 25 bp, Artificial
  Probe
cctgtattatgttgtaggtgctcca

SEQ ID NO: 49213 - DNA, 25 bp, Artificial
  Probe
caaactgaaggacctaaagcaaatg

SEQ ID NO: 49214 - DNA, 25 bp, Artificial
  Probe
ctgaccactgtgaaggactcataag

SEQ ID NO: 49215 - DNA, 25 bp, Artificial
  Probe
agtctgtgccctgtattatgttgta

SEQ ID NO: 49216 - DNA, 25 bp, Artificial
  Probe
ggttgagtctgatgagtatccagtg

SEQ ID NO: 49217 - DNA, 25 bp, Artificial
  Probe
ggttatgggttgagtctgatgagta

SEQ ID NO: 49218 - DNA, 25 bp, Artificial
  Probe
tatagccgaaagaattgatgagttc

SEQ ID NO: 49219 - DNA, 25 bp, Artificial
  Probe
cagaagagaagtcggaagaggaaga

SEQ ID NO: 49220 - DNA, 25 bp, Artificial
  Probe
tctgaccactgtgaaggactcataa

SEQ ID NO: 49221 - DNA, 25 bp, Artificial
  Probe
atagccgaaagaattgatgagttca

SEQ ID NO: 49222 - DNA, 25 bp, Artificial
  Probe
agtctgatgagtatccagtgtgtca

SEQ ID NO: 49223 - DNA, 25 bp, Artificial
  Probe
tgagtctgatgagtatccagtgtgt

SEQ ID NO: 49224 - DNA, 25 bp, Artificial
  Probe
aaactgaaggacctaaagcaaatgg

SEQ ID NO: 49225 - DNA, 25 bp, Artificial
  Probe
gtctgatgagtatccagtgtgtcac

SEQ ID NO: 49226 - DNA, 25 bp, Artificial
  Probe
aagtcggaagaggaagaccttagaa

SEQ ID NO: 49227 - DNA, 25 bp, Artificial
  Probe
aagaattgatgagttcattggcaaa

SEQ ID NO: 49228 - DNA, 25 bp, Artificial
  Probe
aaagaattgatgagttcattggcaa

SEQ ID NO: 49229 - DNA, 25 bp, Artificial
  Probe
gaaagaattgatgagttcattggca

SEQ ID NO: 49230 - DNA, 25 bp, Artificial
  Probe
agaattgatgagttcattggcaaac

SEQ ID NO: 49231 - DNA, 25 bp, Artificial
  Probe
tagccgaaagaattgatgagttcat

SEQ ID NO: 49232 - DNA, 25 bp, Artificial
  Probe
ccgaaagaattgatgagttcattgg

SEQ ID NO: 49233 - DNA, 25 bp, Artificial
  Probe
ctctgaccactgtgaaggactcata

SEQ ID NO: 49234 - DNA, 25 bp, Artificial
  Probe
cgaaagaattgatgagttcattggc

SEQ ID NO: 49235 - DNA, 25 bp, Artificial
  Probe
gccgaaagaattgatgagttcattg

SEQ ID NO: 49236 - DNA, 25 bp, Artificial
  Probe
agccgaaagaattgatgagttcatt

SEQ ID NO: 49237 - DNA, 25 bp, Artificial
  Probe
gaagaggaagaccttagaaacgaag

SEQ ID NO: 49238 - DNA, 25 bp, Artificial
  Probe
gcaaactgaaggacctaaagcaaat

SEQ ID NO: 49239 - DNA, 25 bp, Artificial
  Probe
gaagtcggaagaggaagaccttaga

SEQ ID NO: 49240 - DNA, 25 bp, Artificial
  Probe
agaagtcggaagaggaagaccttag

SEQ ID NO: 49241 - DNA, 25 bp, Artificial
  Probe
gagaagtcggaagaggaagacctta

SEQ ID NO: 49242 - DNA, 25 bp, Artificial
  Probe
cattggcaaactgaaggacctaaag

SEQ ID NO: 49243 - DNA, 25 bp, Artificial
  Probe
agaagagaagtcggaagaggaagac

SEQ ID NO: 49244 - DNA, 25 bp, Artificial
  Probe
tactgcaacctcctcaaatattagc

SEQ ID NO: 49245 - DNA, 25 bp, Artificial
  Probe
caacctcctcaaatattagcactgc

SEQ ID NO: 49246 - DNA, 25 bp, Artificial
  Probe
gcaacctcctcaaatattagcactg

SEQ ID NO: 49247 - DNA, 25 bp, Artificial
  Probe
cgatactgcaacctcctcaaatatt

SEQ ID NO: 49248 - DNA, 25 bp, Artificial
  Probe
atactgcaacctcctcaaatattag

SEQ ID NO: 49249 - DNA, 25 bp, Artificial
  Probe
gatactgcaacctcctcaaatatta

SEQ ID NO: 49250 - DNA, 25 bp, Artificial
  Probe
tcgatactgcaacctcctcaaatat

SEQ ID NO: 49251 - DNA, 25 bp, Artificial
  Probe
ttcgatactgcaacctcctcaaata

SEQ ID NO: 49252 - DNA, 25 bp, Artificial
  Probe
aacctcctcaaatattagcactgcc

SEQ ID NO: 49253 - DNA, 25 bp, Artificial
  Probe
ctcctcaaatattagcactgcctcc

SEQ ID NO: 49254 - DNA, 25 bp, Artificial
  Probe
cctcctcaaatattagcactgcctc

SEQ ID NO: 49255 - DNA, 25 bp, Artificial
  Probe
tttcgatactgcaacctcctcaaat

SEQ ID NO: 49256 - DNA, 25 bp, Artificial
  Probe
acctcctcaaatattagcactgcct

SEQ ID NO: 49257 - DNA, 25 bp, Artificial
  Probe
ggtacaaacgtctacttcgcaagaa

SEQ ID NO: 49258 - DNA, 25 bp, Artificial
  Probe
ctgcaacctcctcaaatattagcac

SEQ ID NO: 49259 - DNA, 25 bp, Artificial
  Probe
tcctcaaatattagcactgcctccc

SEQ ID NO: 49260 - DNA, 25 bp, Artificial
  Probe
tgcaacctcctcaaatattagcact

SEQ ID NO: 49261 - DNA, 25 bp, Artificial
  Probe
actgcaacctcctcaaatattagca

SEQ ID NO: 49262 - DNA, 25 bp, Artificial
  Probe
gtacaaacgtctacttcgcaagaag

SEQ ID NO: 49263 - DNA, 25 bp, Artificial
  Probe
ttttcgatactgcaacctcctcaaa

SEQ ID NO: 49264 - DNA, 25 bp, Artificial
  Probe
tacaaacgtctacttcgcaagaagg

SEQ ID NO: 49265 - DNA, 25 bp, Artificial
  Probe
gttttcgatactgcaacctcctcaa

SEQ ID NO: 49266 - DNA, 25 bp, Artificial
  Probe
gggtacaaacgtctacttcgcaaga

SEQ ID NO: 49267 - DNA, 25 bp, Artificial
  Probe
cctcaaatattagcactgcctcccc

SEQ ID NO: 49268 - DNA, 25 bp, Artificial
  Probe
ggttttcgatactgcaacctcctca

SEQ ID NO: 49269 - DNA, 25 bp, Artificial
  Probe
ttcttgattgaactgaacctgtaag

SEQ ID NO: 49270 - DNA, 25 bp, Artificial
  Probe
cttcttgattgaactgaacctgtaa

SEQ ID NO: 49271 - DNA, 25 bp, Artificial
  Probe
catcaatctaatcttgcgttcagtg

SEQ ID NO: 49272 - DNA, 25 bp, Artificial
  Probe
gcttcttgattgaactgaacctgta

SEQ ID NO: 49273 - DNA, 25 bp, Artificial
  Probe
atcaatctaatcttgcgttcagtga

SEQ ID NO: 49274 - DNA, 25 bp, Artificial
  Probe
gagtagagatcgccatgatgattat

SEQ ID NO: 49275 - DNA, 25 bp, Artificial
  Probe
aatctaatcttgcgttcagtgaatt

SEQ ID NO: 49276 - DNA, 25 bp, Artificial
  Probe
caatctaatcttgcgttcagtgaat

SEQ ID NO: 49277 - DNA, 25 bp, Artificial
  Probe
ttgcttcttgattgaactgaacctg

SEQ ID NO: 49278 - DNA, 25 bp, Artificial
  Probe
tctaatcttgcgttcagtgaattaa

SEQ ID NO: 49279 - DNA, 25 bp, Artificial
  Probe
tcaatctaatcttgcgttcagtgaa

SEQ ID NO: 49280 - DNA, 25 bp, Artificial
  Probe
tgattgaactgaacctgtaaggatt

SEQ ID NO: 49281 - DNA, 25 bp, Artificial
  Probe
ttgattgaactgaacctgtaaggat

SEQ ID NO: 49282 - DNA, 25 bp, Artificial
  Probe
gattgaactgaacctgtaaggattc

SEQ ID NO: 49283 - DNA, 25 bp, Artificial
  Probe
atctaatcttgcgttcagtgaatta

SEQ ID NO: 49284 - DNA, 25 bp, Artificial
  Probe
cttgattgaactgaacctgtaagga

SEQ ID NO: 49285 - DNA, 25 bp, Artificial
  Probe
tcttgattgaactgaacctgtaagg

SEQ ID NO: 49286 - DNA, 25 bp, Artificial
  Probe
ggagtagagatcgccatgatgatta

SEQ ID NO: 49287 - DNA, 25 bp, Artificial
  Probe
tcaagagaaagggaccatagtagat

SEQ ID NO: 49288 - DNA, 25 bp, Artificial
  Probe
atcaagagaaagggaccatagtaga

SEQ ID NO: 49289 - DNA, 25 bp, Artificial
  Probe
attaaacaatccaaagtatctgccg

SEQ ID NO: 49290 - DNA, 25 bp, Artificial
  Probe
tgcttcttgattgaactgaacctgt

SEQ ID NO: 49291 - DNA, 25 bp, Artificial
  Probe
ttaaacaatccaaagtatctgccga

SEQ ID NO: 49292 - DNA, 25 bp, Artificial
  Probe
taaacaatccaaagtatctgccgac

SEQ ID NO: 49293 - DNA, 25 bp, Artificial
  Probe
tttgcttcttgattgaactgaacct

SEQ ID NO: 49294 - DNA, 25 bp, Artificial
  Probe
aagagaaagggaccatagtagatca

SEQ ID NO: 49295 - DNA, 25 bp, Artificial
  Probe
caagagaaagggaccatagtagatc

SEQ ID NO: 49296 - DNA, 25 bp, Artificial
  Probe
gatcaagagaaagggaccatagtag

SEQ ID NO: 49297 - DNA, 25 bp, Artificial
  Probe
ttagaagctgaaggaagaggaacac

SEQ ID NO: 49298 - DNA, 25 bp, Artificial
  Probe
gagaataccgtcatcgttagaagct

SEQ ID NO: 49299 - DNA, 25 bp, Artificial
  Probe
gtttgcttcttgattgaactgaacc

SEQ ID NO: 49300 - DNA, 25 bp, Artificial
  Probe
acagcaccaatttgattacaataga

SEQ ID NO: 49301 - DNA, 25 bp, Artificial
  Probe
agagaaagggaccatagtagatcac

SEQ ID NO: 49302 - DNA, 25 bp, Artificial
  Probe
atcttgcgttcagtgaattaaacat

SEQ ID NO: 49303 - DNA, 25 bp, Artificial
  Probe
aatcttgcgttcagtgaattaaaca

SEQ ID NO: 49304 - DNA, 25 bp, Artificial
  Probe
gttagaagctgaaggaagaggaaca

SEQ ID NO: 49305 - DNA, 25 bp, Artificial
  Probe
tcatcgttagaagctgaaggaagag

SEQ ID NO: 49306 - DNA, 25 bp, Artificial
  Probe
aataccgtcatcgttagaagctgaa

SEQ ID NO: 49307 - DNA, 25 bp, Artificial
  Probe
agaataccgtcatcgttagaagctg

SEQ ID NO: 49308 - DNA, 25 bp, Artificial
  Probe
aattaaacaatccaaagtatctgcc

SEQ ID NO: 49309 - DNA, 25 bp, Artificial
  Probe
cgatcaagagaaagggaccatagta

SEQ ID NO: 49310 - DNA, 25 bp, Artificial
  Probe
aacagcaccaatttgattacaatag

SEQ ID NO: 49311 - DNA, 25 bp, Artificial
  Probe
tcttgcgttcagtgaattaaacatg

SEQ ID NO: 49312 - DNA, 25 bp, Artificial
  Probe
ttgaactgaacctgtaaggattcat

SEQ ID NO: 49313 - DNA, 25 bp, Artificial
  Probe
attgaactgaacctgtaaggattca

SEQ ID NO: 49314 - DNA, 25 bp, Artificial
  Probe
atagcctcagacagttagttccttc

SEQ ID NO: 49315 - DNA, 25 bp, Artificial
  Probe
catagcctcagacagttagttcctt

SEQ ID NO: 49316 - DNA, 25 bp, Artificial
  Probe
cagacagttagttccttcctccttc

SEQ ID NO: 49317 - DNA, 25 bp, Artificial
  Probe
tcagacagttagttccttcctcctt

SEQ ID NO: 49318 - DNA, 25 bp, Artificial
  Probe
ctcagacagttagttccttcctcct

SEQ ID NO: 49319 - DNA, 25 bp, Artificial
  Probe
agacagttagttccttcctccttcc

SEQ ID NO: 49320 - DNA, 25 bp, Artificial
  Probe
tagcctcagacagttagttccttcc

SEQ ID NO: 49321 - DNA, 25 bp, Artificial
  Probe
ccatagcctcagacagttagttcct

SEQ ID NO: 49322 - DNA, 25 bp, Artificial
  Probe
atgccatagcctcagacagttagtt

SEQ ID NO: 49323 - DNA, 25 bp, Artificial
  Probe
aatgccatagcctcagacagttagt

SEQ ID NO: 49324 - DNA, 25 bp, Artificial
  Probe
cctcagacagttagttccttcctcc

SEQ ID NO: 49325 - DNA, 25 bp, Artificial
  Probe
aaatgccatagcctcagacagttag

SEQ ID NO: 49326 - DNA, 25 bp, Artificial
  Probe
gaaatgccatagcctcagacagtta

SEQ ID NO: 49327 - DNA, 25 bp, Artificial
  Probe
tgccatagcctcagacagttagttc

SEQ ID NO: 49328 - DNA, 25 bp, Artificial
  Probe
gcctcagacagttagttccttcctc

SEQ ID NO: 49329 - DNA, 25 bp, Artificial
  Probe
agcctcagacagttagttccttcct

SEQ ID NO: 49330 - DNA, 25 bp, Artificial
  Probe
gccatagcctcagacagttagttcc

SEQ ID NO: 49331 - DNA, 25 bp, Artificial
  Probe
cagttagttccttcctccttccctc

SEQ ID NO: 49332 - DNA, 25 bp, Artificial
  Probe
tttcccttgtaaatgctccttccct

SEQ ID NO: 49333 - DNA, 25 bp, Artificial
  Probe
gattctgatgtcccaacttgctgtc

SEQ ID NO: 49334 - DNA, 25 bp, Artificial
  Probe
gacagttagttccttcctccttccc

SEQ ID NO: 49335 - DNA, 25 bp, Artificial
  Probe
attttcccttgtaaatgctccttcc

SEQ ID NO: 49336 - DNA, 25 bp, Artificial
  Probe
ttcccttgtaaatgctccttccctc

SEQ ID NO: 49337 - DNA, 25 bp, Artificial
  Probe
acagttagttccttcctccttccct

SEQ ID NO: 49338 - DNA, 25 bp, Artificial
  Probe
cccttgtaaatgctccttccctcat

SEQ ID NO: 49339 - DNA, 25 bp, Artificial
  Probe
tgaaatgccatagcctcagacagtt

SEQ ID NO: 49340 - DNA, 25 bp, Artificial
  Probe
ttttcccttgtaaatgctccttccc

SEQ ID NO: 49341 - DNA, 25 bp, Artificial
  Probe
cttgtccagattttgtgcgttgaag

SEQ ID NO: 49342 - DNA, 25 bp, Artificial
  Probe
cattggattctgatgtcccaacttg

SEQ ID NO: 49343 - DNA, 25 bp, Artificial
  Probe
ggattctgatgtcccaacttgctgt

SEQ ID NO: 49344 - DNA, 25 bp, Artificial
  Probe
ttcgactatctcctgttgggaacaa

SEQ ID NO: 49345 - DNA, 25 bp, Artificial
  Probe
ttgtccagattttgtgcgttgaagg

SEQ ID NO: 49346 - DNA, 25 bp, Artificial
  Probe
ccttgtccagattttgtgcgttgaa

SEQ ID NO: 49347 - DNA, 25 bp, Artificial
  Probe
tggattctgatgtcccaacttgctg

SEQ ID NO: 49348 - DNA, 25 bp, Artificial
  Probe
aaaggcaatcattttcccttgtaaa

SEQ ID NO: 49349 - DNA, 25 bp, Artificial
  Probe
aaggcaatcattttcccttgtaaat

SEQ ID NO: 49350 - DNA, 25 bp, Artificial
  Probe
caaaggcaatcattttcccttgtaa

SEQ ID NO: 49351 - DNA, 25 bp, Artificial
  Probe
tcgactatctcctgttgggaacaag

SEQ ID NO: 49352 - DNA, 25 bp, Artificial
  Probe
tccagattttgtgcgttgaagggta

SEQ ID NO: 49353 - DNA, 25 bp, Artificial
  Probe
gactatctcctgttgggaacaagga

SEQ ID NO: 49354 - DNA, 25 bp, Artificial
  Probe
ccagattttgtgcgttgaagggtac

SEQ ID NO: 49355 - DNA, 25 bp, Artificial
  Probe
attggattctgatgtcccaacttgc

SEQ ID NO: 49356 - DNA, 25 bp, Artificial
  Probe
ttgggaacaaggacccgttgatatg

SEQ ID NO: 49357 - DNA, 25 bp, Artificial
  Probe
gttgggaacaaggacccgttgatat

SEQ ID NO: 49358 - DNA, 25 bp, Artificial
  Probe
ccaaaggcaatcattttcccttgta

SEQ ID NO: 49359 - DNA, 25 bp, Artificial
  Probe
gtattacacaggctacatggagagt

SEQ ID NO: 49360 - DNA, 25 bp, Artificial
  Probe
tattacacaggctacatggagagtg

SEQ ID NO: 49361 - DNA, 25 bp, Artificial
  Probe
cataaccgtgctctgtactgaagaa

SEQ ID NO: 49362 - DNA, 25 bp, Artificial
  Probe
tggagagtgaaatactggaagtcat

SEQ ID NO: 49363 - DNA, 25 bp, Artificial
  Probe
atggagagtgaaatactggaagtca

SEQ ID NO: 49364 - DNA, 25 bp, Artificial
  Probe
ttcatcgctgtcaagaacaaatatg

SEQ ID NO: 49365 - DNA, 25 bp, Artificial
  Probe
taccataaccgtgctctgtactgaa

SEQ ID NO: 49366 - DNA, 25 bp, Artificial
  Probe
tacatggagagtgaaatactggaag

SEQ ID NO: 49367 - DNA, 25 bp, Artificial
  Probe
ctacatggagagtgaaatactggaa

SEQ ID NO: 49368 - DNA, 25 bp, Artificial
  Probe
ggagagtgaaatactggaagtcatg

SEQ ID NO: 49369 - DNA, 25 bp, Artificial
  Probe
catggagagtgaaatactggaagtc

SEQ ID NO: 49370 - DNA, 25 bp, Artificial
  Probe
ctatactgaagaaatgtagaatggc

SEQ ID NO: 49371 - DNA, 25 bp, Artificial
  Probe
gagagtgaaatactggaagtcatgc

SEQ ID NO: 49372 - DNA, 25 bp, Artificial
  Probe
acatggagagtgaaatactggaagt

SEQ ID NO: 49373 - DNA, 25 bp, Artificial
  Probe
ataaccgtgctctgtactgaagaaa

SEQ ID NO: 49374 - DNA, 25 bp, Artificial
  Probe
ctaccataaccgtgctctgtactga

SEQ ID NO: 49375 - DNA, 25 bp, Artificial
  Probe
acaggctacatggagagtgaaatac

SEQ ID NO: 49376 - DNA, 25 bp, Artificial
  Probe
tcatcgctgtcaagaacaaatatgc

SEQ ID NO: 49377 - DNA, 25 bp, Artificial
  Probe
gctacatggagagtgaaatactgga

SEQ ID NO: 49378 - DNA, 25 bp, Artificial
  Probe
aggctacatggagagtgaaatactg

SEQ ID NO: 49379 - DNA, 25 bp, Artificial
  Probe
caggctacatggagagtgaaatact

SEQ ID NO: 49380 - DNA, 25 bp, Artificial
  Probe
attacacaggctacatggagagtga

SEQ ID NO: 49381 - DNA, 25 bp, Artificial
  Probe
ttacacaggctacatggagagtgaa

SEQ ID NO: 49382 - DNA, 25 bp, Artificial
  Probe
ccataaccgtgctctgtactgaaga

SEQ ID NO: 49383 - DNA, 25 bp, Artificial
  Probe
cacaggctacatggagagtgaaata

SEQ ID NO: 49384 - DNA, 25 bp, Artificial
  Probe
ggctacatggagagtgaaatactgg

SEQ ID NO: 49385 - DNA, 25 bp, Artificial
  Probe
catcgctgtcaagaacaaatatgcc

SEQ ID NO: 49386 - DNA, 25 bp, Artificial
  Probe
ctgtcaagaacaaatatgccagcag

SEQ ID NO: 49387 - DNA, 25 bp, Artificial
  Probe
agagtgaaatactggaagtcatgca

SEQ ID NO: 49388 - DNA, 25 bp, Artificial
  Probe
atactgaagaaatgtagaatggcct

SEQ ID NO: 49389 - DNA, 25 bp, Artificial
  Probe
accataaccgtgctctgtactgaag

SEQ ID NO: 49390 - DNA, 25 bp, Artificial
  Probe
tgctctatactgaagaaatgtagaa

SEQ ID NO: 49391 - DNA, 25 bp, Artificial
  Probe
tactgaagaaatgtagaatggccta

SEQ ID NO: 49392 - DNA, 25 bp, Artificial
  Probe
gaaagtcaatgaaaacctcaccaag

SEQ ID NO: 49393 - DNA, 25 bp, Artificial
  Probe
gagtgaaatactggaagtcatgcag

SEQ ID NO: 49394 - DNA, 25 bp, Artificial
  Probe
cctaccataaccgtgctctgtactg

SEQ ID NO: 49395 - DNA, 25 bp, Artificial
  Probe
tcaccaagttcatcgctgtcaagaa

SEQ ID NO: 49396 - DNA, 25 bp, Artificial
  Probe
atgctctatactgaagaaatgtaga

SEQ ID NO: 49397 - DNA, 25 bp, Artificial
  Probe
atcgctgtcaagaacaaatatgcca

SEQ ID NO: 49398 - DNA, 25 bp, Artificial
  Probe
aagtcaatgaaaacctcaccaagtt

SEQ ID NO: 49399 - DNA, 25 bp, Artificial
  Probe
aaagtcaatgaaaacctcaccaagt

SEQ ID NO: 49400 - DNA, 25 bp, Artificial
  Probe
tgaaagtcaatgaaaacctcaccaa

SEQ ID NO: 49401 - DNA, 25 bp, Artificial
  Probe
tatactgaagaaatgtagaatggcc

SEQ ID NO: 49402 - DNA, 25 bp, Artificial
  Probe
agtcaatgaaaacctcaccaagttc

SEQ ID NO: 49403 - DNA, 25 bp, Artificial
  Probe
ctcaccaagttcatcgctgtcaaga

SEQ ID NO: 49404 - DNA, 25 bp, Artificial
  Probe
tcattgctaagatggagaagaagat

SEQ ID NO: 49405 - DNA, 25 bp, Artificial
  Probe
gagaagcagaaggaagtgattgaag

SEQ ID NO: 49406 - DNA, 25 bp, Artificial
  Probe
actgaagaagtgtgttgaggattac

SEQ ID NO: 49407 - DNA, 25 bp, Artificial
  Probe
ctcattgctaagatggagaagaaga

SEQ ID NO: 49408 - DNA, 25 bp, Artificial
  Probe
aactcattgctaagatggagaagaa

SEQ ID NO: 49409 - DNA, 25 bp, Artificial
  Probe
actcattgctaagatggagaagaag

SEQ ID NO: 49410 - DNA, 25 bp, Artificial
  Probe
gaactcattgctaagatggagaaga

SEQ ID NO: 49411 - DNA, 25 bp, Artificial
  Probe
ttgaggattacatagtgaagattgg

SEQ ID NO: 49412 - DNA, 25 bp, Artificial
  Probe
tgaactcattgctaagatggagaag

SEQ ID NO: 49413 - DNA, 25 bp, Artificial
  Probe
tgaagaagtgtgttgaggattacat

SEQ ID NO: 49414 - DNA, 25 bp, Artificial
  Probe
agtgtgttgaggattacatagtgaa

SEQ ID NO: 49415 - DNA, 25 bp, Artificial
  Probe
aagtgtgttgaggattacatagtga

SEQ ID NO: 49416 - DNA, 25 bp, Artificial
  Probe
cattgctaagatggagaagaagatc

SEQ ID NO: 49417 - DNA, 25 bp, Artificial
  Probe
tgtgttgaggattacatagtgaaga

SEQ ID NO: 49418 - DNA, 25 bp, Artificial
  Probe
gtgtgttgaggattacatagtgaag

SEQ ID NO: 49419 - DNA, 25 bp, Artificial
  Probe
gaagtgtgttgaggattacatagtg

SEQ ID NO: 49420 - DNA, 25 bp, Artificial
  Probe
agaagtgtgttgaggattacatagt

SEQ ID NO: 49421 - DNA, 25 bp, Artificial
  Probe
ctgaagaagtgtgttgaggattaca

SEQ ID NO: 49422 - DNA, 25 bp, Artificial
  Probe
tgagaagcagaaggaagtgattgaa

SEQ ID NO: 49423 - DNA, 25 bp, Artificial
  Probe
ttgagaagcagaaggaagtgattga

SEQ ID NO: 49424 - DNA, 25 bp, Artificial
  Probe
aagagaacgatgaactgaacaggat

SEQ ID NO: 49425 - DNA, 25 bp, Artificial
  Probe
atgaactcattgctaagatggagaa

SEQ ID NO: 49426 - DNA, 25 bp, Artificial
  Probe
gatgaactcattgctaagatggaga

SEQ ID NO: 49427 - DNA, 25 bp, Artificial
  Probe
aagaagtgtgttgaggattacatag

SEQ ID NO: 49428 - DNA, 25 bp, Artificial
  Probe
gaagaagtgtgttgaggattacata

SEQ ID NO: 49429 - DNA, 25 bp, Artificial
  Probe
gtgttgaggattacatagtgaagat

SEQ ID NO: 49430 - DNA, 25 bp, Artificial
  Probe
atctgaactctatggagaagtcctt

SEQ ID NO: 49431 - DNA, 25 bp, Artificial
  Probe
gttgaggattacatagtgaagattg

SEQ ID NO: 49432 - DNA, 25 bp, Artificial
  Probe
cgatgaactcattgctaagatggag

SEQ ID NO: 49433 - DNA, 25 bp, Artificial
  Probe
agaagcagaaggaagtgattgaagg

SEQ ID NO: 49434 - DNA, 25 bp, Artificial
  Probe
gatctgcgatgaactcattgctaag

SEQ ID NO: 49435 - DNA, 25 bp, Artificial
  Probe
actaaagagaacgatgaactgaaca

SEQ ID NO: 49436 - DNA, 25 bp, Artificial
  Probe
gatctgaactctatggagaagtcct

SEQ ID NO: 49437 - DNA, 25 bp, Artificial
  Probe
gactaaagagaacgatgaactgaac

SEQ ID NO: 49438 - DNA, 25 bp, Artificial
  Probe
agactaaagagaacgatgaactgaa

SEQ ID NO: 49439 - DNA, 25 bp, Artificial
  Probe
aagactaaagagaacgatgaactga

SEQ ID NO: 49440 - DNA, 25 bp, Artificial
  Probe
agagaacgatgaactgaacaggatc

SEQ ID NO: 49441 - DNA, 25 bp, Artificial
  Probe
gaagactaaagagaacgatgaactg

SEQ ID NO: 49442 - DNA, 25 bp, Artificial
  Probe
agaagactaaagagaacgatgaact

SEQ ID NO: 49443 - DNA, 25 bp, Artificial
  Probe
cagaagactaaagagaacgatgaac

SEQ ID NO: 49444 - DNA, 25 bp, Artificial
  Probe
ctgcgatgaactcattgctaagatg

SEQ ID NO: 49445 - DNA, 25 bp, Artificial
  Probe
tctgaactctatggagaagtccttc

SEQ ID NO: 49446 - DNA, 25 bp, Artificial
  Probe
gcagaagactaaagagaacgatgaa

SEQ ID NO: 49447 - DNA, 25 bp, Artificial
  Probe
ctaaagagaacgatgaactgaacag

SEQ ID NO: 49448 - DNA, 25 bp, Artificial
  Probe
tgttgaggattacatagtgaagatt

SEQ ID NO: 49449 - DNA, 25 bp, Artificial
  Probe
cctcatctgccagaccttaataaag

SEQ ID NO: 49450 - DNA, 25 bp, Artificial
  Probe
acaggtcaagtctaaaggcagtaac

SEQ ID NO: 49451 - DNA, 25 bp, Artificial
  Probe
ctcatctgccagaccttaataaagc

SEQ ID NO: 49452 - DNA, 25 bp, Artificial
  Probe
caggtcaagtctaaaggcagtaact

SEQ ID NO: 49453 - DNA, 25 bp, Artificial
  Probe
aagtctaaaggcagtaactgaagtt

SEQ ID NO: 49454 - DNA, 25 bp, Artificial
  Probe
agtctaaaggcagtaactgaagttc

SEQ ID NO: 49455 - DNA, 25 bp, Artificial
  Probe
tcaagtctaaaggcagtaactgaag

SEQ ID NO: 49456 - DNA, 25 bp, Artificial
  Probe
caagtctaaaggcagtaactgaagt

SEQ ID NO: 49457 - DNA, 25 bp, Artificial
  Probe
gtcaagtctaaaggcagtaactgaa

SEQ ID NO: 49458 - DNA, 25 bp, Artificial
  Probe
gacaggtcaagtctaaaggcagtaa

SEQ ID NO: 49459 - DNA, 25 bp, Artificial
  Probe
atctgccagaccttaataaagcctc

SEQ ID NO: 49460 - DNA, 25 bp, Artificial
  Probe
gtctaaaggcagtaactgaagttcg

SEQ ID NO: 49461 - DNA, 25 bp, Artificial
  Probe
catctgccagaccttaataaagcct

SEQ ID NO: 49462 - DNA, 25 bp, Artificial
  Probe
tcatctgccagaccttaataaagcc

SEQ ID NO: 49463 - DNA, 25 bp, Artificial
  Probe
gcctcatctgccagaccttaataaa

SEQ ID NO: 49464 - DNA, 25 bp, Artificial
  Probe
gacagtggacaggtcaagtctaaag

SEQ ID NO: 49465 - DNA, 25 bp, Artificial
  Probe
ggtcaagtctaaaggcagtaactga

SEQ ID NO: 49466 - DNA, 25 bp, Artificial
  Probe
aggtcaagtctaaaggcagtaactg

SEQ ID NO: 49467 - DNA, 25 bp, Artificial
  Probe
tctgccagaccttaataaagcctct

SEQ ID NO: 49468 - DNA, 25 bp, Artificial
  Probe
cagtaactgaagttcgctgtggttc

SEQ ID NO: 49469 - DNA, 25 bp, Artificial
  Probe
ctaaaggcagtaactgaagttcgct

SEQ ID NO: 49470 - DNA, 25 bp, Artificial
  Probe
tctaaaggcagtaactgaagttcgc

SEQ ID NO: 49471 - DNA, 25 bp, Artificial
  Probe
taaaggcagtaactgaagttcgctg

SEQ ID NO: 49472 - DNA, 25 bp, Artificial
  Probe
ggacaggtcaagtctaaaggcagta

SEQ ID NO: 49473 - DNA, 25 bp, Artificial
  Probe
acagtggacaggtcaagtctaaagg

SEQ ID NO: 49474 - DNA, 25 bp, Artificial
  Probe
aagacagtggacaggtcaagtctaa

SEQ ID NO: 49475 - DNA, 25 bp, Artificial
  Probe
gtaactgaagttcgctgtggttcac

SEQ ID NO: 49476 - DNA, 25 bp, Artificial
  Probe
agtaactgaagttcgctgtggttca

SEQ ID NO: 49477 - DNA, 25 bp, Artificial
  Probe
agacagtggacaggtcaagtctaaa

SEQ ID NO: 49478 - DNA, 25 bp, Artificial
  Probe
aaagacagtggacaggtcaagtcta

SEQ ID NO: 49479 - DNA, 25 bp, Artificial
  Probe
ctgccagaccttaataaagcctctg

SEQ ID NO: 49480 - DNA, 25 bp, Artificial
  Probe
gtggacaggtcaagtctaaaggcag

SEQ ID NO: 49481 - DNA, 25 bp, Artificial
  Probe
cagtggacaggtcaagtctaaaggc

SEQ ID NO: 49482 - DNA, 25 bp, Artificial
  Probe
ggaaagacagtggacaggtcaagtc

SEQ ID NO: 49483 - DNA, 25 bp, Artificial
  Probe
cttaataaagcctctgcttctcctg

SEQ ID NO: 49484 - DNA, 25 bp, Artificial
  Probe
gaccttaataaagcctctgcttctc

SEQ ID NO: 49485 - DNA, 25 bp, Artificial
  Probe
agaccttaataaagcctctgcttct

SEQ ID NO: 49486 - DNA, 25 bp, Artificial
  Probe
cagaccttaataaagcctctgcttc

SEQ ID NO: 49487 - DNA, 25 bp, Artificial
  Probe
ttaataaagcctctgcttctcctgt

SEQ ID NO: 49488 - DNA, 25 bp, Artificial
  Probe
aaaggcagtaactgaagttcgctgt

SEQ ID NO: 49489 - DNA, 25 bp, Artificial
  Probe
ccttaataaagcctctgcttctcct

SEQ ID NO: 49490 - DNA, 25 bp, Artificial
  Probe
accttaataaagcctctgcttctcc

SEQ ID NO: 49491 - DNA, 25 bp, Artificial
  Probe
ccagaccttaataaagcctctgctt

SEQ ID NO: 49492 - DNA, 25 bp, Artificial
  Probe
gaaagacagtggacaggtcaagtct

SEQ ID NO: 49493 - DNA, 25 bp, Artificial
  Probe
gccagaccttaataaagcctctgct

SEQ ID NO: 49494 - DNA, 25 bp, Artificial
  Probe
tgccagaccttaataaagcctctgc

SEQ ID NO: 49495 - DNA, 25 bp, Artificial
  Probe
attgatacgggaataaacagagcat

SEQ ID NO: 49496 - DNA, 25 bp, Artificial
  Probe
gaattgatacgggaataaacagagc

SEQ ID NO: 49497 - DNA, 25 bp, Artificial
  Probe
ggaaggataagaattgatacgggaa

SEQ ID NO: 49498 - DNA, 25 bp, Artificial
  Probe
aagggaaggataagaattgatacgg

SEQ ID NO: 49499 - DNA, 25 bp, Artificial
  Probe
aattgatacgggaataaacagagca

SEQ ID NO: 49500 - DNA, 25 bp, Artificial
  Probe
agaattgatacgggaataaacagag

SEQ ID NO: 49501 - DNA, 25 bp, Artificial
  Probe
gaaggataagaattgatacgggaat

SEQ ID NO: 49502 - DNA, 25 bp, Artificial
  Probe
gggaaggataagaattgatacggga

SEQ ID NO: 49503 - DNA, 25 bp, Artificial
  Probe
agggaaggataagaattgatacggg

SEQ ID NO: 49504 - DNA, 25 bp, Artificial
  Probe
aagaattgatacgggaataaacaga

SEQ ID NO: 49505 - DNA, 25 bp, Artificial
  Probe
ttgatacgggaataaacagagcatg

SEQ ID NO: 49506 - DNA, 25 bp, Artificial
  Probe
gctaaatttctgtcttgtttgggtt

SEQ ID NO: 49507 - DNA, 25 bp, Artificial
  Probe
aggataagaattgatacgggaataa

SEQ ID NO: 49508 - DNA, 25 bp, Artificial
  Probe
aaggataagaattgatacgggaata

SEQ ID NO: 49509 - DNA, 25 bp, Artificial
  Probe
agctaaatttctgtcttgtttgggt

SEQ ID NO: 49510 - DNA, 25 bp, Artificial
  Probe
ttacttatgtcctgcccttcctctt

SEQ ID NO: 49511 - DNA, 25 bp, Artificial
  Probe
tttacttatgtcctgcccttcctct

SEQ ID NO: 49512 - DNA, 25 bp, Artificial
  Probe
ctaaatttctgtcttgtttgggttt

SEQ ID NO: 49513 - DNA, 25 bp, Artificial
  Probe
taagaattgatacgggaataaacag

SEQ ID NO: 49514 - DNA, 25 bp, Artificial
  Probe
tacttatgtcctgcccttcctcttc

SEQ ID NO: 49515 - DNA, 25 bp, Artificial
  Probe
cagctaaatttctgtcttgtttggg

SEQ ID NO: 49516 - DNA, 25 bp, Artificial
  Probe
cccagctaaatttctgtcttgtttg

SEQ ID NO: 49517 - DNA, 25 bp, Artificial
  Probe
ggataagaattgatacgggaataaa

SEQ ID NO: 49518 - DNA, 25 bp, Artificial
  Probe
cagttgacccatttgaagtctcctt

SEQ ID NO: 49519 - DNA, 25 bp, Artificial
  Probe
ccagctaaatttctgtcttgtttgg

SEQ ID NO: 49520 - DNA, 25 bp, Artificial
  Probe
ctcctcagcccattttacttatgtc

SEQ ID NO: 49521 - DNA, 25 bp, Artificial
  Probe
attttacttatgtcctgcccttcct

SEQ ID NO: 49522 - DNA, 25 bp, Artificial
  Probe
cactcctcagcccattttacttatg

SEQ ID NO: 49523 - DNA, 25 bp, Artificial
  Probe
cattttacttatgtcctgcccttcc

SEQ ID NO: 49524 - DNA, 25 bp, Artificial
  Probe
ccattttacttatgtcctgcccttc

SEQ ID NO: 49525 - DNA, 25 bp, Artificial
  Probe
ataagaattgatacgggaataaaca

SEQ ID NO: 49526 - DNA, 25 bp, Artificial
  Probe
actcctcagcccattttacttatgt

SEQ ID NO: 49527 - DNA, 25 bp, Artificial
  Probe
gcccagctaaatttctgtcttgttt

SEQ ID NO: 49528 - DNA, 25 bp, Artificial
  Probe
ttttacttatgtcctgcccttcctc

SEQ ID NO: 49529 - DNA, 25 bp, Artificial
  Probe
gataagaattgatacgggaataaac

SEQ ID NO: 49530 - DNA, 25 bp, Artificial
  Probe
ctcagcccattttacttatgtcctg

SEQ ID NO: 49531 - DNA, 25 bp, Artificial
  Probe
cctcagcccattttacttatgtcct

SEQ ID NO: 49532 - DNA, 25 bp, Artificial
  Probe
tcctcagcccattttacttatgtcc

SEQ ID NO: 49533 - DNA, 25 bp, Artificial
  Probe
gcactcctcagcccattttacttat

SEQ ID NO: 49534 - DNA, 25 bp, Artificial
  Probe
cccattttacttatgtcctgccctt

SEQ ID NO: 49535 - DNA, 25 bp, Artificial
  Probe
gaagcccagctaaatttctgtcttg

SEQ ID NO: 49536 - DNA, 25 bp, Artificial
  Probe
agttgacccatttgaagtctccttc

SEQ ID NO: 49537 - DNA, 25 bp, Artificial
  Probe
taaatttctgtcttgtttgggtttt

SEQ ID NO: 49538 - DNA, 25 bp, Artificial
  Probe
agcccagctaaatttctgtcttgtt

SEQ ID NO: 49539 - DNA, 25 bp, Artificial
  Probe
aagcccagctaaatttctgtcttgt

SEQ ID NO: 49540 - DNA, 25 bp, Artificial
  Probe
ctcgctgtatcttgattactcttga

SEQ ID NO: 49541 - DNA, 25 bp, Artificial
  Probe
gactcgctgtatcttgattactctt

SEQ ID NO: 49542 - DNA, 25 bp, Artificial
  Probe
actcgctgtatcttgattactcttg

SEQ ID NO: 49543 - DNA, 25 bp, Artificial
  Probe
tcgctgtatcttgattactcttgat

SEQ ID NO: 49544 - DNA, 25 bp, Artificial
  Probe
cgctgtatcttgattactcttgatt

SEQ ID NO: 49545 - DNA, 25 bp, Artificial
  Probe
agactcgctgtatcttgattactct

SEQ ID NO: 49546 - DNA, 25 bp, Artificial
  Probe
ttctctgtctgttagtctggaactt

SEQ ID NO: 49547 - DNA, 25 bp, Artificial
  Probe
tctctgtctgttagtctggaacttc

SEQ ID NO: 49548 - DNA, 25 bp, Artificial
  Probe
cttctctgtctgttagtctggaact

SEQ ID NO: 49549 - DNA, 25 bp, Artificial
  Probe
cagactcgctgtatcttgattactc

SEQ ID NO: 49550 - DNA, 25 bp, Artificial
  Probe
ctctgtctgttagtctggaacttca

SEQ ID NO: 49551 - DNA, 25 bp, Artificial
  Probe
ttccagactcgctgtatcttgatta

SEQ ID NO: 49552 - DNA, 25 bp, Artificial
  Probe
tctgtctgttagtctggaacttcag

SEQ ID NO: 49553 - DNA, 25 bp, Artificial
  Probe
ccagactcgctgtatcttgattact

SEQ ID NO: 49554 - DNA, 25 bp, Artificial
  Probe
tccagactcgctgtatcttgattac

SEQ ID NO: 49555 - DNA, 25 bp, Artificial
  Probe
gcttctctgtctgttagtctggaac

SEQ ID NO: 49556 - DNA, 25 bp, Artificial
  Probe
tctatctacctgagagatgagaacg

SEQ ID NO: 49557 - DNA, 25 bp, Artificial
  Probe
ggcgtatttccctaagatttctatc

SEQ ID NO: 49558 - DNA, 25 bp, Artificial
  Probe
cttccagactcgctgtatcttgatt

SEQ ID NO: 49559 - DNA, 25 bp, Artificial
  Probe
caactggcttctctgtctgttagtc

SEQ ID NO: 49560 - DNA, 25 bp, Artificial
  Probe
aactggcttctctgtctgttagtct

SEQ ID NO: 49561 - DNA, 25 bp, Artificial
  Probe
ttctatctacctgagagatgagaac

SEQ ID NO: 49562 - DNA, 25 bp, Artificial
  Probe
ctatctacctgagagatgagaacgc

SEQ ID NO: 49563 - DNA, 25 bp, Artificial
  Probe
ctgtctgttagtctggaacttcagc

SEQ ID NO: 49564 - DNA, 25 bp, Artificial
  Probe
ggcttctctgtctgttagtctggaa

SEQ ID NO: 49565 - DNA, 25 bp, Artificial
  Probe
actggcttctctgtctgttagtctg

SEQ ID NO: 49566 - DNA, 25 bp, Artificial
  Probe
gctgtatcttgattactcttgattt

SEQ ID NO: 49567 - DNA, 25 bp, Artificial
  Probe
tatctacctgagagatgagaacgcc

SEQ ID NO: 49568 - DNA, 25 bp, Artificial
  Probe
tccaactggcttctctgtctgttag

SEQ ID NO: 49569 - DNA, 25 bp, Artificial
  Probe
ctccaactggcttctctgtctgtta

SEQ ID NO: 49570 - DNA, 25 bp, Artificial
  Probe
cttctaagagggatgtctccaactg

SEQ ID NO: 49571 - DNA, 25 bp, Artificial
  Probe
ctggcttctctgtctgttagtctgg

SEQ ID NO: 49572 - DNA, 25 bp, Artificial
  Probe
tcttctaagagggatgtctccaact

SEQ ID NO: 49573 - DNA, 25 bp, Artificial
  Probe
ccttccagactcgctgtatcttgat

SEQ ID NO: 49574 - DNA, 25 bp, Artificial
  Probe
gcgtatttccctaagatttctatct

SEQ ID NO: 49575 - DNA, 25 bp, Artificial
  Probe
gtatcttgattactcttgatttcca

SEQ ID NO: 49576 - DNA, 25 bp, Artificial
  Probe
tgtatcttgattactcttgatttcc

SEQ ID NO: 49577 - DNA, 25 bp, Artificial
  Probe
ccaactggcttctctgtctgttagt

SEQ ID NO: 49578 - DNA, 25 bp, Artificial
  Probe
ttccaagttttcaggtcttttctac

SEQ ID NO: 49579 - DNA, 25 bp, Artificial
  Probe
tcaggtcttttctacttcagagaga

SEQ ID NO: 49580 - DNA, 25 bp, Artificial
  Probe
ttcaggtcttttctacttcagagag

SEQ ID NO: 49581 - DNA, 25 bp, Artificial
  Probe
atttccaagttttcaggtcttttct

SEQ ID NO: 49582 - DNA, 25 bp, Artificial
  Probe
gggcgtatttccctaagatttctat

SEQ ID NO: 49583 - DNA, 25 bp, Artificial
  Probe
tttcaggtcttttctacttcagaga

SEQ ID NO: 49584 - DNA, 25 bp, Artificial
  Probe
gatttccaagttttcaggtcttttc

SEQ ID NO: 49585 - DNA, 25 bp, Artificial
  Probe
atcctgtggagatagaagattatcc

SEQ ID NO: 49586 - DNA, 25 bp, Artificial
  Probe
caagatcctgtggagatagaagatt

SEQ ID NO: 49587 - DNA, 25 bp, Artificial
  Probe
acaagatcctgtggagatagaagat

SEQ ID NO: 49588 - DNA, 25 bp, Artificial
  Probe
gacaagatcctgtggagatagaaga

SEQ ID NO: 49589 - DNA, 25 bp, Artificial
  Probe
aagatcctgtggagatagaagatta

SEQ ID NO: 49590 - DNA, 25 bp, Artificial
  Probe
ggacaagatcctgtggagatagaag

SEQ ID NO: 49591 - DNA, 25 bp, Artificial
  Probe
agatcctgtggagatagaagattat

SEQ ID NO: 49592 - DNA, 25 bp, Artificial
  Probe
gatcctgtggagatagaagattatc

SEQ ID NO: 49593 - DNA, 25 bp, Artificial
  Probe
tcctgtggagatagaagattatccc

SEQ ID NO: 49594 - DNA, 25 bp, Artificial
  Probe
cctgtggagatagaagattatcccg

SEQ ID NO: 49595 - DNA, 25 bp, Artificial
  Probe
atagaagattatcccggtcacaaca

SEQ ID NO: 49596 - DNA, 25 bp, Artificial
  Probe
gatagaagattatcccggtcacaac

SEQ ID NO: 49597 - DNA, 25 bp, Artificial
  Probe
agatagaagattatcccggtcacaa

SEQ ID NO: 49598 - DNA, 25 bp, Artificial
  Probe
gagatagaagattatcccggtcaca

SEQ ID NO: 49599 - DNA, 25 bp, Artificial
  Probe
cacaggaggatggtaaagagagtcg

SEQ ID NO: 49600 - DNA, 25 bp, Artificial
  Probe
gtcatcctcatcaccatctttgtgg

SEQ ID NO: 49601 - DNA, 25 bp, Artificial
  Probe
ggtcatcctcatcaccatctttgtg

SEQ ID NO: 49602 - DNA, 25 bp, Artificial
  Probe
gcacaggaggatggtaaagagagtc

SEQ ID NO: 49603 - DNA, 25 bp, Artificial
  Probe
aggacaagatcctgtggagatagaa

SEQ ID NO: 49604 - DNA, 25 bp, Artificial
  Probe
ggagatagaagattatcccggtcac

SEQ ID NO: 49605 - DNA, 25 bp, Artificial
  Probe
gtggagatagaagattatcccggtc

SEQ ID NO: 49606 - DNA, 25 bp, Artificial
  Probe
ctgtggagatagaagattatcccgg

SEQ ID NO: 49607 - DNA, 25 bp, Artificial
  Probe
gaggacaagatcctgtggagataga

SEQ ID NO: 49608 - DNA, 25 bp, Artificial
  Probe
tggagatagaagattatcccggtca

SEQ ID NO: 49609 - DNA, 25 bp, Artificial
  Probe
tgtggagatagaagattatcccggt

SEQ ID NO: 49610 - DNA, 25 bp, Artificial
  Probe
ttgcacaggaggatggtaaagagag

SEQ ID NO: 49611 - DNA, 25 bp, Artificial
  Probe
aggaggatggtaaagagagtcgcat

SEQ ID NO: 49612 - DNA, 25 bp, Artificial
  Probe
gatggtaaagagagtcgcatctcag

SEQ ID NO: 49613 - DNA, 25 bp, Artificial
  Probe
tttcactgtaaggagtcgtggacac

SEQ ID NO: 49614 - DNA, 25 bp, Artificial
  Probe
gttgcacaggaggatggtaaagaga

SEQ ID NO: 49615 - DNA, 25 bp, Artificial
  Probe
gaggatggtaaagagagtcgcatct

SEQ ID NO: 49616 - DNA, 25 bp, Artificial
  Probe
cgaggacaagatcctgtggagatag

SEQ ID NO: 49617 - DNA, 25 bp, Artificial
  Probe
atggtaaagagagtcgcatctcagt

SEQ ID NO: 49618 - DNA, 25 bp, Artificial
  Probe
gttttcactgtaaggagtcgtggac

SEQ ID NO: 49619 - DNA, 25 bp, Artificial
  Probe
aggatggtaaagagagtcgcatctc

SEQ ID NO: 49620 - DNA, 25 bp, Artificial
  Probe
tgttgcacaggaggatggtaaagag

SEQ ID NO: 49621 - DNA, 25 bp, Artificial
  Probe
ttttcactgtaaggagtcgtggaca

SEQ ID NO: 49622 - DNA, 25 bp, Artificial
  Probe
tgcacaggaggatggtaaagagagt

SEQ ID NO: 49623 - DNA, 25 bp, Artificial
  Probe
tcgaggacaagatcctgtggagata

SEQ ID NO: 49624 - DNA, 25 bp, Artificial
  Probe
ggatggtaaagagagtcgcatctca

SEQ ID NO: 49625 - DNA, 25 bp, Artificial
  Probe
tggtaaagagagtcgcatctcagtg

SEQ ID NO: 49626 - DNA, 25 bp, Artificial
  Probe
atcctcatcaccatctttgtggttt

SEQ ID NO: 49627 - DNA, 25 bp, Artificial
  Probe
ggaggatggtaaagagagtcgcatc

SEQ ID NO: 49628 - DNA, 25 bp, Artificial
  Probe
gtcttgctgcggttttcactgtaag

SEQ ID NO: 49629 - DNA, 25 bp, Artificial
  Probe
ggttttcactgtaaggagtcgtgga

SEQ ID NO: 49630 - DNA, 25 bp, Artificial
  Probe
gatcatagatgacttccttctcaag

SEQ ID NO: 49631 - DNA, 25 bp, Artificial
  Probe
tgatcatagatgacttccttctcaa

SEQ ID NO: 49632 - DNA, 25 bp, Artificial
  Probe
tagagtctctgaaatccaggacctt

SEQ ID NO: 49633 - DNA, 25 bp, Artificial
  Probe
tttgtgaatccaaattctctttccc

SEQ ID NO: 49634 - DNA, 25 bp, Artificial
  Probe
atcatagatgacttccttctcaagg

SEQ ID NO: 49635 - DNA, 25 bp, Artificial
  Probe
aatccaaattctctttccccttgtc

SEQ ID NO: 49636 - DNA, 25 bp, Artificial
  Probe
tcatagatgacttccttctcaaggc

SEQ ID NO: 49637 - DNA, 25 bp, Artificial
  Probe
caaattctctttccccttgtccttc

SEQ ID NO: 49638 - DNA, 25 bp, Artificial
  Probe
gaaccatgtctcattttgtgaatcc

SEQ ID NO: 49639 - DNA, 25 bp, Artificial
  Probe
agagtctctgaaatccaggaccttc

SEQ ID NO: 49640 - DNA, 25 bp, Artificial
  Probe
cgaaccatgtctcattttgtgaatc

SEQ ID NO: 49641 - DNA, 25 bp, Artificial
  Probe
accatgtctcattttgtgaatccaa

SEQ ID NO: 49642 - DNA, 25 bp, Artificial
  Probe
aaccatgtctcattttgtgaatcca

SEQ ID NO: 49643 - DNA, 25 bp, Artificial
  Probe
tctgaaatccaggaccttcaatgag

SEQ ID NO: 49644 - DNA, 25 bp, Artificial
  Probe
ctctgaaatccaggaccttcaatga

SEQ ID NO: 49645 - DNA, 25 bp, Artificial
  Probe
tctctgaaatccaggaccttcaatg

SEQ ID NO: 49646 - DNA, 25 bp, Artificial
  Probe
gtctctgaaatccaggaccttcaat

SEQ ID NO: 49647 - DNA, 25 bp, Artificial
  Probe
aaattctctttccccttgtccttcc

SEQ ID NO: 49648 - DNA, 25 bp, Artificial
  Probe
gaatccaaattctctttccccttgt

SEQ ID NO: 49649 - DNA, 25 bp, Artificial
  Probe
tgaatccaaattctctttccccttg

SEQ ID NO: 49650 - DNA, 25 bp, Artificial
  Probe
gtgaatccaaattctctttcccctt

SEQ ID NO: 49651 - DNA, 25 bp, Artificial
  Probe
ttgtgaatccaaattctctttcccc

SEQ ID NO: 49652 - DNA, 25 bp, Artificial
  Probe
atccaaattctctttccccttgtcc

SEQ ID NO: 49653 - DNA, 25 bp, Artificial
  Probe
tcgaaccatgtctcattttgtgaat

SEQ ID NO: 49654 - DNA, 25 bp, Artificial
  Probe
ccaaattctctttccccttgtcctt

SEQ ID NO: 49655 - DNA, 25 bp, Artificial
  Probe
ctgaaatccaggaccttcaatgagg

SEQ ID NO: 49656 - DNA, 25 bp, Artificial
  Probe
agtctctgaaatccaggaccttcaa

SEQ ID NO: 49657 - DNA, 25 bp, Artificial
  Probe
tgtgaatccaaattctctttcccct

SEQ ID NO: 49658 - DNA, 25 bp, Artificial
  Probe
ccatgtctcattttgtgaatccaaa

SEQ ID NO: 49659 - DNA, 25 bp, Artificial
  Probe
gagtctctgaaatccaggaccttca

SEQ ID NO: 49660 - DNA, 25 bp, Artificial
  Probe
tgtctcattttgtgaatccaaattc

SEQ ID NO: 49661 - DNA, 25 bp, Artificial
  Probe
ttttgtgaatccaaattctctttcc

SEQ ID NO: 49662 - DNA, 25 bp, Artificial
  Probe
gtctcattttgtgaatccaaattct

SEQ ID NO: 49663 - DNA, 25 bp, Artificial
  Probe
tccaaattctctttccccttgtcct

SEQ ID NO: 49664 - DNA, 25 bp, Artificial
  Probe
catgtctcattttgtgaatccaaat

SEQ ID NO: 49665 - DNA, 25 bp, Artificial
  Probe
tctcattttgtgaatccaaattctc

SEQ ID NO: 49666 - DNA, 25 bp, Artificial
  Probe
ctcattttgtgaatccaaattctct

SEQ ID NO: 49667 - DNA, 25 bp, Artificial
  Probe
atgtctcattttgtgaatccaaatt

SEQ ID NO: 49668 - DNA, 25 bp, Artificial
  Probe
catagatgacttccttctcaaggcc

SEQ ID NO: 49669 - DNA, 25 bp, Artificial
  Probe
tcattttgtgaatccaaattctctt

SEQ ID NO: 49670 - DNA, 25 bp, Artificial
  Probe
aattctctttccccttgtccttccc

SEQ ID NO: 49671 - DNA, 25 bp, Artificial
  Probe
gttacaaagtgtctcctgctgcatg

SEQ ID NO: 49672 - DNA, 25 bp, Artificial
  Probe
ttacaaagtgtctcctgctgcatga

SEQ ID NO: 49673 - DNA, 25 bp, Artificial
  Probe
agttacaaagtgtctcctgctgcat

SEQ ID NO: 49674 - DNA, 25 bp, Artificial
  Probe
cattttgtgaatccaaattctcttt

SEQ ID NO: 49675 - DNA, 25 bp, Artificial
  Probe
agttgttaccaagtgtaggcattat

SEQ ID NO: 49676 - DNA, 25 bp, Artificial
  Probe
gttgttaccaagtgtaggcattatt

SEQ ID NO: 49677 - DNA, 25 bp, Artificial
  Probe
cagttgttaccaagtgtaggcatta

SEQ ID NO: 49678 - DNA, 25 bp, Artificial
  Probe
tgttaccaagtgtaggcattatttc

SEQ ID NO: 49679 - DNA, 25 bp, Artificial
  Probe
ttaccaagtgtaggcattatttctg

SEQ ID NO: 49680 - DNA, 25 bp, Artificial
  Probe
gttaccaagtgtaggcattatttct

SEQ ID NO: 49681 - DNA, 25 bp, Artificial
  Probe
gcgaaagaattgattgctaaacttg

SEQ ID NO: 49682 - DNA, 25 bp, Artificial
  Probe
cgaaagaattgattgctaaacttgg

SEQ ID NO: 49683 - DNA, 25 bp, Artificial
  Probe
aatccagttgttaccaagtgtaggc

SEQ ID NO: 49684 - DNA, 25 bp, Artificial
  Probe
aagcgatgatgaggaaataccattc

SEQ ID NO: 49685 - DNA, 25 bp, Artificial
  Probe
gaagcgatgatgaggaaataccatt

SEQ ID NO: 49686 - DNA, 25 bp, Artificial
  Probe
taccattcaaatgtttcatctgtcg

SEQ ID NO: 49687 - DNA, 25 bp, Artificial
  Probe
aaatccagttgttaccaagtgtagg

SEQ ID NO: 49688 - DNA, 25 bp, Artificial
  Probe
cgatgatgaggaaataccattcaaa

SEQ ID NO: 49689 - DNA, 25 bp, Artificial
  Probe
ttgttaccaagtgtaggcattattt

SEQ ID NO: 49690 - DNA, 25 bp, Artificial
  Probe
gagagtccagtttccattatttaga

SEQ ID NO: 49691 - DNA, 25 bp, Artificial
  Probe
ccagttgttaccaagtgtaggcatt

SEQ ID NO: 49692 - DNA, 25 bp, Artificial
  Probe
agaattgattgctaaacttggaaag

SEQ ID NO: 49693 - DNA, 25 bp, Artificial
  Probe
gaaagaattgattgctaaacttgga

SEQ ID NO: 49694 - DNA, 25 bp, Artificial
  Probe
gcgatgatgaggaaataccattcaa

SEQ ID NO: 49695 - DNA, 25 bp, Artificial
  Probe
tgatgaggaaataccattcaaatgt

SEQ ID NO: 49696 - DNA, 25 bp, Artificial
  Probe
aagaattgattgctaaacttggaaa

SEQ ID NO: 49697 - DNA, 25 bp, Artificial
  Probe
aaagaattgattgctaaacttggaa

SEQ ID NO: 49698 - DNA, 25 bp, Artificial
  Probe
gaggagagtccagtttccattattt

SEQ ID NO: 49699 - DNA, 25 bp, Artificial
  Probe
agcgatgatgaggaaataccattca

SEQ ID NO: 49700 - DNA, 25 bp, Artificial
  Probe
aggagagtccagtttccattattta

SEQ ID NO: 49701 - DNA, 25 bp, Artificial
  Probe
agaggagagtccagtttccattatt

SEQ ID NO: 49702 - DNA, 25 bp, Artificial
  Probe
agagtccagtttccattatttagat

SEQ ID NO: 49703 - DNA, 25 bp, Artificial
  Probe
ataccattcaaatgtttcatctgtc

SEQ ID NO: 49704 - DNA, 25 bp, Artificial
  Probe
ggagagtccagtttccattatttag

SEQ ID NO: 49705 - DNA, 25 bp, Artificial
  Probe
aaactatgaagtgggaagcgatgat

SEQ ID NO: 49706 - DNA, 25 bp, Artificial
  Probe
cagaggagagtccagtttccattat

SEQ ID NO: 49707 - DNA, 25 bp, Artificial
  Probe
ggaagcgatgatgaggaaataccat

SEQ ID NO: 49708 - DNA, 25 bp, Artificial
  Probe
gcaaggactacaaggagactggatt

SEQ ID NO: 49709 - DNA, 25 bp, Artificial
  Probe
tccagttgttaccaagtgtaggcat

SEQ ID NO: 49710 - DNA, 25 bp, Artificial
  Probe
atccagttgttaccaagtgtaggca

SEQ ID NO: 49711 - DNA, 25 bp, Artificial
  Probe
gatgaggaaataccattcaaatgtt

SEQ ID NO: 49712 - DNA, 25 bp, Artificial
  Probe
atacatctatgggcaatgcttcctc

SEQ ID NO: 49713 - DNA, 25 bp, Artificial
  Probe
gatacatctatgggcaatgcttcct

SEQ ID NO: 49714 - DNA, 25 bp, Artificial
  Probe
aggatacatctatgggcaatgcttc

SEQ ID NO: 49715 - DNA, 25 bp, Artificial
  Probe
gatgatgaggaaataccattcaaat

SEQ ID NO: 49716 - DNA, 25 bp, Artificial
  Probe
ctatgaagtgggaagcgatgatgag

SEQ ID NO: 49717 - DNA, 25 bp, Artificial
  Probe
cattcaaatgtttcatctgtcgcca

SEQ ID NO: 49718 - DNA, 25 bp, Artificial
  Probe
accattcaaatgtttcatctgtcgc

SEQ ID NO: 49719 - DNA, 25 bp, Artificial
  Probe
aataccattcaaatgtttcatctgt

SEQ ID NO: 49720 - DNA, 25 bp, Artificial
  Probe
ctgaaactggaggatactgacttta

SEQ ID NO: 49721 - DNA, 25 bp, Artificial
  Probe
tgaaactggaggatactgactttaa

SEQ ID NO: 49722 - DNA, 25 bp, Artificial
  Probe
actggaggatactgactttaagaaa

SEQ ID NO: 49723 - DNA, 25 bp, Artificial
  Probe
aactggaggatactgactttaagaa

SEQ ID NO: 49724 - DNA, 25 bp, Artificial
  Probe
aaactggaggatactgactttaaga

SEQ ID NO: 49725 - DNA, 25 bp, Artificial
  Probe
gaaactggaggatactgactttaag

SEQ ID NO: 49726 - DNA, 25 bp, Artificial
  Probe
gctgaaactggaggatactgacttt

SEQ ID NO: 49727 - DNA, 25 bp, Artificial
  Probe
gagatgctgaaactggaggatactg

SEQ ID NO: 49728 - DNA, 25 bp, Artificial
  Probe
gatgctgaaactggaggatactgac

SEQ ID NO: 49729 - DNA, 25 bp, Artificial
  Probe
cttctggattggagatgctgaaact

SEQ ID NO: 49730 - DNA, 25 bp, Artificial
  Probe
agatgctgaaactggaggatactga

SEQ ID NO: 49731 - DNA, 25 bp, Artificial
  Probe
atgctgaaactggaggatactgact

SEQ ID NO: 49732 - DNA, 25 bp, Artificial
  Probe
ttggagatgctgaaactggaggata

SEQ ID NO: 49733 - DNA, 25 bp, Artificial
  Probe
ttctggattggagatgctgaaactg

SEQ ID NO: 49734 - DNA, 25 bp, Artificial
  Probe
tgctgaaactggaggatactgactt

SEQ ID NO: 49735 - DNA, 25 bp, Artificial
  Probe
aaacaaggaacaagctaggcaaatg

SEQ ID NO: 49736 - DNA, 25 bp, Artificial
  Probe
ggagatgctgaaactggaggatact

SEQ ID NO: 49737 - DNA, 25 bp, Artificial
  Probe
attggagatgctgaaactggaggat

SEQ ID NO: 49738 - DNA, 25 bp, Artificial
  Probe
tggagatgctgaaactggaggatac

SEQ ID NO: 49739 - DNA, 25 bp, Artificial
  Probe
ctggaggatactgactttaagaaaa

SEQ ID NO: 49740 - DNA, 25 bp, Artificial
  Probe
gattggagatgctgaaactggagga

SEQ ID NO: 49741 - DNA, 25 bp, Artificial
  Probe
gcttctggattggagatgctgaaac

SEQ ID NO: 49742 - DNA, 25 bp, Artificial
  Probe
aaaacaaggaacaagctaggcaaat

SEQ ID NO: 49743 - DNA, 25 bp, Artificial
  Probe
tggattggagatgctgaaactggag

SEQ ID NO: 49744 - DNA, 25 bp, Artificial
  Probe
ctggattggagatgctgaaactgga

SEQ ID NO: 49745 - DNA, 25 bp, Artificial
  Probe
ggacatgtgtaattccagagcttct

SEQ ID NO: 49746 - DNA, 25 bp, Artificial
  Probe
gtcacctccgccccttaaaataaaa

SEQ ID NO: 49747 - DNA, 25 bp, Artificial
  Probe
tctggattggagatgctgaaactgg

SEQ ID NO: 49748 - DNA, 25 bp, Artificial
  Probe
aaaacagaaaggaagaaggggatgc

SEQ ID NO: 49749 - DNA, 25 bp, Artificial
  Probe
caaaacaaggaacaagctaggcaaa

SEQ ID NO: 49750 - DNA, 25 bp, Artificial
  Probe
aacaaggaacaagctaggcaaatgc

SEQ ID NO: 49751 - DNA, 25 bp, Artificial
  Probe
gagcttctggattggagatgctgaa

SEQ ID NO: 49752 - DNA, 25 bp, Artificial
  Probe
gacatgtgtaattccagagcttctg

SEQ ID NO: 49753 - DNA, 25 bp, Artificial
  Probe
tgtcacctccgccccttaaaataaa

SEQ ID NO: 49754 - DNA, 25 bp, Artificial
  Probe
agcttctggattggagatgctgaaa

SEQ ID NO: 49755 - DNA, 25 bp, Artificial
  Probe
ctgtcacctccgccccttaaaataa

SEQ ID NO: 49756 - DNA, 25 bp, Artificial
  Probe
ccaaaacaaggaacaagctaggcaa

SEQ ID NO: 49757 - DNA, 25 bp, Artificial
  Probe
atggacatgtgtaattccagagctt

SEQ ID NO: 49758 - DNA, 25 bp, Artificial
  Probe
gatggacatgtgtaattccagagct

SEQ ID NO: 49759 - DNA, 25 bp, Artificial
  Probe
caaggaacaagctaggcaaatgctg

SEQ ID NO: 49760 - DNA, 25 bp, Artificial
  Probe
aaacagaaaggaagaaggggatgca

SEQ ID NO: 49761 - DNA, 25 bp, Artificial
  Probe
tggacatgtgtaattccagagcttc

SEQ ID NO: 49762 - DNA, 25 bp, Artificial
  Probe
cgatggacatgtgtaattccagagc

SEQ ID NO: 49763 - DNA, 25 bp, Artificial
  Probe
gcgatggacatgtgtaattccagag

SEQ ID NO: 49764 - DNA, 25 bp, Artificial
  Probe
gaaaggaagaaggggatgcattgtc

SEQ ID NO: 49765 - DNA, 25 bp, Artificial
  Probe
gtaaccaaacagggaaacatagttc

SEQ ID NO: 49766 - DNA, 25 bp, Artificial
  Probe
taaccaaacagggaaacatagttcg

SEQ ID NO: 49767 - DNA, 25 bp, Artificial
  Probe
agtcagtcctttgttccagaaattg

SEQ ID NO: 49768 - DNA, 25 bp, Artificial
  Probe
cagtcagtcctttgttccagaaatt

SEQ ID NO: 49769 - DNA, 25 bp, Artificial
  Probe
tgggtatggacagtaataaagaatg

SEQ ID NO: 49770 - DNA, 25 bp, Artificial
  Probe
ttggatctaaagaaacagttggctt

SEQ ID NO: 49771 - DNA, 25 bp, Artificial
  Probe
aagtggctaaactcttggatctaaa

SEQ ID NO: 49772 - DNA, 25 bp, Artificial
  Probe
agtggctaaactcttggatctaaag

SEQ ID NO: 49773 - DNA, 25 bp, Artificial
  Probe
gaagtggctaaactcttggatctaa

SEQ ID NO: 49774 - DNA, 25 bp, Artificial
  Probe
cttggatctaaagaaacagttggct

SEQ ID NO: 49775 - DNA, 25 bp, Artificial
  Probe
gagagaatgttcacacaaagtcact

SEQ ID NO: 49776 - DNA, 25 bp, Artificial
  Probe
agaagtggctaaactcttggatcta

SEQ ID NO: 49777 - DNA, 25 bp, Artificial
  Probe
tgagagaatgttcacacaaagtcac

SEQ ID NO: 49778 - DNA, 25 bp, Artificial
  Probe
agagaatgttcacacaaagtcactt

SEQ ID NO: 49779 - DNA, 25 bp, Artificial
  Probe
gtgacaggaatggcagtgaacatag

SEQ ID NO: 49780 - DNA, 25 bp, Artificial
  Probe
gggtatggacagtaataaagaatgt

SEQ ID NO: 49781 - DNA, 25 bp, Artificial
  Probe
ctgggtatggacagtaataaagaat

SEQ ID NO: 49782 - DNA, 25 bp, Artificial
  Probe
acagtcagtcctttgttccagaaat

SEQ ID NO: 49783 - DNA, 25 bp, Artificial
  Probe
cagcagttgttgaggcagttactac

SEQ ID NO: 49784 - DNA, 25 bp, Artificial
  Probe
cagaagtggctaaactcttggatct

SEQ ID NO: 49785 - DNA, 25 bp, Artificial
  Probe
aagtcactttactgggtatggacag

SEQ ID NO: 49786 - DNA, 25 bp, Artificial
  Probe
gatctaaagaaacagttggctttgg

SEQ ID NO: 49787 - DNA, 25 bp, Artificial
  Probe
ggatctaaagaaacagttggctttg

SEQ ID NO: 49788 - DNA, 25 bp, Artificial
  Probe
gttgttgaggcagttactacagcag

SEQ ID NO: 49789 - DNA, 25 bp, Artificial
  Probe
cagttgttgaggcagttactacagc

SEQ ID NO: 49790 - DNA, 25 bp, Artificial
  Probe
gcagttgttgaggcagttactacag

SEQ ID NO: 49791 - DNA, 25 bp, Artificial
  Probe
tggatctaaagaaacagttggcttt

SEQ ID NO: 49792 - DNA, 25 bp, Artificial
  Probe
gtggctaaactcttggatctaaaga

SEQ ID NO: 49793 - DNA, 25 bp, Artificial
  Probe
ctcttggatctaaagaaacagttgg

SEQ ID NO: 49794 - DNA, 25 bp, Artificial
  Probe
tggctaaactcttggatctaaagaa

SEQ ID NO: 49795 - DNA, 25 bp, Artificial
  Probe
actcttggatctaaagaaacagttg

SEQ ID NO: 49796 - DNA, 25 bp, Artificial
  Probe
caaacagggaaacatagttcgggaa

SEQ ID NO: 49797 - DNA, 25 bp, Artificial
  Probe
gtcagtcctttgttccagaaattgg

SEQ ID NO: 49798 - DNA, 25 bp, Artificial
  Probe
tcttggatctaaagaaacagttggc

SEQ ID NO: 49799 - DNA, 25 bp, Artificial
  Probe
ggctaaactcttggatctaaagaaa

SEQ ID NO: 49800 - DNA, 25 bp, Artificial
  Probe
agttgttgaggcagttactacagca

SEQ ID NO: 49801 - DNA, 25 bp, Artificial
  Probe
agcagttgttgaggcagttactaca

SEQ ID NO: 49802 - DNA, 25 bp, Artificial
  Probe
aaccaaacagggaaacatagttcgg

SEQ ID NO: 49803 - DNA, 25 bp, Artificial
  Probe
cacagtcagtcctttgttccagaaa

SEQ ID NO: 49804 - DNA, 25 bp, Artificial
  Probe
atgttcacacaaagtcactttactg

SEQ ID NO: 49805 - DNA, 25 bp, Artificial
  Probe
gagaatgttcacacaaagtcacttt

SEQ ID NO: 49806 - DNA, 25 bp, Artificial
  Probe
aaactcttggatctaaagaaacagt

SEQ ID NO: 49807 - DNA, 25 bp, Artificial
  Probe
atctaaagaaacagttggctttggc

SEQ ID NO: 49808 - DNA, 25 bp, Artificial
  Probe
aatgttcacacaaagtcactttact

SEQ ID NO: 49809 - DNA, 25 bp, Artificial
  Probe
acacaaagtcactttactgggtatg

SEQ ID NO: 49810 - DNA, 25 bp, Artificial
  Probe
gataaactcactgaaggtcatctgt

SEQ ID NO: 49811 - DNA, 25 bp, Artificial
  Probe
ataaactcactgaaggtcatctgtg

SEQ ID NO: 49812 - DNA, 25 bp, Artificial
  Probe
gcagataaactcactgaaggtcatc

SEQ ID NO: 49813 - DNA, 25 bp, Artificial
  Probe
taaactcactgaaggtcatctgtgt

SEQ ID NO: 49814 - DNA, 25 bp, Artificial
  Probe
agataaactcactgaaggtcatctg

SEQ ID NO: 49815 - DNA, 25 bp, Artificial
  Probe
cagataaactcactgaaggtcatct

SEQ ID NO: 49816 - DNA, 25 bp, Artificial
  Probe
ggcagataaactcactgaaggtcat

SEQ ID NO: 49817 - DNA, 25 bp, Artificial
  Probe
atggcagataaactcactgaaggtc

SEQ ID NO: 49818 - DNA, 25 bp, Artificial
  Probe
aaactcactgaaggtcatctgtgtg

SEQ ID NO: 49819 - DNA, 25 bp, Artificial
  Probe
catggcagataaactcactgaaggt

SEQ ID NO: 49820 - DNA, 25 bp, Artificial
  Probe
ttcatcccatctttgtgtcccagtt

SEQ ID NO: 49821 - DNA, 25 bp, Artificial
  Probe
tggcagataaactcactgaaggtca

SEQ ID NO: 49822 - DNA, 25 bp, Artificial
  Probe
catctttgtgtcccagttgtgactc

SEQ ID NO: 49823 - DNA, 25 bp, Artificial
  Probe
atctttgtgtcccagttgtgactct

SEQ ID NO: 49824 - DNA, 25 bp, Artificial
  Probe
tcatcccatctttgtgtcccagttg

SEQ ID NO: 49825 - DNA, 25 bp, Artificial
  Probe
gttcatcccatctttgtgtcccagt

SEQ ID NO: 49826 - DNA, 25 bp, Artificial
  Probe
tctttgtgtcccagttgtgactctc

SEQ ID NO: 49827 - DNA, 25 bp, Artificial
  Probe
atcccatctttgtgtcccagttgtg

SEQ ID NO: 49828 - DNA, 25 bp, Artificial
  Probe
catcccatctttgtgtcccagttgt

SEQ ID NO: 49829 - DNA, 25 bp, Artificial
  Probe
aactcactgaaggtcatctgtgtga

SEQ ID NO: 49830 - DNA, 25 bp, Artificial
  Probe
ccatctttgtgtcccagttgtgact

SEQ ID NO: 49831 - DNA, 25 bp, Artificial
  Probe
tagggttcatcccatctttgtgtcc

SEQ ID NO: 49832 - DNA, 25 bp, Artificial
  Probe
gggacatccacccagaaatcctatg

SEQ ID NO: 49833 - DNA, 25 bp, Artificial
  Probe
tccatggcagataaactcactgaag

SEQ ID NO: 49834 - DNA, 25 bp, Artificial
  Probe
ctccatggcagataaactcactgaa

SEQ ID NO: 49835 - DNA, 25 bp, Artificial
  Probe
ccatggcagataaactcactgaagg

SEQ ID NO: 49836 - DNA, 25 bp, Artificial
  Probe
ctttggctccatggcagataaactc

SEQ ID NO: 49837 - DNA, 25 bp, Artificial
  Probe
atctttggctccatggcagataaac

SEQ ID NO: 49838 - DNA, 25 bp, Artificial
  Probe
catctttggctccatggcagataaa

SEQ ID NO: 49839 - DNA, 25 bp, Artificial
  Probe
tctttggctccatggcagataaact

SEQ ID NO: 49840 - DNA, 25 bp, Artificial
  Probe
tttggctccatggcagataaactca

SEQ ID NO: 49841 - DNA, 25 bp, Artificial
  Probe
cactgaaggtcatctgtgtgagctc

SEQ ID NO: 49842 - DNA, 25 bp, Artificial
  Probe
gctccatggcagataaactcactga

SEQ ID NO: 49843 - DNA, 25 bp, Artificial
  Probe
ttggctccatggcagataaactcac

SEQ ID NO: 49844 - DNA, 25 bp, Artificial
  Probe
ccatctttggctccatggcagataa

SEQ ID NO: 49845 - DNA, 25 bp, Artificial
  Probe
gcactggagtcaataaattatggtc

SEQ ID NO: 49846 - DNA, 25 bp, Artificial
  Probe
ctgggcactggagtcaataaattat

SEQ ID NO: 49847 - DNA, 25 bp, Artificial
  Probe
ggcactggagtcaataaattatggt

SEQ ID NO: 49848 - DNA, 25 bp, Artificial
  Probe
tgggcactggagtcaataaattatg

SEQ ID NO: 49849 - DNA, 25 bp, Artificial
  Probe
cactggagtcaataaattatggtca

SEQ ID NO: 49850 - DNA, 25 bp, Artificial
  Probe
gggcactggagtcaataaattatgg

SEQ ID NO: 49851 - DNA, 25 bp, Artificial
  Probe
tggagtcaataaattatggtcagaa

SEQ ID NO: 49852 - DNA, 25 bp, Artificial
  Probe
actggagtcaataaattatggtcag

SEQ ID NO: 49853 - DNA, 25 bp, Artificial
  Probe
cctgggcactggagtcaataaatta

SEQ ID NO: 49854 - DNA, 25 bp, Artificial
  Probe
ctggagtcaataaattatggtcaga

SEQ ID NO: 49855 - DNA, 25 bp, Artificial
  Probe
ctcgtgatcgtaatcttcaagaaga

SEQ ID NO: 49856 - DNA, 25 bp, Artificial
  Probe
ggagtcaataaattatggtcagaaa

SEQ ID NO: 49857 - DNA, 25 bp, Artificial
  Probe
tcctgggcactggagtcaataaatt

SEQ ID NO: 49858 - DNA, 25 bp, Artificial
  Probe
gactcagatgagacactgcacagtt

SEQ ID NO: 49859 - DNA, 25 bp, Artificial
  Probe
tcgtgatcgtaatcttcaagaagat

SEQ ID NO: 49860 - DNA, 25 bp, Artificial
  Probe
cgtaatcttcaagaagataacctcg

SEQ ID NO: 49861 - DNA, 25 bp, Artificial
  Probe
actcagatgagacactgcacagttg

SEQ ID NO: 49862 - DNA, 25 bp, Artificial
  Probe
gtcctgggcactggagtcaataaat

SEQ ID NO: 49863 - DNA, 25 bp, Artificial
  Probe
cgtgatcgtaatcttcaagaagata

SEQ ID NO: 49864 - DNA, 25 bp, Artificial
  Probe
gtaatcttcaagaagataacctcga

SEQ ID NO: 49865 - DNA, 25 bp, Artificial
  Probe
tcgtaatcttcaagaagataacctc

SEQ ID NO: 49866 - DNA, 25 bp, Artificial
  Probe
gtcaataaattatggtcagaaaagt

SEQ ID NO: 49867 - DNA, 25 bp, Artificial
  Probe
atcgtaatcttcaagaagataacct

SEQ ID NO: 49868 - DNA, 25 bp, Artificial
  Probe
agtcaataaattatggtcagaaaag

SEQ ID NO: 49869 - DNA, 25 bp, Artificial
  Probe
gagtcaataaattatggtcagaaaa

SEQ ID NO: 49870 - DNA, 25 bp, Artificial
  Probe
gatcgtaatcttcaagaagataacc

SEQ ID NO: 49871 - DNA, 25 bp, Artificial
  Probe
tcaataaattatggtcagaaaagtt

SEQ ID NO: 49872 - DNA, 25 bp, Artificial
  Probe
tgatcgtaatcttcaagaagataac

SEQ ID NO: 49873 - DNA, 25 bp, Artificial
  Probe
gtgatcgtaatcttcaagaagataa

SEQ ID NO: 49874 - DNA, 25 bp, Artificial
  Probe
aatcttcaagaagataacctcgagc

SEQ ID NO: 49875 - DNA, 25 bp, Artificial
  Probe
taatcttcaagaagataacctcgag

SEQ ID NO: 49876 - DNA, 25 bp, Artificial
  Probe
tcttcaagaagataacctcgagcgg

SEQ ID NO: 49877 - DNA, 25 bp, Artificial
  Probe
atcttcaagaagataacctcgagcg

SEQ ID NO: 49878 - DNA, 25 bp, Artificial
  Probe
cttcaagaagataacctcgagcggg

SEQ ID NO: 49879 - DNA, 25 bp, Artificial
  Probe
gaatggaatcaccttgactgaattg

SEQ ID NO: 49880 - DNA, 25 bp, Artificial
  Probe
ggaatggaatcaccttgactgaatt

SEQ ID NO: 49881 - DNA, 25 bp, Artificial
  Probe
aatggaatcaccttgactgaattgg

SEQ ID NO: 49882 - DNA, 25 bp, Artificial
  Probe
atttccttgtgttgtgtttactgac

SEQ ID NO: 49883 - DNA, 25 bp, Artificial
  Probe
aatttccttgtgttgtgtttactga

SEQ ID NO: 49884 - DNA, 25 bp, Artificial
  Probe
tttccttgtgttgtgtttactgact

SEQ ID NO: 49885 - DNA, 25 bp, Artificial
  Probe
gaataccactttctttgtccgaatg

SEQ ID NO: 49886 - DNA, 25 bp, Artificial
  Probe
aataccactttctttgtccgaatga

SEQ ID NO: 49887 - DNA, 25 bp, Artificial
  Probe
ctacgactgatgcacttagcttaac

SEQ ID NO: 49888 - DNA, 25 bp, Artificial
  Probe
ttccttgtgttgtgtttactgactg

SEQ ID NO: 49889 - DNA, 25 bp, Artificial
  Probe
actacgactgatgcacttagcttaa

SEQ ID NO: 49890 - DNA, 25 bp, Artificial
  Probe
gatcaggaataccactttctttgtc

SEQ ID NO: 49891 - DNA, 25 bp, Artificial
  Probe
gttaataacattggcattgtagctt

SEQ ID NO: 49892 - DNA, 25 bp, Artificial
  Probe
cggaatggaatcaccttgactgaat

SEQ ID NO: 49893 - DNA, 25 bp, Artificial
  Probe
taatttccttgtgttgtgtttactg

SEQ ID NO: 49894 - DNA, 25 bp, Artificial
  Probe
gactacgactgatgcacttagctta

SEQ ID NO: 49895 - DNA, 25 bp, Artificial
  Probe
ataccactttctttgtccgaatgac

SEQ ID NO: 49896 - DNA, 25 bp, Artificial
  Probe
attggcattgtagcttaaatcccta

SEQ ID NO: 49897 - DNA, 25 bp, Artificial
  Probe
aagataatttccttgtgttgtgttt

SEQ ID NO: 49898 - DNA, 25 bp, Artificial
  Probe
aaagataatttccttgtgttgtgtt

SEQ ID NO: 49899 - DNA, 25 bp, Artificial
  Probe
ggcattgtagcttaaatccctagaa

SEQ ID NO: 49900 - DNA, 25 bp, Artificial
  Probe
atcaggaataccactttctttgtcc

SEQ ID NO: 49901 - DNA, 25 bp, Artificial
  Probe
tacgactgatgcacttagcttaacc

SEQ ID NO: 49902 - DNA, 25 bp, Artificial
  Probe
ttggcattgtagcttaaatccctag

SEQ ID NO: 49903 - DNA, 25 bp, Artificial
  Probe
ggaataccactttctttgtccgaat

SEQ ID NO: 49904 - DNA, 25 bp, Artificial
  Probe
ccactttctttgtccgaatgacttt

SEQ ID NO: 49905 - DNA, 25 bp, Artificial
  Probe
ataatttccttgtgttgtgtttact

SEQ ID NO: 49906 - DNA, 25 bp, Artificial
  Probe
tggcattgtagcttaaatccctaga

SEQ ID NO: 49907 - DNA, 25 bp, Artificial
  Probe
cattggcattgtagcttaaatccct

SEQ ID NO: 49908 - DNA, 25 bp, Artificial
  Probe
gataatttccttgtgttgtgtttac

SEQ ID NO: 49909 - DNA, 25 bp, Artificial
  Probe
taccactttctttgtccgaatgact

SEQ ID NO: 49910 - DNA, 25 bp, Artificial
  Probe
aacattggcattgtagcttaaatcc

SEQ ID NO: 49911 - DNA, 25 bp, Artificial
  Probe
ttcagacagtagcacggaatggaat

SEQ ID NO: 49912 - DNA, 25 bp, Artificial
  Probe
agataatttccttgtgttgtgttta

SEQ ID NO: 49913 - DNA, 25 bp, Artificial
  Probe
taataacattggcattgtagcttaa

SEQ ID NO: 49914 - DNA, 25 bp, Artificial
  Probe
ttaataacattggcattgtagctta

SEQ ID NO: 49915 - DNA, 25 bp, Artificial
  Probe
tccttgtgttgtgtttactgactgg

SEQ ID NO: 49916 - DNA, 25 bp, Artificial
  Probe
cgactgatgcacttagcttaaccat

SEQ ID NO: 49917 - DNA, 25 bp, Artificial
  Probe
actgtgaaagataatttccttgtgt

SEQ ID NO: 49918 - DNA, 25 bp, Artificial
  Probe
aggaataccactttctttgtccgaa

SEQ ID NO: 49919 - DNA, 25 bp, Artificial
  Probe
cccttctgctttattctcccaataa

SEQ ID NO: 49920 - DNA, 25 bp, Artificial
  Probe
gcccttactattatggtgattagtt

SEQ ID NO: 49921 - DNA, 25 bp, Artificial
  Probe
cactgtgaaagataatttccttgtg

SEQ ID NO: 49922 - DNA, 25 bp, Artificial
  Probe
tcagacagtagcacggaatggaatc

SEQ ID NO: 49923 - DNA, 25 bp, Artificial
  Probe
tgttaataacattggcattgtagct

SEQ ID NO: 49924 - DNA, 25 bp, Artificial
  Probe
gagaaaccttatacttgccccgact

SEQ ID NO: 49925 - DNA, 25 bp, Artificial
  Probe
agaaaccttatacttgccccgactg

SEQ ID NO: 49926 - DNA, 25 bp, Artificial
  Probe
ctttagctggagctcaaacctcatg

SEQ ID NO: 49927 - DNA, 25 bp, Artificial
  Probe
tacatctgcactgagtgtggcaaaa

SEQ ID NO: 49928 - DNA, 25 bp, Artificial
  Probe
gctttagctggagctcaaacctcat

SEQ ID NO: 49929 - DNA, 25 bp, Artificial
  Probe
aacagaagaatgagttcaaggctgc

SEQ ID NO: 49930 - DNA, 25 bp, Artificial
  Probe
catgaaggacggtgacaagaacaac

SEQ ID NO: 49931 - DNA, 25 bp, Artificial
  Probe
gaacagaagaatgagttcaaggctg

SEQ ID NO: 49932 - DNA, 25 bp, Artificial
  Probe
agcatggatgacatctacaaagcag

SEQ ID NO: 49933 - DNA, 25 bp, Artificial
  Probe
cagcatggatgacatctacaaagca

SEQ ID NO: 49934 - DNA, 25 bp, Artificial
  Probe
accagcatggatgacatctacaaag

SEQ ID NO: 49935 - DNA, 25 bp, Artificial
  Probe
caccagcatggatgacatctacaaa

SEQ ID NO: 49936 - DNA, 25 bp, Artificial
  Probe
ccaccagcatggatgacatctacaa

SEQ ID NO: 49937 - DNA, 25 bp, Artificial
  Probe
catggatgacatctacaaagcagcg

SEQ ID NO: 49938 - DNA, 25 bp, Artificial
  Probe
gcatggatgacatctacaaagcagc

SEQ ID NO: 49939 - DNA, 25 bp, Artificial
  Probe
ccagcatggatgacatctacaaagc

SEQ ID NO: 49940 - DNA, 25 bp, Artificial
  Probe
cttcgacgagttccttgtcatgatg

SEQ ID NO: 49941 - DNA, 25 bp, Artificial
  Probe
acttcgacgagttccttgtcatgat

SEQ ID NO: 49942 - DNA, 25 bp, Artificial
  Probe
tcatgaaggacggtgacaagaacaa

SEQ ID NO: 49943 - DNA, 25 bp, Artificial
  Probe
cagaagaatgagttcaaggctgcct

SEQ ID NO: 49944 - DNA, 25 bp, Artificial
  Probe
gacttcgacgagttccttgtcatga

SEQ ID NO: 49945 - DNA, 25 bp, Artificial
  Probe
ctcatgaaggacggtgacaagaaca

SEQ ID NO: 49946 - DNA, 25 bp, Artificial
  Probe
ctgccttcgatatctttgtcctggg

SEQ ID NO: 49947 - DNA, 25 bp, Artificial
  Probe
agttcaaggctgccttcgatatctt

SEQ ID NO: 49948 - DNA, 25 bp, Artificial
  Probe
gaagaatgagttcaaggctgccttc

SEQ ID NO: 49949 - DNA, 25 bp, Artificial
  Probe
atgagttcaaggctgccttcgatat

SEQ ID NO: 49950 - DNA, 25 bp, Artificial
  Probe
aatgagttcaaggctgccttcgata

SEQ ID NO: 49951 - DNA, 25 bp, Artificial
  Probe
ttcaaggctgccttcgatatctttg

SEQ ID NO: 49952 - DNA, 25 bp, Artificial
  Probe
gttcaaggctgccttcgatatcttt

SEQ ID NO: 49953 - DNA, 25 bp, Artificial
  Probe
gagttcaaggctgccttcgatatct

SEQ ID NO: 49954 - DNA, 25 bp, Artificial
  Probe
agaagaatgagttcaaggctgcctt

SEQ ID NO: 49955 - DNA, 25 bp, Artificial
  Probe
tgagttcaaggctgccttcgatatc

SEQ ID NO: 49956 - DNA, 25 bp, Artificial
  Probe
caaggctgccttcgatatctttgtc

SEQ ID NO: 49957 - DNA, 25 bp, Artificial
  Probe
tcaaggctgccttcgatatctttgt

SEQ ID NO: 49958 - DNA, 25 bp, Artificial
  Probe
aaggctgccttcgatatctttgtcc

SEQ ID NO: 49959 - DNA, 25 bp, Artificial
  Probe
atgcccacacgacaaataaataaat

SEQ ID NO: 49960 - DNA, 25 bp, Artificial
  Probe
tgcccacacgacaaataaataaatg

SEQ ID NO: 49961 - DNA, 25 bp, Artificial
  Probe
catgcccacacgacaaataaataaa

SEQ ID NO: 49962 - DNA, 25 bp, Artificial
  Probe
gcccacacgacaaataaataaatgt

SEQ ID NO: 49963 - DNA, 25 bp, Artificial
  Probe
tctactgaacacatttacagagtcc

SEQ ID NO: 49964 - DNA, 25 bp, Artificial
  Probe
ggtctactgaacacatttacagagt

SEQ ID NO: 49965 - DNA, 25 bp, Artificial
  Probe
tggtctactgaacacatttacagag

SEQ ID NO: 49966 - DNA, 25 bp, Artificial
  Probe
ctggtctactgaacacatttacaga

SEQ ID NO: 49967 - DNA, 25 bp, Artificial
  Probe
ctactgaacacatttacagagtccc

SEQ ID NO: 49968 - DNA, 25 bp, Artificial
  Probe
gtctactgaacacatttacagagtc

SEQ ID NO: 49969 - DNA, 25 bp, Artificial
  Probe
ctggctggtctactgaacacattta

SEQ ID NO: 49970 - DNA, 25 bp, Artificial
  Probe
gctggtctactgaacacatttacag

SEQ ID NO: 49971 - DNA, 25 bp, Artificial
  Probe
ggctggtctactgaacacatttaca

SEQ ID NO: 49972 - DNA, 25 bp, Artificial
  Probe
tggctggtctactgaacacatttac

SEQ ID NO: 49973 - DNA, 25 bp, Artificial
  Probe
ccatgcccacacgacaaataaataa

SEQ ID NO: 49974 - DNA, 25 bp, Artificial
  Probe
cccacacgacaaataaataaatgta

SEQ ID NO: 49975 - DNA, 25 bp, Artificial
  Probe
gatcctcagaagagaatggaatctc

SEQ ID NO: 49976 - DNA, 25 bp, Artificial
  Probe
atcctcagaagagaatggaatctca

SEQ ID NO: 49977 - DNA, 25 bp, Artificial
  Probe
tactgaacacatttacagagtcccg

SEQ ID NO: 49978 - DNA, 25 bp, Artificial
  Probe
tcagaagagaatggaatctcacctc

SEQ ID NO: 49979 - DNA, 25 bp, Artificial
  Probe
ctcagaagagaatggaatctcacct

SEQ ID NO: 49980 - DNA, 25 bp, Artificial
  Probe
tcctcagaagagaatggaatctcac

SEQ ID NO: 49981 - DNA, 25 bp, Artificial
  Probe
gaagagaatggaatctcacctcctc

SEQ ID NO: 49982 - DNA, 25 bp, Artificial
  Probe
agaagagaatggaatctcacctcct

SEQ ID NO: 49983 - DNA, 25 bp, Artificial
  Probe
cagaagagaatggaatctcacctcc

SEQ ID NO: 49984 - DNA, 25 bp, Artificial
  Probe
cctcagaagagaatggaatctcacc

SEQ ID NO: 49985 - DNA, 25 bp, Artificial
  Probe
ccacacgacaaataaataaatgtaa

SEQ ID NO: 49986 - DNA, 25 bp, Artificial
  Probe
aagagaatggaatctcacctcctca

SEQ ID NO: 49987 - DNA, 25 bp, Artificial
  Probe
tcacaggctatgagctaggtaactg

SEQ ID NO: 49988 - DNA, 25 bp, Artificial
  Probe
agagaatggaatctcacctcctcag

SEQ ID NO: 49989 - DNA, 25 bp, Artificial
  Probe
gccatgcccacacgacaaataaata

SEQ ID NO: 49990 - DNA, 25 bp, Artificial
  Probe
ttggatcctcagaagagaatggaat

SEQ ID NO: 49991 - DNA, 25 bp, Artificial
  Probe
ggatcctcagaagagaatggaatct

SEQ ID NO: 49992 - DNA, 25 bp, Artificial
  Probe
tggatcctcagaagagaatggaatc

SEQ ID NO: 49993 - DNA, 25 bp, Artificial
  Probe
ctcacaggctatgagctaggtaact

SEQ ID NO: 49994 - DNA, 25 bp, Artificial
  Probe
ctattcagggatctggtgggatgtg

SEQ ID NO: 49995 - DNA, 25 bp, Artificial
  Probe
ctatgagctaggtaactgtggctgg

SEQ ID NO: 49996 - DNA, 25 bp, Artificial
  Probe
caggctatgagctaggtaactgtgg

SEQ ID NO: 49997 - DNA, 25 bp, Artificial
  Probe
gttggatcctcagaagagaatggaa

SEQ ID NO: 49998 - DNA, 25 bp, Artificial
  Probe
gaacacatttacagagtcccggaac

SEQ ID NO: 49999 - DNA, 25 bp, Artificial
  Probe
tatgagctaggtaactgtggctgga

SEQ ID NO: 50000 - DNA, 25 bp, Artificial
  Probe
catttacagagtcccggaactgaac

SEQ ID NO: 50001 - DNA, 25 bp, Artificial
  Probe
tgaacacatttacagagtcccggaa

SEQ ID NO: 50002 - DNA, 25 bp, Artificial
  Probe
tattcagggatctggtgggatgtgt

SEQ ID NO: 50003 - DNA, 25 bp, Artificial
  Probe
gctatgagctaggtaactgtggctg

SEQ ID NO: 50004 - DNA, 25 bp, Artificial
  Probe
cttggaatgttattattgccgagga

SEQ ID NO: 50005 - DNA, 25 bp, Artificial
  Probe
ttggaatgttattattgccgaggac

SEQ ID NO: 50006 - DNA, 25 bp, Artificial
  Probe
gaatgttattattgccgaggacctg

SEQ ID NO: 50007 - DNA, 25 bp, Artificial
  Probe
ttattattgccgaggacctggttag

SEQ ID NO: 50008 - DNA, 25 bp, Artificial
  Probe
gcttggaatgttattattgccgagg

SEQ ID NO: 50009 - DNA, 25 bp, Artificial
  Probe
gttattattgccgaggacctggtta

SEQ ID NO: 50010 - DNA, 25 bp, Artificial
  Probe
ggaatgttattattgccgaggacct

SEQ ID NO: 50011 - DNA, 25 bp, Artificial
  Probe
tggaatgttattattgccgaggacc

SEQ ID NO: 50012 - DNA, 25 bp, Artificial
  Probe
tattattgccgaggacctggttaga

SEQ ID NO: 50013 - DNA, 25 bp, Artificial
  Probe
aatgttattattgccgaggacctgg

SEQ ID NO: 50014 - DNA, 25 bp, Artificial
  Probe
ttccatcggtagatattgtttgtac

SEQ ID NO: 50015 - DNA, 25 bp, Artificial
  Probe
attccatcggtagatattgtttgta

SEQ ID NO: 50016 - DNA, 25 bp, Artificial
  Probe
tattccatcggtagatattgtttgt

SEQ ID NO: 50017 - DNA, 25 bp, Artificial
  Probe
ttcacttatttattccatcggtaga

SEQ ID NO: 50018 - DNA, 25 bp, Artificial
  Probe
tcacttatttattccatcggtagat

SEQ ID NO: 50019 - DNA, 25 bp, Artificial
  Probe
attattgccgaggacctggttagag

SEQ ID NO: 50020 - DNA, 25 bp, Artificial
  Probe
atgttattattgccgaggacctggt

SEQ ID NO: 50021 - DNA, 25 bp, Artificial
  Probe
tgttattattgccgaggacctggtt

SEQ ID NO: 50022 - DNA, 25 bp, Artificial
  Probe
tttcacttatttattccatcggtag

SEQ ID NO: 50023 - DNA, 25 bp, Artificial
  Probe
ttattccatcggtagatattgtttg

SEQ ID NO: 50024 - DNA, 25 bp, Artificial
  Probe
tggtgtgttgtacagcagtataatt

SEQ ID NO: 50025 - DNA, 25 bp, Artificial
  Probe
ttggtgtgttgtacagcagtataat

SEQ ID NO: 50026 - DNA, 25 bp, Artificial
  Probe
tttattccatcggtagatattgttt

SEQ ID NO: 50027 - DNA, 25 bp, Artificial
  Probe
cacttatttattccatcggtagata

SEQ ID NO: 50028 - DNA, 25 bp, Artificial
  Probe
atttattccatcggtagatattgtt

SEQ ID NO: 50029 - DNA, 25 bp, Artificial
  Probe
tccatcggtagatattgtttgtaca

SEQ ID NO: 50030 - DNA, 25 bp, Artificial
  Probe
ggtgtgttgtacagcagtataattt

SEQ ID NO: 50031 - DNA, 25 bp, Artificial
  Probe
tttggtgtgttgtacagcagtataa

SEQ ID NO: 50032 - DNA, 25 bp, Artificial
  Probe
ggcttggaatgttattattgccgag

SEQ ID NO: 50033 - DNA, 25 bp, Artificial
  Probe
tggcttggaatgttattattgccga

SEQ ID NO: 50034 - DNA, 25 bp, Artificial
  Probe
gtggcttggaatgttattattgccg

SEQ ID NO: 50035 - DNA, 25 bp, Artificial
  Probe
tatttattccatcggtagatattgt

SEQ ID NO: 50036 - DNA, 25 bp, Artificial
  Probe
caaccccaccacagaatctaagatc

SEQ ID NO: 50037 - DNA, 25 bp, Artificial
  Probe
tcaaccccaccacagaatctaagat

SEQ ID NO: 50038 - DNA, 25 bp, Artificial
  Probe
ttttcacttatttattccatcggta

SEQ ID NO: 50039 - DNA, 25 bp, Artificial
  Probe
acttatttattccatcggtagatat

SEQ ID NO: 50040 - DNA, 25 bp, Artificial
  Probe
ctcaaccccaccacagaatctaaga

SEQ ID NO: 50041 - DNA, 25 bp, Artificial
  Probe
acctggttagaggtataaagacctt

SEQ ID NO: 50042 - DNA, 25 bp, Artificial
  Probe
gaggacctggttagaggtataaaga

SEQ ID NO: 50043 - DNA, 25 bp, Artificial
  Probe
cctggttagaggtataaagaccttt

SEQ ID NO: 50044 - DNA, 25 bp, Artificial
  Probe
gacctggttagaggtataaagacct

SEQ ID NO: 50045 - DNA, 25 bp, Artificial
  Probe
aggacctggttagaggtataaagac

SEQ ID NO: 50046 - DNA, 25 bp, Artificial
  Probe
tatgaagcgatccttagagggtggt

SEQ ID NO: 50047 - DNA, 25 bp, Artificial
  Probe
ggacctggttagaggtataaagacc

SEQ ID NO: 50048 - DNA, 25 bp, Artificial
  Probe
cgaggacctggttagaggtataaag

SEQ ID NO: 50049 - DNA, 25 bp, Artificial
  Probe
caaggtcactatgaaggaattgaag

SEQ ID NO: 50050 - DNA, 25 bp, Artificial
  Probe
aaggtcactatgaaggaattgaagc

SEQ ID NO: 50051 - DNA, 25 bp, Artificial
  Probe
aatcctatatgaaggcaagcaactc

SEQ ID NO: 50052 - DNA, 25 bp, Artificial
  Probe
tatatgaaggcaagcaactccacat

SEQ ID NO: 50053 - DNA, 25 bp, Artificial
  Probe
ctatatgaaggcaagcaactccaca

SEQ ID NO: 50054 - DNA, 25 bp, Artificial
  Probe
aacgcaaggtcactatgaaggaatt

SEQ ID NO: 50055 - DNA, 25 bp, Artificial
  Probe
atatgaaggcaagcaactccacatt

SEQ ID NO: 50056 - DNA, 25 bp, Artificial
  Probe
aggtcactatgaaggaattgaagcg

SEQ ID NO: 50057 - DNA, 25 bp, Artificial
  Probe
atcctatatgaaggcaagcaactcc

SEQ ID NO: 50058 - DNA, 25 bp, Artificial
  Probe
gaacgcaaggtcactatgaaggaat

SEQ ID NO: 50059 - DNA, 25 bp, Artificial
  Probe
cgcaaggtcactatgaaggaattga

SEQ ID NO: 50060 - DNA, 25 bp, Artificial
  Probe
aaatcctatatgaaggcaagcaact

SEQ ID NO: 50061 - DNA, 25 bp, Artificial
  Probe
caaatcctatatgaaggcaagcaac

SEQ ID NO: 50062 - DNA, 25 bp, Artificial
  Probe
tatgaaggcaagcaactccacattc

SEQ ID NO: 50063 - DNA, 25 bp, Artificial
  Probe
acgcaaggtcactatgaaggaattg

SEQ ID NO: 50064 - DNA, 25 bp, Artificial
  Probe
ccaaatcctatatgaaggcaagcaa

SEQ ID NO: 50065 - DNA, 25 bp, Artificial
  Probe
ggtcactatgaaggaattgaagcgg

SEQ ID NO: 50066 - DNA, 25 bp, Artificial
  Probe
cctatatgaaggcaagcaactccac

SEQ ID NO: 50067 - DNA, 25 bp, Artificial
  Probe
tcctatatgaaggcaagcaactcca

SEQ ID NO: 50068 - DNA, 25 bp, Artificial
  Probe
agaacgcaaggtcactatgaaggaa

SEQ ID NO: 50069 - DNA, 25 bp, Artificial
  Probe
caagcaactccacattcctaccatg

SEQ ID NO: 50070 - DNA, 25 bp, Artificial
  Probe
tgaaataaaatgccaaagaccaaaa

SEQ ID NO: 50071 - DNA, 25 bp, Artificial
  Probe
ttgaaataaaatgccaaagaccaaa

SEQ ID NO: 50072 - DNA, 25 bp, Artificial
  Probe
cagaacgcaaggtcactatgaagga

SEQ ID NO: 50073 - DNA, 25 bp, Artificial
  Probe
gtcactatgaaggaattgaagcggg

SEQ ID NO: 50074 - DNA, 25 bp, Artificial
  Probe
ttcaagagagaaccttggcttcttc

SEQ ID NO: 50075 - DNA, 25 bp, Artificial
  Probe
gttcaagagagaaccttggcttctt

SEQ ID NO: 50076 - DNA, 25 bp, Artificial
  Probe
tcaagagagaaccttggcttcttct

SEQ ID NO: 50077 - DNA, 25 bp, Artificial
  Probe
gaaggcaagcaactccacattccta

SEQ ID NO: 50078 - DNA, 25 bp, Artificial
  Probe
gtgttcaagagagaaccttggcttc

SEQ ID NO: 50079 - DNA, 25 bp, Artificial
  Probe
tgttcaagagagaaccttggcttct

SEQ ID NO: 50080 - DNA, 25 bp, Artificial
  Probe
tgcaccaaatcctatatgaaggcaa

SEQ ID NO: 50081 - DNA, 25 bp, Artificial
  Probe
tttgaaataaaatgccaaagaccaa

SEQ ID NO: 50082 - DNA, 25 bp, Artificial
  Probe
ttttgaaataaaatgccaaagacca

SEQ ID NO: 50083 - DNA, 25 bp, Artificial
  Probe
tcctggtgttcaagagagaaccttg

SEQ ID NO: 50084 - DNA, 25 bp, Artificial
  Probe
gtcctggtgttcaagagagaacctt

SEQ ID NO: 50085 - DNA, 25 bp, Artificial
  Probe
gctgcaattttgaaataaaatgcca

SEQ ID NO: 50086 - DNA, 25 bp, Artificial
  Probe
tgctgcaattttgaaataaaatgcc

SEQ ID NO: 50087 - DNA, 25 bp, Artificial
  Probe
ttgctgcaattttgaaataaaatgc

SEQ ID NO: 50088 - DNA, 25 bp, Artificial
  Probe
ggtgttcaagagagaaccttggctt

SEQ ID NO: 50089 - DNA, 25 bp, Artificial
  Probe
attttgaaataaaatgccaaagacc

SEQ ID NO: 50090 - DNA, 25 bp, Artificial
  Probe
gcaattttgaaataaaatgccaaag

SEQ ID NO: 50091 - DNA, 25 bp, Artificial
  Probe
cctggtgttcaagagagaaccttgg

SEQ ID NO: 50092 - DNA, 25 bp, Artificial
  Probe
ctgcaattttgaaataaaatgccaa

SEQ ID NO: 50093 - DNA, 25 bp, Artificial
  Probe
ccttgctgcaattttgaaataaaat

SEQ ID NO: 50094 - DNA, 25 bp, Artificial
  Probe
aatgaacactaagacatacctggag

SEQ ID NO: 50095 - DNA, 25 bp, Artificial
  Probe
cgcaagataatgaacactaagacat

SEQ ID NO: 50096 - DNA, 25 bp, Artificial
  Probe
taatgaacactaagacatacctgga

SEQ ID NO: 50097 - DNA, 25 bp, Artificial
  Probe
atgaacactaagacatacctggagt

SEQ ID NO: 50098 - DNA, 25 bp, Artificial
  Probe
ataatgaacactaagacatacctgg

SEQ ID NO: 50099 - DNA, 25 bp, Artificial
  Probe
gataatgaacactaagacatacctg

SEQ ID NO: 50100 - DNA, 25 bp, Artificial
  Probe
agataatgaacactaagacatacct

SEQ ID NO: 50101 - DNA, 25 bp, Artificial
  Probe
gcaagataatgaacactaagacata

SEQ ID NO: 50102 - DNA, 25 bp, Artificial
  Probe
aagataatgaacactaagacatacc

SEQ ID NO: 50103 - DNA, 25 bp, Artificial
  Probe
gaacccattgagaagaaagccattc

SEQ ID NO: 50104 - DNA, 25 bp, Artificial
  Probe
ggaacccattgagaagaaagccatt

SEQ ID NO: 50105 - DNA, 25 bp, Artificial
  Probe
caagataatgaacactaagacatac

SEQ ID NO: 50106 - DNA, 25 bp, Artificial
  Probe
aacccattgagaagaaagccattcc

SEQ ID NO: 50107 - DNA, 25 bp, Artificial
  Probe
cttcaggctctttgacgagaacaat

SEQ ID NO: 50108 - DNA, 25 bp, Artificial
  Probe
gtatgaactggacttctcccacttc

SEQ ID NO: 50109 - DNA, 25 bp, Artificial
  Probe
gcgcaagataatgaacactaagaca

SEQ ID NO: 50110 - DNA, 25 bp, Artificial
  Probe
aaactgtgttcgtgctttctgagaa

SEQ ID NO: 50111 - DNA, 25 bp, Artificial
  Probe
ttcgtgctttctgagaacttcgtac

SEQ ID NO: 50112 - DNA, 25 bp, Artificial
  Probe
agtatgaactggacttctcccactt

SEQ ID NO: 50113 - DNA, 25 bp, Artificial
  Probe
ggcaaatggatcattgacaacatca

SEQ ID NO: 50114 - DNA, 25 bp, Artificial
  Probe
ttcaggctctttgacgagaacaatg

SEQ ID NO: 50115 - DNA, 25 bp, Artificial
  Probe
tttgctggaacccattgagaagaaa

SEQ ID NO: 50116 - DNA, 25 bp, Artificial
  Probe
tgaacactaagacatacctggagtg

SEQ ID NO: 50117 - DNA, 25 bp, Artificial
  Probe
gaagtgttttgggcaaatctgagaa

SEQ ID NO: 50118 - DNA, 25 bp, Artificial
  Probe
gggcaaatggatcattgacaacatc

SEQ ID NO: 50119 - DNA, 25 bp, Artificial
  Probe
ttgctggaacccattgagaagaaag

SEQ ID NO: 50120 - DNA, 25 bp, Artificial
  Probe
caggctctttgacgagaacaatgac

SEQ ID NO: 50121 - DNA, 25 bp, Artificial
  Probe
gaacactaagacatacctggagtgg

SEQ ID NO: 50122 - DNA, 25 bp, Artificial
  Probe
tcaggctctttgacgagaacaatga

SEQ ID NO: 50123 - DNA, 25 bp, Artificial
  Probe
aagtgttttgggcaaatctgagaac

SEQ ID NO: 50124 - DNA, 25 bp, Artificial
  Probe
aatctgagaactgcaataaaatcct

SEQ ID NO: 50125 - DNA, 25 bp, Artificial
  Probe
tatgaactggacttctcccacttca

SEQ ID NO: 50126 - DNA, 25 bp, Artificial
  Probe
aagtatgaactggacttctcccact

SEQ ID NO: 50127 - DNA, 25 bp, Artificial
  Probe
caagtatgaactggacttctcccac

SEQ ID NO: 50128 - DNA, 25 bp, Artificial
  Probe
tctgagaactgcaataaaatcctag

SEQ ID NO: 50129 - DNA, 25 bp, Artificial
  Probe
gtgcaagtatgaactggacttctcc

SEQ ID NO: 50130 - DNA, 25 bp, Artificial
  Probe
ggtgcaagtatgaactggacttctc

SEQ ID NO: 50131 - DNA, 25 bp, Artificial
  Probe
gagtggtgcaagtatgaactggact

SEQ ID NO: 50132 - DNA, 25 bp, Artificial
  Probe
acttcaggctctttgacgagaacaa

SEQ ID NO: 50133 - DNA, 25 bp, Artificial
  Probe
gggcaaatctgagaactgcaataaa

SEQ ID NO: 50134 - DNA, 25 bp, Artificial
  Probe
aaatctgagaactgcaataaaatcc

SEQ ID NO: 50135 - DNA, 25 bp, Artificial
  Probe
caaaactgtgttcgtgctttctgag

SEQ ID NO: 50136 - DNA, 25 bp, Artificial
  Probe
atctgagaactgcaataaaatccta

SEQ ID NO: 50137 - DNA, 25 bp, Artificial
  Probe
aaaactgtgttcgtgctttctgaga

SEQ ID NO: 50138 - DNA, 25 bp, Artificial
  Probe
gtgttttgggcaaatctgagaactg

SEQ ID NO: 50139 - DNA, 25 bp, Artificial
  Probe
gaccatcatcctactgtaataaaga

SEQ ID NO: 50140 - DNA, 25 bp, Artificial
  Probe
ggaccatcatcctactgtaataaag

SEQ ID NO: 50141 - DNA, 25 bp, Artificial
  Probe
accatcatcctactgtaataaagat

SEQ ID NO: 50142 - DNA, 25 bp, Artificial
  Probe
cctactgtaataaagatgattgtga

SEQ ID NO: 50143 - DNA, 25 bp, Artificial
  Probe
tcctactgtaataaagatgattgtg

SEQ ID NO: 50144 - DNA, 25 bp, Artificial
  Probe
caggaccatcatcctactgtaataa

SEQ ID NO: 50145 - DNA, 25 bp, Artificial
  Probe
ccaggaccatcatcctactgtaata

SEQ ID NO: 50146 - DNA, 25 bp, Artificial
  Probe
tctttcctaaggctgcaaggtttag

SEQ ID NO: 50147 - DNA, 25 bp, Artificial
  Probe
gtctttcctaaggctgcaaggttta

SEQ ID NO: 50148 - DNA, 25 bp, Artificial
  Probe
atcctactgtaataaagatgattgt

SEQ ID NO: 50149 - DNA, 25 bp, Artificial
  Probe
ctcagcttctcctgtgtgattgaca

SEQ ID NO: 50150 - DNA, 25 bp, Artificial
  Probe
aggaccatcatcctactgtaataaa

SEQ ID NO: 50151 - DNA, 25 bp, Artificial
  Probe
ccatcatcctactgtaataaagatg

SEQ ID NO: 50152 - DNA, 25 bp, Artificial
  Probe
actgtaataaagatgattgtgaaat

SEQ ID NO: 50153 - DNA, 25 bp, Artificial
  Probe
ttctgctactggcaaaaggatcttt

SEQ ID NO: 50154 - DNA, 25 bp, Artificial
  Probe
cccaggaccatcatcctactgtaat

SEQ ID NO: 50155 - DNA, 25 bp, Artificial
  Probe
cttctgctactggcaaaaggatctt

SEQ ID NO: 50156 - DNA, 25 bp, Artificial
  Probe
ctgttttcctcccttctgctactgg

SEQ ID NO: 50157 - DNA, 25 bp, Artificial
  Probe
tctgctactggcaaaaggatctttg

SEQ ID NO: 50158 - DNA, 25 bp, Artificial
  Probe
tcagcttctcctgtgtgattgacag

SEQ ID NO: 50159 - DNA, 25 bp, Artificial
  Probe
ttgctgttttcctcccttctgctac

SEQ ID NO: 50160 - DNA, 25 bp, Artificial
  Probe
gttgctgttttcctcccttctgcta

SEQ ID NO: 50161 - DNA, 25 bp, Artificial
  Probe
catcctactgtaataaagatgattg

SEQ ID NO: 50162 - DNA, 25 bp, Artificial
  Probe
ctgctactggcaaaaggatctttgt

SEQ ID NO: 50163 - DNA, 25 bp, Artificial
  Probe
tgctactggcaaaaggatctttgtg

SEQ ID NO: 50164 - DNA, 25 bp, Artificial
  Probe
ctactggcaaaaggatctttgtggc

SEQ ID NO: 50165 - DNA, 25 bp, Artificial
  Probe
gctactggcaaaaggatctttgtgg

SEQ ID NO: 50166 - DNA, 25 bp, Artificial
  Probe
ggctcattttaatttattaattgct

SEQ ID NO: 50167 - DNA, 25 bp, Artificial
  Probe
aggctcattttaatttattaattgc

SEQ ID NO: 50168 - DNA, 25 bp, Artificial
  Probe
ctttcctaaggctgcaaggtttagg

SEQ ID NO: 50169 - DNA, 25 bp, Artificial
  Probe
ccttctgctactggcaaaaggatct

SEQ ID NO: 50170 - DNA, 25 bp, Artificial
  Probe
aacaataattccaggaggtacaagg

SEQ ID NO: 50171 - DNA, 25 bp, Artificial
  Probe
gctaactaaaggaatcaaagaaccc

SEQ ID NO: 50172 - DNA, 25 bp, Artificial
  Probe
ggctaactaaaggaatcaaagaacc

SEQ ID NO: 50173 - DNA, 25 bp, Artificial
  Probe
caataattccaggaggtacaaggac

SEQ ID NO: 50174 - DNA, 25 bp, Artificial
  Probe
taattccaggaggtacaaggacaat

SEQ ID NO: 50175 - DNA, 25 bp, Artificial
  Probe
ataattccaggaggtacaaggacaa

SEQ ID NO: 50176 - DNA, 25 bp, Artificial
  Probe
aataattccaggaggtacaaggaca

SEQ ID NO: 50177 - DNA, 25 bp, Artificial
  Probe
acaataattccaggaggtacaagga

SEQ ID NO: 50178 - DNA, 25 bp, Artificial
  Probe
acgataacccttaacacatcttaca

SEQ ID NO: 50179 - DNA, 25 bp, Artificial
  Probe
caaacgataacccttaacacatctt

SEQ ID NO: 50180 - DNA, 25 bp, Artificial
  Probe
cgataacccttaacacatcttacac

SEQ ID NO: 50181 - DNA, 25 bp, Artificial
  Probe
ccaaacgataacccttaacacatct

SEQ ID NO: 50182 - DNA, 25 bp, Artificial
  Probe
aacgataacccttaacacatcttac

SEQ ID NO: 50183 - DNA, 25 bp, Artificial
  Probe
aattccaggaggtacaaggacaatt

SEQ ID NO: 50184 - DNA, 25 bp, Artificial
  Probe
gataacccttaacacatcttacaca

SEQ ID NO: 50185 - DNA, 25 bp, Artificial
  Probe
taacccttaacacatcttacacaaa

SEQ ID NO: 50186 - DNA, 25 bp, Artificial
  Probe
ccaggaggtacaaggacaattcttc

SEQ ID NO: 50187 - DNA, 25 bp, Artificial
  Probe
aaacaataattccaggaggtacaag

SEQ ID NO: 50188 - DNA, 25 bp, Artificial
  Probe
aaacgataacccttaacacatctta

SEQ ID NO: 50189 - DNA, 25 bp, Artificial
  Probe
ataacccttaacacatcttacacaa

SEQ ID NO: 50190 - DNA, 25 bp, Artificial
  Probe
cccaaacgataacccttaacacatc

SEQ ID NO: 50191 - DNA, 25 bp, Artificial
  Probe
attccaggaggtacaaggacaattc

SEQ ID NO: 50192 - DNA, 25 bp, Artificial
  Probe
aatctaactggacaccctactctga

SEQ ID NO: 50193 - DNA, 25 bp, Artificial
  Probe
caatctaactggacaccctactctg

SEQ ID NO: 50194 - DNA, 25 bp, Artificial
  Probe
aaagtcacccatatcatgtaactca

SEQ ID NO: 50195 - DNA, 25 bp, Artificial
  Probe
caggaggtacaaggacaattcttcc

SEQ ID NO: 50196 - DNA, 25 bp, Artificial
  Probe
ctaactaaaggaatcaaagaaccct

SEQ ID NO: 50197 - DNA, 25 bp, Artificial
  Probe
tccaggaggtacaaggacaattctt

SEQ ID NO: 50198 - DNA, 25 bp, Artificial
  Probe
ttccaggaggtacaaggacaattct

SEQ ID NO: 50199 - DNA, 25 bp, Artificial
  Probe
aacccttaacacatcttacacaaaa

SEQ ID NO: 50200 - DNA, 25 bp, Artificial
  Probe
attcttccccaaacgataaccctta

SEQ ID NO: 50201 - DNA, 25 bp, Artificial
  Probe
ttcttccccaaacgataacccttaa

SEQ ID NO: 50202 - DNA, 25 bp, Artificial
  Probe
aaaacaataattccaggaggtacaa

SEQ ID NO: 50203 - DNA, 25 bp, Artificial
  Probe
aggaatcaaagaacccttctccaag

SEQ ID NO: 50204 - DNA, 25 bp, Artificial
  Probe
gacaattcttccccaaacgataacc

SEQ ID NO: 50205 - DNA, 25 bp, Artificial
  Probe
aattcttccccaaacgataaccctt

SEQ ID NO: 50206 - DNA, 25 bp, Artificial
  Probe
aaaagtcacccatatcatgtaactc

SEQ ID NO: 50207 - DNA, 25 bp, Artificial
  Probe
tcttccccaaacgataacccttaac

SEQ ID NO: 50208 - DNA, 25 bp, Artificial
  Probe
tgtccttgtcacaaagatgatttta

SEQ ID NO: 50209 - DNA, 25 bp, Artificial
  Probe
gtgtccttgtcacaaagatgatttt

SEQ ID NO: 50210 - DNA, 25 bp, Artificial
  Probe
cttccccaaacgataacccttaaca

SEQ ID NO: 50211 - DNA, 25 bp, Artificial
  Probe
ttccccaaacgataacccttaacac

SEQ ID NO: 50212 - DNA, 25 bp, Artificial
  Probe
gtccttgtcacaaagatgattttaa

SEQ ID NO: 50213 - DNA, 25 bp, Artificial
  Probe
actaaaggaatcaaagaacccttct

SEQ ID NO: 50214 - DNA, 25 bp, Artificial
  Probe
taaaggaatcaaagaacccttctcc

SEQ ID NO: 50215 - DNA, 25 bp, Artificial
  Probe
gtgggtggagaaataaatggtcttt

SEQ ID NO: 50216 - DNA, 25 bp, Artificial
  Probe
tgtgggtggagaaataaatggtctt

SEQ ID NO: 50217 - DNA, 25 bp, Artificial
  Probe
ctgtgggtggagaaataaatggtct

SEQ ID NO: 50218 - DNA, 25 bp, Artificial
  Probe
actgtgggtggagaaataaatggtc

SEQ ID NO: 50219 - DNA, 25 bp, Artificial
  Probe
tgggtggagaaataaatggtctttc

SEQ ID NO: 50220 - DNA, 25 bp, Artificial
  Probe
atctcttgacctctgtctatcccag

SEQ ID NO: 50221 - DNA, 25 bp, Artificial
  Probe
tatcttattttgtgcttgtgtctgc

SEQ ID NO: 50222 - DNA, 25 bp, Artificial
  Probe
gctatcttattttgtgcttgtgtct

SEQ ID NO: 50223 - DNA, 25 bp, Artificial
  Probe
gaggctatcttattttgtgcttgtg

SEQ ID NO: 50224 - DNA, 25 bp, Artificial
  Probe
ggctatcttattttgtgcttgtgtc

SEQ ID NO: 50225 - DNA, 25 bp, Artificial
  Probe
aggctatcttattttgtgcttgtgt

SEQ ID NO: 50226 - DNA, 25 bp, Artificial
  Probe
catctcttgacctctgtctatccca

SEQ ID NO: 50227 - DNA, 25 bp, Artificial
  Probe
gacgaggctatcttattttgtgctt

SEQ ID NO: 50228 - DNA, 25 bp, Artificial
  Probe
ctatcttattttgtgcttgtgtctg

SEQ ID NO: 50229 - DNA, 25 bp, Artificial
  Probe
cactgtgggtggagaaataaatggt

SEQ ID NO: 50230 - DNA, 25 bp, Artificial
  Probe
cgaggctatcttattttgtgcttgt

SEQ ID NO: 50231 - DNA, 25 bp, Artificial
  Probe
acgaggctatcttattttgtgcttg

SEQ ID NO: 50232 - DNA, 25 bp, Artificial
  Probe
ttattttgtgcttgtgtctgccttt

SEQ ID NO: 50233 - DNA, 25 bp, Artificial
  Probe
ccatctcttgacctctgtctatccc

SEQ ID NO: 50234 - DNA, 25 bp, Artificial
  Probe
cccatctcttgacctctgtctatcc

SEQ ID NO: 50235 - DNA, 25 bp, Artificial
  Probe
atcttattttgtgcttgtgtctgcc

SEQ ID NO: 50236 - DNA, 25 bp, Artificial
  Probe
tattttgtgcttgtgtctgcctttc

SEQ ID NO: 50237 - DNA, 25 bp, Artificial
  Probe
cttattttgtgcttgtgtctgcctt

SEQ ID NO: 50238 - DNA, 25 bp, Artificial
  Probe
ggacgaggctatcttattttgtgct

SEQ ID NO: 50239 - DNA, 25 bp, Artificial
  Probe
ctggggacgaggctatcttattttg

SEQ ID NO: 50240 - DNA, 25 bp, Artificial
  Probe
gcccatctcttgacctctgtctatc

SEQ ID NO: 50241 - DNA, 25 bp, Artificial
  Probe
cttacttcttcctcctgtgcccatc

SEQ ID NO: 50242 - DNA, 25 bp, Artificial
  Probe
tcttattttgtgcttgtgtctgcct

SEQ ID NO: 50243 - DNA, 25 bp, Artificial
  Probe
ggggacgaggctatcttattttgtg

SEQ ID NO: 50244 - DNA, 25 bp, Artificial
  Probe
actggggacgaggctatcttatttt

SEQ ID NO: 50245 - DNA, 25 bp, Artificial
  Probe
ggattggctgttgggatggaagtta

SEQ ID NO: 50246 - DNA, 25 bp, Artificial
  Probe
tctcttgacctctgtctatcccagg

SEQ ID NO: 50247 - DNA, 25 bp, Artificial
  Probe
tggggacgaggctatcttattttgt

SEQ ID NO: 50248 - DNA, 25 bp, Artificial
  Probe
ttacttcttcctcctgtgcccatct

SEQ ID NO: 50249 - DNA, 25 bp, Artificial
  Probe
caaagacatcgtccttgcctctgta

SEQ ID NO: 50250 - DNA, 25 bp, Artificial
  Probe
tgcccatctcttgacctctgtctat

SEQ ID NO: 50251 - DNA, 25 bp, Artificial
  Probe
gggacgaggctatcttattttgtgc

SEQ ID NO: 50252 - DNA, 25 bp, Artificial
  Probe
cactggggacgaggctatcttattt

SEQ ID NO: 50253 - DNA, 25 bp, Artificial
  Probe
aaagacatcgtccttgcctctgtac

SEQ ID NO: 50254 - DNA, 25 bp, Artificial
  Probe
gggtggagaaataaatggtctttct

SEQ ID NO: 50255 - DNA, 25 bp, Artificial
  Probe
atttgagacccacttctggcttcag

SEQ ID NO: 50256 - DNA, 25 bp, Artificial
  Probe
gtactggcttctccccaactaaaac

SEQ ID NO: 50257 - DNA, 25 bp, Artificial
  Probe
catttgagacccacttctggcttca

SEQ ID NO: 50258 - DNA, 25 bp, Artificial
  Probe
acatttgagacccacttctggcttc

SEQ ID NO: 50259 - DNA, 25 bp, Artificial
  Probe
gacatttgagacccacttctggctt

SEQ ID NO: 50260 - DNA, 25 bp, Artificial
  Probe
acagtgccaagaatgacaagatatt

SEQ ID NO: 50261 - DNA, 25 bp, Artificial
  Probe
aacagtgccaagaatgacaagatat

SEQ ID NO: 50262 - DNA, 25 bp, Artificial
  Probe
cagtgccaagaatgacaagatatta

SEQ ID NO: 50263 - DNA, 25 bp, Artificial
  Probe
agtgccaagaatgacaagatattaa

SEQ ID NO: 50264 - DNA, 25 bp, Artificial
  Probe
aaacagtgccaagaatgacaagata

SEQ ID NO: 50265 - DNA, 25 bp, Artificial
  Probe
cttgagaacttactaaaggcacttc

SEQ ID NO: 50266 - DNA, 25 bp, Artificial
  Probe
ttagaaacagtgccaagaatgacaa

SEQ ID NO: 50267 - DNA, 25 bp, Artificial
  Probe
tttagaaacagtgccaagaatgaca

SEQ ID NO: 50268 - DNA, 25 bp, Artificial
  Probe
taagttgtgtttattcctggagtga

SEQ ID NO: 50269 - DNA, 25 bp, Artificial
  Probe
ctttagaaacagtgccaagaatgac

SEQ ID NO: 50270 - DNA, 25 bp, Artificial
  Probe
ttgagaacttactaaaggcacttcc

SEQ ID NO: 50271 - DNA, 25 bp, Artificial
  Probe
tagaaacagtgccaagaatgacaag

SEQ ID NO: 50272 - DNA, 25 bp, Artificial
  Probe
gcttgagaacttactaaaggcactt

SEQ ID NO: 50273 - DNA, 25 bp, Artificial
  Probe
aagttgtgtttattcctggagtgac

SEQ ID NO: 50274 - DNA, 25 bp, Artificial
  Probe
ttaacatctcttgaagccaaactcc

SEQ ID NO: 50275 - DNA, 25 bp, Artificial
  Probe
ctctggcttgagaacttactaaagg

SEQ ID NO: 50276 - DNA, 25 bp, Artificial
  Probe
cctctggcttgagaacttactaaag

SEQ ID NO: 50277 - DNA, 25 bp, Artificial
  Probe
gaaacagtgccaagaatgacaagat

SEQ ID NO: 50278 - DNA, 25 bp, Artificial
  Probe
gtgccaagaatgacaagatattaaa

SEQ ID NO: 50279 - DNA, 25 bp, Artificial
  Probe
gttgtgtttattcctggagtgacat

SEQ ID NO: 50280 - DNA, 25 bp, Artificial
  Probe
taacatctcttgaagccaaactcca

SEQ ID NO: 50281 - DNA, 25 bp, Artificial
  Probe
ttgagttaacatctcttgaagccaa

SEQ ID NO: 50282 - DNA, 25 bp, Artificial
  Probe
tgagaacttactaaaggcacttcct

SEQ ID NO: 50283 - DNA, 25 bp, Artificial
  Probe
tctggcttgagaacttactaaaggc

SEQ ID NO: 50284 - DNA, 25 bp, Artificial
  Probe
ttgtgtttattcctggagtgacatg

SEQ ID NO: 50285 - DNA, 25 bp, Artificial
  Probe
agaaacagtgccaagaatgacaaga

SEQ ID NO: 50286 - DNA, 25 bp, Artificial
  Probe
agttgtgtttattcctggagtgaca

SEQ ID NO: 50287 - DNA, 25 bp, Artificial
  Probe
ggcttgagaacttactaaaggcact

SEQ ID NO: 50288 - DNA, 25 bp, Artificial
  Probe
ctggcttgagaacttactaaaggca

SEQ ID NO: 50289 - DNA, 25 bp, Artificial
  Probe
taaatttggtgattctctgctaggc

SEQ ID NO: 50290 - DNA, 25 bp, Artificial
  Probe
ataaatttggtgattctctgctagg

SEQ ID NO: 50291 - DNA, 25 bp, Artificial
  Probe
tggcttgagaacttactaaaggcac

SEQ ID NO: 50292 - DNA, 25 bp, Artificial
  Probe
tctttagaaacagtgccaagaatga

SEQ ID NO: 50293 - DNA, 25 bp, Artificial
  Probe
cataaatttggtgattctctgctag

SEQ ID NO: 50294 - DNA, 25 bp, Artificial
  Probe
ctccataaatttggtgattctctgc

SEQ ID NO: 50295 - DNA, 25 bp, Artificial
  Probe
tccataaatttggtgattctctgct

SEQ ID NO: 50296 - DNA, 25 bp, Artificial
  Probe
aacatctcttgaagccaaactccac

SEQ ID NO: 50297 - DNA, 25 bp, Artificial
  Probe
gttaacatctcttgaagccaaactc

SEQ ID NO: 50298 - DNA, 25 bp, Artificial
  Probe
ccataaatttggtgattctctgcta

SEQ ID NO: 50299 - DNA, 25 bp, Artificial
  Probe
tctccataaatttggtgattctctg

SEQ ID NO: 50300 - DNA, 25 bp, Artificial
  Probe
actctccataaatttggtgattctc

SEQ ID NO: 50301 - DNA, 25 bp, Artificial
  Probe
gagttaacatctcttgaagccaaac

SEQ ID NO: 50302 - DNA, 25 bp, Artificial
  Probe
tgagttaacatctcttgaagccaaa

SEQ ID NO: 50303 - DNA, 25 bp, Artificial
  Probe
tttgagttaacatctcttgaagcca

SEQ ID NO: 50304 - DNA, 25 bp, Artificial
  Probe
ctctccataaatttggtgattctct

SEQ ID NO: 50305 - DNA, 25 bp, Artificial
  Probe
tccataaggctgtgcttgatgtatt

SEQ ID NO: 50306 - DNA, 25 bp, Artificial
  Probe
gcctcctgacagcaataaataattt

SEQ ID NO: 50307 - DNA, 25 bp, Artificial
  Probe
ataaggctgtgcttgatgtatttga

SEQ ID NO: 50308 - DNA, 25 bp, Artificial
  Probe
cataaggctgtgcttgatgtatttg

SEQ ID NO: 50309 - DNA, 25 bp, Artificial
  Probe
gtccataaggctgtgcttgatgtat

SEQ ID NO: 50310 - DNA, 25 bp, Artificial
  Probe
tcctgacagcaataaataatttcgt

SEQ ID NO: 50311 - DNA, 25 bp, Artificial
  Probe
taaggctgtgcttgatgtatttgag

SEQ ID NO: 50312 - DNA, 25 bp, Artificial
  Probe
ctcctgacagcaataaataatttcg

SEQ ID NO: 50313 - DNA, 25 bp, Artificial
  Probe
cctgacagcaataaataatttcgtt

SEQ ID NO: 50314 - DNA, 25 bp, Artificial
  Probe
ccataaggctgtgcttgatgtattt

SEQ ID NO: 50315 - DNA, 25 bp, Artificial
  Probe
agcaataaataatttcgttggacac

SEQ ID NO: 50316 - DNA, 25 bp, Artificial
  Probe
cagcaataaataatttcgttggaca

SEQ ID NO: 50317 - DNA, 25 bp, Artificial
  Probe
acagcaataaataatttcgttggac

SEQ ID NO: 50318 - DNA, 25 bp, Artificial
  Probe
tgacagcaataaataatttcgttgg

SEQ ID NO: 50319 - DNA, 25 bp, Artificial
  Probe
cctcctgacagcaataaataatttc

SEQ ID NO: 50320 - DNA, 25 bp, Artificial
  Probe
ggctctcagtaaggaacttggaatg

SEQ ID NO: 50321 - DNA, 25 bp, Artificial
  Probe
gacagcaataaataatttcgttgga

SEQ ID NO: 50322 - DNA, 25 bp, Artificial
  Probe
tctcagtaaggaacttggaatgcaa

SEQ ID NO: 50323 - DNA, 25 bp, Artificial
  Probe
gctctcagtaaggaacttggaatgc

SEQ ID NO: 50324 - DNA, 25 bp, Artificial
  Probe
ctgacagcaataaataatttcgttg

SEQ ID NO: 50325 - DNA, 25 bp, Artificial
  Probe
ctctcagtaaggaacttggaatgca

SEQ ID NO: 50326 - DNA, 25 bp, Artificial
  Probe
ctgtgcttgatgtatttgaggaggg

SEQ ID NO: 50327 - DNA, 25 bp, Artificial
  Probe
gcattagtggagacaaggaccattg

SEQ ID NO: 50328 - DNA, 25 bp, Artificial
  Probe
gcaataaataatttcgttggacacg

SEQ ID NO: 50329 - DNA, 25 bp, Artificial
  Probe
gatgtatttgaggagggcacagaag

SEQ ID NO: 50330 - DNA, 25 bp, Artificial
  Probe
aaggctgtgcttgatgtatttgagg

SEQ ID NO: 50331 - DNA, 25 bp, Artificial
  Probe
ggtccataaggctgtgcttgatgta

SEQ ID NO: 50332 - DNA, 25 bp, Artificial
  Probe
tacagacacccagaacatcttcttc

SEQ ID NO: 50333 - DNA, 25 bp, Artificial
  Probe
ctacagacacccagaacatcttctt

SEQ ID NO: 50334 - DNA, 25 bp, Artificial
  Probe
attagtggagacaaggaccattgtg

SEQ ID NO: 50335 - DNA, 25 bp, Artificial
  Probe
cattagtggagacaaggaccattgt

SEQ ID NO: 50336 - DNA, 25 bp, Artificial
  Probe
cttgatgtatttgaggagggcacag

SEQ ID NO: 50337 - DNA, 25 bp, Artificial
  Probe
ggcctcctgacagcaataaataatt

SEQ ID NO: 50338 - DNA, 25 bp, Artificial
  Probe
gctgtgcttgatgtatttgaggagg

SEQ ID NO: 50339 - DNA, 25 bp, Artificial
  Probe
ggctgtgcttgatgtatttgaggag

SEQ ID NO: 50340 - DNA, 25 bp, Artificial
  Probe
ttatccttggaaggtgacagcgatt

SEQ ID NO: 50341 - DNA, 25 bp, Artificial
  Probe
tctgcttatccttggaaggtgacag

SEQ ID NO: 50342 - DNA, 25 bp, Artificial
  Probe
ctgtctgcttatccttggaaggtga

SEQ ID NO: 50343 - DNA, 25 bp, Artificial
  Probe
gaacatcttcttcatgagcaaagtc

SEQ ID NO: 50344 - DNA, 25 bp, Artificial
  Probe
cagacacccagaacatcttcttcat

SEQ ID NO: 50345 - DNA, 25 bp, Artificial
  Probe
ctcagtaaggaacttggaatgcaag

SEQ ID NO: 50346 - DNA, 25 bp, Artificial
  Probe
tgatgtatttgaggagggcacagaa

SEQ ID NO: 50347 - DNA, 25 bp, Artificial
  Probe
ttgatgtatttgaggagggcacaga

SEQ ID NO: 50348 - DNA, 25 bp, Artificial
  Probe
gggctctcagtaaggaacttggaat

SEQ ID NO: 50349 - DNA, 25 bp, Artificial
  Probe
agacacccagaacatcttcttcatg

SEQ ID NO: 50350 - DNA, 25 bp, Artificial
  Probe
ggtagatgttagtcttgaagctctt

SEQ ID NO: 50351 - DNA, 25 bp, Artificial
  Probe
taggtagatgttagtcttgaagctc

SEQ ID NO: 50352 - DNA, 25 bp, Artificial
  Probe
aggtagatgttagtcttgaagctct

SEQ ID NO: 50353 - DNA, 25 bp, Artificial
  Probe
attaaccaagcattattacacacat

SEQ ID NO: 50354 - DNA, 25 bp, Artificial
  Probe
tataggtagatgttagtcttgaagc

SEQ ID NO: 50355 - DNA, 25 bp, Artificial
  Probe
ataggtagatgttagtcttgaagct

SEQ ID NO: 50356 - DNA, 25 bp, Artificial
  Probe
ttcttggataattgtttgtgtcagc

SEQ ID NO: 50357 - DNA, 25 bp, Artificial
  Probe
tagaaatgccaagagccttactaaa

SEQ ID NO: 50358 - DNA, 25 bp, Artificial
  Probe
tttagaaatgccaagagccttacta

SEQ ID NO: 50359 - DNA, 25 bp, Artificial
  Probe
cacgaatcacagatggctatttagt

SEQ ID NO: 50360 - DNA, 25 bp, Artificial
  Probe
gaaatgccaagagccttactaaact

SEQ ID NO: 50361 - DNA, 25 bp, Artificial
  Probe
agaaatgccaagagccttactaaac

SEQ ID NO: 50362 - DNA, 25 bp, Artificial
  Probe
ttaaccaagcattattacacacata

SEQ ID NO: 50363 - DNA, 25 bp, Artificial
  Probe
tattaaccaagcattattacacaca

SEQ ID NO: 50364 - DNA, 25 bp, Artificial
  Probe
gtttcttggataattgtttgtgtca

SEQ ID NO: 50365 - DNA, 25 bp, Artificial
  Probe
tgtttcttggataattgtttgtgtc

SEQ ID NO: 50366 - DNA, 25 bp, Artificial
  Probe
aaatgccaagagccttactaaactg

SEQ ID NO: 50367 - DNA, 25 bp, Artificial
  Probe
gtagatgttagtcttgaagctctta

SEQ ID NO: 50368 - DNA, 25 bp, Artificial
  Probe
tttcttggataattgtttgtgtcag

SEQ ID NO: 50369 - DNA, 25 bp, Artificial
  Probe
taaccaagcattattacacacataa

SEQ ID NO: 50370 - DNA, 25 bp, Artificial
  Probe
ttagaaatgccaagagccttactaa

SEQ ID NO: 50371 - DNA, 25 bp, Artificial
  Probe
agatgttagtcttgaagctcttatt

SEQ ID NO: 50372 - DNA, 25 bp, Artificial
  Probe
ttgtttcttggataattgtttgtgt

SEQ ID NO: 50373 - DNA, 25 bp, Artificial
  Probe
gccttactaaactggagcagattta

SEQ ID NO: 50374 - DNA, 25 bp, Artificial
  Probe
tgaaacagggctctagtgaatcttt

SEQ ID NO: 50375 - DNA, 25 bp, Artificial
  Probe
acgaatcacagatggctatttagtg

SEQ ID NO: 50376 - DNA, 25 bp, Artificial
  Probe
tcttggataattgtttgtgtcagct

SEQ ID NO: 50377 - DNA, 25 bp, Artificial
  Probe
ccttactaaactggagcagatttat

SEQ ID NO: 50378 - DNA, 25 bp, Artificial
  Probe
aaccaagcattattacacacataat

SEQ ID NO: 50379 - DNA, 25 bp, Artificial
  Probe
tatgaagtctaacttagtgttcacg

SEQ ID NO: 50380 - DNA, 25 bp, Artificial
  Probe
agtgatgatataggtagatgttagt

SEQ ID NO: 50381 - DNA, 25 bp, Artificial
  Probe
cgaatcacagatggctatttagtgg

SEQ ID NO: 50382 - DNA, 25 bp, Artificial
  Probe
agccttactaaactggagcagattt

SEQ ID NO: 50383 - DNA, 25 bp, Artificial
  Probe
gtgaaacagggctctagtgaatctt

SEQ ID NO: 50384 - DNA, 25 bp, Artificial
  Probe
tagatgttagtcttgaagctcttat

SEQ ID NO: 50385 - DNA, 25 bp, Artificial
  Probe
actggagcagatttatgatatagtg

SEQ ID NO: 50386 - DNA, 25 bp, Artificial
  Probe
gaatcacagatggctatttagtggc

SEQ ID NO: 50387 - DNA, 25 bp, Artificial
  Probe
tggagcagatttatgatatagtgat

SEQ ID NO: 50388 - DNA, 25 bp, Artificial
  Probe
tttgtttcttggataattgtttgtg

SEQ ID NO: 50389 - DNA, 25 bp, Artificial
  Probe
ctggagcagatttatgatatagtga

SEQ ID NO: 50390 - DNA, 25 bp, Artificial
  Probe
gtgatgatataggtagatgttagtc

SEQ ID NO: 50391 - DNA, 25 bp, Artificial
  Probe
ggagcagatttatgatatagtgatg

SEQ ID NO: 50392 - DNA, 25 bp, Artificial
  Probe
tgatataggtagatgttagtcttga

SEQ ID NO: 50393 - DNA, 25 bp, Artificial
  Probe
ccacgaatcacagatggctatttag

SEQ ID NO: 50394 - DNA, 25 bp, Artificial
  Probe
ttactaaactggagcagatttatga

SEQ ID NO: 50395 - DNA, 25 bp, Artificial
  Probe
ctatggaagctattgtcacttgaga

SEQ ID NO: 50396 - DNA, 25 bp, Artificial
  Probe
atggaagctattgtcacttgagaat

SEQ ID NO: 50397 - DNA, 25 bp, Artificial
  Probe
tatggaagctattgtcacttgagaa

SEQ ID NO: 50398 - DNA, 25 bp, Artificial
  Probe
tggaagctattgtcacttgagaatt

SEQ ID NO: 50399 - DNA, 25 bp, Artificial
  Probe
aggtctgtattgctcaatattagga

SEQ ID NO: 50400 - DNA, 25 bp, Artificial
  Probe
gtattgctcaatattaggaagtcgt

SEQ ID NO: 50401 - DNA, 25 bp, Artificial
  Probe
tgtattgctcaatattaggaagtcg

SEQ ID NO: 50402 - DNA, 25 bp, Artificial
  Probe
aggagcaatggttaaatgggtatta

SEQ ID NO: 50403 - DNA, 25 bp, Artificial
  Probe
ggtctgtattgctcaatattaggaa

SEQ ID NO: 50404 - DNA, 25 bp, Artificial
  Probe
attgctcaatattaggaagtcgtat

SEQ ID NO: 50405 - DNA, 25 bp, Artificial
  Probe
gaggagcaatggttaaatgggtatt

SEQ ID NO: 50406 - DNA, 25 bp, Artificial
  Probe
ttgctcaatattaggaagtcgtatt

SEQ ID NO: 50407 - DNA, 25 bp, Artificial
  Probe
ggagcaatggttaaatgggtattaa

SEQ ID NO: 50408 - DNA, 25 bp, Artificial
  Probe
aatgcttatgctaaggctctgagac

SEQ ID NO: 50409 - DNA, 25 bp, Artificial
  Probe
taggtctgtattgctcaatattagg

SEQ ID NO: 50410 - DNA, 25 bp, Artificial
  Probe
ttgttctgaaggatcaaggacagtc

SEQ ID NO: 50411 - DNA, 25 bp, Artificial
  Probe
tctgtattgctcaatattaggaagt

SEQ ID NO: 50412 - DNA, 25 bp, Artificial
  Probe
tgctcaatattaggaagtcgtatta

SEQ ID NO: 50413 - DNA, 25 bp, Artificial
  Probe
tattgctcaatattaggaagtcgta

SEQ ID NO: 50414 - DNA, 25 bp, Artificial
  Probe
ctgtattgctcaatattaggaagtc

SEQ ID NO: 50415 - DNA, 25 bp, Artificial
  Probe
gtctgtattgctcaatattaggaag

SEQ ID NO: 50416 - DNA, 25 bp, Artificial
  Probe
agcaatggttaaatgggtattaaac

SEQ ID NO: 50417 - DNA, 25 bp, Artificial
  Probe
gttctgaaggatcaaggacagtctg

SEQ ID NO: 50418 - DNA, 25 bp, Artificial
  Probe
gagcaatggttaaatgggtattaaa

SEQ ID NO: 50419 - DNA, 25 bp, Artificial
  Probe
ggaggagcaatggttaaatgggtat

SEQ ID NO: 50420 - DNA, 25 bp, Artificial
  Probe
tcagaggaggagcaatggttaaatg

SEQ ID NO: 50421 - DNA, 25 bp, Artificial
  Probe
gtcagaggaggagcaatggttaaat

SEQ ID NO: 50422 - DNA, 25 bp, Artificial
  Probe
ggaagctattgtcacttgagaattt

SEQ ID NO: 50423 - DNA, 25 bp, Artificial
  Probe
atgcttatgctaaggctctgagact

SEQ ID NO: 50424 - DNA, 25 bp, Artificial
  Probe
tgttctgaaggatcaaggacagtct

SEQ ID NO: 50425 - DNA, 25 bp, Artificial
  Probe
ctttgttctgaaggatcaaggacag

SEQ ID NO: 50426 - DNA, 25 bp, Artificial
  Probe
gctatggaagctattgtcacttgag

SEQ ID NO: 50427 - DNA, 25 bp, Artificial
  Probe
tttgttctgaaggatcaaggacagt

SEQ ID NO: 50428 - DNA, 25 bp, Artificial
  Probe
tttccacttccctctcagttcacta

SEQ ID NO: 50429 - DNA, 25 bp, Artificial
  Probe
agctattgtcacttgagaatttagt

SEQ ID NO: 50430 - DNA, 25 bp, Artificial
  Probe
cagaggaggagcaatggttaaatgg

SEQ ID NO: 50431 - DNA, 25 bp, Artificial
  Probe
tgcttatgctaaggctctgagactc

SEQ ID NO: 50432 - DNA, 25 bp, Artificial
  Probe
ttctgaaggatcaaggacagtctgg

SEQ ID NO: 50433 - DNA, 25 bp, Artificial
  Probe
aggaggagcaatggttaaatgggta

SEQ ID NO: 50434 - DNA, 25 bp, Artificial
  Probe
agtcagaggaggagcaatggttaaa

SEQ ID NO: 50435 - DNA, 25 bp, Artificial
  Probe
gaatttagtgttggggtctatgagg

SEQ ID NO: 50436 - DNA, 25 bp, Artificial
  Probe
agaatttagtgttggggtctatgag

SEQ ID NO: 50437 - DNA, 25 bp, Artificial
  Probe
gagaatttagtgttggggtctatga

SEQ ID NO: 50438 - DNA, 25 bp, Artificial
  Probe
tgagaatttagtgttggggtctatg

SEQ ID NO: 50439 - DNA, 25 bp, Artificial
  Probe
cttgagaatttagtgttggggtcta

SEQ ID NO: 50440 - DNA, 25 bp, Artificial
  Probe
atagagatcgccaacaacttgtgtc

SEQ ID NO: 50441 - DNA, 25 bp, Artificial
  Probe
catagagatcgccaacaacttgtgt

SEQ ID NO: 50442 - DNA, 25 bp, Artificial
  Probe
tagagatcgccaacaacttgtgtct

SEQ ID NO: 50443 - DNA, 25 bp, Artificial
  Probe
aattccattttaaccgctacctcac

SEQ ID NO: 50444 - DNA, 25 bp, Artificial
  Probe
attccattttaaccgctacctcact

SEQ ID NO: 50445 - DNA, 25 bp, Artificial
  Probe
gcatagagatcgccaacaacttgtg

SEQ ID NO: 50446 - DNA, 25 bp, Artificial
  Probe
caacaacttgtgtctcaacgagaga

SEQ ID NO: 50447 - DNA, 25 bp, Artificial
  Probe
ttccattttaaccgctacctcactc

SEQ ID NO: 50448 - DNA, 25 bp, Artificial
  Probe
gatcgccaacaacttgtgtctcaac

SEQ ID NO: 50449 - DNA, 25 bp, Artificial
  Probe
agatcgccaacaacttgtgtctcaa

SEQ ID NO: 50450 - DNA, 25 bp, Artificial
  Probe
gatttacccgtggatgaccaaactg

SEQ ID NO: 50451 - DNA, 25 bp, Artificial
  Probe
cagatttacccgtggatgaccaaac

SEQ ID NO: 50452 - DNA, 25 bp, Artificial
  Probe
agatttacccgtggatgaccaaact

SEQ ID NO: 50453 - DNA, 25 bp, Artificial
  Probe
aaagaattccattttaaccgctacc

SEQ ID NO: 50454 - DNA, 25 bp, Artificial
  Probe
aagaattccattttaaccgctacct

SEQ ID NO: 50455 - DNA, 25 bp, Artificial
  Probe
acagatttacccgtggatgaccaaa

SEQ ID NO: 50456 - DNA, 25 bp, Artificial
  Probe
agaattccattttaaccgctacctc

SEQ ID NO: 50457 - DNA, 25 bp, Artificial
  Probe
ccaacaacttgtgtctcaacgagag

SEQ ID NO: 50458 - DNA, 25 bp, Artificial
  Probe
gaattccattttaaccgctacctca

SEQ ID NO: 50459 - DNA, 25 bp, Artificial
  Probe
cacagatttacccgtggatgaccaa

SEQ ID NO: 50460 - DNA, 25 bp, Artificial
  Probe
tccattttaaccgctacctcactcg

SEQ ID NO: 50461 - DNA, 25 bp, Artificial
  Probe
agagatcgccaacaacttgtgtctc

SEQ ID NO: 50462 - DNA, 25 bp, Artificial
  Probe
gaaccctgggatgtacagtcagaag

SEQ ID NO: 50463 - DNA, 25 bp, Artificial
  Probe
tgaaccctgggatgtacagtcagaa

SEQ ID NO: 50464 - DNA, 25 bp, Artificial
  Probe
catcttcaacggttacctcaagttc

SEQ ID NO: 50465 - DNA, 25 bp, Artificial
  Probe
ctctctcctcatcttcaacggttac

SEQ ID NO: 50466 - DNA, 25 bp, Artificial
  Probe
tcttcaacggttacctcaagttcat

SEQ ID NO: 50467 - DNA, 25 bp, Artificial
  Probe
atcttcaacggttacctcaagttca

SEQ ID NO: 50468 - DNA, 25 bp, Artificial
  Probe
tcatcttcaacggttacctcaagtt

SEQ ID NO: 50469 - DNA, 25 bp, Artificial
  Probe
ctcatcttcaacggttacctcaagt

SEQ ID NO: 50470 - DNA, 25 bp, Artificial
  Probe
cttcaacggttacctcaagttcatg

SEQ ID NO: 50471 - DNA, 25 bp, Artificial
  Probe
ttcctcctctctcctcatcttcaac

SEQ ID NO: 50472 - DNA, 25 bp, Artificial
  Probe
cctctctcctcatcttcaacggtta

SEQ ID NO: 50473 - DNA, 25 bp, Artificial
  Probe
cctcatcttcaacggttacctcaag

SEQ ID NO: 50474 - DNA, 25 bp, Artificial
  Probe
tcctcatcttcaacggttacctcaa

SEQ ID NO: 50475 - DNA, 25 bp, Artificial
  Probe
tttcctcctctctcctcatcttcaa

SEQ ID NO: 50476 - DNA, 25 bp, Artificial
  Probe
tctcctcatcttcaacggttacctc

SEQ ID NO: 50477 - DNA, 25 bp, Artificial
  Probe
ctctcctcatcttcaacggttacct

SEQ ID NO: 50478 - DNA, 25 bp, Artificial
  Probe
tctctcctcatcttcaacggttacc

SEQ ID NO: 50479 - DNA, 25 bp, Artificial
  Probe
ctcctcatcttcaacggttacctca

SEQ ID NO: 50480 - DNA, 25 bp, Artificial
  Probe
aatagactaactgcaattccaaagc

SEQ ID NO: 50481 - DNA, 25 bp, Artificial
  Probe
atagactaactgcaattccaaagct

SEQ ID NO: 50482 - DNA, 25 bp, Artificial
  Probe
gaacggacaccttcagattgtaagc

SEQ ID NO: 50483 - DNA, 25 bp, Artificial
  Probe
ttcaacggttacctcaagttcatgc

SEQ ID NO: 50484 - DNA, 25 bp, Artificial
  Probe
aaatagactaactgcaattccaaag

SEQ ID NO: 50485 - DNA, 25 bp, Artificial
  Probe
tcctctctcctcatcttcaacggtt

SEQ ID NO: 50486 - DNA, 25 bp, Artificial
  Probe
tcctcctctctcctcatcttcaacg

SEQ ID NO: 50487 - DNA, 25 bp, Artificial
  Probe
ctcctctctcctcatcttcaacggt

SEQ ID NO: 50488 - DNA, 25 bp, Artificial
  Probe
aacggacaccttcagattgtaagct

SEQ ID NO: 50489 - DNA, 25 bp, Artificial
  Probe
taactgcaattccaaagcttctaac

SEQ ID NO: 50490 - DNA, 25 bp, Artificial
  Probe
ctaactgcaattccaaagcttctaa

SEQ ID NO: 50491 - DNA, 25 bp, Artificial
  Probe
actaactgcaattccaaagcttcta

SEQ ID NO: 50492 - DNA, 25 bp, Artificial
  Probe
tagactaactgcaattccaaagctt

SEQ ID NO: 50493 - DNA, 25 bp, Artificial
  Probe
ttgaagatgaacaattacaaatgaa

SEQ ID NO: 50494 - DNA, 25 bp, Artificial
  Probe
tgaagatgaacaattacaaatgaat

SEQ ID NO: 50495 - DNA, 25 bp, Artificial
  Probe
agctttgaagatgaacaattacaaa

SEQ ID NO: 50496 - DNA, 25 bp, Artificial
  Probe
caacggttacctcaagttcatgcag

SEQ ID NO: 50497 - DNA, 25 bp, Artificial
  Probe
gctttgaagatgaacaattacaaat

SEQ ID NO: 50498 - DNA, 25 bp, Artificial
  Probe
cagattgtaagctttgaagatgaac

SEQ ID NO: 50499 - DNA, 25 bp, Artificial
  Probe
gactaactgcaattccaaagcttct

SEQ ID NO: 50500 - DNA, 25 bp, Artificial
  Probe
agactaactgcaattccaaagcttc

SEQ ID NO: 50501 - DNA, 25 bp, Artificial
  Probe
tgcaattccaaagcttctaaccaaa

SEQ ID NO: 50502 - DNA, 25 bp, Artificial
  Probe
tcagattgtaagctttgaagatgaa

SEQ ID NO: 50503 - DNA, 25 bp, Artificial
  Probe
tcaacggttacctcaagttcatgca

SEQ ID NO: 50504 - DNA, 25 bp, Artificial
  Probe
agattgtaagctttgaagatgaaca

SEQ ID NO: 50505 - DNA, 25 bp, Artificial
  Probe
gacaccttcagattgtaagctttga

SEQ ID NO: 50506 - DNA, 25 bp, Artificial
  Probe
ctgcaattccaaagcttctaaccaa

SEQ ID NO: 50507 - DNA, 25 bp, Artificial
  Probe
aactgcaattccaaagcttctaacc

SEQ ID NO: 50508 - DNA, 25 bp, Artificial
  Probe
ttacctcaagttcatgcagcacctc

SEQ ID NO: 50509 - DNA, 25 bp, Artificial
  Probe
atgtgtatagtctgtggagtttagc

SEQ ID NO: 50510 - DNA, 25 bp, Artificial
  Probe
catgtgtatagtctgtggagtttag

SEQ ID NO: 50511 - DNA, 25 bp, Artificial
  Probe
gtgtatagtctgtggagtttagctt

SEQ ID NO: 50512 - DNA, 25 bp, Artificial
  Probe
gatggagaaagaagtggagaaggtc

SEQ ID NO: 50513 - DNA, 25 bp, Artificial
  Probe
tgtgtatagtctgtggagtttagct

SEQ ID NO: 50514 - DNA, 25 bp, Artificial
  Probe
tttccctgtggtttctacctttaag

SEQ ID NO: 50515 - DNA, 25 bp, Artificial
  Probe
ctttccctgtggtttctacctttaa

SEQ ID NO: 50516 - DNA, 25 bp, Artificial
  Probe
tagtctgtggagtttagcttaaagg

SEQ ID NO: 50517 - DNA, 25 bp, Artificial
  Probe
tgtatagtctgtggagtttagctta

SEQ ID NO: 50518 - DNA, 25 bp, Artificial
  Probe
ctgtggtttctacctttaagccaaa

SEQ ID NO: 50519 - DNA, 25 bp, Artificial
  Probe
ccatgtgtatagtctgtggagttta

SEQ ID NO: 50520 - DNA, 25 bp, Artificial
  Probe
tacagtgttcttggattcataataa

SEQ ID NO: 50521 - DNA, 25 bp, Artificial
  Probe
atataaacgtgctgtctgttcattt

SEQ ID NO: 50522 - DNA, 25 bp, Artificial
  Probe
tctacctttaagccaaagaaacaag

SEQ ID NO: 50523 - DNA, 25 bp, Artificial
  Probe
ctacctttaagccaaagaaacaagc

SEQ ID NO: 50524 - DNA, 25 bp, Artificial
  Probe
ttatacagtgttcttggattcataa

SEQ ID NO: 50525 - DNA, 25 bp, Artificial
  Probe
atagtctgtggagtttagcttaaag

SEQ ID NO: 50526 - DNA, 25 bp, Artificial
  Probe
gtggtttctacctttaagccaaaga

SEQ ID NO: 50527 - DNA, 25 bp, Artificial
  Probe
gtatagtctgtggagtttagcttaa

SEQ ID NO: 50528 - DNA, 25 bp, Artificial
  Probe
tggtttctacctttaagccaaagaa

SEQ ID NO: 50529 - DNA, 25 bp, Artificial
  Probe
atacagtgttcttggattcataata

SEQ ID NO: 50530 - DNA, 25 bp, Artificial
  Probe
tatacagtgttcttggattcataat

SEQ ID NO: 50531 - DNA, 25 bp, Artificial
  Probe
tgtggtttctacctttaagccaaag

SEQ ID NO: 50532 - DNA, 25 bp, Artificial
  Probe
ttctacctttaagccaaagaaacaa

SEQ ID NO: 50533 - DNA, 25 bp, Artificial
  Probe
cctttccctgtggtttctaccttta

SEQ ID NO: 50534 - DNA, 25 bp, Artificial
  Probe
acagtgttcttggattcataataaa

SEQ ID NO: 50535 - DNA, 25 bp, Artificial
  Probe
agggatggagaaagaagtggagaag

SEQ ID NO: 50536 - DNA, 25 bp, Artificial
  Probe
gagggatggagaaagaagtggagaa

SEQ ID NO: 50537 - DNA, 25 bp, Artificial
  Probe
agtctgtggagtttagcttaaaggg

SEQ ID NO: 50538 - DNA, 25 bp, Artificial
  Probe
cccatgtgtatagtctgtggagttt

SEQ ID NO: 50539 - DNA, 25 bp, Artificial
  Probe
tatagcagcctggttttggagtata

SEQ ID NO: 50540 - DNA, 25 bp, Artificial
  Probe
gtgttcttggattcataataaagtg

SEQ ID NO: 50541 - DNA, 25 bp, Artificial
  Probe
ttccctgtggtttctacctttaagc

SEQ ID NO: 50542 - DNA, 25 bp, Artificial
  Probe
ggatggagaaagaagtggagaaggt

SEQ ID NO: 50543 - DNA, 25 bp, Artificial
  Probe
agtgttcttggattcataataaagt

SEQ ID NO: 50544 - DNA, 25 bp, Artificial
  Probe
cagtgttcttggattcataataaag

SEQ ID NO: 50545 - DNA, 25 bp, Artificial
  Probe
tatagtctgtggagtttagcttaaa

SEQ ID NO: 50546 - DNA, 25 bp, Artificial
  Probe
tacctttaagccaaagaaacaagct

SEQ ID NO: 50547 - DNA, 25 bp, Artificial
  Probe
tgttcttggattcataataaagtga

SEQ ID NO: 50548 - DNA, 25 bp, Artificial
  Probe
cctgtggtttctacctttaagccaa

SEQ ID NO: 50549 - DNA, 25 bp, Artificial
  Probe
gagaaagaagtggagaaggtccttt

SEQ ID NO: 50550 - DNA, 25 bp, Artificial
  Probe
cagagggatggagaaagaagtggag

SEQ ID NO: 50551 - DNA, 25 bp, Artificial
  Probe
atagcagcctggttttggagtatag

SEQ ID NO: 50552 - DNA, 25 bp, Artificial
  Probe
ctttaagccaaagaaacaagctgtg

SEQ ID NO: 50553 - DNA, 25 bp, Artificial
  Probe
tcttggattcataataaagtgatgt

SEQ ID NO: 50554 - DNA, 25 bp, Artificial
  Probe
tgaactgcctatgttattgtcctac

SEQ ID NO: 50555 - DNA, 25 bp, Artificial
  Probe
ttgaactgcctatgttattgtccta

SEQ ID NO: 50556 - DNA, 25 bp, Artificial
  Probe
cgaatcttgaactgcctatgttatt

SEQ ID NO: 50557 - DNA, 25 bp, Artificial
  Probe
tgtaacagaatccgaatcttgaact

SEQ ID NO: 50558 - DNA, 25 bp, Artificial
  Probe
ttgtaacagaatccgaatcttgaac

SEQ ID NO: 50559 - DNA, 25 bp, Artificial
  Probe
cttgaactgcctatgttattgtcct

SEQ ID NO: 50560 - DNA, 25 bp, Artificial
  Probe
tcttgaactgcctatgttattgtcc

SEQ ID NO: 50561 - DNA, 25 bp, Artificial
  Probe
atcttgaactgcctatgttattgtc

SEQ ID NO: 50562 - DNA, 25 bp, Artificial
  Probe
ccgaatcttgaactgcctatgttat

SEQ ID NO: 50563 - DNA, 25 bp, Artificial
  Probe
aatcttgaactgcctatgttattgt

SEQ ID NO: 50564 - DNA, 25 bp, Artificial
  Probe
attgtaacagaatccgaatcttgaa

SEQ ID NO: 50565 - DNA, 25 bp, Artificial
  Probe
gaatccgaatcttgaactgcctatg

SEQ ID NO: 50566 - DNA, 25 bp, Artificial
  Probe
gaactgcctatgttattgtcctaca

SEQ ID NO: 50567 - DNA, 25 bp, Artificial
  Probe
gaatcttgaactgcctatgttattg

SEQ ID NO: 50568 - DNA, 25 bp, Artificial
  Probe
gtaacagaatccgaatcttgaactg

SEQ ID NO: 50569 - DNA, 25 bp, Artificial
  Probe
tccgaatcttgaactgcctatgtta

SEQ ID NO: 50570 - DNA, 25 bp, Artificial
  Probe
agaatccgaatcttgaactgcctat

SEQ ID NO: 50571 - DNA, 25 bp, Artificial
  Probe
aatccgaatcttgaactgcctatgt

SEQ ID NO: 50572 - DNA, 25 bp, Artificial
  Probe
tattgtaacagaatccgaatcttga

SEQ ID NO: 50573 - DNA, 25 bp, Artificial
  Probe
gctacagaagatattaactcaggat

SEQ ID NO: 50574 - DNA, 25 bp, Artificial
  Probe
catgaaggaagagctacagaagata

SEQ ID NO: 50575 - DNA, 25 bp, Artificial
  Probe
taacagaatccgaatcttgaactgc

SEQ ID NO: 50576 - DNA, 25 bp, Artificial
  Probe
cttctgtatctacatggttggctat

SEQ ID NO: 50577 - DNA, 25 bp, Artificial
  Probe
ctctcttctgtatctacatggttgg

SEQ ID NO: 50578 - DNA, 25 bp, Artificial
  Probe
aatgctctcttctgtatctacatgg

SEQ ID NO: 50579 - DNA, 25 bp, Artificial
  Probe
atccgaatcttgaactgcctatgtt

SEQ ID NO: 50580 - DNA, 25 bp, Artificial
  Probe
tcttctgtatctacatggttggcta

SEQ ID NO: 50581 - DNA, 25 bp, Artificial
  Probe
gctctcttctgtatctacatggttg

SEQ ID NO: 50582 - DNA, 25 bp, Artificial
  Probe
tgaaggaagagctacagaagatatt

SEQ ID NO: 50583 - DNA, 25 bp, Artificial
  Probe
acgaacattctcagacgaatctaat

SEQ ID NO: 50584 - DNA, 25 bp, Artificial
  Probe
atgctctcttctgtatctacatggt

SEQ ID NO: 50585 - DNA, 25 bp, Artificial
  Probe
tacgaacattctcagacgaatctaa

SEQ ID NO: 50586 - DNA, 25 bp, Artificial
  Probe
ttacgaacattctcagacgaatcta

SEQ ID NO: 50587 - DNA, 25 bp, Artificial
  Probe
tgctctcttctgtatctacatggtt

SEQ ID NO: 50588 - DNA, 25 bp, Artificial
  Probe
atgaaggaagagctacagaagatat

SEQ ID NO: 50589 - DNA, 25 bp, Artificial
  Probe
attaactcaggatactcaatgtgaa

SEQ ID NO: 50590 - DNA, 25 bp, Artificial
  Probe
tctgtatctacatggttggctataa

SEQ ID NO: 50591 - DNA, 25 bp, Artificial
  Probe
ttctgtatctacatggttggctata

SEQ ID NO: 50592 - DNA, 25 bp, Artificial
  Probe
gctcaaatgctctcttctgtatcta

SEQ ID NO: 50593 - DNA, 25 bp, Artificial
  Probe
agctacagaagatattaactcagga

SEQ ID NO: 50594 - DNA, 25 bp, Artificial
  Probe
tagtaaagaatgtgcgaagaaggag

SEQ ID NO: 50595 - DNA, 25 bp, Artificial
  Probe
atctacatggttggctataattctt

SEQ ID NO: 50596 - DNA, 25 bp, Artificial
  Probe
agtagtaaagaatgtgcgaagaagg

SEQ ID NO: 50597 - DNA, 25 bp, Artificial
  Probe
gtagtaaagaatgtgcgaagaagga

SEQ ID NO: 50598 - DNA, 25 bp, Artificial
  Probe
cgaacattctcagacgaatctaata

SEQ ID NO: 50599 - DNA, 25 bp, Artificial
  Probe
catgaagtacatccagcacacatac

SEQ ID NO: 50600 - DNA, 25 bp, Artificial
  Probe
atgaagtacatccagcacacataca

SEQ ID NO: 50601 - DNA, 25 bp, Artificial
  Probe
aattgacaagactgactacatggtc

SEQ ID NO: 50602 - DNA, 25 bp, Artificial
  Probe
tgaagtacatccagcacacatacag

SEQ ID NO: 50603 - DNA, 25 bp, Artificial
  Probe
aaattgacaagactgactacatggt

SEQ ID NO: 50604 - DNA, 25 bp, Artificial
  Probe
gaagtacatccagcacacatacagg

SEQ ID NO: 50605 - DNA, 25 bp, Artificial
  Probe
attgacaagactgactacatggtcg

SEQ ID NO: 50606 - DNA, 25 bp, Artificial
  Probe
gcatgaagtacatccagcacacata

SEQ ID NO: 50607 - DNA, 25 bp, Artificial
  Probe
ttgtgttgaaggaaggtgtggagta

SEQ ID NO: 50608 - DNA, 25 bp, Artificial
  Probe
gagagcttcaagaaacagtcatttg

SEQ ID NO: 50609 - DNA, 25 bp, Artificial
  Probe
ggagagcttcaagaaacagtcattt

SEQ ID NO: 50610 - DNA, 25 bp, Artificial
  Probe
cagtcatttgtgttgaaggaaggtg

SEQ ID NO: 50611 - DNA, 25 bp, Artificial
  Probe
gtcatttgtgttgaaggaaggtgtg

SEQ ID NO: 50612 - DNA, 25 bp, Artificial
  Probe
agtcatttgtgttgaaggaaggtgt

SEQ ID NO: 50613 - DNA, 25 bp, Artificial
  Probe
gagcttcaagaaacagtcatttgtg

SEQ ID NO: 50614 - DNA, 25 bp, Artificial
  Probe
agagcttcaagaaacagtcatttgt

SEQ ID NO: 50615 - DNA, 25 bp, Artificial
  Probe
gatcgtgtcaggcatgaagtacatc

SEQ ID NO: 50616 - DNA, 25 bp, Artificial
  Probe
acagtcatttgtgttgaaggaaggt

SEQ ID NO: 50617 - DNA, 25 bp, Artificial
  Probe
atttgtgttgaaggaaggtgtggag

SEQ ID NO: 50618 - DNA, 25 bp, Artificial
  Probe
agtacatccagcacacatacaggaa

SEQ ID NO: 50619 - DNA, 25 bp, Artificial
  Probe
aagtacatccagcacacatacagga

SEQ ID NO: 50620 - DNA, 25 bp, Artificial
  Probe
tggagagcttcaagaaacagtcatt

SEQ ID NO: 50621 - DNA, 25 bp, Artificial
  Probe
agcttcaagaaacagtcatttgtgt

SEQ ID NO: 50622 - DNA, 25 bp, Artificial
  Probe
tacatccagcacacatacaggaaag

SEQ ID NO: 50623 - DNA, 25 bp, Artificial
  Probe
gagagatcgtgtcaggcatgaagta

SEQ ID NO: 50624 - DNA, 25 bp, Artificial
  Probe
agatcgtgtcaggcatgaagtacat

SEQ ID NO: 50625 - DNA, 25 bp, Artificial
  Probe
catttgtgttgaaggaaggtgtgga

SEQ ID NO: 50626 - DNA, 25 bp, Artificial
  Probe
tgtgttgaaggaaggtgtggagtac

SEQ ID NO: 50627 - DNA, 25 bp, Artificial
  Probe
acatacaggaaaggggtcaaaattg

SEQ ID NO: 50628 - DNA, 25 bp, Artificial
  Probe
cacatacaggaaaggggtcaaaatt

SEQ ID NO: 50629 - DNA, 25 bp, Artificial
  Probe
agagatcgtgtcaggcatgaagtac

SEQ ID NO: 50630 - DNA, 25 bp, Artificial
  Probe
aaaattgacaagactgactacatgg

SEQ ID NO: 50631 - DNA, 25 bp, Artificial
  Probe
gtacatccagcacacatacaggaaa

SEQ ID NO: 50632 - DNA, 25 bp, Artificial
  Probe
tcatttgtgttgaaggaaggtgtgg

SEQ ID NO: 50633 - DNA, 25 bp, Artificial
  Probe
tcaagaaacagtcatttgtgttgaa

SEQ ID NO: 50634 - DNA, 25 bp, Artificial
  Probe
ttcaagaaacagtcatttgtgttga

SEQ ID NO: 50635 - DNA, 25 bp, Artificial
  Probe
aaacagtcatttgtgttgaaggaag

SEQ ID NO: 50636 - DNA, 25 bp, Artificial
  Probe
gaaacagtcatttgtgttgaaggaa

SEQ ID NO: 50637 - DNA, 25 bp, Artificial
  Probe
aagaaacagtcatttgtgttgaagg

SEQ ID NO: 50638 - DNA, 25 bp, Artificial
  Probe
caagaaacagtcatttgtgttgaag

SEQ ID NO: 50639 - DNA, 25 bp, Artificial
  Probe
cttcaagaaacagtcatttgtgttg

SEQ ID NO: 50640 - DNA, 25 bp, Artificial
  Probe
atctggagagcttcaagaaacagtc

SEQ ID NO: 50641 - DNA, 25 bp, Artificial
  Probe
gatctggagagcttcaagaaacagt

SEQ ID NO: 50642 - DNA, 25 bp, Artificial
  Probe
caaaattgacaagactgactacatg

SEQ ID NO: 50643 - DNA, 25 bp, Artificial
  Probe
gcttcaagaaacagtcatttgtgtt

SEQ ID NO: 50644 - DNA, 25 bp, Artificial
  Probe
gcccgtcaatgtcaataataaagat

SEQ ID NO: 50645 - DNA, 25 bp, Artificial
  Probe
ctgcccgtcaatgtcaataataaag

SEQ ID NO: 50646 - DNA, 25 bp, Artificial
  Probe
tgcccgtcaatgtcaataataaaga

SEQ ID NO: 50647 - DNA, 25 bp, Artificial
  Probe
cccgtcaatgtcaataataaagatg

SEQ ID NO: 50648 - DNA, 25 bp, Artificial
  Probe
cctgcccgtcaatgtcaataataaa

SEQ ID NO: 50649 - DNA, 25 bp, Artificial
  Probe
ccagagcatagaaagaagcaacaaa

SEQ ID NO: 50650 - DNA, 25 bp, Artificial
  Probe
ccgtcaatgtcaataataaagatga

SEQ ID NO: 50651 - DNA, 25 bp, Artificial
  Probe
agcatagaaagaagcaacaaaactc

SEQ ID NO: 50652 - DNA, 25 bp, Artificial
  Probe
gagcatagaaagaagcaacaaaact

SEQ ID NO: 50653 - DNA, 25 bp, Artificial
  Probe
agagcatagaaagaagcaacaaaac

SEQ ID NO: 50654 - DNA, 25 bp, Artificial
  Probe
cagagcatagaaagaagcaacaaaa

SEQ ID NO: 50655 - DNA, 25 bp, Artificial
  Probe
gcatagaaagaagcaacaaaactct

SEQ ID NO: 50656 - DNA, 25 bp, Artificial
  Probe
cctctgctttggctagatgtattgg

SEQ ID NO: 50657 - DNA, 25 bp, Artificial
  Probe
ccctctgctttggctagatgtattg

SEQ ID NO: 50658 - DNA, 25 bp, Artificial
  Probe
gcctgcccgtcaatgtcaataataa

SEQ ID NO: 50659 - DNA, 25 bp, Artificial
  Probe
ctttggctagatgtattggctgtcc

SEQ ID NO: 50660 - DNA, 25 bp, Artificial
  Probe
catagaaagaagcaacaaaactctg

SEQ ID NO: 50661 - DNA, 25 bp, Artificial
  Probe
gccagagcatagaaagaagcaacaa

SEQ ID NO: 50662 - DNA, 25 bp, Artificial
  Probe
tagaaagaagcaacaaaactctgtg

SEQ ID NO: 50663 - DNA, 25 bp, Artificial
  Probe
atagaaagaagcaacaaaactctgt

SEQ ID NO: 50664 - DNA, 25 bp, Artificial
  Probe
ctctgctttggctagatgtattggc

SEQ ID NO: 50665 - DNA, 25 bp, Artificial
  Probe
gctttggctagatgtattggctgtc

SEQ ID NO: 50666 - DNA, 25 bp, Artificial
  Probe
ctgctttggctagatgtattggctg

SEQ ID NO: 50667 - DNA, 25 bp, Artificial
  Probe
cgtcaatgtcaataataaagatgaa

SEQ ID NO: 50668 - DNA, 25 bp, Artificial
  Probe
ctagatgtattggctgtccctcacc

SEQ ID NO: 50669 - DNA, 25 bp, Artificial
  Probe
tctgctttggctagatgtattggct

SEQ ID NO: 50670 - DNA, 25 bp, Artificial
  Probe
agaaagaagcaacaaaactctgtgg

SEQ ID NO: 50671 - DNA, 25 bp, Artificial
  Probe
tgcctgcccgtcaatgtcaataata

SEQ ID NO: 50672 - DNA, 25 bp, Artificial
  Probe
tagatgtattggctgtccctcacct

SEQ ID NO: 50673 - DNA, 25 bp, Artificial
  Probe
tttggctagatgtattggctgtccc

SEQ ID NO: 50674 - DNA, 25 bp, Artificial
  Probe
tgctttggctagatgtattggctgt

SEQ ID NO: 50675 - DNA, 25 bp, Artificial
  Probe
gaaagaagcaacaaaactctgtggg

SEQ ID NO: 50676 - DNA, 25 bp, Artificial
  Probe
gctagatgtattggctgtccctcac

SEQ ID NO: 50677 - DNA, 25 bp, Artificial
  Probe
ttttagggattctctttctgcctgc

SEQ ID NO: 50678 - DNA, 25 bp, Artificial
  Probe
tttagggattctctttctgcctgcc

SEQ ID NO: 50679 - DNA, 25 bp, Artificial
  Probe
ctgccagagcatagaaagaagcaac

SEQ ID NO: 50680 - DNA, 25 bp, Artificial
  Probe
cccctctgctttggctagatgtatt

SEQ ID NO: 50681 - DNA, 25 bp, Artificial
  Probe
tgccagagcatagaaagaagcaaca

SEQ ID NO: 50682 - DNA, 25 bp, Artificial
  Probe
aaagaagcaacaaaactctgtgggc

SEQ ID NO: 50683 - DNA, 25 bp, Artificial
  Probe
ttcggaactgaagcagtcacagatg

SEQ ID NO: 50684 - DNA, 25 bp, Artificial
  Probe
acccctctgctttggctagatgtat

SEQ ID NO: 50685 - DNA, 25 bp, Artificial
  Probe
tttcggaactgaagcagtcacagat

SEQ ID NO: 50686 - DNA, 25 bp, Artificial
  Probe
ctttcggaactgaagcagtcacaga

SEQ ID NO: 50687 - DNA, 25 bp, Artificial
  Probe
ctcctggactggttattcttgttat

SEQ ID NO: 50688 - DNA, 25 bp, Artificial
  Probe
tcctggactggttattcttgttatt

SEQ ID NO: 50689 - DNA, 25 bp, Artificial
  Probe
tctcctggactggttattcttgtta

SEQ ID NO: 50690 - DNA, 25 bp, Artificial
  Probe
cctggactggttattcttgttatta

SEQ ID NO: 50691 - DNA, 25 bp, Artificial
  Probe
ctctcctggactggttattcttgtt

SEQ ID NO: 50692 - DNA, 25 bp, Artificial
  Probe
ctctctcctggactggttattcttg

SEQ ID NO: 50693 - DNA, 25 bp, Artificial
  Probe
tctctcctggactggttattcttgt

SEQ ID NO: 50694 - DNA, 25 bp, Artificial
  Probe
ctccctgtctgtgttctaacttatt

SEQ ID NO: 50695 - DNA, 25 bp, Artificial
  Probe
tccctgtctgtgttctaacttattt

SEQ ID NO: 50696 - DNA, 25 bp, Artificial
  Probe
actccctgtctgtgttctaacttat

SEQ ID NO: 50697 - DNA, 25 bp, Artificial
  Probe
cctctctcctggactggttattctt

SEQ ID NO: 50698 - DNA, 25 bp, Artificial
  Probe
ccctgtctgtgttctaacttattta

SEQ ID NO: 50699 - DNA, 25 bp, Artificial
  Probe
ctggactggttattcttgttattat

SEQ ID NO: 50700 - DNA, 25 bp, Artificial
  Probe
aattcgcatgtttaatgtgacttcc

SEQ ID NO: 50701 - DNA, 25 bp, Artificial
  Probe
aaattcgcatgtttaatgtgacttc

SEQ ID NO: 50702 - DNA, 25 bp, Artificial
  Probe
tggactggttattcttgttattatt

SEQ ID NO: 50703 - DNA, 25 bp, Artificial
  Probe
cactccctgtctgtgttctaactta

SEQ ID NO: 50704 - DNA, 25 bp, Artificial
  Probe
ggactggttattcttgttattattg

SEQ ID NO: 50705 - DNA, 25 bp, Artificial
  Probe
attcgcatgtttaatgtgacttccc

SEQ ID NO: 50706 - DNA, 25 bp, Artificial
  Probe
catgtttaatgtgacttcccactcc

SEQ ID NO: 50707 - DNA, 25 bp, Artificial
  Probe
cctgtctgtgttctaacttatttat

SEQ ID NO: 50708 - DNA, 25 bp, Artificial
  Probe
atgtttaatgtgacttcccactccc

SEQ ID NO: 50709 - DNA, 25 bp, Artificial
  Probe
gcatgtttaatgtgacttcccactc

SEQ ID NO: 50710 - DNA, 25 bp, Artificial
  Probe
caagttgccagtgtttctgaatgtc

SEQ ID NO: 50711 - DNA, 25 bp, Artificial
  Probe
gactggttattcttgttattattgt

SEQ ID NO: 50712 - DNA, 25 bp, Artificial
  Probe
ttcgcatgtttaatgtgacttccca

SEQ ID NO: 50713 - DNA, 25 bp, Artificial
  Probe
gtttctgaatgtcctcgtgtctgtg

SEQ ID NO: 50714 - DNA, 25 bp, Artificial
  Probe
gtgtttctgaatgtcctcgtgtctg

SEQ ID NO: 50715 - DNA, 25 bp, Artificial
  Probe
agtgtttctgaatgtcctcgtgtct

SEQ ID NO: 50716 - DNA, 25 bp, Artificial
  Probe
gtttaatgtgacttcccactccctg

SEQ ID NO: 50717 - DNA, 25 bp, Artificial
  Probe
tgtttctgaatgtcctcgtgtctgt

SEQ ID NO: 50718 - DNA, 25 bp, Artificial
  Probe
tttaatgtgacttcccactccctgt

SEQ ID NO: 50719 - DNA, 25 bp, Artificial
  Probe
tgtttaatgtgacttcccactccct

SEQ ID NO: 50720 - DNA, 25 bp, Artificial
  Probe
cagtgtttctgaatgtcctcgtgtc

SEQ ID NO: 50721 - DNA, 25 bp, Artificial
  Probe
ttttcgtttggtcttaggtcttccc

SEQ ID NO: 50722 - DNA, 25 bp, Artificial
  Probe
ccactccctgtctgtgttctaactt

SEQ ID NO: 50723 - DNA, 25 bp, Artificial
  Probe
aagttgccagtgtttctgaatgtcc

SEQ ID NO: 50724 - DNA, 25 bp, Artificial
  Probe
ttcgtttggtcttaggtcttcccat

SEQ ID NO: 50725 - DNA, 25 bp, Artificial
  Probe
ttaatgtgacttcccactccctgtc

SEQ ID NO: 50726 - DNA, 25 bp, Artificial
  Probe
cgcatgtttaatgtgacttcccact

SEQ ID NO: 50727 - DNA, 25 bp, Artificial
  Probe
ccaagttgccagtgtttctgaatgt

SEQ ID NO: 50728 - DNA, 25 bp, Artificial
  Probe
tttcgtttggtcttaggtcttccca

SEQ ID NO: 50729 - DNA, 25 bp, Artificial
  Probe
ccctctctcctggactggttattct

SEQ ID NO: 50730 - DNA, 25 bp, Artificial
  Probe
tcgcatgtttaatgtgacttcccac

SEQ ID NO: 50731 - DNA, 25 bp, Artificial
  Probe
gttgccagtgtttctgaatgtcctc

SEQ ID NO: 50732 - DNA, 25 bp, Artificial
  Probe
gaatatggaggagtgaactctcaga

SEQ ID NO: 50733 - DNA, 25 bp, Artificial
  Probe
aatatggaggagtgaactctcagac

SEQ ID NO: 50734 - DNA, 25 bp, Artificial
  Probe
cctgtcatgtgacctattactctga

SEQ ID NO: 50735 - DNA, 25 bp, Artificial
  Probe
ggaatatggaggagtgaactctcag

SEQ ID NO: 50736 - DNA, 25 bp, Artificial
  Probe
gacaaaccgaccacaattagagaag

SEQ ID NO: 50737 - DNA, 25 bp, Artificial
  Probe
acaattagagaagcctttccctaaa

SEQ ID NO: 50738 - DNA, 25 bp, Artificial
  Probe
aactctcagacccttgaagatgtag

SEQ ID NO: 50739 - DNA, 25 bp, Artificial
  Probe
gaactctcagacccttgaagatgta

SEQ ID NO: 50740 - DNA, 25 bp, Artificial
  Probe
cacaattagagaagcctttccctaa

SEQ ID NO: 50741 - DNA, 25 bp, Artificial
  Probe
agacaaaccgaccacaattagagaa

SEQ ID NO: 50742 - DNA, 25 bp, Artificial
  Probe
aagacaaaccgaccacaattagaga

SEQ ID NO: 50743 - DNA, 25 bp, Artificial
  Probe
caagacaaaccgaccacaattagag

SEQ ID NO: 50744 - DNA, 25 bp, Artificial
  Probe
ccacaattagagaagcctttcccta

SEQ ID NO: 50745 - DNA, 25 bp, Artificial
  Probe
gacctattactctgacataaatcca

SEQ ID NO: 50746 - DNA, 25 bp, Artificial
  Probe
tgacctattactctgacataaatcc

SEQ ID NO: 50747 - DNA, 25 bp, Artificial
  Probe
atatggaggagtgaactctcagacc

SEQ ID NO: 50748 - DNA, 25 bp, Artificial
  Probe
tgaaccgattaaatggcacctgtat

SEQ ID NO: 50749 - DNA, 25 bp, Artificial
  Probe
cacaagacaaaccgaccacaattag

SEQ ID NO: 50750 - DNA, 25 bp, Artificial
  Probe
acaagacaaaccgaccacaattaga

SEQ ID NO: 50751 - DNA, 25 bp, Artificial
  Probe
ttgaaccgattaaatggcacctgta

SEQ ID NO: 50752 - DNA, 25 bp, Artificial
  Probe
tcatgtgacctattactctgacata

SEQ ID NO: 50753 - DNA, 25 bp, Artificial
  Probe
gatttgaaccgattaaatggcacct

SEQ ID NO: 50754 - DNA, 25 bp, Artificial
  Probe
atttgaaccgattaaatggcacctg

SEQ ID NO: 50755 - DNA, 25 bp, Artificial
  Probe
attagagaagcctttccctaaagtg

SEQ ID NO: 50756 - DNA, 25 bp, Artificial
  Probe
acctattactctgacataaatccat

SEQ ID NO: 50757 - DNA, 25 bp, Artificial
  Probe
aattagagaagcctttccctaaagt

SEQ ID NO: 50758 - DNA, 25 bp, Artificial
  Probe
tagagaagcctttccctaaagtgta

SEQ ID NO: 50759 - DNA, 25 bp, Artificial
  Probe
caattagagaagcctttccctaaag

SEQ ID NO: 50760 - DNA, 25 bp, Artificial
  Probe
actctgacataaatccatctgtaat

SEQ ID NO: 50761 - DNA, 25 bp, Artificial
  Probe
attactctgacataaatccatctgt

SEQ ID NO: 50762 - DNA, 25 bp, Artificial
  Probe
aaccgaccacaattagagaagcctt

SEQ ID NO: 50763 - DNA, 25 bp, Artificial
  Probe
acacaagacaaaccgaccacaatta

SEQ ID NO: 50764 - DNA, 25 bp, Artificial
  Probe
catgtgacctattactctgacataa

SEQ ID NO: 50765 - DNA, 25 bp, Artificial
  Probe
gtgaactctcagacccttgaagatg

SEQ ID NO: 50766 - DNA, 25 bp, Artificial
  Probe
agtgaactctcagacccttgaagat

SEQ ID NO: 50767 - DNA, 25 bp, Artificial
  Probe
gtgacctattactctgacataaatc

SEQ ID NO: 50768 - DNA, 25 bp, Artificial
  Probe
gagaagcctttccctaaagtgtaac

SEQ ID NO: 50769 - DNA, 25 bp, Artificial
  Probe
agagaagcctttccctaaagtgtaa

SEQ ID NO: 50770 - DNA, 25 bp, Artificial
  Probe
ttagagaagcctttccctaaagtgt

SEQ ID NO: 50771 - DNA, 25 bp, Artificial
  Probe
agaagcctttccctaaagtgtaact

SEQ ID NO: 50772 - DNA, 25 bp, Artificial
  Probe
tgtgacctattactctgacataaat

SEQ ID NO: 50773 - DNA, 25 bp, Artificial
  Probe
cctattactctgacataaatccatc

SEQ ID NO: 50774 - DNA, 25 bp, Artificial
  Probe
tgaactctcagacccttgaagatgt

SEQ ID NO: 50775 - DNA, 25 bp, Artificial
  Probe
tttgaaccgattaaatggcacctgt

SEQ ID NO: 50776 - DNA, 25 bp, Artificial
  Probe
ggatttgaaccgattaaatggcacc

SEQ ID NO: 50777 - DNA, 25 bp, Artificial
  Probe
tggagagataatgtgagtcaatgag

SEQ ID NO: 50778 - DNA, 25 bp, Artificial
  Probe
ggagagataatgtgagtcaatgaga

SEQ ID NO: 50779 - DNA, 25 bp, Artificial
  Probe
ttggagagataatgtgagtcaatga

SEQ ID NO: 50780 - DNA, 25 bp, Artificial
  Probe
ccttcaattcaagcaactagacatt

SEQ ID NO: 50781 - DNA, 25 bp, Artificial
  Probe
caagcaactagacattggagagata

SEQ ID NO: 50782 - DNA, 25 bp, Artificial
  Probe
aattcaagcaactagacattggaga

SEQ ID NO: 50783 - DNA, 25 bp, Artificial
  Probe
aagcaactagacattggagagataa

SEQ ID NO: 50784 - DNA, 25 bp, Artificial
  Probe
agcaactagacattggagagataat

SEQ ID NO: 50785 - DNA, 25 bp, Artificial
  Probe
attcaagcaactagacattggagag

SEQ ID NO: 50786 - DNA, 25 bp, Artificial
  Probe
gagagataatgtgagtcaatgagaa

SEQ ID NO: 50787 - DNA, 25 bp, Artificial
  Probe
tcaagcaactagacattggagagat

SEQ ID NO: 50788 - DNA, 25 bp, Artificial
  Probe
ttcaagcaactagacattggagaga

SEQ ID NO: 50789 - DNA, 25 bp, Artificial
  Probe
gccttcaattcaagcaactagacat

SEQ ID NO: 50790 - DNA, 25 bp, Artificial
  Probe
tgagtcaatgagaaaggtagaatgt

SEQ ID NO: 50791 - DNA, 25 bp, Artificial
  Probe
tgtgagtcaatgagaaaggtagaat

SEQ ID NO: 50792 - DNA, 25 bp, Artificial
  Probe
atgtgagtcaatgagaaaggtagaa

SEQ ID NO: 50793 - DNA, 25 bp, Artificial
  Probe
aatgtgagtcaatgagaaaggtaga

SEQ ID NO: 50794 - DNA, 25 bp, Artificial
  Probe
gtgagtcaatgagaaaggtagaatg

SEQ ID NO: 50795 - DNA, 25 bp, Artificial
  Probe
gagtcaatgagaaaggtagaatgtc

SEQ ID NO: 50796 - DNA, 25 bp, Artificial
  Probe
ttcaattcaagcaactagacattgg

SEQ ID NO: 50797 - DNA, 25 bp, Artificial
  Probe
caattcaagcaactagacattggag

SEQ ID NO: 50798 - DNA, 25 bp, Artificial
  Probe
gcaactagacattggagagataatg

SEQ ID NO: 50799 - DNA, 25 bp, Artificial
  Probe
tcaattcaagcaactagacattgga

SEQ ID NO: 50800 - DNA, 25 bp, Artificial
  Probe
agtcaatgagaaaggtagaatgtct

SEQ ID NO: 50801 - DNA, 25 bp, Artificial
  Probe
gataatgtgagtcaatgagaaaggt

SEQ ID NO: 50802 - DNA, 25 bp, Artificial
  Probe
cttcaattcaagcaactagacattg

SEQ ID NO: 50803 - DNA, 25 bp, Artificial
  Probe
agataatgtgagtcaatgagaaagg

SEQ ID NO: 50804 - DNA, 25 bp, Artificial
  Probe
attggagagataatgtgagtcaatg

SEQ ID NO: 50805 - DNA, 25 bp, Artificial
  Probe
cattggagagataatgtgagtcaat

SEQ ID NO: 50806 - DNA, 25 bp, Artificial
  Probe
taatgtgagtcaatgagaaaggtag

SEQ ID NO: 50807 - DNA, 25 bp, Artificial
  Probe
ataatgtgagtcaatgagaaaggta

SEQ ID NO: 50808 - DNA, 25 bp, Artificial
  Probe
agagataatgtgagtcaatgagaaa

SEQ ID NO: 50809 - DNA, 25 bp, Artificial
  Probe
gagataatgtgagtcaatgagaaag

SEQ ID NO: 50810 - DNA, 25 bp, Artificial
  Probe
aaatattctgaactgggacggaaag

SEQ ID NO: 50811 - DNA, 25 bp, Artificial
  Probe
caaatattctgaactgggacggaaa

SEQ ID NO: 50812 - DNA, 25 bp, Artificial
  Probe
agggacaaatattctgaactgggac

SEQ ID NO: 50813 - DNA, 25 bp, Artificial
  Probe
gtcaatgagaaaggtagaatgtcta

SEQ ID NO: 50814 - DNA, 25 bp, Artificial
  Probe
acaaatattctgaactgggacggaa

SEQ ID NO: 50815 - DNA, 25 bp, Artificial
  Probe
ctgccttcaattcaagcaactagac

SEQ ID NO: 50816 - DNA, 25 bp, Artificial
  Probe
gactgccttcaattcaagcaactag

SEQ ID NO: 50817 - DNA, 25 bp, Artificial
  Probe
gacaaatattctgaactgggacgga

SEQ ID NO: 50818 - DNA, 25 bp, Artificial
  Probe
atattctgaactgggacggaaagga

SEQ ID NO: 50819 - DNA, 25 bp, Artificial
  Probe
actgccttcaattcaagcaactaga

SEQ ID NO: 50820 - DNA, 25 bp, Artificial
  Probe
aatattctgaactgggacggaaagg

SEQ ID NO: 50821 - DNA, 25 bp, Artificial
  Probe
cagggacaaatattctgaactggga

SEQ ID NO: 50822 - DNA, 25 bp, Artificial
  Probe
gtgttcttgtctgtaaatggtgata

SEQ ID NO: 50823 - DNA, 25 bp, Artificial
  Probe
cgtgttcttgtctgtaaatggtgat

SEQ ID NO: 50824 - DNA, 25 bp, Artificial
  Probe
tgttcttgtctgtaaatggtgataa

SEQ ID NO: 50825 - DNA, 25 bp, Artificial
  Probe
aaccaacatcaagtcagcttcaatg

SEQ ID NO: 50826 - DNA, 25 bp, Artificial
  Probe
ctgagttgagcaatgaaattatctt

SEQ ID NO: 50827 - DNA, 25 bp, Artificial
  Probe
atggtgataatacctacctcatagg

SEQ ID NO: 50828 - DNA, 25 bp, Artificial
  Probe
gttcttgtctgtaaatggtgataat

SEQ ID NO: 50829 - DNA, 25 bp, Artificial
  Probe
aatggtgataatacctacctcatag

SEQ ID NO: 50830 - DNA, 25 bp, Artificial
  Probe
tgagttgagcaatgaaattatcttt

SEQ ID NO: 50831 - DNA, 25 bp, Artificial
  Probe
aaaccaacatcaagtcagcttcaat

SEQ ID NO: 50832 - DNA, 25 bp, Artificial
  Probe
gctgagttgagcaatgaaattatct

SEQ ID NO: 50833 - DNA, 25 bp, Artificial
  Probe
ccgtgttcttgtctgtaaatggtga

SEQ ID NO: 50834 - DNA, 25 bp, Artificial
  Probe
tcttgtctgtaaatggtgataatac

SEQ ID NO: 50835 - DNA, 25 bp, Artificial
  Probe
ttgtctgtaaatggtgataatacct

SEQ ID NO: 50836 - DNA, 25 bp, Artificial
  Probe
gtaaatggtgataatacctacctca

SEQ ID NO: 50837 - DNA, 25 bp, Artificial
  Probe
tgtaaatggtgataatacctacctc

SEQ ID NO: 50838 - DNA, 25 bp, Artificial
  Probe
ctgtaaatggtgataatacctacct

SEQ ID NO: 50839 - DNA, 25 bp, Artificial
  Probe
tctgtaaatggtgataatacctacc

SEQ ID NO: 50840 - DNA, 25 bp, Artificial
  Probe
cttgtctgtaaatggtgataatacc

SEQ ID NO: 50841 - DNA, 25 bp, Artificial
  Probe
tgaaattatcttttgctcaaggctt

SEQ ID NO: 50842 - DNA, 25 bp, Artificial
  Probe
atgaaattatcttttgctcaaggct

SEQ ID NO: 50843 - DNA, 25 bp, Artificial
  Probe
agggaaaatgccaagtggaataaaa

SEQ ID NO: 50844 - DNA, 25 bp, Artificial
  Probe
aatgaaattatcttttgctcaaggc

SEQ ID NO: 50845 - DNA, 25 bp, Artificial
  Probe
tgtctgtaaatggtgataataccta

SEQ ID NO: 50846 - DNA, 25 bp, Artificial
  Probe
gaaattatcttttgctcaaggctta

SEQ ID NO: 50847 - DNA, 25 bp, Artificial
  Probe
cagggaaaatgccaagtggaataaa

SEQ ID NO: 50848 - DNA, 25 bp, Artificial
  Probe
ttcttgtctgtaaatggtgataata

SEQ ID NO: 50849 - DNA, 25 bp, Artificial
  Probe
accaacatcaagtcagcttcaatgc

SEQ ID NO: 50850 - DNA, 25 bp, Artificial
  Probe
tttctaattggcgaccttcaggtag

SEQ ID NO: 50851 - DNA, 25 bp, Artificial
  Probe
ctttctaattggcgaccttcaggta

SEQ ID NO: 50852 - DNA, 25 bp, Artificial
  Probe
aacatcaagtcagcttcaatgcatc

SEQ ID NO: 50853 - DNA, 25 bp, Artificial
  Probe
gtctgtaaatggtgataatacctac

SEQ ID NO: 50854 - DNA, 25 bp, Artificial
  Probe
aaatggtgataatacctacctcata

SEQ ID NO: 50855 - DNA, 25 bp, Artificial
  Probe
taaatggtgataatacctacctcat

SEQ ID NO: 50856 - DNA, 25 bp, Artificial
  Probe
ccaacatcaagtcagcttcaatgca

SEQ ID NO: 50857 - DNA, 25 bp, Artificial
  Probe
attatcttttgctcaaggcttattt

SEQ ID NO: 50858 - DNA, 25 bp, Artificial
  Probe
caacatcaagtcagcttcaatgcat

SEQ ID NO: 50859 - DNA, 25 bp, Artificial
  Probe
aattatcttttgctcaaggcttatt

SEQ ID NO: 50860 - DNA, 25 bp, Artificial
  Probe
aaattatcttttgctcaaggcttat

SEQ ID NO: 50861 - DNA, 25 bp, Artificial
  Probe
caatgaaattatcttttgctcaagg

SEQ ID NO: 50862 - DNA, 25 bp, Artificial
  Probe
aaaaccaacatcaagtcagcttcaa

SEQ ID NO: 50863 - DNA, 25 bp, Artificial
  Probe
gagttgagcaatgaaattatctttt

SEQ ID NO: 50864 - DNA, 25 bp, Artificial
  Probe
agttgagcaatgaaattatcttttg

SEQ ID NO: 50865 - DNA, 25 bp, Artificial
  Probe
ttctaattggcgaccttcaggtagc

SEQ ID NO: 50866 - DNA, 25 bp, Artificial
  Probe
gatgggtacaataaaagatgcaggc

SEQ ID NO: 50867 - DNA, 25 bp, Artificial
  Probe
gtcaacagtgagaagatggtgattg

SEQ ID NO: 50868 - DNA, 25 bp, Artificial
  Probe
tgtcaacagtgagaagatggtgatt

SEQ ID NO: 50869 - DNA, 25 bp, Artificial
  Probe
tcaacagtgagaagatggtgattgg

SEQ ID NO: 50870 - DNA, 25 bp, Artificial
  Probe
ctgtcaacagtgagaagatggtgat

SEQ ID NO: 50871 - DNA, 25 bp, Artificial
  Probe
caacagtgagaagatggtgattggc

SEQ ID NO: 50872 - DNA, 25 bp, Artificial
  Probe
catgctggtgaaggatgtgatacag

SEQ ID NO: 50873 - DNA, 25 bp, Artificial
  Probe
gaaggatgtgatacaggctctgaca

SEQ ID NO: 50874 - DNA, 25 bp, Artificial
  Probe
tgaaggatgtgatacaggctctgac

SEQ ID NO: 50875 - DNA, 25 bp, Artificial
  Probe
gtgaaggatgtgatacaggctctga

SEQ ID NO: 50876 - DNA, 25 bp, Artificial
  Probe
aacagtgagaagatggtgattggca

SEQ ID NO: 50877 - DNA, 25 bp, Artificial
  Probe
aaggatgtgatacaggctctgacac

SEQ ID NO: 50878 - DNA, 25 bp, Artificial
  Probe
ttcctatgggtcccttagtgacttc

SEQ ID NO: 50879 - DNA, 25 bp, Artificial
  Probe
cttcctatgggtcccttagtgactt

SEQ ID NO: 50880 - DNA, 25 bp, Artificial
  Probe
atgctggtgaaggatgtgatacagg

SEQ ID NO: 50881 - DNA, 25 bp, Artificial
  Probe
ccctctcctcagttttctgtatgta

SEQ ID NO: 50882 - DNA, 25 bp, Artificial
  Probe
cctctcctcagttttctgtatgtac

SEQ ID NO: 50883 - DNA, 25 bp, Artificial
  Probe
gtatgtacttacgtagcaaatctca

SEQ ID NO: 50884 - DNA, 25 bp, Artificial
  Probe
tgtatgtacttacgtagcaaatctc

SEQ ID NO: 50885 - DNA, 25 bp, Artificial
  Probe
ctgtatgtacttacgtagcaaatct

SEQ ID NO: 50886 - DNA, 25 bp, Artificial
  Probe
tctgtatgtacttacgtagcaaatc

SEQ ID NO: 50887 - DNA, 25 bp, Artificial
  Probe
ctctcctcagttttctgtatgtact

SEQ ID NO: 50888 - DNA, 25 bp, Artificial
  Probe
cctcagttttctgtatgtacttacg

SEQ ID NO: 50889 - DNA, 25 bp, Artificial
  Probe
atgtacttacgtagcaaatctcaat

SEQ ID NO: 50890 - DNA, 25 bp, Artificial
  Probe
tctcctcagttttctgtatgtactt

SEQ ID NO: 50891 - DNA, 25 bp, Artificial
  Probe
ggtgaaggatgtgatacaggctctg

SEQ ID NO: 50892 - DNA, 25 bp, Artificial
  Probe
ctggtgaaggatgtgatacaggctc

SEQ ID NO: 50893 - DNA, 25 bp, Artificial
  Probe
tttctgtatgtacttacgtagcaaa

SEQ ID NO: 50894 - DNA, 25 bp, Artificial
  Probe
ttctgtatgtacttacgtagcaaat

SEQ ID NO: 50895 - DNA, 25 bp, Artificial
  Probe
tgtacttacgtagcaaatctcaata

SEQ ID NO: 50896 - DNA, 25 bp, Artificial
  Probe
tatgtacttacgtagcaaatctcaa

SEQ ID NO: 50897 - DNA, 25 bp, Artificial
  Probe
tggtgaaggatgtgatacaggctct

SEQ ID NO: 50898 - DNA, 25 bp, Artificial
  Probe
gatacaggctctgacacagtgactg

SEQ ID NO: 50899 - DNA, 25 bp, Artificial
  Probe
gtgatacaggctctgacacagtgac

SEQ ID NO: 50900 - DNA, 25 bp, Artificial
  Probe
tgatacaggctctgacacagtgact

SEQ ID NO: 50901 - DNA, 25 bp, Artificial
  Probe
tcctcagttttctgtatgtacttac

SEQ ID NO: 50902 - DNA, 25 bp, Artificial
  Probe
acagtgagaagatggtgattggcac

SEQ ID NO: 50903 - DNA, 25 bp, Artificial
  Probe
ccatgctggtgaaggatgtgataca

SEQ ID NO: 50904 - DNA, 25 bp, Artificial
  Probe
ctcctcagttttctgtatgtactta

SEQ ID NO: 50905 - DNA, 25 bp, Artificial
  Probe
aacccctctcctcagttttctgtat

SEQ ID NO: 50906 - DNA, 25 bp, Artificial
  Probe
gtacttacgtagcaaatctcaataa

SEQ ID NO: 50907 - DNA, 25 bp, Artificial
  Probe
agcactgttacccactgatcttcac

SEQ ID NO: 50908 - DNA, 25 bp, Artificial
  Probe
ctcagttttctgtatgtacttacgt

SEQ ID NO: 50909 - DNA, 25 bp, Artificial
  Probe
ttcatcaacccctctcctcagtttt

SEQ ID NO: 50910 - DNA, 25 bp, Artificial
  Probe
cagcactgttacccactgatcttca

SEQ ID NO: 50911 - DNA, 25 bp, Artificial
  Probe
aagacagaagctgctccttcatcaa

SEQ ID NO: 50912 - DNA, 25 bp, Artificial
  Probe
ttatacccactctaaactcaacacc

SEQ ID NO: 50913 - DNA, 25 bp, Artificial
  Probe
tatacccactctaaactcaacaccg

SEQ ID NO: 50914 - DNA, 25 bp, Artificial
  Probe
cagaagaggagtaaagtcatccact

SEQ ID NO: 50915 - DNA, 25 bp, Artificial
  Probe
ttcactgtcagcttccaaattcatc

SEQ ID NO: 50916 - DNA, 25 bp, Artificial
  Probe
catgcagaagaggagtaaagtcatc

SEQ ID NO: 50917 - DNA, 25 bp, Artificial
  Probe
catgtcatgcagaagaggagtaaag

SEQ ID NO: 50918 - DNA, 25 bp, Artificial
  Probe
tcatgcagaagaggagtaaagtcat

SEQ ID NO: 50919 - DNA, 25 bp, Artificial
  Probe
atgtcatgcagaagaggagtaaagt

SEQ ID NO: 50920 - DNA, 25 bp, Artificial
  Probe
tcactgtcagcttccaaattcatct

SEQ ID NO: 50921 - DNA, 25 bp, Artificial
  Probe
gtcatgcagaagaggagtaaagtca

SEQ ID NO: 50922 - DNA, 25 bp, Artificial
  Probe
tgtcatgcagaagaggagtaaagtc

SEQ ID NO: 50923 - DNA, 25 bp, Artificial
  Probe
gcagaagaggagtaaagtcatccac

SEQ ID NO: 50924 - DNA, 25 bp, Artificial
  Probe
ctgtcagcttccaaattcatctgtg

SEQ ID NO: 50925 - DNA, 25 bp, Artificial
  Probe
cactgtcagcttccaaattcatctg

SEQ ID NO: 50926 - DNA, 25 bp, Artificial
  Probe
actgtcagcttccaaattcatctgt

SEQ ID NO: 50927 - DNA, 25 bp, Artificial
  Probe
agtaaagtcatccactcctcagatg

SEQ ID NO: 50928 - DNA, 25 bp, Artificial
  Probe
atgcagaagaggagtaaagtcatcc

SEQ ID NO: 50929 - DNA, 25 bp, Artificial
  Probe
agaagaggagtaaagtcatccactc

SEQ ID NO: 50930 - DNA, 25 bp, Artificial
  Probe
gagtaaagtcatccactcctcagat

SEQ ID NO: 50931 - DNA, 25 bp, Artificial
  Probe
atacccactctaaactcaacaccgc

SEQ ID NO: 50932 - DNA, 25 bp, Artificial
  Probe
tgcagaagaggagtaaagtcatcca

SEQ ID NO: 50933 - DNA, 25 bp, Artificial
  Probe
gtcagcttccaaattcatctgtggt

SEQ ID NO: 50934 - DNA, 25 bp, Artificial
  Probe
cagcttccaaattcatctgtggtga

SEQ ID NO: 50935 - DNA, 25 bp, Artificial
  Probe
tcagcttccaaattcatctgtggtg

SEQ ID NO: 50936 - DNA, 25 bp, Artificial
  Probe
tgtcagcttccaaattcatctgtgg

SEQ ID NO: 50937 - DNA, 25 bp, Artificial
  Probe
agcttccaaattcatctgtggtgaa

SEQ ID NO: 50938 - DNA, 25 bp, Artificial
  Probe
tcaacctttacttcttcccacgcag

SEQ ID NO: 50939 - DNA, 25 bp, Artificial
  Probe
gcttccaaattcatctgtggtgaat

SEQ ID NO: 50940 - DNA, 25 bp, Artificial
  Probe
tttggatcaaatccggcaaggaatt

SEQ ID NO: 50941 - DNA, 25 bp, Artificial
  Probe
gatcaaatccggcaaggaattcagc

SEQ ID NO: 50942 - DNA, 25 bp, Artificial
  Probe
ttggatcaaatccggcaaggaattc

SEQ ID NO: 50943 - DNA, 25 bp, Artificial
  Probe
atcaaatccggcaaggaattcagct

SEQ ID NO: 50944 - DNA, 25 bp, Artificial
  Probe
ggatcaaatccggcaaggaattcag

SEQ ID NO: 50945 - DNA, 25 bp, Artificial
  Probe
gcatgtcatgcagaagaggagtaaa

SEQ ID NO: 50946 - DNA, 25 bp, Artificial
  Probe
tggatcaaatccggcaaggaattca

SEQ ID NO: 50947 - DNA, 25 bp, Artificial
  Probe
ttttggatcaaatccggcaaggaat

SEQ ID NO: 50948 - DNA, 25 bp, Artificial
  Probe
cttttggatcaaatccggcaaggaa

SEQ ID NO: 50949 - DNA, 25 bp, Artificial
  Probe
cacttttggatcaaatccggcaagg

SEQ ID NO: 50950 - DNA, 25 bp, Artificial
  Probe
acttttggatcaaatccggcaagga

SEQ ID NO: 50951 - DNA, 25 bp, Artificial
  Probe
cgaccttcataccttattcaacatc

SEQ ID NO: 50952 - DNA, 25 bp, Artificial
  Probe
ccgaccttcataccttattcaacat

SEQ ID NO: 50953 - DNA, 25 bp, Artificial
  Probe
accttattcaacatcagagaagaca

SEQ ID NO: 50954 - DNA, 25 bp, Artificial
  Probe
ccttattcaacatcagagaagacac

SEQ ID NO: 50955 - DNA, 25 bp, Artificial
  Probe
ttattcaacatcagagaagacacac

SEQ ID NO: 50956 - DNA, 25 bp, Artificial
  Probe
gattacaagccttattgaacaccaa

SEQ ID NO: 50957 - DNA, 25 bp, Artificial
  Probe
accttcataccttattcaacatcag

SEQ ID NO: 50958 - DNA, 25 bp, Artificial
  Probe
gaccttcataccttattcaacatca

SEQ ID NO: 50959 - DNA, 25 bp, Artificial
  Probe
cttattcaacatcagagaagacaca

SEQ ID NO: 50960 - DNA, 25 bp, Artificial
  Probe
gcaagagttctaacctattggaatt

SEQ ID NO: 50961 - DNA, 25 bp, Artificial
  Probe
ccttcataccttattcaacatcaga

SEQ ID NO: 50962 - DNA, 25 bp, Artificial
  Probe
ggattacaagccttattgaacacca

SEQ ID NO: 50963 - DNA, 25 bp, Artificial
  Probe
taccttattcaacatcagagaagac

SEQ ID NO: 50964 - DNA, 25 bp, Artificial
  Probe
tcagtaggattacaagccttattga

SEQ ID NO: 50965 - DNA, 25 bp, Artificial
  Probe
aggattacaagccttattgaacacc

SEQ ID NO: 50966 - DNA, 25 bp, Artificial
  Probe
ttcataccttattcaacatcagaga

SEQ ID NO: 50967 - DNA, 25 bp, Artificial
  Probe
taggattacaagccttattgaacac

SEQ ID NO: 50968 - DNA, 25 bp, Artificial
  Probe
gtaggattacaagccttattgaaca

SEQ ID NO: 50969 - DNA, 25 bp, Artificial
  Probe
gtggtcagacttggaactcttatgt

SEQ ID NO: 50970 - DNA, 25 bp, Artificial
  Probe
tgtggtcagacttggaactcttatg

SEQ ID NO: 50971 - DNA, 25 bp, Artificial
  Probe
gtgtggtcagacttggaactcttat

SEQ ID NO: 50972 - DNA, 25 bp, Artificial
  Probe
agtaggattacaagccttattgaac

SEQ ID NO: 50973 - DNA, 25 bp, Artificial
  Probe
cagtaggattacaagccttattgaa

SEQ ID NO: 50974 - DNA, 25 bp, Artificial
  Probe
ttcagtaggattacaagccttattg

SEQ ID NO: 50975 - DNA, 25 bp, Artificial
  Probe
tcataccttattcaacatcagagaa

SEQ ID NO: 50976 - DNA, 25 bp, Artificial
  Probe
cttcataccttattcaacatcagag

SEQ ID NO: 50977 - DNA, 25 bp, Artificial
  Probe
tggtcagacttggaactcttatgtc

SEQ ID NO: 50978 - DNA, 25 bp, Artificial
  Probe
cataccttattcaacatcagagaag

SEQ ID NO: 50979 - DNA, 25 bp, Artificial
  Probe
agaagtttcagtaggattacaagcc

SEQ ID NO: 50980 - DNA, 25 bp, Artificial
  Probe
gagaagtttcagtaggattacaagc

SEQ ID NO: 50981 - DNA, 25 bp, Artificial
  Probe
ataccttattcaacatcagagaaga

SEQ ID NO: 50982 - DNA, 25 bp, Artificial
  Probe
tcagacttggaactcttatgtcctg

SEQ ID NO: 50983 - DNA, 25 bp, Artificial
  Probe
gtcagacttggaactcttatgtcct

SEQ ID NO: 50984 - DNA, 25 bp, Artificial
  Probe
tgcaagagttctaacctattggaat

SEQ ID NO: 50985 - DNA, 25 bp, Artificial
  Probe
ttgtctgcaagagttctaacctatt

SEQ ID NO: 50986 - DNA, 25 bp, Artificial
  Probe
ctgcaagagttctaacctattggaa

SEQ ID NO: 50987 - DNA, 25 bp, Artificial
  Probe
tgtctgcaagagttctaacctattg

SEQ ID NO: 50988 - DNA, 25 bp, Artificial
  Probe
gttgtctgcaagagttctaacctat

SEQ ID NO: 50989 - DNA, 25 bp, Artificial
  Probe
actcctgtgtcttatcaatgcaatg

SEQ ID NO: 50990 - DNA, 25 bp, Artificial
  Probe
aacctattggaattaaatgggcttc

SEQ ID NO: 50991 - DNA, 25 bp, Artificial
  Probe
attacaagccttattgaacaccaaa

SEQ ID NO: 50992 - DNA, 25 bp, Artificial
  Probe
ctaacctattggaattaaatgggct

SEQ ID NO: 50993 - DNA, 25 bp, Artificial
  Probe
tctaacctattggaattaaatgggc

SEQ ID NO: 50994 - DNA, 25 bp, Artificial
  Probe
gattgtgagagaagtttcagtagga

SEQ ID NO: 50995 - DNA, 25 bp, Artificial
  Probe
tctgcaagagttctaacctattgga

SEQ ID NO: 50996 - DNA, 25 bp, Artificial
  Probe
gactttctgtaaccatgtgatgtat

SEQ ID NO: 50997 - DNA, 25 bp, Artificial
  Probe
cggaacttgtgatctccaaggacaa

SEQ ID NO: 50998 - DNA, 25 bp, Artificial
  Probe
gtgatctccaaggacaagaggagtt

SEQ ID NO: 50999 - DNA, 25 bp, Artificial
  Probe
ttgtgatctccaaggacaagaggag

SEQ ID NO: 51000 - DNA, 25 bp, Artificial
  Probe
tgatctccaaggacaagaggagttt

SEQ ID NO: 51001 - DNA, 25 bp, Artificial
  Probe
tgtgatctccaaggacaagaggagt

SEQ ID NO: 51002 - DNA, 25 bp, Artificial
  Probe
gatctccaaggacaagaggagtttt

SEQ ID NO: 51003 - DNA, 25 bp, Artificial
  Probe
tcaccattccaaataacttaatcgg

SEQ ID NO: 51004 - DNA, 25 bp, Artificial
  Probe
tgtgtaatttctggtcagtgattcc

SEQ ID NO: 51005 - DNA, 25 bp, Artificial
  Probe
atgaactcaccattccaaataactt

SEQ ID NO: 51006 - DNA, 25 bp, Artificial
  Probe
acactttatcatccgctaagaattt

SEQ ID NO: 51007 - DNA, 25 bp, Artificial
  Probe
ctcaccattccaaataacttaatcg

SEQ ID NO: 51008 - DNA, 25 bp, Artificial
  Probe
ccatgatccaactgtgtaatttctg

SEQ ID NO: 51009 - DNA, 25 bp, Artificial
  Probe
ttcccatgatccaactgtgtaattt

SEQ ID NO: 51010 - DNA, 25 bp, Artificial
  Probe
tttcccatgatccaactgtgtaatt

SEQ ID NO: 51011 - DNA, 25 bp, Artificial
  Probe
tgaactcaccattccaaataactta

SEQ ID NO: 51012 - DNA, 25 bp, Artificial
  Probe
ctgtgtaatttctggtcagtgattc

SEQ ID NO: 51013 - DNA, 25 bp, Artificial
  Probe
ccatgaactcaccattccaaataac

SEQ ID NO: 51014 - DNA, 25 bp, Artificial
  Probe
catgaactcaccattccaaataact

SEQ ID NO: 51015 - DNA, 25 bp, Artificial
  Probe
cccatgatccaactgtgtaatttct

SEQ ID NO: 51016 - DNA, 25 bp, Artificial
  Probe
tcccatgatccaactgtgtaatttc

SEQ ID NO: 51017 - DNA, 25 bp, Artificial
  Probe
ttctggaaggcaggtcactattact

SEQ ID NO: 51018 - DNA, 25 bp, Artificial
  Probe
tacactttatcatccgctaagaatt

SEQ ID NO: 51019 - DNA, 25 bp, Artificial
  Probe
cttctggaaggcaggtcactattac

SEQ ID NO: 51020 - DNA, 25 bp, Artificial
  Probe
cccatgaactcaccattccaaataa

SEQ ID NO: 51021 - DNA, 25 bp, Artificial
  Probe
tcttctggaaggcaggtcactatta

SEQ ID NO: 51022 - DNA, 25 bp, Artificial
  Probe
gaactcaccattccaaataacttaa

SEQ ID NO: 51023 - DNA, 25 bp, Artificial
  Probe
actcaccattccaaataacttaatc

SEQ ID NO: 51024 - DNA, 25 bp, Artificial
  Probe
gtgtaatttctggtcagtgattcca

SEQ ID NO: 51025 - DNA, 25 bp, Artificial
  Probe
atccaactgtgtaatttctggtcag

SEQ ID NO: 51026 - DNA, 25 bp, Artificial
  Probe
atgatccaactgtgtaatttctggt

SEQ ID NO: 51027 - DNA, 25 bp, Artificial
  Probe
acccatgaactcaccattccaaata

SEQ ID NO: 51028 - DNA, 25 bp, Artificial
  Probe
cactttatcatccgctaagaattta

SEQ ID NO: 51029 - DNA, 25 bp, Artificial
  Probe
tctggaaggcaggtcactattactg

SEQ ID NO: 51030 - DNA, 25 bp, Artificial
  Probe
catgatccaactgtgtaatttctgg

SEQ ID NO: 51031 - DNA, 25 bp, Artificial
  Probe
gatccaactgtgtaatttctggtca

SEQ ID NO: 51032 - DNA, 25 bp, Artificial
  Probe
tgatccaactgtgtaatttctggtc

SEQ ID NO: 51033 - DNA, 25 bp, Artificial
  Probe
aactcaccattccaaataacttaat

SEQ ID NO: 51034 - DNA, 25 bp, Artificial
  Probe
atctactcaaaccacccatgaactc

SEQ ID NO: 51035 - DNA, 25 bp, Artificial
  Probe
catctactcaaaccacccatgaact

SEQ ID NO: 51036 - DNA, 25 bp, Artificial
  Probe
ctcttctggaaggcaggtcactatt

SEQ ID NO: 51037 - DNA, 25 bp, Artificial
  Probe
actttatcatccgctaagaatttaa

SEQ ID NO: 51038 - DNA, 25 bp, Artificial
  Probe
atcatccgctaagaatttaaagaaa

SEQ ID NO: 51039 - DNA, 25 bp, Artificial
  Probe
ttttcccatgatccaactgtgtaat

SEQ ID NO: 51040 - DNA, 25 bp, Artificial
  Probe
ctggaaggcaggtcactattactgg

SEQ ID NO: 51041 - DNA, 25 bp, Artificial
  Probe
atttcagtttagttctgtaatgtca

SEQ ID NO: 51042 - DNA, 25 bp, Artificial
  Probe
ctactcaaaccacccatgaactcac

SEQ ID NO: 51043 - DNA, 25 bp, Artificial
  Probe
cacccatgaactcaccattccaaat

SEQ ID NO: 51044 - DNA, 25 bp, Artificial
  Probe
tctactcaaaccacccatgaactca

SEQ ID NO: 51045 - DNA, 25 bp, Artificial
  Probe
tttggctcatggattttattttctg

SEQ ID NO: 51046 - DNA, 25 bp, Artificial
  Probe
gttttcccatgatccaactgtgtaa

SEQ ID NO: 51047 - DNA, 25 bp, Artificial
  Probe
gaaggcaggtcactattactggctc

SEQ ID NO: 51048 - DNA, 25 bp, Artificial
  Probe
actccactgtccatctgattgaatt

SEQ ID NO: 51049 - DNA, 25 bp, Artificial
  Probe
gttaccacagaacattcaagaccag

SEQ ID NO: 51050 - DNA, 25 bp, Artificial
  Probe
agatgaagttatggattaccttgtt

SEQ ID NO: 51051 - DNA, 25 bp, Artificial
  Probe
ctcttgtcaccagtgtatgatgttg

SEQ ID NO: 51052 - DNA, 25 bp, Artificial
  Probe
cactccactgtccatctgattgaat

SEQ ID NO: 51053 - DNA, 25 bp, Artificial
  Probe
ggagtccttagatgaagttatggat

SEQ ID NO: 51054 - DNA, 25 bp, Artificial
  Probe
ccttagatgaagttatggattacct

SEQ ID NO: 51055 - DNA, 25 bp, Artificial
  Probe
ttaccacagaacattcaagaccagg

SEQ ID NO: 51056 - DNA, 25 bp, Artificial
  Probe
cctttgtgttcttattggctgtaaa

SEQ ID NO: 51057 - DNA, 25 bp, Artificial
  Probe
tagatgaagttatggattaccttgt

SEQ ID NO: 51058 - DNA, 25 bp, Artificial
  Probe
aggagtccttagatgaagttatgga

SEQ ID NO: 51059 - DNA, 25 bp, Artificial
  Probe
atggttcagaagcaaagatactatg

SEQ ID NO: 51060 - DNA, 25 bp, Artificial
  Probe
tttgtgttcttattggctgtaaacg

SEQ ID NO: 51061 - DNA, 25 bp, Artificial
  Probe
gatatggttcagaagcaaagatact

SEQ ID NO: 51062 - DNA, 25 bp, Artificial
  Probe
ctttgtgttcttattggctgtaaac

SEQ ID NO: 51063 - DNA, 25 bp, Artificial
  Probe
gaaggatttgatatggttcagaagc

SEQ ID NO: 51064 - DNA, 25 bp, Artificial
  Probe
tggaaggatttgatatggttcagaa

SEQ ID NO: 51065 - DNA, 25 bp, Artificial
  Probe
tggttcagaagcaaagatactatga

SEQ ID NO: 51066 - DNA, 25 bp, Artificial
  Probe
aggatttgatatggttcagaagcaa

SEQ ID NO: 51067 - DNA, 25 bp, Artificial
  Probe
aaggatttgatatggttcagaagca

SEQ ID NO: 51068 - DNA, 25 bp, Artificial
  Probe
gagtccttagatgaagttatggatt

SEQ ID NO: 51069 - DNA, 25 bp, Artificial
  Probe
gtggaaggatttgatatggttcaga

SEQ ID NO: 51070 - DNA, 25 bp, Artificial
  Probe
ggaaggatttgatatggttcagaag

SEQ ID NO: 51071 - DNA, 25 bp, Artificial
  Probe
tcagaagcaaagatactatgaacgg

SEQ ID NO: 51072 - DNA, 25 bp, Artificial
  Probe
tgatatggttcagaagcaaagatac

SEQ ID NO: 51073 - DNA, 25 bp, Artificial
  Probe
tccttagatgaagttatggattacc

SEQ ID NO: 51074 - DNA, 25 bp, Artificial
  Probe
cagaagcaaagatactatgaacggc

SEQ ID NO: 51075 - DNA, 25 bp, Artificial
  Probe
ggtggaaggatttgatatggttcag

SEQ ID NO: 51076 - DNA, 25 bp, Artificial
  Probe
gatgaagttatggattaccttgtta

SEQ ID NO: 51077 - DNA, 25 bp, Artificial
  Probe
ttgatatggttcagaagcaaagata

SEQ ID NO: 51078 - DNA, 25 bp, Artificial
  Probe
cttgtcaccagtgtatgatgttgct

SEQ ID NO: 51079 - DNA, 25 bp, Artificial
  Probe
tcttgtcaccagtgtatgatgttgc

SEQ ID NO: 51080 - DNA, 25 bp, Artificial
  Probe
aagaaatatcacctttggacccaat

SEQ ID NO: 51081 - DNA, 25 bp, Artificial
  Probe
ctccactgtccatctgattgaattc

SEQ ID NO: 51082 - DNA, 25 bp, Artificial
  Probe
agaaatatcacctttggacccaata

SEQ ID NO: 51083 - DNA, 25 bp, Artificial
  Probe
ttagatgaagttatggattaccttg

SEQ ID NO: 51084 - DNA, 25 bp, Artificial
  Probe
aagggttaccacagaacattcaaga

SEQ ID NO: 51085 - DNA, 25 bp, Artificial
  Probe
caagggttaccacagaacattcaag

SEQ ID NO: 51086 - DNA, 25 bp, Artificial
  Probe
tgaagaaatatcacctttggaccca

SEQ ID NO: 51087 - DNA, 25 bp, Artificial
  Probe
tatggttcagaagcaaagatactat

SEQ ID NO: 51088 - DNA, 25 bp, Artificial
  Probe
atatggttcagaagcaaagatacta

SEQ ID NO: 51089 - DNA, 25 bp, Artificial
  Probe
gaagaaatatcacctttggacccaa

SEQ ID NO: 51090 - DNA, 25 bp, Artificial
  Probe
aaagatactatgaacggctggagtc

SEQ ID NO: 51091 - DNA, 25 bp, Artificial
  Probe
gaaatatcacctttggacccaataa

SEQ ID NO: 51092 - DNA, 25 bp, Artificial
  Probe
ggttaccacagaacattcaagacca

SEQ ID NO: 51093 - DNA, 25 bp, Artificial
  Probe
ctacaaagatgacttccctgagaaa

SEQ ID NO: 51094 - DNA, 25 bp, Artificial
  Probe
tacaaagatgacttccctgagaaac

SEQ ID NO: 51095 - DNA, 25 bp, Artificial
  Probe
tactctacaaagatgacttccctga

SEQ ID NO: 51096 - DNA, 25 bp, Artificial
  Probe
tctacaaagatgacttccctgagaa

SEQ ID NO: 51097 - DNA, 25 bp, Artificial
  Probe
caaagatgacttccctgagaaactg

SEQ ID NO: 51098 - DNA, 25 bp, Artificial
  Probe
aagatgacttccctgagaaactgaa

SEQ ID NO: 51099 - DNA, 25 bp, Artificial
  Probe
aaagatgacttccctgagaaactga

SEQ ID NO: 51100 - DNA, 25 bp, Artificial
  Probe
gtactctacaaagatgacttccctg

SEQ ID NO: 51101 - DNA, 25 bp, Artificial
  Probe
acaaagatgacttccctgagaaact

SEQ ID NO: 51102 - DNA, 25 bp, Artificial
  Probe
ctctacaaagatgacttccctgaga

SEQ ID NO: 51103 - DNA, 25 bp, Artificial
  Probe
actctacaaagatgacttccctgag

SEQ ID NO: 51104 - DNA, 25 bp, Artificial
  Probe
ctgtactctacaaagatgacttccc

SEQ ID NO: 51105 - DNA, 25 bp, Artificial
  Probe
cctgtactctacaaagatgacttcc

SEQ ID NO: 51106 - DNA, 25 bp, Artificial
  Probe
ccctgtactctacaaagatgacttc

SEQ ID NO: 51107 - DNA, 25 bp, Artificial
  Probe
tgtactctacaaagatgacttccct

SEQ ID NO: 51108 - DNA, 25 bp, Artificial
  Probe
accctgtactctacaaagatgactt

SEQ ID NO: 51109 - DNA, 25 bp, Artificial
  Probe
ctgacagtccctgaacaagtctttg

SEQ ID NO: 51110 - DNA, 25 bp, Artificial
  Probe
atgacttccctgagaaactgaagag

SEQ ID NO: 51111 - DNA, 25 bp, Artificial
  Probe
gatgacttccctgagaaactgaaga

SEQ ID NO: 51112 - DNA, 25 bp, Artificial
  Probe
agatgacttccctgagaaactgaag

SEQ ID NO: 51113 - DNA, 25 bp, Artificial
  Probe
gacttccctgagaaactgaagagtt

SEQ ID NO: 51114 - DNA, 25 bp, Artificial
  Probe
agtacctctgagggttagaactgtg

SEQ ID NO: 51115 - DNA, 25 bp, Artificial
  Probe
cctgacagtccctgaacaagtcttt

SEQ ID NO: 51116 - DNA, 25 bp, Artificial
  Probe
tgacttccctgagaaactgaagagt

SEQ ID NO: 51117 - DNA, 25 bp, Artificial
  Probe
ctcatctccgtggactctgaaaatg

SEQ ID NO: 51118 - DNA, 25 bp, Artificial
  Probe
ctctgagggttagaactgtgcttgg

SEQ ID NO: 51119 - DNA, 25 bp, Artificial
  Probe
tctcatctccgtggactctgaaaat

SEQ ID NO: 51120 - DNA, 25 bp, Artificial
  Probe
ctctcatctccgtggactctgaaaa

SEQ ID NO: 51121 - DNA, 25 bp, Artificial
  Probe
atcccagtacctctgagggttagaa

SEQ ID NO: 51122 - DNA, 25 bp, Artificial
  Probe
tcctgacagtccctgaacaagtctt

SEQ ID NO: 51123 - DNA, 25 bp, Artificial
  Probe
tacctctgagggttagaactgtgct

SEQ ID NO: 51124 - DNA, 25 bp, Artificial
  Probe
gtacctctgagggttagaactgtgc

SEQ ID NO: 51125 - DNA, 25 bp, Artificial
  Probe
gtggactctgaaaatgccaaaggaa

SEQ ID NO: 51126 - DNA, 25 bp, Artificial
  Probe
cagtacctctgagggttagaactgt

SEQ ID NO: 51127 - DNA, 25 bp, Artificial
  Probe
gatcccagtacctctgagggttaga

SEQ ID NO: 51128 - DNA, 25 bp, Artificial
  Probe
agatcccagtacctctgagggttag

SEQ ID NO: 51129 - DNA, 25 bp, Artificial
  Probe
cctctgagggttagaactgtgcttg

SEQ ID NO: 51130 - DNA, 25 bp, Artificial
  Probe
aagatgtgtcctgacagtccctgaa

SEQ ID NO: 51131 - DNA, 25 bp, Artificial
  Probe
acttccctgagaaactgaagagttt

SEQ ID NO: 51132 - DNA, 25 bp, Artificial
  Probe
cccagtacctctgagggttagaact

SEQ ID NO: 51133 - DNA, 25 bp, Artificial
  Probe
tcccagtacctctgagggttagaac

SEQ ID NO: 51134 - DNA, 25 bp, Artificial
  Probe
ccagtacctctgagggttagaactg

SEQ ID NO: 51135 - DNA, 25 bp, Artificial
  Probe
acctctgagggttagaactgtgctt

SEQ ID NO: 51136 - DNA, 25 bp, Artificial
  Probe
tcatctccgtggactctgaaaatgc

SEQ ID NO: 51137 - DNA, 25 bp, Artificial
  Probe
cagatcccagtacctctgagggtta

SEQ ID NO: 51138 - DNA, 25 bp, Artificial
  Probe
ctccatatccatcaatataccaagc

SEQ ID NO: 51139 - DNA, 25 bp, Artificial
  Probe
tctccatatccatcaatataccaag

SEQ ID NO: 51140 - DNA, 25 bp, Artificial
  Probe
catctccatatccatcaatatacca

SEQ ID NO: 51141 - DNA, 25 bp, Artificial
  Probe
tccatatccatcaatataccaagct

SEQ ID NO: 51142 - DNA, 25 bp, Artificial
  Probe
tcatctccatatccatcaatatacc

SEQ ID NO: 51143 - DNA, 25 bp, Artificial
  Probe
ggtcatctccatatccatcaatata

SEQ ID NO: 51144 - DNA, 25 bp, Artificial
  Probe
tggtcatctccatatccatcaatat

SEQ ID NO: 51145 - DNA, 25 bp, Artificial
  Probe
agcaataaagtatgttggttggaaa

SEQ ID NO: 51146 - DNA, 25 bp, Artificial
  Probe
aagcaataaagtatgttggttggaa

SEQ ID NO: 51147 - DNA, 25 bp, Artificial
  Probe
aaagcaataaagtatgttggttgga

SEQ ID NO: 51148 - DNA, 25 bp, Artificial
  Probe
atctccatatccatcaatataccaa

SEQ ID NO: 51149 - DNA, 25 bp, Artificial
  Probe
gtcatctccatatccatcaatatac

SEQ ID NO: 51150 - DNA, 25 bp, Artificial
  Probe
catgctattccttgttctctggaca

SEQ ID NO: 51151 - DNA, 25 bp, Artificial
  Probe
ccttaggtccttggatggtcatctc

SEQ ID NO: 51152 - DNA, 25 bp, Artificial
  Probe
ccatgctattccttgttctctggac

SEQ ID NO: 51153 - DNA, 25 bp, Artificial
  Probe
tacctctgtattttatgcccttctc

SEQ ID NO: 51154 - DNA, 25 bp, Artificial
  Probe
ctacctctgtattttatgcccttct

SEQ ID NO: 51155 - DNA, 25 bp, Artificial
  Probe
tctacctctgtattttatgcccttc

SEQ ID NO: 51156 - DNA, 25 bp, Artificial
  Probe
atgctattccttgttctctggacaa

SEQ ID NO: 51157 - DNA, 25 bp, Artificial
  Probe
ttctacctctgtattttatgccctt

SEQ ID NO: 51158 - DNA, 25 bp, Artificial
  Probe
tttctacctctgtattttatgccct

SEQ ID NO: 51159 - DNA, 25 bp, Artificial
  Probe
ctctgtattttatgcccttctctgg

SEQ ID NO: 51160 - DNA, 25 bp, Artificial
  Probe
cctctgtattttatgcccttctctg

SEQ ID NO: 51161 - DNA, 25 bp, Artificial
  Probe
acctctgtattttatgcccttctct

SEQ ID NO: 51162 - DNA, 25 bp, Artificial
  Probe
ttttctacctctgtattttatgccc

SEQ ID NO: 51163 - DNA, 25 bp, Artificial
  Probe
gacccatgctattccttgttctctg

SEQ ID NO: 51164 - DNA, 25 bp, Artificial
  Probe
gcaaaagcaataaagtatgttggtt

SEQ ID NO: 51165 - DNA, 25 bp, Artificial
  Probe
atggtcatctccatatccatcaata

SEQ ID NO: 51166 - DNA, 25 bp, Artificial
  Probe
gcaataaagtatgttggttggaaaa

SEQ ID NO: 51167 - DNA, 25 bp, Artificial
  Probe
cttaggtccttggatggtcatctcc

SEQ ID NO: 51168 - DNA, 25 bp, Artificial
  Probe
aaaagcaataaagtatgttggttgg

SEQ ID NO: 51169 - DNA, 25 bp, Artificial
  Probe
agagagcagtctgacagataggagg

SEQ ID NO: 51170 - DNA, 25 bp, Artificial
  Probe
caaaagcaataaagtatgttggttg

SEQ ID NO: 51171 - DNA, 25 bp, Artificial
  Probe
atggatttggtgatcattggcatag

SEQ ID NO: 51172 - DNA, 25 bp, Artificial
  Probe
gatggatttggtgatcattggcata

SEQ ID NO: 51173 - DNA, 25 bp, Artificial
  Probe
cttcctctcccacttcctttgctag

SEQ ID NO: 51174 - DNA, 25 bp, Artificial
  Probe
gatttggtgatcattggcataggtc

SEQ ID NO: 51175 - DNA, 25 bp, Artificial
  Probe
gtctgacagataggagggacacttc

SEQ ID NO: 51176 - DNA, 25 bp, Artificial
  Probe
cttcaccttaggtccttggatggtc

SEQ ID NO: 51177 - DNA, 25 bp, Artificial
  Probe
caccttaggtccttggatggtcatc

SEQ ID NO: 51178 - DNA, 25 bp, Artificial
  Probe
accttaggtccttggatggtcatct

SEQ ID NO: 51179 - DNA, 25 bp, Artificial
  Probe
cagagagcagtctgacagataggag

SEQ ID NO: 51180 - DNA, 25 bp, Artificial
  Probe
agtctgacagataggagggacactt

SEQ ID NO: 51181 - DNA, 25 bp, Artificial
  Probe
gtccttggatggtcatctccatatc

SEQ ID NO: 51182 - DNA, 25 bp, Artificial
  Probe
cataggtcctgccccattcatagat

SEQ ID NO: 51183 - DNA, 25 bp, Artificial
  Probe
atgagatattagaagtggctgttca

SEQ ID NO: 51184 - DNA, 25 bp, Artificial
  Probe
atactgcctgttgcttatgtgtaga

SEQ ID NO: 51185 - DNA, 25 bp, Artificial
  Probe
gttatgagatattagaagtggctgt

SEQ ID NO: 51186 - DNA, 25 bp, Artificial
  Probe
tgttatgagatattagaagtggctg

SEQ ID NO: 51187 - DNA, 25 bp, Artificial
  Probe
tactgcctgttgcttatgtgtagaa

SEQ ID NO: 51188 - DNA, 25 bp, Artificial
  Probe
tatgagatattagaagtggctgttc

SEQ ID NO: 51189 - DNA, 25 bp, Artificial
  Probe
tgagatattagaagtggctgttcac

SEQ ID NO: 51190 - DNA, 25 bp, Artificial
  Probe
cagtgaaggagttacctggatatta

SEQ ID NO: 51191 - DNA, 25 bp, Artificial
  Probe
cttgaaggctgtgactgagatactt

SEQ ID NO: 51192 - DNA, 25 bp, Artificial
  Probe
aggagttacctggatattattccga

SEQ ID NO: 51193 - DNA, 25 bp, Artificial
  Probe
aaggagttacctggatattattccg

SEQ ID NO: 51194 - DNA, 25 bp, Artificial
  Probe
ggagttacctggatattattccgat

SEQ ID NO: 51195 - DNA, 25 bp, Artificial
  Probe
ttatgagatattagaagtggctgtt

SEQ ID NO: 51196 - DNA, 25 bp, Artificial
  Probe
tgaaggatctcttactattccacct

SEQ ID NO: 51197 - DNA, 25 bp, Artificial
  Probe
agtgaaggagttacctggatattat

SEQ ID NO: 51198 - DNA, 25 bp, Artificial
  Probe
atgaaggatctcttactattccacc

SEQ ID NO: 51199 - DNA, 25 bp, Artificial
  Probe
catactgcctgttgcttatgtgtag

SEQ ID NO: 51200 - DNA, 25 bp, Artificial
  Probe
cctaacactttattaccagaccctc

SEQ ID NO: 51201 - DNA, 25 bp, Artificial
  Probe
atcctaacactttattaccagaccc

SEQ ID NO: 51202 - DNA, 25 bp, Artificial
  Probe
gatctcttactattccaccttgcag

SEQ ID NO: 51203 - DNA, 25 bp, Artificial
  Probe
tcctaacactttattaccagaccct

SEQ ID NO: 51204 - DNA, 25 bp, Artificial
  Probe
gttacctggatattattccgatacc

SEQ ID NO: 51205 - DNA, 25 bp, Artificial
  Probe
gccaagtcatttatttcctttctgt

SEQ ID NO: 51206 - DNA, 25 bp, Artificial
  Probe
agccaagtcatttatttcctttctg

SEQ ID NO: 51207 - DNA, 25 bp, Artificial
  Probe
ttaaccttcaagcctgcattatctt

SEQ ID NO: 51208 - DNA, 25 bp, Artificial
  Probe
gcagtgaaggagttacctggatatt

SEQ ID NO: 51209 - DNA, 25 bp, Artificial
  Probe
aacactttattaccagaccctcttc

SEQ ID NO: 51210 - DNA, 25 bp, Artificial
  Probe
cctgttgcttatgtgtagaaagaat

SEQ ID NO: 51211 - DNA, 25 bp, Artificial
  Probe
gaaggagttacctggatattattcc

SEQ ID NO: 51212 - DNA, 25 bp, Artificial
  Probe
ctaacactttattaccagaccctct

SEQ ID NO: 51213 - DNA, 25 bp, Artificial
  Probe
taaccttcaagcctgcattatcttc

SEQ ID NO: 51214 - DNA, 25 bp, Artificial
  Probe
acactttattaccagaccctcttct

SEQ ID NO: 51215 - DNA, 25 bp, Artificial
  Probe
aggatctcttactattccaccttgc

SEQ ID NO: 51216 - DNA, 25 bp, Artificial
  Probe
gtgaaggagttacctggatattatt

SEQ ID NO: 51217 - DNA, 25 bp, Artificial
  Probe
taacactttattaccagaccctctt

SEQ ID NO: 51218 - DNA, 25 bp, Artificial
  Probe
tgttgcttatgtgtagaaagaatga

SEQ ID NO: 51219 - DNA, 25 bp, Artificial
  Probe
attactgggtctatgaaggatctct

SEQ ID NO: 51220 - DNA, 25 bp, Artificial
  Probe
gattactgggtctatgaaggatctc

SEQ ID NO: 51221 - DNA, 25 bp, Artificial
  Probe
aatcctaacactttattaccagacc

SEQ ID NO: 51222 - DNA, 25 bp, Artificial
  Probe
tgaaggagttacctggatattattc

SEQ ID NO: 51223 - DNA, 25 bp, Artificial
  Probe
atctcttactattccaccttgcagt

SEQ ID NO: 51224 - DNA, 25 bp, Artificial
  Probe
ctgttgcttatgtgtagaaagaatg

SEQ ID NO: 51225 - DNA, 25 bp, Artificial
  Probe
gcctgttgcttatgtgtagaaagaa

SEQ ID NO: 51226 - DNA, 25 bp, Artificial
  Probe
ttactgggtctatgaaggatctctt

SEQ ID NO: 51227 - DNA, 25 bp, Artificial
  Probe
ttcaagcctgcattatcttcagtta

SEQ ID NO: 51228 - DNA, 25 bp, Artificial
  Probe
atggtaaccgttgatgtcataacag

SEQ ID NO: 51229 - DNA, 25 bp, Artificial
  Probe
catggtaaccgttgatgtcataaca

SEQ ID NO: 51230 - DNA, 25 bp, Artificial
  Probe
tacctcaggattctttagtttgctt

SEQ ID NO: 51231 - DNA, 25 bp, Artificial
  Probe
ttacctcaggattctttagtttgct

SEQ ID NO: 51232 - DNA, 25 bp, Artificial
  Probe
tgcttacctcaggattctttagttt

SEQ ID NO: 51233 - DNA, 25 bp, Artificial
  Probe
tactggaaatgtattagactggcat

SEQ ID NO: 51234 - DNA, 25 bp, Artificial
  Probe
atgcttacctcaggattctttagtt

SEQ ID NO: 51235 - DNA, 25 bp, Artificial
  Probe
cttacctcaggattctttagtttgc

SEQ ID NO: 51236 - DNA, 25 bp, Artificial
  Probe
gcttacctcaggattctttagtttg

SEQ ID NO: 51237 - DNA, 25 bp, Artificial
  Probe
attgtataagtgcccaagtcattca

SEQ ID NO: 51238 - DNA, 25 bp, Artificial
  Probe
aattgtataagtgcccaagtcattc

SEQ ID NO: 51239 - DNA, 25 bp, Artificial
  Probe
ctcaggattctttagtttgcttgaa

SEQ ID NO: 51240 - DNA, 25 bp, Artificial
  Probe
acctcaggattctttagtttgcttg

SEQ ID NO: 51241 - DNA, 25 bp, Artificial
  Probe
gcatggtaaccgttgatgtcataac

SEQ ID NO: 51242 - DNA, 25 bp, Artificial
  Probe
tctcttaattgcttaatgcctttga

SEQ ID NO: 51243 - DNA, 25 bp, Artificial
  Probe
agaacattcttaatttggcagtgaa

SEQ ID NO: 51244 - DNA, 25 bp, Artificial
  Probe
tcatgcttacctcaggattctttag

SEQ ID NO: 51245 - DNA, 25 bp, Artificial
  Probe
ctcatgcttacctcaggattcttta

SEQ ID NO: 51246 - DNA, 25 bp, Artificial
  Probe
ttagtttgcttgaatgcccttcttt

SEQ ID NO: 51247 - DNA, 25 bp, Artificial
  Probe
tttagtttgcttgaatgcccttctt

SEQ ID NO: 51248 - DNA, 25 bp, Artificial
  Probe
ttctttagtttgcttgaatgccctt

SEQ ID NO: 51249 - DNA, 25 bp, Artificial
  Probe
catgcttacctcaggattctttagt

SEQ ID NO: 51250 - DNA, 25 bp, Artificial
  Probe
cctcaggattctttagtttgcttga

SEQ ID NO: 51251 - DNA, 25 bp, Artificial
  Probe
tattctcttaattgcttaatgcctt

SEQ ID NO: 51252 - DNA, 25 bp, Artificial
  Probe
aagccttgcctttgtaatttgactt

SEQ ID NO: 51253 - DNA, 25 bp, Artificial
  Probe
ctcttaattgcttaatgcctttgaa

SEQ ID NO: 51254 - DNA, 25 bp, Artificial
  Probe
ttctcttaattgcttaatgcctttg

SEQ ID NO: 51255 - DNA, 25 bp, Artificial
  Probe
tagaacattcttaatttggcagtga

SEQ ID NO: 51256 - DNA, 25 bp, Artificial
  Probe
tagtttgcttgaatgcccttctttc

SEQ ID NO: 51257 - DNA, 25 bp, Artificial
  Probe
ctttagtttgcttgaatgcccttct

SEQ ID NO: 51258 - DNA, 25 bp, Artificial
  Probe
tctttagtttgcttgaatgcccttc

SEQ ID NO: 51259 - DNA, 25 bp, Artificial
  Probe
atactggaaatgtattagactggca

SEQ ID NO: 51260 - DNA, 25 bp, Artificial
  Probe
atattctcttaattgcttaatgcct

SEQ ID NO: 51261 - DNA, 25 bp, Artificial
  Probe
ataaatcaagtcttggttgtggctt

SEQ ID NO: 51262 - DNA, 25 bp, Artificial
  Probe
tcttaattgcttaatgcctttgaaa

SEQ ID NO: 51263 - DNA, 25 bp, Artificial
  Probe
agactggcattctttatattctctt

SEQ ID NO: 51264 - DNA, 25 bp, Artificial
  Probe
tatagctcatgcttacctcaggatt

SEQ ID NO: 51265 - DNA, 25 bp, Artificial
  Probe
aggattctttagtttgcttgaatgc

SEQ ID NO: 51266 - DNA, 25 bp, Artificial
  Probe
gataaatcaagtcttggttgtggct

SEQ ID NO: 51267 - DNA, 25 bp, Artificial
  Probe
tcttaatttggcagtgaatacattt

SEQ ID NO: 51268 - DNA, 25 bp, Artificial
  Probe
gatgaagccctcgatattctgtaaa

SEQ ID NO: 51269 - DNA, 25 bp, Artificial
  Probe
atagaacattcttaatttggcagtg

SEQ ID NO: 51270 - DNA, 25 bp, Artificial
  Probe
catagaacattcttaatttggcagt

SEQ ID NO: 51271 - DNA, 25 bp, Artificial
  Probe
ttcttaatttggcagtgaatacatt

SEQ ID NO: 51272 - DNA, 25 bp, Artificial
  Probe
caggattctttagtttgcttgaatg

SEQ ID NO: 51273 - DNA, 25 bp, Artificial
  Probe
atattcacctcatctgccaataaga

SEQ ID NO: 51274 - DNA, 25 bp, Artificial
  Probe
gatattcacctcatctgccaataag

SEQ ID NO: 51275 - DNA, 25 bp, Artificial
  Probe
tgatattcacctcatctgccaataa

SEQ ID NO: 51276 - DNA, 25 bp, Artificial
  Probe
ccttgttcagttgtatgtgagtatt

SEQ ID NO: 51277 - DNA, 25 bp, Artificial
  Probe
attccaatatcagcatctccacctt

SEQ ID NO: 51278 - DNA, 25 bp, Artificial
  Probe
cacattccaatatcagcatctccac

SEQ ID NO: 51279 - DNA, 25 bp, Artificial
  Probe
taggcacattccaatatcagcatct

SEQ ID NO: 51280 - DNA, 25 bp, Artificial
  Probe
gccttgttcagttgtatgtgagtat

SEQ ID NO: 51281 - DNA, 25 bp, Artificial
  Probe
ctaggcacattccaatatcagcatc

SEQ ID NO: 51282 - DNA, 25 bp, Artificial
  Probe
tgttcagttgtatgtgagtattcaa

SEQ ID NO: 51283 - DNA, 25 bp, Artificial
  Probe
ttgttcagttgtatgtgagtattca

SEQ ID NO: 51284 - DNA, 25 bp, Artificial
  Probe
cattccaatatcagcatctccacct

SEQ ID NO: 51285 - DNA, 25 bp, Artificial
  Probe
cttgttcagttgtatgtgagtattc

SEQ ID NO: 51286 - DNA, 25 bp, Artificial
  Probe
tgccttgttcagttgtatgtgagta

SEQ ID NO: 51287 - DNA, 25 bp, Artificial
  Probe
acattccaatatcagcatctccacc

SEQ ID NO: 51288 - DNA, 25 bp, Artificial
  Probe
gtggactcgaatcagcttatagatc

SEQ ID NO: 51289 - DNA, 25 bp, Artificial
  Probe
tgtggactcgaatcagcttatagat

SEQ ID NO: 51290 - DNA, 25 bp, Artificial
  Probe
atagtttgccttgttcagttgtatg

SEQ ID NO: 51291 - DNA, 25 bp, Artificial
  Probe
gtgtaaatagtttgccttgttcagt

SEQ ID NO: 51292 - DNA, 25 bp, Artificial
  Probe
tgtgtaaatagtttgccttgttcag

SEQ ID NO: 51293 - DNA, 25 bp, Artificial
  Probe
cccttatgtttggctgaaatcttac

SEQ ID NO: 51294 - DNA, 25 bp, Artificial
  Probe
tattagtcacacagagccatttcaa

SEQ ID NO: 51295 - DNA, 25 bp, Artificial
  Probe
ttattagtcacacagagccatttca

SEQ ID NO: 51296 - DNA, 25 bp, Artificial
  Probe
ttgtgtaaatagtttgccttgttca

SEQ ID NO: 51297 - DNA, 25 bp, Artificial
  Probe
tttattagtcacacagagccatttc

SEQ ID NO: 51298 - DNA, 25 bp, Artificial
  Probe
aaatagtttgccttgttcagttgta

SEQ ID NO: 51299 - DNA, 25 bp, Artificial
  Probe
taaatagtttgccttgttcagttgt

SEQ ID NO: 51300 - DNA, 25 bp, Artificial
  Probe
tgtaaatagtttgccttgttcagtt

SEQ ID NO: 51301 - DNA, 25 bp, Artificial
  Probe
ccttatgtttggctgaaatcttact

SEQ ID NO: 51302 - DNA, 25 bp, Artificial
  Probe
tagtttgccttgttcagttgtatgt

SEQ ID NO: 51303 - DNA, 25 bp, Artificial
  Probe
aggcacattccaatatcagcatctc

SEQ ID NO: 51304 - DNA, 25 bp, Artificial
  Probe
aatagtttgccttgttcagttgtat

SEQ ID NO: 51305 - DNA, 25 bp, Artificial
  Probe
gtaaatagtttgccttgttcagttg

SEQ ID NO: 51306 - DNA, 25 bp, Artificial
  Probe
caaatccaatatcagaactgctcaa

SEQ ID NO: 51307 - DNA, 25 bp, Artificial
  Probe
tattcacctcatctgccaataagat

SEQ ID NO: 51308 - DNA, 25 bp, Artificial
  Probe
tttctgtttcactcattaacccact

SEQ ID NO: 51309 - DNA, 25 bp, Artificial
  Probe
attagtcacacagagccatttcaag

SEQ ID NO: 51310 - DNA, 25 bp, Artificial
  Probe
atttattagtcacacagagccattt

SEQ ID NO: 51311 - DNA, 25 bp, Artificial
  Probe
tttgtgtaaatagtttgccttgttc

SEQ ID NO: 51312 - DNA, 25 bp, Artificial
  Probe
aaatccaatatcagaactgctcaaa

SEQ ID NO: 51313 - DNA, 25 bp, Artificial
  Probe
ttgccttgttcagttgtatgtgagt

SEQ ID NO: 51314 - DNA, 25 bp, Artificial
  Probe
gcacattccaatatcagcatctcca

SEQ ID NO: 51315 - DNA, 25 bp, Artificial
  Probe
ctatttattagtcacacagagccat

SEQ ID NO: 51316 - DNA, 25 bp, Artificial
  Probe
actgatctcttacactgtgactgtg

SEQ ID NO: 51317 - DNA, 25 bp, Artificial
  Probe
cactgatctcttacactgtgactgt

SEQ ID NO: 51318 - DNA, 25 bp, Artificial
  Probe
gccaggttagaagtcattgtataat

SEQ ID NO: 51319 - DNA, 25 bp, Artificial
  Probe
atttcacctgtcaaaccaaactttc

SEQ ID NO: 51320 - DNA, 25 bp, Artificial
  Probe
aatttcacctgtcaaaccaaacttt

SEQ ID NO: 51321 - DNA, 25 bp, Artificial
  Probe
gaatttcacctgtcaaaccaaactt

SEQ ID NO: 51322 - DNA, 25 bp, Artificial
  Probe
caaggaaattgttctgtgattaagc

SEQ ID NO: 51323 - DNA, 25 bp, Artificial
  Probe
agcatttgaatgaatttacccgtaa

SEQ ID NO: 51324 - DNA, 25 bp, Artificial
  Probe
ttagcatttgaatgaatttacccgt

SEQ ID NO: 51325 - DNA, 25 bp, Artificial
  Probe
gacatctcaaagaacaaggaaattg

SEQ ID NO: 51326 - DNA, 25 bp, Artificial
  Probe
tgacatctcaaagaacaaggaaatt

SEQ ID NO: 51327 - DNA, 25 bp, Artificial
  Probe
cttagcatttgaatgaatttacccg

SEQ ID NO: 51328 - DNA, 25 bp, Artificial
  Probe
tttgccatctgtctcttatgattta

SEQ ID NO: 51329 - DNA, 25 bp, Artificial
  Probe
tagcatttgaatgaatttacccgta

SEQ ID NO: 51330 - DNA, 25 bp, Artificial
  Probe
caaaccaaactttccctctctgatg

SEQ ID NO: 51331 - DNA, 25 bp, Artificial
  Probe
gcatttgaatgaatttacccgtaat

SEQ ID NO: 51332 - DNA, 25 bp, Artificial
  Probe
ccaggttagaagtcattgtataatt

SEQ ID NO: 51333 - DNA, 25 bp, Artificial
  Probe
ttgccatctgtctcttatgatttat

SEQ ID NO: 51334 - DNA, 25 bp, Artificial
  Probe
aaaccaaactttccctctctgatgt

SEQ ID NO: 51335 - DNA, 25 bp, Artificial
  Probe
tttcacctgtcaaaccaaactttcc

SEQ ID NO: 51336 - DNA, 25 bp, Artificial
  Probe
ggccaggttagaagtcattgtataa

SEQ ID NO: 51337 - DNA, 25 bp, Artificial
  Probe
ggaatttcacctgtcaaaccaaact

SEQ ID NO: 51338 - DNA, 25 bp, Artificial
  Probe
taccataactaacgagtgtgcagag

SEQ ID NO: 51339 - DNA, 25 bp, Artificial
  Probe
tcaaaccaaactttccctctctgat

SEQ ID NO: 51340 - DNA, 25 bp, Artificial
  Probe
gtaccataactaacgagtgtgcaga

SEQ ID NO: 51341 - DNA, 25 bp, Artificial
  Probe
tcttagcatttgaatgaatttaccc

SEQ ID NO: 51342 - DNA, 25 bp, Artificial
  Probe
aaggaaattgttctgtgattaagct

SEQ ID NO: 51343 - DNA, 25 bp, Artificial
  Probe
ctgtcaaaccaaactttccctctct

SEQ ID NO: 51344 - DNA, 25 bp, Artificial
  Probe
tgccatctgtctcttatgatttata

SEQ ID NO: 51345 - DNA, 25 bp, Artificial
  Probe
aaccaaactttccctctctgatgtg

SEQ ID NO: 51346 - DNA, 25 bp, Artificial
  Probe
gaagtcattgtataatttgtaggct

SEQ ID NO: 51347 - DNA, 25 bp, Artificial
  Probe
agaagtcattgtataatttgtaggc

SEQ ID NO: 51348 - DNA, 25 bp, Artificial
  Probe
tgtcaaaccaaactttccctctctg

SEQ ID NO: 51349 - DNA, 25 bp, Artificial
  Probe
aggaaattgttctgtgattaagcta

SEQ ID NO: 51350 - DNA, 25 bp, Artificial
  Probe
gggaatttcacctgtcaaaccaaac

SEQ ID NO: 51351 - DNA, 25 bp, Artificial
  Probe
agagatgttaatgtcaatcgaaaga

SEQ ID NO: 51352 - DNA, 25 bp, Artificial
  Probe
gtcaaaccaaactttccctctctga

SEQ ID NO: 51353 - DNA, 25 bp, Artificial
  Probe
attgaatgcaagcgtggaaatttag

SEQ ID NO: 51354 - DNA, 25 bp, Artificial
  Probe
gattgaatgcaagcgtggaaattta

SEQ ID NO: 51355 - DNA, 25 bp, Artificial
  Probe
ccttctctttccttttctctccatt

SEQ ID NO: 51356 - DNA, 25 bp, Artificial
  Probe
tgttaatgtcaatcgaaagaaatgt

SEQ ID NO: 51357 - DNA, 25 bp, Artificial
  Probe
ctctttccttttctctccattttgc

SEQ ID NO: 51358 - DNA, 25 bp, Artificial
  Probe
agtcattgtataatttgtaggcttt

SEQ ID NO: 51359 - DNA, 25 bp, Artificial
  Probe
ctccattttgccatctgtctcttat

SEQ ID NO: 51360 - DNA, 25 bp, Artificial
  Probe
tctctttccttttctctccattttg

SEQ ID NO: 51361 - DNA, 25 bp, Artificial
  Probe
gagatgttaatgtcaatcgaaagaa

SEQ ID NO: 51362 - DNA, 25 bp, Artificial
  Probe
tgtaggcttttgtaaggattgaatg

SEQ ID NO: 51363 - DNA, 25 bp, Artificial
  Probe
attaagaaggaggagaatggatgga

SEQ ID NO: 51364 - DNA, 25 bp, Artificial
  Probe
tattaagaaggaggagaatggatgg

SEQ ID NO: 51365 - DNA, 25 bp, Artificial
  Probe
attagtccagaacagattagccgta

SEQ ID NO: 51366 - DNA, 25 bp, Artificial
  Probe
ttagtccagaacagattagccgtaa

SEQ ID NO: 51367 - DNA, 25 bp, Artificial
  Probe
tagtccagaacagattagccgtaag

SEQ ID NO: 51368 - DNA, 25 bp, Artificial
  Probe
ttaagaaggaggagaatggatggac

SEQ ID NO: 51369 - DNA, 25 bp, Artificial
  Probe
gattagtccagaacagattagccgt

SEQ ID NO: 51370 - DNA, 25 bp, Artificial
  Probe
ttattaagaaggaggagaatggatg

SEQ ID NO: 51371 - DNA, 25 bp, Artificial
  Probe
aaggattagtccagaacagattagc

SEQ ID NO: 51372 - DNA, 25 bp, Artificial
  Probe
acaaggattagtccagaacagatta

SEQ ID NO: 51373 - DNA, 25 bp, Artificial
  Probe
tacaaggattagtccagaacagatt

SEQ ID NO: 51374 - DNA, 25 bp, Artificial
  Probe
ttacaaggattagtccagaacagat

SEQ ID NO: 51375 - DNA, 25 bp, Artificial
  Probe
caaggattagtccagaacagattag

SEQ ID NO: 51376 - DNA, 25 bp, Artificial
  Probe
aggattagtccagaacagattagcc

SEQ ID NO: 51377 - DNA, 25 bp, Artificial
  Probe
gcaattcaatgaggctactttacaa

SEQ ID NO: 51378 - DNA, 25 bp, Artificial
  Probe
tcaatgaggctactttacaaggatt

SEQ ID NO: 51379 - DNA, 25 bp, Artificial
  Probe
ttcaatgaggctactttacaaggat

SEQ ID NO: 51380 - DNA, 25 bp, Artificial
  Probe
attcaatgaggctactttacaagga

SEQ ID NO: 51381 - DNA, 25 bp, Artificial
  Probe
aattcaatgaggctactttacaagg

SEQ ID NO: 51382 - DNA, 25 bp, Artificial
  Probe
tgaaccagagtgaaataaagcagtg

SEQ ID NO: 51383 - DNA, 25 bp, Artificial
  Probe
tgaggctactttacaaggattagtc

SEQ ID NO: 51384 - DNA, 25 bp, Artificial
  Probe
aggcaattcaatgaggctactttac

SEQ ID NO: 51385 - DNA, 25 bp, Artificial
  Probe
caggcaattcaatgaggctacttta

SEQ ID NO: 51386 - DNA, 25 bp, Artificial
  Probe
cttctgtgaactagggacttgttat

SEQ ID NO: 51387 - DNA, 25 bp, Artificial
  Probe
ttctgtgaactagggacttgttatt

SEQ ID NO: 51388 - DNA, 25 bp, Artificial
  Probe
atgaggctactttacaaggattagt

SEQ ID NO: 51389 - DNA, 25 bp, Artificial
  Probe
caatgaggctactttacaaggatta

SEQ ID NO: 51390 - DNA, 25 bp, Artificial
  Probe
agtgaaataaagcagtggtctcaaa

SEQ ID NO: 51391 - DNA, 25 bp, Artificial
  Probe
taagaaggaggagaatggatggacg

SEQ ID NO: 51392 - DNA, 25 bp, Artificial
  Probe
ggcaattcaatgaggctactttaca

SEQ ID NO: 51393 - DNA, 25 bp, Artificial
  Probe
tgaactagggacttgttattaaggt

SEQ ID NO: 51394 - DNA, 25 bp, Artificial
  Probe
acttctgtgaactagggacttgtta

SEQ ID NO: 51395 - DNA, 25 bp, Artificial
  Probe
caattcaatgaggctactttacaag

SEQ ID NO: 51396 - DNA, 25 bp, Artificial
  Probe
aatgaggctactttacaaggattag

SEQ ID NO: 51397 - DNA, 25 bp, Artificial
  Probe
gtgaactagggacttgttattaagg

SEQ ID NO: 51398 - DNA, 25 bp, Artificial
  Probe
tctgtgaactagggacttgttatta

SEQ ID NO: 51399 - DNA, 25 bp, Artificial
  Probe
gagtgaaataaagcagtggtctcaa

SEQ ID NO: 51400 - DNA, 25 bp, Artificial
  Probe
ggattagtccagaacagattagccg

SEQ ID NO: 51401 - DNA, 25 bp, Artificial
  Probe
cagagtgaaataaagcagtggtctc

SEQ ID NO: 51402 - DNA, 25 bp, Artificial
  Probe
aactagggacttgttattaaggtca

SEQ ID NO: 51403 - DNA, 25 bp, Artificial
  Probe
tgtgaactagggacttgttattaag

SEQ ID NO: 51404 - DNA, 25 bp, Artificial
  Probe
ctgtgaactagggacttgttattaa

SEQ ID NO: 51405 - DNA, 25 bp, Artificial
  Probe
gctactttacaaggattagtccaga

SEQ ID NO: 51406 - DNA, 25 bp, Artificial
  Probe
actttacaaggattagtccagaaca

SEQ ID NO: 51407 - DNA, 25 bp, Artificial
  Probe
gaggctactttacaaggattagtcc

SEQ ID NO: 51408 - DNA, 25 bp, Artificial
  Probe
ttgattctctgatggtaactgacag

SEQ ID NO: 51409 - DNA, 25 bp, Artificial
  Probe
aaagcaaagattcaaagtaagcatg

SEQ ID NO: 51410 - DNA, 25 bp, Artificial
  Probe
aagcaaagattcaaagtaagcatga

SEQ ID NO: 51411 - DNA, 25 bp, Artificial
  Probe
agcaaagattcaaagtaagcatgat

SEQ ID NO: 51412 - DNA, 25 bp, Artificial
  Probe
gcaaagattcaaagtaagcatgata

SEQ ID NO: 51413 - DNA, 25 bp, Artificial
  Probe
ttaaagcactaccagccacattcag

SEQ ID NO: 51414 - DNA, 25 bp, Artificial
  Probe
aatagttggtttaccagtgttcctt

SEQ ID NO: 51415 - DNA, 25 bp, Artificial
  Probe
taatagttggtttaccagtgttcct

SEQ ID NO: 51416 - DNA, 25 bp, Artificial
  Probe
tatcctaccagcacaatgaggctaa

SEQ ID NO: 51417 - DNA, 25 bp, Artificial
  Probe
atagttggtttaccagtgttccttc

SEQ ID NO: 51418 - DNA, 25 bp, Artificial
  Probe
caaagtaagcatgataatagttggt

SEQ ID NO: 51419 - DNA, 25 bp, Artificial
  Probe
gcatgataatagttggtttaccagt

SEQ ID NO: 51420 - DNA, 25 bp, Artificial
  Probe
agggaagaaaagcaaagattcaaag

SEQ ID NO: 51421 - DNA, 25 bp, Artificial
  Probe
attcaggaactctgttcacaggtat

SEQ ID NO: 51422 - DNA, 25 bp, Artificial
  Probe
gggaagaaaagcaaagattcaaagt

SEQ ID NO: 51423 - DNA, 25 bp, Artificial
  Probe
cagggaagaaaagcaaagattcaaa

SEQ ID NO: 51424 - DNA, 25 bp, Artificial
  Probe
agcatgataatagttggtttaccag

SEQ ID NO: 51425 - DNA, 25 bp, Artificial
  Probe
ataatagttggtttaccagtgttcc

SEQ ID NO: 51426 - DNA, 25 bp, Artificial
  Probe
gaaaagcaaagattcaaagtaagca

SEQ ID NO: 51427 - DNA, 25 bp, Artificial
  Probe
taagcatgataatagttggtttacc

SEQ ID NO: 51428 - DNA, 25 bp, Artificial
  Probe
tcaaagtaagcatgataatagttgg

SEQ ID NO: 51429 - DNA, 25 bp, Artificial
  Probe
aagcatgataatagttggtttacca

SEQ ID NO: 51430 - DNA, 25 bp, Artificial
  Probe
agaaaagcaaagattcaaagtaagc

SEQ ID NO: 51431 - DNA, 25 bp, Artificial
  Probe
aaaagcaaagattcaaagtaagcat

SEQ ID NO: 51432 - DNA, 25 bp, Artificial
  Probe
ttcaggaactctgttcacaggtatc

SEQ ID NO: 51433 - DNA, 25 bp, Artificial
  Probe
cagagtcagaagaaagaaaaggcag

SEQ ID NO: 51434 - DNA, 25 bp, Artificial
  Probe
aagtaagcatgataatagttggttt

SEQ ID NO: 51435 - DNA, 25 bp, Artificial
  Probe
aaagtaagcatgataatagttggtt

SEQ ID NO: 51436 - DNA, 25 bp, Artificial
  Probe
tttaaagcactaccagccacattca

SEQ ID NO: 51437 - DNA, 25 bp, Artificial
  Probe
gaactctgttcacaggtatcctacc

SEQ ID NO: 51438 - DNA, 25 bp, Artificial
  Probe
ggaactctgttcacaggtatcctac

SEQ ID NO: 51439 - DNA, 25 bp, Artificial
  Probe
tgataatagttggtttaccagtgtt

SEQ ID NO: 51440 - DNA, 25 bp, Artificial
  Probe
cattcaggaactctgttcacaggta

SEQ ID NO: 51441 - DNA, 25 bp, Artificial
  Probe
ggaagaaaagcaaagattcaaagta

SEQ ID NO: 51442 - DNA, 25 bp, Artificial
  Probe
gtatcctaccagcacaatgaggcta

SEQ ID NO: 51443 - DNA, 25 bp, Artificial
  Probe
atgataatagttggtttaccagtgt

SEQ ID NO: 51444 - DNA, 25 bp, Artificial
  Probe
ccagggaagaaaagcaaagattcaa

SEQ ID NO: 51445 - DNA, 25 bp, Artificial
  Probe
aactctgttcacaggtatcctacca

SEQ ID NO: 51446 - DNA, 25 bp, Artificial
  Probe
catgataatagttggtttaccagtg

SEQ ID NO: 51447 - DNA, 25 bp, Artificial
  Probe
tagttggtttaccagtgttccttcc

SEQ ID NO: 51448 - DNA, 25 bp, Artificial
  Probe
gataatagttggtttaccagtgttc

SEQ ID NO: 51449 - DNA, 25 bp, Artificial
  Probe
cactaccagccacattcaggaactc

SEQ ID NO: 51450 - DNA, 25 bp, Artificial
  Probe
acaatgaggctaactgtgactcgtg

SEQ ID NO: 51451 - DNA, 25 bp, Artificial
  Probe
actctgttcacaggtatcctaccag

SEQ ID NO: 51452 - DNA, 25 bp, Artificial
  Probe
aggaactctgttcacaggtatccta

SEQ ID NO: 51453 - DNA, 25 bp, Artificial
  Probe
acatctcttgtgttcagttattacc

SEQ ID NO: 51454 - DNA, 25 bp, Artificial
  Probe
gatgtttctgttctgctgctaataa

SEQ ID NO: 51455 - DNA, 25 bp, Artificial
  Probe
atctcttgtgttcagttattaccca

SEQ ID NO: 51456 - DNA, 25 bp, Artificial
  Probe
catctcttgtgttcagttattaccc

SEQ ID NO: 51457 - DNA, 25 bp, Artificial
  Probe
atgtttctgttctgctgctaataat

SEQ ID NO: 51458 - DNA, 25 bp, Artificial
  Probe
tctcttgtgttcagttattacccaa

SEQ ID NO: 51459 - DNA, 25 bp, Artificial
  Probe
cgatgtttctgttctgctgctaata

SEQ ID NO: 51460 - DNA, 25 bp, Artificial
  Probe
tgtttctgttctgctgctaataata

SEQ ID NO: 51461 - DNA, 25 bp, Artificial
  Probe
ctcttgtgttcagttattacccaaa

SEQ ID NO: 51462 - DNA, 25 bp, Artificial
  Probe
cgattctgtttactgtgtgttacat

SEQ ID NO: 51463 - DNA, 25 bp, Artificial
  Probe
atctcctgacagcattatgatgttt

SEQ ID NO: 51464 - DNA, 25 bp, Artificial
  Probe
caataatgtcaccaggagtcagcag

SEQ ID NO: 51465 - DNA, 25 bp, Artificial
  Probe
cagcaataatgtcaccaggagtcag

SEQ ID NO: 51466 - DNA, 25 bp, Artificial
  Probe
tctcctgacagcattatgatgtttc

SEQ ID NO: 51467 - DNA, 25 bp, Artificial
  Probe
gtttctgttctgctgctaataataa

SEQ ID NO: 51468 - DNA, 25 bp, Artificial
  Probe
ctgctcttctaagaaactgagacag

SEQ ID NO: 51469 - DNA, 25 bp, Artificial
  Probe
atgtttcgattctgtttactgtgtg

SEQ ID NO: 51470 - DNA, 25 bp, Artificial
  Probe
gatgtttcgattctgtttactgtgt

SEQ ID NO: 51471 - DNA, 25 bp, Artificial
  Probe
tgatgtttcgattctgtttactgtg

SEQ ID NO: 51472 - DNA, 25 bp, Artificial
  Probe
gtttcgattctgtttactgtgtgtt

SEQ ID NO: 51473 - DNA, 25 bp, Artificial
  Probe
ttcgattctgtttactgtgtgttac

SEQ ID NO: 51474 - DNA, 25 bp, Artificial
  Probe
catctcctgacagcattatgatgtt

SEQ ID NO: 51475 - DNA, 25 bp, Artificial
  Probe
cctcatctcctgacagcattatgat

SEQ ID NO: 51476 - DNA, 25 bp, Artificial
  Probe
atgatgtttcgattctgtttactgt

SEQ ID NO: 51477 - DNA, 25 bp, Artificial
  Probe
agcattatgatgtttcgattctgtt

SEQ ID NO: 51478 - DNA, 25 bp, Artificial
  Probe
ctcatctcctgacagcattatgatg

SEQ ID NO: 51479 - DNA, 25 bp, Artificial
  Probe
tttcgattctgtttactgtgtgtta

SEQ ID NO: 51480 - DNA, 25 bp, Artificial
  Probe
tgtttcgattctgtttactgtgtgt

SEQ ID NO: 51481 - DNA, 25 bp, Artificial
  Probe
ctcctgacagcattatgatgtttcg

SEQ ID NO: 51482 - DNA, 25 bp, Artificial
  Probe
ccttcaaaggcaaataaatgaccta

SEQ ID NO: 51483 - DNA, 25 bp, Artificial
  Probe
aaccttcaaaggcaaataaatgacc

SEQ ID NO: 51484 - DNA, 25 bp, Artificial
  Probe
gattctgtttactgtgtgttacatg

SEQ ID NO: 51485 - DNA, 25 bp, Artificial
  Probe
gcattatgatgtttcgattctgttt

SEQ ID NO: 51486 - DNA, 25 bp, Artificial
  Probe
tcatctcctgacagcattatgatgt

SEQ ID NO: 51487 - DNA, 25 bp, Artificial
  Probe
tttctgttctgctgctaataataaa

SEQ ID NO: 51488 - DNA, 25 bp, Artificial
  Probe
gacagcattatgatgtttcgattct

SEQ ID NO: 51489 - DNA, 25 bp, Artificial
  Probe
tgacagcattatgatgtttcgattc

SEQ ID NO: 51490 - DNA, 25 bp, Artificial
  Probe
ctgacagcattatgatgtttcgatt

SEQ ID NO: 51491 - DNA, 25 bp, Artificial
  Probe
cttcaaaggcaaataaatgacctaa

SEQ ID NO: 51492 - DNA, 25 bp, Artificial
  Probe
cttagtaagtaaccttcaaaggcaa

SEQ ID NO: 51493 - DNA, 25 bp, Artificial
  Probe
tcgattctgtttactgtgtgttaca

SEQ ID NO: 51494 - DNA, 25 bp, Artificial
  Probe
accttcaaaggcaaataaatgacct

SEQ ID NO: 51495 - DNA, 25 bp, Artificial
  Probe
cagcattatgatgtttcgattctgt

SEQ ID NO: 51496 - DNA, 25 bp, Artificial
  Probe
acagcattatgatgtttcgattctg

SEQ ID NO: 51497 - DNA, 25 bp, Artificial
  Probe
cagactgttctagagttccgttctt

SEQ ID NO: 51498 - DNA, 25 bp, Artificial
  Probe
tcattaccaccgtgtctttcctaac

SEQ ID NO: 51499 - DNA, 25 bp, Artificial
  Probe
gtcattaccaccgtgtctttcctaa

SEQ ID NO: 51500 - DNA, 25 bp, Artificial
  Probe
cattaccaccgtgtctttcctaacc

SEQ ID NO: 51501 - DNA, 25 bp, Artificial
  Probe
tgtcattaccaccgtgtctttccta

SEQ ID NO: 51502 - DNA, 25 bp, Artificial
  Probe
cattgtgtctgtcattaccaccgtg

SEQ ID NO: 51503 - DNA, 25 bp, Artificial
  Probe
gtctgtcattaccaccgtgtctttc

SEQ ID NO: 51504 - DNA, 25 bp, Artificial
  Probe
gggattatttcctgggtttctgtcc

SEQ ID NO: 51505 - DNA, 25 bp, Artificial
  Probe
attgtgtctgtcattaccaccgtgt

SEQ ID NO: 51506 - DNA, 25 bp, Artificial
  Probe
ctccaaggcttaccaggtgtagttg

SEQ ID NO: 51507 - DNA, 25 bp, Artificial
  Probe
attatttcctgggtttctgtccctc

SEQ ID NO: 51508 - DNA, 25 bp, Artificial
  Probe
gattatttcctgggtttctgtccct

SEQ ID NO: 51509 - DNA, 25 bp, Artificial
  Probe
tgtctgtcattaccaccgtgtcttt

SEQ ID NO: 51510 - DNA, 25 bp, Artificial
  Probe
attaccaccgtgtctttcctaaccc

SEQ ID NO: 51511 - DNA, 25 bp, Artificial
  Probe
gtgtctgtcattaccaccgtgtctt

SEQ ID NO: 51512 - DNA, 25 bp, Artificial
  Probe
ctgtcattaccaccgtgtctttcct

SEQ ID NO: 51513 - DNA, 25 bp, Artificial
  Probe
tctgtcattaccaccgtgtctttcc

SEQ ID NO: 51514 - DNA, 25 bp, Artificial
  Probe
ttgtgtctgtcattaccaccgtgtc

SEQ ID NO: 51515 - DNA, 25 bp, Artificial
  Probe
ccattgtgtctgtcattaccaccgt

SEQ ID NO: 51516 - DNA, 25 bp, Artificial
  Probe
ggattatttcctgggtttctgtccc

SEQ ID NO: 51517 - DNA, 25 bp, Artificial
  Probe
ggggattatttcctgggtttctgtc

SEQ ID NO: 51518 - DNA, 25 bp, Artificial
  Probe
ttatttcctgggtttctgtccctcc

SEQ ID NO: 51519 - DNA, 25 bp, Artificial
  Probe
tatttcctgggtttctgtccctcca

SEQ ID NO: 51520 - DNA, 25 bp, Artificial
  Probe
atgtgtgtatatagatgccgtatgt

SEQ ID NO: 51521 - DNA, 25 bp, Artificial
  Probe
tgtgtgtatatagatgccgtatgta

SEQ ID NO: 51522 - DNA, 25 bp, Artificial
  Probe
aagttggctcactgtataggaagag

SEQ ID NO: 51523 - DNA, 25 bp, Artificial
  Probe
gtgtgtatatagatgccgtatgtat

SEQ ID NO: 51524 - DNA, 25 bp, Artificial
  Probe
tatgtgtgtatatagatgccgtatg

SEQ ID NO: 51525 - DNA, 25 bp, Artificial
  Probe
aattatgtgtgtatatagatgccgt

SEQ ID NO: 51526 - DNA, 25 bp, Artificial
  Probe
gttggctcactgtataggaagagag

SEQ ID NO: 51527 - DNA, 25 bp, Artificial
  Probe
tgtgtatatagatgccgtatgtatc

SEQ ID NO: 51528 - DNA, 25 bp, Artificial
  Probe
tgtaaagtaattgaggtggcatttg

SEQ ID NO: 51529 - DNA, 25 bp, Artificial
  Probe
cattgtaaagtaattgaggtggcat

SEQ ID NO: 51530 - DNA, 25 bp, Artificial
  Probe
gtaaagtaattgaggtggcatttga

SEQ ID NO: 51531 - DNA, 25 bp, Artificial
  Probe
ttggctcactgtataggaagagagt

SEQ ID NO: 51532 - DNA, 25 bp, Artificial
  Probe
agttggctcactgtataggaagaga

SEQ ID NO: 51533 - DNA, 25 bp, Artificial
  Probe
taaagtaattgaggtggcatttgag

SEQ ID NO: 51534 - DNA, 25 bp, Artificial
  Probe
ttgtaaagtaattgaggtggcattt

SEQ ID NO: 51535 - DNA, 25 bp, Artificial
  Probe
aagtaattgaggtggcatttgagat

SEQ ID NO: 51536 - DNA, 25 bp, Artificial
  Probe
cgcagagattctccacttataataa

SEQ ID NO: 51537 - DNA, 25 bp, Artificial
  Probe
attgtaaagtaattgaggtggcatt

SEQ ID NO: 51538 - DNA, 25 bp, Artificial
  Probe
gtttgactcaggtttgctaacataa

SEQ ID NO: 51539 - DNA, 25 bp, Artificial
  Probe
aaagtaattgaggtggcatttgaga

SEQ ID NO: 51540 - DNA, 25 bp, Artificial
  Probe
ttatgtgtgtatatagatgccgtat

SEQ ID NO: 51541 - DNA, 25 bp, Artificial
  Probe
attatgtgtgtatatagatgccgta

SEQ ID NO: 51542 - DNA, 25 bp, Artificial
  Probe
tttgactcaggtttgctaacataag

SEQ ID NO: 51543 - DNA, 25 bp, Artificial
  Probe
gactcaggtttgctaacataagttc

SEQ ID NO: 51544 - DNA, 25 bp, Artificial
  Probe
tgactcaggtttgctaacataagtt

SEQ ID NO: 51545 - DNA, 25 bp, Artificial
  Probe
ttgactcaggtttgctaacataagt

SEQ ID NO: 51546 - DNA, 25 bp, Artificial
  Probe
agtttgactcaggtttgctaacata

SEQ ID NO: 51547 - DNA, 25 bp, Artificial
  Probe
tttacccttctcagatgacattgga

SEQ ID NO: 51548 - DNA, 25 bp, Artificial
  Probe
atcattgtaaagtaattgaggtggc

SEQ ID NO: 51549 - DNA, 25 bp, Artificial
  Probe
tcattgtaaagtaattgaggtggca

SEQ ID NO: 51550 - DNA, 25 bp, Artificial
  Probe
agtaattgaggtggcatttgagatg

SEQ ID NO: 51551 - DNA, 25 bp, Artificial
  Probe
ttacccttctcagatgacattggaa

SEQ ID NO: 51552 - DNA, 25 bp, Artificial
  Probe
actcaggtttgctaacataagttcc

SEQ ID NO: 51553 - DNA, 25 bp, Artificial
  Probe
ggtttgctaacataagttcccagag

SEQ ID NO: 51554 - DNA, 25 bp, Artificial
  Probe
ctcaggtttgctaacataagttccc

SEQ ID NO: 51555 - DNA, 25 bp, Artificial
  Probe
taattgaggtggcatttgagatgtg

SEQ ID NO: 51556 - DNA, 25 bp, Artificial
  Probe
gtaattgaggtggcatttgagatgt

SEQ ID NO: 51557 - DNA, 25 bp, Artificial
  Probe
aaagttggctcactgtataggaaga

SEQ ID NO: 51558 - DNA, 25 bp, Artificial
  Probe
aggtttgctaacataagttcccaga

SEQ ID NO: 51559 - DNA, 25 bp, Artificial
  Probe
caggtttgctaacataagttcccag

SEQ ID NO: 51560 - DNA, 25 bp, Artificial
  Probe
cttctcagatgacattggaacggag

SEQ ID NO: 51561 - DNA, 25 bp, Artificial
  Probe
tacccttctcagatgacattggaac

SEQ ID NO: 51562 - DNA, 25 bp, Artificial
  Probe
tcaggtttgctaacataagttccca

SEQ ID NO: 51563 - DNA, 25 bp, Artificial
  Probe
aaatgatggtaaagctgactactgt

SEQ ID NO: 51564 - DNA, 25 bp, Artificial
  Probe
tgatggtaaagctgactactgtaaa

SEQ ID NO: 51565 - DNA, 25 bp, Artificial
  Probe
tacaatcaaaccaaatgggaggaag

SEQ ID NO: 51566 - DNA, 25 bp, Artificial
  Probe
gtacaatcaaaccaaatgggaggaa

SEQ ID NO: 51567 - DNA, 25 bp, Artificial
  Probe
ataggactaaagcaaagccatgaag

SEQ ID NO: 51568 - DNA, 25 bp, Artificial
  Probe
cataggactaaagcaaagccatgaa

SEQ ID NO: 51569 - DNA, 25 bp, Artificial
  Probe
gaccataggactaaagcaaagccat

SEQ ID NO: 51570 - DNA, 25 bp, Artificial
  Probe
taggactaaagcaaagccatgaagt

SEQ ID NO: 51571 - DNA, 25 bp, Artificial
  Probe
ccataggactaaagcaaagccatga

SEQ ID NO: 51572 - DNA, 25 bp, Artificial
  Probe
accataggactaaagcaaagccatg

SEQ ID NO: 51573 - DNA, 25 bp, Artificial
  Probe
tggacagggtttcatcttacttcct

SEQ ID NO: 51574 - DNA, 25 bp, Artificial
  Probe
acaatcaaaccaaatgggaggaagc

SEQ ID NO: 51575 - DNA, 25 bp, Artificial
  Probe
aggactaaagcaaagccatgaagtg

SEQ ID NO: 51576 - DNA, 25 bp, Artificial
  Probe
agtgtacaatcaaaccaaatgggag

SEQ ID NO: 51577 - DNA, 25 bp, Artificial
  Probe
gagtgtacaatcaaaccaaatggga

SEQ ID NO: 51578 - DNA, 25 bp, Artificial
  Probe
aggaccataggactaaagcaaagcc

SEQ ID NO: 51579 - DNA, 25 bp, Artificial
  Probe
ggaccataggactaaagcaaagcca

SEQ ID NO: 51580 - DNA, 25 bp, Artificial
  Probe
agggtttcatcttacttcctgtaca

SEQ ID NO: 51581 - DNA, 25 bp, Artificial
  Probe
tgtacaatcaaaccaaatgggagga

SEQ ID NO: 51582 - DNA, 25 bp, Artificial
  Probe
gtgtacaatcaaaccaaatgggagg

SEQ ID NO: 51583 - DNA, 25 bp, Artificial
  Probe
caatcaaaccaaatgggaggaagcg

SEQ ID NO: 51584 - DNA, 25 bp, Artificial
  Probe
gaaaagggagatgagagggtgagag

SEQ ID NO: 51585 - DNA, 25 bp, Artificial
  Probe
cagggtttcatcttacttcctgtac

SEQ ID NO: 51586 - DNA, 25 bp, Artificial
  Probe
aaaagggagatgagagggtgagagg

SEQ ID NO: 51587 - DNA, 25 bp, Artificial
  Probe
ggaaaagggagatgagagggtgaga

SEQ ID NO: 51588 - DNA, 25 bp, Artificial
  Probe
cacacagaaaagggcctctctaaag

SEQ ID NO: 51589 - DNA, 25 bp, Artificial
  Probe
ctaaagcaaagccatgaagtgcctg

SEQ ID NO: 51590 - DNA, 25 bp, Artificial
  Probe
gactaaagcaaagccatgaagtgcc

SEQ ID NO: 51591 - DNA, 25 bp, Artificial
  Probe
ggactaaagcaaagccatgaagtgc

SEQ ID NO: 51592 - DNA, 25 bp, Artificial
  Probe
ggacagggtttcatcttacttcctg

SEQ ID NO: 51593 - DNA, 25 bp, Artificial
  Probe
cagaaaagggcctctctaaagcaac

SEQ ID NO: 51594 - DNA, 25 bp, Artificial
  Probe
gaactgttcgaggaaccacacagaa

SEQ ID NO: 51595 - DNA, 25 bp, Artificial
  Probe
acagaaaagggcctctctaaagcaa

SEQ ID NO: 51596 - DNA, 25 bp, Artificial
  Probe
aactgttcgaggaaccacacagaaa

SEQ ID NO: 51597 - DNA, 25 bp, Artificial
  Probe
ccacacagaaaagggcctctctaaa

SEQ ID NO: 51598 - DNA, 25 bp, Artificial
  Probe
cacagaaaagggcctctctaaagca

SEQ ID NO: 51599 - DNA, 25 bp, Artificial
  Probe
acacagaaaagggcctctctaaagc

SEQ ID NO: 51600 - DNA, 25 bp, Artificial
  Probe
agaaaagggcctctctaaagcaacg

SEQ ID NO: 51601 - DNA, 25 bp, Artificial
  Probe
ctgttcgaggaaccacacagaaaag

SEQ ID NO: 51602 - DNA, 25 bp, Artificial
  Probe
gaatttaagctccagcagaccagct

SEQ ID NO: 51603 - DNA, 25 bp, Artificial
  Probe
actgttcgaggaaccacacagaaaa

SEQ ID NO: 51604 - DNA, 25 bp, Artificial
  Probe
agtgttaagatcctagagtgaatca

SEQ ID NO: 51605 - DNA, 25 bp, Artificial
  Probe
tgtactgttgttaagagcatattgt

SEQ ID NO: 51606 - DNA, 25 bp, Artificial
  Probe
gttaagatcctagagtgaatcatgg

SEQ ID NO: 51607 - DNA, 25 bp, Artificial
  Probe
gtattgaactactgctcctctgacc

SEQ ID NO: 51608 - DNA, 25 bp, Artificial
  Probe
gtgttaagatcctagagtgaatcat

SEQ ID NO: 51609 - DNA, 25 bp, Artificial
  Probe
ccttagtgttaagatcctagagtga

SEQ ID NO: 51610 - DNA, 25 bp, Artificial
  Probe
tccttagtgttaagatcctagagtg

SEQ ID NO: 51611 - DNA, 25 bp, Artificial
  Probe
tattgaactactgctcctctgacca

SEQ ID NO: 51612 - DNA, 25 bp, Artificial
  Probe
tgttaagatcctagagtgaatcatg

SEQ ID NO: 51613 - DNA, 25 bp, Artificial
  Probe
ttgtactgttgttaagagcatattg

SEQ ID NO: 51614 - DNA, 25 bp, Artificial
  Probe
agaaataaattcctccaagcaaagc

SEQ ID NO: 51615 - DNA, 25 bp, Artificial
  Probe
ttccttagtgttaagatcctagagt

SEQ ID NO: 51616 - DNA, 25 bp, Artificial
  Probe
tttggtttgtactgttgttaagagc

SEQ ID NO: 51617 - DNA, 25 bp, Artificial
  Probe
atttcctttggtttgtactgttgtt

SEQ ID NO: 51618 - DNA, 25 bp, Artificial
  Probe
aaataaattcctccaagcaaagcct

SEQ ID NO: 51619 - DNA, 25 bp, Artificial
  Probe
gaaataaattcctccaagcaaagcc

SEQ ID NO: 51620 - DNA, 25 bp, Artificial
  Probe
actgttgttaagagcatattgtatt

SEQ ID NO: 51621 - DNA, 25 bp, Artificial
  Probe
ggtttgtactgttgttaagagcata

SEQ ID NO: 51622 - DNA, 25 bp, Artificial
  Probe
tggtttgtactgttgttaagagcat

SEQ ID NO: 51623 - DNA, 25 bp, Artificial
  Probe
ttcctttggtttgtactgttgttaa

SEQ ID NO: 51624 - DNA, 25 bp, Artificial
  Probe
tttcctttggtttgtactgttgtta

SEQ ID NO: 51625 - DNA, 25 bp, Artificial
  Probe
cctttggtttgtactgttgttaaga

SEQ ID NO: 51626 - DNA, 25 bp, Artificial
  Probe
tcctttggtttgtactgttgttaag

SEQ ID NO: 51627 - DNA, 25 bp, Artificial
  Probe
tagtgttaagatcctagagtgaatc

SEQ ID NO: 51628 - DNA, 25 bp, Artificial
  Probe
ttggtttgtactgttgttaagagca

SEQ ID NO: 51629 - DNA, 25 bp, Artificial
  Probe
tatttcctttggtttgtactgttgt

SEQ ID NO: 51630 - DNA, 25 bp, Artificial
  Probe
atcctagagtgaatcatgggtagtt

SEQ ID NO: 51631 - DNA, 25 bp, Artificial
  Probe
aagatcctagagtgaatcatgggta

SEQ ID NO: 51632 - DNA, 25 bp, Artificial
  Probe
taagatcctagagtgaatcatgggt

SEQ ID NO: 51633 - DNA, 25 bp, Artificial
  Probe
agatcctagagtgaatcatgggtag

SEQ ID NO: 51634 - DNA, 25 bp, Artificial
  Probe
aataaattcctccaagcaaagcctc

SEQ ID NO: 51635 - DNA, 25 bp, Artificial
  Probe
ctccatctgccatttcataccattg

SEQ ID NO: 51636 - DNA, 25 bp, Artificial
  Probe
ttaagatcctagagtgaatcatggg

SEQ ID NO: 51637 - DNA, 25 bp, Artificial
  Probe
gtactgttgttaagagcatattgta

SEQ ID NO: 51638 - DNA, 25 bp, Artificial
  Probe
gatcctagagtgaatcatgggtagt

SEQ ID NO: 51639 - DNA, 25 bp, Artificial
  Probe
tcctagagtgaatcatgggtagttg

SEQ ID NO: 51640 - DNA, 25 bp, Artificial
  Probe
ctttggtttgtactgttgttaagag

SEQ ID NO: 51641 - DNA, 25 bp, Artificial
  Probe
cttagtgttaagatcctagagtgaa

SEQ ID NO: 51642 - DNA, 25 bp, Artificial
  Probe
ttagtgttaagatcctagagtgaat

SEQ ID NO: 51643 - DNA, 25 bp, Artificial
  Probe
ttatttcctttggtttgtactgttg

SEQ ID NO: 51644 - DNA, 25 bp, Artificial
  Probe
attccttagtgttaagatcctagag

SEQ ID NO: 51645 - DNA, 25 bp, Artificial
  Probe
tagaaataaattcctccaagcaaag

SEQ ID NO: 51646 - DNA, 25 bp, Artificial
  Probe
ccgaattccttagtgttaagatcct

SEQ ID NO: 51647 - DNA, 25 bp, Artificial
  Probe
tactgttgttaagagcatattgtat

SEQ ID NO: 51648 - DNA, 25 bp, Artificial
  Probe
cctccatctgccatttcataccatt

SEQ ID NO: 51649 - DNA, 25 bp, Artificial
  Probe
ttcaagtgcctgtaactgatctgta

SEQ ID NO: 51650 - DNA, 25 bp, Artificial
  Probe
ttattccagccaaagacatttcaag

SEQ ID NO: 51651 - DNA, 25 bp, Artificial
  Probe
gttattccagccaaagacatttcaa

SEQ ID NO: 51652 - DNA, 25 bp, Artificial
  Probe
tattccagccaaagacatttcaagt

SEQ ID NO: 51653 - DNA, 25 bp, Artificial
  Probe
tcaagtgcctgtaactgatctgtac

SEQ ID NO: 51654 - DNA, 25 bp, Artificial
  Probe
ggttattccagccaaagacatttca

SEQ ID NO: 51655 - DNA, 25 bp, Artificial
  Probe
aaagacatttcaagtgcctgtaact

SEQ ID NO: 51656 - DNA, 25 bp, Artificial
  Probe
caaagacatttcaagtgcctgtaac

SEQ ID NO: 51657 - DNA, 25 bp, Artificial
  Probe
attccagccaaagacatttcaagtg

SEQ ID NO: 51658 - DNA, 25 bp, Artificial
  Probe
gggttattccagccaaagacatttc

SEQ ID NO: 51659 - DNA, 25 bp, Artificial
  Probe
gacatttcaagtgcctgtaactgat

SEQ ID NO: 51660 - DNA, 25 bp, Artificial
  Probe
atttcaagtgcctgtaactgatctg

SEQ ID NO: 51661 - DNA, 25 bp, Artificial
  Probe
catttcaagtgcctgtaactgatct

SEQ ID NO: 51662 - DNA, 25 bp, Artificial
  Probe
aagacatttcaagtgcctgtaactg

SEQ ID NO: 51663 - DNA, 25 bp, Artificial
  Probe
ccaaagacatttcaagtgcctgtaa

SEQ ID NO: 51664 - DNA, 25 bp, Artificial
  Probe
acatttcaagtgcctgtaactgatc

SEQ ID NO: 51665 - DNA, 25 bp, Artificial
  Probe
agacatttcaagtgcctgtaactga

SEQ ID NO: 51666 - DNA, 25 bp, Artificial
  Probe
tttcaagtgcctgtaactgatctgt

SEQ ID NO: 51667 - DNA, 25 bp, Artificial
  Probe
tacttccttttcgtgatggtgataa

SEQ ID NO: 51668 - DNA, 25 bp, Artificial
  Probe
ttacttccttttcgtgatggtgata

SEQ ID NO: 51669 - DNA, 25 bp, Artificial
  Probe
aagtctaccacgctttaaatcccaa

SEQ ID NO: 51670 - DNA, 25 bp, Artificial
  Probe
acttccttttcgtgatggtgataac

SEQ ID NO: 51671 - DNA, 25 bp, Artificial
  Probe
gttacttccttttcgtgatggtgat

SEQ ID NO: 51672 - DNA, 25 bp, Artificial
  Probe
atctcatgcacaccagttacttcct

SEQ ID NO: 51673 - DNA, 25 bp, Artificial
  Probe
catctcatgcacaccagttacttcc

SEQ ID NO: 51674 - DNA, 25 bp, Artificial
  Probe
tctcatgcacaccagttacttcctt

SEQ ID NO: 51675 - DNA, 25 bp, Artificial
  Probe
tttaaatcccaagctcaccgtcatt

SEQ ID NO: 51676 - DNA, 25 bp, Artificial
  Probe
agtctaccacgctttaaatcccaag

SEQ ID NO: 51677 - DNA, 25 bp, Artificial
  Probe
tgggttattccagccaaagacattt

SEQ ID NO: 51678 - DNA, 25 bp, Artificial
  Probe
attgggaaagtctaccacgctttaa

SEQ ID NO: 51679 - DNA, 25 bp, Artificial
  Probe
gtgcctgtaactgatctgtacatat

SEQ ID NO: 51680 - DNA, 25 bp, Artificial
  Probe
tgcctgtaactgatctgtacatatt

SEQ ID NO: 51681 - DNA, 25 bp, Artificial
  Probe
agtgcctgtaactgatctgtacata

SEQ ID NO: 51682 - DNA, 25 bp, Artificial
  Probe
agttacttccttttcgtgatggtga

SEQ ID NO: 51683 - DNA, 25 bp, Artificial
  Probe
cagttacttccttttcgtgatggtg

SEQ ID NO: 51684 - DNA, 25 bp, Artificial
  Probe
gaaagtctaccacgctttaaatccc

SEQ ID NO: 51685 - DNA, 25 bp, Artificial
  Probe
ggaaagtctaccacgctttaaatcc

SEQ ID NO: 51686 - DNA, 25 bp, Artificial
  Probe
gggaaagtctaccacgctttaaatc

SEQ ID NO: 51687 - DNA, 25 bp, Artificial
  Probe
ctttaaatcccaagctcaccgtcat

SEQ ID NO: 51688 - DNA, 25 bp, Artificial
  Probe
aagtgcctgtaactgatctgtacat

SEQ ID NO: 51689 - DNA, 25 bp, Artificial
  Probe
ctcatgcacaccagttacttccttt

SEQ ID NO: 51690 - DNA, 25 bp, Artificial
  Probe
cattgggaaagtctaccacgcttta

SEQ ID NO: 51691 - DNA, 25 bp, Artificial
  Probe
gccaaagacatttcaagtgcctgta

SEQ ID NO: 51692 - DNA, 25 bp, Artificial
  Probe
aaagtctaccacgctttaaatccca

SEQ ID NO: 51693 - DNA, 25 bp, Artificial
  Probe
tgggaaagtctaccacgctttaaat

SEQ ID NO: 51694 - DNA, 25 bp, Artificial
  Probe
gttcatctgtaatactgcctctgtg

SEQ ID NO: 51695 - DNA, 25 bp, Artificial
  Probe
ttcatctgtaatactgcctctgtgt

SEQ ID NO: 51696 - DNA, 25 bp, Artificial
  Probe
atctgtaatactgcctctgtgtgtt

SEQ ID NO: 51697 - DNA, 25 bp, Artificial
  Probe
tcatctgtaatactgcctctgtgtg

SEQ ID NO: 51698 - DNA, 25 bp, Artificial
  Probe
ggttcatctgtaatactgcctctgt

SEQ ID NO: 51699 - DNA, 25 bp, Artificial
  Probe
catctgtaatactgcctctgtgtgt

SEQ ID NO: 51700 - DNA, 25 bp, Artificial
  Probe
ctgtaatactgcctctgtgtgttga

SEQ ID NO: 51701 - DNA, 25 bp, Artificial
  Probe
tctgtaatactgcctctgtgtgttg

SEQ ID NO: 51702 - DNA, 25 bp, Artificial
  Probe
ctctgtgtgttgaggtcactgtata

SEQ ID NO: 51703 - DNA, 25 bp, Artificial
  Probe
ttgttgagtaagcgtctggaatgag

SEQ ID NO: 51704 - DNA, 25 bp, Artificial
  Probe
tgtaatactgcctctgtgtgttgag

SEQ ID NO: 51705 - DNA, 25 bp, Artificial
  Probe
tgttgaggtcactgtatacttctgg

SEQ ID NO: 51706 - DNA, 25 bp, Artificial
  Probe
gttgagtaagcgtctggaatgagtg

SEQ ID NO: 51707 - DNA, 25 bp, Artificial
  Probe
gtgttgaggtcactgtatacttctg

SEQ ID NO: 51708 - DNA, 25 bp, Artificial
  Probe
tgtgttgaggtcactgtatacttct

SEQ ID NO: 51709 - DNA, 25 bp, Artificial
  Probe
gtgtgttgaggtcactgtatacttc

SEQ ID NO: 51710 - DNA, 25 bp, Artificial
  Probe
gagggcactctgtggatatttattc

SEQ ID NO: 51711 - DNA, 25 bp, Artificial
  Probe
gtttgttgagtaagcgtctggaatg

SEQ ID NO: 51712 - DNA, 25 bp, Artificial
  Probe
tgtgtgttgaggtcactgtatactt

SEQ ID NO: 51713 - DNA, 25 bp, Artificial
  Probe
tttgttgagtaagcgtctggaatga

SEQ ID NO: 51714 - DNA, 25 bp, Artificial
  Probe
tgttgagtaagcgtctggaatgagt

SEQ ID NO: 51715 - DNA, 25 bp, Artificial
  Probe
gttgaggtcactgtatacttctggc

SEQ ID NO: 51716 - DNA, 25 bp, Artificial
  Probe
ctgtgtgttgaggtcactgtatact

SEQ ID NO: 51717 - DNA, 25 bp, Artificial
  Probe
tctgtgtgttgaggtcactgtatac

SEQ ID NO: 51718 - DNA, 25 bp, Artificial
  Probe
gagtaagcgtctggaatgagtggat

SEQ ID NO: 51719 - DNA, 25 bp, Artificial
  Probe
agggcactctgtggatatttattcc

SEQ ID NO: 51720 - DNA, 25 bp, Artificial
  Probe
agtaagcgtctggaatgagtggatc

SEQ ID NO: 51721 - DNA, 25 bp, Artificial
  Probe
gataaggtgactcagtctcagccat

SEQ ID NO: 51722 - DNA, 25 bp, Artificial
  Probe
ggtttgttgagtaagcgtctggaat

SEQ ID NO: 51723 - DNA, 25 bp, Artificial
  Probe
ttgagtaagcgtctggaatgagtgg

SEQ ID NO: 51724 - DNA, 25 bp, Artificial
  Probe
ataaggtgactcagtctcagccatg

SEQ ID NO: 51725 - DNA, 25 bp, Artificial
  Probe
gatatttattccagcgggagtcctg

SEQ ID NO: 51726 - DNA, 25 bp, Artificial
  Probe
ctgaagctcctgataaggtgactca

SEQ ID NO: 51727 - DNA, 25 bp, Artificial
  Probe
tatttattccagcgggagtcctgat

SEQ ID NO: 51728 - DNA, 25 bp, Artificial
  Probe
atatttattccagcgggagtcctga

SEQ ID NO: 51729 - DNA, 25 bp, Artificial
  Probe
aacattcgcatcctgggtaattgtc

SEQ ID NO: 51730 - DNA, 25 bp, Artificial
  Probe
gaacattcgcatcctgggtaattgt

SEQ ID NO: 51731 - DNA, 25 bp, Artificial
  Probe
agagggcactctgtggatatttatt

SEQ ID NO: 51732 - DNA, 25 bp, Artificial
  Probe
tcactgtatacttctggcctctgac

SEQ ID NO: 51733 - DNA, 25 bp, Artificial
  Probe
gtcactgtatacttctggcctctga

SEQ ID NO: 51734 - DNA, 25 bp, Artificial
  Probe
tcctgataaggtgactcagtctcag

SEQ ID NO: 51735 - DNA, 25 bp, Artificial
  Probe
ctcctgataaggtgactcagtctca

SEQ ID NO: 51736 - DNA, 25 bp, Artificial
  Probe
attcgcatcctgggtaattgtcact

SEQ ID NO: 51737 - DNA, 25 bp, Artificial
  Probe
cattcgcatcctgggtaattgtcac

SEQ ID NO: 51738 - DNA, 25 bp, Artificial
  Probe
ttgaggtcactgtatacttctggcc

SEQ ID NO: 51739 - DNA, 25 bp, Artificial
  Probe
tagacaggataaagtaacacaccac

SEQ ID NO: 51740 - DNA, 25 bp, Artificial
  Probe
atagacaggataaagtaacacacca

SEQ ID NO: 51741 - DNA, 25 bp, Artificial
  Probe
gaccttaccttaacaaagaaagcaa

SEQ ID NO: 51742 - DNA, 25 bp, Artificial
  Probe
accttaccttaacaaagaaagcaaa

SEQ ID NO: 51743 - DNA, 25 bp, Artificial
  Probe
aatagacaggataaagtaacacacc

SEQ ID NO: 51744 - DNA, 25 bp, Artificial
  Probe
aaatgtggactaaactgctttcagg

SEQ ID NO: 51745 - DNA, 25 bp, Artificial
  Probe
taaactgctttcagggagaaatgtt

SEQ ID NO: 51746 - DNA, 25 bp, Artificial
  Probe
gactaaactgctttcagggagaaat

SEQ ID NO: 51747 - DNA, 25 bp, Artificial
  Probe
ctaaactgctttcagggagaaatgt

SEQ ID NO: 51748 - DNA, 25 bp, Artificial
  Probe
actaaactgctttcagggagaaatg

SEQ ID NO: 51749 - DNA, 25 bp, Artificial
  Probe
taaaatgtggactaaactgctttca

SEQ ID NO: 51750 - DNA, 25 bp, Artificial
  Probe
gtaaaatgtggactaaactgctttc

SEQ ID NO: 51751 - DNA, 25 bp, Artificial
  Probe
aaactgctttcagggagaaatgttt

SEQ ID NO: 51752 - DNA, 25 bp, Artificial
  Probe
aatgtggactaaactgctttcaggg

SEQ ID NO: 51753 - DNA, 25 bp, Artificial
  Probe
ccttaccttaacaaagaaagcaaaa

SEQ ID NO: 51754 - DNA, 25 bp, Artificial
  Probe
taatagacaggataaagtaacacac

SEQ ID NO: 51755 - DNA, 25 bp, Artificial
  Probe
aaaatgtggactaaactgctttcag

SEQ ID NO: 51756 - DNA, 25 bp, Artificial
  Probe
ttaacatacgtcagaaggttctgtg

SEQ ID NO: 51757 - DNA, 25 bp, Artificial
  Probe
ggactaaactgctttcagggagaaa

SEQ ID NO: 51758 - DNA, 25 bp, Artificial
  Probe
tggactaaactgctttcagggagaa

SEQ ID NO: 51759 - DNA, 25 bp, Artificial
  Probe
catggagttaataatagacaggata

SEQ ID NO: 51760 - DNA, 25 bp, Artificial
  Probe
ttaccttaacaaagaaagcaaaagt

SEQ ID NO: 51761 - DNA, 25 bp, Artificial
  Probe
gccatggagttaataatagacagga

SEQ ID NO: 51762 - DNA, 25 bp, Artificial
  Probe
tgccatggagttaataatagacagg

SEQ ID NO: 51763 - DNA, 25 bp, Artificial
  Probe
gtgccatggagttaataatagacag

SEQ ID NO: 51764 - DNA, 25 bp, Artificial
  Probe
taacatacgtcagaaggttctgtgt

SEQ ID NO: 51765 - DNA, 25 bp, Artificial
  Probe
ttgtgccatggagttaataatagac

SEQ ID NO: 51766 - DNA, 25 bp, Artificial
  Probe
atgtggactaaactgctttcaggga

SEQ ID NO: 51767 - DNA, 25 bp, Artificial
  Probe
cttaccttaacaaagaaagcaaaag

SEQ ID NO: 51768 - DNA, 25 bp, Artificial
  Probe
ctgctttcagggagaaatgttttaa

SEQ ID NO: 51769 - DNA, 25 bp, Artificial
  Probe
tgtgccatggagttaataatagaca

SEQ ID NO: 51770 - DNA, 25 bp, Artificial
  Probe
actgctttcagggagaaatgtttta

SEQ ID NO: 51771 - DNA, 25 bp, Artificial
  Probe
gtggactaaactgctttcagggaga

SEQ ID NO: 51772 - DNA, 25 bp, Artificial
  Probe
ctggattcgtttggcatagctttgt

SEQ ID NO: 51773 - DNA, 25 bp, Artificial
  Probe
aactgctttcagggagaaatgtttt

SEQ ID NO: 51774 - DNA, 25 bp, Artificial
  Probe
tttaacatacgtcagaaggttctgt

SEQ ID NO: 51775 - DNA, 25 bp, Artificial
  Probe
ccatggagttaataatagacaggat

SEQ ID NO: 51776 - DNA, 25 bp, Artificial
  Probe
ataatagacaggataaagtaacaca

SEQ ID NO: 51777 - DNA, 25 bp, Artificial
  Probe
tgtggactaaactgctttcagggag

SEQ ID NO: 51778 - DNA, 25 bp, Artificial
  Probe
aacatacgtcagaaggttctgtgtg

SEQ ID NO: 51779 - DNA, 25 bp, Artificial
  Probe
tgctttcagggagaaatgttttaaa

SEQ ID NO: 51780 - DNA, 25 bp, Artificial
  Probe
tggattcgtttggcatagctttgtg

SEQ ID NO: 51781 - DNA, 25 bp, Artificial
  Probe
gctttgtgccatggagttaataata

SEQ ID NO: 51782 - DNA, 25 bp, Artificial
  Probe
atagctttgtgccatggagttaata

SEQ ID NO: 51783 - DNA, 25 bp, Artificial
  Probe
tagctttgtgccatggagttaataa

SEQ ID NO: 51784 - DNA, 25 bp, Artificial
  Probe
tggattgtcaccaagtgcttactta

SEQ ID NO: 51785 - DNA, 25 bp, Artificial
  Probe
caatgtagacatgaactttgcagag

SEQ ID NO: 51786 - DNA, 25 bp, Artificial
  Probe
aatgtagacatgaactttgcagagt

SEQ ID NO: 51787 - DNA, 25 bp, Artificial
  Probe
ttgtatcatgttaagtgttgtctta

SEQ ID NO: 51788 - DNA, 25 bp, Artificial
  Probe
tttgtatcatgttaagtgttgtctt

SEQ ID NO: 51789 - DNA, 25 bp, Artificial
  Probe
aaaatctctaccaatgcctaaaact

SEQ ID NO: 51790 - DNA, 25 bp, Artificial
  Probe
gtcttcaggtgtgtatggagagcag

SEQ ID NO: 51791 - DNA, 25 bp, Artificial
  Probe
tcctttaaaatctctaccaatgcct

SEQ ID NO: 51792 - DNA, 25 bp, Artificial
  Probe
tcccatcctttaaaatctctaccaa

SEQ ID NO: 51793 - DNA, 25 bp, Artificial
  Probe
ttcccatcctttaaaatctctacca

SEQ ID NO: 51794 - DNA, 25 bp, Artificial
  Probe
ggctgcaatgtagacatgaactttg

SEQ ID NO: 51795 - DNA, 25 bp, Artificial
  Probe
atcctttaaaatctctaccaatgcc

SEQ ID NO: 51796 - DNA, 25 bp, Artificial
  Probe
atgtagacatgaactttgcagagtt

SEQ ID NO: 51797 - DNA, 25 bp, Artificial
  Probe
taaaatctctaccaatgcctaaaac

SEQ ID NO: 51798 - DNA, 25 bp, Artificial
  Probe
tgtagacatgaactttgcagagttt

SEQ ID NO: 51799 - DNA, 25 bp, Artificial
  Probe
cctttaaaatctctaccaatgccta

SEQ ID NO: 51800 - DNA, 25 bp, Artificial
  Probe
cccatcctttaaaatctctaccaat

SEQ ID NO: 51801 - DNA, 25 bp, Artificial
  Probe
tttcccatcctttaaaatctctacc

SEQ ID NO: 51802 - DNA, 25 bp, Artificial
  Probe
gaactgatccttttctaacttttgt

SEQ ID NO: 51803 - DNA, 25 bp, Artificial
  Probe
catcctttaaaatctctaccaatgc

SEQ ID NO: 51804 - DNA, 25 bp, Artificial
  Probe
ggaactgatccttttctaacttttg

SEQ ID NO: 51805 - DNA, 25 bp, Artificial
  Probe
ttggattgtcaccaagtgcttactt

SEQ ID NO: 51806 - DNA, 25 bp, Artificial
  Probe
ttttgtatcatgttaagtgttgtct

SEQ ID NO: 51807 - DNA, 25 bp, Artificial
  Probe
ccatcctttaaaatctctaccaatg

SEQ ID NO: 51808 - DNA, 25 bp, Artificial
  Probe
ttaaaatctctaccaatgcctaaaa

SEQ ID NO: 51809 - DNA, 25 bp, Artificial
  Probe
ctttcccatcctttaaaatctctac

SEQ ID NO: 51810 - DNA, 25 bp, Artificial
  Probe
cttatttgtgcctgtttgcagctta

SEQ ID NO: 51811 - DNA, 25 bp, Artificial
  Probe
cttttgtatcatgttaagtgttgtc

SEQ ID NO: 51812 - DNA, 25 bp, Artificial
  Probe
cggctgcaatgtagacatgaacttt

SEQ ID NO: 51813 - DNA, 25 bp, Artificial
  Probe
aactgatccttttctaacttttgta

SEQ ID NO: 51814 - DNA, 25 bp, Artificial
  Probe
ctttaaaatctctaccaatgcctaa

SEQ ID NO: 51815 - DNA, 25 bp, Artificial
  Probe
gttggattgtcaccaagtgcttact

SEQ ID NO: 51816 - DNA, 25 bp, Artificial
  Probe
ctgttggattgtcaccaagtgctta

SEQ ID NO: 51817 - DNA, 25 bp, Artificial
  Probe
tccttttctaacttttgtatcatgt

SEQ ID NO: 51818 - DNA, 25 bp, Artificial
  Probe
actgatccttttctaacttttgtat

SEQ ID NO: 51819 - DNA, 25 bp, Artificial
  Probe
tgttggattgtcaccaagtgcttac

SEQ ID NO: 51820 - DNA, 25 bp, Artificial
  Probe
acatgaactttgcagagttttacaa

SEQ ID NO: 51821 - DNA, 25 bp, Artificial
  Probe
gacatgaactttgcagagttttaca

SEQ ID NO: 51822 - DNA, 25 bp, Artificial
  Probe
agacatgaactttgcagagttttac

SEQ ID NO: 51823 - DNA, 25 bp, Artificial
  Probe
gtagacatgaactttgcagagtttt

SEQ ID NO: 51824 - DNA, 25 bp, Artificial
  Probe
catgaactttgcagagttttacaaa

SEQ ID NO: 51825 - DNA, 25 bp, Artificial
  Probe
ctgatccttttctaacttttgtatc

SEQ ID NO: 51826 - DNA, 25 bp, Artificial
  Probe
tttaaaatctctaccaatgcctaaa

SEQ ID NO: 51827 - DNA, 25 bp, Artificial
  Probe
tagacatgaactttgcagagtttta

SEQ ID NO: 51828 - DNA, 25 bp, Artificial
  Probe
acttttgtatcatgttaagtgttgt

SEQ ID NO: 51829 - DNA, 25 bp, Artificial
  Probe
actcaagggtatgaatagtgttact

SEQ ID NO: 51830 - DNA, 25 bp, Artificial
  Probe
gtatgctgtgtcagtcctgtcttac

SEQ ID NO: 51831 - DNA, 25 bp, Artificial
  Probe
cctactcaagggtatgaatagtgtt

SEQ ID NO: 51832 - DNA, 25 bp, Artificial
  Probe
tcaagggtatgaatagtgttacttc

SEQ ID NO: 51833 - DNA, 25 bp, Artificial
  Probe
ctcaagggtatgaatagtgttactt

SEQ ID NO: 51834 - DNA, 25 bp, Artificial
  Probe
gacctactcaagggtatgaatagtg

SEQ ID NO: 51835 - DNA, 25 bp, Artificial
  Probe
acctactcaagggtatgaatagtgt

SEQ ID NO: 51836 - DNA, 25 bp, Artificial
  Probe
aggacctactcaagggtatgaatag

SEQ ID NO: 51837 - DNA, 25 bp, Artificial
  Probe
ggacctactcaagggtatgaatagt

SEQ ID NO: 51838 - DNA, 25 bp, Artificial
  Probe
caggacctactcaagggtatgaata

SEQ ID NO: 51839 - DNA, 25 bp, Artificial
  Probe
tactcaagggtatgaatagtgttac

SEQ ID NO: 51840 - DNA, 25 bp, Artificial
  Probe
ctactcaagggtatgaatagtgtta

SEQ ID NO: 51841 - DNA, 25 bp, Artificial
  Probe
gtcttaccaaagatgaatgaagcaa

SEQ ID NO: 51842 - DNA, 25 bp, Artificial
  Probe
ctgtcttaccaaagatgaatgaagc

SEQ ID NO: 51843 - DNA, 25 bp, Artificial
  Probe
tcctgtcttaccaaagatgaatgaa

SEQ ID NO: 51844 - DNA, 25 bp, Artificial
  Probe
tatgctgtgtcagtcctgtcttacc

SEQ ID NO: 51845 - DNA, 25 bp, Artificial
  Probe
ggtatgctgtgtcagtcctgtctta

SEQ ID NO: 51846 - DNA, 25 bp, Artificial
  Probe
cctgtcttaccaaagatgaatgaag

SEQ ID NO: 51847 - DNA, 25 bp, Artificial
  Probe
gtcctgtcttaccaaagatgaatga

SEQ ID NO: 51848 - DNA, 25 bp, Artificial
  Probe
agtcctgtcttaccaaagatgaatg

SEQ ID NO: 51849 - DNA, 25 bp, Artificial
  Probe
cagtcctgtcttaccaaagatgaat

SEQ ID NO: 51850 - DNA, 25 bp, Artificial
  Probe
tgtcttaccaaagatgaatgaagca

SEQ ID NO: 51851 - DNA, 25 bp, Artificial
  Probe
tcttaccaaagatgaatgaagcaaa

SEQ ID NO: 51852 - DNA, 25 bp, Artificial
  Probe
tcagtcctgtcttaccaaagatgaa

SEQ ID NO: 51853 - DNA, 25 bp, Artificial
  Probe
acaggacctactcaagggtatgaat

SEQ ID NO: 51854 - DNA, 25 bp, Artificial
  Probe
ctgtgtcagtcctgtcttaccaaag

SEQ ID NO: 51855 - DNA, 25 bp, Artificial
  Probe
gtcagtcctgtcttaccaaagatga

SEQ ID NO: 51856 - DNA, 25 bp, Artificial
  Probe
cttaccaaagatgaatgaagcaaaa

SEQ ID NO: 51857 - DNA, 25 bp, Artificial
  Probe
aatgtttggagaccaccagagaatc

SEQ ID NO: 51858 - DNA, 25 bp, Artificial
  Probe
tgtcagtcctgtcttaccaaagatg

SEQ ID NO: 51859 - DNA, 25 bp, Artificial
  Probe
gtgtcagtcctgtcttaccaaagat

SEQ ID NO: 51860 - DNA, 25 bp, Artificial
  Probe
caatgtttggagaccaccagagaat

SEQ ID NO: 51861 - DNA, 25 bp, Artificial
  Probe
caagggtatgaatagtgttacttca

SEQ ID NO: 51862 - DNA, 25 bp, Artificial
  Probe
tgtaagacccaagagctttgacatc

SEQ ID NO: 51863 - DNA, 25 bp, Artificial
  Probe
ctgtaagacccaagagctttgacat

SEQ ID NO: 51864 - DNA, 25 bp, Artificial
  Probe
gacccaagagctttgacatcctaag

SEQ ID NO: 51865 - DNA, 25 bp, Artificial
  Probe
cacaggacctactcaagggtatgaa

SEQ ID NO: 51866 - DNA, 25 bp, Artificial
  Probe
gtaagacccaagagctttgacatcc

SEQ ID NO: 51867 - DNA, 25 bp, Artificial
  Probe
atgtttggagaccaccagagaatct

SEQ ID NO: 51868 - DNA, 25 bp, Artificial
  Probe
agacccaagagctttgacatcctaa

SEQ ID NO: 51869 - DNA, 25 bp, Artificial
  Probe
aagacccaagagctttgacatccta

SEQ ID NO: 51870 - DNA, 25 bp, Artificial
  Probe
taagacccaagagctttgacatcct

SEQ ID NO: 51871 - DNA, 25 bp, Artificial
  Probe
ctttgacatcctaagctcagtgtgg

SEQ ID NO: 51872 - DNA, 25 bp, Artificial
  Probe
tgtgtcagtcctgtcttaccaaaga

SEQ ID NO: 51873 - DNA, 25 bp, Artificial
  Probe
gctgtgtcagtcctgtcttaccaaa

SEQ ID NO: 51874 - DNA, 25 bp, Artificial
  Probe
tattgacatgctctctaaaccactg

SEQ ID NO: 51875 - DNA, 25 bp, Artificial
  Probe
gtattgacatgctctctaaaccact

SEQ ID NO: 51876 - DNA, 25 bp, Artificial
  Probe
tgtcaatcatggagaaactggaatt

SEQ ID NO: 51877 - DNA, 25 bp, Artificial
  Probe
ctgtcaatcatggagaaactggaat

SEQ ID NO: 51878 - DNA, 25 bp, Artificial
  Probe
atggtattgacatgctctctaaacc

SEQ ID NO: 51879 - DNA, 25 bp, Artificial
  Probe
ggtattgacatgctctctaaaccac

SEQ ID NO: 51880 - DNA, 25 bp, Artificial
  Probe
attgacatgctctctaaaccactgt

SEQ ID NO: 51881 - DNA, 25 bp, Artificial
  Probe
ttatggttcaagcttaacagagtct

SEQ ID NO: 51882 - DNA, 25 bp, Artificial
  Probe
ttgacatgctctctaaaccactgtt

SEQ ID NO: 51883 - DNA, 25 bp, Artificial
  Probe
atggttcaagcttaacagagtctac

SEQ ID NO: 51884 - DNA, 25 bp, Artificial
  Probe
ggttcaagcttaacagagtctacaa

SEQ ID NO: 51885 - DNA, 25 bp, Artificial
  Probe
tatggttcaagcttaacagagtcta

SEQ ID NO: 51886 - DNA, 25 bp, Artificial
  Probe
gacacaccaacttgaagacatggaa

SEQ ID NO: 51887 - DNA, 25 bp, Artificial
  Probe
gaaactggaattctttgacttcact

SEQ ID NO: 51888 - DNA, 25 bp, Artificial
  Probe
gtcaatcatggagaaactggaattc

SEQ ID NO: 51889 - DNA, 25 bp, Artificial
  Probe
aaactggaattctttgacttcactt

SEQ ID NO: 51890 - DNA, 25 bp, Artificial
  Probe
gctgtcaatcatggagaaactggaa

SEQ ID NO: 51891 - DNA, 25 bp, Artificial
  Probe
tggttcaagcttaacagagtctaca

SEQ ID NO: 51892 - DNA, 25 bp, Artificial
  Probe
aactggaattctttgacttcactta

SEQ ID NO: 51893 - DNA, 25 bp, Artificial
  Probe
atgctgtcaatcatggagaaactgg

SEQ ID NO: 51894 - DNA, 25 bp, Artificial
  Probe
gatcttcaggtgtcttccatgaaac

SEQ ID NO: 51895 - DNA, 25 bp, Artificial
  Probe
tgacatgctctctaaaccactgttt

SEQ ID NO: 51896 - DNA, 25 bp, Artificial
  Probe
catggtattgacatgctctctaaac

SEQ ID NO: 51897 - DNA, 25 bp, Artificial
  Probe
aacagagtctacaaataaaacttgc

SEQ ID NO: 51898 - DNA, 25 bp, Artificial
  Probe
atcttcaggtgtcttccatgaaaca

SEQ ID NO: 51899 - DNA, 25 bp, Artificial
  Probe
acacaccaacttgaagacatggaaa

SEQ ID NO: 51900 - DNA, 25 bp, Artificial
  Probe
gttcaagcttaacagagtctacaaa

SEQ ID NO: 51901 - DNA, 25 bp, Artificial
  Probe
tttatggttcaagcttaacagagtc

SEQ ID NO: 51902 - DNA, 25 bp, Artificial
  Probe
aagacatgctgtcaatcatggagaa

SEQ ID NO: 51903 - DNA, 25 bp, Artificial
  Probe
agaaactggaattctttgacttcac

SEQ ID NO: 51904 - DNA, 25 bp, Artificial
  Probe
ggagaaactggaattctttgacttc

SEQ ID NO: 51905 - DNA, 25 bp, Artificial
  Probe
atggagaaactggaattctttgact

SEQ ID NO: 51906 - DNA, 25 bp, Artificial
  Probe
catggagaaactggaattctttgac

SEQ ID NO: 51907 - DNA, 25 bp, Artificial
  Probe
tcatggagaaactggaattctttga

SEQ ID NO: 51908 - DNA, 25 bp, Artificial
  Probe
tcaatcatggagaaactggaattct

SEQ ID NO: 51909 - DNA, 25 bp, Artificial
  Probe
cagatcttcaggtgtcttccatgaa

SEQ ID NO: 51910 - DNA, 25 bp, Artificial
  Probe
tggagaaactggaattctttgactt

SEQ ID NO: 51911 - DNA, 25 bp, Artificial
  Probe
atcatggagaaactggaattctttg

SEQ ID NO: 51912 - DNA, 25 bp, Artificial
  Probe
caatcatggagaaactggaattctt

SEQ ID NO: 51913 - DNA, 25 bp, Artificial
  Probe
gagaaactggaattctttgacttca

SEQ ID NO: 51914 - DNA, 25 bp, Artificial
  Probe
tgctgtcaatcatggagaaactgga

SEQ ID NO: 51915 - DNA, 25 bp, Artificial
  Probe
ccagatcttcaggtgtcttccatga

SEQ ID NO: 51916 - DNA, 25 bp, Artificial
  Probe
ttcaagcttaacagagtctacaaat

SEQ ID NO: 51917 - DNA, 25 bp, Artificial
  Probe
ccgaaacttactcatctttgaggtg

SEQ ID NO: 51918 - DNA, 25 bp, Artificial
  Probe
aatcatggagaaactggaattcttt

SEQ ID NO: 51919 - DNA, 25 bp, Artificial
  Probe
acaccatgtcaccttgtatagttaa

SEQ ID NO: 51920 - DNA, 25 bp, Artificial
  Probe
gtgcttactggctctaacaggtatt

SEQ ID NO: 51921 - DNA, 25 bp, Artificial
  Probe
cttactggctctaacaggtatttcc

SEQ ID NO: 51922 - DNA, 25 bp, Artificial
  Probe
caccatgtcaccttgtatagttaaa

SEQ ID NO: 51923 - DNA, 25 bp, Artificial
  Probe
ctggctctaacaggtatttcctatt

SEQ ID NO: 51924 - DNA, 25 bp, Artificial
  Probe
tactggctctaacaggtatttccta

SEQ ID NO: 51925 - DNA, 25 bp, Artificial
  Probe
tggctctaacaggtatttcctattt

SEQ ID NO: 51926 - DNA, 25 bp, Artificial
  Probe
actggctctaacaggtatttcctat

SEQ ID NO: 51927 - DNA, 25 bp, Artificial
  Probe
gcttactggctctaacaggtatttc

SEQ ID NO: 51928 - DNA, 25 bp, Artificial
  Probe
ttactggctctaacaggtatttcct

SEQ ID NO: 51929 - DNA, 25 bp, Artificial
  Probe
ggctctaacaggtatttcctatttc

SEQ ID NO: 51930 - DNA, 25 bp, Artificial
  Probe
tgcttactggctctaacaggtattt

SEQ ID NO: 51931 - DNA, 25 bp, Artificial
  Probe
gctctaacaggtatttcctatttca

SEQ ID NO: 51932 - DNA, 25 bp, Artificial
  Probe
cgtgcttactggctctaacaggtat

SEQ ID NO: 51933 - DNA, 25 bp, Artificial
  Probe
gacaccatgtcaccttgtatagtta

SEQ ID NO: 51934 - DNA, 25 bp, Artificial
  Probe
cttgaatttgactccccaaccttag

SEQ ID NO: 51935 - DNA, 25 bp, Artificial
  Probe
tctgtacgtgcttactggctctaac

SEQ ID NO: 51936 - DNA, 25 bp, Artificial
  Probe
gtctgtacgtgcttactggctctaa

SEQ ID NO: 51937 - DNA, 25 bp, Artificial
  Probe
ctctcactgagtctgtacgtgctta

SEQ ID NO: 51938 - DNA, 25 bp, Artificial
  Probe
accatgtcaccttgtatagttaaaa

SEQ ID NO: 51939 - DNA, 25 bp, Artificial
  Probe
ctcactgagtctgtacgtgcttact

SEQ ID NO: 51940 - DNA, 25 bp, Artificial
  Probe
tctcactgagtctgtacgtgcttac

SEQ ID NO: 51941 - DNA, 25 bp, Artificial
  Probe
ccatgctttatgtgattgtatttaa

SEQ ID NO: 51942 - DNA, 25 bp, Artificial
  Probe
ctctaacaggtatttcctatttcaa

SEQ ID NO: 51943 - DNA, 25 bp, Artificial
  Probe
tcactgagtctgtacgtgcttactg

SEQ ID NO: 51944 - DNA, 25 bp, Artificial
  Probe
ccttgaatttgactccccaacctta

SEQ ID NO: 51945 - DNA, 25 bp, Artificial
  Probe
ttgaatttgactccccaaccttagg

SEQ ID NO: 51946 - DNA, 25 bp, Artificial
  Probe
ctgtacgtgcttactggctctaaca

SEQ ID NO: 51947 - DNA, 25 bp, Artificial
  Probe
tgtacgtgcttactggctctaacag

SEQ ID NO: 51948 - DNA, 25 bp, Artificial
  Probe
gaatttgactccccaaccttaggaa

SEQ ID NO: 51949 - DNA, 25 bp, Artificial
  Probe
tctaacaggtatttcctatttcaat

SEQ ID NO: 51950 - DNA, 25 bp, Artificial
  Probe
agtctgtacgtgcttactggctcta

SEQ ID NO: 51951 - DNA, 25 bp, Artificial
  Probe
aatttgactccccaaccttaggaac

SEQ ID NO: 51952 - DNA, 25 bp, Artificial
  Probe
gtacgtgcttactggctctaacagg

SEQ ID NO: 51953 - DNA, 25 bp, Artificial
  Probe
cactgagtctgtacgtgcttactgg

SEQ ID NO: 51954 - DNA, 25 bp, Artificial
  Probe
tgaatttgactccccaaccttagga

SEQ ID NO: 51955 - DNA, 25 bp, Artificial
  Probe
caacccttgaatttgactccccaac

SEQ ID NO: 51956 - DNA, 25 bp, Artificial
  Probe
acaacccttgaatttgactccccaa

SEQ ID NO: 51957 - DNA, 25 bp, Artificial
  Probe
atttgactccccaaccttaggaacc

SEQ ID NO: 51958 - DNA, 25 bp, Artificial
  Probe
agagaccctctcactgagtctgtac

SEQ ID NO: 51959 - DNA, 25 bp, Artificial
  Probe
cagagaccctctcactgagtctgta

SEQ ID NO: 51960 - DNA, 25 bp, Artificial
  Probe
cccttgaatttgactccccaacctt

SEQ ID NO: 51961 - DNA, 25 bp, Artificial
  Probe
aacccttgaatttgactccccaacc

SEQ ID NO: 51962 - DNA, 25 bp, Artificial
  Probe
tttgactccccaaccttaggaacct

SEQ ID NO: 51963 - DNA, 25 bp, Artificial
  Probe
gagcatacccatggtgatttcagtg

SEQ ID NO: 51964 - DNA, 25 bp, Artificial
  Probe
aacctgattacttctgtgttcctac

SEQ ID NO: 51965 - DNA, 25 bp, Artificial
  Probe
taacctgattacttctgtgttccta

SEQ ID NO: 51966 - DNA, 25 bp, Artificial
  Probe
acctgattacttctgtgttcctacc

SEQ ID NO: 51967 - DNA, 25 bp, Artificial
  Probe
gtaacctgattacttctgtgttcct

SEQ ID NO: 51968 - DNA, 25 bp, Artificial
  Probe
ccctgaaatggagattatagatgct

SEQ ID NO: 51969 - DNA, 25 bp, Artificial
  Probe
accctgaaatggagattatagatgc

SEQ ID NO: 51970 - DNA, 25 bp, Artificial
  Probe
ttggaaaccctgaaatggagattat

SEQ ID NO: 51971 - DNA, 25 bp, Artificial
  Probe
tttggaaaccctgaaatggagatta

SEQ ID NO: 51972 - DNA, 25 bp, Artificial
  Probe
tggaaaccctgaaatggagattata

SEQ ID NO: 51973 - DNA, 25 bp, Artificial
  Probe
ggaaaccctgaaatggagattatag

SEQ ID NO: 51974 - DNA, 25 bp, Artificial
  Probe
cctgaaatggagattatagatgctt

SEQ ID NO: 51975 - DNA, 25 bp, Artificial
  Probe
ctgattacttctgtgttcctaccca

SEQ ID NO: 51976 - DNA, 25 bp, Artificial
  Probe
tgaaatggagattatagatgcttgt

SEQ ID NO: 51977 - DNA, 25 bp, Artificial
  Probe
aaccctgaaatggagattatagatg

SEQ ID NO: 51978 - DNA, 25 bp, Artificial
  Probe
gaaaccctgaaatggagattataga

SEQ ID NO: 51979 - DNA, 25 bp, Artificial
  Probe
cctgattacttctgtgttcctaccc

SEQ ID NO: 51980 - DNA, 25 bp, Artificial
  Probe
tttacatttaattgccacaaggaaa

SEQ ID NO: 51981 - DNA, 25 bp, Artificial
  Probe
ctgaaatggagattatagatgcttg

SEQ ID NO: 51982 - DNA, 25 bp, Artificial
  Probe
attacttctgtgttcctacccagtt

SEQ ID NO: 51983 - DNA, 25 bp, Artificial
  Probe
aaaccctgaaatggagattatagat

SEQ ID NO: 51984 - DNA, 25 bp, Artificial
  Probe
gattacttctgtgttcctacccagt

SEQ ID NO: 51985 - DNA, 25 bp, Artificial
  Probe
tgattacttctgtgttcctacccag

SEQ ID NO: 51986 - DNA, 25 bp, Artificial
  Probe
ttacttctgtgttcctacccagttc

SEQ ID NO: 51987 - DNA, 25 bp, Artificial
  Probe
aggcaagcaccattttacatttaat

SEQ ID NO: 51988 - DNA, 25 bp, Artificial
  Probe
gttctggaaatgtcacttggtgttc

SEQ ID NO: 51989 - DNA, 25 bp, Artificial
  Probe
ttttggaaaccctgaaatggagatt

SEQ ID NO: 51990 - DNA, 25 bp, Artificial
  Probe
ggcaagcaccattttacatttaatt

SEQ ID NO: 51991 - DNA, 25 bp, Artificial
  Probe
caccattttacatttaattgccaca

SEQ ID NO: 51992 - DNA, 25 bp, Artificial
  Probe
ttcctgagaccatcgagagcttaac

SEQ ID NO: 51993 - DNA, 25 bp, Artificial
  Probe
gttcctgagaccatcgagagcttaa

SEQ ID NO: 51994 - DNA, 25 bp, Artificial
  Probe
agattttatgtgtacgagtgtttgc

SEQ ID NO: 51995 - DNA, 25 bp, Artificial
  Probe
gaaatgtcacttggtgttcctgaga

SEQ ID NO: 51996 - DNA, 25 bp, Artificial
  Probe
agtaacctgattacttctgtgttcc

SEQ ID NO: 51997 - DNA, 25 bp, Artificial
  Probe
tgagtaacctgattacttctgtgtt

SEQ ID NO: 51998 - DNA, 25 bp, Artificial
  Probe
ttgagtaacctgattacttctgtgt

SEQ ID NO: 51999 - DNA, 25 bp, Artificial
  Probe
gattttatgtgtacgagtgtttgcc

SEQ ID NO: 52000 - DNA, 25 bp, Artificial
  Probe
ctccgttttctgtcttttaacaaca

SEQ ID NO: 52001 - DNA, 25 bp, Artificial
  Probe
gagtaacctgattacttctgtgttc

SEQ ID NO: 52002 - DNA, 25 bp, Artificial
  Probe
aaatgtcacttggtgttcctgagac

SEQ ID NO: 52003 - DNA, 25 bp, Artificial
  Probe
attttatgtgtacgagtgtttgcct

SEQ ID NO: 52004 - DNA, 25 bp, Artificial
  Probe
cagattttatgtgtacgagtgtttg

SEQ ID NO: 52005 - DNA, 25 bp, Artificial
  Probe
cctccgttttctgtcttttaacaac

SEQ ID NO: 52006 - DNA, 25 bp, Artificial
  Probe
gcaagcaccattttacatttaattg

SEQ ID NO: 52007 - DNA, 25 bp, Artificial
  Probe
accattttacatttaattgccacaa

SEQ ID NO: 52008 - DNA, 25 bp, Artificial
  Probe
tacttctgtgttcctacccagttcc

SEQ ID NO: 52009 - DNA, 25 bp, Artificial
  Probe
ggattagggaaactgaggaaagaat

SEQ ID NO: 52010 - DNA, 25 bp, Artificial
  Probe
tacttcatctccaaactcatttcct

SEQ ID NO: 52011 - DNA, 25 bp, Artificial
  Probe
gctcttacttcatctccaaactcat

SEQ ID NO: 52012 - DNA, 25 bp, Artificial
  Probe
tcacataaacaagcaaacaagcaaa

SEQ ID NO: 52013 - DNA, 25 bp, Artificial
  Probe
aggattagggaaactgaggaaagaa

SEQ ID NO: 52014 - DNA, 25 bp, Artificial
  Probe
acttcatctccaaactcatttcctg

SEQ ID NO: 52015 - DNA, 25 bp, Artificial
  Probe
ttacttcatctccaaactcatttcc

SEQ ID NO: 52016 - DNA, 25 bp, Artificial
  Probe
gtcacataaacaagcaaacaagcaa

SEQ ID NO: 52017 - DNA, 25 bp, Artificial
  Probe
ctcttacttcatctccaaactcatt

SEQ ID NO: 52018 - DNA, 25 bp, Artificial
  Probe
ttctgtcacataaacaagcaaacaa

SEQ ID NO: 52019 - DNA, 25 bp, Artificial
  Probe
attctgtcacataaacaagcaaaca

SEQ ID NO: 52020 - DNA, 25 bp, Artificial
  Probe
ggattctgtcacataaacaagcaaa

SEQ ID NO: 52021 - DNA, 25 bp, Artificial
  Probe
tcttacttcatctccaaactcattt

SEQ ID NO: 52022 - DNA, 25 bp, Artificial
  Probe
tctgtcacataaacaagcaaacaag

SEQ ID NO: 52023 - DNA, 25 bp, Artificial
  Probe
gattctgtcacataaacaagcaaac

SEQ ID NO: 52024 - DNA, 25 bp, Artificial
  Probe
gattagggaaactgaggaaagaata

SEQ ID NO: 52025 - DNA, 25 bp, Artificial
  Probe
aggctcttacttcatctccaaactc

SEQ ID NO: 52026 - DNA, 25 bp, Artificial
  Probe
catctccaaactcatttcctgcttc

SEQ ID NO: 52027 - DNA, 25 bp, Artificial
  Probe
cttcatctccaaactcatttcctgc

SEQ ID NO: 52028 - DNA, 25 bp, Artificial
  Probe
cttacttcatctccaaactcatttc

SEQ ID NO: 52029 - DNA, 25 bp, Artificial
  Probe
ggctcttacttcatctccaaactca

SEQ ID NO: 52030 - DNA, 25 bp, Artificial
  Probe
aaaggcaagtattaattcccagatg

SEQ ID NO: 52031 - DNA, 25 bp, Artificial
  Probe
ttagggaaactgaggaaagaataat

SEQ ID NO: 52032 - DNA, 25 bp, Artificial
  Probe
attagggaaactgaggaaagaataa

SEQ ID NO: 52033 - DNA, 25 bp, Artificial
  Probe
tcatctccaaactcatttcctgctt

SEQ ID NO: 52034 - DNA, 25 bp, Artificial
  Probe
ttcatctccaaactcatttcctgct

SEQ ID NO: 52035 - DNA, 25 bp, Artificial
  Probe
gggattctgtcacataaacaagcaa

SEQ ID NO: 52036 - DNA, 25 bp, Artificial
  Probe
tagggaaactgaggaaagaataatt

SEQ ID NO: 52037 - DNA, 25 bp, Artificial
  Probe
ctgtcacataaacaagcaaacaagc

SEQ ID NO: 52038 - DNA, 25 bp, Artificial
  Probe
gaggctcttacttcatctccaaact

SEQ ID NO: 52039 - DNA, 25 bp, Artificial
  Probe
caggattagggaaactgaggaaaga

SEQ ID NO: 52040 - DNA, 25 bp, Artificial
  Probe
aagtgtggatcagagagtcttcagg

SEQ ID NO: 52041 - DNA, 25 bp, Artificial
  Probe
caagtattaattcccagatgcccac

SEQ ID NO: 52042 - DNA, 25 bp, Artificial
  Probe
tgtcacataaacaagcaaacaagca

SEQ ID NO: 52043 - DNA, 25 bp, Artificial
  Probe
atctccaaactcatttcctgcttcc

SEQ ID NO: 52044 - DNA, 25 bp, Artificial
  Probe
tacgagacaaacccaaagtcatcat

SEQ ID NO: 52045 - DNA, 25 bp, Artificial
  Probe
agaggctcttacttcatctccaaac

SEQ ID NO: 52046 - DNA, 25 bp, Artificial
  Probe
tattaattcccagatgcccaccatt

SEQ ID NO: 52047 - DNA, 25 bp, Artificial
  Probe
agggaaactgaggaaagaataatta

SEQ ID NO: 52048 - DNA, 25 bp, Artificial
  Probe
gtgtggatcagagagtcttcaggag

SEQ ID NO: 52049 - DNA, 25 bp, Artificial
  Probe
tgggattctgtcacataaacaagca

SEQ ID NO: 52050 - DNA, 25 bp, Artificial
  Probe
gtgggattctgtcacataaacaagc

SEQ ID NO: 52051 - DNA, 25 bp, Artificial
  Probe
ccaggattagggaaactgaggaaag

SEQ ID NO: 52052 - DNA, 25 bp, Artificial
  Probe
tctacgagacaaacccaaagtcatc

SEQ ID NO: 52053 - DNA, 25 bp, Artificial
  Probe
taggaatatggaagctgatgctgtc

SEQ ID NO: 52054 - DNA, 25 bp, Artificial
  Probe
atctgtgcctttcttctggatattt

SEQ ID NO: 52055 - DNA, 25 bp, Artificial
  Probe
ctatctgtgcctttcttctggatat

SEQ ID NO: 52056 - DNA, 25 bp, Artificial
  Probe
tatctgtgcctttcttctggatatt

SEQ ID NO: 52057 - DNA, 25 bp, Artificial
  Probe
gctatctgtgcctttcttctggata

SEQ ID NO: 52058 - DNA, 25 bp, Artificial
  Probe
tatggaagaaatgaggtcatcagcc

SEQ ID NO: 52059 - DNA, 25 bp, Artificial
  Probe
cttctctttgtcccttagttggctg

SEQ ID NO: 52060 - DNA, 25 bp, Artificial
  Probe
tctgtgcctttcttctggatatttt

SEQ ID NO: 52061 - DNA, 25 bp, Artificial
  Probe
ttgcttaccctttgccattctcaat

SEQ ID NO: 52062 - DNA, 25 bp, Artificial
  Probe
ctttgccattctcaatgtctgactt

SEQ ID NO: 52063 - DNA, 25 bp, Artificial
  Probe
ctgtgcctttcttctggatatttta

SEQ ID NO: 52064 - DNA, 25 bp, Artificial
  Probe
gtcaaatccttcaaaactgcctaag

SEQ ID NO: 52065 - DNA, 25 bp, Artificial
  Probe
attctcaatgtctgacttggagact

SEQ ID NO: 52066 - DNA, 25 bp, Artificial
  Probe
cattctcaatgtctgacttggagac

SEQ ID NO: 52067 - DNA, 25 bp, Artificial
  Probe
tttgccattctcaatgtctgacttg

SEQ ID NO: 52068 - DNA, 25 bp, Artificial
  Probe
tagtcaaatccttcaaaactgccta

SEQ ID NO: 52069 - DNA, 25 bp, Artificial
  Probe
ttgccattctcaatgtctgacttgg

SEQ ID NO: 52070 - DNA, 25 bp, Artificial
  Probe
cttaccctttgccattctcaatgtc

SEQ ID NO: 52071 - DNA, 25 bp, Artificial
  Probe
tgtgcctttcttctggatattttat

SEQ ID NO: 52072 - DNA, 25 bp, Artificial
  Probe
cttcaaaactgcctaagtggaaatc

SEQ ID NO: 52073 - DNA, 25 bp, Artificial
  Probe
tcaaaactgcctaagtggaaatctt

SEQ ID NO: 52074 - DNA, 25 bp, Artificial
  Probe
ttcaaaactgcctaagtggaaatct

SEQ ID NO: 52075 - DNA, 25 bp, Artificial
  Probe
caaatccttcaaaactgcctaagtg

SEQ ID NO: 52076 - DNA, 25 bp, Artificial
  Probe
tcaaatccttcaaaactgcctaagt

SEQ ID NO: 52077 - DNA, 25 bp, Artificial
  Probe
agtcaaatccttcaaaactgcctaa

SEQ ID NO: 52078 - DNA, 25 bp, Artificial
  Probe
ccattctcaatgtctgacttggaga

SEQ ID NO: 52079 - DNA, 25 bp, Artificial
  Probe
gccattctcaatgtctgacttggag

SEQ ID NO: 52080 - DNA, 25 bp, Artificial
  Probe
tttctttccttgcttaccctttgcc

SEQ ID NO: 52081 - DNA, 25 bp, Artificial
  Probe
ttaccctttgccattctcaatgtct

SEQ ID NO: 52082 - DNA, 25 bp, Artificial
  Probe
tttccttgcttaccctttgccattc

SEQ ID NO: 52083 - DNA, 25 bp, Artificial
  Probe
ctttccttgcttaccctttgccatt

SEQ ID NO: 52084 - DNA, 25 bp, Artificial
  Probe
cttgcttaccctttgccattctcaa

SEQ ID NO: 52085 - DNA, 25 bp, Artificial
  Probe
ccttcaaaactgcctaagtggaaat

SEQ ID NO: 52086 - DNA, 25 bp, Artificial
  Probe
aaatccttcaaaactgcctaagtgg

SEQ ID NO: 52087 - DNA, 25 bp, Artificial
  Probe
ttttctttccttgcttaccctttgc

SEQ ID NO: 52088 - DNA, 25 bp, Artificial
  Probe
ccttctctttgtcccttagttggct

SEQ ID NO: 52089 - DNA, 25 bp, Artificial
  Probe
tgccattctcaatgtctgacttgga

SEQ ID NO: 52090 - DNA, 25 bp, Artificial
  Probe
taccctttgccattctcaatgtctg

SEQ ID NO: 52091 - DNA, 25 bp, Artificial
  Probe
tgcctttcttctggatattttatct

SEQ ID NO: 52092 - DNA, 25 bp, Artificial
  Probe
gtgcctttcttctggatattttatc

SEQ ID NO: 52093 - DNA, 25 bp, Artificial
  Probe
cctttgccattctcaatgtctgact

SEQ ID NO: 52094 - DNA, 25 bp, Artificial
  Probe
atggaagaaatgaggtcatcagcct

SEQ ID NO: 52095 - DNA, 25 bp, Artificial
  Probe
ttccttgcttaccctttgccattct

SEQ ID NO: 52096 - DNA, 25 bp, Artificial
  Probe
tctttccttgcttaccctttgccat

SEQ ID NO: 52097 - DNA, 25 bp, Artificial
  Probe
atccttcaaaactgcctaagtggaa

SEQ ID NO: 52098 - DNA, 25 bp, Artificial
  Probe
aatccttcaaaactgcctaagtgga

SEQ ID NO: 52099 - DNA, 25 bp, Artificial
  Probe
ttgtgaggcattagtgtagaccaat

SEQ ID NO: 52100 - DNA, 25 bp, Artificial
  Probe
actgaatcctcactagagagctaag

SEQ ID NO: 52101 - DNA, 25 bp, Artificial
  Probe
cactgaatcctcactagagagctaa

SEQ ID NO: 52102 - DNA, 25 bp, Artificial
  Probe
gaggcattagtgtagaccaatgaag

SEQ ID NO: 52103 - DNA, 25 bp, Artificial
  Probe
gaatcctcactagagagctaagcaa

SEQ ID NO: 52104 - DNA, 25 bp, Artificial
  Probe
tgaggcattagtgtagaccaatgaa

SEQ ID NO: 52105 - DNA, 25 bp, Artificial
  Probe
ctgaatcctcactagagagctaagc

SEQ ID NO: 52106 - DNA, 25 bp, Artificial
  Probe
ccactgtgctaagtttcagattatt

SEQ ID NO: 52107 - DNA, 25 bp, Artificial
  Probe
ctgtgctaagtttcagattatttgc

SEQ ID NO: 52108 - DNA, 25 bp, Artificial
  Probe
ctttgtttctgccaccttctaactc

SEQ ID NO: 52109 - DNA, 25 bp, Artificial
  Probe
gccactgtgctaagtttcagattat

SEQ ID NO: 52110 - DNA, 25 bp, Artificial
  Probe
tttgtgaggcattagtgtagaccaa

SEQ ID NO: 52111 - DNA, 25 bp, Artificial
  Probe
ctttgtgaggcattagtgtagacca

SEQ ID NO: 52112 - DNA, 25 bp, Artificial
  Probe
gtgaggcattagtgtagaccaatga

SEQ ID NO: 52113 - DNA, 25 bp, Artificial
  Probe
tttgtttctgccaccttctaactct

SEQ ID NO: 52114 - DNA, 25 bp, Artificial
  Probe
tgtgaggcattagtgtagaccaatg

SEQ ID NO: 52115 - DNA, 25 bp, Artificial
  Probe
actgtgctaagtttcagattatttg

SEQ ID NO: 52116 - DNA, 25 bp, Artificial
  Probe
cactgtgctaagtttcagattattt

SEQ ID NO: 52117 - DNA, 25 bp, Artificial
  Probe
gctaagtttcagattatttgcacaa

SEQ ID NO: 52118 - DNA, 25 bp, Artificial
  Probe
aatcctcactagagagctaagcaaa

SEQ ID NO: 52119 - DNA, 25 bp, Artificial
  Probe
ttgtttctgccaccttctaactctg

SEQ ID NO: 52120 - DNA, 25 bp, Artificial
  Probe
gcactgaatcctcactagagagcta

SEQ ID NO: 52121 - DNA, 25 bp, Artificial
  Probe
atcctcactagagagctaagcaaag

SEQ ID NO: 52122 - DNA, 25 bp, Artificial
  Probe
cctttgtgaggcattagtgtagacc

SEQ ID NO: 52123 - DNA, 25 bp, Artificial
  Probe
agccactgtgctaagtttcagatta

SEQ ID NO: 52124 - DNA, 25 bp, Artificial
  Probe
cagcactgaatcctcactagagagc

SEQ ID NO: 52125 - DNA, 25 bp, Artificial
  Probe
gcagcactgaatcctcactagagag

SEQ ID NO: 52126 - DNA, 25 bp, Artificial
  Probe
tgctaagtttcagattatttgcaca

SEQ ID NO: 52127 - DNA, 25 bp, Artificial
  Probe
tgtgctaagtttcagattatttgca

SEQ ID NO: 52128 - DNA, 25 bp, Artificial
  Probe
ctaagtttcagattatttgcacaat

SEQ ID NO: 52129 - DNA, 25 bp, Artificial
  Probe
tttctgccaccttctaactctggag

SEQ ID NO: 52130 - DNA, 25 bp, Artificial
  Probe
cagccactgtgctaagtttcagatt

SEQ ID NO: 52131 - DNA, 25 bp, Artificial
  Probe
aatgctaccacctgagtttgccttt

SEQ ID NO: 52132 - DNA, 25 bp, Artificial
  Probe
aaatgctaccacctgagtttgcctt

SEQ ID NO: 52133 - DNA, 25 bp, Artificial
  Probe
gtttctgccaccttctaactctgga

SEQ ID NO: 52134 - DNA, 25 bp, Artificial
  Probe
tgtttctgccaccttctaactctgg

SEQ ID NO: 52135 - DNA, 25 bp, Artificial
  Probe
agcactgaatcctcactagagagct

SEQ ID NO: 52136 - DNA, 25 bp, Artificial
  Probe
taccacctgagtttgcctttgtgag

SEQ ID NO: 52137 - DNA, 25 bp, Artificial
  Probe
ctaccacctgagtttgcctttgtga

SEQ ID NO: 52138 - DNA, 25 bp, Artificial
  Probe
tcctcactagagagctaagcaaagc

SEQ ID NO: 52139 - DNA, 25 bp, Artificial
  Probe
taaaacagccactgtgctaagtttc

SEQ ID NO: 52140 - DNA, 25 bp, Artificial
  Probe
ctaaaacagccactgtgctaagttt

SEQ ID NO: 52141 - DNA, 25 bp, Artificial
  Probe
aaacagccactgtgctaagtttcag

SEQ ID NO: 52142 - DNA, 25 bp, Artificial
  Probe
tctaaaacagccactgtgctaagtt

SEQ ID NO: 52143 - DNA, 25 bp, Artificial
  Probe
acagccactgtgctaagtttcagat

SEQ ID NO: 52144 - DNA, 25 bp, Artificial
  Probe
ctccttcactctcacggtaattaat

SEQ ID NO: 52145 - DNA, 25 bp, Artificial
  Probe
tcactctcacggtaattaatgtctt

SEQ ID NO: 52146 - DNA, 25 bp, Artificial
  Probe
ttcactctcacggtaattaatgtct

SEQ ID NO: 52147 - DNA, 25 bp, Artificial
  Probe
tccttcactctcacggtaattaatg

SEQ ID NO: 52148 - DNA, 25 bp, Artificial
  Probe
cttcactctcacggtaattaatgtc

SEQ ID NO: 52149 - DNA, 25 bp, Artificial
  Probe
ccttcactctcacggtaattaatgt

SEQ ID NO: 52150 - DNA, 25 bp, Artificial
  Probe
cactctcacggtaattaatgtctta

SEQ ID NO: 52151 - DNA, 25 bp, Artificial
  Probe
cctccttcactctcacggtaattaa

SEQ ID NO: 52152 - DNA, 25 bp, Artificial
  Probe
ttgattctgttgccatttgtgtaaa

SEQ ID NO: 52153 - DNA, 25 bp, Artificial
  Probe
tttgattctgttgccatttgtgtaa

SEQ ID NO: 52154 - DNA, 25 bp, Artificial
  Probe
actctcacggtaattaatgtcttaa

SEQ ID NO: 52155 - DNA, 25 bp, Artificial
  Probe
tgattctgttgccatttgtgtaaat

SEQ ID NO: 52156 - DNA, 25 bp, Artificial
  Probe
ttctgttgccatttgtgtaaatact

SEQ ID NO: 52157 - DNA, 25 bp, Artificial
  Probe
attctgttgccatttgtgtaaatac

SEQ ID NO: 52158 - DNA, 25 bp, Artificial
  Probe
gattctgttgccatttgtgtaaata

SEQ ID NO: 52159 - DNA, 25 bp, Artificial
  Probe
tagtgtctaccacccttctaccaaa

SEQ ID NO: 52160 - DNA, 25 bp, Artificial
  Probe
gcctccttcactctcacggtaatta

SEQ ID NO: 52161 - DNA, 25 bp, Artificial
  Probe
ttttgattctgttgccatttgtgta

SEQ ID NO: 52162 - DNA, 25 bp, Artificial
  Probe
attaatgtcttaattggctgttgcc

SEQ ID NO: 52163 - DNA, 25 bp, Artificial
  Probe
ttaatgtcttaattggctgttgcct

SEQ ID NO: 52164 - DNA, 25 bp, Artificial
  Probe
taatgtcttaattggctgttgcctg

SEQ ID NO: 52165 - DNA, 25 bp, Artificial
  Probe
ctctcacggtaattaatgtcttaat

SEQ ID NO: 52166 - DNA, 25 bp, Artificial
  Probe
gtagtgtctaccacccttctaccaa

SEQ ID NO: 52167 - DNA, 25 bp, Artificial
  Probe
aattaatgtcttaattggctgttgc

SEQ ID NO: 52168 - DNA, 25 bp, Artificial
  Probe
cacggtaattaatgtcttaattggc

SEQ ID NO: 52169 - DNA, 25 bp, Artificial
  Probe
acggtaattaatgtcttaattggct

SEQ ID NO: 52170 - DNA, 25 bp, Artificial
  Probe
cggtaattaatgtcttaattggctg

SEQ ID NO: 52171 - DNA, 25 bp, Artificial
  Probe
tggaagaaataatgtaaagatgttt

SEQ ID NO: 52172 - DNA, 25 bp, Artificial
  Probe
ttggaagaaataatgtaaagatgtt

SEQ ID NO: 52173 - DNA, 25 bp, Artificial
  Probe
tttggaagaaataatgtaaagatgt

SEQ ID NO: 52174 - DNA, 25 bp, Artificial
  Probe
agtgtctaccacccttctaccaaaa

SEQ ID NO: 52175 - DNA, 25 bp, Artificial
  Probe
ggtaattaatgtcttaattggctgt

SEQ ID NO: 52176 - DNA, 25 bp, Artificial
  Probe
tcacggtaattaatgtcttaattgg

SEQ ID NO: 52177 - DNA, 25 bp, Artificial
  Probe
aatgtcttaattggctgttgcctgg

SEQ ID NO: 52178 - DNA, 25 bp, Artificial
  Probe
ctcacggtaattaatgtcttaattg

SEQ ID NO: 52179 - DNA, 25 bp, Artificial
  Probe
tctcacggtaattaatgtcttaatt

SEQ ID NO: 52180 - DNA, 25 bp, Artificial
  Probe
taattaatgtcttaattggctgttg

SEQ ID NO: 52181 - DNA, 25 bp, Artificial
  Probe
gtaattaatgtcttaattggctgtt

SEQ ID NO: 52182 - DNA, 25 bp, Artificial
  Probe
gttcctagcagtggggtagtgtcta

SEQ ID NO: 52183 - DNA, 25 bp, Artificial
  Probe
ttcctagcagtggggtagtgtctac

SEQ ID NO: 52184 - DNA, 25 bp, Artificial
  Probe
aaagatgttttgtataaactctgaa

SEQ ID NO: 52185 - DNA, 25 bp, Artificial
  Probe
gactcagactgataggatatgaaca

SEQ ID NO: 52186 - DNA, 25 bp, Artificial
  Probe
agactcagactgataggatatgaac

SEQ ID NO: 52187 - DNA, 25 bp, Artificial
  Probe
gaagactcagactgataggatatga

SEQ ID NO: 52188 - DNA, 25 bp, Artificial
  Probe
actcagactgataggatatgaacat

SEQ ID NO: 52189 - DNA, 25 bp, Artificial
  Probe
aagactcagactgataggatatgaa

SEQ ID NO: 52190 - DNA, 25 bp, Artificial
  Probe
ctcagactgataggatatgaacatc

SEQ ID NO: 52191 - DNA, 25 bp, Artificial
  Probe
caagcctgaacaacagatgatgtac

SEQ ID NO: 52192 - DNA, 25 bp, Artificial
  Probe
gcaagcctgaacaacagatgatgta

SEQ ID NO: 52193 - DNA, 25 bp, Artificial
  Probe
aagcctgaacaacagatgatgtacg

SEQ ID NO: 52194 - DNA, 25 bp, Artificial
  Probe
cagactgataggatatgaacatcca

SEQ ID NO: 52195 - DNA, 25 bp, Artificial
  Probe
tcagactgataggatatgaacatcc

SEQ ID NO: 52196 - DNA, 25 bp, Artificial
  Probe
actgataggatatgaacatccaaga

SEQ ID NO: 52197 - DNA, 25 bp, Artificial
  Probe
agactgataggatatgaacatccaa

SEQ ID NO: 52198 - DNA, 25 bp, Artificial
  Probe
atagacaacagataaagctgcaaga

SEQ ID NO: 52199 - DNA, 25 bp, Artificial
  Probe
gactgataggatatgaacatccaag

SEQ ID NO: 52200 - DNA, 25 bp, Artificial
  Probe
aatagacaacagataaagctgcaag

SEQ ID NO: 52201 - DNA, 25 bp, Artificial
  Probe
aaagggagtgcgattacaattcagg

SEQ ID NO: 52202 - DNA, 25 bp, Artificial
  Probe
tagacaacagataaagctgcaagag

SEQ ID NO: 52203 - DNA, 25 bp, Artificial
  Probe
aaatagacaacagataaagctgcaa

SEQ ID NO: 52204 - DNA, 25 bp, Artificial
  Probe
ctgataggatatgaacatccaagag

SEQ ID NO: 52205 - DNA, 25 bp, Artificial
  Probe
aaaagggagtgcgattacaattcag

SEQ ID NO: 52206 - DNA, 25 bp, Artificial
  Probe
gaaaagggagtgcgattacaattca

SEQ ID NO: 52207 - DNA, 25 bp, Artificial
  Probe
cgaaaagggagtgcgattacaattc

SEQ ID NO: 52208 - DNA, 25 bp, Artificial
  Probe
gaaaatagacaacagataaagctgc

SEQ ID NO: 52209 - DNA, 25 bp, Artificial
  Probe
aaagtccccttcgcaaagagtaaag

SEQ ID NO: 52210 - DNA, 25 bp, Artificial
  Probe
gaaagtccccttcgcaaagagtaaa

SEQ ID NO: 52211 - DNA, 25 bp, Artificial
  Probe
aaaatagacaacagataaagctgca

SEQ ID NO: 52212 - DNA, 25 bp, Artificial
  Probe
aagggagtgcgattacaattcaggg

SEQ ID NO: 52213 - DNA, 25 bp, Artificial
  Probe
cacatggaaacgggaattggaacac

SEQ ID NO: 52214 - DNA, 25 bp, Artificial
  Probe
ccgaaaagggagtgcgattacaatt

SEQ ID NO: 52215 - DNA, 25 bp, Artificial
  Probe
agaaagtccccttcgcaaagagtaa

SEQ ID NO: 52216 - DNA, 25 bp, Artificial
  Probe
aaatgcgagactagttccttgccta

SEQ ID NO: 52217 - DNA, 25 bp, Artificial
  Probe
agacaacagataaagctgcaagagc

SEQ ID NO: 52218 - DNA, 25 bp, Artificial
  Probe
aatgcgagactagttccttgcctag

SEQ ID NO: 52219 - DNA, 25 bp, Artificial
  Probe
tagccaataaatcgcggagaaagtc

SEQ ID NO: 52220 - DNA, 25 bp, Artificial
  Probe
gagaaagtccccttcgcaaagagta

SEQ ID NO: 52221 - DNA, 25 bp, Artificial
  Probe
gtagccaataaatcgcggagaaagt

SEQ ID NO: 52222 - DNA, 25 bp, Artificial
  Probe
cagaagcgaaatgcgagactagttc

SEQ ID NO: 52223 - DNA, 25 bp, Artificial
  Probe
cagataaagctgcaagagccagaag

SEQ ID NO: 52224 - DNA, 25 bp, Artificial
  Probe
agctataagtacgtgcatgacgacg

SEQ ID NO: 52225 - DNA, 25 bp, Artificial
  Probe
cttcgcaaagagtaaaggaaaggcc

SEQ ID NO: 52226 - DNA, 25 bp, Artificial
  Probe
cccttcgcaaagagtaaaggaaagg

SEQ ID NO: 52227 - DNA, 25 bp, Artificial
  Probe
aagcgaaatgcgagactagttcctt

SEQ ID NO: 52228 - DNA, 25 bp, Artificial
  Probe
ggtagccaataaatcgcggagaaag

SEQ ID NO: 52229 - DNA, 25 bp, Artificial
  Probe
caacagataaagctgcaagagccag

SEQ ID NO: 52230 - DNA, 25 bp, Artificial
  Probe
cctgatggaatatagcattgtagtt

SEQ ID NO: 52231 - DNA, 25 bp, Artificial
  Probe
tggaatatagcattgtagttgactt

SEQ ID NO: 52232 - DNA, 25 bp, Artificial
  Probe
gtgaatagaggcaccgtcataataa

SEQ ID NO: 52233 - DNA, 25 bp, Artificial
  Probe
tgatggaatatagcattgtagttga

SEQ ID NO: 52234 - DNA, 25 bp, Artificial
  Probe
atggaatatagcattgtagttgact

SEQ ID NO: 52235 - DNA, 25 bp, Artificial
  Probe
gatggaatatagcattgtagttgac

SEQ ID NO: 52236 - DNA, 25 bp, Artificial
  Probe
ctgatggaatatagcattgtagttg

SEQ ID NO: 52237 - DNA, 25 bp, Artificial
  Probe
agtgaatagaggcaccgtcataata

SEQ ID NO: 52238 - DNA, 25 bp, Artificial
  Probe
tcctgatggaatatagcattgtagt

SEQ ID NO: 52239 - DNA, 25 bp, Artificial
  Probe
ttgtttgtatgagtgaatagaggca

SEQ ID NO: 52240 - DNA, 25 bp, Artificial
  Probe
ggattgtgacctgatatttggagat

SEQ ID NO: 52241 - DNA, 25 bp, Artificial
  Probe
gattgtgacctgatatttggagatg

SEQ ID NO: 52242 - DNA, 25 bp, Artificial
  Probe
tttgtttgtatgagtgaatagaggc

SEQ ID NO: 52243 - DNA, 25 bp, Artificial
  Probe
atatgttaatttcaggcagcattcc

SEQ ID NO: 52244 - DNA, 25 bp, Artificial
  Probe
ggaatatgttaatttcaggcagcat

SEQ ID NO: 52245 - DNA, 25 bp, Artificial
  Probe
ttgggaatatgttaatttcaggcag

SEQ ID NO: 52246 - DNA, 25 bp, Artificial
  Probe
atcctgatggaatatagcattgtag

SEQ ID NO: 52247 - DNA, 25 bp, Artificial
  Probe
tttgggaatatgttaatttcaggca

SEQ ID NO: 52248 - DNA, 25 bp, Artificial
  Probe
gagtgaatagaggcaccgtcataat

SEQ ID NO: 52249 - DNA, 25 bp, Artificial
  Probe
gttgttcaaagtagggtgtgtgtaa

SEQ ID NO: 52250 - DNA, 25 bp, Artificial
  Probe
tgaatagaggcaccgtcataataaa

SEQ ID NO: 52251 - DNA, 25 bp, Artificial
  Probe
ttgttcaaagtagggtgtgtgtaac

SEQ ID NO: 52252 - DNA, 25 bp, Artificial
  Probe
ctttgggaatatgttaatttcaggc

SEQ ID NO: 52253 - DNA, 25 bp, Artificial
  Probe
aatatgttaatttcaggcagcattc

SEQ ID NO: 52254 - DNA, 25 bp, Artificial
  Probe
gaatatgttaatttcaggcagcatt

SEQ ID NO: 52255 - DNA, 25 bp, Artificial
  Probe
aatcctgatggaatatagcattgta

SEQ ID NO: 52256 - DNA, 25 bp, Artificial
  Probe
taatcctgatggaatatagcattgt

SEQ ID NO: 52257 - DNA, 25 bp, Artificial
  Probe
tatgttaatttcaggcagcattccc

SEQ ID NO: 52258 - DNA, 25 bp, Artificial
  Probe
gggaatatgttaatttcaggcagca

SEQ ID NO: 52259 - DNA, 25 bp, Artificial
  Probe
tgggaatatgttaatttcaggcagc

SEQ ID NO: 52260 - DNA, 25 bp, Artificial
  Probe
gggattgtgacctgatatttggaga

SEQ ID NO: 52261 - DNA, 25 bp, Artificial
  Probe
atagggattgtgacctgatatttgg

SEQ ID NO: 52262 - DNA, 25 bp, Artificial
  Probe
tttagtctaaccaggaaccctttag

SEQ ID NO: 52263 - DNA, 25 bp, Artificial
  Probe
ctttagtctaaccaggaacccttta

SEQ ID NO: 52264 - DNA, 25 bp, Artificial
  Probe
tgtttgtatgagtgaatagaggcac

SEQ ID NO: 52265 - DNA, 25 bp, Artificial
  Probe
tagggattgtgacctgatatttgga

SEQ ID NO: 52266 - DNA, 25 bp, Artificial
  Probe
actttagtctaaccaggaacccttt

SEQ ID NO: 52267 - DNA, 25 bp, Artificial
  Probe
acatataatagggattgtgacctga

SEQ ID NO: 52268 - DNA, 25 bp, Artificial
  Probe
tctcactggaccactttagtctaac

SEQ ID NO: 52269 - DNA, 25 bp, Artificial
  Probe
gtctcactggaccactttagtctaa

SEQ ID NO: 52270 - DNA, 25 bp, Artificial
  Probe
aatagggattgtgacctgatatttg

SEQ ID NO: 52271 - DNA, 25 bp, Artificial
  Probe
ttaatttcaggcagcattccctatg

SEQ ID NO: 52272 - DNA, 25 bp, Artificial
  Probe
gttaatttcaggcagcattccctat

SEQ ID NO: 52273 - DNA, 25 bp, Artificial
  Probe
gtttgtatgagtgaatagaggcacc

SEQ ID NO: 52274 - DNA, 25 bp, Artificial
  Probe
tcaacatataatagggattgtgacc

SEQ ID NO: 52275 - DNA, 25 bp, Artificial
  Probe
catcctgaactgtgagacaagattg

SEQ ID NO: 52276 - DNA, 25 bp, Artificial
  Probe
tcatcctgaactgtgagacaagatt

SEQ ID NO: 52277 - DNA, 25 bp, Artificial
  Probe
gtgtatgaagaagtaacagccactg

SEQ ID NO: 52278 - DNA, 25 bp, Artificial
  Probe
ttacggctttacttctccttctatg

SEQ ID NO: 52279 - DNA, 25 bp, Artificial
  Probe
cttacggctttacttctccttctat

SEQ ID NO: 52280 - DNA, 25 bp, Artificial
  Probe
ccaaggcacacaactcttaaataaa

SEQ ID NO: 52281 - DNA, 25 bp, Artificial
  Probe
tacggctttacttctccttctatgt

SEQ ID NO: 52282 - DNA, 25 bp, Artificial
  Probe
aaggcacacaactcttaaataaagc

SEQ ID NO: 52283 - DNA, 25 bp, Artificial
  Probe
ggcacacaactcttaaataaagcaa

SEQ ID NO: 52284 - DNA, 25 bp, Artificial
  Probe
gtcatcctgaactgtgagacaagat

SEQ ID NO: 52285 - DNA, 25 bp, Artificial
  Probe
atcctgaactgtgagacaagattgt

SEQ ID NO: 52286 - DNA, 25 bp, Artificial
  Probe
gcacacaactcttaaataaagcaaa

SEQ ID NO: 52287 - DNA, 25 bp, Artificial
  Probe
tcctgaactgtgagacaagattgtt

SEQ ID NO: 52288 - DNA, 25 bp, Artificial
  Probe
aggcacacaactcttaaataaagca

SEQ ID NO: 52289 - DNA, 25 bp, Artificial
  Probe
caaggcacacaactcttaaataaag

SEQ ID NO: 52290 - DNA, 25 bp, Artificial
  Probe
aatacaagtgtcagacaggtctctc

SEQ ID NO: 52291 - DNA, 25 bp, Artificial
  Probe
gaatacaagtgtcagacaggtctct

SEQ ID NO: 52292 - DNA, 25 bp, Artificial
  Probe
gatgacgtgtatgaagaagtaacag

SEQ ID NO: 52293 - DNA, 25 bp, Artificial
  Probe
tgaatacaagtgtcagacaggtctc

SEQ ID NO: 52294 - DNA, 25 bp, Artificial
  Probe
cgatgacgtgtatgaagaagtaaca

SEQ ID NO: 52295 - DNA, 25 bp, Artificial
  Probe
atgacgtgtatgaagaagtaacagc

SEQ ID NO: 52296 - DNA, 25 bp, Artificial
  Probe
tttacttctccttctatgtgggcag

SEQ ID NO: 52297 - DNA, 25 bp, Artificial
  Probe
ctttacttctccttctatgtgggca

SEQ ID NO: 52298 - DNA, 25 bp, Artificial
  Probe
gcgatgacgtgtatgaagaagtaac

SEQ ID NO: 52299 - DNA, 25 bp, Artificial
  Probe
agcgatgacgtgtatgaagaagtaa

SEQ ID NO: 52300 - DNA, 25 bp, Artificial
  Probe
aagcgatgacgtgtatgaagaagta

SEQ ID NO: 52301 - DNA, 25 bp, Artificial
  Probe
gtgaatacaagtgtcagacaggtct

SEQ ID NO: 52302 - DNA, 25 bp, Artificial
  Probe
gcttacggctttacttctccttcta

SEQ ID NO: 52303 - DNA, 25 bp, Artificial
  Probe
cgtgtatgaagaagtaacagccact

SEQ ID NO: 52304 - DNA, 25 bp, Artificial
  Probe
ttatctgtcagtgggaataatgttt

SEQ ID NO: 52305 - DNA, 25 bp, Artificial
  Probe
tttatctgtcagtgggaataatgtt

SEQ ID NO: 52306 - DNA, 25 bp, Artificial
  Probe
acggctttacttctccttctatgtg

SEQ ID NO: 52307 - DNA, 25 bp, Artificial
  Probe
atacaagtgtcagacaggtctctca

SEQ ID NO: 52308 - DNA, 25 bp, Artificial
  Probe
cttctccttctatgtgggcagtaag

SEQ ID NO: 52309 - DNA, 25 bp, Artificial
  Probe
ggctttacttctccttctatgtggg

SEQ ID NO: 52310 - DNA, 25 bp, Artificial
  Probe
tacaagtgtcagacaggtctctcaa

SEQ ID NO: 52311 - DNA, 25 bp, Artificial
  Probe
tctccttctatgtgggcagtaagat

SEQ ID NO: 52312 - DNA, 25 bp, Artificial
  Probe
caagtgtcagacaggtctctcaatg

SEQ ID NO: 52313 - DNA, 25 bp, Artificial
  Probe
ggtgaatacaagtgtcagacaggtc

SEQ ID NO: 52314 - DNA, 25 bp, Artificial
  Probe
ctccttctatgtgggcagtaagatc

SEQ ID NO: 52315 - DNA, 25 bp, Artificial
  Probe
cggctttacttctccttctatgtgg

SEQ ID NO: 52316 - DNA, 25 bp, Artificial
  Probe
ttctccttctatgtgggcagtaaga

SEQ ID NO: 52317 - DNA, 25 bp, Artificial
  Probe
aaacttcccaaacttgaccctgaaa

SEQ ID NO: 52318 - DNA, 25 bp, Artificial
  Probe
gctttacttctccttctatgtgggc

SEQ ID NO: 52319 - DNA, 25 bp, Artificial
  Probe
aactgtgagacaagattgttcctgc

SEQ ID NO: 52320 - DNA, 25 bp, Artificial
  Probe
gtctcatacacacatccgtagttat

SEQ ID NO: 52321 - DNA, 25 bp, Artificial
  Probe
tgtctcatacacacatccgtagtta

SEQ ID NO: 52322 - DNA, 25 bp, Artificial
  Probe
tctcatacacacatccgtagttatg

SEQ ID NO: 52323 - DNA, 25 bp, Artificial
  Probe
ttgtctcatacacacatccgtagtt

SEQ ID NO: 52324 - DNA, 25 bp, Artificial
  Probe
taaggtgtctctttccattccattt

SEQ ID NO: 52325 - DNA, 25 bp, Artificial
  Probe
ctaaggtgtctctttccattccatt

SEQ ID NO: 52326 - DNA, 25 bp, Artificial
  Probe
ctcatacacacatccgtagttatgt

SEQ ID NO: 52327 - DNA, 25 bp, Artificial
  Probe
cctaaggtgtctctttccattccat

SEQ ID NO: 52328 - DNA, 25 bp, Artificial
  Probe
tttgtctcatacacacatccgtagt

SEQ ID NO: 52329 - DNA, 25 bp, Artificial
  Probe
tgtctctttccattccattttctga

SEQ ID NO: 52330 - DNA, 25 bp, Artificial
  Probe
gtgtctctttccattccattttctg

SEQ ID NO: 52331 - DNA, 25 bp, Artificial
  Probe
gtctctttccattccattttctgaa

SEQ ID NO: 52332 - DNA, 25 bp, Artificial
  Probe
ggtgtctctttccattccattttct

SEQ ID NO: 52333 - DNA, 25 bp, Artificial
  Probe
aggtgtctctttccattccattttc

SEQ ID NO: 52334 - DNA, 25 bp, Artificial
  Probe
aaggtgtctctttccattccatttt

SEQ ID NO: 52335 - DNA, 25 bp, Artificial
  Probe
atccgtagttatgtgggttctacac

SEQ ID NO: 52336 - DNA, 25 bp, Artificial
  Probe
catccgtagttatgtgggttctaca

SEQ ID NO: 52337 - DNA, 25 bp, Artificial
  Probe
acagagaggagaaggcttgtgattg

SEQ ID NO: 52338 - DNA, 25 bp, Artificial
  Probe
ttccattccattttctgaaaccaca

SEQ ID NO: 52339 - DNA, 25 bp, Artificial
  Probe
ttttgtctcatacacacatccgtag

SEQ ID NO: 52340 - DNA, 25 bp, Artificial
  Probe
acatccgtagttatgtgggttctac

SEQ ID NO: 52341 - DNA, 25 bp, Artificial
  Probe
gagcgttctggatgacttcttcaca

SEQ ID NO: 52342 - DNA, 25 bp, Artificial
  Probe
agcgttctggatgacttcttcacag

SEQ ID NO: 52343 - DNA, 25 bp, Artificial
  Probe
tccattccattttctgaaaccacag

SEQ ID NO: 52344 - DNA, 25 bp, Artificial
  Probe
gatgacttcttcacagccacagagg

SEQ ID NO: 52345 - DNA, 25 bp, Artificial
  Probe
ggatgacttcttcacagccacagag

SEQ ID NO: 52346 - DNA, 25 bp, Artificial
  Probe
ctttccattccattttctgaaacca

SEQ ID NO: 52347 - DNA, 25 bp, Artificial
  Probe
tctttccattccattttctgaaacc

SEQ ID NO: 52348 - DNA, 25 bp, Artificial
  Probe
tttccattccattttctgaaaccac

SEQ ID NO: 52349 - DNA, 25 bp, Artificial
  Probe
acctaaggtgtctctttccattcca

SEQ ID NO: 52350 - DNA, 25 bp, Artificial
  Probe
ctctttccattccattttctgaaac

SEQ ID NO: 52351 - DNA, 25 bp, Artificial
  Probe
ttctggatgacttcttcacagccac

SEQ ID NO: 52352 - DNA, 25 bp, Artificial
  Probe
gttctggatgacttcttcacagcca

SEQ ID NO: 52353 - DNA, 25 bp, Artificial
  Probe
tctctttccattccattttctgaaa

SEQ ID NO: 52354 - DNA, 25 bp, Artificial
  Probe
tttctgaaaccacagagaggagaag

SEQ ID NO: 52355 - DNA, 25 bp, Artificial
  Probe
gaaaccacagagaggagaaggcttg

SEQ ID NO: 52356 - DNA, 25 bp, Artificial
  Probe
attccattttctgaaaccacagaga

SEQ ID NO: 52357 - DNA, 25 bp, Artificial
  Probe
cattccattttctgaaaccacagag

SEQ ID NO: 52358 - DNA, 25 bp, Artificial
  Probe
ttccattttctgaaaccacagagag

SEQ ID NO: 52359 - DNA, 25 bp, Artificial
  Probe
ggaagagctgtaccacctcatgatg

SEQ ID NO: 52360 - DNA, 25 bp, Artificial
  Probe
ttctgaaaccacagagaggagaagg

SEQ ID NO: 52361 - DNA, 25 bp, Artificial
  Probe
cattttctgaaaccacagagaggag

SEQ ID NO: 52362 - DNA, 25 bp, Artificial
  Probe
attttctgaaaccacagagaggaga

SEQ ID NO: 52363 - DNA, 25 bp, Artificial
  Probe
ttttctgaaaccacagagaggagaa

SEQ ID NO: 52364 - DNA, 25 bp, Artificial
  Probe
ccattccattttctgaaaccacaga

SEQ ID NO: 52365 - DNA, 25 bp, Artificial
  Probe
cttgataatggactgaacctctgaa

SEQ ID NO: 52366 - DNA, 25 bp, Artificial
  Probe
gttctgagtcttatcttctgtgagg

SEQ ID NO: 52367 - DNA, 25 bp, Artificial
  Probe
ggttctgagtcttatcttctgtgag

SEQ ID NO: 52368 - DNA, 25 bp, Artificial
  Probe
ttgataatggactgaacctctgaac

SEQ ID NO: 52369 - DNA, 25 bp, Artificial
  Probe
aggttctgagtcttatcttctgtga

SEQ ID NO: 52370 - DNA, 25 bp, Artificial
  Probe
ttatccaaggagatcatagaccaga

SEQ ID NO: 52371 - DNA, 25 bp, Artificial
  Probe
tatccaaggagatcatagaccagag

SEQ ID NO: 52372 - DNA, 25 bp, Artificial
  Probe
gataatggactgaacctctgaacct

SEQ ID NO: 52373 - DNA, 25 bp, Artificial
  Probe
ccttgataatggactgaacctctga

SEQ ID NO: 52374 - DNA, 25 bp, Artificial
  Probe
ctcaaccattcggaagttaagtgaa

SEQ ID NO: 52375 - DNA, 25 bp, Artificial
  Probe
ataatggactgaacctctgaacctg

SEQ ID NO: 52376 - DNA, 25 bp, Artificial
  Probe
tgataatggactgaacctctgaacc

SEQ ID NO: 52377 - DNA, 25 bp, Artificial
  Probe
aaggaagaggagatcatactggaac

SEQ ID NO: 52378 - DNA, 25 bp, Artificial
  Probe
caggttctgagtcttatcttctgtg

SEQ ID NO: 52379 - DNA, 25 bp, Artificial
  Probe
gaagaggagatcatactggaacaca

SEQ ID NO: 52380 - DNA, 25 bp, Artificial
  Probe
gagtcagagtaacatggtcaactac

SEQ ID NO: 52381 - DNA, 25 bp, Artificial
  Probe
gtcagagtaacatggtcaactacag

SEQ ID NO: 52382 - DNA, 25 bp, Artificial
  Probe
tgagtcagagtaacatggtcaacta

SEQ ID NO: 52383 - DNA, 25 bp, Artificial
  Probe
agtcagagtaacatggtcaactaca

SEQ ID NO: 52384 - DNA, 25 bp, Artificial
  Probe
atccaaggagatcatagaccagagt

SEQ ID NO: 52385 - DNA, 25 bp, Artificial
  Probe
caaccattcggaagttaagtgaatt

SEQ ID NO: 52386 - DNA, 25 bp, Artificial
  Probe
ggaagaggagatcatactggaacac

SEQ ID NO: 52387 - DNA, 25 bp, Artificial
  Probe
atgagtcagagtaacatggtcaact

SEQ ID NO: 52388 - DNA, 25 bp, Artificial
  Probe
aggaagaggagatcatactggaaca

SEQ ID NO: 52389 - DNA, 25 bp, Artificial
  Probe
tcaaccattcggaagttaagtgaat

SEQ ID NO: 52390 - DNA, 25 bp, Artificial
  Probe
agcaggttctgagtcttatcttctg

SEQ ID NO: 52391 - DNA, 25 bp, Artificial
  Probe
cagcaggttctgagtcttatcttct

SEQ ID NO: 52392 - DNA, 25 bp, Artificial
  Probe
aagaggagatcatactggaacacag

SEQ ID NO: 52393 - DNA, 25 bp, Artificial
  Probe
gcaggttctgagtcttatcttctgt

SEQ ID NO: 52394 - DNA, 25 bp, Artificial
  Probe
caaggagatcatagaccagagtcag

SEQ ID NO: 52395 - DNA, 25 bp, Artificial
  Probe
ttctgagtcttatcttctgtgaggg

SEQ ID NO: 52396 - DNA, 25 bp, Artificial
  Probe
aatggactgaacctctgaacctgta

SEQ ID NO: 52397 - DNA, 25 bp, Artificial
  Probe
taatggactgaacctctgaacctgt

SEQ ID NO: 52398 - DNA, 25 bp, Artificial
  Probe
gccttgataatggactgaacctctg

SEQ ID NO: 52399 - DNA, 25 bp, Artificial
  Probe
tcagagtaacatggtcaactacagc

SEQ ID NO: 52400 - DNA, 25 bp, Artificial
  Probe
aaaggaagaggagatcatactggaa

SEQ ID NO: 52401 - DNA, 25 bp, Artificial
  Probe
tttatccaaggagatcatagaccag

SEQ ID NO: 52402 - DNA, 25 bp, Artificial
  Probe
gagtaacatggtcaactacagcctt

SEQ ID NO: 52403 - DNA, 25 bp, Artificial
  Probe
caaaggaagaggagatcatactgga

SEQ ID NO: 52404 - DNA, 25 bp, Artificial
  Probe
aaggagatcatagaccagagtcagg

SEQ ID NO: 52405 - DNA, 25 bp, Artificial
  Probe
gctcaaccattcggaagttaagtga

SEQ ID NO: 52406 - DNA, 25 bp, Artificial
  Probe
tccaaggagatcatagaccagagtc

SEQ ID NO: 52407 - DNA, 25 bp, Artificial
  Probe
ccaaggagatcatagaccagagtca

SEQ ID NO: 52408 - DNA, 25 bp, Artificial
  Probe
tactttactcctgagctgaatgaaa

SEQ ID NO: 52409 - DNA, 25 bp, Artificial
  Probe
gcagcaggttctgagtcttatcttc

SEQ ID NO: 52410 - DNA, 25 bp, Artificial
  Probe
agtcaacatctctgtcgtcactaac

SEQ ID NO: 52411 - DNA, 25 bp, Artificial
  Probe
cagtcaacatctctgtcgtcactaa

SEQ ID NO: 52412 - DNA, 25 bp, Artificial
  Probe
gtcaacatctctgtcgtcactaaca

SEQ ID NO: 52413 - DNA, 25 bp, Artificial
  Probe
ctatggaggaagaagcaacattggc

SEQ ID NO: 52414 - DNA, 25 bp, Artificial
  Probe
ccagtcaacatctctgtcgtcacta

SEQ ID NO: 52415 - DNA, 25 bp, Artificial
  Probe
gtcgtcactaacagcctctcttctg

SEQ ID NO: 52416 - DNA, 25 bp, Artificial
  Probe
gaggaagaagcaacattggctatgg

SEQ ID NO: 52417 - DNA, 25 bp, Artificial
  Probe
ggaggaagaagcaacattggctatg

SEQ ID NO: 52418 - DNA, 25 bp, Artificial
  Probe
gctatggaggaagaagcaacattgg

SEQ ID NO: 52419 - DNA, 25 bp, Artificial
  Probe
ggctatggaggaagaagcaacattg

SEQ ID NO: 52420 - DNA, 25 bp, Artificial
  Probe
tcaacatctctgtcgtcactaacag

SEQ ID NO: 52421 - DNA, 25 bp, Artificial
  Probe
tgtcgtcactaacagcctctcttct

SEQ ID NO: 52422 - DNA, 25 bp, Artificial
  Probe
tggaggaagaagcaacattggctat

SEQ ID NO: 52423 - DNA, 25 bp, Artificial
  Probe
atggaggaagaagcaacattggcta

SEQ ID NO: 52424 - DNA, 25 bp, Artificial
  Probe
tatggaggaagaagcaacattggct

SEQ ID NO: 52425 - DNA, 25 bp, Artificial
  Probe
tggctatggaggaagaagcaacatt

SEQ ID NO: 52426 - DNA, 25 bp, Artificial
  Probe
gaccagtcaacatctctgtcgtcac

SEQ ID NO: 52427 - DNA, 25 bp, Artificial
  Probe
gaagaagcaacattggctatggctc

SEQ ID NO: 52428 - DNA, 25 bp, Artificial
  Probe
ctggctatggaggaagaagcaacat

SEQ ID NO: 52429 - DNA, 25 bp, Artificial
  Probe
ttctggctatggaggaagaagcaac

SEQ ID NO: 52430 - DNA, 25 bp, Artificial
  Probe
aagaagcaacattggctatggctct

SEQ ID NO: 52431 - DNA, 25 bp, Artificial
  Probe
caacatctctgtcgtcactaacagc

SEQ ID NO: 52432 - DNA, 25 bp, Artificial
  Probe
agttggaccagtcaacatctctgtc

SEQ ID NO: 52433 - DNA, 25 bp, Artificial
  Probe
gagttggaccagtcaacatctctgt

SEQ ID NO: 52434 - DNA, 25 bp, Artificial
  Probe
aaggagttggaccagtcaacatctc

SEQ ID NO: 52435 - DNA, 25 bp, Artificial
  Probe
gaaggagttggaccagtcaacatct

SEQ ID NO: 52436 - DNA, 25 bp, Artificial
  Probe
agaaggagttggaccagtcaacatc

SEQ ID NO: 52437 - DNA, 25 bp, Artificial
  Probe
gagaaggagttggaccagtcaacat

SEQ ID NO: 52438 - DNA, 25 bp, Artificial
  Probe
ggagttggaccagtcaacatctctg

SEQ ID NO: 52439 - DNA, 25 bp, Artificial
  Probe
aggagttggaccagtcaacatctct

SEQ ID NO: 52440 - DNA, 25 bp, Artificial
  Probe
ctgtcgtcactaacagcctctcttc

SEQ ID NO: 52441 - DNA, 25 bp, Artificial
  Probe
aacatctctgtcgtcactaacagcc

SEQ ID NO: 52442 - DNA, 25 bp, Artificial
  Probe
catctctgtcgtcactaacagcctc

SEQ ID NO: 52443 - DNA, 25 bp, Artificial
  Probe
atctctgtcgtcactaacagcctct

SEQ ID NO: 52444 - DNA, 25 bp, Artificial
  Probe
tctgtcgtcactaacagcctctctt

SEQ ID NO: 52445 - DNA, 25 bp, Artificial
  Probe
gtaccaggagctcatgaacaccaag

SEQ ID NO: 52446 - DNA, 25 bp, Artificial
  Probe
gctaatatgcaaggtgtctacgtta

SEQ ID NO: 52447 - DNA, 25 bp, Artificial
  Probe
aatatgcaaggtgtctacgttaaga

SEQ ID NO: 52448 - DNA, 25 bp, Artificial
  Probe
atatgcaaggtgtctacgttaagag

SEQ ID NO: 52449 - DNA, 25 bp, Artificial
  Probe
taatatgcaaggtgtctacgttaag

SEQ ID NO: 52450 - DNA, 25 bp, Artificial
  Probe
ctaatatgcaaggtgtctacgttaa

SEQ ID NO: 52451 - DNA, 25 bp, Artificial
  Probe
atttacctgagacactttctatggc

SEQ ID NO: 52452 - DNA, 25 bp, Artificial
  Probe
ggagtacaaacaggaaagtaagaga

SEQ ID NO: 52453 - DNA, 25 bp, Artificial
  Probe
tggagtacaaacaggaaagtaagag

SEQ ID NO: 52454 - DNA, 25 bp, Artificial
  Probe
aattgttcacttcagaatttgagcc

SEQ ID NO: 52455 - DNA, 25 bp, Artificial
  Probe
gaattgttcacttcagaatttgagc

SEQ ID NO: 52456 - DNA, 25 bp, Artificial
  Probe
aatttacctgagacactttctatgg

SEQ ID NO: 52457 - DNA, 25 bp, Artificial
  Probe
agctaatatgcaaggtgtctacgtt

SEQ ID NO: 52458 - DNA, 25 bp, Artificial
  Probe
aagctaatatgcaaggtgtctacgt

SEQ ID NO: 52459 - DNA, 25 bp, Artificial
  Probe
aggaattgttcacttcagaatttga

SEQ ID NO: 52460 - DNA, 25 bp, Artificial
  Probe
attgttcacttcagaatttgagcca

SEQ ID NO: 52461 - DNA, 25 bp, Artificial
  Probe
ggaattgttcacttcagaatttgag

SEQ ID NO: 52462 - DNA, 25 bp, Artificial
  Probe
gagtacaaacaggaaagtaagagaa

SEQ ID NO: 52463 - DNA, 25 bp, Artificial
  Probe
aaggaattgttcacttcagaatttg

SEQ ID NO: 52464 - DNA, 25 bp, Artificial
  Probe
caaggaattgttcacttcagaattt

SEQ ID NO: 52465 - DNA, 25 bp, Artificial
  Probe
gcatttaaagcaatatacccagaca

SEQ ID NO: 52466 - DNA, 25 bp, Artificial
  Probe
ggcatttaaagcaatatacccagac

SEQ ID NO: 52467 - DNA, 25 bp, Artificial
  Probe
ttgttcacttcagaatttgagccag

SEQ ID NO: 52468 - DNA, 25 bp, Artificial
  Probe
agtacaaacaggaaagtaagagaaa

SEQ ID NO: 52469 - DNA, 25 bp, Artificial
  Probe
aacaacgaagacaaatttacctgag

SEQ ID NO: 52470 - DNA, 25 bp, Artificial
  Probe
caacgaagacaaatttacctgagac

SEQ ID NO: 52471 - DNA, 25 bp, Artificial
  Probe
aacgaagacaaatttacctgagaca

SEQ ID NO: 52472 - DNA, 25 bp, Artificial
  Probe
acaacgaagacaaatttacctgaga

SEQ ID NO: 52473 - DNA, 25 bp, Artificial
  Probe
tccgttatacaaggaattgttcact

SEQ ID NO: 52474 - DNA, 25 bp, Artificial
  Probe
tatgcaaggtgtctacgttaagagc

SEQ ID NO: 52475 - DNA, 25 bp, Artificial
  Probe
caaagctaatatgcaaggtgtctac

SEQ ID NO: 52476 - DNA, 25 bp, Artificial
  Probe
ccgttatacaaggaattgttcactt

SEQ ID NO: 52477 - DNA, 25 bp, Artificial
  Probe
agacaaatttacctgagacactttc

SEQ ID NO: 52478 - DNA, 25 bp, Artificial
  Probe
tctaacaaagctaatatgcaaggtg

SEQ ID NO: 52479 - DNA, 25 bp, Artificial
  Probe
acaaggaattgttcacttcagaatt

SEQ ID NO: 52480 - DNA, 25 bp, Artificial
  Probe
aatatacccagacattgtgcgactc

SEQ ID NO: 52481 - DNA, 25 bp, Artificial
  Probe
cgaagacaaatttacctgagacact

SEQ ID NO: 52482 - DNA, 25 bp, Artificial
  Probe
taacaacgaagacaaatttacctga

SEQ ID NO: 52483 - DNA, 25 bp, Artificial
  Probe
gaagacaaatttacctgagacactt

SEQ ID NO: 52484 - DNA, 25 bp, Artificial
  Probe
gacaaatttacctgagacactttct

SEQ ID NO: 52485 - DNA, 25 bp, Artificial
  Probe
acgaagacaaatttacctgagacac

SEQ ID NO: 52486 - DNA, 25 bp, Artificial
  Probe
gactgaagacgaaatcgcattgttt

SEQ ID NO: 52487 - DNA, 25 bp, Artificial
  Probe
aaagctaatatgcaaggtgtctacg

SEQ ID NO: 52488 - DNA, 25 bp, Artificial
  Probe
aagacaaatttacctgagacacttt

SEQ ID NO: 52489 - DNA, 25 bp, Artificial
  Probe
ttctaacaaagctaatatgcaaggt

SEQ ID NO: 52490 - DNA, 25 bp, Artificial
  Probe
tacaaggaattgttcacttcagaat

SEQ ID NO: 52491 - DNA, 25 bp, Artificial
  Probe
agttagagtaattaggcaacaggtt

SEQ ID NO: 52492 - DNA, 25 bp, Artificial
  Probe
tagttagagtaattaggcaacaggt

SEQ ID NO: 52493 - DNA, 25 bp, Artificial
  Probe
ctagttagagtaattaggcaacagg

SEQ ID NO: 52494 - DNA, 25 bp, Artificial
  Probe
caaactacagtgtgtcatcttgtga

SEQ ID NO: 52495 - DNA, 25 bp, Artificial
  Probe
ttccaaacccttgttgttgattgag

SEQ ID NO: 52496 - DNA, 25 bp, Artificial
  Probe
cttccaaacccttgttgttgattga

SEQ ID NO: 52497 - DNA, 25 bp, Artificial
  Probe
acctagttagagtaattaggcaaca

SEQ ID NO: 52498 - DNA, 25 bp, Artificial
  Probe
tgacctagttagagtaattaggcaa

SEQ ID NO: 52499 - DNA, 25 bp, Artificial
  Probe
cctagttagagtaattaggcaacag

SEQ ID NO: 52500 - DNA, 25 bp, Artificial
  Probe
gacctagttagagtaattaggcaac

SEQ ID NO: 52501 - DNA, 25 bp, Artificial
  Probe
atgacctagttagagtaattaggca

SEQ ID NO: 52502 - DNA, 25 bp, Artificial
  Probe
catgacctagttagagtaattaggc

SEQ ID NO: 52503 - DNA, 25 bp, Artificial
  Probe
cactgagaaccatttctaaccacag

SEQ ID NO: 52504 - DNA, 25 bp, Artificial
  Probe
ggcttgttgtttcttttaactccat

SEQ ID NO: 52505 - DNA, 25 bp, Artificial
  Probe
tgttgtttcttttaactccataggg

SEQ ID NO: 52506 - DNA, 25 bp, Artificial
  Probe
gcttccaaacccttgttgttgattg

SEQ ID NO: 52507 - DNA, 25 bp, Artificial
  Probe
gtgggcttgttgtttcttttaactc

SEQ ID NO: 52508 - DNA, 25 bp, Artificial
  Probe
ttggtgggcttgttgtttcttttaa

SEQ ID NO: 52509 - DNA, 25 bp, Artificial
  Probe
gcttgttgtttcttttaactccata

SEQ ID NO: 52510 - DNA, 25 bp, Artificial
  Probe
taactgcactgagaaccatttctaa

SEQ ID NO: 52511 - DNA, 25 bp, Artificial
  Probe
gggcttgttgtttcttttaactcca

SEQ ID NO: 52512 - DNA, 25 bp, Artificial
  Probe
tgggcttgttgtttcttttaactcc

SEQ ID NO: 52513 - DNA, 25 bp, Artificial
  Probe
gaaccatttctaaccacagcccttg

SEQ ID NO: 52514 - DNA, 25 bp, Artificial
  Probe
acaaactacagtgtgtcatcttgtg

SEQ ID NO: 52515 - DNA, 25 bp, Artificial
  Probe
ttgttgtttcttttaactccatagg

SEQ ID NO: 52516 - DNA, 25 bp, Artificial
  Probe
ggtgggcttgttgtttcttttaact

SEQ ID NO: 52517 - DNA, 25 bp, Artificial
  Probe
aactgcactgagaaccatttctaac

SEQ ID NO: 52518 - DNA, 25 bp, Artificial
  Probe
tggtgggcttgttgtttcttttaac

SEQ ID NO: 52519 - DNA, 25 bp, Artificial
  Probe
tccaaacccttgttgttgattgagc

SEQ ID NO: 52520 - DNA, 25 bp, Artificial
  Probe
actgagaaccatttctaaccacagc

SEQ ID NO: 52521 - DNA, 25 bp, Artificial
  Probe
cttgttgttgattgagcccagttcc

SEQ ID NO: 52522 - DNA, 25 bp, Artificial
  Probe
ccttgttgttgattgagcccagttc

SEQ ID NO: 52523 - DNA, 25 bp, Artificial
  Probe
agcttccaaacccttgttgttgatt

SEQ ID NO: 52524 - DNA, 25 bp, Artificial
  Probe
gcactgagaaccatttctaaccaca

SEQ ID NO: 52525 - DNA, 25 bp, Artificial
  Probe
ctgagaaccatttctaaccacagcc

SEQ ID NO: 52526 - DNA, 25 bp, Artificial
  Probe
aaactacagtgtgtcatcttgtgac

SEQ ID NO: 52527 - DNA, 25 bp, Artificial
  Probe
cttgttgtttcttttaactccatag

SEQ ID NO: 52528 - DNA, 25 bp, Artificial
  Probe
cagcttccaaacccttgttgttgat

SEQ ID NO: 52529 - DNA, 25 bp, Artificial
  Probe
ctgcactgagaaccatttctaacca

SEQ ID NO: 52530 - DNA, 25 bp, Artificial
  Probe
actgcactgagaaccatttctaacc

SEQ ID NO: 52531 - DNA, 25 bp, Artificial
  Probe
caaacccttgttgttgattgagccc

SEQ ID NO: 52532 - DNA, 25 bp, Artificial
  Probe
ccaaacccttgttgttgattgagcc

SEQ ID NO: 52533 - DNA, 25 bp, Artificial
  Probe
tgcactgagaaccatttctaaccac

SEQ ID NO: 52534 - DNA, 25 bp, Artificial
  Probe
ctcacaaactacagtgtgtcatctt

SEQ ID NO: 52535 - DNA, 25 bp, Artificial
  Probe
tcacaaactacagtgtgtcatcttg

SEQ ID NO: 52536 - DNA, 25 bp, Artificial
  Probe
tagatttctcactgaagctcttctc

SEQ ID NO: 52537 - DNA, 25 bp, Artificial
  Probe
ttagatttctcactgaagctcttct

SEQ ID NO: 52538 - DNA, 25 bp, Artificial
  Probe
cttagatttctcactgaagctcttc

SEQ ID NO: 52539 - DNA, 25 bp, Artificial
  Probe
gatttctcactgaagctcttctcac

SEQ ID NO: 52540 - DNA, 25 bp, Artificial
  Probe
agatttctcactgaagctcttctca

SEQ ID NO: 52541 - DNA, 25 bp, Artificial
  Probe
ttctcactgaagctcttctcacact

SEQ ID NO: 52542 - DNA, 25 bp, Artificial
  Probe
atttctcactgaagctcttctcaca

SEQ ID NO: 52543 - DNA, 25 bp, Artificial
  Probe
tctcactgaagctcttctcacactc

SEQ ID NO: 52544 - DNA, 25 bp, Artificial
  Probe
gactgtttgtagcggaagcacttag

SEQ ID NO: 52545 - DNA, 25 bp, Artificial
  Probe
tttctcactgaagctcttctcacac

SEQ ID NO: 52546 - DNA, 25 bp, Artificial
  Probe
ctcactgaagctcttctcacactcc

SEQ ID NO: 52547 - DNA, 25 bp, Artificial
  Probe
ggactgtttgtagcggaagcactta

SEQ ID NO: 52548 - DNA, 25 bp, Artificial
  Probe
gcttagatttctcactgaagctctt

SEQ ID NO: 52549 - DNA, 25 bp, Artificial
  Probe
caaatgaaggagacttcgtgcttgc

SEQ ID NO: 52550 - DNA, 25 bp, Artificial
  Probe
gcaaatgaaggagacttcgtgcttg

SEQ ID NO: 52551 - DNA, 25 bp, Artificial
  Probe
ataattgactgtctgtaacatgctg

SEQ ID NO: 52552 - DNA, 25 bp, Artificial
  Probe
tctgtctgtctttctttaggatagc

SEQ ID NO: 52553 - DNA, 25 bp, Artificial
  Probe
gctttcctaaatctgtctgtctttc

SEQ ID NO: 52554 - DNA, 25 bp, Artificial
  Probe
tgctttcctaaatctgtctgtcttt

SEQ ID NO: 52555 - DNA, 25 bp, Artificial
  Probe
ctgctttcctaaatctgtctgtctt

SEQ ID NO: 52556 - DNA, 25 bp, Artificial
  Probe
ttaaatcactctatcagacgcttgt

SEQ ID NO: 52557 - DNA, 25 bp, Artificial
  Probe
tataattgactgtctgtaacatgct

SEQ ID NO: 52558 - DNA, 25 bp, Artificial
  Probe
gtataattgactgtctgtaacatgc

SEQ ID NO: 52559 - DNA, 25 bp, Artificial
  Probe
ctttcctaaatctgtctgtctttct

SEQ ID NO: 52560 - DNA, 25 bp, Artificial
  Probe
gtggtgtttgtcaaatgttctatgt

SEQ ID NO: 52561 - DNA, 25 bp, Artificial
  Probe
tgtggtgtttgtcaaatgttctatg

SEQ ID NO: 52562 - DNA, 25 bp, Artificial
  Probe
ctgtggtgtttgtcaaatgttctat

SEQ ID NO: 52563 - DNA, 25 bp, Artificial
  Probe
attaaatcactctatcagacgcttg

SEQ ID NO: 52564 - DNA, 25 bp, Artificial
  Probe
tctgtggtgtttgtcaaatgttcta

SEQ ID NO: 52565 - DNA, 25 bp, Artificial
  Probe
tttctgtggtgtttgtcaaatgttc

SEQ ID NO: 52566 - DNA, 25 bp, Artificial
  Probe
tggtgtttgtcaaatgttctatgta

SEQ ID NO: 52567 - DNA, 25 bp, Artificial
  Probe
ttcctaaatctgtctgtctttcttt

SEQ ID NO: 52568 - DNA, 25 bp, Artificial
  Probe
tttcctaaatctgtctgtctttctt

SEQ ID NO: 52569 - DNA, 25 bp, Artificial
  Probe
taaatcactctatcagacgcttgtc

SEQ ID NO: 52570 - DNA, 25 bp, Artificial
  Probe
ttctgtggtgtttgtcaaatgttct

SEQ ID NO: 52571 - DNA, 25 bp, Artificial
  Probe
aaatctgtctgtctttctttaggat

SEQ ID NO: 52572 - DNA, 25 bp, Artificial
  Probe
ctattaaatcactctatcagacgct

SEQ ID NO: 52573 - DNA, 25 bp, Artificial
  Probe
tctattaaatcactctatcagacgc

SEQ ID NO: 52574 - DNA, 25 bp, Artificial
  Probe
gtctgtctttctttaggatagctgt

SEQ ID NO: 52575 - DNA, 25 bp, Artificial
  Probe
tgtctgtctttctttaggatagctg

SEQ ID NO: 52576 - DNA, 25 bp, Artificial
  Probe
ctgtctgtctttctttaggatagct

SEQ ID NO: 52577 - DNA, 25 bp, Artificial
  Probe
gttctatgtataattgactgtctgt

SEQ ID NO: 52578 - DNA, 25 bp, Artificial
  Probe
tgttctatgtataattgactgtctg

SEQ ID NO: 52579 - DNA, 25 bp, Artificial
  Probe
atctgtctgtctttctttaggatag

SEQ ID NO: 52580 - DNA, 25 bp, Artificial
  Probe
tattaaatcactctatcagacgctt

SEQ ID NO: 52581 - DNA, 25 bp, Artificial
  Probe
ttctttaggatagctgtatgtctgt

SEQ ID NO: 52582 - DNA, 25 bp, Artificial
  Probe
atagagctgctttcctaaatctgtc

SEQ ID NO: 52583 - DNA, 25 bp, Artificial
  Probe
gatagagctgctttcctaaatctgt

SEQ ID NO: 52584 - DNA, 25 bp, Artificial
  Probe
ggtgtttgtcaaatgttctatgtat

SEQ ID NO: 52585 - DNA, 25 bp, Artificial
  Probe
tctgtctttctttaggatagctgta

SEQ ID NO: 52586 - DNA, 25 bp, Artificial
  Probe
gctgctttcctaaatctgtctgtct

SEQ ID NO: 52587 - DNA, 25 bp, Artificial
  Probe
tgtataattgactgtctgtaacatg

SEQ ID NO: 52588 - DNA, 25 bp, Artificial
  Probe
aatctgtctgtctttctttaggata

SEQ ID NO: 52589 - DNA, 25 bp, Artificial
  Probe
tagagctgctttcctaaatctgtct

SEQ ID NO: 52590 - DNA, 25 bp, Artificial
  Probe
taaatctgtctgtctttctttagga

SEQ ID NO: 52591 - DNA, 25 bp, Artificial
  Probe
tcctaaatctgtctgtctttcttta

SEQ ID NO: 52592 - DNA, 25 bp, Artificial
  Probe
tctttaggatagctgtatgtctgta

SEQ ID NO: 52593 - DNA, 25 bp, Artificial
  Probe
tttctttaggatagctgtatgtctg

SEQ ID NO: 52594 - DNA, 25 bp, Artificial
  Probe
gtctttctttaggatagctgtatgt

SEQ ID NO: 52595 - DNA, 25 bp, Artificial
  Probe
tgtctttctttaggatagctgtatg

SEQ ID NO: 52596 - DNA, 25 bp, Artificial
  Probe
gatgaggtaactgatgcttctcttg

SEQ ID NO: 52597 - DNA, 25 bp, Artificial
  Probe
taacggatgaggtaactgatgcttc

SEQ ID NO: 52598 - DNA, 25 bp, Artificial
  Probe
gtaacggatgaggtaactgatgctt

SEQ ID NO: 52599 - DNA, 25 bp, Artificial
  Probe
ggatgaggtaactgatgcttctctt

SEQ ID NO: 52600 - DNA, 25 bp, Artificial
  Probe
cctttcagatttcctaaccatcaaa

SEQ ID NO: 52601 - DNA, 25 bp, Artificial
  Probe
gcctttcagatttcctaaccatcaa

SEQ ID NO: 52602 - DNA, 25 bp, Artificial
  Probe
ctgtaacggatgaggtaactgatgc

SEQ ID NO: 52603 - DNA, 25 bp, Artificial
  Probe
gctgtaacggatgaggtaactgatg

SEQ ID NO: 52604 - DNA, 25 bp, Artificial
  Probe
cctggatcagatgtgttgctactag

SEQ ID NO: 52605 - DNA, 25 bp, Artificial
  Probe
tgtaacggatgaggtaactgatgct

SEQ ID NO: 52606 - DNA, 25 bp, Artificial
  Probe
aacggatgaggtaactgatgcttct

SEQ ID NO: 52607 - DNA, 25 bp, Artificial
  Probe
tggatcagatgtgttgctactagtc

SEQ ID NO: 52608 - DNA, 25 bp, Artificial
  Probe
aacctttcactcagcctctcaaatc

SEQ ID NO: 52609 - DNA, 25 bp, Artificial
  Probe
ggatcagatgtgttgctactagtct

SEQ ID NO: 52610 - DNA, 25 bp, Artificial
  Probe
ggctgtaacggatgaggtaactgat

SEQ ID NO: 52611 - DNA, 25 bp, Artificial
  Probe
gaacctttcactcagcctctcaaat

SEQ ID NO: 52612 - DNA, 25 bp, Artificial
  Probe
cggatgaggtaactgatgcttctct

SEQ ID NO: 52613 - DNA, 25 bp, Artificial
  Probe
ctggatcagatgtgttgctactagt

SEQ ID NO: 52614 - DNA, 25 bp, Artificial
  Probe
acggatgaggtaactgatgcttctc

SEQ ID NO: 52615 - DNA, 25 bp, Artificial
  Probe
gatttcctaaccatcaaaagaacct

SEQ ID NO: 52616 - DNA, 25 bp, Artificial
  Probe
agatttcctaaccatcaaaagaacc

SEQ ID NO: 52617 - DNA, 25 bp, Artificial
  Probe
atttcctaaccatcaaaagaacctt

SEQ ID NO: 52618 - DNA, 25 bp, Artificial
  Probe
cttcaaaggacggacttcagttagc

SEQ ID NO: 52619 - DNA, 25 bp, Artificial
  Probe
ttcagatttcctaaccatcaaaaga

SEQ ID NO: 52620 - DNA, 25 bp, Artificial
  Probe
gtatcagcagggtcagaaatccaga

SEQ ID NO: 52621 - DNA, 25 bp, Artificial
  Probe
cagatttcctaaccatcaaaagaac

SEQ ID NO: 52622 - DNA, 25 bp, Artificial
  Probe
aaggacggacttcagttagctcttc

SEQ ID NO: 52623 - DNA, 25 bp, Artificial
  Probe
tcagatttcctaaccatcaaaagaa

SEQ ID NO: 52624 - DNA, 25 bp, Artificial
  Probe
acacctatttcctcatctgacggat

SEQ ID NO: 52625 - DNA, 25 bp, Artificial
  Probe
ggtttgaacaggaagcccaatctag

SEQ ID NO: 52626 - DNA, 25 bp, Artificial
  Probe
agaacctttcactcagcctctcaaa

SEQ ID NO: 52627 - DNA, 25 bp, Artificial
  Probe
aagaacctttcactcagcctctcaa

SEQ ID NO: 52628 - DNA, 25 bp, Artificial
  Probe
tgtatcagcagggtcagaaatccag

SEQ ID NO: 52629 - DNA, 25 bp, Artificial
  Probe
tttcagatttcctaaccatcaaaag

SEQ ID NO: 52630 - DNA, 25 bp, Artificial
  Probe
ctttcagatttcctaaccatcaaaa

SEQ ID NO: 52631 - DNA, 25 bp, Artificial
  Probe
ccttcaaaggacggacttcagttag

SEQ ID NO: 52632 - DNA, 25 bp, Artificial
  Probe
ccctggatcagatgtgttgctacta

SEQ ID NO: 52633 - DNA, 25 bp, Artificial
  Probe
ggacggacttcagttagctcttcag

SEQ ID NO: 52634 - DNA, 25 bp, Artificial
  Probe
ctatttcctcatctgacggatgtgt

SEQ ID NO: 52635 - DNA, 25 bp, Artificial
  Probe
gaatgggctgtaacggatgaggtaa

SEQ ID NO: 52636 - DNA, 25 bp, Artificial
  Probe
tatcagcagggtcagaaatccagac

SEQ ID NO: 52637 - DNA, 25 bp, Artificial
  Probe
gacagcacagtctcaaggatcatgt

SEQ ID NO: 52638 - DNA, 25 bp, Artificial
  Probe
aaaggacggacttcagttagctctt

SEQ ID NO: 52639 - DNA, 25 bp, Artificial
  Probe
tatttcctcatctgacggatgtgtg

SEQ ID NO: 52640 - DNA, 25 bp, Artificial
  Probe
cctaaccatcaaaagaacctttcac

SEQ ID NO: 52641 - DNA, 25 bp, Artificial
  Probe
tagatattggcatacagagtccaga

SEQ ID NO: 52642 - DNA, 25 bp, Artificial
  Probe
ctagatattggcatacagagtccag

SEQ ID NO: 52643 - DNA, 25 bp, Artificial
  Probe
gatattggcatacagagtccagaag

SEQ ID NO: 52644 - DNA, 25 bp, Artificial
  Probe
agatattggcatacagagtccagaa

SEQ ID NO: 52645 - DNA, 25 bp, Artificial
  Probe
atattggcatacagagtccagaagg

SEQ ID NO: 52646 - DNA, 25 bp, Artificial
  Probe
gaggtgacaaatacagtgaagatcc

SEQ ID NO: 52647 - DNA, 25 bp, Artificial
  Probe
ggaggtgacaaatacagtgaagatc

SEQ ID NO: 52648 - DNA, 25 bp, Artificial
  Probe
gctaggaatgagttcatatgtcagt

SEQ ID NO: 52649 - DNA, 25 bp, Artificial
  Probe
agctaggaatgagttcatatgtcag

SEQ ID NO: 52650 - DNA, 25 bp, Artificial
  Probe
aagctaggaatgagttcatatgtca

SEQ ID NO: 52651 - DNA, 25 bp, Artificial
  Probe
tgagttcatatgtcagtgtaaggaa

SEQ ID NO: 52652 - DNA, 25 bp, Artificial
  Probe
gtcagtgtaaggaacaaatgtatca

SEQ ID NO: 52653 - DNA, 25 bp, Artificial
  Probe
tgtcagtgtaaggaacaaatgtatc

SEQ ID NO: 52654 - DNA, 25 bp, Artificial
  Probe
tgacaaatacagtgaagatcccaga

SEQ ID NO: 52655 - DNA, 25 bp, Artificial
  Probe
gtgacaaatacagtgaagatcccag

SEQ ID NO: 52656 - DNA, 25 bp, Artificial
  Probe
atgagttcatatgtcagtgtaagga

SEQ ID NO: 52657 - DNA, 25 bp, Artificial
  Probe
aggaatgagttcatatgtcagtgta

SEQ ID NO: 52658 - DNA, 25 bp, Artificial
  Probe
taggaatgagttcatatgtcagtgt

SEQ ID NO: 52659 - DNA, 25 bp, Artificial
  Probe
ttaagtaagctaggaatgagttcat

SEQ ID NO: 52660 - DNA, 25 bp, Artificial
  Probe
ctaggaatgagttcatatgtcagtg

SEQ ID NO: 52661 - DNA, 25 bp, Artificial
  Probe
aatgagttcatatgtcagtgtaagg

SEQ ID NO: 52662 - DNA, 25 bp, Artificial
  Probe
ggaatgagttcatatgtcagtgtaa

SEQ ID NO: 52663 - DNA, 25 bp, Artificial
  Probe
atgtcagtgtaaggaacaaatgtat

SEQ ID NO: 52664 - DNA, 25 bp, Artificial
  Probe
atatgtcagtgtaaggaacaaatgt

SEQ ID NO: 52665 - DNA, 25 bp, Artificial
  Probe
aagtaagctaggaatgagttcatat

SEQ ID NO: 52666 - DNA, 25 bp, Artificial
  Probe
gtaagctaggaatgagttcatatgt

SEQ ID NO: 52667 - DNA, 25 bp, Artificial
  Probe
cggaggtgacaaatacagtgaagat

SEQ ID NO: 52668 - DNA, 25 bp, Artificial
  Probe
tcagtgtaaggaacaaatgtatcat

SEQ ID NO: 52669 - DNA, 25 bp, Artificial
  Probe
taagctaggaatgagttcatatgtc

SEQ ID NO: 52670 - DNA, 25 bp, Artificial
  Probe
agtaagctaggaatgagttcatatg

SEQ ID NO: 52671 - DNA, 25 bp, Artificial
  Probe
aggtgacaaatacagtgaagatccc

SEQ ID NO: 52672 - DNA, 25 bp, Artificial
  Probe
tatgtcagtgtaaggaacaaatgta

SEQ ID NO: 52673 - DNA, 25 bp, Artificial
  Probe
ggtgacaaatacagtgaagatccca

SEQ ID NO: 52674 - DNA, 25 bp, Artificial
  Probe
taagtaagctaggaatgagttcata

SEQ ID NO: 52675 - DNA, 25 bp, Artificial
  Probe
gaccaggtacatgcctctagatatt

SEQ ID NO: 52676 - DNA, 25 bp, Artificial
  Probe
tctagatattggcatacagagtcca

SEQ ID NO: 52677 - DNA, 25 bp, Artificial
  Probe
gaatgagttcatatgtcagtgtaag

SEQ ID NO: 52678 - DNA, 25 bp, Artificial
  Probe
accaggtacatgcctctagatattg

SEQ ID NO: 52679 - DNA, 25 bp, Artificial
  Probe
gtaggctcagcatatctgtacatat

SEQ ID NO: 52680 - DNA, 25 bp, Artificial
  Probe
ggttttctttactgttttgtaggct

SEQ ID NO: 52681 - DNA, 25 bp, Artificial
  Probe
aggttttctttactgttttgtaggc

SEQ ID NO: 52682 - DNA, 25 bp, Artificial
  Probe
tttaagtaagctaggaatgagttca

SEQ ID NO: 52683 - DNA, 25 bp, Artificial
  Probe
ttttctttactgttttgtaggctca

SEQ ID NO: 52684 - DNA, 25 bp, Artificial
  Probe
gttttctttactgttttgtaggctc

SEQ ID NO: 52685 - DNA, 25 bp, Artificial
  Probe
aaagagtttccaacttcttgagaac

SEQ ID NO: 52686 - DNA, 25 bp, Artificial
  Probe
cagtagtaattcaccgtggtagtta

SEQ ID NO: 52687 - DNA, 25 bp, Artificial
  Probe
agtagtaattcaccgtggtagttaa

SEQ ID NO: 52688 - DNA, 25 bp, Artificial
  Probe
acagtagtaattcaccgtggtagtt

SEQ ID NO: 52689 - DNA, 25 bp, Artificial
  Probe
agaataatgtaactgtgagcttgag

SEQ ID NO: 52690 - DNA, 25 bp, Artificial
  Probe
aacacagtagtaattcaccgtggta

SEQ ID NO: 52691 - DNA, 25 bp, Artificial
  Probe
gaataatgtaactgtgagcttgagt

SEQ ID NO: 52692 - DNA, 25 bp, Artificial
  Probe
cacagtagtaattcaccgtggtagt

SEQ ID NO: 52693 - DNA, 25 bp, Artificial
  Probe
acacagtagtaattcaccgtggtag

SEQ ID NO: 52694 - DNA, 25 bp, Artificial
  Probe
tcaccgtggtagttaaatgtttaca

SEQ ID NO: 52695 - DNA, 25 bp, Artificial
  Probe
ttcaccgtggtagttaaatgtttac

SEQ ID NO: 52696 - DNA, 25 bp, Artificial
  Probe
aattcaccgtggtagttaaatgttt

SEQ ID NO: 52697 - DNA, 25 bp, Artificial
  Probe
gtaattcaccgtggtagttaaatgt

SEQ ID NO: 52698 - DNA, 25 bp, Artificial
  Probe
ttaaagcaaatgaccagggattacc

SEQ ID NO: 52699 - DNA, 25 bp, Artificial
  Probe
agtaattcaccgtggtagttaaatg

SEQ ID NO: 52700 - DNA, 25 bp, Artificial
  Probe
tagaataatgtaactgtgagcttga

SEQ ID NO: 52701 - DNA, 25 bp, Artificial
  Probe
attcaccgtggtagttaaatgttta

SEQ ID NO: 52702 - DNA, 25 bp, Artificial
  Probe
taattcaccgtggtagttaaatgtt

SEQ ID NO: 52703 - DNA, 25 bp, Artificial
  Probe
caccgtggtagttaaatgtttacat

SEQ ID NO: 52704 - DNA, 25 bp, Artificial
  Probe
gtagtaattcaccgtggtagttaaa

SEQ ID NO: 52705 - DNA, 25 bp, Artificial
  Probe
ctgtattgatgacaaatcggcttta

SEQ ID NO: 52706 - DNA, 25 bp, Artificial
  Probe
accgtggtagttaaatgtttacatc

SEQ ID NO: 52707 - DNA, 25 bp, Artificial
  Probe
ccgtggtagttaaatgtttacatct

SEQ ID NO: 52708 - DNA, 25 bp, Artificial
  Probe
tgtattgatgacaaatcggctttat

SEQ ID NO: 52709 - DNA, 25 bp, Artificial
  Probe
gttcccagcaacaataaacgagtaa

SEQ ID NO: 52710 - DNA, 25 bp, Artificial
  Probe
gtattgatgacaaatcggctttatt

SEQ ID NO: 52711 - DNA, 25 bp, Artificial
  Probe
ttgttagaataatgtaactgtgagc

SEQ ID NO: 52712 - DNA, 25 bp, Artificial
  Probe
gaacacagtagtaattcaccgtggt

SEQ ID NO: 52713 - DNA, 25 bp, Artificial
  Probe
ttagaataatgtaactgtgagcttg

SEQ ID NO: 52714 - DNA, 25 bp, Artificial
  Probe
tttaaagcaaatgaccagggattac

SEQ ID NO: 52715 - DNA, 25 bp, Artificial
  Probe
tgttagaataatgtaactgtgagct

SEQ ID NO: 52716 - DNA, 25 bp, Artificial
  Probe
tagtaattcaccgtggtagttaaat

SEQ ID NO: 52717 - DNA, 25 bp, Artificial
  Probe
cgtggtagttaaatgtttacatctt

SEQ ID NO: 52718 - DNA, 25 bp, Artificial
  Probe
taaagcaaatgaccagggattacct

SEQ ID NO: 52719 - DNA, 25 bp, Artificial
  Probe
tttagctgtattgatgacaaatcgg

SEQ ID NO: 52720 - DNA, 25 bp, Artificial
  Probe
gctgtattgatgacaaatcggcttt

SEQ ID NO: 52721 - DNA, 25 bp, Artificial
  Probe
aataatgtaactgtgagcttgagtt

SEQ ID NO: 52722 - DNA, 25 bp, Artificial
  Probe
gctttagctgtattgatgacaaatc

SEQ ID NO: 52723 - DNA, 25 bp, Artificial
  Probe
cgaacacagtagtaattcaccgtgg

SEQ ID NO: 52724 - DNA, 25 bp, Artificial
  Probe
ctttagctgtattgatgacaaatcg

SEQ ID NO: 52725 - DNA, 25 bp, Artificial
  Probe
gttagaataatgtaactgtgagctt

SEQ ID NO: 52726 - DNA, 25 bp, Artificial
  Probe
agactggattgttagaataatgtaa

SEQ ID NO: 52727 - DNA, 25 bp, Artificial
  Probe
aagactggattgttagaataatgta

SEQ ID NO: 52728 - DNA, 25 bp, Artificial
  Probe
ttagctgtattgatgacaaatcggc

SEQ ID NO: 52729 - DNA, 25 bp, Artificial
  Probe
tggattgttagaataatgtaactgt

SEQ ID NO: 52730 - DNA, 25 bp, Artificial
  Probe
aaagactggattgttagaataatgt

SEQ ID NO: 52731 - DNA, 25 bp, Artificial
  Probe
atttacagtgaaacaatgttccagg

SEQ ID NO: 52732 - DNA, 25 bp, Artificial
  Probe
ttacagtgaaacaatgttccaggta

SEQ ID NO: 52733 - DNA, 25 bp, Artificial
  Probe
tacagtgaaacaatgttccaggtag

SEQ ID NO: 52734 - DNA, 25 bp, Artificial
  Probe
tttacagtgaaacaatgttccaggt

SEQ ID NO: 52735 - DNA, 25 bp, Artificial
  Probe
gaaacaatgttccaggtagctttaa

SEQ ID NO: 52736 - DNA, 25 bp, Artificial
  Probe
taatttcaaagattaagtgctgctt

SEQ ID NO: 52737 - DNA, 25 bp, Artificial
  Probe
tgaaacaatgttccaggtagcttta

SEQ ID NO: 52738 - DNA, 25 bp, Artificial
  Probe
aaacaatgttccaggtagctttaaa

SEQ ID NO: 52739 - DNA, 25 bp, Artificial
  Probe
acagtcatttacagtgaaacaatgt

SEQ ID NO: 52740 - DNA, 25 bp, Artificial
  Probe
gtgaaacaatgttccaggtagcttt

SEQ ID NO: 52741 - DNA, 25 bp, Artificial
  Probe
tcatttacagtgaaacaatgttcca

SEQ ID NO: 52742 - DNA, 25 bp, Artificial
  Probe
catttacagtgaaacaatgttccag

SEQ ID NO: 52743 - DNA, 25 bp, Artificial
  Probe
gtcatttacagtgaaacaatgttcc

SEQ ID NO: 52744 - DNA, 25 bp, Artificial
  Probe
aatttcaaagattaagtgctgcttt

SEQ ID NO: 52745 - DNA, 25 bp, Artificial
  Probe
gcactaagcaattttatttcagcct

SEQ ID NO: 52746 - DNA, 25 bp, Artificial
  Probe
agcactaagcaattttatttcagcc

SEQ ID NO: 52747 - DNA, 25 bp, Artificial
  Probe
cagtcatttacagtgaaacaatgtt

SEQ ID NO: 52748 - DNA, 25 bp, Artificial
  Probe
agcaattttatttcagcctttcagc

SEQ ID NO: 52749 - DNA, 25 bp, Artificial
  Probe
agtcatttacagtgaaacaatgttc

SEQ ID NO: 52750 - DNA, 25 bp, Artificial
  Probe
aagcaattttatttcagcctttcag

SEQ ID NO: 52751 - DNA, 25 bp, Artificial
  Probe
tttcaaagattaagtgctgctttaa

SEQ ID NO: 52752 - DNA, 25 bp, Artificial
  Probe
agtgaaacaatgttccaggtagctt

SEQ ID NO: 52753 - DNA, 25 bp, Artificial
  Probe
tagcactaagcaattttatttcagc

SEQ ID NO: 52754 - DNA, 25 bp, Artificial
  Probe
atttcaaagattaagtgctgcttta

SEQ ID NO: 52755 - DNA, 25 bp, Artificial
  Probe
cactaagcaattttatttcagcctt

SEQ ID NO: 52756 - DNA, 25 bp, Artificial
  Probe
caaagattaagtgctgctttaaact

SEQ ID NO: 52757 - DNA, 25 bp, Artificial
  Probe
tcaaagattaagtgctgctttaaac

SEQ ID NO: 52758 - DNA, 25 bp, Artificial
  Probe
agattaagtgctgctttaaactatt

SEQ ID NO: 52759 - DNA, 25 bp, Artificial
  Probe
aagattaagtgctgctttaaactat

SEQ ID NO: 52760 - DNA, 25 bp, Artificial
  Probe
taagcaattttatttcagcctttca

SEQ ID NO: 52761 - DNA, 25 bp, Artificial
  Probe
actaagcaattttatttcagccttt

SEQ ID NO: 52762 - DNA, 25 bp, Artificial
  Probe
cagtgaaacaatgttccaggtagct

SEQ ID NO: 52763 - DNA, 25 bp, Artificial
  Probe
acagtgaaacaatgttccaggtagc

SEQ ID NO: 52764 - DNA, 25 bp, Artificial
  Probe
ttcaaagattaagtgctgctttaaa

SEQ ID NO: 52765 - DNA, 25 bp, Artificial
  Probe
acaatgttccaggtagctttaaaag

SEQ ID NO: 52766 - DNA, 25 bp, Artificial
  Probe
aacaatgttccaggtagctttaaaa

SEQ ID NO: 52767 - DNA, 25 bp, Artificial
  Probe
ctaagcaattttatttcagcctttc

SEQ ID NO: 52768 - DNA, 25 bp, Artificial
  Probe
agtgctgctttaaactattatactt

SEQ ID NO: 52769 - DNA, 25 bp, Artificial
  Probe
aagtgctgctttaaactattatact

SEQ ID NO: 52770 - DNA, 25 bp, Artificial
  Probe
aaagattaagtgctgctttaaacta

SEQ ID NO: 52771 - DNA, 25 bp, Artificial
  Probe
tgctgctttaaactattatactttg

SEQ ID NO: 52772 - DNA, 25 bp, Artificial
  Probe
gtgctgctttaaactattatacttt

SEQ ID NO: 52773 - DNA, 25 bp, Artificial
  Probe
gctgctttaaactattatactttga

SEQ ID NO: 52774 - DNA, 25 bp, Artificial
  Probe
ttagcactaagcaattttatttcag

SEQ ID NO: 52775 - DNA, 25 bp, Artificial
  Probe
gcaattttatttcagcctttcagct

SEQ ID NO: 52776 - DNA, 25 bp, Artificial
  Probe
ggtgttgtgattgtgattaagtctt

SEQ ID NO: 52777 - DNA, 25 bp, Artificial
  Probe
cggtgttgtgattgtgattaagtct

SEQ ID NO: 52778 - DNA, 25 bp, Artificial
  Probe
tcggtgttgtgattgtgattaagtc

SEQ ID NO: 52779 - DNA, 25 bp, Artificial
  Probe
gtcggtgttgtgattgtgattaagt

SEQ ID NO: 52780 - DNA, 25 bp, Artificial
  Probe
tgtcggtgttgtgattgtgattaag

SEQ ID NO: 52781 - DNA, 25 bp, Artificial
  Probe
ctgtcggtgttgtgattgtgattaa

SEQ ID NO: 52782 - DNA, 25 bp, Artificial
  Probe
ctattagtaggtgttaggctctggc

SEQ ID NO: 52783 - DNA, 25 bp, Artificial
  Probe
gtgttgtgattgtgattaagtctta

SEQ ID NO: 52784 - DNA, 25 bp, Artificial
  Probe
cctgtcggtgttgtgattgtgatta

SEQ ID NO: 52785 - DNA, 25 bp, Artificial
  Probe
gtctaggcaccgatatgtctctctt

SEQ ID NO: 52786 - DNA, 25 bp, Artificial
  Probe
accagggagaggaagactaattgta

SEQ ID NO: 52787 - DNA, 25 bp, Artificial
  Probe
cagggagaggaagactaattgtacc

SEQ ID NO: 52788 - DNA, 25 bp, Artificial
  Probe
ccagggagaggaagactaattgtac

SEQ ID NO: 52789 - DNA, 25 bp, Artificial
  Probe
gatatgtctctctttgccacagatc

SEQ ID NO: 52790 - DNA, 25 bp, Artificial
  Probe
tgttgtgattgtgattaagtcttaa

SEQ ID NO: 52791 - DNA, 25 bp, Artificial
  Probe
gaggaagactaattgtacccttagg

SEQ ID NO: 52792 - DNA, 25 bp, Artificial
  Probe
cctattagtaggtgttaggctctgg

SEQ ID NO: 52793 - DNA, 25 bp, Artificial
  Probe
tgtgattgtgattaagtcttaaggt

SEQ ID NO: 52794 - DNA, 25 bp, Artificial
  Probe
agaggaagactaattgtacccttag

SEQ ID NO: 52795 - DNA, 25 bp, Artificial
  Probe
gagaggaagactaattgtaccctta

SEQ ID NO: 52796 - DNA, 25 bp, Artificial
  Probe
atatgtctctctttgccacagatca

SEQ ID NO: 52797 - DNA, 25 bp, Artificial
  Probe
ctaggcaccgatatgtctctctttg

SEQ ID NO: 52798 - DNA, 25 bp, Artificial
  Probe
ggagaggaagactaattgtaccctt

SEQ ID NO: 52799 - DNA, 25 bp, Artificial
  Probe
gaagactaattgtacccttaggtgg

SEQ ID NO: 52800 - DNA, 25 bp, Artificial
  Probe
ggaagactaattgtacccttaggtg

SEQ ID NO: 52801 - DNA, 25 bp, Artificial
  Probe
aggaagactaattgtacccttaggt

SEQ ID NO: 52802 - DNA, 25 bp, Artificial
  Probe
tctaggcaccgatatgtctctcttt

SEQ ID NO: 52803 - DNA, 25 bp, Artificial
  Probe
gtgattgtgattaagtcttaaggtc

SEQ ID NO: 52804 - DNA, 25 bp, Artificial
  Probe
cgatatgtctctctttgccacagat

SEQ ID NO: 52805 - DNA, 25 bp, Artificial
  Probe
tgattgtgattaagtcttaaggtct

SEQ ID NO: 52806 - DNA, 25 bp, Artificial
  Probe
tatgtctctctttgccacagatcag

SEQ ID NO: 52807 - DNA, 25 bp, Artificial
  Probe
attgtgattaagtcttaaggtctca

SEQ ID NO: 52808 - DNA, 25 bp, Artificial
  Probe
gtgcctgcctattagtaggtgttag

SEQ ID NO: 52809 - DNA, 25 bp, Artificial
  Probe
gattgtgattaagtcttaaggtctc

SEQ ID NO: 52810 - DNA, 25 bp, Artificial
  Probe
ttgtgattgtgattaagtcttaagg

SEQ ID NO: 52811 - DNA, 25 bp, Artificial
  Probe
gaccagggagaggaagactaattgt

SEQ ID NO: 52812 - DNA, 25 bp, Artificial
  Probe
ctttcagcttcttctccatcctcag

SEQ ID NO: 52813 - DNA, 25 bp, Artificial
  Probe
aagactaattgtacccttaggtggg

SEQ ID NO: 52814 - DNA, 25 bp, Artificial
  Probe
ggaccagggagaggaagactaattg

SEQ ID NO: 52815 - DNA, 25 bp, Artificial
  Probe
tgcctgcctattagtaggtgttagg

SEQ ID NO: 52816 - DNA, 25 bp, Artificial
  Probe
gttgtgattgtgattaagtcttaag

SEQ ID NO: 52817 - DNA, 25 bp, Artificial
  Probe
gtaggcttctgtttcctcaccaatc

SEQ ID NO: 52818 - DNA, 25 bp, Artificial
  Probe
ggtgcctgcctattagtaggtgtta

SEQ ID NO: 52819 - DNA, 25 bp, Artificial
  Probe
gtaccaggtgcctgcctattagtag

SEQ ID NO: 52820 - DNA, 25 bp, Artificial
  Probe
cgtctaggcaccgatatgtctctct

SEQ ID NO: 52821 - DNA, 25 bp, Artificial
  Probe
agaactggagagacacatttatcac

SEQ ID NO: 52822 - DNA, 25 bp, Artificial
  Probe
gtaacctgtgtcttgtctttgaaat

SEQ ID NO: 52823 - DNA, 25 bp, Artificial
  Probe
tctctacaaacactttaaccgacat

SEQ ID NO: 52824 - DNA, 25 bp, Artificial
  Probe
atctctacaaacactttaaccgaca

SEQ ID NO: 52825 - DNA, 25 bp, Artificial
  Probe
gctatctctacaaacactttaaccg

SEQ ID NO: 52826 - DNA, 25 bp, Artificial
  Probe
attgatcgctggaatgagaagagag

SEQ ID NO: 52827 - DNA, 25 bp, Artificial
  Probe
gattgatcgctggaatgagaagaga

SEQ ID NO: 52828 - DNA, 25 bp, Artificial
  Probe
tgtaacctgtgtcttgtctttgaaa

SEQ ID NO: 52829 - DNA, 25 bp, Artificial
  Probe
aacctgtgtcttgtctttgaaattc

SEQ ID NO: 52830 - DNA, 25 bp, Artificial
  Probe
cagaactggagagacacatttatca

SEQ ID NO: 52831 - DNA, 25 bp, Artificial
  Probe
acagaactggagagacacatttatc

SEQ ID NO: 52832 - DNA, 25 bp, Artificial
  Probe
gaactggagagacacatttatcacc

SEQ ID NO: 52833 - DNA, 25 bp, Artificial
  Probe
ctgtaacctgtgtcttgtctttgaa

SEQ ID NO: 52834 - DNA, 25 bp, Artificial
  Probe
taacctgtgtcttgtctttgaaatt

SEQ ID NO: 52835 - DNA, 25 bp, Artificial
  Probe
tgattgatcgctggaatgagaagag

SEQ ID NO: 52836 - DNA, 25 bp, Artificial
  Probe
tatctctacaaacactttaaccgac

SEQ ID NO: 52837 - DNA, 25 bp, Artificial
  Probe
ctatctctacaaacactttaaccga

SEQ ID NO: 52838 - DNA, 25 bp, Artificial
  Probe
gtgattgatcgctggaatgagaaga

SEQ ID NO: 52839 - DNA, 25 bp, Artificial
  Probe
agtgattgatcgctggaatgagaag

SEQ ID NO: 52840 - DNA, 25 bp, Artificial
  Probe
gagtgattgatcgctggaatgagaa

SEQ ID NO: 52841 - DNA, 25 bp, Artificial
  Probe
taaccgacatggaaagtacagatag

SEQ ID NO: 52842 - DNA, 25 bp, Artificial
  Probe
tttaaccgacatggaaagtacagat

SEQ ID NO: 52843 - DNA, 25 bp, Artificial
  Probe
ctctacaaacactttaaccgacatg

SEQ ID NO: 52844 - DNA, 25 bp, Artificial
  Probe
ttaaccgacatggaaagtacagata

SEQ ID NO: 52845 - DNA, 25 bp, Artificial
  Probe
actgtaacctgtgtcttgtctttga

SEQ ID NO: 52846 - DNA, 25 bp, Artificial
  Probe
tacaaacactttaaccgacatggaa

SEQ ID NO: 52847 - DNA, 25 bp, Artificial
  Probe
aactggagagacacatttatcaccc

SEQ ID NO: 52848 - DNA, 25 bp, Artificial
  Probe
ctacaaacactttaaccgacatgga

SEQ ID NO: 52849 - DNA, 25 bp, Artificial
  Probe
tctacaaacactttaaccgacatgg

SEQ ID NO: 52850 - DNA, 25 bp, Artificial
  Probe
acctgtgtcttgtctttgaaattca

SEQ ID NO: 52851 - DNA, 25 bp, Artificial
  Probe
acaaacactttaaccgacatggaaa

SEQ ID NO: 52852 - DNA, 25 bp, Artificial
  Probe
gtcttgtctttgaaattcacacctg

SEQ ID NO: 52853 - DNA, 25 bp, Artificial
  Probe
taacaaacggatcagctatctctac

SEQ ID NO: 52854 - DNA, 25 bp, Artificial
  Probe
ggatcagctatctctacaaacactt

SEQ ID NO: 52855 - DNA, 25 bp, Artificial
  Probe
cttaacaaacggatcagctatctct

SEQ ID NO: 52856 - DNA, 25 bp, Artificial
  Probe
tgtcttgtctttgaaattcacacct

SEQ ID NO: 52857 - DNA, 25 bp, Artificial
  Probe
aaacggatcagctatctctacaaac

SEQ ID NO: 52858 - DNA, 25 bp, Artificial
  Probe
caaacggatcagctatctctacaaa

SEQ ID NO: 52859 - DNA, 25 bp, Artificial
  Probe
ttaacaaacggatcagctatctcta

SEQ ID NO: 52860 - DNA, 25 bp, Artificial
  Probe
gactgtaacctgtgtcttgtctttg

SEQ ID NO: 52861 - DNA, 25 bp, Artificial
  Probe
cctgtgtcttgtctttgaaattcac

SEQ ID NO: 52862 - DNA, 25 bp, Artificial
  Probe
aaccttaacaaacggatcagctatc

SEQ ID NO: 52863 - DNA, 25 bp, Artificial
  Probe
caaccttaacaaacggatcagctat

SEQ ID NO: 52864 - DNA, 25 bp, Artificial
  Probe
agagtgattgatcgctggaatgaga

SEQ ID NO: 52865 - DNA, 25 bp, Artificial
  Probe
agctatctctacaaacactttaacc

SEQ ID NO: 52866 - DNA, 25 bp, Artificial
  Probe
ggaaagggagatttgtaagtggatt

SEQ ID NO: 52867 - DNA, 25 bp, Artificial
  Probe
aaaggaaagggagatttgtaagtgg

SEQ ID NO: 52868 - DNA, 25 bp, Artificial
  Probe
gaaagggagatttgtaagtggattc

SEQ ID NO: 52869 - DNA, 25 bp, Artificial
  Probe
aaagggagatttgtaagtggattct

SEQ ID NO: 52870 - DNA, 25 bp, Artificial
  Probe
ttcagttcagagaggcagtctatag

SEQ ID NO: 52871 - DNA, 25 bp, Artificial
  Probe
gttcagagaggcagtctataggtag

SEQ ID NO: 52872 - DNA, 25 bp, Artificial
  Probe
tttcagttcagagaggcagtctata

SEQ ID NO: 52873 - DNA, 25 bp, Artificial
  Probe
aggaaagggagatttgtaagtggat

SEQ ID NO: 52874 - DNA, 25 bp, Artificial
  Probe
aaggaaagggagatttgtaagtgga

SEQ ID NO: 52875 - DNA, 25 bp, Artificial
  Probe
agttcagagaggcagtctataggta

SEQ ID NO: 52876 - DNA, 25 bp, Artificial
  Probe
gattctcatcctctctcctcctcac

SEQ ID NO: 52877 - DNA, 25 bp, Artificial
  Probe
ctttcagttcagagaggcagtctat

SEQ ID NO: 52878 - DNA, 25 bp, Artificial
  Probe
cagagaggcagtctataggtagatg

SEQ ID NO: 52879 - DNA, 25 bp, Artificial
  Probe
tcagagaggcagtctataggtagat

SEQ ID NO: 52880 - DNA, 25 bp, Artificial
  Probe
ttcagagaggcagtctataggtaga

SEQ ID NO: 52881 - DNA, 25 bp, Artificial
  Probe
tcagttcagagaggcagtctatagg

SEQ ID NO: 52882 - DNA, 25 bp, Artificial
  Probe
cagttcagagaggcagtctataggt

SEQ ID NO: 52883 - DNA, 25 bp, Artificial
  Probe
tttaaggagaacaaagctatgaagt

SEQ ID NO: 52884 - DNA, 25 bp, Artificial
  Probe
ttaaggagaacaaagctatgaagtt

SEQ ID NO: 52885 - DNA, 25 bp, Artificial
  Probe
ttgtaagtggattctcatcctctct

SEQ ID NO: 52886 - DNA, 25 bp, Artificial
  Probe
actttcagttcagagaggcagtcta

SEQ ID NO: 52887 - DNA, 25 bp, Artificial
  Probe
tgtaagtggattctcatcctctctc

SEQ ID NO: 52888 - DNA, 25 bp, Artificial
  Probe
attctcatcctctctcctcctcacc

SEQ ID NO: 52889 - DNA, 25 bp, Artificial
  Probe
aaaaggaaagggagatttgtaagtg

SEQ ID NO: 52890 - DNA, 25 bp, Artificial
  Probe
ggagtcattttaaggagaacaaagc

SEQ ID NO: 52891 - DNA, 25 bp, Artificial
  Probe
gggagtcattttaaggagaacaaag

SEQ ID NO: 52892 - DNA, 25 bp, Artificial
  Probe
tggactgaatttacttgattattgt

SEQ ID NO: 52893 - DNA, 25 bp, Artificial
  Probe
gaagttcttttgtattcttgtgggg

SEQ ID NO: 52894 - DNA, 25 bp, Artificial
  Probe
tgaagttcttttgtattcttgtggg

SEQ ID NO: 52895 - DNA, 25 bp, Artificial
  Probe
taagtggattctcatcctctctcct

SEQ ID NO: 52896 - DNA, 25 bp, Artificial
  Probe
gtaagtggattctcatcctctctcc

SEQ ID NO: 52897 - DNA, 25 bp, Artificial
  Probe
ggggagtcattttaaggagaacaaa

SEQ ID NO: 52898 - DNA, 25 bp, Artificial
  Probe
tgatggtctggtttgggtgaatttc

SEQ ID NO: 52899 - DNA, 25 bp, Artificial
  Probe
tatatattgcaaggtgtgatggtct

SEQ ID NO: 52900 - DNA, 25 bp, Artificial
  Probe
gtgatggtctggtttgggtgaattt

SEQ ID NO: 52901 - DNA, 25 bp, Artificial
  Probe
atatattgcaaggtgtgatggtctg

SEQ ID NO: 52902 - DNA, 25 bp, Artificial
  Probe
ttatatattgcaaggtgtgatggtc

SEQ ID NO: 52903 - DNA, 25 bp, Artificial
  Probe
attttagtgttgatgtgaaatgccc

SEQ ID NO: 52904 - DNA, 25 bp, Artificial
  Probe
agaggcagtctataggtagatgctc

SEQ ID NO: 52905 - DNA, 25 bp, Artificial
  Probe
gagaggcagtctataggtagatgct

SEQ ID NO: 52906 - DNA, 25 bp, Artificial
  Probe
agagaggcagtctataggtagatgc

SEQ ID NO: 52907 - DNA, 25 bp, Artificial
  Probe
aattttagtgttgatgtgaaatgcc

SEQ ID NO: 52908 - DNA, 25 bp, Artificial
  Probe
ttttagtgttgatgtgaaatgcccc

SEQ ID NO: 52909 - DNA, 25 bp, Artificial
  Probe
atgaagttcttttgtattcttgtgg

SEQ ID NO: 52910 - DNA, 25 bp, Artificial
  Probe
gatggtctggtttgggtgaatttca

SEQ ID NO: 52911 - DNA, 25 bp, Artificial
  Probe
taagtgctaagatggagattcaacc

SEQ ID NO: 52912 - DNA, 25 bp, Artificial
  Probe
ggtaagtgctaagatggagattcaa

SEQ ID NO: 52913 - DNA, 25 bp, Artificial
  Probe
aatatgtgtgtggtaagtgctaaga

SEQ ID NO: 52914 - DNA, 25 bp, Artificial
  Probe
atatgtgtgtggtaagtgctaagat

SEQ ID NO: 52915 - DNA, 25 bp, Artificial
  Probe
gtaagtgctaagatggagattcaac

SEQ ID NO: 52916 - DNA, 25 bp, Artificial
  Probe
tatgtgtgtggtaagtgctaagatg

SEQ ID NO: 52917 - DNA, 25 bp, Artificial
  Probe
gtggtaagtgctaagatggagattc

SEQ ID NO: 52918 - DNA, 25 bp, Artificial
  Probe
tggtaagtgctaagatggagattca

SEQ ID NO: 52919 - DNA, 25 bp, Artificial
  Probe
tgtggtaagtgctaagatggagatt

SEQ ID NO: 52920 - DNA, 25 bp, Artificial
  Probe
gtgtggtaagtgctaagatggagat

SEQ ID NO: 52921 - DNA, 25 bp, Artificial
  Probe
ctgatctcactgtggctctgtataa

SEQ ID NO: 52922 - DNA, 25 bp, Artificial
  Probe
catgtacttaggcttattctctgag

SEQ ID NO: 52923 - DNA, 25 bp, Artificial
  Probe
atgtacttaggcttattctctgaga

SEQ ID NO: 52924 - DNA, 25 bp, Artificial
  Probe
tcatgtacttaggcttattctctga

SEQ ID NO: 52925 - DNA, 25 bp, Artificial
  Probe
ttcatgtacttaggcttattctctg

SEQ ID NO: 52926 - DNA, 25 bp, Artificial
  Probe
atgtgtgtggtaagtgctaagatgg

SEQ ID NO: 52927 - DNA, 25 bp, Artificial
  Probe
agatgcttagatttaacttggtggt

SEQ ID NO: 52928 - DNA, 25 bp, Artificial
  Probe
aaatatgtgtgtggtaagtgctaag

SEQ ID NO: 52929 - DNA, 25 bp, Artificial
  Probe
gaaatatgtgtgtggtaagtgctaa

SEQ ID NO: 52930 - DNA, 25 bp, Artificial
  Probe
ggaaatatgtgtgtggtaagtgcta

SEQ ID NO: 52931 - DNA, 25 bp, Artificial
  Probe
atttgccaatcttacttccataggg

SEQ ID NO: 52932 - DNA, 25 bp, Artificial
  Probe
gagatagtgggagtcaaattcttca

SEQ ID NO: 52933 - DNA, 25 bp, Artificial
  Probe
gatgcttagatttaacttggtggta

SEQ ID NO: 52934 - DNA, 25 bp, Artificial
  Probe
tgtgtggtaagtgctaagatggaga

SEQ ID NO: 52935 - DNA, 25 bp, Artificial
  Probe
gtgtgtggtaagtgctaagatggag

SEQ ID NO: 52936 - DNA, 25 bp, Artificial
  Probe
cttcatcaattctaccctttcctgg

SEQ ID NO: 52937 - DNA, 25 bp, Artificial
  Probe
ccttcatcaattctaccctttcctg

SEQ ID NO: 52938 - DNA, 25 bp, Artificial
  Probe
agatagtgggagtcaaattcttcat

SEQ ID NO: 52939 - DNA, 25 bp, Artificial
  Probe
tatagaccctcttgagccaaagtat

SEQ ID NO: 52940 - DNA, 25 bp, Artificial
  Probe
tagatgcttagatttaacttggtgg

SEQ ID NO: 52941 - DNA, 25 bp, Artificial
  Probe
ttatagaccctcttgagccaaagta

SEQ ID NO: 52942 - DNA, 25 bp, Artificial
  Probe
aattcattatagaccctcttgagcc

SEQ ID NO: 52943 - DNA, 25 bp, Artificial
  Probe
tgagatagtgggagtcaaattcttc

SEQ ID NO: 52944 - DNA, 25 bp, Artificial
  Probe
ctgagatagtgggagtcaaattctt

SEQ ID NO: 52945 - DNA, 25 bp, Artificial
  Probe
tgcttagatttaacttggtggtaca

SEQ ID NO: 52946 - DNA, 25 bp, Artificial
  Probe
cattatagaccctcttgagccaaag

SEQ ID NO: 52947 - DNA, 25 bp, Artificial
  Probe
tgggaaacacttgtgaatacttaat

SEQ ID NO: 52948 - DNA, 25 bp, Artificial
  Probe
atgggaaacacttgtgaatacttaa

SEQ ID NO: 52949 - DNA, 25 bp, Artificial
  Probe
atgcttagatttaacttggtggtac

SEQ ID NO: 52950 - DNA, 25 bp, Artificial
  Probe
gtgggagtcaaattcttcataaatg

SEQ ID NO: 52951 - DNA, 25 bp, Artificial
  Probe
agtgggagtcaaattcttcataaat

SEQ ID NO: 52952 - DNA, 25 bp, Artificial
  Probe
attatagaccctcttgagccaaagt

SEQ ID NO: 52953 - DNA, 25 bp, Artificial
  Probe
attcattatagaccctcttgagcca

SEQ ID NO: 52954 - DNA, 25 bp, Artificial
  Probe
gggaaacacttgtgaatacttaatg

SEQ ID NO: 52955 - DNA, 25 bp, Artificial
  Probe
atatgggaaacacttgtgaatactt

SEQ ID NO: 52956 - DNA, 25 bp, Artificial
  Probe
ttatgaagcctatggacaagatgac

SEQ ID NO: 52957 - DNA, 25 bp, Artificial
  Probe
cttatgaagcctatggacaagatga

SEQ ID NO: 52958 - DNA, 25 bp, Artificial
  Probe
tatgaagcctatggacaagatgact

SEQ ID NO: 52959 - DNA, 25 bp, Artificial
  Probe
agattcttatgaagcctatggacaa

SEQ ID NO: 52960 - DNA, 25 bp, Artificial
  Probe
gattcttatgaagcctatggacaag

SEQ ID NO: 52961 - DNA, 25 bp, Artificial
  Probe
aagattcttatgaagcctatggaca

SEQ ID NO: 52962 - DNA, 25 bp, Artificial
  Probe
caagattcttatgaagcctatggac

SEQ ID NO: 52963 - DNA, 25 bp, Artificial
  Probe
ccaccttcctccattctgaattatg

SEQ ID NO: 52964 - DNA, 25 bp, Artificial
  Probe
tcaagattcttatgaagcctatgga

SEQ ID NO: 52965 - DNA, 25 bp, Artificial
  Probe
caccttcctccattctgaattatgc

SEQ ID NO: 52966 - DNA, 25 bp, Artificial
  Probe
atgaagcctatggacaagatgactg

SEQ ID NO: 52967 - DNA, 25 bp, Artificial
  Probe
cagagtattatgactatggacatgg

SEQ ID NO: 52968 - DNA, 25 bp, Artificial
  Probe
tcttatgaagcctatggacaagatg

SEQ ID NO: 52969 - DNA, 25 bp, Artificial
  Probe
atgattcatacgcagaacagagcta

SEQ ID NO: 52970 - DNA, 25 bp, Artificial
  Probe
ttcttatgaagcctatggacaagat

SEQ ID NO: 52971 - DNA, 25 bp, Artificial
  Probe
attcttatgaagcctatggacaaga

SEQ ID NO: 52972 - DNA, 25 bp, Artificial
  Probe
tcagagtattatgactatggacatg

SEQ ID NO: 52973 - DNA, 25 bp, Artificial
  Probe
acgaagattatggatatgatgattc

SEQ ID NO: 52974 - DNA, 25 bp, Artificial
  Probe
accttcctccattctgaattatgca

SEQ ID NO: 52975 - DNA, 25 bp, Artificial
  Probe
atgatgattcatacgcagaacagag

SEQ ID NO: 52976 - DNA, 25 bp, Artificial
  Probe
gcaccagaaacatacgaagattatg

SEQ ID NO: 52977 - DNA, 25 bp, Artificial
  Probe
cgaagattatggatatgatgattca

SEQ ID NO: 52978 - DNA, 25 bp, Artificial
  Probe
agagtattatgactatggacatggg

SEQ ID NO: 52979 - DNA, 25 bp, Artificial
  Probe
cccaccttcctccattctgaattat

SEQ ID NO: 52980 - DNA, 25 bp, Artificial
  Probe
tgattcatacgcagaacagagctac

SEQ ID NO: 52981 - DNA, 25 bp, Artificial
  Probe
tgatgattcatacgcagaacagagc

SEQ ID NO: 52982 - DNA, 25 bp, Artificial
  Probe
gaagcctatggacaagatgactgga

SEQ ID NO: 52983 - DNA, 25 bp, Artificial
  Probe
ttcaagattcttatgaagcctatgg

SEQ ID NO: 52984 - DNA, 25 bp, Artificial
  Probe
accagaaacatacgaagattatgga

SEQ ID NO: 52985 - DNA, 25 bp, Artificial
  Probe
caccagaaacatacgaagattatgg

SEQ ID NO: 52986 - DNA, 25 bp, Artificial
  Probe
gatgattcatacgcagaacagagct

SEQ ID NO: 52987 - DNA, 25 bp, Artificial
  Probe
tgaagcctatggacaagatgactgg

SEQ ID NO: 52988 - DNA, 25 bp, Artificial
  Probe
ccagaaacatacgaagattatggat

SEQ ID NO: 52989 - DNA, 25 bp, Artificial
  Probe
acatacgaagattatggatatgatg

SEQ ID NO: 52990 - DNA, 25 bp, Artificial
  Probe
tttatttgtggtccgtttcttttcc

SEQ ID NO: 52991 - DNA, 25 bp, Artificial
  Probe
acaggaggggaaaatatcagttatg

SEQ ID NO: 52992 - DNA, 25 bp, Artificial
  Probe
catacgaagattatggatatgatga

SEQ ID NO: 52993 - DNA, 25 bp, Artificial
  Probe
ttatgcattctggcttctgtatgta

SEQ ID NO: 52994 - DNA, 25 bp, Artificial
  Probe
gattcatacgcagaacagagctacg

SEQ ID NO: 52995 - DNA, 25 bp, Artificial
  Probe
aattatgcattctggcttctgtatg

SEQ ID NO: 52996 - DNA, 25 bp, Artificial
  Probe
tatgcattctggcttctgtatgtag

SEQ ID NO: 52997 - DNA, 25 bp, Artificial
  Probe
ttttatttgtggtccgtttcttttc

SEQ ID NO: 52998 - DNA, 25 bp, Artificial
  Probe
aacaaacaggaggggaaaatatcag

SEQ ID NO: 52999 - DNA, 25 bp, Artificial
  Probe
attatgcattctggcttctgtatgt

SEQ ID NO: 53000 - DNA, 25 bp, Artificial
  Probe
cttcctccattctgaattatgcatt

SEQ ID NO: 53001 - DNA, 25 bp, Artificial
  Probe
atgtccttgttgaactatcctggta

SEQ ID NO: 53002 - DNA, 25 bp, Artificial
  Probe
aatgtccttgttgaactatcctggt

SEQ ID NO: 53003 - DNA, 25 bp, Artificial
  Probe
caatgtccttgttgaactatcctgg

SEQ ID NO: 53004 - DNA, 25 bp, Artificial
  Probe
tgtccttgttgaactatcctggtac

SEQ ID NO: 53005 - DNA, 25 bp, Artificial
  Probe
gtccatccctgtgtgatatactatt

SEQ ID NO: 53006 - DNA, 25 bp, Artificial
  Probe
caagcaatgtatgtctttctggata

SEQ ID NO: 53007 - DNA, 25 bp, Artificial
  Probe
agtccatccctgtgtgatatactat

SEQ ID NO: 53008 - DNA, 25 bp, Artificial
  Probe
gagtccatccctgtgtgatatacta

SEQ ID NO: 53009 - DNA, 25 bp, Artificial
  Probe
aactgttccttcattgactagcgac

SEQ ID NO: 53010 - DNA, 25 bp, Artificial
  Probe
ttgagacaacctctgataatctatt

SEQ ID NO: 53011 - DNA, 25 bp, Artificial
  Probe
ggcttatttgagacaacctctgata

SEQ ID NO: 53012 - DNA, 25 bp, Artificial
  Probe
acaatatccaacagtttcaatgtcc

SEQ ID NO: 53013 - DNA, 25 bp, Artificial
  Probe
aaacaagcaatgtatgtctttctgg

SEQ ID NO: 53014 - DNA, 25 bp, Artificial
  Probe
atatccaacagtttcaatgtccttg

SEQ ID NO: 53015 - DNA, 25 bp, Artificial
  Probe
caatatccaacagtttcaatgtcct

SEQ ID NO: 53016 - DNA, 25 bp, Artificial
  Probe
aagcaatgtatgtctttctggatat

SEQ ID NO: 53017 - DNA, 25 bp, Artificial
  Probe
tatccaacagtttcaatgtccttgt

SEQ ID NO: 53018 - DNA, 25 bp, Artificial
  Probe
ccatccctgtgtgatatactattac

SEQ ID NO: 53019 - DNA, 25 bp, Artificial
  Probe
acaagcaatgtatgtctttctggat

SEQ ID NO: 53020 - DNA, 25 bp, Artificial
  Probe
gcttatttgagacaacctctgataa

SEQ ID NO: 53021 - DNA, 25 bp, Artificial
  Probe
gaactgttccttcattgactagcga

SEQ ID NO: 53022 - DNA, 25 bp, Artificial
  Probe
aacaagcaatgtatgtctttctgga

SEQ ID NO: 53023 - DNA, 25 bp, Artificial
  Probe
tccatccctgtgtgatatactatta

SEQ ID NO: 53024 - DNA, 25 bp, Artificial
  Probe
ctgagtccatccctgtgtgatatac

SEQ ID NO: 53025 - DNA, 25 bp, Artificial
  Probe
aatatccaacagtttcaatgtcctt

SEQ ID NO: 53026 - DNA, 25 bp, Artificial
  Probe
tttgatctaactcattggaggctag

SEQ ID NO: 53027 - DNA, 25 bp, Artificial
  Probe
ctttgatctaactcattggaggcta

SEQ ID NO: 53028 - DNA, 25 bp, Artificial
  Probe
cttgctttgatctaactcattggag

SEQ ID NO: 53029 - DNA, 25 bp, Artificial
  Probe
gccatgcttgtcttcaaatatagaa

SEQ ID NO: 53030 - DNA, 25 bp, Artificial
  Probe
tctcgtgaataggaagttcattctt

SEQ ID NO: 53031 - DNA, 25 bp, Artificial
  Probe
ttctcgtgaataggaagttcattct

SEQ ID NO: 53032 - DNA, 25 bp, Artificial
  Probe
tgccatgcttgtcttcaaatataga

SEQ ID NO: 53033 - DNA, 25 bp, Artificial
  Probe
gtgccatgcttgtcttcaaatatag

SEQ ID NO: 53034 - DNA, 25 bp, Artificial
  Probe
tacctttctcgtgaataggaagttc

SEQ ID NO: 53035 - DNA, 25 bp, Artificial
  Probe
tcaatgtccttgttgaactatcctg

SEQ ID NO: 53036 - DNA, 25 bp, Artificial
  Probe
ccttgctttgatctaactcattgga

SEQ ID NO: 53037 - DNA, 25 bp, Artificial
  Probe
ttgctttgatctaactcattggagg

SEQ ID NO: 53038 - DNA, 25 bp, Artificial
  Probe
agcaatgtatgtctttctggatata

SEQ ID NO: 53039 - DNA, 25 bp, Artificial
  Probe
gatccataatgatgtcttagaggcc

SEQ ID NO: 53040 - DNA, 25 bp, Artificial
  Probe
tttgtaaagtgttgaaccagtgctg

SEQ ID NO: 53041 - DNA, 25 bp, Artificial
  Probe
aacaatatccaacagtttcaatgtc

SEQ ID NO: 53042 - DNA, 25 bp, Artificial
  Probe
tggcttatttgagacaacctctgat

SEQ ID NO: 53043 - DNA, 25 bp, Artificial
  Probe
gtacctttctcgtgaataggaagtt

SEQ ID NO: 53044 - DNA, 25 bp, Artificial
  Probe
gacaacctctgataatctattaaca

SEQ ID NO: 53045 - DNA, 25 bp, Artificial
  Probe
tgagtccatccctgtgtgatatact

SEQ ID NO: 53046 - DNA, 25 bp, Artificial
  Probe
ccctctctcaaatattcctgatctc

SEQ ID NO: 53047 - DNA, 25 bp, Artificial
  Probe
cctctctcaaatattcctgatctca

SEQ ID NO: 53048 - DNA, 25 bp, Artificial
  Probe
aacgccatcacctacgagacattaa

SEQ ID NO: 53049 - DNA, 25 bp, Artificial
  Probe
ctctctcaaatattcctgatctcag

SEQ ID NO: 53050 - DNA, 25 bp, Artificial
  Probe
gaacgccatcacctacgagacatta

SEQ ID NO: 53051 - DNA, 25 bp, Artificial
  Probe
ctgatggtggaagagagtgaagagc

SEQ ID NO: 53052 - DNA, 25 bp, Artificial
  Probe
gctgatggtggaagagagtgaagag

SEQ ID NO: 53053 - DNA, 25 bp, Artificial
  Probe
gccatcacctacgagacattaaaat

SEQ ID NO: 53054 - DNA, 25 bp, Artificial
  Probe
ccatcacctacgagacattaaaata

SEQ ID NO: 53055 - DNA, 25 bp, Artificial
  Probe
tcacctacgagacattaaaatacat

SEQ ID NO: 53056 - DNA, 25 bp, Artificial
  Probe
atcacctacgagacattaaaataca

SEQ ID NO: 53057 - DNA, 25 bp, Artificial
  Probe
acgccatcacctacgagacattaaa

SEQ ID NO: 53058 - DNA, 25 bp, Artificial
  Probe
catcacctacgagacattaaaatac

SEQ ID NO: 53059 - DNA, 25 bp, Artificial
  Probe
tatcgaaaactccatgtaagaacca

SEQ ID NO: 53060 - DNA, 25 bp, Artificial
  Probe
atcgaaaactccatgtaagaaccag

SEQ ID NO: 53061 - DNA, 25 bp, Artificial
  Probe
atatcgaaaactccatgtaagaacc

SEQ ID NO: 53062 - DNA, 25 bp, Artificial
  Probe
cccctctctcaaatattcctgatct

SEQ ID NO: 53063 - DNA, 25 bp, Artificial
  Probe
acccctctctcaaatattcctgatc

SEQ ID NO: 53064 - DNA, 25 bp, Artificial
  Probe
gacccctctctcaaatattcctgat

SEQ ID NO: 53065 - DNA, 25 bp, Artificial
  Probe
cgaaaactccatgtaagaaccagag

SEQ ID NO: 53066 - DNA, 25 bp, Artificial
  Probe
tcgaaaactccatgtaagaaccaga

SEQ ID NO: 53067 - DNA, 25 bp, Artificial
  Probe
cgccatcacctacgagacattaaaa

SEQ ID NO: 53068 - DNA, 25 bp, Artificial
  Probe
catatcgaaaactccatgtaagaac

SEQ ID NO: 53069 - DNA, 25 bp, Artificial
  Probe
ctgacccctctctcaaatattcctg

SEQ ID NO: 53070 - DNA, 25 bp, Artificial
  Probe
tggacgttcagagaactgtttattc

SEQ ID NO: 53071 - DNA, 25 bp, Artificial
  Probe
ctggacgttcagagaactgtttatt

SEQ ID NO: 53072 - DNA, 25 bp, Artificial
  Probe
agctgatggtggaagagagtgaaga

SEQ ID NO: 53073 - DNA, 25 bp, Artificial
  Probe
tgacccctctctcaaatattcctga

SEQ ID NO: 53074 - DNA, 25 bp, Artificial
  Probe
cacctacgagacattaaaatacata

SEQ ID NO: 53075 - DNA, 25 bp, Artificial
  Probe
gacgttcagagaactgtttattcgg

SEQ ID NO: 53076 - DNA, 25 bp, Artificial
  Probe
ggacgttcagagaactgtttattcg

SEQ ID NO: 53077 - DNA, 25 bp, Artificial
  Probe
ttcagagaactgtttattcggcctg

SEQ ID NO: 53078 - DNA, 25 bp, Artificial
  Probe
cctgacccctctctcaaatattcct

SEQ ID NO: 53079 - DNA, 25 bp, Artificial
  Probe
cctggacgttcagagaactgtttat

SEQ ID NO: 53080 - DNA, 25 bp, Artificial
  Probe
cagagaactgtttattcggcctgac

SEQ ID NO: 53081 - DNA, 25 bp, Artificial
  Probe
aaaactccatgtaagaaccagagtc

SEQ ID NO: 53082 - DNA, 25 bp, Artificial
  Probe
gaaaactccatgtaagaaccagagt

SEQ ID NO: 53083 - DNA, 25 bp, Artificial
  Probe
acatatcgaaaactccatgtaagaa

SEQ ID NO: 53084 - DNA, 25 bp, Artificial
  Probe
acctacgagacattaaaatacatat

SEQ ID NO: 53085 - DNA, 25 bp, Artificial
  Probe
tcctggacgttcagagaactgttta

SEQ ID NO: 53086 - DNA, 25 bp, Artificial
  Probe
acgttcagagaactgtttattcggc

SEQ ID NO: 53087 - DNA, 25 bp, Artificial
  Probe
catttcctggacgttcagagaactg

SEQ ID NO: 53088 - DNA, 25 bp, Artificial
  Probe
cctacgagacattaaaatacatatc

SEQ ID NO: 53089 - DNA, 25 bp, Artificial
  Probe
agagaactgtttattcggcctgacc

SEQ ID NO: 53090 - DNA, 25 bp, Artificial
  Probe
gttcagagaactgtttattcggcct

SEQ ID NO: 53091 - DNA, 25 bp, Artificial
  Probe
aatactatcacctagctctctcatt

SEQ ID NO: 53092 - DNA, 25 bp, Artificial
  Probe
acatccataccaaatactatcacct

SEQ ID NO: 53093 - DNA, 25 bp, Artificial
  Probe
tccataccaaatactatcacctagc

SEQ ID NO: 53094 - DNA, 25 bp, Artificial
  Probe
tgtcaactatattacatccatacca

SEQ ID NO: 53095 - DNA, 25 bp, Artificial
  Probe
cagatatccaacttgtccatcacag

SEQ ID NO: 53096 - DNA, 25 bp, Artificial
  Probe
catcattgtgcatgtcaactatatt

SEQ ID NO: 53097 - DNA, 25 bp, Artificial
  Probe
tacatccataccaaatactatcacc

SEQ ID NO: 53098 - DNA, 25 bp, Artificial
  Probe
ccaaatactatcacctagctctctc

SEQ ID NO: 53099 - DNA, 25 bp, Artificial
  Probe
accaaatactatcacctagctctct

SEQ ID NO: 53100 - DNA, 25 bp, Artificial
  Probe
ccataccaaatactatcacctagct

SEQ ID NO: 53101 - DNA, 25 bp, Artificial
  Probe
actatcacctagctctctcatttac

SEQ ID NO: 53102 - DNA, 25 bp, Artificial
  Probe
caaatactatcacctagctctctca

SEQ ID NO: 53103 - DNA, 25 bp, Artificial
  Probe
catccataccaaatactatcaccta

SEQ ID NO: 53104 - DNA, 25 bp, Artificial
  Probe
gtcaactatattacatccataccaa

SEQ ID NO: 53105 - DNA, 25 bp, Artificial
  Probe
attcagaaatctaccaaggagcttc

SEQ ID NO: 53106 - DNA, 25 bp, Artificial
  Probe
tattcagaaatctaccaaggagctt

SEQ ID NO: 53107 - DNA, 25 bp, Artificial
  Probe
ctatcacctagctctctcatttact

SEQ ID NO: 53108 - DNA, 25 bp, Artificial
  Probe
taccaaatactatcacctagctctc

SEQ ID NO: 53109 - DNA, 25 bp, Artificial
  Probe
cattgtgcatgtcaactatattaca

SEQ ID NO: 53110 - DNA, 25 bp, Artificial
  Probe
tcattgtgcatgtcaactatattac

SEQ ID NO: 53111 - DNA, 25 bp, Artificial
  Probe
tcacctagctctctcatttactaat

SEQ ID NO: 53112 - DNA, 25 bp, Artificial
  Probe
atcacctagctctctcatttactaa

SEQ ID NO: 53113 - DNA, 25 bp, Artificial
  Probe
cataccaaatactatcacctagctc

SEQ ID NO: 53114 - DNA, 25 bp, Artificial
  Probe
atactatcacctagctctctcattt

SEQ ID NO: 53115 - DNA, 25 bp, Artificial
  Probe
aaatactatcacctagctctctcat

SEQ ID NO: 53116 - DNA, 25 bp, Artificial
  Probe
ataccaaatactatcacctagctct

SEQ ID NO: 53117 - DNA, 25 bp, Artificial
  Probe
ccagatatccaacttgtccatcaca

SEQ ID NO: 53118 - DNA, 25 bp, Artificial
  Probe
atccataccaaatactatcacctag

SEQ ID NO: 53119 - DNA, 25 bp, Artificial
  Probe
gatatccaacttgtccatcacagct

SEQ ID NO: 53120 - DNA, 25 bp, Artificial
  Probe
agatatccaacttgtccatcacagc

SEQ ID NO: 53121 - DNA, 25 bp, Artificial
  Probe
aatctaccaaggagcttcgagacat

SEQ ID NO: 53122 - DNA, 25 bp, Artificial
  Probe
tatcacctagctctctcatttacta

SEQ ID NO: 53123 - DNA, 25 bp, Artificial
  Probe
tactatcacctagctctctcattta

SEQ ID NO: 53124 - DNA, 25 bp, Artificial
  Probe
gtgcatgtcaactatattacatcca

SEQ ID NO: 53125 - DNA, 25 bp, Artificial
  Probe
tgtgcatgtcaactatattacatcc

SEQ ID NO: 53126 - DNA, 25 bp, Artificial
  Probe
acatcattgtgcatgtcaactatat

SEQ ID NO: 53127 - DNA, 25 bp, Artificial
  Probe
atcattgtgcatgtcaactatatta

SEQ ID NO: 53128 - DNA, 25 bp, Artificial
  Probe
ttcagaaatctaccaaggagcttcg

SEQ ID NO: 53129 - DNA, 25 bp, Artificial
  Probe
tgcatgtcaactatattacatccat

SEQ ID NO: 53130 - DNA, 25 bp, Artificial
  Probe
ttacatccataccaaatactatcac

SEQ ID NO: 53131 - DNA, 25 bp, Artificial
  Probe
acctagctctctcatttactaatgt

SEQ ID NO: 53132 - DNA, 25 bp, Artificial
  Probe
atctaccaaggagcttcgagacatg

SEQ ID NO: 53133 - DNA, 25 bp, Artificial
  Probe
cacctagctctctcatttactaatg

SEQ ID NO: 53134 - DNA, 25 bp, Artificial
  Probe
cagaaatctaccaaggagcttcgag

SEQ ID NO: 53135 - DNA, 25 bp, Artificial
  Probe
gaaatctaccaaggagcttcgagac

SEQ ID NO: 53136 - DNA, 25 bp, Artificial
  Probe
cagaactgccagattacaggagctt

SEQ ID NO: 53137 - DNA, 25 bp, Artificial
  Probe
agctttgtacccgaaacttttcaag

SEQ ID NO: 53138 - DNA, 25 bp, Artificial
  Probe
ctttgtacccgaaacttttcaagcc

SEQ ID NO: 53139 - DNA, 25 bp, Artificial
  Probe
agaactgccagattacaggagcttt

SEQ ID NO: 53140 - DNA, 25 bp, Artificial
  Probe
gaaacttttcaagcctgaaggaaag

SEQ ID NO: 53141 - DNA, 25 bp, Artificial
  Probe
tttgtacccgaaacttttcaagcct

SEQ ID NO: 53142 - DNA, 25 bp, Artificial
  Probe
aaacttttcaagcctgaaggaaagg

SEQ ID NO: 53143 - DNA, 25 bp, Artificial
  Probe
cgaaacttttcaagcctgaaggaaa

SEQ ID NO: 53144 - DNA, 25 bp, Artificial
  Probe
ttgtacccgaaacttttcaagcctg

SEQ ID NO: 53145 - DNA, 25 bp, Artificial
  Probe
ctggaagctttgtacccgaaacttt

SEQ ID NO: 53146 - DNA, 25 bp, Artificial
  Probe
aagctttgtacccgaaacttttcaa

SEQ ID NO: 53147 - DNA, 25 bp, Artificial
  Probe
gaagctttgtacccgaaacttttca

SEQ ID NO: 53148 - DNA, 25 bp, Artificial
  Probe
tacccgaaacttttcaagcctgaag

SEQ ID NO: 53149 - DNA, 25 bp, Artificial
  Probe
tgtacccgaaacttttcaagcctga

SEQ ID NO: 53150 - DNA, 25 bp, Artificial
  Probe
gtacccgaaacttttcaagcctgaa

SEQ ID NO: 53151 - DNA, 25 bp, Artificial
  Probe
ggaagctttgtacccgaaacttttc

SEQ ID NO: 53152 - DNA, 25 bp, Artificial
  Probe
ccgaaacttttcaagcctgaaggaa

SEQ ID NO: 53153 - DNA, 25 bp, Artificial
  Probe
tggaagctttgtacccgaaactttt

SEQ ID NO: 53154 - DNA, 25 bp, Artificial
  Probe
gctttgtacccgaaacttttcaagc

SEQ ID NO: 53155 - DNA, 25 bp, Artificial
  Probe
aacttgacagtggaagacaaagatg

SEQ ID NO: 53156 - DNA, 25 bp, Artificial
  Probe
caacttgacagtggaagacaaagat

SEQ ID NO: 53157 - DNA, 25 bp, Artificial
  Probe
cttgacagtggaagacaaagatgac

SEQ ID NO: 53158 - DNA, 25 bp, Artificial
  Probe
acttgacagtggaagacaaagatga

SEQ ID NO: 53159 - DNA, 25 bp, Artificial
  Probe
atcatcgaagctcaagatatggcag

SEQ ID NO: 53160 - DNA, 25 bp, Artificial
  Probe
gatcatcgaagctcaagatatggca

SEQ ID NO: 53161 - DNA, 25 bp, Artificial
  Probe
aattcaccaagaaagagtttcaagc

SEQ ID NO: 53162 - DNA, 25 bp, Artificial
  Probe
tcaacttgacagtggaagacaaaga

SEQ ID NO: 53163 - DNA, 25 bp, Artificial
  Probe
aactgatcatcgaagctcaagatat

SEQ ID NO: 53164 - DNA, 25 bp, Artificial
  Probe
gaactgatcatcgaagctcaagata

SEQ ID NO: 53165 - DNA, 25 bp, Artificial
  Probe
actgatcatcgaagctcaagatatg

SEQ ID NO: 53166 - DNA, 25 bp, Artificial
  Probe
ttgacagtggaagacaaagatgacc

SEQ ID NO: 53167 - DNA, 25 bp, Artificial
  Probe
ctgatcatcgaagctcaagatatgg

SEQ ID NO: 53168 - DNA, 25 bp, Artificial
  Probe
aaattcaccaagaaagagtttcaag

SEQ ID NO: 53169 - DNA, 25 bp, Artificial
  Probe
accaaaattcaccaagaaagagttt

SEQ ID NO: 53170 - DNA, 25 bp, Artificial
  Probe
attcaccaagaaagagtttcaagcc

SEQ ID NO: 53171 - DNA, 25 bp, Artificial
  Probe
caccaaaattcaccaagaaagagtt

SEQ ID NO: 53172 - DNA, 25 bp, Artificial
  Probe
ggtgaccaaacaggaaaatatctct

SEQ ID NO: 53173 - DNA, 25 bp, Artificial
  Probe
tcaccaaaattcaccaagaaagagt

SEQ ID NO: 53174 - DNA, 25 bp, Artificial
  Probe
actcaccaaaattcaccaagaaaga

SEQ ID NO: 53175 - DNA, 25 bp, Artificial
  Probe
cactcaccaaaattcaccaagaaag

SEQ ID NO: 53176 - DNA, 25 bp, Artificial
  Probe
atcactcaccaaaattcaccaagaa

SEQ ID NO: 53177 - DNA, 25 bp, Artificial
  Probe
tcactcaccaaaattcaccaagaaa

SEQ ID NO: 53178 - DNA, 25 bp, Artificial
  Probe
tgaactgatcatcgaagctcaagat

SEQ ID NO: 53179 - DNA, 25 bp, Artificial
  Probe
ctcaccaaaattcaccaagaaagag

SEQ ID NO: 53180 - DNA, 25 bp, Artificial
  Probe
gtgaccaaacaggaaaatatctctg

SEQ ID NO: 53181 - DNA, 25 bp, Artificial
  Probe
gatcactcaccaaaattcaccaaga

SEQ ID NO: 53182 - DNA, 25 bp, Artificial
  Probe
caagaaagagtttcaagccacagtg

SEQ ID NO: 53183 - DNA, 25 bp, Artificial
  Probe
catcatcaatggaaatcctgggcag

SEQ ID NO: 53184 - DNA, 25 bp, Artificial
  Probe
tatgaactgatcatcgaagctcaag

SEQ ID NO: 53185 - DNA, 25 bp, Artificial
  Probe
aagtatgaactgatcatcgaagctc

SEQ ID NO: 53186 - DNA, 25 bp, Artificial
  Probe
atcatcaatggaaatcctgggcaga

SEQ ID NO: 53187 - DNA, 25 bp, Artificial
  Probe
tgatcatcgaagctcaagatatggc

SEQ ID NO: 53188 - DNA, 25 bp, Artificial
  Probe
gtatgaactgatcatcgaagctcaa

SEQ ID NO: 53189 - DNA, 25 bp, Artificial
  Probe
caagtatgaactgatcatcgaagct

SEQ ID NO: 53190 - DNA, 25 bp, Artificial
  Probe
ggaaaaccccaagtatgaactgatc

SEQ ID NO: 53191 - DNA, 25 bp, Artificial
  Probe
ttcaccaagaaagagtttcaagcca

SEQ ID NO: 53192 - DNA, 25 bp, Artificial
  Probe
atcgaagctcaagatatggcaggac

SEQ ID NO: 53193 - DNA, 25 bp, Artificial
  Probe
atcaaagtggagaatgaggacccat

SEQ ID NO: 53194 - DNA, 25 bp, Artificial
  Probe
catcgaagctcaagatatggcagga

SEQ ID NO: 53195 - DNA, 25 bp, Artificial
  Probe
tcatcgaagctcaagatatggcagg

SEQ ID NO: 53196 - DNA, 25 bp, Artificial
  Probe
agtatgaactgatcatcgaagctca

SEQ ID NO: 53197 - DNA, 25 bp, Artificial
  Probe
tgacagtggaagacaaagatgaccc

SEQ ID NO: 53198 - DNA, 25 bp, Artificial
  Probe
ccaagtatgaactgatcatcgaagc

SEQ ID NO: 53199 - DNA, 25 bp, Artificial
  Probe
atacaccatcatcaatggaaatcct

SEQ ID NO: 53200 - DNA, 25 bp, Artificial
  Probe
cctcctacatctcaatatctgctga

SEQ ID NO: 53201 - DNA, 25 bp, Artificial
  Probe
gtctacctcatcctgttcttcaaga

SEQ ID NO: 53202 - DNA, 25 bp, Artificial
  Probe
tctacctcatcctgttcttcaagag

SEQ ID NO: 53203 - DNA, 25 bp, Artificial
  Probe
ctacctcatcctgttcttcaagagt

SEQ ID NO: 53204 - DNA, 25 bp, Artificial
  Probe
cgtctacctcatcctgttcttcaag

SEQ ID NO: 53205 - DNA, 25 bp, Artificial
  Probe
tacctcatcctgttcttcaagagtg

SEQ ID NO: 53206 - DNA, 25 bp, Artificial
  Probe
tcttcatccctcctacatctcaata

SEQ ID NO: 53207 - DNA, 25 bp, Artificial
  Probe
tatcttcatccctcctacatctcaa

SEQ ID NO: 53208 - DNA, 25 bp, Artificial
  Probe
catccctcctacatctcaatatctg

SEQ ID NO: 53209 - DNA, 25 bp, Artificial
  Probe
tcatccctcctacatctcaatatct

SEQ ID NO: 53210 - DNA, 25 bp, Artificial
  Probe
ctatcttcatccctcctacatctca

SEQ ID NO: 53211 - DNA, 25 bp, Artificial
  Probe
atcttcatccctcctacatctcaat

SEQ ID NO: 53212 - DNA, 25 bp, Artificial
  Probe
ttcatccctcctacatctcaatatc

SEQ ID NO: 53213 - DNA, 25 bp, Artificial
  Probe
cttcatccctcctacatctcaatat

SEQ ID NO: 53214 - DNA, 25 bp, Artificial
  Probe
taatgtcaatcccagagagagtgtt

SEQ ID NO: 53215 - DNA, 25 bp, Artificial
  Probe
cttgcttgaaaggaaggaaggatat

SEQ ID NO: 53216 - DNA, 25 bp, Artificial
  Probe
atccctcctacatctcaatatctgc

SEQ ID NO: 53217 - DNA, 25 bp, Artificial
  Probe
ttaatgtcaatcccagagagagtgt

SEQ ID NO: 53218 - DNA, 25 bp, Artificial
  Probe
ttgcttgaaaggaaggaaggatatg

SEQ ID NO: 53219 - DNA, 25 bp, Artificial
  Probe
gctatcttcatccctcctacatctc

SEQ ID NO: 53220 - DNA, 25 bp, Artificial
  Probe
atgctatcttcatccctcctacatc

SEQ ID NO: 53221 - DNA, 25 bp, Artificial
  Probe
cttgaaaggaaggaaggatatgctg

SEQ ID NO: 53222 - DNA, 25 bp, Artificial
  Probe
aatgtcaatcccagagagagtgttt

SEQ ID NO: 53223 - DNA, 25 bp, Artificial
  Probe
ctacgtctacctcatcctgttcttc

SEQ ID NO: 53224 - DNA, 25 bp, Artificial
  Probe
cttctacgtctacctcatcctgttc

SEQ ID NO: 53225 - DNA, 25 bp, Artificial
  Probe
gcccaatgtatataaactccagttc

SEQ ID NO: 53226 - DNA, 25 bp, Artificial
  Probe
tgctatcttcatccctcctacatct

SEQ ID NO: 53227 - DNA, 25 bp, Artificial
  Probe
tagtggatgatgaaacaggaaggtc

SEQ ID NO: 53228 - DNA, 25 bp, Artificial
  Probe
tcattactataattctcagagcaga

SEQ ID NO: 53229 - DNA, 25 bp, Artificial
  Probe
ccctcctacatctcaatatctgctg

SEQ ID NO: 53230 - DNA, 25 bp, Artificial
  Probe
tccctcctacatctcaatatctgct

SEQ ID NO: 53231 - DNA, 25 bp, Artificial
  Probe
tctacgtctacctcatcctgttctt

SEQ ID NO: 53232 - DNA, 25 bp, Artificial
  Probe
ttctacgtctacctcatcctgttct

SEQ ID NO: 53233 - DNA, 25 bp, Artificial
  Probe
cccaatgtatataaactccagttcc

SEQ ID NO: 53234 - DNA, 25 bp, Artificial
  Probe
attaatgtcaatcccagagagagtg

SEQ ID NO: 53235 - DNA, 25 bp, Artificial
  Probe
atataaactccagttcctagtcacc

SEQ ID NO: 53236 - DNA, 25 bp, Artificial
  Probe
tataaactccagttcctagtcaccc

SEQ ID NO: 53237 - DNA, 25 bp, Artificial
  Probe
catcctgttcttcaagagtgtggtc

SEQ ID NO: 53238 - DNA, 25 bp, Artificial
  Probe
ctcatcctgttcttcaagagtgtgg

SEQ ID NO: 53239 - DNA, 25 bp, Artificial
  Probe
cctcatcctgttcttcaagagtgtg

SEQ ID NO: 53240 - DNA, 25 bp, Artificial
  Probe
tacgtctacctcatcctgttcttca

SEQ ID NO: 53241 - DNA, 25 bp, Artificial
  Probe
ctagtggatgatgaaacaggaaggt

SEQ ID NO: 53242 - DNA, 25 bp, Artificial
  Probe
cattactataattctcagagcagag

SEQ ID NO: 53243 - DNA, 25 bp, Artificial
  Probe
catgctatcttcatccctcctacat

SEQ ID NO: 53244 - DNA, 25 bp, Artificial
  Probe
caacattcctagtggatgatgaaac

SEQ ID NO: 53245 - DNA, 25 bp, Artificial
  Probe
atcattcatgtattgtccagcttac

SEQ ID NO: 53246 - DNA, 25 bp, Artificial
  Probe
cttatcattcatgtattgtccagct

SEQ ID NO: 53247 - DNA, 25 bp, Artificial
  Probe
ttatcattcatgtattgtccagctt

SEQ ID NO: 53248 - DNA, 25 bp, Artificial
  Probe
tatcattcatgtattgtccagctta

SEQ ID NO: 53249 - DNA, 25 bp, Artificial
  Probe
cacctgactttgtatcctctccttt

SEQ ID NO: 53250 - DNA, 25 bp, Artificial
  Probe
gcttatcattcatgtattgtccagc

SEQ ID NO: 53251 - DNA, 25 bp, Artificial
  Probe
tcattcatgtattgtccagcttaca

SEQ ID NO: 53252 - DNA, 25 bp, Artificial
  Probe
tttaactctaacacccttcagaaat

SEQ ID NO: 53253 - DNA, 25 bp, Artificial
  Probe
ttaactctaacacccttcagaaatt

SEQ ID NO: 53254 - DNA, 25 bp, Artificial
  Probe
atccttgggttgagtgtttcatttg

SEQ ID NO: 53255 - DNA, 25 bp, Artificial
  Probe
catccttgggttgagtgtttcattt

SEQ ID NO: 53256 - DNA, 25 bp, Artificial
  Probe
aattatgatacagtccaaagaatgc

SEQ ID NO: 53257 - DNA, 25 bp, Artificial
  Probe
tcacctgactttgtatcctctcctt

SEQ ID NO: 53258 - DNA, 25 bp, Artificial
  Probe
tatgatacagtccaaagaatgcagt

SEQ ID NO: 53259 - DNA, 25 bp, Artificial
  Probe
ctactttgtaactgcatggcttaac

SEQ ID NO: 53260 - DNA, 25 bp, Artificial
  Probe
aaagccctgtggataattaagttat

SEQ ID NO: 53261 - DNA, 25 bp, Artificial
  Probe
ttatgatacagtccaaagaatgcag

SEQ ID NO: 53262 - DNA, 25 bp, Artificial
  Probe
atgatacagtccaaagaatgcagtc

SEQ ID NO: 53263 - DNA, 25 bp, Artificial
  Probe
attatgatacagtccaaagaatgca

SEQ ID NO: 53264 - DNA, 25 bp, Artificial
  Probe
tactttgtaactgcatggcttaacc

SEQ ID NO: 53265 - DNA, 25 bp, Artificial
  Probe
gatacagtccaaagaatgcagtcac

SEQ ID NO: 53266 - DNA, 25 bp, Artificial
  Probe
acatccttgggttgagtgtttcatt

SEQ ID NO: 53267 - DNA, 25 bp, Artificial
  Probe
taactctaacacccttcagaaattt

SEQ ID NO: 53268 - DNA, 25 bp, Artificial
  Probe
acctgactttgtatcctctcctttt

SEQ ID NO: 53269 - DNA, 25 bp, Artificial
  Probe
aattaagttatcttcatacctgcaa

SEQ ID NO: 53270 - DNA, 25 bp, Artificial
  Probe
aactgtcagaatttgcttactataa

SEQ ID NO: 53271 - DNA, 25 bp, Artificial
  Probe
aaactgtcagaatttgcttactata

SEQ ID NO: 53272 - DNA, 25 bp, Artificial
  Probe
atacagtccaaagaatgcagtcact

SEQ ID NO: 53273 - DNA, 25 bp, Artificial
  Probe
tgatacagtccaaagaatgcagtca

SEQ ID NO: 53274 - DNA, 25 bp, Artificial
  Probe
ctttgtaactgcatggcttaacctg

SEQ ID NO: 53275 - DNA, 25 bp, Artificial
  Probe
actgtcagaatttgcttactataat

SEQ ID NO: 53276 - DNA, 25 bp, Artificial
  Probe
tacagtccaaagaatgcagtcactt

SEQ ID NO: 53277 - DNA, 25 bp, Artificial
  Probe
tccttgggttgagtgtttcatttgg

SEQ ID NO: 53278 - DNA, 25 bp, Artificial
  Probe
cttacattaaaagccctgtggataa

SEQ ID NO: 53279 - DNA, 25 bp, Artificial
  Probe
ttttaactctaacacccttcagaaa

SEQ ID NO: 53280 - DNA, 25 bp, Artificial
  Probe
actttgtaactgcatggcttaacct

SEQ ID NO: 53281 - DNA, 25 bp, Artificial
  Probe
tggtggaggctattttcattaaaac

SEQ ID NO: 53282 - DNA, 25 bp, Artificial
  Probe
ggtggaggctattttcattaaaact

SEQ ID NO: 53283 - DNA, 25 bp, Artificial
  Probe
tcattaaaactgtcagaatttgctt

SEQ ID NO: 53284 - DNA, 25 bp, Artificial
  Probe
ttcattaaaactgtcagaatttgct

SEQ ID NO: 53285 - DNA, 25 bp, Artificial
  Probe
agccctgtggataattaagttatct

SEQ ID NO: 53286 - DNA, 25 bp, Artificial
  Probe
tacattaaaagccctgtggataatt

SEQ ID NO: 53287 - DNA, 25 bp, Artificial
  Probe
ttacattaaaagccctgtggataat

SEQ ID NO: 53288 - DNA, 25 bp, Artificial
  Probe
tggaggctattttcattaaaactgt

SEQ ID NO: 53289 - DNA, 25 bp, Artificial
  Probe
atggtggaggctattttcattaaaa

SEQ ID NO: 53290 - DNA, 25 bp, Artificial
  Probe
gctacattgaagaacacatataccg

SEQ ID NO: 53291 - DNA, 25 bp, Artificial
  Probe
cttcaacattagagagagcactagc

SEQ ID NO: 53292 - DNA, 25 bp, Artificial
  Probe
ctgtagatcgtagatggaacctagc

SEQ ID NO: 53293 - DNA, 25 bp, Artificial
  Probe
gctgtagatcgtagatggaacctag

SEQ ID NO: 53294 - DNA, 25 bp, Artificial
  Probe
gtagatcgtagatggaacctagcac

SEQ ID NO: 53295 - DNA, 25 bp, Artificial
  Probe
agctacattgaagaacacatatacc

SEQ ID NO: 53296 - DNA, 25 bp, Artificial
  Probe
ttatgagacaggagctaatcaagac

SEQ ID NO: 53297 - DNA, 25 bp, Artificial
  Probe
tctttcctatcccacatactattgc

SEQ ID NO: 53298 - DNA, 25 bp, Artificial
  Probe
gtcattctttcctatcccacatact

SEQ ID NO: 53299 - DNA, 25 bp, Artificial
  Probe
ttggtatgtcattctttcctatccc

SEQ ID NO: 53300 - DNA, 25 bp, Artificial
  Probe
tagatcgtagatggaacctagcaca

SEQ ID NO: 53301 - DNA, 25 bp, Artificial
  Probe
tgtagatcgtagatggaacctagca

SEQ ID NO: 53302 - DNA, 25 bp, Artificial
  Probe
agtgttggtatgtcattctttccta

SEQ ID NO: 53303 - DNA, 25 bp, Artificial
  Probe
ggtatgtcattctttcctatcccac

SEQ ID NO: 53304 - DNA, 25 bp, Artificial
  Probe
gttggtatgtcattctttcctatcc

SEQ ID NO: 53305 - DNA, 25 bp, Artificial
  Probe
gaagtgttggtatgtcattctttcc

SEQ ID NO: 53306 - DNA, 25 bp, Artificial
  Probe
ggaagtgttggtatgtcattctttc

SEQ ID NO: 53307 - DNA, 25 bp, Artificial
  Probe
aagtgttggtatgtcattctttcct

SEQ ID NO: 53308 - DNA, 25 bp, Artificial
  Probe
acatactattgcgaagctgtagatc

SEQ ID NO: 53309 - DNA, 25 bp, Artificial
  Probe
ctttcctatcccacatactattgcg

SEQ ID NO: 53310 - DNA, 25 bp, Artificial
  Probe
cacatactattgcgaagctgtagat

SEQ ID NO: 53311 - DNA, 25 bp, Artificial
  Probe
tttcctatcccacatactattgcga

SEQ ID NO: 53312 - DNA, 25 bp, Artificial
  Probe
gtgttggtatgtcattctttcctat

SEQ ID NO: 53313 - DNA, 25 bp, Artificial
  Probe
ggcagttgataccttgttggataaa

SEQ ID NO: 53314 - DNA, 25 bp, Artificial
  Probe
tatgagacaggagctaatcaagacc

SEQ ID NO: 53315 - DNA, 25 bp, Artificial
  Probe
atcgtagatggaacctagcacagat

SEQ ID NO: 53316 - DNA, 25 bp, Artificial
  Probe
tgttggtatgtcattctttcctatc

SEQ ID NO: 53317 - DNA, 25 bp, Artificial
  Probe
gggaagtgttggtatgtcattcttt

SEQ ID NO: 53318 - DNA, 25 bp, Artificial
  Probe
ttcctatcccacatactattgcgaa

SEQ ID NO: 53319 - DNA, 25 bp, Artificial
  Probe
tcattctttcctatcccacatacta

SEQ ID NO: 53320 - DNA, 25 bp, Artificial
  Probe
agctgtagatcgtagatggaaccta

SEQ ID NO: 53321 - DNA, 25 bp, Artificial
  Probe
tcgtagatggaacctagcacagatt

SEQ ID NO: 53322 - DNA, 25 bp, Artificial
  Probe
tcctatcccacatactattgcgaag

SEQ ID NO: 53323 - DNA, 25 bp, Artificial
  Probe
gcttcaacattagagagagcactag

SEQ ID NO: 53324 - DNA, 25 bp, Artificial
  Probe
gtagatggaacctagcacagatttc

SEQ ID NO: 53325 - DNA, 25 bp, Artificial
  Probe
tgtcattctttcctatcccacatac

SEQ ID NO: 53326 - DNA, 25 bp, Artificial
  Probe
gtatgtcattctttcctatcccaca

SEQ ID NO: 53327 - DNA, 25 bp, Artificial
  Probe
tagatggaacctagcacagatttct

SEQ ID NO: 53328 - DNA, 25 bp, Artificial
  Probe
gatggaacctagcacagatttcttc

SEQ ID NO: 53329 - DNA, 25 bp, Artificial
  Probe
gaagctgtagatcgtagatggaacc

SEQ ID NO: 53330 - DNA, 25 bp, Artificial
  Probe
ttctttcctatcccacatactattg

SEQ ID NO: 53331 - DNA, 25 bp, Artificial
  Probe
ctacattgaagaacacatataccgg

SEQ ID NO: 53332 - DNA, 25 bp, Artificial
  Probe
tacattgaagaacacatataccggc

SEQ ID NO: 53333 - DNA, 25 bp, Artificial
  Probe
ttaacatacaaggctggatgggaaa

SEQ ID NO: 53334 - DNA, 25 bp, Artificial
  Probe
tttaacatacaaggctggatgggaa

SEQ ID NO: 53335 - DNA, 25 bp, Artificial
  Probe
cgtggagactgttgaatacaagaat

SEQ ID NO: 53336 - DNA, 25 bp, Artificial
  Probe
gtggagactgttgaatacaagaata

SEQ ID NO: 53337 - DNA, 25 bp, Artificial
  Probe
gactgttgaatacaagaatatcagc

SEQ ID NO: 53338 - DNA, 25 bp, Artificial
  Probe
tggagactgttgaatacaagaatat

SEQ ID NO: 53339 - DNA, 25 bp, Artificial
  Probe
ggagactgttgaatacaagaatatc

SEQ ID NO: 53340 - DNA, 25 bp, Artificial
  Probe
actgttgaatacaagaatatcagct

SEQ ID NO: 53341 - DNA, 25 bp, Artificial
  Probe
gagactgttgaatacaagaatatca

SEQ ID NO: 53342 - DNA, 25 bp, Artificial
  Probe
acgtggagactgttgaatacaagaa

SEQ ID NO: 53343 - DNA, 25 bp, Artificial
  Probe
aacgtggagactgttgaatacaaga

SEQ ID NO: 53344 - DNA, 25 bp, Artificial
  Probe
agactgttgaatacaagaatatcag

SEQ ID NO: 53345 - DNA, 25 bp, Artificial
  Probe
ctgttgaatacaagaatatcagctt

SEQ ID NO: 53346 - DNA, 25 bp, Artificial
  Probe
ctgagatgcgataggagacagatgt

SEQ ID NO: 53347 - DNA, 25 bp, Artificial
  Probe
tagtggaagttggtgagatctggat

SEQ ID NO: 53348 - DNA, 25 bp, Artificial
  Probe
tgagatgcgataggagacagatgtc

SEQ ID NO: 53349 - DNA, 25 bp, Artificial
  Probe
ctatttgatgggcttgtgtgtcagt

SEQ ID NO: 53350 - DNA, 25 bp, Artificial
  Probe
cctgagatgcgataggagacagatg

SEQ ID NO: 53351 - DNA, 25 bp, Artificial
  Probe
tcgacaagcactgtaattatagcta

SEQ ID NO: 53352 - DNA, 25 bp, Artificial
  Probe
tatttgatgggcttgtgtgtcagtg

SEQ ID NO: 53353 - DNA, 25 bp, Artificial
  Probe
ctagtggaagttggtgagatctgga

SEQ ID NO: 53354 - DNA, 25 bp, Artificial
  Probe
gagatgcgataggagacagatgtcc

SEQ ID NO: 53355 - DNA, 25 bp, Artificial
  Probe
ttttcagttttcatttcgacaagca

SEQ ID NO: 53356 - DNA, 25 bp, Artificial
  Probe
cgataggagacagatgtccttcaag

SEQ ID NO: 53357 - DNA, 25 bp, Artificial
  Probe
caacgtggagactgttgaatacaag

SEQ ID NO: 53358 - DNA, 25 bp, Artificial
  Probe
gataggagacagatgtccttcaagc

SEQ ID NO: 53359 - DNA, 25 bp, Artificial
  Probe
gaagttggtgagatctggatgactt

SEQ ID NO: 53360 - DNA, 25 bp, Artificial
  Probe
ggaagttggtgagatctggatgact

SEQ ID NO: 53361 - DNA, 25 bp, Artificial
  Probe
tggaagttggtgagatctggatgac

SEQ ID NO: 53362 - DNA, 25 bp, Artificial
  Probe
gtggaagttggtgagatctggatga

SEQ ID NO: 53363 - DNA, 25 bp, Artificial
  Probe
agtggaagttggtgagatctggatg

SEQ ID NO: 53364 - DNA, 25 bp, Artificial
  Probe
cctagtggaagttggtgagatctgg

SEQ ID NO: 53365 - DNA, 25 bp, Artificial
  Probe
aagttggtgagatctggatgacttg

SEQ ID NO: 53366 - DNA, 25 bp, Artificial
  Probe
agttggtgagatctggatgacttgg

SEQ ID NO: 53367 - DNA, 25 bp, Artificial
  Probe
cattggtttcaacgtggagactgtt

SEQ ID NO: 53368 - DNA, 25 bp, Artificial
  Probe
gagacagatgtccttcaagccctag

SEQ ID NO: 53369 - DNA, 25 bp, Artificial
  Probe
tcccctcatgtcttaaggtactttt

SEQ ID NO: 53370 - DNA, 25 bp, Artificial
  Probe
ataggagacagatgtccttcaagcc

SEQ ID NO: 53371 - DNA, 25 bp, Artificial
  Probe
atgcgataggagacagatgtccttc

SEQ ID NO: 53372 - DNA, 25 bp, Artificial
  Probe
gatgcgataggagacagatgtcctt

SEQ ID NO: 53373 - DNA, 25 bp, Artificial
  Probe
gtcccctcatgtcttaaggtacttt

SEQ ID NO: 53374 - DNA, 25 bp, Artificial
  Probe
gacagatgtccttcaagccctagtg

SEQ ID NO: 53375 - DNA, 25 bp, Artificial
  Probe
aattgtgaccaccattcccaccatt

SEQ ID NO: 53376 - DNA, 25 bp, Artificial
  Probe
aaattgtgaccaccattcccaccat

SEQ ID NO: 53377 - DNA, 25 bp, Artificial
  Probe
ccctagtggaagttggtgagatctg

SEQ ID NO: 53378 - DNA, 25 bp, Artificial
  Probe
agacagatgtccttcaagccctagt

SEQ ID NO: 53379 - DNA, 25 bp, Artificial
  Probe
gcgataggagacagatgtccttcaa

SEQ ID NO: 53380 - DNA, 25 bp, Artificial
  Probe
tgccttctatatacacacacctatg

SEQ ID NO: 53381 - DNA, 25 bp, Artificial
  Probe
gccttctatatacacacacctatga

SEQ ID NO: 53382 - DNA, 25 bp, Artificial
  Probe
agtcatgccttctatatacacacac

SEQ ID NO: 53383 - DNA, 25 bp, Artificial
  Probe
catgccttctatatacacacaccta

SEQ ID NO: 53384 - DNA, 25 bp, Artificial
  Probe
tctatatacacacacctatgagcaa

SEQ ID NO: 53385 - DNA, 25 bp, Artificial
  Probe
ttctatatacacacacctatgagca

SEQ ID NO: 53386 - DNA, 25 bp, Artificial
  Probe
atgccttctatatacacacacctat

SEQ ID NO: 53387 - DNA, 25 bp, Artificial
  Probe
tcatgccttctatatacacacacct

SEQ ID NO: 53388 - DNA, 25 bp, Artificial
  Probe
gtcatgccttctatatacacacacc

SEQ ID NO: 53389 - DNA, 25 bp, Artificial
  Probe
cttctatatacacacacctatgagc

SEQ ID NO: 53390 - DNA, 25 bp, Artificial
  Probe
tagtcatgccttctatatacacaca

SEQ ID NO: 53391 - DNA, 25 bp, Artificial
  Probe
atatacacacacctatgagcaataa

SEQ ID NO: 53392 - DNA, 25 bp, Artificial
  Probe
ctatatacacacacctatgagcaat

SEQ ID NO: 53393 - DNA, 25 bp, Artificial
  Probe
ccttctatatacacacacctatgag

SEQ ID NO: 53394 - DNA, 25 bp, Artificial
  Probe
ttagtcatgccttctatatacacac

SEQ ID NO: 53395 - DNA, 25 bp, Artificial
  Probe
gctaaggagagaaatgacacaaatt

SEQ ID NO: 53396 - DNA, 25 bp, Artificial
  Probe
attcactgtattcctctttctagcc

SEQ ID NO: 53397 - DNA, 25 bp, Artificial
  Probe
cctcctcctttagattaaacctcaa

SEQ ID NO: 53398 - DNA, 25 bp, Artificial
  Probe
cacctcctcctttagattaaacctc

SEQ ID NO: 53399 - DNA, 25 bp, Artificial
  Probe
acctcctcctttagattaaacctca

SEQ ID NO: 53400 - DNA, 25 bp, Artificial
  Probe
cattcactgtattcctctttctagc

SEQ ID NO: 53401 - DNA, 25 bp, Artificial
  Probe
gcattcactgtattcctctttctag

SEQ ID NO: 53402 - DNA, 25 bp, Artificial
  Probe
agggagtttaaggtcaatgtgattt

SEQ ID NO: 53403 - DNA, 25 bp, Artificial
  Probe
gctacccgcaaacaatttatagtac

SEQ ID NO: 53404 - DNA, 25 bp, Artificial
  Probe
cagggagtttaaggtcaatgtgatt

SEQ ID NO: 53405 - DNA, 25 bp, Artificial
  Probe
ctttagattaaacctcaagggctcc

SEQ ID NO: 53406 - DNA, 25 bp, Artificial
  Probe
ctcctcctttagattaaacctcaag

SEQ ID NO: 53407 - DNA, 25 bp, Artificial
  Probe
tatatacacacacctatgagcaata

SEQ ID NO: 53408 - DNA, 25 bp, Artificial
  Probe
tatacacacacctatgagcaataaa

SEQ ID NO: 53409 - DNA, 25 bp, Artificial
  Probe
ttcactgtattcctctttctagccc

SEQ ID NO: 53410 - DNA, 25 bp, Artificial
  Probe
agctaaggagagaaatgacacaaat

SEQ ID NO: 53411 - DNA, 25 bp, Artificial
  Probe
atatggagctaaggagagaaatgac

SEQ ID NO: 53412 - DNA, 25 bp, Artificial
  Probe
tatggagctaaggagagaaatgaca

SEQ ID NO: 53413 - DNA, 25 bp, Artificial
  Probe
gagctaaggagagaaatgacacaaa

SEQ ID NO: 53414 - DNA, 25 bp, Artificial
  Probe
ttatagtactcaatggcagacatct

SEQ ID NO: 53415 - DNA, 25 bp, Artificial
  Probe
aatatggagctaaggagagaaatga

SEQ ID NO: 53416 - DNA, 25 bp, Artificial
  Probe
caatatggagctaaggagagaaatg

SEQ ID NO: 53417 - DNA, 25 bp, Artificial
  Probe
tcaatatggagctaaggagagaaat

SEQ ID NO: 53418 - DNA, 25 bp, Artificial
  Probe
ttcaatatggagctaaggagagaaa

SEQ ID NO: 53419 - DNA, 25 bp, Artificial
  Probe
tttcaatatggagctaaggagagaa

SEQ ID NO: 53420 - DNA, 25 bp, Artificial
  Probe
cactgtattcctctttctagccctg

SEQ ID NO: 53421 - DNA, 25 bp, Artificial
  Probe
tcactgtattcctctttctagccct

SEQ ID NO: 53422 - DNA, 25 bp, Artificial
  Probe
tgcattcactgtattcctctttcta

SEQ ID NO: 53423 - DNA, 25 bp, Artificial
  Probe
tatagtactcaatggcagacatctg

SEQ ID NO: 53424 - DNA, 25 bp, Artificial
  Probe
tttagattaaacctcaagggctccc

SEQ ID NO: 53425 - DNA, 25 bp, Artificial
  Probe
ttgagtagtagaggtggttgagtat

SEQ ID NO: 53426 - DNA, 25 bp, Artificial
  Probe
attgagtagtagaggtggttgagta

SEQ ID NO: 53427 - DNA, 25 bp, Artificial
  Probe
ggtcagtaataatgtgtggagtctt

SEQ ID NO: 53428 - DNA, 25 bp, Artificial
  Probe
tgagtagtagaggtggttgagtatc

SEQ ID NO: 53429 - DNA, 25 bp, Artificial
  Probe
gtcagtaataatgtgtggagtcttg

SEQ ID NO: 53430 - DNA, 25 bp, Artificial
  Probe
cattcttgtcagccagttaatctac

SEQ ID NO: 53431 - DNA, 25 bp, Artificial
  Probe
ttgattgagtagtagaggtggttga

SEQ ID NO: 53432 - DNA, 25 bp, Artificial
  Probe
gtcttctgaatgtatgtgtatgtgt

SEQ ID NO: 53433 - DNA, 25 bp, Artificial
  Probe
gattgagtagtagaggtggttgagt

SEQ ID NO: 53434 - DNA, 25 bp, Artificial
  Probe
tgattgagtagtagaggtggttgag

SEQ ID NO: 53435 - DNA, 25 bp, Artificial
  Probe
cagtaataatgtgtggagtcttgaa

SEQ ID NO: 53436 - DNA, 25 bp, Artificial
  Probe
gcattcttgtcagccagttaatcta

SEQ ID NO: 53437 - DNA, 25 bp, Artificial
  Probe
agtcttctgaatgtatgtgtatgtg

SEQ ID NO: 53438 - DNA, 25 bp, Artificial
  Probe
gagtagtagaggtggttgagtatcg

SEQ ID NO: 53439 - DNA, 25 bp, Artificial
  Probe
attcttgtcagccagttaatctact

SEQ ID NO: 53440 - DNA, 25 bp, Artificial
  Probe
tcagtaataatgtgtggagtcttga

SEQ ID NO: 53441 - DNA, 25 bp, Artificial
  Probe
ttcttgtcagccagttaatctacta

SEQ ID NO: 53442 - DNA, 25 bp, Artificial
  Probe
tcttctgaatgtatgtgtatgtgtt

SEQ ID NO: 53443 - DNA, 25 bp, Artificial
  Probe
tcttgtcagccagttaatctactag

SEQ ID NO: 53444 - DNA, 25 bp, Artificial
  Probe
aagtcttctgaatgtatgtgtatgt

SEQ ID NO: 53445 - DNA, 25 bp, Artificial
  Probe
cttgtcagccagttaatctactagc

SEQ ID NO: 53446 - DNA, 25 bp, Artificial
  Probe
gtagtagaggtggttgagtatcgaa

SEQ ID NO: 53447 - DNA, 25 bp, Artificial
  Probe
ccagttaatctactagctcttaggc

SEQ ID NO: 53448 - DNA, 25 bp, Artificial
  Probe
gccagttaatctactagctcttagg

SEQ ID NO: 53449 - DNA, 25 bp, Artificial
  Probe
tttgattgagtagtagaggtggttg

SEQ ID NO: 53450 - DNA, 25 bp, Artificial
  Probe
catttgattgagtagtagaggtggt

SEQ ID NO: 53451 - DNA, 25 bp, Artificial
  Probe
acatttgattgagtagtagaggtgg

SEQ ID NO: 53452 - DNA, 25 bp, Artificial
  Probe
gttaatctactagctcttaggcagt

SEQ ID NO: 53453 - DNA, 25 bp, Artificial
  Probe
cagttaatctactagctcttaggca

SEQ ID NO: 53454 - DNA, 25 bp, Artificial
  Probe
atttgattgagtagtagaggtggtt

SEQ ID NO: 53455 - DNA, 25 bp, Artificial
  Probe
agttaatctactagctcttaggcag

SEQ ID NO: 53456 - DNA, 25 bp, Artificial
  Probe
tagataagatagttaccacccaggc

SEQ ID NO: 53457 - DNA, 25 bp, Artificial
  Probe
taataatgtgtggagtcttgaaacc

SEQ ID NO: 53458 - DNA, 25 bp, Artificial
  Probe
agtagtagaggtggttgagtatcga

SEQ ID NO: 53459 - DNA, 25 bp, Artificial
  Probe
aacatttgattgagtagtagaggtg

SEQ ID NO: 53460 - DNA, 25 bp, Artificial
  Probe
cttctgaatgtatgtgtatgtgtta

SEQ ID NO: 53461 - DNA, 25 bp, Artificial
  Probe
atagataagatagttaccacccagg

SEQ ID NO: 53462 - DNA, 25 bp, Artificial
  Probe
gtaataatgtgtggagtcttgaaac

SEQ ID NO: 53463 - DNA, 25 bp, Artificial
  Probe
gggtcagtaataatgtgtggagtct

SEQ ID NO: 53464 - DNA, 25 bp, Artificial
  Probe
cgtgtcttgtaacatttgattgagt

SEQ ID NO: 53465 - DNA, 25 bp, Artificial
  Probe
agtaataatgtgtggagtcttgaaa

SEQ ID NO: 53466 - DNA, 25 bp, Artificial
  Probe
tgatagataagatagttaccaccca

SEQ ID NO: 53467 - DNA, 25 bp, Artificial
  Probe
cagttcatgtttacataacgcaatt

SEQ ID NO: 53468 - DNA, 25 bp, Artificial
  Probe
tctgaatgtatgtgtatgtgttatt

SEQ ID NO: 53469 - DNA, 25 bp, Artificial
  Probe
ttctgaatgtatgtgtatgtgttat

SEQ ID NO: 53470 - DNA, 25 bp, Artificial
  Probe
gtatgactgtggctgtactgtatag

SEQ ID NO: 53471 - DNA, 25 bp, Artificial
  Probe
tgtatgactgtggctgtactgtata

SEQ ID NO: 53472 - DNA, 25 bp, Artificial
  Probe
actgtatagtgaacatagttggcat

SEQ ID NO: 53473 - DNA, 25 bp, Artificial
  Probe
tactgtatagtgaacatagttggca

SEQ ID NO: 53474 - DNA, 25 bp, Artificial
  Probe
tatgactgtggctgtactgtatagt

SEQ ID NO: 53475 - DNA, 25 bp, Artificial
  Probe
gtggctgtactgtatagtgaacata

SEQ ID NO: 53476 - DNA, 25 bp, Artificial
  Probe
ggctgtactgtatagtgaacatagt

SEQ ID NO: 53477 - DNA, 25 bp, Artificial
  Probe
tggctgtactgtatagtgaacatag

SEQ ID NO: 53478 - DNA, 25 bp, Artificial
  Probe
atagtgaacatagttggcatatctt

SEQ ID NO: 53479 - DNA, 25 bp, Artificial
  Probe
gtactgtatagtgaacatagttggc

SEQ ID NO: 53480 - DNA, 25 bp, Artificial
  Probe
ctgtatagtgaacatagttggcata

SEQ ID NO: 53481 - DNA, 25 bp, Artificial
  Probe
gtgtatgactgtggctgtactgtat

SEQ ID NO: 53482 - DNA, 25 bp, Artificial
  Probe
tgtggctgtactgtatagtgaacat

SEQ ID NO: 53483 - DNA, 25 bp, Artificial
  Probe
gactgtggctgtactgtatagtgaa

SEQ ID NO: 53484 - DNA, 25 bp, Artificial
  Probe
atgactgtggctgtactgtatagtg

SEQ ID NO: 53485 - DNA, 25 bp, Artificial
  Probe
actgtggctgtactgtatagtgaac

SEQ ID NO: 53486 - DNA, 25 bp, Artificial
  Probe
gctgtactgtatagtgaacatagtt

SEQ ID NO: 53487 - DNA, 25 bp, Artificial
  Probe
atctttgtttgaagtttgttggtga

SEQ ID NO: 53488 - DNA, 25 bp, Artificial
  Probe
tggcatatctttgtttgaagtttgt

SEQ ID NO: 53489 - DNA, 25 bp, Artificial
  Probe
agttggcatatctttgtttgaagtt

SEQ ID NO: 53490 - DNA, 25 bp, Artificial
  Probe
gtatagtgaacatagttggcatatc

SEQ ID NO: 53491 - DNA, 25 bp, Artificial
  Probe
tgtatagtgaacatagttggcatat

SEQ ID NO: 53492 - DNA, 25 bp, Artificial
  Probe
tctttgtttgaagtttgttggtgac

SEQ ID NO: 53493 - DNA, 25 bp, Artificial
  Probe
ctgtggctgtactgtatagtgaaca

SEQ ID NO: 53494 - DNA, 25 bp, Artificial
  Probe
agtgaacatagttggcatatctttg

SEQ ID NO: 53495 - DNA, 25 bp, Artificial
  Probe
tatagtgaacatagttggcatatct

SEQ ID NO: 53496 - DNA, 25 bp, Artificial
  Probe
ggcatatctttgtttgaagtttgtt

SEQ ID NO: 53497 - DNA, 25 bp, Artificial
  Probe
ttggcatatctttgtttgaagtttg

SEQ ID NO: 53498 - DNA, 25 bp, Artificial
  Probe
gttggcatatctttgtttgaagttt

SEQ ID NO: 53499 - DNA, 25 bp, Artificial
  Probe
tgtactgtatagtgaacatagttgg

SEQ ID NO: 53500 - DNA, 25 bp, Artificial
  Probe
tagttggcatatctttgtttgaagt

SEQ ID NO: 53501 - DNA, 25 bp, Artificial
  Probe
tatctttgtttgaagtttgttggtg

SEQ ID NO: 53502 - DNA, 25 bp, Artificial
  Probe
tttgtttgaagtttgttggtgactc

SEQ ID NO: 53503 - DNA, 25 bp, Artificial
  Probe
ctttgtttgaagtttgttggtgact

SEQ ID NO: 53504 - DNA, 25 bp, Artificial
  Probe
gtagtgtatgactgtggctgtactg

SEQ ID NO: 53505 - DNA, 25 bp, Artificial
  Probe
gtgaacatagttggcatatctttgt

SEQ ID NO: 53506 - DNA, 25 bp, Artificial
  Probe
catagttggcatatctttgtttgaa

SEQ ID NO: 53507 - DNA, 25 bp, Artificial
  Probe
tgactgtggctgtactgtatagtga

SEQ ID NO: 53508 - DNA, 25 bp, Artificial
  Probe
gcatatctttgtttgaagtttgttg

SEQ ID NO: 53509 - DNA, 25 bp, Artificial
  Probe
acatagttggcatatctttgtttga

SEQ ID NO: 53510 - DNA, 25 bp, Artificial
  Probe
agaaagtcctgcttgtattcagttt

SEQ ID NO: 53511 - DNA, 25 bp, Artificial
  Probe
agtcctgcttgtattcagtttcaaa

SEQ ID NO: 53512 - DNA, 25 bp, Artificial
  Probe
aagtcctgcttgtattcagtttcaa

SEQ ID NO: 53513 - DNA, 25 bp, Artificial
  Probe
aaagtcctgcttgtattcagtttca

SEQ ID NO: 53514 - DNA, 25 bp, Artificial
  Probe
agtgtatgactgtggctgtactgta

SEQ ID NO: 53515 - DNA, 25 bp, Artificial
  Probe
gctattaatcgaggactgagtgaag

SEQ ID NO: 53516 - DNA, 25 bp, Artificial
  Probe
tttaggctgttgagtttgtgatttc

SEQ ID NO: 53517 - DNA, 25 bp, Artificial
  Probe
tgctattaatcgaggactgagtgaa

SEQ ID NO: 53518 - DNA, 25 bp, Artificial
  Probe
ttgctattaatcgaggactgagtga

SEQ ID NO: 53519 - DNA, 25 bp, Artificial
  Probe
gtttaggctgttgagtttgtgattt

SEQ ID NO: 53520 - DNA, 25 bp, Artificial
  Probe
ctattaatcgaggactgagtgaagt

SEQ ID NO: 53521 - DNA, 25 bp, Artificial
  Probe
attaatcgaggactgagtgaagttg

SEQ ID NO: 53522 - DNA, 25 bp, Artificial
  Probe
ttaggctgttgagtttgtgatttct

SEQ ID NO: 53523 - DNA, 25 bp, Artificial
  Probe
aatgttaatttatagccaggtgtgc

SEQ ID NO: 53524 - DNA, 25 bp, Artificial
  Probe
tattaatcgaggactgagtgaagtt

SEQ ID NO: 53525 - DNA, 25 bp, Artificial
  Probe
gcgaaagccaatgttaatttatagc

SEQ ID NO: 53526 - DNA, 25 bp, Artificial
  Probe
aagccaatgttaatttatagccagg

SEQ ID NO: 53527 - DNA, 25 bp, Artificial
  Probe
gccaatgttaatttatagccaggtg

SEQ ID NO: 53528 - DNA, 25 bp, Artificial
  Probe
agccaatgttaatttatagccaggt

SEQ ID NO: 53529 - DNA, 25 bp, Artificial
  Probe
ccaatgttaatttatagccaggtgt

SEQ ID NO: 53530 - DNA, 25 bp, Artificial
  Probe
cgaaagccaatgttaatttatagcc

SEQ ID NO: 53531 - DNA, 25 bp, Artificial
  Probe
taggctgttgagtttgtgatttctg

SEQ ID NO: 53532 - DNA, 25 bp, Artificial
  Probe
ttaatcgaggactgagtgaagttga

SEQ ID NO: 53533 - DNA, 25 bp, Artificial
  Probe
gatctatttgctatttcgtgtacgc

SEQ ID NO: 53534 - DNA, 25 bp, Artificial
  Probe
cagtgatctatttgctatttcgtgt

SEQ ID NO: 53535 - DNA, 25 bp, Artificial
  Probe
tgatctatttgctatttcgtgtacg

SEQ ID NO: 53536 - DNA, 25 bp, Artificial
  Probe
caatgttaatttatagccaggtgtg

SEQ ID NO: 53537 - DNA, 25 bp, Artificial
  Probe
cagcgaaagccaatgttaatttata

SEQ ID NO: 53538 - DNA, 25 bp, Artificial
  Probe
acagcgaaagccaatgttaatttat

SEQ ID NO: 53539 - DNA, 25 bp, Artificial
  Probe
atgttaatttatagccaggtgtgcg

SEQ ID NO: 53540 - DNA, 25 bp, Artificial
  Probe
agcgaaagccaatgttaatttatag

SEQ ID NO: 53541 - DNA, 25 bp, Artificial
  Probe
gaaagccaatgttaatttatagcca

SEQ ID NO: 53542 - DNA, 25 bp, Artificial
  Probe
gacagcgaaagccaatgttaattta

SEQ ID NO: 53543 - DNA, 25 bp, Artificial
  Probe
taatcgaggactgagtgaagttgac

SEQ ID NO: 53544 - DNA, 25 bp, Artificial
  Probe
aaagccaatgttaatttatagccag

SEQ ID NO: 53545 - DNA, 25 bp, Artificial
  Probe
ctaggttcttctgtcgcatttgaaa

SEQ ID NO: 53546 - DNA, 25 bp, Artificial
  Probe
cgtttaggctgttgagtttgtgatt

SEQ ID NO: 53547 - DNA, 25 bp, Artificial
  Probe
aatgttgtcttgttagtttgctatt

SEQ ID NO: 53548 - DNA, 25 bp, Artificial
  Probe
aaatgttgtcttgttagtttgctat

SEQ ID NO: 53549 - DNA, 25 bp, Artificial
  Probe
gtgatctatttgctatttcgtgtac

SEQ ID NO: 53550 - DNA, 25 bp, Artificial
  Probe
agtgatctatttgctatttcgtgta

SEQ ID NO: 53551 - DNA, 25 bp, Artificial
  Probe
tttgctattaatcgaggactgagtg

SEQ ID NO: 53552 - DNA, 25 bp, Artificial
  Probe
gtttgctattaatcgaggactgagt

SEQ ID NO: 53553 - DNA, 25 bp, Artificial
  Probe
gttaatttatagccaggtgtgcgtg

SEQ ID NO: 53554 - DNA, 25 bp, Artificial
  Probe
tgttagtttgctattaatcgaggac

SEQ ID NO: 53555 - DNA, 25 bp, Artificial
  Probe
tcttaattcctaagtgagagatcaa

SEQ ID NO: 53556 - DNA, 25 bp, Artificial
  Probe
agtttgctattaatcgaggactgag

SEQ ID NO: 53557 - DNA, 25 bp, Artificial
  Probe
tgttgtcttgttagtttgctattaa

SEQ ID NO: 53558 - DNA, 25 bp, Artificial
  Probe
ttaatttatagccaggtgtgcgtgt

SEQ ID NO: 53559 - DNA, 25 bp, Artificial
  Probe
tgttaatttatagccaggtgtgcgt

SEQ ID NO: 53560 - DNA, 25 bp, Artificial
  Probe
ctggtccaagtgcaatatgtaatta

SEQ ID NO: 53561 - DNA, 25 bp, Artificial
  Probe
aataagagcctatcaatgtgtatct

SEQ ID NO: 53562 - DNA, 25 bp, Artificial
  Probe
taacttgattaacttctgccctgaa

SEQ ID NO: 53563 - DNA, 25 bp, Artificial
  Probe
aacttgattaacttctgccctgaat

SEQ ID NO: 53564 - DNA, 25 bp, Artificial
  Probe
ttaacttgattaacttctgccctga

SEQ ID NO: 53565 - DNA, 25 bp, Artificial
  Probe
tggtccaagtgcaatatgtaattat

SEQ ID NO: 53566 - DNA, 25 bp, Artificial
  Probe
tttaacttgattaacttctgccctg

SEQ ID NO: 53567 - DNA, 25 bp, Artificial
  Probe
cttgattaacttctgccctgaatga

SEQ ID NO: 53568 - DNA, 25 bp, Artificial
  Probe
ttgattaacttctgccctgaatgac

SEQ ID NO: 53569 - DNA, 25 bp, Artificial
  Probe
acttgattaacttctgccctgaatg

SEQ ID NO: 53570 - DNA, 25 bp, Artificial
  Probe
agataataagagcctatcaatgtgt

SEQ ID NO: 53571 - DNA, 25 bp, Artificial
  Probe
gctggtccaagtgcaatatgtaatt

SEQ ID NO: 53572 - DNA, 25 bp, Artificial
  Probe
gattaacttctgccctgaatgactg

SEQ ID NO: 53573 - DNA, 25 bp, Artificial
  Probe
atttaacttgattaacttctgccct

SEQ ID NO: 53574 - DNA, 25 bp, Artificial
  Probe
tgattaacttctgccctgaatgact

SEQ ID NO: 53575 - DNA, 25 bp, Artificial
  Probe
attaacttctgccctgaatgactgt

SEQ ID NO: 53576 - DNA, 25 bp, Artificial
  Probe
taataagagcctatcaatgtgtatc

SEQ ID NO: 53577 - DNA, 25 bp, Artificial
  Probe
aaacctgagagtgacctaaaggaag

SEQ ID NO: 53578 - DNA, 25 bp, Artificial
  Probe
ggtccaagtgcaatatgtaattata

SEQ ID NO: 53579 - DNA, 25 bp, Artificial
  Probe
tatttaacttgattaacttctgccc

SEQ ID NO: 53580 - DNA, 25 bp, Artificial
  Probe
tcatagaatagctgactttgacagt

SEQ ID NO: 53581 - DNA, 25 bp, Artificial
  Probe
atgtagatcatagaatagctgactt

SEQ ID NO: 53582 - DNA, 25 bp, Artificial
  Probe
aatgtagatcatagaatagctgact

SEQ ID NO: 53583 - DNA, 25 bp, Artificial
  Probe
ttaacttctgccctgaatgactgtg

SEQ ID NO: 53584 - DNA, 25 bp, Artificial
  Probe
caaacctgagagtgacctaaaggaa

SEQ ID NO: 53585 - DNA, 25 bp, Artificial
  Probe
ataagagcctatcaatgtgtatctt

SEQ ID NO: 53586 - DNA, 25 bp, Artificial
  Probe
gatcatagaatagctgactttgaca

SEQ ID NO: 53587 - DNA, 25 bp, Artificial
  Probe
ggctggtccaagtgcaatatgtaat

SEQ ID NO: 53588 - DNA, 25 bp, Artificial
  Probe
agatcatagaatagctgactttgac

SEQ ID NO: 53589 - DNA, 25 bp, Artificial
  Probe
atcatagaatagctgactttgacag

SEQ ID NO: 53590 - DNA, 25 bp, Artificial
  Probe
gataataagagcctatcaatgtgta

SEQ ID NO: 53591 - DNA, 25 bp, Artificial
  Probe
aacctgagagtgacctaaaggaagt

SEQ ID NO: 53592 - DNA, 25 bp, Artificial
  Probe
ataataagagcctatcaatgtgtat

SEQ ID NO: 53593 - DNA, 25 bp, Artificial
  Probe
tagataataagagcctatcaatgtg

SEQ ID NO: 53594 - DNA, 25 bp, Artificial
  Probe
agagcctatcaatgtgtatcttttg

SEQ ID NO: 53595 - DNA, 25 bp, Artificial
  Probe
taacttctgccctgaatgactgtga

SEQ ID NO: 53596 - DNA, 25 bp, Artificial
  Probe
acagattcccatctatttaacttga

SEQ ID NO: 53597 - DNA, 25 bp, Artificial
  Probe
ctatttaacttgattaacttctgcc

SEQ ID NO: 53598 - DNA, 25 bp, Artificial
  Probe
tgtagatcatagaatagctgacttt

SEQ ID NO: 53599 - DNA, 25 bp, Artificial
  Probe
taagagcctatcaatgtgtatcttt

SEQ ID NO: 53600 - DNA, 25 bp, Artificial
  Probe
acctgagagtgacctaaaggaagtg

SEQ ID NO: 53601 - DNA, 25 bp, Artificial
  Probe
aacaggttttgctatttccgaaaat

SEQ ID NO: 53602 - DNA, 25 bp, Artificial
  Probe
aaacaggttttgctatttccgaaaa

SEQ ID NO: 53603 - DNA, 25 bp, Artificial
  Probe
gtagatcatagaatagctgactttg

SEQ ID NO: 53604 - DNA, 25 bp, Artificial
  Probe
tgtacttacagattcccatctattt

SEQ ID NO: 53605 - DNA, 25 bp, Artificial
  Probe
aattaacgcagtcttggtgatatgg

SEQ ID NO: 53606 - DNA, 25 bp, Artificial
  Probe
taattaacgcagtcttggtgatatg

SEQ ID NO: 53607 - DNA, 25 bp, Artificial
  Probe
agacacaatatccagacacacacaa

SEQ ID NO: 53608 - DNA, 25 bp, Artificial
  Probe
gataattaacgcagtcttggtgata

SEQ ID NO: 53609 - DNA, 25 bp, Artificial
  Probe
agataattaacgcagtcttggtgat

SEQ ID NO: 53610 - DNA, 25 bp, Artificial
  Probe
gagataattaacgcagtcttggtga

SEQ ID NO: 53611 - DNA, 25 bp, Artificial
  Probe
gacagacacaatatccagacacaca

SEQ ID NO: 53612 - DNA, 25 bp, Artificial
  Probe
ataattaacgcagtcttggtgatat

SEQ ID NO: 53613 - DNA, 25 bp, Artificial
  Probe
atctcagaatgtgtagactggatgg

SEQ ID NO: 53614 - DNA, 25 bp, Artificial
  Probe
actaactagcggtagagaggatgag

SEQ ID NO: 53615 - DNA, 25 bp, Artificial
  Probe
cagacacaatatccagacacacaca

SEQ ID NO: 53616 - DNA, 25 bp, Artificial
  Probe
acagacacaatatccagacacacac

SEQ ID NO: 53617 - DNA, 25 bp, Artificial
  Probe
ggagataattaacgcagtcttggtg

SEQ ID NO: 53618 - DNA, 25 bp, Artificial
  Probe
cactaactagcggtagagaggatga

SEQ ID NO: 53619 - DNA, 25 bp, Artificial
  Probe
cacaatatccagacacacacaaatt

SEQ ID NO: 53620 - DNA, 25 bp, Artificial
  Probe
acacaatatccagacacacacaaat

SEQ ID NO: 53621 - DNA, 25 bp, Artificial
  Probe
acactaactagcggtagagaggatg

SEQ ID NO: 53622 - DNA, 25 bp, Artificial
  Probe
cacactaactagcggtagagaggat

SEQ ID NO: 53623 - DNA, 25 bp, Artificial
  Probe
acaatatccagacacacacaaatta

SEQ ID NO: 53624 - DNA, 25 bp, Artificial
  Probe
gacacaatatccagacacacacaaa

SEQ ID NO: 53625 - DNA, 25 bp, Artificial
  Probe
tatccagacacacacaaattacttg

SEQ ID NO: 53626 - DNA, 25 bp, Artificial
  Probe
ctaactagcggtagagaggatgagg

SEQ ID NO: 53627 - DNA, 25 bp, Artificial
  Probe
ttgtttgctttatctttcactgttt

SEQ ID NO: 53628 - DNA, 25 bp, Artificial
  Probe
tttgtttgctttatctttcactgtt

SEQ ID NO: 53629 - DNA, 25 bp, Artificial
  Probe
caatatccagacacacacaaattac

SEQ ID NO: 53630 - DNA, 25 bp, Artificial
  Probe
ctcagaatgtgtagactggatggtg

SEQ ID NO: 53631 - DNA, 25 bp, Artificial
  Probe
atatccagacacacacaaattactt

SEQ ID NO: 53632 - DNA, 25 bp, Artificial
  Probe
aatatccagacacacacaaattact

SEQ ID NO: 53633 - DNA, 25 bp, Artificial
  Probe
tctcagaatgtgtagactggatggt

SEQ ID NO: 53634 - DNA, 25 bp, Artificial
  Probe
agacacacacaaattacttggcttt

SEQ ID NO: 53635 - DNA, 25 bp, Artificial
  Probe
atgacatctcagaatgtgtagactg

SEQ ID NO: 53636 - DNA, 25 bp, Artificial
  Probe
aaattacttggctttgctggtatgg

SEQ ID NO: 53637 - DNA, 25 bp, Artificial
  Probe
gatgacatctcagaatgtgtagact

SEQ ID NO: 53638 - DNA, 25 bp, Artificial
  Probe
gtaagggagataattaacgcagtct

SEQ ID NO: 53639 - DNA, 25 bp, Artificial
  Probe
taagggagataattaacgcagtctt

SEQ ID NO: 53640 - DNA, 25 bp, Artificial
  Probe
ggatgacatctcagaatgtgtagac

SEQ ID NO: 53641 - DNA, 25 bp, Artificial
  Probe
acatctcagaatgtgtagactggat

SEQ ID NO: 53642 - DNA, 25 bp, Artificial
  Probe
aagggagataattaacgcagtcttg

SEQ ID NO: 53643 - DNA, 25 bp, Artificial
  Probe
tcttgctatttagttaagtcctgaa

SEQ ID NO: 53644 - DNA, 25 bp, Artificial
  Probe
gtagagaggatgaggcagaaggatc

SEQ ID NO: 53645 - DNA, 25 bp, Artificial
  Probe
catctcagaatgtgtagactggatg

SEQ ID NO: 53646 - DNA, 25 bp, Artificial
  Probe
cagacacacacaaattacttggctt

SEQ ID NO: 53647 - DNA, 25 bp, Artificial
  Probe
atcttgctatttagttaagtcctga

SEQ ID NO: 53648 - DNA, 25 bp, Artificial
  Probe
gacatctcagaatgtgtagactgga

SEQ ID NO: 53649 - DNA, 25 bp, Artificial
  Probe
ttggaatgggatgacatctcagaat

SEQ ID NO: 53650 - DNA, 25 bp, Artificial
  Probe
caactcttccttgtctactgagatg

SEQ ID NO: 53651 - DNA, 25 bp, Artificial
  Probe
aactggatggtctgtgtcattataa

SEQ ID NO: 53652 - DNA, 25 bp, Artificial
  Probe
aactcttccttgtctactgagatgc

SEQ ID NO: 53653 - DNA, 25 bp, Artificial
  Probe
gcaactcttccttgtctactgagat

SEQ ID NO: 53654 - DNA, 25 bp, Artificial
  Probe
taacatcaatggactgagtcagatt

SEQ ID NO: 53655 - DNA, 25 bp, Artificial
  Probe
ttaacatcaatggactgagtcagat

SEQ ID NO: 53656 - DNA, 25 bp, Artificial
  Probe
aacatcaatggactgagtcagattc

SEQ ID NO: 53657 - DNA, 25 bp, Artificial
  Probe
aaactggatggtctgtgtcattata

SEQ ID NO: 53658 - DNA, 25 bp, Artificial
  Probe
ttatgcaactcttccttgtctactg

SEQ ID NO: 53659 - DNA, 25 bp, Artificial
  Probe
caaactggatggtctgtgtcattat

SEQ ID NO: 53660 - DNA, 25 bp, Artificial
  Probe
acatcaatggactgagtcagattca

SEQ ID NO: 53661 - DNA, 25 bp, Artificial
  Probe
tatgcaactcttccttgtctactga

SEQ ID NO: 53662 - DNA, 25 bp, Artificial
  Probe
ccctaaatcttcccttactccagaa

SEQ ID NO: 53663 - DNA, 25 bp, Artificial
  Probe
tcaaactggatggtctgtgtcatta

SEQ ID NO: 53664 - DNA, 25 bp, Artificial
  Probe
actggatggtctgtgtcattataaa

SEQ ID NO: 53665 - DNA, 25 bp, Artificial
  Probe
tggtctgtgtcattataaagcatac

SEQ ID NO: 53666 - DNA, 25 bp, Artificial
  Probe
gatggtctgtgtcattataaagcat

SEQ ID NO: 53667 - DNA, 25 bp, Artificial
  Probe
ctggatggtctgtgtcattataaag

SEQ ID NO: 53668 - DNA, 25 bp, Artificial
  Probe
ggatggtctgtgtcattataaagca

SEQ ID NO: 53669 - DNA, 25 bp, Artificial
  Probe
tggatggtctgtgtcattataaagc

SEQ ID NO: 53670 - DNA, 25 bp, Artificial
  Probe
ggtctgtgtcattataaagcatact

SEQ ID NO: 53671 - DNA, 25 bp, Artificial
  Probe
ctgtgtcattataaagcatactcct

SEQ ID NO: 53672 - DNA, 25 bp, Artificial
  Probe
tctgtgtcattataaagcatactcc

SEQ ID NO: 53673 - DNA, 25 bp, Artificial
  Probe
tgtatttaacatcaatggactgagt

SEQ ID NO: 53674 - DNA, 25 bp, Artificial
  Probe
atgcaactcttccttgtctactgag

SEQ ID NO: 53675 - DNA, 25 bp, Artificial
  Probe
tttaacatcaatggactgagtcaga

SEQ ID NO: 53676 - DNA, 25 bp, Artificial
  Probe
actcttccttgtctactgagatgcc

SEQ ID NO: 53677 - DNA, 25 bp, Artificial
  Probe
tacctttctttatgcaactcttcct

SEQ ID NO: 53678 - DNA, 25 bp, Artificial
  Probe
ctggatgaggctgttccttgtaatc

SEQ ID NO: 53679 - DNA, 25 bp, Artificial
  Probe
atttaacatcaatggactgagtcag

SEQ ID NO: 53680 - DNA, 25 bp, Artificial
  Probe
acctttctttatgcaactcttcctt

SEQ ID NO: 53681 - DNA, 25 bp, Artificial
  Probe
tcattataaagcatactccttaggc

SEQ ID NO: 53682 - DNA, 25 bp, Artificial
  Probe
atggtctgtgtcattataaagcata

SEQ ID NO: 53683 - DNA, 25 bp, Artificial
  Probe
atacctttctttatgcaactcttcc

SEQ ID NO: 53684 - DNA, 25 bp, Artificial
  Probe
tgtgtcattataaagcatactcctt

SEQ ID NO: 53685 - DNA, 25 bp, Artificial
  Probe
tttatgcaactcttccttgtctact

SEQ ID NO: 53686 - DNA, 25 bp, Artificial
  Probe
ctttatgcaactcttccttgtctac

SEQ ID NO: 53687 - DNA, 25 bp, Artificial
  Probe
tctttatgcaactcttccttgtcta

SEQ ID NO: 53688 - DNA, 25 bp, Artificial
  Probe
tttctttatgcaactcttccttgtc

SEQ ID NO: 53689 - DNA, 25 bp, Artificial
  Probe
ctttctttatgcaactcttccttgt

SEQ ID NO: 53690 - DNA, 25 bp, Artificial
  Probe
cctttctttatgcaactcttccttg

SEQ ID NO: 53691 - DNA, 25 bp, Artificial
  Probe
ttctttatgcaactcttccttgtct

SEQ ID NO: 53692 - DNA, 25 bp, Artificial
  Probe
ctcaaactggatggtctgtgtcatt

SEQ ID NO: 53693 - DNA, 25 bp, Artificial
  Probe
gtctgtgtcattataaagcatactc

SEQ ID NO: 53694 - DNA, 25 bp, Artificial
  Probe
ttgtatttaacatcaatggactgag

SEQ ID NO: 53695 - DNA, 25 bp, Artificial
  Probe
ttggttcagatagagagagagagag

SEQ ID NO: 53696 - DNA, 25 bp, Artificial
  Probe
ttcagatagagagagagagagcaag

SEQ ID NO: 53697 - DNA, 25 bp, Artificial
  Probe
gatagagagagagagagcaagagag

SEQ ID NO: 53698 - DNA, 25 bp, Artificial
  Probe
gttcagatagagagagagagagcaa

SEQ ID NO: 53699 - DNA, 25 bp, Artificial
  Probe
agatagagagagagagagcaagaga

SEQ ID NO: 53700 - DNA, 25 bp, Artificial
  Probe
cagatagagagagagagagcaagag

SEQ ID NO: 53701 - DNA, 25 bp, Artificial
  Probe
ttatactgttgagaggttctgactg

SEQ ID NO: 53702 - DNA, 25 bp, Artificial
  Probe
tcagatagagagagagagagcaaga

SEQ ID NO: 53703 - DNA, 25 bp, Artificial
  Probe
tatactgttgagaggttctgactgg

SEQ ID NO: 53704 - DNA, 25 bp, Artificial
  Probe
ggaacatcaacaccagtatattgct

SEQ ID NO: 53705 - DNA, 25 bp, Artificial
  Probe
gaacatcaacaccagtatattgctg

SEQ ID NO: 53706 - DNA, 25 bp, Artificial
  Probe
ggttcagatagagagagagagagca

SEQ ID NO: 53707 - DNA, 25 bp, Artificial
  Probe
tggttcagatagagagagagagagc

SEQ ID NO: 53708 - DNA, 25 bp, Artificial
  Probe
atagagagagagagagcaagagagc

SEQ ID NO: 53709 - DNA, 25 bp, Artificial
  Probe
ttcttctctctggaacatcaacacc

SEQ ID NO: 53710 - DNA, 25 bp, Artificial
  Probe
tttggttcagatagagagagagaga

SEQ ID NO: 53711 - DNA, 25 bp, Artificial
  Probe
acatttggttcagatagagagagag

SEQ ID NO: 53712 - DNA, 25 bp, Artificial
  Probe
catttggttcagatagagagagaga

SEQ ID NO: 53713 - DNA, 25 bp, Artificial
  Probe
tggaacatcaacaccagtatattgc

SEQ ID NO: 53714 - DNA, 25 bp, Artificial
  Probe
atttggttcagatagagagagagag

SEQ ID NO: 53715 - DNA, 25 bp, Artificial
  Probe
atactgttgagaggttctgactggt

SEQ ID NO: 53716 - DNA, 25 bp, Artificial
  Probe
tttcttctctctggaacatcaacac

SEQ ID NO: 53717 - DNA, 25 bp, Artificial
  Probe
ggcaataatcaacatttggttcaga

SEQ ID NO: 53718 - DNA, 25 bp, Artificial
  Probe
aacatttggttcagatagagagaga

SEQ ID NO: 53719 - DNA, 25 bp, Artificial
  Probe
gtttatactgttgagaggttctgac

SEQ ID NO: 53720 - DNA, 25 bp, Artificial
  Probe
tggcaataatcaacatttggttcag

SEQ ID NO: 53721 - DNA, 25 bp, Artificial
  Probe
ctggcaataatcaacatttggttca

SEQ ID NO: 53722 - DNA, 25 bp, Artificial
  Probe
tcaacatttggttcagatagagaga

SEQ ID NO: 53723 - DNA, 25 bp, Artificial
  Probe
tttatactgttgagaggttctgact

SEQ ID NO: 53724 - DNA, 25 bp, Artificial
  Probe
caacatttggttcagatagagagag

SEQ ID NO: 53725 - DNA, 25 bp, Artificial
  Probe
tactgttgagaggttctgactggtt

SEQ ID NO: 53726 - DNA, 25 bp, Artificial
  Probe
agtttatactgttgagaggttctga

SEQ ID NO: 53727 - DNA, 25 bp, Artificial
  Probe
gagagagagagagcaagagagcatt

SEQ ID NO: 53728 - DNA, 25 bp, Artificial
  Probe
gagagagcaagagagcatttgttag

SEQ ID NO: 53729 - DNA, 25 bp, Artificial
  Probe
atcaacatttggttcagatagagag

SEQ ID NO: 53730 - DNA, 25 bp, Artificial
  Probe
gcaataatcaacatttggttcagat

SEQ ID NO: 53731 - DNA, 25 bp, Artificial
  Probe
tagagagagagagagcaagagagca

SEQ ID NO: 53732 - DNA, 25 bp, Artificial
  Probe
agagagagcaagagagcatttgtta

SEQ ID NO: 53733 - DNA, 25 bp, Artificial
  Probe
gctggcaataatcaacatttggttc

SEQ ID NO: 53734 - DNA, 25 bp, Artificial
  Probe
aatcaacatttggttcagatagaga

SEQ ID NO: 53735 - DNA, 25 bp, Artificial
  Probe
gggtaggaatgaaagctctttacaa

SEQ ID NO: 53736 - DNA, 25 bp, Artificial
  Probe
ttgggtaggaatgaaagctctttac

SEQ ID NO: 53737 - DNA, 25 bp, Artificial
  Probe
ggtaggaatgaaagctctttacaaa

SEQ ID NO: 53738 - DNA, 25 bp, Artificial
  Probe
cttgggtaggaatgaaagctcttta

SEQ ID NO: 53739 - DNA, 25 bp, Artificial
  Probe
agagagagagagagcaagagagcat

SEQ ID NO: 53740 - DNA, 25 bp, Artificial
  Probe
aatctctactcaatggatgactgtg

SEQ ID NO: 53741 - DNA, 25 bp, Artificial
  Probe
caatctctactcaatggatgactgt

SEQ ID NO: 53742 - DNA, 25 bp, Artificial
  Probe
acaatctctactcaatggatgactg

SEQ ID NO: 53743 - DNA, 25 bp, Artificial
  Probe
atctctactcaatggatgactgtgc

SEQ ID NO: 53744 - DNA, 25 bp, Artificial
  Probe
cttcctgtccaaattagagtctgtg

SEQ ID NO: 53745 - DNA, 25 bp, Artificial
  Probe
tggatgtgaatatcaatttgccttg

SEQ ID NO: 53746 - DNA, 25 bp, Artificial
  Probe
gctttggatgtgaatatcaatttgc

SEQ ID NO: 53747 - DNA, 25 bp, Artificial
  Probe
ttggatgtgaatatcaatttgcctt

SEQ ID NO: 53748 - DNA, 25 bp, Artificial
  Probe
tttggatgtgaatatcaatttgcct

SEQ ID NO: 53749 - DNA, 25 bp, Artificial
  Probe
ctttggatgtgaatatcaatttgcc

SEQ ID NO: 53750 - DNA, 25 bp, Artificial
  Probe
ttcctgtccaaattagagtctgtgt

SEQ ID NO: 53751 - DNA, 25 bp, Artificial
  Probe
tcctgtccaaattagagtctgtgtc

SEQ ID NO: 53752 - DNA, 25 bp, Artificial
  Probe
caaattagagtctgtgtcggaggat

SEQ ID NO: 53753 - DNA, 25 bp, Artificial
  Probe
tacccagttggcagaaatagagaag

SEQ ID NO: 53754 - DNA, 25 bp, Artificial
  Probe
ctacccagttggcagaaatagagaa

SEQ ID NO: 53755 - DNA, 25 bp, Artificial
  Probe
aaattagagtctgtgtcggaggatc

SEQ ID NO: 53756 - DNA, 25 bp, Artificial
  Probe
gcttcctgtccaaattagagtctgt

SEQ ID NO: 53757 - DNA, 25 bp, Artificial
  Probe
tctctactcaatggatgactgtgcc

SEQ ID NO: 53758 - DNA, 25 bp, Artificial
  Probe
gatcctacccagttggcagaaatag

SEQ ID NO: 53759 - DNA, 25 bp, Artificial
  Probe
atcctacccagttggcagaaataga

SEQ ID NO: 53760 - DNA, 25 bp, Artificial
  Probe
agctttggatgtgaatatcaatttg

SEQ ID NO: 53761 - DNA, 25 bp, Artificial
  Probe
cagctttggatgtgaatatcaattt

SEQ ID NO: 53762 - DNA, 25 bp, Artificial
  Probe
ctgtccaaattagagtctgtgtcgg

SEQ ID NO: 53763 - DNA, 25 bp, Artificial
  Probe
cctgtccaaattagagtctgtgtcg

SEQ ID NO: 53764 - DNA, 25 bp, Artificial
  Probe
agcttcctgtccaaattagagtctg

SEQ ID NO: 53765 - DNA, 25 bp, Artificial
  Probe
ccagttggcagaaatagagaaggac

SEQ ID NO: 53766 - DNA, 25 bp, Artificial
  Probe
ccagctttggatgtgaatatcaatt

SEQ ID NO: 53767 - DNA, 25 bp, Artificial
  Probe
ggaaacacaggaagaagacaaggac

SEQ ID NO: 53768 - DNA, 25 bp, Artificial
  Probe
cagttggcagaaatagagaaggacg

SEQ ID NO: 53769 - DNA, 25 bp, Artificial
  Probe
accagctttggatgtgaatatcaat

SEQ ID NO: 53770 - DNA, 25 bp, Artificial
  Probe
aaccagctttggatgtgaatatcaa

SEQ ID NO: 53771 - DNA, 25 bp, Artificial
  Probe
gaaacacaggaagaagacaaggacg

SEQ ID NO: 53772 - DNA, 25 bp, Artificial
  Probe
cctacccagttggcagaaatagaga

SEQ ID NO: 53773 - DNA, 25 bp, Artificial
  Probe
tcctacccagttggcagaaatagag

SEQ ID NO: 53774 - DNA, 25 bp, Artificial
  Probe
caaccagctttggatgtgaatatca

SEQ ID NO: 53775 - DNA, 25 bp, Artificial
  Probe
gtccaaattagagtctgtgtcggag

SEQ ID NO: 53776 - DNA, 25 bp, Artificial
  Probe
ccaaattagagtctgtgtcggagga

SEQ ID NO: 53777 - DNA, 25 bp, Artificial
  Probe
cccagttggcagaaatagagaagga

SEQ ID NO: 53778 - DNA, 25 bp, Artificial
  Probe
tgtccaaattagagtctgtgtcgga

SEQ ID NO: 53779 - DNA, 25 bp, Artificial
  Probe
gggaaacacaggaagaagacaagga

SEQ ID NO: 53780 - DNA, 25 bp, Artificial
  Probe
acccagttggcagaaatagagaagg

SEQ ID NO: 53781 - DNA, 25 bp, Artificial
  Probe
gtcatctctcacctccaagctgatc

SEQ ID NO: 53782 - DNA, 25 bp, Artificial
  Probe
tccaaattagagtctgtgtcggagg

SEQ ID NO: 53783 - DNA, 25 bp, Artificial
  Probe
aagcttcctgtccaaattagagtct

SEQ ID NO: 53784 - DNA, 25 bp, Artificial
  Probe
agttggcagaaatagagaaggacgt

SEQ ID NO: 53785 - DNA, 25 bp, Artificial
  Probe
actgtaattgtagcattctgttcca

SEQ ID NO: 53786 - DNA, 25 bp, Artificial
  Probe
ctgtaattgtagcattctgttccat

SEQ ID NO: 53787 - DNA, 25 bp, Artificial
  Probe
gccttatactacctggaagacattc

SEQ ID NO: 53788 - DNA, 25 bp, Artificial
  Probe
tgtaattgtagcattctgttccatt

SEQ ID NO: 53789 - DNA, 25 bp, Artificial
  Probe
aactgtaattgtagcattctgttcc

SEQ ID NO: 53790 - DNA, 25 bp, Artificial
  Probe
ccttatactacctggaagacattct

SEQ ID NO: 53791 - DNA, 25 bp, Artificial
  Probe
actctctgatcttagaatgtgtctt

SEQ ID NO: 53792 - DNA, 25 bp, Artificial
  Probe
aactctctgatcttagaatgtgtct

SEQ ID NO: 53793 - DNA, 25 bp, Artificial
  Probe
aattgtagcattctgttccatttcc

SEQ ID NO: 53794 - DNA, 25 bp, Artificial
  Probe
aattcctgtctttcattcttcctca

SEQ ID NO: 53795 - DNA, 25 bp, Artificial
  Probe
caattcctgtctttcattcttcctc

SEQ ID NO: 53796 - DNA, 25 bp, Artificial
  Probe
tcaattcctgtctttcattcttcct

SEQ ID NO: 53797 - DNA, 25 bp, Artificial
  Probe
ttcaattcctgtctttcattcttcc

SEQ ID NO: 53798 - DNA, 25 bp, Artificial
  Probe
acccatttcatttctttcaattcct

SEQ ID NO: 53799 - DNA, 25 bp, Artificial
  Probe
gtctttcattcttcctcaggtagtc

SEQ ID NO: 53800 - DNA, 25 bp, Artificial
  Probe
caagaactacgtcaagaagaggaac

SEQ ID NO: 53801 - DNA, 25 bp, Artificial
  Probe
gaacaagaactacgtcaagaagagg

SEQ ID NO: 53802 - DNA, 25 bp, Artificial
  Probe
ggaacaagaactacgtcaagaagag

SEQ ID NO: 53803 - DNA, 25 bp, Artificial
  Probe
cccatttcatttctttcaattcctg

SEQ ID NO: 53804 - DNA, 25 bp, Artificial
  Probe
tactacctggaagacattcttgttc

SEQ ID NO: 53805 - DNA, 25 bp, Artificial
  Probe
attgtagcattctgttccatttccc

SEQ ID NO: 53806 - DNA, 25 bp, Artificial
  Probe
tgtctttcattcttcctcaggtagt

SEQ ID NO: 53807 - DNA, 25 bp, Artificial
  Probe
catccaagagcagaggtctcaatac

SEQ ID NO: 53808 - DNA, 25 bp, Artificial
  Probe
agaactacgtcaagaagaggaacaa

SEQ ID NO: 53809 - DNA, 25 bp, Artificial
  Probe
aagaactacgtcaagaagaggaaca

SEQ ID NO: 53810 - DNA, 25 bp, Artificial
  Probe
acaagaactacgtcaagaagaggaa

SEQ ID NO: 53811 - DNA, 25 bp, Artificial
  Probe
aacaagaactacgtcaagaagagga

SEQ ID NO: 53812 - DNA, 25 bp, Artificial
  Probe
aggaacaagaactacgtcaagaaga

SEQ ID NO: 53813 - DNA, 25 bp, Artificial
  Probe
caggaacaagaactacgtcaagaag

SEQ ID NO: 53814 - DNA, 25 bp, Artificial
  Probe
atactacctggaagacattcttgtt

SEQ ID NO: 53815 - DNA, 25 bp, Artificial
  Probe
tctttcaattcctgtctttcattct

SEQ ID NO: 53816 - DNA, 25 bp, Artificial
  Probe
ctacctggaagacattcttgttcaa

SEQ ID NO: 53817 - DNA, 25 bp, Artificial
  Probe
ccatttcatttctttcaattcctgt

SEQ ID NO: 53818 - DNA, 25 bp, Artificial
  Probe
ggaaacctactcaagattctgtaaa

SEQ ID NO: 53819 - DNA, 25 bp, Artificial
  Probe
tctttcattcttcctcaggtagtcc

SEQ ID NO: 53820 - DNA, 25 bp, Artificial
  Probe
gggaaatgtataaacagatgccaaa

SEQ ID NO: 53821 - DNA, 25 bp, Artificial
  Probe
gtcctctctacgagtacatccaaga

SEQ ID NO: 53822 - DNA, 25 bp, Artificial
  Probe
agtcctctctacgagtacatccaag

SEQ ID NO: 53823 - DNA, 25 bp, Artificial
  Probe
ttccagtcctctctacgagtacatc

SEQ ID NO: 53824 - DNA, 25 bp, Artificial
  Probe
tatactacctggaagacattcttgt

SEQ ID NO: 53825 - DNA, 25 bp, Artificial
  Probe
catttctttcaattcctgtctttca

SEQ ID NO: 53826 - DNA, 25 bp, Artificial
  Probe
acatccaagagcagaggtctcaata

SEQ ID NO: 53827 - DNA, 25 bp, Artificial
  Probe
tacatccaagagcagaggtctcaat

SEQ ID NO: 53828 - DNA, 25 bp, Artificial
  Probe
ttatacttatcagctcacaatcctt

SEQ ID NO: 53829 - DNA, 25 bp, Artificial
  Probe
gtaattgtagcattctgttccattt

SEQ ID NO: 53830 - DNA, 25 bp, Artificial
  Probe
atcaataaagctcaaggatttggga

SEQ ID NO: 53831 - DNA, 25 bp, Artificial
  Probe
tatcaataaagctcaaggatttggg

SEQ ID NO: 53832 - DNA, 25 bp, Artificial
  Probe
tcaataaagctcaaggatttgggag

SEQ ID NO: 53833 - DNA, 25 bp, Artificial
  Probe
gtatcaataaagctcaaggatttgg

SEQ ID NO: 53834 - DNA, 25 bp, Artificial
  Probe
caataaagctcaaggatttgggagg

SEQ ID NO: 53835 - DNA, 25 bp, Artificial
  Probe
ctgtatcaataaagctcaaggattt

SEQ ID NO: 53836 - DNA, 25 bp, Artificial
  Probe
tgtatcaataaagctcaaggatttg

SEQ ID NO: 53837 - DNA, 25 bp, Artificial
  Probe
gctgtatcaataaagctcaaggatt

SEQ ID NO: 53838 - DNA, 25 bp, Artificial
  Probe
cgctgtatcaataaagctcaaggat

SEQ ID NO: 53839 - DNA, 25 bp, Artificial
  Probe
aataaagctcaaggatttgggaggg

SEQ ID NO: 53840 - DNA, 25 bp, Artificial
  Probe
ccgctgtatcaataaagctcaagga

SEQ ID NO: 53841 - DNA, 25 bp, Artificial
  Probe
agccgctgtatcaataaagctcaag

SEQ ID NO: 53842 - DNA, 25 bp, Artificial
  Probe
catcaaatccgaacgtctgtctcca

SEQ ID NO: 53843 - DNA, 25 bp, Artificial
  Probe
ataaagctcaaggatttgggagggc

SEQ ID NO: 53844 - DNA, 25 bp, Artificial
  Probe
atcaaatccgaacgtctgtctccag

SEQ ID NO: 53845 - DNA, 25 bp, Artificial
  Probe
gccgctgtatcaataaagctcaagg

SEQ ID NO: 53846 - DNA, 25 bp, Artificial
  Probe
acaaataccaaaggaccagactaaa

SEQ ID NO: 53847 - DNA, 25 bp, Artificial
  Probe
gacaaataccaaaggaccagactaa

SEQ ID NO: 53848 - DNA, 25 bp, Artificial
  Probe
agacaaataccaaaggaccagacta

SEQ ID NO: 53849 - DNA, 25 bp, Artificial
  Probe
ccagtgttacatcaaatacatccaa

SEQ ID NO: 53850 - DNA, 25 bp, Artificial
  Probe
cccagtgttacatcaaatacatcca

SEQ ID NO: 53851 - DNA, 25 bp, Artificial
  Probe
tgcccagtgttacatcaaatacatc

SEQ ID NO: 53852 - DNA, 25 bp, Artificial
  Probe
ctgcccagtgttacatcaaatacat

SEQ ID NO: 53853 - DNA, 25 bp, Artificial
  Probe
cagacaaataccaaaggaccagact

SEQ ID NO: 53854 - DNA, 25 bp, Artificial
  Probe
tcagacaaataccaaaggaccagac

SEQ ID NO: 53855 - DNA, 25 bp, Artificial
  Probe
cagtgttacatcaaatacatccaag

SEQ ID NO: 53856 - DNA, 25 bp, Artificial
  Probe
agtgttacatcaaatacatccaaga

SEQ ID NO: 53857 - DNA, 25 bp, Artificial
  Probe
gcccagtgttacatcaaatacatcc

SEQ ID NO: 53858 - DNA, 25 bp, Artificial
  Probe
ctagggtcagacaaataccaaagga

SEQ ID NO: 53859 - DNA, 25 bp, Artificial
  Probe
tctagggtcagacaaataccaaagg

SEQ ID NO: 53860 - DNA, 25 bp, Artificial
  Probe
gtcagacaaataccaaaggaccaga

SEQ ID NO: 53861 - DNA, 25 bp, Artificial
  Probe
gtgttacatcaaatacatccaagat

SEQ ID NO: 53862 - DNA, 25 bp, Artificial
  Probe
tagggtcagacaaataccaaaggac

SEQ ID NO: 53863 - DNA, 25 bp, Artificial
  Probe
gactaaaagaacataagcacctacg

SEQ ID NO: 53864 - DNA, 25 bp, Artificial
  Probe
gaccagactaaaagaacataagcac

SEQ ID NO: 53865 - DNA, 25 bp, Artificial
  Probe
taccaaaggaccagactaaaagaac

SEQ ID NO: 53866 - DNA, 25 bp, Artificial
  Probe
aggaccagactaaaagaacataagc

SEQ ID NO: 53867 - DNA, 25 bp, Artificial
  Probe
ataccaaaggaccagactaaaagaa

SEQ ID NO: 53868 - DNA, 25 bp, Artificial
  Probe
aataccaaaggaccagactaaaaga

SEQ ID NO: 53869 - DNA, 25 bp, Artificial
  Probe
ccagactaaaagaacataagcacct

SEQ ID NO: 53870 - DNA, 25 bp, Artificial
  Probe
ggaccagactaaaagaacataagca

SEQ ID NO: 53871 - DNA, 25 bp, Artificial
  Probe
taaacacaacagtcggatctgacaa

SEQ ID NO: 53872 - DNA, 25 bp, Artificial
  Probe
caaataccaaaggaccagactaaaa

SEQ ID NO: 53873 - DNA, 25 bp, Artificial
  Probe
ccaaaggaccagactaaaagaacat

SEQ ID NO: 53874 - DNA, 25 bp, Artificial
  Probe
accagactaaaagaacataagcacc

SEQ ID NO: 53875 - DNA, 25 bp, Artificial
  Probe
aaataccaaaggaccagactaaaag

SEQ ID NO: 53876 - DNA, 25 bp, Artificial
  Probe
caaaggaccagactaaaagaacata

SEQ ID NO: 53877 - DNA, 25 bp, Artificial
  Probe
tttaaatgcaagctgtgggatgaag

SEQ ID NO: 53878 - DNA, 25 bp, Artificial
  Probe
actaaaagaacataagcacctacgc

SEQ ID NO: 53879 - DNA, 25 bp, Artificial
  Probe
agactaaaagaacataagcacctac

SEQ ID NO: 53880 - DNA, 25 bp, Artificial
  Probe
cagactaaaagaacataagcaccta

SEQ ID NO: 53881 - DNA, 25 bp, Artificial
  Probe
aaggaccagactaaaagaacataag

SEQ ID NO: 53882 - DNA, 25 bp, Artificial
  Probe
aacacaacagtcggatctgacaaga

SEQ ID NO: 53883 - DNA, 25 bp, Artificial
  Probe
gtaaacacaacagtcggatctgaca

SEQ ID NO: 53884 - DNA, 25 bp, Artificial
  Probe
aaaggaccagactaaaagaacataa

SEQ ID NO: 53885 - DNA, 25 bp, Artificial
  Probe
accaaaggaccagactaaaagaaca

SEQ ID NO: 53886 - DNA, 25 bp, Artificial
  Probe
aaatgttgtgcattcaatgataccc

SEQ ID NO: 53887 - DNA, 25 bp, Artificial
  Probe
gctgcccagtgttacatcaaataca

SEQ ID NO: 53888 - DNA, 25 bp, Artificial
  Probe
aaacacaacagtcggatctgacaag

SEQ ID NO: 53889 - DNA, 25 bp, Artificial
  Probe
cttcctgcaagagagtttctagctc

SEQ ID NO: 53890 - DNA, 25 bp, Artificial
  Probe
ctattttaaatgcaagctgtgggat

SEQ ID NO: 53891 - DNA, 25 bp, Artificial
  Probe
ccgaagatatgacagtgatgatgat

SEQ ID NO: 53892 - DNA, 25 bp, Artificial
  Probe
gatatgacagtgatgatgatcttgc

SEQ ID NO: 53893 - DNA, 25 bp, Artificial
  Probe
atatgacagtgatgatgatcttgcc

SEQ ID NO: 53894 - DNA, 25 bp, Artificial
  Probe
cgaagatatgacagtgatgatgatc

SEQ ID NO: 53895 - DNA, 25 bp, Artificial
  Probe
cctggctatgtcagtgagtataatt

SEQ ID NO: 53896 - DNA, 25 bp, Artificial
  Probe
tatgacagtgatgatgatcttgcct

SEQ ID NO: 53897 - DNA, 25 bp, Artificial
  Probe
gatgatgatcttgcctggaacattg

SEQ ID NO: 53898 - DNA, 25 bp, Artificial
  Probe
tgatgatgatcttgcctggaacatt

SEQ ID NO: 53899 - DNA, 25 bp, Artificial
  Probe
tcctatggaagagtcctctactgaa

SEQ ID NO: 53900 - DNA, 25 bp, Artificial
  Probe
ctttggtggtttatttcttccgagt

SEQ ID NO: 53901 - DNA, 25 bp, Artificial
  Probe
actttggtggtttatttcttccgag

SEQ ID NO: 53902 - DNA, 25 bp, Artificial
  Probe
tttggtggtttatttcttccgagtc

SEQ ID NO: 53903 - DNA, 25 bp, Artificial
  Probe
gcctggctatgtcagtgagtataat

SEQ ID NO: 53904 - DNA, 25 bp, Artificial
  Probe
gtcctatggaagagtcctctactga

SEQ ID NO: 53905 - DNA, 25 bp, Artificial
  Probe
agtcctatggaagagtcctctactg

SEQ ID NO: 53906 - DNA, 25 bp, Artificial
  Probe
cagtcctatggaagagtcctctact

SEQ ID NO: 53907 - DNA, 25 bp, Artificial
  Probe
cccgaagatatgacagtgatgatga

SEQ ID NO: 53908 - DNA, 25 bp, Artificial
  Probe
cctttgattatgactggtacaatgt

SEQ ID NO: 53909 - DNA, 25 bp, Artificial
  Probe
cattcctttgattatgactggtaca

SEQ ID NO: 53910 - DNA, 25 bp, Artificial
  Probe
agatatgacagtgatgatgatcttg

SEQ ID NO: 53911 - DNA, 25 bp, Artificial
  Probe
gtgatgatgatcttgcctggaacat

SEQ ID NO: 53912 - DNA, 25 bp, Artificial
  Probe
acagtcctatggaagagtcctctac

SEQ ID NO: 53913 - DNA, 25 bp, Artificial
  Probe
cacagtcctatggaagagtcctcta

SEQ ID NO: 53914 - DNA, 25 bp, Artificial
  Probe
ttggtggtttatttcttccgagtca

SEQ ID NO: 53915 - DNA, 25 bp, Artificial
  Probe
tcctttgattatgactggtacaatg

SEQ ID NO: 53916 - DNA, 25 bp, Artificial
  Probe
gaagatatgacagtgatgatgatct

SEQ ID NO: 53917 - DNA, 25 bp, Artificial
  Probe
gggctaagcaataaacctttagtac

SEQ ID NO: 53918 - DNA, 25 bp, Artificial
  Probe
agggctaagcaataaacctttagta

SEQ ID NO: 53919 - DNA, 25 bp, Artificial
  Probe
tagggctaagcaataaacctttagt

SEQ ID NO: 53920 - DNA, 25 bp, Artificial
  Probe
atgacagtgatgatgatcttgcctg

SEQ ID NO: 53921 - DNA, 25 bp, Artificial
  Probe
ctcagatcaagaacgtccattcctt

SEQ ID NO: 53922 - DNA, 25 bp, Artificial
  Probe
ctggctatgtcagtgagtataattt

SEQ ID NO: 53923 - DNA, 25 bp, Artificial
  Probe
ttcctttgattatgactggtacaat

SEQ ID NO: 53924 - DNA, 25 bp, Artificial
  Probe
attcctttgattatgactggtacaa

SEQ ID NO: 53925 - DNA, 25 bp, Artificial
  Probe
tccattcctttgattatgactggta

SEQ ID NO: 53926 - DNA, 25 bp, Artificial
  Probe
tggtggtttatttcttccgagtcag

SEQ ID NO: 53927 - DNA, 25 bp, Artificial
  Probe
gtccattcctttgattatgactggt

SEQ ID NO: 53928 - DNA, 25 bp, Artificial
  Probe
ggtggtttatttcttccgagtcaga

SEQ ID NO: 53929 - DNA, 25 bp, Artificial
  Probe
cactttggtggtttatttcttccga

SEQ ID NO: 53930 - DNA, 25 bp, Artificial
  Probe
tggctatgtcagtgagtataattta

SEQ ID NO: 53931 - DNA, 25 bp, Artificial
  Probe
atagggctaagcaataaacctttag

SEQ ID NO: 53932 - DNA, 25 bp, Artificial
  Probe
cctatggaagagtcctctactgaaa

SEQ ID NO: 53933 - DNA, 25 bp, Artificial
  Probe
agaacgtccattcctttgattatga

SEQ ID NO: 53934 - DNA, 25 bp, Artificial
  Probe
ccattcctttgattatgactggtac

SEQ ID NO: 53935 - DNA, 25 bp, Artificial
  Probe
aagaacgtccattcctttgattatg

SEQ ID NO: 53936 - DNA, 25 bp, Artificial
  Probe
gggctatatcgtaaatggctctaaa

SEQ ID NO: 53937 - DNA, 25 bp, Artificial
  Probe
ggctatatcgtaaatggctctaaag

SEQ ID NO: 53938 - DNA, 25 bp, Artificial
  Probe
gcctgggtatttatgagtttcaaat

SEQ ID NO: 53939 - DNA, 25 bp, Artificial
  Probe
cgggctatatcgtaaatggctctaa

SEQ ID NO: 53940 - DNA, 25 bp, Artificial
  Probe
cgcctgggtatttatgagtttcaaa

SEQ ID NO: 53941 - DNA, 25 bp, Artificial
  Probe
caagcaggtggtagagaaagtagag

SEQ ID NO: 53942 - DNA, 25 bp, Artificial
  Probe
cctgggtatttatgagtttcaaatg

SEQ ID NO: 53943 - DNA, 25 bp, Artificial
  Probe
tcgcctgggtatttatgagtttcaa

SEQ ID NO: 53944 - DNA, 25 bp, Artificial
  Probe
gctatatcgtaaatggctctaaagc

SEQ ID NO: 53945 - DNA, 25 bp, Artificial
  Probe
gtcgcctgggtatttatgagtttca

SEQ ID NO: 53946 - DNA, 25 bp, Artificial
  Probe
atatcgtaaatggctctaaagcagg

SEQ ID NO: 53947 - DNA, 25 bp, Artificial
  Probe
ctgggtatttatgagtttcaaatga

SEQ ID NO: 53948 - DNA, 25 bp, Artificial
  Probe
ggtcgcctgggtatttatgagtttc

SEQ ID NO: 53949 - DNA, 25 bp, Artificial
  Probe
tatatcgtaaatggctctaaagcag

SEQ ID NO: 53950 - DNA, 25 bp, Artificial
  Probe
ctatatcgtaaatggctctaaagca

SEQ ID NO: 53951 - DNA, 25 bp, Artificial
  Probe
tttgtctttgaagtgtccaccagtg

SEQ ID NO: 53952 - DNA, 25 bp, Artificial
  Probe
tcattgcttttgtctttgaagtgtc

SEQ ID NO: 53953 - DNA, 25 bp, Artificial
  Probe
gtcattgcttttgtctttgaagtgt

SEQ ID NO: 53954 - DNA, 25 bp, Artificial
  Probe
cattgcttttgtctttgaagtgtcc

SEQ ID NO: 53955 - DNA, 25 bp, Artificial
  Probe
atgagtttcaaatgaagtactgtgc

SEQ ID NO: 53956 - DNA, 25 bp, Artificial
  Probe
ctggtcattgcttttgtctttgaag

SEQ ID NO: 53957 - DNA, 25 bp, Artificial
  Probe
tgggtatttatgagtttcaaatgaa

SEQ ID NO: 53958 - DNA, 25 bp, Artificial
  Probe
attgcttttgtctttgaagtgtcca

SEQ ID NO: 53959 - DNA, 25 bp, Artificial
  Probe
ggtcattgcttttgtctttgaagtg

SEQ ID NO: 53960 - DNA, 25 bp, Artificial
  Probe
tatcgtaaatggctctaaagcaggg

SEQ ID NO: 53961 - DNA, 25 bp, Artificial
  Probe
agaagtacatgatgaacagcgtgct

SEQ ID NO: 53962 - DNA, 25 bp, Artificial
  Probe
gcaagcaggtggtagagaaagtaga

SEQ ID NO: 53963 - DNA, 25 bp, Artificial
  Probe
tggtcattgcttttgtctttgaagt

SEQ ID NO: 53964 - DNA, 25 bp, Artificial
  Probe
tgagtttcaaatgaagtactgtgcc

SEQ ID NO: 53965 - DNA, 25 bp, Artificial
  Probe
gggtatttatgagtttcaaatgaag

SEQ ID NO: 53966 - DNA, 25 bp, Artificial
  Probe
ctgaaggtcttcaccattgcatact

SEQ ID NO: 53967 - DNA, 25 bp, Artificial
  Probe
cttttgtctttgaagtgtccaccag

SEQ ID NO: 53968 - DNA, 25 bp, Artificial
  Probe
ttgtctttgaagtgtccaccagtga

SEQ ID NO: 53969 - DNA, 25 bp, Artificial
  Probe
aggtcgcctgggtatttatgagttt

SEQ ID NO: 53970 - DNA, 25 bp, Artificial
  Probe
aaggtcgcctgggtatttatgagtt

SEQ ID NO: 53971 - DNA, 25 bp, Artificial
  Probe
tgaaggtcttcaccattgcatactg

SEQ ID NO: 53972 - DNA, 25 bp, Artificial
  Probe
ttgcttttgtctttgaagtgtccac

SEQ ID NO: 53973 - DNA, 25 bp, Artificial
  Probe
gagtttcaaatgaagtactgtgccc

SEQ ID NO: 53974 - DNA, 25 bp, Artificial
  Probe
ttttgtctttgaagtgtccaccagt

SEQ ID NO: 53975 - DNA, 25 bp, Artificial
  Probe
tcttcaccattgcatactgctcatg

SEQ ID NO: 53976 - DNA, 25 bp, Artificial
  Probe
gtcttcaccattgcatactgctcat

SEQ ID NO: 53977 - DNA, 25 bp, Artificial
  Probe
tgtctttgaagtgtccaccagtgag

SEQ ID NO: 53978 - DNA, 25 bp, Artificial
  Probe
acgggctatatcgtaaatggctcta

SEQ ID NO: 53979 - DNA, 25 bp, Artificial
  Probe
gctggtcattgcttttgtctttgaa

SEQ ID NO: 53980 - DNA, 25 bp, Artificial
  Probe
tatgagtttcaaatgaagtactgtg

SEQ ID NO: 53981 - DNA, 25 bp, Artificial
  Probe
cacacacacacacacacactcatat

SEQ ID NO: 53982 - DNA, 25 bp, Artificial
  Probe
taaactcaacaagccactcaaatac

SEQ ID NO: 53983 - DNA, 25 bp, Artificial
  Probe
aaataaactcaacaagccactcaaa

SEQ ID NO: 53984 - DNA, 25 bp, Artificial
  Probe
aataaactcaacaagccactcaaat

SEQ ID NO: 53985 - DNA, 25 bp, Artificial
  Probe
caaataaactcaacaagccactcaa

SEQ ID NO: 53986 - DNA, 25 bp, Artificial
  Probe
aaactcaacaagccactcaaatact

SEQ ID NO: 53987 - DNA, 25 bp, Artificial
  Probe
ataaactcaacaagccactcaaata

SEQ ID NO: 53988 - DNA, 25 bp, Artificial
  Probe
gcaaatatgttcagccattattcca

SEQ ID NO: 53989 - DNA, 25 bp, Artificial
  Probe
aactcaacaagccactcaaatactc

SEQ ID NO: 53990 - DNA, 25 bp, Artificial
  Probe
aagatggtgtcagtcagtgaaataa

SEQ ID NO: 53991 - DNA, 25 bp, Artificial
  Probe
gaagaaggaaagatgaggctgaatc

SEQ ID NO: 53992 - DNA, 25 bp, Artificial
  Probe
agaagaaggaaagatgaggctgaat

SEQ ID NO: 53993 - DNA, 25 bp, Artificial
  Probe
agatggtgtcagtcagtgaaataac

SEQ ID NO: 53994 - DNA, 25 bp, Artificial
  Probe
ctcaacaagccactcaaatactctg

SEQ ID NO: 53995 - DNA, 25 bp, Artificial
  Probe
aaggagagctggtctgaatacattc

SEQ ID NO: 53996 - DNA, 25 bp, Artificial
  Probe
gaaggagagctggtctgaatacatt

SEQ ID NO: 53997 - DNA, 25 bp, Artificial
  Probe
ccaaataaactcaacaagccactca

SEQ ID NO: 53998 - DNA, 25 bp, Artificial
  Probe
aacaagccactcaaatactctgaag

SEQ ID NO: 53999 - DNA, 25 bp, Artificial
  Probe
actcaacaagccactcaaatactct

SEQ ID NO: 54000 - DNA, 25 bp, Artificial
  Probe
caacaagccactcaaatactctgaa

SEQ ID NO: 54001 - DNA, 25 bp, Artificial
  Probe
gagaagaaggaaagatgaggctgaa

SEQ ID NO: 54002 - DNA, 25 bp, Artificial
  Probe
caaatatgttcagccattattccat

SEQ ID NO: 54003 - DNA, 25 bp, Artificial
  Probe
tcttactctgaaatctggagatccc

SEQ ID NO: 54004 - DNA, 25 bp, Artificial
  Probe
cccaaataaactcaacaagccactc

SEQ ID NO: 54005 - DNA, 25 bp, Artificial
  Probe
gagagctggtctgaatacattctgg

SEQ ID NO: 54006 - DNA, 25 bp, Artificial
  Probe
ggagagctggtctgaatacattctg

SEQ ID NO: 54007 - DNA, 25 bp, Artificial
  Probe
aggagagctggtctgaatacattct

SEQ ID NO: 54008 - DNA, 25 bp, Artificial
  Probe
cttgtgtgggagaagaaggaaagat

SEQ ID NO: 54009 - DNA, 25 bp, Artificial
  Probe
tcaacaagccactcaaatactctga

SEQ ID NO: 54010 - DNA, 25 bp, Artificial
  Probe
gcatgatatttagccactaacatcc

SEQ ID NO: 54011 - DNA, 25 bp, Artificial
  Probe
ccctagcatgatatttagccactaa

SEQ ID NO: 54012 - DNA, 25 bp, Artificial
  Probe
ttgtgtgggagaagaaggaaagatg

SEQ ID NO: 54013 - DNA, 25 bp, Artificial
  Probe
gccctagcatgatatttagccacta

SEQ ID NO: 54014 - DNA, 25 bp, Artificial
  Probe
cctagcatgatatttagccactaac

SEQ ID NO: 54015 - DNA, 25 bp, Artificial
  Probe
agcatgatatttagccactaacatc

SEQ ID NO: 54016 - DNA, 25 bp, Artificial
  Probe
acacacacacacacacacactcata

SEQ ID NO: 54017 - DNA, 25 bp, Artificial
  Probe
gtgtgggagaagaaggaaagatgag

SEQ ID NO: 54018 - DNA, 25 bp, Artificial
  Probe
aagccactcaaatactctgaagcat

SEQ ID NO: 54019 - DNA, 25 bp, Artificial
  Probe
tatttagccactaacatccaatgat

SEQ ID NO: 54020 - DNA, 25 bp, Artificial
  Probe
atatttagccactaacatccaatga

SEQ ID NO: 54021 - DNA, 25 bp, Artificial
  Probe
tgatatttagccactaacatccaat

SEQ ID NO: 54022 - DNA, 25 bp, Artificial
  Probe
atgatatttagccactaacatccaa

SEQ ID NO: 54023 - DNA, 25 bp, Artificial
  Probe
aaatatgttcagccattattccatg

SEQ ID NO: 54024 - DNA, 25 bp, Artificial
  Probe
catgatatttagccactaacatcca

SEQ ID NO: 54025 - DNA, 25 bp, Artificial
  Probe
cccatcttactctgaaatctggaga

SEQ ID NO: 54026 - DNA, 25 bp, Artificial
  Probe
gcatagttaattgattgtgtggagt

SEQ ID NO: 54027 - DNA, 25 bp, Artificial
  Probe
ataccttgttgaatcattgaatggc

SEQ ID NO: 54028 - DNA, 25 bp, Artificial
  Probe
cttgttgaatcattgaatggcagag

SEQ ID NO: 54029 - DNA, 25 bp, Artificial
  Probe
taccttgttgaatcattgaatggca

SEQ ID NO: 54030 - DNA, 25 bp, Artificial
  Probe
gataccttgttgaatcattgaatgg

SEQ ID NO: 54031 - DNA, 25 bp, Artificial
  Probe
ccttgttgaatcattgaatggcaga

SEQ ID NO: 54032 - DNA, 25 bp, Artificial
  Probe
accttgttgaatcattgaatggcag

SEQ ID NO: 54033 - DNA, 25 bp, Artificial
  Probe
ttaggtgaactaatcaatcttcgtt

SEQ ID NO: 54034 - DNA, 25 bp, Artificial
  Probe
tgcatagttaattgattgtgtggag

SEQ ID NO: 54035 - DNA, 25 bp, Artificial
  Probe
tggtaaactttggctcttatggata

SEQ ID NO: 54036 - DNA, 25 bp, Artificial
  Probe
ctttggtaaactttggctcttatgg

SEQ ID NO: 54037 - DNA, 25 bp, Artificial
  Probe
actttggtaaactttggctcttatg

SEQ ID NO: 54038 - DNA, 25 bp, Artificial
  Probe
ttggtaaactttggctcttatggat

SEQ ID NO: 54039 - DNA, 25 bp, Artificial
  Probe
gactttggtaaactttggctcttat

SEQ ID NO: 54040 - DNA, 25 bp, Artificial
  Probe
tacatttgaagaaagggatttggac

SEQ ID NO: 54041 - DNA, 25 bp, Artificial
  Probe
tttggtaaactttggctcttatgga

SEQ ID NO: 54042 - DNA, 25 bp, Artificial
  Probe
actacatttgaagaaagggatttgg

SEQ ID NO: 54043 - DNA, 25 bp, Artificial
  Probe
ttgcatagttaattgattgtgtgga

SEQ ID NO: 54044 - DNA, 25 bp, Artificial
  Probe
ggatttggactttggtaaactttgg

SEQ ID NO: 54045 - DNA, 25 bp, Artificial
  Probe
gggatttggactttggtaaactttg

SEQ ID NO: 54046 - DNA, 25 bp, Artificial
  Probe
agggatttggactttggtaaacttt

SEQ ID NO: 54047 - DNA, 25 bp, Artificial
  Probe
acatttgaagaaagggatttggact

SEQ ID NO: 54048 - DNA, 25 bp, Artificial
  Probe
ctacatttgaagaaagggatttgga

SEQ ID NO: 54049 - DNA, 25 bp, Artificial
  Probe
tgattgtgtggagtaaattaggtga

SEQ ID NO: 54050 - DNA, 25 bp, Artificial
  Probe
catttgaagaaagggatttggactt

SEQ ID NO: 54051 - DNA, 25 bp, Artificial
  Probe
ggactttggtaaactttggctctta

SEQ ID NO: 54052 - DNA, 25 bp, Artificial
  Probe
aagggatttggactttggtaaactt

SEQ ID NO: 54053 - DNA, 25 bp, Artificial
  Probe
attgtgtggagtaaattaggtgaac

SEQ ID NO: 54054 - DNA, 25 bp, Artificial
  Probe
ttgattgtgtggagtaaattaggtg

SEQ ID NO: 54055 - DNA, 25 bp, Artificial
  Probe
ttgttgaatcattgaatggcagagc

SEQ ID NO: 54056 - DNA, 25 bp, Artificial
  Probe
ggtaaactttggctcttatggataa

SEQ ID NO: 54057 - DNA, 25 bp, Artificial
  Probe
gatttggactttggtaaactttggc

SEQ ID NO: 54058 - DNA, 25 bp, Artificial
  Probe
gattgtgtggagtaaattaggtgaa

SEQ ID NO: 54059 - DNA, 25 bp, Artificial
  Probe
atttggactttggtaaactttggct

SEQ ID NO: 54060 - DNA, 25 bp, Artificial
  Probe
attgcatagttaattgattgtgtgg

SEQ ID NO: 54061 - DNA, 25 bp, Artificial
  Probe
ttgtgtggagtaaattaggtgaact

SEQ ID NO: 54062 - DNA, 25 bp, Artificial
  Probe
catagttaattgattgtgtggagta

SEQ ID NO: 54063 - DNA, 25 bp, Artificial
  Probe
tgtgtggagtaaattaggtgaacta

SEQ ID NO: 54064 - DNA, 25 bp, Artificial
  Probe
gagctagagatcatgcagagtatct

SEQ ID NO: 54065 - DNA, 25 bp, Artificial
  Probe
attgattgtgtggagtaaattaggt

SEQ ID NO: 54066 - DNA, 25 bp, Artificial
  Probe
ggagctagagatcatgcagagtatc

SEQ ID NO: 54067 - DNA, 25 bp, Artificial
  Probe
ggtgataccttgttgaatcattgaa

SEQ ID NO: 54068 - DNA, 25 bp, Artificial
  Probe
ctagacttgatgaaacagtgagaag

SEQ ID NO: 54069 - DNA, 25 bp, Artificial
  Probe
gttgaatcattgaatggcagagcac

SEQ ID NO: 54070 - DNA, 25 bp, Artificial
  Probe
tttggactttggtaaactttggctc

SEQ ID NO: 54071 - DNA, 25 bp, Artificial
  Probe
atgtatgtactgtgaatgtgtgtgt

SEQ ID NO: 54072 - DNA, 25 bp, Artificial
  Probe
tgtatgtactgtgaatgtgtgtgtt

SEQ ID NO: 54073 - DNA, 25 bp, Artificial
  Probe
tatgtatgtactgtgaatgtgtgtg

SEQ ID NO: 54074 - DNA, 25 bp, Artificial
  Probe
ttatgtatgtactgtgaatgtgtgt

SEQ ID NO: 54075 - DNA, 25 bp, Artificial
  Probe
tgttatgtatgtactgtgaatgtgt

SEQ ID NO: 54076 - DNA, 25 bp, Artificial
  Probe
gttatgtatgtactgtgaatgtgtg

SEQ ID NO: 54077 - DNA, 25 bp, Artificial
  Probe
gacaatatcacagacttaacggtgg

SEQ ID NO: 54078 - DNA, 25 bp, Artificial
  Probe
ttgttatgtatgtactgtgaatgtg

SEQ ID NO: 54079 - DNA, 25 bp, Artificial
  Probe
atgaaatggaagacactgtgaactt

SEQ ID NO: 54080 - DNA, 25 bp, Artificial
  Probe
gatgaaatggaagacactgtgaact

SEQ ID NO: 54081 - DNA, 25 bp, Artificial
  Probe
gtatgtactgtgaatgtgtgtgttt

SEQ ID NO: 54082 - DNA, 25 bp, Artificial
  Probe
cttgttatgtatgtactgtgaatgt

SEQ ID NO: 54083 - DNA, 25 bp, Artificial
  Probe
gtgtgagatacctttcttgttatgt

SEQ ID NO: 54084 - DNA, 25 bp, Artificial
  Probe
tctgtgtgtctttgtgtgttctttc

SEQ ID NO: 54085 - DNA, 25 bp, Artificial
  Probe
ctctgtgtgtctttgtgtgttcttt

SEQ ID NO: 54086 - DNA, 25 bp, Artificial
  Probe
gtgtgttctttcctgtcccattatg

SEQ ID NO: 54087 - DNA, 25 bp, Artificial
  Probe
tgaaatggaagacactgtgaacttg

SEQ ID NO: 54088 - DNA, 25 bp, Artificial
  Probe
tcttgttatgtatgtactgtgaatg

SEQ ID NO: 54089 - DNA, 25 bp, Artificial
  Probe
tgtgtgttctttcctgtcccattat

SEQ ID NO: 54090 - DNA, 25 bp, Artificial
  Probe
ttgtgtgttctttcctgtcccatta

SEQ ID NO: 54091 - DNA, 25 bp, Artificial
  Probe
ggatgaaatggaagacactgtgaac

SEQ ID NO: 54092 - DNA, 25 bp, Artificial
  Probe
gtgtctttgtgtgttctttcctgtc

SEQ ID NO: 54093 - DNA, 25 bp, Artificial
  Probe
gaaatggaagacactgtgaacttgt

SEQ ID NO: 54094 - DNA, 25 bp, Artificial
  Probe
gtgtgtctttgtgtgttctttcctg

SEQ ID NO: 54095 - DNA, 25 bp, Artificial
  Probe
ctgtgtgtctttgtgtgttctttcc

SEQ ID NO: 54096 - DNA, 25 bp, Artificial
  Probe
acctttcttgttatgtatgtactgt

SEQ ID NO: 54097 - DNA, 25 bp, Artificial
  Probe
tggtgtgagatacctttcttgttat

SEQ ID NO: 54098 - DNA, 25 bp, Artificial
  Probe
gtggtgtgagatacctttcttgtta

SEQ ID NO: 54099 - DNA, 25 bp, Artificial
  Probe
ggtgtgagatacctttcttgttatg

SEQ ID NO: 54100 - DNA, 25 bp, Artificial
  Probe
cctttcttgttatgtatgtactgtg

SEQ ID NO: 54101 - DNA, 25 bp, Artificial
  Probe
tgtgagatacctttcttgttatgta

SEQ ID NO: 54102 - DNA, 25 bp, Artificial
  Probe
tgtgtctttgtgtgttctttcctgt

SEQ ID NO: 54103 - DNA, 25 bp, Artificial
  Probe
tgtgtgtctttgtgtgttctttcct

SEQ ID NO: 54104 - DNA, 25 bp, Artificial
  Probe
cagaacttgagcagtggagacaatg

SEQ ID NO: 54105 - DNA, 25 bp, Artificial
  Probe
tttgtgtgttctttcctgtcccatt

SEQ ID NO: 54106 - DNA, 25 bp, Artificial
  Probe
gggatgaaatggaagacactgtgaa

SEQ ID NO: 54107 - DNA, 25 bp, Artificial
  Probe
ttcttgttatgtatgtactgtgaat

SEQ ID NO: 54108 - DNA, 25 bp, Artificial
  Probe
tgtggtgtgagatacctttcttgtt

SEQ ID NO: 54109 - DNA, 25 bp, Artificial
  Probe
ctttgtgtgttctttcctgtcccat

SEQ ID NO: 54110 - DNA, 25 bp, Artificial
  Probe
tgtctttgtgtgttctttcctgtcc

SEQ ID NO: 54111 - DNA, 25 bp, Artificial
  Probe
cctctgtgtgtctttgtgtgttctt

SEQ ID NO: 54112 - DNA, 25 bp, Artificial
  Probe
acaatatcacagacttaacggtggg

SEQ ID NO: 54113 - DNA, 25 bp, Artificial
  Probe
ctttcttgttatgtatgtactgtga

SEQ ID NO: 54114 - DNA, 25 bp, Artificial
  Probe
attttaattgttgttgatgtgaggc

SEQ ID NO: 54115 - DNA, 25 bp, Artificial
  Probe
aacttgagcagtggagacaatggaa

SEQ ID NO: 54116 - DNA, 25 bp, Artificial
  Probe
aatcttgtcttccactccataacca

SEQ ID NO: 54117 - DNA, 25 bp, Artificial
  Probe
atcttgtcttccactccataaccag

SEQ ID NO: 54118 - DNA, 25 bp, Artificial
  Probe
cttgtcttccactccataaccagaa

SEQ ID NO: 54119 - DNA, 25 bp, Artificial
  Probe
aaatcttgtcttccactccataacc

SEQ ID NO: 54120 - DNA, 25 bp, Artificial
  Probe
gaccacgagacacttactgctattc

SEQ ID NO: 54121 - DNA, 25 bp, Artificial
  Probe
tcttgtcttccactccataaccaga

SEQ ID NO: 54122 - DNA, 25 bp, Artificial
  Probe
accacgagacacttactgctattct

SEQ ID NO: 54123 - DNA, 25 bp, Artificial
  Probe
tgaccacgagacacttactgctatt

SEQ ID NO: 54124 - DNA, 25 bp, Artificial
  Probe
taaagaggaaaggaagagatggcag

SEQ ID NO: 54125 - DNA, 25 bp, Artificial
  Probe
ctaaagaggaaaggaagagatggca

SEQ ID NO: 54126 - DNA, 25 bp, Artificial
  Probe
tctaaagaggaaaggaagagatggc

SEQ ID NO: 54127 - DNA, 25 bp, Artificial
  Probe
cactggatatgacgagaaacttgtc

SEQ ID NO: 54128 - DNA, 25 bp, Artificial
  Probe
ctgaccacgagacacttactgctat

SEQ ID NO: 54129 - DNA, 25 bp, Artificial
  Probe
cttctggctcagtctacatttgtac

SEQ ID NO: 54130 - DNA, 25 bp, Artificial
  Probe
cctatcacgagtcagtggaagaact

SEQ ID NO: 54131 - DNA, 25 bp, Artificial
  Probe
gcactggatatgacgagaaacttgt

SEQ ID NO: 54132 - DNA, 25 bp, Artificial
  Probe
ttgtcttccactccataaccagaag

SEQ ID NO: 54133 - DNA, 25 bp, Artificial
  Probe
ctggagataggggaagtgtataaaa

SEQ ID NO: 54134 - DNA, 25 bp, Artificial
  Probe
gcttctggctcagtctacatttgta

SEQ ID NO: 54135 - DNA, 25 bp, Artificial
  Probe
aaaatcttgtcttccactccataac

SEQ ID NO: 54136 - DNA, 25 bp, Artificial
  Probe
gctggagataggggaagtgtataaa

SEQ ID NO: 54137 - DNA, 25 bp, Artificial
  Probe
acgagacacttactgctattctcag

SEQ ID NO: 54138 - DNA, 25 bp, Artificial
  Probe
ggcactggatatgacgagaaacttg

SEQ ID NO: 54139 - DNA, 25 bp, Artificial
  Probe
ccaaaatcttgtcttccactccata

SEQ ID NO: 54140 - DNA, 25 bp, Artificial
  Probe
gagaaacttgtcagggaagtagaag

SEQ ID NO: 54141 - DNA, 25 bp, Artificial
  Probe
caaaatcttgtcttccactccataa

SEQ ID NO: 54142 - DNA, 25 bp, Artificial
  Probe
cacgagacacttactgctattctca

SEQ ID NO: 54143 - DNA, 25 bp, Artificial
  Probe
tttcatcgagacagtcccttccata

SEQ ID NO: 54144 - DNA, 25 bp, Artificial
  Probe
ctctaaagaggaaaggaagagatgg

SEQ ID NO: 54145 - DNA, 25 bp, Artificial
  Probe
tctgaccacgagacacttactgcta

SEQ ID NO: 54146 - DNA, 25 bp, Artificial
  Probe
atcgagacagtcccttccatagatg

SEQ ID NO: 54147 - DNA, 25 bp, Artificial
  Probe
catcgagacagtcccttccatagat

SEQ ID NO: 54148 - DNA, 25 bp, Artificial
  Probe
agaaacttgtcagggaagtagaagg

SEQ ID NO: 54149 - DNA, 25 bp, Artificial
  Probe
gagacacttactgctattctcagcc

SEQ ID NO: 54150 - DNA, 25 bp, Artificial
  Probe
ccacgagacacttactgctattctc

SEQ ID NO: 54151 - DNA, 25 bp, Artificial
  Probe
ctatcacgagtcagtggaagaactc

SEQ ID NO: 54152 - DNA, 25 bp, Artificial
  Probe
atttatcttcaggggcactggatat

SEQ ID NO: 54153 - DNA, 25 bp, Artificial
  Probe
ttcatcgagacagtcccttccatag

SEQ ID NO: 54154 - DNA, 25 bp, Artificial
  Probe
gctcagtctacatttgtacactttg

SEQ ID NO: 54155 - DNA, 25 bp, Artificial
  Probe
cgagaaacttgtcagggaagtagaa

SEQ ID NO: 54156 - DNA, 25 bp, Artificial
  Probe
aatttatcttcaggggcactggata

SEQ ID NO: 54157 - DNA, 25 bp, Artificial
  Probe
aaagaggaaaggaagagatggcagg

SEQ ID NO: 54158 - DNA, 25 bp, Artificial
  Probe
cgagacacttactgctattctcagc

SEQ ID NO: 54159 - DNA, 25 bp, Artificial
  Probe
ggctcagtctacatttgtacacttt

SEQ ID NO: 54160 - DNA, 25 bp, Artificial
  Probe
aatccctatcacgagtcagtggaag

SEQ ID NO: 54161 - DNA, 25 bp, Artificial
  Probe
gaaaccgtaagatgtctagcaaatc

SEQ ID NO: 54162 - DNA, 25 bp, Artificial
  Probe
cgaaaccgtaagatgtctagcaaat

SEQ ID NO: 54163 - DNA, 25 bp, Artificial
  Probe
aaaccgtaagatgtctagcaaatcg

SEQ ID NO: 54164 - DNA, 25 bp, Artificial
  Probe
caaactccacaatattaacagaccc

SEQ ID NO: 54165 - DNA, 25 bp, Artificial
  Probe
acaaactccacaatattaacagacc

SEQ ID NO: 54166 - DNA, 25 bp, Artificial
  Probe
ggctgtactacaaactccacaatat

SEQ ID NO: 54167 - DNA, 25 bp, Artificial
  Probe
ccgtaagatgtctagcaaatcgaaa

SEQ ID NO: 54168 - DNA, 25 bp, Artificial
  Probe
gctgtactacaaactccacaatatt

SEQ ID NO: 54169 - DNA, 25 bp, Artificial
  Probe
gggctgtactacaaactccacaata

SEQ ID NO: 54170 - DNA, 25 bp, Artificial
  Probe
accgtaagatgtctagcaaatcgaa

SEQ ID NO: 54171 - DNA, 25 bp, Artificial
  Probe
aaccgtaagatgtctagcaaatcga

SEQ ID NO: 54172 - DNA, 25 bp, Artificial
  Probe
ccgaaaccgtaagatgtctagcaaa

SEQ ID NO: 54173 - DNA, 25 bp, Artificial
  Probe
ctgcggactctaccataaaatgaat

SEQ ID NO: 54174 - DNA, 25 bp, Artificial
  Probe
tacaaactccacaatattaacagac

SEQ ID NO: 54175 - DNA, 25 bp, Artificial
  Probe
actacaaactccacaatattaacag

SEQ ID NO: 54176 - DNA, 25 bp, Artificial
  Probe
tgcggactctaccataaaatgaatg

SEQ ID NO: 54177 - DNA, 25 bp, Artificial
  Probe
ctacaaactccacaatattaacaga

SEQ ID NO: 54178 - DNA, 25 bp, Artificial
  Probe
attaacagacccctgactatgaaga

SEQ ID NO: 54179 - DNA, 25 bp, Artificial
  Probe
tattaacagacccctgactatgaag

SEQ ID NO: 54180 - DNA, 25 bp, Artificial
  Probe
ttaacagacccctgactatgaagaa

SEQ ID NO: 54181 - DNA, 25 bp, Artificial
  Probe
aaactccacaatattaacagacccc

SEQ ID NO: 54182 - DNA, 25 bp, Artificial
  Probe
taacagacccctgactatgaagaag

SEQ ID NO: 54183 - DNA, 25 bp, Artificial
  Probe
atattaacagacccctgactatgaa

SEQ ID NO: 54184 - DNA, 25 bp, Artificial
  Probe
aactccacaatattaacagacccct

SEQ ID NO: 54185 - DNA, 25 bp, Artificial
  Probe
cgtaagatgtctagcaaatcgaaaa

SEQ ID NO: 54186 - DNA, 25 bp, Artificial
  Probe
cctgcggactctaccataaaatgaa

SEQ ID NO: 54187 - DNA, 25 bp, Artificial
  Probe
cacaatattaacagacccctgacta

SEQ ID NO: 54188 - DNA, 25 bp, Artificial
  Probe
acaatattaacagacccctgactat

SEQ ID NO: 54189 - DNA, 25 bp, Artificial
  Probe
ctgtactacaaactccacaatatta

SEQ ID NO: 54190 - DNA, 25 bp, Artificial
  Probe
aatattaacagacccctgactatga

SEQ ID NO: 54191 - DNA, 25 bp, Artificial
  Probe
caatattaacagacccctgactatg

SEQ ID NO: 54192 - DNA, 25 bp, Artificial
  Probe
tactacaaactccacaatattaaca

SEQ ID NO: 54193 - DNA, 25 bp, Artificial
  Probe
cccgaaaccgtaagatgtctagcaa

SEQ ID NO: 54194 - DNA, 25 bp, Artificial
  Probe
cctgactatgaagaaggagggcatc

SEQ ID NO: 54195 - DNA, 25 bp, Artificial
  Probe
ctccacaatattaacagacccctga

SEQ ID NO: 54196 - DNA, 25 bp, Artificial
  Probe
gtactacaaactccacaatattaac

SEQ ID NO: 54197 - DNA, 25 bp, Artificial
  Probe
tgggctgtactacaaactccacaat

SEQ ID NO: 54198 - DNA, 25 bp, Artificial
  Probe
ctatgaagaaggagggcatccagac

SEQ ID NO: 54199 - DNA, 25 bp, Artificial
  Probe
gactatgaagaaggagggcatccag

SEQ ID NO: 54200 - DNA, 25 bp, Artificial
  Probe
ctgactatgaagaaggagggcatcc

SEQ ID NO: 54201 - DNA, 25 bp, Artificial
  Probe
ccacaatattaacagacccctgact

SEQ ID NO: 54202 - DNA, 25 bp, Artificial
  Probe
tccacaatattaacagacccctgac

SEQ ID NO: 54203 - DNA, 25 bp, Artificial
  Probe
actccacaatattaacagacccctg

SEQ ID NO: 54204 - DNA, 25 bp, Artificial
  Probe
tgtactacaaactccacaatattaa

SEQ ID NO: 54205 - DNA, 25 bp, Artificial
  Probe
actatgaagaaggagggcatccaga

SEQ ID NO: 54206 - DNA, 25 bp, Artificial
  Probe
aagaacctgaagactgtgactccta

SEQ ID NO: 54207 - DNA, 25 bp, Artificial
  Probe
gaacctgaagactgtgactcctact

SEQ ID NO: 54208 - DNA, 25 bp, Artificial
  Probe
agaacctgaagactgtgactcctac

SEQ ID NO: 54209 - DNA, 25 bp, Artificial
  Probe
atggaagaacctgaagactgtgact

SEQ ID NO: 54210 - DNA, 25 bp, Artificial
  Probe
aacctgaagactgtgactcctactg

SEQ ID NO: 54211 - DNA, 25 bp, Artificial
  Probe
gaagaacctgaagactgtgactcct

SEQ ID NO: 54212 - DNA, 25 bp, Artificial
  Probe
gaagatgaacatgaagaaatactgc

SEQ ID NO: 54213 - DNA, 25 bp, Artificial
  Probe
catggaagaacctgaagactgtgac

SEQ ID NO: 54214 - DNA, 25 bp, Artificial
  Probe
tggaagaacctgaagactgtgactc

SEQ ID NO: 54215 - DNA, 25 bp, Artificial
  Probe
gactatgctgtccagatccacattc

SEQ ID NO: 54216 - DNA, 25 bp, Artificial
  Probe
actatgctgtccagatccacattct

SEQ ID NO: 54217 - DNA, 25 bp, Artificial
  Probe
aagatgaacatgaagaaatactgca

SEQ ID NO: 54218 - DNA, 25 bp, Artificial
  Probe
tgaagatgaacatgaagaaatactg

SEQ ID NO: 54219 - DNA, 25 bp, Artificial
  Probe
actgaagatgaacatgaagaaatac

SEQ ID NO: 54220 - DNA, 25 bp, Artificial
  Probe
aaactgaagatgaacatgaagaaat

SEQ ID NO: 54221 - DNA, 25 bp, Artificial
  Probe
cacagtgaacatcatctccgtgtac

SEQ ID NO: 54222 - DNA, 25 bp, Artificial
  Probe
ccaaaggaaaactgaagatgaacat

SEQ ID NO: 54223 - DNA, 25 bp, Artificial
  Probe
ctgaagatgaacatgaagaaatact

SEQ ID NO: 54224 - DNA, 25 bp, Artificial
  Probe
tcacagtgaacatcatctccgtgta

SEQ ID NO: 54225 - DNA, 25 bp, Artificial
  Probe
aactgaagatgaacatgaagaaata

SEQ ID NO: 54226 - DNA, 25 bp, Artificial
  Probe
ggaaaactgaagatgaacatgaaga

SEQ ID NO: 54227 - DNA, 25 bp, Artificial
  Probe
aggaaaactgaagatgaacatgaag

SEQ ID NO: 54228 - DNA, 25 bp, Artificial
  Probe
tgaagactgtgactcctactgcaag

SEQ ID NO: 54229 - DNA, 25 bp, Artificial
  Probe
ctgaagactgtgactcctactgcaa

SEQ ID NO: 54230 - DNA, 25 bp, Artificial
  Probe
aaggaaaactgaagatgaacatgaa

SEQ ID NO: 54231 - DNA, 25 bp, Artificial
  Probe
aaaggaaaactgaagatgaacatga

SEQ ID NO: 54232 - DNA, 25 bp, Artificial
  Probe
caaaggaaaactgaagatgaacatg

SEQ ID NO: 54233 - DNA, 25 bp, Artificial
  Probe
agtgaacatcatctccgtgtacaag

SEQ ID NO: 54234 - DNA, 25 bp, Artificial
  Probe
ggaagaacctgaagactgtgactcc

SEQ ID NO: 54235 - DNA, 25 bp, Artificial
  Probe
tccaaaggaaaactgaagatgaaca

SEQ ID NO: 54236 - DNA, 25 bp, Artificial
  Probe
gcatggaagaacctgaagactgtga

SEQ ID NO: 54237 - DNA, 25 bp, Artificial
  Probe
agcatggaagaacctgaagactgtg

SEQ ID NO: 54238 - DNA, 25 bp, Artificial
  Probe
cagtgaacatcatctccgtgtacaa

SEQ ID NO: 54239 - DNA, 25 bp, Artificial
  Probe
gaaaactgaagatgaacatgaagaa

SEQ ID NO: 54240 - DNA, 25 bp, Artificial
  Probe
ctatgctgtccagatccacattctg

SEQ ID NO: 54241 - DNA, 25 bp, Artificial
  Probe
aaaactgaagatgaacatgaagaaa

SEQ ID NO: 54242 - DNA, 25 bp, Artificial
  Probe
tatgctgtccagatccacattctga

SEQ ID NO: 54243 - DNA, 25 bp, Artificial
  Probe
cagcatggaagaacctgaagactgt

SEQ ID NO: 54244 - DNA, 25 bp, Artificial
  Probe
cccttgcattaagattcctgtagcg

SEQ ID NO: 54245 - DNA, 25 bp, Artificial
  Probe
gtacaagcagggcacaagtcgtata

SEQ ID NO: 54246 - DNA, 25 bp, Artificial
  Probe
gaacatcatctccgtgtacaagcag

SEQ ID NO: 54247 - DNA, 25 bp, Artificial
  Probe
acagtgaacatcatctccgtgtaca

SEQ ID NO: 54248 - DNA, 25 bp, Artificial
  Probe
gaagactgtgactcctactgcaagg

SEQ ID NO: 54249 - DNA, 25 bp, Artificial
  Probe
gtgaacatcatctccgtgtacaagc

SEQ ID NO: 54250 - DNA, 25 bp, Artificial
  Probe
atgctgtccagatccacattctgaa

SEQ ID NO: 54251 - DNA, 25 bp, Artificial
  Probe
agatattcgcatagtactcacaagg

SEQ ID NO: 54252 - DNA, 25 bp, Artificial
  Probe
acagatattcgcatagtactcacaa

SEQ ID NO: 54253 - DNA, 25 bp, Artificial
  Probe
cacagatattcgcatagtactcaca

SEQ ID NO: 54254 - DNA, 25 bp, Artificial
  Probe
cagatattcgcatagtactcacaag

SEQ ID NO: 54255 - DNA, 25 bp, Artificial
  Probe
ccacagatattcgcatagtactcac

SEQ ID NO: 54256 - DNA, 25 bp, Artificial
  Probe
gatattcgcatagtactcacaaggc

SEQ ID NO: 54257 - DNA, 25 bp, Artificial
  Probe
gactgccacagatattcgcatagta

SEQ ID NO: 54258 - DNA, 25 bp, Artificial
  Probe
gccacagatattcgcatagtactca

SEQ ID NO: 54259 - DNA, 25 bp, Artificial
  Probe
actgccacagatattcgcatagtac

SEQ ID NO: 54260 - DNA, 25 bp, Artificial
  Probe
atattcgcatagtactcacaaggcc

SEQ ID NO: 54261 - DNA, 25 bp, Artificial
  Probe
gtgactgccacagatattcgcatag

SEQ ID NO: 54262 - DNA, 25 bp, Artificial
  Probe
tgactgccacagatattcgcatagt

SEQ ID NO: 54263 - DNA, 25 bp, Artificial
  Probe
tgccacagatattcgcatagtactc

SEQ ID NO: 54264 - DNA, 25 bp, Artificial
  Probe
ctgccacagatattcgcatagtact

SEQ ID NO: 54265 - DNA, 25 bp, Artificial
  Probe
ggtgactgccacagatattcgcata

SEQ ID NO: 54266 - DNA, 25 bp, Artificial
  Probe
gactgggtgactgccacagatattc

SEQ ID NO: 54267 - DNA, 25 bp, Artificial
  Probe
gtcacagtcccctactcctactcag

SEQ ID NO: 54268 - DNA, 25 bp, Artificial
  Probe
ggaagaagacgataagtgctagagg

SEQ ID NO: 54269 - DNA, 25 bp, Artificial
  Probe
cggaagaagacgataagtgctagag

SEQ ID NO: 54270 - DNA, 25 bp, Artificial
  Probe
gaagaagacgataagtgctagaggc

SEQ ID NO: 54271 - DNA, 25 bp, Artificial
  Probe
gagtgacacggaagaagacgataag

SEQ ID NO: 54272 - DNA, 25 bp, Artificial
  Probe
aagaagacgataagtgctagaggct

SEQ ID NO: 54273 - DNA, 25 bp, Artificial
  Probe
acggaagaagacgataagtgctaga

SEQ ID NO: 54274 - DNA, 25 bp, Artificial
  Probe
agtgacacggaagaagacgataagt

SEQ ID NO: 54275 - DNA, 25 bp, Artificial
  Probe
tgagtgacacggaagaagacgataa

SEQ ID NO: 54276 - DNA, 25 bp, Artificial
  Probe
agaagacgataagtgctagaggctg

SEQ ID NO: 54277 - DNA, 25 bp, Artificial
  Probe
cacggaagaagacgataagtgctag

SEQ ID NO: 54278 - DNA, 25 bp, Artificial
  Probe
ctgagtgacacggaagaagacgata

SEQ ID NO: 54279 - DNA, 25 bp, Artificial
  Probe
gtgacacggaagaagacgataagtg

SEQ ID NO: 54280 - DNA, 25 bp, Artificial
  Probe
acacggaagaagacgataagtgcta

SEQ ID NO: 54281 - DNA, 25 bp, Artificial
  Probe
cactacatctctgagccctatctgg

SEQ ID NO: 54282 - DNA, 25 bp, Artificial
  Probe
gcactacatctctgagccctatctg

SEQ ID NO: 54283 - DNA, 25 bp, Artificial
  Probe
agcactacatctctgagccctatct

SEQ ID NO: 54284 - DNA, 25 bp, Artificial
  Probe
gacacggaagaagacgataagtgct

SEQ ID NO: 54285 - DNA, 25 bp, Artificial
  Probe
gaagacgataagtgctagaggctgc

SEQ ID NO: 54286 - DNA, 25 bp, Artificial
  Probe
cagggagaaaaccaagaccaaattg

SEQ ID NO: 54287 - DNA, 25 bp, Artificial
  Probe
acagggagaaaaccaagaccaaatt

SEQ ID NO: 54288 - DNA, 25 bp, Artificial
  Probe
tgacacggaagaagacgataagtgc

SEQ ID NO: 54289 - DNA, 25 bp, Artificial
  Probe
cagcactacatctctgagccctatc

SEQ ID NO: 54290 - DNA, 25 bp, Artificial
  Probe
cacagggagaaaaccaagaccaaat

SEQ ID NO: 54291 - DNA, 25 bp, Artificial
  Probe
acagcactacatctctgagccctat

SEQ ID NO: 54292 - DNA, 25 bp, Artificial
  Probe
tcacagggagaaaaccaagaccaaa

SEQ ID NO: 54293 - DNA, 25 bp, Artificial
  Probe
cctaaccgagtcttccaactccttg

SEQ ID NO: 54294 - DNA, 25 bp, Artificial
  Probe
ctcacagggagaaaaccaagaccaa

SEQ ID NO: 54295 - DNA, 25 bp, Artificial
  Probe
ctaaccgagtcttccaactccttgc

SEQ ID NO: 54296 - DNA, 25 bp, Artificial
  Probe
cttgcctaaccgagtcttccaactc

SEQ ID NO: 54297 - DNA, 25 bp, Artificial
  Probe
agaaaaccaagaccaaattgggaag

SEQ ID NO: 54298 - DNA, 25 bp, Artificial
  Probe
gagaaaaccaagaccaaattgggaa

SEQ ID NO: 54299 - DNA, 25 bp, Artificial
  Probe
tctctcacagggagaaaaccaagac

SEQ ID NO: 54300 - DNA, 25 bp, Artificial
  Probe
atctctccacctcctgatggaagtg

SEQ ID NO: 54301 - DNA, 25 bp, Artificial
  Probe
catctctccacctcctgatggaagt

SEQ ID NO: 54302 - DNA, 25 bp, Artificial
  Probe
gaaaaccaagaccaaattgggaagc

SEQ ID NO: 54303 - DNA, 25 bp, Artificial
  Probe
ggagaaaaccaagaccaaattggga

SEQ ID NO: 54304 - DNA, 25 bp, Artificial
  Probe
agggagaaaaccaagaccaaattgg

SEQ ID NO: 54305 - DNA, 25 bp, Artificial
  Probe
actacatctctgagccctatctggc

SEQ ID NO: 54306 - DNA, 25 bp, Artificial
  Probe
gggagaaaaccaagaccaaattggg

SEQ ID NO: 54307 - DNA, 25 bp, Artificial
  Probe
ctctcacagggagaaaaccaagacc

SEQ ID NO: 54308 - DNA, 25 bp, Artificial
  Probe
aaaaccaagaccaaattgggaagcc

SEQ ID NO: 54309 - DNA, 25 bp, Artificial
  Probe
atccacctgaatccaattacatctg

SEQ ID NO: 54310 - DNA, 25 bp, Artificial
  Probe
gccttggatggaagcaatataatat

SEQ ID NO: 54311 - DNA, 25 bp, Artificial
  Probe
gatccacctgaatccaattacatct

SEQ ID NO: 54312 - DNA, 25 bp, Artificial
  Probe
gtctcttcagtatgtagttgacaga

SEQ ID NO: 54313 - DNA, 25 bp, Artificial
  Probe
tctgtctcttcagtatgtagttgac

SEQ ID NO: 54314 - DNA, 25 bp, Artificial
  Probe
tctcttcagtatgtagttgacagat

SEQ ID NO: 54315 - DNA, 25 bp, Artificial
  Probe
atctgtctcttcagtatgtagttga

SEQ ID NO: 54316 - DNA, 25 bp, Artificial
  Probe
ctgaatccaattacatctggtgaac

SEQ ID NO: 54317 - DNA, 25 bp, Artificial
  Probe
gaatccaattacatctggtgaactc

SEQ ID NO: 54318 - DNA, 25 bp, Artificial
  Probe
tgaatccaattacatctggtgaact

SEQ ID NO: 54319 - DNA, 25 bp, Artificial
  Probe
aatccaattacatctggtgaactcc

SEQ ID NO: 54320 - DNA, 25 bp, Artificial
  Probe
cctgaatccaattacatctggtgaa

SEQ ID NO: 54321 - DNA, 25 bp, Artificial
  Probe
atctatttcgcccttactgttactc

SEQ ID NO: 54322 - DNA, 25 bp, Artificial
  Probe
aatctatttcgcccttactgttact

SEQ ID NO: 54323 - DNA, 25 bp, Artificial
  Probe
caatctatttcgcccttactgttac

SEQ ID NO: 54324 - DNA, 25 bp, Artificial
  Probe
cgaaactgggcaaagatacataaat

SEQ ID NO: 54325 - DNA, 25 bp, Artificial
  Probe
aatctgtctcttcagtatgtagttg

SEQ ID NO: 54326 - DNA, 25 bp, Artificial
  Probe
tgtatgtatcaaataaaggtgctgc

SEQ ID NO: 54327 - DNA, 25 bp, Artificial
  Probe
ctatttcgcccttactgttactcta

SEQ ID NO: 54328 - DNA, 25 bp, Artificial
  Probe
gtatgtatcaaataaaggtgctgct

SEQ ID NO: 54329 - DNA, 25 bp, Artificial
  Probe
gggcaaagatacataaatcacaagg

SEQ ID NO: 54330 - DNA, 25 bp, Artificial
  Probe
ggcaaagatacataaatcacaaggt

SEQ ID NO: 54331 - DNA, 25 bp, Artificial
  Probe
tgggcaaagatacataaatcacaag

SEQ ID NO: 54332 - DNA, 25 bp, Artificial
  Probe
ctgggcaaagatacataaatcacaa

SEQ ID NO: 54333 - DNA, 25 bp, Artificial
  Probe
aactgggcaaagatacataaatcac

SEQ ID NO: 54334 - DNA, 25 bp, Artificial
  Probe
actgggcaaagatacataaatcaca

SEQ ID NO: 54335 - DNA, 25 bp, Artificial
  Probe
ataatgtatggagtctttgccttgg

SEQ ID NO: 54336 - DNA, 25 bp, Artificial
  Probe
tctatttcgcccttactgttactct

SEQ ID NO: 54337 - DNA, 25 bp, Artificial
  Probe
aaactgggcaaagatacataaatca

SEQ ID NO: 54338 - DNA, 25 bp, Artificial
  Probe
tatttcgcccttactgttactctag

SEQ ID NO: 54339 - DNA, 25 bp, Artificial
  Probe
atccaattacatctggtgaactcca

SEQ ID NO: 54340 - DNA, 25 bp, Artificial
  Probe
acctgaatccaattacatctggtga

SEQ ID NO: 54341 - DNA, 25 bp, Artificial
  Probe
tataatgtatggagtctttgccttg

SEQ ID NO: 54342 - DNA, 25 bp, Artificial
  Probe
tgtgttggatgttcaaatgatgttc

SEQ ID NO: 54343 - DNA, 25 bp, Artificial
  Probe
tatgtatcaaataaaggtgctgctt

SEQ ID NO: 54344 - DNA, 25 bp, Artificial
  Probe
gtgtgttggatgttcaaatgatgtt

SEQ ID NO: 54345 - DNA, 25 bp, Artificial
  Probe
tcttcagtatgtagttgacagatac

SEQ ID NO: 54346 - DNA, 25 bp, Artificial
  Probe
ctcttcagtatgtagttgacagata

SEQ ID NO: 54347 - DNA, 25 bp, Artificial
  Probe
gtgttggatgttcaaatgatgttca

SEQ ID NO: 54348 - DNA, 25 bp, Artificial
  Probe
gaaactgggcaaagatacataaatc

SEQ ID NO: 54349 - DNA, 25 bp, Artificial
  Probe
taatgtatggagtctttgccttgga

SEQ ID NO: 54350 - DNA, 25 bp, Artificial
  Probe
acaatctatttcgcccttactgtta

SEQ ID NO: 54351 - DNA, 25 bp, Artificial
  Probe
tacaatctatttcgcccttactgtt

SEQ ID NO: 54352 - DNA, 25 bp, Artificial
  Probe
gcaaagatacataaatcacaaggtt

SEQ ID NO: 54353 - DNA, 25 bp, Artificial
  Probe
ctttcgtgtgttggatgttcaaatg

SEQ ID NO: 54354 - DNA, 25 bp, Artificial
  Probe
agatttatagcaagaggaggagact

SEQ ID NO: 54355 - DNA, 25 bp, Artificial
  Probe
cagatttatagcaagaggaggagac

SEQ ID NO: 54356 - DNA, 25 bp, Artificial
  Probe
tggacaggtttacagatttatagca

SEQ ID NO: 54357 - DNA, 25 bp, Artificial
  Probe
acagatttatagcaagaggaggaga

SEQ ID NO: 54358 - DNA, 25 bp, Artificial
  Probe
ttgtatgctaccctcttattccttt

SEQ ID NO: 54359 - DNA, 25 bp, Artificial
  Probe
attgtatgctaccctcttattcctt

SEQ ID NO: 54360 - DNA, 25 bp, Artificial
  Probe
tacagatttatagcaagaggaggag

SEQ ID NO: 54361 - DNA, 25 bp, Artificial
  Probe
gatttatagcaagaggaggagacta

SEQ ID NO: 54362 - DNA, 25 bp, Artificial
  Probe
aattgtatgctaccctcttattcct

SEQ ID NO: 54363 - DNA, 25 bp, Artificial
  Probe
ggacaggtttacagatttatagcaa

SEQ ID NO: 54364 - DNA, 25 bp, Artificial
  Probe
ttacagatttatagcaagaggagga

SEQ ID NO: 54365 - DNA, 25 bp, Artificial
  Probe
tgtatgctaccctcttattccttta

SEQ ID NO: 54366 - DNA, 25 bp, Artificial
  Probe
tttatagcaagaggaggagactagg

SEQ ID NO: 54367 - DNA, 25 bp, Artificial
  Probe
atggacaggtttacagatttatagc

SEQ ID NO: 54368 - DNA, 25 bp, Artificial
  Probe
tggattagtgacctaagttattgtt

SEQ ID NO: 54369 - DNA, 25 bp, Artificial
  Probe
ttggattagtgacctaagttattgt

SEQ ID NO: 54370 - DNA, 25 bp, Artificial
  Probe
ggtttacagatttatagcaagagga

SEQ ID NO: 54371 - DNA, 25 bp, Artificial
  Probe
aaattgtatgctaccctcttattcc

SEQ ID NO: 54372 - DNA, 25 bp, Artificial
  Probe
aagaggaggagactagggatagaaa

SEQ ID NO: 54373 - DNA, 25 bp, Artificial
  Probe
atttatagcaagaggaggagactag

SEQ ID NO: 54374 - DNA, 25 bp, Artificial
  Probe
aggtttacagatttatagcaagagg

SEQ ID NO: 54375 - DNA, 25 bp, Artificial
  Probe
tttacagatttatagcaagaggagg

SEQ ID NO: 54376 - DNA, 25 bp, Artificial
  Probe
acaggtttacagatttatagcaaga

SEQ ID NO: 54377 - DNA, 25 bp, Artificial
  Probe
caagaggaggagactagggatagaa

SEQ ID NO: 54378 - DNA, 25 bp, Artificial
  Probe
gacaggtttacagatttatagcaag

SEQ ID NO: 54379 - DNA, 25 bp, Artificial
  Probe
gtatgctaccctcttattcctttaa

SEQ ID NO: 54380 - DNA, 25 bp, Artificial
  Probe
cttgtgccgccattactgtgaatat

SEQ ID NO: 54381 - DNA, 25 bp, Artificial
  Probe
cagttctttaaatggttcttgggtt

SEQ ID NO: 54382 - DNA, 25 bp, Artificial
  Probe
gcttcacagttctttaaatggttct

SEQ ID NO: 54383 - DNA, 25 bp, Artificial
  Probe
agcttcacagttctttaaatggttc

SEQ ID NO: 54384 - DNA, 25 bp, Artificial
  Probe
agttctttaaatggttcttgggttc

SEQ ID NO: 54385 - DNA, 25 bp, Artificial
  Probe
tcacagttctttaaatggttcttgg

SEQ ID NO: 54386 - DNA, 25 bp, Artificial
  Probe
ttatagcaagaggaggagactaggg

SEQ ID NO: 54387 - DNA, 25 bp, Artificial
  Probe
gttctttaaatggttcttgggttcc

SEQ ID NO: 54388 - DNA, 25 bp, Artificial
  Probe
cacagttctttaaatggttcttggg

SEQ ID NO: 54389 - DNA, 25 bp, Artificial
  Probe
ccgccattactgtgaatatttctaa

SEQ ID NO: 54390 - DNA, 25 bp, Artificial
  Probe
caggtttacagatttatagcaagag

SEQ ID NO: 54391 - DNA, 25 bp, Artificial
  Probe
acagttctttaaatggttcttgggt

SEQ ID NO: 54392 - DNA, 25 bp, Artificial
  Probe
cttacaagaacgtgaagacacagag

SEQ ID NO: 54393 - DNA, 25 bp, Artificial
  Probe
tactgtgaatatttctaagtgggct

SEQ ID NO: 54394 - DNA, 25 bp, Artificial
  Probe
gccgccattactgtgaatatttcta

SEQ ID NO: 54395 - DNA, 25 bp, Artificial
  Probe
actgtgaatatttctaagtgggctg

SEQ ID NO: 54396 - DNA, 25 bp, Artificial
  Probe
gtttacagatttatagcaagaggag

SEQ ID NO: 54397 - DNA, 25 bp, Artificial
  Probe
ttgtgccgccattactgtgaatatt

SEQ ID NO: 54398 - DNA, 25 bp, Artificial
  Probe
ttactgtgaatatttctaagtgggc

SEQ ID NO: 54399 - DNA, 25 bp, Artificial
  Probe
gttatccttcagcctctcttctatg

SEQ ID NO: 54400 - DNA, 25 bp, Artificial
  Probe
ggttatccttcagcctctcttctat

SEQ ID NO: 54401 - DNA, 25 bp, Artificial
  Probe
ttatccttcagcctctcttctatgc

SEQ ID NO: 54402 - DNA, 25 bp, Artificial
  Probe
taagagataccacatggatcatcac

SEQ ID NO: 54403 - DNA, 25 bp, Artificial
  Probe
ttaagagataccacatggatcatca

SEQ ID NO: 54404 - DNA, 25 bp, Artificial
  Probe
gtccacacttcagaataggagataa

SEQ ID NO: 54405 - DNA, 25 bp, Artificial
  Probe
tgtccacacttcagaataggagata

SEQ ID NO: 54406 - DNA, 25 bp, Artificial
  Probe
aattcctgtccacacttcagaatag

SEQ ID NO: 54407 - DNA, 25 bp, Artificial
  Probe
ttcagaataggagataaagtggagc

SEQ ID NO: 54408 - DNA, 25 bp, Artificial
  Probe
ctgtccacacttcagaataggagat

SEQ ID NO: 54409 - DNA, 25 bp, Artificial
  Probe
cgatttcctttaagagataccacat

SEQ ID NO: 54410 - DNA, 25 bp, Artificial
  Probe
aatgagattcaggagtaaatgccat

SEQ ID NO: 54411 - DNA, 25 bp, Artificial
  Probe
ccacacttcagaataggagataaag

SEQ ID NO: 54412 - DNA, 25 bp, Artificial
  Probe
gagattcaggagtaaatgccatcac

SEQ ID NO: 54413 - DNA, 25 bp, Artificial
  Probe
atgagattcaggagtaaatgccatc

SEQ ID NO: 54414 - DNA, 25 bp, Artificial
  Probe
tttggaatgtttgctaacctctctc

SEQ ID NO: 54415 - DNA, 25 bp, Artificial
  Probe
tagcaaagtatccagagatcaagtc

SEQ ID NO: 54416 - DNA, 25 bp, Artificial
  Probe
atctgatctggattgtagccatgat

SEQ ID NO: 54417 - DNA, 25 bp, Artificial
  Probe
attcctgtccacacttcagaatagg

SEQ ID NO: 54418 - DNA, 25 bp, Artificial
  Probe
ttagcaaagtatccagagatcaagt

SEQ ID NO: 54419 - DNA, 25 bp, Artificial
  Probe
gtttggaatgtttgctaacctctct

SEQ ID NO: 54420 - DNA, 25 bp, Artificial
  Probe
caaagtatccagagatcaagtcctt

SEQ ID NO: 54421 - DNA, 25 bp, Artificial
  Probe
gattcaggagtaaatgccatcacag

SEQ ID NO: 54422 - DNA, 25 bp, Artificial
  Probe
aatctgatctggattgtagccatga

SEQ ID NO: 54423 - DNA, 25 bp, Artificial
  Probe
cctttaagagataccacatggatca

SEQ ID NO: 54424 - DNA, 25 bp, Artificial
  Probe
tatccttcagcctctcttctatgcg

SEQ ID NO: 54425 - DNA, 25 bp, Artificial
  Probe
cttcagaataggagataaagtggag

SEQ ID NO: 54426 - DNA, 25 bp, Artificial
  Probe
cttagcaaagtatccagagatcaag

SEQ ID NO: 54427 - DNA, 25 bp, Artificial
  Probe
tatccatgagatttcccacaatttc

SEQ ID NO: 54428 - DNA, 25 bp, Artificial
  Probe
ctatccatgagatttcccacaattt

SEQ ID NO: 54429 - DNA, 25 bp, Artificial
  Probe
atttggactggaaatgggtcatatt

SEQ ID NO: 54430 - DNA, 25 bp, Artificial
  Probe
agattcaggagtaaatgccatcaca

SEQ ID NO: 54431 - DNA, 25 bp, Artificial
  Probe
tttggactggaaatgggtcatattt

SEQ ID NO: 54432 - DNA, 25 bp, Artificial
  Probe
tgatgaaacctgaccacaatctgat

SEQ ID NO: 54433 - DNA, 25 bp, Artificial
  Probe
aaagtatccagagatcaagtccttg

SEQ ID NO: 54434 - DNA, 25 bp, Artificial
  Probe
gctatccatgagatttcccacaatt

SEQ ID NO: 54435 - DNA, 25 bp, Artificial
  Probe
gatttggactggaaatgggtcatat

SEQ ID NO: 54436 - DNA, 25 bp, Artificial
  Probe
ttggaatgtttgctaacctctctct

SEQ ID NO: 54437 - DNA, 25 bp, Artificial
  Probe
tgagattcaggagtaaatgccatca

SEQ ID NO: 54438 - DNA, 25 bp, Artificial
  Probe
gacacgaaacatactcctactatgg

SEQ ID NO: 54439 - DNA, 25 bp, Artificial
  Probe
gcatttcatagccgaacattacatg

SEQ ID NO: 54440 - DNA, 25 bp, Artificial
  Probe
atccatgagatttcccacaatttcc

SEQ ID NO: 54441 - DNA, 25 bp, Artificial
  Probe
gatgaaacctgaccacaatctgatc

SEQ ID NO: 54442 - DNA, 25 bp, Artificial
  Probe
atttcctttaagagataccacatgg

SEQ ID NO: 54443 - DNA, 25 bp, Artificial
  Probe
cttgatgaaacctgaccacaatctg

SEQ ID NO: 54444 - DNA, 25 bp, Artificial
  Probe
tctacccattcccttaataaagttt

SEQ ID NO: 54445 - DNA, 25 bp, Artificial
  Probe
ttctacccattcccttaataaagtt

SEQ ID NO: 54446 - DNA, 25 bp, Artificial
  Probe
tttctacccattcccttaataaagt

SEQ ID NO: 54447 - DNA, 25 bp, Artificial
  Probe
ggtggacgtatgtattgttcactct

SEQ ID NO: 54448 - DNA, 25 bp, Artificial
  Probe
ccgttttctacccattcccttaata

SEQ ID NO: 54449 - DNA, 25 bp, Artificial
  Probe
ctgacatcttcctgagcctgtatcc

SEQ ID NO: 54450 - DNA, 25 bp, Artificial
  Probe
cgttttctacccattcccttaataa

SEQ ID NO: 54451 - DNA, 25 bp, Artificial
  Probe
gacatcttcctgagcctgtatccag

SEQ ID NO: 54452 - DNA, 25 bp, Artificial
  Probe
cccgttttctacccattcccttaat

SEQ ID NO: 54453 - DNA, 25 bp, Artificial
  Probe
tgacatcttcctgagcctgtatcca

SEQ ID NO: 54454 - DNA, 25 bp, Artificial
  Probe
gttttctacccattcccttaataaa

SEQ ID NO: 54455 - DNA, 25 bp, Artificial
  Probe
gggtggacgtatgtattgttcactc

SEQ ID NO: 54456 - DNA, 25 bp, Artificial
  Probe
ctacccattcccttaataaagtttt

SEQ ID NO: 54457 - DNA, 25 bp, Artificial
  Probe
ttttctacccattcccttaataaag

SEQ ID NO: 54458 - DNA, 25 bp, Artificial
  Probe
gctgacatcttcctgagcctgtatc

SEQ ID NO: 54459 - DNA, 25 bp, Artificial
  Probe
ccccgttttctacccattcccttaa

SEQ ID NO: 54460 - DNA, 25 bp, Artificial
  Probe
agctgacatcttcctgagcctgtat

SEQ ID NO: 54461 - DNA, 25 bp, Artificial
  Probe
caaggggtggacgtatgtattgttc

SEQ ID NO: 54462 - DNA, 25 bp, Artificial
  Probe
tatttattcaactcccaggggcgtc

SEQ ID NO: 54463 - DNA, 25 bp, Artificial
  Probe
aaggggtggacgtatgtattgttca

SEQ ID NO: 54464 - DNA, 25 bp, Artificial
  Probe
caagaagggagagtacaacgtccag

SEQ ID NO: 54465 - DNA, 25 bp, Artificial
  Probe
tccccgttttctacccattccctta

SEQ ID NO: 54466 - DNA, 25 bp, Artificial
  Probe
ggggtggacgtatgtattgttcact

SEQ ID NO: 54467 - DNA, 25 bp, Artificial
  Probe
aggggtggacgtatgtattgttcac

SEQ ID NO: 54468 - DNA, 25 bp, Artificial
  Probe
ttgcaagaagggagagtacaacgtc

SEQ ID NO: 54469 - DNA, 25 bp, Artificial
  Probe
acaaggggtggacgtatgtattgtt

SEQ ID NO: 54470 - DNA, 25 bp, Artificial
  Probe
cacaaggggtggacgtatgtattgt

SEQ ID NO: 54471 - DNA, 25 bp, Artificial
  Probe
tactgttggctacatggttacttac

SEQ ID NO: 54472 - DNA, 25 bp, Artificial
  Probe
gtactgttggctacatggttactta

SEQ ID NO: 54473 - DNA, 25 bp, Artificial
  Probe
atgaagataaacggaaagtcacact

SEQ ID NO: 54474 - DNA, 25 bp, Artificial
  Probe
tatgaagataaacggaaagtcacac

SEQ ID NO: 54475 - DNA, 25 bp, Artificial
  Probe
ggtactgttggctacatggttactt

SEQ ID NO: 54476 - DNA, 25 bp, Artificial
  Probe
atatgaagataaacggaaagtcaca

SEQ ID NO: 54477 - DNA, 25 bp, Artificial
  Probe
ttggtactgttggctacatggttac

SEQ ID NO: 54478 - DNA, 25 bp, Artificial
  Probe
gttggtactgttggctacatggtta

SEQ ID NO: 54479 - DNA, 25 bp, Artificial
  Probe
cctcaatgaatatgaagataaacgg

SEQ ID NO: 54480 - DNA, 25 bp, Artificial
  Probe
actgttggctacatggttacttacc

SEQ ID NO: 54481 - DNA, 25 bp, Artificial
  Probe
tgaatatgaagataaacggaaagtc

SEQ ID NO: 54482 - DNA, 25 bp, Artificial
  Probe
aatatgaagataaacggaaagtcac

SEQ ID NO: 54483 - DNA, 25 bp, Artificial
  Probe
acctcaatgaatatgaagataaacg

SEQ ID NO: 54484 - DNA, 25 bp, Artificial
  Probe
tggtactgttggctacatggttact

SEQ ID NO: 54485 - DNA, 25 bp, Artificial
  Probe
gaatatgaagataaacggaaagtca

SEQ ID NO: 54486 - DNA, 25 bp, Artificial
  Probe
ctcaatgaatatgaagataaacgga

SEQ ID NO: 54487 - DNA, 25 bp, Artificial
  Probe
atgaatatgaagataaacggaaagt

SEQ ID NO: 54488 - DNA, 25 bp, Artificial
  Probe
agataaacggaaagtcacacttgta

SEQ ID NO: 54489 - DNA, 25 bp, Artificial
  Probe
gataaacggaaagtcacacttgtaa

SEQ ID NO: 54490 - DNA, 25 bp, Artificial
  Probe
gaagataaacggaaagtcacacttg

SEQ ID NO: 54491 - DNA, 25 bp, Artificial
  Probe
tgaagataaacggaaagtcacactt

SEQ ID NO: 54492 - DNA, 25 bp, Artificial
  Probe
aacggaaagtcacacttgtaataaa

SEQ ID NO: 54493 - DNA, 25 bp, Artificial
  Probe
aaacggaaagtcacacttgtaataa

SEQ ID NO: 54494 - DNA, 25 bp, Artificial
  Probe
aagataaacggaaagtcacacttgt

SEQ ID NO: 54495 - DNA, 25 bp, Artificial
  Probe
ataaacggaaagtcacacttgtaat

SEQ ID NO: 54496 - DNA, 25 bp, Artificial
  Probe
tcaatgaatatgaagataaacggaa

SEQ ID NO: 54497 - DNA, 25 bp, Artificial
  Probe
taaacggaaagtcacacttgtaata

SEQ ID NO: 54498 - DNA, 25 bp, Artificial
  Probe
agttggtactgttggctacatggtt

SEQ ID NO: 54499 - DNA, 25 bp, Artificial
  Probe
caatgaatatgaagataaacggaaa

SEQ ID NO: 54500 - DNA, 25 bp, Artificial
  Probe
aatgaatatgaagataaacggaaag

SEQ ID NO: 54501 - DNA, 25 bp, Artificial
  Probe
gagttggtactgttggctacatggt

SEQ ID NO: 54502 - DNA, 25 bp, Artificial
  Probe
gacctcaatgaatatgaagataaac

SEQ ID NO: 54503 - DNA, 25 bp, Artificial
  Probe
gctacatggttacttaccaaggatc

SEQ ID NO: 54504 - DNA, 25 bp, Artificial
  Probe
gttggctacatggttacttaccaag

SEQ ID NO: 54505 - DNA, 25 bp, Artificial
  Probe
ggctacatggttacttaccaaggat

SEQ ID NO: 54506 - DNA, 25 bp, Artificial
  Probe
tgttggctacatggttacttaccaa

SEQ ID NO: 54507 - DNA, 25 bp, Artificial
  Probe
acggaaagtcacacttgtaataaaa

SEQ ID NO: 54508 - DNA, 25 bp, Artificial
  Probe
ttggctacatggttacttaccaagg

SEQ ID NO: 54509 - DNA, 25 bp, Artificial
  Probe
ctgttggctacatggttacttacca

SEQ ID NO: 54510 - DNA, 25 bp, Artificial
  Probe
tggctacatggttacttaccaagga

SEQ ID NO: 54511 - DNA, 25 bp, Artificial
  Probe
ctacatggttacttaccaaggatcc

SEQ ID NO: 54512 - DNA, 25 bp, Artificial
  Probe
tggttacttaccaaggatccaagta

SEQ ID NO: 54513 - DNA, 25 bp, Artificial
  Probe
tacatggttacttaccaaggatcca

SEQ ID NO: 54514 - DNA, 25 bp, Artificial
  Probe
catggttacttaccaaggatccaag

SEQ ID NO: 54515 - DNA, 25 bp, Artificial
  Probe
atggttacttaccaaggatccaagt

SEQ ID NO: 54516 - DNA, 25 bp, Artificial
  Probe
acatggttacttaccaaggatccaa

SEQ ID NO: 54517 - DNA, 25 bp, Artificial
  Probe
cttcttacatcaaacaacagcctct

SEQ ID NO: 54518 - DNA, 25 bp, Artificial
  Probe
ttcttacatcaaacaacagcctctg

SEQ ID NO: 54519 - DNA, 25 bp, Artificial
  Probe
tcttacatcaaacaacagcctctgg

SEQ ID NO: 54520 - DNA, 25 bp, Artificial
  Probe
ttacatcaaacaacagcctctggtc

SEQ ID NO: 54521 - DNA, 25 bp, Artificial
  Probe
cttacatcaaacaacagcctctggt

SEQ ID NO: 54522 - DNA, 25 bp, Artificial
  Probe
gcttcttacatcaaacaacagcctc

SEQ ID NO: 54523 - DNA, 25 bp, Artificial
  Probe
tacatcaaacaacagcctctggtcc

SEQ ID NO: 54524 - DNA, 25 bp, Artificial
  Probe
cggggcttcttacatcaaacaacag

SEQ ID NO: 54525 - DNA, 25 bp, Artificial
  Probe
ggggcttcttacatcaaacaacagc

SEQ ID NO: 54526 - DNA, 25 bp, Artificial
  Probe
ctttatgctacttgaccagaacaac

SEQ ID NO: 54527 - DNA, 25 bp, Artificial
  Probe
cacctttatgctacttgaccagaac

SEQ ID NO: 54528 - DNA, 25 bp, Artificial
  Probe
cctttatgctacttgaccagaacaa

SEQ ID NO: 54529 - DNA, 25 bp, Artificial
  Probe
ttatgctacttgaccagaacaaccg

SEQ ID NO: 54530 - DNA, 25 bp, Artificial
  Probe
tttatgctacttgaccagaacaacc

SEQ ID NO: 54531 - DNA, 25 bp, Artificial
  Probe
acctttatgctacttgaccagaaca

SEQ ID NO: 54532 - DNA, 25 bp, Artificial
  Probe
tcacctttatgctacttgaccagaa

SEQ ID NO: 54533 - DNA, 25 bp, Artificial
  Probe
ctacactgccaagtacggttacaag

SEQ ID NO: 54534 - DNA, 25 bp, Artificial
  Probe
tatgctacttgaccagaacaaccgt

SEQ ID NO: 54535 - DNA, 25 bp, Artificial
  Probe
tctacactgccaagtacggttacaa

SEQ ID NO: 54536 - DNA, 25 bp, Artificial
  Probe
ttctacactgccaagtacggttaca

SEQ ID NO: 54537 - DNA, 25 bp, Artificial
  Probe
ctttctacactgccaagtacggtta

SEQ ID NO: 54538 - DNA, 25 bp, Artificial
  Probe
tacactgccaagtacggttacaagt

SEQ ID NO: 54539 - DNA, 25 bp, Artificial
  Probe
tttctacactgccaagtacggttac

SEQ ID NO: 54540 - DNA, 25 bp, Artificial
  Probe
gtcctttgatggtactttcctgtgg

SEQ ID NO: 54541 - DNA, 25 bp, Artificial
  Probe
gtggaagatcaccaatgtcaccaag

SEQ ID NO: 54542 - DNA, 25 bp, Artificial
  Probe
cactgccaagtacggttacaagttg

SEQ ID NO: 54543 - DNA, 25 bp, Artificial
  Probe
ctcttctctccagctttctacactg

SEQ ID NO: 54544 - DNA, 25 bp, Artificial
  Probe
cgtcctttgatggtactttcctgtg

SEQ ID NO: 54545 - DNA, 25 bp, Artificial
  Probe
caagtacggttacaagttgtgcctg

SEQ ID NO: 54546 - DNA, 25 bp, Artificial
  Probe
ctgccaagtacggttacaagttgtg

SEQ ID NO: 54547 - DNA, 25 bp, Artificial
  Probe
cctcttctctccagctttctacact

SEQ ID NO: 54548 - DNA, 25 bp, Artificial
  Probe
acactgccaagtacggttacaagtt

SEQ ID NO: 54549 - DNA, 25 bp, Artificial
  Probe
tcctttgatggtactttcctgtgga

SEQ ID NO: 54550 - DNA, 25 bp, Artificial
  Probe
actgccaagtacggttacaagttgt

SEQ ID NO: 54551 - DNA, 25 bp, Artificial
  Probe
tgtggaagatcaccaatgtcaccaa

SEQ ID NO: 54552 - DNA, 25 bp, Artificial
  Probe
tcctgtggaagatcaccaatgtcac

SEQ ID NO: 54553 - DNA, 25 bp, Artificial
  Probe
ctgtggaagatcaccaatgtcacca

SEQ ID NO: 54554 - DNA, 25 bp, Artificial
  Probe
ctttgatggtactttcctgtggaag

SEQ ID NO: 54555 - DNA, 25 bp, Artificial
  Probe
tactttcctgtggaagatcaccaat

SEQ ID NO: 54556 - DNA, 25 bp, Artificial
  Probe
ttgatggtactttcctgtggaagat

SEQ ID NO: 54557 - DNA, 25 bp, Artificial
  Probe
tttgatggtactttcctgtggaaga

SEQ ID NO: 54558 - DNA, 25 bp, Artificial
  Probe
gatggtactttcctgtggaagatca

SEQ ID NO: 54559 - DNA, 25 bp, Artificial
  Probe
tgatggtactttcctgtggaagatc

SEQ ID NO: 54560 - DNA, 25 bp, Artificial
  Probe
atggtactttcctgtggaagatcac

SEQ ID NO: 54561 - DNA, 25 bp, Artificial
  Probe
tcttctctccagctttctacactgc

SEQ ID NO: 54562 - DNA, 25 bp, Artificial
  Probe
gtactttcctgtggaagatcaccaa

SEQ ID NO: 54563 - DNA, 25 bp, Artificial
  Probe
gcctcttctctccagctttctacac

SEQ ID NO: 54564 - DNA, 25 bp, Artificial
  Probe
gcgtcctttgatggtactttcctgt

SEQ ID NO: 54565 - DNA, 25 bp, Artificial
  Probe
gtcacctttatgctacttgaccaga

SEQ ID NO: 54566 - DNA, 25 bp, Artificial
  Probe
ttcctgtggaagatcaccaatgtca

SEQ ID NO: 54567 - DNA, 25 bp, Artificial
  Probe
cctttgatggtactttcctgtggaa

SEQ ID NO: 54568 - DNA, 25 bp, Artificial
  Probe
ctccagctttctacactgccaagta

SEQ ID NO: 54569 - DNA, 25 bp, Artificial
  Probe
gaacaaggtcacctttatgctactt

SEQ ID NO: 54570 - DNA, 25 bp, Artificial
  Probe
aacaaggtcacctttatgctacttg

SEQ ID NO: 54571 - DNA, 25 bp, Artificial
  Probe
tgaatccagagtatcacagagatgc

SEQ ID NO: 54572 - DNA, 25 bp, Artificial
  Probe
atccagagtatcacagagatgcaat

SEQ ID NO: 54573 - DNA, 25 bp, Artificial
  Probe
aatccagagtatcacagagatgcaa

SEQ ID NO: 54574 - DNA, 25 bp, Artificial
  Probe
agagtatcacagagatgcaatgtac

SEQ ID NO: 54575 - DNA, 25 bp, Artificial
  Probe
cagagtatcacagagatgcaatgta

SEQ ID NO: 54576 - DNA, 25 bp, Artificial
  Probe
gaatccagagtatcacagagatgca

SEQ ID NO: 54577 - DNA, 25 bp, Artificial
  Probe
tccagagtatcacagagatgcaatg

SEQ ID NO: 54578 - DNA, 25 bp, Artificial
  Probe
tatcacagagatgcaatgtactcga

SEQ ID NO: 54579 - DNA, 25 bp, Artificial
  Probe
gtatcacagagatgcaatgtactcg

SEQ ID NO: 54580 - DNA, 25 bp, Artificial
  Probe
gagtgtcagtacgtctatctgcatc

SEQ ID NO: 54581 - DNA, 25 bp, Artificial
  Probe
agtatcacagagatgcaatgtactc

SEQ ID NO: 54582 - DNA, 25 bp, Artificial
  Probe
gagtatcacagagatgcaatgtact

SEQ ID NO: 54583 - DNA, 25 bp, Artificial
  Probe
ctatctgcatcagtgtgtgagagac

SEQ ID NO: 54584 - DNA, 25 bp, Artificial
  Probe
tctatctgcatcagtgtgtgagaga

SEQ ID NO: 54585 - DNA, 25 bp, Artificial
  Probe
gtctatctgcatcagtgtgtgagag

SEQ ID NO: 54586 - DNA, 25 bp, Artificial
  Probe
gtcagtacgtctatctgcatcagtg

SEQ ID NO: 54587 - DNA, 25 bp, Artificial
  Probe
gtgtcagtacgtctatctgcatcag

SEQ ID NO: 54588 - DNA, 25 bp, Artificial
  Probe
gacattgagaattcacctggagatc

SEQ ID NO: 54589 - DNA, 25 bp, Artificial
  Probe
cagtacgtctatctgcatcagtgtg

SEQ ID NO: 54590 - DNA, 25 bp, Artificial
  Probe
tcagtacgtctatctgcatcagtgt

SEQ ID NO: 54591 - DNA, 25 bp, Artificial
  Probe
tgtcagtacgtctatctgcatcagt

SEQ ID NO: 54592 - DNA, 25 bp, Artificial
  Probe
agtgtcagtacgtctatctgcatca

SEQ ID NO: 54593 - DNA, 25 bp, Artificial
  Probe
ctcaaaggactccgtggacatttat

SEQ ID NO: 54594 - DNA, 25 bp, Artificial
  Probe
agacattgagaattcacctggagat

SEQ ID NO: 54595 - DNA, 25 bp, Artificial
  Probe
ccagagtatcacagagatgcaatgt

SEQ ID NO: 54596 - DNA, 25 bp, Artificial
  Probe
gtacgtctatctgcatcagtgtgtg

SEQ ID NO: 54597 - DNA, 25 bp, Artificial
  Probe
tcaaaggactccgtggacatttatg

SEQ ID NO: 54598 - DNA, 25 bp, Artificial
  Probe
gagaacggtcagggactatatcaac

SEQ ID NO: 54599 - DNA, 25 bp, Artificial
  Probe
tacgtctatctgcatcagtgtgtga

SEQ ID NO: 54600 - DNA, 25 bp, Artificial
  Probe
agtacgtctatctgcatcagtgtgt

SEQ ID NO: 54601 - DNA, 25 bp, Artificial
  Probe
gagacattgagaattcacctggaga

SEQ ID NO: 54602 - DNA, 25 bp, Artificial
  Probe
tgagaacggtcagggactatatcaa

SEQ ID NO: 54603 - DNA, 25 bp, Artificial
  Probe
acattgagaattcacctggagatcc

SEQ ID NO: 54604 - DNA, 25 bp, Artificial
  Probe
ttgtgagaacggtcagggactatat

SEQ ID NO: 54605 - DNA, 25 bp, Artificial
  Probe
tttgtgagaacggtcagggactata

SEQ ID NO: 54606 - DNA, 25 bp, Artificial
  Probe
tccgatctatgaaaatgtgaatcca

SEQ ID NO: 54607 - DNA, 25 bp, Artificial
  Probe
cgagtgtcagtacgtctatctgcat

SEQ ID NO: 54608 - DNA, 25 bp, Artificial
  Probe
ccgatctatgaaaatgtgaatccag

SEQ ID NO: 54609 - DNA, 25 bp, Artificial
  Probe
gtgagaacggtcagggactatatca

SEQ ID NO: 54610 - DNA, 25 bp, Artificial
  Probe
tgtgagaacggtcagggactatatc

SEQ ID NO: 54611 - DNA, 25 bp, Artificial
  Probe
gtgaatccagagtatcacagagatg

SEQ ID NO: 54612 - DNA, 25 bp, Artificial
  Probe
caaaggactccgtggacatttatgg

SEQ ID NO: 54613 - DNA, 25 bp, Artificial
  Probe
actcaaaggactccgtggacattta

SEQ ID NO: 54614 - DNA, 25 bp, Artificial
  Probe
ttccgatctatgaaaatgtgaatcc

SEQ ID NO: 54615 - DNA, 25 bp, Artificial
  Probe
cgagacattgagaattcacctggag

SEQ ID NO: 54616 - DNA, 25 bp, Artificial
  Probe
atgtaaccttggtactcctgttgtt

SEQ ID NO: 54617 - DNA, 25 bp, Artificial
  Probe
ctaggatgatctctactgccaggta

SEQ ID NO: 54618 - DNA, 25 bp, Artificial
  Probe
ctccacccattctcttcaacttaaa

SEQ ID NO: 54619 - DNA, 25 bp, Artificial
  Probe
ttctaggatgatctctactgccagg

SEQ ID NO: 54620 - DNA, 25 bp, Artificial
  Probe
catgtaaccttggtactcctgttgt

SEQ ID NO: 54621 - DNA, 25 bp, Artificial
  Probe
cactcttgacttagctctagccatt

SEQ ID NO: 54622 - DNA, 25 bp, Artificial
  Probe
atttctaggatgatctctactgcca

SEQ ID NO: 54623 - DNA, 25 bp, Artificial
  Probe
gatttctaggatgatctctactgcc

SEQ ID NO: 54624 - DNA, 25 bp, Artificial
  Probe
aataactgactcagaaggaagccaa

SEQ ID NO: 54625 - DNA, 25 bp, Artificial
  Probe
tgatttctaggatgatctctactgc

SEQ ID NO: 54626 - DNA, 25 bp, Artificial
  Probe
tttctaggatgatctctactgccag

SEQ ID NO: 54627 - DNA, 25 bp, Artificial
  Probe
gctctgatttctaggatgatctcta

SEQ ID NO: 54628 - DNA, 25 bp, Artificial
  Probe
gcaaattgttcttgtcaccaaatgt

SEQ ID NO: 54629 - DNA, 25 bp, Artificial
  Probe
ggctctgatttctaggatgatctct

SEQ ID NO: 54630 - DNA, 25 bp, Artificial
  Probe
aggctctgatttctaggatgatctc

SEQ ID NO: 54631 - DNA, 25 bp, Artificial
  Probe
tgtgttggaacaattcataatgtaa

SEQ ID NO: 54632 - DNA, 25 bp, Artificial
  Probe
caaattgttcttgtcaccaaatgtg

SEQ ID NO: 54633 - DNA, 25 bp, Artificial
  Probe
aattgttcttgtcaccaaatgtgtt

SEQ ID NO: 54634 - DNA, 25 bp, Artificial
  Probe
aaattgttcttgtcaccaaatgtgt

SEQ ID NO: 54635 - DNA, 25 bp, Artificial
  Probe
attgttcttgtcaccaaatgtgttc

SEQ ID NO: 54636 - DNA, 25 bp, Artificial
  Probe
ataactgactcagaaggaagccaac

SEQ ID NO: 54637 - DNA, 25 bp, Artificial
  Probe
taaccttggtactcctgttgtttct

SEQ ID NO: 54638 - DNA, 25 bp, Artificial
  Probe
gtaaccttggtactcctgttgtttc

SEQ ID NO: 54639 - DNA, 25 bp, Artificial
  Probe
ggtactcctgttgtttcttgtgaag

SEQ ID NO: 54640 - DNA, 25 bp, Artificial
  Probe
cttggtactcctgttgtttcttgtg

SEQ ID NO: 54641 - DNA, 25 bp, Artificial
  Probe
tctaggatgatctctactgccaggt

SEQ ID NO: 54642 - DNA, 25 bp, Artificial
  Probe
tcactcttgacttagctctagccat

SEQ ID NO: 54643 - DNA, 25 bp, Artificial
  Probe
taggatgatctctactgccaggtag

SEQ ID NO: 54644 - DNA, 25 bp, Artificial
  Probe
ttggtactcctgttgtttcttgtga

SEQ ID NO: 54645 - DNA, 25 bp, Artificial
  Probe
ctcttgacttagctctagccatttg

SEQ ID NO: 54646 - DNA, 25 bp, Artificial
  Probe
gtgtcttgtgttggaacaattcata

SEQ ID NO: 54647 - DNA, 25 bp, Artificial
  Probe
tgtaaccttggtactcctgttgttt

SEQ ID NO: 54648 - DNA, 25 bp, Artificial
  Probe
ctgatttctaggatgatctctactg

SEQ ID NO: 54649 - DNA, 25 bp, Artificial
  Probe
tctgatttctaggatgatctctact

SEQ ID NO: 54650 - DNA, 25 bp, Artificial
  Probe
gctccacccattctcttcaacttaa

SEQ ID NO: 54651 - DNA, 25 bp, Artificial
  Probe
actcttgacttagctctagccattt

SEQ ID NO: 54652 - DNA, 25 bp, Artificial
  Probe
caggctctgatttctaggatgatct

SEQ ID NO: 54653 - DNA, 25 bp, Artificial
  Probe
ttgttcttgtcaccaaatgtgttca

SEQ ID NO: 54654 - DNA, 25 bp, Artificial
  Probe
tgtcttgtgttggaacaattcataa

SEQ ID NO: 54655 - DNA, 25 bp, Artificial
  Probe
tggtactcctgttgtttcttgtgaa

SEQ ID NO: 54656 - DNA, 25 bp, Artificial
  Probe
aaccttggtactcctgttgtttctt

SEQ ID NO: 54657 - DNA, 25 bp, Artificial
  Probe
tgtgaagaatctattctgttgtctt

SEQ ID NO: 54658 - DNA, 25 bp, Artificial
  Probe
ttgtgaagaatctattctgttgtct

SEQ ID NO: 54659 - DNA, 25 bp, Artificial
  Probe
tcttgtgaagaatctattctgttgt

SEQ ID NO: 54660 - DNA, 25 bp, Artificial
  Probe
ctctgatttctaggatgatctctac

SEQ ID NO: 54661 - DNA, 25 bp, Artificial
  Probe
tgaccttgatattcagaacagacat

SEQ ID NO: 54662 - DNA, 25 bp, Artificial
  Probe
accttgatattcagaacagacatct

SEQ ID NO: 54663 - DNA, 25 bp, Artificial
  Probe
gaccttgatattcagaacagacatc

SEQ ID NO: 54664 - DNA, 25 bp, Artificial
  Probe
tgctgtgtctttctctgtctatatt

SEQ ID NO: 54665 - DNA, 25 bp, Artificial
  Probe
atgctgtgtctttctctgtctatat

SEQ ID NO: 54666 - DNA, 25 bp, Artificial
  Probe
tttctctgtctatatttgtggtggc

SEQ ID NO: 54667 - DNA, 25 bp, Artificial
  Probe
ctttctctgtctatatttgtggtgg

SEQ ID NO: 54668 - DNA, 25 bp, Artificial
  Probe
gctgtgtctttctctgtctatattt

SEQ ID NO: 54669 - DNA, 25 bp, Artificial
  Probe
tctttctctgtctatatttgtggtg

SEQ ID NO: 54670 - DNA, 25 bp, Artificial
  Probe
gtctttctctgtctatatttgtggt

SEQ ID NO: 54671 - DNA, 25 bp, Artificial
  Probe
tgtctttctctgtctatatttgtgg

SEQ ID NO: 54672 - DNA, 25 bp, Artificial
  Probe
catgctgtgtctttctctgtctata

SEQ ID NO: 54673 - DNA, 25 bp, Artificial
  Probe
gtggctgtctctgaccttgatattc

SEQ ID NO: 54674 - DNA, 25 bp, Artificial
  Probe
tgtgtctttctctgtctatatttgt

SEQ ID NO: 54675 - DNA, 25 bp, Artificial
  Probe
gtgtctttctctgtctatatttgtg

SEQ ID NO: 54676 - DNA, 25 bp, Artificial
  Probe
tggctgtctctgaccttgatattca

SEQ ID NO: 54677 - DNA, 25 bp, Artificial
  Probe
ctgtgtctttctctgtctatatttg

SEQ ID NO: 54678 - DNA, 25 bp, Artificial
  Probe
gtgtatagatgtatttaccactggg

SEQ ID NO: 54679 - DNA, 25 bp, Artificial
  Probe
cccatgtgtatagatgtatttacca

SEQ ID NO: 54680 - DNA, 25 bp, Artificial
  Probe
ccatgctgtgtctttctctgtctat

SEQ ID NO: 54681 - DNA, 25 bp, Artificial
  Probe
tcccatgtgtatagatgtatttacc

SEQ ID NO: 54682 - DNA, 25 bp, Artificial
  Probe
aaagaagggagatcacagacacatg

SEQ ID NO: 54683 - DNA, 25 bp, Artificial
  Probe
tgtgtatagatgtatttaccactgg

SEQ ID NO: 54684 - DNA, 25 bp, Artificial
  Probe
ctgaccttgatattcagaacagaca

SEQ ID NO: 54685 - DNA, 25 bp, Artificial
  Probe
gcctttgaaatgcagtaatataaca

SEQ ID NO: 54686 - DNA, 25 bp, Artificial
  Probe
ttttggtttgttttgttttctgtcc

SEQ ID NO: 54687 - DNA, 25 bp, Artificial
  Probe
ccttgatattcagaacagacatctg

SEQ ID NO: 54688 - DNA, 25 bp, Artificial
  Probe
tgttttggtttgttttgttttctgt

SEQ ID NO: 54689 - DNA, 25 bp, Artificial
  Probe
gttttggtttgttttgttttctgtc

SEQ ID NO: 54690 - DNA, 25 bp, Artificial
  Probe
tttggtttgttttgttttctgtccc

SEQ ID NO: 54691 - DNA, 25 bp, Artificial
  Probe
catgaataaatgaccctatctttgt

SEQ ID NO: 54692 - DNA, 25 bp, Artificial
  Probe
acatgaataaatgaccctatctttg

SEQ ID NO: 54693 - DNA, 25 bp, Artificial
  Probe
tatagatgtatttaccactggggct

SEQ ID NO: 54694 - DNA, 25 bp, Artificial
  Probe
gtatagatgtatttaccactggggc

SEQ ID NO: 54695 - DNA, 25 bp, Artificial
  Probe
tgtatagatgtatttaccactgggg

SEQ ID NO: 54696 - DNA, 25 bp, Artificial
  Probe
ttgttttggtttgttttgttttctg

SEQ ID NO: 54697 - DNA, 25 bp, Artificial
  Probe
tgtttgttttggtttgttttgtttt

SEQ ID NO: 54698 - DNA, 25 bp, Artificial
  Probe
ttgtttgttttggtttgttttgttt

SEQ ID NO: 54699 - DNA, 25 bp, Artificial
  Probe
tttgtttgttttggtttgttttgtt

SEQ ID NO: 54700 - DNA, 25 bp, Artificial
  Probe
ttttgtttgttttggtttgttttgt

SEQ ID NO: 54701 - DNA, 25 bp, Artificial
  Probe
ttaaaagaagggagatcacagacac

SEQ ID NO: 54702 - DNA, 25 bp, Artificial
  Probe
cttaaaagaagggagatcacagaca

SEQ ID NO: 54703 - DNA, 25 bp, Artificial
  Probe
ggtggctgtctctgaccttgatatt

SEQ ID NO: 54704 - DNA, 25 bp, Artificial
  Probe
gtttgttttggtttgttttgttttc

SEQ ID NO: 54705 - DNA, 25 bp, Artificial
  Probe
taaaagaagggagatcacagacaca

SEQ ID NO: 54706 - DNA, 25 bp, Artificial
  Probe
gtgtaataaagaccgaccatttcaa

SEQ ID NO: 54707 - DNA, 25 bp, Artificial
  Probe
tgtaataaagaccgaccatttcaaa

SEQ ID NO: 54708 - DNA, 25 bp, Artificial
  Probe
tgactgtaaacatagatagtgcttt

SEQ ID NO: 54709 - DNA, 25 bp, Artificial
  Probe
atgactgtaaacatagatagtgctt

SEQ ID NO: 54710 - DNA, 25 bp, Artificial
  Probe
ggtgtaataaagaccgaccatttca

SEQ ID NO: 54711 - DNA, 25 bp, Artificial
  Probe
tctgatggtgtaataaagaccgacc

SEQ ID NO: 54712 - DNA, 25 bp, Artificial
  Probe
tatgactgtaaacatagatagtgct

SEQ ID NO: 54713 - DNA, 25 bp, Artificial
  Probe
gtaataaagaccgaccatttcaaaa

SEQ ID NO: 54714 - DNA, 25 bp, Artificial
  Probe
gactgtaaacatagatagtgcttta

SEQ ID NO: 54715 - DNA, 25 bp, Artificial
  Probe
ttatgactgtaaacatagatagtgc

SEQ ID NO: 54716 - DNA, 25 bp, Artificial
  Probe
actgtaaacatagatagtgctttat

SEQ ID NO: 54717 - DNA, 25 bp, Artificial
  Probe
ctccatcccttgttcatgagcttag

SEQ ID NO: 54718 - DNA, 25 bp, Artificial
  Probe
ctgtaaacatagatagtgctttatt

SEQ ID NO: 54719 - DNA, 25 bp, Artificial
  Probe
tctccatcccttgttcatgagctta

SEQ ID NO: 54720 - DNA, 25 bp, Artificial
  Probe
tggtgtaataaagaccgaccatttc

SEQ ID NO: 54721 - DNA, 25 bp, Artificial
  Probe
gtgctttattttgttactaagaaga

SEQ ID NO: 54722 - DNA, 25 bp, Artificial
  Probe
agtgctttattttgttactaagaag

SEQ ID NO: 54723 - DNA, 25 bp, Artificial
  Probe
ctgatggtgtaataaagaccgacca

SEQ ID NO: 54724 - DNA, 25 bp, Artificial
  Probe
tccatcccttgttcatgagcttagg

SEQ ID NO: 54725 - DNA, 25 bp, Artificial
  Probe
aaacatagatagtgctttattttgt

SEQ ID NO: 54726 - DNA, 25 bp, Artificial
  Probe
cttgttcatgagcttagggtgggtt

SEQ ID NO: 54727 - DNA, 25 bp, Artificial
  Probe
tgctttattttgttactaagaagat

SEQ ID NO: 54728 - DNA, 25 bp, Artificial
  Probe
gtctccatcccttgttcatgagctt

SEQ ID NO: 54729 - DNA, 25 bp, Artificial
  Probe
ctggtctccatcccttgttcatgag

SEQ ID NO: 54730 - DNA, 25 bp, Artificial
  Probe
aacatagatagtgctttattttgtt

SEQ ID NO: 54731 - DNA, 25 bp, Artificial
  Probe
catggggctcttttgtcattgacag

SEQ ID NO: 54732 - DNA, 25 bp, Artificial
  Probe
gagataaccagtgtcaccaagaatt

SEQ ID NO: 54733 - DNA, 25 bp, Artificial
  Probe
aatcctagcacttgagagttgagaa

SEQ ID NO: 54734 - DNA, 25 bp, Artificial
  Probe
ggagataaccagtgtcaccaagaat

SEQ ID NO: 54735 - DNA, 25 bp, Artificial
  Probe
atcctagcacttgagagttgagaac

SEQ ID NO: 54736 - DNA, 25 bp, Artificial
  Probe
caatcctagcacttgagagttgaga

SEQ ID NO: 54737 - DNA, 25 bp, Artificial
  Probe
gataaccagtgtcaccaagaatttc

SEQ ID NO: 54738 - DNA, 25 bp, Artificial
  Probe
agataaccagtgtcaccaagaattt

SEQ ID NO: 54739 - DNA, 25 bp, Artificial
  Probe
cagtgtcaccaagaatttccattat

SEQ ID NO: 54740 - DNA, 25 bp, Artificial
  Probe
ccagtgtcaccaagaatttccatta

SEQ ID NO: 54741 - DNA, 25 bp, Artificial
  Probe
ataaccagtgtcaccaagaatttcc

SEQ ID NO: 54742 - DNA, 25 bp, Artificial
  Probe
actgattgtaaagttcgccactaaa

SEQ ID NO: 54743 - DNA, 25 bp, Artificial
  Probe
gccaaataaaccatttcttgtctca

SEQ ID NO: 54744 - DNA, 25 bp, Artificial
  Probe
gactgattgtaaagttcgccactaa

SEQ ID NO: 54745 - DNA, 25 bp, Artificial
  Probe
agtgtcaccaagaatttccattata

SEQ ID NO: 54746 - DNA, 25 bp, Artificial
  Probe
ccaaataaaccatttcttgtctcag

SEQ ID NO: 54747 - DNA, 25 bp, Artificial
  Probe
tctaatctcagaagtcccagtagac

SEQ ID NO: 54748 - DNA, 25 bp, Artificial
  Probe
taaccagtgtcaccaagaatttcca

SEQ ID NO: 54749 - DNA, 25 bp, Artificial
  Probe
cctgagctacaaatgattcctttaa

SEQ ID NO: 54750 - DNA, 25 bp, Artificial
  Probe
gcctgagctacaaatgattccttta

SEQ ID NO: 54751 - DNA, 25 bp, Artificial
  Probe
gcaatcctagcacttgagagttgag

SEQ ID NO: 54752 - DNA, 25 bp, Artificial
  Probe
caaataaaccatttcttgtctcagt

SEQ ID NO: 54753 - DNA, 25 bp, Artificial
  Probe
gtgtcaccaagaatttccattatat

SEQ ID NO: 54754 - DNA, 25 bp, Artificial
  Probe
accagtgtcaccaagaatttccatt

SEQ ID NO: 54755 - DNA, 25 bp, Artificial
  Probe
aaccagtgtcaccaagaatttccat

SEQ ID NO: 54756 - DNA, 25 bp, Artificial
  Probe
tattaaggacccttctaatctcaga

SEQ ID NO: 54757 - DNA, 25 bp, Artificial
  Probe
tggagataaccagtgtcaccaagaa

SEQ ID NO: 54758 - DNA, 25 bp, Artificial
  Probe
caagtgcctttacctggagataacc

SEQ ID NO: 54759 - DNA, 25 bp, Artificial
  Probe
ttctaatctcagaagtcccagtaga

SEQ ID NO: 54760 - DNA, 25 bp, Artificial
  Probe
ggactgattgtaaagttcgccacta

SEQ ID NO: 54761 - DNA, 25 bp, Artificial
  Probe
gagctacaaatgattcctttaaaca

SEQ ID NO: 54762 - DNA, 25 bp, Artificial
  Probe
tgagctacaaatgattcctttaaac

SEQ ID NO: 54763 - DNA, 25 bp, Artificial
  Probe
aaataaaccatttcttgtctcagtt

SEQ ID NO: 54764 - DNA, 25 bp, Artificial
  Probe
tgtcaccaagaatttccattatatt

SEQ ID NO: 54765 - DNA, 25 bp, Artificial
  Probe
ctgagctacaaatgattcctttaaa

SEQ ID NO: 54766 - DNA, 25 bp, Artificial
  Probe
atgaggactgattgtaaagttcgcc

SEQ ID NO: 54767 - DNA, 25 bp, Artificial
  Probe
tagtcatgaatgaggtggtgtgatt

SEQ ID NO: 54768 - DNA, 25 bp, Artificial
  Probe
cctagcacttgagagttgagaactg

SEQ ID NO: 54769 - DNA, 25 bp, Artificial
  Probe
tcctagcacttgagagttgagaact

SEQ ID NO: 54770 - DNA, 25 bp, Artificial
  Probe
ccatttcttgtctcagttttccaaa

SEQ ID NO: 54771 - DNA, 25 bp, Artificial
  Probe
agctacaaatgattcctttaaacaa

SEQ ID NO: 54772 - DNA, 25 bp, Artificial
  Probe
aaccatttcttgtctcagttttcca

SEQ ID NO: 54773 - DNA, 25 bp, Artificial
  Probe
ctgattgtaaagttcgccactaaaa

SEQ ID NO: 54774 - DNA, 25 bp, Artificial
  Probe
attgtaaagttcgccactaaaatcg

SEQ ID NO: 54775 - DNA, 25 bp, Artificial
  Probe
atattaaggacccttctaatctcag

SEQ ID NO: 54776 - DNA, 25 bp, Artificial
  Probe
tgattgtaaagttcgccactaaaat

SEQ ID NO: 54777 - DNA, 25 bp, Artificial
  Probe
tccttaccttagtgattgaatgagt

SEQ ID NO: 54778 - DNA, 25 bp, Artificial
  Probe
ccttaccttagtgattgaatgagtt

SEQ ID NO: 54779 - DNA, 25 bp, Artificial
  Probe
tatgagtcggattacaattcactgg

SEQ ID NO: 54780 - DNA, 25 bp, Artificial
  Probe
ttccttaccttagtgattgaatgag

SEQ ID NO: 54781 - DNA, 25 bp, Artificial
  Probe
atatgagtcggattacaattcactg

SEQ ID NO: 54782 - DNA, 25 bp, Artificial
  Probe
gtatcagaaggttatgctggaagag

SEQ ID NO: 54783 - DNA, 25 bp, Artificial
  Probe
cctatatgagtcggattacaattca

SEQ ID NO: 54784 - DNA, 25 bp, Artificial
  Probe
ggtatcagaaggttatgctggaaga

SEQ ID NO: 54785 - DNA, 25 bp, Artificial
  Probe
atgtatgtaacctcccagaacctta

SEQ ID NO: 54786 - DNA, 25 bp, Artificial
  Probe
gccctatatgagtcggattacaatt

SEQ ID NO: 54787 - DNA, 25 bp, Artificial
  Probe
ttagtgattgaatgagtttccctgt

SEQ ID NO: 54788 - DNA, 25 bp, Artificial
  Probe
ccctttccttaccttagtgattgaa

SEQ ID NO: 54789 - DNA, 25 bp, Artificial
  Probe
cttagtgattgaatgagtttccctg

SEQ ID NO: 54790 - DNA, 25 bp, Artificial
  Probe
ccttagtgattgaatgagtttccct

SEQ ID NO: 54791 - DNA, 25 bp, Artificial
  Probe
accttagtgattgaatgagtttccc

SEQ ID NO: 54792 - DNA, 25 bp, Artificial
  Probe
tatatgagtcggattacaattcact

SEQ ID NO: 54793 - DNA, 25 bp, Artificial
  Probe
ccctatatgagtcggattacaattc

SEQ ID NO: 54794 - DNA, 25 bp, Artificial
  Probe
ctatatgagtcggattacaattcac

SEQ ID NO: 54795 - DNA, 25 bp, Artificial
  Probe
taccttagtgattgaatgagtttcc

SEQ ID NO: 54796 - DNA, 25 bp, Artificial
  Probe
cctttccttaccttagtgattgaat

SEQ ID NO: 54797 - DNA, 25 bp, Artificial
  Probe
atgagtcggattacaattcactggc

SEQ ID NO: 54798 - DNA, 25 bp, Artificial
  Probe
cgccctatatgagtcggattacaat

SEQ ID NO: 54799 - DNA, 25 bp, Artificial
  Probe
cctgcctgtcttgattgtcttaaac

SEQ ID NO: 54800 - DNA, 25 bp, Artificial
  Probe
tttccttaccttagtgattgaatga

SEQ ID NO: 54801 - DNA, 25 bp, Artificial
  Probe
ctttccttaccttagtgattgaatg

SEQ ID NO: 54802 - DNA, 25 bp, Artificial
  Probe
ctgcctgtcttgattgtcttaaacg

SEQ ID NO: 54803 - DNA, 25 bp, Artificial
  Probe
tatcagaaggttatgctggaagagc

SEQ ID NO: 54804 - DNA, 25 bp, Artificial
  Probe
tatctgatataggtcacgggctctt

SEQ ID NO: 54805 - DNA, 25 bp, Artificial
  Probe
catgtatgtaacctcccagaacctt

SEQ ID NO: 54806 - DNA, 25 bp, Artificial
  Probe
atcgccctatatgagtcggattaca

SEQ ID NO: 54807 - DNA, 25 bp, Artificial
  Probe
tgtatgtaacctcccagaaccttac

SEQ ID NO: 54808 - DNA, 25 bp, Artificial
  Probe
aaatcgccctatatgagtcggatta

SEQ ID NO: 54809 - DNA, 25 bp, Artificial
  Probe
tcgccctatatgagtcggattacaa

SEQ ID NO: 54810 - DNA, 25 bp, Artificial
  Probe
ccctgcctgtcttgattgtcttaaa

SEQ ID NO: 54811 - DNA, 25 bp, Artificial
  Probe
cttaccttagtgattgaatgagttt

SEQ ID NO: 54812 - DNA, 25 bp, Artificial
  Probe
ttaccttagtgattgaatgagtttc

SEQ ID NO: 54813 - DNA, 25 bp, Artificial
  Probe
ctatctgatataggtcacgggctct

SEQ ID NO: 54814 - DNA, 25 bp, Artificial
  Probe
atctgatataggtcacgggctcttt

SEQ ID NO: 54815 - DNA, 25 bp, Artificial
  Probe
gtatgtaacctcccagaaccttacc

SEQ ID NO: 54816 - DNA, 25 bp, Artificial
  Probe
aatcgccctatatgagtcggattac

SEQ ID NO: 54817 - DNA, 25 bp, Artificial
  Probe
actatctgatataggtcacgggctc

SEQ ID NO: 54818 - DNA, 25 bp, Artificial
  Probe
gggtatcagaaggttatgctggaag

SEQ ID NO: 54819 - DNA, 25 bp, Artificial
  Probe
caaatcgccctatatgagtcggatt

SEQ ID NO: 54820 - DNA, 25 bp, Artificial
  Probe
tctgatataggtcacgggctctttc

SEQ ID NO: 54821 - DNA, 25 bp, Artificial
  Probe
tatgtaacctcccagaaccttaccc

SEQ ID NO: 54822 - DNA, 25 bp, Artificial
  Probe
ataggtgtaaataaggagcgattgt

SEQ ID NO: 54823 - DNA, 25 bp, Artificial
  Probe
taggtgtaaataaggagcgattgtc

SEQ ID NO: 54824 - DNA, 25 bp, Artificial
  Probe
cataggtgtaaataaggagcgattg

SEQ ID NO: 54825 - DNA, 25 bp, Artificial
  Probe
cactggagaacaaagggaacttaaa

SEQ ID NO: 54826 - DNA, 25 bp, Artificial
  Probe
aaacataggtgtaaataaggagcga

SEQ ID NO: 54827 - DNA, 25 bp, Artificial
  Probe
acataggtgtaaataaggagcgatt

SEQ ID NO: 54828 - DNA, 25 bp, Artificial
  Probe
aacataggtgtaaataaggagcgat

SEQ ID NO: 54829 - DNA, 25 bp, Artificial
  Probe
aggtgtaaataaggagcgattgtca

SEQ ID NO: 54830 - DNA, 25 bp, Artificial
  Probe
gtaaataaggagcgattgtcacacc

SEQ ID NO: 54831 - DNA, 25 bp, Artificial
  Probe
gagacacggactaatcggtatggat

SEQ ID NO: 54832 - DNA, 25 bp, Artificial
  Probe
tattatcttgccaagcctggttgta

SEQ ID NO: 54833 - DNA, 25 bp, Artificial
  Probe
acactggagaacaaagggaacttaa

SEQ ID NO: 54834 - DNA, 25 bp, Artificial
  Probe
taaacataggtgtaaataaggagcg

SEQ ID NO: 54835 - DNA, 25 bp, Artificial
  Probe
gtacaagacacactggagaacaaag

SEQ ID NO: 54836 - DNA, 25 bp, Artificial
  Probe
tgtaaataaggagcgattgtcacac

SEQ ID NO: 54837 - DNA, 25 bp, Artificial
  Probe
tacaagacacactggagaacaaagg

SEQ ID NO: 54838 - DNA, 25 bp, Artificial
  Probe
gacacggactaatcggtatggattc

SEQ ID NO: 54839 - DNA, 25 bp, Artificial
  Probe
gtgtaaataaggagcgattgtcaca

SEQ ID NO: 54840 - DNA, 25 bp, Artificial
  Probe
cacactggagaacaaagggaactta

SEQ ID NO: 54841 - DNA, 25 bp, Artificial
  Probe
tatcttgccaagcctggttgtaatt

SEQ ID NO: 54842 - DNA, 25 bp, Artificial
  Probe
ttatcttgccaagcctggttgtaat

SEQ ID NO: 54843 - DNA, 25 bp, Artificial
  Probe
attatcttgccaagcctggttgtaa

SEQ ID NO: 54844 - DNA, 25 bp, Artificial
  Probe
agacacggactaatcggtatggatt

SEQ ID NO: 54845 - DNA, 25 bp, Artificial
  Probe
gagtgagacacggactaatcggtat

SEQ ID NO: 54846 - DNA, 25 bp, Artificial
  Probe
taaataaggagcgattgtcacacct

SEQ ID NO: 54847 - DNA, 25 bp, Artificial
  Probe
ggtgtaaataaggagcgattgtcac

SEQ ID NO: 54848 - DNA, 25 bp, Artificial
  Probe
ctattatcttgccaagcctggttgt

SEQ ID NO: 54849 - DNA, 25 bp, Artificial
  Probe
agtgagacacggactaatcggtatg

SEQ ID NO: 54850 - DNA, 25 bp, Artificial
  Probe
tttataggctgtctttagcattgtg

SEQ ID NO: 54851 - DNA, 25 bp, Artificial
  Probe
ctggagaacaaagggaacttaaaac

SEQ ID NO: 54852 - DNA, 25 bp, Artificial
  Probe
tggagaacaaagggaacttaaaact

SEQ ID NO: 54853 - DNA, 25 bp, Artificial
  Probe
actggagaacaaagggaacttaaaa

SEQ ID NO: 54854 - DNA, 25 bp, Artificial
  Probe
tgagacacggactaatcggtatgga

SEQ ID NO: 54855 - DNA, 25 bp, Artificial
  Probe
tttgtgcaaactctgtaaatatgtt

SEQ ID NO: 54856 - DNA, 25 bp, Artificial
  Probe
ttaaacataggtgtaaataaggagc

SEQ ID NO: 54857 - DNA, 25 bp, Artificial
  Probe
gactaatcggtatggattccctgtg

SEQ ID NO: 54858 - DNA, 25 bp, Artificial
  Probe
aataaggagcgattgtcacacctga

SEQ ID NO: 54859 - DNA, 25 bp, Artificial
  Probe
tttctatttgtgcaaactctgtaaa

SEQ ID NO: 54860 - DNA, 25 bp, Artificial
  Probe
ggagaacaaagggaacttaaaactc

SEQ ID NO: 54861 - DNA, 25 bp, Artificial
  Probe
agaacaaagggaacttaaaactctt

SEQ ID NO: 54862 - DNA, 25 bp, Artificial
  Probe
ctaatcggtatggattccctgtgtg

SEQ ID NO: 54863 - DNA, 25 bp, Artificial
  Probe
agactgtcattggggatttgatttt

SEQ ID NO: 54864 - DNA, 25 bp, Artificial
  Probe
gaacaaagggaacttaaaactcttc

SEQ ID NO: 54865 - DNA, 25 bp, Artificial
  Probe
acacggactaatcggtatggattcc

SEQ ID NO: 54866 - DNA, 25 bp, Artificial
  Probe
ttataggctgtctttagcattgtgc

SEQ ID NO: 54867 - DNA, 25 bp, Artificial
  Probe
ggataccattgatagcatagtctgg

SEQ ID NO: 54868 - DNA, 25 bp, Artificial
  Probe
tggataccattgatagcatagtctg

SEQ ID NO: 54869 - DNA, 25 bp, Artificial
  Probe
acttggataccattgatagcatagt

SEQ ID NO: 54870 - DNA, 25 bp, Artificial
  Probe
gcacttggataccattgatagcata

SEQ ID NO: 54871 - DNA, 25 bp, Artificial
  Probe
ttggataccattgatagcatagtct

SEQ ID NO: 54872 - DNA, 25 bp, Artificial
  Probe
cacttggataccattgatagcatag

SEQ ID NO: 54873 - DNA, 25 bp, Artificial
  Probe
cttggataccattgatagcatagtc

SEQ ID NO: 54874 - DNA, 25 bp, Artificial
  Probe
attgatagcatagtctggtcaccat

SEQ ID NO: 54875 - DNA, 25 bp, Artificial
  Probe
atgtacgaccacaaagtccaataaa

SEQ ID NO: 54876 - DNA, 25 bp, Artificial
  Probe
ccattgatagcatagtctggtcacc

SEQ ID NO: 54877 - DNA, 25 bp, Artificial
  Probe
aaactgaacaaagtgtgatgtacga

SEQ ID NO: 54878 - DNA, 25 bp, Artificial
  Probe
gatgtacgaccacaaagtccaataa

SEQ ID NO: 54879 - DNA, 25 bp, Artificial
  Probe
ggcacttggataccattgatagcat

SEQ ID NO: 54880 - DNA, 25 bp, Artificial
  Probe
ttgatagcatagtctggtcaccatg

SEQ ID NO: 54881 - DNA, 25 bp, Artificial
  Probe
cattgatagcatagtctggtcacca

SEQ ID NO: 54882 - DNA, 25 bp, Artificial
  Probe
aactgaacaaagtgtgatgtacgac

SEQ ID NO: 54883 - DNA, 25 bp, Artificial
  Probe
tagggcacttggataccattgatag

SEQ ID NO: 54884 - DNA, 25 bp, Artificial
  Probe
tgatgtacgaccacaaagtccaata

SEQ ID NO: 54885 - DNA, 25 bp, Artificial
  Probe
ctagggcacttggataccattgata

SEQ ID NO: 54886 - DNA, 25 bp, Artificial
  Probe
cctgaccacactaaggagagagatg

SEQ ID NO: 54887 - DNA, 25 bp, Artificial
  Probe
ctatggcacctgcaagtgatcttaa

SEQ ID NO: 54888 - DNA, 25 bp, Artificial
  Probe
ctgaccacactaaggagagagatgg

SEQ ID NO: 54889 - DNA, 25 bp, Artificial
  Probe
tatggcacctgcaagtgatcttaag

SEQ ID NO: 54890 - DNA, 25 bp, Artificial
  Probe
ctgaacaaagtgtgatgtacgacca

SEQ ID NO: 54891 - DNA, 25 bp, Artificial
  Probe
actgaacaaagtgtgatgtacgacc

SEQ ID NO: 54892 - DNA, 25 bp, Artificial
  Probe
gtcacaactgaaaatcctcccaaaa

SEQ ID NO: 54893 - DNA, 25 bp, Artificial
  Probe
aaaactgaacaaagtgtgatgtacg

SEQ ID NO: 54894 - DNA, 25 bp, Artificial
  Probe
gtgatgtacgaccacaaagtccaat

SEQ ID NO: 54895 - DNA, 25 bp, Artificial
  Probe
actatggcacctgcaagtgatctta

SEQ ID NO: 54896 - DNA, 25 bp, Artificial
  Probe
tactatggcacctgcaagtgatctt

SEQ ID NO: 54897 - DNA, 25 bp, Artificial
  Probe
tgtacgaccacaaagtccaataaaa

SEQ ID NO: 54898 - DNA, 25 bp, Artificial
  Probe
tgaacaaagtgtgatgtacgaccac

SEQ ID NO: 54899 - DNA, 25 bp, Artificial
  Probe
ataccattgatagcatagtctggtc

SEQ ID NO: 54900 - DNA, 25 bp, Artificial
  Probe
gataccattgatagcatagtctggt

SEQ ID NO: 54901 - DNA, 25 bp, Artificial
  Probe
taccattgatagcatagtctggtca

SEQ ID NO: 54902 - DNA, 25 bp, Artificial
  Probe
tgtcacaactgaaaatcctcccaaa

SEQ ID NO: 54903 - DNA, 25 bp, Artificial
  Probe
ttaagtcccagcctcagacaattcc

SEQ ID NO: 54904 - DNA, 25 bp, Artificial
  Probe
gcctgaccacactaaggagagagat

SEQ ID NO: 54905 - DNA, 25 bp, Artificial
  Probe
cacactaaggagagagatggtgcag

SEQ ID NO: 54906 - DNA, 25 bp, Artificial
  Probe
gtactatggcacctgcaagtgatct

SEQ ID NO: 54907 - DNA, 25 bp, Artificial
  Probe
ctgtcacaactgaaaatcctcccaa

SEQ ID NO: 54908 - DNA, 25 bp, Artificial
  Probe
cttaagtcccagcctcagacaattc

SEQ ID NO: 54909 - DNA, 25 bp, Artificial
  Probe
atcttaagtcccagcctcagacaat

SEQ ID NO: 54910 - DNA, 25 bp, Artificial
  Probe
accattgatagcatagtctggtcac

SEQ ID NO: 54911 - DNA, 25 bp, Artificial
  Probe
tgtactatggcacctgcaagtgatc

SEQ ID NO: 54912 - DNA, 25 bp, Artificial
  Probe
aattcgtaatatctcttgtgctgcc

SEQ ID NO: 54913 - DNA, 25 bp, Artificial
  Probe
ttactgcctttgatgtgaatttagc

SEQ ID NO: 54914 - DNA, 25 bp, Artificial
  Probe
tgtttactgcctttgatgtgaattt

SEQ ID NO: 54915 - DNA, 25 bp, Artificial
  Probe
aaattcgtaatatctcttgtgctgc

SEQ ID NO: 54916 - DNA, 25 bp, Artificial
  Probe
gcctttgatgtgaatttagcctatg

SEQ ID NO: 54917 - DNA, 25 bp, Artificial
  Probe
gtgtttactgcctttgatgtgaatt

SEQ ID NO: 54918 - DNA, 25 bp, Artificial
  Probe
tgcctttgatgtgaatttagcctat

SEQ ID NO: 54919 - DNA, 25 bp, Artificial
  Probe
cctttgatgtgaatttagcctatga

SEQ ID NO: 54920 - DNA, 25 bp, Artificial
  Probe
agacctctcaacctttgcttatatc

SEQ ID NO: 54921 - DNA, 25 bp, Artificial
  Probe
gacctctcaacctttgcttatatca

SEQ ID NO: 54922 - DNA, 25 bp, Artificial
  Probe
aagacctctcaacctttgcttatat

SEQ ID NO: 54923 - DNA, 25 bp, Artificial
  Probe
gaagacctctcaacctttgcttata

SEQ ID NO: 54924 - DNA, 25 bp, Artificial
  Probe
cctctcaacctttgcttatatcaca

SEQ ID NO: 54925 - DNA, 25 bp, Artificial
  Probe
acctctcaacctttgcttatatcac

SEQ ID NO: 54926 - DNA, 25 bp, Artificial
  Probe
ctgcctttgatgtgaatttagccta

SEQ ID NO: 54927 - DNA, 25 bp, Artificial
  Probe
ctctcaacctttgcttatatcacaa

SEQ ID NO: 54928 - DNA, 25 bp, Artificial
  Probe
tgaaattcgtaatatctcttgtgct

SEQ ID NO: 54929 - DNA, 25 bp, Artificial
  Probe
tactgcctttgatgtgaatttagcc

SEQ ID NO: 54930 - DNA, 25 bp, Artificial
  Probe
gaaattcgtaatatctcttgtgctg

SEQ ID NO: 54931 - DNA, 25 bp, Artificial
  Probe
gtttactgcctttgatgtgaattta

SEQ ID NO: 54932 - DNA, 25 bp, Artificial
  Probe
tttactgcctttgatgtgaatttag

SEQ ID NO: 54933 - DNA, 25 bp, Artificial
  Probe
agaagacctctcaacctttgcttat

SEQ ID NO: 54934 - DNA, 25 bp, Artificial
  Probe
cgtgtttactgcctttgatgtgaat

SEQ ID NO: 54935 - DNA, 25 bp, Artificial
  Probe
atgaaattcgtaatatctcttgtgc

SEQ ID NO: 54936 - DNA, 25 bp, Artificial
  Probe
ttagcctatgaaatcatcctaacgc

SEQ ID NO: 54937 - DNA, 25 bp, Artificial
  Probe
ctttgatgtgaatttagcctatgaa

SEQ ID NO: 54938 - DNA, 25 bp, Artificial
  Probe
tttagcctatgaaatcatcctaacg

SEQ ID NO: 54939 - DNA, 25 bp, Artificial
  Probe
cagaagacctctcaacctttgctta

SEQ ID NO: 54940 - DNA, 25 bp, Artificial
  Probe
gcatgaaattcgtaatatctcttgt

SEQ ID NO: 54941 - DNA, 25 bp, Artificial
  Probe
tttgatgtgaatttagcctatgaaa

SEQ ID NO: 54942 - DNA, 25 bp, Artificial
  Probe
attcgtaatatctcttgtgctgccc

SEQ ID NO: 54943 - DNA, 25 bp, Artificial
  Probe
gtgaatttagcctatgaaatcatcc

SEQ ID NO: 54944 - DNA, 25 bp, Artificial
  Probe
tgaatttagcctatgaaatcatcct

SEQ ID NO: 54945 - DNA, 25 bp, Artificial
  Probe
actgcctttgatgtgaatttagcct

SEQ ID NO: 54946 - DNA, 25 bp, Artificial
  Probe
agcatgaaattcgtaatatctcttg

SEQ ID NO: 54947 - DNA, 25 bp, Artificial
  Probe
atctgaagtccaaccaccactactg

SEQ ID NO: 54948 - DNA, 25 bp, Artificial
  Probe
gatgtgaatttagcctatgaaatca

SEQ ID NO: 54949 - DNA, 25 bp, Artificial
  Probe
tgatgtgaatttagcctatgaaatc

SEQ ID NO: 54950 - DNA, 25 bp, Artificial
  Probe
gatctgaagtccaaccaccactact

SEQ ID NO: 54951 - DNA, 25 bp, Artificial
  Probe
tgtgaatttagcctatgaaatcatc

SEQ ID NO: 54952 - DNA, 25 bp, Artificial
  Probe
ccgagcatgaaattcgtaatatctc

SEQ ID NO: 54953 - DNA, 25 bp, Artificial
  Probe
cctatgaaatcatcctaacgctggg

SEQ ID NO: 54954 - DNA, 25 bp, Artificial
  Probe
cgagcatgaaattcgtaatatctct

SEQ ID NO: 54955 - DNA, 25 bp, Artificial
  Probe
tagcctatgaaatcatcctaacgct

SEQ ID NO: 54956 - DNA, 25 bp, Artificial
  Probe
gagcatgaaattcgtaatatctctt

SEQ ID NO: 54957 - DNA, 25 bp, Artificial
  Probe
cctcttctcaagtgccttaatagta

SEQ ID NO: 54958 - DNA, 25 bp, Artificial
  Probe
ctcttctcaagtgccttaatagtag

SEQ ID NO: 54959 - DNA, 25 bp, Artificial
  Probe
agccttatcaagtgtcttccatcat

SEQ ID NO: 54960 - DNA, 25 bp, Artificial
  Probe
aagccttatcaagtgtcttccatca

SEQ ID NO: 54961 - DNA, 25 bp, Artificial
  Probe
tcttctcaagtgccttaatagtagg

SEQ ID NO: 54962 - DNA, 25 bp, Artificial
  Probe
gccttatcaagtgtcttccatcatg

SEQ ID NO: 54963 - DNA, 25 bp, Artificial
  Probe
tagtagggtaagttgttaagagtgg

SEQ ID NO: 54964 - DNA, 25 bp, Artificial
  Probe
ctcttgctctttctactctgaacta

SEQ ID NO: 54965 - DNA, 25 bp, Artificial
  Probe
tgaactaataaatctgttgccaagc

SEQ ID NO: 54966 - DNA, 25 bp, Artificial
  Probe
tcttgctctttctactctgaactaa

SEQ ID NO: 54967 - DNA, 25 bp, Artificial
  Probe
gactcttgctctttctactctgaac

SEQ ID NO: 54968 - DNA, 25 bp, Artificial
  Probe
aaagccttatcaagtgtcttccatc

SEQ ID NO: 54969 - DNA, 25 bp, Artificial
  Probe
ctctgaactaataaatctgttgcca

SEQ ID NO: 54970 - DNA, 25 bp, Artificial
  Probe
actctgaactaataaatctgttgcc

SEQ ID NO: 54971 - DNA, 25 bp, Artificial
  Probe
actcttgctctttctactctgaact

SEQ ID NO: 54972 - DNA, 25 bp, Artificial
  Probe
agtagggtaagttgttaagagtggg

SEQ ID NO: 54973 - DNA, 25 bp, Artificial
  Probe
tttactgaacaatcaaagcacttgg

SEQ ID NO: 54974 - DNA, 25 bp, Artificial
  Probe
caaagccttatcaagtgtcttccat

SEQ ID NO: 54975 - DNA, 25 bp, Artificial
  Probe
cttggactcttgctctttctactct

SEQ ID NO: 54976 - DNA, 25 bp, Artificial
  Probe
tctgaactaataaatctgttgccaa

SEQ ID NO: 54977 - DNA, 25 bp, Artificial
  Probe
ccttatcaagtgtcttccatcatgg

SEQ ID NO: 54978 - DNA, 25 bp, Artificial
  Probe
tccctcttctcaagtgccttaatag

SEQ ID NO: 54979 - DNA, 25 bp, Artificial
  Probe
ctccctcttctcaagtgccttaata

SEQ ID NO: 54980 - DNA, 25 bp, Artificial
  Probe
ttactgaacaatcaaagcacttgga

SEQ ID NO: 54981 - DNA, 25 bp, Artificial
  Probe
ctgaactaataaatctgttgccaag

SEQ ID NO: 54982 - DNA, 25 bp, Artificial
  Probe
cttgctctttctactctgaactaat

SEQ ID NO: 54983 - DNA, 25 bp, Artificial
  Probe
ggactcttgctctttctactctgaa

SEQ ID NO: 54984 - DNA, 25 bp, Artificial
  Probe
ccctcttctcaagtgccttaatagt

SEQ ID NO: 54985 - DNA, 25 bp, Artificial
  Probe
ttggactcttgctctttctactctg

SEQ ID NO: 54986 - DNA, 25 bp, Artificial
  Probe
acttggactcttgctctttctactc

SEQ ID NO: 54987 - DNA, 25 bp, Artificial
  Probe
ccatcatggattcattacagcttaa

SEQ ID NO: 54988 - DNA, 25 bp, Artificial
  Probe
cacttggactcttgctctttctact

SEQ ID NO: 54989 - DNA, 25 bp, Artificial
  Probe
gtgccttaatagtagggtaagttgt

SEQ ID NO: 54990 - DNA, 25 bp, Artificial
  Probe
tactgaacaatcaaagcacttggac

SEQ ID NO: 54991 - DNA, 25 bp, Artificial
  Probe
agtgccttaatagtagggtaagttg

SEQ ID NO: 54992 - DNA, 25 bp, Artificial
  Probe
caagtgccttaatagtagggtaagt

SEQ ID NO: 54993 - DNA, 25 bp, Artificial
  Probe
tctcaagtgccttaatagtagggta

SEQ ID NO: 54994 - DNA, 25 bp, Artificial
  Probe
cttctcaagtgccttaatagtaggg

SEQ ID NO: 54995 - DNA, 25 bp, Artificial
  Probe
tcaagtgccttaatagtagggtaag

SEQ ID NO: 54996 - DNA, 25 bp, Artificial
  Probe
ctcaagtgccttaatagtagggtaa

SEQ ID NO: 54997 - DNA, 25 bp, Artificial
  Probe
catcatggattcattacagcttaat

SEQ ID NO: 54998 - DNA, 25 bp, Artificial
  Probe
gaacaatcaaagcacttggactctt

SEQ ID NO: 54999 - DNA, 25 bp, Artificial
  Probe
tgccttaatagtagggtaagttgtt

SEQ ID NO: 55000 - DNA, 25 bp, Artificial
  Probe
aagtgccttaatagtagggtaagtt

SEQ ID NO: 55001 - DNA, 25 bp, Artificial
  Probe
ttctcaagtgccttaatagtagggt

SEQ ID NO: 55002 - DNA, 25 bp, Artificial
  Probe
atggagaagtgaacgaagaagagtt

SEQ ID NO: 55003 - DNA, 25 bp, Artificial
  Probe
gatggagaagtgaacgaagaagagt

SEQ ID NO: 55004 - DNA, 25 bp, Artificial
  Probe
tgatggagaagtgaacgaagaagag

SEQ ID NO: 55005 - DNA, 25 bp, Artificial
  Probe
gtgatggagaagtgaacgaagaaga

SEQ ID NO: 55006 - DNA, 25 bp, Artificial
  Probe
ccgagaaagataccaaagaggaaat

SEQ ID NO: 55007 - DNA, 25 bp, Artificial
  Probe
cgagaaagataccaaagaggaaatc

SEQ ID NO: 55008 - DNA, 25 bp, Artificial
  Probe
aatgatttcagaagtggacaaagag

SEQ ID NO: 55009 - DNA, 25 bp, Artificial
  Probe
cttctaagcctccagatcaattata

SEQ ID NO: 55010 - DNA, 25 bp, Artificial
  Probe
aatgacttcttggctgtgatgactc

SEQ ID NO: 55011 - DNA, 25 bp, Artificial
  Probe
ttcaatgacttcttggctgtgatga

SEQ ID NO: 55012 - DNA, 25 bp, Artificial
  Probe
atgatttcagaagtggacaaagagg

SEQ ID NO: 55013 - DNA, 25 bp, Artificial
  Probe
aaatgatttcagaagtggacaaaga

SEQ ID NO: 55014 - DNA, 25 bp, Artificial
  Probe
gagaaagataccaaagaggaaatcc

SEQ ID NO: 55015 - DNA, 25 bp, Artificial
  Probe
ctttcaggttgtttgatgatgatga

SEQ ID NO: 55016 - DNA, 25 bp, Artificial
  Probe
aagaccaacctttattaagtgactg

SEQ ID NO: 55017 - DNA, 25 bp, Artificial
  Probe
ggtgatggagaagtgaacgaagaag

SEQ ID NO: 55018 - DNA, 25 bp, Artificial
  Probe
gctttcaggttgtttgatgatgatg

SEQ ID NO: 55019 - DNA, 25 bp, Artificial
  Probe
ggagaagtgaacgaagaagagtttc

SEQ ID NO: 55020 - DNA, 25 bp, Artificial
  Probe
gatggtgatggagaagtgaacgaag

SEQ ID NO: 55021 - DNA, 25 bp, Artificial
  Probe
caatgacttcttggctgtgatgact

SEQ ID NO: 55022 - DNA, 25 bp, Artificial
  Probe
caacctttattaagtgactggctgg

SEQ ID NO: 55023 - DNA, 25 bp, Artificial
  Probe
tcaatgacttcttggctgtgatgac

SEQ ID NO: 55024 - DNA, 25 bp, Artificial
  Probe
ttctaagcctccagatcaattataa

SEQ ID NO: 55025 - DNA, 25 bp, Artificial
  Probe
tggagaagtgaacgaagaagagttt

SEQ ID NO: 55026 - DNA, 25 bp, Artificial
  Probe
gcttctaagcctccagatcaattat

SEQ ID NO: 55027 - DNA, 25 bp, Artificial
  Probe
atggtgatggagaagtgaacgaaga

SEQ ID NO: 55028 - DNA, 25 bp, Artificial
  Probe
atcgtgatggtgatggagaagtgaa

SEQ ID NO: 55029 - DNA, 25 bp, Artificial
  Probe
ggctttcaggttgtttgatgatgat

SEQ ID NO: 55030 - DNA, 25 bp, Artificial
  Probe
gaaggctttcaggttgtttgatgat

SEQ ID NO: 55031 - DNA, 25 bp, Artificial
  Probe
tttcaatgacttcttggctgtgatg

SEQ ID NO: 55032 - DNA, 25 bp, Artificial
  Probe
gtttcaatgacttcttggctgtgat

SEQ ID NO: 55033 - DNA, 25 bp, Artificial
  Probe
gatcagtttcaatgacttcttggct

SEQ ID NO: 55034 - DNA, 25 bp, Artificial
  Probe
agatcagtttcaatgacttcttggc

SEQ ID NO: 55035 - DNA, 25 bp, Artificial
  Probe
tggtgatggagaagtgaacgaagaa

SEQ ID NO: 55036 - DNA, 25 bp, Artificial
  Probe
agaccaacctttattaagtgactgg

SEQ ID NO: 55037 - DNA, 25 bp, Artificial
  Probe
aaggctttcaggttgtttgatgatg

SEQ ID NO: 55038 - DNA, 25 bp, Artificial
  Probe
atcagtttcaatgacttcttggctg

SEQ ID NO: 55039 - DNA, 25 bp, Artificial
  Probe
tgatggtgatggagaagtgaacgaa

SEQ ID NO: 55040 - DNA, 25 bp, Artificial
  Probe
ctcctgtgcttgattagcttctaag

SEQ ID NO: 55041 - DNA, 25 bp, Artificial
  Probe
agcttctaagcctccagatcaatta

SEQ ID NO: 55042 - DNA, 25 bp, Artificial
  Probe
tagcttctaagcctccagatcaatt

SEQ ID NO: 55043 - DNA, 25 bp, Artificial
  Probe
ttagcttctaagcctccagatcaat

SEQ ID NO: 55044 - DNA, 25 bp, Artificial
  Probe
attagcttctaagcctccagatcaa

SEQ ID NO: 55045 - DNA, 25 bp, Artificial
  Probe
ttgattagcttctaagcctccagat

SEQ ID NO: 55046 - DNA, 25 bp, Artificial
  Probe
gccgagaaagataccaaagaggaaa

SEQ ID NO: 55047 - DNA, 25 bp, Artificial
  Probe
ctattcttgggcgatttgattacag

SEQ ID NO: 55048 - DNA, 25 bp, Artificial
  Probe
gactattcttgggcgatttgattac

SEQ ID NO: 55049 - DNA, 25 bp, Artificial
  Probe
tgactattcttgggcgatttgatta

SEQ ID NO: 55050 - DNA, 25 bp, Artificial
  Probe
actattcttgggcgatttgattaca

SEQ ID NO: 55051 - DNA, 25 bp, Artificial
  Probe
taatgtgactattcttgggcgattt

SEQ ID NO: 55052 - DNA, 25 bp, Artificial
  Probe
ctaatgtgactattcttgggcgatt

SEQ ID NO: 55053 - DNA, 25 bp, Artificial
  Probe
aaagggactagagcatttagacttg

SEQ ID NO: 55054 - DNA, 25 bp, Artificial
  Probe
caaagggactagagcatttagactt

SEQ ID NO: 55055 - DNA, 25 bp, Artificial
  Probe
gaagtagaagatcctcataaagcca

SEQ ID NO: 55056 - DNA, 25 bp, Artificial
  Probe
gtgactattcttgggcgatttgatt

SEQ ID NO: 55057 - DNA, 25 bp, Artificial
  Probe
tctaatgtgactattcttgggcgat

SEQ ID NO: 55058 - DNA, 25 bp, Artificial
  Probe
tagcaaagggactagagcatttaga

SEQ ID NO: 55059 - DNA, 25 bp, Artificial
  Probe
agaagtagaagatcctcataaagcc

SEQ ID NO: 55060 - DNA, 25 bp, Artificial
  Probe
agtagaagatcctcataaagccaaa

SEQ ID NO: 55061 - DNA, 25 bp, Artificial
  Probe
aagtagaagatcctcataaagccaa

SEQ ID NO: 55062 - DNA, 25 bp, Artificial
  Probe
tattcttgggcgatttgattacagc

SEQ ID NO: 55063 - DNA, 25 bp, Artificial
  Probe
aagggactagagcatttagacttgt

SEQ ID NO: 55064 - DNA, 25 bp, Artificial
  Probe
aatgtgactattcttgggcgatttg

SEQ ID NO: 55065 - DNA, 25 bp, Artificial
  Probe
gtagaagatcctcataaagccaaat

SEQ ID NO: 55066 - DNA, 25 bp, Artificial
  Probe
catttagacttgtctttcagcatcc

SEQ ID NO: 55067 - DNA, 25 bp, Artificial
  Probe
atttgattacagccagtgtgacatt

SEQ ID NO: 55068 - DNA, 25 bp, Artificial
  Probe
cattctttgtactgtcttcctgctc

SEQ ID NO: 55069 - DNA, 25 bp, Artificial
  Probe
aactgtatgtttgggatttagaagt

SEQ ID NO: 55070 - DNA, 25 bp, Artificial
  Probe
gcatttagacttgtctttcagcatc

SEQ ID NO: 55071 - DNA, 25 bp, Artificial
  Probe
agaagatcctcataaagccaaatgc

SEQ ID NO: 55072 - DNA, 25 bp, Artificial
  Probe
tagaagatcctcataaagccaaatg

SEQ ID NO: 55073 - DNA, 25 bp, Artificial
  Probe
tttgattacagccagtgtgacattt

SEQ ID NO: 55074 - DNA, 25 bp, Artificial
  Probe
agcatttagacttgtctttcagcat

SEQ ID NO: 55075 - DNA, 25 bp, Artificial
  Probe
cacaacactgacccatcataaatgt

SEQ ID NO: 55076 - DNA, 25 bp, Artificial
  Probe
tgtttgggatttagaagtagaagat

SEQ ID NO: 55077 - DNA, 25 bp, Artificial
  Probe
atgtttgggatttagaagtagaaga

SEQ ID NO: 55078 - DNA, 25 bp, Artificial
  Probe
gatttgattacagccagtgtgacat

SEQ ID NO: 55079 - DNA, 25 bp, Artificial
  Probe
attctttgtactgtcttcctgctca

SEQ ID NO: 55080 - DNA, 25 bp, Artificial
  Probe
tgtgactattcttgggcgatttgat

SEQ ID NO: 55081 - DNA, 25 bp, Artificial
  Probe
atgtgactattcttgggcgatttga

SEQ ID NO: 55082 - DNA, 25 bp, Artificial
  Probe
gtggtgtttacattgtttacattct

SEQ ID NO: 55083 - DNA, 25 bp, Artificial
  Probe
agtggtgtttacattgtttacattc

SEQ ID NO: 55084 - DNA, 25 bp, Artificial
  Probe
agagcatttagacttgtctttcagc

SEQ ID NO: 55085 - DNA, 25 bp, Artificial
  Probe
atttagacttgtctttcagcatccg

SEQ ID NO: 55086 - DNA, 25 bp, Artificial
  Probe
tagagcatttagacttgtctttcag

SEQ ID NO: 55087 - DNA, 25 bp, Artificial
  Probe
ctagagcatttagacttgtctttca

SEQ ID NO: 55088 - DNA, 25 bp, Artificial
  Probe
actagagcatttagacttgtctttc

SEQ ID NO: 55089 - DNA, 25 bp, Artificial
  Probe
tgtatgtttgggatttagaagtaga

SEQ ID NO: 55090 - DNA, 25 bp, Artificial
  Probe
gcaaagggactagagcatttagact

SEQ ID NO: 55091 - DNA, 25 bp, Artificial
  Probe
agcaaagggactagagcatttagac

SEQ ID NO: 55092 - DNA, 25 bp, Artificial
  Probe
aagtagaagtctcagtgtaatgtgg

SEQ ID NO: 55093 - DNA, 25 bp, Artificial
  Probe
cagtgtttatatttcaaggtcggtg

SEQ ID NO: 55094 - DNA, 25 bp, Artificial
  Probe
tagaagtctcagtgtaatgtgggaa

SEQ ID NO: 55095 - DNA, 25 bp, Artificial
  Probe
ccagtgtttatatttcaaggtcggt

SEQ ID NO: 55096 - DNA, 25 bp, Artificial
  Probe
agtgtttatatttcaaggtcggtga

SEQ ID NO: 55097 - DNA, 25 bp, Artificial
  Probe
ggttgaaactgtttgaaagccttta

SEQ ID NO: 55098 - DNA, 25 bp, Artificial
  Probe
gtagaagtctcagtgtaatgtggga

SEQ ID NO: 55099 - DNA, 25 bp, Artificial
  Probe
agtagaagtctcagtgtaatgtggg

SEQ ID NO: 55100 - DNA, 25 bp, Artificial
  Probe
aaagtagaagtctcagtgtaatgtg

SEQ ID NO: 55101 - DNA, 25 bp, Artificial
  Probe
cgtaagaaactgtagatgtctgtag

SEQ ID NO: 55102 - DNA, 25 bp, Artificial
  Probe
gttgaaactgtttgaaagcctttaa

SEQ ID NO: 55103 - DNA, 25 bp, Artificial
  Probe
ttcatttgaaactttggatgctgag

SEQ ID NO: 55104 - DNA, 25 bp, Artificial
  Probe
gttcatttgaaactttggatgctga

SEQ ID NO: 55105 - DNA, 25 bp, Artificial
  Probe
agaagtctcagtgtaatgtgggaac

SEQ ID NO: 55106 - DNA, 25 bp, Artificial
  Probe
gaaactttggatgctgagctttatc

SEQ ID NO: 55107 - DNA, 25 bp, Artificial
  Probe
aaactttggatgctgagctttatct

SEQ ID NO: 55108 - DNA, 25 bp, Artificial
  Probe
gtaagaaactgtagatgtctgtagt

SEQ ID NO: 55109 - DNA, 25 bp, Artificial
  Probe
tgaaactttggatgctgagctttat

SEQ ID NO: 55110 - DNA, 25 bp, Artificial
  Probe
ttgaaactttggatgctgagcttta

SEQ ID NO: 55111 - DNA, 25 bp, Artificial
  Probe
ttgaaactgtttgaaagcctttaaa

SEQ ID NO: 55112 - DNA, 25 bp, Artificial
  Probe
aactttggatgctgagctttatctg

SEQ ID NO: 55113 - DNA, 25 bp, Artificial
  Probe
tgaaactgtttgaaagcctttaaat

SEQ ID NO: 55114 - DNA, 25 bp, Artificial
  Probe
atgctgggttgaaactgtttgaaag

SEQ ID NO: 55115 - DNA, 25 bp, Artificial
  Probe
gatgctgggttgaaactgtttgaaa

SEQ ID NO: 55116 - DNA, 25 bp, Artificial
  Probe
cacgtaagaaactgtagatgtctgt

SEQ ID NO: 55117 - DNA, 25 bp, Artificial
  Probe
acgtaagaaactgtagatgtctgta

SEQ ID NO: 55118 - DNA, 25 bp, Artificial
  Probe
gtccacgtaagaaactgtagatgtc

SEQ ID NO: 55119 - DNA, 25 bp, Artificial
  Probe
aagaaactgtagatgtctgtagtac

SEQ ID NO: 55120 - DNA, 25 bp, Artificial
  Probe
aagtctcagtgtaatgtgggaacag

SEQ ID NO: 55121 - DNA, 25 bp, Artificial
  Probe
gaagtctcagtgtaatgtgggaaca

SEQ ID NO: 55122 - DNA, 25 bp, Artificial
  Probe
atttgaaactttggatgctgagctt

SEQ ID NO: 55123 - DNA, 25 bp, Artificial
  Probe
ccttgtaggtggtagccttaacttt

SEQ ID NO: 55124 - DNA, 25 bp, Artificial
  Probe
gggttgaaactgtttgaaagccttt

SEQ ID NO: 55125 - DNA, 25 bp, Artificial
  Probe
tcatttgaaactttggatgctgagc

SEQ ID NO: 55126 - DNA, 25 bp, Artificial
  Probe
ccacgtaagaaactgtagatgtctg

SEQ ID NO: 55127 - DNA, 25 bp, Artificial
  Probe
tccacgtaagaaactgtagatgtct

SEQ ID NO: 55128 - DNA, 25 bp, Artificial
  Probe
tttgaaactttggatgctgagcttt

SEQ ID NO: 55129 - DNA, 25 bp, Artificial
  Probe
agtccacgtaagaaactgtagatgt

SEQ ID NO: 55130 - DNA, 25 bp, Artificial
  Probe
tagccttaacttttagccaactttg

SEQ ID NO: 55131 - DNA, 25 bp, Artificial
  Probe
gtagccttaacttttagccaacttt

SEQ ID NO: 55132 - DNA, 25 bp, Artificial
  Probe
gccttaacttttagccaactttgtt

SEQ ID NO: 55133 - DNA, 25 bp, Artificial
  Probe
ggtagccttaacttttagccaactt

SEQ ID NO: 55134 - DNA, 25 bp, Artificial
  Probe
gtgtttatatttcaaggtcggtgaa

SEQ ID NO: 55135 - DNA, 25 bp, Artificial
  Probe
catttgaaactttggatgctgagct

SEQ ID NO: 55136 - DNA, 25 bp, Artificial
  Probe
agatgctgggttgaaactgtttgaa

SEQ ID NO: 55137 - DNA, 25 bp, Artificial
  Probe
tatatcattggcgtatggcactcat

SEQ ID NO: 55138 - DNA, 25 bp, Artificial
  Probe
atatatcattggcgtatggcactca

SEQ ID NO: 55139 - DNA, 25 bp, Artificial
  Probe
tttgtatagaacgcactaccctaag

SEQ ID NO: 55140 - DNA, 25 bp, Artificial
  Probe
gcatttgtggctatttgtagtttac

SEQ ID NO: 55141 - DNA, 25 bp, Artificial
  Probe
catatatcattggcgtatggcactc

SEQ ID NO: 55142 - DNA, 25 bp, Artificial
  Probe
aaaggatcagaaaccattcaaagag

SEQ ID NO: 55143 - DNA, 25 bp, Artificial
  Probe
aaggatcagaaaccattcaaagagg

SEQ ID NO: 55144 - DNA, 25 bp, Artificial
  Probe
ttgtatagaacgcactaccctaagc

SEQ ID NO: 55145 - DNA, 25 bp, Artificial
  Probe
atgctttgctaaccaacataactgt

SEQ ID NO: 55146 - DNA, 25 bp, Artificial
  Probe
catttgtggctatttgtagtttact

SEQ ID NO: 55147 - DNA, 25 bp, Artificial
  Probe
catgctttgctaaccaacataactg

SEQ ID NO: 55148 - DNA, 25 bp, Artificial
  Probe
atatcattggcgtatggcactcatg

SEQ ID NO: 55149 - DNA, 25 bp, Artificial
  Probe
aaataaatctgggtctgcatctctt

SEQ ID NO: 55150 - DNA, 25 bp, Artificial
  Probe
atctgggtctgcatctcttattaaa

SEQ ID NO: 55151 - DNA, 25 bp, Artificial
  Probe
aatctgggtctgcatctcttattaa

SEQ ID NO: 55152 - DNA, 25 bp, Artificial
  Probe
aaatctgggtctgcatctcttatta

SEQ ID NO: 55153 - DNA, 25 bp, Artificial
  Probe
taaatctgggtctgcatctcttatt

SEQ ID NO: 55154 - DNA, 25 bp, Artificial
  Probe
aataaatctgggtctgcatctctta

SEQ ID NO: 55155 - DNA, 25 bp, Artificial
  Probe
taaataaatctgggtctgcatctct

SEQ ID NO: 55156 - DNA, 25 bp, Artificial
  Probe
tatagaacgcactaccctaagccat

SEQ ID NO: 55157 - DNA, 25 bp, Artificial
  Probe
ctccatgctttgctaaccaacataa

SEQ ID NO: 55158 - DNA, 25 bp, Artificial
  Probe
atttgtggctatttgtagtttactt

SEQ ID NO: 55159 - DNA, 25 bp, Artificial
  Probe
ccatgctttgctaaccaacataact

SEQ ID NO: 55160 - DNA, 25 bp, Artificial
  Probe
tccatgctttgctaaccaacataac

SEQ ID NO: 55161 - DNA, 25 bp, Artificial
  Probe
ataaatctgggtctgcatctcttat

SEQ ID NO: 55162 - DNA, 25 bp, Artificial
  Probe
ataaataaatctgggtctgcatctc

SEQ ID NO: 55163 - DNA, 25 bp, Artificial
  Probe
gcatatatcattggcgtatggcact

SEQ ID NO: 55164 - DNA, 25 bp, Artificial
  Probe
aagcatttgtggctatttgtagttt

SEQ ID NO: 55165 - DNA, 25 bp, Artificial
  Probe
aaagcatttgtggctatttgtagtt

SEQ ID NO: 55166 - DNA, 25 bp, Artificial
  Probe
aataaataaatctgggtctgcatct

SEQ ID NO: 55167 - DNA, 25 bp, Artificial
  Probe
agcatttgtggctatttgtagttta

SEQ ID NO: 55168 - DNA, 25 bp, Artificial
  Probe
ttttgtatagaacgcactaccctaa

SEQ ID NO: 55169 - DNA, 25 bp, Artificial
  Probe
ttgtggctatttgtagtttacttaa

SEQ ID NO: 55170 - DNA, 25 bp, Artificial
  Probe
tttgtggctatttgtagtttactta

SEQ ID NO: 55171 - DNA, 25 bp, Artificial
  Probe
caaagcatttgtggctatttgtagt

SEQ ID NO: 55172 - DNA, 25 bp, Artificial
  Probe
actccatgctttgctaaccaacata

SEQ ID NO: 55173 - DNA, 25 bp, Artificial
  Probe
aaataaataaatctgggtctgcatc

SEQ ID NO: 55174 - DNA, 25 bp, Artificial
  Probe
gtatagaacgcactaccctaagcca

SEQ ID NO: 55175 - DNA, 25 bp, Artificial
  Probe
tgtatagaacgcactaccctaagcc

SEQ ID NO: 55176 - DNA, 25 bp, Artificial
  Probe
gcaaagcatttgtggctatttgtag

SEQ ID NO: 55177 - DNA, 25 bp, Artificial
  Probe
caggcatatatcattggcgtatggc

SEQ ID NO: 55178 - DNA, 25 bp, Artificial
  Probe
gcaggcatatatcattggcgtatgg

SEQ ID NO: 55179 - DNA, 25 bp, Artificial
  Probe
gcaaaaggatcagaaaccattcaaa

SEQ ID NO: 55180 - DNA, 25 bp, Artificial
  Probe
tgcaggcatatatcattggcgtatg

SEQ ID NO: 55181 - DNA, 25 bp, Artificial
  Probe
aaaaggatcagaaaccattcaaaga

SEQ ID NO: 55182 - DNA, 25 bp, Artificial
  Probe
taatttgtagttggatgttacggac

SEQ ID NO: 55183 - DNA, 25 bp, Artificial
  Probe
aatttgtagttggatgttacggacc

SEQ ID NO: 55184 - DNA, 25 bp, Artificial
  Probe
ttaatttgtagttggatgttacgga

SEQ ID NO: 55185 - DNA, 25 bp, Artificial
  Probe
aatctctcctgaaattcaactcacc

SEQ ID NO: 55186 - DNA, 25 bp, Artificial
  Probe
tttaatttgtagttggatgttacgg

SEQ ID NO: 55187 - DNA, 25 bp, Artificial
  Probe
atctctcctgaaattcaactcacca

SEQ ID NO: 55188 - DNA, 25 bp, Artificial
  Probe
acagaatctctcctgaaattcaact

SEQ ID NO: 55189 - DNA, 25 bp, Artificial
  Probe
gaatctctcctgaaattcaactcac

SEQ ID NO: 55190 - DNA, 25 bp, Artificial
  Probe
agaatctctcctgaaattcaactca

SEQ ID NO: 55191 - DNA, 25 bp, Artificial
  Probe
cagaatctctcctgaaattcaactc

SEQ ID NO: 55192 - DNA, 25 bp, Artificial
  Probe
aacagaatctctcctgaaattcaac

SEQ ID NO: 55193 - DNA, 25 bp, Artificial
  Probe
cgaacagaatctctcctgaaattca

SEQ ID NO: 55194 - DNA, 25 bp, Artificial
  Probe
gaacagaatctctcctgaaattcaa

SEQ ID NO: 55195 - DNA, 25 bp, Artificial
  Probe
agcgaacagaatctctcctgaaatt

SEQ ID NO: 55196 - DNA, 25 bp, Artificial
  Probe
attaataaattgccgttcagtttga

SEQ ID NO: 55197 - DNA, 25 bp, Artificial
  Probe
gcgaacagaatctctcctgaaattc

SEQ ID NO: 55198 - DNA, 25 bp, Artificial
  Probe
atttgtagttggatgttacggacca

SEQ ID NO: 55199 - DNA, 25 bp, Artificial
  Probe
gaaagtccctgtttatgaaaatcgc

SEQ ID NO: 55200 - DNA, 25 bp, Artificial
  Probe
cagcgaacagaatctctcctgaaat

SEQ ID NO: 55201 - DNA, 25 bp, Artificial
  Probe
agggaaactgtattaatctcattct

SEQ ID NO: 55202 - DNA, 25 bp, Artificial
  Probe
agtccctgtttatgaaaatcgcttt

SEQ ID NO: 55203 - DNA, 25 bp, Artificial
  Probe
aaagtccctgtttatgaaaatcgct

SEQ ID NO: 55204 - DNA, 25 bp, Artificial
  Probe
aagtccctgtttatgaaaatcgctt

SEQ ID NO: 55205 - DNA, 25 bp, Artificial
  Probe
aagggaaactgtattaatctcattc

SEQ ID NO: 55206 - DNA, 25 bp, Artificial
  Probe
ttaataaattgccgttcagtttgaa

SEQ ID NO: 55207 - DNA, 25 bp, Artificial
  Probe
taataaattgccgttcagtttgaat

SEQ ID NO: 55208 - DNA, 25 bp, Artificial
  Probe
ggaaagtccctgtttatgaaaatcg

SEQ ID NO: 55209 - DNA, 25 bp, Artificial
  Probe
aaagggaaactgtattaatctcatt

SEQ ID NO: 55210 - DNA, 25 bp, Artificial
  Probe
ccctgtttatgaaaatcgctttctt

SEQ ID NO: 55211 - DNA, 25 bp, Artificial
  Probe
gggaaactgtattaatctcattcta

SEQ ID NO: 55212 - DNA, 25 bp, Artificial
  Probe
tccctgtttatgaaaatcgctttct

SEQ ID NO: 55213 - DNA, 25 bp, Artificial
  Probe
gtccctgtttatgaaaatcgctttc

SEQ ID NO: 55214 - DNA, 25 bp, Artificial
  Probe
tgttgatcatatccattgtttgttt

SEQ ID NO: 55215 - DNA, 25 bp, Artificial
  Probe
ttgttgatcatatccattgtttgtt

SEQ ID NO: 55216 - DNA, 25 bp, Artificial
  Probe
tttgttgatcatatccattgtttgt

SEQ ID NO: 55217 - DNA, 25 bp, Artificial
  Probe
cctgtttatgaaaatcgctttcttt

SEQ ID NO: 55218 - DNA, 25 bp, Artificial
  Probe
ttttatcctatgtcgaaagaagggg

SEQ ID NO: 55219 - DNA, 25 bp, Artificial
  Probe
tattaataaattgccgttcagtttg

SEQ ID NO: 55220 - DNA, 25 bp, Artificial
  Probe
gttacggaccaaacaccagaaagtg

SEQ ID NO: 55221 - DNA, 25 bp, Artificial
  Probe
attttatcctatgtcgaaagaaggg

SEQ ID NO: 55222 - DNA, 25 bp, Artificial
  Probe
ttttaatttgtagttggatgttacg

SEQ ID NO: 55223 - DNA, 25 bp, Artificial
  Probe
tctcattctatcatccttttctttt

SEQ ID NO: 55224 - DNA, 25 bp, Artificial
  Probe
ctgtttatgaaaatcgctttctttt

SEQ ID NO: 55225 - DNA, 25 bp, Artificial
  Probe
atgttacggaccaaacaccagaaag

SEQ ID NO: 55226 - DNA, 25 bp, Artificial
  Probe
gatgttacggaccaaacaccagaaa

SEQ ID NO: 55227 - DNA, 25 bp, Artificial
  Probe
gagcagatgggcgtttattaaatat

SEQ ID NO: 55228 - DNA, 25 bp, Artificial
  Probe
tgagcagatgggcgtttattaaata

SEQ ID NO: 55229 - DNA, 25 bp, Artificial
  Probe
cgttacctcatttattctcacaaca

SEQ ID NO: 55230 - DNA, 25 bp, Artificial
  Probe
aatatacactctaaggtctatgtgc

SEQ ID NO: 55231 - DNA, 25 bp, Artificial
  Probe
atcatatgcacagtatagaacagcc

SEQ ID NO: 55232 - DNA, 25 bp, Artificial
  Probe
gcagatgggcgtttattaaatatac

SEQ ID NO: 55233 - DNA, 25 bp, Artificial
  Probe
agcagatgggcgtttattaaatata

SEQ ID NO: 55234 - DNA, 25 bp, Artificial
  Probe
aatcatatgcacagtatagaacagc

SEQ ID NO: 55235 - DNA, 25 bp, Artificial
  Probe
tgggcgtttattaaatatacactct

SEQ ID NO: 55236 - DNA, 25 bp, Artificial
  Probe
gtgagcagatgggcgtttattaaat

SEQ ID NO: 55237 - DNA, 25 bp, Artificial
  Probe
actctaaggtctatgtgcatatgta

SEQ ID NO: 55238 - DNA, 25 bp, Artificial
  Probe
ctcatttattctcacaacatgcctg

SEQ ID NO: 55239 - DNA, 25 bp, Artificial
  Probe
tacctcatttattctcacaacatgc

SEQ ID NO: 55240 - DNA, 25 bp, Artificial
  Probe
ctctaaggtctatgtgcatatgtac

SEQ ID NO: 55241 - DNA, 25 bp, Artificial
  Probe
ccttgaatcatatgcacagtataga

SEQ ID NO: 55242 - DNA, 25 bp, Artificial
  Probe
tacactctaaggtctatgtgcatat

SEQ ID NO: 55243 - DNA, 25 bp, Artificial
  Probe
atacactctaaggtctatgtgcata

SEQ ID NO: 55244 - DNA, 25 bp, Artificial
  Probe
tatacactctaaggtctatgtgcat

SEQ ID NO: 55245 - DNA, 25 bp, Artificial
  Probe
atatacactctaaggtctatgtgca

SEQ ID NO: 55246 - DNA, 25 bp, Artificial
  Probe
cctcatttattctcacaacatgcct

SEQ ID NO: 55247 - DNA, 25 bp, Artificial
  Probe
cactctaaggtctatgtgcatatgt

SEQ ID NO: 55248 - DNA, 25 bp, Artificial
  Probe
acactctaaggtctatgtgcatatg

SEQ ID NO: 55249 - DNA, 25 bp, Artificial
  Probe
tgaatcatatgcacagtatagaaca

SEQ ID NO: 55250 - DNA, 25 bp, Artificial
  Probe
acctcatttattctcacaacatgcc

SEQ ID NO: 55251 - DNA, 25 bp, Artificial
  Probe
tcatttattctcacaacatgcctgt

SEQ ID NO: 55252 - DNA, 25 bp, Artificial
  Probe
acacgttacctcatttattctcaca

SEQ ID NO: 55253 - DNA, 25 bp, Artificial
  Probe
atgggcgtttattaaatatacactc

SEQ ID NO: 55254 - DNA, 25 bp, Artificial
  Probe
gatgggcgtttattaaatatacact

SEQ ID NO: 55255 - DNA, 25 bp, Artificial
  Probe
agatgggcgtttattaaatatacac

SEQ ID NO: 55256 - DNA, 25 bp, Artificial
  Probe
cagatgggcgtttattaaatataca

SEQ ID NO: 55257 - DNA, 25 bp, Artificial
  Probe
cacgttacctcatttattctcacaa

SEQ ID NO: 55258 - DNA, 25 bp, Artificial
  Probe
gttacctcatttattctcacaacat

SEQ ID NO: 55259 - DNA, 25 bp, Artificial
  Probe
gaatcatatgcacagtatagaacag

SEQ ID NO: 55260 - DNA, 25 bp, Artificial
  Probe
acgttacctcatttattctcacaac

SEQ ID NO: 55261 - DNA, 25 bp, Artificial
  Probe
tacacgttacctcatttattctcac

SEQ ID NO: 55262 - DNA, 25 bp, Artificial
  Probe
gcccttgaatcatatgcacagtata

SEQ ID NO: 55263 - DNA, 25 bp, Artificial
  Probe
ttacctcatttattctcacaacatg

SEQ ID NO: 55264 - DNA, 25 bp, Artificial
  Probe
cccttgaatcatatgcacagtatag

SEQ ID NO: 55265 - DNA, 25 bp, Artificial
  Probe
ttgaatcatatgcacagtatagaac

SEQ ID NO: 55266 - DNA, 25 bp, Artificial
  Probe
ttacacgttacctcatttattctca

SEQ ID NO: 55267 - DNA, 25 bp, Artificial
  Probe
tctaaggtctatgtgcatatgtaca

SEQ ID NO: 55268 - DNA, 25 bp, Artificial
  Probe
agtcctacattttcttttgctgaag

SEQ ID NO: 55269 - DNA, 25 bp, Artificial
  Probe
gagtcctacattttcttttgctgaa

SEQ ID NO: 55270 - DNA, 25 bp, Artificial
  Probe
gggcgtttattaaatatacactcta

SEQ ID NO: 55271 - DNA, 25 bp, Artificial
  Probe
cattttacagaggaggaagttgagg

SEQ ID NO: 55272 - DNA, 25 bp, Artificial
  Probe
gggaaattacctggagacattgtat

SEQ ID NO: 55273 - DNA, 25 bp, Artificial
  Probe
ctgagatcaaagtgggtatttaggc

SEQ ID NO: 55274 - DNA, 25 bp, Artificial
  Probe
gctgagatcaaagtgggtatttagg

SEQ ID NO: 55275 - DNA, 25 bp, Artificial
  Probe
ggctgagatcaaagtgggtatttag

SEQ ID NO: 55276 - DNA, 25 bp, Artificial
  Probe
ggaaattacctggagacattgtata

SEQ ID NO: 55277 - DNA, 25 bp, Artificial
  Probe
gccatagtgacaatgtaatttgatt

SEQ ID NO: 55278 - DNA, 25 bp, Artificial
  Probe
tggctgagatcaaagtgggtattta

SEQ ID NO: 55279 - DNA, 25 bp, Artificial
  Probe
caaagtcttggctgagatcaaagtg

SEQ ID NO: 55280 - DNA, 25 bp, Artificial
  Probe
cacaaagtcttggctgagatcaaag

SEQ ID NO: 55281 - DNA, 25 bp, Artificial
  Probe
ttggctgagatcaaagtgggtattt

SEQ ID NO: 55282 - DNA, 25 bp, Artificial
  Probe
acaaagtcttggctgagatcaaagt

SEQ ID NO: 55283 - DNA, 25 bp, Artificial
  Probe
cttggctgagatcaaagtgggtatt

SEQ ID NO: 55284 - DNA, 25 bp, Artificial
  Probe
ttgattgtaccttactatagggtgg

SEQ ID NO: 55285 - DNA, 25 bp, Artificial
  Probe
ttctgtcgaaggaagaattcaagtg

SEQ ID NO: 55286 - DNA, 25 bp, Artificial
  Probe
gaaattacctggagacattgtatat

SEQ ID NO: 55287 - DNA, 25 bp, Artificial
  Probe
ggtatttaggccatagtgacaatgt

SEQ ID NO: 55288 - DNA, 25 bp, Artificial
  Probe
aaagtcttggctgagatcaaagtgg

SEQ ID NO: 55289 - DNA, 25 bp, Artificial
  Probe
tgattgtaccttactatagggtggc

SEQ ID NO: 55290 - DNA, 25 bp, Artificial
  Probe
ggccatagtgacaatgtaatttgat

SEQ ID NO: 55291 - DNA, 25 bp, Artificial
  Probe
aggccatagtgacaatgtaatttga

SEQ ID NO: 55292 - DNA, 25 bp, Artificial
  Probe
tccccttgataaccatgaactagat

SEQ ID NO: 55293 - DNA, 25 bp, Artificial
  Probe
gggtatttaggccatagtgacaatg

SEQ ID NO: 55294 - DNA, 25 bp, Artificial
  Probe
tacttctgtcgaaggaagaattcaa

SEQ ID NO: 55295 - DNA, 25 bp, Artificial
  Probe
taggccatagtgacaatgtaatttg

SEQ ID NO: 55296 - DNA, 25 bp, Artificial
  Probe
tctgtcgaaggaagaattcaagtgc

SEQ ID NO: 55297 - DNA, 25 bp, Artificial
  Probe
atacttctgtcgaaggaagaattca

SEQ ID NO: 55298 - DNA, 25 bp, Artificial
  Probe
tcttggctgagatcaaagtgggtat

SEQ ID NO: 55299 - DNA, 25 bp, Artificial
  Probe
ccccttgataaccatgaactagatg

SEQ ID NO: 55300 - DNA, 25 bp, Artificial
  Probe
ggggaaattacctggagacattgta

SEQ ID NO: 55301 - DNA, 25 bp, Artificial
  Probe
ttaggccatagtgacaatgtaattt

SEQ ID NO: 55302 - DNA, 25 bp, Artificial
  Probe
tttaggccatagtgacaatgtaatt

SEQ ID NO: 55303 - DNA, 25 bp, Artificial
  Probe
cttctgtcgaaggaagaattcaagt

SEQ ID NO: 55304 - DNA, 25 bp, Artificial
  Probe
acttctgtcgaaggaagaattcaag

SEQ ID NO: 55305 - DNA, 25 bp, Artificial
  Probe
gtatttaggccatagtgacaatgta

SEQ ID NO: 55306 - DNA, 25 bp, Artificial
  Probe
atttaggccatagtgacaatgtaat

SEQ ID NO: 55307 - DNA, 25 bp, Artificial
  Probe
cagtctcaaaggctcagttctcaga

SEQ ID NO: 55308 - DNA, 25 bp, Artificial
  Probe
gtccccttgataaccatgaactaga

SEQ ID NO: 55309 - DNA, 25 bp, Artificial
  Probe
tttgattgtaccttactatagggtg

SEQ ID NO: 55310 - DNA, 25 bp, Artificial
  Probe
tctcaaaggctcagttctcagacac

SEQ ID NO: 55311 - DNA, 25 bp, Artificial
  Probe
tgagatcaaagtgggtatttaggcc

SEQ ID NO: 55312 - DNA, 25 bp, Artificial
  Probe
tatacttctgtcgaaggaagaattc

SEQ ID NO: 55313 - DNA, 25 bp, Artificial
  Probe
tatttaggccatagtgacaatgtaa

SEQ ID NO: 55314 - DNA, 25 bp, Artificial
  Probe
atcaaagtgggtatttaggccatag

SEQ ID NO: 55315 - DNA, 25 bp, Artificial
  Probe
gatcaaagtgggtatttaggccata

SEQ ID NO: 55316 - DNA, 25 bp, Artificial
  Probe
agtccccttgataaccatgaactag

SEQ ID NO: 55317 - DNA, 25 bp, Artificial
  Probe
cattaagtgtgctgtagagattcaa

SEQ ID NO: 55318 - DNA, 25 bp, Artificial
  Probe
ttaagtgtgctgtagagattcaaac

SEQ ID NO: 55319 - DNA, 25 bp, Artificial
  Probe
gtatgttgtttctcattacttcccg

SEQ ID NO: 55320 - DNA, 25 bp, Artificial
  Probe
cgtatgttgtttctcattacttccc

SEQ ID NO: 55321 - DNA, 25 bp, Artificial
  Probe
tatgttgtttctcattacttcccgt

SEQ ID NO: 55322 - DNA, 25 bp, Artificial
  Probe
taagtgtgctgtagagattcaaacg

SEQ ID NO: 55323 - DNA, 25 bp, Artificial
  Probe
attaagtgtgctgtagagattcaaa

SEQ ID NO: 55324 - DNA, 25 bp, Artificial
  Probe
atgttgtttctcattacttcccgtg

SEQ ID NO: 55325 - DNA, 25 bp, Artificial
  Probe
gatgtttgaatacagccctaatgac

SEQ ID NO: 55326 - DNA, 25 bp, Artificial
  Probe
tttgaatacagccctaatgacacct

SEQ ID NO: 55327 - DNA, 25 bp, Artificial
  Probe
gtttgaatacagccctaatgacacc

SEQ ID NO: 55328 - DNA, 25 bp, Artificial
  Probe
atgtttgaatacagccctaatgaca

SEQ ID NO: 55329 - DNA, 25 bp, Artificial
  Probe
tacagttccacacgatgtttgaata

SEQ ID NO: 55330 - DNA, 25 bp, Artificial
  Probe
accaagtcttaagtaatcctcactg

SEQ ID NO: 55331 - DNA, 25 bp, Artificial
  Probe
aagtcttaagtaatcctcactgcaa

SEQ ID NO: 55332 - DNA, 25 bp, Artificial
  Probe
agtcttaagtaatcctcactgcaag

SEQ ID NO: 55333 - DNA, 25 bp, Artificial
  Probe
caagtcttaagtaatcctcactgca

SEQ ID NO: 55334 - DNA, 25 bp, Artificial
  Probe
aaactaaagtgctgaccatgagaag

SEQ ID NO: 55335 - DNA, 25 bp, Artificial
  Probe
cgatgtttgaatacagccctaatga

SEQ ID NO: 55336 - DNA, 25 bp, Artificial
  Probe
tgtttgaatacagccctaatgacac

SEQ ID NO: 55337 - DNA, 25 bp, Artificial
  Probe
ccaagtcttaagtaatcctcactgc

SEQ ID NO: 55338 - DNA, 25 bp, Artificial
  Probe
ttgaatacagccctaatgacacctc

SEQ ID NO: 55339 - DNA, 25 bp, Artificial
  Probe
acgatgtttgaatacagccctaatg

SEQ ID NO: 55340 - DNA, 25 bp, Artificial
  Probe
cacgatgtttgaatacagccctaat

SEQ ID NO: 55341 - DNA, 25 bp, Artificial
  Probe
caaactaaagtgctgaccatgagaa

SEQ ID NO: 55342 - DNA, 25 bp, Artificial
  Probe
agttccacacgatgtttgaatacag

SEQ ID NO: 55343 - DNA, 25 bp, Artificial
  Probe
gcattaagtgtgctgtagagattca

SEQ ID NO: 55344 - DNA, 25 bp, Artificial
  Probe
taccaagtcttaagtaatcctcact

SEQ ID NO: 55345 - DNA, 25 bp, Artificial
  Probe
cagttccacacgatgtttgaataca

SEQ ID NO: 55346 - DNA, 25 bp, Artificial
  Probe
acagttccacacgatgtttgaatac

SEQ ID NO: 55347 - DNA, 25 bp, Artificial
  Probe
gcgttaccaagtcttaagtaatcct

SEQ ID NO: 55348 - DNA, 25 bp, Artificial
  Probe
tgcgttaccaagtcttaagtaatcc

SEQ ID NO: 55349 - DNA, 25 bp, Artificial
  Probe
atgcgttaccaagtcttaagtaatc

SEQ ID NO: 55350 - DNA, 25 bp, Artificial
  Probe
gacaaactaaagtgctgaccatgag

SEQ ID NO: 55351 - DNA, 25 bp, Artificial
  Probe
cgttaccaagtcttaagtaatcctc

SEQ ID NO: 55352 - DNA, 25 bp, Artificial
  Probe
gtacagttccacacgatgtttgaat

SEQ ID NO: 55353 - DNA, 25 bp, Artificial
  Probe
acgtatgttgtttctcattacttcc

SEQ ID NO: 55354 - DNA, 25 bp, Artificial
  Probe
acaaactaaagtgctgaccatgaga

SEQ ID NO: 55355 - DNA, 25 bp, Artificial
  Probe
agacaaactaaagtgctgaccatga

SEQ ID NO: 55356 - DNA, 25 bp, Artificial
  Probe
tttctcattacttcccgtgcattac

SEQ ID NO: 55357 - DNA, 25 bp, Artificial
  Probe
gtttctcattacttcccgtgcatta

SEQ ID NO: 55358 - DNA, 25 bp, Artificial
  Probe
acacgatgtttgaatacagccctaa

SEQ ID NO: 55359 - DNA, 25 bp, Artificial
  Probe
aagtgtgctgtagagattcaaacgg

SEQ ID NO: 55360 - DNA, 25 bp, Artificial
  Probe
ttgcattaagtgtgctgtagagatt

SEQ ID NO: 55361 - DNA, 25 bp, Artificial
  Probe
gtcttaagtaatcctcactgcaaga

SEQ ID NO: 55362 - DNA, 25 bp, Artificial
  Probe
tgtgtttccttgacttagaagaaga

SEQ ID NO: 55363 - DNA, 25 bp, Artificial
  Probe
ctgtgtttccttgacttagaagaag

SEQ ID NO: 55364 - DNA, 25 bp, Artificial
  Probe
tctgtgtttccttgacttagaagaa

SEQ ID NO: 55365 - DNA, 25 bp, Artificial
  Probe
tccttgacttagaagaagagaaaca

SEQ ID NO: 55366 - DNA, 25 bp, Artificial
  Probe
tgtttccttgacttagaagaagaga

SEQ ID NO: 55367 - DNA, 25 bp, Artificial
  Probe
gtgtttccttgacttagaagaagag

SEQ ID NO: 55368 - DNA, 25 bp, Artificial
  Probe
atctgtgtttccttgacttagaaga

SEQ ID NO: 55369 - DNA, 25 bp, Artificial
  Probe
ccttgacttagaagaagagaaacag

SEQ ID NO: 55370 - DNA, 25 bp, Artificial
  Probe
aatctgtgtttccttgacttagaag

SEQ ID NO: 55371 - DNA, 25 bp, Artificial
  Probe
caatctgtgtttccttgacttagaa

SEQ ID NO: 55372 - DNA, 25 bp, Artificial
  Probe
ttccttgacttagaagaagagaaac

SEQ ID NO: 55373 - DNA, 25 bp, Artificial
  Probe
gtttccttgacttagaagaagagaa

SEQ ID NO: 55374 - DNA, 25 bp, Artificial
  Probe
cttgacttagaagaagagaaacagt

SEQ ID NO: 55375 - DNA, 25 bp, Artificial
  Probe
tgacttagaagaagagaaacagtac

SEQ ID NO: 55376 - DNA, 25 bp, Artificial
  Probe
ttgacttagaagaagagaaacagta

SEQ ID NO: 55377 - DNA, 25 bp, Artificial
  Probe
catacggaaatccacttagtgtcag

SEQ ID NO: 55378 - DNA, 25 bp, Artificial
  Probe
gtactgctgtgcttatgtctgcttg

SEQ ID NO: 55379 - DNA, 25 bp, Artificial
  Probe
gtattcacctgtaaatagtttgtgt

SEQ ID NO: 55380 - DNA, 25 bp, Artificial
  Probe
tgtattcacctgtaaatagtttgtg

SEQ ID NO: 55381 - DNA, 25 bp, Artificial
  Probe
gtgtattcacctgtaaatagtttgt

SEQ ID NO: 55382 - DNA, 25 bp, Artificial
  Probe
tcaatctgtgtttccttgacttaga

SEQ ID NO: 55383 - DNA, 25 bp, Artificial
  Probe
ttcaatctgtgtttccttgacttag

SEQ ID NO: 55384 - DNA, 25 bp, Artificial
  Probe
tttccttgacttagaagaagagaaa

SEQ ID NO: 55385 - DNA, 25 bp, Artificial
  Probe
tttcaatctgtgtttccttgactta

SEQ ID NO: 55386 - DNA, 25 bp, Artificial
  Probe
ttcattttcaatctgtgtttccttg

SEQ ID NO: 55387 - DNA, 25 bp, Artificial
  Probe
tttgtaaagcggttagttgctgtac

SEQ ID NO: 55388 - DNA, 25 bp, Artificial
  Probe
atacggaaatccacttagtgtcagc

SEQ ID NO: 55389 - DNA, 25 bp, Artificial
  Probe
ttcacctgtaaatagtttgtgtaaa

SEQ ID NO: 55390 - DNA, 25 bp, Artificial
  Probe
attcattttcaatctgtgtttcctt

SEQ ID NO: 55391 - DNA, 25 bp, Artificial
  Probe
gcatacggaaatccacttagtgtca

SEQ ID NO: 55392 - DNA, 25 bp, Artificial
  Probe
attcacctgtaaatagtttgtgtaa

SEQ ID NO: 55393 - DNA, 25 bp, Artificial
  Probe
tactgctgtgcttatgtctgcttgg

SEQ ID NO: 55394 - DNA, 25 bp, Artificial
  Probe
gacttagaagaagagaaacagtact

SEQ ID NO: 55395 - DNA, 25 bp, Artificial
  Probe
tgattcattttcaatctgtgtttcc

SEQ ID NO: 55396 - DNA, 25 bp, Artificial
  Probe
gattcattttcaatctgtgtttcct

SEQ ID NO: 55397 - DNA, 25 bp, Artificial
  Probe
tattcacctgtaaatagtttgtgta

SEQ ID NO: 55398 - DNA, 25 bp, Artificial
  Probe
cgcatacggaaatccacttagtgtc

SEQ ID NO: 55399 - DNA, 25 bp, Artificial
  Probe
gacgcatacggaaatccacttagtg

SEQ ID NO: 55400 - DNA, 25 bp, Artificial
  Probe
agtactgctgtgcttatgtctgctt

SEQ ID NO: 55401 - DNA, 25 bp, Artificial
  Probe
ttttgtaaagcggttagttgctgta

SEQ ID NO: 55402 - DNA, 25 bp, Artificial
  Probe
gtgattcattttcaatctgtgtttc

SEQ ID NO: 55403 - DNA, 25 bp, Artificial
  Probe
ttttcaatctgtgtttccttgactt

SEQ ID NO: 55404 - DNA, 25 bp, Artificial
  Probe
cattttcaatctgtgtttccttgac

SEQ ID NO: 55405 - DNA, 25 bp, Artificial
  Probe
attttcaatctgtgtttccttgact

SEQ ID NO: 55406 - DNA, 25 bp, Artificial
  Probe
tcattttcaatctgtgtttccttga

SEQ ID NO: 55407 - DNA, 25 bp, Artificial
  Probe
tatcaggagacaatcagcattacaa

SEQ ID NO: 55408 - DNA, 25 bp, Artificial
  Probe
ttatcaggagacaatcagcattaca

SEQ ID NO: 55409 - DNA, 25 bp, Artificial
  Probe
cttatcaggagacaatcagcattac

SEQ ID NO: 55410 - DNA, 25 bp, Artificial
  Probe
atcaggagacaatcagcattacaac

SEQ ID NO: 55411 - DNA, 25 bp, Artificial
  Probe
ttcttatcaggagacaatcagcatt

SEQ ID NO: 55412 - DNA, 25 bp, Artificial
  Probe
catcataccagacattatctcgttg

SEQ ID NO: 55413 - DNA, 25 bp, Artificial
  Probe
tcttatcaggagacaatcagcatta

SEQ ID NO: 55414 - DNA, 25 bp, Artificial
  Probe
gcatcataccagacattatctcgtt

SEQ ID NO: 55415 - DNA, 25 bp, Artificial
  Probe
caggagacaatcagcattacaacac

SEQ ID NO: 55416 - DNA, 25 bp, Artificial
  Probe
tcaggagacaatcagcattacaaca

SEQ ID NO: 55417 - DNA, 25 bp, Artificial
  Probe
gagacaatcagcattacaacacctc

SEQ ID NO: 55418 - DNA, 25 bp, Artificial
  Probe
ggcatcataccagacattatctcgt

SEQ ID NO: 55419 - DNA, 25 bp, Artificial
  Probe
atcataccagacattatctcgttgg

SEQ ID NO: 55420 - DNA, 25 bp, Artificial
  Probe
ttggcatcataccagacattatctc

SEQ ID NO: 55421 - DNA, 25 bp, Artificial
  Probe
ataccagacattatctcgttggact

SEQ ID NO: 55422 - DNA, 25 bp, Artificial
  Probe
cataccagacattatctcgttggac

SEQ ID NO: 55423 - DNA, 25 bp, Artificial
  Probe
tcataccagacattatctcgttgga

SEQ ID NO: 55424 - DNA, 25 bp, Artificial
  Probe
agattaaatgacttggcagaagaga

SEQ ID NO: 55425 - DNA, 25 bp, Artificial
  Probe
cagattaaatgacttggcagaagag

SEQ ID NO: 55426 - DNA, 25 bp, Artificial
  Probe
agacaatcagcattacaacacctcc

SEQ ID NO: 55427 - DNA, 25 bp, Artificial
  Probe
ggagacaatcagcattacaacacct

SEQ ID NO: 55428 - DNA, 25 bp, Artificial
  Probe
aggagacaatcagcattacaacacc

SEQ ID NO: 55429 - DNA, 25 bp, Artificial
  Probe
tttcttatcaggagacaatcagcat

SEQ ID NO: 55430 - DNA, 25 bp, Artificial
  Probe
gattaaatgacttggcagaagagaa

SEQ ID NO: 55431 - DNA, 25 bp, Artificial
  Probe
ctttcttatcaggagacaatcagca

SEQ ID NO: 55432 - DNA, 25 bp, Artificial
  Probe
taccagacattatctcgttggactg

SEQ ID NO: 55433 - DNA, 25 bp, Artificial
  Probe
tggcatcataccagacattatctcg

SEQ ID NO: 55434 - DNA, 25 bp, Artificial
  Probe
cctttcttatcaggagacaatcagc

SEQ ID NO: 55435 - DNA, 25 bp, Artificial
  Probe
tttggcatcataccagacattatct

SEQ ID NO: 55436 - DNA, 25 bp, Artificial
  Probe
tctttggcatcataccagacattat

SEQ ID NO: 55437 - DNA, 25 bp, Artificial
  Probe
atctttggcatcataccagacatta

SEQ ID NO: 55438 - DNA, 25 bp, Artificial
  Probe
ctttggcatcataccagacattatc

SEQ ID NO: 55439 - DNA, 25 bp, Artificial
  Probe
ccagacattatctcgttggactgac

SEQ ID NO: 55440 - DNA, 25 bp, Artificial
  Probe
ccagattaaatgacttggcagaaga

SEQ ID NO: 55441 - DNA, 25 bp, Artificial
  Probe
catctttggcatcataccagacatt

SEQ ID NO: 55442 - DNA, 25 bp, Artificial
  Probe
accagacattatctcgttggactga

SEQ ID NO: 55443 - DNA, 25 bp, Artificial
  Probe
cagatgtttctcgatcagctaagtg

SEQ ID NO: 55444 - DNA, 25 bp, Artificial
  Probe
cccagattaaatgacttggcagaag

SEQ ID NO: 55445 - DNA, 25 bp, Artificial
  Probe
atcccagattaaatgacttggcaga

SEQ ID NO: 55446 - DNA, 25 bp, Artificial
  Probe
catcccagattaaatgacttggcag

SEQ ID NO: 55447 - DNA, 25 bp, Artificial
  Probe
tcccagattaaatgacttggcagaa

SEQ ID NO: 55448 - DNA, 25 bp, Artificial
  Probe
tgtatataaatctaagactgcctgt

SEQ ID NO: 55449 - DNA, 25 bp, Artificial
  Probe
tgccttatgacttacaaggattaga

SEQ ID NO: 55450 - DNA, 25 bp, Artificial
  Probe
ccatgccttatgacttacaaggatt

SEQ ID NO: 55451 - DNA, 25 bp, Artificial
  Probe
atccatctttggcatcataccagac

SEQ ID NO: 55452 - DNA, 25 bp, Artificial
  Probe
aatgatcttaaactggagagtgctt

SEQ ID NO: 55453 - DNA, 25 bp, Artificial
  Probe
atgatcttaaactggagagtgcttc

SEQ ID NO: 55454 - DNA, 25 bp, Artificial
  Probe
caatgatcttaaactggagagtgct

SEQ ID NO: 55455 - DNA, 25 bp, Artificial
  Probe
agcaatgatcttaaactggagagtg

SEQ ID NO: 55456 - DNA, 25 bp, Artificial
  Probe
ttcagcaatgatcttaaactggaga

SEQ ID NO: 55457 - DNA, 25 bp, Artificial
  Probe
gttcagcaatgatcttaaactggag

SEQ ID NO: 55458 - DNA, 25 bp, Artificial
  Probe
tcagcaatgatcttaaactggagag

SEQ ID NO: 55459 - DNA, 25 bp, Artificial
  Probe
cagcaatgatcttaaactggagagt

SEQ ID NO: 55460 - DNA, 25 bp, Artificial
  Probe
ttcagtgaaagcaaggtggtagatt

SEQ ID NO: 55461 - DNA, 25 bp, Artificial
  Probe
atcttaaactggagagtgcttcctg

SEQ ID NO: 55462 - DNA, 25 bp, Artificial
  Probe
gatcttaaactggagagtgcttcct

SEQ ID NO: 55463 - DNA, 25 bp, Artificial
  Probe
tgatcttaaactggagagtgcttcc

SEQ ID NO: 55464 - DNA, 25 bp, Artificial
  Probe
aagttcagcaatgatcttaaactgg

SEQ ID NO: 55465 - DNA, 25 bp, Artificial
  Probe
agttcagcaatgatcttaaactgga

SEQ ID NO: 55466 - DNA, 25 bp, Artificial
  Probe
cttaaactggagagtgcttcctgtc

SEQ ID NO: 55467 - DNA, 25 bp, Artificial
  Probe
aaagttcagcaatgatcttaaactg

SEQ ID NO: 55468 - DNA, 25 bp, Artificial
  Probe
tcttaaactggagagtgcttcctgt

SEQ ID NO: 55469 - DNA, 25 bp, Artificial
  Probe
gcaatgatcttaaactggagagtgc

SEQ ID NO: 55470 - DNA, 25 bp, Artificial
  Probe
gaaaagttcagcaatgatcttaaac

SEQ ID NO: 55471 - DNA, 25 bp, Artificial
  Probe
ttaaactggagagtgcttcctgtcc

SEQ ID NO: 55472 - DNA, 25 bp, Artificial
  Probe
ccctattgaaaagttcagcaatgat

SEQ ID NO: 55473 - DNA, 25 bp, Artificial
  Probe
cctattgaaaagttcagcaatgatc

SEQ ID NO: 55474 - DNA, 25 bp, Artificial
  Probe
cccctattgaaaagttcagcaatga

SEQ ID NO: 55475 - DNA, 25 bp, Artificial
  Probe
ctattgaaaagttcagcaatgatct

SEQ ID NO: 55476 - DNA, 25 bp, Artificial
  Probe
aaaagttcagcaatgatcttaaact

SEQ ID NO: 55477 - DNA, 25 bp, Artificial
  Probe
tgaaaagttcagcaatgatcttaaa

SEQ ID NO: 55478 - DNA, 25 bp, Artificial
  Probe
ttgaaaagttcagcaatgatcttaa

SEQ ID NO: 55479 - DNA, 25 bp, Artificial
  Probe
attgaaaagttcagcaatgatctta

SEQ ID NO: 55480 - DNA, 25 bp, Artificial
  Probe
tattgaaaagttcagcaatgatctt

SEQ ID NO: 55481 - DNA, 25 bp, Artificial
  Probe
gaggataattggtcggagtaagttc

SEQ ID NO: 55482 - DNA, 25 bp, Artificial
  Probe
aggataattggtcggagtaagttca

SEQ ID NO: 55483 - DNA, 25 bp, Artificial
  Probe
ggataattggtcggagtaagttcaa

SEQ ID NO: 55484 - DNA, 25 bp, Artificial
  Probe
cacatgctcctagatcagtgaattg

SEQ ID NO: 55485 - DNA, 25 bp, Artificial
  Probe
taattggtcggagtaagttcaaagg

SEQ ID NO: 55486 - DNA, 25 bp, Artificial
  Probe
ataattggtcggagtaagttcaaag

SEQ ID NO: 55487 - DNA, 25 bp, Artificial
  Probe
gataattggtcggagtaagttcaaa

SEQ ID NO: 55488 - DNA, 25 bp, Artificial
  Probe
acatgctcctagatcagtgaattgc

SEQ ID NO: 55489 - DNA, 25 bp, Artificial
  Probe
ccgtaccataaagcgaggataattg

SEQ ID NO: 55490 - DNA, 25 bp, Artificial
  Probe
cgaggataattggtcggagtaagtt

SEQ ID NO: 55491 - DNA, 25 bp, Artificial
  Probe
gcacatgctcctagatcagtgaatt

SEQ ID NO: 55492 - DNA, 25 bp, Artificial
  Probe
taccatcgactttgaagagttcttg

SEQ ID NO: 55493 - DNA, 25 bp, Artificial
  Probe
gtaccatcgactttgaagagttctt

SEQ ID NO: 55494 - DNA, 25 bp, Artificial
  Probe
tccgtaccataaagcgaggataatt

SEQ ID NO: 55495 - DNA, 25 bp, Artificial
  Probe
catgctcctagatcagtgaattgcg

SEQ ID NO: 55496 - DNA, 25 bp, Artificial
  Probe
aattggtcggagtaagttcaaaggg

SEQ ID NO: 55497 - DNA, 25 bp, Artificial
  Probe
cgtaccataaagcgaggataattgg

SEQ ID NO: 55498 - DNA, 25 bp, Artificial
  Probe
cgactttgaagagttcttggtcatg

SEQ ID NO: 55499 - DNA, 25 bp, Artificial
  Probe
atgctcctagatcagtgaattgcgt

SEQ ID NO: 55500 - DNA, 25 bp, Artificial
  Probe
tccctgatgaaggatggtgataaga

SEQ ID NO: 55501 - DNA, 25 bp, Artificial
  Probe
gtccgtaccataaagcgaggataat

SEQ ID NO: 55502 - DNA, 25 bp, Artificial
  Probe
gatgaaagaggatgcgaaagggaag

SEQ ID NO: 55503 - DNA, 25 bp, Artificial
  Probe
catcgactttgaagagttcttggtc

SEQ ID NO: 55504 - DNA, 25 bp, Artificial
  Probe
ttgaagagttcttggtcatgatggt

SEQ ID NO: 55505 - DNA, 25 bp, Artificial
  Probe
tcgactttgaagagttcttggtcat

SEQ ID NO: 55506 - DNA, 25 bp, Artificial
  Probe
atcgactttgaagagttcttggtca

SEQ ID NO: 55507 - DNA, 25 bp, Artificial
  Probe
attggtcggagtaagttcaaaggga

SEQ ID NO: 55508 - DNA, 25 bp, Artificial
  Probe
atgaaagaggatgcgaaagggaaga

SEQ ID NO: 55509 - DNA, 25 bp, Artificial
  Probe
agatgaaagaggatgcgaaagggaa

SEQ ID NO: 55510 - DNA, 25 bp, Artificial
  Probe
aagcgaggataattggtcggagtaa

SEQ ID NO: 55511 - DNA, 25 bp, Artificial
  Probe
tccaaacatgatcaatagacccaag

SEQ ID NO: 55512 - DNA, 25 bp, Artificial
  Probe
ataaagcgaggataattggtcggag

SEQ ID NO: 55513 - DNA, 25 bp, Artificial
  Probe
tgaagagttcttggtcatgatggtg

SEQ ID NO: 55514 - DNA, 25 bp, Artificial
  Probe
ctttgaagagttcttggtcatgatg

SEQ ID NO: 55515 - DNA, 25 bp, Artificial
  Probe
actttgaagagttcttggtcatgat

SEQ ID NO: 55516 - DNA, 25 bp, Artificial
  Probe
cataaagcgaggataattggtcgga

SEQ ID NO: 55517 - DNA, 25 bp, Artificial
  Probe
agcgaggataattggtcggagtaag

SEQ ID NO: 55518 - DNA, 25 bp, Artificial
  Probe
tgctcctagatcagtgaattgcgtg

SEQ ID NO: 55519 - DNA, 25 bp, Artificial
  Probe
ccaaacatgatcaatagacccaagg

SEQ ID NO: 55520 - DNA, 25 bp, Artificial
  Probe
tgcacatgctcctagatcagtgaat

SEQ ID NO: 55521 - DNA, 25 bp, Artificial
  Probe
aatccctgatgaaggatggtgataa

SEQ ID NO: 55522 - DNA, 25 bp, Artificial
  Probe
tttgaagagttcttggtcatgatgg

SEQ ID NO: 55523 - DNA, 25 bp, Artificial
  Probe
gcgaggataattggtcggagtaagt

SEQ ID NO: 55524 - DNA, 25 bp, Artificial
  Probe
atccctgatgaaggatggtgataag

SEQ ID NO: 55525 - DNA, 25 bp, Artificial
  Probe
gaatccctgatgaaggatggtgata

SEQ ID NO: 55526 - DNA, 25 bp, Artificial
  Probe
ctcttgttactccatctgtcctgta

SEQ ID NO: 55527 - DNA, 25 bp, Artificial
  Probe
ctgacttactgctctgaagaacaag

SEQ ID NO: 55528 - DNA, 25 bp, Artificial
  Probe
aggaggacactgtaggatatgttaa

SEQ ID NO: 55529 - DNA, 25 bp, Artificial
  Probe
aaggaggacactgtaggatatgtta

SEQ ID NO: 55530 - DNA, 25 bp, Artificial
  Probe
tactccatctgtcctgtaacacaat

SEQ ID NO: 55531 - DNA, 25 bp, Artificial
  Probe
taacacaatgctgacttactgctct

SEQ ID NO: 55532 - DNA, 25 bp, Artificial
  Probe
gaacaaggaggacactgtaggatat

SEQ ID NO: 55533 - DNA, 25 bp, Artificial
  Probe
caaggaggacactgtaggatatgtt

SEQ ID NO: 55534 - DNA, 25 bp, Artificial
  Probe
aacaaggaggacactgtaggatatg

SEQ ID NO: 55535 - DNA, 25 bp, Artificial
  Probe
gacttactgctctgaagaacaagga

SEQ ID NO: 55536 - DNA, 25 bp, Artificial
  Probe
aatgctgacttactgctctgaagaa

SEQ ID NO: 55537 - DNA, 25 bp, Artificial
  Probe
aaggattacaagacacataggctgt

SEQ ID NO: 55538 - DNA, 25 bp, Artificial
  Probe
tcttgttactccatctgtcctgtaa

SEQ ID NO: 55539 - DNA, 25 bp, Artificial
  Probe
tgacttactgctctgaagaacaagg

SEQ ID NO: 55540 - DNA, 25 bp, Artificial
  Probe
ttactccatctgtcctgtaacacaa

SEQ ID NO: 55541 - DNA, 25 bp, Artificial
  Probe
acttactgctctgaagaacaaggag

SEQ ID NO: 55542 - DNA, 25 bp, Artificial
  Probe
agaacaaggaggacactgtaggata

SEQ ID NO: 55543 - DNA, 25 bp, Artificial
  Probe
gtcgtcatggagagcatctacttaa

SEQ ID NO: 55544 - DNA, 25 bp, Artificial
  Probe
gaaaggattacaagacacataggct

SEQ ID NO: 55545 - DNA, 25 bp, Artificial
  Probe
agaaaggattacaagacacataggc

SEQ ID NO: 55546 - DNA, 25 bp, Artificial
  Probe
acatcagaaaggattacaagacaca

SEQ ID NO: 55547 - DNA, 25 bp, Artificial
  Probe
aaaggattacaagacacataggctg

SEQ ID NO: 55548 - DNA, 25 bp, Artificial
  Probe
cagaaaggattacaagacacatagg

SEQ ID NO: 55549 - DNA, 25 bp, Artificial
  Probe
aacatcagaaaggattacaagacac

SEQ ID NO: 55550 - DNA, 25 bp, Artificial
  Probe
tgtcctgtaacacaatgctgactta

SEQ ID NO: 55551 - DNA, 25 bp, Artificial
  Probe
atgctgacttactgctctgaagaac

SEQ ID NO: 55552 - DNA, 25 bp, Artificial
  Probe
caatgctgacttactgctctgaaga

SEQ ID NO: 55553 - DNA, 25 bp, Artificial
  Probe
catcagaaaggattacaagacacat

SEQ ID NO: 55554 - DNA, 25 bp, Artificial
  Probe
cctgtaacacaatgctgacttactg

SEQ ID NO: 55555 - DNA, 25 bp, Artificial
  Probe
gtcctgtaacacaatgctgacttac

SEQ ID NO: 55556 - DNA, 25 bp, Artificial
  Probe
acaaggaggacactgtaggatatgt

SEQ ID NO: 55557 - DNA, 25 bp, Artificial
  Probe
tcctgtaacacaatgctgacttact

SEQ ID NO: 55558 - DNA, 25 bp, Artificial
  Probe
tatgttgttagaaagccctcaaaga

SEQ ID NO: 55559 - DNA, 25 bp, Artificial
  Probe
tcaatatgttgttagaaagccctca

SEQ ID NO: 55560 - DNA, 25 bp, Artificial
  Probe
ctgaagaacaaggaggacactgtag

SEQ ID NO: 55561 - DNA, 25 bp, Artificial
  Probe
actccatctgtcctgtaacacaatg

SEQ ID NO: 55562 - DNA, 25 bp, Artificial
  Probe
caatatgttgttagaaagccctcaa

SEQ ID NO: 55563 - DNA, 25 bp, Artificial
  Probe
acaatgctgacttactgctctgaag

SEQ ID NO: 55564 - DNA, 25 bp, Artificial
  Probe
gctgacttactgctctgaagaacaa

SEQ ID NO: 55565 - DNA, 25 bp, Artificial
  Probe
atatgttgttagaaagccctcaaag

SEQ ID NO: 55566 - DNA, 25 bp, Artificial
  Probe
aaacatcagaaaggattacaagaca

SEQ ID NO: 55567 - DNA, 25 bp, Artificial
  Probe
atgttgttagaaagccctcaaagaa

SEQ ID NO: 55568 - DNA, 25 bp, Artificial
  Probe
cacaatgctgacttactgctctgaa

SEQ ID NO: 55569 - DNA, 25 bp, Artificial
  Probe
gtaacacaatgctgacttactgctc

SEQ ID NO: 55570 - DNA, 25 bp, Artificial
  Probe
atcaatatgttgttagaaagccctc

SEQ ID NO: 55571 - DNA, 25 bp, Artificial
  Probe
ctaatactgtgtgtctgatagtggt

SEQ ID NO: 55572 - DNA, 25 bp, Artificial
  Probe
tctaatactgtgtgtctgatagtgg

SEQ ID NO: 55573 - DNA, 25 bp, Artificial
  Probe
aatactgtgtgtctgatagtggtac

SEQ ID NO: 55574 - DNA, 25 bp, Artificial
  Probe
taatactgtgtgtctgatagtggta

SEQ ID NO: 55575 - DNA, 25 bp, Artificial
  Probe
ttctaatactgtgtgtctgatagtg

SEQ ID NO: 55576 - DNA, 25 bp, Artificial
  Probe
tgtcaccttgctgtagtttctaata

SEQ ID NO: 55577 - DNA, 25 bp, Artificial
  Probe
gtcaccttgctgtagtttctaatac

SEQ ID NO: 55578 - DNA, 25 bp, Artificial
  Probe
ctgtcaccttgctgtagtttctaat

SEQ ID NO: 55579 - DNA, 25 bp, Artificial
  Probe
tgctgtagtttctaatactgtgtgt

SEQ ID NO: 55580 - DNA, 25 bp, Artificial
  Probe
accttgctgtagtttctaatactgt

SEQ ID NO: 55581 - DNA, 25 bp, Artificial
  Probe
gctgtagtttctaatactgtgtgtc

SEQ ID NO: 55582 - DNA, 25 bp, Artificial
  Probe
cccaaactactccagaatgacattt

SEQ ID NO: 55583 - DNA, 25 bp, Artificial
  Probe
ccttgctgtagtttctaatactgtg

SEQ ID NO: 55584 - DNA, 25 bp, Artificial
  Probe
caccttgctgtagtttctaatactg

SEQ ID NO: 55585 - DNA, 25 bp, Artificial
  Probe
tcaccttgctgtagtttctaatact

SEQ ID NO: 55586 - DNA, 25 bp, Artificial
  Probe
ttgctgtagtttctaatactgtgtg

SEQ ID NO: 55587 - DNA, 25 bp, Artificial
  Probe
cttgctgtagtttctaatactgtgt

SEQ ID NO: 55588 - DNA, 25 bp, Artificial
  Probe
ttcttagaaccacatggtcactcta

SEQ ID NO: 55589 - DNA, 25 bp, Artificial
  Probe
tcttagaaccacatggtcactctag

SEQ ID NO: 55590 - DNA, 25 bp, Artificial
  Probe
gaatgacatttggcactgttcttag

SEQ ID NO: 55591 - DNA, 25 bp, Artificial
  Probe
tgtagtttctaatactgtgtgtctg

SEQ ID NO: 55592 - DNA, 25 bp, Artificial
  Probe
aatgacatttggcactgttcttaga

SEQ ID NO: 55593 - DNA, 25 bp, Artificial
  Probe
atgacatttggcactgttcttagaa

SEQ ID NO: 55594 - DNA, 25 bp, Artificial
  Probe
gtagtttctaatactgtgtgtctga

SEQ ID NO: 55595 - DNA, 25 bp, Artificial
  Probe
ctgtagtttctaatactgtgtgtct

SEQ ID NO: 55596 - DNA, 25 bp, Artificial
  Probe
gttaagaagattatctaagtcctgg

SEQ ID NO: 55597 - DNA, 25 bp, Artificial
  Probe
ttgaatccaagtatatggctgcttt

SEQ ID NO: 55598 - DNA, 25 bp, Artificial
  Probe
catggtcactctagcaaggtcctaa

SEQ ID NO: 55599 - DNA, 25 bp, Artificial
  Probe
gtttctaatactgtgtgtctgatag

SEQ ID NO: 55600 - DNA, 25 bp, Artificial
  Probe
gctgtcaccttgctgtagtttctaa

SEQ ID NO: 55601 - DNA, 25 bp, Artificial
  Probe
tgaatccaagtatatggctgctttg

SEQ ID NO: 55602 - DNA, 25 bp, Artificial
  Probe
aaactactccagaatgacatttggc

SEQ ID NO: 55603 - DNA, 25 bp, Artificial
  Probe
cttagaaccacatggtcactctagc

SEQ ID NO: 55604 - DNA, 25 bp, Artificial
  Probe
atggtcactctagcaaggtcctaaa

SEQ ID NO: 55605 - DNA, 25 bp, Artificial
  Probe
tttctaatactgtgtgtctgatagt

SEQ ID NO: 55606 - DNA, 25 bp, Artificial
  Probe
agtttctaatactgtgtgtctgata

SEQ ID NO: 55607 - DNA, 25 bp, Artificial
  Probe
tagtttctaatactgtgtgtctgat

SEQ ID NO: 55608 - DNA, 25 bp, Artificial
  Probe
ttaagaagattatctaagtcctggg

SEQ ID NO: 55609 - DNA, 25 bp, Artificial
  Probe
cttgaatccaagtatatggctgctt

SEQ ID NO: 55610 - DNA, 25 bp, Artificial
  Probe
agaatgacatttggcactgttctta

SEQ ID NO: 55611 - DNA, 25 bp, Artificial
  Probe
caaactactccagaatgacatttgg

SEQ ID NO: 55612 - DNA, 25 bp, Artificial
  Probe
ccaaactactccagaatgacatttg

SEQ ID NO: 55613 - DNA, 25 bp, Artificial
  Probe
tgttaagaagattatctaagtcctg

SEQ ID NO: 55614 - DNA, 25 bp, Artificial
  Probe
tagaaccacatggtcactctagcaa

SEQ ID NO: 55615 - DNA, 25 bp, Artificial
  Probe
ttagaaccacatggtcactctagca

SEQ ID NO: 55616 - DNA, 25 bp, Artificial
  Probe
ctattgcctaccagagaaacaaagc

SEQ ID NO: 55617 - DNA, 25 bp, Artificial
  Probe
gctattgcctaccagagaaacaaag

SEQ ID NO: 55618 - DNA, 25 bp, Artificial
  Probe
ctgggttcagtttctttaagctaag

SEQ ID NO: 55619 - DNA, 25 bp, Artificial
  Probe
ctaccagagaaacaaagccagacag

SEQ ID NO: 55620 - DNA, 25 bp, Artificial
  Probe
tattgcctaccagagaaacaaagcc

SEQ ID NO: 55621 - DNA, 25 bp, Artificial
  Probe
agctattgcctaccagagaaacaaa

SEQ ID NO: 55622 - DNA, 25 bp, Artificial
  Probe
ttaagctaagactgacaaggccatg

SEQ ID NO: 55623 - DNA, 25 bp, Artificial
  Probe
gggttcagtttctttaagctaagac

SEQ ID NO: 55624 - DNA, 25 bp, Artificial
  Probe
tgggttcagtttctttaagctaaga

SEQ ID NO: 55625 - DNA, 25 bp, Artificial
  Probe
gtgacagctattgcctaccagagaa

SEQ ID NO: 55626 - DNA, 25 bp, Artificial
  Probe
ttctttaagctaagactgacaaggc

SEQ ID NO: 55627 - DNA, 25 bp, Artificial
  Probe
tttctttaagctaagactgacaagg

SEQ ID NO: 55628 - DNA, 25 bp, Artificial
  Probe
ggttcagtttctttaagctaagact

SEQ ID NO: 55629 - DNA, 25 bp, Artificial
  Probe
cagctattgcctaccagagaaacaa

SEQ ID NO: 55630 - DNA, 25 bp, Artificial
  Probe
gacagctattgcctaccagagaaac

SEQ ID NO: 55631 - DNA, 25 bp, Artificial
  Probe
atgtgaaggcaagttccatgtagga

SEQ ID NO: 55632 - DNA, 25 bp, Artificial
  Probe
gctgggttcagtttctttaagctaa

SEQ ID NO: 55633 - DNA, 25 bp, Artificial
  Probe
agtttctttaagctaagactgacaa

SEQ ID NO: 55634 - DNA, 25 bp, Artificial
  Probe
gtttctttaagctaagactgacaag

SEQ ID NO: 55635 - DNA, 25 bp, Artificial
  Probe
tttaagctaagactgacaaggccat

SEQ ID NO: 55636 - DNA, 25 bp, Artificial
  Probe
tgacagctattgcctaccagagaaa

SEQ ID NO: 55637 - DNA, 25 bp, Artificial
  Probe
tgctgggttcagtttctttaagcta

SEQ ID NO: 55638 - DNA, 25 bp, Artificial
  Probe
gggtgctgggttcagtttctttaag

SEQ ID NO: 55639 - DNA, 25 bp, Artificial
  Probe
cctaccagagaaacaaagccagaca

SEQ ID NO: 55640 - DNA, 25 bp, Artificial
  Probe
acagctattgcctaccagagaaaca

SEQ ID NO: 55641 - DNA, 25 bp, Artificial
  Probe
tgaaggcaagttccatgtaggacag

SEQ ID NO: 55642 - DNA, 25 bp, Artificial
  Probe
ctttaagctaagactgacaaggcca

SEQ ID NO: 55643 - DNA, 25 bp, Artificial
  Probe
gtgaaggcaagttccatgtaggaca

SEQ ID NO: 55644 - DNA, 25 bp, Artificial
  Probe
tgtgaaggcaagttccatgtaggac

SEQ ID NO: 55645 - DNA, 25 bp, Artificial
  Probe
taagctaagactgacaaggccatgt

SEQ ID NO: 55646 - DNA, 25 bp, Artificial
  Probe
agggtgctgggttcagtttctttaa

SEQ ID NO: 55647 - DNA, 25 bp, Artificial
  Probe
attgcctaccagagaaacaaagcca

SEQ ID NO: 55648 - DNA, 25 bp, Artificial
  Probe
taccagagaaacaaagccagacagc

SEQ ID NO: 55649 - DNA, 25 bp, Artificial
  Probe
cagtttctttaagctaagactgaca

SEQ ID NO: 55650 - DNA, 25 bp, Artificial
  Probe
gttcagtttctttaagctaagactg

SEQ ID NO: 55651 - DNA, 25 bp, Artificial
  Probe
gtgctgggttcagtttctttaagct

SEQ ID NO: 55652 - DNA, 25 bp, Artificial
  Probe
aagctaagactgacaaggccatgtt

SEQ ID NO: 55653 - DNA, 25 bp, Artificial
  Probe
tctttaagctaagactgacaaggcc

SEQ ID NO: 55654 - DNA, 25 bp, Artificial
  Probe
cagggtgctgggttcagtttcttta

SEQ ID NO: 55655 - DNA, 25 bp, Artificial
  Probe
ggtgctgggttcagtttctttaagc

SEQ ID NO: 55656 - DNA, 25 bp, Artificial
  Probe
agctaagactgacaaggccatgttg

SEQ ID NO: 55657 - DNA, 25 bp, Artificial
  Probe
gagagagagagagagagagagaaga

SEQ ID NO: 55658 - DNA, 25 bp, Artificial
  Probe
agagagagagagagagagagaagac

SEQ ID NO: 55659 - DNA, 25 bp, Artificial
  Probe
tgtagtaatacggtggactcttcta

SEQ ID NO: 55660 - DNA, 25 bp, Artificial
  Probe
agtaatacggtggactcttctatga

SEQ ID NO: 55661 - DNA, 25 bp, Artificial
  Probe
gtaatacggtggactcttctatgag

SEQ ID NO: 55662 - DNA, 25 bp, Artificial
  Probe
tagtaatacggtggactcttctatg

SEQ ID NO: 55663 - DNA, 25 bp, Artificial
  Probe
gtagtaatacggtggactcttctat

SEQ ID NO: 55664 - DNA, 25 bp, Artificial
  Probe
ctgtagtaatacggtggactcttct

SEQ ID NO: 55665 - DNA, 25 bp, Artificial
  Probe
taatacggtggactcttctatgagg

SEQ ID NO: 55666 - DNA, 25 bp, Artificial
  Probe
cctgtagtaatacggtggactcttc

SEQ ID NO: 55667 - DNA, 25 bp, Artificial
  Probe
gagagagagagagagagagaagacg

SEQ ID NO: 55668 - DNA, 25 bp, Artificial
  Probe
gtggactcttctatgaggagacaac

SEQ ID NO: 55669 - DNA, 25 bp, Artificial
  Probe
gagagagagagagagagaagacgac

SEQ ID NO: 55670 - DNA, 25 bp, Artificial
  Probe
agagagagagagagagagaagacga

SEQ ID NO: 55671 - DNA, 25 bp, Artificial
  Probe
tacttcctgtagtaatacggtggac

SEQ ID NO: 55672 - DNA, 25 bp, Artificial
  Probe
aatacggtggactcttctatgagga

SEQ ID NO: 55673 - DNA, 25 bp, Artificial
  Probe
agagagagagagagagaagacgact

SEQ ID NO: 55674 - DNA, 25 bp, Artificial
  Probe
tttagtttctcctacagacaccttg

SEQ ID NO: 55675 - DNA, 25 bp, Artificial
  Probe
cttcctgtagtaatacggtggactc

SEQ ID NO: 55676 - DNA, 25 bp, Artificial
  Probe
atacggtggactcttctatgaggag

SEQ ID NO: 55677 - DNA, 25 bp, Artificial
  Probe
atttagtttctcctacagacacctt

SEQ ID NO: 55678 - DNA, 25 bp, Artificial
  Probe
tacagacaccttgccagtaacctta

SEQ ID NO: 55679 - DNA, 25 bp, Artificial
  Probe
gctatttagtttctcctacagacac

SEQ ID NO: 55680 - DNA, 25 bp, Artificial
  Probe
gagagagagagagagaagacgactc

SEQ ID NO: 55681 - DNA, 25 bp, Artificial
  Probe
aatggttctttgctgtttctggatt

SEQ ID NO: 55682 - DNA, 25 bp, Artificial
  Probe
aaatggttctttgctgtttctggat

SEQ ID NO: 55683 - DNA, 25 bp, Artificial
  Probe
tcctgtagtaatacggtggactctt

SEQ ID NO: 55684 - DNA, 25 bp, Artificial
  Probe
ttcctgtagtaatacggtggactct

SEQ ID NO: 55685 - DNA, 25 bp, Artificial
  Probe
ctacttcctgtagtaatacggtgga

SEQ ID NO: 55686 - DNA, 25 bp, Artificial
  Probe
tatttagtttctcctacagacacct

SEQ ID NO: 55687 - DNA, 25 bp, Artificial
  Probe
ctgtttctggattcccttcttcttg

SEQ ID NO: 55688 - DNA, 25 bp, Artificial
  Probe
acttcctgtagtaatacggtggact

SEQ ID NO: 55689 - DNA, 25 bp, Artificial
  Probe
ctatttagtttctcctacagacacc

SEQ ID NO: 55690 - DNA, 25 bp, Artificial
  Probe
tggactcttctatgaggagacaacc

SEQ ID NO: 55691 - DNA, 25 bp, Artificial
  Probe
ggtggactcttctatgaggagacaa

SEQ ID NO: 55692 - DNA, 25 bp, Artificial
  Probe
atggttctttgctgtttctggattc

SEQ ID NO: 55693 - DNA, 25 bp, Artificial
  Probe
ggactcttctatgaggagacaacct

SEQ ID NO: 55694 - DNA, 25 bp, Artificial
  Probe
ttagtttctcctacagacaccttgc

SEQ ID NO: 55695 - DNA, 25 bp, Artificial
  Probe
gctacttcctgtagtaatacggtgg

SEQ ID NO: 55696 - DNA, 25 bp, Artificial
  Probe
tacggtggactcttctatgaggaga

SEQ ID NO: 55697 - DNA, 25 bp, Artificial
  Probe
gagctacttcctgtagtaatacggt

SEQ ID NO: 55698 - DNA, 25 bp, Artificial
  Probe
agctacttcctgtagtaatacggtg

SEQ ID NO: 55699 - DNA, 25 bp, Artificial
  Probe
agctatttagtttctcctacagaca

SEQ ID NO: 55700 - DNA, 25 bp, Artificial
  Probe
tttcaatagcctgtggtgggtaatg

SEQ ID NO: 55701 - DNA, 25 bp, Artificial
  Probe
tttgctgtttctggattcccttctt

SEQ ID NO: 55702 - DNA, 25 bp, Artificial
  Probe
ccttggttatgtctttgctctattg

SEQ ID NO: 55703 - DNA, 25 bp, Artificial
  Probe
tccttggttatgtctttgctctatt

SEQ ID NO: 55704 - DNA, 25 bp, Artificial
  Probe
ctccttggttatgtctttgctctat

SEQ ID NO: 55705 - DNA, 25 bp, Artificial
  Probe
cttggttatgtctttgctctattgc

SEQ ID NO: 55706 - DNA, 25 bp, Artificial
  Probe
catttgaaactgagcactaaactgg

SEQ ID NO: 55707 - DNA, 25 bp, Artificial
  Probe
tctccttggttatgtctttgctcta

SEQ ID NO: 55708 - DNA, 25 bp, Artificial
  Probe
tttctccttggttatgtctttgctc

SEQ ID NO: 55709 - DNA, 25 bp, Artificial
  Probe
ctttctccttggttatgtctttgct

SEQ ID NO: 55710 - DNA, 25 bp, Artificial
  Probe
gcatttgaaactgagcactaaactg

SEQ ID NO: 55711 - DNA, 25 bp, Artificial
  Probe
ttggttatgtctttgctctattgcc

SEQ ID NO: 55712 - DNA, 25 bp, Artificial
  Probe
atttgaaactgagcactaaactggg

SEQ ID NO: 55713 - DNA, 25 bp, Artificial
  Probe
ttctccttggttatgtctttgctct

SEQ ID NO: 55714 - DNA, 25 bp, Artificial
  Probe
ccagtgttaatcctgaaatgtctca

SEQ ID NO: 55715 - DNA, 25 bp, Artificial
  Probe
cagtgttaatcctgaaatgtctcac

SEQ ID NO: 55716 - DNA, 25 bp, Artificial
  Probe
agtgttaatcctgaaatgtctcacc

SEQ ID NO: 55717 - DNA, 25 bp, Artificial
  Probe
tgttaatcctgaaatgtctcaccga

SEQ ID NO: 55718 - DNA, 25 bp, Artificial
  Probe
ctacttactgcctgtttccactgaa

SEQ ID NO: 55719 - DNA, 25 bp, Artificial
  Probe
gctttctccttggttatgtctttgc

SEQ ID NO: 55720 - DNA, 25 bp, Artificial
  Probe
ttaatcctgaaatgtctcaccgact

SEQ ID NO: 55721 - DNA, 25 bp, Artificial
  Probe
gttaatcctgaaatgtctcaccgac

SEQ ID NO: 55722 - DNA, 25 bp, Artificial
  Probe
agctttctccttggttatgtctttg

SEQ ID NO: 55723 - DNA, 25 bp, Artificial
  Probe
aacgtgactgaaagaagaacaattt

SEQ ID NO: 55724 - DNA, 25 bp, Artificial
  Probe
aaacgtgactgaaagaagaacaatt

SEQ ID NO: 55725 - DNA, 25 bp, Artificial
  Probe
gccagtgttaatcctgaaatgtctc

SEQ ID NO: 55726 - DNA, 25 bp, Artificial
  Probe
tttgtgtttacattgagccaagtcc

SEQ ID NO: 55727 - DNA, 25 bp, Artificial
  Probe
ttacattgagccaagtcctggtaga

SEQ ID NO: 55728 - DNA, 25 bp, Artificial
  Probe
gtgttaatcctgaaatgtctcaccg

SEQ ID NO: 55729 - DNA, 25 bp, Artificial
  Probe
ctgccagtgttaatcctgaaatgtc

SEQ ID NO: 55730 - DNA, 25 bp, Artificial
  Probe
aaactgccagtgttaatcctgaaat

SEQ ID NO: 55731 - DNA, 25 bp, Artificial
  Probe
tggttatgtctttgctctattgccc

SEQ ID NO: 55732 - DNA, 25 bp, Artificial
  Probe
gtctacttactgcctgtttccactg

SEQ ID NO: 55733 - DNA, 25 bp, Artificial
  Probe
gagctttctccttggttatgtcttt

SEQ ID NO: 55734 - DNA, 25 bp, Artificial
  Probe
gttacaaactgccagtgttaatcct

SEQ ID NO: 55735 - DNA, 25 bp, Artificial
  Probe
taatcctgaaatgtctcaccgactg

SEQ ID NO: 55736 - DNA, 25 bp, Artificial
  Probe
tctacttactgcctgtttccactga

SEQ ID NO: 55737 - DNA, 25 bp, Artificial
  Probe
ttacaaactgccagtgttaatcctg

SEQ ID NO: 55738 - DNA, 25 bp, Artificial
  Probe
tgccagtgttaatcctgaaatgtct

SEQ ID NO: 55739 - DNA, 25 bp, Artificial
  Probe
aactgccagtgttaatcctgaaatg

SEQ ID NO: 55740 - DNA, 25 bp, Artificial
  Probe
agagctttctccttggttatgtctt

SEQ ID NO: 55741 - DNA, 25 bp, Artificial
  Probe
atgagacaaccaaaacaaaccaaaa

SEQ ID NO: 55742 - DNA, 25 bp, Artificial
  Probe
aatgagacaaccaaaacaaaccaaa

SEQ ID NO: 55743 - DNA, 25 bp, Artificial
  Probe
aaatgagacaaccaaaacaaaccaa

SEQ ID NO: 55744 - DNA, 25 bp, Artificial
  Probe
aacaaatgagacaaccaaaacaaac

SEQ ID NO: 55745 - DNA, 25 bp, Artificial
  Probe
caacaaatgagacaaccaaaacaaa

SEQ ID NO: 55746 - DNA, 25 bp, Artificial
  Probe
tacattgagccaagtcctggtagag

SEQ ID NO: 55747 - DNA, 25 bp, Artificial
  Probe
acgcagtattacacagaagttctta

SEQ ID NO: 55748 - DNA, 25 bp, Artificial
  Probe
tacgcagtattacacagaagttctt

SEQ ID NO: 55749 - DNA, 25 bp, Artificial
  Probe
ctacgcagtattacacagaagttct

SEQ ID NO: 55750 - DNA, 25 bp, Artificial
  Probe
gctacgcagtattacacagaagttc

SEQ ID NO: 55751 - DNA, 25 bp, Artificial
  Probe
attgaagacatgagacagtggaatt

SEQ ID NO: 55752 - DNA, 25 bp, Artificial
  Probe
cgcagtattacacagaagttcttaa

SEQ ID NO: 55753 - DNA, 25 bp, Artificial
  Probe
ttgaagacatgagacagtggaattg

SEQ ID NO: 55754 - DNA, 25 bp, Artificial
  Probe
cattgaagacatgagacagtggaat

SEQ ID NO: 55755 - DNA, 25 bp, Artificial
  Probe
tcaacattgaagacatgagacagtg

SEQ ID NO: 55756 - DNA, 25 bp, Artificial
  Probe
acattgaagacatgagacagtggaa

SEQ ID NO: 55757 - DNA, 25 bp, Artificial
  Probe
aacattgaagacatgagacagtgga

SEQ ID NO: 55758 - DNA, 25 bp, Artificial
  Probe
caacattgaagacatgagacagtgg

SEQ ID NO: 55759 - DNA, 25 bp, Artificial
  Probe
tgaactaaaccacaaatctgaatct

SEQ ID NO: 55760 - DNA, 25 bp, Artificial
  Probe
tgaagacatgagacagtggaattgg

SEQ ID NO: 55761 - DNA, 25 bp, Artificial
  Probe
ttgaactaaaccacaaatctgaatc

SEQ ID NO: 55762 - DNA, 25 bp, Artificial
  Probe
aattcatgctacgcagtattacaca

SEQ ID NO: 55763 - DNA, 25 bp, Artificial
  Probe
aaatcactactttcaacaaatggaa

SEQ ID NO: 55764 - DNA, 25 bp, Artificial
  Probe
atcccaaacaggcacttcaaactat

SEQ ID NO: 55765 - DNA, 25 bp, Artificial
  Probe
attcatgctacgcagtattacacag

SEQ ID NO: 55766 - DNA, 25 bp, Artificial
  Probe
tcccaaacaggcacttcaaactatt

SEQ ID NO: 55767 - DNA, 25 bp, Artificial
  Probe
actattgaactaaaccacaaatctg

SEQ ID NO: 55768 - DNA, 25 bp, Artificial
  Probe
gcagtattacacagaagttcttaag

SEQ ID NO: 55769 - DNA, 25 bp, Artificial
  Probe
gaactaaaccacaaatctgaatcta

SEQ ID NO: 55770 - DNA, 25 bp, Artificial
  Probe
attgaactaaaccacaaatctgaat

SEQ ID NO: 55771 - DNA, 25 bp, Artificial
  Probe
catgctacgcagtattacacagaag

SEQ ID NO: 55772 - DNA, 25 bp, Artificial
  Probe
ttcaacattgaagacatgagacagt

SEQ ID NO: 55773 - DNA, 25 bp, Artificial
  Probe
ctattgaactaaaccacaaatctga

SEQ ID NO: 55774 - DNA, 25 bp, Artificial
  Probe
cccaaacaggcacttcaaactattg

SEQ ID NO: 55775 - DNA, 25 bp, Artificial
  Probe
atgctacgcagtattacacagaagt

SEQ ID NO: 55776 - DNA, 25 bp, Artificial
  Probe
agtaagaaattggcactcaaataaa

SEQ ID NO: 55777 - DNA, 25 bp, Artificial
  Probe
tgctacgcagtattacacagaagtt

SEQ ID NO: 55778 - DNA, 25 bp, Artificial
  Probe
tcatgctacgcagtattacacagaa

SEQ ID NO: 55779 - DNA, 25 bp, Artificial
  Probe
ttcatgctacgcagtattacacaga

SEQ ID NO: 55780 - DNA, 25 bp, Artificial
  Probe
gcatgtttcagtttacactatacaa

SEQ ID NO: 55781 - DNA, 25 bp, Artificial
  Probe
tattgaactaaaccacaaatctgaa

SEQ ID NO: 55782 - DNA, 25 bp, Artificial
  Probe
aactattgaactaaaccacaaatct

SEQ ID NO: 55783 - DNA, 25 bp, Artificial
  Probe
aactaaaccacaaatctgaatctaa

SEQ ID NO: 55784 - DNA, 25 bp, Artificial
  Probe
catcccaaacaggcacttcaaacta

SEQ ID NO: 55785 - DNA, 25 bp, Artificial
  Probe
aaatgtgcatgtttcagtttacact

SEQ ID NO: 55786 - DNA, 25 bp, Artificial
  Probe
cactactttcaacaaatggaaatca

SEQ ID NO: 55787 - DNA, 25 bp, Artificial
  Probe
attcatctaaaatgcctaccaccat

SEQ ID NO: 55788 - DNA, 25 bp, Artificial
  Probe
ctagtaagaaattggcactcaaata

SEQ ID NO: 55789 - DNA, 25 bp, Artificial
  Probe
aatgtgcatgtttcagtttacacta

SEQ ID NO: 55790 - DNA, 25 bp, Artificial
  Probe
tgcatgtttcagtttacactataca

SEQ ID NO: 55791 - DNA, 25 bp, Artificial
  Probe
atgtgcatgtttcagtttacactat

SEQ ID NO: 55792 - DNA, 25 bp, Artificial
  Probe
aagtcctgtgcttgagcaataaagt

SEQ ID NO: 55793 - DNA, 25 bp, Artificial
  Probe
atacaccctgagctctgatatagac

SEQ ID NO: 55794 - DNA, 25 bp, Artificial
  Probe
catacaccctgagctctgatataga

SEQ ID NO: 55795 - DNA, 25 bp, Artificial
  Probe
caagtcctgtgcttgagcaataaag

SEQ ID NO: 55796 - DNA, 25 bp, Artificial
  Probe
tcatacaccctgagctctgatatag

SEQ ID NO: 55797 - DNA, 25 bp, Artificial
  Probe
agtcctgtgcttgagcaataaagtg

SEQ ID NO: 55798 - DNA, 25 bp, Artificial
  Probe
cctgtgcttgagcaataaagtggaa

SEQ ID NO: 55799 - DNA, 25 bp, Artificial
  Probe
gtcctgtgcttgagcaataaagtgg

SEQ ID NO: 55800 - DNA, 25 bp, Artificial
  Probe
tcctgtgcttgagcaataaagtgga

SEQ ID NO: 55801 - DNA, 25 bp, Artificial
  Probe
tgagatggtattcccggtaacatcc

SEQ ID NO: 55802 - DNA, 25 bp, Artificial
  Probe
ctcatacaccctgagctctgatata

SEQ ID NO: 55803 - DNA, 25 bp, Artificial
  Probe
gagatggtattcccggtaacatccc

SEQ ID NO: 55804 - DNA, 25 bp, Artificial
  Probe
ttcccctcaacaagaagaggaagag

SEQ ID NO: 55805 - DNA, 25 bp, Artificial
  Probe
gttcccctcaacaagaagaggaaga

SEQ ID NO: 55806 - DNA, 25 bp, Artificial
  Probe
ggttcccctcaacaagaagaggaag

SEQ ID NO: 55807 - DNA, 25 bp, Artificial
  Probe
gacaaggagatggaggagacaacag

SEQ ID NO: 55808 - DNA, 25 bp, Artificial
  Probe
caaggagatggaggagacaacagtg

SEQ ID NO: 55809 - DNA, 25 bp, Artificial
  Probe
ccaatgcagtcaatacttgaattcc

SEQ ID NO: 55810 - DNA, 25 bp, Artificial
  Probe
acaaggagatggaggagacaacagt

SEQ ID NO: 55811 - DNA, 25 bp, Artificial
  Probe
gaggacaaggagatggaggagacaa

SEQ ID NO: 55812 - DNA, 25 bp, Artificial
  Probe
tcccaatgcagtcaatacttgaatt

SEQ ID NO: 55813 - DNA, 25 bp, Artificial
  Probe
acaggaggcatgtcttcaagatcac

SEQ ID NO: 55814 - DNA, 25 bp, Artificial
  Probe
ctcccaatgcagtcaatacttgaat

SEQ ID NO: 55815 - DNA, 25 bp, Artificial
  Probe
atggtttgtggttcccgagaatgaa

SEQ ID NO: 55816 - DNA, 25 bp, Artificial
  Probe
cagtcaatacttgaattcccatcaa

SEQ ID NO: 55817 - DNA, 25 bp, Artificial
  Probe
atgcagtcaatacttgaattcccat

SEQ ID NO: 55818 - DNA, 25 bp, Artificial
  Probe
caatgcagtcaatacttgaattccc

SEQ ID NO: 55819 - DNA, 25 bp, Artificial
  Probe
cccaatgcagtcaatacttgaattc

SEQ ID NO: 55820 - DNA, 25 bp, Artificial
  Probe
aatgcagtcaatacttgaattccca

SEQ ID NO: 55821 - DNA, 25 bp, Artificial
  Probe
gcagtcaatacttgaattcccatca

SEQ ID NO: 55822 - DNA, 25 bp, Artificial
  Probe
tgcagtcaatacttgaattcccatc

SEQ ID NO: 55823 - DNA, 25 bp, Artificial
  Probe
actcccaatgcagtcaatacttgaa

SEQ ID NO: 55824 - DNA, 25 bp, Artificial
  Probe
ccactcccaatgcagtcaatacttg

SEQ ID NO: 55825 - DNA, 25 bp, Artificial
  Probe
cactcccaatgcagtcaatacttga

SEQ ID NO: 55826 - DNA, 25 bp, Artificial
  Probe
tacttcagcccagagacagaagaac

SEQ ID NO: 55827 - DNA, 25 bp, Artificial
  Probe
gtacttcagcccagagacagaagaa

SEQ ID NO: 55828 - DNA, 25 bp, Artificial
  Probe
cccactcccaatgcagtcaatactt

SEQ ID NO: 55829 - DNA, 25 bp, Artificial
  Probe
gacaggaggcatgtcttcaagatca

SEQ ID NO: 55830 - DNA, 25 bp, Artificial
  Probe
cacactgtctgaggacaaggagatg

SEQ ID NO: 55831 - DNA, 25 bp, Artificial
  Probe
cttcagcccagagacagaagaactc

SEQ ID NO: 55832 - DNA, 25 bp, Artificial
  Probe
atcttttcacaaaatgtgggctttt

SEQ ID NO: 55833 - DNA, 25 bp, Artificial
  Probe
aaagaaagacaaactattcctaaaa

SEQ ID NO: 55834 - DNA, 25 bp, Artificial
  Probe
aaaagaaagacaaactattcctaaa

SEQ ID NO: 55835 - DNA, 25 bp, Artificial
  Probe
attcatcttttcacaaaatgtgggc

SEQ ID NO: 55836 - DNA, 25 bp, Artificial
  Probe
aattcatcttttcacaaaatgtggg

SEQ ID NO: 55837 - DNA, 25 bp, Artificial
  Probe
agaatgaacccttggtgctgtacat

SEQ ID NO: 55838 - DNA, 25 bp, Artificial
  Probe
catcttttcacaaaatgtgggcttt

SEQ ID NO: 55839 - DNA, 25 bp, Artificial
  Probe
actgtctgaggacaaggagatggag

SEQ ID NO: 55840 - DNA, 25 bp, Artificial
  Probe
acttcagcccagagacagaagaact

SEQ ID NO: 55841 - DNA, 25 bp, Artificial
  Probe
tcatcttttcacaaaatgtgggctt

SEQ ID NO: 55842 - DNA, 25 bp, Artificial
  Probe
ttcatcttttcacaaaatgtgggct

SEQ ID NO: 55843 - DNA, 25 bp, Artificial
  Probe
gagaatgaacccttggtgctgtaca

SEQ ID NO: 55844 - DNA, 25 bp, Artificial
  Probe
taattcatcttttcacaaaatgtgg

SEQ ID NO: 55845 - DNA, 25 bp, Artificial
  Probe
ttaattcatcttttcacaaaatgtg

SEQ ID NO: 55846 - DNA, 25 bp, Artificial
  Probe
cagatttctcctgtgtcttcctatg

SEQ ID NO: 55847 - DNA, 25 bp, Artificial
  Probe
tgaagatcaagagatcgtcactaac

SEQ ID NO: 55848 - DNA, 25 bp, Artificial
  Probe
gaagatcaagagatcgtcactaacc

SEQ ID NO: 55849 - DNA, 25 bp, Artificial
  Probe
ctctaccctctacagatttctcctg

SEQ ID NO: 55850 - DNA, 25 bp, Artificial
  Probe
agatttctcctgtgtcttcctatgc

SEQ ID NO: 55851 - DNA, 25 bp, Artificial
  Probe
gggatttcttagctttgtgttgtta

SEQ ID NO: 55852 - DNA, 25 bp, Artificial
  Probe
gttgggatttcttagctttgtgttg

SEQ ID NO: 55853 - DNA, 25 bp, Artificial
  Probe
gttgttgggatttcttagctttgtg

SEQ ID NO: 55854 - DNA, 25 bp, Artificial
  Probe
tgggatttcttagctttgtgttgtt

SEQ ID NO: 55855 - DNA, 25 bp, Artificial
  Probe
ttgggatttcttagctttgtgttgt

SEQ ID NO: 55856 - DNA, 25 bp, Artificial
  Probe
tgttgggatttcttagctttgtgtt

SEQ ID NO: 55857 - DNA, 25 bp, Artificial
  Probe
ttgttgggatttcttagctttgtgt

SEQ ID NO: 55858 - DNA, 25 bp, Artificial
  Probe
gctctaccctctacagatttctcct

SEQ ID NO: 55859 - DNA, 25 bp, Artificial
  Probe
ggttgttgggatttcttagctttgt

SEQ ID NO: 55860 - DNA, 25 bp, Artificial
  Probe
tggttgttgggatttcttagctttg

SEQ ID NO: 55861 - DNA, 25 bp, Artificial
  Probe
gtggttgttgggatttcttagcttt

SEQ ID NO: 55862 - DNA, 25 bp, Artificial
  Probe
cctggtggttgttgggatttcttag

SEQ ID NO: 55863 - DNA, 25 bp, Artificial
  Probe
cttcctatgcagaaagcgaaactac

SEQ ID NO: 55864 - DNA, 25 bp, Artificial
  Probe
tcttcctatgcagaaagcgaaacta

SEQ ID NO: 55865 - DNA, 25 bp, Artificial
  Probe
gatttctcctgtgtcttcctatgca

SEQ ID NO: 55866 - DNA, 25 bp, Artificial
  Probe
gacatctgccaggttgtagaagtga

SEQ ID NO: 55867 - DNA, 25 bp, Artificial
  Probe
agacatctgccaggttgtagaagtg

SEQ ID NO: 55868 - DNA, 25 bp, Artificial
  Probe
agctctaccctctacagatttctcc

SEQ ID NO: 55869 - DNA, 25 bp, Artificial
  Probe
cagtgtcatcaagaagacatctgat

SEQ ID NO: 55870 - DNA, 25 bp, Artificial
  Probe
agtgtcatcaagaagacatctgata

SEQ ID NO: 55871 - DNA, 25 bp, Artificial
  Probe
acatctgccaggttgtagaagtgac

SEQ ID NO: 55872 - DNA, 25 bp, Artificial
  Probe
gtagaagtgaccaccgagagtgatg

SEQ ID NO: 55873 - DNA, 25 bp, Artificial
  Probe
aagatcaagagatcgtcactaaccc

SEQ ID NO: 55874 - DNA, 25 bp, Artificial
  Probe
ctggtggttgttgggatttcttagc

SEQ ID NO: 55875 - DNA, 25 bp, Artificial
  Probe
gtgtcatcaagaagacatctgatat

SEQ ID NO: 55876 - DNA, 25 bp, Artificial
  Probe
atttctcctgtgtcttcctatgcag

SEQ ID NO: 55877 - DNA, 25 bp, Artificial
  Probe
tagaagtgaccaccgagagtgatga

SEQ ID NO: 55878 - DNA, 25 bp, Artificial
  Probe
cagacatctgccaggttgtagaagt

SEQ ID NO: 55879 - DNA, 25 bp, Artificial
  Probe
ggtggttgttgggatttcttagctt

SEQ ID NO: 55880 - DNA, 25 bp, Artificial
  Probe
ttctcctgtgtcttcctatgcagaa

SEQ ID NO: 55881 - DNA, 25 bp, Artificial
  Probe
ttcctatgcagaaagcgaaactacc

SEQ ID NO: 55882 - DNA, 25 bp, Artificial
  Probe
tgtagaagtgaccaccgagagtgat

SEQ ID NO: 55883 - DNA, 25 bp, Artificial
  Probe
ccagtgtcatcaagaagacatctga

SEQ ID NO: 55884 - DNA, 25 bp, Artificial
  Probe
ctcctgtgtcttcctatgcagaaag

SEQ ID NO: 55885 - DNA, 25 bp, Artificial
  Probe
gttgtagaagtgaccaccgagagtg

SEQ ID NO: 55886 - DNA, 25 bp, Artificial
  Probe
gtcttcctatgcagaaagcgaaact

SEQ ID NO: 55887 - DNA, 25 bp, Artificial
  Probe
ttgtagaagtgaccaccgagagtga

SEQ ID NO: 55888 - DNA, 25 bp, Artificial
  Probe
tctcctgtgtcttcctatgcagaaa

SEQ ID NO: 55889 - DNA, 25 bp, Artificial
  Probe
tttctcctgtgtcttcctatgcaga

SEQ ID NO: 55890 - DNA, 25 bp, Artificial
  Probe
tgtcttcctatgcagaaagcgaaac

SEQ ID NO: 55891 - DNA, 25 bp, Artificial
  Probe
gacatacacctacatctccagataa

SEQ ID NO: 55892 - DNA, 25 bp, Artificial
  Probe
attccagattgtcagtagttcacat

SEQ ID NO: 55893 - DNA, 25 bp, Artificial
  Probe
aattccagattgtcagtagttcaca

SEQ ID NO: 55894 - DNA, 25 bp, Artificial
  Probe
tcagtagttcacatgatgacacaat

SEQ ID NO: 55895 - DNA, 25 bp, Artificial
  Probe
cagtagttcacatgatgacacaatt

SEQ ID NO: 55896 - DNA, 25 bp, Artificial
  Probe
gtagttcacatgatgacacaattct

SEQ ID NO: 55897 - DNA, 25 bp, Artificial
  Probe
agtagttcacatgatgacacaattc

SEQ ID NO: 55898 - DNA, 25 bp, Artificial
  Probe
agttcacatgatgacacaattctca

SEQ ID NO: 55899 - DNA, 25 bp, Artificial
  Probe
tagttcacatgatgacacaattctc

SEQ ID NO: 55900 - DNA, 25 bp, Artificial
  Probe
agattgtcagtagttcacatgatga

SEQ ID NO: 55901 - DNA, 25 bp, Artificial
  Probe
cagattgtcagtagttcacatgatg

SEQ ID NO: 55902 - DNA, 25 bp, Artificial
  Probe
ccagattgtcagtagttcacatgat

SEQ ID NO: 55903 - DNA, 25 bp, Artificial
  Probe
ggacatacacctacatctccagata

SEQ ID NO: 55904 - DNA, 25 bp, Artificial
  Probe
ttccagattgtcagtagttcacatg

SEQ ID NO: 55905 - DNA, 25 bp, Artificial
  Probe
tccagattgtcagtagttcacatga

SEQ ID NO: 55906 - DNA, 25 bp, Artificial
  Probe
gggttccagacaaagatgacttata

SEQ ID NO: 55907 - DNA, 25 bp, Artificial
  Probe
caattctcatctgggacttcctaaa

SEQ ID NO: 55908 - DNA, 25 bp, Artificial
  Probe
aattctcatctgggacttcctaaat

SEQ ID NO: 55909 - DNA, 25 bp, Artificial
  Probe
attctcatctgggacttcctaaatg

SEQ ID NO: 55910 - DNA, 25 bp, Artificial
  Probe
acctacatctccagataaataacgc

SEQ ID NO: 55911 - DNA, 25 bp, Artificial
  Probe
acaattctcatctgggacttcctaa

SEQ ID NO: 55912 - DNA, 25 bp, Artificial
  Probe
gtctttatcttgtgtgaatgattgg

SEQ ID NO: 55913 - DNA, 25 bp, Artificial
  Probe
cacctacatctccagataaataacg

SEQ ID NO: 55914 - DNA, 25 bp, Artificial
  Probe
acatacacctacatctccagataaa

SEQ ID NO: 55915 - DNA, 25 bp, Artificial
  Probe
cacaattctcatctgggacttccta

SEQ ID NO: 55916 - DNA, 25 bp, Artificial
  Probe
gttcacatgatgacacaattctcat

SEQ ID NO: 55917 - DNA, 25 bp, Artificial
  Probe
gaattccagattgtcagtagttcac

SEQ ID NO: 55918 - DNA, 25 bp, Artificial
  Probe
tgtctttatcttgtgtgaatgattg

SEQ ID NO: 55919 - DNA, 25 bp, Artificial
  Probe
tgctgctatcagaagatgtctttat

SEQ ID NO: 55920 - DNA, 25 bp, Artificial
  Probe
gctgctatcagaagatgtctttatc

SEQ ID NO: 55921 - DNA, 25 bp, Artificial
  Probe
tgatgaattccagattgtcagtagt

SEQ ID NO: 55922 - DNA, 25 bp, Artificial
  Probe
acacctacatctccagataaataac

SEQ ID NO: 55923 - DNA, 25 bp, Artificial
  Probe
ggttccagacaaagatgacttataa

SEQ ID NO: 55924 - DNA, 25 bp, Artificial
  Probe
gatgtctttatcttgtgtgaatgat

SEQ ID NO: 55925 - DNA, 25 bp, Artificial
  Probe
atgaattccagattgtcagtagttc

SEQ ID NO: 55926 - DNA, 25 bp, Artificial
  Probe
gatgaattccagattgtcagtagtt

SEQ ID NO: 55927 - DNA, 25 bp, Artificial
  Probe
ttgatgaattccagattgtcagtag

SEQ ID NO: 55928 - DNA, 25 bp, Artificial
  Probe
catacacctacatctccagataaat

SEQ ID NO: 55929 - DNA, 25 bp, Artificial
  Probe
ctcataattgcccaggactcgttaa

SEQ ID NO: 55930 - DNA, 25 bp, Artificial
  Probe
tgacacaattctcatctgggacttc

SEQ ID NO: 55931 - DNA, 25 bp, Artificial
  Probe
cggacatacacctacatctccagat

SEQ ID NO: 55932 - DNA, 25 bp, Artificial
  Probe
atgtctttatcttgtgtgaatgatt

SEQ ID NO: 55933 - DNA, 25 bp, Artificial
  Probe
tgggttccagacaaagatgacttat

SEQ ID NO: 55934 - DNA, 25 bp, Artificial
  Probe
ttgggttccagacaaagatgactta

SEQ ID NO: 55935 - DNA, 25 bp, Artificial
  Probe
gacacaattctcatctgggacttcc

SEQ ID NO: 55936 - DNA, 25 bp, Artificial
  Probe
ctgtataaggtctctgatgccactg

SEQ ID NO: 55937 - DNA, 25 bp, Artificial
  Probe
gattcctacctagtgcttcacaatg

SEQ ID NO: 55938 - DNA, 25 bp, Artificial
  Probe
tgaagagttgaatcactgacctgag

SEQ ID NO: 55939 - DNA, 25 bp, Artificial
  Probe
ctgaagagttgaatcactgacctga

SEQ ID NO: 55940 - DNA, 25 bp, Artificial
  Probe
tctgaagagttgaatcactgacctg

SEQ ID NO: 55941 - DNA, 25 bp, Artificial
  Probe
ccatcttcaagcagttcttcaagga

SEQ ID NO: 55942 - DNA, 25 bp, Artificial
  Probe
ctctgaagagttgaatcactgacct

SEQ ID NO: 55943 - DNA, 25 bp, Artificial
  Probe
ggattcctacctagtgcttcacaat

SEQ ID NO: 55944 - DNA, 25 bp, Artificial
  Probe
gaagagttgaatcactgacctgagg

SEQ ID NO: 55945 - DNA, 25 bp, Artificial
  Probe
attcctacctagtgcttcacaatgg

SEQ ID NO: 55946 - DNA, 25 bp, Artificial
  Probe
catcaggaagctctaccaggttaag

SEQ ID NO: 55947 - DNA, 25 bp, Artificial
  Probe
gtataaggtctctgatgccactgga

SEQ ID NO: 55948 - DNA, 25 bp, Artificial
  Probe
aagagttgaatcactgacctgagga

SEQ ID NO: 55949 - DNA, 25 bp, Artificial
  Probe
tgtataaggtctctgatgccactgg

SEQ ID NO: 55950 - DNA, 25 bp, Artificial
  Probe
agagttgaatcactgacctgaggag

SEQ ID NO: 55951 - DNA, 25 bp, Artificial
  Probe
gaggctctgaagagttgaatcactg

SEQ ID NO: 55952 - DNA, 25 bp, Artificial
  Probe
tataaggtctctgatgccactggac

SEQ ID NO: 55953 - DNA, 25 bp, Artificial
  Probe
cctgtataaggtctctgatgccact

SEQ ID NO: 55954 - DNA, 25 bp, Artificial
  Probe
atcaggaagctctaccaggttaagg

SEQ ID NO: 55955 - DNA, 25 bp, Artificial
  Probe
gctctgaagagttgaatcactgacc

SEQ ID NO: 55956 - DNA, 25 bp, Artificial
  Probe
ggctctgaagagttgaatcactgac

SEQ ID NO: 55957 - DNA, 25 bp, Artificial
  Probe
aggctctgaagagttgaatcactga

SEQ ID NO: 55958 - DNA, 25 bp, Artificial
  Probe
tcccatcttcaagcagttcttcaag

SEQ ID NO: 55959 - DNA, 25 bp, Artificial
  Probe
ccatcaggaagctctaccaggttaa

SEQ ID NO: 55960 - DNA, 25 bp, Artificial
  Probe
gtcccatcttcaagcagttcttcaa

SEQ ID NO: 55961 - DNA, 25 bp, Artificial
  Probe
gaggaggctctgaagagttgaatca

SEQ ID NO: 55962 - DNA, 25 bp, Artificial
  Probe
ctctggatgctcaataaaggacacg

SEQ ID NO: 55963 - DNA, 25 bp, Artificial
  Probe
gagtcccatcttcaagcagttcttc

SEQ ID NO: 55964 - DNA, 25 bp, Artificial
  Probe
gatgctcaataaaggacacgttctg

SEQ ID NO: 55965 - DNA, 25 bp, Artificial
  Probe
ggaggctctgaagagttgaatcact

SEQ ID NO: 55966 - DNA, 25 bp, Artificial
  Probe
aggaggctctgaagagttgaatcac

SEQ ID NO: 55967 - DNA, 25 bp, Artificial
  Probe
gtttgcctctgaactgctaattcca

SEQ ID NO: 55968 - DNA, 25 bp, Artificial
  Probe
agagtcccatcttcaagcagttctt

SEQ ID NO: 55969 - DNA, 25 bp, Artificial
  Probe
tttgcctctgaactgctaattccag

SEQ ID NO: 55970 - DNA, 25 bp, Artificial
  Probe
cccatcttcaagcagttcttcaagg

SEQ ID NO: 55971 - DNA, 25 bp, Artificial
  Probe
cctctggatgctcaataaaggacac

SEQ ID NO: 55972 - DNA, 25 bp, Artificial
  Probe
cctctgaactgctaattccagatga

SEQ ID NO: 55973 - DNA, 25 bp, Artificial
  Probe
agtcccatcttcaagcagttcttca

SEQ ID NO: 55974 - DNA, 25 bp, Artificial
  Probe
ctcaataaaggacacgttctgttcc

SEQ ID NO: 55975 - DNA, 25 bp, Artificial
  Probe
gagttgaatcactgacctgaggagg

SEQ ID NO: 55976 - DNA, 25 bp, Artificial
  Probe
ctgatgccactggacagatgaatct

SEQ ID NO: 55977 - DNA, 25 bp, Artificial
  Probe
ggaggaggctctgaagagttgaatc

SEQ ID NO: 55978 - DNA, 25 bp, Artificial
  Probe
gctcaataaaggacacgttctgttc

SEQ ID NO: 55979 - DNA, 25 bp, Artificial
  Probe
gtcgtaagtagtctgaaaacagcat

SEQ ID NO: 55980 - DNA, 25 bp, Artificial
  Probe
ggatgctcaataaaggacacgttct

SEQ ID NO: 55981 - DNA, 25 bp, Artificial
  Probe
gaaactgtccgagtctgctttatag

SEQ ID NO: 55982 - DNA, 25 bp, Artificial
  Probe
tgaaactgtccgagtctgctttata

SEQ ID NO: 55983 - DNA, 25 bp, Artificial
  Probe
tagttatgtcctctgggaaagtctt

SEQ ID NO: 55984 - DNA, 25 bp, Artificial
  Probe
ttagttatgtcctctgggaaagtct

SEQ ID NO: 55985 - DNA, 25 bp, Artificial
  Probe
gttagttatgtcctctgggaaagtc

SEQ ID NO: 55986 - DNA, 25 bp, Artificial
  Probe
caagattgaatgtctgacgtgaacc

SEQ ID NO: 55987 - DNA, 25 bp, Artificial
  Probe
ccaagattgaatgtctgacgtgaac

SEQ ID NO: 55988 - DNA, 25 bp, Artificial
  Probe
aaggttagttatgtcctctgggaaa

SEQ ID NO: 55989 - DNA, 25 bp, Artificial
  Probe
aggttagttatgtcctctgggaaag

SEQ ID NO: 55990 - DNA, 25 bp, Artificial
  Probe
ttgaaactgtccgagtctgctttat

SEQ ID NO: 55991 - DNA, 25 bp, Artificial
  Probe
ggttagttatgtcctctgggaaagt

SEQ ID NO: 55992 - DNA, 25 bp, Artificial
  Probe
caaggttagttatgtcctctgggaa

SEQ ID NO: 55993 - DNA, 25 bp, Artificial
  Probe
cttgaaactgtccgagtctgcttta

SEQ ID NO: 55994 - DNA, 25 bp, Artificial
  Probe
gttggttccaatccttgaaactgtc

SEQ ID NO: 55995 - DNA, 25 bp, Artificial
  Probe
ccttttgtatgatagtgagcctgtt

SEQ ID NO: 55996 - DNA, 25 bp, Artificial
  Probe
acaaggttagttatgtcctctggga

SEQ ID NO: 55997 - DNA, 25 bp, Artificial
  Probe
tttgccatttaaggttggttccaat

SEQ ID NO: 55998 - DNA, 25 bp, Artificial
  Probe
aagattgaatgtctgacgtgaaccg

SEQ ID NO: 55999 - DNA, 25 bp, Artificial
  Probe
accttttgtatgatagtgagcctgt

SEQ ID NO: 56000 - DNA, 25 bp, Artificial
  Probe
caatccttgaaactgtccgagtctg

SEQ ID NO: 56001 - DNA, 25 bp, Artificial
  Probe
ttgccatttaaggttggttccaatc

SEQ ID NO: 56002 - DNA, 25 bp, Artificial
  Probe
gttccaatccttgaaactgtccgag

SEQ ID NO: 56003 - DNA, 25 bp, Artificial
  Probe
ttggttccaatccttgaaactgtcc

SEQ ID NO: 56004 - DNA, 25 bp, Artificial
  Probe
aaactgtccgagtctgctttatagc

SEQ ID NO: 56005 - DNA, 25 bp, Artificial
  Probe
ggttggttccaatccttgaaactgt

SEQ ID NO: 56006 - DNA, 25 bp, Artificial
  Probe
ttccaatccttgaaactgtccgagt

SEQ ID NO: 56007 - DNA, 25 bp, Artificial
  Probe
aggttggttccaatccttgaaactg

SEQ ID NO: 56008 - DNA, 25 bp, Artificial
  Probe
atttaaggttggttccaatccttga

SEQ ID NO: 56009 - DNA, 25 bp, Artificial
  Probe
catttaaggttggttccaatccttg

SEQ ID NO: 56010 - DNA, 25 bp, Artificial
  Probe
ttaaggttggttccaatccttgaaa

SEQ ID NO: 56011 - DNA, 25 bp, Artificial
  Probe
tttaaggttggttccaatccttgaa

SEQ ID NO: 56012 - DNA, 25 bp, Artificial
  Probe
gccatttaaggttggttccaatcct

SEQ ID NO: 56013 - DNA, 25 bp, Artificial
  Probe
ccaatccttgaaactgtccgagtct

SEQ ID NO: 56014 - DNA, 25 bp, Artificial
  Probe
tccaatccttgaaactgtccgagtc

SEQ ID NO: 56015 - DNA, 25 bp, Artificial
  Probe
taaggttggttccaatccttgaaac

SEQ ID NO: 56016 - DNA, 25 bp, Artificial
  Probe
ccatttaaggttggttccaatcctt

SEQ ID NO: 56017 - DNA, 25 bp, Artificial
  Probe
tgccatttaaggttggttccaatcc

SEQ ID NO: 56018 - DNA, 25 bp, Artificial
  Probe
ttttgccatttaaggttggttccaa

SEQ ID NO: 56019 - DNA, 25 bp, Artificial
  Probe
gaatgatcttttcactctgaagcca

SEQ ID NO: 56020 - DNA, 25 bp, Artificial
  Probe
tgaatgatcttttcactctgaagcc

SEQ ID NO: 56021 - DNA, 25 bp, Artificial
  Probe
ggttccaatccttgaaactgtccga

SEQ ID NO: 56022 - DNA, 25 bp, Artificial
  Probe
aatgatcttttcactctgaagccac

SEQ ID NO: 56023 - DNA, 25 bp, Artificial
  Probe
aatccttgaaactgtccgagtctgc

SEQ ID NO: 56024 - DNA, 25 bp, Artificial
  Probe
gacaaggttagttatgtcctctggg

SEQ ID NO: 56025 - DNA, 25 bp, Artificial
  Probe
tctgacgtgaaccgtgaatgatctt

SEQ ID NO: 56026 - DNA, 25 bp, Artificial
  Probe
cttgtaacttcagtagcattcttct

SEQ ID NO: 56027 - DNA, 25 bp, Artificial
  Probe
tcttgtaacttcagtagcattcttc

SEQ ID NO: 56028 - DNA, 25 bp, Artificial
  Probe
gcagtatcttgtaacttcagtagca

SEQ ID NO: 56029 - DNA, 25 bp, Artificial
  Probe
atcttgtaacttcagtagcattctt

SEQ ID NO: 56030 - DNA, 25 bp, Artificial
  Probe
caataacagatggtgctgctaatac

SEQ ID NO: 56031 - DNA, 25 bp, Artificial
  Probe
tcaataacagatggtgctgctaata

SEQ ID NO: 56032 - DNA, 25 bp, Artificial
  Probe
cagtatcttgtaacttcagtagcat

SEQ ID NO: 56033 - DNA, 25 bp, Artificial
  Probe
ttcaataacagatggtgctgctaat

SEQ ID NO: 56034 - DNA, 25 bp, Artificial
  Probe
tgtaacttcagtagcattcttctag

SEQ ID NO: 56035 - DNA, 25 bp, Artificial
  Probe
ttgtaacttcagtagcattcttcta

SEQ ID NO: 56036 - DNA, 25 bp, Artificial
  Probe
gtatcttgtaacttcagtagcattc

SEQ ID NO: 56037 - DNA, 25 bp, Artificial
  Probe
tatcttgtaacttcagtagcattct

SEQ ID NO: 56038 - DNA, 25 bp, Artificial
  Probe
tagaacagtacatctggtgtgctta

SEQ ID NO: 56039 - DNA, 25 bp, Artificial
  Probe
agtatcttgtaacttcagtagcatt

SEQ ID NO: 56040 - DNA, 25 bp, Artificial
  Probe
aataacagatggtgctgctaatacc

SEQ ID NO: 56041 - DNA, 25 bp, Artificial
  Probe
gccatatagttactctcttctagtg

SEQ ID NO: 56042 - DNA, 25 bp, Artificial
  Probe
tgctatttcaataacagatggtgct

SEQ ID NO: 56043 - DNA, 25 bp, Artificial
  Probe
ctgctaatacccaacatttcctaaa

SEQ ID NO: 56044 - DNA, 25 bp, Artificial
  Probe
gctgctaatacccaacatttcctaa

SEQ ID NO: 56045 - DNA, 25 bp, Artificial
  Probe
aaatcagtgaactattgcccttaaa

SEQ ID NO: 56046 - DNA, 25 bp, Artificial
  Probe
ttgctatttcaataacagatggtgc

SEQ ID NO: 56047 - DNA, 25 bp, Artificial
  Probe
tgcagtatcttgtaacttcagtagc

SEQ ID NO: 56048 - DNA, 25 bp, Artificial
  Probe
ccacttacactatgcagtatcttgt

SEQ ID NO: 56049 - DNA, 25 bp, Artificial
  Probe
atctggtgtgcttactgaaatctct

SEQ ID NO: 56050 - DNA, 25 bp, Artificial
  Probe
catctggtgtgcttactgaaatctc

SEQ ID NO: 56051 - DNA, 25 bp, Artificial
  Probe
aataaatcagtgaactattgccctt

SEQ ID NO: 56052 - DNA, 25 bp, Artificial
  Probe
cactatgcagtatcttgtaacttca

SEQ ID NO: 56053 - DNA, 25 bp, Artificial
  Probe
ctagaacagtacatctggtgtgctt

SEQ ID NO: 56054 - DNA, 25 bp, Artificial
  Probe
agttactctcttctagtgtttgctt

SEQ ID NO: 56055 - DNA, 25 bp, Artificial
  Probe
taaatcagtgaactattgcccttaa

SEQ ID NO: 56056 - DNA, 25 bp, Artificial
  Probe
cttgctatttcaataacagatggtg

SEQ ID NO: 56057 - DNA, 25 bp, Artificial
  Probe
tcttgctatttcaataacagatggt

SEQ ID NO: 56058 - DNA, 25 bp, Artificial
  Probe
atcatacaggctttcattggttata

SEQ ID NO: 56059 - DNA, 25 bp, Artificial
  Probe
tatcatacaggctttcattggttat

SEQ ID NO: 56060 - DNA, 25 bp, Artificial
  Probe
tgctgctaatacccaacatttccta

SEQ ID NO: 56061 - DNA, 25 bp, Artificial
  Probe
tcatacaggctttcattggttatat

SEQ ID NO: 56062 - DNA, 25 bp, Artificial
  Probe
atatcatacaggctttcattggtta

SEQ ID NO: 56063 - DNA, 25 bp, Artificial
  Probe
tatatcatacaggctttcattggtt

SEQ ID NO: 56064 - DNA, 25 bp, Artificial
  Probe
ttatatcatacaggctttcattggt

SEQ ID NO: 56065 - DNA, 25 bp, Artificial
  Probe
tacatctggtgtgcttactgaaatc

SEQ ID NO: 56066 - DNA, 25 bp, Artificial
  Probe
atgcagtatcttgtaacttcagtag

SEQ ID NO: 56067 - DNA, 25 bp, Artificial
  Probe
ctatgcagtatcttgtaacttcagt

SEQ ID NO: 56068 - DNA, 25 bp, Artificial
  Probe
actatgcagtatcttgtaacttcag

SEQ ID NO: 56069 - DNA, 25 bp, Artificial
  Probe
acactatgcagtatcttgtaacttc

SEQ ID NO: 56070 - DNA, 25 bp, Artificial
  Probe
agaacagtacatctggtgtgcttac

SEQ ID NO: 56071 - DNA, 25 bp, Artificial
  Probe
tggttcagattgagttatacaggaa

SEQ ID NO: 56072 - DNA, 25 bp, Artificial
  Probe
ttggttcagattgagttatacagga

SEQ ID NO: 56073 - DNA, 25 bp, Artificial
  Probe
tccttggttcagattgagttataca

SEQ ID NO: 56074 - DNA, 25 bp, Artificial
  Probe
cttggttcagattgagttatacagg

SEQ ID NO: 56075 - DNA, 25 bp, Artificial
  Probe
ccttggttcagattgagttatacag

SEQ ID NO: 56076 - DNA, 25 bp, Artificial
  Probe
atccttggttcagattgagttatac

SEQ ID NO: 56077 - DNA, 25 bp, Artificial
  Probe
ctacagaacaatgtccgtcactaac

SEQ ID NO: 56078 - DNA, 25 bp, Artificial
  Probe
tacagaacaatgtccgtcactaaca

SEQ ID NO: 56079 - DNA, 25 bp, Artificial
  Probe
agaacaatgtccgtcactaacactt

SEQ ID NO: 56080 - DNA, 25 bp, Artificial
  Probe
caattatgcacagactccattatgt

SEQ ID NO: 56081 - DNA, 25 bp, Artificial
  Probe
gctacagaacaatgtccgtcactaa

SEQ ID NO: 56082 - DNA, 25 bp, Artificial
  Probe
aatccttggttcagattgagttata

SEQ ID NO: 56083 - DNA, 25 bp, Artificial
  Probe
ggttcagattgagttatacaggaaa

SEQ ID NO: 56084 - DNA, 25 bp, Artificial
  Probe
cagaacaatgtccgtcactaacact

SEQ ID NO: 56085 - DNA, 25 bp, Artificial
  Probe
acagaacaatgtccgtcactaacac

SEQ ID NO: 56086 - DNA, 25 bp, Artificial
  Probe
gaacaatgtccgtcactaacacttt

SEQ ID NO: 56087 - DNA, 25 bp, Artificial
  Probe
aacaatgtccgtcactaacactttg

SEQ ID NO: 56088 - DNA, 25 bp, Artificial
  Probe
atcatgtagaacccacttcacaaga

SEQ ID NO: 56089 - DNA, 25 bp, Artificial
  Probe
catcatgtagaacccacttcacaag

SEQ ID NO: 56090 - DNA, 25 bp, Artificial
  Probe
catgtagaacccacttcacaagaac

SEQ ID NO: 56091 - DNA, 25 bp, Artificial
  Probe
tcatgtagaacccacttcacaagaa

SEQ ID NO: 56092 - DNA, 25 bp, Artificial
  Probe
gcaattatgcacagactccattatg

SEQ ID NO: 56093 - DNA, 25 bp, Artificial
  Probe
acaatgtccgtcactaacactttga

SEQ ID NO: 56094 - DNA, 25 bp, Artificial
  Probe
atgtagaacccacttcacaagaacc

SEQ ID NO: 56095 - DNA, 25 bp, Artificial
  Probe
ggaacaacaatccttggttcagatt

SEQ ID NO: 56096 - DNA, 25 bp, Artificial
  Probe
ttgctgaattgctgattttcctttt

SEQ ID NO: 56097 - DNA, 25 bp, Artificial
  Probe
tttgctgaattgctgattttccttt

SEQ ID NO: 56098 - DNA, 25 bp, Artificial
  Probe
ttttgctgaattgctgattttcctt

SEQ ID NO: 56099 - DNA, 25 bp, Artificial
  Probe
tagaacccacttcacaagaaccctt

SEQ ID NO: 56100 - DNA, 25 bp, Artificial
  Probe
tgctgaattgctgattttccttttg

SEQ ID NO: 56101 - DNA, 25 bp, Artificial
  Probe
ggctacagaacaatgtccgtcacta

SEQ ID NO: 56102 - DNA, 25 bp, Artificial
  Probe
taggctacagaacaatgtccgtcac

SEQ ID NO: 56103 - DNA, 25 bp, Artificial
  Probe
cttgtcaggctgcatcatgtagaac

SEQ ID NO: 56104 - DNA, 25 bp, Artificial
  Probe
gtaggctacagaacaatgtccgtca

SEQ ID NO: 56105 - DNA, 25 bp, Artificial
  Probe
ctgaattgctgattttccttttggc

SEQ ID NO: 56106 - DNA, 25 bp, Artificial
  Probe
gctgaattgctgattttccttttgg

SEQ ID NO: 56107 - DNA, 25 bp, Artificial
  Probe
gcatcatgtagaacccacttcacaa

SEQ ID NO: 56108 - DNA, 25 bp, Artificial
  Probe
gtagaacccacttcacaagaaccct

SEQ ID NO: 56109 - DNA, 25 bp, Artificial
  Probe
gaacccacttcacaagaaccctttg

SEQ ID NO: 56110 - DNA, 25 bp, Artificial
  Probe
agaacccacttcacaagaacccttt

SEQ ID NO: 56111 - DNA, 25 bp, Artificial
  Probe
tcagattgagttatacaggaaaaga

SEQ ID NO: 56112 - DNA, 25 bp, Artificial
  Probe
ggtaggctacagaacaatgtccgtc

SEQ ID NO: 56113 - DNA, 25 bp, Artificial
  Probe
attatgcacagactccattatgtga

SEQ ID NO: 56114 - DNA, 25 bp, Artificial
  Probe
ctaaagggagaagaacctgggaagg

SEQ ID NO: 56115 - DNA, 25 bp, Artificial
  Probe
ttatgcacagactccattatgtgag

SEQ ID NO: 56116 - DNA, 25 bp, Artificial
  Probe
ctatcacagacgctgagactgagtc

SEQ ID NO: 56117 - DNA, 25 bp, Artificial
  Probe
tagagccgtaaggattgggaaagtc

SEQ ID NO: 56118 - DNA, 25 bp, Artificial
  Probe
gtagagccgtaaggattgggaaagt

SEQ ID NO: 56119 - DNA, 25 bp, Artificial
  Probe
tgtagagccgtaaggattgggaaag

SEQ ID NO: 56120 - DNA, 25 bp, Artificial
  Probe
ctgtagagccgtaaggattgggaaa

SEQ ID NO: 56121 - DNA, 25 bp, Artificial
  Probe
gagactgagtcctcatcctgatctc

SEQ ID NO: 56122 - DNA, 25 bp, Artificial
  Probe
agactgagtcctcatcctgatctcg

SEQ ID NO: 56123 - DNA, 25 bp, Artificial
  Probe
agccgtaaggattgggaaagtcttc

SEQ ID NO: 56124 - DNA, 25 bp, Artificial
  Probe
gagccgtaaggattgggaaagtctt

SEQ ID NO: 56125 - DNA, 25 bp, Artificial
  Probe
ctgagactgagtcctcatcctgatc

SEQ ID NO: 56126 - DNA, 25 bp, Artificial
  Probe
tgagactgagtcctcatcctgatct

SEQ ID NO: 56127 - DNA, 25 bp, Artificial
  Probe
cagtcctgtagagccgtaaggattg

SEQ ID NO: 56128 - DNA, 25 bp, Artificial
  Probe
gctgagactgagtcctcatcctgat

SEQ ID NO: 56129 - DNA, 25 bp, Artificial
  Probe
acagtcctgtagagccgtaaggatt

SEQ ID NO: 56130 - DNA, 25 bp, Artificial
  Probe
aaggcagtggtgatcctatttattt

SEQ ID NO: 56131 - DNA, 25 bp, Artificial
  Probe
gaaggcagtggtgatcctatttatt

SEQ ID NO: 56132 - DNA, 25 bp, Artificial
  Probe
tagaaggcagtggtgatcctattta

SEQ ID NO: 56133 - DNA, 25 bp, Artificial
  Probe
agaaggcagtggtgatcctatttat

SEQ ID NO: 56134 - DNA, 25 bp, Artificial
  Probe
gtagaaggcagtggtgatcctattt

SEQ ID NO: 56135 - DNA, 25 bp, Artificial
  Probe
aggctggcttaagtataaatttgtt

SEQ ID NO: 56136 - DNA, 25 bp, Artificial
  Probe
aaggctggcttaagtataaatttgt

SEQ ID NO: 56137 - DNA, 25 bp, Artificial
  Probe
tcaaggctggcttaagtataaattt

SEQ ID NO: 56138 - DNA, 25 bp, Artificial
  Probe
ggctggcttaagtataaatttgttt

SEQ ID NO: 56139 - DNA, 25 bp, Artificial
  Probe
caaggctggcttaagtataaatttg

SEQ ID NO: 56140 - DNA, 25 bp, Artificial
  Probe
cgtagaaggcagtggtgatcctatt

SEQ ID NO: 56141 - DNA, 25 bp, Artificial
  Probe
ttttggtcactacttttgggaatgg

SEQ ID NO: 56142 - DNA, 25 bp, Artificial
  Probe
gtcactacttttgggaatggtgtat

SEQ ID NO: 56143 - DNA, 25 bp, Artificial
  Probe
tttggtcactacttttgggaatggt

SEQ ID NO: 56144 - DNA, 25 bp, Artificial
  Probe
aggcagtggtgatcctatttatttt

SEQ ID NO: 56145 - DNA, 25 bp, Artificial
  Probe
gtttggggtcttttggtttggtttt

SEQ ID NO: 56146 - DNA, 25 bp, Artificial
  Probe
aggaaaatcaacattacaaaagtgt

SEQ ID NO: 56147 - DNA, 25 bp, Artificial
  Probe
gtaaggagatgacgcagttccagac

SEQ ID NO: 56148 - DNA, 25 bp, Artificial
  Probe
ggtcactacttttgggaatggtgta

SEQ ID NO: 56149 - DNA, 25 bp, Artificial
  Probe
taggaaaatcaacattacaaaagtg

SEQ ID NO: 56150 - DNA, 25 bp, Artificial
  Probe
ttggtcactacttttgggaatggtg

SEQ ID NO: 56151 - DNA, 25 bp, Artificial
  Probe
ggtttggggtcttttggtttggttt

SEQ ID NO: 56152 - DNA, 25 bp, Artificial
  Probe
ttaggaaaatcaacattacaaaagt

SEQ ID NO: 56153 - DNA, 25 bp, Artificial
  Probe
gctggcttaagtataaatttgtttt

SEQ ID NO: 56154 - DNA, 25 bp, Artificial
  Probe
tggtcactacttttgggaatggtgt

SEQ ID NO: 56155 - DNA, 25 bp, Artificial
  Probe
gatgttgtgggtttggggtcttttg

SEQ ID NO: 56156 - DNA, 25 bp, Artificial
  Probe
ggttcctccaatactatcattcctg

SEQ ID NO: 56157 - DNA, 25 bp, Artificial
  Probe
atggttctatggctccttctctaat

SEQ ID NO: 56158 - DNA, 25 bp, Artificial
  Probe
aatggttctatggctccttctctaa

SEQ ID NO: 56159 - DNA, 25 bp, Artificial
  Probe
gttcctccaatactatcattcctgc

SEQ ID NO: 56160 - DNA, 25 bp, Artificial
  Probe
gtcggttcactgagaataacataga

SEQ ID NO: 56161 - DNA, 25 bp, Artificial
  Probe
tcggttcactgagaataacatagat

SEQ ID NO: 56162 - DNA, 25 bp, Artificial
  Probe
ggtataggtgtatataggttgagcc

SEQ ID NO: 56163 - DNA, 25 bp, Artificial
  Probe
ctctcagattagtccaggatagaac

SEQ ID NO: 56164 - DNA, 25 bp, Artificial
  Probe
ttctatggctccttctctaatgctc

SEQ ID NO: 56165 - DNA, 25 bp, Artificial
  Probe
tggttctatggctccttctctaatg

SEQ ID NO: 56166 - DNA, 25 bp, Artificial
  Probe
gctctcagattagtccaggatagaa

SEQ ID NO: 56167 - DNA, 25 bp, Artificial
  Probe
tctcagattagtccaggatagaact

SEQ ID NO: 56168 - DNA, 25 bp, Artificial
  Probe
cggttcactgagaataacatagatt

SEQ ID NO: 56169 - DNA, 25 bp, Artificial
  Probe
gatgctatctactggacttgagagt

SEQ ID NO: 56170 - DNA, 25 bp, Artificial
  Probe
tgtcggttcactgagaataacatag

SEQ ID NO: 56171 - DNA, 25 bp, Artificial
  Probe
gttctatggctccttctctaatgct

SEQ ID NO: 56172 - DNA, 25 bp, Artificial
  Probe
aggtataggtgtatataggttgagc

SEQ ID NO: 56173 - DNA, 25 bp, Artificial
  Probe
ctcagattagtccaggatagaactg

SEQ ID NO: 56174 - DNA, 25 bp, Artificial
  Probe
aggttcctccaatactatcattcct

SEQ ID NO: 56175 - DNA, 25 bp, Artificial
  Probe
cagattagtccaggatagaactgat

SEQ ID NO: 56176 - DNA, 25 bp, Artificial
  Probe
agtccaggatagaactgattaggaa

SEQ ID NO: 56177 - DNA, 25 bp, Artificial
  Probe
ttagtccaggatagaactgattagg

SEQ ID NO: 56178 - DNA, 25 bp, Artificial
  Probe
tagtccaggatagaactgattagga

SEQ ID NO: 56179 - DNA, 25 bp, Artificial
  Probe
gtccaggatagaactgattaggaat

SEQ ID NO: 56180 - DNA, 25 bp, Artificial
  Probe
ttgctcaggcttatgaagatgctat

SEQ ID NO: 56181 - DNA, 25 bp, Artificial
  Probe
atgctatctactggacttgagagta

SEQ ID NO: 56182 - DNA, 25 bp, Artificial
  Probe
agattagtccaggatagaactgatt

SEQ ID NO: 56183 - DNA, 25 bp, Artificial
  Probe
ggttctatggctccttctctaatgc

SEQ ID NO: 56184 - DNA, 25 bp, Artificial
  Probe
tagtatcggacatggtagaaggtga

SEQ ID NO: 56185 - DNA, 25 bp, Artificial
  Probe
gtagtatcggacatggtagaaggtg

SEQ ID NO: 56186 - DNA, 25 bp, Artificial
  Probe
tccaggatagaactgattaggaatc

SEQ ID NO: 56187 - DNA, 25 bp, Artificial
  Probe
ggttcactgagaataacatagattg

SEQ ID NO: 56188 - DNA, 25 bp, Artificial
  Probe
cctccaatactatcattcctgcaat

SEQ ID NO: 56189 - DNA, 25 bp, Artificial
  Probe
gaggttcctccaatactatcattcc

SEQ ID NO: 56190 - DNA, 25 bp, Artificial
  Probe
tggcttcgtttatttatctggtagt

SEQ ID NO: 56191 - DNA, 25 bp, Artificial
  Probe
gtggcttcgtttatttatctggtag

SEQ ID NO: 56192 - DNA, 25 bp, Artificial
  Probe
tttgtggcttcgtttatttatctgg

SEQ ID NO: 56193 - DNA, 25 bp, Artificial
  Probe
tgtggcttcgtttatttatctggta

SEQ ID NO: 56194 - DNA, 25 bp, Artificial
  Probe
gtataggtgtatataggttgagcct

SEQ ID NO: 56195 - DNA, 25 bp, Artificial
  Probe
cgaggttcctccaatactatcattc

SEQ ID NO: 56196 - DNA, 25 bp, Artificial
  Probe
tgctcaggcttatgaagatgctatc

SEQ ID NO: 56197 - DNA, 25 bp, Artificial
  Probe
ggcttcgtttatttatctggtagtt

SEQ ID NO: 56198 - DNA, 25 bp, Artificial
  Probe
catgagtcacaggtataggtgtata

SEQ ID NO: 56199 - DNA, 25 bp, Artificial
  Probe
ccatgagtcacaggtataggtgtat

SEQ ID NO: 56200 - DNA, 25 bp, Artificial
  Probe
aaatggttctatggctccttctcta

SEQ ID NO: 56201 - DNA, 25 bp, Artificial
  Probe
gcctctgtatagattggtgtcatat

SEQ ID NO: 56202 - DNA, 25 bp, Artificial
  Probe
tgcctctgtatagattggtgtcata

SEQ ID NO: 56203 - DNA, 25 bp, Artificial
  Probe
atgcctctgtatagattggtgtcat

SEQ ID NO: 56204 - DNA, 25 bp, Artificial
  Probe
aatgcctctgtatagattggtgtca

SEQ ID NO: 56205 - DNA, 25 bp, Artificial
  Probe
tttggtagactgtttcactgtaaag

SEQ ID NO: 56206 - DNA, 25 bp, Artificial
  Probe
ctttggtagactgtttcactgtaaa

SEQ ID NO: 56207 - DNA, 25 bp, Artificial
  Probe
aaattgctttggtagactgtttcac

SEQ ID NO: 56208 - DNA, 25 bp, Artificial
  Probe
gctttggtagactgtttcactgtaa

SEQ ID NO: 56209 - DNA, 25 bp, Artificial
  Probe
taaatgcctctgtatagattggtgt

SEQ ID NO: 56210 - DNA, 25 bp, Artificial
  Probe
aaatgcctctgtatagattggtgtc

SEQ ID NO: 56211 - DNA, 25 bp, Artificial
  Probe
taaattgctttggtagactgtttca

SEQ ID NO: 56212 - DNA, 25 bp, Artificial
  Probe
atttcatctcccatcaacatatctg

SEQ ID NO: 56213 - DNA, 25 bp, Artificial
  Probe
aattgctttggtagactgtttcact

SEQ ID NO: 56214 - DNA, 25 bp, Artificial
  Probe
tggtagactgtttcactgtaaagtt

SEQ ID NO: 56215 - DNA, 25 bp, Artificial
  Probe
ttggtagactgtttcactgtaaagt

SEQ ID NO: 56216 - DNA, 25 bp, Artificial
  Probe
cctctgtatagattggtgtcatata

SEQ ID NO: 56217 - DNA, 25 bp, Artificial
  Probe
ggtagactgtttcactgtaaagttt

SEQ ID NO: 56218 - DNA, 25 bp, Artificial
  Probe
attgctttggtagactgtttcactg

SEQ ID NO: 56219 - DNA, 25 bp, Artificial
  Probe
ttaaatgcctctgtatagattggtg

SEQ ID NO: 56220 - DNA, 25 bp, Artificial
  Probe
ttgttatgtccgtcatttaagaaga

SEQ ID NO: 56221 - DNA, 25 bp, Artificial
  Probe
ccgtcatttaagaagacatactcct

SEQ ID NO: 56222 - DNA, 25 bp, Artificial
  Probe
tccgtcatttaagaagacatactcc

SEQ ID NO: 56223 - DNA, 25 bp, Artificial
  Probe
ataaattgctttggtagactgtttc

SEQ ID NO: 56224 - DNA, 25 bp, Artificial
  Probe
tgctttggtagactgtttcactgta

SEQ ID NO: 56225 - DNA, 25 bp, Artificial
  Probe
aatttcatctcccatcaacatatct

SEQ ID NO: 56226 - DNA, 25 bp, Artificial
  Probe
gtccgtcatttaagaagacatactc

SEQ ID NO: 56227 - DNA, 25 bp, Artificial
  Probe
tgttatgtccgtcatttaagaagac

SEQ ID NO: 56228 - DNA, 25 bp, Artificial
  Probe
atccacagtcattgtaaattgtacg

SEQ ID NO: 56229 - DNA, 25 bp, Artificial
  Probe
tttgttatgtccgtcatttaagaag

SEQ ID NO: 56230 - DNA, 25 bp, Artificial
  Probe
cgtcatttaagaagacatactcctt

SEQ ID NO: 56231 - DNA, 25 bp, Artificial
  Probe
cgaacacgaacagccaaataaattg

SEQ ID NO: 56232 - DNA, 25 bp, Artificial
  Probe
attaaatgcctctgtatagattggt

SEQ ID NO: 56233 - DNA, 25 bp, Artificial
  Probe
aataaattgctttggtagactgttt

SEQ ID NO: 56234 - DNA, 25 bp, Artificial
  Probe
aaataaattgctttggtagactgtt

SEQ ID NO: 56235 - DNA, 25 bp, Artificial
  Probe
gaacacgaacagccaaataaattgc

SEQ ID NO: 56236 - DNA, 25 bp, Artificial
  Probe
tttaagaagacatactccttacgga

SEQ ID NO: 56237 - DNA, 25 bp, Artificial
  Probe
tttcatctcccatcaacatatctgg

SEQ ID NO: 56238 - DNA, 25 bp, Artificial
  Probe
aaaggagggaacactacagaaattt

SEQ ID NO: 56239 - DNA, 25 bp, Artificial
  Probe
atttaagaagacatactccttacgg

SEQ ID NO: 56240 - DNA, 25 bp, Artificial
  Probe
ggaacactacagaaatttggagact

SEQ ID NO: 56241 - DNA, 25 bp, Artificial
  Probe
gaacactacagaaatttggagactt

SEQ ID NO: 56242 - DNA, 25 bp, Artificial
  Probe
ttgctttggtagactgtttcactgt

SEQ ID NO: 56243 - DNA, 25 bp, Artificial
  Probe
aaggagggaacactacagaaatttg

SEQ ID NO: 56244 - DNA, 25 bp, Artificial
  Probe
aacactacagaaatttggagacttc

SEQ ID NO: 56245 - DNA, 25 bp, Artificial
  Probe
gagggaacactacagaaatttggag

SEQ ID NO: 56246 - DNA, 25 bp, Artificial
  Probe
ctgaggatgagaagcagagagataa

SEQ ID NO: 56247 - DNA, 25 bp, Artificial
  Probe
gagaacaagatcaccatcaccaatg

SEQ ID NO: 56248 - DNA, 25 bp, Artificial
  Probe
ccgcttgagtaaggaggatattgag

SEQ ID NO: 56249 - DNA, 25 bp, Artificial
  Probe
caagatcaccatcaccaatgacaag

SEQ ID NO: 56250 - DNA, 25 bp, Artificial
  Probe
gaacaagatcaccatcaccaatgac

SEQ ID NO: 56251 - DNA, 25 bp, Artificial
  Probe
agaacaagatcaccatcaccaatga

SEQ ID NO: 56252 - DNA, 25 bp, Artificial
  Probe
ttccttgtagaagaagctcctcatc

SEQ ID NO: 56253 - DNA, 25 bp, Artificial
  Probe
aaggaagaattgagcatcagcagaa

SEQ ID NO: 56254 - DNA, 25 bp, Artificial
  Probe
ggagaacaagatcaccatcaccaat

SEQ ID NO: 56255 - DNA, 25 bp, Artificial
  Probe
acaagatcaccatcaccaatgacaa

SEQ ID NO: 56256 - DNA, 25 bp, Artificial
  Probe
aacaagatcaccatcaccaatgaca

SEQ ID NO: 56257 - DNA, 25 bp, Artificial
  Probe
gagaaacttcaaggcaagatcaatg

SEQ ID NO: 56258 - DNA, 25 bp, Artificial
  Probe
agaaggaagaattgagcatcagcag

SEQ ID NO: 56259 - DNA, 25 bp, Artificial
  Probe
aagaattgagcatcagcagaaagaa

SEQ ID NO: 56260 - DNA, 25 bp, Artificial
  Probe
gaaggaagaattgagcatcagcaga

SEQ ID NO: 56261 - DNA, 25 bp, Artificial
  Probe
gagaaggaagaattgagcatcagca

SEQ ID NO: 56262 - DNA, 25 bp, Artificial
  Probe
gaaacttcaaggcaagatcaatgat

SEQ ID NO: 56263 - DNA, 25 bp, Artificial
  Probe
tccttgtagaagaagctcctcatct

SEQ ID NO: 56264 - DNA, 25 bp, Artificial
  Probe
gaagaattgagcatcagcagaaaga

SEQ ID NO: 56265 - DNA, 25 bp, Artificial
  Probe
agaaacttcaaggcaagatcaatga

SEQ ID NO: 56266 - DNA, 25 bp, Artificial
  Probe
tgagaaacttcaaggcaagatcaat

SEQ ID NO: 56267 - DNA, 25 bp, Artificial
  Probe
atgagaaacttcaaggcaagatcaa

SEQ ID NO: 56268 - DNA, 25 bp, Artificial
  Probe
gaaaggagaacaagatcaccatcac

SEQ ID NO: 56269 - DNA, 25 bp, Artificial
  Probe
aagatcaccatcaccaatgacaagg

SEQ ID NO: 56270 - DNA, 25 bp, Artificial
  Probe
gaattgagcatcagcagaaagaact

SEQ ID NO: 56271 - DNA, 25 bp, Artificial
  Probe
agaattgagcatcagcagaaagaac

SEQ ID NO: 56272 - DNA, 25 bp, Artificial
  Probe
gatgagaaacttcaaggcaagatca

SEQ ID NO: 56273 - DNA, 25 bp, Artificial
  Probe
ctggagtcttatgctttcaacatga

SEQ ID NO: 56274 - DNA, 25 bp, Artificial
  Probe
cttgtagaagaagctcctcatcttg

SEQ ID NO: 56275 - DNA, 25 bp, Artificial
  Probe
gaagtacaaagctgaggatgagaag

SEQ ID NO: 56276 - DNA, 25 bp, Artificial
  Probe
catggtccaagaagctgagaagtac

SEQ ID NO: 56277 - DNA, 25 bp, Artificial
  Probe
ctatcataacaaagctgaccagagt

SEQ ID NO: 56278 - DNA, 25 bp, Artificial
  Probe
agaagtacaaagctgaggatgagaa

SEQ ID NO: 56279 - DNA, 25 bp, Artificial
  Probe
aggagaacaagatcaccatcaccaa

SEQ ID NO: 56280 - DNA, 25 bp, Artificial
  Probe
aaggagaacaagatcaccatcacca

SEQ ID NO: 56281 - DNA, 25 bp, Artificial
  Probe
ttgtagaagaagctcctcatcttgt

SEQ ID NO: 56282 - DNA, 25 bp, Artificial
  Probe
tatcataacaaagctgaccagagtg

SEQ ID NO: 56283 - DNA, 25 bp, Artificial
  Probe
ggaagaattgagcatcagcagaaag

SEQ ID NO: 56284 - DNA, 25 bp, Artificial
  Probe
gtccaagaagctgagaagtacaaag

SEQ ID NO: 56285 - DNA, 25 bp, Artificial
  Probe
cctatcataacaaagctgaccagag

SEQ ID NO: 56286 - DNA, 25 bp, Artificial
  Probe
ggaaaggagaacaagatcaccatca

SEQ ID NO: 56287 - DNA, 25 bp, Artificial
  Probe
gagaagtacaaagctgaggatgaga

SEQ ID NO: 56288 - DNA, 25 bp, Artificial
  Probe
gtagaagaagctcctcatcttgtga

SEQ ID NO: 56289 - DNA, 25 bp, Artificial
  Probe
ccttgtagaagaagctcctcatctt

SEQ ID NO: 56290 - DNA, 25 bp, Artificial
  Probe
atggtccaagaagctgagaagtaca

SEQ ID NO: 56291 - DNA, 25 bp, Artificial
  Probe
atagagagaagcgagatgttcaaga

SEQ ID NO: 56292 - DNA, 25 bp, Artificial
  Probe
catagagagaagcgagatgttcaag

SEQ ID NO: 56293 - DNA, 25 bp, Artificial
  Probe
tagagagaagcgagatgttcaagaa

SEQ ID NO: 56294 - DNA, 25 bp, Artificial
  Probe
tatatcctatgtacctcactgtcca

SEQ ID NO: 56295 - DNA, 25 bp, Artificial
  Probe
atatcctatgtacctcactgtccac

SEQ ID NO: 56296 - DNA, 25 bp, Artificial
  Probe
tatgtacctcactgtccactatgaa

SEQ ID NO: 56297 - DNA, 25 bp, Artificial
  Probe
ttatatcctatgtacctcactgtcc

SEQ ID NO: 56298 - DNA, 25 bp, Artificial
  Probe
ctatgtacctcactgtccactatga

SEQ ID NO: 56299 - DNA, 25 bp, Artificial
  Probe
ccatagagagaagcgagatgttcaa

SEQ ID NO: 56300 - DNA, 25 bp, Artificial
  Probe
cctatgtacctcactgtccactatg

SEQ ID NO: 56301 - DNA, 25 bp, Artificial
  Probe
tcctatgtacctcactgtccactat

SEQ ID NO: 56302 - DNA, 25 bp, Artificial
  Probe
atcctatgtacctcactgtccacta

SEQ ID NO: 56303 - DNA, 25 bp, Artificial
  Probe
tatcctatgtacctcactgtccact

SEQ ID NO: 56304 - DNA, 25 bp, Artificial
  Probe
agagagaagcgagatgttcaagaag

SEQ ID NO: 56305 - DNA, 25 bp, Artificial
  Probe
caccatagagagaagcgagatgttc

SEQ ID NO: 56306 - DNA, 25 bp, Artificial
  Probe
gcaacgaaccctagaattatatcct

SEQ ID NO: 56307 - DNA, 25 bp, Artificial
  Probe
agcaacgaaccctagaattatatcc

SEQ ID NO: 56308 - DNA, 25 bp, Artificial
  Probe
acagcaacgaaccctagaattatat

SEQ ID NO: 56309 - DNA, 25 bp, Artificial
  Probe
aacagcaacgaaccctagaattata

SEQ ID NO: 56310 - DNA, 25 bp, Artificial
  Probe
taacagcaacgaaccctagaattat

SEQ ID NO: 56311 - DNA, 25 bp, Artificial
  Probe
ttaacagcaacgaaccctagaatta

SEQ ID NO: 56312 - DNA, 25 bp, Artificial
  Probe
cagcaacgaaccctagaattatatc

SEQ ID NO: 56313 - DNA, 25 bp, Artificial
  Probe
accatagagagaagcgagatgttca

SEQ ID NO: 56314 - DNA, 25 bp, Artificial
  Probe
attatatcctatgtacctcactgtc

SEQ ID NO: 56315 - DNA, 25 bp, Artificial
  Probe
tgtgcatgagaagaacatagtgatg

SEQ ID NO: 56316 - DNA, 25 bp, Artificial
  Probe
gtgtgcatgagaagaacatagtgat

SEQ ID NO: 56317 - DNA, 25 bp, Artificial
  Probe
aagtgtgcatgagaagaacatagtg

SEQ ID NO: 56318 - DNA, 25 bp, Artificial
  Probe
caagtgtgcatgagaagaacatagt

SEQ ID NO: 56319 - DNA, 25 bp, Artificial
  Probe
tacagggatttgcgtaactaacaca

SEQ ID NO: 56320 - DNA, 25 bp, Artificial
  Probe
atgtacctcactgtccactatgaaa

SEQ ID NO: 56321 - DNA, 25 bp, Artificial
  Probe
agtgtgcatgagaagaacatagtga

SEQ ID NO: 56322 - DNA, 25 bp, Artificial
  Probe
ccaagtgtgcatgagaagaacatag

SEQ ID NO: 56323 - DNA, 25 bp, Artificial
  Probe
gagagaagcgagatgttcaagaagc

SEQ ID NO: 56324 - DNA, 25 bp, Artificial
  Probe
aattatatcctatgtacctcactgt

SEQ ID NO: 56325 - DNA, 25 bp, Artificial
  Probe
cttacagggatttgcgtaactaaca

SEQ ID NO: 56326 - DNA, 25 bp, Artificial
  Probe
ttacagggatttgcgtaactaacac

SEQ ID NO: 56327 - DNA, 25 bp, Artificial
  Probe
caacgaaccctagaattatatccta

SEQ ID NO: 56328 - DNA, 25 bp, Artificial
  Probe
ccaccatagagagaagcgagatgtt

SEQ ID NO: 56329 - DNA, 25 bp, Artificial
  Probe
ccttacagggatttgcgtaactaac

SEQ ID NO: 56330 - DNA, 25 bp, Artificial
  Probe
tcctgtctggaagagtttagaagtg

SEQ ID NO: 56331 - DNA, 25 bp, Artificial
  Probe
gtcctgtctggaagagtttagaagt

SEQ ID NO: 56332 - DNA, 25 bp, Artificial
  Probe
cgaaccctagaattatatcctatgt

SEQ ID NO: 56333 - DNA, 25 bp, Artificial
  Probe
acgaaccctagaattatatcctatg

SEQ ID NO: 56334 - DNA, 25 bp, Artificial
  Probe
gaattatatcctatgtacctcactg

SEQ ID NO: 56335 - DNA, 25 bp, Artificial
  Probe
ctgtctggaagagtttagaagtgcc

SEQ ID NO: 56336 - DNA, 25 bp, Artificial
  Probe
ggttgaattgctatctaagtctcca

SEQ ID NO: 56337 - DNA, 25 bp, Artificial
  Probe
gttgaattgctatctaagtctccat

SEQ ID NO: 56338 - DNA, 25 bp, Artificial
  Probe
cgtgaatgaagtaattgagatcctg

SEQ ID NO: 56339 - DNA, 25 bp, Artificial
  Probe
aatgaagtaattgagatcctgatgg

SEQ ID NO: 56340 - DNA, 25 bp, Artificial
  Probe
gtgaatgaagtaattgagatcctga

SEQ ID NO: 56341 - DNA, 25 bp, Artificial
  Probe
ttgaattgctatctaagtctccatt

SEQ ID NO: 56342 - DNA, 25 bp, Artificial
  Probe
attgagatcctgatggaagattctt

SEQ ID NO: 56343 - DNA, 25 bp, Artificial
  Probe
aattgagatcctgatggaagattct

SEQ ID NO: 56344 - DNA, 25 bp, Artificial
  Probe
tgaagtaattgagatcctgatggaa

SEQ ID NO: 56345 - DNA, 25 bp, Artificial
  Probe
acgtgaatgaagtaattgagatcct

SEQ ID NO: 56346 - DNA, 25 bp, Artificial
  Probe
tgaatgaagtaattgagatcctgat

SEQ ID NO: 56347 - DNA, 25 bp, Artificial
  Probe
aagtaattgagatcctgatggaaga

SEQ ID NO: 56348 - DNA, 25 bp, Artificial
  Probe
atgaagtaattgagatcctgatgga

SEQ ID NO: 56349 - DNA, 25 bp, Artificial
  Probe
aacgtgaatgaagtaattgagatcc

SEQ ID NO: 56350 - DNA, 25 bp, Artificial
  Probe
agtaattgagatcctgatggaagat

SEQ ID NO: 56351 - DNA, 25 bp, Artificial
  Probe
gaagtaattgagatcctgatggaag

SEQ ID NO: 56352 - DNA, 25 bp, Artificial
  Probe
gaatgaagtaattgagatcctgatg

SEQ ID NO: 56353 - DNA, 25 bp, Artificial
  Probe
gtgtataggaggatcaccactgtag

SEQ ID NO: 56354 - DNA, 25 bp, Artificial
  Probe
tgggttgaattgctatctaagtctc

SEQ ID NO: 56355 - DNA, 25 bp, Artificial
  Probe
atgggttgaattgctatctaagtct

SEQ ID NO: 56356 - DNA, 25 bp, Artificial
  Probe
tcctatgggttgaattgctatctaa

SEQ ID NO: 56357 - DNA, 25 bp, Artificial
  Probe
gggttgaattgctatctaagtctcc

SEQ ID NO: 56358 - DNA, 25 bp, Artificial
  Probe
cttcctatgggttgaattgctatct

SEQ ID NO: 56359 - DNA, 25 bp, Artificial
  Probe
cctatgggttgaattgctatctaag

SEQ ID NO: 56360 - DNA, 25 bp, Artificial
  Probe
gtaattgagatcctgatggaagatt

SEQ ID NO: 56361 - DNA, 25 bp, Artificial
  Probe
ttcctatgggttgaattgctatcta

SEQ ID NO: 56362 - DNA, 25 bp, Artificial
  Probe
tgtgtataggaggatcaccactgta

SEQ ID NO: 56363 - DNA, 25 bp, Artificial
  Probe
ccttcctatgggttgaattgctatc

SEQ ID NO: 56364 - DNA, 25 bp, Artificial
  Probe
taattgagatcctgatggaagattc

SEQ ID NO: 56365 - DNA, 25 bp, Artificial
  Probe
tataggaggatcaccactgtagcac

SEQ ID NO: 56366 - DNA, 25 bp, Artificial
  Probe
gtataggaggatcaccactgtagca

SEQ ID NO: 56367 - DNA, 25 bp, Artificial
  Probe
tgtataggaggatcaccactgtagc

SEQ ID NO: 56368 - DNA, 25 bp, Artificial
  Probe
gatcatctatccacacacctgtctg

SEQ ID NO: 56369 - DNA, 25 bp, Artificial
  Probe
tatgggttgaattgctatctaagtc

SEQ ID NO: 56370 - DNA, 25 bp, Artificial
  Probe
ctatgggttgaattgctatctaagt

SEQ ID NO: 56371 - DNA, 25 bp, Artificial
  Probe
tgaattgctatctaagtctccattt

SEQ ID NO: 56372 - DNA, 25 bp, Artificial
  Probe
gaaatgaatcatatcctgccctgtg

SEQ ID NO: 56373 - DNA, 25 bp, Artificial
  Probe
taacgtgaatgaagtaattgagatc

SEQ ID NO: 56374 - DNA, 25 bp, Artificial
  Probe
ctgtgtataggaggatcaccactgt

SEQ ID NO: 56375 - DNA, 25 bp, Artificial
  Probe
aaatgaatcatatcctgccctgtga

SEQ ID NO: 56376 - DNA, 25 bp, Artificial
  Probe
tgaaatgaatcatatcctgccctgt

SEQ ID NO: 56377 - DNA, 25 bp, Artificial
  Probe
ctgagctttaacgtgaatgaagtaa

SEQ ID NO: 56378 - DNA, 25 bp, Artificial
  Probe
actatgtggagaagatctgatcatc

SEQ ID NO: 56379 - DNA, 25 bp, Artificial
  Probe
gccttcctatgggttgaattgctat

SEQ ID NO: 56380 - DNA, 25 bp, Artificial
  Probe
tgagctttaacgtgaatgaagtaat

SEQ ID NO: 56381 - DNA, 25 bp, Artificial
  Probe
ctcaggtcaagatatggttccagaa

SEQ ID NO: 56382 - DNA, 25 bp, Artificial
  Probe
ctcacacagactcaggtcaagatat

SEQ ID NO: 56383 - DNA, 25 bp, Artificial
  Probe
aggtcaagatatggttccagaacaa

SEQ ID NO: 56384 - DNA, 25 bp, Artificial
  Probe
acagactcaggtcaagatatggttc

SEQ ID NO: 56385 - DNA, 25 bp, Artificial
  Probe
tcacacagactcaggtcaagatatg

SEQ ID NO: 56386 - DNA, 25 bp, Artificial
  Probe
actcaggtcaagatatggttccaga

SEQ ID NO: 56387 - DNA, 25 bp, Artificial
  Probe
cacagactcaggtcaagatatggtt

SEQ ID NO: 56388 - DNA, 25 bp, Artificial
  Probe
tcaggtcaagatatggttccagaac

SEQ ID NO: 56389 - DNA, 25 bp, Artificial
  Probe
caggtcaagatatggttccagaaca

SEQ ID NO: 56390 - DNA, 25 bp, Artificial
  Probe
cagactcaggtcaagatatggttcc

SEQ ID NO: 56391 - DNA, 25 bp, Artificial
  Probe
gactcaggtcaagatatggttccag

SEQ ID NO: 56392 - DNA, 25 bp, Artificial
  Probe
cacacagactcaggtcaagatatgg

SEQ ID NO: 56393 - DNA, 25 bp, Artificial
  Probe
actcacacagactcaggtcaagata

SEQ ID NO: 56394 - DNA, 25 bp, Artificial
  Probe
agactcaggtcaagatatggttcca

SEQ ID NO: 56395 - DNA, 25 bp, Artificial
  Probe
gtcaagatatggttccagaacaaac

SEQ ID NO: 56396 - DNA, 25 bp, Artificial
  Probe
acacagactcaggtcaagatatggt

SEQ ID NO: 56397 - DNA, 25 bp, Artificial
  Probe
ggtcaagatatggttccagaacaaa

SEQ ID NO: 56398 - DNA, 25 bp, Artificial
  Probe
tcaagatatggttccagaacaaacg

SEQ ID NO: 56399 - DNA, 25 bp, Artificial
  Probe
gatgtgaggttatcagttcgcactc

SEQ ID NO: 56400 - DNA, 25 bp, Artificial
  Probe
caagatatggttccagaacaaacgc

SEQ ID NO: 56401 - DNA, 25 bp, Artificial
  Probe
ctccaagttcaagaagctgatgaag

SEQ ID NO: 56402 - DNA, 25 bp, Artificial
  Probe
aagatatggttccagaacaaacgct

SEQ ID NO: 56403 - DNA, 25 bp, Artificial
  Probe
aagttcaagaagctgatgaagcaag

SEQ ID NO: 56404 - DNA, 25 bp, Artificial
  Probe
caagttcaagaagctgatgaagcaa

SEQ ID NO: 56405 - DNA, 25 bp, Artificial
  Probe
agatatggttccagaacaaacgctc

SEQ ID NO: 56406 - DNA, 25 bp, Artificial
  Probe
tgatgtgaggttatcagttcgcact

SEQ ID NO: 56407 - DNA, 25 bp, Artificial
  Probe
gatatggttccagaacaaacgctcc

SEQ ID NO: 56408 - DNA, 25 bp, Artificial
  Probe
agttcaagaagctgatgaagcaagg

SEQ ID NO: 56409 - DNA, 25 bp, Artificial
  Probe
tccaagttcaagaagctgatgaagc

SEQ ID NO: 56410 - DNA, 25 bp, Artificial
  Probe
gctccaagttcaagaagctgatgaa

SEQ ID NO: 56411 - DNA, 25 bp, Artificial
  Probe
ccaagttcaagaagctgatgaagca

SEQ ID NO: 56412 - DNA, 25 bp, Artificial
  Probe
gaacaaacgctccaagttcaagaag

SEQ ID NO: 56413 - DNA, 25 bp, Artificial
  Probe
atgtgaggttatcagttcgcactca

SEQ ID NO: 56414 - DNA, 25 bp, Artificial
  Probe
agaacaaacgctccaagttcaagaa

SEQ ID NO: 56415 - DNA, 25 bp, Artificial
  Probe
atatggttccagaacaaacgctcca

SEQ ID NO: 56416 - DNA, 25 bp, Artificial
  Probe
tatggttccagaacaaacgctccaa

SEQ ID NO: 56417 - DNA, 25 bp, Artificial
  Probe
aacgctccaagttcaagaagctgat

SEQ ID NO: 56418 - DNA, 25 bp, Artificial
  Probe
gttcaagaagctgatgaagcaaggc

SEQ ID NO: 56419 - DNA, 25 bp, Artificial
  Probe
aacaaacgctccaagttcaagaagc

SEQ ID NO: 56420 - DNA, 25 bp, Artificial
  Probe
cagaacaaacgctccaagttcaaga

SEQ ID NO: 56421 - DNA, 25 bp, Artificial
  Probe
caaacgctccaagttcaagaagctg

SEQ ID NO: 56422 - DNA, 25 bp, Artificial
  Probe
ccagaacaaacgctccaagttcaag

SEQ ID NO: 56423 - DNA, 25 bp, Artificial
  Probe
gttccagaacaaacgctccaagttc

SEQ ID NO: 56424 - DNA, 25 bp, Artificial
  Probe
tccagaacaaacgctccaagttcaa

SEQ ID NO: 56425 - DNA, 25 bp, Artificial
  Probe
ttccagaacaaacgctccaagttca

SEQ ID NO: 56426 - DNA, 25 bp, Artificial
  Probe
gaatcgaattcctcctctgggaagg

SEQ ID NO: 56427 - DNA, 25 bp, Artificial
  Probe
aagagaaataagaagaaaccctgct

SEQ ID NO: 56428 - DNA, 25 bp, Artificial
  Probe
gaagagaaataagaagaaaccctgc

SEQ ID NO: 56429 - DNA, 25 bp, Artificial
  Probe
gcagaagagaaataagaagaaaccc

SEQ ID NO: 56430 - DNA, 25 bp, Artificial
  Probe
ggcagaagagaaataagaagaaacc

SEQ ID NO: 56431 - DNA, 25 bp, Artificial
  Probe
gtgaggcagaagagaaataagaaga

SEQ ID NO: 56432 - DNA, 25 bp, Artificial
  Probe
tgaggcagaagagaaataagaagaa

SEQ ID NO: 56433 - DNA, 25 bp, Artificial
  Probe
agagaaataagaagaaaccctgcta

SEQ ID NO: 56434 - DNA, 25 bp, Artificial
  Probe
aggcagaagagaaataagaagaaac

SEQ ID NO: 56435 - DNA, 25 bp, Artificial
  Probe
ggtgaggcagaagagaaataagaag

SEQ ID NO: 56436 - DNA, 25 bp, Artificial
  Probe
gaggcagaagagaaataagaagaaa

SEQ ID NO: 56437 - DNA, 25 bp, Artificial
  Probe
gagaaataagaagaaaccctgctag

SEQ ID NO: 56438 - DNA, 25 bp, Artificial
  Probe
agaagagaaataagaagaaaccctg

SEQ ID NO: 56439 - DNA, 25 bp, Artificial
  Probe
cagaagagaaataagaagaaaccct

SEQ ID NO: 56440 - DNA, 25 bp, Artificial
  Probe
cctttagtaaacactgtgctttgta

SEQ ID NO: 56441 - DNA, 25 bp, Artificial
  Probe
gggtgaggcagaagagaaataagaa

SEQ ID NO: 56442 - DNA, 25 bp, Artificial
  Probe
ctttgtgcctttagtaaacactgtg

SEQ ID NO: 56443 - DNA, 25 bp, Artificial
  Probe
cactttgtgcctttagtaaacactg

SEQ ID NO: 56444 - DNA, 25 bp, Artificial
  Probe
agaaataagaagaaaccctgctagg

SEQ ID NO: 56445 - DNA, 25 bp, Artificial
  Probe
actttgtgcctttagtaaacactgt

SEQ ID NO: 56446 - DNA, 25 bp, Artificial
  Probe
tgcctttagtaaacactgtgctttg

SEQ ID NO: 56447 - DNA, 25 bp, Artificial
  Probe
ccactttgtgcctttagtaaacact

SEQ ID NO: 56448 - DNA, 25 bp, Artificial
  Probe
ctttagtaaacactgtgctttgtaa

SEQ ID NO: 56449 - DNA, 25 bp, Artificial
  Probe
gcctttagtaaacactgtgctttgt

SEQ ID NO: 56450 - DNA, 25 bp, Artificial
  Probe
ctcccactttgtgcctttagtaaac

SEQ ID NO: 56451 - DNA, 25 bp, Artificial
  Probe
tttagtaaacactgtgctttgtaaa

SEQ ID NO: 56452 - DNA, 25 bp, Artificial
  Probe
gtgcctttagtaaacactgtgcttt

SEQ ID NO: 56453 - DNA, 25 bp, Artificial
  Probe
tttgtgcctttagtaaacactgtgc

SEQ ID NO: 56454 - DNA, 25 bp, Artificial
  Probe
cccactttgtgcctttagtaaacac

SEQ ID NO: 56455 - DNA, 25 bp, Artificial
  Probe
tcccactttgtgcctttagtaaaca

SEQ ID NO: 56456 - DNA, 25 bp, Artificial
  Probe
cctcccactttgtgcctttagtaaa

SEQ ID NO: 56457 - DNA, 25 bp, Artificial
  Probe
tgtgcctttagtaaacactgtgctt

SEQ ID NO: 56458 - DNA, 25 bp, Artificial
  Probe
ttgtgcctttagtaaacactgtgct

SEQ ID NO: 56459 - DNA, 25 bp, Artificial
  Probe
acctcccactttgtgcctttagtaa

SEQ ID NO: 56460 - DNA, 25 bp, Artificial
  Probe
ttagtaaacactgtgctttgtaaaa

SEQ ID NO: 56461 - DNA, 25 bp, Artificial
  Probe
gacctcccactttgtgcctttagta

SEQ ID NO: 56462 - DNA, 25 bp, Artificial
  Probe
ggggtgaggcagaagagaaataaga

SEQ ID NO: 56463 - DNA, 25 bp, Artificial
  Probe
aggggtgaggcagaagagaaataag

SEQ ID NO: 56464 - DNA, 25 bp, Artificial
  Probe
caggggtgaggcagaagagaaataa

SEQ ID NO: 56465 - DNA, 25 bp, Artificial
  Probe
acaggggtgaggcagaagagaaata

SEQ ID NO: 56466 - DNA, 25 bp, Artificial
  Probe
ctttcccatgaagggcattttggag

SEQ ID NO: 56467 - DNA, 25 bp, Artificial
  Probe
ttcccatgaagggcattttggagaa

SEQ ID NO: 56468 - DNA, 25 bp, Artificial
  Probe
tttcccatgaagggcattttggaga

SEQ ID NO: 56469 - DNA, 25 bp, Artificial
  Probe
tcccatgaagggcattttggagaag

SEQ ID NO: 56470 - DNA, 25 bp, Artificial
  Probe
ttagctcataagatggaatagacgg

SEQ ID NO: 56471 - DNA, 25 bp, Artificial
  Probe
ctcctgtctggtctgtttgtataat

SEQ ID NO: 56472 - DNA, 25 bp, Artificial
  Probe
tgtgacttatgacttatctttggct

SEQ ID NO: 56473 - DNA, 25 bp, Artificial
  Probe
aaacttggtaaacttccttccttgt

SEQ ID NO: 56474 - DNA, 25 bp, Artificial
  Probe
atgacttatctttggcttctctgag

SEQ ID NO: 56475 - DNA, 25 bp, Artificial
  Probe
tatgacttatctttggcttctctga

SEQ ID NO: 56476 - DNA, 25 bp, Artificial
  Probe
gtgacttatgacttatctttggctt

SEQ ID NO: 56477 - DNA, 25 bp, Artificial
  Probe
atgtgacttatgacttatctttggc

SEQ ID NO: 56478 - DNA, 25 bp, Artificial
  Probe
cctgtctggtctgtttgtataattg

SEQ ID NO: 56479 - DNA, 25 bp, Artificial
  Probe
tcctgtctggtctgtttgtataatt

SEQ ID NO: 56480 - DNA, 25 bp, Artificial
  Probe
acaaacttggtaaacttccttcctt

SEQ ID NO: 56481 - DNA, 25 bp, Artificial
  Probe
aacaaacttggtaaacttccttcct

SEQ ID NO: 56482 - DNA, 25 bp, Artificial
  Probe
ctctgagaacaaacttggtaaactt

SEQ ID NO: 56483 - DNA, 25 bp, Artificial
  Probe
ctgagaacaaacttggtaaacttcc

SEQ ID NO: 56484 - DNA, 25 bp, Artificial
  Probe
gaacaaacttggtaaacttccttcc

SEQ ID NO: 56485 - DNA, 25 bp, Artificial
  Probe
agaacaaacttggtaaacttccttc

SEQ ID NO: 56486 - DNA, 25 bp, Artificial
  Probe
gagaacaaacttggtaaacttcctt

SEQ ID NO: 56487 - DNA, 25 bp, Artificial
  Probe
tgacttatgacttatctttggcttc

SEQ ID NO: 56488 - DNA, 25 bp, Artificial
  Probe
tgagaacaaacttggtaaacttcct

SEQ ID NO: 56489 - DNA, 25 bp, Artificial
  Probe
tctgagaacaaacttggtaaacttc

SEQ ID NO: 56490 - DNA, 25 bp, Artificial
  Probe
aacttggtaaacttccttccttgtg

SEQ ID NO: 56491 - DNA, 25 bp, Artificial
  Probe
ctgtctggtctgtttgtataattgt

SEQ ID NO: 56492 - DNA, 25 bp, Artificial
  Probe
caaacttggtaaacttccttccttg

SEQ ID NO: 56493 - DNA, 25 bp, Artificial
  Probe
ttatgacttatctttggcttctctg

SEQ ID NO: 56494 - DNA, 25 bp, Artificial
  Probe
acttatgacttatctttggcttctc

SEQ ID NO: 56495 - DNA, 25 bp, Artificial
  Probe
gacttatgacttatctttggcttct

SEQ ID NO: 56496 - DNA, 25 bp, Artificial
  Probe
cttggtaaacttccttccttgtgag

SEQ ID NO: 56497 - DNA, 25 bp, Artificial
  Probe
attagctcataagatggaatagacg

SEQ ID NO: 56498 - DNA, 25 bp, Artificial
  Probe
cttatgacttatctttggcttctct

SEQ ID NO: 56499 - DNA, 25 bp, Artificial
  Probe
cctcctgtctggtctgtttgtataa

SEQ ID NO: 56500 - DNA, 25 bp, Artificial
  Probe
acttggtaaacttccttccttgtga

SEQ ID NO: 56501 - DNA, 25 bp, Artificial
  Probe
tctctgagaacaaacttggtaaact

SEQ ID NO: 56502 - DNA, 25 bp, Artificial
  Probe
tgattgattagctcataagatggaa

SEQ ID NO: 56503 - DNA, 25 bp, Artificial
  Probe
tgtctggtctgtttgtataattgta

SEQ ID NO: 56504 - DNA, 25 bp, Artificial
  Probe
tgacttatctttggcttctctgaga

SEQ ID NO: 56505 - DNA, 25 bp, Artificial
  Probe
ttggtaaacttccttccttgtgagt

SEQ ID NO: 56506 - DNA, 25 bp, Artificial
  Probe
tagctcataagatggaatagacggg

SEQ ID NO: 56507 - DNA, 25 bp, Artificial
  Probe
gattagctcataagatggaatagac

SEQ ID NO: 56508 - DNA, 25 bp, Artificial
  Probe
ctgcatgattgattagctcataaga

SEQ ID NO: 56509 - DNA, 25 bp, Artificial
  Probe
tctgcatgattgattagctcataag

SEQ ID NO: 56510 - DNA, 25 bp, Artificial
  Probe
gcatgattgattagctcataagatg

SEQ ID NO: 56511 - DNA, 25 bp, Artificial
  Probe
tgattagctcataagatggaataga

SEQ ID NO: 56512 - DNA, 25 bp, Artificial
  Probe
gattgattagctcataagatggaat

SEQ ID NO: 56513 - DNA, 25 bp, Artificial
  Probe
gtctggtctgtttgtataattgtat

SEQ ID NO: 56514 - DNA, 25 bp, Artificial
  Probe
ccctcctgtctggtctgtttgtata

SEQ ID NO: 56515 - DNA, 25 bp, Artificial
  Probe
ctccatcttctctccaagtccctta

SEQ ID NO: 56516 - DNA, 25 bp, Artificial
  Probe
tccatcttctctccaagtcccttac

SEQ ID NO: 56517 - DNA, 25 bp, Artificial
  Probe
ccatcttctctccaagtcccttact

SEQ ID NO: 56518 - DNA, 25 bp, Artificial
  Probe
tgagactctttgtaataaaacagcg

SEQ ID NO: 56519 - DNA, 25 bp, Artificial
  Probe
gtgagactctttgtaataaaacagc

SEQ ID NO: 56520 - DNA, 25 bp, Artificial
  Probe
ccttttcaggcttgggtaatatcag

SEQ ID NO: 56521 - DNA, 25 bp, Artificial
  Probe
gtagggtccaggtgaaaagaaaaca

SEQ ID NO: 56522 - DNA, 25 bp, Artificial
  Probe
tgtgagactctttgtaataaaacag

SEQ ID NO: 56523 - DNA, 25 bp, Artificial
  Probe
aaggggtcaaagaagaggtcaagat

SEQ ID NO: 56524 - DNA, 25 bp, Artificial
  Probe
caaaggggtcaaagaagaggtcaag

SEQ ID NO: 56525 - DNA, 25 bp, Artificial
  Probe
aaaggggtcaaagaagaggtcaaga

SEQ ID NO: 56526 - DNA, 25 bp, Artificial
  Probe
ttgtgagactctttgtaataaaaca

SEQ ID NO: 56527 - DNA, 25 bp, Artificial
  Probe
cttttcaggcttgggtaatatcagc

SEQ ID NO: 56528 - DNA, 25 bp, Artificial
  Probe
cgtagggtccaggtgaaaagaaaac

SEQ ID NO: 56529 - DNA, 25 bp, Artificial
  Probe
atattaaatataacgtccccaggga

SEQ ID NO: 56530 - DNA, 25 bp, Artificial
  Probe
aggggtcaaagaagaggtcaagatg

SEQ ID NO: 56531 - DNA, 25 bp, Artificial
  Probe
tttgtgagactctttgtaataaaac

SEQ ID NO: 56532 - DNA, 25 bp, Artificial
  Probe
tatattaaatataacgtccccaggg

SEQ ID NO: 56533 - DNA, 25 bp, Artificial
  Probe
taggtctgagttttgaaccacgtag

SEQ ID NO: 56534 - DNA, 25 bp, Artificial
  Probe
ggaggttgttagcctagcttccttt

SEQ ID NO: 56535 - DNA, 25 bp, Artificial
  Probe
gaggttgttagcctagcttcctttt

SEQ ID NO: 56536 - DNA, 25 bp, Artificial
  Probe
ggggtcaaagaagaggtcaagatgg

SEQ ID NO: 56537 - DNA, 25 bp, Artificial
  Probe
acgtagggtccaggtgaaaagaaaa

SEQ ID NO: 56538 - DNA, 25 bp, Artificial
  Probe
aaagaagaggtcaagatggcctgag

SEQ ID NO: 56539 - DNA, 25 bp, Artificial
  Probe
caaagaagaggtcaagatggcctga

SEQ ID NO: 56540 - DNA, 25 bp, Artificial
  Probe
tcaaagaagaggtcaagatggcctg

SEQ ID NO: 56541 - DNA, 25 bp, Artificial
  Probe
gtcaaagaagaggtcaagatggcct

SEQ ID NO: 56542 - DNA, 25 bp, Artificial
  Probe
ttttgtgagactctttgtaataaaa

SEQ ID NO: 56543 - DNA, 25 bp, Artificial
  Probe
taggatggccttgttaagcttttca

SEQ ID NO: 56544 - DNA, 25 bp, Artificial
  Probe
atatattaaatataacgtccccagg

SEQ ID NO: 56545 - DNA, 25 bp, Artificial
  Probe
tctgagttttgaaccacgtagggtc

SEQ ID NO: 56546 - DNA, 25 bp, Artificial
  Probe
aggtctgagttttgaaccacgtagg

SEQ ID NO: 56547 - DNA, 25 bp, Artificial
  Probe
cacgtagggtccaggtgaaaagaaa

SEQ ID NO: 56548 - DNA, 25 bp, Artificial
  Probe
aggatggccttgttaagcttttcag

SEQ ID NO: 56549 - DNA, 25 bp, Artificial
  Probe
gtctgagttttgaaccacgtagggt

SEQ ID NO: 56550 - DNA, 25 bp, Artificial
  Probe
ttaaatataacgtccccagggacta

SEQ ID NO: 56551 - DNA, 25 bp, Artificial
  Probe
tattaaatataacgtccccagggac

SEQ ID NO: 56552 - DNA, 25 bp, Artificial
  Probe
taaatataacgtccccagggactag

SEQ ID NO: 56553 - DNA, 25 bp, Artificial
  Probe
attaaatataacgtccccagggact

SEQ ID NO: 56554 - DNA, 25 bp, Artificial
  Probe
atataacgtccccagggactagata

SEQ ID NO: 56555 - DNA, 25 bp, Artificial
  Probe
atggccttgttaagcttttcagcag

SEQ ID NO: 56556 - DNA, 25 bp, Artificial
  Probe
gatggccttgttaagcttttcagca

SEQ ID NO: 56557 - DNA, 25 bp, Artificial
  Probe
tataacgtccccagggactagatag

SEQ ID NO: 56558 - DNA, 25 bp, Artificial
  Probe
aatataacgtccccagggactagat

SEQ ID NO: 56559 - DNA, 25 bp, Artificial
  Probe
aaatataacgtccccagggactaga

SEQ ID NO: 56560 - DNA, 25 bp, Artificial
  Probe
gatacattcgtccgtctcctagtaa

SEQ ID NO: 56561 - DNA, 25 bp, Artificial
  Probe
atacattcgtccgtctcctagtaac

SEQ ID NO: 56562 - DNA, 25 bp, Artificial
  Probe
attcgtccgtctcctagtaacaatc

SEQ ID NO: 56563 - DNA, 25 bp, Artificial
  Probe
ccacaactgcttctctctacctaag

SEQ ID NO: 56564 - DNA, 25 bp, Artificial
  Probe
agatacattcgtccgtctcctagta

SEQ ID NO: 56565 - DNA, 25 bp, Artificial
  Probe
cattcgtccgtctcctagtaacaat

SEQ ID NO: 56566 - DNA, 25 bp, Artificial
  Probe
cacaactgcttctctctacctaagg

SEQ ID NO: 56567 - DNA, 25 bp, Artificial
  Probe
tacattcgtccgtctcctagtaaca

SEQ ID NO: 56568 - DNA, 25 bp, Artificial
  Probe
cgtccgtctcctagtaacaatcttg

SEQ ID NO: 56569 - DNA, 25 bp, Artificial
  Probe
tccgtctcctagtaacaatcttgtg

SEQ ID NO: 56570 - DNA, 25 bp, Artificial
  Probe
gtccgtctcctagtaacaatcttgt

SEQ ID NO: 56571 - DNA, 25 bp, Artificial
  Probe
tcgtccgtctcctagtaacaatctt

SEQ ID NO: 56572 - DNA, 25 bp, Artificial
  Probe
ttcgtccgtctcctagtaacaatct

SEQ ID NO: 56573 - DNA, 25 bp, Artificial
  Probe
catagtcccttcctgaactttgaat

SEQ ID NO: 56574 - DNA, 25 bp, Artificial
  Probe
atagtcccttcctgaactttgaatt

SEQ ID NO: 56575 - DNA, 25 bp, Artificial
  Probe
tcatagtcccttcctgaactttgaa

SEQ ID NO: 56576 - DNA, 25 bp, Artificial
  Probe
acattcgtccgtctcctagtaacaa

SEQ ID NO: 56577 - DNA, 25 bp, Artificial
  Probe
cagtaaacatggagatacattcgtc

SEQ ID NO: 56578 - DNA, 25 bp, Artificial
  Probe
ccgtctcctagtaacaatcttgtgg

SEQ ID NO: 56579 - DNA, 25 bp, Artificial
  Probe
ggaagagaagggaaggtaaagtcag

SEQ ID NO: 56580 - DNA, 25 bp, Artificial
  Probe
ttctagcagtaaacatggagataca

SEQ ID NO: 56581 - DNA, 25 bp, Artificial
  Probe
agcagtaaacatggagatacattcg

SEQ ID NO: 56582 - DNA, 25 bp, Artificial
  Probe
tctagcagtaaacatggagatacat

SEQ ID NO: 56583 - DNA, 25 bp, Artificial
  Probe
gcagtaaacatggagatacattcgt

SEQ ID NO: 56584 - DNA, 25 bp, Artificial
  Probe
tagcagtaaacatggagatacattc

SEQ ID NO: 56585 - DNA, 25 bp, Artificial
  Probe
ctagcagtaaacatggagatacatt

SEQ ID NO: 56586 - DNA, 25 bp, Artificial
  Probe
ctctctacctaagggtgacagatta

SEQ ID NO: 56587 - DNA, 25 bp, Artificial
  Probe
tttctagcagtaaacatggagatac

SEQ ID NO: 56588 - DNA, 25 bp, Artificial
  Probe
tctctacctaagggtgacagattac

SEQ ID NO: 56589 - DNA, 25 bp, Artificial
  Probe
cgtctcctagtaacaatcttgtggc

SEQ ID NO: 56590 - DNA, 25 bp, Artificial
  Probe
gaagagaagggaaggtaaagtcagc

SEQ ID NO: 56591 - DNA, 25 bp, Artificial
  Probe
agtaaacatggagatacattcgtcc

SEQ ID NO: 56592 - DNA, 25 bp, Artificial
  Probe
cccataaattcaagatttctcacaa

SEQ ID NO: 56593 - DNA, 25 bp, Artificial
  Probe
atatcagggaaaggacaggcaagta

SEQ ID NO: 56594 - DNA, 25 bp, Artificial
  Probe
aggtaaagtcagcatgtgttacaaa

SEQ ID NO: 56595 - DNA, 25 bp, Artificial
  Probe
aaggtaaagtcagcatgtgttacaa

SEQ ID NO: 56596 - DNA, 25 bp, Artificial
  Probe
ccaaaggtaaatcacaccatgaaat

SEQ ID NO: 56597 - DNA, 25 bp, Artificial
  Probe
agttcaggaaagatatcagggaaag

SEQ ID NO: 56598 - DNA, 25 bp, Artificial
  Probe
cagttcaggaaagatatcagggaaa

SEQ ID NO: 56599 - DNA, 25 bp, Artificial
  Probe
caaaggtaaatcacaccatgaaatg

SEQ ID NO: 56600 - DNA, 25 bp, Artificial
  Probe
tccaaaggtaaatcacaccatgaaa

SEQ ID NO: 56601 - DNA, 25 bp, Artificial
  Probe
tctctctacctaagggtgacagatt

SEQ ID NO: 56602 - DNA, 25 bp, Artificial
  Probe
ttctctctacctaagggtgacagat

SEQ ID NO: 56603 - DNA, 25 bp, Artificial
  Probe
gaaggtaaagtcagcatgtgttaca

SEQ ID NO: 56604 - DNA, 25 bp, Artificial
  Probe
agagaagggaaggtaaagtcagcat

SEQ ID NO: 56605 - DNA, 25 bp, Artificial
  Probe
cttcagagacaatgtgcctatccag

SEQ ID NO: 56606 - DNA, 25 bp, Artificial
  Probe
aggttgatgggtaataaactgcttg

SEQ ID NO: 56607 - DNA, 25 bp, Artificial
  Probe
ctggaggaagtgagtgagatcattg

SEQ ID NO: 56608 - DNA, 25 bp, Artificial
  Probe
ttgatgggtaataaactgcttgctg

SEQ ID NO: 56609 - DNA, 25 bp, Artificial
  Probe
ctggacaggttgatgggtaataaac

SEQ ID NO: 56610 - DNA, 25 bp, Artificial
  Probe
tggacaggttgatgggtaataaact

SEQ ID NO: 56611 - DNA, 25 bp, Artificial
  Probe
gttgatgggtaataaactgcttgct

SEQ ID NO: 56612 - DNA, 25 bp, Artificial
  Probe
caggttgatgggtaataaactgctt

SEQ ID NO: 56613 - DNA, 25 bp, Artificial
  Probe
ggacaggttgatgggtaataaactg

SEQ ID NO: 56614 - DNA, 25 bp, Artificial
  Probe
gacaggttgatgggtaataaactgc

SEQ ID NO: 56615 - DNA, 25 bp, Artificial
  Probe
ggttgatgggtaataaactgcttgc

SEQ ID NO: 56616 - DNA, 25 bp, Artificial
  Probe
gctggacaggttgatgggtaataaa

SEQ ID NO: 56617 - DNA, 25 bp, Artificial
  Probe
acaggttgatgggtaataaactgct

SEQ ID NO: 56618 - DNA, 25 bp, Artificial
  Probe
cctggaggaagtgagtgagatcatt

SEQ ID NO: 56619 - DNA, 25 bp, Artificial
  Probe
tggaggaagtgagtgagatcattgg

SEQ ID NO: 56620 - DNA, 25 bp, Artificial
  Probe
ttcagagacaatgtgcctatccagg

SEQ ID NO: 56621 - DNA, 25 bp, Artificial
  Probe
gcttcagagacaatgtgcctatcca

SEQ ID NO: 56622 - DNA, 25 bp, Artificial
  Probe
tgatgggtaataaactgcttgctgc

SEQ ID NO: 56623 - DNA, 25 bp, Artificial
  Probe
cttacctgctgagggttacaatgag

SEQ ID NO: 56624 - DNA, 25 bp, Artificial
  Probe
agacaatgtgcctatccagggtatc

SEQ ID NO: 56625 - DNA, 25 bp, Artificial
  Probe
gagacaatgtgcctatccagggtat

SEQ ID NO: 56626 - DNA, 25 bp, Artificial
  Probe
ggctggacaggttgatgggtaataa

SEQ ID NO: 56627 - DNA, 25 bp, Artificial
  Probe
gatgggtaataaactgcttgctgcc

SEQ ID NO: 56628 - DNA, 25 bp, Artificial
  Probe
gacaatgtgcctatccagggtatca

SEQ ID NO: 56629 - DNA, 25 bp, Artificial
  Probe
ggaggaagtgagtgagatcattggc

SEQ ID NO: 56630 - DNA, 25 bp, Artificial
  Probe
acaatgtgcctatccagggtatcac

SEQ ID NO: 56631 - DNA, 25 bp, Artificial
  Probe
ttacctgctgagggttacaatgagg

SEQ ID NO: 56632 - DNA, 25 bp, Artificial
  Probe
ccttacctgctgagggttacaatga

SEQ ID NO: 56633 - DNA, 25 bp, Artificial
  Probe
aggctggacaggttgatgggtaata

SEQ ID NO: 56634 - DNA, 25 bp, Artificial
  Probe
agagacaatgtgcctatccagggta

SEQ ID NO: 56635 - DNA, 25 bp, Artificial
  Probe
caatgtgcctatccagggtatcacc

SEQ ID NO: 56636 - DNA, 25 bp, Artificial
  Probe
ccctggaggaagtgagtgagatcat

SEQ ID NO: 56637 - DNA, 25 bp, Artificial
  Probe
gaggaagtgagtgagatcattggcc

SEQ ID NO: 56638 - DNA, 25 bp, Artificial
  Probe
tatcaccctggaggaagtgagtgag

SEQ ID NO: 56639 - DNA, 25 bp, Artificial
  Probe
gtatcaccctggaggaagtgagtga

SEQ ID NO: 56640 - DNA, 25 bp, Artificial
  Probe
tacctgctgagggttacaatgaggt

SEQ ID NO: 56641 - DNA, 25 bp, Artificial
  Probe
cactagaaggctactataatgaccg

SEQ ID NO: 56642 - DNA, 25 bp, Artificial
  Probe
gcactagaaggctactataatgacc

SEQ ID NO: 56643 - DNA, 25 bp, Artificial
  Probe
ggcactagaaggctactataatgac

SEQ ID NO: 56644 - DNA, 25 bp, Artificial
  Probe
tggcactagaaggctactataatga

SEQ ID NO: 56645 - DNA, 25 bp, Artificial
  Probe
gtggcactagaaggctactataatg

SEQ ID NO: 56646 - DNA, 25 bp, Artificial
  Probe
agtggcactagaaggctactataat

SEQ ID NO: 56647 - DNA, 25 bp, Artificial
  Probe
aagtggcactagaaggctactataa

SEQ ID NO: 56648 - DNA, 25 bp, Artificial
  Probe
gaagtggcactagaaggctactata

SEQ ID NO: 56649 - DNA, 25 bp, Artificial
  Probe
ctatggtagaagtggcactagaagg

SEQ ID NO: 56650 - DNA, 25 bp, Artificial
  Probe
tagaagtggcactagaaggctacta

SEQ ID NO: 56651 - DNA, 25 bp, Artificial
  Probe
gctatggtagaagtggcactagaag

SEQ ID NO: 56652 - DNA, 25 bp, Artificial
  Probe
agaagtggcactagaaggctactat

SEQ ID NO: 56653 - DNA, 25 bp, Artificial
  Probe
actagaaggctactataatgaccgg

SEQ ID NO: 56654 - DNA, 25 bp, Artificial
  Probe
ctagaaggctactataatgaccggc

SEQ ID NO: 56655 - DNA, 25 bp, Artificial
  Probe
tagaaggctactataatgaccggct

SEQ ID NO: 56656 - DNA, 25 bp, Artificial
  Probe
tatggtagaagtggcactagaaggc

SEQ ID NO: 56657 - DNA, 25 bp, Artificial
  Probe
ctactccaccctgttagttttgtaa

SEQ ID NO: 56658 - DNA, 25 bp, Artificial
  Probe
tactccaccctgttagttttgtaaa

SEQ ID NO: 56659 - DNA, 25 bp, Artificial
  Probe
cgctatggtagaagtggcactagaa

SEQ ID NO: 56660 - DNA, 25 bp, Artificial
  Probe
cttccctactccaccctgttagttt

SEQ ID NO: 56661 - DNA, 25 bp, Artificial
  Probe
gatgaagggtgagccgaacaatatg

SEQ ID NO: 56662 - DNA, 25 bp, Artificial
  Probe
actccaccctgttagttttgtaaaa

SEQ ID NO: 56663 - DNA, 25 bp, Artificial
  Probe
ctactataatgaccggctgtttgac

SEQ ID NO: 56664 - DNA, 25 bp, Artificial
  Probe
agatgaagggtgagccgaacaatat

SEQ ID NO: 56665 - DNA, 25 bp, Artificial
  Probe
gaggaacataaggccaagacagaag

SEQ ID NO: 56666 - DNA, 25 bp, Artificial
  Probe
gtagaagtggcactagaaggctact

SEQ ID NO: 56667 - DNA, 25 bp, Artificial
  Probe
cctactccaccctgttagttttgta

SEQ ID NO: 56668 - DNA, 25 bp, Artificial
  Probe
aaggctactataatgaccggctgtt

SEQ ID NO: 56669 - DNA, 25 bp, Artificial
  Probe
ggaacataaggccaagacagaagtg

SEQ ID NO: 56670 - DNA, 25 bp, Artificial
  Probe
tggtagaagtggcactagaaggcta

SEQ ID NO: 56671 - DNA, 25 bp, Artificial
  Probe
tactataatgaccggctgtttgacc

SEQ ID NO: 56672 - DNA, 25 bp, Artificial
  Probe
aggaacataaggccaagacagaagt

SEQ ID NO: 56673 - DNA, 25 bp, Artificial
  Probe
agaaggctactataatgaccggctg

SEQ ID NO: 56674 - DNA, 25 bp, Artificial
  Probe
gagatgaagggtgagccgaacaata

SEQ ID NO: 56675 - DNA, 25 bp, Artificial
  Probe
gctactataatgaccggctgtttga

SEQ ID NO: 56676 - DNA, 25 bp, Artificial
  Probe
gaaggctactataatgaccggctgt

SEQ ID NO: 56677 - DNA, 25 bp, Artificial
  Probe
tgaagaattttgagtgaattagacc

SEQ ID NO: 56678 - DNA, 25 bp, Artificial
  Probe
ggtagaagtggcactagaaggctac

SEQ ID NO: 56679 - DNA, 25 bp, Artificial
  Probe
gaagaattttgagtgaattagacct

SEQ ID NO: 56680 - DNA, 25 bp, Artificial
  Probe
ttccctactccaccctgttagtttt

SEQ ID NO: 56681 - DNA, 25 bp, Artificial
  Probe
atggtagaagtggcactagaaggct

SEQ ID NO: 56682 - DNA, 25 bp, Artificial
  Probe
ggaggaacataaggccaagacagaa

SEQ ID NO: 56683 - DNA, 25 bp, Artificial
  Probe
gaacataaggccaagacagaagtgg

SEQ ID NO: 56684 - DNA, 25 bp, Artificial
  Probe
ggaaaagaagctctatgccaacatg

SEQ ID NO: 56685 - DNA, 25 bp, Artificial
  Probe
ggctactataatgaccggctgtttg

SEQ ID NO: 56686 - DNA, 25 bp, Artificial
  Probe
tcagtgtaactaataaggctgtgaa

SEQ ID NO: 56687 - DNA, 25 bp, Artificial
  Probe
ttcagtgtaactaataaggctgtga

SEQ ID NO: 56688 - DNA, 25 bp, Artificial
  Probe
cagtgtaactaataaggctgtgaag

SEQ ID NO: 56689 - DNA, 25 bp, Artificial
  Probe
taaggactcacagaactgatgatgc

SEQ ID NO: 56690 - DNA, 25 bp, Artificial
  Probe
cagtgaggagcctttcttaatgttt

SEQ ID NO: 56691 - DNA, 25 bp, Artificial
  Probe
agtgtaactaataaggctgtgaagc

SEQ ID NO: 56692 - DNA, 25 bp, Artificial
  Probe
aatccagtaaatacaatgtccaagt

SEQ ID NO: 56693 - DNA, 25 bp, Artificial
  Probe
tgaaatccagtaaatacaatgtcca

SEQ ID NO: 56694 - DNA, 25 bp, Artificial
  Probe
tttcagtgtaactaataaggctgtg

SEQ ID NO: 56695 - DNA, 25 bp, Artificial
  Probe
tccagtaaatacaatgtccaagtaa

SEQ ID NO: 56696 - DNA, 25 bp, Artificial
  Probe
ctgacagtgaggagcctttcttaat

SEQ ID NO: 56697 - DNA, 25 bp, Artificial
  Probe
atccagtaaatacaatgtccaagta

SEQ ID NO: 56698 - DNA, 25 bp, Artificial
  Probe
aaatccagtaaatacaatgtccaag

SEQ ID NO: 56699 - DNA, 25 bp, Artificial
  Probe
gaaatccagtaaatacaatgtccaa

SEQ ID NO: 56700 - DNA, 25 bp, Artificial
  Probe
gtgtaactaataaggctgtgaagct

SEQ ID NO: 56701 - DNA, 25 bp, Artificial
  Probe
ttatcctgttagctctggagtgttg

SEQ ID NO: 56702 - DNA, 25 bp, Artificial
  Probe
ttagtgagggttaatttagcttggc

SEQ ID NO: 56703 - DNA, 25 bp, Artificial
  Probe
tttagtgagggttaatttagcttgg

SEQ ID NO: 56704 - DNA, 25 bp, Artificial
  Probe
tgacagtgaggagcctttcttaatg

SEQ ID NO: 56705 - DNA, 25 bp, Artificial
  Probe
ttataagaatgaacgaagccatatt

SEQ ID NO: 56706 - DNA, 25 bp, Artificial
  Probe
ctgaaatccagtaaatacaatgtcc

SEQ ID NO: 56707 - DNA, 25 bp, Artificial
  Probe
acagtgaggagcctttcttaatgtt

SEQ ID NO: 56708 - DNA, 25 bp, Artificial
  Probe
ccagtaaatacaatgtccaagtaat

SEQ ID NO: 56709 - DNA, 25 bp, Artificial
  Probe
tagtgagggttaatttagcttggca

SEQ ID NO: 56710 - DNA, 25 bp, Artificial
  Probe
gacagtgaggagcctttcttaatgt

SEQ ID NO: 56711 - DNA, 25 bp, Artificial
  Probe
tatcctgttagctctggagtgttga

SEQ ID NO: 56712 - DNA, 25 bp, Artificial
  Probe
ctttagtgagggttaatttagcttg

SEQ ID NO: 56713 - DNA, 25 bp, Artificial
  Probe
tcgctttaaatctacatatgctgag

SEQ ID NO: 56714 - DNA, 25 bp, Artificial
  Probe
gagcctttcttaatgttttcagtgt

SEQ ID NO: 56715 - DNA, 25 bp, Artificial
  Probe
cctttagtgagggttaatttagctt

SEQ ID NO: 56716 - DNA, 25 bp, Artificial
  Probe
ggagcctttcttaatgttttcagtg

SEQ ID NO: 56717 - DNA, 25 bp, Artificial
  Probe
tataagaatgaacgaagccatattt

SEQ ID NO: 56718 - DNA, 25 bp, Artificial
  Probe
gaggagcctttcttaatgttttcag

SEQ ID NO: 56719 - DNA, 25 bp, Artificial
  Probe
gtgaggagcctttcttaatgttttc

SEQ ID NO: 56720 - DNA, 25 bp, Artificial
  Probe
atcgctttaaatctacatatgctga

SEQ ID NO: 56721 - DNA, 25 bp, Artificial
  Probe
aggagcctttcttaatgttttcagt

SEQ ID NO: 56722 - DNA, 25 bp, Artificial
  Probe
agtgaggagcctttcttaatgtttt

SEQ ID NO: 56723 - DNA, 25 bp, Artificial
  Probe
agcctttcttaatgttttcagtgta

SEQ ID NO: 56724 - DNA, 25 bp, Artificial
  Probe
tttatcctgttagctctggagtgtt

SEQ ID NO: 56725 - DNA, 25 bp, Artificial
  Probe
tttctcacgtagacaccatcaaagt

SEQ ID NO: 56726 - DNA, 25 bp, Artificial
  Probe
tgaggagcctttcttaatgttttca

SEQ ID NO: 56727 - DNA, 25 bp, Artificial
  Probe
gcctttcttaatgttttcagtgtaa

SEQ ID NO: 56728 - DNA, 25 bp, Artificial
  Probe
atcctgttagctctggagtgttgaa

SEQ ID NO: 56729 - DNA, 25 bp, Artificial
  Probe
cagtaaatacaatgtccaagtaatg

SEQ ID NO: 56730 - DNA, 25 bp, Artificial
  Probe
aaggactcacagaactgatgatgcc

SEQ ID NO: 56731 - DNA, 25 bp, Artificial
  Probe
ctatgagaatgttactgttggacct

SEQ ID NO: 56732 - DNA, 25 bp, Artificial
  Probe
actatgagaatgttactgttggacc

SEQ ID NO: 56733 - DNA, 25 bp, Artificial
  Probe
cactatgagaatgttactgttggac

SEQ ID NO: 56734 - DNA, 25 bp, Artificial
  Probe
tatgagaatgttactgttggacctc

SEQ ID NO: 56735 - DNA, 25 bp, Artificial
  Probe
acactatgagaatgttactgttgga

SEQ ID NO: 56736 - DNA, 25 bp, Artificial
  Probe
cttcatcctgttcctcagataccaa

SEQ ID NO: 56737 - DNA, 25 bp, Artificial
  Probe
atgagaatgttactgttggacctcc

SEQ ID NO: 56738 - DNA, 25 bp, Artificial
  Probe
caccagacatcccagaacaaataaa

SEQ ID NO: 56739 - DNA, 25 bp, Artificial
  Probe
ctgcttcatcctgttcctcagatac

SEQ ID NO: 56740 - DNA, 25 bp, Artificial
  Probe
cctgagcaatgtatcttgtcacgaa

SEQ ID NO: 56741 - DNA, 25 bp, Artificial
  Probe
ctgagcaatgtatcttgtcacgaaa

SEQ ID NO: 56742 - DNA, 25 bp, Artificial
  Probe
agccattcagagtatattgtttaca

SEQ ID NO: 56743 - DNA, 25 bp, Artificial
  Probe
tgagcaatgtatcttgtcacgaaac

SEQ ID NO: 56744 - DNA, 25 bp, Artificial
  Probe
agagtatttaaaggacccagatcag

SEQ ID NO: 56745 - DNA, 25 bp, Artificial
  Probe
ctcctgagcaatgtatcttgtcacg

SEQ ID NO: 56746 - DNA, 25 bp, Artificial
  Probe
ttcatcctgttcctcagataccaaa

SEQ ID NO: 56747 - DNA, 25 bp, Artificial
  Probe
gtatttaaaggacccagatcagctc

SEQ ID NO: 56748 - DNA, 25 bp, Artificial
  Probe
gagtatttaaaggacccagatcagc

SEQ ID NO: 56749 - DNA, 25 bp, Artificial
  Probe
aagagtatttaaaggacccagatca

SEQ ID NO: 56750 - DNA, 25 bp, Artificial
  Probe
gagcaatgtatcttgtcacgaaaca

SEQ ID NO: 56751 - DNA, 25 bp, Artificial
  Probe
gagtatattgtttacaaaccaaggc

SEQ ID NO: 56752 - DNA, 25 bp, Artificial
  Probe
ttgaagccattcagagtatattgtt

SEQ ID NO: 56753 - DNA, 25 bp, Artificial
  Probe
tatttaaaggacccagatcagctca

SEQ ID NO: 56754 - DNA, 25 bp, Artificial
  Probe
agtatttaaaggacccagatcagct

SEQ ID NO: 56755 - DNA, 25 bp, Artificial
  Probe
ccaccagacatcccagaacaaataa

SEQ ID NO: 56756 - DNA, 25 bp, Artificial
  Probe
tcctgagcaatgtatcttgtcacga

SEQ ID NO: 56757 - DNA, 25 bp, Artificial
  Probe
aagccattcagagtatattgtttac

SEQ ID NO: 56758 - DNA, 25 bp, Artificial
  Probe
aacactatgagaatgttactgttgg

SEQ ID NO: 56759 - DNA, 25 bp, Artificial
  Probe
cctgcttcatcctgttcctcagata

SEQ ID NO: 56760 - DNA, 25 bp, Artificial
  Probe
atttaaaggacccagatcagctcat

SEQ ID NO: 56761 - DNA, 25 bp, Artificial
  Probe
aaagagtatttaaaggacccagatc

SEQ ID NO: 56762 - DNA, 25 bp, Artificial
  Probe
gaagccattcagagtatattgttta

SEQ ID NO: 56763 - DNA, 25 bp, Artificial
  Probe
gcttcatcctgttcctcagatacca

SEQ ID NO: 56764 - DNA, 25 bp, Artificial
  Probe
tgcttcatcctgttcctcagatacc

SEQ ID NO: 56765 - DNA, 25 bp, Artificial
  Probe
tcaacactatgagaatgttactgtt

SEQ ID NO: 56766 - DNA, 25 bp, Artificial
  Probe
ttcaacactatgagaatgttactgt

SEQ ID NO: 56767 - DNA, 25 bp, Artificial
  Probe
ccagacatcccagaacaaataaaag

SEQ ID NO: 56768 - DNA, 25 bp, Artificial
  Probe
gaggcatcttttcagtattttgtcc

SEQ ID NO: 56769 - DNA, 25 bp, Artificial
  Probe
ggaggcatcttttcagtattttgtc

SEQ ID NO: 56770 - DNA, 25 bp, Artificial
  Probe
caggaggcatcttttcagtattttg

SEQ ID NO: 56771 - DNA, 25 bp, Artificial
  Probe
gccattcagagtatattgtttacaa

SEQ ID NO: 56772 - DNA, 25 bp, Artificial
  Probe
atccatttcaacactatgagaatgt

SEQ ID NO: 56773 - DNA, 25 bp, Artificial
  Probe
accagacatcccagaacaaataaaa

SEQ ID NO: 56774 - DNA, 25 bp, Artificial
  Probe
aggaggcatcttttcagtattttgt

SEQ ID NO: 56775 - DNA, 25 bp, Artificial
  Probe
tttaaaggacccagatcagctcatc

SEQ ID NO: 56776 - DNA, 25 bp, Artificial
  Probe
agactaggtatgtgaagactactgg

SEQ ID NO: 56777 - DNA, 25 bp, Artificial
  Probe
ccagactaggtatgtgaagactact

SEQ ID NO: 56778 - DNA, 25 bp, Artificial
  Probe
cagactaggtatgtgaagactactg

SEQ ID NO: 56779 - DNA, 25 bp, Artificial
  Probe
gccagactaggtatgtgaagactac

SEQ ID NO: 56780 - DNA, 25 bp, Artificial
  Probe
aaggagaatactgccagactaggta

SEQ ID NO: 56781 - DNA, 25 bp, Artificial
  Probe
tgccagactaggtatgtgaagacta

SEQ ID NO: 56782 - DNA, 25 bp, Artificial
  Probe
tactgccagactaggtatgtgaaga

SEQ ID NO: 56783 - DNA, 25 bp, Artificial
  Probe
aatactgccagactaggtatgtgaa

SEQ ID NO: 56784 - DNA, 25 bp, Artificial
  Probe
gagaatactgccagactaggtatgt

SEQ ID NO: 56785 - DNA, 25 bp, Artificial
  Probe
atactgccagactaggtatgtgaag

SEQ ID NO: 56786 - DNA, 25 bp, Artificial
  Probe
gaatactgccagactaggtatgtga

SEQ ID NO: 56787 - DNA, 25 bp, Artificial
  Probe
agaatactgccagactaggtatgtg

SEQ ID NO: 56788 - DNA, 25 bp, Artificial
  Probe
taggtatgtgaagactactgggaat

SEQ ID NO: 56789 - DNA, 25 bp, Artificial
  Probe
ggagaatactgccagactaggtatg

SEQ ID NO: 56790 - DNA, 25 bp, Artificial
  Probe
aggagaatactgccagactaggtat

SEQ ID NO: 56791 - DNA, 25 bp, Artificial
  Probe
ctaggtatgtgaagactactgggaa

SEQ ID NO: 56792 - DNA, 25 bp, Artificial
  Probe
aggtatgtgaagactactgggaatg

SEQ ID NO: 56793 - DNA, 25 bp, Artificial
  Probe
gagaaaggagaatactgccagacta

SEQ ID NO: 56794 - DNA, 25 bp, Artificial
  Probe
agaaaggagaatactgccagactag

SEQ ID NO: 56795 - DNA, 25 bp, Artificial
  Probe
gactaggtatgtgaagactactggg

SEQ ID NO: 56796 - DNA, 25 bp, Artificial
  Probe
actaggtatgtgaagactactggga

SEQ ID NO: 56797 - DNA, 25 bp, Artificial
  Probe
ctgccagactaggtatgtgaagact

SEQ ID NO: 56798 - DNA, 25 bp, Artificial
  Probe
ctgcttgtggagaaaggagaatact

SEQ ID NO: 56799 - DNA, 25 bp, Artificial
  Probe
actgccagactaggtatgtgaagac

SEQ ID NO: 56800 - DNA, 25 bp, Artificial
  Probe
gaaaggagaatactgccagactagg

SEQ ID NO: 56801 - DNA, 25 bp, Artificial
  Probe
tgcttgtggagaaaggagaatactg

SEQ ID NO: 56802 - DNA, 25 bp, Artificial
  Probe
aactagtctatattgtacagcacgg

SEQ ID NO: 56803 - DNA, 25 bp, Artificial
  Probe
aaaggagaatactgccagactaggt

SEQ ID NO: 56804 - DNA, 25 bp, Artificial
  Probe
gtatgtgaagactactgggaatgcc

SEQ ID NO: 56805 - DNA, 25 bp, Artificial
  Probe
ggtatgtgaagactactgggaatgc

SEQ ID NO: 56806 - DNA, 25 bp, Artificial
  Probe
gaactagtctatattgtacagcacg

SEQ ID NO: 56807 - DNA, 25 bp, Artificial
  Probe
cttgtggagaaaggagaatactgcc

SEQ ID NO: 56808 - DNA, 25 bp, Artificial
  Probe
tgaactagtctatattgtacagcac

SEQ ID NO: 56809 - DNA, 25 bp, Artificial
  Probe
ggagaaaggagaatactgccagact

SEQ ID NO: 56810 - DNA, 25 bp, Artificial
  Probe
gcttgtggagaaaggagaatactgc

SEQ ID NO: 56811 - DNA, 25 bp, Artificial
  Probe
cctgcttgtggagaaaggagaatac

SEQ ID NO: 56812 - DNA, 25 bp, Artificial
  Probe
ttgaactagtctatattgtacagca

SEQ ID NO: 56813 - DNA, 25 bp, Artificial
  Probe
ctagtctatattgtacagcacggga

SEQ ID NO: 56814 - DNA, 25 bp, Artificial
  Probe
tatgtgaagactactgggaatgcca

SEQ ID NO: 56815 - DNA, 25 bp, Artificial
  Probe
actagtctatattgtacagcacggg

SEQ ID NO: 56816 - DNA, 25 bp, Artificial
  Probe
ttgtggagaaaggagaatactgcca

SEQ ID NO: 56817 - DNA, 25 bp, Artificial
  Probe
acacagacggcttttatacaaagta

SEQ ID NO: 56818 - DNA, 25 bp, Artificial
  Probe
cacagacggcttttatacaaagtat

SEQ ID NO: 56819 - DNA, 25 bp, Artificial
  Probe
ccctgcttgtggagaaaggagaata

SEQ ID NO: 56820 - DNA, 25 bp, Artificial
  Probe
acagacggcttttatacaaagtatc

SEQ ID NO: 56821 - DNA, 25 bp, Artificial
  Probe
tgacacaacttggactataccttta

SEQ ID NO: 56822 - DNA, 25 bp, Artificial
  Probe
actatacctttaataagcccaagca

SEQ ID NO: 56823 - DNA, 25 bp, Artificial
  Probe
atacctttaataagcccaagcaagt

SEQ ID NO: 56824 - DNA, 25 bp, Artificial
  Probe
gactatacctttaataagcccaagc

SEQ ID NO: 56825 - DNA, 25 bp, Artificial
  Probe
ttgacacaacttggactataccttt

SEQ ID NO: 56826 - DNA, 25 bp, Artificial
  Probe
tttgacacaacttggactatacctt

SEQ ID NO: 56827 - DNA, 25 bp, Artificial
  Probe
ctttaataagcccaagcaagtgaac

SEQ ID NO: 56828 - DNA, 25 bp, Artificial
  Probe
tatacctttaataagcccaagcaag

SEQ ID NO: 56829 - DNA, 25 bp, Artificial
  Probe
ctatacctttaataagcccaagcaa

SEQ ID NO: 56830 - DNA, 25 bp, Artificial
  Probe
gtttgacacaacttggactatacct

SEQ ID NO: 56831 - DNA, 25 bp, Artificial
  Probe
gttggagaaatcacttcagagacag

SEQ ID NO: 56832 - DNA, 25 bp, Artificial
  Probe
gacacaacttggactatacctttaa

SEQ ID NO: 56833 - DNA, 25 bp, Artificial
  Probe
tacctttaataagcccaagcaagtg

SEQ ID NO: 56834 - DNA, 25 bp, Artificial
  Probe
ggactatacctttaataagcccaag

SEQ ID NO: 56835 - DNA, 25 bp, Artificial
  Probe
cttggactatacctttaataagccc

SEQ ID NO: 56836 - DNA, 25 bp, Artificial
  Probe
cctttaataagcccaagcaagtgaa

SEQ ID NO: 56837 - DNA, 25 bp, Artificial
  Probe
aatacagtgccttcttggtctgatg

SEQ ID NO: 56838 - DNA, 25 bp, Artificial
  Probe
caatacagtgccttcttggtctgat

SEQ ID NO: 56839 - DNA, 25 bp, Artificial
  Probe
acttggactatacctttaataagcc

SEQ ID NO: 56840 - DNA, 25 bp, Artificial
  Probe
acacaacttggactatacctttaat

SEQ ID NO: 56841 - DNA, 25 bp, Artificial
  Probe
gaatatcatcaacaggctctggctt

SEQ ID NO: 56842 - DNA, 25 bp, Artificial
  Probe
tttaataagcccaagcaagtgaacg

SEQ ID NO: 56843 - DNA, 25 bp, Artificial
  Probe
ttggagaaatcacttcagagacagg

SEQ ID NO: 56844 - DNA, 25 bp, Artificial
  Probe
tgttggagaaatcacttcagagaca

SEQ ID NO: 56845 - DNA, 25 bp, Artificial
  Probe
ctgtgttggagaaatcacttcagag

SEQ ID NO: 56846 - DNA, 25 bp, Artificial
  Probe
tggactatacctttaataagcccaa

SEQ ID NO: 56847 - DNA, 25 bp, Artificial
  Probe
ttggactatacctttaataagccca

SEQ ID NO: 56848 - DNA, 25 bp, Artificial
  Probe
gtgttggagaaatcacttcagagac

SEQ ID NO: 56849 - DNA, 25 bp, Artificial
  Probe
acctttaataagcccaagcaagtga

SEQ ID NO: 56850 - DNA, 25 bp, Artificial
  Probe
catagagtcagatgtacggtcgtga

SEQ ID NO: 56851 - DNA, 25 bp, Artificial
  Probe
atactttgcaggaggatgtgtttag

SEQ ID NO: 56852 - DNA, 25 bp, Artificial
  Probe
tgtgttggagaaatcacttcagaga

SEQ ID NO: 56853 - DNA, 25 bp, Artificial
  Probe
gtctgtgttggagaaatcacttcag

SEQ ID NO: 56854 - DNA, 25 bp, Artificial
  Probe
ctgtctgtgttggagaaatcacttc

SEQ ID NO: 56855 - DNA, 25 bp, Artificial
  Probe
caggaggatgtgtttaggaatgtgg

SEQ ID NO: 56856 - DNA, 25 bp, Artificial
  Probe
tctgtctgtgttggagaaatcactt

SEQ ID NO: 56857 - DNA, 25 bp, Artificial
  Probe
catactttgcaggaggatgtgttta

SEQ ID NO: 56858 - DNA, 25 bp, Artificial
  Probe
ctgttactgtagctggcacaagatt

SEQ ID NO: 56859 - DNA, 25 bp, Artificial
  Probe
atacagtgccttcttggtctgatgt

SEQ ID NO: 56860 - DNA, 25 bp, Artificial
  Probe
tgtctgtgttggagaaatcacttca

SEQ ID NO: 56861 - DNA, 25 bp, Artificial
  Probe
aatatcatcaacaggctctggcttt

SEQ ID NO: 56862 - DNA, 25 bp, Artificial
  Probe
tgttactgtagctggcacaagattg

SEQ ID NO: 56863 - DNA, 25 bp, Artificial
  Probe
ctgcttccaatacagtgccttcttg

SEQ ID NO: 56864 - DNA, 25 bp, Artificial
  Probe
gatgtgtttaggaatgtggggaaat

SEQ ID NO: 56865 - DNA, 25 bp, Artificial
  Probe
agattggcagtgaattttaatacga

SEQ ID NO: 56866 - DNA, 25 bp, Artificial
  Probe
ttctagcctcatgttctctccttat

SEQ ID NO: 56867 - DNA, 25 bp, Artificial
  Probe
atatcagtgttgactctcgcctaat

SEQ ID NO: 56868 - DNA, 25 bp, Artificial
  Probe
gttctagcctcatgttctctcctta

SEQ ID NO: 56869 - DNA, 25 bp, Artificial
  Probe
tctagcctcatgttctctccttatg

SEQ ID NO: 56870 - DNA, 25 bp, Artificial
  Probe
tatcagtgttgactctcgcctaatg

SEQ ID NO: 56871 - DNA, 25 bp, Artificial
  Probe
catatcagtgttgactctcgcctaa

SEQ ID NO: 56872 - DNA, 25 bp, Artificial
  Probe
attctttgcccgtctttatttctac

SEQ ID NO: 56873 - DNA, 25 bp, Artificial
  Probe
cattctttgcccgtctttatttcta

SEQ ID NO: 56874 - DNA, 25 bp, Artificial
  Probe
cttggttctagcctcatgttctctc

SEQ ID NO: 56875 - DNA, 25 bp, Artificial
  Probe
ccattctttgcccgtctttatttct

SEQ ID NO: 56876 - DNA, 25 bp, Artificial
  Probe
tagcctcatgttctctccttatgaa

SEQ ID NO: 56877 - DNA, 25 bp, Artificial
  Probe
ctagcctcatgttctctccttatga

SEQ ID NO: 56878 - DNA, 25 bp, Artificial
  Probe
ggttctagcctcatgttctctcctt

SEQ ID NO: 56879 - DNA, 25 bp, Artificial
  Probe
ttggttctagcctcatgttctctcc

SEQ ID NO: 56880 - DNA, 25 bp, Artificial
  Probe
ccttggttctagcctcatgttctct

SEQ ID NO: 56881 - DNA, 25 bp, Artificial
  Probe
gccattctttgcccgtctttatttc

SEQ ID NO: 56882 - DNA, 25 bp, Artificial
  Probe
gcatatcagtgttgactctcgccta

SEQ ID NO: 56883 - DNA, 25 bp, Artificial
  Probe
ctgaaaagtgaaaatctagtcctgc

SEQ ID NO: 56884 - DNA, 25 bp, Artificial
  Probe
agaagtatggcaagaggaccagaag

SEQ ID NO: 56885 - DNA, 25 bp, Artificial
  Probe
atcagtgttgactctcgcctaatgg

SEQ ID NO: 56886 - DNA, 25 bp, Artificial
  Probe
tttgtctgtgtcccatcgtatccat

SEQ ID NO: 56887 - DNA, 25 bp, Artificial
  Probe
aagaggaagctattgaaatagaagt

SEQ ID NO: 56888 - DNA, 25 bp, Artificial
  Probe
agcctcatgttctctccttatgaaa

SEQ ID NO: 56889 - DNA, 25 bp, Artificial
  Probe
tggttctagcctcatgttctctcct

SEQ ID NO: 56890 - DNA, 25 bp, Artificial
  Probe
cagaagtatggcaagaggaccagaa

SEQ ID NO: 56891 - DNA, 25 bp, Artificial
  Probe
ttctttgcccgtctttatttctacg

SEQ ID NO: 56892 - DNA, 25 bp, Artificial
  Probe
actgaaaagtgaaaatctagtcctg

SEQ ID NO: 56893 - DNA, 25 bp, Artificial
  Probe
aactgaaaagtgaaaatctagtcct

SEQ ID NO: 56894 - DNA, 25 bp, Artificial
  Probe
ttatttctacgtttcttctaatggg

SEQ ID NO: 56895 - DNA, 25 bp, Artificial
  Probe
cgtgtttctgcactgaatttctagg

SEQ ID NO: 56896 - DNA, 25 bp, Artificial
  Probe
ccgtgtttctgcactgaatttctag

SEQ ID NO: 56897 - DNA, 25 bp, Artificial
  Probe
agaggaagctattgaaatagaagta

SEQ ID NO: 56898 - DNA, 25 bp, Artificial
  Probe
cccgtctttatttctacgtttcttc

SEQ ID NO: 56899 - DNA, 25 bp, Artificial
  Probe
ccgtctttatttctacgtttcttct

SEQ ID NO: 56900 - DNA, 25 bp, Artificial
  Probe
gtgtttctgcactgaatttctaggc

SEQ ID NO: 56901 - DNA, 25 bp, Artificial
  Probe
aaaagtgaaaatctagtcctgcatg

SEQ ID NO: 56902 - DNA, 25 bp, Artificial
  Probe
cactgaatttctaggccattctttg

SEQ ID NO: 56903 - DNA, 25 bp, Artificial
  Probe
gaaaagtgaaaatctagtcctgcat

SEQ ID NO: 56904 - DNA, 25 bp, Artificial
  Probe
tttctacgtttcttctaatggggag

SEQ ID NO: 56905 - DNA, 25 bp, Artificial
  Probe
atttctacgtttcttctaatgggga

SEQ ID NO: 56906 - DNA, 25 bp, Artificial
  Probe
tgaaaagtgaaaatctagtcctgca

SEQ ID NO: 56907 - DNA, 25 bp, Artificial
  Probe
aaagaggaagctattgaaatagaag

SEQ ID NO: 56908 - DNA, 25 bp, Artificial
  Probe
tttgcccgtctttatttctacgttt

SEQ ID NO: 56909 - DNA, 25 bp, Artificial
  Probe
accgtgtttctgcactgaatttcta

SEQ ID NO: 56910 - DNA, 25 bp, Artificial
  Probe
gcccgtctttatttctacgtttctt

SEQ ID NO: 56911 - DNA, 25 bp, Artificial
  Probe
ttctctctctagttcactctcactt

SEQ ID NO: 56912 - DNA, 25 bp, Artificial
  Probe
ctcagtattgcgacagtacaacatt

SEQ ID NO: 56913 - DNA, 25 bp, Artificial
  Probe
tctcagtattgcgacagtacaacat

SEQ ID NO: 56914 - DNA, 25 bp, Artificial
  Probe
gtgaagaaatgaagaaccaatcgtc

SEQ ID NO: 56915 - DNA, 25 bp, Artificial
  Probe
aactttgtgaagaaatgaagaacca

SEQ ID NO: 56916 - DNA, 25 bp, Artificial
  Probe
gttaagaaagtggctctcagtattg

SEQ ID NO: 56917 - DNA, 25 bp, Artificial
  Probe
gaagaaatgaagaaccaatcgtctg

SEQ ID NO: 56918 - DNA, 25 bp, Artificial
  Probe
tgtgaagaaatgaagaaccaatcgt

SEQ ID NO: 56919 - DNA, 25 bp, Artificial
  Probe
tatactcacttcgcttgtattgtaa

SEQ ID NO: 56920 - DNA, 25 bp, Artificial
  Probe
ggttaagaaagtggctctcagtatt

SEQ ID NO: 56921 - DNA, 25 bp, Artificial
  Probe
gaactttgtgaagaaatgaagaacc

SEQ ID NO: 56922 - DNA, 25 bp, Artificial
  Probe
tgaagaaatgaagaaccaatcgtct

SEQ ID NO: 56923 - DNA, 25 bp, Artificial
  Probe
ttgtgaagaaatgaagaaccaatcg

SEQ ID NO: 56924 - DNA, 25 bp, Artificial
  Probe
actttgtgaagaaatgaagaaccaa

SEQ ID NO: 56925 - DNA, 25 bp, Artificial
  Probe
tatgatcttcgtatactcacttcgc

SEQ ID NO: 56926 - DNA, 25 bp, Artificial
  Probe
ttaagaaagtggctctcagtattgc

SEQ ID NO: 56927 - DNA, 25 bp, Artificial
  Probe
gatcttcgtatactcacttcgcttg

SEQ ID NO: 56928 - DNA, 25 bp, Artificial
  Probe
tcttcgtatactcacttcgcttgta

SEQ ID NO: 56929 - DNA, 25 bp, Artificial
  Probe
ctctcagtattgcgacagtacaaca

SEQ ID NO: 56930 - DNA, 25 bp, Artificial
  Probe
tctctctctagttcactctcacttt

SEQ ID NO: 56931 - DNA, 25 bp, Artificial
  Probe
tttctctctctagttcactctcact

SEQ ID NO: 56932 - DNA, 25 bp, Artificial
  Probe
tttgtgaagaaatgaagaaccaatc

SEQ ID NO: 56933 - DNA, 25 bp, Artificial
  Probe
ctttgtgaagaaatgaagaaccaat

SEQ ID NO: 56934 - DNA, 25 bp, Artificial
  Probe
agaactttgtgaagaaatgaagaac

SEQ ID NO: 56935 - DNA, 25 bp, Artificial
  Probe
atcttcgtatactcacttcgcttgt

SEQ ID NO: 56936 - DNA, 25 bp, Artificial
  Probe
ttcgtatactcacttcgcttgtatt

SEQ ID NO: 56937 - DNA, 25 bp, Artificial
  Probe
atgatcttcgtatactcacttcgct

SEQ ID NO: 56938 - DNA, 25 bp, Artificial
  Probe
tcagtattgcgacagtacaacattt

SEQ ID NO: 56939 - DNA, 25 bp, Artificial
  Probe
cttcgtatactcacttcgcttgtat

SEQ ID NO: 56940 - DNA, 25 bp, Artificial
  Probe
tgatcttcgtatactcacttcgctt

SEQ ID NO: 56941 - DNA, 25 bp, Artificial
  Probe
tcgtatactcacttcgcttgtattg

SEQ ID NO: 56942 - DNA, 25 bp, Artificial
  Probe
gggttaagaaagtggctctcagtat

SEQ ID NO: 56943 - DNA, 25 bp, Artificial
  Probe
cgtatactcacttcgcttgtattgt

SEQ ID NO: 56944 - DNA, 25 bp, Artificial
  Probe
ttatgatcttcgtatactcacttcg

SEQ ID NO: 56945 - DNA, 25 bp, Artificial
  Probe
ataactgacatgatgtgaggtttct

SEQ ID NO: 56946 - DNA, 25 bp, Artificial
  Probe
aagaactttgtgaagaaatgaagaa

SEQ ID NO: 56947 - DNA, 25 bp, Artificial
  Probe
taactgacatgatgtgaggtttctg

SEQ ID NO: 56948 - DNA, 25 bp, Artificial
  Probe
atactcacttcgcttgtattgtaaa

SEQ ID NO: 56949 - DNA, 25 bp, Artificial
  Probe
gtatactcacttcgcttgtattgta

SEQ ID NO: 56950 - DNA, 25 bp, Artificial
  Probe
tataactgacatgatgtgaggtttc

SEQ ID NO: 56951 - DNA, 25 bp, Artificial
  Probe
aaagaactttgtgaagaaatgaaga

SEQ ID NO: 56952 - DNA, 25 bp, Artificial
  Probe
ctgacatgatgtgaggtttctgttt

SEQ ID NO: 56953 - DNA, 25 bp, Artificial
  Probe
aagaaatgaagaaccaatcgtctgg

SEQ ID NO: 56954 - DNA, 25 bp, Artificial
  Probe
taagaaagtggctctcagtattgcg

SEQ ID NO: 56955 - DNA, 25 bp, Artificial
  Probe
gctctcagtattgcgacagtacaac

SEQ ID NO: 56956 - DNA, 25 bp, Artificial
  Probe
tcacattattacattccttctgctg

SEQ ID NO: 56957 - DNA, 25 bp, Artificial
  Probe
ccttctgctgttcatattaaccttg

SEQ ID NO: 56958 - DNA, 25 bp, Artificial
  Probe
tccttctgctgttcatattaacctt

SEQ ID NO: 56959 - DNA, 25 bp, Artificial
  Probe
ttccttctgctgttcatattaacct

SEQ ID NO: 56960 - DNA, 25 bp, Artificial
  Probe
cttctgctgttcatattaaccttgt

SEQ ID NO: 56961 - DNA, 25 bp, Artificial
  Probe
attccttctgctgttcatattaacc

SEQ ID NO: 56962 - DNA, 25 bp, Artificial
  Probe
ttcacattattacattccttctgct

SEQ ID NO: 56963 - DNA, 25 bp, Artificial
  Probe
cttcacattattacattccttctgc

SEQ ID NO: 56964 - DNA, 25 bp, Artificial
  Probe
aataaccactggatcactacactaa

SEQ ID NO: 56965 - DNA, 25 bp, Artificial
  Probe
ttaataaccactggatcactacact

SEQ ID NO: 56966 - DNA, 25 bp, Artificial
  Probe
cacattattacattccttctgctgt

SEQ ID NO: 56967 - DNA, 25 bp, Artificial
  Probe
cattccttctgctgttcatattaac

SEQ ID NO: 56968 - DNA, 25 bp, Artificial
  Probe
ttctgctgttcatattaaccttgta

SEQ ID NO: 56969 - DNA, 25 bp, Artificial
  Probe
gagtaggcagcaattctgactatac
